United States Patent Application Publication US 2018/0305689 A1 - sequence listing, part 48

SEQ ID NO: 634653 - RNA, 19 nt, Artificial Sequence
  Description of Artificial Sequence: Synthetic oligonucleotide
  Antisense strand to SEQ ID NO: 634652
uuuccucauaaugguuugg

SEQ ID NO: 634654 - RNA, 19 nt, Artificial Sequence
  Description of Artificial Sequence: Synthetic oligonucleotide
  Sense strand starting at position 2257 of SEQ ID NO: 585372
aagagcugguccuuauaca

SEQ ID NO: 634655 - RNA, 19 nt, Artificial Sequence
  Description of Artificial Sequence: Synthetic oligonucleotide
  Antisense strand to SEQ ID NO: 634654
uguauaaggaccagcucuu

SEQ ID NO: 634656 - RNA, 19 nt, Artificial Sequence
  Description of Artificial Sequence: Synthetic oligonucleotide
  Sense strand starting at position 2279 of SEQ ID NO: 585372
uucugaaaucccugagauc

SEQ ID NO: 634657 - RNA, 19 nt, Artificial Sequence
  Description of Artificial Sequence: Synthetic oligonucleotide
  Antisense strand to SEQ ID NO: 634656
gaucucagggauuucagaa

SEQ ID NO: 634658 - RNA, 19 nt, Artificial Sequence
  Description of Artificial Sequence: Synthetic oligonucleotide
  Sense strand starting at position 2292 of SEQ ID NO: 585372
gagaucugucaaugaaucg

SEQ ID NO: 634659 - RNA, 19 nt, Artificial Sequence
  Description of Artificial Sequence: Synthetic oligonucleotide
  Antisense strand to SEQ ID NO: 634658
cgauucauugacagaucuc

SEQ ID NO: 634660 - RNA, 19 nt, Artificial Sequence
  Description of Artificial Sequence: Synthetic oligonucleotide
  Sense strand starting at position 2330 of SEQ ID NO: 585372
guauuuguugaacgucauu

SEQ ID NO: 634661 - RNA, 19 nt, Artificial Sequence
  Description of Artificial Sequence: Synthetic oligonucleotide
  Antisense strand to SEQ ID NO: 634660
aaugacguucaacaaauac

SEQ ID NO: 634662 - RNA, 19 nt, Artificial Sequence
  Description of Artificial Sequence: Synthetic oligonucleotide
  Sense strand starting at position 2340 of SEQ ID NO: 585372
aacgucauuguguaaguua

SEQ ID NO: 634663 - RNA, 19 nt, Artificial Sequence
  Description of Artificial Sequence: Synthetic oligonucleotide
  Antisense strand to SEQ ID NO: 634662
uaacuuacacaaugacguu

SEQ ID NO: 634664 - RNA, 19 nt, Artificial Sequence
  Description of Artificial Sequence: Synthetic oligonucleotide
  Sense strand starting at position 2354 of SEQ ID NO: 585372
aguuaucacguauauuauc

SEQ ID NO: 634665 - RNA, 19 nt, Artificial Sequence
  Description of Artificial Sequence: Synthetic oligonucleotide
  Antisense strand to SEQ ID NO: 634664
gauaauauacgugauaacu

SEQ ID NO: 634666 - RNA, 19 nt, Artificial Sequence
  Description of Artificial Sequence: Synthetic oligonucleotide
  Sense strand starting at position 2459 of SEQ ID NO: 585372
caagcucagucaucgaauu

SEQ ID NO: 634667 - RNA, 19 nt, Artificial Sequence
  Description of Artificial Sequence: Synthetic oligonucleotide
  Antisense strand to SEQ ID NO: 634666
aauucgaugacugagcuug

SEQ ID NO: 634668 - RNA, 19 nt, Artificial Sequence
  Description of Artificial Sequence: Synthetic oligonucleotide
  Sense strand starting at position 2460 of SEQ ID NO: 585372
aagcucagucaucgaauua

SEQ ID NO: 634669 - RNA, 19 nt, Artificial Sequence
  Description of Artificial Sequence: Synthetic oligonucleotide
  Antisense strand to SEQ ID NO: 634668
uaauucgaugacugagcuu

SEQ ID NO: 634670 - RNA, 19 nt, Artificial Sequence
  Description of Artificial Sequence: Synthetic oligonucleotide
  Sense strand starting at position 2461 of SEQ ID NO: 585372
agcucagucaucgaauuag

SEQ ID NO: 634671 - RNA, 19 nt, Artificial Sequence
  Description of Artificial Sequence: Synthetic oligonucleotide
  Antisense strand to SEQ ID NO: 634670
cuaauucgaugacugagcu

SEQ ID NO: 634672 - RNA, 19 nt, Artificial Sequence
  Description of Artificial Sequence: Synthetic oligonucleotide
  Sense strand starting at position 2482 of SEQ ID NO: 585372
gccguauauaaacagugua

SEQ ID NO: 634673 - RNA, 19 nt, Artificial Sequence
  Description of Artificial Sequence: Synthetic oligonucleotide
  Antisense strand to SEQ ID NO: 634672
uacacuguuuauauacggc

SEQ ID NO: 634674 - RNA, 19 nt, Artificial Sequence
  Description of Artificial Sequence: Synthetic oligonucleotide
  Sense strand starting at position 2485 of SEQ ID NO: 585372
guauauaaacaguguaaca

SEQ ID NO: 634675 - RNA, 19 nt, Artificial Sequence
  Description of Artificial Sequence: Synthetic oligonucleotide
  Antisense strand to SEQ ID NO: 634674
uguuacacuguuuauauac

SEQ ID NO: 634676 - RNA, 19 nt, Artificial Sequence
  Description of Artificial Sequence: Synthetic oligonucleotide
  Sense strand starting at position 2498 of SEQ ID NO: 585372
guaacaguagcucaagaaa

SEQ ID NO: 634677 - RNA, 19 nt, Artificial Sequence
  Description of Artificial Sequence: Synthetic oligonucleotide
  Antisense strand to SEQ ID NO: 634676
uuucuugagcuacuguuac

SEQ ID NO: 634678 - RNA, 19 nt, Artificial Sequence
  Description of Artificial Sequence: Synthetic oligonucleotide
  Sense strand starting at position 2578 of SEQ ID NO: 585372
auaauuccaucguuguaaa

SEQ ID NO: 634679 - RNA, 19 nt, Artificial Sequence
  Description of Artificial Sequence: Synthetic oligonucleotide
  Antisense strand to SEQ ID NO: 634678
uuuacaacgauggaauuau

SEQ ID NO: 634680 - RNA, 19 nt, Artificial Sequence
  Description of Artificial Sequence: Synthetic oligonucleotide
  Sense strand starting at position 2579 of SEQ ID NO: 585372
uaauuccaucguuguaaag

SEQ ID NO: 634681 - RNA, 19 nt, Artificial Sequence
  Description of Artificial Sequence: Synthetic oligonucleotide
  Antisense strand to SEQ ID NO: 634680
cuuuacaacgauggaauua

SEQ ID NO: 634682 - RNA, 19 nt, Artificial Sequence
  Description of Artificial Sequence: Synthetic oligonucleotide
  Sense strand starting at position 2603 of SEQ ID NO: 585372
gagcguggcaucgauuuga

SEQ ID NO: 634683 - RNA, 19 nt, Artificial Sequence
  Description of Artificial Sequence: Synthetic oligonucleotide
  Antisense strand to SEQ ID NO: 634682
ucaaaucgaugccacgcuc

SEQ ID NO: 634684 - RNA, 19 nt, Artificial Sequence
  Description of Artificial Sequence: Synthetic oligonucleotide
  Sense strand starting at position 2608 of SEQ ID NO: 585372
uggcaucgauuugaggaau

SEQ ID NO: 634685 - RNA, 19 nt, Artificial Sequence
  Description of Artificial Sequence: Synthetic oligonucleotide
  Antisense strand to SEQ ID NO: 634684
auuccucaaaucgaugcca

SEQ ID NO: 634686 - RNA, 19 nt, Artificial Sequence
  Description of Artificial Sequence: Synthetic oligonucleotide
  Sense strand starting at position 2942 of SEQ ID NO: 585372
cccgucucuccagacuuau

SEQ ID NO: 634687 - RNA, 19 nt, Artificial Sequence
  Description of Artificial Sequence: Synthetic oligonucleotide
  Antisense strand to SEQ ID NO: 634686
auaagucuggagagacggg

SEQ ID NO: 634688 - RNA, 19 nt, Artificial Sequence
  Description of Artificial Sequence: Synthetic oligonucleotide
  Sense strand starting at position 2954 of SEQ ID NO: 585372
gacuuauucguuuagucau

SEQ ID NO: 634689 - RNA, 19 nt, Artificial Sequence
  Description of Artificial Sequence: Synthetic oligonucleotide
  Antisense strand to SEQ ID NO: 634688
augacuaaacgaauaaguc

SEQ ID NO: 634690 - RNA, 19 nt, Artificial Sequence
  Description of Artificial Sequence: Synthetic oligonucleotide
  Sense strand starting at position 2961 of SEQ ID NO: 585372
ucguuuagucauuaagucu

SEQ ID NO: 634691 - RNA, 19 nt, Artificial Sequence
  Description of Artificial Sequence: Synthetic oligonucleotide
  Antisense strand to SEQ ID NO: 634690
agacuuaaugacuaaacga

SEQ ID NO: 634692 - RNA, 19 nt, Artificial Sequence
  Description of Artificial Sequence: Synthetic oligonucleotide
  Sense strand starting at position 3628 of SEQ ID NO: 585372
aauagaguucugggcuaac

SEQ ID NO: 634693 - RNA, 19 nt, Artificial Sequence
  Description of Artificial Sequence: Synthetic oligonucleotide
  Antisense strand to SEQ ID NO: 634692
guuagcccagaacucuauu

SEQ ID NO: 634694 - RNA, 19 nt, Artificial Sequence
  Description of Artificial Sequence: Synthetic oligonucleotide
  Sense strand starting at position 3670 of SEQ ID NO: 585372
agaugagauuucuauucga

SEQ ID NO: 634695 - RNA, 19 nt, Artificial Sequence
  Description of Artificial Sequence: Synthetic oligonucleotide
  Antisense strand to SEQ ID NO: 634694
ucgaauagaaaucucaucu

SEQ ID NO: 634696 - RNA, 19 nt, Artificial Sequence
  Description of Artificial Sequence: Synthetic oligonucleotide
  Sense strand starting at position 3881 of SEQ ID NO: 585372
agucguaaucagugagaga

SEQ ID NO: 634697 - RNA, 19 nt, Artificial Sequence
  Description of Artificial Sequence: Synthetic oligonucleotide
  Antisense strand to SEQ ID NO: 634696
ucucucacugauuacgacu

SEQ ID NO: 634698 - RNA, 19 nt, Artificial Sequence
  Description of Artificial Sequence: Synthetic oligonucleotide
  Sense strand starting at position 3882 of SEQ ID NO: 585372
gucguaaucagugagagag

SEQ ID NO: 634699 - RNA, 19 nt, Artificial Sequence
  Description of Artificial Sequence: Synthetic oligonucleotide
  Antisense strand to SEQ ID NO: 634698
cucucucacugauuacgac

SEQ ID NO: 634700 - RNA, 19 nt, Artificial Sequence
  Description of Artificial Sequence: Synthetic oligonucleotide
  Sense strand starting at position 3938 of SEQ ID NO: 585372
ucuaccuaucuuuggagaa

SEQ ID NO: 634701 - RNA, 19 nt, Artificial Sequence
  Description of Artificial Sequence: Synthetic oligonucleotide
  Antisense strand to SEQ ID NO: 634700
uucuccaaagauagguaga

SEQ ID NO: 634702 - RNA, 19 nt, Artificial Sequence
  Description of Artificial Sequence: Synthetic oligonucleotide
  Sense strand starting at position 26 of SEQ ID NO: 585373
gggacauucguuggugaua

SEQ ID NO: 634703 - RNA, 19 nt, Artificial Sequence
  Description of Artificial Sequence: Synthetic oligonucleotide
  Antisense strand to SEQ ID NO: 634702
uaucaccaacgaauguccc

SEQ ID NO: 634704 - RNA, 19 nt, Artificial Sequence
  Description of Artificial Sequence: Synthetic oligonucleotide
  Sense strand starting at position 27 of SEQ ID NO: 585373
ggacauucguuggugauau

SEQ ID NO: 634705 - RNA, 19 nt, Artificial Sequence
  Description of Artificial Sequence: Synthetic oligonucleotide
  Antisense strand to SEQ ID NO: 634704
auaucaccaacgaaugucc

SEQ ID NO: 634706 - RNA, 19 nt, Artificial Sequence
  Description of Artificial Sequence: Synthetic oligonucleotide
  Sense strand starting at position 37 of SEQ ID NO: 585373
uggugauaugggcaucuaa

SEQ ID NO: 634707 - RNA, 19 nt, Artificial Sequence
  Description of Artificial Sequence: Synthetic oligonucleotide
  Antisense strand to SEQ ID NO: 634706
uuagaugcccauaucacca

SEQ ID NO: 634708 - RNA, 19 nt, Artificial Sequence
  Description of Artificial Sequence: Synthetic oligonucleotide
  Sense strand starting at position 76 of SEQ ID NO: 585373
uguacucaaugaguuuacu

SEQ ID NO: 634709 - RNA, 19 nt, Artificial Sequence
  Description of Artificial Sequence: Synthetic oligonucleotide
  Antisense strand to SEQ ID NO: 634708
aguaaacucauugaguaca

SEQ ID NO: 634710 - RNA, 19 nt, Artificial Sequence
  Description of Artificial Sequence: Synthetic oligonucleotide
  Sense strand starting at position 85 of SEQ ID NO: 585373
ugaguuuacuuacuaucac

SEQ ID NO: 634711 - RNA, 19 nt, Artificial Sequence
  Description of Artificial Sequence: Synthetic oligonucleotide
  Antisense strand to SEQ ID NO: 634710
gugauaguaaguaaacuca

SEQ ID NO: 634712 - RNA, 19 nt, Artificial Sequence
  Description of Artificial Sequence: Synthetic oligonucleotide
  Sense strand starting at position 268 of SEQ ID NO: 585373
guagcagaauguuugcaaa

SEQ ID NO: 634713 - RNA, 19 nt, Artificial Sequence
  Description of Artificial Sequence: Synthetic oligonucleotide
  Antisense strand to SEQ ID NO: 634712
uuugcaaacauucugcuac

SEQ ID NO: 634714 - RNA, 19 nt, Artificial Sequence
  Description of Artificial Sequence: Synthetic oligonucleotide
  Sense strand starting at position 270 of SEQ ID NO: 585373
agcagaauguuugcaaacu

SEQ ID NO: 634715 - RNA, 19 nt, Artificial Sequence
  Description of Artificial Sequence: Synthetic oligonucleotide
  Antisense strand to SEQ ID NO: 634714
aguuugcaaacauucugcu

SEQ ID NO: 634716 - RNA, 19 nt, Artificial Sequence
  Description of Artificial Sequence: Synthetic oligonucleotide
  Sense strand starting at position 299 of SEQ ID NO: 585373
ugcuaugcucaacacgaaa

SEQ ID NO: 634717 - RNA, 19 nt, Artificial Sequence
  Description of Artificial Sequence: Synthetic oligonucleotide
  Antisense strand to SEQ ID NO: 634716
uuucguguugagcauagca

SEQ ID NO: 634718 - RNA, 19 nt, Artificial Sequence
  Description of Artificial Sequence: Synthetic oligonucleotide
  Sense strand starting at position 333 of SEQ ID NO: 585373
aucuuaucgccucaugauu

SEQ ID NO: 634719 - RNA, 19 nt, Artificial Sequence
  Description of Artificial Sequence: Synthetic oligonucleotide
  Antisense strand to SEQ ID NO: 634718
aaucaugaggcgauaagau

SEQ ID NO: 634720 - RNA, 19 nt, Artificial Sequence
  Description of Artificial Sequence: Synthetic oligonucleotide
  Sense strand starting at position 492 of SEQ ID NO: 585373
auuguauuccaucgaucaa

SEQ ID NO: 634721 - RNA, 19 nt, Artificial Sequence
  Description of Artificial Sequence: Synthetic oligonucleotide
  Antisense strand to SEQ ID NO: 634720
uugaucgauggaauacaau

SEQ ID NO: 634722 - RNA, 19 nt, Artificial Sequence
  Description of Artificial Sequence: Synthetic oligonucleotide
  Sense strand starting at position 512 of SEQ ID NO: 585373
aggugauucguggaaacac

SEQ ID NO: 634723 - RNA, 19 nt, Artificial Sequence
  Description of Artificial Sequence: Synthetic oligonucleotide
  Antisense strand to SEQ ID NO: 634722
guguuuccacgaaucaccu

SEQ ID NO: 634724 - RNA, 19 nt, Artificial Sequence
  Description of Artificial Sequence: Synthetic oligonucleotide
  Sense strand starting at position 562 of SEQ ID NO: 585373
auuguaaacucucccguuu

SEQ ID NO: 634725 - RNA, 19 nt, Artificial Sequence
  Description of Artificial Sequence: Synthetic oligonucleotide
  Antisense strand to SEQ ID NO: 634724
aaacgggagaguuuacaau

SEQ ID NO: 634726 - RNA, 19 nt, Artificial Sequence
  Description of Artificial Sequence: Synthetic oligonucleotide
  Sense strand starting at position 637 of SEQ ID NO: 585373
gauuucuucucagaggcuu

SEQ ID NO: 634727 - RNA, 19 nt, Artificial Sequence
  Description of Artificial Sequence: Synthetic oligonucleotide
  Antisense strand to SEQ ID NO: 634726
aagccucugagaagaaauc

SEQ ID NO: 634728 - RNA, 19 nt, Artificial Sequence
  Description of Artificial Sequence: Synthetic oligonucleotide
  Sense strand starting at position 643 of SEQ ID NO: 585373
uucucagaggcuuacuaga

SEQ ID NO: 634729 - RNA, 19 nt, Artificial Sequence
  Description of Artificial Sequence: Synthetic oligonucleotide
  Antisense strand to SEQ ID NO: 634728
ucuaguaagccucugagaa

SEQ ID NO: 634730 - RNA, 19 nt, Artificial Sequence
  Description of Artificial Sequence: Synthetic oligonucleotide
  Sense strand starting at position 645 of SEQ ID NO: 585373
cucagaggcuuacuagaaa

SEQ ID NO: 634731 - RNA, 19 nt, Artificial Sequence
  Description of Artificial Sequence: Synthetic oligonucleotide
  Antisense strand to SEQ ID NO: 634730
uuucuaguaagccucugag

SEQ ID NO: 634732 - RNA, 19 nt, Artificial Sequence
  Description of Artificial Sequence: Synthetic oligonucleotide
  Sense strand starting at position 690 of SEQ ID NO: 585373
ggcguuaacccauacuguu

SEQ ID NO: 634733 - RNA, 19 nt, Artificial Sequence
  Description of Artificial Sequence: Synthetic oligonucleotide
  Antisense strand to SEQ ID NO: 634732
aacaguauggguuaacgcc

SEQ ID NO: 634734 - RNA, 19 nt, Artificial Sequence
  Description of Artificial Sequence: Synthetic oligonucleotide
  Sense strand starting at position 700 of SEQ ID NO: 585373
cauacuguugcauggaaca

SEQ ID NO: 634735 - RNA, 19 nt, Artificial Sequence
  Description of Artificial Sequence: Synthetic oligonucleotide
  Antisense strand to SEQ ID NO: 634734
uguuccaugcaacaguaug

SEQ ID NO: 634736 - RNA, 19 nt, Artificial Sequence
  Description of Artificial Sequence: Synthetic oligonucleotide
  Sense strand starting at position 761 of SEQ ID NO: 585373
gcaaauauguugccaucua

SEQ ID NO: 634737 - RNA, 19 nt, Artificial Sequence
  Description of Artificial Sequence: Synthetic oligonucleotide
  Antisense strand to SEQ ID NO: 634736
uagauggcaacauauuugc

SEQ ID NO: 634738 - RNA, 19 nt, Artificial Sequence
  Description of Artificial Sequence: Synthetic oligonucleotide
  Sense strand starting at position 862 of SEQ ID NO: 585373
gcgcauuacauugaggcau

SEQ ID NO: 634739 - RNA, 19 nt, Artificial Sequence
  Description of Artificial Sequence: Synthetic oligonucleotide
  Antisense strand to SEQ ID NO: 634738
augccucaauguaaugcgc

SEQ ID NO: 634740 - RNA, 19 nt, Artificial Sequence
  Description of Artificial Sequence: Synthetic oligonucleotide
  Sense strand starting at position 929 of SEQ ID NO: 585373
cugagucuacaucguacaa

SEQ ID NO: 634741 - RNA, 19 nt, Artificial Sequence
  Description of Artificial Sequence: Synthetic oligonucleotide
  Antisense strand to SEQ ID NO: 634740
uuguacgauguagacucag

SEQ ID NO: 634742 - RNA, 19 nt, Artificial Sequence
  Description of Artificial Sequence: Synthetic oligonucleotide
  Sense strand starting at position 933 of SEQ ID NO: 585373
gucuacaucguacaagacu

SEQ ID NO: 634743 - RNA, 19 nt, Artificial Sequence
  Description of Artificial Sequence: Synthetic oligonucleotide
  Antisense strand to SEQ ID NO: 634742
agucuuguacgauguagac

SEQ ID NO: 634744 - RNA, 19 nt, Artificial Sequence
  Description of Artificial Sequence: Synthetic oligonucleotide
  Sense strand starting at position 1471 of SEQ ID NO: 585373
ccguuugauucccuuccau

SEQ ID NO: 634745 - RNA, 19 nt, Artificial Sequence
  Description of Artificial Sequence: Synthetic oligonucleotide
  Antisense strand to SEQ ID NO: 634744
auggaagggaaucaaacgg

SEQ ID NO: 634746 - RNA, 19 nt, Artificial Sequence
  Description of Artificial Sequence: Synthetic oligonucleotide
  Sense strand starting at position 2557 of SEQ ID NO: 585373
uuaagaucucuguggugaa

SEQ ID NO: 634747 - RNA, 19 nt, Artificial Sequence
  Description of Artificial Sequence: Synthetic oligonucleotide
  Antisense strand to SEQ ID NO: 634746
uucaccacagagaucuuaa

SEQ ID NO: 634748 - RNA, 19 nt, Artificial Sequence
  Description of Artificial Sequence: Synthetic oligonucleotide
  Sense strand starting at position 2594 of SEQ ID NO: 585373
cugugaauccaccaccgaa

SEQ ID NO: 634749 - RNA, 19 nt, Artificial Sequence
  Description of Artificial Sequence: Synthetic oligonucleotide
  Antisense strand to SEQ ID NO: 634748
uucggugguggauucacag

SEQ ID NO: 634750 - RNA, 19 nt, Artificial Sequence
  Description of Artificial Sequence: Synthetic oligonucleotide
  Sense strand starting at position 2607 of SEQ ID NO: 585373
accgaaacaguguauguuu

SEQ ID NO: 634751 - RNA, 19 nt, Artificial Sequence
  Description of Artificial Sequence: Synthetic oligonucleotide
  Antisense strand to SEQ ID NO: 634750
aaacauacacuguuucggu

SEQ ID NO: 634752 - RNA, 19 nt, Artificial Sequence
  Description of Artificial Sequence: Synthetic oligonucleotide
  Sense strand starting at position 2610 of SEQ ID NO: 585373
gaaacaguguauguuugua

SEQ ID NO: 634753 - RNA, 19 nt, Artificial Sequence
  Description of Artificial Sequence: Synthetic oligonucleotide
  Antisense strand to SEQ ID NO: 634752
uacaaacauacacuguuuc

SEQ ID NO: 634754 - RNA, 19 nt, Artificial Sequence
  Description of Artificial Sequence: Synthetic oligonucleotide
  Sense strand starting at position 2614 of SEQ ID NO: 585373
caguguauguuuguaaaua

SEQ ID NO: 634755 - RNA, 19 nt, Artificial Sequence
  Description of Artificial Sequence: Synthetic oligonucleotide
  Antisense strand to SEQ ID NO: 634754
uauuuacaaacauacacug

SEQ ID NO: 634756 - RNA, 19 nt, Artificial Sequence
  Description of Artificial Sequence: Synthetic oligonucleotide
  Sense strand starting at position 2713 of SEQ ID NO: 585373
agaauuuaauagcaaugga

SEQ ID NO: 634757 - RNA, 19 nt, Artificial Sequence
  Description of Artificial Sequence: Synthetic oligonucleotide
  Antisense strand to SEQ ID NO: 634756
uccauugcuauuaaauucu

SEQ ID NO: 634758 - RNA, 19 nt, Artificial Sequence
  Description of Artificial Sequence: Synthetic oligonucleotide
  Sense strand starting at position 2785 of SEQ ID NO: 585373
ccgauuuauucuguuuggu

SEQ ID NO: 634759 - RNA, 19 nt, Artificial Sequence
  Description of Artificial Sequence: Synthetic oligonucleotide
  Antisense strand to SEQ ID NO: 634758
accaaacagaauaaaucgg

SEQ ID NO: 634760 - RNA, 19 nt, Artificial Sequence
  Description of Artificial Sequence: Synthetic oligonucleotide
  Sense strand starting at position 2873 of SEQ ID NO: 585373
aguuuagauccaggaaucu

SEQ ID NO: 634761 - RNA, 19 nt, Artificial Sequence
  Description of Artificial Sequence: Synthetic oligonucleotide
  Antisense strand to SEQ ID NO: 634760
agauuccuggaucuaaacu

SEQ ID NO: 634762 - RNA, 19 nt, Artificial Sequence
  Description of Artificial Sequence: Synthetic oligonucleotide
  Sense strand starting at position 2926 of SEQ ID NO: 585373
ggaagaugcauugagguuu

SEQ ID NO: 634763 - RNA, 19 nt, Artificial Sequence
  Description of Artificial Sequence: Synthetic oligonucleotide
  Antisense strand to SEQ ID NO: 634762
aaaccucaaugcaucuucc

SEQ ID NO: 634764 - RNA, 19 nt, Artificial Sequence
  Description of Artificial Sequence: Synthetic oligonucleotide
  Sense strand starting at position 2980 of SEQ ID NO: 585373
acaugaauagcaugaugca

SEQ ID NO: 634765 - RNA, 19 nt, Artificial Sequence
  Description of Artificial Sequence: Synthetic oligonucleotide
  Antisense strand to SEQ ID NO: 634764
ugcaucaugcuauucaugu

SEQ ID NO: 634766 - RNA, 19 nt, Artificial Sequence
  Description of Artificial Sequence: Synthetic oligonucleotide
  Sense strand starting at position 3027 of SEQ ID NO: 585373
cguggagacuuauuaugcu

SEQ ID NO: 634767 - RNA, 19 nt, Artificial Sequence
  Description of Artificial Sequence: Synthetic oligonucleotide
  Antisense strand to SEQ ID NO: 634766
agcauaauaagucuccacg

SEQ ID NO: 634768 - RNA, 19 nt, Artificial Sequence
  Description of Artificial Sequence: Synthetic oligonucleotide
  Sense strand starting at position 3031 of SEQ ID NO: 585373
gagacuuauuaugcuagac

SEQ ID NO: 634769 - RNA, 19 nt, Artificial Sequence
  Description of Artificial Sequence: Synthetic oligonucleotide
  Antisense strand to SEQ ID NO: 634768
gucuagcauaauaagucuc

SEQ ID NO: 634770 - RNA, 19 nt, Artificial Sequence
  Description of Artificial Sequence: Synthetic oligonucleotide
  Sense strand starting at position 3366 of SEQ ID NO: 585373
uagucuuaguuacuggaga

SEQ ID NO: 634771 - RNA, 19 nt, Artificial Sequence
  Description of Artificial Sequence: Synthetic oligonucleotide
  Antisense strand to SEQ ID NO: 634770
ucuccaguaacuaagacua

SEQ ID NO: 634772 - RNA, 19 nt, Artificial Sequence
  Description of Artificial Sequence: Synthetic oligonucleotide
  Sense strand starting at position 3563 of SEQ ID NO: 585373
guggguucugcagagcuga

SEQ ID NO: 634773 - RNA, 19 nt, Artificial Sequence
  Description of Artificial Sequence: Synthetic oligonucleotide
  Antisense strand to SEQ ID NO: 634772
ucagcucugcagaacccac

SEQ ID NO: 634774 - RNA, 19 nt, Artificial Sequence
  Description of Artificial Sequence: Synthetic oligonucleotide
  Sense strand starting at position 3607 of SEQ ID NO: 585373
uuggauguuccuggaacca

SEQ ID NO: 634775 - RNA, 19 nt, Artificial Sequence
  Description of Artificial Sequence: Synthetic oligonucleotide
  Antisense strand to SEQ ID NO: 634774
ugguuccaggaacauccaa

SEQ ID NO: 634776 - RNA, 19 nt, Artificial Sequence
  Description of Artificial Sequence: Synthetic oligonucleotide
  Sense strand starting at position 3839 of SEQ ID NO: 585373
cucagcugcugcucagaaa

SEQ ID NO: 634777 - RNA, 19 nt, Artificial Sequence
  Description of Artificial Sequence: Synthetic oligonucleotide
  Antisense strand to SEQ ID NO: 634776
uuucugagcagcagcugag

SEQ ID NO: 634778 - RNA, 19 nt, Artificial Sequence
  Description of Artificial Sequence: Synthetic oligonucleotide
  Sense strand starting at position 3873 of SEQ ID NO: 585373
gcccucugaggcuaagaau

SEQ ID NO: 634779 - RNA, 19 nt, Artificial Sequence
  Description of Artificial Sequence: Synthetic oligonucleotide
  Antisense strand to SEQ ID NO: 634778
auucuuagccucagagggc

SEQ ID NO: 634780 - RNA, 19 nt, Artificial Sequence
  Description of Artificial Sequence: Synthetic oligonucleotide
  Sense strand starting at position 3888 of SEQ ID NO: 585373
gaaucuaggucugugcuua

SEQ ID NO: 634781 - RNA, 19 nt, Artificial Sequence
  Description of Artificial Sequence: Synthetic oligonucleotide
  Antisense strand to SEQ ID NO: 634780
uaagcacagaccuagauuc

SEQ ID NO: 634782 - RNA, 19 nt, Artificial Sequence
  Description of Artificial Sequence: Synthetic oligonucleotide
  Sense strand starting at position 77 of SEQ ID NO: 585374
cugcaacucccgcuguauu

SEQ ID NO: 634783 - RNA, 19 nt, Artificial Sequence
  Description of Artificial Sequence: Synthetic oligonucleotide
  Antisense strand to SEQ ID NO: 634782
aauacagcgggaguugcag

SEQ ID NO: 634784 - RNA, 19 nt, Artificial Sequence
  Description of Artificial Sequence: Synthetic oligonucleotide
  Sense strand starting at position 312 of SEQ ID NO: 585374
gguuucacguuggucauuu

SEQ ID NO: 634785 - RNA, 19 nt, Artificial Sequence
  Description of Artificial Sequence: Synthetic oligonucleotide
  Antisense strand to SEQ ID NO: 634784
aaaugaccaacgugaaacc

SEQ ID NO: 634786 - RNA, 19 nt, Artificial Sequence
  Description of Artificial Sequence: Synthetic oligonucleotide
  Sense strand starting at position 548 of SEQ ID NO: 585374
uguuauuucucgcucuauu

SEQ ID NO: 634787 - RNA, 19 nt, Artificial Sequence
  Description of Artificial Sequence: Synthetic oligonucleotide
  Antisense strand to SEQ ID NO: 634786
aauagagcgagaaauaaca

SEQ ID NO: 634788 - RNA, 19 nt, Artificial Sequence
  Description of Artificial Sequence: Synthetic oligonucleotide
  Sense strand starting at position 560 of SEQ ID NO: 585374
cucuauuuccguugccuga

SEQ ID NO: 634789 - RNA, 19 nt, Artificial Sequence
  Description of Artificial Sequence: Synthetic oligonucleotide
  Antisense strand to SEQ ID NO: 634788
ucaggcaacggaaauagag

SEQ ID NO: 634790 - RNA, 19 nt, Artificial Sequence
  Description of Artificial Sequence: Synthetic oligonucleotide
  Sense strand starting at position 612 of SEQ ID NO: 585374
cuugaaucaugucugguaa

SEQ ID NO: 634791 - RNA, 19 nt, Artificial Sequence
  Description of Artificial Sequence: Synthetic oligonucleotide
  Antisense strand to SEQ ID NO: 634790
uuaccagacaugauucaag

SEQ ID NO: 634792 - RNA, 19 nt, Artificial Sequence
  Description of Artificial Sequence: Synthetic oligonucleotide
  Sense strand starting at position 613 of SEQ ID NO: 585374
uugaaucaugucugguaau

SEQ ID NO: 634793 - RNA, 19 nt, Artificial Sequence
  Description of Artificial Sequence: Synthetic oligonucleotide
  Antisense strand to SEQ ID NO: 634792
auuaccagacaugauucaa

SEQ ID NO: 634794 - RNA, 19 nt, Artificial Sequence
  Description of Artificial Sequence: Synthetic oligonucleotide
  Sense strand starting at position 767 of SEQ ID NO: 585374
cauuuaaguucugccgcau

SEQ ID NO: 634795 - RNA, 19 nt, Artificial Sequence
  Description of Artificial Sequence: Synthetic oligonucleotide
  Antisense strand to SEQ ID NO: 634794
augcggcagaacuuaaaug

SEQ ID NO: 634796 - RNA, 19 nt, Artificial Sequence
  Description of Artificial Sequence: Synthetic oligonucleotide
  Sense strand starting at position 837 of SEQ ID NO: 585374
uguguaucacgagguauuu

SEQ ID NO: 634797 - RNA, 19 nt, Artificial Sequence
  Description of Artificial Sequence: Synthetic oligonucleotide
  Antisense strand to SEQ ID NO: 634796
aaauaccucgugauacaca

SEQ ID NO: 634798 - RNA, 19 nt, Artificial Sequence
  Description of Artificial Sequence: Synthetic oligonucleotide
  Sense strand starting at position 1006 of SEQ ID NO: 585374
ugcccuucuccagauguga

SEQ ID NO: 634799 - RNA, 19 nt, Artificial Sequence
  Description of Artificial Sequence: Synthetic oligonucleotide
  Antisense strand to SEQ ID NO: 634798
ucacaucuggagaagggca

SEQ ID NO: 634800 - RNA, 19 nt, Artificial Sequence
  Description of Artificial Sequence: Synthetic oligonucleotide
  Sense strand starting at position 1256 of SEQ ID NO: 585374
gacagaaagcccuauuguu

SEQ ID NO: 634801 - RNA, 19 nt, Artificial Sequence
  Description of Artificial Sequence: Synthetic oligonucleotide
  Antisense strand to SEQ ID NO: 634800
aacaauagggcuuucuguc

SEQ ID NO: 634802 - RNA, 19 nt, Artificial Sequence
  Description of Artificial Sequence: Synthetic oligonucleotide
  Sense strand starting at position 1396 of SEQ ID NO: 585374
ugagaaacccauuguaggu

SEQ ID NO: 634803 - RNA, 19 nt, Artificial Sequence
  Description of Artificial Sequence: Synthetic oligonucleotide
  Antisense strand to SEQ ID NO: 634802
accuacaauggguuucuca

SEQ ID NO: 634804 - RNA, 19 nt, Artificial Sequence
  Description of Artificial Sequence: Synthetic oligonucleotide
  Sense strand starting at position 1578 of SEQ ID NO: 585374
uaguuuacugaguacugua

SEQ ID NO: 634805 - RNA, 19 nt, Artificial Sequence
  Description of Artificial Sequence: Synthetic oligonucleotide
  Antisense strand to SEQ ID NO: 634804
uacaguacucaguaaacua

SEQ ID NO: 634806 - RNA, 19 nt, Artificial Sequence
  Description of Artificial Sequence: Synthetic oligonucleotide
  Sense strand starting at position 1634 of SEQ ID NO: 585374
gagacauagugucuacuga

SEQ ID NO: 634807 - RNA, 19 nt, Artificial Sequence
  Description of Artificial Sequence: Synthetic oligonucleotide
  Antisense strand to SEQ ID NO: 634806
ucaguagacacuaugucuc

SEQ ID NO: 634808 - RNA, 19 nt, Artificial Sequence
  Description of Artificial Sequence: Synthetic oligonucleotide
  Sense strand starting at position 1701 of SEQ ID NO: 585374
gaccgucuguauuuauaau

SEQ ID NO: 634809 - RNA, 19 nt, Artificial Sequence
  Description of Artificial Sequence: Synthetic oligonucleotide
  Antisense strand to SEQ ID NO: 634808
auuauaaauacagacgguc

SEQ ID NO: 634810 - RNA, 19 nt, Artificial Sequence
  Description of Artificial Sequence: Synthetic oligonucleotide
  Sense strand starting at position 1793 of SEQ ID NO: 585374
uauggaaguuugcuuuaua

SEQ ID NO: 634811 - RNA, 19 nt, Artificial Sequence
  Description of Artificial Sequence: Synthetic oligonucleotide
  Antisense strand to SEQ ID NO: 634810
uauaaagcaaacuuccaua

SEQ ID NO: 634812 - RNA, 19 nt, Artificial Sequence
  Description of Artificial Sequence: Synthetic oligonucleotide
  Sense strand starting at position 1794 of SEQ ID NO: 585374
auggaaguuugcuuuauag

SEQ ID NO: 634813 - RNA, 19 nt, Artificial Sequence
  Description of Artificial Sequence: Synthetic oligonucleotide
  Antisense strand to SEQ ID NO: 634812
cuauaaagcaaacuuccau

SEQ ID NO: 634814 - RNA, 19 nt, Artificial Sequence
  Description of Artificial Sequence: Synthetic oligonucleotide
  Sense strand starting at position 1796 of SEQ ID NO: 585374
ggaaguuugcuuuauagga

SEQ ID NO: 634815 - RNA, 19 nt, Artificial Sequence
  Description of Artificial Sequence: Synthetic oligonucleotide
  Antisense strand to SEQ ID NO: 634814
uccuauaaagcaaacuucc

SEQ ID NO: 634816 - RNA, 19 nt, Artificial Sequence
  Description of Artificial Sequence: Synthetic oligonucleotide
  Sense strand starting at position 2002 of SEQ ID NO: 585374
caaaguuugccuggaacac

SEQ ID NO: 634817 - RNA, 19 nt, Artificial Sequence
  Description of Artificial Sequence: Synthetic oligonucleotide
  Antisense strand to SEQ ID NO: 634816
guguuccaggcaaacuuug

SEQ ID NO: 634818 - RNA, 19 nt, Artificial Sequence
  Description of Artificial Sequence: Synthetic oligonucleotide
  Sense strand starting at position 2003 of SEQ ID NO: 585374
aaaguuugccuggaacaca

SEQ ID NO: 634819 - RNA, 19 nt, Artificial Sequence
  Description of Artificial Sequence: Synthetic oligonucleotide
  Antisense strand to SEQ ID NO: 634818
uguguuccaggcaaacuuu

SEQ ID NO: 634820 - RNA, 19 nt, Artificial Sequence
  Description of Artificial Sequence: Synthetic oligonucleotide
  Sense strand starting at position 2067 of SEQ ID NO: 585374
agggcaaagcuggaugauu

SEQ ID NO: 634821 - RNA, 19 nt, Artificial Sequence
  Description of Artificial Sequence: Synthetic oligonucleotide
  Antisense strand to SEQ ID NO: 634820
aaucauccagcuuugcccu

SEQ ID NO: 634822 - RNA, 19 nt, Artificial Sequence
  Description of Artificial Sequence: Synthetic oligonucleotide
  Sense strand starting at position 2069 of SEQ ID NO: 585374
ggcaaagcuggaugauuga

SEQ ID NO: 634823 - RNA, 19 nt, Artificial Sequence
  Description of Artificial Sequence: Synthetic oligonucleotide
  Antisense strand to SEQ ID NO: 634822
ucaaucauccagcuuugcc

SEQ ID NO: 634824 - RNA, 19 nt, Artificial Sequence
  Description of Artificial Sequence: Synthetic oligonucleotide
  Sense strand starting at position 2333 of SEQ ID NO: 585374
aucguaaccaguggaacua

SEQ ID NO: 634825 - RNA, 19 nt, Artificial Sequence
  Description of Artificial Sequence: Synthetic oligonucleotide
  Antisense strand to SEQ ID NO: 634824
uaguuccacugguuacgau

SEQ ID NO: 634826 - RNA, 19 nt, Artificial Sequence
  Description of Artificial Sequence: Synthetic oligonucleotide
  Sense strand starting at position 2384 of SEQ ID NO: 585374
gcuggacuguauucuuaaa

SEQ ID NO: 634827 - RNA, 19 nt, Artificial Sequence
  Description of Artificial Sequence: Synthetic oligonucleotide
  Antisense strand to SEQ ID NO: 634826
uuuaagaauacaguccagc

SEQ ID NO: 634828 - RNA, 19 nt, Artificial Sequence
  Description of Artificial Sequence: Synthetic oligonucleotide
  Sense strand starting at position 2386 of SEQ ID NO: 585374
uggacuguauucuuaaauu

SEQ ID NO: 634829 - RNA, 19 nt, Artificial Sequence
  Description of Artificial Sequence: Synthetic oligonucleotide
  Antisense strand to SEQ ID NO: 634828
aauuuaagaauacagucca

SEQ ID NO: 634830 - RNA, 19 nt, Artificial Sequence
  Description of Artificial Sequence: Synthetic oligonucleotide
  Sense strand starting at position 2401 of SEQ ID NO: 585374
aauuauauccuguguaagg

SEQ ID NO: 634831 - RNA, 19 nt, Artificial Sequence
  Description of Artificial Sequence: Synthetic oligonucleotide
  Antisense strand to SEQ ID NO: 634830
ccuuacacaggauauaauu

SEQ ID NO: 634832 - RNA, 19 nt, Artificial Sequence
  Description of Artificial Sequence: Synthetic oligonucleotide
  Sense strand starting at position 2403 of SEQ ID NO: 585374
uuauauccuguguaaggga

SEQ ID NO: 634833 - RNA, 19 nt, Artificial Sequence
  Description of Artificial Sequence: Synthetic oligonucleotide
  Antisense strand to SEQ ID NO: 634832
ucccuuacacaggauauaa

SEQ ID NO: 634834 - RNA, 19 nt, Artificial Sequence
  Description of Artificial Sequence: Synthetic oligonucleotide
  Sense strand starting at position 2836 of SEQ ID NO: 585374
ugaggucuccgaugugaaa

SEQ ID NO: 634835 - RNA, 19 nt, Artificial Sequence
  Description of Artificial Sequence: Synthetic oligonucleotide
  Antisense strand to SEQ ID NO: 634834
uuucacaucggagaccuca

SEQ ID NO: 634836 - RNA, 19 nt, Artificial Sequence
  Description of Artificial Sequence: Synthetic oligonucleotide
  Sense strand starting at position 2838 of SEQ ID NO: 585374
aggucuccgaugugaaaug

SEQ ID NO: 634837 - RNA, 19 nt, Artificial Sequence
  Description of Artificial Sequence: Synthetic oligonucleotide
  Antisense strand to SEQ ID NO: 634836
cauuucacaucggagaccu

SEQ ID NO: 634838 - RNA, 19 nt, Artificial Sequence
  Description of Artificial Sequence: Synthetic oligonucleotide
  Sense strand starting at position 2883 of SEQ ID NO: 585374
ccugucuugccagagguga

SEQ ID NO: 634839 - RNA, 19 nt, Artificial Sequence
  Description of Artificial Sequence: Synthetic oligonucleotide
  Antisense strand to SEQ ID NO: 634838
ucaccucuggcaagacagg

SEQ ID NO: 634840 - RNA, 19 nt, Artificial Sequence
  Description of Artificial Sequence: Synthetic oligonucleotide
  Sense strand starting at position 3052 of SEQ ID NO: 585374
uauuguccaguguaaugaa

SEQ ID NO: 634841 - RNA, 19 nt, Artificial Sequence
  Description of Artificial Sequence: Synthetic oligonucleotide
  Antisense strand to SEQ ID NO: 634840
uucauuacacuggacaaua

SEQ ID NO: 634842 - RNA, 19 nt, Artificial Sequence
  Description of Artificial Sequence: Synthetic oligonucleotide
  Sense strand starting at position 3322 of SEQ ID NO: 585374
acuugcuaccgugauuugu

SEQ ID NO: 634843 - RNA, 19 nt, Artificial Sequence
  Description of Artificial Sequence: Synthetic oligonucleotide
  Antisense strand to SEQ ID NO: 634842
acaaaucacgguagcaagu

SEQ ID NO: 634844 - RNA, 19 nt, Artificial Sequence
  Description of Artificial Sequence: Synthetic oligonucleotide
  Sense strand starting at position 3324 of SEQ ID NO: 585374
uugcuaccgugauuuguau

SEQ ID NO: 634845 - RNA, 19 nt, Artificial Sequence
  Description of Artificial Sequence: Synthetic oligonucleotide
  Antisense strand to SEQ ID NO: 634844
auacaaaucacgguagcaa

SEQ ID NO: 634846 - RNA, 19 nt, Artificial Sequence
  Description of Artificial Sequence: Synthetic oligonucleotide
  Sense strand starting at position 3343 of SEQ ID NO: 585374
ccaauuuccugggaugacu

SEQ ID NO: 634847 - RNA, 19 nt, Artificial Sequence
  Description of Artificial Sequence: Synthetic oligonucleotide
  Antisense strand to SEQ ID NO: 634846
agucaucccaggaaauugg

SEQ ID NO: 634848 - RNA, 19 nt, Artificial Sequence
  Description of Artificial Sequence: Synthetic oligonucleotide
  Sense strand starting at position 3534 of SEQ ID NO: 585374
ugucucugcugaguauuua

SEQ ID NO: 634849 - RNA, 19 nt, Artificial Sequence
  Description of Artificial Sequence: Synthetic oligonucleotide
  Antisense strand to SEQ ID NO: 634848
uaaauacucagcagagaca

SEQ ID NO: 634850 - RNA, 19 nt, Artificial Sequence
  Description of Artificial Sequence: Synthetic oligonucleotide
  Sense strand starting at position 3570 of SEQ ID NO: 585374
accagaaacuguuucggaa

SEQ ID NO: 634851 - RNA, 19 nt, Artificial Sequence
  Description of Artificial Sequence: Synthetic oligonucleotide
  Antisense strand to SEQ ID NO: 634850
uuccgaaacaguuucuggu

SEQ ID NO: 634852 - RNA, 19 nt, Artificial Sequence
  Description of Artificial Sequence: Synthetic oligonucleotide
  Sense strand starting at position 3765 of SEQ ID NO: 585374
uccuuucucgcggcauauu

SEQ ID NO: 634853 - RNA, 19 nt, Artificial Sequence
  Description of Artificial Sequence: Synthetic oligonucleotide
  Antisense strand to SEQ ID NO: 634852
aauaugccgcgagaaagga

SEQ ID NO: 634854 - RNA, 19 nt, Artificial Sequence
  Description of Artificial Sequence: Synthetic oligonucleotide
  Sense strand starting at position 3766 of SEQ ID NO: 585374
ccuuucucgcggcauauuu

SEQ ID NO: 634855 - RNA, 19 nt, Artificial Sequence
  Description of Artificial Sequence: Synthetic oligonucleotide
  Antisense strand to SEQ ID NO: 634854
aaauaugccgcgagaaagg

SEQ ID NO: 634856 - RNA, 19 nt, Artificial Sequence
  Description of Artificial Sequence: Synthetic oligonucleotide
  Sense strand starting at position 3822 of SEQ ID NO: 585374
gaugcuaugccagaaugua

SEQ ID NO: 634857 - RNA, 19 nt, Artificial Sequence
  Description of Artificial Sequence: Synthetic oligonucleotide
  Antisense strand to SEQ ID NO: 634856
uacauucuggcauagcauc

SEQ ID NO: 634858 - RNA, 19 nt, Artificial Sequence
  Description of Artificial Sequence: Synthetic oligonucleotide
  Sense strand starting at position 3949 of SEQ ID NO: 585374
aaaggucuacagugucuaa

SEQ ID NO: 634859 - RNA, 19 nt, Artificial Sequence
  Description of Artificial Sequence: Synthetic oligonucleotide
  Antisense strand to SEQ ID NO: 634858
uuagacacuguagaccuuu

SEQ ID NO: 634860 - RNA, 19 nt, Artificial Sequence
  Description of Artificial Sequence: Synthetic oligonucleotide
  Sense strand starting at position 3956 of SEQ ID NO: 585374
uacagugucuaacccgaaa

SEQ ID NO: 634861 - RNA, 19 nt, Artificial Sequence
  Description of Artificial Sequence: Synthetic oligonucleotide
  Antisense strand to SEQ ID NO: 634860
uuucggguuagacacugua

SEQ ID NO: 634862 - RNA, 19 nt, Artificial Sequence
  Description of Artificial Sequence: Synthetic oligonucleotide
  Sense strand starting at position 427 of SEQ ID NO: 585375
guguauaccuacgugagaa

SEQ ID NO: 634863 - RNA, 19 nt, Artificial Sequence
  Description of Artificial Sequence: Synthetic oligonucleotide
  Antisense strand to SEQ ID NO: 634862
uucucacguagguauacac

SEQ ID NO: 634864 - RNA, 19 nt, Artificial Sequence
  Description of Artificial Sequence: Synthetic oligonucleotide
  Sense strand starting at position 428 of SEQ ID NO: 585375
uguauaccuacgugagaaa

SEQ ID NO: 634865 - RNA, 19 nt, Artificial Sequence
  Description of Artificial Sequence: Synthetic oligonucleotide
  Antisense strand to SEQ ID NO: 634864
uuucucacguagguauaca

SEQ ID NO: 634866 - RNA, 19 nt, Artificial Sequence
  Description of Artificial Sequence: Synthetic oligonucleotide
  Sense strand starting at position 439 of SEQ ID NO: 585375
gugagaaaccuguacguuc

SEQ ID NO: 634867 - RNA, 19 nt, Artificial Sequence
  Description of Artificial Sequence: Synthetic oligonucleotide
  Antisense strand to SEQ ID NO: 634866
gaacguacagguuucucac

SEQ ID NO: 634868 - RNA, 19 nt, Artificial Sequence
  Description of Artificial Sequence: Synthetic oligonucleotide
  Sense strand starting at position 551 of SEQ ID NO: 585375
gggugccuuggucacauua

SEQ ID NO: 634869 - RNA, 19 nt, Artificial Sequence
  Description of Artificial Sequence: Synthetic oligonucleotide
  Antisense strand to SEQ ID NO: 634868
uaaugugaccaaggcaccc

SEQ ID NO: 634870 - RNA, 19 nt, Artificial Sequence
  Description of Artificial Sequence: Synthetic oligonucleotide
  Sense strand starting at position 1079 of SEQ ID NO: 585375
aaaguaucauugcucagag

SEQ ID NO: 634871 - RNA, 19 nt, Artificial Sequence
  Description of Artificial Sequence: Synthetic oligonucleotide
  Antisense strand to SEQ ID NO: 634870
cucugagcaaugauacuuu

SEQ ID NO: 634872 - RNA, 19 nt, Artificial Sequence
  Description of Artificial Sequence: Synthetic oligonucleotide
  Sense strand starting at position 1080 of SEQ ID NO: 585375
aaguaucauugcucagagu

SEQ ID NO: 634873 - RNA, 19 nt, Artificial Sequence
  Description of Artificial Sequence: Synthetic oligonucleotide
  Antisense strand to SEQ ID NO: 634872
acucugagcaaugauacuu

SEQ ID NO: 634874 - RNA, 19 nt, Artificial Sequence
  Description of Artificial Sequence: Synthetic oligonucleotide
  Sense strand starting at position 1081 of SEQ ID NO: 585375
aguaucauugcucagaguc

SEQ ID NO: 634875 - RNA, 19 nt, Artificial Sequence
  Description of Artificial Sequence: Synthetic oligonucleotide
  Antisense strand to SEQ ID NO: 634874
gacucugagcaaugauacu

SEQ ID NO: 634876 - RNA, 19 nt, Artificial Sequence
  Description of Artificial Sequence: Synthetic oligonucleotide
  Sense strand starting at position 1095 of SEQ ID NO: 585375
gagucagggcaaugucuua

SEQ ID NO: 634877 - RNA, 19 nt, Artificial Sequence
  Description of Artificial Sequence: Synthetic oligonucleotide
  Antisense strand to SEQ ID NO: 634876
uaagacauugcccugacuc

SEQ ID NO: 634878 - RNA, 19 nt, Artificial Sequence
  Description of Artificial Sequence: Synthetic oligonucleotide
  Sense strand starting at position 1148 of SEQ ID NO: 585375
gaggaagcaccugguaaau

SEQ ID NO: 634879 - RNA, 19 nt, Artificial Sequence
  Description of Artificial Sequence: Synthetic oligonucleotide
  Antisense strand to SEQ ID NO: 634878
auuuaccaggugcuuccuc

SEQ ID NO: 634880 - RNA, 19 nt, Artificial Sequence
  Description of Artificial Sequence: Synthetic oligonucleotide
  Sense strand starting at position 1176 of SEQ ID NO: 585375
auuguuucugaaugaagua

SEQ ID NO: 634881 - RNA, 19 nt, Artificial Sequence
  Description of Artificial Sequence: Synthetic oligonucleotide
  Antisense strand to SEQ ID NO: 634880
uacuucauucagaaacaau

SEQ ID NO: 634882 - RNA, 19 nt, Artificial Sequence
  Description of Artificial Sequence: Synthetic oligonucleotide
  Sense strand starting at position 1201 of SEQ ID NO: 585375
cguauucuuugggucagga

SEQ ID NO: 634883 - RNA, 19 nt, Artificial Sequence
  Description of Artificial Sequence: Synthetic oligonucleotide
  Antisense strand to SEQ ID NO: 634882
uccugacccaaagaauacg

SEQ ID NO: 634884 - RNA, 19 nt, Artificial Sequence
  Description of Artificial Sequence: Synthetic oligonucleotide
  Sense strand starting at position 1271 of SEQ ID NO: 585375
cacguuuauguuggagaau

SEQ ID NO: 634885 - RNA, 19 nt, Artificial Sequence
  Description of Artificial Sequence: Synthetic oligonucleotide
  Antisense strand to SEQ ID NO: 634884
auucuccaacauaaacgug

SEQ ID NO: 634886 - RNA, 19 nt, Artificial Sequence
  Description of Artificial Sequence: Synthetic oligonucleotide
  Sense strand starting at position 1353 of SEQ ID NO: 585375
gugcauuugugucuaucua

SEQ ID NO: 634887 - RNA, 19 nt, Artificial Sequence
  Description of Artificial Sequence: Synthetic oligonucleotide
  Antisense strand to SEQ ID NO: 634886
uagauagacacaaaugcac

SEQ ID NO: 634888 - RNA, 19 nt, Artificial Sequence
  Description of Artificial Sequence: Synthetic oligonucleotide
  Sense strand starting at position 1354 of SEQ ID NO: 585375
ugcauuugugucuaucuau

SEQ ID NO: 634889 - RNA, 19 nt, Artificial Sequence
  Description of Artificial Sequence: Synthetic oligonucleotide
  Antisense strand to SEQ ID NO: 634888
auagauagacacaaaugca

SEQ ID NO: 634890 - RNA, 19 nt, Artificial Sequence
  Description of Artificial Sequence: Synthetic oligonucleotide
  Sense strand starting at position 1475 of SEQ ID NO: 585375
gugaguuucccagaaaggu

SEQ ID NO: 634891 - RNA, 19 nt, Artificial Sequence
  Description of Artificial Sequence: Synthetic oligonucleotide
  Antisense strand to SEQ ID NO: 634890
accuuucugggaaacucac

SEQ ID NO: 634892 - RNA, 19 nt, Artificial Sequence
  Description of Artificial Sequence: Synthetic oligonucleotide
  Sense strand starting at position 1876 of SEQ ID NO: 585375
cgcgaauaucuggauaguc

SEQ ID NO: 634893 - RNA, 19 nt, Artificial Sequence
  Description of Artificial Sequence: Synthetic oligonucleotide
  Antisense strand to SEQ ID NO: 634892
gacuauccagauauucgcg

SEQ ID NO: 634894 - RNA, 19 nt, Artificial Sequence
  Description of Artificial Sequence: Synthetic oligonucleotide
  Sense strand starting at position 2357 of SEQ ID NO: 585375
ucgcuuagagcccaggaau

SEQ ID NO: 634895 - RNA, 19 nt, Artificial Sequence
  Description of Artificial Sequence: Synthetic oligonucleotide
  Antisense strand to SEQ ID NO: 634894
auuccugggcucuaagcga

SEQ ID NO: 634896 - RNA, 19 nt, Artificial Sequence
  Description of Artificial Sequence: Synthetic oligonucleotide
  Sense strand starting at position 2601 of SEQ ID NO: 585375
aggucucucaagugacaag

SEQ ID NO: 634897 - RNA, 19 nt, Artificial Sequence
  Description of Artificial Sequence: Synthetic oligonucleotide
  Antisense strand to SEQ ID NO: 634896
cuugucacuugagagaccu

SEQ ID NO: 634898 - RNA, 19 nt, Artificial Sequence
  Description of Artificial Sequence: Synthetic oligonucleotide
  Sense strand starting at position 2662 of SEQ ID NO: 585375
cuaugccaugauggaauua

SEQ ID NO: 634899 - RNA, 19 nt, Artificial Sequence
  Description of Artificial Sequence: Synthetic oligonucleotide
  Antisense strand to SEQ ID NO: 634898
uaauuccaucauggcauag

SEQ ID NO: 634900 - RNA, 19 nt, Artificial Sequence
  Description of Artificial Sequence: Synthetic oligonucleotide
  Sense strand starting at position 2741 of SEQ ID NO: 585375
cacaauggucacggcaaga

SEQ ID NO: 634901 - RNA, 19 nt, Artificial Sequence
  Description of Artificial Sequence: Synthetic oligonucleotide
  Antisense strand to SEQ ID NO: 634900
ucuugccgugaccauugug

SEQ ID NO: 634902 - RNA, 19 nt, Artificial Sequence
  Description of Artificial Sequence: Synthetic oligonucleotide
  Sense strand starting at position 2806 of SEQ ID NO: 585375
cauuauuauccacguggga

SEQ ID NO: 634903 - RNA, 19 nt, Artificial Sequence
  Description of Artificial Sequence: Synthetic oligonucleotide
  Antisense strand to SEQ ID NO: 634902
ucccacguggauaauaaug

SEQ ID NO: 634904 - RNA, 19 nt, Artificial Sequence
  Description of Artificial Sequence: Synthetic oligonucleotide
  Sense strand starting at position 2808 of SEQ ID NO: 585375
uuauuauccacgugggaaa

SEQ ID NO: 634905 - RNA, 19 nt, Artificial Sequence
  Description of Artificial Sequence: Synthetic oligonucleotide
  Antisense strand to SEQ ID NO: 634904
uuucccacguggauaauaa

SEQ ID NO: 634906 - RNA, 19 nt, Artificial Sequence
  Description of Artificial Sequence: Synthetic oligonucleotide
  Sense strand starting at position 2809 of SEQ ID NO: 585375
uauuauccacgugggaaau

SEQ ID NO: 634907 - RNA, 19 nt, Artificial Sequence
  Description of Artificial Sequence: Synthetic oligonucleotide
  Antisense strand to SEQ ID NO: 634906
auuucccacguggauaaua

SEQ ID NO: 634908 - RNA, 19 nt, Artificial Sequence
  Description of Artificial Sequence: Synthetic oligonucleotide
  Sense strand starting at position 2810 of SEQ ID NO: 585375
auuauccacgugggaaaua

SEQ ID NO: 634909 - RNA, 19 nt, Artificial Sequence
  Description of Artificial Sequence: Synthetic oligonucleotide
  Antisense strand to SEQ ID NO: 634908
uauuucccacguggauaau

SEQ ID NO: 634910 - RNA, 19 nt, Artificial Sequence
  Description of Artificial Sequence: Synthetic oligonucleotide
  Sense strand starting at position 2815 of SEQ ID NO: 585375
ccacgugggaaauauaagu

SEQ ID NO: 634911 - RNA, 19 nt, Artificial Sequence
  Description of Artificial Sequence: Synthetic oligonucleotide
  Antisense strand to SEQ ID NO: 634910
acuuauauuucccacgugg

SEQ ID NO: 634912 - RNA, 19 nt, Artificial Sequence
  Description of Artificial Sequence: Synthetic oligonucleotide
  Sense strand starting at position 3042 of SEQ ID NO: 585375
aggugcaacuacucuaaga

SEQ ID NO: 634913 - RNA, 19 nt, Artificial Sequence
  Description of Artificial Sequence: Synthetic oligonucleotide
  Antisense strand to SEQ ID NO: 634912
ucuuagaguaguugcaccu

SEQ ID NO: 634914 - RNA, 19 nt, Artificial Sequence
  Description of Artificial Sequence: Synthetic oligonucleotide
  Sense strand starting at position 3044 of SEQ ID NO: 585375
gugcaacuacucuaagaca

SEQ ID NO: 634915 - RNA, 19 nt, Artificial Sequence
  Description of Artificial Sequence: Synthetic oligonucleotide
  Antisense strand to SEQ ID NO: 634914
ugucuuagaguaguugcac

SEQ ID NO: 634916 - RNA, 19 nt, Artificial Sequence
  Description of Artificial Sequence: Synthetic oligonucleotide
  Sense strand starting at position 3079 of SEQ ID NO: 585375
gggcauuuaucucagauga

SEQ ID NO: 634917 - RNA, 19 nt, Artificial Sequence
  Description of Artificial Sequence: Synthetic oligonucleotide
  Antisense strand to SEQ ID NO: 634916
ucaucugagauaaaugccc

SEQ ID NO: 634918 - RNA, 19 nt, Artificial Sequence
  Description of Artificial Sequence: Synthetic oligonucleotide
  Sense strand starting at position 3081 of SEQ ID NO: 585375
gcauuuaucucagaugaau

SEQ ID NO: 634919 - RNA, 19 nt, Artificial Sequence
  Description of Artificial Sequence: Synthetic oligonucleotide
  Antisense strand to SEQ ID NO: 634918
auucaucugagauaaaugc

SEQ ID NO: 634920 - RNA, 19 nt, Artificial Sequence
  Description of Artificial Sequence: Synthetic oligonucleotide
  Sense strand starting at position 3125 of SEQ ID NO: 585375
ugcgcauguguguuuauag

SEQ ID NO: 634921 - RNA, 19 nt, Artificial Sequence
  Description of Artificial Sequence: Synthetic oligonucleotide
  Antisense strand to SEQ ID NO: 634920
cuauaaacacacaugcgca

SEQ ID NO: 634922 - RNA, 19 nt, Artificial Sequence
  Description of Artificial Sequence: Synthetic oligonucleotide
  Sense strand starting at position 3253 of SEQ ID NO: 585375
aguguugauacacguaaca

SEQ ID NO: 634923 - RNA, 19 nt, Artificial Sequence
  Description of Artificial Sequence: Synthetic oligonucleotide
  Antisense strand to SEQ ID NO: 634922
uguuacguguaucaacacu

SEQ ID NO: 634924 - RNA, 19 nt, Artificial Sequence
  Description of Artificial Sequence: Synthetic oligonucleotide
  Sense strand starting at position 3265 of SEQ ID NO: 585375
cguaacaaauugguugaau

SEQ ID NO: 634925 - RNA, 19 nt, Artificial Sequence
  Description of Artificial Sequence: Synthetic oligonucleotide
  Antisense strand to SEQ ID NO: 634924
auucaaccaauuuguuacg

SEQ ID NO: 634926 - RNA, 19 nt, Artificial Sequence
  Description of Artificial Sequence: Synthetic oligonucleotide
  Sense strand starting at position 3266 of SEQ ID NO: 585375
guaacaaauugguugaauu

SEQ ID NO: 634927 - RNA, 19 nt, Artificial Sequence
  Description of Artificial Sequence: Synthetic oligonucleotide
  Antisense strand to SEQ ID NO: 634926
aauucaaccaauuuguuac

SEQ ID NO: 634928 - RNA, 19 nt, Artificial Sequence
  Description of Artificial Sequence: Synthetic oligonucleotide
  Sense strand starting at position 3324 of SEQ ID NO: 585375
agcuaacuaccguaugguu

SEQ ID NO: 634929 - RNA, 19 nt, Artificial Sequence
  Description of Artificial Sequence: Synthetic oligonucleotide
  Antisense strand to SEQ ID NO: 634928
aaccauacgguaguuagcu

SEQ ID NO: 634930 - RNA, 19 nt, Artificial Sequence
  Description of Artificial Sequence: Synthetic oligonucleotide
  Sense strand starting at position 3346 of SEQ ID NO: 585375
uuacuauugccagggaggu

SEQ ID NO: 634931 - RNA, 19 nt, Artificial Sequence
  Description of Artificial Sequence: Synthetic oligonucleotide
  Antisense strand to SEQ ID NO: 634930
accucccuggcaauaguaa

SEQ ID NO: 634932 - RNA, 19 nt, Artificial Sequence
  Description of Artificial Sequence: Synthetic oligonucleotide
  Sense strand starting at position 3417 of SEQ ID NO: 585375
gacugugauggugaucaca

SEQ ID NO: 634933 - RNA, 19 nt, Artificial Sequence
  Description of Artificial Sequence: Synthetic oligonucleotide
  Antisense strand to SEQ ID NO: 634932
ugugaucaccaucacaguc

SEQ ID NO: 634934 - RNA, 19 nt, Artificial Sequence
  Description of Artificial Sequence: Synthetic oligonucleotide
  Sense strand starting at position 3419 of SEQ ID NO: 585375
cugugauggugaucacaga

SEQ ID NO: 634935 - RNA, 19 nt, Artificial Sequence
  Description of Artificial Sequence: Synthetic oligonucleotide
  Antisense strand to SEQ ID NO: 634934
ucugugaucaccaucacag

SEQ ID NO: 634936 - RNA, 19 nt, Artificial Sequence
  Description of Artificial Sequence: Synthetic oligonucleotide
  Sense strand starting at position 3447 of SEQ ID NO: 585375
augugauagcauugcauag

SEQ ID NO: 634937 - RNA, 19 nt, Artificial Sequence
  Description of Artificial Sequence: Synthetic oligonucleotide
  Antisense strand to SEQ ID NO: 634936
cuaugcaaugcuaucacau

SEQ ID NO: 634938 - RNA, 19 nt, Artificial Sequence
  Description of Artificial Sequence: Synthetic oligonucleotide
  Sense strand starting at position 3614 of SEQ ID NO: 585375
gggagauggguauacgagu

SEQ ID NO: 634939 - RNA, 19 nt, Artificial Sequence
  Description of Artificial Sequence: Synthetic oligonucleotide
  Antisense strand to SEQ ID NO: 634938
acucguauacccaucuccc

SEQ ID NO: 634940 - RNA, 19 nt, Artificial Sequence
  Description of Artificial Sequence: Synthetic oligonucleotide
  Sense strand starting at position 3807 of SEQ ID NO: 585375
acaaguagcugggcuuaua

SEQ ID NO: 634941 - RNA, 19 nt, Artificial Sequence
  Description of Artificial Sequence: Synthetic oligonucleotide
  Antisense strand to SEQ ID NO: 634940
uauaagcccagcuacuugu

SEQ ID NO: 634942 - RNA, 19 nt, Artificial Sequence
  Description of Artificial Sequence: Synthetic oligonucleotide
  Sense strand starting at position 156 of SEQ ID NO: 585376
uucuguggccuauaauauu

SEQ ID NO: 634943 - RNA, 19 nt, Artificial Sequence
  Description of Artificial Sequence: Synthetic oligonucleotide
  Antisense strand to SEQ ID NO: 634942
aauauuauaggccacagaa

SEQ ID NO: 634944 - RNA, 19 nt, Artificial Sequence
  Description of Artificial Sequence: Synthetic oligonucleotide
  Sense strand starting at position 740 of SEQ ID NO: 585376
cuuggcuaucaggacauua

SEQ ID NO: 634945 - RNA, 19 nt, Artificial Sequence
  Description of Artificial Sequence: Synthetic oligonucleotide
  Antisense strand to SEQ ID NO: 634944
uaauguccugauagccaag

SEQ ID NO: 634946 - RNA, 19 nt, Artificial Sequence
  Description of Artificial Sequence: Synthetic oligonucleotide
  Sense strand starting at position 742 of SEQ ID NO: 585376
uggcuaucaggacauuauu

SEQ ID NO: 634947 - RNA, 19 nt, Artificial Sequence
  Description of Artificial Sequence: Synthetic oligonucleotide
  Antisense strand to SEQ ID NO: 634946
aauaauguccugauagcca

SEQ ID NO: 634948 - RNA, 19 nt, Artificial Sequence
  Description of Artificial Sequence: Synthetic oligonucleotide
  Sense strand starting at position 884 of SEQ ID NO: 585376
acauguucuccugagagcu

SEQ ID NO: 634949 - RNA, 19 nt, Artificial Sequence
  Description of Artificial Sequence: Synthetic oligonucleotide
  Antisense strand to SEQ ID NO: 634948
agcucucaggagaacaugu

SEQ ID NO: 634950 - RNA, 19 nt, Artificial Sequence
  Description of Artificial Sequence: Synthetic oligonucleotide
  Sense strand starting at position 926 of SEQ ID NO: 585376
guugucauaugauucucaa

SEQ ID NO: 634951 - RNA, 19 nt, Artificial Sequence
  Description of Artificial Sequence: Synthetic oligonucleotide
  Antisense strand to SEQ ID NO: 634950
uugagaaucauaugacaac

SEQ ID NO: 634952 - RNA, 19 nt, Artificial Sequence
  Description of Artificial Sequence: Synthetic oligonucleotide
  Sense strand starting at position 1082 of SEQ ID NO: 585376
acaguuugaggauaugcau

SEQ ID NO: 634953 - RNA, 19 nt, Artificial Sequence
  Description of Artificial Sequence: Synthetic oligonucleotide
  Antisense strand to SEQ ID NO: 634952
augcauauccucaaacugu

SEQ ID NO: 634954 - RNA, 19 nt, Artificial Sequence
  Description of Artificial Sequence: Synthetic oligonucleotide
  Sense strand starting at position 1085 of SEQ ID NO: 585376
guuugaggauaugcauaua

SEQ ID NO: 634955 - RNA, 19 nt, Artificial Sequence
  Description of Artificial Sequence: Synthetic oligonucleotide
  Antisense strand to SEQ ID NO: 634954
uauaugcauauccucaaac

SEQ ID NO: 634956 - RNA, 19 nt, Artificial Sequence
  Description of Artificial Sequence: Synthetic oligonucleotide
  Sense strand starting at position 1181 of SEQ ID NO: 585376
gacaacaugucagcagaua

SEQ ID NO: 634957 - RNA, 19 nt, Artificial Sequence
  Description of Artificial Sequence: Synthetic oligonucleotide
  Antisense strand to SEQ ID NO: 634956
uaucugcugacauguuguc

SEQ ID NO: 634958 - RNA, 19 nt, Artificial Sequence
  Description of Artificial Sequence: Synthetic oligonucleotide
  Sense strand starting at position 1237 of SEQ ID NO: 585376
aaaggcuucugggucacaa

SEQ ID NO: 634959 - RNA, 19 nt, Artificial Sequence
  Description of Artificial Sequence: Synthetic oligonucleotide
  Antisense strand to SEQ ID NO: 634958
uugugacccagaagccuuu

SEQ ID NO: 634960 - RNA, 19 nt, Artificial Sequence
  Description of Artificial Sequence: Synthetic oligonucleotide
  Sense strand starting at position 1239 of SEQ ID NO: 585376
aggcuucugggucacaaga

SEQ ID NO: 634961 - RNA, 19 nt, Artificial Sequence
  Description of Artificial Sequence: Synthetic oligonucleotide
  Antisense strand to SEQ ID NO: 634960
ucuugugacccagaagccu

SEQ ID NO: 634962 - RNA, 19 nt, Artificial Sequence
  Description of Artificial Sequence: Synthetic oligonucleotide
  Sense strand starting at position 1249 of SEQ ID NO: 585376
gucacaagaugugcacaua

SEQ ID NO: 634963 - RNA, 19 nt, Artificial Sequence
  Description of Artificial Sequence: Synthetic oligonucleotide
  Antisense strand to SEQ ID NO: 634962
uaugugcacaucuugugac

SEQ ID NO: 634964 - RNA, 19 nt, Artificial Sequence
  Description of Artificial Sequence: Synthetic oligonucleotide
  Sense strand starting at position 1250 of SEQ ID NO: 585376
ucacaagaugugcacauau

SEQ ID NO: 634965 - RNA, 19 nt, Artificial Sequence
  Description of Artificial Sequence: Synthetic oligonucleotide
  Antisense strand to SEQ ID NO: 634964
auaugugcacaucuuguga

SEQ ID NO: 634966 - RNA, 19 nt, Artificial Sequence
  Description of Artificial Sequence: Synthetic oligonucleotide
  Sense strand starting at position 1392 of SEQ ID NO: 585376
ggcugaugagaaugaaugu

SEQ ID NO: 634967 - RNA, 19 nt, Artificial Sequence
  Description of Artificial Sequence: Synthetic oligonucleotide
  Antisense strand to SEQ ID NO: 634966
acauucauucucaucagcc

SEQ ID NO: 634968 - RNA, 19 nt, Artificial Sequence
  Description of Artificial Sequence: Synthetic oligonucleotide
  Sense strand starting at position 1412 of SEQ ID NO: 585376
ugaugugagaauuguaaau

SEQ ID NO: 634969 - RNA, 19 nt, Artificial Sequence
  Description of Artificial Sequence: Synthetic oligonucleotide
  Antisense strand to SEQ ID NO: 634968
auuuacaauucucacauca

SEQ ID NO: 634970 - RNA, 19 nt, Artificial Sequence
  Description of Artificial Sequence: Synthetic oligonucleotide
  Sense strand starting at position 1490 of SEQ ID NO: 585376
gauggugaggcucacacau

SEQ ID NO: 634971 - RNA, 19 nt, Artificial Sequence
  Description of Artificial Sequence: Synthetic oligonucleotide
  Antisense strand to SEQ ID NO: 634970
augugugagccucaccauc

SEQ ID NO: 634972 - RNA, 19 nt, Artificial Sequence
  Description of Artificial Sequence: Synthetic oligonucleotide
  Sense strand starting at position 1514 of SEQ ID NO: 585376
agaauuguaccaggcugga

SEQ ID NO: 634973 - RNA, 19 nt, Artificial Sequence
  Description of Artificial Sequence: Synthetic oligonucleotide
  Antisense strand to SEQ ID NO: 634972
uccagccugguacaauucu

SEQ ID NO: 634974 - RNA, 19 nt, Artificial Sequence
  Description of Artificial Sequence: Synthetic oligonucleotide
  Sense strand starting at position 1576 of SEQ ID NO: 585376
aauaguuauguugggcaga

SEQ ID NO: 634975 - RNA, 19 nt, Artificial Sequence
  Description of Artificial Sequence: Synthetic oligonucleotide
  Antisense strand to SEQ ID NO: 634974
ucugcccaacauaacuauu

SEQ ID NO: 634976 - RNA, 19 nt, Artificial Sequence
  Description of Artificial Sequence: Synthetic oligonucleotide
  Sense strand starting at position 1579 of SEQ ID NO: 585376
aguuauguugggcagauua

SEQ ID NO: 634977 - RNA, 19 nt, Artificial Sequence
  Description of Artificial Sequence: Synthetic oligonucleotide
  Antisense strand to SEQ ID NO: 634976
uaaucugcccaacauaacu

SEQ ID NO: 634978 - RNA, 19 nt, Artificial Sequence
  Description of Artificial Sequence: Synthetic oligonucleotide
  Sense strand starting at position 1726 of SEQ ID NO: 585376
guggucccucuugaagauu

SEQ ID NO: 634979 - RNA, 19 nt, Artificial Sequence
  Description of Artificial Sequence: Synthetic oligonucleotide
  Antisense strand to SEQ ID NO: 634978
aaucuucaagagggaccac

SEQ ID NO: 634980 - RNA, 19 nt, Artificial Sequence
  Description of Artificial Sequence: Synthetic oligonucleotide
  Sense strand starting at position 1780 of SEQ ID NO: 585376
ucucauuccuguuuggaga

SEQ ID NO: 634981 - RNA, 19 nt, Artificial Sequence
  Description of Artificial Sequence: Synthetic oligonucleotide
  Antisense strand to SEQ ID NO: 634980
ucuccaaacaggaaugaga

SEQ ID NO: 634982 - RNA, 19 nt, Artificial Sequence
  Description of Artificial Sequence: Synthetic oligonucleotide
  Sense strand starting at position 1803 of SEQ ID NO: 585376
gggaaauggccucagucac

SEQ ID NO: 634983 - RNA, 19 nt, Artificial Sequence
  Description of Artificial Sequence: Synthetic oligonucleotide
  Antisense strand to SEQ ID NO: 634982
gugacugaggccauuuccc

SEQ ID NO: 634984 - RNA, 19 nt, Artificial Sequence
  Description of Artificial Sequence: Synthetic oligonucleotide
  Sense strand starting at position 2239 of SEQ ID NO: 585376
uuagucucuguauaacaau

SEQ ID NO: 634985 - RNA, 19 nt, Artificial Sequence
  Description of Artificial Sequence: Synthetic oligonucleotide
  Antisense strand to SEQ ID NO: 634984
auuguuauacagagacuaa

SEQ ID NO: 634986 - RNA, 19 nt, Artificial Sequence
  Description of Artificial Sequence: Synthetic oligonucleotide
  Sense strand starting at position 2305 of SEQ ID NO: 585376
ggaguuagguccucaguua

SEQ ID NO: 634987 - RNA, 19 nt, Artificial Sequence
  Description of Artificial Sequence: Synthetic oligonucleotide
  Antisense strand to SEQ ID NO: 634986
uaacugaggaccuaacucc

SEQ ID NO: 634988 - RNA, 19 nt, Artificial Sequence
  Description of Artificial Sequence: Synthetic oligonucleotide
  Sense strand starting at position 2306 of SEQ ID NO: 585376
gaguuagguccucaguuac

SEQ ID NO: 634989 - RNA, 19 nt, Artificial Sequence
  Description of Artificial Sequence: Synthetic oligonucleotide
  Antisense strand to SEQ ID NO: 634988
guaacugaggaccuaacuc

SEQ ID NO: 634990 - RNA, 19 nt, Artificial Sequence
  Description of Artificial Sequence: Synthetic oligonucleotide
  Sense strand starting at position 2352 of SEQ ID NO: 585376
gucccuaggucaucucuaa

SEQ ID NO: 634991 - RNA, 19 nt, Artificial Sequence
  Description of Artificial Sequence: Synthetic oligonucleotide
  Antisense strand to SEQ ID NO: 634990
uuagagaugaccuagggac

SEQ ID NO: 634992 - RNA, 19 nt, Artificial Sequence
  Description of Artificial Sequence: Synthetic oligonucleotide
  Sense strand starting at position 2380 of SEQ ID NO: 585376
ccuguaucgccuuugccaa

SEQ ID NO: 634993 - RNA, 19 nt, Artificial Sequence
  Description of Artificial Sequence: Synthetic oligonucleotide
  Antisense strand to SEQ ID NO: 634992
uuggcaaaggcgauacagg

SEQ ID NO: 634994 - RNA, 19 nt, Artificial Sequence
  Description of Artificial Sequence: Synthetic oligonucleotide
  Sense strand starting at position 2533 of SEQ ID NO: 585376
cucagugagagcugaauuc

SEQ ID NO: 634995 - RNA, 19 nt, Artificial Sequence
  Description of Artificial Sequence: Synthetic oligonucleotide
  Antisense strand to SEQ ID NO: 634994
gaauucagcucucacugag

SEQ ID NO: 634996 - RNA, 19 nt, Artificial Sequence
  Description of Artificial Sequence: Synthetic oligonucleotide
  Sense strand starting at position 2776 of SEQ ID NO: 585376
auccuuucuggugaaaugu

SEQ ID NO: 634997 - RNA, 19 nt, Artificial Sequence
  Description of Artificial Sequence: Synthetic oligonucleotide
  Antisense strand to SEQ ID NO: 634996
acauuucaccagaaaggau

SEQ ID NO: 634998 - RNA, 19 nt, Artificial Sequence
  Description of Artificial Sequence: Synthetic oligonucleotide
  Sense strand starting at position 2782 of SEQ ID NO: 585376
ucuggugaaauguaaguuu

SEQ ID NO: 634999 - RNA, 19 nt, Artificial Sequence
  Description of Artificial Sequence: Synthetic oligonucleotide
  Antisense strand to SEQ ID NO: 634998
aaacuuacauuucaccaga

SEQ ID NO: 635000 - RNA, 19 nt, Artificial Sequence
  Description of Artificial Sequence: Synthetic oligonucleotide
  Sense strand starting at position 2874 of SEQ ID NO: 585376
uuagaaggugcucagcaua

SEQ ID NO: 635001 - RNA, 19 nt, Artificial Sequence
  Description of Artificial Sequence: Synthetic oligonucleotide
  Antisense strand to SEQ ID NO: 635000
uaugcugagcaccuucuaa

SEQ ID NO: 635002 - RNA, 19 nt, Artificial Sequence
  Description of Artificial Sequence: Synthetic oligonucleotide
  Sense strand starting at position 2877 of SEQ ID NO: 585376
gaaggugcucagcauacau

SEQ ID NO: 635003 - RNA, 19 nt, Artificial Sequence
  Description of Artificial Sequence: Synthetic oligonucleotide
  Antisense strand to SEQ ID NO: 635002
auguaugcugagcaccuuc

SEQ ID NO: 635004 - RNA, 19 nt, Artificial Sequence
  Description of Artificial Sequence: Synthetic oligonucleotide
  Sense strand starting at position 2944 of SEQ ID NO: 585376
gcuguuauugcugcgggaa

SEQ ID NO: 635005 - RNA, 19 nt, Artificial Sequence
  Description of Artificial Sequence: Synthetic oligonucleotide
  Antisense strand to SEQ ID NO: 635004
uucccgcagcaauaacagc

SEQ ID NO: 635006 - RNA, 19 nt, Artificial Sequence
  Description of Artificial Sequence: Synthetic oligonucleotide
  Sense strand starting at position 3077 of SEQ ID NO: 585376
ccauccuaagggugaguaa

SEQ ID NO: 635007 - RNA, 19 nt, Artificial Sequence
  Description of Artificial Sequence: Synthetic oligonucleotide
  Antisense strand to SEQ ID NO: 635006
uuacucacccuuaggaugg

SEQ ID NO: 635008 - RNA, 19 nt, Artificial Sequence
  Description of Artificial Sequence: Synthetic oligonucleotide
  Sense strand starting at position 3147 of SEQ ID NO: 585376
caccgugaagaaugucuaa

SEQ ID NO: 635009 - RNA, 19 nt, Artificial Sequence
  Description of Artificial Sequence: Synthetic oligonucleotide
  Antisense strand to SEQ ID NO: 635008
uuagacauucuucacggug

SEQ ID NO: 635010 - RNA, 19 nt, Artificial Sequence
  Description of Artificial Sequence: Synthetic oligonucleotide
  Sense strand starting at position 3150 of SEQ ID NO: 585376
cgugaagaaugucuaaaug

SEQ ID NO: 635011 - RNA, 19 nt, Artificial Sequence
  Description of Artificial Sequence: Synthetic oligonucleotide
  Antisense strand to SEQ ID NO: 635010
cauuuagacauucuucacg

SEQ ID NO: 635012 - RNA, 19 nt, Artificial Sequence
  Description of Artificial Sequence: Synthetic oligonucleotide
  Sense strand starting at position 3286 of SEQ ID NO: 585376
gugugagacgcagaaagau

SEQ ID NO: 635013 - RNA, 19 nt, Artificial Sequence
  Description of Artificial Sequence: Synthetic oligonucleotide
  Antisense strand to SEQ ID NO: 635012
aucuuucugcgucucacac

SEQ ID NO: 635014 - RNA, 19 nt, Artificial Sequence
  Description of Artificial Sequence: Synthetic oligonucleotide
  Sense strand starting at position 3295 of SEQ ID NO: 585376
gcagaaagaugaucccuga

SEQ ID NO: 635015 - RNA, 19 nt, Artificial Sequence
  Description of Artificial Sequence: Synthetic oligonucleotide
  Antisense strand to SEQ ID NO: 635014
ucagggaucaucuuucugc

SEQ ID NO: 635016 - RNA, 19 nt, Artificial Sequence
  Description of Artificial Sequence: Synthetic oligonucleotide
  Sense strand starting at position 3306 of SEQ ID NO: 585376
aucccugaugcaugagaga

SEQ ID NO: 635017 - RNA, 19 nt, Artificial Sequence
  Description of Artificial Sequence: Synthetic oligonucleotide
  Antisense strand to SEQ ID NO: 635016
ucucucaugcaucagggau

SEQ ID NO: 635018 - RNA, 19 nt, Artificial Sequence
  Description of Artificial Sequence: Synthetic oligonucleotide
  Sense strand starting at position 3572 of SEQ ID NO: 585376
gcagccuuccaccaacaga

SEQ ID NO: 635019 - RNA, 19 nt, Artificial Sequence
  Description of Artificial Sequence: Synthetic oligonucleotide
  Antisense strand to SEQ ID NO: 635018
ucuguugguggaaggcugc

SEQ ID NO: 635020 - RNA, 19 nt, Artificial Sequence
  Description of Artificial Sequence: Synthetic oligonucleotide
  Sense strand starting at position 3971 of SEQ ID NO: 585376
cguuguguacggucuugaa

SEQ ID NO: 635021 - RNA, 19 nt, Artificial Sequence
  Description of Artificial Sequence: Synthetic oligonucleotide
  Antisense strand to SEQ ID NO: 635020
uucaagaccguacacaacg

SEQ ID NO: 635022 - RNA, 19 nt, Artificial Sequence
  Description of Artificial Sequence: Synthetic oligonucleotide
  Sense strand starting at position 108 of SEQ ID NO: 585377
uggugcuaugguuacgaaa

SEQ ID NO: 635023 - RNA, 19 nt, Artificial Sequence
  Description of Artificial Sequence: Synthetic oligonucleotide
  Antisense strand to SEQ ID NO: 635022
uuucguaaccauagcacca

SEQ ID NO: 635024 - RNA, 19 nt, Artificial Sequence
  Description of Artificial Sequence: Synthetic oligonucleotide
  Sense strand starting at position 224 of SEQ ID NO: 585377
gacaaacugugaucagcaa

SEQ ID NO: 635025 - RNA, 19 nt, Artificial Sequence
  Description of Artificial Sequence: Synthetic oligonucleotide
  Antisense strand to SEQ ID NO: 635024
uugcugaucacaguuuguc

SEQ ID NO: 635026 - RNA, 19 nt, Artificial Sequence
  Description of Artificial Sequence: Synthetic oligonucleotide
  Sense strand starting at position 317 of SEQ ID NO: 585377
ccuuacaacucuuuaggga

SEQ ID NO: 635027 - RNA, 19 nt, Artificial Sequence
  Description of Artificial Sequence: Synthetic oligonucleotide
  Antisense strand to SEQ ID NO: 635026
ucccuaaagaguuguaagg

SEQ ID NO: 635028 - RNA, 19 nt, Artificial Sequence
  Description of Artificial Sequence: Synthetic oligonucleotide
  Sense strand starting at position 332 of SEQ ID NO: 585377
gggacucugcucuagcaga

SEQ ID NO: 635029 - RNA, 19 nt, Artificial Sequence
  Description of Artificial Sequence: Synthetic oligonucleotide
  Antisense strand to SEQ ID NO: 635028
ucugcuagagcagaguccc

SEQ ID NO: 635030 - RNA, 19 nt, Artificial Sequence
  Description of Artificial Sequence: Synthetic oligonucleotide
  Sense strand starting at position 346 of SEQ ID NO: 585377
gcagauucccucugccuga

SEQ ID NO: 635031 - RNA, 19 nt, Artificial Sequence
  Description of Artificial Sequence: Synthetic oligonucleotide
  Antisense strand to SEQ ID NO: 635030
ucaggcagagggaaucugc

SEQ ID NO: 635032 - RNA, 19 nt, Artificial Sequence
  Description of Artificial Sequence: Synthetic oligonucleotide
  Sense strand starting at position 755 of SEQ ID NO: 585377
ucugguugucacgagagaa

SEQ ID NO: 635033 - RNA, 19 nt, Artificial Sequence
  Description of Artificial Sequence: Synthetic oligonucleotide
  Antisense strand to SEQ ID NO: 635032
uucucucgugacaaccaga

SEQ ID NO: 635034 - RNA, 19 nt, Artificial Sequence
  Description of Artificial Sequence: Synthetic oligonucleotide
  Sense strand starting at position 819 of SEQ ID NO: 585377
gugaaauacuaguaaacaa

SEQ ID NO: 635035 - RNA, 19 nt, Artificial Sequence
  Description of Artificial Sequence: Synthetic oligonucleotide
  Antisense strand to SEQ ID NO: 635034
uuguuuacuaguauuucac

SEQ ID NO: 635036 - RNA, 19 nt, Artificial Sequence
  Description of Artificial Sequence: Synthetic oligonucleotide
  Sense strand starting at position 850 of SEQ ID NO: 585377
gaccuuuccuggcaccaga

SEQ ID NO: 635037 - RNA, 19 nt, Artificial Sequence
  Description of Artificial Sequence: Synthetic oligonucleotide
  Antisense strand to SEQ ID NO: 635036
ucuggugccaggaaagguc

SEQ ID NO: 635038 - RNA, 19 nt, Artificial Sequence
  Description of Artificial Sequence: Synthetic oligonucleotide
  Sense strand starting at position 983 of SEQ ID NO: 585377
aguuucauugggcaggaau

SEQ ID NO: 635039 - RNA, 19 nt, Artificial Sequence
  Description of Artificial Sequence: Synthetic oligonucleotide
  Antisense strand to SEQ ID NO: 635038
auuccugcccaaugaaacu

SEQ ID NO: 635040 - RNA, 19 nt, Artificial Sequence
  Description of Artificial Sequence: Synthetic oligonucleotide
  Sense strand starting at position 1003 of SEQ ID NO: 585377
ugcacaauuugggaaagga

SEQ ID NO: 635041 - RNA, 19 nt, Artificial Sequence
  Description of Artificial Sequence: Synthetic oligonucleotide
  Antisense strand to SEQ ID NO: 635040
uccuuucccaaauugugca

SEQ ID NO: 635042 - RNA, 19 nt, Artificial Sequence
  Description of Artificial Sequence: Synthetic oligonucleotide
  Sense strand starting at position 1211 of SEQ ID NO: 585377
cacccugaguaggaauaaa

SEQ ID NO: 635043 - RNA, 19 nt, Artificial Sequence
  Description of Artificial Sequence: Synthetic oligonucleotide
  Antisense strand to SEQ ID NO: 635042
uuuauuccuacucagggug

SEQ ID NO: 635044 - RNA, 19 nt, Artificial Sequence
  Description of Artificial Sequence: Synthetic oligonucleotide
  Sense strand starting at position 1243 of SEQ ID NO: 585377
gucagacgagccugagaau

SEQ ID NO: 635045 - RNA, 19 nt, Artificial Sequence
  Description of Artificial Sequence: Synthetic oligonucleotide
  Antisense strand to SEQ ID NO: 635044
auucucaggcucgucugac

SEQ ID NO: 635046 - RNA, 19 nt, Artificial Sequence
  Description of Artificial Sequence: Synthetic oligonucleotide
  Sense strand starting at position 1244 of SEQ ID NO: 585377
ucagacgagccugagaauu

SEQ ID NO: 635047 - RNA, 19 nt, Artificial Sequence
  Description of Artificial Sequence: Synthetic oligonucleotide
  Antisense strand to SEQ ID NO: 635046
aauucucaggcucgucuga

SEQ ID NO: 635048 - RNA, 19 nt, Artificial Sequence
  Description of Artificial Sequence: Synthetic oligonucleotide
  Sense strand starting at position 1252 of SEQ ID NO: 585377
gccugagaauucgaaauga

SEQ ID NO: 635049 - RNA, 19 nt, Artificial Sequence
  Description of Artificial Sequence: Synthetic oligonucleotide
  Antisense strand to SEQ ID NO: 635048
ucauuucgaauucucaggc

SEQ ID NO: 635050 - RNA, 19 nt, Artificial Sequence
  Description of Artificial Sequence: Synthetic oligonucleotide
  Sense strand starting at position 1268 of SEQ ID NO: 585377
ugagaaaucucggagacau

SEQ ID NO: 635051 - RNA, 19 nt, Artificial Sequence
  Description of Artificial Sequence: Synthetic oligonucleotide
  Antisense strand to SEQ ID NO: 635050
augucuccgagauuucuca

SEQ ID NO: 635052 - RNA, 19 nt, Artificial Sequence
  Description of Artificial Sequence: Synthetic oligonucleotide
  Sense strand starting at position 1424 of SEQ ID NO: 585377
ucgcucucccgguagacau

SEQ ID NO: 635053 - RNA, 19 nt, Artificial Sequence
  Description of Artificial Sequence: Synthetic oligonucleotide
  Antisense strand to SEQ ID NO: 635052
augucuaccgggagagcga

SEQ ID NO: 635054 - RNA, 19 nt, Artificial Sequence
  Description of Artificial Sequence: Synthetic oligonucleotide
  Sense strand starting at position 2068 of SEQ ID NO: 585377
agaaaugacgcgugcgcaa

SEQ ID NO: 635055 - RNA, 19 nt, Artificial Sequence
  Description of Artificial Sequence: Synthetic oligonucleotide
  Antisense strand to SEQ ID NO: 635054
uugcgcacgcgucauuucu

SEQ ID NO: 635056 - RNA, 19 nt, Artificial Sequence
  Description of Artificial Sequence: Synthetic oligonucleotide
  Sense strand starting at position 2272 of SEQ ID NO: 585377
ugguaauguugccauuucu

SEQ ID NO: 635057 - RNA, 19 nt, Artificial Sequence
  Description of Artificial Sequence: Synthetic oligonucleotide
  Antisense strand to SEQ ID NO: 635056
agaaauggcaacauuacca

SEQ ID NO: 635058 - RNA, 19 nt, Artificial Sequence
  Description of Artificial Sequence: Synthetic oligonucleotide
  Sense strand starting at position 2315 of SEQ ID NO: 585377
uccauugaagccugacagu

SEQ ID NO: 635059 - RNA, 19 nt, Artificial Sequence
  Description of Artificial Sequence: Synthetic oligonucleotide
  Antisense strand to SEQ ID NO: 635058
acugucaggcuucaaugga

SEQ ID NO: 635060 - RNA, 19 nt, Artificial Sequence
  Description of Artificial Sequence: Synthetic oligonucleotide
  Sense strand starting at position 2461 of SEQ ID NO: 585377
ugcuuccauuuauggagua

SEQ ID NO: 635061 - RNA, 19 nt, Artificial Sequence
  Description of Artificial Sequence: Synthetic oligonucleotide
  Antisense strand to SEQ ID NO: 635060
uacuccauaaauggaagca

SEQ ID NO: 635062 - RNA, 19 nt, Artificial Sequence
  Description of Artificial Sequence: Synthetic oligonucleotide
  Sense strand starting at position 2462 of SEQ ID NO: 585377
gcuuccauuuauggaguau

SEQ ID NO: 635063 - RNA, 19 nt, Artificial Sequence
  Description of Artificial Sequence: Synthetic oligonucleotide
  Antisense strand to SEQ ID NO: 635062
auacuccauaaauggaagc

SEQ ID NO: 635064 - RNA, 19 nt, Artificial Sequence
  Description of Artificial Sequence: Synthetic oligonucleotide
  Sense strand starting at position 2555 of SEQ ID NO: 585377
gccacauucuuuguagaga

SEQ ID NO: 635065 - RNA, 19 nt, Artificial Sequence
  Description of Artificial Sequence: Synthetic oligonucleotide
  Antisense strand to SEQ ID NO: 635064
ucucuacaaagaauguggc

SEQ ID NO: 635066 - RNA, 19 nt, Artificial Sequence
  Description of Artificial Sequence: Synthetic oligonucleotide
  Sense strand starting at position 2563 of SEQ ID NO: 585377
cuuuguagagauggaugga

SEQ ID NO: 635067 - RNA, 19 nt, Artificial Sequence
  Description of Artificial Sequence: Synthetic oligonucleotide
  Antisense strand to SEQ ID NO: 635066
uccauccaucucuacaaag

SEQ ID NO: 635068 - RNA, 19 nt, Artificial Sequence
  Description of Artificial Sequence: Synthetic oligonucleotide
  Sense strand starting at position 2619 of SEQ ID NO: 585377
cugguuaggaauggaucua

SEQ ID NO: 635069 - RNA, 19 nt, Artificial Sequence
  Description of Artificial Sequence: Synthetic oligonucleotide
  Antisense strand to SEQ ID NO: 635068
uagauccauuccuaaccag

SEQ ID NO: 635070 - RNA, 19 nt, Artificial Sequence
  Description of Artificial Sequence: Synthetic oligonucleotide
  Sense strand starting at position 2677 of SEQ ID NO: 585377
ucacguugccucuaacagu

SEQ ID NO: 635071 - RNA, 19 nt, Artificial Sequence
  Description of Artificial Sequence: Synthetic oligonucleotide
  Antisense strand to SEQ ID NO: 635070
acuguuagaggcaacguga

SEQ ID NO: 635072 - RNA, 19 nt, Artificial Sequence
  Description of Artificial Sequence: Synthetic oligonucleotide
  Sense strand starting at position 2688 of SEQ ID NO: 585377
cuaacagucucggugacaa

SEQ ID NO: 635073 - RNA, 19 nt, Artificial Sequence
  Description of Artificial Sequence: Synthetic oligonucleotide
  Antisense strand to SEQ ID NO: 635072
uugucaccgagacuguuag

SEQ ID NO: 635074 - RNA, 19 nt, Artificial Sequence
  Description of Artificial Sequence: Synthetic oligonucleotide
  Sense strand starting at position 2690 of SEQ ID NO: 585377
aacagucucggugacaaga

SEQ ID NO: 635075 - RNA, 19 nt, Artificial Sequence
  Description of Artificial Sequence: Synthetic oligonucleotide
  Antisense strand to SEQ ID NO: 635074
ucuugucaccgagacuguu

SEQ ID NO: 635076 - RNA, 19 nt, Artificial Sequence
  Description of Artificial Sequence: Synthetic oligonucleotide
  Sense strand starting at position 2721 of SEQ ID NO: 585377
gugugaauagggugcuagu

SEQ ID NO: 635077 - RNA, 19 nt, Artificial Sequence
  Description of Artificial Sequence: Synthetic oligonucleotide
  Antisense strand to SEQ ID NO: 635076
acuagcacccuauucacac

SEQ ID NO: 635078 - RNA, 19 nt, Artificial Sequence
  Description of Artificial Sequence: Synthetic oligonucleotide
  Sense strand starting at position 2730 of SEQ ID NO: 585377
gggugcuaguuugcaaagu

SEQ ID NO: 635079 - RNA, 19 nt, Artificial Sequence
  Description of Artificial Sequence: Synthetic oligonucleotide
  Antisense strand to SEQ ID NO: 635078
acuuugcaaacuagcaccc

SEQ ID NO: 635080 - RNA, 19 nt, Artificial Sequence
  Description of Artificial Sequence: Synthetic oligonucleotide
  Sense strand starting at position 2778 of SEQ ID NO: 585377
ccauccaauccuggaggua

SEQ ID NO: 635081 - RNA, 19 nt, Artificial Sequence
  Description of Artificial Sequence: Synthetic oligonucleotide
  Antisense strand to SEQ ID NO: 635080
uaccuccaggauuggaugg

SEQ ID NO: 635082 - RNA, 19 nt, Artificial Sequence
  Description of Artificial Sequence: Synthetic oligonucleotide
  Sense strand starting at position 2860 of SEQ ID NO: 585377
uggugugcaguuggaaauu

SEQ ID NO: 635083 - RNA, 19 nt, Artificial Sequence
  Description of Artificial Sequence: Synthetic oligonucleotide
  Antisense strand to SEQ ID NO: 635082
aauuuccaacugcacacca

SEQ ID NO: 635084 - RNA, 19 nt, Artificial Sequence
  Description of Artificial Sequence: Synthetic oligonucleotide
  Sense strand starting at position 2871 of SEQ ID NO: 585377
uggaaauuggcaggucuga

SEQ ID NO: 635085 - RNA, 19 nt, Artificial Sequence
  Description of Artificial Sequence: Synthetic oligonucleotide
  Antisense strand to SEQ ID NO: 635084
ucagaccugccaauuucca

SEQ ID NO: 635086 - RNA, 19 nt, Artificial Sequence
  Description of Artificial Sequence: Synthetic oligonucleotide
  Sense strand starting at position 3432 of SEQ ID NO: 585377
ggaaguuguagccagucca

SEQ ID NO: 635087 - RNA, 19 nt, Artificial Sequence
  Description of Artificial Sequence: Synthetic oligonucleotide
  Antisense strand to SEQ ID NO: 635086
uggacuggcuacaacuucc

SEQ ID NO: 635088 - RNA, 19 nt, Artificial Sequence
  Description of Artificial Sequence: Synthetic oligonucleotide
  Sense strand starting at position 3486 of SEQ ID NO: 585377
uaauguuaauauucgcaga

SEQ ID NO: 635089 - RNA, 19 nt, Artificial Sequence
  Description of Artificial Sequence: Synthetic oligonucleotide
  Antisense strand to SEQ ID NO: 635088
ucugcgaauauuaacauua

SEQ ID NO: 635090 - RNA, 19 nt, Artificial Sequence
  Description of Artificial Sequence: Synthetic oligonucleotide
  Sense strand starting at position 3488 of SEQ ID NO: 585377
auguuaauauucgcagaug

SEQ ID NO: 635091 - RNA, 19 nt, Artificial Sequence
  Description of Artificial Sequence: Synthetic oligonucleotide
  Antisense strand to SEQ ID NO: 635090
caucugcgaauauuaacau

SEQ ID NO: 635092 - RNA, 19 nt, Artificial Sequence
  Description of Artificial Sequence: Synthetic oligonucleotide
  Sense strand starting at position 3491 of SEQ ID NO: 585377
uuaauauucgcagaugaaa

SEQ ID NO: 635093 - RNA, 19 nt, Artificial Sequence
  Description of Artificial Sequence: Synthetic oligonucleotide
  Antisense strand to SEQ ID NO: 635092
uuucaucugcgaauauuaa

SEQ ID NO: 635094 - RNA, 19 nt, Artificial Sequence
  Description of Artificial Sequence: Synthetic oligonucleotide
  Sense strand starting at position 3494 of SEQ ID NO: 585377
auauucgcagaugaaauua

SEQ ID NO: 635095 - RNA, 19 nt, Artificial Sequence
  Description of Artificial Sequence: Synthetic oligonucleotide
  Antisense strand to SEQ ID NO: 635094
uaauuucaucugcgaauau

SEQ ID NO: 635096 - RNA, 19 nt, Artificial Sequence
  Description of Artificial Sequence: Synthetic oligonucleotide
  Sense strand starting at position 3506 of SEQ ID NO: 585377
gaaauuauugcaugugcag

SEQ ID NO: 635097 - RNA, 19 nt, Artificial Sequence
  Description of Artificial Sequence: Synthetic oligonucleotide
  Antisense strand to SEQ ID NO: 635096
cugcacaugcaauaauuuc

SEQ ID NO: 635098 - RNA, 19 nt, Artificial Sequence
  Description of Artificial Sequence: Synthetic oligonucleotide
  Sense strand starting at position 3560 of SEQ ID NO: 585377
uaaguuuagcaagguugau

SEQ ID NO: 635099 - RNA, 19 nt, Artificial Sequence
  Description of Artificial Sequence: Synthetic oligonucleotide
  Antisense strand to SEQ ID NO: 635098
aucaaccuugcuaaacuua

SEQ ID NO: 635100 - RNA, 19 nt, Artificial Sequence
  Description of Artificial Sequence: Synthetic oligonucleotide
  Sense strand starting at position 3566 of SEQ ID NO: 585377
uagcaagguugauggauaa

SEQ ID NO: 635101 - RNA, 19 nt, Artificial Sequence
  Description of Artificial Sequence: Synthetic oligonucleotide
  Antisense strand to SEQ ID NO: 635100
uuauccaucaaccuugcua

SEQ ID NO: 635102 - RNA, 19 nt, Artificial Sequence
  Description of Artificial Sequence: Synthetic oligonucleotide
  Sense strand starting at position 113 of SEQ ID NO: 585378
agcauucuggcacacagua

SEQ ID NO: 635103 - RNA, 19 nt, Artificial Sequence
  Description of Artificial Sequence: Synthetic oligonucleotide
  Antisense strand to SEQ ID NO: 635102
uacugugugccagaaugcu

SEQ ID NO: 635104 - RNA, 19 nt, Artificial Sequence
  Description of Artificial Sequence: Synthetic oligonucleotide
  Sense strand starting at position 598 of SEQ ID NO: 585378
ugagcaacuuucucagaga

SEQ ID NO: 635105 - RNA, 19 nt, Artificial Sequence
  Description of Artificial Sequence: Synthetic oligonucleotide
  Antisense strand to SEQ ID NO: 635104
ucucugagaaaguugcuca

SEQ ID NO: 635106 - RNA, 19 nt, Artificial Sequence
  Description of Artificial Sequence: Synthetic oligonucleotide
  Sense strand starting at position 784 of SEQ ID NO: 585378
gaacaaaggugcuuagaac

SEQ ID NO: 635107 - RNA, 19 nt, Artificial Sequence
  Description of Artificial Sequence: Synthetic oligonucleotide
  Antisense strand to SEQ ID NO: 635106
guucuaagcaccuuuguuc

SEQ ID NO: 635108 - RNA, 19 nt, Artificial Sequence
  Description of Artificial Sequence: Synthetic oligonucleotide
  Sense strand starting at position 791 of SEQ ID NO: 585378
ggugcuuagaacuagcaga

SEQ ID NO: 635109 - RNA, 19 nt, Artificial Sequence
  Description of Artificial Sequence: Synthetic oligonucleotide
  Antisense strand to SEQ ID NO: 635108
ucugcuaguucuaagcacc

SEQ ID NO: 635110 - RNA, 19 nt, Artificial Sequence
  Description of Artificial Sequence: Synthetic oligonucleotide
  Sense strand starting at position 901 of SEQ ID NO: 585378
acagaaggucugugggaga

SEQ ID NO: 635111 - RNA, 19 nt, Artificial Sequence
  Description of Artificial Sequence: Synthetic oligonucleotide
  Antisense strand to SEQ ID NO: 635110
ucucccacagaccuucugu

SEQ ID NO: 635112 - RNA, 19 nt, Artificial Sequence
  Description of Artificial Sequence: Synthetic oligonucleotide
  Sense strand starting at position 986 of SEQ ID NO: 585378
gaaggaaucucugcaaagu

SEQ ID NO: 635113 - RNA, 19 nt, Artificial Sequence
  Description of Artificial Sequence: Synthetic oligonucleotide
  Antisense strand to SEQ ID NO: 635112
acuuugcagagauuccuuc

SEQ ID NO: 635114 - RNA, 19 nt, Artificial Sequence
  Description of Artificial Sequence: Synthetic oligonucleotide
  Sense strand starting at position 1134 of SEQ ID NO: 585378
uggucagcccugcauauuu

SEQ ID NO: 635115 - RNA, 19 nt, Artificial Sequence
  Description of Artificial Sequence: Synthetic oligonucleotide
  Antisense strand to SEQ ID NO: 635114
aaauaugcagggcugacca

SEQ ID NO: 635116 - RNA, 19 nt, Artificial Sequence
  Description of Artificial Sequence: Synthetic oligonucleotide
  Sense strand starting at position 1245 of SEQ ID NO: 585378
cuucuuaccuguguacaga

SEQ ID NO: 635117 - RNA, 19 nt, Artificial Sequence
  Description of Artificial Sequence: Synthetic oligonucleotide
  Antisense strand to SEQ ID NO: 635116
ucuguacacagguaagaag

SEQ ID NO: 635118 - RNA, 19 nt, Artificial Sequence
  Description of Artificial Sequence: Synthetic oligonucleotide
  Sense strand starting at position 2104 of SEQ ID NO: 585378
cugguagugcgagaauaag

SEQ ID NO: 635119 - RNA, 19 nt, Artificial Sequence
  Description of Artificial Sequence: Synthetic oligonucleotide
  Antisense strand to SEQ ID NO: 635118
cuuauucucgcacuaccag

SEQ ID NO: 635120 - RNA, 19 nt, Artificial Sequence
  Description of Artificial Sequence: Synthetic oligonucleotide
  Sense strand starting at position 2285 of SEQ ID NO: 585378
cuagucacgcgacauuaga

SEQ ID NO: 635121 - RNA, 19 nt, Artificial Sequence
  Description of Artificial Sequence: Synthetic oligonucleotide
  Antisense strand to SEQ ID NO: 635120
ucuaaugucgcgugacuag

SEQ ID NO: 635122 - RNA, 19 nt, Artificial Sequence
  Description of Artificial Sequence: Synthetic oligonucleotide
  Sense strand starting at position 2337 of SEQ ID NO: 585378
uaggaaaggagguguguau

SEQ ID NO: 635123 - RNA, 19 nt, Artificial Sequence
  Description of Artificial Sequence: Synthetic oligonucleotide
  Antisense strand to SEQ ID NO: 635122
auacacaccuccuuuccua

SEQ ID NO: 635124 - RNA, 19 nt, Artificial Sequence
  Description of Artificial Sequence: Synthetic oligonucleotide
  Sense strand starting at position 2419 of SEQ ID NO: 585378
cagucaacgucaucuagga

SEQ ID NO: 635125 - RNA, 19 nt, Artificial Sequence
  Description of Artificial Sequence: Synthetic oligonucleotide
  Antisense strand to SEQ ID NO: 635124
uccuagaugacguugacug

SEQ ID NO: 635126 - RNA, 19 nt, Artificial Sequence
  Description of Artificial Sequence: Synthetic oligonucleotide
  Sense strand starting at position 2577 of SEQ ID NO: 585378
uccaucuuacccgggaaga

SEQ ID NO: 635127 - RNA, 19 nt, Artificial Sequence
  Description of Artificial Sequence: Synthetic oligonucleotide
  Antisense strand to SEQ ID NO: 635126
ucuucccggguaagaugga

SEQ ID NO: 635128 - RNA, 19 nt, Artificial Sequence
  Description of Artificial Sequence: Synthetic oligonucleotide
  Sense strand starting at position 2578 of SEQ ID NO: 585378
ccaucuuacccgggaagaa

SEQ ID NO: 635129 - RNA, 19 nt, Artificial Sequence
  Description of Artificial Sequence: Synthetic oligonucleotide
  Antisense strand to SEQ ID NO: 635128
uucuucccggguaagaugg

SEQ ID NO: 635130 - RNA, 19 nt, Artificial Sequence
  Description of Artificial Sequence: Synthetic oligonucleotide
  Sense strand starting at position 2591 of SEQ ID NO: 585378
gaagaaggcugcuuccauu

SEQ ID NO: 635131 - RNA, 19 nt, Artificial Sequence
  Description of Artificial Sequence: Synthetic oligonucleotide
  Antisense strand to SEQ ID NO: 635130
aauggaagcagccuucuuc

SEQ ID NO: 635132 - RNA, 19 nt, Artificial Sequence
  Description of Artificial Sequence: Synthetic oligonucleotide
  Sense strand starting at position 2656 of SEQ ID NO: 585378
gagucuggucaggagucau

SEQ ID NO: 635133 - RNA, 19 nt, Artificial Sequence
  Description of Artificial Sequence: Synthetic oligonucleotide
  Antisense strand to SEQ ID NO: 635132
augacuccugaccagacuc

SEQ ID NO: 635134 - RNA, 19 nt, Artificial Sequence
  Description of Artificial Sequence: Synthetic oligonucleotide
  Sense strand starting at position 2679 of SEQ ID NO: 585378
guccgugaccuuggauaag

SEQ ID NO: 635135 - RNA, 19 nt, Artificial Sequence
  Description of Artificial Sequence: Synthetic oligonucleotide
  Antisense strand to SEQ ID NO: 635134
cuuauccaaggucacggac

SEQ ID NO: 635136 - RNA, 19 nt, Artificial Sequence
  Description of Artificial Sequence: Synthetic oligonucleotide
  Sense strand starting at position 2736 of SEQ ID NO: 585378
uuucucauagggcgaaauu

SEQ ID NO: 635137 - RNA, 19 nt, Artificial Sequence
  Description of Artificial Sequence: Synthetic oligonucleotide
  Antisense strand to SEQ ID NO: 635136
aauuucgcccuaugagaaa

SEQ ID NO: 635138 - RNA, 19 nt, Artificial Sequence
  Description of Artificial Sequence: Synthetic oligonucleotide
  Sense strand starting at position 2745 of SEQ ID NO: 585378
gggcgaaauucuucagacg

SEQ ID NO: 635139 - RNA, 19 nt, Artificial Sequence
  Description of Artificial Sequence: Synthetic oligonucleotide
  Antisense strand to SEQ ID NO: 635138
cgucugaagaauuucgccc

SEQ ID NO: 635140 - RNA, 19 nt, Artificial Sequence
  Description of Artificial Sequence: Synthetic oligonucleotide
  Sense strand starting at position 2746 of SEQ ID NO: 585378
ggcgaaauucuucagacga

SEQ ID NO: 635141 - RNA, 19 nt, Artificial Sequence
  Description of Artificial Sequence: Synthetic oligonucleotide
  Antisense strand to SEQ ID NO: 635140
ucgucugaagaauuucgcc

SEQ ID NO: 635142 - RNA, 19 nt, Artificial Sequence
  Description of Artificial Sequence: Synthetic oligonucleotide
  Sense strand starting at position 2764 of SEQ ID NO: 585378
agauacuuaaggugaaagu

SEQ ID NO: 635143 - RNA, 19 nt, Artificial Sequence
  Description of Artificial Sequence: Synthetic oligonucleotide
  Antisense strand to SEQ ID NO: 635142
acuuucaccuuaaguaucu

SEQ ID NO: 635144 - RNA, 19 nt, Artificial Sequence
  Description of Artificial Sequence: Synthetic oligonucleotide
  Sense strand starting at position 2834 of SEQ ID NO: 585378
uaugauaagccagguauag

SEQ ID NO: 635145 - RNA, 19 nt, Artificial Sequence
  Description of Artificial Sequence: Synthetic oligonucleotide
  Antisense strand to SEQ ID NO: 635144
cuauaccuggcuuaucaua

SEQ ID NO: 635146 - RNA, 19 nt, Artificial Sequence
  Description of Artificial Sequence: Synthetic oligonucleotide
  Sense strand starting at position 2836 of SEQ ID NO: 585378
ugauaagccagguauaggu

SEQ ID NO: 635147 - RNA, 19 nt, Artificial Sequence
  Description of Artificial Sequence: Synthetic oligonucleotide
  Antisense strand to SEQ ID NO: 635146
accuauaccuggcuuauca

SEQ ID NO: 635148 - RNA, 19 nt, Artificial Sequence
  Description of Artificial Sequence: Synthetic oligonucleotide
  Sense strand starting at position 3011 of SEQ ID NO: 585378
auaugaugccugcaaggau

SEQ ID NO: 635149 - RNA, 19 nt, Artificial Sequence
  Description of Artificial Sequence: Synthetic oligonucleotide
  Antisense strand to SEQ ID NO: 635148
auccuugcaggcaucauau

SEQ ID NO: 635150 - RNA, 19 nt, Artificial Sequence
  Description of Artificial Sequence: Synthetic oligonucleotide
  Sense strand starting at position 3029 of SEQ ID NO: 585378
ugaguuacugcugauauua

SEQ ID NO: 635151 - RNA, 19 nt, Artificial Sequence
  Description of Artificial Sequence: Synthetic oligonucleotide
  Antisense strand to SEQ ID NO: 635150
uaauaucagcaguaacuca

SEQ ID NO: 635152 - RNA, 19 nt, Artificial Sequence
  Description of Artificial Sequence: Synthetic oligonucleotide
  Sense strand starting at position 3038 of SEQ ID NO: 585378
gcugauauuagagaaugca

SEQ ID NO: 635153 - RNA, 19 nt, Artificial Sequence
  Description of Artificial Sequence: Synthetic oligonucleotide
  Antisense strand to SEQ ID NO: 635152
ugcauucucuaauaucagc

SEQ ID NO: 635154 - RNA, 19 nt, Artificial Sequence
  Description of Artificial Sequence: Synthetic oligonucleotide
  Sense strand starting at position 3178 of SEQ ID NO: 585378
uacaguuugggagaugcau

SEQ ID NO: 635155 - RNA, 19 nt, Artificial Sequence
  Description of Artificial Sequence: Synthetic oligonucleotide
  Antisense strand to SEQ ID NO: 635154
augcaucucccaaacugua

SEQ ID NO: 635156 - RNA, 19 nt, Artificial Sequence
  Description of Artificial Sequence: Synthetic oligonucleotide
  Sense strand starting at position 3184 of SEQ ID NO: 585378
uugggagaugcauguuuaa

SEQ ID NO: 635157 - RNA, 19 nt, Artificial Sequence
  Description of Artificial Sequence: Synthetic oligonucleotide
  Antisense strand to SEQ ID NO: 635156
uuaaacaugcaucucccaa

SEQ ID NO: 635158 - RNA, 19 nt, Artificial Sequence
  Description of Artificial Sequence: Synthetic oligonucleotide
  Sense strand starting at position 3341 of SEQ ID NO: 585378
gguacauggauguguggaa

SEQ ID NO: 635159 - RNA, 19 nt, Artificial Sequence
  Description of Artificial Sequence: Synthetic oligonucleotide
  Antisense strand to SEQ ID NO: 635158
uuccacacauccauguacc

SEQ ID NO: 635160 - RNA, 19 nt, Artificial Sequence
  Description of Artificial Sequence: Synthetic oligonucleotide
  Sense strand starting at position 3710 of SEQ ID NO: 585378
ccaacuuuguguccuggaa

SEQ ID NO: 635161 - RNA, 19 nt, Artificial Sequence
  Description of Artificial Sequence: Synthetic oligonucleotide
  Antisense strand to SEQ ID NO: 635160
uuccaggacacaaaguugg

SEQ ID NO: 635162 - RNA, 19 nt, Artificial Sequence
  Description of Artificial Sequence: Synthetic oligonucleotide
  Sense strand starting at position 3714 of SEQ ID NO: 585378
cuuuguguccuggaagagu

SEQ ID NO: 635163 - RNA, 19 nt, Artificial Sequence
  Description of Artificial Sequence: Synthetic oligonucleotide
  Antisense strand to SEQ ID NO: 635162
acucuuccaggacacaaag

SEQ ID NO: 635164 - RNA, 19 nt, Artificial Sequence
  Description of Artificial Sequence: Synthetic oligonucleotide
  Sense strand starting at position 3746 of SEQ ID NO: 585378
ccauuacaccagugaagau

SEQ ID NO: 635165 - RNA, 19 nt, Artificial Sequence
  Description of Artificial Sequence: Synthetic oligonucleotide
  Antisense strand to SEQ ID NO: 635164
aucuucacugguguaaugg

SEQ ID NO: 635166 - RNA, 19 nt, Artificial Sequence
  Description of Artificial Sequence: Synthetic oligonucleotide
  Sense strand starting at position 3848 of SEQ ID NO: 585378
ccuagacuuguauauugac

SEQ ID NO: 635167 - RNA, 19 nt, Artificial Sequence
  Description of Artificial Sequence: Synthetic oligonucleotide
  Antisense strand to SEQ ID NO: 635166
gucaauauacaagucuagg

SEQ ID NO: 635168 - RNA, 19 nt, Artificial Sequence
  Description of Artificial Sequence: Synthetic oligonucleotide
  Sense strand starting at position 3865 of SEQ ID NO: 585378
acacacuuguaccuuguaa

SEQ ID NO: 635169 - RNA, 19 nt, Artificial Sequence
  Description of Artificial Sequence: Synthetic oligonucleotide
  Antisense strand to SEQ ID NO: 635168
uuacaagguacaagugugu

SEQ ID NO: 635170 - RNA, 19 nt, Artificial Sequence
  Description of Artificial Sequence: Synthetic oligonucleotide
  Sense strand starting at position 3882 of SEQ ID NO: 585378
aaggcagaggaauguaauu

SEQ ID NO: 635171 - RNA, 19 nt, Artificial Sequence
  Description of Artificial Sequence: Synthetic oligonucleotide
  Antisense strand to SEQ ID NO: 635170
aauuacauuccucugccuu

SEQ ID NO: 635172 - RNA, 19 nt, Artificial Sequence
  Description of Artificial Sequence: Synthetic oligonucleotide
  Sense strand starting at position 3906 of SEQ ID NO: 585378
gcacuuauuuggcuccuuu

SEQ ID NO: 635173 - RNA, 19 nt, Artificial Sequence
  Description of Artificial Sequence: Synthetic oligonucleotide
  Antisense strand to SEQ ID NO: 635172
aaaggagccaaauaagugc

SEQ ID NO: 635174 - RNA, 19 nt, Artificial Sequence
  Description of Artificial Sequence: Synthetic oligonucleotide
  Sense strand starting at position 3930 of SEQ ID NO: 585378
guaguauguguacaggagu

SEQ ID NO: 635175 - RNA, 19 nt, Artificial Sequence
  Description of Artificial Sequence: Synthetic oligonucleotide
  Antisense strand to SEQ ID NO: 635174
acuccuguacacauacuac

SEQ ID NO: 635176 - RNA, 19 nt, Artificial Sequence
  Description of Artificial Sequence: Synthetic oligonucleotide
  Sense strand starting at position 3967 of SEQ ID NO: 585378
gcaauagguaauuggucua

SEQ ID NO: 635177 - RNA, 19 nt, Artificial Sequence
  Description of Artificial Sequence: Synthetic oligonucleotide
  Antisense strand to SEQ ID NO: 635176
uagaccaauuaccuauugc

SEQ ID NO: 635178 - RNA, 19 nt, Artificial Sequence
  Description of Artificial Sequence: Synthetic oligonucleotide
  Sense strand starting at position 3972 of SEQ ID NO: 585378
agguaauuggucuaugcuu

SEQ ID NO: 635179 - RNA, 19 nt, Artificial Sequence
  Description of Artificial Sequence: Synthetic oligonucleotide
  Antisense strand to SEQ ID NO: 635178
aagcauagaccaauuaccu

SEQ ID NO: 635180 - RNA, 19 nt, Artificial Sequence
  Description of Artificial Sequence: Synthetic oligonucleotide
  Sense strand starting at position 3977 of SEQ ID NO: 585378
auuggucuaugcuucuaaa

SEQ ID NO: 635181 - RNA, 19 nt, Artificial Sequence
  Description of Artificial Sequence: Synthetic oligonucleotide
  Antisense strand to SEQ ID NO: 635180
uuuagaagcauagaccaau

SEQ ID NO: 635182 - RNA, 19 nt, Artificial Sequence
  Description of Artificial Sequence: Synthetic oligonucleotide
  Sense strand starting at position 335 of SEQ ID NO: 585379
ugagcaacuuucucagaga

SEQ ID NO: 635183 - RNA, 19 nt, Artificial Sequence
  Description of Artificial Sequence: Synthetic oligonucleotide
  Antisense strand to SEQ ID NO: 635182
ucucugagaaaguugcuca

SEQ ID NO: 635184 - RNA, 19 nt, Artificial Sequence
  Description of Artificial Sequence: Synthetic oligonucleotide
  Sense strand starting at position 521 of SEQ ID NO: 585379
gaacaaaggugcuuagaac

SEQ ID NO: 635185 - RNA, 19 nt, Artificial Sequence
  Description of Artificial Sequence: Synthetic oligonucleotide
  Antisense strand to SEQ ID NO: 635184
guucuaagcaccuuuguuc

SEQ ID NO: 635186 - RNA, 19 nt, Artificial Sequence
  Description of Artificial Sequence: Synthetic oligonucleotide
  Sense strand starting at position 528 of SEQ ID NO: 585379
ggugcuuagaacuagcaga

SEQ ID NO: 635187 - RNA, 19 nt, Artificial Sequence
  Description of Artificial Sequence: Synthetic oligonucleotide
  Antisense strand to SEQ ID NO: 635186
ucugcuaguucuaagcacc

SEQ ID NO: 635188 - RNA, 19 nt, Artificial Sequence
  Description of Artificial Sequence: Synthetic oligonucleotide
  Sense strand starting at position 638 of SEQ ID NO: 585379
acagaaggucugugggaga

SEQ ID NO: 635189 - RNA, 19 nt, Artificial Sequence
  Description of Artificial Sequence: Synthetic oligonucleotide
  Antisense strand to SEQ ID NO: 635188
ucucccacagaccuucugu

SEQ ID NO: 635190 - RNA, 19 nt, Artificial Sequence
  Description of Artificial Sequence: Synthetic oligonucleotide
  Sense strand starting at position 723 of SEQ ID NO: 585379
gaaggaaucucugcaaagu

SEQ ID NO: 635191 - RNA, 19 nt, Artificial Sequence
  Description of Artificial Sequence: Synthetic oligonucleotide
  Antisense strand to SEQ ID NO: 635190
acuuugcagagauuccuuc

SEQ ID NO: 635192 - RNA, 19 nt, Artificial Sequence
  Description of Artificial Sequence: Synthetic oligonucleotide
  Sense strand starting at position 871 of SEQ ID NO: 585379
uggucagcccugcauauuu

SEQ ID NO: 635193 - RNA, 19 nt, Artificial Sequence
  Description of Artificial Sequence: Synthetic oligonucleotide
  Antisense strand to SEQ ID NO: 635192
aaauaugcagggcugacca

SEQ ID NO: 635194 - RNA, 19 nt, Artificial Sequence
  Description of Artificial Sequence: Synthetic oligonucleotide
  Sense strand starting at position 982 of SEQ ID NO: 585379
cuucuuaccuguguacaga

SEQ ID NO: 635195 - RNA, 19 nt, Artificial Sequence
  Description of Artificial Sequence: Synthetic oligonucleotide
  Antisense strand to SEQ ID NO: 635194
ucuguacacagguaagaag

SEQ ID NO: 635196 - RNA, 19 nt, Artificial Sequence
  Description of Artificial Sequence: Synthetic oligonucleotide
  Sense strand starting at position 1841 of SEQ ID NO: 585379
cugguagugcgagaauaag

SEQ ID NO: 635197 - RNA, 19 nt, Artificial Sequence
  Description of Artificial Sequence: Synthetic oligonucleotide
  Antisense strand to SEQ ID NO: 635196
cuuauucucgcacuaccag

SEQ ID NO: 635198 - RNA, 19 nt, Artificial Sequence
  Description of Artificial Sequence: Synthetic oligonucleotide
  Sense strand starting at position 2022 of SEQ ID NO: 585379
cuagucacgcgacauuaga

SEQ ID NO: 635199 - RNA, 19 nt, Artificial Sequence
  Description of Artificial Sequence: Synthetic oligonucleotide
  Antisense strand to SEQ ID NO: 635198
ucuaaugucgcgugacuag

SEQ ID NO: 635200 - RNA, 19 nt, Artificial Sequence
  Description of Artificial Sequence: Synthetic oligonucleotide
  Sense strand starting at position 2074 of SEQ ID NO: 585379
uaggaaaggagguguguau

SEQ ID NO: 635201 - RNA, 19 nt, Artificial Sequence
  Description of Artificial Sequence: Synthetic oligonucleotide
  Antisense strand to SEQ ID NO: 635200
auacacaccuccuuuccua

SEQ ID NO: 635202 - RNA, 19 nt, Artificial Sequence
  Description of Artificial Sequence: Synthetic oligonucleotide
  Sense strand starting at position 2156 of SEQ ID NO: 585379
cagucaacgucaucuagga

SEQ ID NO: 635203 - RNA, 19 nt, Artificial Sequence
  Description of Artificial Sequence: Synthetic oligonucleotide
  Antisense strand to SEQ ID NO: 635202
uccuagaugacguugacug

SEQ ID NO: 635204 - RNA, 19 nt, Artificial Sequence
  Description of Artificial Sequence: Synthetic oligonucleotide
  Sense strand starting at position 2314 of SEQ ID NO: 585379
uccaucuuacccgggaaga

SEQ ID NO: 635205 - RNA, 19 nt, Artificial Sequence
  Description of Artificial Sequence: Synthetic oligonucleotide
  Antisense strand to SEQ ID NO: 635204
ucuucccggguaagaugga

SEQ ID NO: 635206 - RNA, 19 nt, Artificial Sequence
  Description of Artificial Sequence: Synthetic oligonucleotide
  Sense strand starting at position 2315 of SEQ ID NO: 585379
ccaucuuacccgggaagaa

SEQ ID NO: 635207 - RNA, 19 nt, Artificial Sequence
  Description of Artificial Sequence: Synthetic oligonucleotide
  Antisense strand to SEQ ID NO: 635206
uucuucccggguaagaugg

SEQ ID NO: 635208 - RNA, 19 nt, Artificial Sequence
  Description of Artificial Sequence: Synthetic oligonucleotide
  Sense strand starting at position 2328 of SEQ ID NO: 585379
gaagaaggcugcuuccauu

SEQ ID NO: 635209 - RNA, 19 nt, Artificial Sequence
  Description of Artificial Sequence: Synthetic oligonucleotide
  Antisense strand to SEQ ID NO: 635208
aauggaagcagccuucuuc

SEQ ID NO: 635210 - RNA, 19 nt, Artificial Sequence
  Description of Artificial Sequence: Synthetic oligonucleotide
  Sense strand starting at position 2393 of SEQ ID NO: 585379
gagucuggucaggagucau

SEQ ID NO: 635211 - RNA, 19 nt, Artificial Sequence
  Description of Artificial Sequence: Synthetic oligonucleotide
  Antisense strand to SEQ ID NO: 635210
augacuccugaccagacuc

SEQ ID NO: 635212 - RNA, 19 nt, Artificial Sequence
  Description of Artificial Sequence: Synthetic oligonucleotide
  Sense strand starting at position 2416 of SEQ ID NO: 585379
guccgugaccuuggauaag

SEQ ID NO: 635213 - RNA, 19 nt, Artificial Sequence
  Description of Artificial Sequence: Synthetic oligonucleotide
  Antisense strand to SEQ ID NO: 635212
cuuauccaaggucacggac

SEQ ID NO: 635214 - RNA, 19 nt, Artificial Sequence
  Description of Artificial Sequence: Synthetic oligonucleotide
  Sense strand starting at position 2473 of SEQ ID NO: 585379
uuucucauagggcgaaauu

SEQ ID NO: 635215 - RNA, 19 nt, Artificial Sequence
  Description of Artificial Sequence: Synthetic oligonucleotide
  Antisense strand to SEQ ID NO: 635214
aauuucgcccuaugagaaa

SEQ ID NO: 635216 - RNA, 19 nt, Artificial Sequence
  Description of Artificial Sequence: Synthetic oligonucleotide
  Sense strand starting at position 2482 of SEQ ID NO: 585379
gggcgaaauucuucagacg

SEQ ID NO: 635217 - RNA, 19 nt, Artificial Sequence
  Description of Artificial Sequence: Synthetic oligonucleotide
  Antisense strand to SEQ ID NO: 635216
cgucugaagaauuucgccc

SEQ ID NO: 635218 - RNA, 19 nt, Artificial Sequence
  Description of Artificial Sequence: Synthetic oligonucleotide
  Sense strand starting at position 2483 of SEQ ID NO: 585379
ggcgaaauucuucagacga

SEQ ID NO: 635219 - RNA, 19 nt, Artificial Sequence
  Description of Artificial Sequence: Synthetic oligonucleotide
  Antisense strand to SEQ ID NO: 635218
ucgucugaagaauuucgcc

SEQ ID NO: 635220 - RNA, 19 nt, Artificial Sequence
  Description of Artificial Sequence: Synthetic oligonucleotide
  Sense strand starting at position 2501 of SEQ ID NO: 585379
agauacuuaaggugaaagu

SEQ ID NO: 635221 - RNA, 19 nt, Artificial Sequence
  Description of Artificial Sequence: Synthetic oligonucleotide
  Antisense strand to SEQ ID NO: 635220
acuuucaccuuaaguaucu

SEQ ID NO: 635222 - RNA, 19 nt, Artificial Sequence
  Description of Artificial Sequence: Synthetic oligonucleotide
  Sense strand starting at position 2571 of SEQ ID NO: 585379
uaugauaagccagguauag

SEQ ID NO: 635223 - RNA, 19 nt, Artificial Sequence
  Description of Artificial Sequence: Synthetic oligonucleotide
  Antisense strand to SEQ ID NO: 635222
cuauaccuggcuuaucaua

SEQ ID NO: 635224 - RNA, 19 nt, Artificial Sequence
  Description of Artificial Sequence: Synthetic oligonucleotide
  Sense strand starting at position 2573 of SEQ ID NO: 585379
ugauaagccagguauaggu

SEQ ID NO: 635225 - RNA, 19 nt, Artificial Sequence
  Description of Artificial Sequence: Synthetic oligonucleotide
  Antisense strand to SEQ ID NO: 635224
accuauaccuggcuuauca

SEQ ID NO: 635226 - RNA, 19 nt, Artificial Sequence
  Description of Artificial Sequence: Synthetic oligonucleotide
  Sense strand starting at position 2748 of SEQ ID NO: 585379
auaugaugccugcaaggau

SEQ ID NO: 635227 - RNA, 19 nt, Artificial Sequence
  Description of Artificial Sequence: Synthetic oligonucleotide
  Antisense strand to SEQ ID NO: 635226
auccuugcaggcaucauau

SEQ ID NO: 635228 - RNA, 19 nt, Artificial Sequence
  Description of Artificial Sequence: Synthetic oligonucleotide
  Sense strand starting at position 2766 of SEQ ID NO: 585379
ugaguuacugcugauauua

SEQ ID NO: 635229 - RNA, 19 nt, Artificial Sequence
  Description of Artificial Sequence: Synthetic oligonucleotide
  Antisense strand to SEQ ID NO: 635228
uaauaucagcaguaacuca

SEQ ID NO: 635230 - RNA, 19 nt, Artificial Sequence
  Description of Artificial Sequence: Synthetic oligonucleotide
  Sense strand starting at position 2775 of SEQ ID NO: 585379
gcugauauuagagaaugca

SEQ ID NO: 635231 - RNA, 19 nt, Artificial Sequence
  Description of Artificial Sequence: Synthetic oligonucleotide
  Antisense strand to SEQ ID NO: 635230
ugcauucucuaauaucagc

SEQ ID NO: 635232 - RNA, 19 nt, Artificial Sequence
  Description of Artificial Sequence: Synthetic oligonucleotide
  Sense strand starting at position 2915 of SEQ ID NO: 585379
uacaguuugggagaugcau

SEQ ID NO: 635233 - RNA, 19 nt, Artificial Sequence
  Description of Artificial Sequence: Synthetic oligonucleotide
  Antisense strand to SEQ ID NO: 635232
augcaucucccaaacugua

SEQ ID NO: 635234 - RNA, 19 nt, Artificial Sequence
  Description of Artificial Sequence: Synthetic oligonucleotide
  Sense strand starting at position 2921 of SEQ ID NO: 585379
uugggagaugcauguuuaa

SEQ ID NO: 635235 - RNA, 19 nt, Artificial Sequence
  Description of Artificial Sequence: Synthetic oligonucleotide
  Antisense strand to SEQ ID NO: 635234
uuaaacaugcaucucccaa

SEQ ID NO: 635236 - RNA, 19 nt, Artificial Sequence
  Description of Artificial Sequence: Synthetic oligonucleotide
  Sense strand starting at position 3078 of SEQ ID NO: 585379
gguacauggauguguggaa

SEQ ID NO: 635237 - RNA, 19 nt, Artificial Sequence
  Description of Artificial Sequence: Synthetic oligonucleotide
  Antisense strand to SEQ ID NO: 635236
uuccacacauccauguacc

SEQ ID NO: 635238 - RNA, 19 nt, Artificial Sequence
  Description of Artificial Sequence: Synthetic oligonucleotide
  Sense strand starting at position 3447 of SEQ ID NO: 585379
ccaacuuuguguccuggaa

SEQ ID NO: 635239 - RNA, 19 nt, Artificial Sequence
  Description of Artificial Sequence: Synthetic oligonucleotide
  Antisense strand to SEQ ID NO: 635238
uuccaggacacaaaguugg

SEQ ID NO: 635240 - RNA, 19 nt, Artificial Sequence
  Description of Artificial Sequence: Synthetic oligonucleotide
  Sense strand starting at position 3451 of SEQ ID NO: 585379
cuuuguguccuggaagagu

SEQ ID NO: 635241 - RNA, 19 nt, Artificial Sequence
  Description of Artificial Sequence: Synthetic oligonucleotide
  Antisense strand to SEQ ID NO: 635240
acucuuccaggacacaaag

SEQ ID NO: 635242 - RNA, 19 nt, Artificial Sequence
  Description of Artificial Sequence: Synthetic oligonucleotide
  Sense strand starting at position 3483 of SEQ ID NO: 585379
ccauuacaccagugaagau

SEQ ID NO: 635243 - RNA, 19 nt, Artificial Sequence
  Description of Artificial Sequence: Synthetic oligonucleotide
  Antisense strand to SEQ ID NO: 635242
aucuucacugguguaaugg

SEQ ID NO: 635244 - RNA, 19 nt, Artificial Sequence
  Description of Artificial Sequence: Synthetic oligonucleotide
  Sense strand starting at position 3585 of SEQ ID NO: 585379
ccuagacuuguauauugac

SEQ ID NO: 635245 - RNA, 19 nt, Artificial Sequence
  Description of Artificial Sequence: Synthetic oligonucleotide
  Antisense strand to SEQ ID NO: 635244
gucaauauacaagucuagg

SEQ ID NO: 635246 - RNA, 19 nt, Artificial Sequence
  Description of Artificial Sequence: Synthetic oligonucleotide
  Sense strand starting at position 3602 of SEQ ID NO: 585379
acacacuuguaccuuguaa

SEQ ID NO: 635247 - RNA, 19 nt, Artificial Sequence
  Description of Artificial Sequence: Synthetic oligonucleotide
  Antisense strand to SEQ ID NO: 635246
uuacaagguacaagugugu

SEQ ID NO: 635248 - RNA, 19 nt, Artificial Sequence
  Description of Artificial Sequence: Synthetic oligonucleotide
  Sense strand starting at position 3619 of SEQ ID NO: 585379
aaggcagaggaauguaauu

SEQ ID NO: 635249 - RNA, 19 nt, Artificial Sequence
  Description of Artificial Sequence: Synthetic oligonucleotide
  Antisense strand to SEQ ID NO: 635248
aauuacauuccucugccuu

SEQ ID NO: 635250 - RNA, 19 nt, Artificial Sequence
  Description of Artificial Sequence: Synthetic oligonucleotide
  Sense strand starting at position 3643 of SEQ ID NO: 585379
gcacuuauuuggcuccuuu

SEQ ID NO: 635251 - RNA, 19 nt, Artificial Sequence
  Description of Artificial Sequence: Synthetic oligonucleotide
  Antisense strand to SEQ ID NO: 635250
aaaggagccaaauaagugc

SEQ ID NO: 635252 - RNA, 19 nt, Artificial Sequence
  Description of Artificial Sequence: Synthetic oligonucleotide
  Sense strand starting at position 3667 of SEQ ID NO: 585379
guaguauguguacaggagu

SEQ ID NO: 635253 - RNA, 19 nt, Artificial Sequence
  Description of Artificial Sequence: Synthetic oligonucleotide
  Antisense strand to SEQ ID NO: 635252
acuccuguacacauacuac

SEQ ID NO: 635254 - RNA, 19 nt, Artificial Sequence
  Description of Artificial Sequence: Synthetic oligonucleotide
  Sense strand starting at position 3704 of SEQ ID NO: 585379
gcaauagguaauuggucua

SEQ ID NO: 635255 - RNA, 19 nt, Artificial Sequence
  Description of Artificial Sequence: Synthetic oligonucleotide
  Antisense strand to SEQ ID NO: 635254
uagaccaauuaccuauugc

SEQ ID NO: 635256 - RNA, 19 nt, Artificial Sequence
  Description of Artificial Sequence: Synthetic oligonucleotide
  Sense strand starting at position 3709 of SEQ ID NO: 585379
agguaauuggucuaugcuu

SEQ ID NO: 635257 - RNA, 19 nt, Artificial Sequence
  Description of Artificial Sequence: Synthetic oligonucleotide
  Antisense strand to SEQ ID NO: 635256
aagcauagaccaauuaccu

SEQ ID NO: 635258 - RNA, 19 nt, Artificial Sequence
  Description of Artificial Sequence: Synthetic oligonucleotide
  Sense strand starting at position 3714 of SEQ ID NO: 585379
auuggucuaugcuucuaaa

SEQ ID NO: 635259 - RNA, 19 nt, Artificial Sequence
  Description of Artificial Sequence: Synthetic oligonucleotide
  Antisense strand to SEQ ID NO: 635258
uuuagaagcauagaccaau

SEQ ID NO: 635260 - RNA, 19 nt, Artificial Sequence
  Description of Artificial Sequence: Synthetic oligonucleotide
  Sense strand starting at position 3768 of SEQ ID NO: 585379
caggaagugccaugacauu

SEQ ID NO: 635261 - RNA, 19 nt, Artificial Sequence
  Description of Artificial Sequence: Synthetic oligonucleotide
  Antisense strand to SEQ ID NO: 635260
aaugucauggcacuuccug

SEQ ID NO: 635262 - RNA, 19 nt, Artificial Sequence
  Description of Artificial Sequence: Synthetic oligonucleotide
  Sense strand starting at position 215 of SEQ ID NO: 585380
augagaagucauggucuuu

SEQ ID NO: 635263 - RNA, 19 nt, Artificial Sequence
  Description of Artificial Sequence: Synthetic oligonucleotide
  Antisense strand to SEQ ID NO: 635262
aaagaccaugacuucucau

SEQ ID NO: 635264 - RNA, 19 nt, Artificial Sequence
  Description of Artificial Sequence: Synthetic oligonucleotide
  Sense strand starting at position 536 of SEQ ID NO: 585380
uggucauggucucuuaaac

SEQ ID NO: 635265 - RNA, 19 nt, Artificial Sequence
  Description of Artificial Sequence: Synthetic oligonucleotide
  Antisense strand to SEQ ID NO: 635264
guuuaagagaccaugacca

SEQ ID NO: 635266 - RNA, 19 nt, Artificial Sequence
  Description of Artificial Sequence: Synthetic oligonucleotide
  Sense strand starting at position 584 of SEQ ID NO: 585380
cuggguacaucugagguuu

SEQ ID NO: 635267 - RNA, 19 nt, Artificial Sequence
  Description of Artificial Sequence: Synthetic oligonucleotide
  Antisense strand to SEQ ID NO: 635266
aaaccucagauguacccag

SEQ ID NO: 635268 - RNA, 19 nt, Artificial Sequence
  Description of Artificial Sequence: Synthetic oligonucleotide
  Sense strand starting at position 608 of SEQ ID NO: 585380
ggcaaauccuugcaacuga

SEQ ID NO: 635269 - RNA, 19 nt, Artificial Sequence
  Description of Artificial Sequence: Synthetic oligonucleotide
  Antisense strand to SEQ ID NO: 635268
ucaguugcaaggauuugcc

SEQ ID NO: 635270 - RNA, 19 nt, Artificial Sequence
  Description of Artificial Sequence: Synthetic oligonucleotide
  Sense strand starting at position 641 of SEQ ID NO: 585380
gcaagcaucuccugaguuu

SEQ ID NO: 635271 - RNA, 19 nt, Artificial Sequence
  Description of Artificial Sequence: Synthetic oligonucleotide
  Antisense strand to SEQ ID NO: 635270
aaacucaggagaugcuugc

SEQ ID NO: 635272 - RNA, 19 nt, Artificial Sequence
  Description of Artificial Sequence: Synthetic oligonucleotide
  Sense strand starting at position 642 of SEQ ID NO: 585380
caagcaucuccugaguuug

SEQ ID NO: 635273 - RNA, 19 nt, Artificial Sequence
  Description of Artificial Sequence: Synthetic oligonucleotide
  Antisense strand to SEQ ID NO: 635272
caaacucaggagaugcuug

SEQ ID NO: 635274 - RNA, 19 nt, Artificial Sequence
  Description of Artificial Sequence: Synthetic oligonucleotide
  Sense strand starting at position 653 of SEQ ID NO: 585380
ugaguuuggguguaucauc

SEQ ID NO: 635275 - RNA, 19 nt, Artificial Sequence
  Description of Artificial Sequence: Synthetic oligonucleotide
  Antisense strand to SEQ ID NO: 635274
gaugauacacccaaacuca

SEQ ID NO: 635276 - RNA, 19 nt, Artificial Sequence
  Description of Artificial Sequence: Synthetic oligonucleotide
  Sense strand starting at position 833 of SEQ ID NO: 585380
gcuuuaaauagccauggga

SEQ ID NO: 635277 - RNA, 19 nt, Artificial Sequence
  Description of Artificial Sequence: Synthetic oligonucleotide
  Antisense strand to SEQ ID NO: 635276
ucccauggcuauuuaaagc

SEQ ID NO: 635278 - RNA, 19 nt, Artificial Sequence
  Description of Artificial Sequence: Synthetic oligonucleotide
  Sense strand starting at position 847 of SEQ ID NO: 585380
ugggacccauccugaaaua

SEQ ID NO: 635279 - RNA, 19 nt, Artificial Sequence
  Description of Artificial Sequence: Synthetic oligonucleotide
  Antisense strand to SEQ ID NO: 635278
uauuucaggauggguccca

SEQ ID NO: 635280 - RNA, 19 nt, Artificial Sequence
  Description of Artificial Sequence: Synthetic oligonucleotide
  Sense strand starting at position 947 of SEQ ID NO: 585380
ggucgaugggcuuaagaau

SEQ ID NO: 635281 - RNA, 19 nt, Artificial Sequence
  Description of Artificial Sequence: Synthetic oligonucleotide
  Antisense strand to SEQ ID NO: 635280
auucuuaagcccaucgacc

SEQ ID NO: 635282 - RNA, 19 nt, Artificial Sequence
  Description of Artificial Sequence: Synthetic oligonucleotide
  Sense strand starting at position 953 of SEQ ID NO: 585380
ugggcuuaagaauggaagu

SEQ ID NO: 635283 - RNA, 19 nt, Artificial Sequence
  Description of Artificial Sequence: Synthetic oligonucleotide
  Antisense strand to SEQ ID NO: 635282
acuuccauucuuaagccca

SEQ ID NO: 635284 - RNA, 19 nt, Artificial Sequence
  Description of Artificial Sequence: Synthetic oligonucleotide
  Sense strand starting at position 1007 of SEQ ID NO: 585380
cagauaugucaagguaaag

SEQ ID NO: 635285 - RNA, 19 nt, Artificial Sequence
  Description of Artificial Sequence: Synthetic oligonucleotide
  Antisense strand to SEQ ID NO: 635284
cuuuaccuugacauaucug

SEQ ID NO: 635286 - RNA, 19 nt, Artificial Sequence
  Description of Artificial Sequence: Synthetic oligonucleotide
  Sense strand starting at position 1083 of SEQ ID NO: 585380
uuuaguuucucugccauau

SEQ ID NO: 635287 - RNA, 19 nt, Artificial Sequence
  Description of Artificial Sequence: Synthetic oligonucleotide
  Antisense strand to SEQ ID NO: 635286
auauggcagagaaacuaaa

SEQ ID NO: 635288 - RNA, 19 nt, Artificial Sequence
  Description of Artificial Sequence: Synthetic oligonucleotide
  Sense strand starting at position 1267 of SEQ ID NO: 585380
ccuucuugaucucgugaga

SEQ ID NO: 635289 - RNA, 19 nt, Artificial Sequence
  Description of Artificial Sequence: Synthetic oligonucleotide
  Antisense strand to SEQ ID NO: 635288
ucucacgagaucaagaagg

SEQ ID NO: 635290 - RNA, 19 nt, Artificial Sequence
  Description of Artificial Sequence: Synthetic oligonucleotide
  Sense strand starting at position 1270 of SEQ ID NO: 585380
ucuugaucucgugagagcu

SEQ ID NO: 635291 - RNA, 19 nt, Artificial Sequence
  Description of Artificial Sequence: Synthetic oligonucleotide
  Antisense strand to SEQ ID NO: 635290
agcucucacgagaucaaga

SEQ ID NO: 635292 - RNA, 19 nt, Artificial Sequence
  Description of Artificial Sequence: Synthetic oligonucleotide
  Sense strand starting at position 1272 of SEQ ID NO: 585380
uugaucucgugagagcuuu

SEQ ID NO: 635293 - RNA, 19 nt, Artificial Sequence
  Description of Artificial Sequence: Synthetic oligonucleotide
  Antisense strand to SEQ ID NO: 635292
aaagcucucacgagaucaa

SEQ ID NO: 635294 - RNA, 19 nt, Artificial Sequence
  Description of Artificial Sequence: Synthetic oligonucleotide
  Sense strand starting at position 1278 of SEQ ID NO: 585380
ucgugagagcuuugcaguu

SEQ ID NO: 635295 - RNA, 19 nt, Artificial Sequence
  Description of Artificial Sequence: Synthetic oligonucleotide
  Antisense strand to SEQ ID NO: 635294
aacugcaaagcucucacga

SEQ ID NO: 635296 - RNA, 19 nt, Artificial Sequence
  Description of Artificial Sequence: Synthetic oligonucleotide
  Sense strand starting at position 1423 of SEQ ID NO: 585380
ccugucuucuuccagacau

SEQ ID NO: 635297 - RNA, 19 nt, Artificial Sequence
  Description of Artificial Sequence: Synthetic oligonucleotide
  Antisense strand to SEQ ID NO: 635296
augucuggaagaagacagg

SEQ ID NO: 635298 - RNA, 19 nt, Artificial Sequence
  Description of Artificial Sequence: Synthetic oligonucleotide
  Sense strand starting at position 1425 of SEQ ID NO: 585380
ugucuucuuccagacauuc

SEQ ID NO: 635299 - RNA, 19 nt, Artificial Sequence
  Description of Artificial Sequence: Synthetic oligonucleotide
  Antisense strand to SEQ ID NO: 635298
gaaugucuggaagaagaca

SEQ ID NO: 635300 - RNA, 19 nt, Artificial Sequence
  Description of Artificial Sequence: Synthetic oligonucleotide
  Sense strand starting at position 1990 of SEQ ID NO: 585380
aggagagauucugcgcaug

SEQ ID NO: 635301 - RNA, 19 nt, Artificial Sequence
  Description of Artificial Sequence: Synthetic oligonucleotide
  Antisense strand to SEQ ID NO: 635300
caugcgcagaaucucuccu

SEQ ID NO: 635302 - RNA, 19 nt, Artificial Sequence
  Description of Artificial Sequence: Synthetic oligonucleotide
  Sense strand starting at position 1992 of SEQ ID NO: 585380
gagagauucugcgcaugug

SEQ ID NO: 635303 - RNA, 19 nt, Artificial Sequence
  Description of Artificial Sequence: Synthetic oligonucleotide
  Antisense strand to SEQ ID NO: 635302
cacaugcgcagaaucucuc

SEQ ID NO: 635304 - RNA, 19 nt, Artificial Sequence
  Description of Artificial Sequence: Synthetic oligonucleotide
  Sense strand starting at position 1995 of SEQ ID NO: 585380
agauucugcgcaugugcaa

SEQ ID NO: 635305 - RNA, 19 nt, Artificial Sequence
  Description of Artificial Sequence: Synthetic oligonucleotide
  Antisense strand to SEQ ID NO: 635304
uugcacaugcgcagaaucu

SEQ ID NO: 635306 - RNA, 19 nt, Artificial Sequence
  Description of Artificial Sequence: Synthetic oligonucleotide
  Sense strand starting at position 2008 of SEQ ID NO: 585380
gugcaaauaugugucgaga

SEQ ID NO: 635307 - RNA, 19 nt, Artificial Sequence
  Description of Artificial Sequence: Synthetic oligonucleotide
  Antisense strand to SEQ ID NO: 635306
ucucgacacauauuugcac

SEQ ID NO: 635308 - RNA, 19 nt, Artificial Sequence
  Description of Artificial Sequence: Synthetic oligonucleotide
  Sense strand starting at position 2114 of SEQ ID NO: 585380
cagcgucaaucauggauau

SEQ ID NO: 635309 - RNA, 19 nt, Artificial Sequence
  Description of Artificial Sequence: Synthetic oligonucleotide
  Antisense strand to SEQ ID NO: 635308
auauccaugauugacgcug

SEQ ID NO: 635310 - RNA, 19 nt, Artificial Sequence
  Description of Artificial Sequence: Synthetic oligonucleotide
  Sense strand starting at position 2305 of SEQ ID NO: 585380
gcaucugucaggcgguaca

SEQ ID NO: 635311 - RNA, 19 nt, Artificial Sequence
  Description of Artificial Sequence: Synthetic oligonucleotide
  Antisense strand to SEQ ID NO: 635310
uguaccgccugacagaugc

SEQ ID NO: 635312 - RNA, 19 nt, Artificial Sequence
  Description of Artificial Sequence: Synthetic oligonucleotide
  Sense strand starting at position 2735 of SEQ ID NO: 585380
guaguucuaggaggagaca

SEQ ID NO: 635313 - RNA, 19 nt, Artificial Sequence
  Description of Artificial Sequence: Synthetic oligonucleotide
  Antisense strand to SEQ ID NO: 635312
ugucuccuccuagaacuac

SEQ ID NO: 635314 - RNA, 19 nt, Artificial Sequence
  Description of Artificial Sequence: Synthetic oligonucleotide
  Sense strand starting at position 2956 of SEQ ID NO: 585380
agauguaguugcugacauc

SEQ ID NO: 635315 - RNA, 19 nt, Artificial Sequence
  Description of Artificial Sequence: Synthetic oligonucleotide
  Antisense strand to SEQ ID NO: 635314
gaugucagcaacuacaucu

SEQ ID NO: 635316 - RNA, 19 nt, Artificial Sequence
  Description of Artificial Sequence: Synthetic oligonucleotide
  Sense strand starting at position 3002 of SEQ ID NO: 585380
agggaugguuccugaacag

SEQ ID NO: 635317 - RNA, 19 nt, Artificial Sequence
  Description of Artificial Sequence: Synthetic oligonucleotide
  Antisense strand to SEQ ID NO: 635316
cuguucaggaaccaucccu

SEQ ID NO: 635318 - RNA, 19 nt, Artificial Sequence
  Description of Artificial Sequence: Synthetic oligonucleotide
  Sense strand starting at position 3134 of SEQ ID NO: 585380
gagcuacagcguugaacaa

SEQ ID NO: 635319 - RNA, 19 nt, Artificial Sequence
  Description of Artificial Sequence: Synthetic oligonucleotide
  Antisense strand to SEQ ID NO: 635318
uuguucaacgcuguagcuc

SEQ ID NO: 635320 - RNA, 19 nt, Artificial Sequence
  Description of Artificial Sequence: Synthetic oligonucleotide
  Sense strand starting at position 3201 of SEQ ID NO: 585380
uggaauaauuacuaaggaa

SEQ ID NO: 635321 - RNA, 19 nt, Artificial Sequence
  Description of Artificial Sequence: Synthetic oligonucleotide
  Antisense strand to SEQ ID NO: 635320
uuccuuaguaauuauucca

SEQ ID NO: 635322 - RNA, 19 nt, Artificial Sequence
  Description of Artificial Sequence: Synthetic oligonucleotide
  Sense strand starting at position 3226 of SEQ ID NO: 585380
uggcaugagucaguagaag

SEQ ID NO: 635323 - RNA, 19 nt, Artificial Sequence
  Description of Artificial Sequence: Synthetic oligonucleotide
  Antisense strand to SEQ ID NO: 635322
cuucuacugacucaugcca

SEQ ID NO: 635324 - RNA, 19 nt, Artificial Sequence
  Description of Artificial Sequence: Synthetic oligonucleotide
  Sense strand starting at position 3346 of SEQ ID NO: 585380
ugggcaggcuugccuuaaa

SEQ ID NO: 635325 - RNA, 19 nt, Artificial Sequence
  Description of Artificial Sequence: Synthetic oligonucleotide
  Antisense strand to SEQ ID NO: 635324
uuuaaggcaagccugccca

SEQ ID NO: 635326 - RNA, 19 nt, Artificial Sequence
  Description of Artificial Sequence: Synthetic oligonucleotide
  Sense strand starting at position 3349 of SEQ ID NO: 585380
gcaggcuugccuuaaagua

SEQ ID NO: 635327 - RNA, 19 nt, Artificial Sequence
  Description of Artificial Sequence: Synthetic oligonucleotide
  Antisense strand to SEQ ID NO: 635326
uacuuuaaggcaagccugc

SEQ ID NO: 635328 - RNA, 19 nt, Artificial Sequence
  Description of Artificial Sequence: Synthetic oligonucleotide
  Sense strand starting at position 3430 of SEQ ID NO: 585380
gggagcuggucccauuauu

SEQ ID NO: 635329 - RNA, 19 nt, Artificial Sequence
  Description of Artificial Sequence: Synthetic oligonucleotide
  Antisense strand to SEQ ID NO: 635328
aauaaugggaccagcuccc

SEQ ID NO: 635330 - RNA, 19 nt, Artificial Sequence
  Description of Artificial Sequence: Synthetic oligonucleotide
  Sense strand starting at position 3484 of SEQ ID NO: 585380
acauguagagcuggugaaa

SEQ ID NO: 635331 - RNA, 19 nt, Artificial Sequence
  Description of Artificial Sequence: Synthetic oligonucleotide
  Antisense strand to SEQ ID NO: 635330
uuucaccagcucuacaugu

SEQ ID NO: 635332 - RNA, 19 nt, Artificial Sequence
  Description of Artificial Sequence: Synthetic oligonucleotide
  Sense strand starting at position 3503 of SEQ ID NO: 585380
aggacaauggcuggaguaa

SEQ ID NO: 635333 - RNA, 19 nt, Artificial Sequence
  Description of Artificial Sequence: Synthetic oligonucleotide
  Antisense strand to SEQ ID NO: 635332
uuacuccagccauuguccu

SEQ ID NO: 635334 - RNA, 19 nt, Artificial Sequence
  Description of Artificial Sequence: Synthetic oligonucleotide
  Sense strand starting at position 3556 of SEQ ID NO: 585380
ggagauaucggaugcccag

SEQ ID NO: 635335 - RNA, 19 nt, Artificial Sequence
  Description of Artificial Sequence: Synthetic oligonucleotide
  Antisense strand to SEQ ID NO: 635334
cugggcauccgauaucucc

SEQ ID NO: 635336 - RNA, 19 nt, Artificial Sequence
  Description of Artificial Sequence: Synthetic oligonucleotide
  Sense strand starting at position 3691 of SEQ ID NO: 585380
gaacacaucccugguugua

SEQ ID NO: 635337 - RNA, 19 nt, Artificial Sequence
  Description of Artificial Sequence: Synthetic oligonucleotide
  Antisense strand to SEQ ID NO: 635336
uacaaccagggauguguuc

SEQ ID NO: 635338 - RNA, 19 nt, Artificial Sequence
  Description of Artificial Sequence: Synthetic oligonucleotide
  Sense strand starting at position 3693 of SEQ ID NO: 585380
acacaucccugguuguaau

SEQ ID NO: 635339 - RNA, 19 nt, Artificial Sequence
  Description of Artificial Sequence: Synthetic oligonucleotide
  Antisense strand to SEQ ID NO: 635338
auuacaaccagggaugugu

SEQ ID NO: 635340 - RNA, 19 nt, Artificial Sequence
  Description of Artificial Sequence: Synthetic oligonucleotide
  Sense strand starting at position 77 of SEQ ID NO: 585381
gagguuagaaauugaguuu

SEQ ID NO: 635341 - RNA, 19 nt, Artificial Sequence
  Description of Artificial Sequence: Synthetic oligonucleotide
  Antisense strand to SEQ ID NO: 635340
aaacucaauuucuaaccuc

SEQ ID NO: 635342 - RNA, 19 nt, Artificial Sequence
  Description of Artificial Sequence: Synthetic oligonucleotide
  Sense strand starting at position 341 of SEQ ID NO: 585381
ggccuuccauaucuuuaga

SEQ ID NO: 635343 - RNA, 19 nt, Artificial Sequence
  Description of Artificial Sequence: Synthetic oligonucleotide
  Antisense strand to SEQ ID NO: 635342
ucuaaagauauggaaggcc

SEQ ID NO: 635344 - RNA, 19 nt, Artificial Sequence
  Description of Artificial Sequence: Synthetic oligonucleotide
  Sense strand starting at position 393 of SEQ ID NO: 585381
gagacaagguuucuuuaca

SEQ ID NO: 635345 - RNA, 19 nt, Artificial Sequence
  Description of Artificial Sequence: Synthetic oligonucleotide
  Antisense strand to SEQ ID NO: 635344
uguaaagaaaccuugucuc

SEQ ID NO: 635346 - RNA, 19 nt, Artificial Sequence
  Description of Artificial Sequence: Synthetic oligonucleotide
  Sense strand starting at position 394 of SEQ ID NO: 585381
agacaagguuucuuuacau

SEQ ID NO: 635347 - RNA, 19 nt, Artificial Sequence
  Description of Artificial Sequence: Synthetic oligonucleotide
  Antisense strand to SEQ ID NO: 635346
auguaaagaaaccuugucu

SEQ ID NO: 635348 - RNA, 19 nt, Artificial Sequence
  Description of Artificial Sequence: Synthetic oligonucleotide
  Sense strand starting at position 400 of SEQ ID NO: 585381
gguuucuuuacaugggauc

SEQ ID NO: 635349 - RNA, 19 nt, Artificial Sequence
  Description of Artificial Sequence: Synthetic oligonucleotide
  Antisense strand to SEQ ID NO: 635348
gaucccauguaaagaaacc

SEQ ID NO: 635350 - RNA, 19 nt, Artificial Sequence
  Description of Artificial Sequence: Synthetic oligonucleotide
  Sense strand starting at position 418 of SEQ ID NO: 585381
cuauaugucugggucugaa

SEQ ID NO: 635351 - RNA, 19 nt, Artificial Sequence
  Description of Artificial Sequence: Synthetic oligonucleotide
  Antisense strand to SEQ ID NO: 635350
uucagacccagacauauag

SEQ ID NO: 635352 - RNA, 19 nt, Artificial Sequence
  Description of Artificial Sequence: Synthetic oligonucleotide
  Sense strand starting at position 531 of SEQ ID NO: 585381
caguguugaggacauacuu

SEQ ID NO: 635353 - RNA, 19 nt, Artificial Sequence
  Description of Artificial Sequence: Synthetic oligonucleotide
  Antisense strand to SEQ ID NO: 635352
aaguauguccucaacacug

SEQ ID NO: 635354 - RNA, 19 nt, Artificial Sequence
  Description of Artificial Sequence: Synthetic oligonucleotide
  Sense strand starting at position 566 of SEQ ID NO: 585381
uguagcuuaccugaaauuc

SEQ ID NO: 635355 - RNA, 19 nt, Artificial Sequence
  Description of Artificial Sequence: Synthetic oligonucleotide
  Antisense strand to SEQ ID NO: 635354
gaauuucagguaagcuaca

SEQ ID NO: 635356 - RNA, 19 nt, Artificial Sequence
  Description of Artificial Sequence: Synthetic oligonucleotide
  Sense strand starting at position 592 of SEQ ID NO: 585381
gcuggaugaccugacuugu

SEQ ID NO: 635357 - RNA, 19 nt, Artificial Sequence
  Description of Artificial Sequence: Synthetic oligonucleotide
  Antisense strand to SEQ ID NO: 635356
acaagucaggucauccagc

SEQ ID NO: 635358 - RNA, 19 nt, Artificial Sequence
  Description of Artificial Sequence: Synthetic oligonucleotide
  Sense strand starting at position 651 of SEQ ID NO: 585381
augaguccugcggaauagu

SEQ ID NO: 635359 - RNA, 19 nt, Artificial Sequence
  Description of Artificial Sequence: Synthetic oligonucleotide
  Antisense strand to SEQ ID NO: 635358
acuauuccgcaggacucau

SEQ ID NO: 635360 - RNA, 19 nt, Artificial Sequence
  Description of Artificial Sequence: Synthetic oligonucleotide
  Sense strand starting at position 659 of SEQ ID NO: 585381
ugcggaauagucugaaaca

SEQ ID NO: 635361 - RNA, 19 nt, Artificial Sequence
  Description of Artificial Sequence: Synthetic oligonucleotide
  Antisense strand to SEQ ID NO: 635360
uguuucagacuauuccgca

SEQ ID NO: 635362 - RNA, 19 nt, Artificial Sequence
  Description of Artificial Sequence: Synthetic oligonucleotide
  Sense strand starting at position 672 of SEQ ID NO: 585381
gaaacauacugugugcaua

SEQ ID NO: 635363 - RNA, 19 nt, Artificial Sequence
  Description of Artificial Sequence: Synthetic oligonucleotide
  Antisense strand to SEQ ID NO: 635362
uaugcacacaguauguuuc

SEQ ID NO: 635364 - RNA, 19 nt, Artificial Sequence
  Description of Artificial Sequence: Synthetic oligonucleotide
  Sense strand starting at position 822 of SEQ ID NO: 585381
ugggcaaguccaugugaaa

SEQ ID NO: 635365 - RNA, 19 nt, Artificial Sequence
  Description of Artificial Sequence: Synthetic oligonucleotide
  Antisense strand to SEQ ID NO: 635364
uuucacauggacuugccca

SEQ ID NO: 635366 - RNA, 19 nt, Artificial Sequence
  Description of Artificial Sequence: Synthetic oligonucleotide
  Sense strand starting at position 1026 of SEQ ID NO: 585381
cucucaugccaguaugaac

SEQ ID NO: 635367 - RNA, 19 nt, Artificial Sequence
  Description of Artificial Sequence: Synthetic oligonucleotide
  Antisense strand to SEQ ID NO: 635366
guucauacuggcaugagag

SEQ ID NO: 635368 - RNA, 19 nt, Artificial Sequence
  Description of Artificial Sequence: Synthetic oligonucleotide
  Sense strand starting at position 1612 of SEQ ID NO: 585381
uuagaaauuacaggugguu

SEQ ID NO: 635369 - RNA, 19 nt, Artificial Sequence
  Description of Artificial Sequence: Synthetic oligonucleotide
  Antisense strand to SEQ ID NO: 635368
aaccaccuguaauuucuaa

SEQ ID NO: 635370 - RNA, 19 nt, Artificial Sequence
  Description of Artificial Sequence: Synthetic oligonucleotide
  Sense strand starting at position 1687 of SEQ ID NO: 585381
cguuacauuucucagauuu

SEQ ID NO: 635371 - RNA, 19 nt, Artificial Sequence
  Description of Artificial Sequence: Synthetic oligonucleotide
  Antisense strand to SEQ ID NO: 635370
aaaucugagaaauguaacg

SEQ ID NO: 635372 - RNA, 19 nt, Artificial Sequence
  Description of Artificial Sequence: Synthetic oligonucleotide
  Sense strand starting at position 1959 of SEQ ID NO: 585381
agggaucuguggagauaga

SEQ ID NO: 635373 - RNA, 19 nt, Artificial Sequence
  Description of Artificial Sequence: Synthetic oligonucleotide
  Antisense strand to SEQ ID NO: 635372
ucuaucuccacagaucccu

SEQ ID NO: 635374 - RNA, 19 nt, Artificial Sequence
  Description of Artificial Sequence: Synthetic oligonucleotide
  Sense strand starting at position 2403 of SEQ ID NO: 585381
ucaaucaaccugugugaga

SEQ ID NO: 635375 - RNA, 19 nt, Artificial Sequence
  Description of Artificial Sequence: Synthetic oligonucleotide
  Antisense strand to SEQ ID NO: 635374
ucucacacagguugauuga

SEQ ID NO: 635376 - RNA, 19 nt, Artificial Sequence
  Description of Artificial Sequence: Synthetic oligonucleotide
  Sense strand starting at position 2429 of SEQ ID NO: 585381
aaauuaauucgauggaugu

SEQ ID NO: 635377 - RNA, 19 nt, Artificial Sequence
  Description of Artificial Sequence: Synthetic oligonucleotide
  Antisense strand to SEQ ID NO: 635376
acauccaucgaauuaauuu

SEQ ID NO: 635378 - RNA, 19 nt, Artificial Sequence
  Description of Artificial Sequence: Synthetic oligonucleotide
  Sense strand starting at position 2430 of SEQ ID NO: 585381
aauuaauucgauggauguu

SEQ ID NO: 635379 - RNA, 19 nt, Artificial Sequence
  Description of Artificial Sequence: Synthetic oligonucleotide
  Antisense strand to SEQ ID NO: 635378
aacauccaucgaauuaauu

SEQ ID NO: 635380 - RNA, 19 nt, Artificial Sequence
  Description of Artificial Sequence: Synthetic oligonucleotide
  Sense strand starting at position 2431 of SEQ ID NO: 585381
auuaauucgauggauguuu

SEQ ID NO: 635381 - RNA, 19 nt, Artificial Sequence
  Description of Artificial Sequence: Synthetic oligonucleotide
  Antisense strand to SEQ ID NO: 635380
aaacauccaucgaauuaau

SEQ ID NO: 635382 - RNA, 19 nt, Artificial Sequence
  Description of Artificial Sequence: Synthetic oligonucleotide
  Sense strand starting at position 2433 of SEQ ID NO: 585381
uaauucgauggauguuuaa

SEQ ID NO: 635383 - RNA, 19 nt, Artificial Sequence
  Description of Artificial Sequence: Synthetic oligonucleotide
  Antisense strand to SEQ ID NO: 635382
uuaaacauccaucgaauua

SEQ ID NO: 635384 - RNA, 19 nt, Artificial Sequence
  Description of Artificial Sequence: Synthetic oligonucleotide
  Sense strand starting at position 2443 of SEQ ID NO: 585381
gauguuuaauuguuggaag

SEQ ID NO: 635385 - RNA, 19 nt, Artificial Sequence
  Description of Artificial Sequence: Synthetic oligonucleotide
  Antisense strand to SEQ ID NO: 635384
cuuccaacaauuaaacauc

SEQ ID NO: 635386 - RNA, 19 nt, Artificial Sequence
  Description of Artificial Sequence: Synthetic oligonucleotide
  Sense strand starting at position 2454 of SEQ ID NO: 585381
guuggaagcagggauucua

SEQ ID NO: 635387 - RNA, 19 nt, Artificial Sequence
  Description of Artificial Sequence: Synthetic oligonucleotide
  Antisense strand to SEQ ID NO: 635386
uagaaucccugcuuccaac

SEQ ID NO: 635388 - RNA, 19 nt, Artificial Sequence
  Description of Artificial Sequence: Synthetic oligonucleotide
  Sense strand starting at position 2486 of SEQ ID NO: 585381
aagggaaggcuguggauua

SEQ ID NO: 635389 - RNA, 19 nt, Artificial Sequence
  Description of Artificial Sequence: Synthetic oligonucleotide
  Antisense strand to SEQ ID NO: 635388
uaauccacagccuucccuu

SEQ ID NO: 635390 - RNA, 19 nt, Artificial Sequence
  Description of Artificial Sequence: Synthetic oligonucleotide
  Sense strand starting at position 2552 of SEQ ID NO: 585381
ugagaagauagugguuaua

SEQ ID NO: 635391 - RNA, 19 nt, Artificial Sequence
  Description of Artificial Sequence: Synthetic oligonucleotide
  Antisense strand to SEQ ID NO: 635390
uauaaccacuaucuucuca

SEQ ID NO: 635392 - RNA, 19 nt, Artificial Sequence
  Description of Artificial Sequence: Synthetic oligonucleotide
  Sense strand starting at position 2668 of SEQ ID NO: 585381
aguuuaauaaagugagguu

SEQ ID NO: 635393 - RNA, 19 nt, Artificial Sequence
  Description of Artificial Sequence: Synthetic oligonucleotide
  Antisense strand to SEQ ID NO: 635392
aaccucacuuuauuaaacu

SEQ ID NO: 635394 - RNA, 19 nt, Artificial Sequence
  Description of Artificial Sequence: Synthetic oligonucleotide
  Sense strand starting at position 2669 of SEQ ID NO: 585381
guuuaauaaagugagguuu

SEQ ID NO: 635395 - RNA, 19 nt, Artificial Sequence
  Description of Artificial Sequence: Synthetic oligonucleotide
  Antisense strand to SEQ ID NO: 635394
aaaccucacuuuauuaaac

SEQ ID NO: 635396 - RNA, 19 nt, Artificial Sequence
  Description of Artificial Sequence: Synthetic oligonucleotide
  Sense strand starting at position 2832 of SEQ ID NO: 585381
gcaccaagagugugaaaug

SEQ ID NO: 635397 - RNA, 19 nt, Artificial Sequence
  Description of Artificial Sequence: Synthetic oligonucleotide
  Antisense strand to SEQ ID NO: 635396
cauuucacacucuuggugc

SEQ ID NO: 635398 - RNA, 19 nt, Artificial Sequence
  Description of Artificial Sequence: Synthetic oligonucleotide
  Sense strand starting at position 2930 of SEQ ID NO: 585381
ucauuagucagaugaugug

SEQ ID NO: 635399 - RNA, 19 nt, Artificial Sequence
  Description of Artificial Sequence: Synthetic oligonucleotide
  Antisense strand to SEQ ID NO: 635398
cacaucaucugacuaauga

SEQ ID NO: 635400 - RNA, 19 nt, Artificial Sequence
  Description of Artificial Sequence: Synthetic oligonucleotide
  Sense strand starting at position 3036 of SEQ ID NO: 585381
gcauguuggaaacaucuga

SEQ ID NO: 635401 - RNA, 19 nt, Artificial Sequence
  Description of Artificial Sequence: Synthetic oligonucleotide
  Antisense strand to SEQ ID NO: 635400
ucagauguuuccaacaugc

SEQ ID NO: 635402 - RNA, 19 nt, Artificial Sequence
  Description of Artificial Sequence: Synthetic oligonucleotide
  Sense strand starting at position 3123 of SEQ ID NO: 585381
guuguacagcaagaggauu

SEQ ID NO: 635403 - RNA, 19 nt, Artificial Sequence
  Description of Artificial Sequence: Synthetic oligonucleotide
  Antisense strand to SEQ ID NO: 635402
aauccucuugcuguacaac

SEQ ID NO: 635404 - RNA, 19 nt, Artificial Sequence
  Description of Artificial Sequence: Synthetic oligonucleotide
  Sense strand starting at position 3234 of SEQ ID NO: 585381
acagcugggcucuaaugau

SEQ ID NO: 635405 - RNA, 19 nt, Artificial Sequence
  Description of Artificial Sequence: Synthetic oligonucleotide
  Antisense strand to SEQ ID NO: 635404
aucauuagagcccagcugu

SEQ ID NO: 635406 - RNA, 19 nt, Artificial Sequence
  Description of Artificial Sequence: Synthetic oligonucleotide
  Sense strand starting at position 3273 of SEQ ID NO: 585381
agagccaguucucuauaau

SEQ ID NO: 635407 - RNA, 19 nt, Artificial Sequence
  Description of Artificial Sequence: Synthetic oligonucleotide
  Antisense strand to SEQ ID NO: 635406
auuauagagaacuggcucu

SEQ ID NO: 635408 - RNA, 19 nt, Artificial Sequence
  Description of Artificial Sequence: Synthetic oligonucleotide
  Sense strand starting at position 3276 of SEQ ID NO: 585381
gccaguucucuauaauuag

SEQ ID NO: 635409 - RNA, 19 nt, Artificial Sequence
  Description of Artificial Sequence: Synthetic oligonucleotide
  Antisense strand to SEQ ID NO: 635408
cuaauuauagagaacuggc

SEQ ID NO: 635410 - RNA, 19 nt, Artificial Sequence
  Description of Artificial Sequence: Synthetic oligonucleotide
  Sense strand starting at position 3279 of SEQ ID NO: 585381
aguucucuauaauuagaag

SEQ ID NO: 635411 - RNA, 19 nt, Artificial Sequence
  Description of Artificial Sequence: Synthetic oligonucleotide
  Antisense strand to SEQ ID NO: 635410
cuucuaauuauagagaacu

SEQ ID NO: 635412 - RNA, 19 nt, Artificial Sequence
  Description of Artificial Sequence: Synthetic oligonucleotide
  Sense strand starting at position 3288 of SEQ ID NO: 585381
uaauuagaaggguggaagu

SEQ ID NO: 635413 - RNA, 19 nt, Artificial Sequence
  Description of Artificial Sequence: Synthetic oligonucleotide
  Antisense strand to SEQ ID NO: 635412
acuuccacccuucuaauua

SEQ ID NO: 635414 - RNA, 19 nt, Artificial Sequence
  Description of Artificial Sequence: Synthetic oligonucleotide
  Sense strand starting at position 3393 of SEQ ID NO: 585381
acucuaaggcucugauucu

SEQ ID NO: 635415 - RNA, 19 nt, Artificial Sequence
  Description of Artificial Sequence: Synthetic oligonucleotide
  Antisense strand to SEQ ID NO: 635414
agaaucagagccuuagagu

SEQ ID NO: 635416 - RNA, 19 nt, Artificial Sequence
  Description of Artificial Sequence: Synthetic oligonucleotide
  Sense strand starting at position 3455 of SEQ ID NO: 585381
gauagcaucugucuauuga

SEQ ID NO: 635417 - RNA, 19 nt, Artificial Sequence
  Description of Artificial Sequence: Synthetic oligonucleotide
  Antisense strand to SEQ ID NO: 635416
ucaauagacagaugcuauc

SEQ ID NO: 635418 - RNA, 19 nt, Artificial Sequence
  Description of Artificial Sequence: Synthetic oligonucleotide
  Sense strand starting at position 3470 of SEQ ID NO: 585381
uugacuacuucugcuggaa

SEQ ID NO: 635419 - RNA, 19 nt, Artificial Sequence
  Description of Artificial Sequence: Synthetic oligonucleotide
  Antisense strand to SEQ ID NO: 635418
uuccagcagaaguagucaa

SEQ ID NO: 635420 - RNA, 19 nt, Artificial Sequence
  Description of Artificial Sequence: Synthetic oligonucleotide
  Sense strand starting at position 123 of SEQ ID NO: 585382
cuuuaaauggaagguaauu

SEQ ID NO: 635421 - RNA, 19 nt, Artificial Sequence
  Description of Artificial Sequence: Synthetic oligonucleotide
  Antisense strand to SEQ ID NO: 635420
aauuaccuuccauuuaaag

SEQ ID NO: 635422 - RNA, 19 nt, Artificial Sequence
  Description of Artificial Sequence: Synthetic oligonucleotide
  Sense strand starting at position 195 of SEQ ID NO: 585382
cuuucuacacuguaaugua

SEQ ID NO: 635423 - RNA, 19 nt, Artificial Sequence
  Description of Artificial Sequence: Synthetic oligonucleotide
  Antisense strand to SEQ ID NO: 635422
uacauuacaguguagaaag

SEQ ID NO: 635424 - RNA, 19 nt, Artificial Sequence
  Description of Artificial Sequence: Synthetic oligonucleotide
  Sense strand starting at position 278 of SEQ ID NO: 585382
ugucauuauuuggcuuacu

SEQ ID NO: 635425 - RNA, 19 nt, Artificial Sequence
  Description of Artificial Sequence: Synthetic oligonucleotide
  Antisense strand to SEQ ID NO: 635424
aguaagccaaauaaugaca

SEQ ID NO: 635426 - RNA, 19 nt, Artificial Sequence
  Description of Artificial Sequence: Synthetic oligonucleotide
  Sense strand starting at position 279 of SEQ ID NO: 585382
gucauuauuuggcuuacuu

SEQ ID NO: 635427 - RNA, 19 nt, Artificial Sequence
  Description of Artificial Sequence: Synthetic oligonucleotide
  Antisense strand to SEQ ID NO: 635426
aaguaagccaaauaaugac

SEQ ID NO: 635428 - RNA, 19 nt, Artificial Sequence
  Description of Artificial Sequence: Synthetic oligonucleotide
  Sense strand starting at position 445 of SEQ ID NO: 585382
ggaucuuuacugggccauu

SEQ ID NO: 635429 - RNA, 19 nt, Artificial Sequence
  Description of Artificial Sequence: Synthetic oligonucleotide
  Antisense strand to SEQ ID NO: 635428
aauggcccaguaaagaucc

SEQ ID NO: 635430 - RNA, 19 nt, Artificial Sequence
  Description of Artificial Sequence: Synthetic oligonucleotide
  Sense strand starting at position 455 of SEQ ID NO: 585382
ugggccauuuguuugugau

SEQ ID NO: 635431 - RNA, 19 nt, Artificial Sequence
  Description of Artificial Sequence: Synthetic oligonucleotide
  Antisense strand to SEQ ID NO: 635430
aucacaaacaaauggccca

SEQ ID NO: 635432 - RNA, 19 nt, Artificial Sequence
  Description of Artificial Sequence: Synthetic oligonucleotide
  Sense strand starting at position 456 of SEQ ID NO: 585382
gggccauuuguuugugaug

SEQ ID NO: 635433 - RNA, 19 nt, Artificial Sequence
  Description of Artificial Sequence: Synthetic oligonucleotide
  Antisense strand to SEQ ID NO: 635432
caucacaaacaaauggccc

SEQ ID NO: 635434 - RNA, 19 nt, Artificial Sequence
  Description of Artificial Sequence: Synthetic oligonucleotide
  Sense strand starting at position 463 of SEQ ID NO: 585382
uuguuugugauggaggcau

SEQ ID NO: 635435 - RNA, 19 nt, Artificial Sequence
  Description of Artificial Sequence: Synthetic oligonucleotide
  Antisense strand to SEQ ID NO: 635434
augccuccaucacaaacaa

SEQ ID NO: 635436 - RNA, 19 nt, Artificial Sequence
  Description of Artificial Sequence: Synthetic oligonucleotide
  Sense strand starting at position 480 of SEQ ID NO: 585382
augaaauucgugcaaagug

SEQ ID NO: 635437 - RNA, 19 nt, Artificial Sequence
  Description of Artificial Sequence: Synthetic oligonucleotide
  Antisense strand to SEQ ID NO: 635436
cacuuugcacgaauuucau

SEQ ID NO: 635438 - RNA, 19 nt, Artificial Sequence
  Description of Artificial Sequence: Synthetic oligonucleotide
  Sense strand starting at position 496 of SEQ ID NO: 585382
guguaauuacuggauugcu

SEQ ID NO: 635439 - RNA, 19 nt, Artificial Sequence
  Description of Artificial Sequence: Synthetic oligonucleotide
  Antisense strand to SEQ ID NO: 635438
agcaauccaguaauuacac

SEQ ID NO: 635440 - RNA, 19 nt, Artificial Sequence
  Description of Artificial Sequence: Synthetic oligonucleotide
  Sense strand starting at position 580 of SEQ ID NO: 585382
acugacagcccagguauua

SEQ ID NO: 635441 - RNA, 19 nt, Artificial Sequence
  Description of Artificial Sequence: Synthetic oligonucleotide
  Antisense strand to SEQ ID NO: 635440
uaauaccugggcugucagu

SEQ ID NO: 635442 - RNA, 19 nt, Artificial Sequence
  Description of Artificial Sequence: Synthetic oligonucleotide
  Sense strand starting at position 687 of SEQ ID NO: 585382
ucauauaagcucuaguaag

SEQ ID NO: 635443 - RNA, 19 nt, Artificial Sequence
  Description of Artificial Sequence: Synthetic oligonucleotide
  Antisense strand to SEQ ID NO: 635442
cuuacuagagcuuauauga

SEQ ID NO: 635444 - RNA, 19 nt, Artificial Sequence
  Description of Artificial Sequence: Synthetic oligonucleotide
  Sense strand starting at position 728 of SEQ ID NO: 585382
aucucuaucuguguauaga

SEQ ID NO: 635445 - RNA, 19 nt, Artificial Sequence
  Description of Artificial Sequence: Synthetic oligonucleotide
  Antisense strand to SEQ ID NO: 635444
ucuauacacagauagagau

SEQ ID NO: 635446 - RNA, 19 nt, Artificial Sequence
  Description of Artificial Sequence: Synthetic oligonucleotide
  Sense strand starting at position 729 of SEQ ID NO: 585382
ucucuaucuguguauagag

SEQ ID NO: 635447 - RNA, 19 nt, Artificial Sequence
  Description of Artificial Sequence: Synthetic oligonucleotide
  Antisense strand to SEQ ID NO: 635446
cucuauacacagauagaga

SEQ ID NO: 635448 - RNA, 19 nt, Artificial Sequence
  Description of Artificial Sequence: Synthetic oligonucleotide
  Sense strand starting at position 731 of SEQ ID NO: 585382
ucuaucuguguauagagau

SEQ ID NO: 635449 - RNA, 19 nt, Artificial Sequence
  Description of Artificial Sequence: Synthetic oligonucleotide
  Antisense strand to SEQ ID NO: 635448
aucucuauacacagauaga

SEQ ID NO: 635450 - RNA, 19 nt, Artificial Sequence
  Description of Artificial Sequence: Synthetic oligonucleotide
  Sense strand starting at position 867 of SEQ ID NO: 585382
gauguaugucaugaaugcu

SEQ ID NO: 635451 - RNA, 19 nt, Artificial Sequence
  Description of Artificial Sequence: Synthetic oligonucleotide
  Antisense strand to SEQ ID NO: 635450
agcauucaugacauacauc

SEQ ID NO: 635452 - RNA, 19 nt, Artificial Sequence
  Description of Artificial Sequence: Synthetic oligonucleotide
  Sense strand starting at position 886 of SEQ ID NO: 585382
accuucuuacguuacgaau

SEQ ID NO: 635453 - RNA, 19 nt, Artificial Sequence
  Description of Artificial Sequence: Synthetic oligonucleotide
  Antisense strand to SEQ ID NO: 635452
auucguaacguaagaaggu

SEQ ID NO: 635454 - RNA, 19 nt, Artificial Sequence
  Description of Artificial Sequence: Synthetic oligonucleotide
  Sense strand starting at position 924 of SEQ ID NO: 585382
cuggucaauuuacaauaga

SEQ ID NO: 635455 - RNA, 19 nt, Artificial Sequence
  Description of Artificial Sequence: Synthetic oligonucleotide
  Antisense strand to SEQ ID NO: 635454
ucuauuguaaauugaccag

SEQ ID NO: 635456 - RNA, 19 nt, Artificial Sequence
  Description of Artificial Sequence: Synthetic oligonucleotide
  Sense strand starting at position 1048 of SEQ ID NO: 585382
ggaucuaaacugcagucau

SEQ ID NO: 635457 - RNA, 19 nt, Artificial Sequence
  Description of Artificial Sequence: Synthetic oligonucleotide
  Antisense strand to SEQ ID NO: 635456
augacugcaguuuagaucc

SEQ ID NO: 635458 - RNA, 19 nt, Artificial Sequence
  Description of Artificial Sequence: Synthetic oligonucleotide
  Sense strand starting at position 1235 of SEQ ID NO: 585382
acgaaagguccucagugua

SEQ ID NO: 635459 - RNA, 19 nt, Artificial Sequence
  Description of Artificial Sequence: Synthetic oligonucleotide
  Antisense strand to SEQ ID NO: 635458
uacacugaggaccuuucgu

SEQ ID NO: 635460 - RNA, 19 nt, Artificial Sequence
  Description of Artificial Sequence: Synthetic oligonucleotide
  Sense strand starting at position 1284 of SEQ ID NO: 585382
ggcaucauuuaagaaacca

SEQ ID NO: 635461 - RNA, 19 nt, Artificial Sequence
  Description of Artificial Sequence: Synthetic oligonucleotide
  Antisense strand to SEQ ID NO: 635460
ugguuucuuaaaugaugcc

SEQ ID NO: 635462 - RNA, 19 nt, Artificial Sequence
  Description of Artificial Sequence: Synthetic oligonucleotide
  Sense strand starting at position 1422 of SEQ ID NO: 585382
gcauaaguaaccugaguag

SEQ ID NO: 635463 - RNA, 19 nt, Artificial Sequence
  Description of Artificial Sequence: Synthetic oligonucleotide
  Antisense strand to SEQ ID NO: 635462
cuacucagguuacuuaugc

SEQ ID NO: 635464 - RNA, 19 nt, Artificial Sequence
  Description of Artificial Sequence: Synthetic oligonucleotide
  Sense strand starting at position 2342 of SEQ ID NO: 585382
cgggcaaucugagcaaaca

SEQ ID NO: 635465 - RNA, 19 nt, Artificial Sequence
  Description of Artificial Sequence: Synthetic oligonucleotide
  Antisense strand to SEQ ID NO: 635464
uguuugcucagauugcccg

SEQ ID NO: 635466 - RNA, 19 nt, Artificial Sequence
  Description of Artificial Sequence: Synthetic oligonucleotide
  Sense strand starting at position 2449 of SEQ ID NO: 585382
aguggcccuccuuaggaua

SEQ ID NO: 635467 - RNA, 19 nt, Artificial Sequence
  Description of Artificial Sequence: Synthetic oligonucleotide
  Antisense strand to SEQ ID NO: 635466
uauccuaaggagggccacu

SEQ ID NO: 635468 - RNA, 19 nt, Artificial Sequence
  Description of Artificial Sequence: Synthetic oligonucleotide
  Sense strand starting at position 2569 of SEQ ID NO: 585382
ugagaaagggugugauuac

SEQ ID NO: 635469 - RNA, 19 nt, Artificial Sequence
  Description of Artificial Sequence: Synthetic oligonucleotide
  Antisense strand to SEQ ID NO: 635468
guaaucacacccuuucuca

SEQ ID NO: 635470 - RNA, 19 nt, Artificial Sequence
  Description of Artificial Sequence: Synthetic oligonucleotide
  Sense strand starting at position 2581 of SEQ ID NO: 585382
ugauuacugugguuacuac

SEQ ID NO: 635471 - RNA, 19 nt, Artificial Sequence
  Description of Artificial Sequence: Synthetic oligonucleotide
  Antisense strand to SEQ ID NO: 635470
guaguaaccacaguaauca

SEQ ID NO: 635472 - RNA, 19 nt, Artificial Sequence
  Description of Artificial Sequence: Synthetic oligonucleotide
  Sense strand starting at position 2822 of SEQ ID NO: 585382
ggaagaguguaacuaaauu

SEQ ID NO: 635473 - RNA, 19 nt, Artificial Sequence
  Description of Artificial Sequence: Synthetic oligonucleotide
  Antisense strand to SEQ ID NO: 635472
aauuuaguuacacucuucc

SEQ ID NO: 635474 - RNA, 19 nt, Artificial Sequence
  Description of Artificial Sequence: Synthetic oligonucleotide
  Sense strand starting at position 2828 of SEQ ID NO: 585382
guguaacuaaauuggagua

SEQ ID NO: 635475 - RNA, 19 nt, Artificial Sequence
  Description of Artificial Sequence: Synthetic oligonucleotide
  Antisense strand to SEQ ID NO: 635474
uacuccaauuuaguuacac

SEQ ID NO: 635476 - RNA, 19 nt, Artificial Sequence
  Description of Artificial Sequence: Synthetic oligonucleotide
  Sense strand starting at position 2903 of SEQ ID NO: 585382
cuauuucuugcagguuuau

SEQ ID NO: 635477 - RNA, 19 nt, Artificial Sequence
  Description of Artificial Sequence: Synthetic oligonucleotide
  Antisense strand to SEQ ID NO: 635476
auaaaccugcaagaaauag

SEQ ID NO: 635478 - RNA, 19 nt, Artificial Sequence
  Description of Artificial Sequence: Synthetic oligonucleotide
  Sense strand starting at position 2944 of SEQ ID NO: 585382
ggaacagugcccugaucua

SEQ ID NO: 635479 - RNA, 19 nt, Artificial Sequence
  Description of Artificial Sequence: Synthetic oligonucleotide
  Antisense strand to SEQ ID NO: 635478
uagaucagggcacuguucc

SEQ ID NO: 635480 - RNA, 19 nt, Artificial Sequence
  Description of Artificial Sequence: Synthetic oligonucleotide
  Sense strand starting at position 3133 of SEQ ID NO: 585382
cuggguaccuacuuaucua

SEQ ID NO: 635481 - RNA, 19 nt, Artificial Sequence
  Description of Artificial Sequence: Synthetic oligonucleotide
  Antisense strand to SEQ ID NO: 635480
uagauaaguagguacccag

SEQ ID NO: 635482 - RNA, 19 nt, Artificial Sequence
  Description of Artificial Sequence: Synthetic oligonucleotide
  Sense strand starting at position 3178 of SEQ ID NO: 585382
gggaaagaaugacaaacaa

SEQ ID NO: 635483 - RNA, 19 nt, Artificial Sequence
  Description of Artificial Sequence: Synthetic oligonucleotide
  Antisense strand to SEQ ID NO: 635482
uuguuugucauucuuuccc

SEQ ID NO: 635484 - RNA, 19 nt, Artificial Sequence
  Description of Artificial Sequence: Synthetic oligonucleotide
  Sense strand starting at position 3317 of SEQ ID NO: 585382
uugacagugacugguauca

SEQ ID NO: 635485 - RNA, 19 nt, Artificial Sequence
  Description of Artificial Sequence: Synthetic oligonucleotide
  Antisense strand to SEQ ID NO: 635484
ugauaccagucacugucaa

SEQ ID NO: 635486 - RNA, 19 nt, Artificial Sequence
  Description of Artificial Sequence: Synthetic oligonucleotide
  Sense strand starting at position 3413 of SEQ ID NO: 585382
uauugauuggauuaucugu

SEQ ID NO: 635487 - RNA, 19 nt, Artificial Sequence
  Description of Artificial Sequence: Synthetic oligonucleotide
  Antisense strand to SEQ ID NO: 635486
acagauaauccaaucaaua

SEQ ID NO: 635488 - RNA, 19 nt, Artificial Sequence
  Description of Artificial Sequence: Synthetic oligonucleotide
  Sense strand starting at position 3418 of SEQ ID NO: 585382
auuggauuaucuguuuaga

SEQ ID NO: 635489 - RNA, 19 nt, Artificial Sequence
  Description of Artificial Sequence: Synthetic oligonucleotide
  Antisense strand to SEQ ID NO: 635488
ucuaaacagauaauccaau

SEQ ID NO: 635490 - RNA, 19 nt, Artificial Sequence
  Description of Artificial Sequence: Synthetic oligonucleotide
  Sense strand starting at position 3420 of SEQ ID NO: 585382
uggauuaucuguuuagaau

SEQ ID NO: 635491 - RNA, 19 nt, Artificial Sequence
  Description of Artificial Sequence: Synthetic oligonucleotide
  Antisense strand to SEQ ID NO: 635490
auucuaaacagauaaucca

SEQ ID NO: 635492 - RNA, 19 nt, Artificial Sequence
  Description of Artificial Sequence: Synthetic oligonucleotide
  Sense strand starting at position 3528 of SEQ ID NO: 585382
ccaucugugugacuaugga

SEQ ID NO: 635493 - RNA, 19 nt, Artificial Sequence
  Description of Artificial Sequence: Synthetic oligonucleotide
  Antisense strand to SEQ ID NO: 635492
uccauagucacacagaugg

SEQ ID NO: 635494 - RNA, 19 nt, Artificial Sequence
  Description of Artificial Sequence: Synthetic oligonucleotide
  Sense strand starting at position 3613 of SEQ ID NO: 585382
auaguaucggcucacuaaa

SEQ ID NO: 635495 - RNA, 19 nt, Artificial Sequence
  Description of Artificial Sequence: Synthetic oligonucleotide
  Antisense strand to SEQ ID NO: 635494
uuuagugagccgauacuau

SEQ ID NO: 635496 - RNA, 19 nt, Artificial Sequence
  Description of Artificial Sequence: Synthetic oligonucleotide
  Sense strand starting at position 3664 of SEQ ID NO: 585382
aaugguaaaugccuaguaa

SEQ ID NO: 635497 - RNA, 19 nt, Artificial Sequence
  Description of Artificial Sequence: Synthetic oligonucleotide
  Antisense strand to SEQ ID NO: 635496
uuacuaggcauuuaccauu

SEQ ID NO: 635498 - RNA, 19 nt, Artificial Sequence
  Description of Artificial Sequence: Synthetic oligonucleotide
  Sense strand starting at position 3859 of SEQ ID NO: 585382
cuagguguuaggcaccauu

SEQ ID NO: 635499 - RNA, 19 nt, Artificial Sequence
  Description of Artificial Sequence: Synthetic oligonucleotide
  Antisense strand to SEQ ID NO: 635498
aauggugccuaacaccuag

SEQ ID NO: 635500 - RNA, 19 nt, Artificial Sequence
  Description of Artificial Sequence: Synthetic oligonucleotide
  Sense strand starting at position 48 of SEQ ID NO: 585383
uagcuaauggcagacauga

SEQ ID NO: 635501 - RNA, 19 nt, Artificial Sequence
  Description of Artificial Sequence: Synthetic oligonucleotide
  Antisense strand to SEQ ID NO: 635500
ucaugucugccauuagcua

SEQ ID NO: 635502 - RNA, 19 nt, Artificial Sequence
  Description of Artificial Sequence: Synthetic oligonucleotide
  Sense strand starting at position 83 of SEQ ID NO: 585383
uccacacagcuugguauaa

SEQ ID NO: 635503 - RNA, 19 nt, Artificial Sequence
  Description of Artificial Sequence: Synthetic oligonucleotide
  Antisense strand to SEQ ID NO: 635502
uuauaccaagcugugugga

SEQ ID NO: 635504 - RNA, 19 nt, Artificial Sequence
  Description of Artificial Sequence: Synthetic oligonucleotide
  Sense strand starting at position 84 of SEQ ID NO: 585383
ccacacagcuugguauaau

SEQ ID NO: 635505 - RNA, 19 nt, Artificial Sequence
  Description of Artificial Sequence: Synthetic oligonucleotide
  Antisense strand to SEQ ID NO: 635504
auuauaccaagcugugugg

SEQ ID NO: 635506 - RNA, 19 nt, Artificial Sequence
  Description of Artificial Sequence: Synthetic oligonucleotide
  Sense strand starting at position 143 of SEQ ID NO: 585383
ggguuuagacucuagcauu

SEQ ID NO: 635507 - RNA, 19 nt, Artificial Sequence
  Description of Artificial Sequence: Synthetic oligonucleotide
  Antisense strand to SEQ ID NO: 635506
aaugcuagagucuaaaccc

SEQ ID NO: 635508 - RNA, 19 nt, Artificial Sequence
  Description of Artificial Sequence: Synthetic oligonucleotide
  Sense strand starting at position 166 of SEQ ID NO: 585383
aguuacgugauugauuaca

SEQ ID NO: 635509 - RNA, 19 nt, Artificial Sequence
  Description of Artificial Sequence: Synthetic oligonucleotide
  Antisense strand to SEQ ID NO: 635508
uguaaucaaucacguaacu

SEQ ID NO: 635510 - RNA, 19 nt, Artificial Sequence
  Description of Artificial Sequence: Synthetic oligonucleotide
  Sense strand starting at position 168 of SEQ ID NO: 585383
uuacgugauugauuacaaa

SEQ ID NO: 635511 - RNA, 19 nt, Artificial Sequence
  Description of Artificial Sequence: Synthetic oligonucleotide
  Antisense strand to SEQ ID NO: 635510
uuuguaaucaaucacguaa

SEQ ID NO: 635512 - RNA, 19 nt, Artificial Sequence
  Description of Artificial Sequence: Synthetic oligonucleotide
  Sense strand starting at position 330 of SEQ ID NO: 585383
uuuaauaaacgccaguuua

SEQ ID NO: 635513 - RNA, 19 nt, Artificial Sequence
  Description of Artificial Sequence: Synthetic oligonucleotide
  Antisense strand to SEQ ID NO: 635512
uaaacuggcguuuauuaaa

SEQ ID NO: 635514 - RNA, 19 nt, Artificial Sequence
  Description of Artificial Sequence: Synthetic oligonucleotide
  Sense strand starting at position 392 of SEQ ID NO: 585383
uuauuuccuuaguaagaag

SEQ ID NO: 635515 - RNA, 19 nt, Artificial Sequence
  Description of Artificial Sequence: Synthetic oligonucleotide
  Antisense strand to SEQ ID NO: 635514
cuucuuacuaaggaaauaa

SEQ ID NO: 635516 - RNA, 19 nt, Artificial Sequence
  Description of Artificial Sequence: Synthetic oligonucleotide
  Sense strand starting at position 489 of SEQ ID NO: 585383
uguccauaagcaggagaua

SEQ ID NO: 635517 - RNA, 19 nt, Artificial Sequence
  Description of Artificial Sequence: Synthetic oligonucleotide
  Antisense strand to SEQ ID NO: 635516
uaucuccugcuuauggaca

SEQ ID NO: 635518 - RNA, 19 nt, Artificial Sequence
  Description of Artificial Sequence: Synthetic oligonucleotide
  Sense strand starting at position 500 of SEQ ID NO: 585383
aggagauaaguuuguaaug

SEQ ID NO: 635519 - RNA, 19 nt, Artificial Sequence
  Description of Artificial Sequence: Synthetic oligonucleotide
  Antisense strand to SEQ ID NO: 635518
cauuacaaacuuaucuccu

SEQ ID NO: 635520 - RNA, 19 nt, Artificial Sequence
  Description of Artificial Sequence: Synthetic oligonucleotide
  Sense strand starting at position 501 of SEQ ID NO: 585383
ggagauaaguuuguaauga

SEQ ID NO: 635521 - RNA, 19 nt, Artificial Sequence
  Description of Artificial Sequence: Synthetic oligonucleotide
  Antisense strand to SEQ ID NO: 635520
ucauuacaaacuuaucucc

SEQ ID NO: 635522 - RNA, 19 nt, Artificial Sequence
  Description of Artificial Sequence: Synthetic oligonucleotide
  Sense strand starting at position 514 of SEQ ID NO: 585383
uaaugacucggaugcuuaa

SEQ ID NO: 635523 - RNA, 19 nt, Artificial Sequence
  Description of Artificial Sequence: Synthetic oligonucleotide
  Antisense strand to SEQ ID NO: 635522
uuaagcauccgagucauua

SEQ ID NO: 635524 - RNA, 19 nt, Artificial Sequence
  Description of Artificial Sequence: Synthetic oligonucleotide
  Sense strand starting at position 760 of SEQ ID NO: 585383
acauacuugugauuaguaa

SEQ ID NO: 635525 - RNA, 19 nt, Artificial Sequence
  Description of Artificial Sequence: Synthetic oligonucleotide
  Antisense strand to SEQ ID NO: 635524
uuacuaaucacaaguaugu

SEQ ID NO: 635526 - RNA, 19 nt, Artificial Sequence
  Description of Artificial Sequence: Synthetic oligonucleotide
  Sense strand starting at position 840 of SEQ ID NO: 585383
uggcuucucuaggugauuu

SEQ ID NO: 635527 - RNA, 19 nt, Artificial Sequence
  Description of Artificial Sequence: Synthetic oligonucleotide
  Antisense strand to SEQ ID NO: 635526
aaaucaccuagagaagcca

SEQ ID NO: 635528 - RNA, 19 nt, Artificial Sequence
  Description of Artificial Sequence: Synthetic oligonucleotide
  Sense strand starting at position 947 of SEQ ID NO: 585383
agaagaacaugucucccau

SEQ ID NO: 635529 - RNA, 19 nt, Artificial Sequence
  Description of Artificial Sequence: Synthetic oligonucleotide
  Antisense strand to SEQ ID NO: 635528
augggagacauguucuucu

SEQ ID NO: 635530 - RNA, 19 nt, Artificial Sequence
  Description of Artificial Sequence: Synthetic oligonucleotide
  Sense strand starting at position 1022 of SEQ ID NO: 585383
acgugaacuuggcuagaca

SEQ ID NO: 635531 - RNA, 19 nt, Artificial Sequence
  Description of Artificial Sequence: Synthetic oligonucleotide
  Antisense strand to SEQ ID NO: 635530
ugucuagccaaguucacgu

SEQ ID NO: 635532 - RNA, 19 nt, Artificial Sequence
  Description of Artificial Sequence: Synthetic oligonucleotide
  Sense strand starting at position 1023 of SEQ ID NO: 585383
cgugaacuuggcuagacaa

SEQ ID NO: 635533 - RNA, 19 nt, Artificial Sequence
  Description of Artificial Sequence: Synthetic oligonucleotide
  Antisense strand to SEQ ID NO: 635532
uugucuagccaaguucacg

SEQ ID NO: 635534 - RNA, 19 nt, Artificial Sequence
  Description of Artificial Sequence: Synthetic oligonucleotide
  Sense strand starting at position 1213 of SEQ ID NO: 585383
guacguguuaaagaucaga

SEQ ID NO: 635535 - RNA, 19 nt, Artificial Sequence
  Description of Artificial Sequence: Synthetic oligonucleotide
  Antisense strand to SEQ ID NO: 635534
ucugaucuuuaacacguac

SEQ ID NO: 635536 - RNA, 19 nt, Artificial Sequence
  Description of Artificial Sequence: Synthetic oligonucleotide
  Sense strand starting at position 1270 of SEQ ID NO: 585383
gcuggacaaucuccaguaa

SEQ ID NO: 635537 - RNA, 19 nt, Artificial Sequence
  Description of Artificial Sequence: Synthetic oligonucleotide
  Antisense strand to SEQ ID NO: 635536
uuacuggagauuguccagc

SEQ ID NO: 635538 - RNA, 19 nt, Artificial Sequence
  Description of Artificial Sequence: Synthetic oligonucleotide
  Sense strand starting at position 1548 of SEQ ID NO: 585383
agcagaauauuagcaagua

SEQ ID NO: 635539 - RNA, 19 nt, Artificial Sequence
  Description of Artificial Sequence: Synthetic oligonucleotide
  Antisense strand to SEQ ID NO: 635538
uacuugcuaauauucugcu

SEQ ID NO: 635540 - RNA, 19 nt, Artificial Sequence
  Description of Artificial Sequence: Synthetic oligonucleotide
  Sense strand starting at position 1845 of SEQ ID NO: 585383
ugaacaaguccugacucuu

SEQ ID NO: 635541 - RNA, 19 nt, Artificial Sequence
  Description of Artificial Sequence: Synthetic oligonucleotide
  Antisense strand to SEQ ID NO: 635540
aagagucaggacuuguuca

SEQ ID NO: 635542 - RNA, 19 nt, Artificial Sequence
  Description of Artificial Sequence: Synthetic oligonucleotide
  Sense strand starting at position 1984 of SEQ ID NO: 585383
gauaaucugcagugaacca

SEQ ID NO: 635543 - RNA, 19 nt, Artificial Sequence
  Description of Artificial Sequence: Synthetic oligonucleotide
  Antisense strand to SEQ ID NO: 635542
ugguucacugcagauuauc

SEQ ID NO: 635544 - RNA, 19 nt, Artificial Sequence
  Description of Artificial Sequence: Synthetic oligonucleotide
  Sense strand starting at position 2010 of SEQ ID NO: 585383
ggcauagaguguccuauaa

SEQ ID NO: 635545 - RNA, 19 nt, Artificial Sequence
  Description of Artificial Sequence: Synthetic oligonucleotide
  Antisense strand to SEQ ID NO: 635544
uuauaggacacucuaugcc

SEQ ID NO: 635546 - RNA, 19 nt, Artificial Sequence
  Description of Artificial Sequence: Synthetic oligonucleotide
  Sense strand starting at position 2240 of SEQ ID NO: 585383
gggcccucucacugacaau

SEQ ID NO: 635547 - RNA, 19 nt, Artificial Sequence
  Description of Artificial Sequence: Synthetic oligonucleotide
  Antisense strand to SEQ ID NO: 635546
auugucagugagagggccc

SEQ ID NO: 635548 - RNA, 19 nt, Artificial Sequence
  Description of Artificial Sequence: Synthetic oligonucleotide
  Sense strand starting at position 2454 of SEQ ID NO: 585383
uagguaugagcaugaaaua

SEQ ID NO: 635549 - RNA, 19 nt, Artificial Sequence
  Description of Artificial Sequence: Synthetic oligonucleotide
  Antisense strand to SEQ ID NO: 635548
uauuucaugcucauaccua

SEQ ID NO: 635550 - RNA, 19 nt, Artificial Sequence
  Description of Artificial Sequence: Synthetic oligonucleotide
  Sense strand starting at position 2698 of SEQ ID NO: 585383
auacaagugcucuauugca

SEQ ID NO: 635551 - RNA, 19 nt, Artificial Sequence
  Description of Artificial Sequence: Synthetic oligonucleotide
  Antisense strand to SEQ ID NO: 635550
ugcaauagagcacuuguau

SEQ ID NO: 635552 - RNA, 19 nt, Artificial Sequence
  Description of Artificial Sequence: Synthetic oligonucleotide
  Sense strand starting at position 2759 of SEQ ID NO: 585383
gucgauagugaagagaguu

SEQ ID NO: 635553 - RNA, 19 nt, Artificial Sequence
  Description of Artificial Sequence: Synthetic oligonucleotide
  Antisense strand to SEQ ID NO: 635552
aacucucuucacuaucgac

SEQ ID NO: 635554 - RNA, 19 nt, Artificial Sequence
  Description of Artificial Sequence: Synthetic oligonucleotide
  Sense strand starting at position 2789 of SEQ ID NO: 585383
gagagccaauguguuuaaa

SEQ ID NO: 635555 - RNA, 19 nt, Artificial Sequence
  Description of Artificial Sequence: Synthetic oligonucleotide
  Antisense strand to SEQ ID NO: 635554
uuuaaacacauuggcucuc

SEQ ID NO: 635556 - RNA, 19 nt, Artificial Sequence
  Description of Artificial Sequence: Synthetic oligonucleotide
  Sense strand starting at position 3012 of SEQ ID NO: 585383
cuaguaaaccaucaguuua

SEQ ID NO: 635557 - RNA, 19 nt, Artificial Sequence
  Description of Artificial Sequence: Synthetic oligonucleotide
  Antisense strand to SEQ ID NO: 635556
uaaacugaugguuuacuag

SEQ ID NO: 635558 - RNA, 19 nt, Artificial Sequence
  Description of Artificial Sequence: Synthetic oligonucleotide
  Sense strand starting at position 3014 of SEQ ID NO: 585383
aguaaaccaucaguuuaac

SEQ ID NO: 635559 - RNA, 19 nt, Artificial Sequence
  Description of Artificial Sequence: Synthetic oligonucleotide
  Antisense strand to SEQ ID NO: 635558
guuaaacugaugguuuacu

SEQ ID NO: 635560 - RNA, 19 nt, Artificial Sequence
  Description of Artificial Sequence: Synthetic oligonucleotide
  Sense strand starting at position 3162 of SEQ ID NO: 585383
ccacuugcccaaggauaua

SEQ ID NO: 635561 - RNA, 19 nt, Artificial Sequence
  Description of Artificial Sequence: Synthetic oligonucleotide
  Antisense strand to SEQ ID NO: 635560
uauauccuugggcaagugg

SEQ ID NO: 635562 - RNA, 19 nt, Artificial Sequence
  Description of Artificial Sequence: Synthetic oligonucleotide
  Sense strand starting at position 3185 of SEQ ID NO: 585383
gccagaaaguaugugaaca

SEQ ID NO: 635563 - RNA, 19 nt, Artificial Sequence
  Description of Artificial Sequence: Synthetic oligonucleotide
  Antisense strand to SEQ ID NO: 635562
uguucacauacuuucuggc

SEQ ID NO: 635564 - RNA, 19 nt, Artificial Sequence
  Description of Artificial Sequence: Synthetic oligonucleotide
  Sense strand starting at position 3196 of SEQ ID NO: 585383
ugugaacagagauguuaua

SEQ ID NO: 635565 - RNA, 19 nt, Artificial Sequence
  Description of Artificial Sequence: Synthetic oligonucleotide
  Antisense strand to SEQ ID NO: 635564
uauaacaucucuguucaca

SEQ ID NO: 635566 - RNA, 19 nt, Artificial Sequence
  Description of Artificial Sequence: Synthetic oligonucleotide
  Sense strand starting at position 3214 of SEQ ID NO: 585383
aaauuagacuggucucagu

SEQ ID NO: 635567 - RNA, 19 nt, Artificial Sequence
  Description of Artificial Sequence: Synthetic oligonucleotide
  Antisense strand to SEQ ID NO: 635566
acugagaccagucuaauuu

SEQ ID NO: 635568 - RNA, 19 nt, Artificial Sequence
  Description of Artificial Sequence: Synthetic oligonucleotide
  Sense strand starting at position 3355 of SEQ ID NO: 585383
ugaaauacucucugagcag

SEQ ID NO: 635569 - RNA, 19 nt, Artificial Sequence
  Description of Artificial Sequence: Synthetic oligonucleotide
  Antisense strand to SEQ ID NO: 635568
cugcucagagaguauuuca

SEQ ID NO: 635570 - RNA, 19 nt, Artificial Sequence
  Description of Artificial Sequence: Synthetic oligonucleotide
  Sense strand starting at position 3366 of SEQ ID NO: 585383
cugagcagaucuuuggaga

SEQ ID NO: 635571 - RNA, 19 nt, Artificial Sequence
  Description of Artificial Sequence: Synthetic oligonucleotide
  Antisense strand to SEQ ID NO: 635570
ucuccaaagaucugcucag

SEQ ID NO: 635572 - RNA, 19 nt, Artificial Sequence
  Description of Artificial Sequence: Synthetic oligonucleotide
  Sense strand starting at position 3367 of SEQ ID NO: 585383
ugagcagaucuuuggagag

SEQ ID NO: 635573 - RNA, 19 nt, Artificial Sequence
  Description of Artificial Sequence: Synthetic oligonucleotide
  Antisense strand to SEQ ID NO: 635572
cucuccaaagaucugcuca

SEQ ID NO: 635574 - RNA, 19 nt, Artificial Sequence
  Description of Artificial Sequence: Synthetic oligonucleotide
  Sense strand starting at position 3474 of SEQ ID NO: 585383
gacucauuccugggcucca

SEQ ID NO: 635575 - RNA, 19 nt, Artificial Sequence
  Description of Artificial Sequence: Synthetic oligonucleotide
  Antisense strand to SEQ ID NO: 635574
uggagcccaggaaugaguc

SEQ ID NO: 635576 - RNA, 19 nt, Artificial Sequence
  Description of Artificial Sequence: Synthetic oligonucleotide
  Sense strand starting at position 3664 of SEQ ID NO: 585383
gagaguuuggcaugggagu

SEQ ID NO: 635577 - RNA, 19 nt, Artificial Sequence
  Description of Artificial Sequence: Synthetic oligonucleotide
  Antisense strand to SEQ ID NO: 635576
acucccaugccaaacucuc

SEQ ID NO: 635578 - RNA, 19 nt, Artificial Sequence
  Description of Artificial Sequence: Synthetic oligonucleotide
  Sense strand starting at position 3745 of SEQ ID NO: 585383
acugucauaccuggacaca

SEQ ID NO: 635579 - RNA, 19 nt, Artificial Sequence
  Description of Artificial Sequence: Synthetic oligonucleotide
  Antisense strand to SEQ ID NO: 635578
uguguccagguaugacagu

SEQ ID NO: 635580 - RNA, 19 nt, Artificial Sequence
  Description of Artificial Sequence: Synthetic oligonucleotide
  Sense strand starting at position 208 of SEQ ID NO: 585384
agauaucacuuguuccuuu

SEQ ID NO: 635581 - RNA, 19 nt, Artificial Sequence
  Description of Artificial Sequence: Synthetic oligonucleotide
  Antisense strand to SEQ ID NO: 635580
aaaggaacaagugauaucu

SEQ ID NO: 635582 - RNA, 19 nt, Artificial Sequence
  Description of Artificial Sequence: Synthetic oligonucleotide
  Sense strand starting at position 344 of SEQ ID NO: 585384
gggauuguuucguucacug

SEQ ID NO: 635583 - RNA, 19 nt, Artificial Sequence
  Description of Artificial Sequence: Synthetic oligonucleotide
  Antisense strand to SEQ ID NO: 635582
cagugaacgaaacaauccc

SEQ ID NO: 635584 - RNA, 19 nt, Artificial Sequence
  Description of Artificial Sequence: Synthetic oligonucleotide
  Sense strand starting at position 431 of SEQ ID NO: 585384
auguuauuccagcacuuua

SEQ ID NO: 635585 - RNA, 19 nt, Artificial Sequence
  Description of Artificial Sequence: Synthetic oligonucleotide
  Antisense strand to SEQ ID NO: 635584
uaaagugcuggaauaacau

SEQ ID NO: 635586 - RNA, 19 nt, Artificial Sequence
  Description of Artificial Sequence: Synthetic oligonucleotide
  Sense strand starting at position 508 of SEQ ID NO: 585384
ccauguuuaaguugggcaa

SEQ ID NO: 635587 - RNA, 19 nt, Artificial Sequence
  Description of Artificial Sequence: Synthetic oligonucleotide
  Antisense strand to SEQ ID NO: 635586
uugcccaacuuaaacaugg

SEQ ID NO: 635588 - RNA, 19 nt, Artificial Sequence
  Description of Artificial Sequence: Synthetic oligonucleotide
  Sense strand starting at position 509 of SEQ ID NO: 585384
cauguuuaaguugggcaaa

SEQ ID NO: 635589 - RNA, 19 nt, Artificial Sequence
  Description of Artificial Sequence: Synthetic oligonucleotide
  Antisense strand to SEQ ID NO: 635588
uuugcccaacuuaaacaug

SEQ ID NO: 635590 - RNA, 19 nt, Artificial Sequence
  Description of Artificial Sequence: Synthetic oligonucleotide
  Sense strand starting at position 615 of SEQ ID NO: 585384
cgccucauuagugaaagua

SEQ ID NO: 635591 - RNA, 19 nt, Artificial Sequence
  Description of Artificial Sequence: Synthetic oligonucleotide
  Antisense strand to SEQ ID NO: 635590
uacuuucacuaaugaggcg

SEQ ID NO: 635592 - RNA, 19 nt, Artificial Sequence
  Description of Artificial Sequence: Synthetic oligonucleotide
  Sense strand starting at position 762 of SEQ ID NO: 585384
aucauuauuggguguugua

SEQ ID NO: 635593 - RNA, 19 nt, Artificial Sequence
  Description of Artificial Sequence: Synthetic oligonucleotide
  Antisense strand to SEQ ID NO: 635592
uacaacacccaauaaugau

SEQ ID NO: 635594 - RNA, 19 nt, Artificial Sequence
  Description of Artificial Sequence: Synthetic oligonucleotide
  Sense strand starting at position 771 of SEQ ID NO: 585384
ggguguuguaauugagaga

SEQ ID NO: 635595 - RNA, 19 nt, Artificial Sequence
  Description of Artificial Sequence: Synthetic oligonucleotide
  Antisense strand to SEQ ID NO: 635594
ucucucaauuacaacaccc

SEQ ID NO: 635596 - RNA, 19 nt, Artificial Sequence
  Description of Artificial Sequence: Synthetic oligonucleotide
  Sense strand starting at position 772 of SEQ ID NO: 585384
gguguuguaauugagagau

SEQ ID NO: 635597 - RNA, 19 nt, Artificial Sequence
  Description of Artificial Sequence: Synthetic oligonucleotide
  Antisense strand to SEQ ID NO: 635596
aucucucaauuacaacacc

SEQ ID NO: 635598 - RNA, 19 nt, Artificial Sequence
  Description of Artificial Sequence: Synthetic oligonucleotide
  Sense strand starting at position 785 of SEQ ID NO: 585384
agagauaaaucauuagugu

SEQ ID NO: 635599 - RNA, 19 nt, Artificial Sequence
  Description of Artificial Sequence: Synthetic oligonucleotide
  Antisense strand to SEQ ID NO: 635598
acacuaaugauuuaucucu

SEQ ID NO: 635600 - RNA, 19 nt, Artificial Sequence
  Description of Artificial Sequence: Synthetic oligonucleotide
  Sense strand starting at position 842 of SEQ ID NO: 585384
aguaaaugccagugucaua

SEQ ID NO: 635601 - RNA, 19 nt, Artificial Sequence
  Description of Artificial Sequence: Synthetic oligonucleotide
  Antisense strand to SEQ ID NO: 635600
uaugacacuggcauuuacu

SEQ ID NO: 635602 - RNA, 19 nt, Artificial Sequence
  Description of Artificial Sequence: Synthetic oligonucleotide
  Sense strand starting at position 1224 of SEQ ID NO: 585384
augucauauucuuuagaca

SEQ ID NO: 635603 - RNA, 19 nt, Artificial Sequence
  Description of Artificial Sequence: Synthetic oligonucleotide
  Antisense strand to SEQ ID NO: 635602
ugucuaaagaauaugacau

SEQ ID NO: 635604 - RNA, 19 nt, Artificial Sequence
  Description of Artificial Sequence: Synthetic oligonucleotide
  Sense strand starting at position 1225 of SEQ ID NO: 585384
ugucauauucuuuagacau

SEQ ID NO: 635605 - RNA, 19 nt, Artificial Sequence
  Description of Artificial Sequence: Synthetic oligonucleotide
  Antisense strand to SEQ ID NO: 635604
augucuaaagaauaugaca

SEQ ID NO: 635606 - RNA, 19 nt, Artificial Sequence
  Description of Artificial Sequence: Synthetic oligonucleotide
  Sense strand starting at position 1236 of SEQ ID NO: 585384
uuagacauaucacugucau

SEQ ID NO: 635607 - RNA, 19 nt, Artificial Sequence
  Description of Artificial Sequence: Synthetic oligonucleotide
  Antisense strand to SEQ ID NO: 635606
augacagugauaugucuaa

SEQ ID NO: 635608 - RNA, 19 nt, Artificial Sequence
  Description of Artificial Sequence: Synthetic oligonucleotide
  Sense strand starting at position 1280 of SEQ ID NO: 585384
uccuauguauuaucgauga

SEQ ID NO: 635609 - RNA, 19 nt, Artificial Sequence
  Description of Artificial Sequence: Synthetic oligonucleotide
  Antisense strand to SEQ ID NO: 635608
ucaucgauaauacauagga

SEQ ID NO: 635610 - RNA, 19 nt, Artificial Sequence
  Description of Artificial Sequence: Synthetic oligonucleotide
  Sense strand starting at position 1333 of SEQ ID NO: 585384
gacuauuagaagcguggaa

SEQ ID NO: 635611 - RNA, 19 nt, Artificial Sequence
  Description of Artificial Sequence: Synthetic oligonucleotide
  Antisense strand to SEQ ID NO: 635610
uuccacgcuucuaauaguc

SEQ ID NO: 635612 - RNA, 19 nt, Artificial Sequence
  Description of Artificial Sequence: Synthetic oligonucleotide
  Sense strand starting at position 1461 of SEQ ID NO: 585384
ccugucucuucuuuggaca

SEQ ID NO: 635613 - RNA, 19 nt, Artificial Sequence
  Description of Artificial Sequence: Synthetic oligonucleotide
  Antisense strand to SEQ ID NO: 635612
uguccaaagaagagacagg

SEQ ID NO: 635614 - RNA, 19 nt, Artificial Sequence
  Description of Artificial Sequence: Synthetic oligonucleotide
  Sense strand starting at position 1514 of SEQ ID NO: 585384
auggguaccagguaugagu

SEQ ID NO: 635615 - RNA, 19 nt, Artificial Sequence
  Description of Artificial Sequence: Synthetic oligonucleotide
  Antisense strand to SEQ ID NO: 635614
acucauaccugguacccau

SEQ ID NO: 635616 - RNA, 19 nt, Artificial Sequence
  Description of Artificial Sequence: Synthetic oligonucleotide
  Sense strand starting at position 1633 of SEQ ID NO: 585384
cugaaagaaucugaacuca

SEQ ID NO: 635617 - RNA, 19 nt, Artificial Sequence
  Description of Artificial Sequence: Synthetic oligonucleotide
  Antisense strand to SEQ ID NO: 635616
ugaguucagauucuuucag

SEQ ID NO: 635618 - RNA, 19 nt, Artificial Sequence
  Description of Artificial Sequence: Synthetic oligonucleotide
  Sense strand starting at position 2181 of SEQ ID NO: 585384
ugcgacaagcccuggauuu

SEQ ID NO: 635619 - RNA, 19 nt, Artificial Sequence
  Description of Artificial Sequence: Synthetic oligonucleotide
  Antisense strand to SEQ ID NO: 635618
aaauccagggcuugucgca

SEQ ID NO: 635620 - RNA, 19 nt, Artificial Sequence
  Description of Artificial Sequence: Synthetic oligonucleotide
  Sense strand starting at position 2304 of SEQ ID NO: 585384
augcauacauucuuaagga

SEQ ID NO: 635621 - RNA, 19 nt, Artificial Sequence
  Description of Artificial Sequence: Synthetic oligonucleotide
  Antisense strand to SEQ ID NO: 635620
uccuuaagaauguaugcau

SEQ ID NO: 635622 - RNA, 19 nt, Artificial Sequence
  Description of Artificial Sequence: Synthetic oligonucleotide
  Sense strand starting at position 2320 of SEQ ID NO: 585384
ggauauaaacugugucaag

SEQ ID NO: 635623 - RNA, 19 nt, Artificial Sequence
  Description of Artificial Sequence: Synthetic oligonucleotide
  Antisense strand to SEQ ID NO: 635622
cuugacacaguuuauaucc

SEQ ID NO: 635624 - RNA, 19 nt, Artificial Sequence
  Description of Artificial Sequence: Synthetic oligonucleotide
  Sense strand starting at position 2321 of SEQ ID NO: 585384
gauauaaacugugucaagu

SEQ ID NO: 635625 - RNA, 19 nt, Artificial Sequence
  Description of Artificial Sequence: Synthetic oligonucleotide
  Antisense strand to SEQ ID NO: 635624
acuugacacaguuuauauc

SEQ ID NO: 635626 - RNA, 19 nt, Artificial Sequence
  Description of Artificial Sequence: Synthetic oligonucleotide
  Sense strand starting at position 2401 of SEQ ID NO: 585384
uuguuaaguguacggagaa

SEQ ID NO: 635627 - RNA, 19 nt, Artificial Sequence
  Description of Artificial Sequence: Synthetic oligonucleotide
  Antisense strand to SEQ ID NO: 635626
uucuccguacacuuaacaa

SEQ ID NO: 635628 - RNA, 19 nt, Artificial Sequence
  Description of Artificial Sequence: Synthetic oligonucleotide
  Sense strand starting at position 2832 of SEQ ID NO: 585384
cagccacaugaguguauuu

SEQ ID NO: 635629 - RNA, 19 nt, Artificial Sequence
  Description of Artificial Sequence: Synthetic oligonucleotide
  Antisense strand to SEQ ID NO: 635628
aaauacacucauguggcug

SEQ ID NO: 635630 - RNA, 19 nt, Artificial Sequence
  Description of Artificial Sequence: Synthetic oligonucleotide
  Sense strand starting at position 2854 of SEQ ID NO: 585384
acagcaauguagucaccaa

SEQ ID NO: 635631 - RNA, 19 nt, Artificial Sequence
  Description of Artificial Sequence: Synthetic oligonucleotide
  Antisense strand to SEQ ID NO: 635630
uuggugacuacauugcugu

SEQ ID NO: 635632 - RNA, 19 nt, Artificial Sequence
  Description of Artificial Sequence: Synthetic oligonucleotide
  Sense strand starting at position 2861 of SEQ ID NO: 585384
uguagucaccaauaaacga

SEQ ID NO: 635633 - RNA, 19 nt, Artificial Sequence
  Description of Artificial Sequence: Synthetic oligonucleotide
  Antisense strand to SEQ ID NO: 635632
ucguuuauuggugacuaca

SEQ ID NO: 635634 - RNA, 19 nt, Artificial Sequence
  Description of Artificial Sequence: Synthetic oligonucleotide
  Sense strand starting at position 2889 of SEQ ID NO: 585384
guuaaaguacuguagauua

SEQ ID NO: 635635 - RNA, 19 nt, Artificial Sequence
  Description of Artificial Sequence: Synthetic oligonucleotide
  Antisense strand to SEQ ID NO: 635634
uaaucuacaguacuuuaac

SEQ ID NO: 635636 - RNA, 19 nt, Artificial Sequence
  Description of Artificial Sequence: Synthetic oligonucleotide
  Sense strand starting at position 2921 of SEQ ID NO: 585384
uguaaucuacccuggaguu

SEQ ID NO: 635637 - RNA, 19 nt, Artificial Sequence
  Description of Artificial Sequence: Synthetic oligonucleotide
  Antisense strand to SEQ ID NO: 635636
aacuccaggguagauuaca

SEQ ID NO: 635638 - RNA, 19 nt, Artificial Sequence
  Description of Artificial Sequence: Synthetic oligonucleotide
  Sense strand starting at position 2957 of SEQ ID NO: 585384
aacagacuguguuccagau

SEQ ID NO: 635639 - RNA, 19 nt, Artificial Sequence
  Description of Artificial Sequence: Synthetic oligonucleotide
  Antisense strand to SEQ ID NO: 635638
aucuggaacacagucuguu

SEQ ID NO: 635640 - RNA, 19 nt, Artificial Sequence
  Description of Artificial Sequence: Synthetic oligonucleotide
  Sense strand starting at position 2961 of SEQ ID NO: 585384
gacuguguuccagaugcaa

SEQ ID NO: 635641 - RNA, 19 nt, Artificial Sequence
  Description of Artificial Sequence: Synthetic oligonucleotide
  Antisense strand to SEQ ID NO: 635640
uugcaucuggaacacaguc

SEQ ID NO: 635642 - RNA, 19 nt, Artificial Sequence
  Description of Artificial Sequence: Synthetic oligonucleotide
  Sense strand starting at position 3021 of SEQ ID NO: 585384
ccagaagacguuugcaauu

SEQ ID NO: 635643 - RNA, 19 nt, Artificial Sequence
  Description of Artificial Sequence: Synthetic oligonucleotide
  Antisense strand to SEQ ID NO: 635642
aauugcaaacgucuucugg

SEQ ID NO: 635644 - RNA, 19 nt, Artificial Sequence
  Description of Artificial Sequence: Synthetic oligonucleotide
  Sense strand starting at position 3124 of SEQ ID NO: 585384
uauuuaacuguggguaugu

SEQ ID NO: 635645 - RNA, 19 nt, Artificial Sequence
  Description of Artificial Sequence: Synthetic oligonucleotide
  Antisense strand to SEQ ID NO: 635644
acauacccacaguuaaaua

SEQ ID NO: 635646 - RNA, 19 nt, Artificial Sequence
  Description of Artificial Sequence: Synthetic oligonucleotide
  Sense strand starting at position 3137 of SEQ ID NO: 585384
guauguagggcugagaaag

SEQ ID NO: 635647 - RNA, 19 nt, Artificial Sequence
  Description of Artificial Sequence: Synthetic oligonucleotide
  Antisense strand to SEQ ID NO: 635646
cuuucucagcccuacauac

SEQ ID NO: 635648 - RNA, 19 nt, Artificial Sequence
  Description of Artificial Sequence: Synthetic oligonucleotide
  Sense strand starting at position 3177 of SEQ ID NO: 585384
ugggcaguguuaccagaaa

SEQ ID NO: 635649 - RNA, 19 nt, Artificial Sequence
  Description of Artificial Sequence: Synthetic oligonucleotide
  Antisense strand to SEQ ID NO: 635648
uuucugguaacacugccca

SEQ ID NO: 635650 - RNA, 19 nt, Artificial Sequence
  Description of Artificial Sequence: Synthetic oligonucleotide
  Sense strand starting at position 3188 of SEQ ID NO: 585384
accagaaagcguugccaau

SEQ ID NO: 635651 - RNA, 19 nt, Artificial Sequence
  Description of Artificial Sequence: Synthetic oligonucleotide
  Antisense strand to SEQ ID NO: 635650
auuggcaacgcuuucuggu

SEQ ID NO: 635652 - RNA, 19 nt, Artificial Sequence
  Description of Artificial Sequence: Synthetic oligonucleotide
  Sense strand starting at position 3200 of SEQ ID NO: 585384
ugccaaucaugaguccaua

SEQ ID NO: 635653 - RNA, 19 nt, Artificial Sequence
  Description of Artificial Sequence: Synthetic oligonucleotide
  Antisense strand to SEQ ID NO: 635652
uauggacucaugauuggca

SEQ ID NO: 635654 - RNA, 19 nt, Artificial Sequence
  Description of Artificial Sequence: Synthetic oligonucleotide
  Sense strand starting at position 3211 of SEQ ID NO: 585384
aguccauauagugaaguga

SEQ ID NO: 635655 - RNA, 19 nt, Artificial Sequence
  Description of Artificial Sequence: Synthetic oligonucleotide
  Antisense strand to SEQ ID NO: 635654
ucacuucacuauauggacu

SEQ ID NO: 635656 - RNA, 19 nt, Artificial Sequence
  Description of Artificial Sequence: Synthetic oligonucleotide
  Sense strand starting at position 3702 of SEQ ID NO: 585384
guaugacuucuggauguug

SEQ ID NO: 635657 - RNA, 19 nt, Artificial Sequence
  Description of Artificial Sequence: Synthetic oligonucleotide
  Antisense strand to SEQ ID NO: 635656
caacauccagaagucauac

SEQ ID NO: 635658 - RNA, 19 nt, Artificial Sequence
  Description of Artificial Sequence: Synthetic oligonucleotide
  Sense strand starting at position 3855 of SEQ ID NO: 585384
gccugucuucuuuacgaca

SEQ ID NO: 635659 - RNA, 19 nt, Artificial Sequence
  Description of Artificial Sequence: Synthetic oligonucleotide
  Antisense strand to SEQ ID NO: 635658
ugucguaaagaagacaggc

SEQ ID NO: 635660 - RNA, 19 nt, Artificial Sequence
  Description of Artificial Sequence: Synthetic oligonucleotide
  Sense strand starting at position 776 of SEQ ID NO: 585385
cugccucgggcagaaauaa

SEQ ID NO: 635661 - RNA, 19 nt, Artificial Sequence
  Description of Artificial Sequence: Synthetic oligonucleotide
  Antisense strand to SEQ ID NO: 635660
uuauuucugcccgaggcag

SEQ ID NO: 635662 - RNA, 19 nt, Artificial Sequence
  Description of Artificial Sequence: Synthetic oligonucleotide
  Sense strand starting at position 789 of SEQ ID NO: 585385
aaauaaaccggaggguuua

SEQ ID NO: 635663 - RNA, 19 nt, Artificial Sequence
  Description of Artificial Sequence: Synthetic oligonucleotide
  Antisense strand to SEQ ID NO: 635662
uaaacccuccgguuuauuu

SEQ ID NO: 635664 - RNA, 19 nt, Artificial Sequence
  Description of Artificial Sequence: Synthetic oligonucleotide
  Sense strand starting at position 834 of SEQ ID NO: 585385
ggaaauuggagcugaucua

SEQ ID NO: 635665 - RNA, 19 nt, Artificial Sequence
  Description of Artificial Sequence: Synthetic oligonucleotide
  Antisense strand to SEQ ID NO: 635664
uagaucagcuccaauuucc

SEQ ID NO: 635666 - RNA, 19 nt, Artificial Sequence
  Description of Artificial Sequence: Synthetic oligonucleotide
  Sense strand starting at position 1532 of SEQ ID NO: 585385
ccgugugcgcgcaaagaaa

SEQ ID NO: 635667 - RNA, 19 nt, Artificial Sequence
  Description of Artificial Sequence: Synthetic oligonucleotide
  Antisense strand to SEQ ID NO: 635666
uuucuuugcgcgcacacgg

SEQ ID NO: 635668 - RNA, 19 nt, Artificial Sequence
  Description of Artificial Sequence: Synthetic oligonucleotide
  Sense strand starting at position 1665 of SEQ ID NO: 585385
agccguuuccgagucacuu

SEQ ID NO: 635669 - RNA, 19 nt, Artificial Sequence
  Description of Artificial Sequence: Synthetic oligonucleotide
  Antisense strand to SEQ ID NO: 635668
aagugacucggaaacggcu

SEQ ID NO: 635670 - RNA, 19 nt, Artificial Sequence
  Description of Artificial Sequence: Synthetic oligonucleotide
  Sense strand starting at position 2110 of SEQ ID NO: 585385
gcgccuucgccgcuggaaa

SEQ ID NO: 635671 - RNA, 19 nt, Artificial Sequence
  Description of Artificial Sequence: Synthetic oligonucleotide
  Antisense strand to SEQ ID NO: 635670
uuuccagcggcgaaggcgc

SEQ ID NO: 635672 - RNA, 19 nt, Artificial Sequence
  Description of Artificial Sequence: Synthetic oligonucleotide
  Sense strand starting at position 2258 of SEQ ID NO: 585385
guuccagauuucuuugucu

SEQ ID NO: 635673 - RNA, 19 nt, Artificial Sequence
  Description of Artificial Sequence: Synthetic oligonucleotide
  Antisense strand to SEQ ID NO: 635672
agacaaagaaaucuggaac

SEQ ID NO: 635674 - RNA, 19 nt, Artificial Sequence
  Description of Artificial Sequence: Synthetic oligonucleotide
  Sense strand starting at position 2324 of SEQ ID NO: 585385
caccaugugcugugaaaug

SEQ ID NO: 635675 - RNA, 19 nt, Artificial Sequence
  Description of Artificial Sequence: Synthetic oligonucleotide
  Antisense strand to SEQ ID NO: 635674
cauuucacagcacauggug

SEQ ID NO: 635676 - RNA, 19 nt, Artificial Sequence
  Description of Artificial Sequence: Synthetic oligonucleotide
  Sense strand starting at position 2331 of SEQ ID NO: 585385
ugcugugaaauguaugcau

SEQ ID NO: 635677 - RNA, 19 nt, Artificial Sequence
  Description of Artificial Sequence: Synthetic oligonucleotide
  Antisense strand to SEQ ID NO: 635676
augcauacauuucacagca

SEQ ID NO: 635678 - RNA, 19 nt, Artificial Sequence
  Description of Artificial Sequence: Synthetic oligonucleotide
  Sense strand starting at position 2360 of SEQ ID NO: 585385
aagagugggccuuagucuu

SEQ ID NO: 635679 - RNA, 19 nt, Artificial Sequence
  Description of Artificial Sequence: Synthetic oligonucleotide
  Antisense strand to SEQ ID NO: 635678
aagacuaaggcccacucuu

SEQ ID NO: 635680 - RNA, 19 nt, Artificial Sequence
  Description of Artificial Sequence: Synthetic oligonucleotide
  Sense strand starting at position 2433 of SEQ ID NO: 585385
aguuguaagcuuugggaga

SEQ ID NO: 635681 - RNA, 19 nt, Artificial Sequence
  Description of Artificial Sequence: Synthetic oligonucleotide
  Antisense strand to SEQ ID NO: 635680
ucucccaaagcuuacaacu

SEQ ID NO: 635682 - RNA, 19 nt, Artificial Sequence
  Description of Artificial Sequence: Synthetic oligonucleotide
  Sense strand starting at position 2492 of SEQ ID NO: 585385
uaaagaaagugugcauaua

SEQ ID NO: 635683 - RNA, 19 nt, Artificial Sequence
  Description of Artificial Sequence: Synthetic oligonucleotide
  Antisense strand to SEQ ID NO: 635682
uauaugcacacuuucuuua

SEQ ID NO: 635684 - RNA, 19 nt, Artificial Sequence
  Description of Artificial Sequence: Synthetic oligonucleotide
  Sense strand starting at position 2519 of SEQ ID NO: 585385
gccuucuuuccgcuuccua

SEQ ID NO: 635685 - RNA, 19 nt, Artificial Sequence
  Description of Artificial Sequence: Synthetic oligonucleotide
  Antisense strand to SEQ ID NO: 635684
uaggaagcggaaagaaggc

SEQ ID NO: 635686 - RNA, 19 nt, Artificial Sequence
  Description of Artificial Sequence: Synthetic oligonucleotide
  Sense strand starting at position 2537 of SEQ ID NO: 585385
aagugcggaucuuuauuga

SEQ ID NO: 635687 - RNA, 19 nt, Artificial Sequence
  Description of Artificial Sequence: Synthetic oligonucleotide
  Antisense strand to SEQ ID NO: 635686
ucaauaaagauccgcacuu

SEQ ID NO: 635688 - RNA, 19 nt, Artificial Sequence
  Description of Artificial Sequence: Synthetic oligonucleotide
  Sense strand starting at position 2573 of SEQ ID NO: 585385
gccucugucgaguaauagg

SEQ ID NO: 635689 - RNA, 19 nt, Artificial Sequence
  Description of Artificial Sequence: Synthetic oligonucleotide
  Antisense strand to SEQ ID NO: 635688
ccuauuacucgacagaggc

SEQ ID NO: 635690 - RNA, 19 nt, Artificial Sequence
  Description of Artificial Sequence: Synthetic oligonucleotide
  Sense strand starting at position 2581 of SEQ ID NO: 585385
cgaguaauaggcugagauu

SEQ ID NO: 635691 - RNA, 19 nt, Artificial Sequence
  Description of Artificial Sequence: Synthetic oligonucleotide
  Antisense strand to SEQ ID NO: 635690
aaucucagccuauuacucg

SEQ ID NO: 635692 - RNA, 19 nt, Artificial Sequence
  Description of Artificial Sequence: Synthetic oligonucleotide
  Sense strand starting at position 2610 of SEQ ID NO: 585385
cuuagaacacugugaaagu

SEQ ID NO: 635693 - RNA, 19 nt, Artificial Sequence
  Description of Artificial Sequence: Synthetic oligonucleotide
  Antisense strand to SEQ ID NO: 635692
acuuucacaguguucuaag

SEQ ID NO: 635694 - RNA, 19 nt, Artificial Sequence
  Description of Artificial Sequence: Synthetic oligonucleotide
  Sense strand starting at position 2621 of SEQ ID NO: 585385
gugaaagucccuuggcaau

SEQ ID NO: 635695 - RNA, 19 nt, Artificial Sequence
  Description of Artificial Sequence: Synthetic oligonucleotide
  Antisense strand to SEQ ID NO: 635694
auugccaagggacuuucac

SEQ ID NO: 635696 - RNA, 19 nt, Artificial Sequence
  Description of Artificial Sequence: Synthetic oligonucleotide
  Sense strand starting at position 2736 of SEQ ID NO: 585385
ucaagagaguauuacauuu

SEQ ID NO: 635697 - RNA, 19 nt, Artificial Sequence
  Description of Artificial Sequence: Synthetic oligonucleotide
  Antisense strand to SEQ ID NO: 635696
aaauguaauacucucuuga

SEQ ID NO: 635698 - RNA, 19 nt, Artificial Sequence
  Description of Artificial Sequence: Synthetic oligonucleotide
  Sense strand starting at position 2763 of SEQ ID NO: 585385
acagcuuucggcgcauuga

SEQ ID NO: 635699 - RNA, 19 nt, Artificial Sequence
  Description of Artificial Sequence: Synthetic oligonucleotide
  Antisense strand to SEQ ID NO: 635698
ucaaugcgccgaaagcugu

SEQ ID NO: 635700 - RNA, 19 nt, Artificial Sequence
  Description of Artificial Sequence: Synthetic oligonucleotide
  Sense strand starting at position 2936 of SEQ ID NO: 585385
agggaagcaugucuuagau

SEQ ID NO: 635701 - RNA, 19 nt, Artificial Sequence
  Description of Artificial Sequence: Synthetic oligonucleotide
  Antisense strand to SEQ ID NO: 635700
aucuaagacaugcuucccu

SEQ ID NO: 635702 - RNA, 19 nt, Artificial Sequence
  Description of Artificial Sequence: Synthetic oligonucleotide
  Sense strand starting at position 3049 of SEQ ID NO: 585385
cugccugaggccuagaauu

SEQ ID NO: 635703 - RNA, 19 nt, Artificial Sequence
  Description of Artificial Sequence: Synthetic oligonucleotide
  Antisense strand to SEQ ID NO: 635702
aauucuaggccucaggcag

SEQ ID NO: 635704 - RNA, 19 nt, Artificial Sequence
  Description of Artificial Sequence: Synthetic oligonucleotide
  Sense strand starting at position 3119 of SEQ ID NO: 585385
ggaauauuauucuugauug

SEQ ID NO: 635705 - RNA, 19 nt, Artificial Sequence
  Description of Artificial Sequence: Synthetic oligonucleotide
  Antisense strand to SEQ ID NO: 635704
caaucaagaauaauauucc

SEQ ID NO: 635706 - RNA, 19 nt, Artificial Sequence
  Description of Artificial Sequence: Synthetic oligonucleotide
  Sense strand starting at position 3199 of SEQ ID NO: 585385
uccuuaggaccaugaaauu

SEQ ID NO: 635707 - RNA, 19 nt, Artificial Sequence
  Description of Artificial Sequence: Synthetic oligonucleotide
  Antisense strand to SEQ ID NO: 635706
aauuucaugguccuaagga

SEQ ID NO: 635708 - RNA, 19 nt, Artificial Sequence
  Description of Artificial Sequence: Synthetic oligonucleotide
  Sense strand starting at position 3228 of SEQ ID NO: 585385
agcagaccacccgauauau

SEQ ID NO: 635709 - RNA, 19 nt, Artificial Sequence
  Description of Artificial Sequence: Synthetic oligonucleotide
  Antisense strand to SEQ ID NO: 635708
auauaucggguggucugcu

SEQ ID NO: 635710 - RNA, 19 nt, Artificial Sequence
  Description of Artificial Sequence: Synthetic oligonucleotide
  Sense strand starting at position 3289 of SEQ ID NO: 585385
ggccauaugccuuaacaug

SEQ ID NO: 635711 - RNA, 19 nt, Artificial Sequence
  Description of Artificial Sequence: Synthetic oligonucleotide
  Antisense strand to SEQ ID NO: 635710
cauguuaaggcauauggcc

SEQ ID NO: 635712 - RNA, 19 nt, Artificial Sequence
  Description of Artificial Sequence: Synthetic oligonucleotide
  Sense strand starting at position 3323 of SEQ ID NO: 585385
ggacaaauccugugaagcu

SEQ ID NO: 635713 - RNA, 19 nt, Artificial Sequence
  Description of Artificial Sequence: Synthetic oligonucleotide
  Antisense strand to SEQ ID NO: 635712
agcuucacaggauuugucc

SEQ ID NO: 635714 - RNA, 19 nt, Artificial Sequence
  Description of Artificial Sequence: Synthetic oligonucleotide
  Sense strand starting at position 3330 of SEQ ID NO: 585385
uccugugaagcugaaauga

SEQ ID NO: 635715 - RNA, 19 nt, Artificial Sequence
  Description of Artificial Sequence: Synthetic oligonucleotide
  Antisense strand to SEQ ID NO: 635714
ucauuucagcuucacagga

SEQ ID NO: 635716 - RNA, 19 nt, Artificial Sequence
  Description of Artificial Sequence: Synthetic oligonucleotide
  Sense strand starting at position 3412 of SEQ ID NO: 585385
gguagugagagcuguagau

SEQ ID NO: 635717 - RNA, 19 nt, Artificial Sequence
  Description of Artificial Sequence: Synthetic oligonucleotide
  Antisense strand to SEQ ID NO: 635716
aucuacagcucucacuacc

SEQ ID NO: 635718 - RNA, 19 nt, Artificial Sequence
  Description of Artificial Sequence: Synthetic oligonucleotide
  Sense strand starting at position 3414 of SEQ ID NO: 585385
uagugagagcuguagauga

SEQ ID NO: 635719 - RNA, 19 nt, Artificial Sequence
  Description of Artificial Sequence: Synthetic oligonucleotide
  Antisense strand to SEQ ID NO: 635718
ucaucuacagcucucacua

SEQ ID NO: 635720 - RNA, 19 nt, Artificial Sequence
  Description of Artificial Sequence: Synthetic oligonucleotide
  Sense strand starting at position 3416 of SEQ ID NO: 585385
gugagagcuguagaugauc

SEQ ID NO: 635721 - RNA, 19 nt, Artificial Sequence
  Description of Artificial Sequence: Synthetic oligonucleotide
  Antisense strand to SEQ ID NO: 635720
gaucaucuacagcucucac

SEQ ID NO: 635722 - RNA, 19 nt, Artificial Sequence
  Description of Artificial Sequence: Synthetic oligonucleotide
  Sense strand starting at position 3421 of SEQ ID NO: 585385
agcuguagaugaucucaaa

SEQ ID NO: 635723 - RNA, 19 nt, Artificial Sequence
  Description of Artificial Sequence: Synthetic oligonucleotide
  Antisense strand to SEQ ID NO: 635722
uuugagaucaucuacagcu

SEQ ID NO: 635724 - RNA, 19 nt, Artificial Sequence
  Description of Artificial Sequence: Synthetic oligonucleotide
  Sense strand starting at position 3606 of SEQ ID NO: 585385
gggcaugagcuauguacaa

SEQ ID NO: 635725 - RNA, 19 nt, Artificial Sequence
  Description of Artificial Sequence: Synthetic oligonucleotide
  Antisense strand to SEQ ID NO: 635724
uuguacauagcucaugccc

SEQ ID NO: 635726 - RNA, 19 nt, Artificial Sequence
  Description of Artificial Sequence: Synthetic oligonucleotide
  Sense strand starting at position 3777 of SEQ ID NO: 585385
guauuaauggccuaccugu

SEQ ID NO: 635727 - RNA, 19 nt, Artificial Sequence
  Description of Artificial Sequence: Synthetic oligonucleotide
  Antisense strand to SEQ ID NO: 635726
acagguaggccauuaauac

SEQ ID NO: 635728 - RNA, 19 nt, Artificial Sequence
  Description of Artificial Sequence: Synthetic oligonucleotide
  Sense strand starting at position 3794 of SEQ ID NO: 585385
gugcuaagugcucugcaag

SEQ ID NO: 635729 - RNA, 19 nt, Artificial Sequence
  Description of Artificial Sequence: Synthetic oligonucleotide
  Antisense strand to SEQ ID NO: 635728
cuugcagagcacuuagcac

SEQ ID NO: 635730 - RNA, 19 nt, Artificial Sequence
  Description of Artificial Sequence: Synthetic oligonucleotide
  Sense strand starting at position 3856 of SEQ ID NO: 585385
agaaauucagccuggugga

SEQ ID NO: 635731 - RNA, 19 nt, Artificial Sequence
  Description of Artificial Sequence: Synthetic oligonucleotide
  Antisense strand to SEQ ID NO: 635730
uccaccaggcugaauuucu

SEQ ID NO: 635732 - RNA, 19 nt, Artificial Sequence
  Description of Artificial Sequence: Synthetic oligonucleotide
  Sense strand starting at position 3883 of SEQ ID NO: 585385
guaguaaauugggcauuau

SEQ ID NO: 635733 - RNA, 19 nt, Artificial Sequence
  Description of Artificial Sequence: Synthetic oligonucleotide
  Antisense strand to SEQ ID NO: 635732
auaaugcccaauuuacuac

SEQ ID NO: 635734 - RNA, 19 nt, Artificial Sequence
  Description of Artificial Sequence: Synthetic oligonucleotide
  Sense strand starting at position 3887 of SEQ ID NO: 585385
uaaauugggcauuauguua

SEQ ID NO: 635735 - RNA, 19 nt, Artificial Sequence
  Description of Artificial Sequence: Synthetic oligonucleotide
  Antisense strand to SEQ ID NO: 635734
uaacauaaugcccaauuua

SEQ ID NO: 635736 - RNA, 19 nt, Artificial Sequence
  Description of Artificial Sequence: Synthetic oligonucleotide
  Sense strand starting at position 3924 of SEQ ID NO: 585385
aauguuauagcagagguau

SEQ ID NO: 635737 - RNA, 19 nt, Artificial Sequence
  Description of Artificial Sequence: Synthetic oligonucleotide
  Antisense strand to SEQ ID NO: 635736
auaccucugcuauaacauu

SEQ ID NO: 635738 - RNA, 19 nt, Artificial Sequence
  Description of Artificial Sequence: Synthetic oligonucleotide
  Sense strand starting at position 3981 of SEQ ID NO: 585385
aaggcuuuacauuagaagu

SEQ ID NO: 635739 - RNA, 19 nt, Artificial Sequence
  Description of Artificial Sequence: Synthetic oligonucleotide
  Antisense strand to SEQ ID NO: 635738
acuucuaauguaaagccuu

SEQ ID NO: 635740 - RNA, 19 nt, Artificial Sequence
  Description of Artificial Sequence: Synthetic oligonucleotide
  Sense strand starting at position 10 of SEQ ID NO: 585386
ugaggauaaugaggaauaa

SEQ ID NO: 635741 - RNA, 19 nt, Artificial Sequence
  Description of Artificial Sequence: Synthetic oligonucleotide
  Antisense strand to SEQ ID NO: 635740
uuauuccucauuauccuca

SEQ ID NO: 635742 - RNA, 19 nt, Artificial Sequence
  Description of Artificial Sequence: Synthetic oligonucleotide
  Sense strand starting at position 20 of SEQ ID NO: 585386
gaggaauaauaagauaaug

SEQ ID NO: 635743 - RNA, 19 nt, Artificial Sequence
  Description of Artificial Sequence: Synthetic oligonucleotide
  Antisense strand to SEQ ID NO: 635742
cauuaucuuauuauuccuc

SEQ ID NO: 635744 - RNA, 19 nt, Artificial Sequence
  Description of Artificial Sequence: Synthetic oligonucleotide
  Sense strand starting at position 41 of SEQ ID NO: 585386
uguagaaaguacuuaguau

SEQ ID NO: 635745 - RNA, 19 nt, Artificial Sequence
  Description of Artificial Sequence: Synthetic oligonucleotide
  Antisense strand to SEQ ID NO: 635744
auacuaaguacuuucuaca

SEQ ID NO: 635746 - RNA, 19 nt, Artificial Sequence
  Description of Artificial Sequence: Synthetic oligonucleotide
  Sense strand starting at position 42 of SEQ ID NO: 585386
guagaaaguacuuaguaua

SEQ ID NO: 635747 - RNA, 19 nt, Artificial Sequence
  Description of Artificial Sequence: Synthetic oligonucleotide
  Antisense strand to SEQ ID NO: 635746
uauacuaaguacuuucuac

SEQ ID NO: 635748 - RNA, 19 nt, Artificial Sequence
  Description of Artificial Sequence: Synthetic oligonucleotide
  Sense strand starting at position 298 of SEQ ID NO: 585386
caauguguacagcauguua

SEQ ID NO: 635749 - RNA, 19 nt, Artificial Sequence
  Description of Artificial Sequence: Synthetic oligonucleotide
  Antisense strand to SEQ ID NO: 635748
uaacaugcuguacacauug

SEQ ID NO: 635750 - RNA, 19 nt, Artificial Sequence
  Description of Artificial Sequence: Synthetic oligonucleotide
  Sense strand starting at position 309 of SEQ ID NO: 585386
gcauguuacuacuucuauu

SEQ ID NO: 635751 - RNA, 19 nt, Artificial Sequence
  Description of Artificial Sequence: Synthetic oligonucleotide
  Antisense strand to SEQ ID NO: 635750
aauagaaguaguaacaugc

SEQ ID NO: 635752 - RNA, 19 nt, Artificial Sequence
  Description of Artificial Sequence: Synthetic oligonucleotide
  Sense strand starting at position 409 of SEQ ID NO: 585386
acagauugccucugaggag

SEQ ID NO: 635753 - RNA, 19 nt, Artificial Sequence
  Description of Artificial Sequence: Synthetic oligonucleotide
  Antisense strand to SEQ ID NO: 635752
cuccucagaggcaaucugu

SEQ ID NO: 635754 - RNA, 19 nt, Artificial Sequence
  Description of Artificial Sequence: Synthetic oligonucleotide
  Sense strand starting at position 620 of SEQ ID NO: 585386
cgacuacuccagcagauca

SEQ ID NO: 635755 - RNA, 19 nt, Artificial Sequence
  Description of Artificial Sequence: Synthetic oligonucleotide
  Antisense strand to SEQ ID NO: 635754
ugaucugcuggaguagucg

SEQ ID NO: 635756 - RNA, 19 nt, Artificial Sequence
  Description of Artificial Sequence: Synthetic oligonucleotide
  Sense strand starting at position 658 of SEQ ID NO: 585386
uguggagccuauuccauua

SEQ ID NO: 635757 - RNA, 19 nt, Artificial Sequence
  Description of Artificial Sequence: Synthetic oligonucleotide
  Antisense strand to SEQ ID NO: 635756
uaauggaauaggcuccaca

SEQ ID NO: 635758 - RNA, 19 nt, Artificial Sequence
  Description of Artificial Sequence: Synthetic oligonucleotide
  Sense strand starting at position 688 of SEQ ID NO: 585386
uuaugcuaaucuuugcaga

SEQ ID NO: 635759 - RNA, 19 nt, Artificial Sequence
  Description of Artificial Sequence: Synthetic oligonucleotide
  Antisense strand to SEQ ID NO: 635758
ucugcaaagauuagcauaa

SEQ ID NO: 635760 - RNA, 19 nt, Artificial Sequence
  Description of Artificial Sequence: Synthetic oligonucleotide
  Sense strand starting at position 690 of SEQ ID NO: 585386
augcuaaucuuugcagaaa

SEQ ID NO: 635761 - RNA, 19 nt, Artificial Sequence
  Description of Artificial Sequence: Synthetic oligonucleotide
  Antisense strand to SEQ ID NO: 635760
uuucugcaaagauuagcau

SEQ ID NO: 635762 - RNA, 19 nt, Artificial Sequence
  Description of Artificial Sequence: Synthetic oligonucleotide
  Sense strand starting at position 764 of SEQ ID NO: 585386
agggucaaagauugucaua

SEQ ID NO: 635763 - RNA, 19 nt, Artificial Sequence
  Description of Artificial Sequence: Synthetic oligonucleotide
  Antisense strand to SEQ ID NO: 635762
uaugacaaucuuugacccu

SEQ ID NO: 635764 - RNA, 19 nt, Artificial Sequence
  Description of Artificial Sequence: Synthetic oligonucleotide
  Sense strand starting at position 766 of SEQ ID NO: 585386
ggucaaagauugucauauu

SEQ ID NO: 635765 - RNA, 19 nt, Artificial Sequence
  Description of Artificial Sequence: Synthetic oligonucleotide
  Antisense strand to SEQ ID NO: 635764
aauaugacaaucuuugacc

SEQ ID NO: 635766 - RNA, 19 nt, Artificial Sequence
  Description of Artificial Sequence: Synthetic oligonucleotide
  Sense strand starting at position 767 of SEQ ID NO: 585386
gucaaagauugucauauuu

SEQ ID NO: 635767 - RNA, 19 nt, Artificial Sequence
  Description of Artificial Sequence: Synthetic oligonucleotide
  Antisense strand to SEQ ID NO: 635766
aaauaugacaaucuuugac

SEQ ID NO: 635768 - RNA, 19 nt, Artificial Sequence
  Description of Artificial Sequence: Synthetic oligonucleotide
  Sense strand starting at position 815 of SEQ ID NO: 585386
guauauaccuuauuaaggu

SEQ ID NO: 635769 - RNA, 19 nt, Artificial Sequence
  Description of Artificial Sequence: Synthetic oligonucleotide
  Antisense strand to SEQ ID NO: 635768
accuuaauaagguauauac

SEQ ID NO: 635770 - RNA, 19 nt, Artificial Sequence
  Description of Artificial Sequence: Synthetic oligonucleotide
  Sense strand starting at position 890 of SEQ ID NO: 585386
cgaguauguggaugaggga

SEQ ID NO: 635771 - RNA, 19 nt, Artificial Sequence
  Description of Artificial Sequence: Synthetic oligonucleotide
  Antisense strand to SEQ ID NO: 635770
ucccucauccacauacucg

SEQ ID NO: 635772 - RNA, 19 nt, Artificial Sequence
  Description of Artificial Sequence: Synthetic oligonucleotide
  Sense strand starting at position 947 of SEQ ID NO: 585386
aucauauuugcacgucaag

SEQ ID NO: 635773 - RNA, 19 nt, Artificial Sequence
  Description of Artificial Sequence: Synthetic oligonucleotide
  Antisense strand to SEQ ID NO: 635772
cuugacgugcaaauaugau

SEQ ID NO: 635774 - RNA, 19 nt, Artificial Sequence
  Description of Artificial Sequence: Synthetic oligonucleotide
  Sense strand starting at position 977 of SEQ ID NO: 585386
gcgcuaagugcuuaggaaa

SEQ ID NO: 635775 - RNA, 19 nt, Artificial Sequence
  Description of Artificial Sequence: Synthetic oligonucleotide
  Antisense strand to SEQ ID NO: 635774
uuuccuaagcacuuagcgc

SEQ ID NO: 635776 - RNA, 19 nt, Artificial Sequence
  Description of Artificial Sequence: Synthetic oligonucleotide
  Sense strand starting at position 1037 of SEQ ID NO: 585386
gugcgaauacaugaauaga

SEQ ID NO: 635777 - RNA, 19 nt, Artificial Sequence
  Description of Artificial Sequence: Synthetic oligonucleotide
  Antisense strand to SEQ ID NO: 635776
ucuauucauguauucgcac

SEQ ID NO: 635778 - RNA, 19 nt, Artificial Sequence
  Description of Artificial Sequence: Synthetic oligonucleotide
  Sense strand starting at position 1070 of SEQ ID NO: 585386
acucuugguuacucagaau

SEQ ID NO: 635779 - RNA, 19 nt, Artificial Sequence
  Description of Artificial Sequence: Synthetic oligonucleotide
  Antisense strand to SEQ ID NO: 635778
auucugaguaaccaagagu

SEQ ID NO: 635780 - RNA, 19 nt, Artificial Sequence
  Description of Artificial Sequence: Synthetic oligonucleotide
  Sense strand starting at position 1144 of SEQ ID NO: 585386
aagaaagcccggugacaaa

SEQ ID NO: 635781 - RNA, 19 nt, Artificial Sequence
  Description of Artificial Sequence: Synthetic oligonucleotide
  Antisense strand to SEQ ID NO: 635780
uuugucaccgggcuuucuu

SEQ ID NO: 635782 - RNA, 19 nt, Artificial Sequence
  Description of Artificial Sequence: Synthetic oligonucleotide
  Sense strand starting at position 1235 of SEQ ID NO: 585386
ggaccuuccuuccuagaau

SEQ ID NO: 635783 - RNA, 19 nt, Artificial Sequence
  Description of Artificial Sequence: Synthetic oligonucleotide
  Antisense strand to SEQ ID NO: 635782
auucuaggaaggaaggucc

SEQ ID NO: 635784 - RNA, 19 nt, Artificial Sequence
  Description of Artificial Sequence: Synthetic oligonucleotide
  Sense strand starting at position 1483 of SEQ ID NO: 585386
ggucauuucccucagugcu

SEQ ID NO: 635785 - RNA, 19 nt, Artificial Sequence
  Description of Artificial Sequence: Synthetic oligonucleotide
  Antisense strand to SEQ ID NO: 635784
agcacugagggaaaugacc

SEQ ID NO: 635786 - RNA, 19 nt, Artificial Sequence
  Description of Artificial Sequence: Synthetic oligonucleotide
  Sense strand starting at position 1609 of SEQ ID NO: 585386
aggguaaucccagaggcuu

SEQ ID NO: 635787 - RNA, 19 nt, Artificial Sequence
  Description of Artificial Sequence: Synthetic oligonucleotide
  Antisense strand to SEQ ID NO: 635786
aagccucugggauuacccu

SEQ ID NO: 635788 - RNA, 19 nt, Artificial Sequence
  Description of Artificial Sequence: Synthetic oligonucleotide
  Sense strand starting at position 2206 of SEQ ID NO: 585386
agcucacaugaccgagauu

SEQ ID NO: 635789 - RNA, 19 nt, Artificial Sequence
  Description of Artificial Sequence: Synthetic oligonucleotide
  Antisense strand to SEQ ID NO: 635788
aaucucggucaugugagcu

SEQ ID NO: 635790 - RNA, 19 nt, Artificial Sequence
  Description of Artificial Sequence: Synthetic oligonucleotide
  Sense strand starting at position 2353 of SEQ ID NO: 585386
uuugacgaguaccugaaau

SEQ ID NO: 635791 - RNA, 19 nt, Artificial Sequence
  Description of Artificial Sequence: Synthetic oligonucleotide
  Antisense strand to SEQ ID NO: 635790
auuucagguacucgucaaa

SEQ ID NO: 635792 - RNA, 19 nt, Artificial Sequence
  Description of Artificial Sequence: Synthetic oligonucleotide
  Sense strand starting at position 2355 of SEQ ID NO: 585386
ugacgaguaccugaaaugu

SEQ ID NO: 635793 - RNA, 19 nt, Artificial Sequence
  Description of Artificial Sequence: Synthetic oligonucleotide
  Antisense strand to SEQ ID NO: 635792
acauuucagguacucguca

SEQ ID NO: 635794 - RNA, 19 nt, Artificial Sequence
  Description of Artificial Sequence: Synthetic oligonucleotide
  Sense strand starting at position 2443 of SEQ ID NO: 585386
guauaaguggcaugggaaa

SEQ ID NO: 635795 - RNA, 19 nt, Artificial Sequence
  Description of Artificial Sequence: Synthetic oligonucleotide
  Antisense strand to SEQ ID NO: 635794
uuucccaugccacuuauac

SEQ ID NO: 635796 - RNA, 19 nt, Artificial Sequence
  Description of Artificial Sequence: Synthetic oligonucleotide
  Sense strand starting at position 2493 of SEQ ID NO: 585386
ggagaagucaugggacagu

SEQ ID NO: 635797 - RNA, 19 nt, Artificial Sequence
  Description of Artificial Sequence: Synthetic oligonucleotide
  Antisense strand to SEQ ID NO: 635796
acugucccaugacuucucc

SEQ ID NO: 635798 - RNA, 19 nt, Artificial Sequence
  Description of Artificial Sequence: Synthetic oligonucleotide
  Sense strand starting at position 2496 of SEQ ID NO: 585386
gaagucaugggacagugua

SEQ ID NO: 635799 - RNA, 19 nt, Artificial Sequence
  Description of Artificial Sequence: Synthetic oligonucleotide
  Antisense strand to SEQ ID NO: 635798
uacacugucccaugacuuc

SEQ ID NO: 635800 - RNA, 19 nt, Artificial Sequence
  Description of Artificial Sequence: Synthetic oligonucleotide
  Sense strand starting at position 2509 of SEQ ID NO: 585386
aguguauccgaaggguaac

SEQ ID NO: 635801 - RNA, 19 nt, Artificial Sequence
  Description of Artificial Sequence: Synthetic oligonucleotide
  Antisense strand to SEQ ID NO: 635800
guuacccuucggauacacu

SEQ ID NO: 635802 - RNA, 19 nt, Artificial Sequence
  Description of Artificial Sequence: Synthetic oligonucleotide
  Sense strand starting at position 2510 of SEQ ID NO: 585386
guguauccgaaggguaacu

SEQ ID NO: 635803 - RNA, 19 nt, Artificial Sequence
  Description of Artificial Sequence: Synthetic oligonucleotide
  Antisense strand to SEQ ID NO: 635802
aguuacccuucggauacac

SEQ ID NO: 635804 - RNA, 19 nt, Artificial Sequence
  Description of Artificial Sequence: Synthetic oligonucleotide
  Sense strand starting at position 2519 of SEQ ID NO: 585386
aaggguaacuucucauuga

SEQ ID NO: 635805 - RNA, 19 nt, Artificial Sequence
  Description of Artificial Sequence: Synthetic oligonucleotide
  Antisense strand to SEQ ID NO: 635804
ucaaugagaaguuacccuu

SEQ ID NO: 635806 - RNA, 19 nt, Artificial Sequence
  Description of Artificial Sequence: Synthetic oligonucleotide
  Sense strand starting at position 2522 of SEQ ID NO: 585386
gguaacuucucauugaucu

SEQ ID NO: 635807 - RNA, 19 nt, Artificial Sequence
  Description of Artificial Sequence: Synthetic oligonucleotide
  Antisense strand to SEQ ID NO: 635806
agaucaaugagaaguuacc

SEQ ID NO: 635808 - RNA, 19 nt, Artificial Sequence
  Description of Artificial Sequence: Synthetic oligonucleotide
  Sense strand starting at position 2523 of SEQ ID NO: 585386
guaacuucucauugaucug

SEQ ID NO: 635809 - RNA, 19 nt, Artificial Sequence
  Description of Artificial Sequence: Synthetic oligonucleotide
  Antisense strand to SEQ ID NO: 635808
cagaucaaugagaaguuac

SEQ ID NO: 635810 - RNA, 19 nt, Artificial Sequence
  Description of Artificial Sequence: Synthetic oligonucleotide
  Sense strand starting at position 2586 of SEQ ID NO: 585386
gcgaauuaggaguacaaau

SEQ ID NO: 635811 - RNA, 19 nt, Artificial Sequence
  Description of Artificial Sequence: Synthetic oligonucleotide
  Antisense strand to SEQ ID NO: 635810
auuuguacuccuaauucgc

SEQ ID NO: 635812 - RNA, 19 nt, Artificial Sequence
  Description of Artificial Sequence: Synthetic oligonucleotide
  Sense strand starting at position 2599 of SEQ ID NO: 585386
acaaauugcuguccagaag

SEQ ID NO: 635813 - RNA, 19 nt, Artificial Sequence
  Description of Artificial Sequence: Synthetic oligonucleotide
  Antisense strand to SEQ ID NO: 635812
cuucuggacagcaauuugu

SEQ ID NO: 635814 - RNA, 19 nt, Artificial Sequence
  Description of Artificial Sequence: Synthetic oligonucleotide
  Sense strand starting at position 2600 of SEQ ID NO: 585386
caaauugcuguccagaaga

SEQ ID NO: 635815 - RNA, 19 nt, Artificial Sequence
  Description of Artificial Sequence: Synthetic oligonucleotide
  Antisense strand to SEQ ID NO: 635814
ucuucuggacagcaauuug

SEQ ID NO: 635816 - RNA, 19 nt, Artificial Sequence
  Description of Artificial Sequence: Synthetic oligonucleotide
  Sense strand starting at position 2628 of SEQ ID NO: 585386
uccaguaagcgagaugaau

SEQ ID NO: 635817 - RNA, 19 nt, Artificial Sequence
  Description of Artificial Sequence: Synthetic oligonucleotide
  Antisense strand to SEQ ID NO: 635816
auucaucucgcuuacugga

SEQ ID NO: 635818 - RNA, 19 nt, Artificial Sequence
  Description of Artificial Sequence: Synthetic oligonucleotide
  Sense strand starting at position 3408 of SEQ ID NO: 585386
agagcaguuuggcugguaa

SEQ ID NO: 635819 - RNA, 19 nt, Artificial Sequence
  Description of Artificial Sequence: Synthetic oligonucleotide
  Antisense strand to SEQ ID NO: 635818
uuaccagccaaacugcucu

SEQ ID NO: 635820 - RNA, 19 nt, Artificial Sequence
  Description of Artificial Sequence: Synthetic oligonucleotide
  Sense strand starting at position 46 of SEQ ID NO: 585387
guagcauuuaagugguauc

SEQ ID NO: 635821 - RNA, 19 nt, Artificial Sequence
  Description of Artificial Sequence: Synthetic oligonucleotide
  Antisense strand to SEQ ID NO: 635820
gauaccacuuaaaugcuac

SEQ ID NO: 635822 - RNA, 19 nt, Artificial Sequence
  Description of Artificial Sequence: Synthetic oligonucleotide
  Sense strand starting at position 59 of SEQ ID NO: 585387
gguaucuugacagaauggu

SEQ ID NO: 635823 - RNA, 19 nt, Artificial Sequence
  Description of Artificial Sequence: Synthetic oligonucleotide
  Antisense strand to SEQ ID NO: 635822
accauucugucaagauacc

SEQ ID NO: 635824 - RNA, 19 nt, Artificial Sequence
  Description of Artificial Sequence: Synthetic oligonucleotide
  Sense strand starting at position 63 of SEQ ID NO: 585387
ucuugacagaaugguagua

SEQ ID NO: 635825 - RNA, 19 nt, Artificial Sequence
  Description of Artificial Sequence: Synthetic oligonucleotide
  Antisense strand to SEQ ID NO: 635824
uacuaccauucugucaaga

SEQ ID NO: 635826 - RNA, 19 nt, Artificial Sequence
  Description of Artificial Sequence: Synthetic oligonucleotide
  Sense strand starting at position 206 of SEQ ID NO: 585387
ucaggauaauucuuagcaa

SEQ ID NO: 635827 - RNA, 19 nt, Artificial Sequence
  Description of Artificial Sequence: Synthetic oligonucleotide
  Antisense strand to SEQ ID NO: 635826
uugcuaagaauuauccuga

SEQ ID NO: 635828 - RNA, 19 nt, Artificial Sequence
  Description of Artificial Sequence: Synthetic oligonucleotide
  Sense strand starting at position 209 of SEQ ID NO: 585387
ggauaauucuuagcaacaa

SEQ ID NO: 635829 - RNA, 19 nt, Artificial Sequence
  Description of Artificial Sequence: Synthetic oligonucleotide
  Antisense strand to SEQ ID NO: 635828
uuguugcuaagaauuaucc

SEQ ID NO: 635830 - RNA, 19 nt, Artificial Sequence
  Description of Artificial Sequence: Synthetic oligonucleotide
  Sense strand starting at position 340 of SEQ ID NO: 585387
uuaugucuuguuuaaacac

SEQ ID NO: 635831 - RNA, 19 nt, Artificial Sequence
  Description of Artificial Sequence: Synthetic oligonucleotide
  Antisense strand to SEQ ID NO: 635830
guguuuaaacaagacauaa

SEQ ID NO: 635832 - RNA, 19 nt, Artificial Sequence
  Description of Artificial Sequence: Synthetic oligonucleotide
  Sense strand starting at position 360 of SEQ ID NO: 585387
ccuuguaauugagcaaagu

SEQ ID NO: 635833 - RNA, 19 nt, Artificial Sequence
  Description of Artificial Sequence: Synthetic oligonucleotide
  Antisense strand to SEQ ID NO: 635832
acuuugcucaauuacaagg

SEQ ID NO: 635834 - RNA, 19 nt, Artificial Sequence
  Description of Artificial Sequence: Synthetic oligonucleotide
  Sense strand starting at position 361 of SEQ ID NO: 585387
cuuguaauugagcaaaguu

SEQ ID NO: 635835 - RNA, 19 nt, Artificial Sequence
  Description of Artificial Sequence: Synthetic oligonucleotide
  Antisense strand to SEQ ID NO: 635834
aacuuugcucaauuacaag

SEQ ID NO: 635836 - RNA, 19 nt, Artificial Sequence
  Description of Artificial Sequence: Synthetic oligonucleotide
  Sense strand starting at position 368 of SEQ ID NO: 585387
uugagcaaaguuuaauagu

SEQ ID NO: 635837 - RNA, 19 nt, Artificial Sequence
  Description of Artificial Sequence: Synthetic oligonucleotide
  Antisense strand to SEQ ID NO: 635836
acuauuaaacuuugcucaa

SEQ ID NO: 635838 - RNA, 19 nt, Artificial Sequence
  Description of Artificial Sequence: Synthetic oligonucleotide
  Sense strand starting at position 590 of SEQ ID NO: 585387
gggauaucucuuuacuccu

SEQ ID NO: 635839 - RNA, 19 nt, Artificial Sequence
  Description of Artificial Sequence: Synthetic oligonucleotide
  Antisense strand to SEQ ID NO: 635838
aggaguaaagagauauccc

SEQ ID NO: 635840 - RNA, 19 nt, Artificial Sequence
  Description of Artificial Sequence: Synthetic oligonucleotide
  Sense strand starting at position 658 of SEQ ID NO: 585387
acuauugacuuggcuagaa

SEQ ID NO: 635841 - RNA, 19 nt, Artificial Sequence
  Description of Artificial Sequence: Synthetic oligonucleotide
  Antisense strand to SEQ ID NO: 635840
uucuagccaagucaauagu

SEQ ID NO: 635842 - RNA, 19 nt, Artificial Sequence
  Description of Artificial Sequence: Synthetic oligonucleotide
  Sense strand starting at position 660 of SEQ ID NO: 585387
uauugacuuggcuagaagu

SEQ ID NO: 635843 - RNA, 19 nt, Artificial Sequence
  Description of Artificial Sequence: Synthetic oligonucleotide
  Antisense strand to SEQ ID NO: 635842
acuucuagccaagucaaua

SEQ ID NO: 635844 - RNA, 19 nt, Artificial Sequence
  Description of Artificial Sequence: Synthetic oligonucleotide
  Sense strand starting at position 662 of SEQ ID NO: 585387
uugacuuggcuagaaguua

SEQ ID NO: 635845 - RNA, 19 nt, Artificial Sequence
  Description of Artificial Sequence: Synthetic oligonucleotide
  Antisense strand to SEQ ID NO: 635844
uaacuucuagccaagucaa

SEQ ID NO: 635846 - RNA, 19 nt, Artificial Sequence
  Description of Artificial Sequence: Synthetic oligonucleotide
  Sense strand starting at position 765 of SEQ ID NO: 585387
guacucuuagguuaaacau

SEQ ID NO: 635847 - RNA, 19 nt, Artificial Sequence
  Description of Artificial Sequence: Synthetic oligonucleotide
  Antisense strand to SEQ ID NO: 635846
auguuuaaccuaagaguac

SEQ ID NO: 635848 - RNA, 19 nt, Artificial Sequence
  Description of Artificial Sequence: Synthetic oligonucleotide
  Sense strand starting at position 899 of SEQ ID NO: 585387
ugcacaugugcuuccugua

SEQ ID NO: 635849 - RNA, 19 nt, Artificial Sequence
  Description of Artificial Sequence: Synthetic oligonucleotide
  Antisense strand to SEQ ID NO: 635848
uacaggaagcacaugugca

SEQ ID NO: 635850 - RNA, 19 nt, Artificial Sequence
  Description of Artificial Sequence: Synthetic oligonucleotide
  Sense strand starting at position 1101 of SEQ ID NO: 585387
auagaagucuccucuguau

SEQ ID NO: 635851 - RNA, 19 nt, Artificial Sequence
  Description of Artificial Sequence: Synthetic oligonucleotide
  Antisense strand to SEQ ID NO: 635850
auacagaggagacuucuau

SEQ ID NO: 635852 - RNA, 19 nt, Artificial Sequence
  Description of Artificial Sequence: Synthetic oligonucleotide
  Sense strand starting at position 1169 of SEQ ID NO: 585387
gaagauaagauguggguuu

SEQ ID NO: 635853 - RNA, 19 nt, Artificial Sequence
  Description of Artificial Sequence: Synthetic oligonucleotide
  Antisense strand to SEQ ID NO: 635852
aaacccacaucuuaucuuc

SEQ ID NO: 635854 - RNA, 19 nt, Artificial Sequence
  Description of Artificial Sequence: Synthetic oligonucleotide
  Sense strand starting at position 1171 of SEQ ID NO: 585387
agauaagauguggguuuga

SEQ ID NO: 635855 - RNA, 19 nt, Artificial Sequence
  Description of Artificial Sequence: Synthetic oligonucleotide
  Antisense strand to SEQ ID NO: 635854
ucaaacccacaucuuaucu

SEQ ID NO: 635856 - RNA, 19 nt, Artificial Sequence
  Description of Artificial Sequence: Synthetic oligonucleotide
  Sense strand starting at position 1208 of SEQ ID NO: 585387
cgccauugccaugaaagaa

SEQ ID NO: 635857 - RNA, 19 nt, Artificial Sequence
  Description of Artificial Sequence: Synthetic oligonucleotide
  Antisense strand to SEQ ID NO: 635856
uucuuucauggcaauggcg

SEQ ID NO: 635858 - RNA, 19 nt, Artificial Sequence
  Description of Artificial Sequence: Synthetic oligonucleotide
  Sense strand starting at position 1436 of SEQ ID NO: 585387
gggcucugauuugaagaaa

SEQ ID NO: 635859 - RNA, 19 nt, Artificial Sequence
  Description of Artificial Sequence: Synthetic oligonucleotide
  Antisense strand to SEQ ID NO: 635858
uuucuucaaaucagagccc

SEQ ID NO: 635860 - RNA, 19 nt, Artificial Sequence
  Description of Artificial Sequence: Synthetic oligonucleotide
  Sense strand starting at position 1531 of SEQ ID NO: 585387
gcaagaccucuucgaaacu

SEQ ID NO: 635861 - RNA, 19 nt, Artificial Sequence
  Description of Artificial Sequence: Synthetic oligonucleotide
  Antisense strand to SEQ ID NO: 635860
aguuucgaagaggucuugc

SEQ ID NO: 635862 - RNA, 19 nt, Artificial Sequence
  Description of Artificial Sequence: Synthetic oligonucleotide
  Sense strand starting at position 1614 of SEQ ID NO: 585387
cucucauggcauugaacuu

SEQ ID NO: 635863 - RNA, 19 nt, Artificial Sequence
  Description of Artificial Sequence: Synthetic oligonucleotide
  Antisense strand to SEQ ID NO: 635862
aaguucaaugccaugagag

SEQ ID NO: 635864 - RNA, 19 nt, Artificial Sequence
  Description of Artificial Sequence: Synthetic oligonucleotide
  Sense strand starting at position 2222 of SEQ ID NO: 585387
augaaagcacuuugaaauc

SEQ ID NO: 635865 - RNA, 19 nt, Artificial Sequence
  Description of Artificial Sequence: Synthetic oligonucleotide
  Antisense strand to SEQ ID NO: 635864
gauuucaaagugcuuucau

SEQ ID NO: 635866 - RNA, 19 nt, Artificial Sequence
  Description of Artificial Sequence: Synthetic oligonucleotide
  Sense strand starting at position 2307 of SEQ ID NO: 585387
uugagaaaggccuggcaaa

SEQ ID NO: 635867 - RNA, 19 nt, Artificial Sequence
  Description of Artificial Sequence: Synthetic oligonucleotide
  Antisense strand to SEQ ID NO: 635866
uuugccaggccuuucucaa

SEQ ID NO: 635868 - RNA, 19 nt, Artificial Sequence
  Description of Artificial Sequence: Synthetic oligonucleotide
  Sense strand starting at position 2507 of SEQ ID NO: 585387
ccugaaauguuccugacca

SEQ ID NO: 635869 - RNA, 19 nt, Artificial Sequence
  Description of Artificial Sequence: Synthetic oligonucleotide
  Antisense strand to SEQ ID NO: 635868
uggucaggaacauuucagg

SEQ ID NO: 635870 - RNA, 19 nt, Artificial Sequence
  Description of Artificial Sequence: Synthetic oligonucleotide
  Sense strand starting at position 2595 of SEQ ID NO: 585387
gcaauaguuuccuuccaga

SEQ ID NO: 635871 - RNA, 19 nt, Artificial Sequence
  Description of Artificial Sequence: Synthetic oligonucleotide
  Antisense strand to SEQ ID NO: 635870
ucuggaaggaaacuauugc

SEQ ID NO: 635872 - RNA, 19 nt, Artificial Sequence
  Description of Artificial Sequence: Synthetic oligonucleotide
  Sense strand starting at position 2790 of SEQ ID NO: 585387
uuugguuuacuccgggaac

SEQ ID NO: 635873 - RNA, 19 nt, Artificial Sequence
  Description of Artificial Sequence: Synthetic oligonucleotide
  Antisense strand to SEQ ID NO: 635872
guucccggaguaaaccaaa

SEQ ID NO: 635874 - RNA, 19 nt, Artificial Sequence
  Description of Artificial Sequence: Synthetic oligonucleotide
  Sense strand starting at position 2793 of SEQ ID NO: 585387
gguuuacuccgggaacggu

SEQ ID NO: 635875 - RNA, 19 nt, Artificial Sequence
  Description of Artificial Sequence: Synthetic oligonucleotide
  Antisense strand to SEQ ID NO: 635874
accguucccggaguaaacc

SEQ ID NO: 635876 - RNA, 19 nt, Artificial Sequence
  Description of Artificial Sequence: Synthetic oligonucleotide
  Sense strand starting at position 2847 of SEQ ID NO: 585387
gugugagcugucccucagu

SEQ ID NO: 635877 - RNA, 19 nt, Artificial Sequence
  Description of Artificial Sequence: Synthetic oligonucleotide
  Antisense strand to SEQ ID NO: 635876
acugagggacagcucacac

SEQ ID NO: 635878 - RNA, 19 nt, Artificial Sequence
  Description of Artificial Sequence: Synthetic oligonucleotide
  Sense strand starting at position 2912 of SEQ ID NO: 585387
ggccacuggucauuuaugu

SEQ ID NO: 635879 - RNA, 19 nt, Artificial Sequence
  Description of Artificial Sequence: Synthetic oligonucleotide
  Antisense strand to SEQ ID NO: 635878
acauaaaugaccaguggcc

SEQ ID NO: 635880 - RNA, 19 nt, Artificial Sequence
  Description of Artificial Sequence: Synthetic oligonucleotide
  Sense strand starting at position 2925 of SEQ ID NO: 585387
uuauguagugaguaaacaa

SEQ ID NO: 635881 - RNA, 19 nt, Artificial Sequence
  Description of Artificial Sequence: Synthetic oligonucleotide
  Antisense strand to SEQ ID NO: 635880
uuguuuacucacuacauaa

SEQ ID NO: 635882 - RNA, 19 nt, Artificial Sequence
  Description of Artificial Sequence: Synthetic oligonucleotide
  Sense strand starting at position 3108 of SEQ ID NO: 585387
cccauuugucaaugggugu

SEQ ID NO: 635883 - RNA, 19 nt, Artificial Sequence
  Description of Artificial Sequence: Synthetic oligonucleotide
  Antisense strand to SEQ ID NO: 635882
acacccauugacaaauggg

SEQ ID NO: 635884 - RNA, 19 nt, Artificial Sequence
  Description of Artificial Sequence: Synthetic oligonucleotide
  Sense strand starting at position 3109 of SEQ ID NO: 585387
ccauuugucaaugggugua

SEQ ID NO: 635885 - RNA, 19 nt, Artificial Sequence
  Description of Artificial Sequence: Synthetic oligonucleotide
  Antisense strand to SEQ ID NO: 635884
uacacccauugacaaaugg

SEQ ID NO: 635886 - RNA, 19 nt, Artificial Sequence
  Description of Artificial Sequence: Synthetic oligonucleotide
  Sense strand starting at position 3114 of SEQ ID NO: 585387
ugucaauggguguaaagau

SEQ ID NO: 635887 - RNA, 19 nt, Artificial Sequence
  Description of Artificial Sequence: Synthetic oligonucleotide
  Antisense strand to SEQ ID NO: 635886
aucuuuacacccauugaca

SEQ ID NO: 635888 - RNA, 19 nt, Artificial Sequence
  Description of Artificial Sequence: Synthetic oligonucleotide
  Sense strand starting at position 3122 of SEQ ID NO: 585387
gguguaaagauguacuuuc

SEQ ID NO: 635889 - RNA, 19 nt, Artificial Sequence
  Description of Artificial Sequence: Synthetic oligonucleotide
  Antisense strand to SEQ ID NO: 635888
gaaaguacaucuuuacacc

SEQ ID NO: 635890 - RNA, 19 nt, Artificial Sequence
  Description of Artificial Sequence: Synthetic oligonucleotide
  Sense strand starting at position 3180 of SEQ ID NO: 585387
uugagucaccagcacaaua

SEQ ID NO: 635891 - RNA, 19 nt, Artificial Sequence
  Description of Artificial Sequence: Synthetic oligonucleotide
  Antisense strand to SEQ ID NO: 635890
uauugugcuggugacucaa

SEQ ID NO: 635892 - RNA, 19 nt, Artificial Sequence
  Description of Artificial Sequence: Synthetic oligonucleotide
  Sense strand starting at position 3400 of SEQ ID NO: 585387
aagagaguauugcuuugaa

SEQ ID NO: 635893 - RNA, 19 nt, Artificial Sequence
  Description of Artificial Sequence: Synthetic oligonucleotide
  Antisense strand to SEQ ID NO: 635892
uucaaagcaauacucucuu

SEQ ID NO: 635894 - RNA, 19 nt, Artificial Sequence
  Description of Artificial Sequence: Synthetic oligonucleotide
  Sense strand starting at position 3403 of SEQ ID NO: 585387
agaguauugcuuugaagag

SEQ ID NO: 635895 - RNA, 19 nt, Artificial Sequence
  Description of Artificial Sequence: Synthetic oligonucleotide
  Antisense strand to SEQ ID NO: 635894
cucuucaaagcaauacucu

SEQ ID NO: 635896 - RNA, 19 nt, Artificial Sequence
  Description of Artificial Sequence: Synthetic oligonucleotide
  Sense strand starting at position 3494 of SEQ ID NO: 585387
accagaaagcuuuguaauc

SEQ ID NO: 635897 - RNA, 19 nt, Artificial Sequence
  Description of Artificial Sequence: Synthetic oligonucleotide
  Antisense strand to SEQ ID NO: 635896
gauuacaaagcuuucuggu

SEQ ID NO: 635898 - RNA, 19 nt, Artificial Sequence
  Description of Artificial Sequence: Synthetic oligonucleotide
  Sense strand starting at position 3515 of SEQ ID NO: 585387
uuuaccuuacuguggaaau

SEQ ID NO: 635899 - RNA, 19 nt, Artificial Sequence
  Description of Artificial Sequence: Synthetic oligonucleotide
  Antisense strand to SEQ ID NO: 635898
auuuccacaguaagguaaa

SEQ ID NO: 635900 - RNA, 19 nt, Artificial Sequence
  Description of Artificial Sequence: Synthetic oligonucleotide
  Sense strand starting at position 13 of SEQ ID NO: 585388
auuccaagccuguagagaa

SEQ ID NO: 635901 - RNA, 19 nt, Artificial Sequence
  Description of Artificial Sequence: Synthetic oligonucleotide
  Antisense strand to SEQ ID NO: 635900
uucucuacaggcuuggaau

SEQ ID NO: 635902 - RNA, 19 nt, Artificial Sequence
  Description of Artificial Sequence: Synthetic oligonucleotide
  Sense strand starting at position 78 of SEQ ID NO: 585388
ccaaguuucuggguaugaa

SEQ ID NO: 635903 - RNA, 19 nt, Artificial Sequence
  Description of Artificial Sequence: Synthetic oligonucleotide
  Antisense strand to SEQ ID NO: 635902
uucauacccagaaacuugg

SEQ ID NO: 635904 - RNA, 19 nt, Artificial Sequence
  Description of Artificial Sequence: Synthetic oligonucleotide
  Sense strand starting at position 79 of SEQ ID NO: 585388
caaguuucuggguaugaag

SEQ ID NO: 635905 - RNA, 19 nt, Artificial Sequence
  Description of Artificial Sequence: Synthetic oligonucleotide
  Antisense strand to SEQ ID NO: 635904
cuucauacccagaaacuug

SEQ ID NO: 635906 - RNA, 19 nt, Artificial Sequence
  Description of Artificial Sequence: Synthetic oligonucleotide
  Sense strand starting at position 90 of SEQ ID NO: 585388
guaugaaguugaccagaag

SEQ ID NO: 635907 - RNA, 19 nt, Artificial Sequence
  Description of Artificial Sequence: Synthetic oligonucleotide
  Antisense strand to SEQ ID NO: 635906
cuucuggucaacuucauac

SEQ ID NO: 635908 - RNA, 19 nt, Artificial Sequence
  Description of Artificial Sequence: Synthetic oligonucleotide
  Sense strand starting at position 149 of SEQ ID NO: 585388
cagugagagguuggcauau

SEQ ID NO: 635909 - RNA, 19 nt, Artificial Sequence
  Description of Artificial Sequence: Synthetic oligonucleotide
  Antisense strand to SEQ ID NO: 635908
auaugccaaccucucacug

SEQ ID NO: 635910 - RNA, 19 nt, Artificial Sequence
  Description of Artificial Sequence: Synthetic oligonucleotide
  Sense strand starting at position 206 of SEQ ID NO: 585388
uagggcuuacucugaagaa

SEQ ID NO: 635911 - RNA, 19 nt, Artificial Sequence
  Description of Artificial Sequence: Synthetic oligonucleotide
  Antisense strand to SEQ ID NO: 635910
uucuucagaguaagcccua

SEQ ID NO: 635912 - RNA, 19 nt, Artificial Sequence
  Description of Artificial Sequence: Synthetic oligonucleotide
  Sense strand starting at position 323 of SEQ ID NO: 585388
gauguuagaaaugguguca

SEQ ID NO: 635913 - RNA, 19 nt, Artificial Sequence
  Description of Artificial Sequence: Synthetic oligonucleotide
  Antisense strand to SEQ ID NO: 635912
ugacaccauuucuaacauc

SEQ ID NO: 635914 - RNA, 19 nt, Artificial Sequence
  Description of Artificial Sequence: Synthetic oligonucleotide
  Sense strand starting at position 335 of SEQ ID NO: 585388
ggugucaauccacauaacu

SEQ ID NO: 635915 - RNA, 19 nt, Artificial Sequence
  Description of Artificial Sequence: Synthetic oligonucleotide
  Antisense strand to SEQ ID NO: 635914
aguuauguggauugacacc

SEQ ID NO: 635916 - RNA, 19 nt, Artificial Sequence
  Description of Artificial Sequence: Synthetic oligonucleotide
  Sense strand starting at position 372 of SEQ ID NO: 585388
cuguaaccauagcuauaga

SEQ ID NO: 635917 - RNA, 19 nt, Artificial Sequence
  Description of Artificial Sequence: Synthetic oligonucleotide
  Antisense strand to SEQ ID NO: 635916
ucuauagcuaugguuacag

SEQ ID NO: 635918 - RNA, 19 nt, Artificial Sequence
  Description of Artificial Sequence: Synthetic oligonucleotide
  Sense strand starting at position 436 of SEQ ID NO: 585388
gaacuuaggugacuuuauu

SEQ ID NO: 635919 - RNA, 19 nt, Artificial Sequence
  Description of Artificial Sequence: Synthetic oligonucleotide
  Antisense strand to SEQ ID NO: 635918
aauaaagucaccuaaguuc

SEQ ID NO: 635920 - RNA, 19 nt, Artificial Sequence
  Description of Artificial Sequence: Synthetic oligonucleotide
  Sense strand starting at position 489 of SEQ ID NO: 585388
ugcuguugucuguuucagu

SEQ ID NO: 635921 - RNA, 19 nt, Artificial Sequence
  Description of Artificial Sequence: Synthetic oligonucleotide
  Antisense strand to SEQ ID NO: 635920
acugaaacagacaacagca

SEQ ID NO: 635922 - RNA, 19 nt, Artificial Sequence
  Description of Artificial Sequence: Synthetic oligonucleotide
  Sense strand starting at position 518 of SEQ ID NO: 585388
uuaaaucacuuguucugga

SEQ ID NO: 635923 - RNA, 19 nt, Artificial Sequence
  Description of Artificial Sequence: Synthetic oligonucleotide
  Antisense strand to SEQ ID NO: 635922
uccagaacaagugauuuaa

SEQ ID NO: 635924 - RNA, 19 nt, Artificial Sequence
  Description of Artificial Sequence: Synthetic oligonucleotide
  Sense strand starting at position 608 of SEQ ID NO: 585388
acagcagcucuuugaauaa

SEQ ID NO: 635925 - RNA, 19 nt, Artificial Sequence
  Description of Artificial Sequence: Synthetic oligonucleotide
  Antisense strand to SEQ ID NO: 635924
uuauucaaagagcugcugu

SEQ ID NO: 635926 - RNA, 19 nt, Artificial Sequence
  Description of Artificial Sequence: Synthetic oligonucleotide
  Sense strand starting at position 638 of SEQ ID NO: 585388
auagcauauccugaggcuu

SEQ ID NO: 635927 - RNA, 19 nt, Artificial Sequence
  Description of Artificial Sequence: Synthetic oligonucleotide
  Antisense strand to SEQ ID NO: 635926
aagccucaggauaugcuau

SEQ ID NO: 635928 - RNA, 19 nt, Artificial Sequence
  Description of Artificial Sequence: Synthetic oligonucleotide
  Sense strand starting at position 667 of SEQ ID NO: 585388
gaaacaucuuguuucugga

SEQ ID NO: 635929 - RNA, 19 nt, Artificial Sequence
  Description of Artificial Sequence: Synthetic oligonucleotide
  Antisense strand to SEQ ID NO: 635928
uccagaaacaagauguuuc

SEQ ID NO: 635930 - RNA, 19 nt, Artificial Sequence
  Description of Artificial Sequence: Synthetic oligonucleotide
  Sense strand starting at position 785 of SEQ ID NO: 585388
gcagaagacuucuugucua

SEQ ID NO: 635931 - RNA, 19 nt, Artificial Sequence
  Description of Artificial Sequence: Synthetic oligonucleotide
  Antisense strand to SEQ ID NO: 635930
uagacaagaagucuucugc

SEQ ID NO: 635932 - RNA, 19 nt, Artificial Sequence
  Description of Artificial Sequence: Synthetic oligonucleotide
  Sense strand starting at position 790 of SEQ ID NO: 585388
agacuucuugucuaauaug

SEQ ID NO: 635933 - RNA, 19 nt, Artificial Sequence
  Description of Artificial Sequence: Synthetic oligonucleotide
  Antisense strand to SEQ ID NO: 635932
cauauuagacaagaagucu

SEQ ID NO: 635934 - RNA, 19 nt, Artificial Sequence
  Description of Artificial Sequence: Synthetic oligonucleotide
  Sense strand starting at position 1109 of SEQ ID NO: 585388
ugaccuagcccaggugaaa

SEQ ID NO: 635935 - RNA, 19 nt, Artificial Sequence
  Description of Artificial Sequence: Synthetic oligonucleotide
  Antisense strand to SEQ ID NO: 635934
uuucaccugggcuagguca

SEQ ID NO: 635936 - RNA, 19 nt, Artificial Sequence
  Description of Artificial Sequence: Synthetic oligonucleotide
  Sense strand starting at position 1430 of SEQ ID NO: 585388
agccauuucuccgcugaca

SEQ ID NO: 635937 - RNA, 19 nt, Artificial Sequence
  Description of Artificial Sequence: Synthetic oligonucleotide
  Antisense strand to SEQ ID NO: 635936
ugucagcggagaaauggcu

SEQ ID NO: 635938 - RNA, 19 nt, Artificial Sequence
  Description of Artificial Sequence: Synthetic oligonucleotide
  Sense strand starting at position 1432 of SEQ ID NO: 585388
ccauuucuccgcugacauc

SEQ ID NO: 635939 - RNA, 19 nt, Artificial Sequence
  Description of Artificial Sequence: Synthetic oligonucleotide
  Antisense strand to SEQ ID NO: 635938
gaugucagcggagaaaugg

SEQ ID NO: 635940 - RNA, 19 nt, Artificial Sequence
  Description of Artificial Sequence: Synthetic oligonucleotide
  Sense strand starting at position 1704 of SEQ ID NO: 585388
gagguucuggcucaagaac

SEQ ID NO: 635941 - RNA, 19 nt, Artificial Sequence
  Description of Artificial Sequence: Synthetic oligonucleotide
  Antisense strand to SEQ ID NO: 635940
guucuugagccagaaccuc

SEQ ID NO: 635942 - RNA, 19 nt, Artificial Sequence
  Description of Artificial Sequence: Synthetic oligonucleotide
  Sense strand starting at position 2041 of SEQ ID NO: 585388
caagguaccggaugucuua

SEQ ID NO: 635943 - RNA, 19 nt, Artificial Sequence
  Description of Artificial Sequence: Synthetic oligonucleotide
  Antisense strand to SEQ ID NO: 635942
uaagacauccgguaccuug

SEQ ID NO: 635944 - RNA, 19 nt, Artificial Sequence
  Description of Artificial Sequence: Synthetic oligonucleotide
  Sense strand starting at position 2093 of SEQ ID NO: 585388
gcuaguuugcaggaaagug

SEQ ID NO: 635945 - RNA, 19 nt, Artificial Sequence
  Description of Artificial Sequence: Synthetic oligonucleotide
  Antisense strand to SEQ ID NO: 635944
cacuuuccugcaaacuagc

SEQ ID NO: 635946 - RNA, 19 nt, Artificial Sequence
  Description of Artificial Sequence: Synthetic oligonucleotide
  Sense strand starting at position 2180 of SEQ ID NO: 585388
cacuuucuugagcaagguu

SEQ ID NO: 635947 - RNA, 19 nt, Artificial Sequence
  Description of Artificial Sequence: Synthetic oligonucleotide
  Antisense strand to SEQ ID NO: 635946
aaccuugcucaagaaagug

SEQ ID NO: 635948 - RNA, 19 nt, Artificial Sequence
  Description of Artificial Sequence: Synthetic oligonucleotide
  Sense strand starting at position 2593 of SEQ ID NO: 585388
ugggauagugucugcaaca

SEQ ID NO: 635949 - RNA, 19 nt, Artificial Sequence
  Description of Artificial Sequence: Synthetic oligonucleotide
  Antisense strand to SEQ ID NO: 635948
uguugcagacacuauccca

SEQ ID NO: 635950 - RNA, 19 nt, Artificial Sequence
  Description of Artificial Sequence: Synthetic oligonucleotide
  Sense strand starting at position 2594 of SEQ ID NO: 585388
gggauagugucugcaacag

SEQ ID NO: 635951 - RNA, 19 nt, Artificial Sequence
  Description of Artificial Sequence: Synthetic oligonucleotide
  Antisense strand to SEQ ID NO: 635950
cuguugcagacacuauccc

SEQ ID NO: 635952 - RNA, 19 nt, Artificial Sequence
  Description of Artificial Sequence: Synthetic oligonucleotide
  Sense strand starting at position 2616 of SEQ ID NO: 585388
auagguaccuuuguuuaca

SEQ ID NO: 635953 - RNA, 19 nt, Artificial Sequence
  Description of Artificial Sequence: Synthetic oligonucleotide
  Antisense strand to SEQ ID NO: 635952
uguaaacaaagguaccuau

SEQ ID NO: 635954 - RNA, 19 nt, Artificial Sequence
  Description of Artificial Sequence: Synthetic oligonucleotide
  Sense strand starting at position 2668 of SEQ ID NO: 585388
agauccaaccaugguuuaa

SEQ ID NO: 635955 - RNA, 19 nt, Artificial Sequence
  Description of Artificial Sequence: Synthetic oligonucleotide
  Antisense strand to SEQ ID NO: 635954
uuaaaccaugguuggaucu

SEQ ID NO: 635956 - RNA, 19 nt, Artificial Sequence
  Description of Artificial Sequence: Synthetic oligonucleotide
  Sense strand starting at position 2881 of SEQ ID NO: 585388
gccagauacuuggcauaug

SEQ ID NO: 635957 - RNA, 19 nt, Artificial Sequence
  Description of Artificial Sequence: Synthetic oligonucleotide
  Antisense strand to SEQ ID NO: 635956
cauaugccaaguaucuggc

SEQ ID NO: 635958 - RNA, 19 nt, Artificial Sequence
  Description of Artificial Sequence: Synthetic oligonucleotide
  Sense strand starting at position 2884 of SEQ ID NO: 585388
agauacuuggcauaugcua

SEQ ID NO: 635959 - RNA, 19 nt, Artificial Sequence
  Description of Artificial Sequence: Synthetic oligonucleotide
  Antisense strand to SEQ ID NO: 635958
uagcauaugccaaguaucu

SEQ ID NO: 635960 - RNA, 19 nt, Artificial Sequence
  Description of Artificial Sequence: Synthetic oligonucleotide
  Sense strand starting at position 2892 of SEQ ID NO: 585388
ggcauaugcuauuuguaaa

SEQ ID NO: 635961 - RNA, 19 nt, Artificial Sequence
  Description of Artificial Sequence: Synthetic oligonucleotide
  Antisense strand to SEQ ID NO: 635960
uuuacaaauagcauaugcc

SEQ ID NO: 635962 - RNA, 19 nt, Artificial Sequence
  Description of Artificial Sequence: Synthetic oligonucleotide
  Sense strand starting at position 3038 of SEQ ID NO: 585388
aggccucacugauuccaaa

SEQ ID NO: 635963 - RNA, 19 nt, Artificial Sequence
  Description of Artificial Sequence: Synthetic oligonucleotide
  Antisense strand to SEQ ID NO: 635962
uuuggaaucagugaggccu

SEQ ID NO: 635964 - RNA, 19 nt, Artificial Sequence
  Description of Artificial Sequence: Synthetic oligonucleotide
  Sense strand starting at position 3536 of SEQ ID NO: 585388
ugaaguagggauugucaua

SEQ ID NO: 635965 - RNA, 19 nt, Artificial Sequence
  Description of Artificial Sequence: Synthetic oligonucleotide
  Antisense strand to SEQ ID NO: 635964
uaugacaaucccuacuuca

SEQ ID NO: 635966 - RNA, 19 nt, Artificial Sequence
  Description of Artificial Sequence: Synthetic oligonucleotide
  Sense strand starting at position 3599 of SEQ ID NO: 585388
gguaaaucugaugguaaga

SEQ ID NO: 635967 - RNA, 19 nt, Artificial Sequence
  Description of Artificial Sequence: Synthetic oligonucleotide
  Antisense strand to SEQ ID NO: 635966
ucuuaccaucagauuuacc

SEQ ID NO: 635968 - RNA, 19 nt, Artificial Sequence
  Description of Artificial Sequence: Synthetic oligonucleotide
  Sense strand starting at position 3727 of SEQ ID NO: 585388
auaguauugcaagggacua

SEQ ID NO: 635969 - RNA, 19 nt, Artificial Sequence
  Description of Artificial Sequence: Synthetic oligonucleotide
  Antisense strand to SEQ ID NO: 635968
uagucccuugcaauacuau

SEQ ID NO: 635970 - RNA, 19 nt, Artificial Sequence
  Description of Artificial Sequence: Synthetic oligonucleotide
  Sense strand starting at position 3729 of SEQ ID NO: 585388
aguauugcaagggacuauu

SEQ ID NO: 635971 - RNA, 19 nt, Artificial Sequence
  Description of Artificial Sequence: Synthetic oligonucleotide
  Antisense strand to SEQ ID NO: 635970
aauagucccuugcaauacu

SEQ ID NO: 635972 - RNA, 19 nt, Artificial Sequence
  Description of Artificial Sequence: Synthetic oligonucleotide
  Sense strand starting at position 3818 of SEQ ID NO: 585388
acauguuugguuuaguuga

SEQ ID NO: 635973 - RNA, 19 nt, Artificial Sequence
  Description of Artificial Sequence: Synthetic oligonucleotide
  Antisense strand to SEQ ID NO: 635972
ucaacuaaaccaaacaugu

SEQ ID NO: 635974 - RNA, 19 nt, Artificial Sequence
  Description of Artificial Sequence: Synthetic oligonucleotide
  Sense strand starting at position 3820 of SEQ ID NO: 585388
auguuugguuuaguugaga

SEQ ID NO: 635975 - RNA, 19 nt, Artificial Sequence
  Description of Artificial Sequence: Synthetic oligonucleotide
  Antisense strand to SEQ ID NO: 635974
ucucaacuaaaccaaacau

SEQ ID NO: 635976 - RNA, 19 nt, Artificial Sequence
  Description of Artificial Sequence: Synthetic oligonucleotide
  Sense strand starting at position 3880 of SEQ ID NO: 585388
acagauuaugcucaguuau

SEQ ID NO: 635977 - RNA, 19 nt, Artificial Sequence
  Description of Artificial Sequence: Synthetic oligonucleotide
  Antisense strand to SEQ ID NO: 635976
auaacugagcauaaucugu

SEQ ID NO: 635978 - RNA, 19 nt, Artificial Sequence
  Description of Artificial Sequence: Synthetic oligonucleotide
  Sense strand starting at position 3882 of SEQ ID NO: 585388
agauuaugcucaguuauac

SEQ ID NO: 635979 - RNA, 19 nt, Artificial Sequence
  Description of Artificial Sequence: Synthetic oligonucleotide
  Antisense strand to SEQ ID NO: 635978
guauaacugagcauaaucu

SEQ ID NO: 635980 - RNA, 19 nt, Artificial Sequence
  Description of Artificial Sequence: Synthetic oligonucleotide
  Sense strand starting at position 642 of SEQ ID NO: 585389
cuuccucauggaggaaauu

SEQ ID NO: 635981 - RNA, 19 nt, Artificial Sequence
  Description of Artificial Sequence: Synthetic oligonucleotide
  Antisense strand to SEQ ID NO: 635980
aauuuccuccaugaggaag

SEQ ID NO: 635982 - RNA, 19 nt, Artificial Sequence
  Description of Artificial Sequence: Synthetic oligonucleotide
  Sense strand starting at position 804 of SEQ ID NO: 585389
auauuacuucugugcauga

SEQ ID NO: 635983 - RNA, 19 nt, Artificial Sequence
  Description of Artificial Sequence: Synthetic oligonucleotide
  Antisense strand to SEQ ID NO: 635982
ucaugcacagaaguaauau

SEQ ID NO: 635984 - RNA, 19 nt, Artificial Sequence
  Description of Artificial Sequence: Synthetic oligonucleotide
  Sense strand starting at position 806 of SEQ ID NO: 585389
auuacuucugugcaugaga

SEQ ID NO: 635985 - RNA, 19 nt, Artificial Sequence
  Description of Artificial Sequence: Synthetic oligonucleotide
  Antisense strand to SEQ ID NO: 635984
ucucaugcacagaaguaau

SEQ ID NO: 635986 - RNA, 19 nt, Artificial Sequence
  Description of Artificial Sequence: Synthetic oligonucleotide
  Sense strand starting at position 808 of SEQ ID NO: 585389
uacuucugugcaugagauu

SEQ ID NO: 635987 - RNA, 19 nt, Artificial Sequence
  Description of Artificial Sequence: Synthetic oligonucleotide
  Antisense strand to SEQ ID NO: 635986
aaucucaugcacagaagua

SEQ ID NO: 635988 - RNA, 19 nt, Artificial Sequence
  Description of Artificial Sequence: Synthetic oligonucleotide
  Sense strand starting at position 809 of SEQ ID NO: 585389
acuucugugcaugagauua

SEQ ID NO: 635989 - RNA, 19 nt, Artificial Sequence
  Description of Artificial Sequence: Synthetic oligonucleotide
  Antisense strand to SEQ ID NO: 635988
uaaucucaugcacagaagu

SEQ ID NO: 635990 - RNA, 19 nt, Artificial Sequence
  Description of Artificial Sequence: Synthetic oligonucleotide
  Sense strand starting at position 814 of SEQ ID NO: 585389
ugugcaugagauuauacuu

SEQ ID NO: 635991 - RNA, 19 nt, Artificial Sequence
  Description of Artificial Sequence: Synthetic oligonucleotide
  Antisense strand to SEQ ID NO: 635990
aaguauaaucucaugcaca

SEQ ID NO: 635992 - RNA, 19 nt, Artificial Sequence
  Description of Artificial Sequence: Synthetic oligonucleotide
  Sense strand starting at position 885 of SEQ ID NO: 585389
gccguauuaacauaugagu

SEQ ID NO: 635993 - RNA, 19 nt, Artificial Sequence
  Description of Artificial Sequence: Synthetic oligonucleotide
  Antisense strand to SEQ ID NO: 635992
acucauauguuaauacggc

SEQ ID NO: 635994 - RNA, 19 nt, Artificial Sequence
  Description of Artificial Sequence: Synthetic oligonucleotide
  Sense strand starting at position 887 of SEQ ID NO: 585389
cguauuaacauaugaguug

SEQ ID NO: 635995 - RNA, 19 nt, Artificial Sequence
  Description of Artificial Sequence: Synthetic oligonucleotide
  Antisense strand to SEQ ID NO: 635994
caacucauauguuaauacg

SEQ ID NO: 635996 - RNA, 19 nt, Artificial Sequence
  Description of Artificial Sequence: Synthetic oligonucleotide
  Sense strand starting at position 927 of SEQ ID NO: 585389
cuuagaaauugacagagaa

SEQ ID NO: 635997 - RNA, 19 nt, Artificial Sequence
  Description of Artificial Sequence: Synthetic oligonucleotide
  Antisense strand to SEQ ID NO: 635996
uucucugucaauuucuaag

SEQ ID NO: 635998 - RNA, 19 nt, Artificial Sequence
  Description of Artificial Sequence: Synthetic oligonucleotide
  Sense strand starting at position 2123 of SEQ ID NO: 585389
cgaguagggaugugcauuu

SEQ ID NO: 635999 - RNA, 19 nt, Artificial Sequence
  Description of Artificial Sequence: Synthetic oligonucleotide
  Antisense strand to SEQ ID NO: 635998
aaaugcacaucccuacucg

SEQ ID NO: 636000 - RNA, 19 nt, Artificial Sequence
  Description of Artificial Sequence: Synthetic oligonucleotide
  Sense strand starting at position 2133 of SEQ ID NO: 585389
ugugcauuucacggagcua

SEQ ID NO: 636001 - RNA, 19 nt, Artificial Sequence
  Description of Artificial Sequence: Synthetic oligonucleotide
  Antisense strand to SEQ ID NO: 636000
uagcuccgugaaaugcaca

SEQ ID NO: 636002 - RNA, 19 nt, Artificial Sequence
  Description of Artificial Sequence: Synthetic oligonucleotide
  Sense strand starting at position 2145 of SEQ ID NO: 585389
ggagcuacguucucagaag

SEQ ID NO: 636003 - RNA, 19 nt, Artificial Sequence
  Description of Artificial Sequence: Synthetic oligonucleotide
  Antisense strand to SEQ ID NO: 636002
cuucugagaacguagcucc

SEQ ID NO: 636004 - RNA, 19 nt, Artificial Sequence
  Description of Artificial Sequence: Synthetic oligonucleotide
  Sense strand starting at position 2192 of SEQ ID NO: 585389
cccuguggaccucagaauu

SEQ ID NO: 636005 - RNA, 19 nt, Artificial Sequence
  Description of Artificial Sequence: Synthetic oligonucleotide
  Antisense strand to SEQ ID NO: 636004
aauucugagguccacaggg

SEQ ID NO: 636006 - RNA, 19 nt, Artificial Sequence
  Description of Artificial Sequence: Synthetic oligonucleotide
  Sense strand starting at position 2298 of SEQ ID NO: 585389
uucugaauccggcagauaa

SEQ ID NO: 636007 - RNA, 19 nt, Artificial Sequence
  Description of Artificial Sequence: Synthetic oligonucleotide
  Antisense strand to SEQ ID NO: 636006
uuaucugccggauucagaa

SEQ ID NO: 636008 - RNA, 19 nt, Artificial Sequence
  Description of Artificial Sequence: Synthetic oligonucleotide
  Sense strand starting at position 2313 of SEQ ID NO: 585389
auaagaaaugcuugagcca

SEQ ID NO: 636009 - RNA, 19 nt, Artificial Sequence
  Description of Artificial Sequence: Synthetic oligonucleotide
  Antisense strand to SEQ ID NO: 636008
uggcucaagcauuucuuau

SEQ ID NO: 636010 - RNA, 19 nt, Artificial Sequence
  Description of Artificial Sequence: Synthetic oligonucleotide
  Sense strand starting at position 2343 of SEQ ID NO: 585389
uuagcagcgguuuagagau

SEQ ID NO: 636011 - RNA, 19 nt, Artificial Sequence
  Description of Artificial Sequence: Synthetic oligonucleotide
  Antisense strand to SEQ ID NO: 636010
aucucuaaaccgcugcuaa

SEQ ID NO: 636012 - RNA, 19 nt, Artificial Sequence
  Description of Artificial Sequence: Synthetic oligonucleotide
  Sense strand starting at position 2382 of SEQ ID NO: 585389
guagaaggagaucguuauu

SEQ ID NO: 636013 - RNA, 19 nt, Artificial Sequence
  Description of Artificial Sequence: Synthetic oligonucleotide
  Antisense strand to SEQ ID NO: 636012
aauaacgaucuccuucuac

SEQ ID NO: 636014 - RNA, 19 nt, Artificial Sequence
  Description of Artificial Sequence: Synthetic oligonucleotide
  Sense strand starting at position 2387 of SEQ ID NO: 585389
aggagaucguuauugccau

SEQ ID NO: 636015 - RNA, 19 nt, Artificial Sequence
  Description of Artificial Sequence: Synthetic oligonucleotide
  Antisense strand to SEQ ID NO: 636014
auggcaauaacgaucuccu

SEQ ID NO: 636016 - RNA, 19 nt, Artificial Sequence
  Description of Artificial Sequence: Synthetic oligonucleotide
  Sense strand starting at position 2445 of SEQ ID NO: 585389
ucugguuaagcugaaugua

SEQ ID NO: 636017 - RNA, 19 nt, Artificial Sequence
  Description of Artificial Sequence: Synthetic oligonucleotide
  Antisense strand to SEQ ID NO: 636016
uacauucagcuuaaccaga

SEQ ID NO: 636018 - RNA, 19 nt, Artificial Sequence
  Description of Artificial Sequence: Synthetic oligonucleotide
  Sense strand starting at position 2448 of SEQ ID NO: 585389
gguuaagcugaauguaaag

SEQ ID NO: 636019 - RNA, 19 nt, Artificial Sequence
  Description of Artificial Sequence: Synthetic oligonucleotide
  Antisense strand to SEQ ID NO: 636018
cuuuacauucagcuuaacc

SEQ ID NO: 636020 - RNA, 19 nt, Artificial Sequence
  Description of Artificial Sequence: Synthetic oligonucleotide
  Sense strand starting at position 2471 of SEQ ID NO: 585389
ggaugggaucguuggguuu

SEQ ID NO: 636021 - RNA, 19 nt, Artificial Sequence
  Description of Artificial Sequence: Synthetic oligonucleotide
  Antisense strand to SEQ ID NO: 636020
aaacccaacgaucccaucc

SEQ ID NO: 636022 - RNA, 19 nt, Artificial Sequence
  Description of Artificial Sequence: Synthetic oligonucleotide
  Sense strand starting at position 2474 of SEQ ID NO: 585389
ugggaucguuggguuugau

SEQ ID NO: 636023 - RNA, 19 nt, Artificial Sequence
  Description of Artificial Sequence: Synthetic oligonucleotide
  Antisense strand to SEQ ID NO: 636022
aucaaacccaacgauccca

SEQ ID NO: 636024 - RNA, 19 nt, Artificial Sequence
  Description of Artificial Sequence: Synthetic oligonucleotide
  Sense strand starting at position 2484 of SEQ ID NO: 585389
ggguuugauguauaaggua

SEQ ID NO: 636025 - RNA, 19 nt, Artificial Sequence
  Description of Artificial Sequence: Synthetic oligonucleotide
  Antisense strand to SEQ ID NO: 636024
uaccuuauacaucaaaccc

SEQ ID NO: 636026 - RNA, 19 nt, Artificial Sequence
  Description of Artificial Sequence: Synthetic oligonucleotide
  Sense strand starting at position 2504 of SEQ ID NO: 585389
gguccacccuuugugaaga

SEQ ID NO: 636027 - RNA, 19 nt, Artificial Sequence
  Description of Artificial Sequence: Synthetic oligonucleotide
  Antisense strand to SEQ ID NO: 636026
ucuucacaaaggguggacc

SEQ ID NO: 636028 - RNA, 19 nt, Artificial Sequence
  Description of Artificial Sequence: Synthetic oligonucleotide
  Sense strand starting at position 2572 of SEQ ID NO: 585389
guaccuucuuucguaauuu

SEQ ID NO: 636029 - RNA, 19 nt, Artificial Sequence
  Description of Artificial Sequence: Synthetic oligonucleotide
  Antisense strand to SEQ ID NO: 636028
aaauuacgaaagaagguac

SEQ ID NO: 636030 - RNA, 19 nt, Artificial Sequence
  Description of Artificial Sequence: Synthetic oligonucleotide
  Sense strand starting at position 2640 of SEQ ID NO: 585389
aguaauaacuggcuacuua

SEQ ID NO: 636031 - RNA, 19 nt, Artificial Sequence
  Description of Artificial Sequence: Synthetic oligonucleotide
  Antisense strand to SEQ ID NO: 636030
uaaguagccaguuauuacu

SEQ ID NO: 636032 - RNA, 19 nt, Artificial Sequence
  Description of Artificial Sequence: Synthetic oligonucleotide
  Sense strand starting at position 3022 of SEQ ID NO: 585389
ccaagaacauuugguugaa

SEQ ID NO: 636033 - RNA, 19 nt, Artificial Sequence
  Description of Artificial Sequence: Synthetic oligonucleotide
  Antisense strand to SEQ ID NO: 636032
uucaaccaaauguucuugg

SEQ ID NO: 636034 - RNA, 19 nt, Artificial Sequence
  Description of Artificial Sequence: Synthetic oligonucleotide
  Sense strand starting at position 3055 of SEQ ID NO: 585389
aagcacagaguuuguagaa

SEQ ID NO: 636035 - RNA, 19 nt, Artificial Sequence
  Description of Artificial Sequence: Synthetic oligonucleotide
  Antisense strand to SEQ ID NO: 636034
uucuacaaacucugugcuu

SEQ ID NO: 636036 - RNA, 19 nt, Artificial Sequence
  Description of Artificial Sequence: Synthetic oligonucleotide
  Sense strand starting at position 3086 of SEQ ID NO: 585389
caaggugggucacuaaaga

SEQ ID NO: 636037 - RNA, 19 nt, Artificial Sequence
  Description of Artificial Sequence: Synthetic oligonucleotide
  Antisense strand to SEQ ID NO: 636036
ucuuuagugacccaccuug

SEQ ID NO: 636038 - RNA, 19 nt, Artificial Sequence
  Description of Artificial Sequence: Synthetic oligonucleotide
  Sense strand starting at position 3180 of SEQ ID NO: 585389
ggaaucuaauauguccaca

SEQ ID NO: 636039 - RNA, 19 nt, Artificial Sequence
  Description of Artificial Sequence: Synthetic oligonucleotide
  Antisense strand to SEQ ID NO: 636038
uguggacauauuagauucc

SEQ ID NO: 636040 - RNA, 19 nt, Artificial Sequence
  Description of Artificial Sequence: Synthetic oligonucleotide
  Sense strand starting at position 3185 of SEQ ID NO: 585389
cuaauauguccacaggucu

SEQ ID NO: 636041 - RNA, 19 nt, Artificial Sequence
  Description of Artificial Sequence: Synthetic oligonucleotide
  Antisense strand to SEQ ID NO: 636040
agaccuguggacauauuag

SEQ ID NO: 636042 - RNA, 19 nt, Artificial Sequence
  Description of Artificial Sequence: Synthetic oligonucleotide
  Sense strand starting at position 3221 of SEQ ID NO: 585389
ggauuaugcaucuggaagg

SEQ ID NO: 636043 - RNA, 19 nt, Artificial Sequence
  Description of Artificial Sequence: Synthetic oligonucleotide
  Antisense strand to SEQ ID NO: 636042
ccuuccagaugcauaaucc

SEQ ID NO: 636044 - RNA, 19 nt, Artificial Sequence
  Description of Artificial Sequence: Synthetic oligonucleotide
  Sense strand starting at position 3509 of SEQ ID NO: 585389
gcggagagugaugaugguu

SEQ ID NO: 636045 - RNA, 19 nt, Artificial Sequence
  Description of Artificial Sequence: Synthetic oligonucleotide
  Antisense strand to SEQ ID NO: 636044
aaccaucaucacucuccgc

SEQ ID NO: 636046 - RNA, 19 nt, Artificial Sequence
  Description of Artificial Sequence: Synthetic oligonucleotide
  Sense strand starting at position 3554 of SEQ ID NO: 585389
augugugggaauggugaua

SEQ ID NO: 636047 - RNA, 19 nt, Artificial Sequence
  Description of Artificial Sequence: Synthetic oligonucleotide
  Antisense strand to SEQ ID NO: 636046
uaucaccauucccacacau

SEQ ID NO: 636048 - RNA, 19 nt, Artificial Sequence
  Description of Artificial Sequence: Synthetic oligonucleotide
  Sense strand starting at position 3599 of SEQ ID NO: 585389
uauuauugugauggaagau

SEQ ID NO: 636049 - RNA, 19 nt, Artificial Sequence
  Description of Artificial Sequence: Synthetic oligonucleotide
  Antisense strand to SEQ ID NO: 636048
aucuuccaucacaauaaua

SEQ ID NO: 636050 - RNA, 19 nt, Artificial Sequence
  Description of Artificial Sequence: Synthetic oligonucleotide
  Sense strand starting at position 3611 of SEQ ID NO: 585389
ggaagaucuugguccaguu

SEQ ID NO: 636051 - RNA, 19 nt, Artificial Sequence
  Description of Artificial Sequence: Synthetic oligonucleotide
  Antisense strand to SEQ ID NO: 636050
aacuggaccaagaucuucc

SEQ ID NO: 636052 - RNA, 19 nt, Artificial Sequence
  Description of Artificial Sequence: Synthetic oligonucleotide
  Sense strand starting at position 3696 of SEQ ID NO: 585389
cgauuucaugcuuguguga

SEQ ID NO: 636053 - RNA, 19 nt, Artificial Sequence
  Description of Artificial Sequence: Synthetic oligonucleotide
  Antisense strand to SEQ ID NO: 636052
ucacacaagcaugaaaucg

SEQ ID NO: 636054 - RNA, 19 nt, Artificial Sequence
  Description of Artificial Sequence: Synthetic oligonucleotide
  Sense strand starting at position 3734 of SEQ ID NO: 585389
ggcaguguacauggaagaa

SEQ ID NO: 636055 - RNA, 19 nt, Artificial Sequence
  Description of Artificial Sequence: Synthetic oligonucleotide
  Antisense strand to SEQ ID NO: 636054
uucuuccauguacacugcc

SEQ ID NO: 636056 - RNA, 19 nt, Artificial Sequence
  Description of Artificial Sequence: Synthetic oligonucleotide
  Sense strand starting at position 3763 of SEQ ID NO: 585389
caguguggcccugagaaca

SEQ ID NO: 636057 - RNA, 19 nt, Artificial Sequence
  Description of Artificial Sequence: Synthetic oligonucleotide
  Antisense strand to SEQ ID NO: 636056
uguucucagggccacacug

SEQ ID NO: 636058 - RNA, 19 nt, Artificial Sequence
  Description of Artificial Sequence: Synthetic oligonucleotide
  Sense strand starting at position 3862 of SEQ ID NO: 585389
ugcuccaucuucuugaaag

SEQ ID NO: 636059 - RNA, 19 nt, Artificial Sequence
  Description of Artificial Sequence: Synthetic oligonucleotide
  Antisense strand to SEQ ID NO: 636058
cuuucaagaagauggagca

SEQ ID NO: 636060 - RNA, 19 nt, Artificial Sequence
  Description of Artificial Sequence: Synthetic oligonucleotide
  Sense strand starting at position 175 of SEQ ID NO: 585390
aggugauggguucaauauu

SEQ ID NO: 636061 - RNA, 19 nt, Artificial Sequence
  Description of Artificial Sequence: Synthetic oligonucleotide
  Antisense strand to SEQ ID NO: 636060
aauauugaacccaucaccu

SEQ ID NO: 636062 - RNA, 19 nt, Artificial Sequence
  Description of Artificial Sequence: Synthetic oligonucleotide
  Sense strand starting at position 207 of SEQ ID NO: 585390
uugggaugccuauggauag

SEQ ID NO: 636063 - RNA, 19 nt, Artificial Sequence
  Description of Artificial Sequence: Synthetic oligonucleotide
  Antisense strand to SEQ ID NO: 636062
cuauccauaggcaucccaa

SEQ ID NO: 636064 - RNA, 19 nt, Artificial Sequence
  Description of Artificial Sequence: Synthetic oligonucleotide
  Sense strand starting at position 213 of SEQ ID NO: 585390
ugccuauggauaggaaauu

SEQ ID NO: 636065 - RNA, 19 nt, Artificial Sequence
  Description of Artificial Sequence: Synthetic oligonucleotide
  Antisense strand to SEQ ID NO: 636064
aauuuccuauccauaggca

SEQ ID NO: 636066 - RNA, 19 nt, Artificial Sequence
  Description of Artificial Sequence: Synthetic oligonucleotide
  Sense strand starting at position 214 of SEQ ID NO: 585390
gccuauggauaggaaauuu

SEQ ID NO: 636067 - RNA, 19 nt, Artificial Sequence
  Description of Artificial Sequence: Synthetic oligonucleotide
  Antisense strand to SEQ ID NO: 636066
aaauuuccuauccauaggc

SEQ ID NO: 636068 - RNA, 19 nt, Artificial Sequence
  Description of Artificial Sequence: Synthetic oligonucleotide
  Sense strand starting at position 222 of SEQ ID NO: 585390
auaggaaauuuauguggaa

SEQ ID NO: 636069 - RNA, 19 nt, Artificial Sequence
  Description of Artificial Sequence: Synthetic oligonucleotide
  Antisense strand to SEQ ID NO: 636068
uuccacauaaauuuccuau

SEQ ID NO: 636070 - RNA, 19 nt, Artificial Sequence
  Description of Artificial Sequence: Synthetic oligonucleotide
  Sense strand starting at position 225 of SEQ ID NO: 585390
ggaaauuuauguggaaaua

SEQ ID NO: 636071 - RNA, 19 nt, Artificial Sequence
  Description of Artificial Sequence: Synthetic oligonucleotide
  Antisense strand to SEQ ID NO: 636070
uauuuccacauaaauuucc

SEQ ID NO: 636072 - RNA, 19 nt, Artificial Sequence
  Description of Artificial Sequence: Synthetic oligonucleotide
  Sense strand starting at position 555 of SEQ ID NO: 585390
ccacaauauguguaacgga

SEQ ID NO: 636073 - RNA, 19 nt, Artificial Sequence
  Description of Artificial Sequence: Synthetic oligonucleotide
  Antisense strand to SEQ ID NO: 636072
uccguuacacauauugugg

SEQ ID NO: 636074 - RNA, 19 nt, Artificial Sequence
  Description of Artificial Sequence: Synthetic oligonucleotide
  Sense strand starting at position 709 of SEQ ID NO: 585390
acuagcuaacaugggaaau

SEQ ID NO: 636075 - RNA, 19 nt, Artificial Sequence
  Description of Artificial Sequence: Synthetic oligonucleotide
  Antisense strand to SEQ ID NO: 636074
auuucccauguuagcuagu

SEQ ID NO: 636076 - RNA, 19 nt, Artificial Sequence
  Description of Artificial Sequence: Synthetic oligonucleotide
  Sense strand starting at position 900 of SEQ ID NO: 585390
augacuucugauugcaaag

SEQ ID NO: 636077 - RNA, 19 nt, Artificial Sequence
  Description of Artificial Sequence: Synthetic oligonucleotide
  Antisense strand to SEQ ID NO: 636076
cuuugcaaucagaagucau

SEQ ID NO: 636078 - RNA, 19 nt, Artificial Sequence
  Description of Artificial Sequence: Synthetic oligonucleotide
  Sense strand starting at position 933 of SEQ ID NO: 585390
aguucuuaacgugaagaua

SEQ ID NO: 636079 - RNA, 19 nt, Artificial Sequence
  Description of Artificial Sequence: Synthetic oligonucleotide
  Antisense strand to SEQ ID NO: 636078
uaucuucacguuaagaacu

SEQ ID NO: 636080 - RNA, 19 nt, Artificial Sequence
  Description of Artificial Sequence: Synthetic oligonucleotide
  Sense strand starting at position 1079 of SEQ ID NO: 585390
uaacguaaacaucacguau

SEQ ID NO: 636081 - RNA, 19 nt, Artificial Sequence
  Description of Artificial Sequence: Synthetic oligonucleotide
  Antisense strand to SEQ ID NO: 636080
auacgugauguuuacguua

SEQ ID NO: 636082 - RNA, 19 nt, Artificial Sequence
  Description of Artificial Sequence: Synthetic oligonucleotide
  Sense strand starting at position 1265 of SEQ ID NO: 585390
auuauuauccgagagcuac

SEQ ID NO: 636083 - RNA, 19 nt, Artificial Sequence
  Description of Artificial Sequence: Synthetic oligonucleotide
  Antisense strand to SEQ ID NO: 636082
guagcucucggauaauaau

SEQ ID NO: 636084 - RNA, 19 nt, Artificial Sequence
  Description of Artificial Sequence: Synthetic oligonucleotide
  Sense strand starting at position 1525 of SEQ ID NO: 585390
ccgagcucuuuacucauuu

SEQ ID NO: 636085 - RNA, 19 nt, Artificial Sequence
  Description of Artificial Sequence: Synthetic oligonucleotide
  Antisense strand to SEQ ID NO: 636084
aaaugaguaaagagcucgg

SEQ ID NO: 636086 - RNA, 19 nt, Artificial Sequence
  Description of Artificial Sequence: Synthetic oligonucleotide
  Sense strand starting at position 2020 of SEQ ID NO: 585390
gccaaucaugaugacucua

SEQ ID NO: 636087 - RNA, 19 nt, Artificial Sequence
  Description of Artificial Sequence: Synthetic oligonucleotide
  Antisense strand to SEQ ID NO: 636086
uagagucaucaugauuggc

SEQ ID NO: 636088 - RNA, 19 nt, Artificial Sequence
  Description of Artificial Sequence: Synthetic oligonucleotide
  Sense strand starting at position 2025 of SEQ ID NO: 585390
ucaugaugacucuacccga

SEQ ID NO: 636089 - RNA, 19 nt, Artificial Sequence
  Description of Artificial Sequence: Synthetic oligonucleotide
  Antisense strand to SEQ ID NO: 636088
ucggguagagucaucauga

SEQ ID NO: 636090 - RNA, 19 nt, Artificial Sequence
  Description of Artificial Sequence: Synthetic oligonucleotide
  Sense strand starting at position 2310 of SEQ ID NO: 585390
uggcgacugcguaauguaa

SEQ ID NO: 636091 - RNA, 19 nt, Artificial Sequence
  Description of Artificial Sequence: Synthetic oligonucleotide
  Antisense strand to SEQ ID NO: 636090
uuacauuacgcagucgcca

SEQ ID NO: 636092 - RNA, 19 nt, Artificial Sequence
  Description of Artificial Sequence: Synthetic oligonucleotide
  Sense strand starting at position 2414 of SEQ ID NO: 585390
uggaucuucuuaccgaaau

SEQ ID NO: 636093 - RNA, 19 nt, Artificial Sequence
  Description of Artificial Sequence: Synthetic oligonucleotide
  Antisense strand to SEQ ID NO: 636092
auuucgguaagaagaucca

SEQ ID NO: 636094 - RNA, 19 nt, Artificial Sequence
  Description of Artificial Sequence: Synthetic oligonucleotide
  Sense strand starting at position 2511 of SEQ ID NO: 585390
ugaguuuggcuugaaagug

SEQ ID NO: 636095 - RNA, 19 nt, Artificial Sequence
  Description of Artificial Sequence: Synthetic oligonucleotide
  Antisense strand to SEQ ID NO: 636094
cacuuucaagccaaacuca

SEQ ID NO: 636096 - RNA, 19 nt, Artificial Sequence
  Description of Artificial Sequence: Synthetic oligonucleotide
  Sense strand starting at position 2738 of SEQ ID NO: 585390
ucgugagggcuuuaaacug

SEQ ID NO: 636097 - RNA, 19 nt, Artificial Sequence
  Description of Artificial Sequence: Synthetic oligonucleotide
  Antisense strand to SEQ ID NO: 636096
caguuuaaagcccucacga

SEQ ID NO: 636098 - RNA, 19 nt, Artificial Sequence
  Description of Artificial Sequence: Synthetic oligonucleotide
  Sense strand starting at position 2769 of SEQ ID NO: 585390
ugauuaucaaggugguuua

SEQ ID NO: 636099 - RNA, 19 nt, Artificial Sequence
  Description of Artificial Sequence: Synthetic oligonucleotide
  Antisense strand to SEQ ID NO: 636098
uaaaccaccuugauaauca

SEQ ID NO: 636100 - RNA, 19 nt, Artificial Sequence
  Description of Artificial Sequence: Synthetic oligonucleotide
  Sense strand starting at position 2770 of SEQ ID NO: 585390
gauuaucaaggugguuuaa

SEQ ID NO: 636101 - RNA, 19 nt, Artificial Sequence
  Description of Artificial Sequence: Synthetic oligonucleotide
  Antisense strand to SEQ ID NO: 636100
uuaaaccaccuugauaauc

SEQ ID NO: 636102 - RNA, 19 nt, Artificial Sequence
  Description of Artificial Sequence: Synthetic oligonucleotide
  Sense strand starting at position 2772 of SEQ ID NO: 585390
uuaucaaggugguuuaaca

SEQ ID NO: 636103 - RNA, 19 nt, Artificial Sequence
  Description of Artificial Sequence: Synthetic oligonucleotide
  Antisense strand to SEQ ID NO: 636102
uguuaaaccaccuugauaa

SEQ ID NO: 636104 - RNA, 19 nt, Artificial Sequence
  Description of Artificial Sequence: Synthetic oligonucleotide
  Sense strand starting at position 2895 of SEQ ID NO: 585390
ccaugaagauugguaauuc

SEQ ID NO: 636105 - RNA, 19 nt, Artificial Sequence
  Description of Artificial Sequence: Synthetic oligonucleotide
  Antisense strand to SEQ ID NO: 636104
gaauuaccaaucuucaugg

SEQ ID NO: 636106 - RNA, 19 nt, Artificial Sequence
  Description of Artificial Sequence: Synthetic oligonucleotide
  Sense strand starting at position 3050 of SEQ ID NO: 585390
cgaaauacaucuguacaag

SEQ ID NO: 636107 - RNA, 19 nt, Artificial Sequence
  Description of Artificial Sequence: Synthetic oligonucleotide
  Antisense strand to SEQ ID NO: 636106
cuuguacagauguauuucg

SEQ ID NO: 636108 - RNA, 19 nt, Artificial Sequence
  Description of Artificial Sequence: Synthetic oligonucleotide
  Sense strand starting at position 3107 of SEQ ID NO: 585390
ccuaaauugcacggaauua

SEQ ID NO: 636109 - RNA, 19 nt, Artificial Sequence
  Description of Artificial Sequence: Synthetic oligonucleotide
  Antisense strand to SEQ ID NO: 636108
uaauuccgugcaauuuagg

SEQ ID NO: 636110 - RNA, 19 nt, Artificial Sequence
  Description of Artificial Sequence: Synthetic oligonucleotide
  Sense strand starting at position 3208 of SEQ ID NO: 585390
uguaaauguauggguggau

SEQ ID NO: 636111 - RNA, 19 nt, Artificial Sequence
  Description of Artificial Sequence: Synthetic oligonucleotide
  Antisense strand to SEQ ID NO: 636110
auccacccauacauuuaca

SEQ ID NO: 636112 - RNA, 19 nt, Artificial Sequence
  Description of Artificial Sequence: Synthetic oligonucleotide
  Sense strand starting at position 3209 of SEQ ID NO: 585390
guaaauguauggguggauu

SEQ ID NO: 636113 - RNA, 19 nt, Artificial Sequence
  Description of Artificial Sequence: Synthetic oligonucleotide
  Antisense strand to SEQ ID NO: 636112
aauccacccauacauuuac

SEQ ID NO: 636114 - RNA, 19 nt, Artificial Sequence
  Description of Artificial Sequence: Synthetic oligonucleotide
  Sense strand starting at position 3212 of SEQ ID NO: 585390
aauguauggguggauuacu

SEQ ID NO: 636115 - RNA, 19 nt, Artificial Sequence
  Description of Artificial Sequence: Synthetic oligonucleotide
  Antisense strand to SEQ ID NO: 636114
aguaauccacccauacauu

SEQ ID NO: 636116 - RNA, 19 nt, Artificial Sequence
  Description of Artificial Sequence: Synthetic oligonucleotide
  Sense strand starting at position 3217 of SEQ ID NO: 585390
auggguggauuacuuauaa

SEQ ID NO: 636117 - RNA, 19 nt, Artificial Sequence
  Description of Artificial Sequence: Synthetic oligonucleotide
  Antisense strand to SEQ ID NO: 636116
uuauaaguaauccacccau

SEQ ID NO: 636118 - RNA, 19 nt, Artificial Sequence
  Description of Artificial Sequence: Synthetic oligonucleotide
  Sense strand starting at position 3265 of SEQ ID NO: 585390
uaccguauuuacguggaca

SEQ ID NO: 636119 - RNA, 19 nt, Artificial Sequence
  Description of Artificial Sequence: Synthetic oligonucleotide
  Antisense strand to SEQ ID NO: 636118
uguccacguaaauacggua

SEQ ID NO: 636120 - RNA, 19 nt, Artificial Sequence
  Description of Artificial Sequence: Synthetic oligonucleotide
  Sense strand starting at position 3266 of SEQ ID NO: 585390
accguauuuacguggacaa

SEQ ID NO: 636121 - RNA, 19 nt, Artificial Sequence
  Description of Artificial Sequence: Synthetic oligonucleotide
  Antisense strand to SEQ ID NO: 636120
uuguccacguaaauacggu

SEQ ID NO: 636122 - RNA, 19 nt, Artificial Sequence
  Description of Artificial Sequence: Synthetic oligonucleotide
  Sense strand starting at position 3267 of SEQ ID NO: 585390
ccguauuuacguggacaaa

SEQ ID NO: 636123 - RNA, 19 nt, Artificial Sequence
  Description of Artificial Sequence: Synthetic oligonucleotide
  Antisense strand to SEQ ID NO: 636122
uuuguccacguaaauacgg

SEQ ID NO: 636124 - RNA, 19 nt, Artificial Sequence
  Description of Artificial Sequence: Synthetic oligonucleotide
  Sense strand starting at position 3278 of SEQ ID NO: 585390
uggacaaaugucugucaca

SEQ ID NO: 636125 - RNA, 19 nt, Artificial Sequence
  Description of Artificial Sequence: Synthetic oligonucleotide
  Antisense strand to SEQ ID NO: 636124
ugugacagacauuugucca

SEQ ID NO: 636126 - RNA, 19 nt, Artificial Sequence
  Description of Artificial Sequence: Synthetic oligonucleotide
  Sense strand starting at position 3279 of SEQ ID NO: 585390
ggacaaaugucugucacag

SEQ ID NO: 636127 - RNA, 19 nt, Artificial Sequence
  Description of Artificial Sequence: Synthetic oligonucleotide
  Antisense strand to SEQ ID NO: 636126
cugugacagacauuugucc

SEQ ID NO: 636128 - RNA, 19 nt, Artificial Sequence
  Description of Artificial Sequence: Synthetic oligonucleotide
  Sense strand starting at position 3303 of SEQ ID NO: 585390
ucagaucaggauugcugaa

SEQ ID NO: 636129 - RNA, 19 nt, Artificial Sequence
  Description of Artificial Sequence: Synthetic oligonucleotide
  Antisense strand to SEQ ID NO: 636128
uucagcaauccugaucuga

SEQ ID NO: 636130 - RNA, 19 nt, Artificial Sequence
  Description of Artificial Sequence: Synthetic oligonucleotide
  Sense strand starting at position 3494 of SEQ ID NO: 585390
guaguaaugccagaguaca

SEQ ID NO: 636131 - RNA, 19 nt, Artificial Sequence
  Description of Artificial Sequence: Synthetic oligonucleotide
  Antisense strand to SEQ ID NO: 636130
uguacucuggcauuacuac

SEQ ID NO: 636132 - RNA, 19 nt, Artificial Sequence
  Description of Artificial Sequence: Synthetic oligonucleotide
  Sense strand starting at position 3525 of SEQ ID NO: 585390
cuuccaaauuucgugguuu

SEQ ID NO: 636133 - RNA, 19 nt, Artificial Sequence
  Description of Artificial Sequence: Synthetic oligonucleotide
  Antisense strand to SEQ ID NO: 636132
aaaccacgaaauuuggaag

SEQ ID NO: 636134 - RNA, 19 nt, Artificial Sequence
  Description of Artificial Sequence: Synthetic oligonucleotide
  Sense strand starting at position 3529 of SEQ ID NO: 585390
caaauuucgugguuucgga

SEQ ID NO: 636135 - RNA, 19 nt, Artificial Sequence
  Description of Artificial Sequence: Synthetic oligonucleotide
  Antisense strand to SEQ ID NO: 636134
uccgaaaccacgaaauuug

SEQ ID NO: 636136 - RNA, 19 nt, Artificial Sequence
  Description of Artificial Sequence: Synthetic oligonucleotide
  Sense strand starting at position 3586 of SEQ ID NO: 585390
guuguugguaagcaagaaa

SEQ ID NO: 636137 - RNA, 19 nt, Artificial Sequence
  Description of Artificial Sequence: Synthetic oligonucleotide
  Antisense strand to SEQ ID NO: 636136
uuucuugcuuaccaacaac

SEQ ID NO: 636138 - RNA, 19 nt, Artificial Sequence
  Description of Artificial Sequence: Synthetic oligonucleotide
  Sense strand starting at position 3713 of SEQ ID NO: 585390
guaucaguuugaccuugaa

SEQ ID NO: 636139 - RNA, 19 nt, Artificial Sequence
  Description of Artificial Sequence: Synthetic oligonucleotide
  Antisense strand to SEQ ID NO: 636138
uucaaggucaaacugauac

SEQ ID NO: 636140 - RNA, 19 nt, Artificial Sequence
  Description of Artificial Sequence: Synthetic oligonucleotide
  Sense strand starting at position 76 of SEQ ID NO: 585391
acgagacggccugauuaag

SEQ ID NO: 636141 - RNA, 19 nt, Artificial Sequence
  Description of Artificial Sequence: Synthetic oligonucleotide
  Antisense strand to SEQ ID NO: 636140
cuuaaucaggccgucucgu

SEQ ID NO: 636142 - RNA, 19 nt, Artificial Sequence
  Description of Artificial Sequence: Synthetic oligonucleotide
  Sense strand starting at position 418 of SEQ ID NO: 585391
aggucugaaugguuacaaa

SEQ ID NO: 636143 - RNA, 19 nt, Artificial Sequence
  Description of Artificial Sequence: Synthetic oligonucleotide
  Antisense strand to SEQ ID NO: 636142
uuuguaaccauucagaccu

SEQ ID NO: 636144 - RNA, 19 nt, Artificial Sequence
  Description of Artificial Sequence: Synthetic oligonucleotide
  Sense strand starting at position 555 of SEQ ID NO: 585391
guguguccagaucagagaa

SEQ ID NO: 636145 - RNA, 19 nt, Artificial Sequence
  Description of Artificial Sequence: Synthetic oligonucleotide
  Antisense strand to SEQ ID NO: 636144
uucucugaucuggacacac

SEQ ID NO: 636146 - RNA, 19 nt, Artificial Sequence
  Description of Artificial Sequence: Synthetic oligonucleotide
  Sense strand starting at position 578 of SEQ ID NO: 585391
agggaacaaaugugccauu

SEQ ID NO: 636147 - RNA, 19 nt, Artificial Sequence
  Description of Artificial Sequence: Synthetic oligonucleotide
  Antisense strand to SEQ ID NO: 636146
aauggcacauuuguucccu

SEQ ID NO: 636148 - RNA, 19 nt, Artificial Sequence
  Description of Artificial Sequence: Synthetic oligonucleotide
  Sense strand starting at position 866 of SEQ ID NO: 585391
aaagauauuugguggauga

SEQ ID NO: 636149 - RNA, 19 nt, Artificial Sequence
  Description of Artificial Sequence: Synthetic oligonucleotide
  Antisense strand to SEQ ID NO: 636148
ucauccaccaaauaucuuu

SEQ ID NO: 636150 - RNA, 19 nt, Artificial Sequence
  Description of Artificial Sequence: Synthetic oligonucleotide
  Sense strand starting at position 1048 of SEQ ID NO: 585391
ugggcuacuagagauguua

SEQ ID NO: 636151 - RNA, 19 nt, Artificial Sequence
  Description of Artificial Sequence: Synthetic oligonucleotide
  Antisense strand to SEQ ID NO: 636150
uaacaucucuaguagccca

SEQ ID NO: 636152 - RNA, 19 nt, Artificial Sequence
  Description of Artificial Sequence: Synthetic oligonucleotide
  Sense strand starting at position 1050 of SEQ ID NO: 585391
ggcuacuagagauguuaac

SEQ ID NO: 636153 - RNA, 19 nt, Artificial Sequence
  Description of Artificial Sequence: Synthetic oligonucleotide
  Antisense strand to SEQ ID NO: 636152
guuaacaucucuaguagcc

SEQ ID NO: 636154 - RNA, 19 nt, Artificial Sequence
  Description of Artificial Sequence: Synthetic oligonucleotide
  Sense strand starting at position 1147 of SEQ ID NO: 585391
gguacaauuuaagaccuga

SEQ ID NO: 636155 - RNA, 19 nt, Artificial Sequence
  Description of Artificial Sequence: Synthetic oligonucleotide
  Antisense strand to SEQ ID NO: 636154
ucaggucuuaaauuguacc

SEQ ID NO: 636156 - RNA, 19 nt, Artificial Sequence
  Description of Artificial Sequence: Synthetic oligonucleotide
  Sense strand starting at position 1427 of SEQ ID NO: 585391
ccuccugaugcuuagaaac

SEQ ID NO: 636157 - RNA, 19 nt, Artificial Sequence
  Description of Artificial Sequence: Synthetic oligonucleotide
  Antisense strand to SEQ ID NO: 636156
guuucuaagcaucaggagg

SEQ ID NO: 636158 - RNA, 19 nt, Artificial Sequence
  Description of Artificial Sequence: Synthetic oligonucleotide
  Sense strand starting at position 1553 of SEQ ID NO: 585391
augggaaaguguccauaac

SEQ ID NO: 636159 - RNA, 19 nt, Artificial Sequence
  Description of Artificial Sequence: Synthetic oligonucleotide
  Antisense strand to SEQ ID NO: 636158
guuauggacacuuucccau

SEQ ID NO: 636160 - RNA, 19 nt, Artificial Sequence
  Description of Artificial Sequence: Synthetic oligonucleotide
  Sense strand starting at position 1664 of SEQ ID NO: 585391
gugacucugguacauuaca

SEQ ID NO: 636161 - RNA, 19 nt, Artificial Sequence
  Description of Artificial Sequence: Synthetic oligonucleotide
  Antisense strand to SEQ ID NO: 636160
uguaauguaccagagucac

SEQ ID NO: 636162 - RNA, 19 nt, Artificial Sequence
  Description of Artificial Sequence: Synthetic oligonucleotide
  Sense strand starting at position 1741 of SEQ ID NO: 585391
aggcuaauauccucaggaa

SEQ ID NO: 636163 - RNA, 19 nt, Artificial Sequence
  Description of Artificial Sequence: Synthetic oligonucleotide
  Antisense strand to SEQ ID NO: 636162
uuccugaggauauuagccu

SEQ ID NO: 636164 - RNA, 19 nt, Artificial Sequence
  Description of Artificial Sequence: Synthetic oligonucleotide
  Sense strand starting at position 1856 of SEQ ID NO: 585391
gaggaaauuaagugugggu

SEQ ID NO: 636165 - RNA, 19 nt, Artificial Sequence
  Description of Artificial Sequence: Synthetic oligonucleotide
  Antisense strand to SEQ ID NO: 636164
acccacacuuaauuuccuc

SEQ ID NO: 636166 - RNA, 19 nt, Artificial Sequence
  Description of Artificial Sequence: Synthetic oligonucleotide
  Sense strand starting at position 1861 of SEQ ID NO: 585391
aauuaaguguggguugaga

SEQ ID NO: 636167 - RNA, 19 nt, Artificial Sequence
  Description of Artificial Sequence: Synthetic oligonucleotide
  Antisense strand to SEQ ID NO: 636166
ucucaacccacacuuaauu

SEQ ID NO: 636168 - RNA, 19 nt, Artificial Sequence
  Description of Artificial Sequence: Synthetic oligonucleotide
  Sense strand starting at position 1863 of SEQ ID NO: 585391
uuaaguguggguugagaaa

SEQ ID NO: 636169 - RNA, 19 nt, Artificial Sequence
  Description of Artificial Sequence: Synthetic oligonucleotide
  Antisense strand to SEQ ID NO: 636168
uuucucaacccacacuuaa

SEQ ID NO: 636170 - RNA, 19 nt, Artificial Sequence
  Description of Artificial Sequence: Synthetic oligonucleotide
  Sense strand starting at position 1998 of SEQ ID NO: 585391
auguaaggguauccaaauc

SEQ ID NO: 636171 - RNA, 19 nt, Artificial Sequence
  Description of Artificial Sequence: Synthetic oligonucleotide
  Antisense strand to SEQ ID NO: 636170
gauuuggauacccuuacau

SEQ ID NO: 636172 - RNA, 19 nt, Artificial Sequence
  Description of Artificial Sequence: Synthetic oligonucleotide
  Sense strand starting at position 2146 of SEQ ID NO: 585391
ugcuuaacucagggaguua

SEQ ID NO: 636173 - RNA, 19 nt, Artificial Sequence
  Description of Artificial Sequence: Synthetic oligonucleotide
  Antisense strand to SEQ ID NO: 636172
uaacucccugaguuaagca

SEQ ID NO: 636174 - RNA, 19 nt, Artificial Sequence
  Description of Artificial Sequence: Synthetic oligonucleotide
  Sense strand starting at position 2147 of SEQ ID NO: 585391
gcuuaacucagggaguuag

SEQ ID NO: 636175 - RNA, 19 nt, Artificial Sequence
  Description of Artificial Sequence: Synthetic oligonucleotide
  Antisense strand to SEQ ID NO: 636174
cuaacucccugaguuaagc

SEQ ID NO: 636176 - RNA, 19 nt, Artificial Sequence
  Description of Artificial Sequence: Synthetic oligonucleotide
  Sense strand starting at position 2216 of SEQ ID NO: 585391
agagauuaacaccguaaug

SEQ ID NO: 636177 - RNA, 19 nt, Artificial Sequence
  Description of Artificial Sequence: Synthetic oligonucleotide
  Antisense strand to SEQ ID NO: 636176
cauuacgguguuaaucucu

SEQ ID NO: 636178 - RNA, 19 nt, Artificial Sequence
  Description of Artificial Sequence: Synthetic oligonucleotide
  Sense strand starting at position 2249 of SEQ ID NO: 585391
gguaaauaccagcauacau

SEQ ID NO: 636179 - RNA, 19 nt, Artificial Sequence
  Description of Artificial Sequence: Synthetic oligonucleotide
  Antisense strand to SEQ ID NO: 636178
auguaugcugguauuuacc

SEQ ID NO: 636180 - RNA, 19 nt, Artificial Sequence
  Description of Artificial Sequence: Synthetic oligonucleotide
  Sense strand starting at position 2316 of SEQ ID NO: 585391
acuguuugacaucaccagu

SEQ ID NO: 636181 - RNA, 19 nt, Artificial Sequence
  Description of Artificial Sequence: Synthetic oligonucleotide
  Antisense strand to SEQ ID NO: 636180
acuggugaugucaaacagu

SEQ ID NO: 636182 - RNA, 19 nt, Artificial Sequence
  Description of Artificial Sequence: Synthetic oligonucleotide
  Sense strand starting at position 2324 of SEQ ID NO: 585391
acaucaccaguguaguuau

SEQ ID NO: 636183 - RNA, 19 nt, Artificial Sequence
  Description of Artificial Sequence: Synthetic oligonucleotide
  Antisense strand to SEQ ID NO: 636182
auaacuacacuggugaugu

SEQ ID NO: 636184 - RNA, 19 nt, Artificial Sequence
  Description of Artificial Sequence: Synthetic oligonucleotide
  Sense strand starting at position 2338 of SEQ ID NO: 585391
guuauaguaccaugacacu

SEQ ID NO: 636185 - RNA, 19 nt, Artificial Sequence
  Description of Artificial Sequence: Synthetic oligonucleotide
  Antisense strand to SEQ ID NO: 636184
agugucaugguacuauaac

SEQ ID NO: 636186 - RNA, 19 nt, Artificial Sequence
  Description of Artificial Sequence: Synthetic oligonucleotide
  Sense strand starting at position 2404 of SEQ ID NO: 585391
guugauaaaugcucucaua

SEQ ID NO: 636187 - RNA, 19 nt, Artificial Sequence
  Description of Artificial Sequence: Synthetic oligonucleotide
  Antisense strand to SEQ ID NO: 636186
uaugagagcauuuaucaac

SEQ ID NO: 636188 - RNA, 19 nt, Artificial Sequence
  Description of Artificial Sequence: Synthetic oligonucleotide
  Sense strand starting at position 2432 of SEQ ID NO: 585391
ucauuuggguguuugcaca

SEQ ID NO: 636189 - RNA, 19 nt, Artificial Sequence
  Description of Artificial Sequence: Synthetic oligonucleotide
  Antisense strand to SEQ ID NO: 636188
ugugcaaacacccaaauga

SEQ ID NO: 636190 - RNA, 19 nt, Artificial Sequence
  Description of Artificial Sequence: Synthetic oligonucleotide
  Sense strand starting at position 2550 of SEQ ID NO: 585391
guuccugcuaggcaugaaa

SEQ ID NO: 636191 - RNA, 19 nt, Artificial Sequence
  Description of Artificial Sequence: Synthetic oligonucleotide
  Antisense strand to SEQ ID NO: 636190
uuucaugccuagcaggaac

SEQ ID NO: 636192 - RNA, 19 nt, Artificial Sequence
  Description of Artificial Sequence: Synthetic oligonucleotide
  Sense strand starting at position 2593 of SEQ ID NO: 585391
ggaacaguauuagucacau

SEQ ID NO: 636193 - RNA, 19 nt, Artificial Sequence
  Description of Artificial Sequence: Synthetic oligonucleotide
  Antisense strand to SEQ ID NO: 636192
augugacuaauacuguucc

SEQ ID NO: 636194 - RNA, 19 nt, Artificial Sequence
  Description of Artificial Sequence: Synthetic oligonucleotide
  Sense strand starting at position 2676 of SEQ ID NO: 585391
augaaaugaucucuauguu

SEQ ID NO: 636195 - RNA, 19 nt, Artificial Sequence
  Description of Artificial Sequence: Synthetic oligonucleotide
  Antisense strand to SEQ ID NO: 636194
aacauagagaucauuucau

SEQ ID NO: 636196 - RNA, 19 nt, Artificial Sequence
  Description of Artificial Sequence: Synthetic oligonucleotide
  Sense strand starting at position 2677 of SEQ ID NO: 585391
ugaaaugaucucuauguuu

SEQ ID NO: 636197 - RNA, 19 nt, Artificial Sequence
  Description of Artificial Sequence: Synthetic oligonucleotide
  Antisense strand to SEQ ID NO: 636196
aaacauagagaucauuuca

SEQ ID NO: 636198 - RNA, 19 nt, Artificial Sequence
  Description of Artificial Sequence: Synthetic oligonucleotide
  Sense strand starting at position 2718 of SEQ ID NO: 585391
ucagcuauuccggauacau

SEQ ID NO: 636199 - RNA, 19 nt, Artificial Sequence
  Description of Artificial Sequence: Synthetic oligonucleotide
  Antisense strand to SEQ ID NO: 636198
auguauccggaauagcuga

SEQ ID NO: 636200 - RNA, 19 nt, Artificial Sequence
  Description of Artificial Sequence: Synthetic oligonucleotide
  Sense strand starting at position 2720 of SEQ ID NO: 585391
agcuauuccggauacauac

SEQ ID NO: 636201 - RNA, 19 nt, Artificial Sequence
  Description of Artificial Sequence: Synthetic oligonucleotide
  Antisense strand to SEQ ID NO: 636200
guauguauccggaauagcu

SEQ ID NO: 636202 - RNA, 19 nt, Artificial Sequence
  Description of Artificial Sequence: Synthetic oligonucleotide
  Sense strand starting at position 2760 of SEQ ID NO: 585391
uggcauaucuaaccaugua

SEQ ID NO: 636203 - RNA, 19 nt, Artificial Sequence
  Description of Artificial Sequence: Synthetic oligonucleotide
  Antisense strand to SEQ ID NO: 636202
uacaugguuagauaugcca

SEQ ID NO: 636204 - RNA, 19 nt, Artificial Sequence
  Description of Artificial Sequence: Synthetic oligonucleotide
  Sense strand starting at position 2779 of SEQ ID NO: 585391
acuuaaauguggccagaag

SEQ ID NO: 636205 - RNA, 19 nt, Artificial Sequence
  Description of Artificial Sequence: Synthetic oligonucleotide
  Antisense strand to SEQ ID NO: 636204
cuucuggccacauuuaagu

SEQ ID NO: 636206 - RNA, 19 nt, Artificial Sequence
  Description of Artificial Sequence: Synthetic oligonucleotide
  Sense strand starting at position 2850 of SEQ ID NO: 585391
gggugcuacaagcaaugau

SEQ ID NO: 636207 - RNA, 19 nt, Artificial Sequence
  Description of Artificial Sequence: Synthetic oligonucleotide
  Antisense strand to SEQ ID NO: 636206
aucauugcuuguagcaccc

SEQ ID NO: 636208 - RNA, 19 nt, Artificial Sequence
  Description of Artificial Sequence: Synthetic oligonucleotide
  Sense strand starting at position 3052 of SEQ ID NO: 585391
gcacuaaauguguaagcca

SEQ ID NO: 636209 - RNA, 19 nt, Artificial Sequence
  Description of Artificial Sequence: Synthetic oligonucleotide
  Antisense strand to SEQ ID NO: 636208
uggcuuacacauuuagugc

SEQ ID NO: 636210 - RNA, 19 nt, Artificial Sequence
  Description of Artificial Sequence: Synthetic oligonucleotide
  Sense strand starting at position 3059 of SEQ ID NO: 585391
auguguaagccagagguca

SEQ ID NO: 636211 - RNA, 19 nt, Artificial Sequence
  Description of Artificial Sequence: Synthetic oligonucleotide
  Antisense strand to SEQ ID NO: 636210
ugaccucuggcuuacacau

SEQ ID NO: 636212 - RNA, 19 nt, Artificial Sequence
  Description of Artificial Sequence: Synthetic oligonucleotide
  Sense strand starting at position 3127 of SEQ ID NO: 585391
gcuuccucuccagggagaa

SEQ ID NO: 636213 - RNA, 19 nt, Artificial Sequence
  Description of Artificial Sequence: Synthetic oligonucleotide
  Antisense strand to SEQ ID NO: 636212
uucucccuggagaggaagc

SEQ ID NO: 636214 - RNA, 19 nt, Artificial Sequence
  Description of Artificial Sequence: Synthetic oligonucleotide
  Sense strand starting at position 3128 of SEQ ID NO: 585391
cuuccucuccagggagaaa

SEQ ID NO: 636215 - RNA, 19 nt, Artificial Sequence
  Description of Artificial Sequence: Synthetic oligonucleotide
  Antisense strand to SEQ ID NO: 636214
uuucucccuggagaggaag

SEQ ID NO: 636216 - RNA, 19 nt, Artificial Sequence
  Description of Artificial Sequence: Synthetic oligonucleotide
  Sense strand starting at position 3171 of SEQ ID NO: 585391
uacagcuugugauugaaag

SEQ ID NO: 636217 - RNA, 19 nt, Artificial Sequence
  Description of Artificial Sequence: Synthetic oligonucleotide
  Antisense strand to SEQ ID NO: 636216
cuuucaaucacaagcugua

SEQ ID NO: 636218 - RNA, 19 nt, Artificial Sequence
  Description of Artificial Sequence: Synthetic oligonucleotide
  Sense strand starting at position 3247 of SEQ ID NO: 585391
gaaauuauugcagaugcag

SEQ ID NO: 636219 - RNA, 19 nt, Artificial Sequence
  Description of Artificial Sequence: Synthetic oligonucleotide
  Antisense strand to SEQ ID NO: 636218
cugcaucugcaauaauuuc

SEQ ID NO: 636220 - RNA, 19 nt, Artificial Sequence
  Description of Artificial Sequence: Synthetic oligonucleotide
  Sense strand starting at position 29 of SEQ ID NO: 585392
agagauuaacaccguaaug

SEQ ID NO: 636221 - RNA, 19 nt, Artificial Sequence
  Description of Artificial Sequence: Synthetic oligonucleotide
  Antisense strand to SEQ ID NO: 636220
cauuacgguguuaaucucu

SEQ ID NO: 636222 - RNA, 19 nt, Artificial Sequence
  Description of Artificial Sequence: Synthetic oligonucleotide
  Sense strand starting at position 62 of SEQ ID NO: 585392
gguaaauaccagcauacau

SEQ ID NO: 636223 - RNA, 19 nt, Artificial Sequence
  Description of Artificial Sequence: Synthetic oligonucleotide
  Antisense strand to SEQ ID NO: 636222
auguaugcugguauuuacc

SEQ ID NO: 636224 - RNA, 19 nt, Artificial Sequence
  Description of Artificial Sequence: Synthetic oligonucleotide
  Sense strand starting at position 129 of SEQ ID NO: 585392
acuguuugacaucaccagu

SEQ ID NO: 636225 - RNA, 19 nt, Artificial Sequence
  Description of Artificial Sequence: Synthetic oligonucleotide
  Antisense strand to SEQ ID NO: 636224
acuggugaugucaaacagu

SEQ ID NO: 636226 - RNA, 19 nt, Artificial Sequence
  Description of Artificial Sequence: Synthetic oligonucleotide
  Sense strand starting at position 137 of SEQ ID NO: 585392
acaucaccaguguaguuau

SEQ ID NO: 636227 - RNA, 19 nt, Artificial Sequence
  Description of Artificial Sequence: Synthetic oligonucleotide
  Antisense strand to SEQ ID NO: 636226
auaacuacacuggugaugu

SEQ ID NO: 636228 - RNA, 19 nt, Artificial Sequence
  Description of Artificial Sequence: Synthetic oligonucleotide
  Sense strand starting at position 151 of SEQ ID NO: 585392
guuauaguaccaugacacu

SEQ ID NO: 636229 - RNA, 19 nt, Artificial Sequence
  Description of Artificial Sequence: Synthetic oligonucleotide
  Antisense strand to SEQ ID NO: 636228
agugucaugguacuauaac

SEQ ID NO: 636230 - RNA, 19 nt, Artificial Sequence
  Description of Artificial Sequence: Synthetic oligonucleotide
  Sense strand starting at position 245 of SEQ ID NO: 585392
ucauuuggguguuugcaca

SEQ ID NO: 636231 - RNA, 19 nt, Artificial Sequence
  Description of Artificial Sequence: Synthetic oligonucleotide
  Antisense strand to SEQ ID NO: 636230
ugugcaaacacccaaauga

SEQ ID NO: 636232 - RNA, 19 nt, Artificial Sequence
  Description of Artificial Sequence: Synthetic oligonucleotide
  Sense strand starting at position 406 of SEQ ID NO: 585392
ggaacaguauuagucacau

SEQ ID NO: 636233 - RNA, 19 nt, Artificial Sequence
  Description of Artificial Sequence: Synthetic oligonucleotide
  Antisense strand to SEQ ID NO: 636232
augugacuaauacuguucc

SEQ ID NO: 636234 - RNA, 19 nt, Artificial Sequence
  Description of Artificial Sequence: Synthetic oligonucleotide
  Sense strand starting at position 489 of SEQ ID NO: 585392
augaaaugaucucuauguu

SEQ ID NO: 636235 - RNA, 19 nt, Artificial Sequence
  Description of Artificial Sequence: Synthetic oligonucleotide
  Antisense strand to SEQ ID NO: 636234
aacauagagaucauuucau

SEQ ID NO: 636236 - RNA, 19 nt, Artificial Sequence
  Description of Artificial Sequence: Synthetic oligonucleotide
  Sense strand starting at position 490 of SEQ ID NO: 585392
ugaaaugaucucuauguuu

SEQ ID NO: 636237 - RNA, 19 nt, Artificial Sequence
  Description of Artificial Sequence: Synthetic oligonucleotide
  Antisense strand to SEQ ID NO: 636236
aaacauagagaucauuuca

SEQ ID NO: 636238 - RNA, 19 nt, Artificial Sequence
  Description of Artificial Sequence: Synthetic oligonucleotide
  Sense strand starting at position 531 of SEQ ID NO: 585392
ucagcuauuccggauacau

SEQ ID NO: 636239 - RNA, 19 nt, Artificial Sequence
  Description of Artificial Sequence: Synthetic oligonucleotide
  Antisense strand to SEQ ID NO: 636238
auguauccggaauagcuga

SEQ ID NO: 636240 - RNA, 19 nt, Artificial Sequence
  Description of Artificial Sequence: Synthetic oligonucleotide
  Sense strand starting at position 533 of SEQ ID NO: 585392
agcuauuccggauacauac

SEQ ID NO: 636241 - RNA, 19 nt, Artificial Sequence
  Description of Artificial Sequence: Synthetic oligonucleotide
  Antisense strand to SEQ ID NO: 636240
guauguauccggaauagcu

SEQ ID NO: 636242 - RNA, 19 nt, Artificial Sequence
  Description of Artificial Sequence: Synthetic oligonucleotide
  Sense strand starting at position 592 of SEQ ID NO: 585392
acuuaaauguggccagaag

SEQ ID NO: 636243 - RNA, 19 nt, Artificial Sequence
  Description of Artificial Sequence: Synthetic oligonucleotide
  Antisense strand to SEQ ID NO: 636242
cuucuggccacauuuaagu

SEQ ID NO: 636244 - RNA, 19 nt, Artificial Sequence
  Description of Artificial Sequence: Synthetic oligonucleotide
  Sense strand starting at position 663 of SEQ ID NO: 585392
gggugcuacaagcaaugau

SEQ ID NO: 636245 - RNA, 19 nt, Artificial Sequence
  Description of Artificial Sequence: Synthetic oligonucleotide
  Antisense strand to SEQ ID NO: 636244
aucauugcuuguagcaccc

SEQ ID NO: 636246 - RNA, 19 nt, Artificial Sequence
  Description of Artificial Sequence: Synthetic oligonucleotide
  Sense strand starting at position 872 of SEQ ID NO: 585392
auguguaagccagagguca

SEQ ID NO: 636247 - RNA, 19 nt, Artificial Sequence
  Description of Artificial Sequence: Synthetic oligonucleotide
  Antisense strand to SEQ ID NO: 636246
ugaccucuggcuuacacau

SEQ ID NO: 636248 - RNA, 19 nt, Artificial Sequence
  Description of Artificial Sequence: Synthetic oligonucleotide
  Sense strand starting at position 940 of SEQ ID NO: 585392
gcuuccucuccagggagaa

SEQ ID NO: 636249 - RNA, 19 nt, Artificial Sequence
  Description of Artificial Sequence: Synthetic oligonucleotide
  Antisense strand to SEQ ID NO: 636248
uucucccuggagaggaagc

SEQ ID NO: 636250 - RNA, 19 nt, Artificial Sequence
  Description of Artificial Sequence: Synthetic oligonucleotide
  Sense strand starting at position 941 of SEQ ID NO: 585392
cuuccucuccagggagaaa

SEQ ID NO: 636251 - RNA, 19 nt, Artificial Sequence
  Description of Artificial Sequence: Synthetic oligonucleotide
  Antisense strand to SEQ ID NO: 636250
uuucucccuggagaggaag

SEQ ID NO: 636252 - RNA, 19 nt, Artificial Sequence
  Description of Artificial Sequence: Synthetic oligonucleotide
  Sense strand starting at position 984 of SEQ ID NO: 585392
uacagcuugugauugaaag

SEQ ID NO: 636253 - RNA, 19 nt, Artificial Sequence
  Description of Artificial Sequence: Synthetic oligonucleotide
  Antisense strand to SEQ ID NO: 636252
cuuucaaucacaagcugua

SEQ ID NO: 636254 - RNA, 19 nt, Artificial Sequence
  Description of Artificial Sequence: Synthetic oligonucleotide
  Sense strand starting at position 1060 of SEQ ID NO: 585392
gaaauuauugcagaugcag

SEQ ID NO: 636255 - RNA, 19 nt, Artificial Sequence
  Description of Artificial Sequence: Synthetic oligonucleotide
  Antisense strand to SEQ ID NO: 636254
cugcaucugcaauaauuuc

SEQ ID NO: 636256 - RNA, 19 nt, Artificial Sequence
  Description of Artificial Sequence: Synthetic oligonucleotide
  Sense strand starting at position 2271 of SEQ ID NO: 585392
uagaucaagcgguauuaau

SEQ ID NO: 636257 - RNA, 19 nt, Artificial Sequence
  Description of Artificial Sequence: Synthetic oligonucleotide
  Antisense strand to SEQ ID NO: 636256
auuaauaccgcuugaucua

SEQ ID NO: 636258 - RNA, 19 nt, Artificial Sequence
  Description of Artificial Sequence: Synthetic oligonucleotide
  Sense strand starting at position 2341 of SEQ ID NO: 585392
uaaagucagcguugauuua

SEQ ID NO: 636259 - RNA, 19 nt, Artificial Sequence
  Description of Artificial Sequence: Synthetic oligonucleotide
  Antisense strand to SEQ ID NO: 636258
uaaaucaacgcugacuuua

SEQ ID NO: 636260 - RNA, 19 nt, Artificial Sequence
  Description of Artificial Sequence: Synthetic oligonucleotide
  Sense strand starting at position 2362 of SEQ ID NO: 585392
agaugaauugcuuaauggu

SEQ ID NO: 636261 - RNA, 19 nt, Artificial Sequence
  Description of Artificial Sequence: Synthetic oligonucleotide
  Antisense strand to SEQ ID NO: 636260
accauuaagcaauucaucu

SEQ ID NO: 636262 - RNA, 19 nt, Artificial Sequence
  Description of Artificial Sequence: Synthetic oligonucleotide
  Sense strand starting at position 2369 of SEQ ID NO: 585392
uugcuuaauggugaacgaa

SEQ ID NO: 636263 - RNA, 19 nt, Artificial Sequence
  Description of Artificial Sequence: Synthetic oligonucleotide
  Antisense strand to SEQ ID NO: 636262
uucguucaccauuaagcaa

SEQ ID NO: 636264 - RNA, 19 nt, Artificial Sequence
  Description of Artificial Sequence: Synthetic oligonucleotide
  Sense strand starting at position 2685 of SEQ ID NO: 585392
cugugucugcguaauggga

SEQ ID NO: 636265 - RNA, 19 nt, Artificial Sequence
  Description of Artificial Sequence: Synthetic oligonucleotide
  Antisense strand to SEQ ID NO: 636264
ucccauuacgcagacacag

SEQ ID NO: 636266 - RNA, 19 nt, Artificial Sequence
  Description of Artificial Sequence: Synthetic oligonucleotide
  Sense strand starting at position 2823 of SEQ ID NO: 585392
acuauuagaugugugauca

SEQ ID NO: 636267 - RNA, 19 nt, Artificial Sequence
  Description of Artificial Sequence: Synthetic oligonucleotide
  Antisense strand to SEQ ID NO: 636266
ugaucacacaucuaauagu

SEQ ID NO: 636268 - RNA, 19 nt, Artificial Sequence
  Description of Artificial Sequence: Synthetic oligonucleotide
  Sense strand starting at position 2827 of SEQ ID NO: 585392
uuagaugugugaucauauu

SEQ ID NO: 636269 - RNA, 19 nt, Artificial Sequence
  Description of Artificial Sequence: Synthetic oligonucleotide
  Antisense strand to SEQ ID NO: 636268
aauaugaucacacaucuaa

SEQ ID NO: 636270 - RNA, 19 nt, Artificial Sequence
  Description of Artificial Sequence: Synthetic oligonucleotide
  Sense strand starting at position 2869 of SEQ ID NO: 585392
gccaguaaaccucaauaga

SEQ ID NO: 636271 - RNA, 19 nt, Artificial Sequence
  Description of Artificial Sequence: Synthetic oligonucleotide
  Antisense strand to SEQ ID NO: 636270
ucuauugagguuuacuggc

SEQ ID NO: 636272 - RNA, 19 nt, Artificial Sequence
  Description of Artificial Sequence: Synthetic oligonucleotide
  Sense strand starting at position 2897 of SEQ ID NO: 585392
aggauuagaagagguaguu

SEQ ID NO: 636273 - RNA, 19 nt, Artificial Sequence
  Description of Artificial Sequence: Synthetic oligonucleotide
  Antisense strand to SEQ ID NO: 636272
aacuaccucuucuaauccu

SEQ ID NO: 636274 - RNA, 19 nt, Artificial Sequence
  Description of Artificial Sequence: Synthetic oligonucleotide
  Sense strand starting at position 2947 of SEQ ID NO: 585392
acguucaugcguguuuaua

SEQ ID NO: 636275 - RNA, 19 nt, Artificial Sequence
  Description of Artificial Sequence: Synthetic oligonucleotide
  Antisense strand to SEQ ID NO: 636274
uauaaacacgcaugaacgu

SEQ ID NO: 636276 - RNA, 19 nt, Artificial Sequence
  Description of Artificial Sequence: Synthetic oligonucleotide
  Sense strand starting at position 2948 of SEQ ID NO: 585392
cguucaugcguguuuauac

SEQ ID NO: 636277 - RNA, 19 nt, Artificial Sequence
  Description of Artificial Sequence: Synthetic oligonucleotide
  Antisense strand to SEQ ID NO: 636276
guauaaacacgcaugaacg

SEQ ID NO: 636278 - RNA, 19 nt, Artificial Sequence
  Description of Artificial Sequence: Synthetic oligonucleotide
  Sense strand starting at position 2984 of SEQ ID NO: 585392
agugucagugcuguguaga

SEQ ID NO: 636279 - RNA, 19 nt, Artificial Sequence
  Description of Artificial Sequence: Synthetic oligonucleotide
  Antisense strand to SEQ ID NO: 636278
ucuacacagcacugacacu

SEQ ID NO: 636280 - RNA, 19 nt, Artificial Sequence
  Description of Artificial Sequence: Synthetic oligonucleotide
  Sense strand starting at position 3139 of SEQ ID NO: 585392
acauuuauugccggcccaa

SEQ ID NO: 636281 - RNA, 19 nt, Artificial Sequence
  Description of Artificial Sequence: Synthetic oligonucleotide
  Antisense strand to SEQ ID NO: 636280
uugggccggcaauaaaugu

SEQ ID NO: 636282 - RNA, 19 nt, Artificial Sequence
  Description of Artificial Sequence: Synthetic oligonucleotide
  Sense strand starting at position 3516 of SEQ ID NO: 585392
ccaugaauuugauauagug

SEQ ID NO: 636283 - RNA, 19 nt, Artificial Sequence
  Description of Artificial Sequence: Synthetic oligonucleotide
  Antisense strand to SEQ ID NO: 636282
cacuauaucaaauucaugg

SEQ ID NO: 636284 - RNA, 19 nt, Artificial Sequence
  Description of Artificial Sequence: Synthetic oligonucleotide
  Sense strand starting at position 3594 of SEQ ID NO: 585392
ugacaaaugaguugguaac

SEQ ID NO: 636285 - RNA, 19 nt, Artificial Sequence
  Description of Artificial Sequence: Synthetic oligonucleotide
  Antisense strand to SEQ ID NO: 636284
guuaccaacucauuuguca

SEQ ID NO: 636286 - RNA, 19 nt, Artificial Sequence
  Description of Artificial Sequence: Synthetic oligonucleotide
  Sense strand starting at position 3595 of SEQ ID NO: 585392
gacaaaugaguugguaaca

SEQ ID NO: 636287 - RNA, 19 nt, Artificial Sequence
  Description of Artificial Sequence: Synthetic oligonucleotide
  Antisense strand to SEQ ID NO: 636286
uguuaccaacucauuuguc

SEQ ID NO: 636288 - RNA, 19 nt, Artificial Sequence
  Description of Artificial Sequence: Synthetic oligonucleotide
  Sense strand starting at position 3596 of SEQ ID NO: 585392
acaaaugaguugguaacau

SEQ ID NO: 636289 - RNA, 19 nt, Artificial Sequence
  Description of Artificial Sequence: Synthetic oligonucleotide
  Antisense strand to SEQ ID NO: 636288
auguuaccaacucauuugu

SEQ ID NO: 636290 - RNA, 19 nt, Artificial Sequence
  Description of Artificial Sequence: Synthetic oligonucleotide
  Sense strand starting at position 3604 of SEQ ID NO: 585392
guugguaacauuugugcaa

SEQ ID NO: 636291 - RNA, 19 nt, Artificial Sequence
  Description of Artificial Sequence: Synthetic oligonucleotide
  Antisense strand to SEQ ID NO: 636290
uugcacaaauguuaccaac

SEQ ID NO: 636292 - RNA, 19 nt, Artificial Sequence
  Description of Artificial Sequence: Synthetic oligonucleotide
  Sense strand starting at position 3628 of SEQ ID NO: 585392
ugcagcugugcgguucaau

SEQ ID NO: 636293 - RNA, 19 nt, Artificial Sequence
  Description of Artificial Sequence: Synthetic oligonucleotide
  Antisense strand to SEQ ID NO: 636292
auugaaccgcacagcugca

SEQ ID NO: 636294 - RNA, 19 nt, Artificial Sequence
  Description of Artificial Sequence: Synthetic oligonucleotide
  Sense strand starting at position 3629 of SEQ ID NO: 585392
gcagcugugcgguucaaua

SEQ ID NO: 636295 - RNA, 19 nt, Artificial Sequence
  Description of Artificial Sequence: Synthetic oligonucleotide
  Antisense strand to SEQ ID NO: 636294
uauugaaccgcacagcugc

SEQ ID NO: 636296 - RNA, 19 nt, Artificial Sequence
  Description of Artificial Sequence: Synthetic oligonucleotide
  Sense strand starting at position 3687 of SEQ ID NO: 585392
guauucuaagagggcuuga

SEQ ID NO: 636297 - RNA, 19 nt, Artificial Sequence
  Description of Artificial Sequence: Synthetic oligonucleotide
  Antisense strand to SEQ ID NO: 636296
ucaagcccucuuagaauac

SEQ ID NO: 636298 - RNA, 19 nt, Artificial Sequence
  Description of Artificial Sequence: Synthetic oligonucleotide
  Sense strand starting at position 3768 of SEQ ID NO: 585392
aauggaucucagggcgauu

SEQ ID NO: 636299 - RNA, 19 nt, Artificial Sequence
  Description of Artificial Sequence: Synthetic oligonucleotide
  Antisense strand to SEQ ID NO: 636298
aaucgcccugagauccauu

SEQ ID NO: 636300 - RNA, 19 nt, Artificial Sequence
  Description of Artificial Sequence: Synthetic oligonucleotide
  Sense strand starting at position 99 of SEQ ID NO: 585393
cuaagaauguagcugaaug

SEQ ID NO: 636301 - RNA, 19 nt, Artificial Sequence
  Description of Artificial Sequence: Synthetic oligonucleotide
  Antisense strand to SEQ ID NO: 636300
cauucagcuacauucuuag

SEQ ID NO: 636302 - RNA, 19 nt, Artificial Sequence
  Description of Artificial Sequence: Synthetic oligonucleotide
  Sense strand starting at position 109 of SEQ ID NO: 585393
agcugaaugcaugacuuua

SEQ ID NO: 636303 - RNA, 19 nt, Artificial Sequence
  Description of Artificial Sequence: Synthetic oligonucleotide
  Antisense strand to SEQ ID NO: 636302
uaaagucaugcauucagcu

SEQ ID NO: 636304 - RNA, 19 nt, Artificial Sequence
  Description of Artificial Sequence: Synthetic oligonucleotide
  Sense strand starting at position 111 of SEQ ID NO: 585393
cugaaugcaugacuuuaca

SEQ ID NO: 636305 - RNA, 19 nt, Artificial Sequence
  Description of Artificial Sequence: Synthetic oligonucleotide
  Antisense strand to SEQ ID NO: 636304
uguaaagucaugcauucag

SEQ ID NO: 636306 - RNA, 19 nt, Artificial Sequence
  Description of Artificial Sequence: Synthetic oligonucleotide
  Sense strand starting at position 290 of SEQ ID NO: 585393
ucggaauccacugagcuuu

SEQ ID NO: 636307 - RNA, 19 nt, Artificial Sequence
  Description of Artificial Sequence: Synthetic oligonucleotide
  Antisense strand to SEQ ID NO: 636306
aaagcucaguggauuccga

SEQ ID NO: 636308 - RNA, 19 nt, Artificial Sequence
  Description of Artificial Sequence: Synthetic oligonucleotide
  Sense strand starting at position 400 of SEQ ID NO: 585393
aaacaucuguuagcuggaa

SEQ ID NO: 636309 - RNA, 19 nt, Artificial Sequence
  Description of Artificial Sequence: Synthetic oligonucleotide
  Antisense strand to SEQ ID NO: 636308
uuccagcuaacagauguuu

SEQ ID NO: 636310 - RNA, 19 nt, Artificial Sequence
  Description of Artificial Sequence: Synthetic oligonucleotide
  Sense strand starting at position 401 of SEQ ID NO: 585393
aacaucuguuagcuggaaa

SEQ ID NO: 636311 - RNA, 19 nt, Artificial Sequence
  Description of Artificial Sequence: Synthetic oligonucleotide
  Antisense strand to SEQ ID NO: 636310
uuuccagcuaacagauguu

SEQ ID NO: 636312 - RNA, 19 nt, Artificial Sequence
  Description of Artificial Sequence: Synthetic oligonucleotide
  Sense strand starting at position 700 of SEQ ID NO: 585393
ggucuagacuggucuugag

SEQ ID NO: 636313 - RNA, 19 nt, Artificial Sequence
  Description of Artificial Sequence: Synthetic oligonucleotide
  Antisense strand to SEQ ID NO: 636312
cucaagaccagucuagacc

SEQ ID NO: 636314 - RNA, 19 nt, Artificial Sequence
  Description of Artificial Sequence: Synthetic oligonucleotide
  Sense strand starting at position 747 of SEQ ID NO: 585393
ggagcuguaucaccuggaa

SEQ ID NO: 636315 - RNA, 19 nt, Artificial Sequence
  Description of Artificial Sequence: Synthetic oligonucleotide
  Antisense strand to SEQ ID NO: 636314
uuccaggugauacagcucc

SEQ ID NO: 636316 - RNA, 19 nt, Artificial Sequence
  Description of Artificial Sequence: Synthetic oligonucleotide
  Sense strand starting at position 808 of SEQ ID NO: 585393
cugccaugggaucagaagu

SEQ ID NO: 636317 - RNA, 19 nt, Artificial Sequence
  Description of Artificial Sequence: Synthetic oligonucleotide
  Antisense strand to SEQ ID NO: 636316
acuucugaucccauggcag

SEQ ID NO: 636318 - RNA, 19 nt, Artificial Sequence
  Description of Artificial Sequence: Synthetic oligonucleotide
  Sense strand starting at position 881 of SEQ ID NO: 585393
gcuaaugauguauaugcua

SEQ ID NO: 636319 - RNA, 19 nt, Artificial Sequence
  Description of Artificial Sequence: Synthetic oligonucleotide
  Antisense strand to SEQ ID NO: 636318
uagcauauacaucauuagc

SEQ ID NO: 636320 - RNA, 19 nt, Artificial Sequence
  Description of Artificial Sequence: Synthetic oligonucleotide
  Sense strand starting at position 1072 of SEQ ID NO: 585393
cccaguuucccuuagggaa

SEQ ID NO: 636321 - RNA, 19 nt, Artificial Sequence
  Description of Artificial Sequence: Synthetic oligonucleotide
  Antisense strand to SEQ ID NO: 636320
uucccuaagggaaacuggg

SEQ ID NO: 636322 - RNA, 19 nt, Artificial Sequence
  Description of Artificial Sequence: Synthetic oligonucleotide
  Sense strand starting at position 1092 of SEQ ID NO: 585393
gugcauuuguucuugacuc

SEQ ID NO: 636323 - RNA, 19 nt, Artificial Sequence
  Description of Artificial Sequence: Synthetic oligonucleotide
  Antisense strand to SEQ ID NO: 636322
gagucaagaacaaaugcac

SEQ ID NO: 636324 - RNA, 19 nt, Artificial Sequence
  Description of Artificial Sequence: Synthetic oligonucleotide
  Sense strand starting at position 1373 of SEQ ID NO: 585393
ucagaauggucagucagaa

SEQ ID NO: 636325 - RNA, 19 nt, Artificial Sequence
  Description of Artificial Sequence: Synthetic oligonucleotide
  Antisense strand to SEQ ID NO: 636324
uucugacugaccauucuga

SEQ ID NO: 636326 - RNA, 19 nt, Artificial Sequence
  Description of Artificial Sequence: Synthetic oligonucleotide
  Sense strand starting at position 1481 of SEQ ID NO: 585393
ccuauaaguggcuaucauu

SEQ ID NO: 636327 - RNA, 19 nt, Artificial Sequence
  Description of Artificial Sequence: Synthetic oligonucleotide
  Antisense strand to SEQ ID NO: 636326
aaugauagccacuuauagg

SEQ ID NO: 636328 - RNA, 19 nt, Artificial Sequence
  Description of Artificial Sequence: Synthetic oligonucleotide
  Sense strand starting at position 1566 of SEQ ID NO: 585393
gcauauuuauuagaaagag

SEQ ID NO: 636329 - RNA, 19 nt, Artificial Sequence
  Description of Artificial Sequence: Synthetic oligonucleotide
  Antisense strand to SEQ ID NO: 636328
cucuuucuaauaaauaugc

SEQ ID NO: 636330 - RNA, 19 nt, Artificial Sequence
  Description of Artificial Sequence: Synthetic oligonucleotide
  Sense strand starting at position 1583 of SEQ ID NO: 585393
aggccaaagcuuugagaaa

SEQ ID NO: 636331 - RNA, 19 nt, Artificial Sequence
  Description of Artificial Sequence: Synthetic oligonucleotide
  Antisense strand to SEQ ID NO: 636330
uuucucaaagcuuuggccu

SEQ ID NO: 636332 - RNA, 19 nt, Artificial Sequence
  Description of Artificial Sequence: Synthetic oligonucleotide
  Sense strand starting at position 1670 of SEQ ID NO: 585393
gaaacucagugccuauuga

SEQ ID NO: 636333 - RNA, 19 nt, Artificial Sequence
  Description of Artificial Sequence: Synthetic oligonucleotide
  Antisense strand to SEQ ID NO: 636332
ucaauaggcacugaguuuc

SEQ ID NO: 636334 - RNA, 19 nt, Artificial Sequence
  Description of Artificial Sequence: Synthetic oligonucleotide
  Sense strand starting at position 1713 of SEQ ID NO: 585393
ugagcuuuccuagaugaau

SEQ ID NO: 636335 - RNA, 19 nt, Artificial Sequence
  Description of Artificial Sequence: Synthetic oligonucleotide
  Antisense strand to SEQ ID NO: 636334
auucaucuaggaaagcuca

SEQ ID NO: 636336 - RNA, 19 nt, Artificial Sequence
  Description of Artificial Sequence: Synthetic oligonucleotide
  Sense strand starting at position 1716 of SEQ ID NO: 585393
gcuuuccuagaugaauauu

SEQ ID NO: 636337 - RNA, 19 nt, Artificial Sequence
  Description of Artificial Sequence: Synthetic oligonucleotide
  Antisense strand to SEQ ID NO: 636336
aauauucaucuaggaaagc

SEQ ID NO: 636338 - RNA, 19 nt, Artificial Sequence
  Description of Artificial Sequence: Synthetic oligonucleotide
  Sense strand starting at position 1801 of SEQ ID NO: 585393
aacuucuccugaguggaca

SEQ ID NO: 636339 - RNA, 19 nt, Artificial Sequence
  Description of Artificial Sequence: Synthetic oligonucleotide
  Antisense strand to SEQ ID NO: 636338
uguccacucaggagaaguu

SEQ ID NO: 636340 - RNA, 19 nt, Artificial Sequence
  Description of Artificial Sequence: Synthetic oligonucleotide
  Sense strand starting at position 1802 of SEQ ID NO: 585393
acuucuccugaguggacau

SEQ ID NO: 636341 - RNA, 19 nt, Artificial Sequence
  Description of Artificial Sequence: Synthetic oligonucleotide
  Antisense strand to SEQ ID NO: 636340
auguccacucaggagaagu

SEQ ID NO: 636342 - RNA, 19 nt, Artificial Sequence
  Description of Artificial Sequence: Synthetic oligonucleotide
  Sense strand starting at position 2028 of SEQ ID NO: 585393
guauuuauauguguaccua

SEQ ID NO: 636343 - RNA, 19 nt, Artificial Sequence
  Description of Artificial Sequence: Synthetic oligonucleotide
  Antisense strand to SEQ ID NO: 636342
uagguacacauauaaauac

SEQ ID NO: 636344 - RNA, 19 nt, Artificial Sequence
  Description of Artificial Sequence: Synthetic oligonucleotide
  Sense strand starting at position 2092 of SEQ ID NO: 585393
gggucuggcagguaauaaa

SEQ ID NO: 636345 - RNA, 19 nt, Artificial Sequence
  Description of Artificial Sequence: Synthetic oligonucleotide
  Antisense strand to SEQ ID NO: 636344
uuuauuaccugccagaccc

SEQ ID NO: 636346 - RNA, 19 nt, Artificial Sequence
  Description of Artificial Sequence: Synthetic oligonucleotide
  Sense strand starting at position 2292 of SEQ ID NO: 585393
uguauucuggaaugauauc

SEQ ID NO: 636347 - RNA, 19 nt, Artificial Sequence
  Description of Artificial Sequence: Synthetic oligonucleotide
  Antisense strand to SEQ ID NO: 636346
gauaucauuccagaauaca

SEQ ID NO: 636348 - RNA, 19 nt, Artificial Sequence
  Description of Artificial Sequence: Synthetic oligonucleotide
  Sense strand starting at position 2298 of SEQ ID NO: 585393
cuggaaugauaucuauugu

SEQ ID NO: 636349 - RNA, 19 nt, Artificial Sequence
  Description of Artificial Sequence: Synthetic oligonucleotide
  Antisense strand to SEQ ID NO: 636348
acaauagauaucauuccag

SEQ ID NO: 636350 - RNA, 19 nt, Artificial Sequence
  Description of Artificial Sequence: Synthetic oligonucleotide
  Sense strand starting at position 2304 of SEQ ID NO: 585393
ugauaucuauugucagauu

SEQ ID NO: 636351 - RNA, 19 nt, Artificial Sequence
  Description of Artificial Sequence: Synthetic oligonucleotide
  Antisense strand to SEQ ID NO: 636350
aaucugacaauagauauca

SEQ ID NO: 636352 - RNA, 19 nt, Artificial Sequence
  Description of Artificial Sequence: Synthetic oligonucleotide
  Sense strand starting at position 2338 of SEQ ID NO: 585393
uuauuagacgacuaugcua

SEQ ID NO: 636353 - RNA, 19 nt, Artificial Sequence
  Description of Artificial Sequence: Synthetic oligonucleotide
  Antisense strand to SEQ ID NO: 636352
uagcauagucgucuaauaa

SEQ ID NO: 636354 - RNA, 19 nt, Artificial Sequence
  Description of Artificial Sequence: Synthetic oligonucleotide
  Sense strand starting at position 2394 of SEQ ID NO: 585393
agcuauaagugacccagau

SEQ ID NO: 636355 - RNA, 19 nt, Artificial Sequence
  Description of Artificial Sequence: Synthetic oligonucleotide
  Antisense strand to SEQ ID NO: 636354
aucugggucacuuauagcu

SEQ ID NO: 636356 - RNA, 19 nt, Artificial Sequence
  Description of Artificial Sequence: Synthetic oligonucleotide
  Sense strand starting at position 3188 of SEQ ID NO: 585393
guuuaauucccacaauguc

SEQ ID NO: 636357 - RNA, 19 nt, Artificial Sequence
  Description of Artificial Sequence: Synthetic oligonucleotide
  Antisense strand to SEQ ID NO: 636356
gacauugugggaauuaaac

SEQ ID NO: 636358 - RNA, 19 nt, Artificial Sequence
  Description of Artificial Sequence: Synthetic oligonucleotide
  Sense strand starting at position 3209 of SEQ ID NO: 585393
guaccagagccuuaccuaa

SEQ ID NO: 636359 - RNA, 19 nt, Artificial Sequence
  Description of Artificial Sequence: Synthetic oligonucleotide
  Antisense strand to SEQ ID NO: 636358
uuagguaaggcucugguac

SEQ ID NO: 636360 - RNA, 19 nt, Artificial Sequence
  Description of Artificial Sequence: Synthetic oligonucleotide
  Sense strand starting at position 3312 of SEQ ID NO: 585393
gugccauugagcuauggaa

SEQ ID NO: 636361 - RNA, 19 nt, Artificial Sequence
  Description of Artificial Sequence: Synthetic oligonucleotide
  Antisense strand to SEQ ID NO: 636360
uuccauagcucaauggcac

SEQ ID NO: 636362 - RNA, 19 nt, Artificial Sequence
  Description of Artificial Sequence: Synthetic oligonucleotide
  Sense strand starting at position 3643 of SEQ ID NO: 585393
uaaagcuugguuggacaua

SEQ ID NO: 636363 - RNA, 19 nt, Artificial Sequence
  Description of Artificial Sequence: Synthetic oligonucleotide
  Antisense strand to SEQ ID NO: 636362
uauguccaaccaagcuuua

SEQ ID NO: 636364 - RNA, 19 nt, Artificial Sequence
  Description of Artificial Sequence: Synthetic oligonucleotide
  Sense strand starting at position 3657 of SEQ ID NO: 585393
acauaugguguauaaccua

SEQ ID NO: 636365 - RNA, 19 nt, Artificial Sequence
  Description of Artificial Sequence: Synthetic oligonucleotide
  Antisense strand to SEQ ID NO: 636364
uagguuauacaccauaugu

SEQ ID NO: 636366 - RNA, 19 nt, Artificial Sequence
  Description of Artificial Sequence: Synthetic oligonucleotide
  Sense strand starting at position 3680 of SEQ ID NO: 585393
augguauuagcaugauaca

SEQ ID NO: 636367 - RNA, 19 nt, Artificial Sequence
  Description of Artificial Sequence: Synthetic oligonucleotide
  Antisense strand to SEQ ID NO: 636366
uguaucaugcuaauaccau

SEQ ID NO: 636368 - RNA, 19 nt, Artificial Sequence
  Description of Artificial Sequence: Synthetic oligonucleotide
  Sense strand starting at position 3681 of SEQ ID NO: 585393
ugguauuagcaugauacau

SEQ ID NO: 636369 - RNA, 19 nt, Artificial Sequence
  Description of Artificial Sequence: Synthetic oligonucleotide
  Antisense strand to SEQ ID NO: 636368
auguaucaugcuaauacca

SEQ ID NO: 636370 - RNA, 19 nt, Artificial Sequence
  Description of Artificial Sequence: Synthetic oligonucleotide
  Sense strand starting at position 3797 of SEQ ID NO: 585393
ggucaauaaguccauauua

SEQ ID NO: 636371 - RNA, 19 nt, Artificial Sequence
  Description of Artificial Sequence: Synthetic oligonucleotide
  Antisense strand to SEQ ID NO: 636370
uaauauggacuuauugacc

SEQ ID NO: 636372 - RNA, 19 nt, Artificial Sequence
  Description of Artificial Sequence: Synthetic oligonucleotide
  Sense strand starting at position 3848 of SEQ ID NO: 585393
guacuauauccagaaagcu

SEQ ID NO: 636373 - RNA, 19 nt, Artificial Sequence
  Description of Artificial Sequence: Synthetic oligonucleotide
  Antisense strand to SEQ ID NO: 636372
agcuuucuggauauaguac

SEQ ID NO: 636374 - RNA, 19 nt, Artificial Sequence
  Description of Artificial Sequence: Synthetic oligonucleotide
  Sense strand starting at position 3881 of SEQ ID NO: 585393
gaauauagucauugagcca

SEQ ID NO: 636375 - RNA, 19 nt, Artificial Sequence
  Description of Artificial Sequence: Synthetic oligonucleotide
  Antisense strand to SEQ ID NO: 636374
uggcucaaugacuauauuc

SEQ ID NO: 636376 - RNA, 19 nt, Artificial Sequence
  Description of Artificial Sequence: Synthetic oligonucleotide
  Sense strand starting at position 3884 of SEQ ID NO: 585393
uauagucauugagccauga

SEQ ID NO: 636377 - RNA, 19 nt, Artificial Sequence
  Description of Artificial Sequence: Synthetic oligonucleotide
  Antisense strand to SEQ ID NO: 636376
ucauggcucaaugacuaua

SEQ ID NO: 636378 - RNA, 19 nt, Artificial Sequence
  Description of Artificial Sequence: Synthetic oligonucleotide
  Sense strand starting at position 3892 of SEQ ID NO: 585393
uugagccaugaauguaaau

SEQ ID NO: 636379 - RNA, 19 nt, Artificial Sequence
  Description of Artificial Sequence: Synthetic oligonucleotide
  Antisense strand to SEQ ID NO: 636378
auuuacauucauggcucaa

SEQ ID NO: 636380 - RNA, 19 nt, Artificial Sequence
  Description of Artificial Sequence: Synthetic oligonucleotide
  Sense strand starting at position 610 of SEQ ID NO: 585394
uucuauaggcaaggucaua

SEQ ID NO: 636381 - RNA, 19 nt, Artificial Sequence
  Description of Artificial Sequence: Synthetic oligonucleotide
  Antisense strand to SEQ ID NO: 636380
uaugaccuugccuauagaa

SEQ ID NO: 636382 - RNA, 19 nt, Artificial Sequence
  Description of Artificial Sequence: Synthetic oligonucleotide
  Sense strand starting at position 622 of SEQ ID NO: 585394
ggucauacccugcauaaua

SEQ ID NO: 636383 - RNA, 19 nt, Artificial Sequence
  Description of Artificial Sequence: Synthetic oligonucleotide
  Antisense strand to SEQ ID NO: 636382
uauuaugcaggguaugacc

SEQ ID NO: 636384 - RNA, 19 nt, Artificial Sequence
  Description of Artificial Sequence: Synthetic oligonucleotide
  Sense strand starting at position 667 of SEQ ID NO: 585394
cuuagaaucugagagcagu

SEQ ID NO: 636385 - RNA, 19 nt, Artificial Sequence
  Description of Artificial Sequence: Synthetic oligonucleotide
  Antisense strand to SEQ ID NO: 636384
acugcucucagauucuaag

SEQ ID NO: 636386 - RNA, 19 nt, Artificial Sequence
  Description of Artificial Sequence: Synthetic oligonucleotide
  Sense strand starting at position 680 of SEQ ID NO: 585394
agcaguuuggagugggaga

SEQ ID NO: 636387 - RNA, 19 nt, Artificial Sequence
  Description of Artificial Sequence: Synthetic oligonucleotide
  Antisense strand to SEQ ID NO: 636386
ucucccacuccaaacugcu

SEQ ID NO: 636388 - RNA, 19 nt, Artificial Sequence
  Description of Artificial Sequence: Synthetic oligonucleotide
  Sense strand starting at position 765 of SEQ ID NO: 585394
gcaucuagaaugugcuuga

SEQ ID NO: 636389 - RNA, 19 nt, Artificial Sequence
  Description of Artificial Sequence: Synthetic oligonucleotide
  Antisense strand to SEQ ID NO: 636388
ucaagcacauucuagaugc

SEQ ID NO: 636390 - RNA, 19 nt, Artificial Sequence
  Description of Artificial Sequence: Synthetic oligonucleotide
  Sense strand starting at position 787 of SEQ ID NO: 585394
gugucacuacuuugugcua

SEQ ID NO: 636391 - RNA, 19 nt, Artificial Sequence
  Description of Artificial Sequence: Synthetic oligonucleotide
  Antisense strand to SEQ ID NO: 636390
uagcacaaaguagugacac

SEQ ID NO: 636392 - RNA, 19 nt, Artificial Sequence
  Description of Artificial Sequence: Synthetic oligonucleotide
  Sense strand starting at position 879 of SEQ ID NO: 585394
augugauggccugggaauc

SEQ ID NO: 636393 - RNA, 19 nt, Artificial Sequence
  Description of Artificial Sequence: Synthetic oligonucleotide
  Antisense strand to SEQ ID NO: 636392
gauucccaggccaucacau

SEQ ID NO: 636394 - RNA, 19 nt, Artificial Sequence
  Description of Artificial Sequence: Synthetic oligonucleotide
  Sense strand starting at position 982 of SEQ ID NO: 585394
ccucaucuguaggaugaga

SEQ ID NO: 636395 - RNA, 19 nt, Artificial Sequence
  Description of Artificial Sequence: Synthetic oligonucleotide
  Antisense strand to SEQ ID NO: 636394
ucucauccuacagaugagg

SEQ ID NO: 636396 - RNA, 19 nt, Artificial Sequence
  Description of Artificial Sequence: Synthetic oligonucleotide
  Sense strand starting at position 1005 of SEQ ID NO: 585394
uggacagcuuggucucuaa

SEQ ID NO: 636397 - RNA, 19 nt, Artificial Sequence
  Description of Artificial Sequence: Synthetic oligonucleotide
  Antisense strand to SEQ ID NO: 636396
uuagagaccaagcugucca

SEQ ID NO: 636398 - RNA, 19 nt, Artificial Sequence
  Description of Artificial Sequence: Synthetic oligonucleotide
  Sense strand starting at position 1062 of SEQ ID NO: 585394
cucagaaucuucugcagag

SEQ ID NO: 636399 - RNA, 19 nt, Artificial Sequence
  Description of Artificial Sequence: Synthetic oligonucleotide
  Antisense strand to SEQ ID NO: 636398
cucugcagaagauucugag

SEQ ID NO: 636400 - RNA, 19 nt, Artificial Sequence
  Description of Artificial Sequence: Synthetic oligonucleotide
  Sense strand starting at position 1084 of SEQ ID NO: 585394
ugaguaggacugggcuaua

SEQ ID NO: 636401 - RNA, 19 nt, Artificial Sequence
  Description of Artificial Sequence: Synthetic oligonucleotide
  Antisense strand to SEQ ID NO: 636400
uauagcccaguccuacuca

SEQ ID NO: 636402 - RNA, 19 nt, Artificial Sequence
  Description of Artificial Sequence: Synthetic oligonucleotide
  Sense strand starting at position 2136 of SEQ ID NO: 585394
ggaugugacugacacauuc

SEQ ID NO: 636403 - RNA, 19 nt, Artificial Sequence
  Description of Artificial Sequence: Synthetic oligonucleotide
  Antisense strand to SEQ ID NO: 636402
gaaugugucagucacaucc

SEQ ID NO: 636404 - RNA, 19 nt, Artificial Sequence
  Description of Artificial Sequence: Synthetic oligonucleotide
  Sense strand starting at position 2160 of SEQ ID NO: 585394
gcucaauuccagcagcaaa

SEQ ID NO: 636405 - RNA, 19 nt, Artificial Sequence
  Description of Artificial Sequence: Synthetic oligonucleotide
  Antisense strand to SEQ ID NO: 636404
uuugcugcuggaauugagc

SEQ ID NO: 636406 - RNA, 19 nt, Artificial Sequence
  Description of Artificial Sequence: Synthetic oligonucleotide
  Sense strand starting at position 2356 of SEQ ID NO: 585394
agcauacuauguguuaaga

SEQ ID NO: 636407 - RNA, 19 nt, Artificial Sequence
  Description of Artificial Sequence: Synthetic oligonucleotide
  Antisense strand to SEQ ID NO: 636406
ucuuaacacauaguaugcu

SEQ ID NO: 636408 - RNA, 19 nt, Artificial Sequence
  Description of Artificial Sequence: Synthetic oligonucleotide
  Sense strand starting at position 2366 of SEQ ID NO: 585394
guguuaagauuauguugga

SEQ ID NO: 636409 - RNA, 19 nt, Artificial Sequence
  Description of Artificial Sequence: Synthetic oligonucleotide
  Antisense strand to SEQ ID NO: 636408
uccaacauaaucuuaacac

SEQ ID NO: 636410 - RNA, 19 nt, Artificial Sequence
  Description of Artificial Sequence: Synthetic oligonucleotide
  Sense strand starting at position 2369 of SEQ ID NO: 585394
uuaagauuauguuggagga

SEQ ID NO: 636411 - RNA, 19 nt, Artificial Sequence
  Description of Artificial Sequence: Synthetic oligonucleotide
  Antisense strand to SEQ ID NO: 636410
uccuccaacauaaucuuaa

SEQ ID NO: 636412 - RNA, 19 nt, Artificial Sequence
  Description of Artificial Sequence: Synthetic oligonucleotide
  Sense strand starting at position 2371 of SEQ ID NO: 585394
aagauuauguuggaggaca

SEQ ID NO: 636413 - RNA, 19 nt, Artificial Sequence
  Description of Artificial Sequence: Synthetic oligonucleotide
  Antisense strand to SEQ ID NO: 636412
uguccuccaacauaaucuu

SEQ ID NO: 636414 - RNA, 19 nt, Artificial Sequence
  Description of Artificial Sequence: Synthetic oligonucleotide
  Sense strand starting at position 2373 of SEQ ID NO: 585394
gauuauguuggaggacauc

SEQ ID NO: 636415 - RNA, 19 nt, Artificial Sequence
  Description of Artificial Sequence: Synthetic oligonucleotide
  Antisense strand to SEQ ID NO: 636414
gauguccuccaacauaauc

SEQ ID NO: 636416 - RNA, 19 nt, Artificial Sequence
  Description of Artificial Sequence: Synthetic oligonucleotide
  Sense strand starting at position 2503 of SEQ ID NO: 585394
ccuguauaugcagacugau

SEQ ID NO: 636417 - RNA, 19 nt, Artificial Sequence
  Description of Artificial Sequence: Synthetic oligonucleotide
  Antisense strand to SEQ ID NO: 636416
aucagucugcauauacagg

SEQ ID NO: 636418 - RNA, 19 nt, Artificial Sequence
  Description of Artificial Sequence: Synthetic oligonucleotide
  Sense strand starting at position 2506 of SEQ ID NO: 585394
guauaugcagacugauugu

SEQ ID NO: 636419 - RNA, 19 nt, Artificial Sequence
  Description of Artificial Sequence: Synthetic oligonucleotide
  Antisense strand to SEQ ID NO: 636418
acaaucagucugcauauac

SEQ ID NO: 636420 - RNA, 19 nt, Artificial Sequence
  Description of Artificial Sequence: Synthetic oligonucleotide
  Sense strand starting at position 2512 of SEQ ID NO: 585394
gcagacugauugugugaua

SEQ ID NO: 636421 - RNA, 19 nt, Artificial Sequence
  Description of Artificial Sequence: Synthetic oligonucleotide
  Antisense strand to SEQ ID NO: 636420
uaucacacaaucagucugc

SEQ ID NO: 636422 - RNA, 19 nt, Artificial Sequence
  Description of Artificial Sequence: Synthetic oligonucleotide
  Sense strand starting at position 2513 of SEQ ID NO: 585394
cagacugauugugugauaa

SEQ ID NO: 636423 - RNA, 19 nt, Artificial Sequence
  Description of Artificial Sequence: Synthetic oligonucleotide
  Antisense strand to SEQ ID NO: 636422
uuaucacacaaucagucug

SEQ ID NO: 636424 - RNA, 19 nt, Artificial Sequence
  Description of Artificial Sequence: Synthetic oligonucleotide
  Sense strand starting at position 2515 of SEQ ID NO: 585394
gacugauugugugauaaca

SEQ ID NO: 636425 - RNA, 19 nt, Artificial Sequence
  Description of Artificial Sequence: Synthetic oligonucleotide
  Antisense strand to SEQ ID NO: 636424
uguuaucacacaaucaguc

SEQ ID NO: 636426 - RNA, 19 nt, Artificial Sequence
  Description of Artificial Sequence: Synthetic oligonucleotide
  Sense strand starting at position 2517 of SEQ ID NO: 585394
cugauugugugauaacaga

SEQ ID NO: 636427 - RNA, 19 nt, Artificial Sequence
  Description of Artificial Sequence: Synthetic oligonucleotide
  Antisense strand to SEQ ID NO: 636426
ucuguuaucacacaaucag

SEQ ID NO: 636428 - RNA, 19 nt, Artificial Sequence
  Description of Artificial Sequence: Synthetic oligonucleotide
  Sense strand starting at position 2715 of SEQ ID NO: 585394
agguaaauacauggcuagu

SEQ ID NO: 636429 - RNA, 19 nt, Artificial Sequence
  Description of Artificial Sequence: Synthetic oligonucleotide
  Antisense strand to SEQ ID NO: 636428
acuagccauguauuuaccu

SEQ ID NO: 636430 - RNA, 19 nt, Artificial Sequence
  Description of Artificial Sequence: Synthetic oligonucleotide
  Sense strand starting at position 2718 of SEQ ID NO: 585394
uaaauacauggcuagugua

SEQ ID NO: 636431 - RNA, 19 nt, Artificial Sequence
  Description of Artificial Sequence: Synthetic oligonucleotide
  Antisense strand to SEQ ID NO: 636430
uacacuagccauguauuua

SEQ ID NO: 636432 - RNA, 19 nt, Artificial Sequence
  Description of Artificial Sequence: Synthetic oligonucleotide
  Sense strand starting at position 2721 of SEQ ID NO: 585394
auacauggcuaguguaaag

SEQ ID NO: 636433 - RNA, 19 nt, Artificial Sequence
  Description of Artificial Sequence: Synthetic oligonucleotide
  Antisense strand to SEQ ID NO: 636432
cuuuacacuagccauguau

SEQ ID NO: 636434 - RNA, 19 nt, Artificial Sequence
  Description of Artificial Sequence: Synthetic oligonucleotide
  Sense strand starting at position 3140 of SEQ ID NO: 585394
augagcuacuuacuaagua

SEQ ID NO: 636435 - RNA, 19 nt, Artificial Sequence
  Description of Artificial Sequence: Synthetic oligonucleotide
  Antisense strand to SEQ ID NO: 636434
uacuuaguaaguagcucau

SEQ ID NO: 636436 - RNA, 19 nt, Artificial Sequence
  Description of Artificial Sequence: Synthetic oligonucleotide
  Sense strand starting at position 3141 of SEQ ID NO: 585394
ugagcuacuuacuaaguaa

SEQ ID NO: 636437 - RNA, 19 nt, Artificial Sequence
  Description of Artificial Sequence: Synthetic oligonucleotide
  Antisense strand to SEQ ID NO: 636436
uuacuuaguaaguagcuca

SEQ ID NO: 636438 - RNA, 19 nt, Artificial Sequence
  Description of Artificial Sequence: Synthetic oligonucleotide
  Sense strand starting at position 3156 of SEQ ID NO: 585394
guaaccauccauggacuua

SEQ ID NO: 636439 - RNA, 19 nt, Artificial Sequence
  Description of Artificial Sequence: Synthetic oligonucleotide
  Antisense strand to SEQ ID NO: 636438
uaaguccauggaugguuac

SEQ ID NO: 636440 - RNA, 19 nt, Artificial Sequence
  Description of Artificial Sequence: Synthetic oligonucleotide
  Sense strand starting at position 3189 of SEQ ID NO: 585394
gccucaguuucgccaucua

SEQ ID NO: 636441 - RNA, 19 nt, Artificial Sequence
  Description of Artificial Sequence: Synthetic oligonucleotide
  Antisense strand to SEQ ID NO: 636440
uagauggcgaaacugaggc

SEQ ID NO: 636442 - RNA, 19 nt, Artificial Sequence
  Description of Artificial Sequence: Synthetic oligonucleotide
  Sense strand starting at position 3205 of SEQ ID NO: 585394
cuauuaaaugcaggaaaug

SEQ ID NO: 636443 - RNA, 19 nt, Artificial Sequence
  Description of Artificial Sequence: Synthetic oligonucleotide
  Antisense strand to SEQ ID NO: 636442
cauuuccugcauuuaauag

SEQ ID NO: 636444 - RNA, 19 nt, Artificial Sequence
  Description of Artificial Sequence: Synthetic oligonucleotide
  Sense strand starting at position 3420 of SEQ ID NO: 585394
guacauuaguggucucuaa

SEQ ID NO: 636445 - RNA, 19 nt, Artificial Sequence
  Description of Artificial Sequence: Synthetic oligonucleotide
  Antisense strand to SEQ ID NO: 636444
uuagagaccacuaauguac

SEQ ID NO: 636446 - RNA, 19 nt, Artificial Sequence
  Description of Artificial Sequence: Synthetic oligonucleotide
  Sense strand starting at position 3464 of SEQ ID NO: 585394
guccgaucacuugagcuca

SEQ ID NO: 636447 - RNA, 19 nt, Artificial Sequence
  Description of Artificial Sequence: Synthetic oligonucleotide
  Antisense strand to SEQ ID NO: 636446
ugagcucaagugaucggac

SEQ ID NO: 636448 - RNA, 19 nt, Artificial Sequence
  Description of Artificial Sequence: Synthetic oligonucleotide
  Sense strand starting at position 3668 of SEQ ID NO: 585394
acuccagucugggcuuuaa

SEQ ID NO: 636449 - RNA, 19 nt, Artificial Sequence
  Description of Artificial Sequence: Synthetic oligonucleotide
  Antisense strand to SEQ ID NO: 636448
uuaaagcccagacuggagu

SEQ ID NO: 636450 - RNA, 19 nt, Artificial Sequence
  Description of Artificial Sequence: Synthetic oligonucleotide
  Sense strand starting at position 3672 of SEQ ID NO: 585394
cagucugggcuuuaacaaa

SEQ ID NO: 636451 - RNA, 19 nt, Artificial Sequence
  Description of Artificial Sequence: Synthetic oligonucleotide
  Antisense strand to SEQ ID NO: 636450
uuuguuaaagcccagacug

SEQ ID NO: 636452 - RNA, 19 nt, Artificial Sequence
  Description of Artificial Sequence: Synthetic oligonucleotide
  Sense strand starting at position 3735 of SEQ ID NO: 585394
auuguuaaucucugcaguu

SEQ ID NO: 636453 - RNA, 19 nt, Artificial Sequence
  Description of Artificial Sequence: Synthetic oligonucleotide
  Antisense strand to SEQ ID NO: 636452
aacugcagagauuaacaau

SEQ ID NO: 636454 - RNA, 19 nt, Artificial Sequence
  Description of Artificial Sequence: Synthetic oligonucleotide
  Sense strand starting at position 3736 of SEQ ID NO: 585394
uuguuaaucucugcaguuu

SEQ ID NO: 636455 - RNA, 19 nt, Artificial Sequence
  Description of Artificial Sequence: Synthetic oligonucleotide
  Antisense strand to SEQ ID NO: 636454
aaacugcagagauuaacaa

SEQ ID NO: 636456 - RNA, 19 nt, Artificial Sequence
  Description of Artificial Sequence: Synthetic oligonucleotide
  Sense strand starting at position 3777 of SEQ ID NO: 585394
uacacaauuggaugaugua

SEQ ID NO: 636457 - RNA, 19 nt, Artificial Sequence
  Description of Artificial Sequence: Synthetic oligonucleotide
  Antisense strand to SEQ ID NO: 636456
uacaucauccaauugugua

SEQ ID NO: 636458 - RNA, 19 nt, Artificial Sequence
  Description of Artificial Sequence: Synthetic oligonucleotide
  Sense strand starting at position 3784 of SEQ ID NO: 585394
uuggaugauguauguacaa

SEQ ID NO: 636459 - RNA, 19 nt, Artificial Sequence
  Description of Artificial Sequence: Synthetic oligonucleotide
  Antisense strand to SEQ ID NO: 636458
uuguacauacaucauccaa

SEQ ID NO: 636460 - RNA, 19 nt, Artificial Sequence
  Description of Artificial Sequence: Synthetic oligonucleotide
  Sense strand starting at position 120 of SEQ ID NO: 585395
acaguauacguagaccaau

SEQ ID NO: 636461 - RNA, 19 nt, Artificial Sequence
  Description of Artificial Sequence: Synthetic oligonucleotide
  Antisense strand to SEQ ID NO: 636460
auuggucuacguauacugu

SEQ ID NO: 636462 - RNA, 19 nt, Artificial Sequence
  Description of Artificial Sequence: Synthetic oligonucleotide
  Sense strand starting at position 187 of SEQ ID NO: 585395
gcacgcauuucuuuacaac

SEQ ID NO: 636463 - RNA, 19 nt, Artificial Sequence
  Description of Artificial Sequence: Synthetic oligonucleotide
  Antisense strand to SEQ ID NO: 636462
guuguaaagaaaugcgugc

SEQ ID NO: 636464 - RNA, 19 nt, Artificial Sequence
  Description of Artificial Sequence: Synthetic oligonucleotide
  Sense strand starting at position 213 of SEQ ID NO: 585395
ggccaacaguguucuauuu

SEQ ID NO: 636465 - RNA, 19 nt, Artificial Sequence
  Description of Artificial Sequence: Synthetic oligonucleotide
  Antisense strand to SEQ ID NO: 636464
aaauagaacacuguuggcc

SEQ ID NO: 636466 - RNA, 19 nt, Artificial Sequence
  Description of Artificial Sequence: Synthetic oligonucleotide
  Sense strand starting at position 286 of SEQ ID NO: 585395
acaggcagcgaugaaauaa

SEQ ID NO: 636467 - RNA, 19 nt, Artificial Sequence
  Description of Artificial Sequence: Synthetic oligonucleotide
  Antisense strand to SEQ ID NO: 636466
uuauuucaucgcugccugu

SEQ ID NO: 636468 - RNA, 19 nt, Artificial Sequence
  Description of Artificial Sequence: Synthetic oligonucleotide
  Sense strand starting at position 318 of SEQ ID NO: 585395
ugugacuagaggugucuaa

SEQ ID NO: 636469 - RNA, 19 nt, Artificial Sequence
  Description of Artificial Sequence: Synthetic oligonucleotide
  Antisense strand to SEQ ID NO: 636468
uuagacaccucuagucaca

SEQ ID NO: 636470 - RNA, 19 nt, Artificial Sequence
  Description of Artificial Sequence: Synthetic oligonucleotide
  Sense strand starting at position 443 of SEQ ID NO: 585395
ggcgacaaaguauauugua

SEQ ID NO: 636471 - RNA, 19 nt, Artificial Sequence
  Description of Artificial Sequence: Synthetic oligonucleotide
  Antisense strand to SEQ ID NO: 636470
uacaauauacuuugucgcc

SEQ ID NO: 636472 - RNA, 19 nt, Artificial Sequence
  Description of Artificial Sequence: Synthetic oligonucleotide
  Sense strand starting at position 461 of SEQ ID NO: 585395
auagguaauaccggaaaca

SEQ ID NO: 636473 - RNA, 19 nt, Artificial Sequence
  Description of Artificial Sequence: Synthetic oligonucleotide
  Antisense strand to SEQ ID NO: 636472
uguuuccgguauuaccuau

SEQ ID NO: 636474 - RNA, 19 nt, Artificial Sequence
  Description of Artificial Sequence: Synthetic oligonucleotide
  Sense strand starting at position 486 of SEQ ID NO: 585395
acacuauuucgcuguagaa

SEQ ID NO: 636475 - RNA, 19 nt, Artificial Sequence
  Description of Artificial Sequence: Synthetic oligonucleotide
  Antisense strand to SEQ ID NO: 636474
uucuacagcgaaauagugu

SEQ ID NO: 636476 - RNA, 19 nt, Artificial Sequence
  Description of Artificial Sequence: Synthetic oligonucleotide
  Sense strand starting at position 520 of SEQ ID NO: 585395
ugcuaauaacgucaaccuu

SEQ ID NO: 636477 - RNA, 19 nt, Artificial Sequence
  Description of Artificial Sequence: Synthetic oligonucleotide
  Antisense strand to SEQ ID NO: 636476
aagguugacguuauuagca

SEQ ID NO: 636478 - RNA, 19 nt, Artificial Sequence
  Description of Artificial Sequence: Synthetic oligonucleotide
  Sense strand starting at position 611 of SEQ ID NO: 585395
uacccuaaacguuggacua

SEQ ID NO: 636479 - RNA, 19 nt, Artificial Sequence
  Description of Artificial Sequence: Synthetic oligonucleotide
  Antisense strand to SEQ ID NO: 636478
uaguccaacguuuagggua

SEQ ID NO: 636480 - RNA, 19 nt, Artificial Sequence
  Description of Artificial Sequence: Synthetic oligonucleotide
  Sense strand starting at position 687 of SEQ ID NO: 585395
cgucuauuggcauaacuac

SEQ ID NO: 636481 - RNA, 19 nt, Artificial Sequence
  Description of Artificial Sequence: Synthetic oligonucleotide
  Antisense strand to SEQ ID NO: 636480
guaguuaugccaauagacg

SEQ ID NO: 636482 - RNA, 19 nt, Artificial Sequence
  Description of Artificial Sequence: Synthetic oligonucleotide
  Sense strand starting at position 757 of SEQ ID NO: 585395
gcuuacuugguguacaaau

SEQ ID NO: 636483 - RNA, 19 nt, Artificial Sequence
  Description of Artificial Sequence: Synthetic oligonucleotide
  Antisense strand to SEQ ID NO: 636482
auuuguacaccaaguaagc

SEQ ID NO: 636484 - RNA, 19 nt, Artificial Sequence
  Description of Artificial Sequence: Synthetic oligonucleotide
  Sense strand starting at position 1157 of SEQ ID NO: 585395
uguucuaucgaucacacca

SEQ ID NO: 636485 - RNA, 19 nt, Artificial Sequence
  Description of Artificial Sequence: Synthetic oligonucleotide
  Antisense strand to SEQ ID NO: 636484
uggugugaucgauagaaca

SEQ ID NO: 636486 - RNA, 19 nt, Artificial Sequence
  Description of Artificial Sequence: Synthetic oligonucleotide
  Sense strand starting at position 1242 of SEQ ID NO: 585395
uacagcaugcgauacuuua

SEQ ID NO: 636487 - RNA, 19 nt, Artificial Sequence
  Description of Artificial Sequence: Synthetic oligonucleotide
  Antisense strand to SEQ ID NO: 636486
uaaaguaucgcaugcugua

SEQ ID NO: 636488 - RNA, 19 nt, Artificial Sequence
  Description of Artificial Sequence: Synthetic oligonucleotide
  Sense strand starting at position 1260 of SEQ ID NO: 585395
acuuguauauugcugauuu

SEQ ID NO: 636489 - RNA, 19 nt, Artificial Sequence
  Description of Artificial Sequence: Synthetic oligonucleotide
  Antisense strand to SEQ ID NO: 636488
aaaucagcaauauacaagu

SEQ ID NO: 636490 - RNA, 19 nt, Artificial Sequence
  Description of Artificial Sequence: Synthetic oligonucleotide
  Sense strand starting at position 1349 of SEQ ID NO: 585395
agaaaucgugaagaugguu

SEQ ID NO: 636491 - RNA, 19 nt, Artificial Sequence
  Description of Artificial Sequence: Synthetic oligonucleotide
  Antisense strand to SEQ ID NO: 636490
aaccaucuucacgauuucu

SEQ ID NO: 636492 - RNA, 19 nt, Artificial Sequence
  Description of Artificial Sequence: Synthetic oligonucleotide
  Sense strand starting at position 1354 of SEQ ID NO: 585395
ucgugaagaugguuuagag

SEQ ID NO: 636493 - RNA, 19 nt, Artificial Sequence
  Description of Artificial Sequence: Synthetic oligonucleotide
  Antisense strand to SEQ ID NO: 636492
cucuaaaccaucuucacga

SEQ ID NO: 636494 - RNA, 19 nt, Artificial Sequence
  Description of Artificial Sequence: Synthetic oligonucleotide
  Sense strand starting at position 1362 of SEQ ID NO: 585395
augguuuagagcuacuagu

SEQ ID NO: 636495 - RNA, 19 nt, Artificial Sequence
  Description of Artificial Sequence: Synthetic oligonucleotide
  Antisense strand to SEQ ID NO: 636494
acuaguagcucuaaaccau

SEQ ID NO: 636496 - RNA, 19 nt, Artificial Sequence
  Description of Artificial Sequence: Synthetic oligonucleotide
  Sense strand starting at position 1403 of SEQ ID NO: 585395
aauccagcguuauuugcaa

SEQ ID NO: 636497 - RNA, 19 nt, Artificial Sequence
  Description of Artificial Sequence: Synthetic oligonucleotide
  Antisense strand to SEQ ID NO: 636496
uugcaaauaacgcuggauu

SEQ ID NO: 636498 - RNA, 19 nt, Artificial Sequence
  Description of Artificial Sequence: Synthetic oligonucleotide
  Sense strand starting at position 1663 of SEQ ID NO: 585395
ggagguaaugcccaguauu

SEQ ID NO: 636499 - RNA, 19 nt, Artificial Sequence
  Description of Artificial Sequence: Synthetic oligonucleotide
  Antisense strand to SEQ ID NO: 636498
aauacugggcauuaccucc

SEQ ID NO: 636500 - RNA, 19 nt, Artificial Sequence
  Description of Artificial Sequence: Synthetic oligonucleotide
  Sense strand starting at position 2149 of SEQ ID NO: 585395
uggaacgcuucuuuaggau

SEQ ID NO: 636501 - RNA, 19 nt, Artificial Sequence
  Description of Artificial Sequence: Synthetic oligonucleotide
  Antisense strand to SEQ ID NO: 636500
auccuaaagaagcguucca

SEQ ID NO: 636502 - RNA, 19 nt, Artificial Sequence
  Description of Artificial Sequence: Synthetic oligonucleotide
  Sense strand starting at position 2155 of SEQ ID NO: 585395
gcuucuuuaggauaaauca

SEQ ID NO: 636503 - RNA, 19 nt, Artificial Sequence
  Description of Artificial Sequence: Synthetic oligonucleotide
  Antisense strand to SEQ ID NO: 636502
ugauuuauccuaaagaagc

SEQ ID NO: 636504 - RNA, 19 nt, Artificial Sequence
  Description of Artificial Sequence: Synthetic oligonucleotide
  Sense strand starting at position 2179 of SEQ ID NO: 585395
cugauuucgugcuucuacu

SEQ ID NO: 636505 - RNA, 19 nt, Artificial Sequence
  Description of Artificial Sequence: Synthetic oligonucleotide
  Antisense strand to SEQ ID NO: 636504
aguagaagcacgaaaucag

SEQ ID NO: 636506 - RNA, 19 nt, Artificial Sequence
  Description of Artificial Sequence: Synthetic oligonucleotide
  Sense strand starting at position 2215 of SEQ ID NO: 585395
ccuugugaaucauagauuu

SEQ ID NO: 636507 - RNA, 19 nt, Artificial Sequence
  Description of Artificial Sequence: Synthetic oligonucleotide
  Antisense strand to SEQ ID NO: 636506
aaaucuaugauucacaagg

SEQ ID NO: 636508 - RNA, 19 nt, Artificial Sequence
  Description of Artificial Sequence: Synthetic oligonucleotide
  Sense strand starting at position 2370 of SEQ ID NO: 585395
caguaaaccugcuuggaac

SEQ ID NO: 636509 - RNA, 19 nt, Artificial Sequence
  Description of Artificial Sequence: Synthetic oligonucleotide
  Antisense strand to SEQ ID NO: 636508
guuccaagcagguuuacug

SEQ ID NO: 636510 - RNA, 19 nt, Artificial Sequence
  Description of Artificial Sequence: Synthetic oligonucleotide
  Sense strand starting at position 2524 of SEQ ID NO: 585395
accugauuaugcccgaaau

SEQ ID NO: 636511 - RNA, 19 nt, Artificial Sequence
  Description of Artificial Sequence: Synthetic oligonucleotide
  Antisense strand to SEQ ID NO: 636510
auuucgggcauaaucaggu

SEQ ID NO: 636512 - RNA, 19 nt, Artificial Sequence
  Description of Artificial Sequence: Synthetic oligonucleotide
  Sense strand starting at position 2598 of SEQ ID NO: 585395
ucaaauuguguuuagguaa

SEQ ID NO: 636513 - RNA, 19 nt, Artificial Sequence
  Description of Artificial Sequence: Synthetic oligonucleotide
  Antisense strand to SEQ ID NO: 636512
uuaccuaaacacaauuuga

SEQ ID NO: 636514 - RNA, 19 nt, Artificial Sequence
  Description of Artificial Sequence: Synthetic oligonucleotide
  Sense strand starting at position 2643 of SEQ ID NO: 585395
uugguaaggaauuguacuu

SEQ ID NO: 636515 - RNA, 19 nt, Artificial Sequence
  Description of Artificial Sequence: Synthetic oligonucleotide
  Antisense strand to SEQ ID NO: 636514
aaguacaauuccuuaccaa

SEQ ID NO: 636516 - RNA, 19 nt, Artificial Sequence
  Description of Artificial Sequence: Synthetic oligonucleotide
  Sense strand starting at position 2699 of SEQ ID NO: 585395
ugugauuaaugacuuccua

SEQ ID NO: 636517 - RNA, 19 nt, Artificial Sequence
  Description of Artificial Sequence: Synthetic oligonucleotide
  Antisense strand to SEQ ID NO: 636516
uaggaagucauuaaucaca

SEQ ID NO: 636518 - RNA, 19 nt, Artificial Sequence
  Description of Artificial Sequence: Synthetic oligonucleotide
  Sense strand starting at position 2964 of SEQ ID NO: 585395
auugacuuguacccugaca

SEQ ID NO: 636519 - RNA, 19 nt, Artificial Sequence
  Description of Artificial Sequence: Synthetic oligonucleotide
  Antisense strand to SEQ ID NO: 636518
ugucaggguacaagucaau

SEQ ID NO: 636520 - RNA, 19 nt, Artificial Sequence
  Description of Artificial Sequence: Synthetic oligonucleotide
  Sense strand starting at position 2966 of SEQ ID NO: 585395
ugacuuguacccugacauu

SEQ ID NO: 636521 - RNA, 19 nt, Artificial Sequence
  Description of Artificial Sequence: Synthetic oligonucleotide
  Antisense strand to SEQ ID NO: 636520
aaugucaggguacaaguca

SEQ ID NO: 636522 - RNA, 19 nt, Artificial Sequence
  Description of Artificial Sequence: Synthetic oligonucleotide
  Sense strand starting at position 3154 of SEQ ID NO: 585395
gcccuuaucgaauacuaua

SEQ ID NO: 636523 - RNA, 19 nt, Artificial Sequence
  Description of Artificial Sequence: Synthetic oligonucleotide
  Antisense strand to SEQ ID NO: 636522
uauaguauucgauaagggc

SEQ ID NO: 636524 - RNA, 19 nt, Artificial Sequence
  Description of Artificial Sequence: Synthetic oligonucleotide
  Sense strand starting at position 3293 of SEQ ID NO: 585395
gcaguuuaccaagaaacua

SEQ ID NO: 636525 - RNA, 19 nt, Artificial Sequence
  Description of Artificial Sequence: Synthetic oligonucleotide
  Antisense strand to SEQ ID NO: 636524
uaguuucuugguaaacugc

SEQ ID NO: 636526 - RNA, 19 nt, Artificial Sequence
  Description of Artificial Sequence: Synthetic oligonucleotide
  Sense strand starting at position 3444 of SEQ ID NO: 585395
uuaugaaucgaagagcuau

SEQ ID NO: 636527 - RNA, 19 nt, Artificial Sequence
  Description of Artificial Sequence: Synthetic oligonucleotide
  Antisense strand to SEQ ID NO: 636526
auagcucuucgauucauaa

SEQ ID NO: 636528 - RNA, 19 nt, Artificial Sequence
  Description of Artificial Sequence: Synthetic oligonucleotide
  Sense strand starting at position 3603 of SEQ ID NO: 585395
acuaaucaauuuggaaaga

SEQ ID NO: 636529 - RNA, 19 nt, Artificial Sequence
  Description of Artificial Sequence: Synthetic oligonucleotide
  Antisense strand to SEQ ID NO: 636528
ucuuuccaaauugauuagu

SEQ ID NO: 636530 - RNA, 19 nt, Artificial Sequence
  Description of Artificial Sequence: Synthetic oligonucleotide
  Sense strand starting at position 3604 of SEQ ID NO: 585395
cuaaucaauuuggaaagau

SEQ ID NO: 636531 - RNA, 19 nt, Artificial Sequence
  Description of Artificial Sequence: Synthetic oligonucleotide
  Antisense strand to SEQ ID NO: 636530
aucuuuccaaauugauuag

SEQ ID NO: 636532 - RNA, 19 nt, Artificial Sequence
  Description of Artificial Sequence: Synthetic oligonucleotide
  Sense strand starting at position 3646 of SEQ ID NO: 585395
uuuguuauuucucaggaaa

SEQ ID NO: 636533 - RNA, 19 nt, Artificial Sequence
  Description of Artificial Sequence: Synthetic oligonucleotide
  Antisense strand to SEQ ID NO: 636532
uuuccugagaaauaacaaa

SEQ ID NO: 636534 - RNA, 19 nt, Artificial Sequence
  Description of Artificial Sequence: Synthetic oligonucleotide
  Sense strand starting at position 3745 of SEQ ID NO: 585395
auccaaugacuuugaaagu

SEQ ID NO: 636535 - RNA, 19 nt, Artificial Sequence
  Description of Artificial Sequence: Synthetic oligonucleotide
  Antisense strand to SEQ ID NO: 636534
acuuucaaagucauuggau

SEQ ID NO: 636536 - RNA, 19 nt, Artificial Sequence
  Description of Artificial Sequence: Synthetic oligonucleotide
  Sense strand starting at position 3831 of SEQ ID NO: 585395
gguagaaauuacuucuauu

SEQ ID NO: 636537 - RNA, 19 nt, Artificial Sequence
  Description of Artificial Sequence: Synthetic oligonucleotide
  Antisense strand to SEQ ID NO: 636536
aauagaaguaauuucuacc

SEQ ID NO: 636538 - RNA, 19 nt, Artificial Sequence
  Description of Artificial Sequence: Synthetic oligonucleotide
  Sense strand starting at position 3854 of SEQ ID NO: 585395
ugauuacacugacaagaaa

SEQ ID NO: 636539 - RNA, 19 nt, Artificial Sequence
  Description of Artificial Sequence: Synthetic oligonucleotide
  Antisense strand to SEQ ID NO: 636538
uuucuugucaguguaauca

SEQ ID NO: 636540 - RNA, 19 nt, Artificial Sequence
  Description of Artificial Sequence: Synthetic oligonucleotide
  Sense strand starting at position 84 of SEQ ID NO: 585396
uuuauuuguccuugcugua

SEQ ID NO: 636541 - RNA, 19 nt, Artificial Sequence
  Description of Artificial Sequence: Synthetic oligonucleotide
  Antisense strand to SEQ ID NO: 636540
uacagcaaggacaaauaaa

SEQ ID NO: 636542 - RNA, 19 nt, Artificial Sequence
  Description of Artificial Sequence: Synthetic oligonucleotide
  Sense strand starting at position 304 of SEQ ID NO: 585396
ugguuuacauccucuuaca

SEQ ID NO: 636543 - RNA, 19 nt, Artificial Sequence
  Description of Artificial Sequence: Synthetic oligonucleotide
  Antisense strand to SEQ ID NO: 636542
uguaagaggauguaaacca

SEQ ID NO: 636544 - RNA, 19 nt, Artificial Sequence
  Description of Artificial Sequence: Synthetic oligonucleotide
  Sense strand starting at position 332 of SEQ ID NO: 585396
acuucuguaccguaaaugu

SEQ ID NO: 636545 - RNA, 19 nt, Artificial Sequence
  Description of Artificial Sequence: Synthetic oligonucleotide
  Antisense strand to SEQ ID NO: 636544
acauuuacgguacagaagu

SEQ ID NO: 636546 - RNA, 19 nt, Artificial Sequence
  Description of Artificial Sequence: Synthetic oligonucleotide
  Sense strand starting at position 534 of SEQ ID NO: 585396
uaacauguuccaggguaaa

SEQ ID NO: 636547 - RNA, 19 nt, Artificial Sequence
  Description of Artificial Sequence: Synthetic oligonucleotide
  Antisense strand to SEQ ID NO: 636546
uuuacccuggaacauguua

SEQ ID NO: 636548 - RNA, 19 nt, Artificial Sequence
  Description of Artificial Sequence: Synthetic oligonucleotide
  Sense strand starting at position 573 of SEQ ID NO: 585396
cagugauggcaguaacaag

SEQ ID NO: 636549 - RNA, 19 nt, Artificial Sequence
  Description of Artificial Sequence: Synthetic oligonucleotide
  Antisense strand to SEQ ID NO: 636548
cuuguuacugccaucacug

SEQ ID NO: 636550 - RNA, 19 nt, Artificial Sequence
  Description of Artificial Sequence: Synthetic oligonucleotide
  Sense strand starting at position 843 of SEQ ID NO: 585396
uagagaaguuaugaaagga

SEQ ID NO: 636551 - RNA, 19 nt, Artificial Sequence
  Description of Artificial Sequence: Synthetic oligonucleotide
  Antisense strand to SEQ ID NO: 636550
uccuuucauaacuucucua

SEQ ID NO: 636552 - RNA, 19 nt, Artificial Sequence
  Description of Artificial Sequence: Synthetic oligonucleotide
  Sense strand starting at position 910 of SEQ ID NO: 585396
aaguaauagccaggccacu

SEQ ID NO: 636553 - RNA, 19 nt, Artificial Sequence
  Description of Artificial Sequence: Synthetic oligonucleotide
  Antisense strand to SEQ ID NO: 636552
aguggccuggcuauuacuu

SEQ ID NO: 636554 - RNA, 19 nt, Artificial Sequence
  Description of Artificial Sequence: Synthetic oligonucleotide
  Sense strand starting at position 921 of SEQ ID NO: 585396
aggccacucugagacauuu

SEQ ID NO: 636555 - RNA, 19 nt, Artificial Sequence
  Description of Artificial Sequence: Synthetic oligonucleotide
  Antisense strand to SEQ ID NO: 636554
aaaugucucagaguggccu

SEQ ID NO: 636556 - RNA, 19 nt, Artificial Sequence
  Description of Artificial Sequence: Synthetic oligonucleotide
  Sense strand starting at position 967 of SEQ ID NO: 585396
cagaaauaagaucguugga

SEQ ID NO: 636557 - RNA, 19 nt, Artificial Sequence
  Description of Artificial Sequence: Synthetic oligonucleotide
  Antisense strand to SEQ ID NO: 636556
uccaacgaucuuauuucug

SEQ ID NO: 636558 - RNA, 19 nt, Artificial Sequence
  Description of Artificial Sequence: Synthetic oligonucleotide
  Sense strand starting at position 998 of SEQ ID NO: 585396
ugaggucagacagguagua

SEQ ID NO: 636559 - RNA, 19 nt, Artificial Sequence
  Description of Artificial Sequence: Synthetic oligonucleotide
  Antisense strand to SEQ ID NO: 636558
uacuaccugucugaccuca

SEQ ID NO: 636560 - RNA, 19 nt, Artificial Sequence
  Description of Artificial Sequence: Synthetic oligonucleotide
  Sense strand starting at position 1000 of SEQ ID NO: 585396
aggucagacagguaguagu

SEQ ID NO: 636561 - RNA, 19 nt, Artificial Sequence
  Description of Artificial Sequence: Synthetic oligonucleotide
  Antisense strand to SEQ ID NO: 636560
acuacuaccugucugaccu

SEQ ID NO: 636562 - RNA, 19 nt, Artificial Sequence
  Description of Artificial Sequence: Synthetic oligonucleotide
  Sense strand starting at position 1013 of SEQ ID NO: 585396
aguaguauauacuccgaua

SEQ ID NO: 636563 - RNA, 19 nt, Artificial Sequence
  Description of Artificial Sequence: Synthetic oligonucleotide
  Antisense strand to SEQ ID NO: 636562
uaucggaguauauacuacu

SEQ ID NO: 636564 - RNA, 19 nt, Artificial Sequence
  Description of Artificial Sequence: Synthetic oligonucleotide
  Sense strand starting at position 1034 of SEQ ID NO: 585396
gguaauaaagagggcuaca

SEQ ID NO: 636565 - RNA, 19 nt, Artificial Sequence
  Description of Artificial Sequence: Synthetic oligonucleotide
  Antisense strand to SEQ ID NO: 636564
uguagcccucuuuauuacc

SEQ ID NO: 636566 - RNA, 19 nt, Artificial Sequence
  Description of Artificial Sequence: Synthetic oligonucleotide
  Sense strand starting at position 1133 of SEQ ID NO: 585396
ucacgucaucaaggcagaa

SEQ ID NO: 636567 - RNA, 19 nt, Artificial Sequence
  Description of Artificial Sequence: Synthetic oligonucleotide
  Antisense strand to SEQ ID NO: 636566
uucugccuugaugacguga

SEQ ID NO: 636568 - RNA, 19 nt, Artificial Sequence
  Description of Artificial Sequence: Synthetic oligonucleotide
  Sense strand starting at position 1434 of SEQ ID NO: 585396
agacgucaucggugaaaug

SEQ ID NO: 636569 - RNA, 19 nt, Artificial Sequence
  Description of Artificial Sequence: Synthetic oligonucleotide
  Antisense strand to SEQ ID NO: 636568
cauuucaccgaugacgucu

SEQ ID NO: 636570 - RNA, 19 nt, Artificial Sequence
  Description of Artificial Sequence: Synthetic oligonucleotide
  Sense strand starting at position 1435 of SEQ ID NO: 585396
gacgucaucggugaaauga

SEQ ID NO: 636571 - RNA, 19 nt, Artificial Sequence
  Description of Artificial Sequence: Synthetic oligonucleotide
  Antisense strand to SEQ ID NO: 636570
ucauuucaccgaugacguc

SEQ ID NO: 636572 - RNA, 19 nt, Artificial Sequence
  Description of Artificial Sequence: Synthetic oligonucleotide
  Sense strand starting at position 1658 of SEQ ID NO: 585396
guaguaagaggccgaauau

SEQ ID NO: 636573 - RNA, 19 nt, Artificial Sequence
  Description of Artificial Sequence: Synthetic oligonucleotide
  Antisense strand to SEQ ID NO: 636572
auauucggccucuuacuac

SEQ ID NO: 636574 - RNA, 19 nt, Artificial Sequence
  Description of Artificial Sequence: Synthetic oligonucleotide
  Sense strand starting at position 1784 of SEQ ID NO: 585396
gggagagagcgcgagauau

SEQ ID NO: 636575 - RNA, 19 nt, Artificial Sequence
  Description of Artificial Sequence: Synthetic oligonucleotide
  Antisense strand to SEQ ID NO: 636574
auaucucgcgcucucuccc

SEQ ID NO: 636576 - RNA, 19 nt, Artificial Sequence
  Description of Artificial Sequence: Synthetic oligonucleotide
  Sense strand starting at position 1851 of SEQ ID NO: 585396
agugguugccaaggagacu

SEQ ID NO: 636577 - RNA, 19 nt, Artificial Sequence
  Description of Artificial Sequence: Synthetic oligonucleotide
  Antisense strand to SEQ ID NO: 636576
agucuccuuggcaaccacu

SEQ ID NO: 636578 - RNA, 19 nt, Artificial Sequence
  Description of Artificial Sequence: Synthetic oligonucleotide
  Sense strand starting at position 2038 of SEQ ID NO: 585396
gcaaccuauugagauauuu

SEQ ID NO: 636579 - RNA, 19 nt, Artificial Sequence
  Description of Artificial Sequence: Synthetic oligonucleotide
  Antisense strand to SEQ ID NO: 636578
aaauaucucaauagguugc

SEQ ID NO: 636580 - RNA, 19 nt, Artificial Sequence
  Description of Artificial Sequence: Synthetic oligonucleotide
  Sense strand starting at position 2057 of SEQ ID NO: 585396
gacucagccuaaguugaua

SEQ ID NO: 636581 - RNA, 19 nt, Artificial Sequence
  Description of Artificial Sequence: Synthetic oligonucleotide
  Antisense strand to SEQ ID NO: 636580
uaucaacuuaggcugaguc

SEQ ID NO: 636582 - RNA, 19 nt, Artificial Sequence
  Description of Artificial Sequence: Synthetic oligonucleotide
  Sense strand starting at position 2167 of SEQ ID NO: 585396
ggaaguuuggcccucgugu

SEQ ID NO: 636583 - RNA, 19 nt, Artificial Sequence
  Description of Artificial Sequence: Synthetic oligonucleotide
  Antisense strand to SEQ ID NO: 636582
acacgagggccaaacuucc

SEQ ID NO: 636584 - RNA, 19 nt, Artificial Sequence
  Description of Artificial Sequence: Synthetic oligonucleotide
  Sense strand starting at position 2229 of SEQ ID NO: 585396
gcaagaauggcugauguca

SEQ ID NO: 636585 - RNA, 19 nt, Artificial Sequence
  Description of Artificial Sequence: Synthetic oligonucleotide
  Antisense strand to SEQ ID NO: 636584
ugacaucagccauucuugc

SEQ ID NO: 636586 - RNA, 19 nt, Artificial Sequence
  Description of Artificial Sequence: Synthetic oligonucleotide
  Sense strand starting at position 2801 of SEQ ID NO: 585396
uaugcaugccugugaauuu

SEQ ID NO: 636587 - RNA, 19 nt, Artificial Sequence
  Description of Artificial Sequence: Synthetic oligonucleotide
  Antisense strand to SEQ ID NO: 636586
aaauucacaggcaugcaua

SEQ ID NO: 636588 - RNA, 19 nt, Artificial Sequence
  Description of Artificial Sequence: Synthetic oligonucleotide
  Sense strand starting at position 2824 of SEQ ID NO: 585396
gauagcuuuguauguaaag

SEQ ID NO: 636589 - RNA, 19 nt, Artificial Sequence
  Description of Artificial Sequence: Synthetic oligonucleotide
  Antisense strand to SEQ ID NO: 636588
cuuuacauacaaagcuauc

SEQ ID NO: 636590 - RNA, 19 nt, Artificial Sequence
  Description of Artificial Sequence: Synthetic oligonucleotide
  Sense strand starting at position 2834 of SEQ ID NO: 585396
uauguaaagguauaugcau

SEQ ID NO: 636591 - RNA, 19 nt, Artificial Sequence
  Description of Artificial Sequence: Synthetic oligonucleotide
  Antisense strand to SEQ ID NO: 636590
augcauauaccuuuacaua

SEQ ID NO: 636592 - RNA, 19 nt, Artificial Sequence
  Description of Artificial Sequence: Synthetic oligonucleotide
  Sense strand starting at position 2841 of SEQ ID NO: 585396
agguauaugcaucagcaaa

SEQ ID NO: 636593 - RNA, 19 nt, Artificial Sequence
  Description of Artificial Sequence: Synthetic oligonucleotide
  Antisense strand to SEQ ID NO: 636592
uuugcugaugcauauaccu

SEQ ID NO: 636594 - RNA, 19 nt, Artificial Sequence
  Description of Artificial Sequence: Synthetic oligonucleotide
  Sense strand starting at position 2843 of SEQ ID NO: 585396
guauaugcaucagcaaaca

SEQ ID NO: 636595 - RNA, 19 nt, Artificial Sequence
  Description of Artificial Sequence: Synthetic oligonucleotide
  Antisense strand to SEQ ID NO: 636594
uguuugcugaugcauauac

SEQ ID NO: 636596 - RNA, 19 nt, Artificial Sequence
  Description of Artificial Sequence: Synthetic oligonucleotide
  Sense strand starting at position 2901 of SEQ ID NO: 585396
aaacucuugggauggcuua

SEQ ID NO: 636597 - RNA, 19 nt, Artificial Sequence
  Description of Artificial Sequence: Synthetic oligonucleotide
  Antisense strand to SEQ ID NO: 636596
uaagccaucccaagaguuu

SEQ ID NO: 636598 - RNA, 19 nt, Artificial Sequence
  Description of Artificial Sequence: Synthetic oligonucleotide
  Sense strand starting at position 2989 of SEQ ID NO: 585396
accacugugauguagucaa

SEQ ID NO: 636599 - RNA, 19 nt, Artificial Sequence
  Description of Artificial Sequence: Synthetic oligonucleotide
  Antisense strand to SEQ ID NO: 636598
uugacuacaucacaguggu

SEQ ID NO: 636600 - RNA, 19 nt, Artificial Sequence
  Description of Artificial Sequence: Synthetic oligonucleotide
  Sense strand starting at position 2993 of SEQ ID NO: 585396
cugugauguagucaagaaa

SEQ ID NO: 636601 - RNA, 19 nt, Artificial Sequence
  Description of Artificial Sequence: Synthetic oligonucleotide
  Antisense strand to SEQ ID NO: 636600
uuucuugacuacaucacag

SEQ ID NO: 636602 - RNA, 19 nt, Artificial Sequence
  Description of Artificial Sequence: Synthetic oligonucleotide
  Sense strand starting at position 3048 of SEQ ID NO: 585396
guauuauguggugaugagu

SEQ ID NO: 636603 - RNA, 19 nt, Artificial Sequence
  Description of Artificial Sequence: Synthetic oligonucleotide
  Antisense strand to SEQ ID NO: 636602
acucaucaccacauaauac

SEQ ID NO: 636604 - RNA, 19 nt, Artificial Sequence
  Description of Artificial Sequence: Synthetic oligonucleotide
  Sense strand starting at position 3051 of SEQ ID NO: 585396
uuauguggugaugaguuau

SEQ ID NO: 636605 - RNA, 19 nt, Artificial Sequence
  Description of Artificial Sequence: Synthetic oligonucleotide
  Antisense strand to SEQ ID NO: 636604
auaacucaucaccacauaa

SEQ ID NO: 636606 - RNA, 19 nt, Artificial Sequence
  Description of Artificial Sequence: Synthetic oligonucleotide
  Sense strand starting at position 3062 of SEQ ID NO: 585396
ugaguuaugcucuaccuau

SEQ ID NO: 636607 - RNA, 19 nt, Artificial Sequence
  Description of Artificial Sequence: Synthetic oligonucleotide
  Antisense strand to SEQ ID NO: 636606
auagguagagcauaacuca

SEQ ID NO: 636608 - RNA, 19 nt, Artificial Sequence
  Description of Artificial Sequence: Synthetic oligonucleotide
  Sense strand starting at position 3216 of SEQ ID NO: 585396
accugcaaauguuugaauu

SEQ ID NO: 636609 - RNA, 19 nt, Artificial Sequence
  Description of Artificial Sequence: Synthetic oligonucleotide
  Antisense strand to SEQ ID NO: 636608
aauucaaacauuugcaggu

SEQ ID NO: 636610 - RNA, 19 nt, Artificial Sequence
  Description of Artificial Sequence: Synthetic oligonucleotide
  Sense strand starting at position 3263 of SEQ ID NO: 585396
ccuggagaccucugucaua

SEQ ID NO: 636611 - RNA, 19 nt, Artificial Sequence
  Description of Artificial Sequence: Synthetic oligonucleotide
  Antisense strand to SEQ ID NO: 636610
uaugacagaggucuccagg

SEQ ID NO: 636612 - RNA, 19 nt, Artificial Sequence
  Description of Artificial Sequence: Synthetic oligonucleotide
  Sense strand starting at position 3275 of SEQ ID NO: 585396
ugucauagcuuccuuaaag

SEQ ID NO: 636613 - RNA, 19 nt, Artificial Sequence
  Description of Artificial Sequence: Synthetic oligonucleotide
  Antisense strand to SEQ ID NO: 636612
cuuuaaggaagcuaugaca

SEQ ID NO: 636614 - RNA, 19 nt, Artificial Sequence
  Description of Artificial Sequence: Synthetic oligonucleotide
  Sense strand starting at position 3312 of SEQ ID NO: 585396
ccagguugauaucucuauu

SEQ ID NO: 636615 - RNA, 19 nt, Artificial Sequence
  Description of Artificial Sequence: Synthetic oligonucleotide
  Antisense strand to SEQ ID NO: 636614
aauagagauaucaaccugg

SEQ ID NO: 636616 - RNA, 19 nt, Artificial Sequence
  Description of Artificial Sequence: Synthetic oligonucleotide
  Sense strand starting at position 3315 of SEQ ID NO: 585396
gguugauaucucuauucca

SEQ ID NO: 636617 - RNA, 19 nt, Artificial Sequence
  Description of Artificial Sequence: Synthetic oligonucleotide
  Antisense strand to SEQ ID NO: 636616
uggaauagagauaucaacc

SEQ ID NO: 636618 - RNA, 19 nt, Artificial Sequence
  Description of Artificial Sequence: Synthetic oligonucleotide
  Sense strand starting at position 3609 of SEQ ID NO: 585396
cuagucuuacaucagguau

SEQ ID NO: 636619 - RNA, 19 nt, Artificial Sequence
  Description of Artificial Sequence: Synthetic oligonucleotide
  Antisense strand to SEQ ID NO: 636618
auaccugauguaagacuag

SEQ ID NO: 636620 - RNA, 19 nt, Artificial Sequence
  Description of Artificial Sequence: Synthetic oligonucleotide
  Sense strand starting at position 317 of SEQ ID NO: 585397
ccaguccugccaugagagu

SEQ ID NO: 636621 - RNA, 19 nt, Artificial Sequence
  Description of Artificial Sequence: Synthetic oligonucleotide
  Antisense strand to SEQ ID NO: 636620
acucucauggcaggacugg

SEQ ID NO: 636622 - RNA, 19 nt, Artificial Sequence
  Description of Artificial Sequence: Synthetic oligonucleotide
  Sense strand starting at position 331 of SEQ ID NO: 585397
agagucaugucucccaacu

SEQ ID NO: 636623 - RNA, 19 nt, Artificial Sequence
  Description of Artificial Sequence: Synthetic oligonucleotide
  Antisense strand to SEQ ID NO: 636622
aguugggagacaugacucu

SEQ ID NO: 636624 - RNA, 19 nt, Artificial Sequence
  Description of Artificial Sequence: Synthetic oligonucleotide
  Sense strand starting at position 537 of SEQ ID NO: 585397
cugggaguccugugaggga

SEQ ID NO: 636625 - RNA, 19 nt, Artificial Sequence
  Description of Artificial Sequence: Synthetic oligonucleotide
  Antisense strand to SEQ ID NO: 636624
ucccucacaggacucccag

SEQ ID NO: 636626 - RNA, 19 nt, Artificial Sequence
  Description of Artificial Sequence: Synthetic oligonucleotide
  Sense strand starting at position 542 of SEQ ID NO: 585397
aguccugugagggaugcua

SEQ ID NO: 636627 - RNA, 19 nt, Artificial Sequence
  Description of Artificial Sequence: Synthetic oligonucleotide
  Antisense strand to SEQ ID NO: 636626
uagcaucccucacaggacu

SEQ ID NO: 636628 - RNA, 19 nt, Artificial Sequence
  Description of Artificial Sequence: Synthetic oligonucleotide
  Sense strand starting at position 544 of SEQ ID NO: 585397
uccugugagggaugcuauu

SEQ ID NO: 636629 - RNA, 19 nt, Artificial Sequence
  Description of Artificial Sequence: Synthetic oligonucleotide
  Antisense strand to SEQ ID NO: 636628
aauagcaucccucacagga

SEQ ID NO: 636630 - RNA, 19 nt, Artificial Sequence
  Description of Artificial Sequence: Synthetic oligonucleotide
  Sense strand starting at position 660 of SEQ ID NO: 585397
agaggucucauguaggcaa

SEQ ID NO: 636631 - RNA, 19 nt, Artificial Sequence
  Description of Artificial Sequence: Synthetic oligonucleotide
  Antisense strand to SEQ ID NO: 636630
uugccuacaugagaccucu

SEQ ID NO: 636632 - RNA, 19 nt, Artificial Sequence
  Description of Artificial Sequence: Synthetic oligonucleotide
  Sense strand starting at position 683 of SEQ ID NO: 585397
ggaacucaaugagaagcau

SEQ ID NO: 636633 - RNA, 19 nt, Artificial Sequence
  Description of Artificial Sequence: Synthetic oligonucleotide
  Antisense strand to SEQ ID NO: 636632
augcuucucauugaguucc

SEQ ID NO: 636634 - RNA, 19 nt, Artificial Sequence
  Description of Artificial Sequence: Synthetic oligonucleotide
  Sense strand starting at position 727 of SEQ ID NO: 585397
auagcugucucuucugaca

SEQ ID NO: 636635 - RNA, 19 nt, Artificial Sequence
  Description of Artificial Sequence: Synthetic oligonucleotide
  Antisense strand to SEQ ID NO: 636634
ugucagaagagacagcuau

SEQ ID NO: 636636 - RNA, 19 nt, Artificial Sequence
  Description of Artificial Sequence: Synthetic oligonucleotide
  Sense strand starting at position 759 of SEQ ID NO: 585397
ggcccugauuucuaacucu

SEQ ID NO: 636637 - RNA, 19 nt, Artificial Sequence
  Description of Artificial Sequence: Synthetic oligonucleotide
  Antisense strand to SEQ ID NO: 636636
agaguuagaaaucagggcc

SEQ ID NO: 636638 - RNA, 19 nt, Artificial Sequence
  Description of Artificial Sequence: Synthetic oligonucleotide
  Sense strand starting at position 904 of SEQ ID NO: 585397
cuuggucaccgaugaggaa

SEQ ID NO: 636639 - RNA, 19 nt, Artificial Sequence
  Description of Artificial Sequence: Synthetic oligonucleotide
  Antisense strand to SEQ ID NO: 636638
uuccucaucggugaccaag

SEQ ID NO: 636640 - RNA, 19 nt, Artificial Sequence
  Description of Artificial Sequence: Synthetic oligonucleotide
  Sense strand starting at position 1056 of SEQ ID NO: 585397
cccucuaccuucuugaguu

SEQ ID NO: 636641 - RNA, 19 nt, Artificial Sequence
  Description of Artificial Sequence: Synthetic oligonucleotide
  Antisense strand to SEQ ID NO: 636640
aacucaagaagguagaggg

SEQ ID NO: 636642 - RNA, 19 nt, Artificial Sequence
  Description of Artificial Sequence: Synthetic oligonucleotide
  Sense strand starting at position 1104 of SEQ ID NO: 585397
ccauuugccugucuugagu

SEQ ID NO: 636643 - RNA, 19 nt, Artificial Sequence
  Description of Artificial Sequence: Synthetic oligonucleotide
  Antisense strand to SEQ ID NO: 636642
acucaagacaggcaaaugg

SEQ ID NO: 636644 - RNA, 19 nt, Artificial Sequence
  Description of Artificial Sequence: Synthetic oligonucleotide
  Sense strand starting at position 1107 of SEQ ID NO: 585397
uuugccugucuugagugau

SEQ ID NO: 636645 - RNA, 19 nt, Artificial Sequence
  Description of Artificial Sequence: Synthetic oligonucleotide
  Antisense strand to SEQ ID NO: 636644
aucacucaagacaggcaaa

SEQ ID NO: 636646 - RNA, 19 nt, Artificial Sequence
  Description of Artificial Sequence: Synthetic oligonucleotide
  Sense strand starting at position 1113 of SEQ ID NO: 585397
ugucuugagugauuacaua

SEQ ID NO: 636647 - RNA, 19 nt, Artificial Sequence
  Description of Artificial Sequence: Synthetic oligonucleotide
  Antisense strand to SEQ ID NO: 636646
uauguaaucacucaagaca

SEQ ID NO: 636648 - RNA, 19 nt, Artificial Sequence
  Description of Artificial Sequence: Synthetic oligonucleotide
  Sense strand starting at position 1216 of SEQ ID NO: 585397
ugcacaacuuugucuguga

SEQ ID NO: 636649 - RNA, 19 nt, Artificial Sequence
  Description of Artificial Sequence: Synthetic oligonucleotide
  Antisense strand to SEQ ID NO: 636648
ucacagacaaaguugugca

SEQ ID NO: 636650 - RNA, 19 nt, Artificial Sequence
  Description of Artificial Sequence: Synthetic oligonucleotide
  Sense strand starting at position 1217 of SEQ ID NO: 585397
gcacaacuuugucugugau

SEQ ID NO: 636651 - RNA, 19 nt, Artificial Sequence
  Description of Artificial Sequence: Synthetic oligonucleotide
  Antisense strand to SEQ ID NO: 636650
aucacagacaaaguugugc

SEQ ID NO: 636652 - RNA, 19 nt, Artificial Sequence
  Description of Artificial Sequence: Synthetic oligonucleotide
  Sense strand starting at position 1219 of SEQ ID NO: 585397
acaacuuugucugugauua

SEQ ID NO: 636653 - RNA, 19 nt, Artificial Sequence
  Description of Artificial Sequence: Synthetic oligonucleotide
  Antisense strand to SEQ ID NO: 636652
uaaucacagacaaaguugu

SEQ ID NO: 636654 - RNA, 19 nt, Artificial Sequence
  Description of Artificial Sequence: Synthetic oligonucleotide
  Sense strand starting at position 1229 of SEQ ID NO: 585397
cugugauuaagcugagucu

SEQ ID NO: 636655 - RNA, 19 nt, Artificial Sequence
  Description of Artificial Sequence: Synthetic oligonucleotide
  Antisense strand to SEQ ID NO: 636654
agacucagcuuaaucacag

SEQ ID NO: 636656 - RNA, 19 nt, Artificial Sequence
  Description of Artificial Sequence: Synthetic oligonucleotide
  Sense strand starting at position 1394 of SEQ ID NO: 585397
agggcaugcuaccuaauga

SEQ ID NO: 636657 - RNA, 19 nt, Artificial Sequence
  Description of Artificial Sequence: Synthetic oligonucleotide
  Antisense strand to SEQ ID NO: 636656
ucauuagguagcaugcccu

SEQ ID NO: 636658 - RNA, 19 nt, Artificial Sequence
  Description of Artificial Sequence: Synthetic oligonucleotide
  Sense strand starting at position 1663 of SEQ ID NO: 585397
uucuucuuccguuaagaug

SEQ ID NO: 636659 - RNA, 19 nt, Artificial Sequence
  Description of Artificial Sequence: Synthetic oligonucleotide
  Antisense strand to SEQ ID NO: 636658
caucuuaacggaagaagaa

SEQ ID NO: 636660 - RNA, 19 nt, Artificial Sequence
  Description of Artificial Sequence: Synthetic oligonucleotide
  Sense strand starting at position 1743 of SEQ ID NO: 585397
cggcucauguggucacaaa

SEQ ID NO: 636661 - RNA, 19 nt, Artificial Sequence
  Description of Artificial Sequence: Synthetic oligonucleotide
  Antisense strand to SEQ ID NO: 636660
uuugugaccacaugagccg

SEQ ID NO: 636662 - RNA, 19 nt, Artificial Sequence
  Description of Artificial Sequence: Synthetic oligonucleotide
  Sense strand starting at position 1766 of SEQ ID NO: 585397
ugguguuuccuauguggag

SEQ ID NO: 636663 - RNA, 19 nt, Artificial Sequence
  Description of Artificial Sequence: Synthetic oligonucleotide
  Antisense strand to SEQ ID NO: 636662
cuccacauaggaaacacca

SEQ ID NO: 636664 - RNA, 19 nt, Artificial Sequence
  Description of Artificial Sequence: Synthetic oligonucleotide
  Sense strand starting at position 1767 of SEQ ID NO: 585397
gguguuuccuauguggaga

SEQ ID NO: 636665 - RNA, 19 nt, Artificial Sequence
  Description of Artificial Sequence: Synthetic oligonucleotide
  Antisense strand to SEQ ID NO: 636664
ucuccacauaggaaacacc

SEQ ID NO: 636666 - RNA, 19 nt, Artificial Sequence
  Description of Artificial Sequence: Synthetic oligonucleotide
  Sense strand starting at position 1768 of SEQ ID NO: 585397
guguuuccuauguggagau

SEQ ID NO: 636667 - RNA, 19 nt, Artificial Sequence
  Description of Artificial Sequence: Synthetic oligonucleotide
  Antisense strand to SEQ ID NO: 636666
aucuccacauaggaaacac

SEQ ID NO: 636668 - RNA, 19 nt, Artificial Sequence
  Description of Artificial Sequence: Synthetic oligonucleotide
  Sense strand starting at position 1780 of SEQ ID NO: 585397
uggagauaccauugcuguu

SEQ ID NO: 636669 - RNA, 19 nt, Artificial Sequence
  Description of Artificial Sequence: Synthetic oligonucleotide
  Antisense strand to SEQ ID NO: 636668
aacagcaaugguaucucca

SEQ ID NO: 636670 - RNA, 19 nt, Artificial Sequence
  Description of Artificial Sequence: Synthetic oligonucleotide
  Sense strand starting at position 1870 of SEQ ID NO: 585397
cugucuguuccuuaaucac

SEQ ID NO: 636671 - RNA, 19 nt, Artificial Sequence
  Description of Artificial Sequence: Synthetic oligonucleotide
  Antisense strand to SEQ ID NO: 636670
gugauuaaggaacagacag

SEQ ID NO: 636672 - RNA, 19 nt, Artificial Sequence
  Description of Artificial Sequence: Synthetic oligonucleotide
  Sense strand starting at position 2370 of SEQ ID NO: 585397
auuagaauaugagcuguca

SEQ ID NO: 636673 - RNA, 19 nt, Artificial Sequence
  Description of Artificial Sequence: Synthetic oligonucleotide
  Antisense strand to SEQ ID NO: 636672
ugacagcucauauucuaau

SEQ ID NO: 636674 - RNA, 19 nt, Artificial Sequence
  Description of Artificial Sequence: Synthetic oligonucleotide
  Sense strand starting at position 2574 of SEQ ID NO: 585397
uaacacgcucauuguuaga

SEQ ID NO: 636675 - RNA, 19 nt, Artificial Sequence
  Description of Artificial Sequence: Synthetic oligonucleotide
  Antisense strand to SEQ ID NO: 636674
ucuaacaaugagcguguua

SEQ ID NO: 636676 - RNA, 19 nt, Artificial Sequence
  Description of Artificial Sequence: Synthetic oligonucleotide
  Sense strand starting at position 2576 of SEQ ID NO: 585397
acacgcucauuguuagacu

SEQ ID NO: 636677 - RNA, 19 nt, Artificial Sequence
  Description of Artificial Sequence: Synthetic oligonucleotide
  Antisense strand to SEQ ID NO: 636676
agucuaacaaugagcgugu

SEQ ID NO: 636678 - RNA, 19 nt, Artificial Sequence
  Description of Artificial Sequence: Synthetic oligonucleotide
  Sense strand starting at position 2584 of SEQ ID NO: 585397
auuguuagacuccaggagu

SEQ ID NO: 636679 - RNA, 19 nt, Artificial Sequence
  Description of Artificial Sequence: Synthetic oligonucleotide
  Antisense strand to SEQ ID NO: 636678
acuccuggagucuaacaau

SEQ ID NO: 636680 - RNA, 19 nt, Artificial Sequence
  Description of Artificial Sequence: Synthetic oligonucleotide
  Sense strand starting at position 2806 of SEQ ID NO: 585397
ggaaauuuaacuugcgugu

SEQ ID NO: 636681 - RNA, 19 nt, Artificial Sequence
  Description of Artificial Sequence: Synthetic oligonucleotide
  Antisense strand to SEQ ID NO: 636680
acacgcaaguuaaauuucc

SEQ ID NO: 636682 - RNA, 19 nt, Artificial Sequence
  Description of Artificial Sequence: Synthetic oligonucleotide
  Sense strand starting at position 2809 of SEQ ID NO: 585397
aauuuaacuugcguguaac

SEQ ID NO: 636683 - RNA, 19 nt, Artificial Sequence
  Description of Artificial Sequence: Synthetic oligonucleotide
  Antisense strand to SEQ ID NO: 636682
guuacacgcaaguuaaauu

SEQ ID NO: 636684 - RNA, 19 nt, Artificial Sequence
  Description of Artificial Sequence: Synthetic oligonucleotide
  Sense strand starting at position 2810 of SEQ ID NO: 585397
auuuaacuugcguguaaca

SEQ ID NO: 636685 - RNA, 19 nt, Artificial Sequence
  Description of Artificial Sequence: Synthetic oligonucleotide
  Antisense strand to SEQ ID NO: 636684
uguuacacgcaaguuaaau

SEQ ID NO: 636686 - RNA, 19 nt, Artificial Sequence
  Description of Artificial Sequence: Synthetic oligonucleotide
  Sense strand starting at position 2812 of SEQ ID NO: 585397
uuaacuugcguguaacaug

SEQ ID NO: 636687 - RNA, 19 nt, Artificial Sequence
  Description of Artificial Sequence: Synthetic oligonucleotide
  Antisense strand to SEQ ID NO: 636686
cauguuacacgcaaguuaa

SEQ ID NO: 636688 - RNA, 19 nt, Artificial Sequence
  Description of Artificial Sequence: Synthetic oligonucleotide
  Sense strand starting at position 3126 of SEQ ID NO: 585397
gaacguaacugauuggagu

SEQ ID NO: 636689 - RNA, 19 nt, Artificial Sequence
  Description of Artificial Sequence: Synthetic oligonucleotide
  Antisense strand to SEQ ID NO: 636688
acuccaaucaguuacguuc

SEQ ID NO: 636690 - RNA, 19 nt, Artificial Sequence
  Description of Artificial Sequence: Synthetic oligonucleotide
  Sense strand starting at position 3179 of SEQ ID NO: 585397
agguuuggagaguaguuga

SEQ ID NO: 636691 - RNA, 19 nt, Artificial Sequence
  Description of Artificial Sequence: Synthetic oligonucleotide
  Antisense strand to SEQ ID NO: 636690
ucaacuacucuccaaaccu

SEQ ID NO: 636692 - RNA, 19 nt, Artificial Sequence
  Description of Artificial Sequence: Synthetic oligonucleotide
  Sense strand starting at position 3184 of SEQ ID NO: 585397
uggagaguaguugagugau

SEQ ID NO: 636693 - RNA, 19 nt, Artificial Sequence
  Description of Artificial Sequence: Synthetic oligonucleotide
  Antisense strand to SEQ ID NO: 636692
aucacucaacuacucucca

SEQ ID NO: 636694 - RNA, 19 nt, Artificial Sequence
  Description of Artificial Sequence: Synthetic oligonucleotide
  Sense strand starting at position 3186 of SEQ ID NO: 585397
gagaguaguugagugauau

SEQ ID NO: 636695 - RNA, 19 nt, Artificial Sequence
  Description of Artificial Sequence: Synthetic oligonucleotide
  Antisense strand to SEQ ID NO: 636694
auaucacucaacuacucuc

SEQ ID NO: 636696 - RNA, 19 nt, Artificial Sequence
  Description of Artificial Sequence: Synthetic oligonucleotide
  Sense strand starting at position 3187 of SEQ ID NO: 585397
agaguaguugagugauauu

SEQ ID NO: 636697 - RNA, 19 nt, Artificial Sequence
  Description of Artificial Sequence: Synthetic oligonucleotide
  Antisense strand to SEQ ID NO: 636696
aauaucacucaacuacucu

SEQ ID NO: 636698 - RNA, 19 nt, Artificial Sequence
  Description of Artificial Sequence: Synthetic oligonucleotide
  Sense strand starting at position 3539 of SEQ ID NO: 585397
aagggucacuuaguccaaa

SEQ ID NO: 636699 - RNA, 19 nt, Artificial Sequence
  Description of Artificial Sequence: Synthetic oligonucleotide
  Antisense strand to SEQ ID NO: 636698
uuuggacuaagugacccuu

SEQ ID NO: 636700 - RNA, 19 nt, Artificial Sequence
  Description of Artificial Sequence: Synthetic oligonucleotide
  Sense strand starting at position 61 of SEQ ID NO: 585398
ucaggacucucaucugacu

SEQ ID NO: 636701 - RNA, 19 nt, Artificial Sequence
  Description of Artificial Sequence: Synthetic oligonucleotide
  Antisense strand to SEQ ID NO: 636700
agucagaugagaguccuga

SEQ ID NO: 636702 - RNA, 19 nt, Artificial Sequence
  Description of Artificial Sequence: Synthetic oligonucleotide
  Sense strand starting at position 118 of SEQ ID NO: 585398
gucucuuauaucgggaaua

SEQ ID NO: 636703 - RNA, 19 nt, Artificial Sequence
  Description of Artificial Sequence: Synthetic oligonucleotide
  Antisense strand to SEQ ID NO: 636702
uauucccgauauaagagac

SEQ ID NO: 636704 - RNA, 19 nt, Artificial Sequence
  Description of Artificial Sequence: Synthetic oligonucleotide
  Sense strand starting at position 341 of SEQ ID NO: 585398
gggcucagauggguacuaa

SEQ ID NO: 636705 - RNA, 19 nt, Artificial Sequence
  Description of Artificial Sequence: Synthetic oligonucleotide
  Antisense strand to SEQ ID NO: 636704
uuaguacccaucugagccc

SEQ ID NO: 636706 - RNA, 19 nt, Artificial Sequence
  Description of Artificial Sequence: Synthetic oligonucleotide
  Sense strand starting at position 448 of SEQ ID NO: 585398
caucuaacguagucagauc

SEQ ID NO: 636707 - RNA, 19 nt, Artificial Sequence
  Description of Artificial Sequence: Synthetic oligonucleotide
  Antisense strand to SEQ ID NO: 636706
gaucugacuacguuagaug

SEQ ID NO: 636708 - RNA, 19 nt, Artificial Sequence
  Description of Artificial Sequence: Synthetic oligonucleotide
  Sense strand starting at position 732 of SEQ ID NO: 585398
uuugauaaagucuagcuau

SEQ ID NO: 636709 - RNA, 19 nt, Artificial Sequence
  Description of Artificial Sequence: Synthetic oligonucleotide
  Antisense strand to SEQ ID NO: 636708
auagcuagacuuuaucaaa

SEQ ID NO: 636710 - RNA, 19 nt, Artificial Sequence
  Description of Artificial Sequence: Synthetic oligonucleotide
  Sense strand starting at position 803 of SEQ ID NO: 585398
guugcagaucaauacacaa

SEQ ID NO: 636711 - RNA, 19 nt, Artificial Sequence
  Description of Artificial Sequence: Synthetic oligonucleotide
  Antisense strand to SEQ ID NO: 636710
uuguguauugaucugcaac

SEQ ID NO: 636712 - RNA, 19 nt, Artificial Sequence
  Description of Artificial Sequence: Synthetic oligonucleotide
  Sense strand starting at position 989 of SEQ ID NO: 585398
gggaacaccuucuuuaucu

SEQ ID NO: 636713 - RNA, 19 nt, Artificial Sequence
  Description of Artificial Sequence: Synthetic oligonucleotide
  Antisense strand to SEQ ID NO: 636712
agauaaagaagguguuccc

SEQ ID NO: 636714 - RNA, 19 nt, Artificial Sequence
  Description of Artificial Sequence: Synthetic oligonucleotide
  Sense strand starting at position 1341 of SEQ ID NO: 585398
ggcaaugaaacgugcauuu

SEQ ID NO: 636715 - RNA, 19 nt, Artificial Sequence
  Description of Artificial Sequence: Synthetic oligonucleotide
  Antisense strand to SEQ ID NO: 636714
aaaugcacguuucauugcc

SEQ ID NO: 636716 - RNA, 19 nt, Artificial Sequence
  Description of Artificial Sequence: Synthetic oligonucleotide
  Sense strand starting at position 1352 of SEQ ID NO: 585398
gugcauuucuucccucauu

SEQ ID NO: 636717 - RNA, 19 nt, Artificial Sequence
  Description of Artificial Sequence: Synthetic oligonucleotide
  Antisense strand to SEQ ID NO: 636716
aaugagggaagaaaugcac

SEQ ID NO: 636718 - RNA, 19 nt, Artificial Sequence
  Description of Artificial Sequence: Synthetic oligonucleotide
  Sense strand starting at position 1433 of SEQ ID NO: 585398
guagaacuaucuuugacga

SEQ ID NO: 636719 - RNA, 19 nt, Artificial Sequence
  Description of Artificial Sequence: Synthetic oligonucleotide
  Antisense strand to SEQ ID NO: 636718
ucgucaaagauaguucuac

SEQ ID NO: 636720 - RNA, 19 nt, Artificial Sequence
  Description of Artificial Sequence: Synthetic oligonucleotide
  Sense strand starting at position 1549 of SEQ ID NO: 585398
uagauacaccguuaugugu

SEQ ID NO: 636721 - RNA, 19 nt, Artificial Sequence
  Description of Artificial Sequence: Synthetic oligonucleotide
  Antisense strand to SEQ ID NO: 636720
acacauaacgguguaucua

SEQ ID NO: 636722 - RNA, 19 nt, Artificial Sequence
  Description of Artificial Sequence: Synthetic oligonucleotide
  Sense strand starting at position 1574 of SEQ ID NO: 585398
cgaacagaguagcuauuaa

SEQ ID NO: 636723 - RNA, 19 nt, Artificial Sequence
  Description of Artificial Sequence: Synthetic oligonucleotide
  Antisense strand to SEQ ID NO: 636722
uuaauagcuacucuguucg

SEQ ID NO: 636724 - RNA, 19 nt, Artificial Sequence
  Description of Artificial Sequence: Synthetic oligonucleotide
  Sense strand starting at position 1698 of SEQ ID NO: 585398
aguuuagccgcgagaaguc

SEQ ID NO: 636725 - RNA, 19 nt, Artificial Sequence
  Description of Artificial Sequence: Synthetic oligonucleotide
  Antisense strand to SEQ ID NO: 636724
gacuucucgcggcuaaacu

SEQ ID NO: 636726 - RNA, 19 nt, Artificial Sequence
  Description of Artificial Sequence: Synthetic oligonucleotide
  Sense strand starting at position 2410 of SEQ ID NO: 585398
cugugugaauaaguaacua

SEQ ID NO: 636727 - RNA, 19 nt, Artificial Sequence
  Description of Artificial Sequence: Synthetic oligonucleotide
  Antisense strand to SEQ ID NO: 636726
uaguuacuuauucacacag

SEQ ID NO: 636728 - RNA, 19 nt, Artificial Sequence
  Description of Artificial Sequence: Synthetic oligonucleotide
  Sense strand starting at position 2420 of SEQ ID NO: 585398
aaguaacuaugagcaguuu

SEQ ID NO: 636729 - RNA, 19 nt, Artificial Sequence
  Description of Artificial Sequence: Synthetic oligonucleotide
  Antisense strand to SEQ ID NO: 636728
aaacugcucauaguuacuu

SEQ ID NO: 636730 - RNA, 19 nt, Artificial Sequence
  Description of Artificial Sequence: Synthetic oligonucleotide
  Sense strand starting at position 2421 of SEQ ID NO: 585398
aguaacuaugagcaguuua

SEQ ID NO: 636731 - RNA, 19 nt, Artificial Sequence
  Description of Artificial Sequence: Synthetic oligonucleotide
  Antisense strand to SEQ ID NO: 636730
uaaacugcucauaguuacu

SEQ ID NO: 636732 - RNA, 19 nt, Artificial Sequence
  Description of Artificial Sequence: Synthetic oligonucleotide
  Sense strand starting at position 2426 of SEQ ID NO: 585398
cuaugagcaguuuacuuau

SEQ ID NO: 636733 - RNA, 19 nt, Artificial Sequence
  Description of Artificial Sequence: Synthetic oligonucleotide
  Antisense strand to SEQ ID NO: 636732
auaaguaaacugcucauag

SEQ ID NO: 636734 - RNA, 19 nt, Artificial Sequence
  Description of Artificial Sequence: Synthetic oligonucleotide
  Sense strand starting at position 2428 of SEQ ID NO: 585398
augagcaguuuacuuauua

SEQ ID NO: 636735 - RNA, 19 nt, Artificial Sequence
  Description of Artificial Sequence: Synthetic oligonucleotide
  Antisense strand to SEQ ID NO: 636734
uaauaaguaaacugcucau

SEQ ID NO: 636736 - RNA, 19 nt, Artificial Sequence
  Description of Artificial Sequence: Synthetic oligonucleotide
  Sense strand starting at position 2429 of SEQ ID NO: 585398
ugagcaguuuacuuauuau

SEQ ID NO: 636737 - RNA, 19 nt, Artificial Sequence
  Description of Artificial Sequence: Synthetic oligonucleotide
  Antisense strand to SEQ ID NO: 636736
auaauaaguaaacugcuca

SEQ ID NO: 636738 - RNA, 19 nt, Artificial Sequence
  Description of Artificial Sequence: Synthetic oligonucleotide
  Sense strand starting at position 2468 of SEQ ID NO: 585398
ugcuguuugauauacagga

SEQ ID NO: 636739 - RNA, 19 nt, Artificial Sequence
  Description of Artificial Sequence: Synthetic oligonucleotide
  Antisense strand to SEQ ID NO: 636738
uccuguauaucaaacagca

SEQ ID NO: 636740 - RNA, 19 nt, Artificial Sequence
  Description of Artificial Sequence: Synthetic oligonucleotide
  Sense strand starting at position 2498 of SEQ ID NO: 585398
gcucuugugacagauguaa

SEQ ID NO: 636741 - RNA, 19 nt, Artificial Sequence
  Description of Artificial Sequence: Synthetic oligonucleotide
  Antisense strand to SEQ ID NO: 636740
uuacaucugucacaagagc

SEQ ID NO: 636742 - RNA, 19 nt, Artificial Sequence
  Description of Artificial Sequence: Synthetic oligonucleotide
  Sense strand starting at position 2529 of SEQ ID NO: 585398
gaggaaaucgcgagugcug

SEQ ID NO: 636743 - RNA, 19 nt, Artificial Sequence
  Description of Artificial Sequence: Synthetic oligonucleotide
  Antisense strand to SEQ ID NO: 636742
cagcacucgcgauuuccuc

SEQ ID NO: 636744 - RNA, 19 nt, Artificial Sequence
  Description of Artificial Sequence: Synthetic oligonucleotide
  Sense strand starting at position 2555 of SEQ ID NO: 585398
agaauauugugguuuagac

SEQ ID NO: 636745 - RNA, 19 nt, Artificial Sequence
  Description of Artificial Sequence: Synthetic oligonucleotide
  Antisense strand to SEQ ID NO: 636744
gucuaaaccacaauauucu

SEQ ID NO: 636746 - RNA, 19 nt, Artificial Sequence
  Description of Artificial Sequence: Synthetic oligonucleotide
  Sense strand starting at position 2557 of SEQ ID NO: 585398
aauauugugguuuagacca

SEQ ID NO: 636747 - RNA, 19 nt, Artificial Sequence
  Description of Artificial Sequence: Synthetic oligonucleotide
  Antisense strand to SEQ ID NO: 636746
uggucuaaaccacaauauu

SEQ ID NO: 636748 - RNA, 19 nt, Artificial Sequence
  Description of Artificial Sequence: Synthetic oligonucleotide
  Sense strand starting at position 2582 of SEQ ID NO: 585398
guuuauuugcauugcuuua

SEQ ID NO: 636749 - RNA, 19 nt, Artificial Sequence
  Description of Artificial Sequence: Synthetic oligonucleotide
  Antisense strand to SEQ ID NO: 636748
uaaagcaaugcaaauaaac

SEQ ID NO: 636750 - RNA, 19 nt, Artificial Sequence
  Description of Artificial Sequence: Synthetic oligonucleotide
  Sense strand starting at position 2709 of SEQ ID NO: 585398
gagaacuaaucgucucuau

SEQ ID NO: 636751 - RNA, 19 nt, Artificial Sequence
  Description of Artificial Sequence: Synthetic oligonucleotide
  Antisense strand to SEQ ID NO: 636750
auagagacgauuaguucuc

SEQ ID NO: 636752 - RNA, 19 nt, Artificial Sequence
  Description of Artificial Sequence: Synthetic oligonucleotide
  Sense strand starting at position 2754 of SEQ ID NO: 585398
auuuguguugcauguugaa

SEQ ID NO: 636753 - RNA, 19 nt, Artificial Sequence
  Description of Artificial Sequence: Synthetic oligonucleotide
  Antisense strand to SEQ ID NO: 636752
uucaacaugcaacacaaau

SEQ ID NO: 636754 - RNA, 19 nt, Artificial Sequence
  Description of Artificial Sequence: Synthetic oligonucleotide
  Sense strand starting at position 2853 of SEQ ID NO: 585398
cccagugguaucugggauu

SEQ ID NO: 636755 - RNA, 19 nt, Artificial Sequence
  Description of Artificial Sequence: Synthetic oligonucleotide
  Antisense strand to SEQ ID NO: 636754
aaucccagauaccacuggg

SEQ ID NO: 636756 - RNA, 19 nt, Artificial Sequence
  Description of Artificial Sequence: Synthetic oligonucleotide
  Sense strand starting at position 2867 of SEQ ID NO: 585398
ggauuagagacugggcauu

SEQ ID NO: 636757 - RNA, 19 nt, Artificial Sequence
  Description of Artificial Sequence: Synthetic oligonucleotide
  Antisense strand to SEQ ID NO: 636756
aaugcccagucucuaaucc

SEQ ID NO: 636758 - RNA, 19 nt, Artificial Sequence
  Description of Artificial Sequence: Synthetic oligonucleotide
  Sense strand starting at position 2883 of SEQ ID NO: 585398
auuggagccuuucccagaa

SEQ ID NO: 636759 - RNA, 19 nt, Artificial Sequence
  Description of Artificial Sequence: Synthetic oligonucleotide
  Antisense strand to SEQ ID NO: 636758
uucugggaaaggcuccaau

SEQ ID NO: 636760 - RNA, 19 nt, Artificial Sequence
  Description of Artificial Sequence: Synthetic oligonucleotide
  Sense strand starting at position 2955 of SEQ ID NO: 585398
aauuuaagcucagugguuu

SEQ ID NO: 636761 - RNA, 19 nt, Artificial Sequence
  Description of Artificial Sequence: Synthetic oligonucleotide
  Antisense strand to SEQ ID NO: 636760
aaaccacugagcuuaaauu

SEQ ID NO: 636762 - RNA, 19 nt, Artificial Sequence
  Description of Artificial Sequence: Synthetic oligonucleotide
  Sense strand starting at position 2956 of SEQ ID NO: 585398
auuuaagcucagugguuua

SEQ ID NO: 636763 - RNA, 19 nt, Artificial Sequence
  Description of Artificial Sequence: Synthetic oligonucleotide
  Antisense strand to SEQ ID NO: 636762
uaaaccacugagcuuaaau

SEQ ID NO: 636764 - RNA, 19 nt, Artificial Sequence
  Description of Artificial Sequence: Synthetic oligonucleotide
  Sense strand starting at position 2961 of SEQ ID NO: 585398
agcucagugguuuaaauuc

SEQ ID NO: 636765 - RNA, 19 nt, Artificial Sequence
  Description of Artificial Sequence: Synthetic oligonucleotide
  Antisense strand to SEQ ID NO: 636764
gaauuuaaaccacugagcu

SEQ ID NO: 636766 - RNA, 19 nt, Artificial Sequence
  Description of Artificial Sequence: Synthetic oligonucleotide
  Sense strand starting at position 3057 of SEQ ID NO: 585398
cagcaauggguuugaaucu

SEQ ID NO: 636767 - RNA, 19 nt, Artificial Sequence
  Description of Artificial Sequence: Synthetic oligonucleotide
  Antisense strand to SEQ ID NO: 636766
agauucaaacccauugcug

SEQ ID NO: 636768 - RNA, 19 nt, Artificial Sequence
  Description of Artificial Sequence: Synthetic oligonucleotide
  Sense strand starting at position 3124 of SEQ ID NO: 585398
ggccuaauguuucuagaag

SEQ ID NO: 636769 - RNA, 19 nt, Artificial Sequence
  Description of Artificial Sequence: Synthetic oligonucleotide
  Antisense strand to SEQ ID NO: 636768
cuucuagaaacauuaggcc

SEQ ID NO: 636770 - RNA, 19 nt, Artificial Sequence
  Description of Artificial Sequence: Synthetic oligonucleotide
  Sense strand starting at position 3130 of SEQ ID NO: 585398
auguuucuagaaggcaauu

SEQ ID NO: 636771 - RNA, 19 nt, Artificial Sequence
  Description of Artificial Sequence: Synthetic oligonucleotide
  Antisense strand to SEQ ID NO: 636770
aauugccuucuagaaacau

SEQ ID NO: 636772 - RNA, 19 nt, Artificial Sequence
  Description of Artificial Sequence: Synthetic oligonucleotide
  Sense strand starting at position 3644 of SEQ ID NO: 585398
acacguauuccgcauggaa

SEQ ID NO: 636773 - RNA, 19 nt, Artificial Sequence
  Description of Artificial Sequence: Synthetic oligonucleotide
  Antisense strand to SEQ ID NO: 636772
uuccaugcggaauacgugu

SEQ ID NO: 636774 - RNA, 19 nt, Artificial Sequence
  Description of Artificial Sequence: Synthetic oligonucleotide
  Sense strand starting at position 3736 of SEQ ID NO: 585398
uuguuuggaaaugguuaga

SEQ ID NO: 636775 - RNA, 19 nt, Artificial Sequence
  Description of Artificial Sequence: Synthetic oligonucleotide
  Antisense strand to SEQ ID NO: 636774
ucuaaccauuuccaaacaa

SEQ ID NO: 636776 - RNA, 19 nt, Artificial Sequence
  Description of Artificial Sequence: Synthetic oligonucleotide
  Sense strand starting at position 3856 of SEQ ID NO: 585398
uguuuaguaguugaaguaa

SEQ ID NO: 636777 - RNA, 19 nt, Artificial Sequence
  Description of Artificial Sequence: Synthetic oligonucleotide
  Antisense strand to SEQ ID NO: 636776
uuacuucaacuacuaaaca

SEQ ID NO: 636778 - RNA, 19 nt, Artificial Sequence
  Description of Artificial Sequence: Synthetic oligonucleotide
  Sense strand starting at position 3944 of SEQ ID NO: 585398
gguucuucuuaagcauaca

SEQ ID NO: 636779 - RNA, 19 nt, Artificial Sequence
  Description of Artificial Sequence: Synthetic oligonucleotide
  Antisense strand to SEQ ID NO: 636778
uguaugcuuaagaagaacc

SEQ ID NO: 636780 - RNA, 19 nt, Artificial Sequence
  Description of Artificial Sequence: Synthetic oligonucleotide
  Sense strand starting at position 175 of SEQ ID NO: 585399
gcuccagacugugagagaa

SEQ ID NO: 636781 - RNA, 19 nt, Artificial Sequence
  Description of Artificial Sequence: Synthetic oligonucleotide
  Antisense strand to SEQ ID NO: 636780
uucucucacagucuggagc

SEQ ID NO: 636782 - RNA, 19 nt, Artificial Sequence
  Description of Artificial Sequence: Synthetic oligonucleotide
  Sense strand starting at position 193 of SEQ ID NO: 585399
auaaauuucugucauugug

SEQ ID NO: 636783 - RNA, 19 nt, Artificial Sequence
  Description of Artificial Sequence: Synthetic oligonucleotide
  Antisense strand to SEQ ID NO: 636782
cacaaugacagaaauuuau

SEQ ID NO: 636784 - RNA, 19 nt, Artificial Sequence
  Description of Artificial Sequence: Synthetic oligonucleotide
  Sense strand starting at position 203 of SEQ ID NO: 585399
gucauugugagacacaguu

SEQ ID NO: 636785 - RNA, 19 nt, Artificial Sequence
  Description of Artificial Sequence: Synthetic oligonucleotide
  Antisense strand to SEQ ID NO: 636784
aacugugucucacaaugac

SEQ ID NO: 636786 - RNA, 19 nt, Artificial Sequence
  Description of Artificial Sequence: Synthetic oligonucleotide
  Sense strand starting at position 237 of SEQ ID NO: 585399
ugauaauccuaggaaucga

SEQ ID NO: 636787 - RNA, 19 nt, Artificial Sequence
  Description of Artificial Sequence: Synthetic oligonucleotide
  Antisense strand to SEQ ID NO: 636786
ucgauuccuaggauuauca

SEQ ID NO: 636788 - RNA, 19 nt, Artificial Sequence
  Description of Artificial Sequence: Synthetic oligonucleotide
  Sense strand starting at position 254 of SEQ ID NO: 585399
gaauacaaguaagaaguau

SEQ ID NO: 636789 - RNA, 19 nt, Artificial Sequence
  Description of Artificial Sequence: Synthetic oligonucleotide
  Antisense strand to SEQ ID NO: 636788
auacuucuuacuuguauuc

SEQ ID NO: 636790 - RNA, 19 nt, Artificial Sequence
  Description of Artificial Sequence: Synthetic oligonucleotide
  Sense strand starting at position 309 of SEQ ID NO: 585399
aucugcugcuuccugagaa

SEQ ID NO: 636791 - RNA, 19 nt, Artificial Sequence
  Description of Artificial Sequence: Synthetic oligonucleotide
  Antisense strand to SEQ ID NO: 636790
uucucaggaagcagcagau

SEQ ID NO: 636792 - RNA, 19 nt, Artificial Sequence
  Description of Artificial Sequence: Synthetic oligonucleotide
  Sense strand starting at position 617 of SEQ ID NO: 585399
acgucccucucauugugaa

SEQ ID NO: 636793 - RNA, 19 nt, Artificial Sequence
  Description of Artificial Sequence: Synthetic oligonucleotide
  Antisense strand to SEQ ID NO: 636792
uucacaaugagagggacgu

SEQ ID NO: 636794 - RNA, 19 nt, Artificial Sequence
  Description of Artificial Sequence: Synthetic oligonucleotide
  Sense strand starting at position 618 of SEQ ID NO: 585399
cgucccucucauugugaaa

SEQ ID NO: 636795 - RNA, 19 nt, Artificial Sequence
  Description of Artificial Sequence: Synthetic oligonucleotide
  Antisense strand to SEQ ID NO: 636794
uuucacaaugagagggacg

SEQ ID NO: 636796 - RNA, 19 nt, Artificial Sequence
  Description of Artificial Sequence: Synthetic oligonucleotide
  Sense strand starting at position 688 of SEQ ID NO: 585399
uguccaaucucccaagaug

SEQ ID NO: 636797 - RNA, 19 nt, Artificial Sequence
  Description of Artificial Sequence: Synthetic oligonucleotide
  Antisense strand to SEQ ID NO: 636796
caucuugggagauuggaca

SEQ ID NO: 636798 - RNA, 19 nt, Artificial Sequence
  Description of Artificial Sequence: Synthetic oligonucleotide
  Sense strand starting at position 867 of SEQ ID NO: 585399
ucaggagcaucugauauaa

SEQ ID NO: 636799 - RNA, 19 nt, Artificial Sequence
  Description of Artificial Sequence: Synthetic oligonucleotide
  Antisense strand to SEQ ID NO: 636798
uuauaucagaugcuccuga

SEQ ID NO: 636800 - RNA, 19 nt, Artificial Sequence
  Description of Artificial Sequence: Synthetic oligonucleotide
  Sense strand starting at position 869 of SEQ ID NO: 585399
aggagcaucugauauaauu

SEQ ID NO: 636801 - RNA, 19 nt, Artificial Sequence
  Description of Artificial Sequence: Synthetic oligonucleotide
  Antisense strand to SEQ ID NO: 636800
aauuauaucagaugcuccu

SEQ ID NO: 636802 - RNA, 19 nt, Artificial Sequence
  Description of Artificial Sequence: Synthetic oligonucleotide
  Sense strand starting at position 889 of SEQ ID NO: 585399
agugcuuccugauucuuga

SEQ ID NO: 636803 - RNA, 19 nt, Artificial Sequence
  Description of Artificial Sequence: Synthetic oligonucleotide
  Antisense strand to SEQ ID NO: 636802
ucaagaaucaggaagcacu

SEQ ID NO: 636804 - RNA, 19 nt, Artificial Sequence
  Description of Artificial Sequence: Synthetic oligonucleotide
  Sense strand starting at position 967 of SEQ ID NO: 585399
ggucauucugucugacacu

SEQ ID NO: 636805 - RNA, 19 nt, Artificial Sequence
  Description of Artificial Sequence: Synthetic oligonucleotide
  Antisense strand to SEQ ID NO: 636804
agugucagacagaaugacc

SEQ ID NO: 636806 - RNA, 19 nt, Artificial Sequence
  Description of Artificial Sequence: Synthetic oligonucleotide
  Sense strand starting at position 1385 of SEQ ID NO: 585399
ucaccaaguucuguuaguu

SEQ ID NO: 636807 - RNA, 19 nt, Artificial Sequence
  Description of Artificial Sequence: Synthetic oligonucleotide
  Antisense strand to SEQ ID NO: 636806
aacuaacagaacuugguga

SEQ ID NO: 636808 - RNA, 19 nt, Artificial Sequence
  Description of Artificial Sequence: Synthetic oligonucleotide
  Sense strand starting at position 1426 of SEQ ID NO: 585399
auccacuucugauauagga

SEQ ID NO: 636809 - RNA, 19 nt, Artificial Sequence
  Description of Artificial Sequence: Synthetic oligonucleotide
  Antisense strand to SEQ ID NO: 636808
uccuauaucagaaguggau

SEQ ID NO: 636810 - RNA, 19 nt, Artificial Sequence
  Description of Artificial Sequence: Synthetic oligonucleotide
  Sense strand starting at position 1620 of SEQ ID NO: 585399
acgcaagaagcugaauguu

SEQ ID NO: 636811 - RNA, 19 nt, Artificial Sequence
  Description of Artificial Sequence: Synthetic oligonucleotide
  Antisense strand to SEQ ID NO: 636810
aacauucagcuucuugcgu

SEQ ID NO: 636812 - RNA, 19 nt, Artificial Sequence
  Description of Artificial Sequence: Synthetic oligonucleotide
  Sense strand starting at position 1704 of SEQ ID NO: 585399
ggaagaggccucugaacgu

SEQ ID NO: 636813 - RNA, 19 nt, Artificial Sequence
  Description of Artificial Sequence: Synthetic oligonucleotide
  Antisense strand to SEQ ID NO: 636812
acguucagaggccucuucc

SEQ ID NO: 636814 - RNA, 19 nt, Artificial Sequence
  Description of Artificial Sequence: Synthetic oligonucleotide
  Sense strand starting at position 1994 of SEQ ID NO: 585399
cugaaagggcuuuguaaca

SEQ ID NO: 636815 - RNA, 19 nt, Artificial Sequence
  Description of Artificial Sequence: Synthetic oligonucleotide
  Antisense strand to SEQ ID NO: 636814
uguuacaaagcccuuucag

SEQ ID NO: 636816 - RNA, 19 nt, Artificial Sequence
  Description of Artificial Sequence: Synthetic oligonucleotide
  Sense strand starting at position 2250 of SEQ ID NO: 585399
aggacuagucuaggagcuu

SEQ ID NO: 636817 - RNA, 19 nt, Artificial Sequence
  Description of Artificial Sequence: Synthetic oligonucleotide
  Antisense strand to SEQ ID NO: 636816
aagcuccuagacuaguccu

SEQ ID NO: 636818 - RNA, 19 nt, Artificial Sequence
  Description of Artificial Sequence: Synthetic oligonucleotide
  Sense strand starting at position 2371 of SEQ ID NO: 585399
ugcaauucugauuguguca

SEQ ID NO: 636819 - RNA, 19 nt, Artificial Sequence
  Description of Artificial Sequence: Synthetic oligonucleotide
  Antisense strand to SEQ ID NO: 636818
ugacacaaucagaauugca

SEQ ID NO: 636820 - RNA, 19 nt, Artificial Sequence
  Description of Artificial Sequence: Synthetic oligonucleotide
  Sense strand starting at position 2555 of SEQ ID NO: 585399
agauacuucugguugucau

SEQ ID NO: 636821 - RNA, 19 nt, Artificial Sequence
  Description of Artificial Sequence: Synthetic oligonucleotide
  Antisense strand to SEQ ID NO: 636820
augacaaccagaaguaucu

SEQ ID NO: 636822 - RNA, 19 nt, Artificial Sequence
  Description of Artificial Sequence: Synthetic oligonucleotide
  Sense strand starting at position 2556 of SEQ ID NO: 585399
gauacuucugguugucaug

SEQ ID NO: 636823 - RNA, 19 nt, Artificial Sequence
  Description of Artificial Sequence: Synthetic oligonucleotide
  Antisense strand to SEQ ID NO: 636822
caugacaaccagaaguauc

SEQ ID NO: 636824 - RNA, 19 nt, Artificial Sequence
  Description of Artificial Sequence: Synthetic oligonucleotide
  Sense strand starting at position 2571 of SEQ ID NO: 585399
caugacuuagugggaggua

SEQ ID NO: 636825 - RNA, 19 nt, Artificial Sequence
  Description of Artificial Sequence: Synthetic oligonucleotide
  Antisense strand to SEQ ID NO: 636824
uaccucccacuaagucaug

SEQ ID NO: 636826 - RNA, 19 nt, Artificial Sequence
  Description of Artificial Sequence: Synthetic oligonucleotide
  Sense strand starting at position 3057 of SEQ ID NO: 585399
ggguaaggaacaugucuau

SEQ ID NO: 636827 - RNA, 19 nt, Artificial Sequence
  Description of Artificial Sequence: Synthetic oligonucleotide
  Antisense strand to SEQ ID NO: 636826
auagacauguuccuuaccc

SEQ ID NO: 636828 - RNA, 19 nt, Artificial Sequence
  Description of Artificial Sequence: Synthetic oligonucleotide
  Sense strand starting at position 3175 of SEQ ID NO: 585399
uauauuugcgcauauaggu

SEQ ID NO: 636829 - RNA, 19 nt, Artificial Sequence
  Description of Artificial Sequence: Synthetic oligonucleotide
  Antisense strand to SEQ ID NO: 636828
accuauaugcgcaaauaua

SEQ ID NO: 636830 - RNA, 19 nt, Artificial Sequence
  Description of Artificial Sequence: Synthetic oligonucleotide
  Sense strand starting at position 3185 of SEQ ID NO: 585399
cauauagguuucuuugagu

SEQ ID NO: 636831 - RNA, 19 nt, Artificial Sequence
  Description of Artificial Sequence: Synthetic oligonucleotide
  Antisense strand to SEQ ID NO: 636830
acucaaagaaaccuauaug

SEQ ID NO: 636832 - RNA, 19 nt, Artificial Sequence
  Description of Artificial Sequence: Synthetic oligonucleotide
  Sense strand starting at position 3202 of SEQ ID NO: 585399
gucuaugauuuguaaucuc

SEQ ID NO: 636833 - RNA, 19 nt, Artificial Sequence
  Description of Artificial Sequence: Synthetic oligonucleotide
  Antisense strand to SEQ ID NO: 636832
gagauuacaaaucauagac

SEQ ID NO: 636834 - RNA, 19 nt, Artificial Sequence
  Description of Artificial Sequence: Synthetic oligonucleotide
  Sense strand starting at position 3239 of SEQ ID NO: 585399
uuaacauaugccugugcuu

SEQ ID NO: 636835 - RNA, 19 nt, Artificial Sequence
  Description of Artificial Sequence: Synthetic oligonucleotide
  Antisense strand to SEQ ID NO: 636834
aagcacaggcauauguuaa

SEQ ID NO: 636836 - RNA, 19 nt, Artificial Sequence
  Description of Artificial Sequence: Synthetic oligonucleotide
  Sense strand starting at position 3298 of SEQ ID NO: 585399
agauucugaucucauguca

SEQ ID NO: 636837 - RNA, 19 nt, Artificial Sequence
  Description of Artificial Sequence: Synthetic oligonucleotide
  Antisense strand to SEQ ID NO: 636836
ugacaugagaucagaaucu

SEQ ID NO: 636838 - RNA, 19 nt, Artificial Sequence
  Description of Artificial Sequence: Synthetic oligonucleotide
  Sense strand starting at position 3348 of SEQ ID NO: 585399
ggauaaugcccagguggaa

SEQ ID NO: 636839 - RNA, 19 nt, Artificial Sequence
  Description of Artificial Sequence: Synthetic oligonucleotide
  Antisense strand to SEQ ID NO: 636838
uuccaccugggcauuaucc

SEQ ID NO: 636840 - RNA, 19 nt, Artificial Sequence
  Description of Artificial Sequence: Synthetic oligonucleotide
  Sense strand starting at position 3368 of SEQ ID NO: 585399
gugguucuuggaggacaaa

SEQ ID NO: 636841 - RNA, 19 nt, Artificial Sequence
  Description of Artificial Sequence: Synthetic oligonucleotide
  Antisense strand to SEQ ID NO: 636840
uuuguccuccaagaaccac

SEQ ID NO: 636842 - RNA, 19 nt, Artificial Sequence
  Description of Artificial Sequence: Synthetic oligonucleotide
  Sense strand starting at position 3447 of SEQ ID NO: 585399
auggcauaucucugguguu

SEQ ID NO: 636843 - RNA, 19 nt, Artificial Sequence
  Description of Artificial Sequence: Synthetic oligonucleotide
  Antisense strand to SEQ ID NO: 636842
aacaccagagauaugccau

SEQ ID NO: 636844 - RNA, 19 nt, Artificial Sequence
  Description of Artificial Sequence: Synthetic oligonucleotide
  Sense strand starting at position 3560 of SEQ ID NO: 585399
uggccuagauaucuaucau

SEQ ID NO: 636845 - RNA, 19 nt, Artificial Sequence
  Description of Artificial Sequence: Synthetic oligonucleotide
  Antisense strand to SEQ ID NO: 636844
augauagauaucuaggcca

SEQ ID NO: 636846 - RNA, 19 nt, Artificial Sequence
  Description of Artificial Sequence: Synthetic oligonucleotide
  Sense strand starting at position 3720 of SEQ ID NO: 585399
ucauguuguugugcaacua

SEQ ID NO: 636847 - RNA, 19 nt, Artificial Sequence
  Description of Artificial Sequence: Synthetic oligonucleotide
  Antisense strand to SEQ ID NO: 636846
uaguugcacaacaacauga

SEQ ID NO: 636848 - RNA, 19 nt, Artificial Sequence
  Description of Artificial Sequence: Synthetic oligonucleotide
  Sense strand starting at position 3721 of SEQ ID NO: 585399
cauguuguugugcaacuau

SEQ ID NO: 636849 - RNA, 19 nt, Artificial Sequence
  Description of Artificial Sequence: Synthetic oligonucleotide
  Antisense strand to SEQ ID NO: 636848
auaguugcacaacaacaug

SEQ ID NO: 636850 - RNA, 19 nt, Artificial Sequence
  Description of Artificial Sequence: Synthetic oligonucleotide
  Sense strand starting at position 3879 of SEQ ID NO: 585399
aggugucucauguaauguc

SEQ ID NO: 636851 - RNA, 19 nt, Artificial Sequence
  Description of Artificial Sequence: Synthetic oligonucleotide
  Antisense strand to SEQ ID NO: 636850
gacauuacaugagacaccu

SEQ ID NO: 636852 - RNA, 19 nt, Artificial Sequence
  Description of Artificial Sequence: Synthetic oligonucleotide
  Sense strand starting at position 3924 of SEQ ID NO: 585399
gcauaaucccaucgagauu

SEQ ID NO: 636853 - RNA, 19 nt, Artificial Sequence
  Description of Artificial Sequence: Synthetic oligonucleotide
  Antisense strand to SEQ ID NO: 636852
aaucucgaugggauuaugc

SEQ ID NO: 636854 - RNA, 19 nt, Artificial Sequence
  Description of Artificial Sequence: Synthetic oligonucleotide
  Sense strand starting at position 3962 of SEQ ID NO: 585399
gucagaauuuccuuccggu

SEQ ID NO: 636855 - RNA, 19 nt, Artificial Sequence
  Description of Artificial Sequence: Synthetic oligonucleotide
  Antisense strand to SEQ ID NO: 636854
accggaaggaaauucugac

SEQ ID NO: 636856 - RNA, 19 nt, Artificial Sequence
  Description of Artificial Sequence: Synthetic oligonucleotide
  Sense strand starting at position 3976 of SEQ ID NO: 585399
ccgguuucaggcugaauua

SEQ ID NO: 636857 - RNA, 19 nt, Artificial Sequence
  Description of Artificial Sequence: Synthetic oligonucleotide
  Antisense strand to SEQ ID NO: 636856
uaauucagccugaaaccgg

SEQ ID NO: 636858 - RNA, 19 nt, Artificial Sequence
  Description of Artificial Sequence: Synthetic oligonucleotide
  Sense strand starting at position 3977 of SEQ ID NO: 585399
cgguuucaggcugaauuau

SEQ ID NO: 636859 - RNA, 19 nt, Artificial Sequence
  Description of Artificial Sequence: Synthetic oligonucleotide
  Antisense strand to SEQ ID NO: 636858
auaauucagccugaaaccg

SEQ ID NO: 636860 - RNA, 19 nt, Artificial Sequence
  Description of Artificial Sequence: Synthetic oligonucleotide
  Sense strand starting at position 1561 of SEQ ID NO: 585400
gguccagaaccuugagaug

SEQ ID NO: 636861 - RNA, 19 nt, Artificial Sequence
  Description of Artificial Sequence: Synthetic oligonucleotide
  Antisense strand to SEQ ID NO: 636860
caucucaagguucuggacc

SEQ ID NO: 636862 - RNA, 19 nt, Artificial Sequence
  Description of Artificial Sequence: Synthetic oligonucleotide
  Sense strand starting at position 1572 of SEQ ID NO: 585400
uugagauggccuggaagau

SEQ ID NO: 636863 - RNA, 19 nt, Artificial Sequence
  Description of Artificial Sequence: Synthetic oligonucleotide
  Antisense strand to SEQ ID NO: 636862
aucuuccaggccaucucaa

SEQ ID NO: 636864 - RNA, 19 nt, Artificial Sequence
  Description of Artificial Sequence: Synthetic oligonucleotide
  Sense strand starting at position 1581 of SEQ ID NO: 585400
ccuggaagaugucaacagu

SEQ ID NO: 636865 - RNA, 19 nt, Artificial Sequence
  Description of Artificial Sequence: Synthetic oligonucleotide
  Antisense strand to SEQ ID NO: 636864
acuguugacaucuuccagg

SEQ ID NO: 636866 - RNA, 19 nt, Artificial Sequence
  Description of Artificial Sequence: Synthetic oligonucleotide
  Sense strand starting at position 1615 of SEQ ID NO: 585400
aggaauccgcaccaauuau

SEQ ID NO: 636867 - RNA, 19 nt, Artificial Sequence
  Description of Artificial Sequence: Synthetic oligonucleotide
  Antisense strand to SEQ ID NO: 636866
auaauuggugcggauuccu

SEQ ID NO: 636868 - RNA, 19 nt, Artificial Sequence
  Description of Artificial Sequence: Synthetic oligonucleotide
  Sense strand starting at position 1623 of SEQ ID NO: 585400
gcaccaauuaugggaguuu

SEQ ID NO: 636869 - RNA, 19 nt, Artificial Sequence
  Description of Artificial Sequence: Synthetic oligonucleotide
  Antisense strand to SEQ ID NO: 636868
aaacucccauaauuggugc

SEQ ID NO: 636870 - RNA, 19 nt, Artificial Sequence
  Description of Artificial Sequence: Synthetic oligonucleotide
  Sense strand starting at position 1624 of SEQ ID NO: 585400
caccaauuaugggaguuua

SEQ ID NO: 636871 - RNA, 19 nt, Artificial Sequence
  Description of Artificial Sequence: Synthetic oligonucleotide
  Antisense strand to SEQ ID NO: 636870
uaaacucccauaauuggug

SEQ ID NO: 636872 - RNA, 19 nt, Artificial Sequence
  Description of Artificial Sequence: Synthetic oligonucleotide
  Sense strand starting at position 2036 of SEQ ID NO: 585400
agguguaguuccucuauga

SEQ ID NO: 636873 - RNA, 19 nt, Artificial Sequence
  Description of Artificial Sequence: Synthetic oligonucleotide
  Antisense strand to SEQ ID NO: 636872
ucauagaggaacuacaccu

SEQ ID NO: 636874 - RNA, 19 nt, Artificial Sequence
  Description of Artificial Sequence: Synthetic oligonucleotide
  Sense strand starting at position 2075 of SEQ ID NO: 585400
uucuuauaucuuugguaga

SEQ ID NO: 636875 - RNA, 19 nt, Artificial Sequence
  Description of Artificial Sequence: Synthetic oligonucleotide
  Antisense strand to SEQ ID NO: 636874
ucuaccaaagauauaagaa

SEQ ID NO: 636876 - RNA, 19 nt, Artificial Sequence
  Description of Artificial Sequence: Synthetic oligonucleotide
  Sense strand starting at position 2077 of SEQ ID NO: 585400
cuuauaucuuugguagaga

SEQ ID NO: 636877 - RNA, 19 nt, Artificial Sequence
  Description of Artificial Sequence: Synthetic oligonucleotide
  Antisense strand to SEQ ID NO: 636876
ucucuaccaaagauauaag

SEQ ID NO: 636878 - RNA, 19 nt, Artificial Sequence
  Description of Artificial Sequence: Synthetic oligonucleotide
  Sense strand starting at position 2299 of SEQ ID NO: 585400
aaacuaaguugguagcaga

SEQ ID NO: 636879 - RNA, 19 nt, Artificial Sequence
  Description of Artificial Sequence: Synthetic oligonucleotide
  Antisense strand to SEQ ID NO: 636878
ucugcuaccaacuuaguuu

SEQ ID NO: 636880 - RNA, 19 nt, Artificial Sequence
  Description of Artificial Sequence: Synthetic oligonucleotide
  Sense strand starting at position 2335 of SEQ ID NO: 585400
agccgaauacucgaaagac

SEQ ID NO: 636881 - RNA, 19 nt, Artificial Sequence
  Description of Artificial Sequence: Synthetic oligonucleotide
  Antisense strand to SEQ ID NO: 636880
gucuuucgaguauucggcu

SEQ ID NO: 636882 - RNA, 19 nt, Artificial Sequence
  Description of Artificial Sequence: Synthetic oligonucleotide
  Sense strand starting at position 2345 of SEQ ID NO: 585400
ucgaaagacaggcauugua

SEQ ID NO: 636883 - RNA, 19 nt, Artificial Sequence
  Description of Artificial Sequence: Synthetic oligonucleotide
  Antisense strand to SEQ ID NO: 636882
uacaaugccugucuuucga

SEQ ID NO: 636884 - RNA, 19 nt, Artificial Sequence
  Description of Artificial Sequence: Synthetic oligonucleotide
  Sense strand starting at position 2363 of SEQ ID NO: 585400
acucaucagucauuccuga

SEQ ID NO: 636885 - RNA, 19 nt, Artificial Sequence
  Description of Artificial Sequence: Synthetic oligonucleotide
  Antisense strand to SEQ ID NO: 636884
ucaggaaugacugaugagu

SEQ ID NO: 636886 - RNA, 19 nt, Artificial Sequence
  Description of Artificial Sequence: Synthetic oligonucleotide
  Sense strand starting at position 2409 of SEQ ID NO: 585400
caaagaauugguugaaagc

SEQ ID NO: 636887 - RNA, 19 nt, Artificial Sequence
  Description of Artificial Sequence: Synthetic oligonucleotide
  Antisense strand to SEQ ID NO: 636886
gcuuucaaccaauucuuug

SEQ ID NO: 636888 - RNA, 19 nt, Artificial Sequence
  Description of Artificial Sequence: Synthetic oligonucleotide
  Sense strand starting at position 2426 of SEQ ID NO: 585400
gcuuuaugagcacacaguu

SEQ ID NO: 636889 - RNA, 19 nt, Artificial Sequence
  Description of Artificial Sequence: Synthetic oligonucleotide
  Antisense strand to SEQ ID NO: 636888
aacugugugcucauaaagc

SEQ ID NO: 636890 - RNA, 19 nt, Artificial Sequence
  Description of Artificial Sequence: Synthetic oligonucleotide
  Sense strand starting at position 2483 of SEQ ID NO: 585400
uguuccauucuugagcaau

SEQ ID NO: 636891 - RNA, 19 nt, Artificial Sequence
  Description of Artificial Sequence: Synthetic oligonucleotide
  Antisense strand to SEQ ID NO: 636890
auugcucaagaauggaaca

SEQ ID NO: 636892 - RNA, 19 nt, Artificial Sequence
  Description of Artificial Sequence: Synthetic oligonucleotide
  Sense strand starting at position 2672 of SEQ ID NO: 585400
cugagagaauuagagaguu

SEQ ID NO: 636893 - RNA, 19 nt, Artificial Sequence
  Description of Artificial Sequence: Synthetic oligonucleotide
  Antisense strand to SEQ ID NO: 636892
aacucucuaauucucucag

SEQ ID NO: 636894 - RNA, 19 nt, Artificial Sequence
  Description of Artificial Sequence: Synthetic oligonucleotide
  Sense strand starting at position 2701 of SEQ ID NO: 585400
ucagccaggucucuuugau

SEQ ID NO: 636895 - RNA, 19 nt, Artificial Sequence
  Description of Artificial Sequence: Synthetic oligonucleotide
  Antisense strand to SEQ ID NO: 636894
aucaaagagaccuggcuga

SEQ ID NO: 636896 - RNA, 19 nt, Artificial Sequence
  Description of Artificial Sequence: Synthetic oligonucleotide
  Sense strand starting at position 2705 of SEQ ID NO: 585400
ccaggucucuuugaucaca

SEQ ID NO: 636897 - RNA, 19 nt, Artificial Sequence
  Description of Artificial Sequence: Synthetic oligonucleotide
  Antisense strand to SEQ ID NO: 636896
ugugaucaaagagaccugg

SEQ ID NO: 636898 - RNA, 19 nt, Artificial Sequence
  Description of Artificial Sequence: Synthetic oligonucleotide
  Sense strand starting at position 2707 of SEQ ID NO: 585400
aggucucuuugaucacagu

SEQ ID NO: 636899 - RNA, 19 nt, Artificial Sequence
  Description of Artificial Sequence: Synthetic oligonucleotide
  Antisense strand to SEQ ID NO: 636898
acugugaucaaagagaccu

SEQ ID NO: 636900 - RNA, 19 nt, Artificial Sequence
  Description of Artificial Sequence: Synthetic oligonucleotide
  Sense strand starting at position 2726 of SEQ ID NO: 585400
gcaauaaagucacuagaaa

SEQ ID NO: 636901 - RNA, 19 nt, Artificial Sequence
  Description of Artificial Sequence: Synthetic oligonucleotide
  Antisense strand to SEQ ID NO: 636900
uuucuagugacuuuauugc

SEQ ID NO: 636902 - RNA, 19 nt, Artificial Sequence
  Description of Artificial Sequence: Synthetic oligonucleotide
  Sense strand starting at position 2864 of SEQ ID NO: 585400
agaccaaagucaguuggaa

SEQ ID NO: 636903 - RNA, 19 nt, Artificial Sequence
  Description of Artificial Sequence: Synthetic oligonucleotide
  Antisense strand to SEQ ID NO: 636902
uuccaacugacuuuggucu

SEQ ID NO: 636904 - RNA, 19 nt, Artificial Sequence
  Description of Artificial Sequence: Synthetic oligonucleotide
  Sense strand starting at position 2912 of SEQ ID NO: 585400
agaagagaugcauguuaaa

SEQ ID NO: 636905 - RNA, 19 nt, Artificial Sequence
  Description of Artificial Sequence: Synthetic oligonucleotide
  Antisense strand to SEQ ID NO: 636904
uuuaacaugcaucucuucu

SEQ ID NO: 636906 - RNA, 19 nt, Artificial Sequence
  Description of Artificial Sequence: Synthetic oligonucleotide
  Sense strand starting at position 2915 of SEQ ID NO: 585400
agagaugcauguuaaacuu

SEQ ID NO: 636907 - RNA, 19 nt, Artificial Sequence
  Description of Artificial Sequence: Synthetic oligonucleotide
  Antisense strand to SEQ ID NO: 636906
aaguuuaacaugcaucucu

SEQ ID NO: 636908 - RNA, 19 nt, Artificial Sequence
  Description of Artificial Sequence: Synthetic oligonucleotide
  Sense strand starting at position 3161 of SEQ ID NO: 585400
ggugaagagucaucccaga

SEQ ID NO: 636909 - RNA, 19 nt, Artificial Sequence
  Description of Artificial Sequence: Synthetic oligonucleotide
  Antisense strand to SEQ ID NO: 636908
ucugggaugacucuucacc

SEQ ID NO: 636910 - RNA, 19 nt, Artificial Sequence
  Description of Artificial Sequence: Synthetic oligonucleotide
  Sense strand starting at position 3221 of SEQ ID NO: 585400
aggcauuucuaaggacaaa

SEQ ID NO: 636911 - RNA, 19 nt, Artificial Sequence
  Description of Artificial Sequence: Synthetic oligonucleotide
  Antisense strand to SEQ ID NO: 636910
uuuguccuuagaaaugccu

SEQ ID NO: 636912 - RNA, 19 nt, Artificial Sequence
  Description of Artificial Sequence: Synthetic oligonucleotide
  Sense strand starting at position 3250 of SEQ ID NO: 585400
cugagagaauauccaaugu

SEQ ID NO: 636913 - RNA, 19 nt, Artificial Sequence
  Description of Artificial Sequence: Synthetic oligonucleotide
  Antisense strand to SEQ ID NO: 636912
acauuggauauucucucag

SEQ ID NO: 636914 - RNA, 19 nt, Artificial Sequence
  Description of Artificial Sequence: Synthetic oligonucleotide
  Sense strand starting at position 3302 of SEQ ID NO: 585400
augacuggaugcuuagaau

SEQ ID NO: 636915 - RNA, 19 nt, Artificial Sequence
  Description of Artificial Sequence: Synthetic oligonucleotide
  Antisense strand to SEQ ID NO: 636914
auucuaagcauccagucau

SEQ ID NO: 636916 - RNA, 19 nt, Artificial Sequence
  Description of Artificial Sequence: Synthetic oligonucleotide
  Sense strand starting at position 3305 of SEQ ID NO: 585400
acuggaugcuuagaauaag

SEQ ID NO: 636917 - RNA, 19 nt, Artificial Sequence
  Description of Artificial Sequence: Synthetic oligonucleotide
  Antisense strand to SEQ ID NO: 636916
cuuauucuaagcauccagu

SEQ ID NO: 636918 - RNA, 19 nt, Artificial Sequence
  Description of Artificial Sequence: Synthetic oligonucleotide
  Sense strand starting at position 3311 of SEQ ID NO: 585400
ugcuuagaauaaguaaaca

SEQ ID NO: 636919 - RNA, 19 nt, Artificial Sequence
  Description of Artificial Sequence: Synthetic oligonucleotide
  Antisense strand to SEQ ID NO: 636918
uguuuacuuauucuaagca

SEQ ID NO: 636920 - RNA, 19 nt, Artificial Sequence
  Description of Artificial Sequence: Synthetic oligonucleotide
  Sense strand starting at position 3499 of SEQ ID NO: 585400
aagggcuugguguguuuau

SEQ ID NO: 636921 - RNA, 19 nt, Artificial Sequence
  Description of Artificial Sequence: Synthetic oligonucleotide
  Antisense strand to SEQ ID NO: 636920
auaaacacaccaagcccuu

SEQ ID NO: 636922 - RNA, 19 nt, Artificial Sequence
  Description of Artificial Sequence: Synthetic oligonucleotide
  Sense strand starting at position 3509 of SEQ ID NO: 585400
uguguuuaucugugugucu

SEQ ID NO: 636923 - RNA, 19 nt, Artificial Sequence
  Description of Artificial Sequence: Synthetic oligonucleotide
  Antisense strand to SEQ ID NO: 636922
agacacacagauaaacaca

SEQ ID NO: 636924 - RNA, 19 nt, Artificial Sequence
  Description of Artificial Sequence: Synthetic oligonucleotide
  Sense strand starting at position 3511 of SEQ ID NO: 585400
uguuuaucugugugucugu

SEQ ID NO: 636925 - RNA, 19 nt, Artificial Sequence
  Description of Artificial Sequence: Synthetic oligonucleotide
  Antisense strand to SEQ ID NO: 636924
acagacacacagauaaaca

SEQ ID NO: 636926 - RNA, 19 nt, Artificial Sequence
  Description of Artificial Sequence: Synthetic oligonucleotide
  Sense strand starting at position 3581 of SEQ ID NO: 585400
uccauaggaugacaucaau

SEQ ID NO: 636927 - RNA, 19 nt, Artificial Sequence
  Description of Artificial Sequence: Synthetic oligonucleotide
  Antisense strand to SEQ ID NO: 636926
auugaugucauccuaugga

SEQ ID NO: 636928 - RNA, 19 nt, Artificial Sequence
  Description of Artificial Sequence: Synthetic oligonucleotide
  Sense strand starting at position 3706 of SEQ ID NO: 585400
guggcaggaugaguuagaa

SEQ ID NO: 636929 - RNA, 19 nt, Artificial Sequence
  Description of Artificial Sequence: Synthetic oligonucleotide
  Antisense strand to SEQ ID NO: 636928
uucuaacucauccugccac

SEQ ID NO: 636930 - RNA, 19 nt, Artificial Sequence
  Description of Artificial Sequence: Synthetic oligonucleotide
  Sense strand starting at position 3725 of SEQ ID NO: 585400
auggaaacgcacuguaaua

SEQ ID NO: 636931 - RNA, 19 nt, Artificial Sequence
  Description of Artificial Sequence: Synthetic oligonucleotide
  Antisense strand to SEQ ID NO: 636930
uauuacagugcguuuccau

SEQ ID NO: 636932 - RNA, 19 nt, Artificial Sequence
  Description of Artificial Sequence: Synthetic oligonucleotide
  Sense strand starting at position 3727 of SEQ ID NO: 585400
ggaaacgcacuguaauauu

SEQ ID NO: 636933 - RNA, 19 nt, Artificial Sequence
  Description of Artificial Sequence: Synthetic oligonucleotide
  Antisense strand to SEQ ID NO: 636932
aauauuacagugcguuucc

SEQ ID NO: 636934 - RNA, 19 nt, Artificial Sequence
  Description of Artificial Sequence: Synthetic oligonucleotide
  Sense strand starting at position 3743 of SEQ ID NO: 585400
auuugacccucagaagaca

SEQ ID NO: 636935 - RNA, 19 nt, Artificial Sequence
  Description of Artificial Sequence: Synthetic oligonucleotide
  Antisense strand to SEQ ID NO: 636934
ugucuucugagggucaaau

SEQ ID NO: 636936 - RNA, 19 nt, Artificial Sequence
  Description of Artificial Sequence: Synthetic oligonucleotide
  Sense strand starting at position 3926 of SEQ ID NO: 585400
agcgacacuuuccuaagaa

SEQ ID NO: 636937 - RNA, 19 nt, Artificial Sequence
  Description of Artificial Sequence: Synthetic oligonucleotide
  Antisense strand to SEQ ID NO: 636936
uucuuaggaaagugucgcu

SEQ ID NO: 636938 - RNA, 19 nt, Artificial Sequence
  Description of Artificial Sequence: Synthetic oligonucleotide
  Sense strand starting at position 3927 of SEQ ID NO: 585400
gcgacacuuuccuaagaac

SEQ ID NO: 636939 - RNA, 19 nt, Artificial Sequence
  Description of Artificial Sequence: Synthetic oligonucleotide
  Antisense strand to SEQ ID NO: 636938
guucuuaggaaagugucgc

SEQ ID NO: 636940 - RNA, 19 nt, Artificial Sequence
  Description of Artificial Sequence: Synthetic oligonucleotide
  Sense strand starting at position 333 of SEQ ID NO: 585401
ggugaauauaaggguuuag

SEQ ID NO: 636941 - RNA, 19 nt, Artificial Sequence
  Description of Artificial Sequence: Synthetic oligonucleotide
  Antisense strand to SEQ ID NO: 636940
cuaaacccuuauauucacc

SEQ ID NO: 636942 - RNA, 19 nt, Artificial Sequence
  Description of Artificial Sequence: Synthetic oligonucleotide
  Sense strand starting at position 506 of SEQ ID NO: 585401
cuaaguugugucuguagag

SEQ ID NO: 636943 - RNA, 19 nt, Artificial Sequence
  Description of Artificial Sequence: Synthetic oligonucleotide
  Antisense strand to SEQ ID NO: 636942
cucuacagacacaacuuag

SEQ ID NO: 636944 - RNA, 19 nt, Artificial Sequence
  Description of Artificial Sequence: Synthetic oligonucleotide
  Sense strand starting at position 507 of SEQ ID NO: 585401
uaaguugugucuguagaga

SEQ ID NO: 636945 - RNA, 19 nt, Artificial Sequence
  Description of Artificial Sequence: Synthetic oligonucleotide
  Antisense strand to SEQ ID NO: 636944
ucucuacagacacaacuua

SEQ ID NO: 636946 - RNA, 19 nt, Artificial Sequence
  Description of Artificial Sequence: Synthetic oligonucleotide
  Sense strand starting at position 522 of SEQ ID NO: 585401
gagaccuguccaugacucu

SEQ ID NO: 636947 - RNA, 19 nt, Artificial Sequence
  Description of Artificial Sequence: Synthetic oligonucleotide
  Antisense strand to SEQ ID NO: 636946
agagucauggacaggucuc

SEQ ID NO: 636948 - RNA, 19 nt, Artificial Sequence
  Description of Artificial Sequence: Synthetic oligonucleotide
  Sense strand starting at position 666 of SEQ ID NO: 585401
gagccaguggcucaggaau

SEQ ID NO: 636949 - RNA, 19 nt, Artificial Sequence
  Description of Artificial Sequence: Synthetic oligonucleotide
  Antisense strand to SEQ ID NO: 636948
auuccugagccacuggcuc

SEQ ID NO: 636950 - RNA, 19 nt, Artificial Sequence
  Description of Artificial Sequence: Synthetic oligonucleotide
  Sense strand starting at position 700 of SEQ ID NO: 585401
ggcugagggucuaagagua

SEQ ID NO: 636951 - RNA, 19 nt, Artificial Sequence
  Description of Artificial Sequence: Synthetic oligonucleotide
  Antisense strand to SEQ ID NO: 636950
uacucuuagacccucagcc

SEQ ID NO: 636952 - RNA, 19 nt, Artificial Sequence
  Description of Artificial Sequence: Synthetic oligonucleotide
  Sense strand starting at position 748 of SEQ ID NO: 585401
ugccuaucccugugaggau

SEQ ID NO: 636953 - RNA, 19 nt, Artificial Sequence
  Description of Artificial Sequence: Synthetic oligonucleotide
  Antisense strand to SEQ ID NO: 636952
auccucacagggauaggca

SEQ ID NO: 636954 - RNA, 19 nt, Artificial Sequence
  Description of Artificial Sequence: Synthetic oligonucleotide
  Sense strand starting at position 942 of SEQ ID NO: 585401
ccucuagaugggugugaga

SEQ ID NO: 636955 - RNA, 19 nt, Artificial Sequence
  Description of Artificial Sequence: Synthetic oligonucleotide
  Antisense strand to SEQ ID NO: 636954
ucucacacccaucuagagg

SEQ ID NO: 636956 - RNA, 19 nt, Artificial Sequence
  Description of Artificial Sequence: Synthetic oligonucleotide
  Sense strand starting at position 1990 of SEQ ID NO: 585401
ucucaauguuucccugagu

SEQ ID NO: 636957 - RNA, 19 nt, Artificial Sequence
  Description of Artificial Sequence: Synthetic oligonucleotide
  Antisense strand to SEQ ID NO: 636956
acucagggaaacauugaga

SEQ ID NO: 636958 - RNA, 19 nt, Artificial Sequence
  Description of Artificial Sequence: Synthetic oligonucleotide
  Sense strand starting at position 2190 of SEQ ID NO: 585401
gugagcuugcccugggaau

SEQ ID NO: 636959 - RNA, 19 nt, Artificial Sequence
  Description of Artificial Sequence: Synthetic oligonucleotide
  Antisense strand to SEQ ID NO: 636958
auucccagggcaagcucac

SEQ ID NO: 636960 - RNA, 19 nt, Artificial Sequence
  Description of Artificial Sequence: Synthetic oligonucleotide
  Sense strand starting at position 2335 of SEQ ID NO: 585401
agcagaaucuugguaacuc

SEQ ID NO: 636961 - RNA, 19 nt, Artificial Sequence
  Description of Artificial Sequence: Synthetic oligonucleotide
  Antisense strand to SEQ ID NO: 636960
gaguuaccaagauucugcu

SEQ ID NO: 636962 - RNA, 19 nt, Artificial Sequence
  Description of Artificial Sequence: Synthetic oligonucleotide
  Sense strand starting at position 2386 of SEQ ID NO: 585401
ugacuuuggucccuugaca

SEQ ID NO: 636963 - RNA, 19 nt, Artificial Sequence
  Description of Artificial Sequence: Synthetic oligonucleotide
  Antisense strand to SEQ ID NO: 636962
ugucaagggaccaaaguca

SEQ ID NO: 636964 - RNA, 19 nt, Artificial Sequence
  Description of Artificial Sequence: Synthetic oligonucleotide
  Sense strand starting at position 2560 of SEQ ID NO: 585401
caagguagccacuguguua

SEQ ID NO: 636965 - RNA, 19 nt, Artificial Sequence
  Description of Artificial Sequence: Synthetic oligonucleotide
  Antisense strand to SEQ ID NO: 636964
uaacacaguggcuaccuug

SEQ ID NO: 636966 - RNA, 19 nt, Artificial Sequence
  Description of Artificial Sequence: Synthetic oligonucleotide
  Sense strand starting at position 2563 of SEQ ID NO: 585401
gguagccacuguguuacua

SEQ ID NO: 636967 - RNA, 19 nt, Artificial Sequence
  Description of Artificial Sequence: Synthetic oligonucleotide
  Antisense strand to SEQ ID NO: 636966
uaguaacacaguggcuacc

SEQ ID NO: 636968 - RNA, 19 nt, Artificial Sequence
  Description of Artificial Sequence: Synthetic oligonucleotide
  Sense strand starting at position 2572 of SEQ ID NO: 585401
uguguuacuauauguugua

SEQ ID NO: 636969 - RNA, 19 nt, Artificial Sequence
  Description of Artificial Sequence: Synthetic oligonucleotide
  Antisense strand to SEQ ID NO: 636968
uacaacauauaguaacaca

SEQ ID NO: 636970 - RNA, 19 nt, Artificial Sequence
  Description of Artificial Sequence: Synthetic oligonucleotide
  Sense strand starting at position 2573 of SEQ ID NO: 585401
guguuacuauauguuguaa

SEQ ID NO: 636971 - RNA, 19 nt, Artificial Sequence
  Description of Artificial Sequence: Synthetic oligonucleotide
  Antisense strand to SEQ ID NO: 636970
uuacaacauauaguaacac

SEQ ID NO: 636972 - RNA, 19 nt, Artificial Sequence
  Description of Artificial Sequence: Synthetic oligonucleotide
  Sense strand starting at position 2818 of SEQ ID NO: 585401
ccugcaaggcucuguagau

SEQ ID NO: 636973 - RNA, 19 nt, Artificial Sequence
  Description of Artificial Sequence: Synthetic oligonucleotide
  Antisense strand to SEQ ID NO: 636972
aucuacagagccuugcagg

SEQ ID NO: 636974 - RNA, 19 nt, Artificial Sequence
  Description of Artificial Sequence: Synthetic oligonucleotide
  Sense strand starting at position 2819 of SEQ ID NO: 585401
cugcaaggcucuguagauu

SEQ ID NO: 636975 - RNA, 19 nt, Artificial Sequence
  Description of Artificial Sequence: Synthetic oligonucleotide
  Antisense strand to SEQ ID NO: 636974
aaucuacagagccuugcag

SEQ ID NO: 636976 - RNA, 19 nt, Artificial Sequence
  Description of Artificial Sequence: Synthetic oligonucleotide
  Sense strand starting at position 2822 of SEQ ID NO: 585401
caaggcucuguagauugau

SEQ ID NO: 636977 - RNA, 19 nt, Artificial Sequence
  Description of Artificial Sequence: Synthetic oligonucleotide
  Antisense strand to SEQ ID NO: 636976
aucaaucuacagagccuug

SEQ ID NO: 636978 - RNA, 19 nt, Artificial Sequence
  Description of Artificial Sequence: Synthetic oligonucleotide
  Sense strand starting at position 2862 of SEQ ID NO: 585401
uguguuuaaaccugaguuc

SEQ ID NO: 636979 - RNA, 19 nt, Artificial Sequence
  Description of Artificial Sequence: Synthetic oligonucleotide
  Antisense strand to SEQ ID NO: 636978
gaacucagguuuaaacaca

SEQ ID NO: 636980 - RNA, 19 nt, Artificial Sequence
  Description of Artificial Sequence: Synthetic oligonucleotide
  Sense strand starting at position 2863 of SEQ ID NO: 585401
guguuuaaaccugaguucu

SEQ ID NO: 636981 - RNA, 19 nt, Artificial Sequence
  Description of Artificial Sequence: Synthetic oligonucleotide
  Antisense strand to SEQ ID NO: 636980
agaacucagguuuaaacac

SEQ ID NO: 636982 - RNA, 19 nt, Artificial Sequence
  Description of Artificial Sequence: Synthetic oligonucleotide
  Sense strand starting at position 2874 of SEQ ID NO: 585401
ugaguucugcugcuuucga

SEQ ID NO: 636983 - RNA, 19 nt, Artificial Sequence
  Description of Artificial Sequence: Synthetic oligonucleotide
  Antisense strand to SEQ ID NO: 636982
ucgaaagcagcagaacuca

SEQ ID NO: 636984 - RNA, 19 nt, Artificial Sequence
  Description of Artificial Sequence: Synthetic oligonucleotide
  Sense strand starting at position 2876 of SEQ ID NO: 585401
aguucugcugcuuucgaau

SEQ ID NO: 636985 - RNA, 19 nt, Artificial Sequence
  Description of Artificial Sequence: Synthetic oligonucleotide
  Antisense strand to SEQ ID NO: 636984
auucgaaagcagcagaacu

SEQ ID NO: 636986 - RNA, 19 nt, Artificial Sequence
  Description of Artificial Sequence: Synthetic oligonucleotide
  Sense strand starting at position 2995 of SEQ ID NO: 585401
ugucacuccuuauuuguga

SEQ ID NO: 636987 - RNA, 19 nt, Artificial Sequence
  Description of Artificial Sequence: Synthetic oligonucleotide
  Antisense strand to SEQ ID NO: 636986
ucacaaauaaggagugaca

SEQ ID NO: 636988 - RNA, 19 nt, Artificial Sequence
  Description of Artificial Sequence: Synthetic oligonucleotide
  Sense strand starting at position 3000 of SEQ ID NO: 585401
cuccuuauuugugacacua

SEQ ID NO: 636989 - RNA, 19 nt, Artificial Sequence
  Description of Artificial Sequence: Synthetic oligonucleotide
  Antisense strand to SEQ ID NO: 636988
uagugucacaaauaaggag

SEQ ID NO: 636990 - RNA, 19 nt, Artificial Sequence
  Description of Artificial Sequence: Synthetic oligonucleotide
  Sense strand starting at position 3142 of SEQ ID NO: 585401
uggaaugucaggcacguaa

SEQ ID NO: 636991 - RNA, 19 nt, Artificial Sequence
  Description of Artificial Sequence: Synthetic oligonucleotide
  Antisense strand to SEQ ID NO: 636990
uuacgugccugacauucca

SEQ ID NO: 636992 - RNA, 19 nt, Artificial Sequence
  Description of Artificial Sequence: Synthetic oligonucleotide
  Sense strand starting at position 3178 of SEQ ID NO: 585401
ugguucauuguagggauua

SEQ ID NO: 636993 - RNA, 19 nt, Artificial Sequence
  Description of Artificial Sequence: Synthetic oligonucleotide
  Antisense strand to SEQ ID NO: 636992
uaaucccuacaaugaacca

SEQ ID NO: 636994 - RNA, 19 nt, Artificial Sequence
  Description of Artificial Sequence: Synthetic oligonucleotide
  Sense strand starting at position 3302 of SEQ ID NO: 585401
auguaauuagugugcauau

SEQ ID NO: 636995 - RNA, 19 nt, Artificial Sequence
  Description of Artificial Sequence: Synthetic oligonucleotide
  Antisense strand to SEQ ID NO: 636994
auaugcacacuaauuacau

SEQ ID NO: 636996 - RNA, 19 nt, Artificial Sequence
  Description of Artificial Sequence: Synthetic oligonucleotide
  Sense strand starting at position 3303 of SEQ ID NO: 585401
uguaauuagugugcauauc

SEQ ID NO: 636997 - RNA, 19 nt, Artificial Sequence
  Description of Artificial Sequence: Synthetic oligonucleotide
  Antisense strand to SEQ ID NO: 636996
gauaugcacacuaauuaca

SEQ ID NO: 636998 - RNA, 19 nt, Artificial Sequence
  Description of Artificial Sequence: Synthetic oligonucleotide
  Sense strand starting at position 3304 of SEQ ID NO: 585401
guaauuagugugcauauca

SEQ ID NO: 636999 - RNA, 19 nt, Artificial Sequence
  Description of Artificial Sequence: Synthetic oligonucleotide
  Antisense strand to SEQ ID NO: 636998
ugauaugcacacuaauuac

SEQ ID NO: 637000 - RNA, 19 nt, Artificial Sequence
  Description of Artificial Sequence: Synthetic oligonucleotide
  Sense strand starting at position 3378 of SEQ ID NO: 585401
gcuuauacuuccuugguca

SEQ ID NO: 637001 - RNA, 19 nt, Artificial Sequence
  Description of Artificial Sequence: Synthetic oligonucleotide
  Antisense strand to SEQ ID NO: 637000
ugaccaaggaaguauaagc

SEQ ID NO: 637002 - RNA, 19 nt, Artificial Sequence
  Description of Artificial Sequence: Synthetic oligonucleotide
  Sense strand starting at position 3380 of SEQ ID NO: 585401
uuauacuuccuuggucaga

SEQ ID NO: 637003 - RNA, 19 nt, Artificial Sequence
  Description of Artificial Sequence: Synthetic oligonucleotide
  Antisense strand to SEQ ID NO: 637002
ucugaccaaggaaguauaa

SEQ ID NO: 637004 - RNA, 19 nt, Artificial Sequence
  Description of Artificial Sequence: Synthetic oligonucleotide
  Sense strand starting at position 3382 of SEQ ID NO: 585401
auacuuccuuggucagaaa

SEQ ID NO: 637005 - RNA, 19 nt, Artificial Sequence
  Description of Artificial Sequence: Synthetic oligonucleotide
  Antisense strand to SEQ ID NO: 637004
uuucugaccaaggaaguau

SEQ ID NO: 637006 - RNA, 19 nt, Artificial Sequence
  Description of Artificial Sequence: Synthetic oligonucleotide
  Sense strand starting at position 3509 of SEQ ID NO: 585401
aguuguaagacugagguuu

SEQ ID NO: 637007 - RNA, 19 nt, Artificial Sequence
  Description of Artificial Sequence: Synthetic oligonucleotide
  Antisense strand to SEQ ID NO: 637006
aaaccucagucuuacaacu

SEQ ID NO: 637008 - RNA, 19 nt, Artificial Sequence
  Description of Artificial Sequence: Synthetic oligonucleotide
  Sense strand starting at position 3587 of SEQ ID NO: 585401
cuaacaguguucuuuccua

SEQ ID NO: 637009 - RNA, 19 nt, Artificial Sequence
  Description of Artificial Sequence: Synthetic oligonucleotide
  Antisense strand to SEQ ID NO: 637008
uaggaaagaacacuguuag

SEQ ID NO: 637010 - RNA, 19 nt, Artificial Sequence
  Description of Artificial Sequence: Synthetic oligonucleotide
  Sense strand starting at position 3671 of SEQ ID NO: 585401
gcaaaucucuaugcucaga

SEQ ID NO: 637011 - RNA, 19 nt, Artificial Sequence
  Description of Artificial Sequence: Synthetic oligonucleotide
  Antisense strand to SEQ ID NO: 637010
ucugagcauagagauuugc

SEQ ID NO: 637012 - RNA, 19 nt, Artificial Sequence
  Description of Artificial Sequence: Synthetic oligonucleotide
  Sense strand starting at position 3763 of SEQ ID NO: 585401
aauugaggcccuuaguuau

SEQ ID NO: 637013 - RNA, 19 nt, Artificial Sequence
  Description of Artificial Sequence: Synthetic oligonucleotide
  Antisense strand to SEQ ID NO: 637012
auaacuaagggccucaauu

SEQ ID NO: 637014 - RNA, 19 nt, Artificial Sequence
  Description of Artificial Sequence: Synthetic oligonucleotide
  Sense strand starting at position 3811 of SEQ ID NO: 585401
acacuagaguugcuugaau

SEQ ID NO: 637015 - RNA, 19 nt, Artificial Sequence
  Description of Artificial Sequence: Synthetic oligonucleotide
  Antisense strand to SEQ ID NO: 637014
auucaagcaacucuagugu

SEQ ID NO: 637016 - RNA, 19 nt, Artificial Sequence
  Description of Artificial Sequence: Synthetic oligonucleotide
  Sense strand starting at position 3813 of SEQ ID NO: 585401
acuagaguugcuugaauaa

SEQ ID NO: 637017 - RNA, 19 nt, Artificial Sequence
  Description of Artificial Sequence: Synthetic oligonucleotide
  Antisense strand to SEQ ID NO: 637016
uuauucaagcaacucuagu

SEQ ID NO: 637018 - RNA, 19 nt, Artificial Sequence
  Description of Artificial Sequence: Synthetic oligonucleotide
  Sense strand starting at position 3956 of SEQ ID NO: 585401
gaucauugugaaugguaau

SEQ ID NO: 637019 - RNA, 19 nt, Artificial Sequence
  Description of Artificial Sequence: Synthetic oligonucleotide
  Antisense strand to SEQ ID NO: 637018
auuaccauucacaaugauc

SEQ ID NO: 637020 - RNA, 19 nt, Artificial Sequence
  Description of Artificial Sequence: Synthetic oligonucleotide
  Sense strand starting at position 36 of SEQ ID NO: 585402
ucaauagaugcugggaagu

SEQ ID NO: 637021 - RNA, 19 nt, Artificial Sequence
  Description of Artificial Sequence: Synthetic oligonucleotide
  Antisense strand to SEQ ID NO: 637020
acuucccagcaucuauuga

SEQ ID NO: 637022 - RNA, 19 nt, Artificial Sequence
  Description of Artificial Sequence: Synthetic oligonucleotide
  Sense strand starting at position 209 of SEQ ID NO: 585402
agcucauauuugcugguaa

SEQ ID NO: 637023 - RNA, 19 nt, Artificial Sequence
  Description of Artificial Sequence: Synthetic oligonucleotide
  Antisense strand to SEQ ID NO: 637022
uuaccagcaaauaugagcu

SEQ ID NO: 637024 - RNA, 19 nt, Artificial Sequence
  Description of Artificial Sequence: Synthetic oligonucleotide
  Sense strand starting at position 211 of SEQ ID NO: 585402
cucauauuugcugguaacu

SEQ ID NO: 637025 - RNA, 19 nt, Artificial Sequence
  Description of Artificial Sequence: Synthetic oligonucleotide
  Antisense strand to SEQ ID NO: 637024
aguuaccagcaaauaugag

SEQ ID NO: 637026 - RNA, 19 nt, Artificial Sequence
  Description of Artificial Sequence: Synthetic oligonucleotide
  Sense strand starting at position 391 of SEQ ID NO: 585402
gcaagcuagguauaaaugu

SEQ ID NO: 637027 - RNA, 19 nt, Artificial Sequence
  Description of Artificial Sequence: Synthetic oligonucleotide
  Antisense strand to SEQ ID NO: 637026
acauuuauaccuagcuugc

SEQ ID NO: 637028 - RNA, 19 nt, Artificial Sequence
  Description of Artificial Sequence: Synthetic oligonucleotide
  Sense strand starting at position 430 of SEQ ID NO: 585402
ccaaacugugccgaaauga

SEQ ID NO: 637029 - RNA, 19 nt, Artificial Sequence
  Description of Artificial Sequence: Synthetic oligonucleotide
  Antisense strand to SEQ ID NO: 637028
ucauuucggcacaguuugg

SEQ ID NO: 637030 - RNA, 19 nt, Artificial Sequence
  Description of Artificial Sequence: Synthetic oligonucleotide
  Sense strand starting at position 897 of SEQ ID NO: 585402
guaguuguggcuuaaauaa

SEQ ID NO: 637031 - RNA, 19 nt, Artificial Sequence
  Description of Artificial Sequence: Synthetic oligonucleotide
  Antisense strand to SEQ ID NO: 637030
uuauuuaagccacaacuac

SEQ ID NO: 637032 - RNA, 19 nt, Artificial Sequence
  Description of Artificial Sequence: Synthetic oligonucleotide
  Sense strand starting at position 1265 of SEQ ID NO: 585402
ucaaucuuuccgcaaauga

SEQ ID NO: 637033 - RNA, 19 nt, Artificial Sequence
  Description of Artificial Sequence: Synthetic oligonucleotide
  Antisense strand to SEQ ID NO: 637032
ucauuugcggaaagauuga

SEQ ID NO: 637034 - RNA, 19 nt, Artificial Sequence
  Description of Artificial Sequence: Synthetic oligonucleotide
  Sense strand starting at position 1305 of SEQ ID NO: 585402
uuucguucucaugaaguaa

SEQ ID NO: 637035 - RNA, 19 nt, Artificial Sequence
  Description of Artificial Sequence: Synthetic oligonucleotide
  Antisense strand to SEQ ID NO: 637034
uuacuucaugagaacgaaa

SEQ ID NO: 637036 - RNA, 19 nt, Artificial Sequence
  Description of Artificial Sequence: Synthetic oligonucleotide
  Sense strand starting at position 1344 of SEQ ID NO: 585402
guggaaagagucuaucucu

SEQ ID NO: 637037 - RNA, 19 nt, Artificial Sequence
  Description of Artificial Sequence: Synthetic oligonucleotide
  Antisense strand to SEQ ID NO: 637036
agagauagacucuuuccac

SEQ ID NO: 637038 - RNA, 19 nt, Artificial Sequence
  Description of Artificial Sequence: Synthetic oligonucleotide
  Sense strand starting at position 1347 of SEQ ID NO: 585402
gaaagagucuaucucuagu

SEQ ID NO: 637039 - RNA, 19 nt, Artificial Sequence
  Description of Artificial Sequence: Synthetic oligonucleotide
  Antisense strand to SEQ ID NO: 637038
acuagagauagacucuuuc

SEQ ID NO: 637040 - RNA, 19 nt, Artificial Sequence
  Description of Artificial Sequence: Synthetic oligonucleotide
  Sense strand starting at position 1350 of SEQ ID NO: 585402
agagucuaucucuagugua

SEQ ID NO: 637041 - RNA, 19 nt, Artificial Sequence
  Description of Artificial Sequence: Synthetic oligonucleotide
  Antisense strand to SEQ ID NO: 637040
uacacuagagauagacucu

SEQ ID NO: 637042 - RNA, 19 nt, Artificial Sequence
  Description of Artificial Sequence: Synthetic oligonucleotide
  Sense strand starting at position 1365 of SEQ ID NO: 585402
uguagucacgucagugguu

SEQ ID NO: 637043 - RNA, 19 nt, Artificial Sequence
  Description of Artificial Sequence: Synthetic oligonucleotide
  Antisense strand to SEQ ID NO: 637042
aaccacugacgugacuaca

SEQ ID NO: 637044 - RNA, 19 nt, Artificial Sequence
  Description of Artificial Sequence: Synthetic oligonucleotide
  Sense strand starting at position 1599 of SEQ ID NO: 585402
gugaguggucugagguagu

SEQ ID NO: 637045 - RNA, 19 nt, Artificial Sequence
  Description of Artificial Sequence: Synthetic oligonucleotide
  Antisense strand to SEQ ID NO: 637044
acuaccucagaccacucac

SEQ ID NO: 637046 - RNA, 19 nt, Artificial Sequence
  Description of Artificial Sequence: Synthetic oligonucleotide
  Sense strand starting at position 1602 of SEQ ID NO: 585402
aguggucugagguaguuau

SEQ ID NO: 637047 - RNA, 19 nt, Artificial Sequence
  Description of Artificial Sequence: Synthetic oligonucleotide
  Antisense strand to SEQ ID NO: 637046
auaacuaccucagaccacu

SEQ ID NO: 637048 - RNA, 19 nt, Artificial Sequence
  Description of Artificial Sequence: Synthetic oligonucleotide
  Sense strand starting at position 1688 of SEQ ID NO: 585402
auauacauuugggacagau

SEQ ID NO: 637049 - RNA, 19 nt, Artificial Sequence
  Description of Artificial Sequence: Synthetic oligonucleotide
  Antisense strand to SEQ ID NO: 637048
aucugucccaaauguauau

SEQ ID NO: 637050 - RNA, 19 nt, Artificial Sequence
  Description of Artificial Sequence: Synthetic oligonucleotide
  Sense strand starting at position 1710 of SEQ ID NO: 585402
gggaguuucugagcaacac

SEQ ID NO: 637051 - RNA, 19 nt, Artificial Sequence
  Description of Artificial Sequence: Synthetic oligonucleotide
  Antisense strand to SEQ ID NO: 637050
guguugcucagaaacuccc

SEQ ID NO: 637052 - RNA, 19 nt, Artificial Sequence
  Description of Artificial Sequence: Synthetic oligonucleotide
  Sense strand starting at position 1711 of SEQ ID NO: 585402
ggaguuucugagcaacacu

SEQ ID NO: 637053 - RNA, 19 nt, Artificial Sequence
  Description of Artificial Sequence: Synthetic oligonucleotide
  Antisense strand to SEQ ID NO: 637052
aguguugcucagaaacucc

SEQ ID NO: 637054 - RNA, 19 nt, Artificial Sequence
  Description of Artificial Sequence: Synthetic oligonucleotide
  Sense strand starting at position 1760 of SEQ ID NO: 585402
acuugaauucgcuacuuug

SEQ ID NO: 637055 - RNA, 19 nt, Artificial Sequence
  Description of Artificial Sequence: Synthetic oligonucleotide
  Antisense strand to SEQ ID NO: 637054
caaaguagcgaauucaagu

SEQ ID NO: 637056 - RNA, 19 nt, Artificial Sequence
  Description of Artificial Sequence: Synthetic oligonucleotide
  Sense strand starting at position 1964 of SEQ ID NO: 585402
cugggcuuccuugagaaag

SEQ ID NO: 637057 - RNA, 19 nt, Artificial Sequence
  Description of Artificial Sequence: Synthetic oligonucleotide
  Antisense strand to SEQ ID NO: 637056
cuuucucaaggaagcccag

SEQ ID NO: 637058 - RNA, 19 nt, Artificial Sequence
  Description of Artificial Sequence: Synthetic oligonucleotide
  Sense strand starting at position 2157 of SEQ ID NO: 585402
gaguguaaacgucauauaa

SEQ ID NO: 637059 - RNA, 19 nt, Artificial Sequence
  Description of Artificial Sequence: Synthetic oligonucleotide
  Antisense strand to SEQ ID NO: 637058
uuauaugacguuuacacuc

SEQ ID NO: 637060 - RNA, 19 nt, Artificial Sequence
  Description of Artificial Sequence: Synthetic oligonucleotide
  Sense strand starting at position 2161 of SEQ ID NO: 585402
guaaacgucauauaagagu

SEQ ID NO: 637061 - RNA, 19 nt, Artificial Sequence
  Description of Artificial Sequence: Synthetic oligonucleotide
  Antisense strand to SEQ ID NO: 637060
acucuuauaugacguuuac

SEQ ID NO: 637062 - RNA, 19 nt, Artificial Sequence
  Description of Artificial Sequence: Synthetic oligonucleotide
  Sense strand starting at position 2172 of SEQ ID NO: 585402
auaagagucuauguuccaa

SEQ ID NO: 637063 - RNA, 19 nt, Artificial Sequence
  Description of Artificial Sequence: Synthetic oligonucleotide
  Antisense strand to SEQ ID NO: 637062
uuggaacauagacucuuau

SEQ ID NO: 637064 - RNA, 19 nt, Artificial Sequence
  Description of Artificial Sequence: Synthetic oligonucleotide
  Sense strand starting at position 2212 of SEQ ID NO: 585402
agcuuugucauggugcuuu

SEQ ID NO: 637065 - RNA, 19 nt, Artificial Sequence
  Description of Artificial Sequence: Synthetic oligonucleotide
  Antisense strand to SEQ ID NO: 637064
aaagcaccaugacaaagcu

SEQ ID NO: 637066 - RNA, 19 nt, Artificial Sequence
  Description of Artificial Sequence: Synthetic oligonucleotide
  Sense strand starting at position 2464 of SEQ ID NO: 585402
gagagcuacugauuaauga

SEQ ID NO: 637067 - RNA, 19 nt, Artificial Sequence
  Description of Artificial Sequence: Synthetic oligonucleotide
  Antisense strand to SEQ ID NO: 637066
ucauuaaucaguagcucuc

SEQ ID NO: 637068 - RNA, 19 nt, Artificial Sequence
  Description of Artificial Sequence: Synthetic oligonucleotide
  Sense strand starting at position 2474 of SEQ ID NO: 585402
gauuaaugagcaugagguu

SEQ ID NO: 637069 - RNA, 19 nt, Artificial Sequence
  Description of Artificial Sequence: Synthetic oligonucleotide
  Antisense strand to SEQ ID NO: 637068
aaccucaugcucauuaauc

SEQ ID NO: 637070 - RNA, 19 nt, Artificial Sequence
  Description of Artificial Sequence: Synthetic oligonucleotide
  Sense strand starting at position 2523 of SEQ ID NO: 585402
auaugaugaugguugcaca

SEQ ID NO: 637071 - RNA, 19 nt, Artificial Sequence
  Description of Artificial Sequence: Synthetic oligonucleotide
  Antisense strand to SEQ ID NO: 637070
ugugcaaccaucaucauau

SEQ ID NO: 637072 - RNA, 19 nt, Artificial Sequence
  Description of Artificial Sequence: Synthetic oligonucleotide
  Sense strand starting at position 2598 of SEQ ID NO: 585402
guaacucuuacgcugugua

SEQ ID NO: 637073 - RNA, 19 nt, Artificial Sequence
  Description of Artificial Sequence: Synthetic oligonucleotide
  Antisense strand to SEQ ID NO: 637072
uacacagcguaagaguuac

SEQ ID NO: 637074 - RNA, 19 nt, Artificial Sequence
  Description of Artificial Sequence: Synthetic oligonucleotide
  Sense strand starting at position 3080 of SEQ ID NO: 585402
gguugaaauuguccugauu

SEQ ID NO: 637075 - RNA, 19 nt, Artificial Sequence
  Description of Artificial Sequence: Synthetic oligonucleotide
  Antisense strand to SEQ ID NO: 637074
aaucaggacaauuucaacc

SEQ ID NO: 637076 - RNA, 19 nt, Artificial Sequence
  Description of Artificial Sequence: Synthetic oligonucleotide
  Sense strand starting at position 3134 of SEQ ID NO: 585402
gagugaagauucuccuggu

SEQ ID NO: 637077 - RNA, 19 nt, Artificial Sequence
  Description of Artificial Sequence: Synthetic oligonucleotide
  Antisense strand to SEQ ID NO: 637076
accaggagaaucuucacuc

SEQ ID NO: 637078 - RNA, 19 nt, Artificial Sequence
  Description of Artificial Sequence: Synthetic oligonucleotide
  Sense strand starting at position 3408 of SEQ ID NO: 585402
gcacuuagaucauugacuu

SEQ ID NO: 637079 - RNA, 19 nt, Artificial Sequence
  Description of Artificial Sequence: Synthetic oligonucleotide
  Antisense strand to SEQ ID NO: 637078
aagucaaugaucuaagugc

SEQ ID NO: 637080 - RNA, 19 nt, Artificial Sequence
  Description of Artificial Sequence: Synthetic oligonucleotide
  Sense strand starting at position 3539 of SEQ ID NO: 585402
ggaaguuucugacuaccaa

SEQ ID NO: 637081 - RNA, 19 nt, Artificial Sequence
  Description of Artificial Sequence: Synthetic oligonucleotide
  Antisense strand to SEQ ID NO: 637080
uugguagucagaaacuucc

SEQ ID NO: 637082 - RNA, 19 nt, Artificial Sequence
  Description of Artificial Sequence: Synthetic oligonucleotide
  Sense strand starting at position 3570 of SEQ ID NO: 585402
gggugcaucaccuggacua

SEQ ID NO: 637083 - RNA, 19 nt, Artificial Sequence
  Description of Artificial Sequence: Synthetic oligonucleotide
  Antisense strand to SEQ ID NO: 637082
uaguccaggugaugcaccc

SEQ ID NO: 637084 - RNA, 19 nt, Artificial Sequence
  Description of Artificial Sequence: Synthetic oligonucleotide
  Sense strand starting at position 3587 of SEQ ID NO: 585402
uacauaguugugugaggga

SEQ ID NO: 637085 - RNA, 19 nt, Artificial Sequence
  Description of Artificial Sequence: Synthetic oligonucleotide
  Antisense strand to SEQ ID NO: 637084
ucccucacacaacuaugua

SEQ ID NO: 637086 - RNA, 19 nt, Artificial Sequence
  Description of Artificial Sequence: Synthetic oligonucleotide
  Sense strand starting at position 3670 of SEQ ID NO: 585402
gcaaguugccaggaaaguu

SEQ ID NO: 637087 - RNA, 19 nt, Artificial Sequence
  Description of Artificial Sequence: Synthetic oligonucleotide
  Antisense strand to SEQ ID NO: 637086
aacuuuccuggcaacuugc

SEQ ID NO: 637088 - RNA, 19 nt, Artificial Sequence
  Description of Artificial Sequence: Synthetic oligonucleotide
  Sense strand starting at position 3724 of SEQ ID NO: 585402
ccgacauagagaugucauc

SEQ ID NO: 637089 - RNA, 19 nt, Artificial Sequence
  Description of Artificial Sequence: Synthetic oligonucleotide
  Antisense strand to SEQ ID NO: 637088
gaugacaucucuaugucgg

SEQ ID NO: 637090 - RNA, 19 nt, Artificial Sequence
  Description of Artificial Sequence: Synthetic oligonucleotide
  Sense strand starting at position 3831 of SEQ ID NO: 585402
gcaggaucaguccauugau

SEQ ID NO: 637091 - RNA, 19 nt, Artificial Sequence
  Description of Artificial Sequence: Synthetic oligonucleotide
  Antisense strand to SEQ ID NO: 637090
aucaauggacugauccugc

SEQ ID NO: 637092 - RNA, 19 nt, Artificial Sequence
  Description of Artificial Sequence: Synthetic oligonucleotide
  Sense strand starting at position 3834 of SEQ ID NO: 585402
ggaucaguccauugauugu

SEQ ID NO: 637093 - RNA, 19 nt, Artificial Sequence
  Description of Artificial Sequence: Synthetic oligonucleotide
  Antisense strand to SEQ ID NO: 637092
acaaucaauggacugaucc

SEQ ID NO: 637094 - RNA, 19 nt, Artificial Sequence
  Description of Artificial Sequence: Synthetic oligonucleotide
  Sense strand starting at position 3838 of SEQ ID NO: 585402
caguccauugauuguggau

SEQ ID NO: 637095 - RNA, 19 nt, Artificial Sequence
  Description of Artificial Sequence: Synthetic oligonucleotide
  Antisense strand to SEQ ID NO: 637094
auccacaaucaauggacug

SEQ ID NO: 637096 - RNA, 19 nt, Artificial Sequence
  Description of Artificial Sequence: Synthetic oligonucleotide
  Sense strand starting at position 3900 of SEQ ID NO: 585402
cucugcauuugauccaagu

SEQ ID NO: 637097 - RNA, 19 nt, Artificial Sequence
  Description of Artificial Sequence: Synthetic oligonucleotide
  Antisense strand to SEQ ID NO: 637096
acuuggaucaaaugcagag

SEQ ID NO: 637098 - RNA, 19 nt, Artificial Sequence
  Description of Artificial Sequence: Synthetic oligonucleotide
  Sense strand starting at position 3977 of SEQ ID NO: 585402
ggcugagaacgccaauuga

SEQ ID NO: 637099 - RNA, 19 nt, Artificial Sequence
  Description of Artificial Sequence: Synthetic oligonucleotide
  Antisense strand to SEQ ID NO: 637098
ucaauuggcguucucagcc

SEQ ID NO: 637100 - RNA, 19 nt, Artificial Sequence
  Description of Artificial Sequence: Synthetic oligonucleotide
  Sense strand starting at position 151 of SEQ ID NO: 585403
auauaaagcuccugccaga

SEQ ID NO: 637101 - RNA, 19 nt, Artificial Sequence
  Description of Artificial Sequence: Synthetic oligonucleotide
  Antisense strand to SEQ ID NO: 637100
ucuggcaggagcuuuauau

SEQ ID NO: 637102 - RNA, 19 nt, Artificial Sequence
  Description of Artificial Sequence: Synthetic oligonucleotide
  Sense strand starting at position 314 of SEQ ID NO: 585403
gcaguuuccucccuagcuu

SEQ ID NO: 637103 - RNA, 19 nt, Artificial Sequence
  Description of Artificial Sequence: Synthetic oligonucleotide
  Antisense strand to SEQ ID NO: 637102
aagcuagggaggaaacugc

SEQ ID NO: 637104 - RNA, 19 nt, Artificial Sequence
  Description of Artificial Sequence: Synthetic oligonucleotide
  Sense strand starting at position 353 of SEQ ID NO: 585403
gggucaaauuccugaagcu

SEQ ID NO: 637105 - RNA, 19 nt, Artificial Sequence
  Description of Artificial Sequence: Synthetic oligonucleotide
  Antisense strand to SEQ ID NO: 637104
agcuucaggaauuugaccc

SEQ ID NO: 637106 - RNA, 19 nt, Artificial Sequence
  Description of Artificial Sequence: Synthetic oligonucleotide
  Sense strand starting at position 354 of SEQ ID NO: 585403
ggucaaauuccugaagcuu

SEQ ID NO: 637107 - RNA, 19 nt, Artificial Sequence
  Description of Artificial Sequence: Synthetic oligonucleotide
  Antisense strand to SEQ ID NO: 637106
aagcuucaggaauuugacc

SEQ ID NO: 637108 - RNA, 19 nt, Artificial Sequence
  Description of Artificial Sequence: Synthetic oligonucleotide
  Sense strand starting at position 511 of SEQ ID NO: 585403
ggucaucaucuauagccau

SEQ ID NO: 637109 - RNA, 19 nt, Artificial Sequence
  Description of Artificial Sequence: Synthetic oligonucleotide
  Antisense strand to SEQ ID NO: 637108
auggcuauagaugaugacc

SEQ ID NO: 637110 - RNA, 19 nt, Artificial Sequence
  Description of Artificial Sequence: Synthetic oligonucleotide
  Sense strand starting at position 617 of SEQ ID NO: 585403
gggugcauuuggcaacagu

SEQ ID NO: 637111 - RNA, 19 nt, Artificial Sequence
  Description of Artificial Sequence: Synthetic oligonucleotide
  Antisense strand to SEQ ID NO: 637110
acuguugccaaaugcaccc

SEQ ID NO: 637112 - RNA, 19 nt, Artificial Sequence
  Description of Artificial Sequence: Synthetic oligonucleotide
  Sense strand starting at position 699 of SEQ ID NO: 585403
ggcucuaucucccuagaac

SEQ ID NO: 637113 - RNA, 19 nt, Artificial Sequence
  Description of Artificial Sequence: Synthetic oligonucleotide
  Antisense strand to SEQ ID NO: 637112
guucuagggagauagagcc

SEQ ID NO: 637114 - RNA, 19 nt, Artificial Sequence
  Description of Artificial Sequence: Synthetic oligonucleotide
  Sense strand starting at position 772 of SEQ ID NO: 585403
cucagaaggucugugcaaa

SEQ ID NO: 637115 - RNA, 19 nt, Artificial Sequence
  Description of Artificial Sequence: Synthetic oligonucleotide
  Antisense strand to SEQ ID NO: 637114
uuugcacagaccuucugag

SEQ ID NO: 637116 - RNA, 19 nt, Artificial Sequence
  Description of Artificial Sequence: Synthetic oligonucleotide
  Sense strand starting at position 773 of SEQ ID NO: 585403
ucagaaggucugugcaaag

SEQ ID NO: 637117 - RNA, 19 nt, Artificial Sequence
  Description of Artificial Sequence: Synthetic oligonucleotide
  Antisense strand to SEQ ID NO: 637116
cuuugcacagaccuucuga

SEQ ID NO: 637118 - RNA, 19 nt, Artificial Sequence
  Description of Artificial Sequence: Synthetic oligonucleotide
  Sense strand starting at position 1204 of SEQ ID NO: 585403
guggucuggcggcaaaguu

SEQ ID NO: 637119 - RNA, 19 nt, Artificial Sequence
  Description of Artificial Sequence: Synthetic oligonucleotide
  Antisense strand to SEQ ID NO: 637118
aacuuugccgccagaccac

SEQ ID NO: 637120 - RNA, 19 nt, Artificial Sequence
  Description of Artificial Sequence: Synthetic oligonucleotide
  Sense strand starting at position 1363 of SEQ ID NO: 585403
aaggaaaucucucgcgaua

SEQ ID NO: 637121 - RNA, 19 nt, Artificial Sequence
  Description of Artificial Sequence: Synthetic oligonucleotide
  Antisense strand to SEQ ID NO: 637120
uaucgcgagagauuuccuu

SEQ ID NO: 637122 - RNA, 19 nt, Artificial Sequence
  Description of Artificial Sequence: Synthetic oligonucleotide
  Sense strand starting at position 1365 of SEQ ID NO: 585403
ggaaaucucucgcgauaag

SEQ ID NO: 637123 - RNA, 19 nt, Artificial Sequence
  Description of Artificial Sequence: Synthetic oligonucleotide
  Antisense strand to SEQ ID NO: 637122
cuuaucgcgagagauuucc

SEQ ID NO: 637124 - RNA, 19 nt, Artificial Sequence
  Description of Artificial Sequence: Synthetic oligonucleotide
  Sense strand starting at position 1366 of SEQ ID NO: 585403
gaaaucucucgcgauaagg

SEQ ID NO: 637125 - RNA, 19 nt, Artificial Sequence
  Description of Artificial Sequence: Synthetic oligonucleotide
  Antisense strand to SEQ ID NO: 637124
ccuuaucgcgagagauuuc

SEQ ID NO: 637126 - RNA, 19 nt, Artificial Sequence
  Description of Artificial Sequence: Synthetic oligonucleotide
  Sense strand starting at position 1368 of SEQ ID NO: 585403
aaucucucgcgauaaggau

SEQ ID NO: 637127 - RNA, 19 nt, Artificial Sequence
  Description of Artificial Sequence: Synthetic oligonucleotide
  Antisense strand to SEQ ID NO: 637126
auccuuaucgcgagagauu

SEQ ID NO: 637128 - RNA, 19 nt, Artificial Sequence
  Description of Artificial Sequence: Synthetic oligonucleotide
  Sense strand starting at position 1797 of SEQ ID NO: 585403
guucucuucucuuccagau

SEQ ID NO: 637129 - RNA, 19 nt, Artificial Sequence
  Description of Artificial Sequence: Synthetic oligonucleotide
  Antisense strand to SEQ ID NO: 637128
aucuggaagagaagagaac

SEQ ID NO: 637130 - RNA, 19 nt, Artificial Sequence
  Description of Artificial Sequence: Synthetic oligonucleotide
  Sense strand starting at position 1848 of SEQ ID NO: 585403
ggaggaugccgguaggauu

SEQ ID NO: 637131 - RNA, 19 nt, Artificial Sequence
  Description of Artificial Sequence: Synthetic oligonucleotide
  Antisense strand to SEQ ID NO: 637130
aauccuaccggcauccucc

SEQ ID NO: 637132 - RNA, 19 nt, Artificial Sequence
  Description of Artificial Sequence: Synthetic oligonucleotide
  Sense strand starting at position 1949 of SEQ ID NO: 585403
ccggguuguguauguguga

SEQ ID NO: 637133 - RNA, 19 nt, Artificial Sequence
  Description of Artificial Sequence: Synthetic oligonucleotide
  Antisense strand to SEQ ID NO: 637132
ucacacauacacaacccgg

SEQ ID NO: 637134 - RNA, 19 nt, Artificial Sequence
  Description of Artificial Sequence: Synthetic oligonucleotide
  Sense strand starting at position 2746 of SEQ ID NO: 585403
cucgaauccugguaaggga

SEQ ID NO: 637135 - RNA, 19 nt, Artificial Sequence
  Description of Artificial Sequence: Synthetic oligonucleotide
  Antisense strand to SEQ ID NO: 637134
ucccuuaccaggauucgag

SEQ ID NO: 637136 - RNA, 19 nt, Artificial Sequence
  Description of Artificial Sequence: Synthetic oligonucleotide
  Sense strand starting at position 2891 of SEQ ID NO: 585403
guuugaucuucucagcaac

SEQ ID NO: 637137 - RNA, 19 nt, Artificial Sequence
  Description of Artificial Sequence: Synthetic oligonucleotide
  Antisense strand to SEQ ID NO: 637136
guugcugagaagaucaaac

SEQ ID NO: 637138 - RNA, 19 nt, Artificial Sequence
  Description of Artificial Sequence: Synthetic oligonucleotide
  Sense strand starting at position 2915 of SEQ ID NO: 585403
uuugauguauaaggaaacu

SEQ ID NO: 637139 - RNA, 19 nt, Artificial Sequence
  Description of Artificial Sequence: Synthetic oligonucleotide
  Antisense strand to SEQ ID NO: 637138
aguuuccuuauacaucaaa

SEQ ID NO: 637140 - RNA, 19 nt, Artificial Sequence
  Description of Artificial Sequence: Synthetic oligonucleotide
  Sense strand starting at position 2953 of SEQ ID NO: 585403
ugacuuguccaaggcaugu

SEQ ID NO: 637141 - RNA, 19 nt, Artificial Sequence
  Description of Artificial Sequence: Synthetic oligonucleotide
  Antisense strand to SEQ ID NO: 637140
acaugccuuggacaaguca

SEQ ID NO: 637142 - RNA, 19 nt, Artificial Sequence
  Description of Artificial Sequence: Synthetic oligonucleotide
  Sense strand starting at position 3038 of SEQ ID NO: 585403
aaggucucgucuuugguua

SEQ ID NO: 637143 - RNA, 19 nt, Artificial Sequence
  Description of Artificial Sequence: Synthetic oligonucleotide
  Antisense strand to SEQ ID NO: 637142
uaaccaaagacgagaccuu

SEQ ID NO: 637144 - RNA, 19 nt, Artificial Sequence
  Description of Artificial Sequence: Synthetic oligonucleotide
  Sense strand starting at position 3039 of SEQ ID NO: 585403
aggucucgucuuugguuau

SEQ ID NO: 637145 - RNA, 19 nt, Artificial Sequence
  Description of Artificial Sequence: Synthetic oligonucleotide
  Antisense strand to SEQ ID NO: 637144
auaaccaaagacgagaccu

SEQ ID NO: 637146 - RNA, 19 nt, Artificial Sequence
  Description of Artificial Sequence: Synthetic oligonucleotide
  Sense strand starting at position 3164 of SEQ ID NO: 585403
ugagauuccuguugguacu

SEQ ID NO: 637147 - RNA, 19 nt, Artificial Sequence
  Description of Artificial Sequence: Synthetic oligonucleotide
  Antisense strand to SEQ ID NO: 637146
aguaccaacaggaaucuca

SEQ ID NO: 637148 - RNA, 19 nt, Artificial Sequence
  Description of Artificial Sequence: Synthetic oligonucleotide
  Sense strand starting at position 3177 of SEQ ID NO: 585403
gguacuccagcugguaaau

SEQ ID NO: 637149 - RNA, 19 nt, Artificial Sequence
  Description of Artificial Sequence: Synthetic oligonucleotide
  Antisense strand to SEQ ID NO: 637148
auuuaccagcuggaguacc

SEQ ID NO: 637150 - RNA, 19 nt, Artificial Sequence
  Description of Artificial Sequence: Synthetic oligonucleotide
  Sense strand starting at position 3203 of SEQ ID NO: 585403
caggaagaaugucaauguu

SEQ ID NO: 637151 - RNA, 19 nt, Artificial Sequence
  Description of Artificial Sequence: Synthetic oligonucleotide
  Antisense strand to SEQ ID NO: 637150
aacauugacauucuuccug

SEQ ID NO: 637152 - RNA, 19 nt, Artificial Sequence
  Description of Artificial Sequence: Synthetic oligonucleotide
  Sense strand starting at position 3206 of SEQ ID NO: 585403
gaagaaugucaauguugca

SEQ ID NO: 637153 - RNA, 19 nt, Artificial Sequence
  Description of Artificial Sequence: Synthetic oligonucleotide
  Antisense strand to SEQ ID NO: 637152
ugcaacauugacauucuuc

SEQ ID NO: 637154 - RNA, 19 nt, Artificial Sequence
  Description of Artificial Sequence: Synthetic oligonucleotide
  Sense strand starting at position 3289 of SEQ ID NO: 585403
gcacauguugcauguggau

SEQ ID NO: 637155 - RNA, 19 nt, Artificial Sequence
  Description of Artificial Sequence: Synthetic oligonucleotide
  Antisense strand to SEQ ID NO: 637154
auccacaugcaacaugugc

SEQ ID NO: 637156 - RNA, 19 nt, Artificial Sequence
  Description of Artificial Sequence: Synthetic oligonucleotide
  Sense strand starting at position 3336 of SEQ ID NO: 585403
cuggauacaucuguaacau

SEQ ID NO: 637157 - RNA, 19 nt, Artificial Sequence
  Description of Artificial Sequence: Synthetic oligonucleotide
  Antisense strand to SEQ ID NO: 637156
auguuacagauguauccag

SEQ ID NO: 637158 - RNA, 19 nt, Artificial Sequence
  Description of Artificial Sequence: Synthetic oligonucleotide
  Sense strand starting at position 3463 of SEQ ID NO: 585403
ugcugcauauccuugaaga

SEQ ID NO: 637159 - RNA, 19 nt, Artificial Sequence
  Description of Artificial Sequence: Synthetic oligonucleotide
  Antisense strand to SEQ ID NO: 637158
ucuucaaggauaugcagca

SEQ ID NO: 637160 - RNA, 19 nt, Artificial Sequence
  Description of Artificial Sequence: Synthetic oligonucleotide
  Sense strand starting at position 3464 of SEQ ID NO: 585403
gcugcauauccuugaagac

SEQ ID NO: 637161 - RNA, 19 nt, Artificial Sequence
  Description of Artificial Sequence: Synthetic oligonucleotide
  Antisense strand to SEQ ID NO: 637160
gucuucaaggauaugcagc

SEQ ID NO: 637162 - RNA, 19 nt, Artificial Sequence
  Description of Artificial Sequence: Synthetic oligonucleotide
  Sense strand starting at position 3465 of SEQ ID NO: 585403
cugcauauccuugaagaca

SEQ ID NO: 637163 - RNA, 19 nt, Artificial Sequence
  Description of Artificial Sequence: Synthetic oligonucleotide
  Antisense strand to SEQ ID NO: 637162
ugucuucaaggauaugcag

SEQ ID NO: 637164 - RNA, 19 nt, Artificial Sequence
  Description of Artificial Sequence: Synthetic oligonucleotide
  Sense strand starting at position 3614 of SEQ ID NO: 585403
agggaagagucaugagaag

SEQ ID NO: 637165 - RNA, 19 nt, Artificial Sequence
  Description of Artificial Sequence: Synthetic oligonucleotide
  Antisense strand to SEQ ID NO: 637164
cuucucaugacucuucccu

SEQ ID NO: 637166 - RNA, 19 nt, Artificial Sequence
  Description of Artificial Sequence: Synthetic oligonucleotide
  Sense strand starting at position 3629 of SEQ ID NO: 585403
gaaggaaaguaaugaggaa

SEQ ID NO: 637167 - RNA, 19 nt, Artificial Sequence
  Description of Artificial Sequence: Synthetic oligonucleotide
  Antisense strand to SEQ ID NO: 637166
uuccucauuacuuuccuuc

SEQ ID NO: 637168 - RNA, 19 nt, Artificial Sequence
  Description of Artificial Sequence: Synthetic oligonucleotide
  Sense strand starting at position 3740 of SEQ ID NO: 585403
gggaaacugccuuacucuu

SEQ ID NO: 637169 - RNA, 19 nt, Artificial Sequence
  Description of Artificial Sequence: Synthetic oligonucleotide
  Antisense strand to SEQ ID NO: 637168
aagaguaaggcaguuuccc

SEQ ID NO: 637170 - RNA, 19 nt, Artificial Sequence
  Description of Artificial Sequence: Synthetic oligonucleotide
  Sense strand starting at position 3802 of SEQ ID NO: 585403
aagaaaggcuuaggaagaa

SEQ ID NO: 637171 - RNA, 19 nt, Artificial Sequence
  Description of Artificial Sequence: Synthetic oligonucleotide
  Antisense strand to SEQ ID NO: 637170
uucuuccuaagccuuucuu

SEQ ID NO: 637172 - RNA, 19 nt, Artificial Sequence
  Description of Artificial Sequence: Synthetic oligonucleotide
  Sense strand starting at position 3831 of SEQ ID NO: 585403
ggcucaagccuuugaauuc

SEQ ID NO: 637173 - RNA, 19 nt, Artificial Sequence
  Description of Artificial Sequence: Synthetic oligonucleotide
  Antisense strand to SEQ ID NO: 637172
gaauucaaaggcuugagcc

SEQ ID NO: 637174 - RNA, 19 nt, Artificial Sequence
  Description of Artificial Sequence: Synthetic oligonucleotide
  Sense strand starting at position 3832 of SEQ ID NO: 585403
gcucaagccuuugaauucu

SEQ ID NO: 637175 - RNA, 19 nt, Artificial Sequence
  Description of Artificial Sequence: Synthetic oligonucleotide
  Antisense strand to SEQ ID NO: 637174
agaauucaaaggcuugagc

SEQ ID NO: 637176 - RNA, 19 nt, Artificial Sequence
  Description of Artificial Sequence: Synthetic oligonucleotide
  Sense strand starting at position 3841 of SEQ ID NO: 585403
uuugaauucucccaagggu

SEQ ID NO: 637177 - RNA, 19 nt, Artificial Sequence
  Description of Artificial Sequence: Synthetic oligonucleotide
  Antisense strand to SEQ ID NO: 637176
acccuugggagaauucaaa

SEQ ID NO: 637178 - RNA, 19 nt, Artificial Sequence
  Description of Artificial Sequence: Synthetic oligonucleotide
  Sense strand starting at position 3893 of SEQ ID NO: 585403
cucagucacccaugagaca

SEQ ID NO: 637179 - RNA, 19 nt, Artificial Sequence
  Description of Artificial Sequence: Synthetic oligonucleotide
  Antisense strand to SEQ ID NO: 637178
ugucucaugggugacugag

SEQ ID NO: 637180 - RNA, 19 nt, Artificial Sequence
  Description of Artificial Sequence: Synthetic oligonucleotide
  Sense strand starting at position 12 of SEQ ID NO: 585404
agcaacagggcaugauuaa

SEQ ID NO: 637181 - RNA, 19 nt, Artificial Sequence
  Description of Artificial Sequence: Synthetic oligonucleotide
  Antisense strand to SEQ ID NO: 637180
uuaaucaugcccuguugcu

SEQ ID NO: 637182 - RNA, 19 nt, Artificial Sequence
  Description of Artificial Sequence: Synthetic oligonucleotide
  Sense strand starting at position 161 of SEQ ID NO: 585404
aagucaaaccgucgaauca

SEQ ID NO: 637183 - RNA, 19 nt, Artificial Sequence
  Description of Artificial Sequence: Synthetic oligonucleotide
  Antisense strand to SEQ ID NO: 637182
ugauucgacgguuugacuu

SEQ ID NO: 637184 - RNA, 19 nt, Artificial Sequence
  Description of Artificial Sequence: Synthetic oligonucleotide
  Sense strand starting at position 199 of SEQ ID NO: 585404
agaaacacgcuuuaaaguu

SEQ ID NO: 637185 - RNA, 19 nt, Artificial Sequence
  Description of Artificial Sequence: Synthetic oligonucleotide
  Antisense strand to SEQ ID NO: 637184
aacuuuaaagcguguuucu

SEQ ID NO: 637186 - RNA, 19 nt, Artificial Sequence
  Description of Artificial Sequence: Synthetic oligonucleotide
  Sense strand starting at position 683 of SEQ ID NO: 585404
cgagaagcccggcaucuaa

SEQ ID NO: 637187 - RNA, 19 nt, Artificial Sequence
  Description of Artificial Sequence: Synthetic oligonucleotide
  Antisense strand to SEQ ID NO: 637186
uuagaugccgggcuucucg

SEQ ID NO: 637188 - RNA, 19 nt, Artificial Sequence
  Description of Artificial Sequence: Synthetic oligonucleotide
  Sense strand starting at position 690 of SEQ ID NO: 585404
cccggcaucuaauuagauu

SEQ ID NO: 637189 - RNA, 19 nt, Artificial Sequence
  Description of Artificial Sequence: Synthetic oligonucleotide
  Antisense strand to SEQ ID NO: 637188
aaucuaauuagaugccggg

SEQ ID NO: 637190 - RNA, 19 nt, Artificial Sequence
  Description of Artificial Sequence: Synthetic oligonucleotide
  Sense strand starting at position 807 of SEQ ID NO: 585404
uuccacgaauccucucaga

SEQ ID NO: 637191 - RNA, 19 nt, Artificial Sequence
  Description of Artificial Sequence: Synthetic oligonucleotide
  Antisense strand to SEQ ID NO: 637190
ucugagaggauucguggaa

SEQ ID NO: 637192 - RNA, 19 nt, Artificial Sequence
  Description of Artificial Sequence: Synthetic oligonucleotide
  Sense strand starting at position 936 of SEQ ID NO: 585404
gccagaaacucuucugggu

SEQ ID NO: 637193 - RNA, 19 nt, Artificial Sequence
  Description of Artificial Sequence: Synthetic oligonucleotide
  Antisense strand to SEQ ID NO: 637192
acccagaagaguuucuggc

SEQ ID NO: 637194 - RNA, 19 nt, Artificial Sequence
  Description of Artificial Sequence: Synthetic oligonucleotide
  Sense strand starting at position 982 of SEQ ID NO: 585404
guguguuucgcuuccaacu

SEQ ID NO: 637195 - RNA, 19 nt, Artificial Sequence
  Description of Artificial Sequence: Synthetic oligonucleotide
  Antisense strand to SEQ ID NO: 637194
aguuggaagcgaaacacac

SEQ ID NO: 637196 - RNA, 19 nt, Artificial Sequence
  Description of Artificial Sequence: Synthetic oligonucleotide
  Sense strand starting at position 983 of SEQ ID NO: 585404
uguguuucgcuuccaacuu

SEQ ID NO: 637197 - RNA, 19 nt, Artificial Sequence
  Description of Artificial Sequence: Synthetic oligonucleotide
  Antisense strand to SEQ ID NO: 637196
aaguuggaagcgaaacaca

SEQ ID NO: 637198 - RNA, 19 nt, Artificial Sequence
  Description of Artificial Sequence: Synthetic oligonucleotide
  Sense strand starting at position 2348 of SEQ ID NO: 585404
gcgcgucaucaguccuuca

SEQ ID NO: 637199 - RNA, 19 nt, Artificial Sequence
  Description of Artificial Sequence: Synthetic oligonucleotide
  Antisense strand to SEQ ID NO: 637198
ugaaggacugaugacgcgc

SEQ ID NO: 637200 - RNA, 19 nt, Artificial Sequence
  Description of Artificial Sequence: Synthetic oligonucleotide
  Sense strand starting at position 2400 of SEQ ID NO: 585404
ccaagaugugcuuggguag

SEQ ID NO: 637201 - RNA, 19 nt, Artificial Sequence
  Description of Artificial Sequence: Synthetic oligonucleotide
  Antisense strand to SEQ ID NO: 637200
cuacccaagcacaucuugg

SEQ ID NO: 637202 - RNA, 19 nt, Artificial Sequence
  Description of Artificial Sequence: Synthetic oligonucleotide
  Sense strand starting at position 2757 of SEQ ID NO: 585404
aguaauacagccugugaca

SEQ ID NO: 637203 - RNA, 19 nt, Artificial Sequence
  Description of Artificial Sequence: Synthetic oligonucleotide
  Antisense strand to SEQ ID NO: 637202
ugucacaggcuguauuacu

SEQ ID NO: 637204 - RNA, 19 nt, Artificial Sequence
  Description of Artificial Sequence: Synthetic oligonucleotide
  Sense strand starting at position 2759 of SEQ ID NO: 585404
uaauacagccugugacaga

SEQ ID NO: 637205 - RNA, 19 nt, Artificial Sequence
  Description of Artificial Sequence: Synthetic oligonucleotide
  Antisense strand to SEQ ID NO: 637204
ucugucacaggcuguauua

SEQ ID NO: 637206 - RNA, 19 nt, Artificial Sequence
  Description of Artificial Sequence: Synthetic oligonucleotide
  Sense strand starting at position 2812 of SEQ ID NO: 585404
ggaguugugcuuuaaauga

SEQ ID NO: 637207 - RNA, 19 nt, Artificial Sequence
  Description of Artificial Sequence: Synthetic oligonucleotide
  Antisense strand to SEQ ID NO: 637206
ucauuuaaagcacaacucc

SEQ ID NO: 637208 - RNA, 19 nt, Artificial Sequence
  Description of Artificial Sequence: Synthetic oligonucleotide
  Sense strand starting at position 2880 of SEQ ID NO: 585404
ucuagacuucugugagcag

SEQ ID NO: 637209 - RNA, 19 nt, Artificial Sequence
  Description of Artificial Sequence: Synthetic oligonucleotide
  Antisense strand to SEQ ID NO: 637208
cugcucacagaagucuaga

SEQ ID NO: 637210 - RNA, 19 nt, Artificial Sequence
  Description of Artificial Sequence: Synthetic oligonucleotide
  Sense strand starting at position 2883 of SEQ ID NO: 585404
agacuucugugagcagcau

SEQ ID NO: 637211 - RNA, 19 nt, Artificial Sequence
  Description of Artificial Sequence: Synthetic oligonucleotide
  Antisense strand to SEQ ID NO: 637210
augcugcucacagaagucu

SEQ ID NO: 637212 - RNA, 19 nt, Artificial Sequence
  Description of Artificial Sequence: Synthetic oligonucleotide
  Sense strand starting at position 2921 of SEQ ID NO: 585404
gaaucaguuucuguugauu

SEQ ID NO: 637213 - RNA, 19 nt, Artificial Sequence
  Description of Artificial Sequence: Synthetic oligonucleotide
  Antisense strand to SEQ ID NO: 637212
aaucaacagaaacugauuc

SEQ ID NO: 637214 - RNA, 19 nt, Artificial Sequence
  Description of Artificial Sequence: Synthetic oligonucleotide
  Sense strand starting at position 2950 of SEQ ID NO: 585404
cugauuguggaucgcauuu

SEQ ID NO: 637215 - RNA, 19 nt, Artificial Sequence
  Description of Artificial Sequence: Synthetic oligonucleotide
  Antisense strand to SEQ ID NO: 637214
aaaugcgauccacaaucag

SEQ ID NO: 637216 - RNA, 19 nt, Artificial Sequence
  Description of Artificial Sequence: Synthetic oligonucleotide
  Sense strand starting at position 3028 of SEQ ID NO: 585404
cuguuaagugucuguauuu

SEQ ID NO: 637217 - RNA, 19 nt, Artificial Sequence
  Description of Artificial Sequence: Synthetic oligonucleotide
  Antisense strand to SEQ ID NO: 637216
aaauacagacacuuaacag

SEQ ID NO: 637218 - RNA, 19 nt, Artificial Sequence
  Description of Artificial Sequence: Synthetic oligonucleotide
  Sense strand starting at position 3091 of SEQ ID NO: 585404
cugcuauguguuuauuauc

SEQ ID NO: 637219 - RNA, 19 nt, Artificial Sequence
  Description of Artificial Sequence: Synthetic oligonucleotide
  Antisense strand to SEQ ID NO: 637218
gauaauaaacacauagcag

SEQ ID NO: 637220 - RNA, 19 nt, Artificial Sequence
  Description of Artificial Sequence: Synthetic oligonucleotide
  Sense strand starting at position 3097 of SEQ ID NO: 585404
uguguuuauuaucuccaga

SEQ ID NO: 637221 - RNA, 19 nt, Artificial Sequence
  Description of Artificial Sequence: Synthetic oligonucleotide
  Antisense strand to SEQ ID NO: 637220
ucuggagauaauaaacaca

SEQ ID NO: 637222 - RNA, 19 nt, Artificial Sequence
  Description of Artificial Sequence: Synthetic oligonucleotide
  Sense strand starting at position 3099 of SEQ ID NO: 585404
uguuuauuaucuccagagu

SEQ ID NO: 637223 - RNA, 19 nt, Artificial Sequence
  Description of Artificial Sequence: Synthetic oligonucleotide
  Antisense strand to SEQ ID NO: 637222
acucuggagauaauaaaca

SEQ ID NO: 637224 - RNA, 19 nt, Artificial Sequence
  Description of Artificial Sequence: Synthetic oligonucleotide
  Sense strand starting at position 3100 of SEQ ID NO: 585404
guuuauuaucuccagaguu

SEQ ID NO: 637225 - RNA, 19 nt, Artificial Sequence
  Description of Artificial Sequence: Synthetic oligonucleotide
  Antisense strand to SEQ ID NO: 637224
aacucuggagauaauaaac

SEQ ID NO: 637226 - RNA, 19 nt, Artificial Sequence
  Description of Artificial Sequence: Synthetic oligonucleotide
  Sense strand starting at position 3102 of SEQ ID NO: 585404
uuauuaucuccagaguuga

SEQ ID NO: 637227 - RNA, 19 nt, Artificial Sequence
  Description of Artificial Sequence: Synthetic oligonucleotide
  Antisense strand to SEQ ID NO: 637226
ucaacucuggagauaauaa

SEQ ID NO: 637228 - RNA, 19 nt, Artificial Sequence
  Description of Artificial Sequence: Synthetic oligonucleotide
  Sense strand starting at position 3289 of SEQ ID NO: 585404
auggccucuuagcucuaaa

SEQ ID NO: 637229 - RNA, 19 nt, Artificial Sequence
  Description of Artificial Sequence: Synthetic oligonucleotide
  Antisense strand to SEQ ID NO: 637228
uuuagagcuaagaggccau

SEQ ID NO: 637230 - RNA, 19 nt, Artificial Sequence
  Description of Artificial Sequence: Synthetic oligonucleotide
  Sense strand starting at position 3325 of SEQ ID NO: 585404
accacuucggccuggagau

SEQ ID NO: 637231 - RNA, 19 nt, Artificial Sequence
  Description of Artificial Sequence: Synthetic oligonucleotide
  Antisense strand to SEQ ID NO: 637230
aucuccaggccgaaguggu

SEQ ID NO: 637232 - RNA, 19 nt, Artificial Sequence
  Description of Artificial Sequence: Synthetic oligonucleotide
  Sense strand starting at position 3326 of SEQ ID NO: 585404
ccacuucggccuggagauu

SEQ ID NO: 637233 - RNA, 19 nt, Artificial Sequence
  Description of Artificial Sequence: Synthetic oligonucleotide
  Antisense strand to SEQ ID NO: 637232
aaucuccaggccgaagugg

SEQ ID NO: 637234 - RNA, 19 nt, Artificial Sequence
  Description of Artificial Sequence: Synthetic oligonucleotide
  Sense strand starting at position 3335 of SEQ ID NO: 585404
ccuggagauucuuccucau

SEQ ID NO: 637235 - RNA, 19 nt, Artificial Sequence
  Description of Artificial Sequence: Synthetic oligonucleotide
  Antisense strand to SEQ ID NO: 637234
augaggaagaaucuccagg

SEQ ID NO: 637236 - RNA, 19 nt, Artificial Sequence
  Description of Artificial Sequence: Synthetic oligonucleotide
  Sense strand starting at position 3337 of SEQ ID NO: 585404
uggagauucuuccucauau

SEQ ID NO: 637237 - RNA, 19 nt, Artificial Sequence
  Description of Artificial Sequence: Synthetic oligonucleotide
  Antisense strand to SEQ ID NO: 637236
auaugaggaagaaucucca

SEQ ID NO: 637238 - RNA, 19 nt, Artificial Sequence
  Description of Artificial Sequence: Synthetic oligonucleotide
  Sense strand starting at position 3338 of SEQ ID NO: 585404
ggagauucuuccucauaug

SEQ ID NO: 637239 - RNA, 19 nt, Artificial Sequence
  Description of Artificial Sequence: Synthetic oligonucleotide
  Antisense strand to SEQ ID NO: 637238
cauaugaggaagaaucucc

SEQ ID NO: 637240 - RNA, 19 nt, Artificial Sequence
  Description of Artificial Sequence: Synthetic oligonucleotide
  Sense strand starting at position 3384 of SEQ ID NO: 585404
auuguaagaugaccuugaa

SEQ ID NO: 637241 - RNA, 19 nt, Artificial Sequence
  Description of Artificial Sequence: Synthetic oligonucleotide
  Antisense strand to SEQ ID NO: 637240
uucaaggucaucuuacaau

SEQ ID NO: 637242 - RNA, 19 nt, Artificial Sequence
  Description of Artificial Sequence: Synthetic oligonucleotide
  Sense strand starting at position 3387 of SEQ ID NO: 585404
guaagaugaccuugaagca

SEQ ID NO: 637243 - RNA, 19 nt, Artificial Sequence
  Description of Artificial Sequence: Synthetic oligonucleotide
  Antisense strand to SEQ ID NO: 637242
ugcuucaaggucaucuuac

SEQ ID NO: 637244 - RNA, 19 nt, Artificial Sequence
  Description of Artificial Sequence: Synthetic oligonucleotide
  Sense strand starting at position 3455 of SEQ ID NO: 585404
gagcuugagcaggauuguu

SEQ ID NO: 637245 - RNA, 19 nt, Artificial Sequence
  Description of Artificial Sequence: Synthetic oligonucleotide
  Antisense strand to SEQ ID NO: 637244
aacaauccugcucaagcuc

SEQ ID NO: 637246 - RNA, 19 nt, Artificial Sequence
  Description of Artificial Sequence: Synthetic oligonucleotide
  Sense strand starting at position 3533 of SEQ ID NO: 585404
aaggacuaguuguuauaua

SEQ ID NO: 637247 - RNA, 19 nt, Artificial Sequence
  Description of Artificial Sequence: Synthetic oligonucleotide
  Antisense strand to SEQ ID NO: 637246
uauauaacaacuaguccuu

SEQ ID NO: 637248 - RNA, 19 nt, Artificial Sequence
  Description of Artificial Sequence: Synthetic oligonucleotide
  Sense strand starting at position 3684 of SEQ ID NO: 585404
ugccuuugggaccgugaaa

SEQ ID NO: 637249 - RNA, 19 nt, Artificial Sequence
  Description of Artificial Sequence: Synthetic oligonucleotide
  Antisense strand to SEQ ID NO: 637248
uuucacggucccaaaggca

SEQ ID NO: 637250 - RNA, 19 nt, Artificial Sequence
  Description of Artificial Sequence: Synthetic oligonucleotide
  Sense strand starting at position 3715 of SEQ ID NO: 585404
uagagugagcccuagcuca

SEQ ID NO: 637251 - RNA, 19 nt, Artificial Sequence
  Description of Artificial Sequence: Synthetic oligonucleotide
  Antisense strand to SEQ ID NO: 637250
ugagcuagggcucacucua

SEQ ID NO: 637252 - RNA, 19 nt, Artificial Sequence
  Description of Artificial Sequence: Synthetic oligonucleotide
  Sense strand starting at position 3883 of SEQ ID NO: 585404
guguuuaccgugagcagug

SEQ ID NO: 637253 - RNA, 19 nt, Artificial Sequence
  Description of Artificial Sequence: Synthetic oligonucleotide
  Antisense strand to SEQ ID NO: 637252
cacugcucacgguaaacac

SEQ ID NO: 637254 - RNA, 19 nt, Artificial Sequence
  Description of Artificial Sequence: Synthetic oligonucleotide
  Sense strand starting at position 3901 of SEQ ID NO: 585404
gguuauuucugggcuguga

SEQ ID NO: 637255 - RNA, 19 nt, Artificial Sequence
  Description of Artificial Sequence: Synthetic oligonucleotide
  Antisense strand to SEQ ID NO: 637254
ucacagcccagaaauaacc

SEQ ID NO: 637256 - RNA, 19 nt, Artificial Sequence
  Description of Artificial Sequence: Synthetic oligonucleotide
  Sense strand starting at position 3903 of SEQ ID NO: 585404
uuauuucugggcugugagu

SEQ ID NO: 637257 - RNA, 19 nt, Artificial Sequence
  Description of Artificial Sequence: Synthetic oligonucleotide
  Antisense strand to SEQ ID NO: 637256
acucacagcccagaaauaa

SEQ ID NO: 637258 - RNA, 19 nt, Artificial Sequence
  Description of Artificial Sequence: Synthetic oligonucleotide
  Sense strand starting at position 3916 of SEQ ID NO: 585404
gugaguugcaaguacugaa

SEQ ID NO: 637259 - RNA, 19 nt, Artificial Sequence
  Description of Artificial Sequence: Synthetic oligonucleotide
  Antisense strand to SEQ ID NO: 637258
uucaguacuugcaacucac

SEQ ID NO: 637260 - RNA, 19 nt, Artificial Sequence
  Description of Artificial Sequence: Synthetic oligonucleotide
  Sense strand starting at position 47 of SEQ ID NO: 585405
uucuauauuccuggugaua

SEQ ID NO: 637261 - RNA, 19 nt, Artificial Sequence
  Description of Artificial Sequence: Synthetic oligonucleotide
  Antisense strand to SEQ ID NO: 637260
uaucaccaggaauauagaa

SEQ ID NO: 637262 - RNA, 19 nt, Artificial Sequence
  Description of Artificial Sequence: Synthetic oligonucleotide
  Sense strand starting at position 58 of SEQ ID NO: 585405
uggugauaucacugccuaa

SEQ ID NO: 637263 - RNA, 19 nt, Artificial Sequence
  Description of Artificial Sequence: Synthetic oligonucleotide
  Antisense strand to SEQ ID NO: 637262
uuaggcagugauaucacca

SEQ ID NO: 637264 - RNA, 19 nt, Artificial Sequence
  Description of Artificial Sequence: Synthetic oligonucleotide
  Sense strand starting at position 178 of SEQ ID NO: 585405
auaauaaacgccugaggga

SEQ ID NO: 637265 - RNA, 19 nt, Artificial Sequence
  Description of Artificial Sequence: Synthetic oligonucleotide
  Antisense strand to SEQ ID NO: 637264
ucccucaggcguuuauuau

SEQ ID NO: 637266 - RNA, 19 nt, Artificial Sequence
  Description of Artificial Sequence: Synthetic oligonucleotide
  Sense strand starting at position 238 of SEQ ID NO: 585405
gggcuuugcaaagguccua

SEQ ID NO: 637267 - RNA, 19 nt, Artificial Sequence
  Description of Artificial Sequence: Synthetic oligonucleotide
  Antisense strand to SEQ ID NO: 637266
uaggaccuuugcaaagccc

SEQ ID NO: 637268 - RNA, 19 nt, Artificial Sequence
  Description of Artificial Sequence: Synthetic oligonucleotide
  Sense strand starting at position 250 of SEQ ID NO: 585405
gguccuagugaggauaauc

SEQ ID NO: 637269 - RNA, 19 nt, Artificial Sequence
  Description of Artificial Sequence: Synthetic oligonucleotide
  Antisense strand to SEQ ID NO: 637268
gauuauccucacuaggacc

SEQ ID NO: 637270 - RNA, 19 nt, Artificial Sequence
  Description of Artificial Sequence: Synthetic oligonucleotide
  Sense strand starting at position 261 of SEQ ID NO: 585405
ggauaaucuccaugauuac

SEQ ID NO: 637271 - RNA, 19 nt, Artificial Sequence
  Description of Artificial Sequence: Synthetic oligonucleotide
  Antisense strand to SEQ ID NO: 637270
guaaucauggagauuaucc

SEQ ID NO: 637272 - RNA, 19 nt, Artificial Sequence
  Description of Artificial Sequence: Synthetic oligonucleotide
  Sense strand starting at position 388 of SEQ ID NO: 585405
cuccaucagcgcuggagaa

SEQ ID NO: 637273 - RNA, 19 nt, Artificial Sequence
  Description of Artificial Sequence: Synthetic oligonucleotide
  Antisense strand to SEQ ID NO: 637272
uucuccagcgcugauggag

SEQ ID NO: 637274 - RNA, 19 nt, Artificial Sequence
  Description of Artificial Sequence: Synthetic oligonucleotide
  Sense strand starting at position 405 of SEQ ID NO: 585405
aacguaucaggucauucua

SEQ ID NO: 637275 - RNA, 19 nt, Artificial Sequence
  Description of Artificial Sequence: Synthetic oligonucleotide
  Antisense strand to SEQ ID NO: 637274
uagaaugaccugauacguu

SEQ ID NO: 637276 - RNA, 19 nt, Artificial Sequence
  Description of Artificial Sequence: Synthetic oligonucleotide
  Sense strand starting at position 428 of SEQ ID NO: 585405
gucagaacacuugacuagu

SEQ ID NO: 637277 - RNA, 19 nt, Artificial Sequence
  Description of Artificial Sequence: Synthetic oligonucleotide
  Antisense strand to SEQ ID NO: 637276
acuagucaaguguucugac

SEQ ID NO: 637278 - RNA, 19 nt, Artificial Sequence
  Description of Artificial Sequence: Synthetic oligonucleotide
  Sense strand starting at position 439 of SEQ ID NO: 585405
ugacuaguguuucugugac

SEQ ID NO: 637279 - RNA, 19 nt, Artificial Sequence
  Description of Artificial Sequence: Synthetic oligonucleotide
  Antisense strand to SEQ ID NO: 637278
gucacagaaacacuaguca

SEQ ID NO: 637280 - RNA, 19 nt, Artificial Sequence
  Description of Artificial Sequence: Synthetic oligonucleotide
  Sense strand starting at position 441 of SEQ ID NO: 585405
acuaguguuucugugacaa

SEQ ID NO: 637281 - RNA, 19 nt, Artificial Sequence
  Description of Artificial Sequence: Synthetic oligonucleotide
  Antisense strand to SEQ ID NO: 637280
uugucacagaaacacuagu

SEQ ID NO: 637282 - RNA, 19 nt, Artificial Sequence
  Description of Artificial Sequence: Synthetic oligonucleotide
  Sense strand starting at position 458 of SEQ ID NO: 585405
aaugauuuggcuuguguua

SEQ ID NO: 637283 - RNA, 19 nt, Artificial Sequence
  Description of Artificial Sequence: Synthetic oligonucleotide
  Antisense strand to SEQ ID NO: 637282
uaacacaagccaaaucauu

SEQ ID NO: 637284 - RNA, 19 nt, Artificial Sequence
  Description of Artificial Sequence: Synthetic oligonucleotide
  Sense strand starting at position 629 of SEQ ID NO: 585405
ggguuacucuagcuaaguu

SEQ ID NO: 637285 - RNA, 19 nt, Artificial Sequence
  Description of Artificial Sequence: Synthetic oligonucleotide
  Antisense strand to SEQ ID NO: 637284
aacuuagcuagaguaaccc

SEQ ID NO: 637286 - RNA, 19 nt, Artificial Sequence
  Description of Artificial Sequence: Synthetic oligonucleotide
  Sense strand starting at position 639 of SEQ ID NO: 585405
agcuaaguucccgaggcaa

SEQ ID NO: 637287 - RNA, 19 nt, Artificial Sequence
  Description of Artificial Sequence: Synthetic oligonucleotide
  Antisense strand to SEQ ID NO: 637286
uugccucgggaacuuagcu

SEQ ID NO: 637288 - RNA, 19 nt, Artificial Sequence
  Description of Artificial Sequence: Synthetic oligonucleotide
  Sense strand starting at position 650 of SEQ ID NO: 585405
cgaggcaagcuugaaagaa

SEQ ID NO: 637289 - RNA, 19 nt, Artificial Sequence
  Description of Artificial Sequence: Synthetic oligonucleotide
  Antisense strand to SEQ ID NO: 637288
uucuuucaagcuugccucg

SEQ ID NO: 637290 - RNA, 19 nt, Artificial Sequence
  Description of Artificial Sequence: Synthetic oligonucleotide
  Sense strand starting at position 660 of SEQ ID NO: 585405
uugaaagaaguucgcugua

SEQ ID NO: 637291 - RNA, 19 nt, Artificial Sequence
  Description of Artificial Sequence: Synthetic oligonucleotide
  Antisense strand to SEQ ID NO: 637290
uacagcgaacuucuuucaa

SEQ ID NO: 637292 - RNA, 19 nt, Artificial Sequence
  Description of Artificial Sequence: Synthetic oligonucleotide
  Sense strand starting at position 729 of SEQ ID NO: 585405
gcggcaauggagugaucaa

SEQ ID NO: 637293 - RNA, 19 nt, Artificial Sequence
  Description of Artificial Sequence: Synthetic oligonucleotide
  Antisense strand to SEQ ID NO: 637292
uugaucacuccauugccgc

SEQ ID NO: 637294 - RNA, 19 nt, Artificial Sequence
  Description of Artificial Sequence: Synthetic oligonucleotide
  Sense strand starting at position 730 of SEQ ID NO: 585405
cggcaauggagugaucaau

SEQ ID NO: 637295 - RNA, 19 nt, Artificial Sequence
  Description of Artificial Sequence: Synthetic oligonucleotide
  Antisense strand to SEQ ID NO: 637294
auugaucacuccauugccg

SEQ ID NO: 637296 - RNA, 19 nt, Artificial Sequence
  Description of Artificial Sequence: Synthetic oligonucleotide
  Sense strand starting at position 1117 of SEQ ID NO: 585405
cgggacaugccuugacuaa

SEQ ID NO: 637297 - RNA, 19 nt, Artificial Sequence
  Description of Artificial Sequence: Synthetic oligonucleotide
  Antisense strand to SEQ ID NO: 637296
uuagucaaggcaugucccg

SEQ ID NO: 637298 - RNA, 19 nt, Artificial Sequence
  Description of Artificial Sequence: Synthetic oligonucleotide
  Sense strand starting at position 1207 of SEQ ID NO: 585405
guagcuuccagauggaaac

SEQ ID NO: 637299 - RNA, 19 nt, Artificial Sequence
  Description of Artificial Sequence: Synthetic oligonucleotide
  Antisense strand to SEQ ID NO: 637298
guuuccaucuggaagcuac

SEQ ID NO: 637300 - RNA, 19 nt, Artificial Sequence
  Description of Artificial Sequence: Synthetic oligonucleotide
  Sense strand starting at position 1288 of SEQ ID NO: 585405
ggaucuaaguuacuuaaca

SEQ ID NO: 637301 - RNA, 19 nt, Artificial Sequence
  Description of Artificial Sequence: Synthetic oligonucleotide
  Antisense strand to SEQ ID NO: 637300
uguuaaguaacuuagaucc

SEQ ID NO: 637302 - RNA, 19 nt, Artificial Sequence
  Description of Artificial Sequence: Synthetic oligonucleotide
  Sense strand starting at position 1309 of SEQ ID NO: 585405
ccagaacgcuucuccaaua

SEQ ID NO: 637303 - RNA, 19 nt, Artificial Sequence
  Description of Artificial Sequence: Synthetic oligonucleotide
  Antisense strand to SEQ ID NO: 637302
uauuggagaagcguucugg

SEQ ID NO: 637304 - RNA, 19 nt, Artificial Sequence
  Description of Artificial Sequence: Synthetic oligonucleotide
  Sense strand starting at position 2151 of SEQ ID NO: 585405
ugcuuacuccggcaaagac

SEQ ID NO: 637305 - RNA, 19 nt, Artificial Sequence
  Description of Artificial Sequence: Synthetic oligonucleotide
  Antisense strand to SEQ ID NO: 637304
gucuuugccggaguaagca

SEQ ID NO: 637306 - RNA, 19 nt, Artificial Sequence
  Description of Artificial Sequence: Synthetic oligonucleotide
  Sense strand starting at position 2255 of SEQ ID NO: 585405
gcagaacaacuuugauauu

SEQ ID NO: 637307 - RNA, 19 nt, Artificial Sequence
  Description of Artificial Sequence: Synthetic oligonucleotide
  Antisense strand to SEQ ID NO: 637306
aauaucaaaguuguucugc

SEQ ID NO: 637308 - RNA, 19 nt, Artificial Sequence
  Description of Artificial Sequence: Synthetic oligonucleotide
  Sense strand starting at position 2545 of SEQ ID NO: 585405
ggagcacaucucuggugau

SEQ ID NO: 637309 - RNA, 19 nt, Artificial Sequence
  Description of Artificial Sequence: Synthetic oligonucleotide
  Antisense strand to SEQ ID NO: 637308
aucaccagagaugugcucc

SEQ ID NO: 637310 - RNA, 19 nt, Artificial Sequence
  Description of Artificial Sequence: Synthetic oligonucleotide
  Sense strand starting at position 2555 of SEQ ID NO: 585405
ucuggugaucaugguuuau

SEQ ID NO: 637311 - RNA, 19 nt, Artificial Sequence
  Description of Artificial Sequence: Synthetic oligonucleotide
  Antisense strand to SEQ ID NO: 637310
auaaaccaugaucaccaga

SEQ ID NO: 637312 - RNA, 19 nt, Artificial Sequence
  Description of Artificial Sequence: Synthetic oligonucleotide
  Sense strand starting at position 2567 of SEQ ID NO: 585405
gguuuaugcagugagugau

SEQ ID NO: 637313 - RNA, 19 nt, Artificial Sequence
  Description of Artificial Sequence: Synthetic oligonucleotide
  Antisense strand to SEQ ID NO: 637312
aucacucacugcauaaacc

SEQ ID NO: 637314 - RNA, 19 nt, Artificial Sequence
  Description of Artificial Sequence: Synthetic oligonucleotide
  Sense strand starting at position 2570 of SEQ ID NO: 585405
uuaugcagugagugauagu

SEQ ID NO: 637315 - RNA, 19 nt, Artificial Sequence
  Description of Artificial Sequence: Synthetic oligonucleotide
  Antisense strand to SEQ ID NO: 637314
acuaucacucacugcauaa

SEQ ID NO: 637316 - RNA, 19 nt, Artificial Sequence
  Description of Artificial Sequence: Synthetic oligonucleotide
  Sense strand starting at position 2571 of SEQ ID NO: 585405
uaugcagugagugauagua

SEQ ID NO: 637317 - RNA, 19 nt, Artificial Sequence
  Description of Artificial Sequence: Synthetic oligonucleotide
  Antisense strand to SEQ ID NO: 637316
uacuaucacucacugcaua

SEQ ID NO: 637318 - RNA, 19 nt, Artificial Sequence
  Description of Artificial Sequence: Synthetic oligonucleotide
  Sense strand starting at position 2614 of SEQ ID NO: 585405
ggcauaggagucugagagu

SEQ ID NO: 637319 - RNA, 19 nt, Artificial Sequence
  Description of Artificial Sequence: Synthetic oligonucleotide
  Antisense strand to SEQ ID NO: 637318
acucucagacuccuaugcc

SEQ ID NO: 637320 - RNA, 19 nt, Artificial Sequence
  Description of Artificial Sequence: Synthetic oligonucleotide
  Sense strand starting at position 2623 of SEQ ID NO: 585405
gucugagagucugcgagau

SEQ ID NO: 637321 - RNA, 19 nt, Artificial Sequence
  Description of Artificial Sequence: Synthetic oligonucleotide
  Antisense strand to SEQ ID NO: 637320
aucucgcagacucucagac

SEQ ID NO: 637322 - RNA, 19 nt, Artificial Sequence
  Description of Artificial Sequence: Synthetic oligonucleotide
  Sense strand starting at position 2881 of SEQ ID NO: 585405
gcucacuauuggguuauaa

SEQ ID NO: 637323 - RNA, 19 nt, Artificial Sequence
  Description of Artificial Sequence: Synthetic oligonucleotide
  Antisense strand to SEQ ID NO: 637322
uuauaacccaauagugagc

SEQ ID NO: 637324 - RNA, 19 nt, Artificial Sequence
  Description of Artificial Sequence: Synthetic oligonucleotide
  Sense strand starting at position 2918 of SEQ ID NO: 585405
gacucauuccugcggacca

SEQ ID NO: 637325 - RNA, 19 nt, Artificial Sequence
  Description of Artificial Sequence: Synthetic oligonucleotide
  Antisense strand to SEQ ID NO: 637324
ugguccgcaggaaugaguc

SEQ ID NO: 637326 - RNA, 19 nt, Artificial Sequence
  Description of Artificial Sequence: Synthetic oligonucleotide
  Sense strand starting at position 3021 of SEQ ID NO: 585405
aaugaaggguugcuaaagu

SEQ ID NO: 637327 - RNA, 19 nt, Artificial Sequence
  Description of Artificial Sequence: Synthetic oligonucleotide
  Antisense strand to SEQ ID NO: 637326
acuuuagcaacccuucauu

SEQ ID NO: 637328 - RNA, 19 nt, Artificial Sequence
  Description of Artificial Sequence: Synthetic oligonucleotide
  Sense strand starting at position 3031 of SEQ ID NO: 585405
ugcuaaagucaaggucaau

SEQ ID NO: 637329 - RNA, 19 nt, Artificial Sequence
  Description of Artificial Sequence: Synthetic oligonucleotide
  Antisense strand to SEQ ID NO: 637328
auugaccuugacuuuagca

SEQ ID NO: 637330 - RNA, 19 nt, Artificial Sequence
  Description of Artificial Sequence: Synthetic oligonucleotide
  Sense strand starting at position 3277 of SEQ ID NO: 585405
aggcaaaguuuggucggaa

SEQ ID NO: 637331 - RNA, 19 nt, Artificial Sequence
  Description of Artificial Sequence: Synthetic oligonucleotide
  Antisense strand to SEQ ID NO: 637330
uuccgaccaaacuuugccu

SEQ ID NO: 637332 - RNA, 19 nt, Artificial Sequence
  Description of Artificial Sequence: Synthetic oligonucleotide
  Sense strand starting at position 3278 of SEQ ID NO: 585405
ggcaaaguuuggucggaaa

SEQ ID NO: 637333 - RNA, 19 nt, Artificial Sequence
  Description of Artificial Sequence: Synthetic oligonucleotide
  Antisense strand to SEQ ID NO: 637332
uuuccgaccaaacuuugcc

SEQ ID NO: 637334 - RNA, 19 nt, Artificial Sequence
  Description of Artificial Sequence: Synthetic oligonucleotide
  Sense strand starting at position 3280 of SEQ ID NO: 585405
caaaguuuggucggaaacu

SEQ ID NO: 637335 - RNA, 19 nt, Artificial Sequence
  Description of Artificial Sequence: Synthetic oligonucleotide
  Antisense strand to SEQ ID NO: 637334
aguuuccgaccaaacuuug

SEQ ID NO: 637336 - RNA, 19 nt, Artificial Sequence
  Description of Artificial Sequence: Synthetic oligonucleotide
  Sense strand starting at position 3779 of SEQ ID NO: 585405
uaaugugauuuccagaggu

SEQ ID NO: 637337 - RNA, 19 nt, Artificial Sequence
  Description of Artificial Sequence: Synthetic oligonucleotide
  Antisense strand to SEQ ID NO: 637336
accucuggaaaucacauua

SEQ ID NO: 637338 - RNA, 19 nt, Artificial Sequence
  Description of Artificial Sequence: Synthetic oligonucleotide
  Sense strand starting at position 3932 of SEQ ID NO: 585405
guaucaccuuaauccgaaa

SEQ ID NO: 637339 - RNA, 19 nt, Artificial Sequence
  Description of Artificial Sequence: Synthetic oligonucleotide
  Antisense strand to SEQ ID NO: 637338
uuucggauuaaggugauac

SEQ ID NO: 637340 - RNA, 19 nt, Artificial Sequence
  Description of Artificial Sequence: Synthetic oligonucleotide
  Sense strand starting at position 228 of SEQ ID NO: 585406
agaggaucugcugggauca

SEQ ID NO: 637341 - RNA, 19 nt, Artificial Sequence
  Description of Artificial Sequence: Synthetic oligonucleotide
  Antisense strand to SEQ ID NO: 637340
ugaucccagcagauccucu

SEQ ID NO: 637342 - RNA, 19 nt, Artificial Sequence
  Description of Artificial Sequence: Synthetic oligonucleotide
  Sense strand starting at position 229 of SEQ ID NO: 585406
gaggaucugcugggaucau

SEQ ID NO: 637343 - RNA, 19 nt, Artificial Sequence
  Description of Artificial Sequence: Synthetic oligonucleotide
  Antisense strand to SEQ ID NO: 637342
augaucccagcagauccuc

SEQ ID NO: 637344 - RNA, 19 nt, Artificial Sequence
  Description of Artificial Sequence: Synthetic oligonucleotide
  Sense strand starting at position 349 of SEQ ID NO: 585406
aagaucagguuugucugua

SEQ ID NO: 637345 - RNA, 19 nt, Artificial Sequence
  Description of Artificial Sequence: Synthetic oligonucleotide
  Antisense strand to SEQ ID NO: 637344
uacagacaaaccugaucuu

SEQ ID NO: 637346 - RNA, 19 nt, Artificial Sequence
  Description of Artificial Sequence: Synthetic oligonucleotide
  Sense strand starting at position 350 of SEQ ID NO: 585406
agaucagguuugucuguaa

SEQ ID NO: 637347 - RNA, 19 nt, Artificial Sequence
  Description of Artificial Sequence: Synthetic oligonucleotide
  Antisense strand to SEQ ID NO: 637346
uuacagacaaaccugaucu

SEQ ID NO: 637348 - RNA, 19 nt, Artificial Sequence
  Description of Artificial Sequence: Synthetic oligonucleotide
  Sense strand starting at position 553 of SEQ ID NO: 585406
cuuguugucagcgccgauu

SEQ ID NO: 637349 - RNA, 19 nt, Artificial Sequence
  Description of Artificial Sequence: Synthetic oligonucleotide
  Antisense strand to SEQ ID NO: 637348
aaucggcgcugacaacaag

SEQ ID NO: 637350 - RNA, 19 nt, Artificial Sequence
  Description of Artificial Sequence: Synthetic oligonucleotide
  Sense strand starting at position 912 of SEQ ID NO: 585406
uagggagaaucgguagguu

SEQ ID NO: 637351 - RNA, 19 nt, Artificial Sequence
  Description of Artificial Sequence: Synthetic oligonucleotide
  Antisense strand to SEQ ID NO: 637350
aaccuaccgauucucccua

SEQ ID NO: 637352 - RNA, 19 nt, Artificial Sequence
  Description of Artificial Sequence: Synthetic oligonucleotide
  Sense strand starting at position 915 of SEQ ID NO: 585406
ggagaaucgguagguuaau

SEQ ID NO: 637353 - RNA, 19 nt, Artificial Sequence
  Description of Artificial Sequence: Synthetic oligonucleotide
  Antisense strand to SEQ ID NO: 637352
auuaaccuaccgauucucc

SEQ ID NO: 637354 - RNA, 19 nt, Artificial Sequence
  Description of Artificial Sequence: Synthetic oligonucleotide
  Sense strand starting at position 916 of SEQ ID NO: 585406
gagaaucgguagguuaauc

SEQ ID NO: 637355 - RNA, 19 nt, Artificial Sequence
  Description of Artificial Sequence: Synthetic oligonucleotide
  Antisense strand to SEQ ID NO: 637354
gauuaaccuaccgauucuc

SEQ ID NO: 637356 - RNA, 19 nt, Artificial Sequence
  Description of Artificial Sequence: Synthetic oligonucleotide
  Sense strand starting at position 964 of SEQ ID NO: 585406
ccucuauuuccuggccuga

SEQ ID NO: 637357 - RNA, 19 nt, Artificial Sequence
  Description of Artificial Sequence: Synthetic oligonucleotide
  Antisense strand to SEQ ID NO: 637356
ucaggccaggaaauagagg

SEQ ID NO: 637358 - RNA, 19 nt, Artificial Sequence
  Description of Artificial Sequence: Synthetic oligonucleotide
  Sense strand starting at position 966 of SEQ ID NO: 585406
ucuauuuccuggccugagu

SEQ ID NO: 637359 - RNA, 19 nt, Artificial Sequence
  Description of Artificial Sequence: Synthetic oligonucleotide
  Antisense strand to SEQ ID NO: 637358
acucaggccaggaaauaga

SEQ ID NO: 637360 - RNA, 19 nt, Artificial Sequence
  Description of Artificial Sequence: Synthetic oligonucleotide
  Sense strand starting at position 1492 of SEQ ID NO: 585406
ccaagacuucucgagaccu

SEQ ID NO: 637361 - RNA, 19 nt, Artificial Sequence
  Description of Artificial Sequence: Synthetic oligonucleotide
  Antisense strand to SEQ ID NO: 637360
aggucucgagaagucuugg

SEQ ID NO: 637362 - RNA, 19 nt, Artificial Sequence
  Description of Artificial Sequence: Synthetic oligonucleotide
  Sense strand starting at position 1582 of SEQ ID NO: 585406
cgugaaucuuaccuaucaa

SEQ ID NO: 637363 - RNA, 19 nt, Artificial Sequence
  Description of Artificial Sequence: Synthetic oligonucleotide
  Antisense strand to SEQ ID NO: 637362
uugauagguaagauucacg

SEQ ID NO: 637364 - RNA, 19 nt, Artificial Sequence
  Description of Artificial Sequence: Synthetic oligonucleotide
  Sense strand starting at position 2016 of SEQ ID NO: 585406
ccuacagcccuaggugaaa

SEQ ID NO: 637365 - RNA, 19 nt, Artificial Sequence
  Description of Artificial Sequence: Synthetic oligonucleotide
  Antisense strand to SEQ ID NO: 637364
uuucaccuagggcuguagg

SEQ ID NO: 637366 - RNA, 19 nt, Artificial Sequence
  Description of Artificial Sequence: Synthetic oligonucleotide
  Sense strand starting at position 2626 of SEQ ID NO: 585406
agacgaaaccugugaacac

SEQ ID NO: 637367 - RNA, 19 nt, Artificial Sequence
  Description of Artificial Sequence: Synthetic oligonucleotide
  Antisense strand to SEQ ID NO: 637366
guguucacagguuucgucu

SEQ ID NO: 637368 - RNA, 19 nt, Artificial Sequence
  Description of Artificial Sequence: Synthetic oligonucleotide
  Sense strand starting at position 2644 of SEQ ID NO: 585406
cuaaucauaccgugagaag

SEQ ID NO: 637369 - RNA, 19 nt, Artificial Sequence
  Description of Artificial Sequence: Synthetic oligonucleotide
  Antisense strand to SEQ ID NO: 637368
cuucucacgguaugauuag

SEQ ID NO: 637370 - RNA, 19 nt, Artificial Sequence
  Description of Artificial Sequence: Synthetic oligonucleotide
  Sense strand starting at position 2656 of SEQ ID NO: 585406
ugagaagacacuugugugu

SEQ ID NO: 637371 - RNA, 19 nt, Artificial Sequence
  Description of Artificial Sequence: Synthetic oligonucleotide
  Antisense strand to SEQ ID NO: 637370
acacacaagugucuucuca

SEQ ID NO: 637372 - RNA, 19 nt, Artificial Sequence
  Description of Artificial Sequence: Synthetic oligonucleotide
  Sense strand starting at position 2700 of SEQ ID NO: 585406
cgcaguucgcuaucucaga

SEQ ID NO: 637373 - RNA, 19 nt, Artificial Sequence
  Description of Artificial Sequence: Synthetic oligonucleotide
  Antisense strand to SEQ ID NO: 637372
ucugagauagcgaacugcg

SEQ ID NO: 637374 - RNA, 19 nt, Artificial Sequence
  Description of Artificial Sequence: Synthetic oligonucleotide
  Sense strand starting at position 2788 of SEQ ID NO: 585406
ucaggaagcugagcuuuaa

SEQ ID NO: 637375 - RNA, 19 nt, Artificial Sequence
  Description of Artificial Sequence: Synthetic oligonucleotide
  Antisense strand to SEQ ID NO: 637374
uuaaagcucagcuuccuga

SEQ ID NO: 637376 - RNA, 19 nt, Artificial Sequence
  Description of Artificial Sequence: Synthetic oligonucleotide
  Sense strand starting at position 2801 of SEQ ID NO: 585406
cuuuaaucacuggagccua

SEQ ID NO: 637377 - RNA, 19 nt, Artificial Sequence
  Description of Artificial Sequence: Synthetic oligonucleotide
  Antisense strand to SEQ ID NO: 637376
uaggcuccagugauuaaag

SEQ ID NO: 637378 - RNA, 19 nt, Artificial Sequence
  Description of Artificial Sequence: Synthetic oligonucleotide
  Sense strand starting at position 2911 of SEQ ID NO: 585406
agaauacuuugugccucaa

SEQ ID NO: 637379 - RNA, 19 nt, Artificial Sequence
  Description of Artificial Sequence: Synthetic oligonucleotide
  Antisense strand to SEQ ID NO: 637378
uugaggcacaaaguauucu

SEQ ID NO: 637380 - RNA, 19 nt, Artificial Sequence
  Description of Artificial Sequence: Synthetic oligonucleotide
  Sense strand starting at position 2959 of SEQ ID NO: 585406
gucccagacugucuaauca

SEQ ID NO: 637381 - RNA, 19 nt, Artificial Sequence
  Description of Artificial Sequence: Synthetic oligonucleotide
  Antisense strand to SEQ ID NO: 637380
ugauuagacagucugggac

SEQ ID NO: 637382 - RNA, 19 nt, Artificial Sequence
  Description of Artificial Sequence: Synthetic oligonucleotide
  Sense strand starting at position 2963 of SEQ ID NO: 585406
cagacugucuaaucagguu

SEQ ID NO: 637383 - RNA, 19 nt, Artificial Sequence
  Description of Artificial Sequence: Synthetic oligonucleotide
  Antisense strand to SEQ ID NO: 637382
aaccugauuagacagucug

SEQ ID NO: 637384 - RNA, 19 nt, Artificial Sequence
  Description of Artificial Sequence: Synthetic oligonucleotide
  Sense strand starting at position 3201 of SEQ ID NO: 585406
uccucuuaagguuaucuga

SEQ ID NO: 637385 - RNA, 19 nt, Artificial Sequence
  Description of Artificial Sequence: Synthetic oligonucleotide
  Antisense strand to SEQ ID NO: 637384
ucagauaaccuuaagagga

SEQ ID NO: 637386 - RNA, 19 nt, Artificial Sequence
  Description of Artificial Sequence: Synthetic oligonucleotide
  Sense strand starting at position 3203 of SEQ ID NO: 585406
cucuuaagguuaucugauu

SEQ ID NO: 637387 - RNA, 19 nt, Artificial Sequence
  Description of Artificial Sequence: Synthetic oligonucleotide
  Antisense strand to SEQ ID NO: 637386
aaucagauaaccuuaagag

SEQ ID NO: 637388 - RNA, 19 nt, Artificial Sequence
  Description of Artificial Sequence: Synthetic oligonucleotide
  Sense strand starting at position 3211 of SEQ ID NO: 585406
guuaucugauucuuaucua

SEQ ID NO: 637389 - RNA, 19 nt, Artificial Sequence
  Description of Artificial Sequence: Synthetic oligonucleotide
  Antisense strand to SEQ ID NO: 637388
uagauaagaaucagauaac

SEQ ID NO: 637390 - RNA, 19 nt, Artificial Sequence
  Description of Artificial Sequence: Synthetic oligonucleotide
  Sense strand starting at position 3214 of SEQ ID NO: 585406
aucugauucuuaucuaugu

SEQ ID NO: 637391 - RNA, 19 nt, Artificial Sequence
  Description of Artificial Sequence: Synthetic oligonucleotide
  Antisense strand to SEQ ID NO: 637390
acauagauaagaaucagau

SEQ ID NO: 637392 - RNA, 19 nt, Artificial Sequence
  Description of Artificial Sequence: Synthetic oligonucleotide
  Sense strand starting at position 3215 of SEQ ID NO: 585406
ucugauucuuaucuauguu

SEQ ID NO: 637393 - RNA, 19 nt, Artificial Sequence
  Description of Artificial Sequence: Synthetic oligonucleotide
  Antisense strand to SEQ ID NO: 637392
aacauagauaagaaucaga

SEQ ID NO: 637394 - RNA, 19 nt, Artificial Sequence
  Description of Artificial Sequence: Synthetic oligonucleotide
  Sense strand starting at position 3288 of SEQ ID NO: 585406
agauuacugugaucccuaa

SEQ ID NO: 637395 - RNA, 19 nt, Artificial Sequence
  Description of Artificial Sequence: Synthetic oligonucleotide
  Antisense strand to SEQ ID NO: 637394
uuagggaucacaguaaucu

SEQ ID NO: 637396 - RNA, 19 nt, Artificial Sequence
  Description of Artificial Sequence: Synthetic oligonucleotide
  Sense strand starting at position 3316 of SEQ ID NO: 585406
auauguauugccugaaaca

SEQ ID NO: 637397 - RNA, 19 nt, Artificial Sequence
  Description of Artificial Sequence: Synthetic oligonucleotide
  Antisense strand to SEQ ID NO: 637396
uguuucaggcaauacauau

SEQ ID NO: 637398 - RNA, 19 nt, Artificial Sequence
  Description of Artificial Sequence: Synthetic oligonucleotide
  Sense strand starting at position 3446 of SEQ ID NO: 585406
gacuguaggugaguugaaa

SEQ ID NO: 637399 - RNA, 19 nt, Artificial Sequence
  Description of Artificial Sequence: Synthetic oligonucleotide
  Antisense strand to SEQ ID NO: 637398
uuucaacucaccuacaguc

SEQ ID NO: 637400 - RNA, 19 nt, Artificial Sequence
  Description of Artificial Sequence: Synthetic oligonucleotide
  Sense strand starting at position 3454 of SEQ ID NO: 585406
gugaguugaaagugggaau

SEQ ID NO: 637401 - RNA, 19 nt, Artificial Sequence
  Description of Artificial Sequence: Synthetic oligonucleotide
  Antisense strand to SEQ ID NO: 637400
auucccacuuucaacucac

SEQ ID NO: 637402 - RNA, 19 nt, Artificial Sequence
  Description of Artificial Sequence: Synthetic oligonucleotide
  Sense strand starting at position 3455 of SEQ ID NO: 585406
ugaguugaaagugggaauu

SEQ ID NO: 637403 - RNA, 19 nt, Artificial Sequence
  Description of Artificial Sequence: Synthetic oligonucleotide
  Antisense strand to SEQ ID NO: 637402
aauucccacuuucaacuca

SEQ ID NO: 637404 - RNA, 19 nt, Artificial Sequence
  Description of Artificial Sequence: Synthetic oligonucleotide
  Sense strand starting at position 3457 of SEQ ID NO: 585406
aguugaaagugggaauuua

SEQ ID NO: 637405 - RNA, 19 nt, Artificial Sequence
  Description of Artificial Sequence: Synthetic oligonucleotide
  Antisense strand to SEQ ID NO: 637404
uaaauucccacuuucaacu

SEQ ID NO: 637406 - RNA, 19 nt, Artificial Sequence
  Description of Artificial Sequence: Synthetic oligonucleotide
  Sense strand starting at position 3687 of SEQ ID NO: 585406
ugguguguuaaagaggacu

SEQ ID NO: 637407 - RNA, 19 nt, Artificial Sequence
  Description of Artificial Sequence: Synthetic oligonucleotide
  Antisense strand to SEQ ID NO: 637406
aguccucuuuaacacacca

SEQ ID NO: 637408 - RNA, 19 nt, Artificial Sequence
  Description of Artificial Sequence: Synthetic oligonucleotide
  Sense strand starting at position 3689 of SEQ ID NO: 585406
guguguuaaagaggacuuu

SEQ ID NO: 637409 - RNA, 19 nt, Artificial Sequence
  Description of Artificial Sequence: Synthetic oligonucleotide
  Antisense strand to SEQ ID NO: 637408
aaaguccucuuuaacacac

SEQ ID NO: 637410 - RNA, 19 nt, Artificial Sequence
  Description of Artificial Sequence: Synthetic oligonucleotide
  Sense strand starting at position 3711 of SEQ ID NO: 585406
ggcacauaccaaugaaguu

SEQ ID NO: 637411 - RNA, 19 nt, Artificial Sequence
  Description of Artificial Sequence: Synthetic oligonucleotide
  Antisense strand to SEQ ID NO: 637410
aacuucauugguaugugcc

SEQ ID NO: 637412 - RNA, 19 nt, Artificial Sequence
  Description of Artificial Sequence: Synthetic oligonucleotide
  Sense strand starting at position 3730 of SEQ ID NO: 585406
ucagaaaugcccugaaguu

SEQ ID NO: 637413 - RNA, 19 nt, Artificial Sequence
  Description of Artificial Sequence: Synthetic oligonucleotide
  Antisense strand to SEQ ID NO: 637412
aacuucagggcauuucuga

SEQ ID NO: 637414 - RNA, 19 nt, Artificial Sequence
  Description of Artificial Sequence: Synthetic oligonucleotide
  Sense strand starting at position 3731 of SEQ ID NO: 585406
cagaaaugcccugaaguuu

SEQ ID NO: 637415 - RNA, 19 nt, Artificial Sequence
  Description of Artificial Sequence: Synthetic oligonucleotide
  Antisense strand to SEQ ID NO: 637414
aaacuucagggcauuucug

SEQ ID NO: 637416 - RNA, 19 nt, Artificial Sequence
  Description of Artificial Sequence: Synthetic oligonucleotide
  Sense strand starting at position 3746 of SEQ ID NO: 585406
guuuccaaaccaugugaua

SEQ ID NO: 637417 - RNA, 19 nt, Artificial Sequence
  Description of Artificial Sequence: Synthetic oligonucleotide
  Antisense strand to SEQ ID NO: 637416
uaucacaugguuuggaaac

SEQ ID NO: 637418 - RNA, 19 nt, Artificial Sequence
  Description of Artificial Sequence: Synthetic oligonucleotide
  Sense strand starting at position 3843 of SEQ ID NO: 585406
gcuguauggcaguucugua

SEQ ID NO: 637419 - RNA, 19 nt, Artificial Sequence
  Description of Artificial Sequence: Synthetic oligonucleotide
  Antisense strand to SEQ ID NO: 637418
uacagaacugccauacagc

SEQ ID NO: 637420 - RNA, 19 nt, Artificial Sequence
  Description of Artificial Sequence: Synthetic oligonucleotide
  Sense strand starting at position 82 of SEQ ID NO: 585407
gcagcaucauagcaagaaa

SEQ ID NO: 637421 - RNA, 19 nt, Artificial Sequence
  Description of Artificial Sequence: Synthetic oligonucleotide
  Antisense strand to SEQ ID NO: 637420
uuucuugcuaugaugcugc

SEQ ID NO: 637422 - RNA, 19 nt, Artificial Sequence
  Description of Artificial Sequence: Synthetic oligonucleotide
  Sense strand starting at position 304 of SEQ ID NO: 585407
gaaagauguucucgcccac

SEQ ID NO: 637423 - RNA, 19 nt, Artificial Sequence
  Description of Artificial Sequence: Synthetic oligonucleotide
  Antisense strand to SEQ ID NO: 637422
gugggcgagaacaucuuuc

SEQ ID NO: 637424 - RNA, 19 nt, Artificial Sequence
  Description of Artificial Sequence: Synthetic oligonucleotide
  Sense strand starting at position 308 of SEQ ID NO: 585407
gauguucucgcccacauca

SEQ ID NO: 637425 - RNA, 19 nt, Artificial Sequence
  Description of Artificial Sequence: Synthetic oligonucleotide
  Antisense strand to SEQ ID NO: 637424
ugaugugggcgagaacauc

SEQ ID NO: 637426 - RNA, 19 nt, Artificial Sequence
  Description of Artificial Sequence: Synthetic oligonucleotide
  Sense strand starting at position 404 of SEQ ID NO: 585407
ggguccugcucaccagauu

SEQ ID NO: 637427 - RNA, 19 nt, Artificial Sequence
  Description of Artificial Sequence: Synthetic oligonucleotide
  Antisense strand to SEQ ID NO: 637426
aaucuggugagcaggaccc

SEQ ID NO: 637428 - RNA, 19 nt, Artificial Sequence
  Description of Artificial Sequence: Synthetic oligonucleotide
  Sense strand starting at position 649 of SEQ ID NO: 585407
uucugucagcccuagguau

SEQ ID NO: 637429 - RNA, 19 nt, Artificial Sequence
  Description of Artificial Sequence: Synthetic oligonucleotide
  Antisense strand to SEQ ID NO: 637428
auaccuagggcugacagaa

SEQ ID NO: 637430 - RNA, 19 nt, Artificial Sequence
  Description of Artificial Sequence: Synthetic oligonucleotide
  Sense strand starting at position 708 of SEQ ID NO: 585407
gaaggaaaguucuagauuc

SEQ ID NO: 637431 - RNA, 19 nt, Artificial Sequence
  Description of Artificial Sequence: Synthetic oligonucleotide
  Antisense strand to SEQ ID NO: 637430
gaaucuagaacuuuccuuc

SEQ ID NO: 637432 - RNA, 19 nt, Artificial Sequence
  Description of Artificial Sequence: Synthetic oligonucleotide
  Sense strand starting at position 715 of SEQ ID NO: 585407
aguucuagauucucaggga

SEQ ID NO: 637433 - RNA, 19 nt, Artificial Sequence
  Description of Artificial Sequence: Synthetic oligonucleotide
  Antisense strand to SEQ ID NO: 637432
ucccugagaaucuagaacu

SEQ ID NO: 637434 - RNA, 19 nt, Artificial Sequence
  Description of Artificial Sequence: Synthetic oligonucleotide
  Sense strand starting at position 716 of SEQ ID NO: 585407
guucuagauucucagggaa

SEQ ID NO: 637435 - RNA, 19 nt, Artificial Sequence
  Description of Artificial Sequence: Synthetic oligonucleotide
  Antisense strand to SEQ ID NO: 637434
uucccugagaaucuagaac

SEQ ID NO: 637436 - RNA, 19 nt, Artificial Sequence
  Description of Artificial Sequence: Synthetic oligonucleotide
  Sense strand starting at position 718 of SEQ ID NO: 585407
ucuagauucucagggaaua

SEQ ID NO: 637437 - RNA, 19 nt, Artificial Sequence
  Description of Artificial Sequence: Synthetic oligonucleotide
  Antisense strand to SEQ ID NO: 637436
uauucccugagaaucuaga

SEQ ID NO: 637438 - RNA, 19 nt, Artificial Sequence
  Description of Artificial Sequence: Synthetic oligonucleotide
  Sense strand starting at position 743 of SEQ ID NO: 585407
gagggagaauucgguuugu

SEQ ID NO: 637439 - RNA, 19 nt, Artificial Sequence
  Description of Artificial Sequence: Synthetic oligonucleotide
  Antisense strand to SEQ ID NO: 637438
acaaaccgaauucucccuc

SEQ ID NO: 637440 - RNA, 19 nt, Artificial Sequence
  Description of Artificial Sequence: Synthetic oligonucleotide
  Sense strand starting at position 904 of SEQ ID NO: 585407
aguaaaugcagaugauuag

SEQ ID NO: 637441 - RNA, 19 nt, Artificial Sequence
  Description of Artificial Sequence: Synthetic oligonucleotide
  Antisense strand to SEQ ID NO: 637440
cuaaucaucugcauuuacu

SEQ ID NO: 637442 - RNA, 19 nt, Artificial Sequence
  Description of Artificial Sequence: Synthetic oligonucleotide
  Sense strand starting at position 1045 of SEQ ID NO: 585407
gguguaugugcauaaggca

SEQ ID NO: 637443 - RNA, 19 nt, Artificial Sequence
  Description of Artificial Sequence: Synthetic oligonucleotide
  Antisense strand to SEQ ID NO: 637442
ugccuuaugcacauacacc

SEQ ID NO: 637444 - RNA, 19 nt, Artificial Sequence
  Description of Artificial Sequence: Synthetic oligonucleotide
  Sense strand starting at position 1052 of SEQ ID NO: 585407
gugcauaaggcaugugaag

SEQ ID NO: 637445 - RNA, 19 nt, Artificial Sequence
  Description of Artificial Sequence: Synthetic oligonucleotide
  Antisense strand to SEQ ID NO: 637444
cuucacaugccuuaugcac

SEQ ID NO: 637446 - RNA, 19 nt, Artificial Sequence
  Description of Artificial Sequence: Synthetic oligonucleotide
  Sense strand starting at position 1054 of SEQ ID NO: 585407
gcauaaggcaugugaaggu

SEQ ID NO: 637447 - RNA, 19 nt, Artificial Sequence
  Description of Artificial Sequence: Synthetic oligonucleotide
  Antisense strand to SEQ ID NO: 637446
accuucacaugccuuaugc

SEQ ID NO: 637448 - RNA, 19 nt, Artificial Sequence
  Description of Artificial Sequence: Synthetic oligonucleotide
  Sense strand starting at position 1415 of SEQ ID NO: 585407
ccgaaaucuggauggagcu

SEQ ID NO: 637449 - RNA, 19 nt, Artificial Sequence
  Description of Artificial Sequence: Synthetic oligonucleotide
  Antisense strand to SEQ ID NO: 637448
agcuccauccagauuucgg

SEQ ID NO: 637450 - RNA, 19 nt, Artificial Sequence
  Description of Artificial Sequence: Synthetic oligonucleotide
  Sense strand starting at position 2450 of SEQ ID NO: 585407
gcuugcuccucgccaagau

SEQ ID NO: 637451 - RNA, 19 nt, Artificial Sequence
  Description of Artificial Sequence: Synthetic oligonucleotide
  Antisense strand to SEQ ID NO: 637450
aucuuggcgaggagcaagc

SEQ ID NO: 637452 - RNA, 19 nt, Artificial Sequence
  Description of Artificial Sequence: Synthetic oligonucleotide
  Sense strand starting at position 2615 of SEQ ID NO: 585407
gggcacuguugacaucuga

SEQ ID NO: 637453 - RNA, 19 nt, Artificial Sequence
  Description of Artificial Sequence: Synthetic oligonucleotide
  Antisense strand to SEQ ID NO: 637452
ucagaugucaacagugccc

SEQ ID NO: 637454 - RNA, 19 nt, Artificial Sequence
  Description of Artificial Sequence: Synthetic oligonucleotide
  Sense strand starting at position 2746 of SEQ ID NO: 585407
ggcggugcugucucaacuu

SEQ ID NO: 637455 - RNA, 19 nt, Artificial Sequence
  Description of Artificial Sequence: Synthetic oligonucleotide
  Antisense strand to SEQ ID NO: 637454
aaguugagacagcaccgcc

SEQ ID NO: 637456 - RNA, 19 nt, Artificial Sequence
  Description of Artificial Sequence: Synthetic oligonucleotide
  Sense strand starting at position 2789 of SEQ ID NO: 585407
gacucacuuguguaacgca

SEQ ID NO: 637457 - RNA, 19 nt, Artificial Sequence
  Description of Artificial Sequence: Synthetic oligonucleotide
  Antisense strand to SEQ ID NO: 637456
ugcguuacacaagugaguc

SEQ ID NO: 637458 - RNA, 19 nt, Artificial Sequence
  Description of Artificial Sequence: Synthetic oligonucleotide
  Sense strand starting at position 2796 of SEQ ID NO: 585407
uuguguaacgcaggacaaa

SEQ ID NO: 637459 - RNA, 19 nt, Artificial Sequence
  Description of Artificial Sequence: Synthetic oligonucleotide
  Antisense strand to SEQ ID NO: 637458
uuuguccugcguuacacaa

SEQ ID NO: 637460 - RNA, 19 nt, Artificial Sequence
  Description of Artificial Sequence: Synthetic oligonucleotide
  Sense strand starting at position 2797 of SEQ ID NO: 585407
uguguaacgcaggacaaau

SEQ ID NO: 637461 - RNA, 19 nt, Artificial Sequence
  Description of Artificial Sequence: Synthetic oligonucleotide
  Antisense strand to SEQ ID NO: 637460
auuuguccugcguuacaca

SEQ ID NO: 637462 - RNA, 19 nt, Artificial Sequence
  Description of Artificial Sequence: Synthetic oligonucleotide
  Sense strand starting at position 2829 of SEQ ID NO: 585407
guuugucccuuuguuagga

SEQ ID NO: 637463 - RNA, 19 nt, Artificial Sequence
  Description of Artificial Sequence: Synthetic oligonucleotide
  Antisense strand to SEQ ID NO: 637462
uccuaacaaagggacaaac

SEQ ID NO: 637464 - RNA, 19 nt, Artificial Sequence
  Description of Artificial Sequence: Synthetic oligonucleotide
  Sense strand starting at position 2834 of SEQ ID NO: 585407
ucccuuuguuaggagggau

SEQ ID NO: 637465 - RNA, 19 nt, Artificial Sequence
  Description of Artificial Sequence: Synthetic oligonucleotide
  Antisense strand to SEQ ID NO: 637464
aucccuccuaacaaaggga

SEQ ID NO: 637466 - RNA, 19 nt, Artificial Sequence
  Description of Artificial Sequence: Synthetic oligonucleotide
  Sense strand starting at position 2837 of SEQ ID NO: 585407
cuuuguuaggagggauaga

SEQ ID NO: 637467 - RNA, 19 nt, Artificial Sequence
  Description of Artificial Sequence: Synthetic oligonucleotide
  Antisense strand to SEQ ID NO: 637466
ucuaucccuccuaacaaag

SEQ ID NO: 637468 - RNA, 19 nt, Artificial Sequence
  Description of Artificial Sequence: Synthetic oligonucleotide
  Sense strand starting at position 2867 of SEQ ID NO: 585407
cagauuuacuaguguuaag

SEQ ID NO: 637469 - RNA, 19 nt, Artificial Sequence
  Description of Artificial Sequence: Synthetic oligonucleotide
  Antisense strand to SEQ ID NO: 637468
cuuaacacuaguaaaucug

SEQ ID NO: 637470 - RNA, 19 nt, Artificial Sequence
  Description of Artificial Sequence: Synthetic oligonucleotide
  Sense strand starting at position 2870 of SEQ ID NO: 585407
auuuacuaguguuaagaug

SEQ ID NO: 637471 - RNA, 19 nt, Artificial Sequence
  Description of Artificial Sequence: Synthetic oligonucleotide
  Antisense strand to SEQ ID NO: 637470
caucuuaacacuaguaaau

SEQ ID NO: 637472 - RNA, 19 nt, Artificial Sequence
  Description of Artificial Sequence: Synthetic oligonucleotide
  Sense strand starting at position 2969 of SEQ ID NO: 585407
acuuauuaaguggagcaua

SEQ ID NO: 637473 - RNA, 19 nt, Artificial Sequence
  Description of Artificial Sequence: Synthetic oligonucleotide
  Antisense strand to SEQ ID NO: 637472
uaugcuccacuuaauaagu

SEQ ID NO: 637474 - RNA, 19 nt, Artificial Sequence
  Description of Artificial Sequence: Synthetic oligonucleotide
  Sense strand starting at position 2972 of SEQ ID NO: 585407
uauuaaguggagcauauua

SEQ ID NO: 637475 - RNA, 19 nt, Artificial Sequence
  Description of Artificial Sequence: Synthetic oligonucleotide
  Antisense strand to SEQ ID NO: 637474
uaauaugcuccacuuaaua

SEQ ID NO: 637476 - RNA, 19 nt, Artificial Sequence
  Description of Artificial Sequence: Synthetic oligonucleotide
  Sense strand starting at position 3004 of SEQ ID NO: 585407
gguggauggugcuauguua

SEQ ID NO: 637477 - RNA, 19 nt, Artificial Sequence
  Description of Artificial Sequence: Synthetic oligonucleotide
  Antisense strand to SEQ ID NO: 637476
uaacauagcaccauccacc

SEQ ID NO: 637478 - RNA, 19 nt, Artificial Sequence
  Description of Artificial Sequence: Synthetic oligonucleotide
  Sense strand starting at position 3012 of SEQ ID NO: 585407
gugcuauguuaggaguggu

SEQ ID NO: 637479 - RNA, 19 nt, Artificial Sequence
  Description of Artificial Sequence: Synthetic oligonucleotide
  Antisense strand to SEQ ID NO: 637478
accacuccuaacauagcac

SEQ ID NO: 637480 - RNA, 19 nt, Artificial Sequence
  Description of Artificial Sequence: Synthetic oligonucleotide
  Sense strand starting at position 3177 of SEQ ID NO: 585407
ggguuuaagucgggauguu

SEQ ID NO: 637481 - RNA, 19 nt, Artificial Sequence
  Description of Artificial Sequence: Synthetic oligonucleotide
  Antisense strand to SEQ ID NO: 637480
aacaucccgacuuaaaccc

SEQ ID NO: 637482 - RNA, 19 nt, Artificial Sequence
  Description of Artificial Sequence: Synthetic oligonucleotide
  Sense strand starting at position 3178 of SEQ ID NO: 585407
gguuuaagucgggauguuu

SEQ ID NO: 637483 - RNA, 19 nt, Artificial Sequence
  Description of Artificial Sequence: Synthetic oligonucleotide
  Antisense strand to SEQ ID NO: 637482
aaacaucccgacuuaaacc

SEQ ID NO: 637484 - RNA, 19 nt, Artificial Sequence
  Description of Artificial Sequence: Synthetic oligonucleotide
  Sense strand starting at position 3263 of SEQ ID NO: 585407
aguguuccaucaggcuuau

SEQ ID NO: 637485 - RNA, 19 nt, Artificial Sequence
  Description of Artificial Sequence: Synthetic oligonucleotide
  Antisense strand to SEQ ID NO: 637484
auaagccugauggaacacu

SEQ ID NO: 637486 - RNA, 19 nt, Artificial Sequence
  Description of Artificial Sequence: Synthetic oligonucleotide
  Sense strand starting at position 3314 of SEQ ID NO: 585407
augggucaggugugauauu

SEQ ID NO: 637487 - RNA, 19 nt, Artificial Sequence
  Description of Artificial Sequence: Synthetic oligonucleotide
  Antisense strand to SEQ ID NO: 637486
aauaucacaccugacccau

SEQ ID NO: 637488 - RNA, 19 nt, Artificial Sequence
  Description of Artificial Sequence: Synthetic oligonucleotide
  Sense strand starting at position 3369 of SEQ ID NO: 585407
cuuuaucuugccuggguga

SEQ ID NO: 637489 - RNA, 19 nt, Artificial Sequence
  Description of Artificial Sequence: Synthetic oligonucleotide
  Antisense strand to SEQ ID NO: 637488
ucacccaggcaagauaaag

SEQ ID NO: 637490 - RNA, 19 nt, Artificial Sequence
  Description of Artificial Sequence: Synthetic oligonucleotide
  Sense strand starting at position 3419 of SEQ ID NO: 585407
acuguugacugaguaggaa

SEQ ID NO: 637491 - RNA, 19 nt, Artificial Sequence
  Description of Artificial Sequence: Synthetic oligonucleotide
  Antisense strand to SEQ ID NO: 637490
uuccuacucagucaacagu

SEQ ID NO: 637492 - RNA, 19 nt, Artificial Sequence
  Description of Artificial Sequence: Synthetic oligonucleotide
  Sense strand starting at position 3423 of SEQ ID NO: 585407
uugacugaguaggaaagua

SEQ ID NO: 637493 - RNA, 19 nt, Artificial Sequence
  Description of Artificial Sequence: Synthetic oligonucleotide
  Antisense strand to SEQ ID NO: 637492
uacuuuccuacucagucaa

SEQ ID NO: 637494 - RNA, 19 nt, Artificial Sequence
  Description of Artificial Sequence: Synthetic oligonucleotide
  Sense strand starting at position 3748 of SEQ ID NO: 585407
ucaggacuguccuuuaaua

SEQ ID NO: 637495 - RNA, 19 nt, Artificial Sequence
  Description of Artificial Sequence: Synthetic oligonucleotide
  Antisense strand to SEQ ID NO: 637494
uauuaaaggacaguccuga

SEQ ID NO: 637496 - RNA, 19 nt, Artificial Sequence
  Description of Artificial Sequence: Synthetic oligonucleotide
  Sense strand starting at position 3750 of SEQ ID NO: 585407
aggacuguccuuuaauagu

SEQ ID NO: 637497 - RNA, 19 nt, Artificial Sequence
  Description of Artificial Sequence: Synthetic oligonucleotide
  Antisense strand to SEQ ID NO: 637496
acuauuaaaggacaguccu

SEQ ID NO: 637498 - RNA, 19 nt, Artificial Sequence
  Description of Artificial Sequence: Synthetic oligonucleotide
  Sense strand starting at position 126 of SEQ ID NO: 585408
gcuggaguaaagugauaca

SEQ ID NO: 637499 - RNA, 19 nt, Artificial Sequence
  Description of Artificial Sequence: Synthetic oligonucleotide
  Antisense strand to SEQ ID NO: 637498
uguaucacuuuacuccagc

SEQ ID NO: 637500 - RNA, 19 nt, Artificial Sequence
  Description of Artificial Sequence: Synthetic oligonucleotide
  Sense strand starting at position 129 of SEQ ID NO: 585408
ggaguaaagugauacaauc

SEQ ID NO: 637501 - RNA, 19 nt, Artificial Sequence
  Description of Artificial Sequence: Synthetic oligonucleotide
  Antisense strand to SEQ ID NO: 637500
gauuguaucacuuuacucc

SEQ ID NO: 637502 - RNA, 19 nt, Artificial Sequence
  Description of Artificial Sequence: Synthetic oligonucleotide
  Sense strand starting at position 283 of SEQ ID NO: 585408
ccagacuagucucgacauc

SEQ ID NO: 637503 - RNA, 19 nt, Artificial Sequence
  Description of Artificial Sequence: Synthetic oligonucleotide
  Antisense strand to SEQ ID NO: 637502
gaugucgagacuagucugg

SEQ ID NO: 637504 - RNA, 19 nt, Artificial Sequence
  Description of Artificial Sequence: Synthetic oligonucleotide
  Sense strand starting at position 689 of SEQ ID NO: 585408
gcgccugaccuguauuuac

SEQ ID NO: 637505 - RNA, 19 nt, Artificial Sequence
  Description of Artificial Sequence: Synthetic oligonucleotide
  Antisense strand to SEQ ID NO: 637504
guaaauacaggucaggcgc

SEQ ID NO: 637506 - RNA, 19 nt, Artificial Sequence
  Description of Artificial Sequence: Synthetic oligonucleotide
  Sense strand starting at position 748 of SEQ ID NO: 585408
cgauacaaucucuaagcuu

SEQ ID NO: 637507 - RNA, 19 nt, Artificial Sequence
  Description of Artificial Sequence: Synthetic oligonucleotide
  Antisense strand to SEQ ID NO: 637506
aagcuuagagauuguaucg

SEQ ID NO: 637508 - RNA, 19 nt, Artificial Sequence
  Description of Artificial Sequence: Synthetic oligonucleotide
  Sense strand starting at position 864 of SEQ ID NO: 585408
uggaguaaucacugcucac

SEQ ID NO: 637509 - RNA, 19 nt, Artificial Sequence
  Description of Artificial Sequence: Synthetic oligonucleotide
  Antisense strand to SEQ ID NO: 637508
gugagcagugauuacucca

SEQ ID NO: 637510 - RNA, 19 nt, Artificial Sequence
  Description of Artificial Sequence: Synthetic oligonucleotide
  Sense strand starting at position 999 of SEQ ID NO: 585408
cucgccuagcccugaaaua

SEQ ID NO: 637511 - RNA, 19 nt, Artificial Sequence
  Description of Artificial Sequence: Synthetic oligonucleotide
  Antisense strand to SEQ ID NO: 637510
uauuucagggcuaggcgag

SEQ ID NO: 637512 - RNA, 19 nt, Artificial Sequence
  Description of Artificial Sequence: Synthetic oligonucleotide
  Sense strand starting at position 1000 of SEQ ID NO: 585408
ucgccuagcccugaaauau

SEQ ID NO: 637513 - RNA, 19 nt, Artificial Sequence
  Description of Artificial Sequence: Synthetic oligonucleotide
  Antisense strand to SEQ ID NO: 637512
auauuucagggcuaggcga

SEQ ID NO: 637514 - RNA, 19 nt, Artificial Sequence
  Description of Artificial Sequence: Synthetic oligonucleotide
  Sense strand starting at position 1062 of SEQ ID NO: 585408
ccaacagacuuguuggaac

SEQ ID NO: 637515 - RNA, 19 nt, Artificial Sequence
  Description of Artificial Sequence: Synthetic oligonucleotide
  Antisense strand to SEQ ID NO: 637514
guuccaacaagucuguugg

SEQ ID NO: 637516 - RNA, 19 nt, Artificial Sequence
  Description of Artificial Sequence: Synthetic oligonucleotide
  Sense strand starting at position 1083 of SEQ ID NO: 585408
guaccuaccucaggucauu

SEQ ID NO: 637517 - RNA, 19 nt, Artificial Sequence
  Description of Artificial Sequence: Synthetic oligonucleotide
  Antisense strand to SEQ ID NO: 637516
aaugaccugagguagguac

SEQ ID NO: 637518 - RNA, 19 nt, Artificial Sequence
  Description of Artificial Sequence: Synthetic oligonucleotide
  Sense strand starting at position 1207 of SEQ ID NO: 585408
ggaggaguguccuuugaca

SEQ ID NO: 637519 - RNA, 19 nt, Artificial Sequence
  Description of Artificial Sequence: Synthetic oligonucleotide
  Antisense strand to SEQ ID NO: 637518
ugucaaaggacacuccucc

SEQ ID NO: 637520 - RNA, 19 nt, Artificial Sequence
  Description of Artificial Sequence: Synthetic oligonucleotide
  Sense strand starting at position 1209 of SEQ ID NO: 585408
aggaguguccuuugacagu

SEQ ID NO: 637521 - RNA, 19 nt, Artificial Sequence
  Description of Artificial Sequence: Synthetic oligonucleotide
  Antisense strand to SEQ ID NO: 637520
acugucaaaggacacuccu

SEQ ID NO: 637522 - RNA, 19 nt, Artificial Sequence
  Description of Artificial Sequence: Synthetic oligonucleotide
  Sense strand starting at position 1212 of SEQ ID NO: 585408
aguguccuuugacaguauu

SEQ ID NO: 637523 - RNA, 19 nt, Artificial Sequence
  Description of Artificial Sequence: Synthetic oligonucleotide
  Antisense strand to SEQ ID NO: 637522
aauacugucaaaggacacu

SEQ ID NO: 637524 - RNA, 19 nt, Artificial Sequence
  Description of Artificial Sequence: Synthetic oligonucleotide
  Sense strand starting at position 1373 of SEQ ID NO: 585408
gagagacucugcccugcau

SEQ ID NO: 637525 - RNA, 19 nt, Artificial Sequence
  Description of Artificial Sequence: Synthetic oligonucleotide
  Antisense strand to SEQ ID NO: 637524
augcagggcagagucucuc

SEQ ID NO: 637526 - RNA, 19 nt, Artificial Sequence
  Description of Artificial Sequence: Synthetic oligonucleotide
  Sense strand starting at position 1507 of SEQ ID NO: 585408
agagaagugcucugagguc

SEQ ID NO: 637527 - RNA, 19 nt, Artificial Sequence
  Description of Artificial Sequence: Synthetic oligonucleotide
  Antisense strand to SEQ ID NO: 637526
gaccucagagcacuucucu

SEQ ID NO: 637528 - RNA, 19 nt, Artificial Sequence
  Description of Artificial Sequence: Synthetic oligonucleotide
  Sense strand starting at position 1514 of SEQ ID NO: 585408
ugcucugaggucuaacuuu

SEQ ID NO: 637529 - RNA, 19 nt, Artificial Sequence
  Description of Artificial Sequence: Synthetic oligonucleotide
  Antisense strand to SEQ ID NO: 637528
aaaguuagaccucagagca

SEQ ID NO: 637530 - RNA, 19 nt, Artificial Sequence
  Description of Artificial Sequence: Synthetic oligonucleotide
  Sense strand starting at position 1541 of SEQ ID NO: 585408
ccgcuauccucacugaauc

SEQ ID NO: 637531 - RNA, 19 nt, Artificial Sequence
  Description of Artificial Sequence: Synthetic oligonucleotide
  Antisense strand to SEQ ID NO: 637530
gauucagugaggauagcgg

SEQ ID NO: 637532 - RNA, 19 nt, Artificial Sequence
  Description of Artificial Sequence: Synthetic oligonucleotide
  Sense strand starting at position 1613 of SEQ ID NO: 585408
cucagugccuccucaauga

SEQ ID NO: 637533 - RNA, 19 nt, Artificial Sequence
  Description of Artificial Sequence: Synthetic oligonucleotide
  Antisense strand to SEQ ID NO: 637532
ucauugaggaggcacugag

SEQ ID NO: 637534 - RNA, 19 nt, Artificial Sequence
  Description of Artificial Sequence: Synthetic oligonucleotide
  Sense strand starting at position 1641 of SEQ ID NO: 585408
acaguacaguacuaaagau

SEQ ID NO: 637535 - RNA, 19 nt, Artificial Sequence
  Description of Artificial Sequence: Synthetic oligonucleotide
  Antisense strand to SEQ ID NO: 637534
aucuuuaguacuguacugu

SEQ ID NO: 637536 - RNA, 19 nt, Artificial Sequence
  Description of Artificial Sequence: Synthetic oligonucleotide
  Sense strand starting at position 2175 of SEQ ID NO: 585408
acuuccuaucgagaauugu

SEQ ID NO: 637537 - RNA, 19 nt, Artificial Sequence
  Description of Artificial Sequence: Synthetic oligonucleotide
  Antisense strand to SEQ ID NO: 637536
acaauucucgauaggaagu

SEQ ID NO: 637538 - RNA, 19 nt, Artificial Sequence
  Description of Artificial Sequence: Synthetic oligonucleotide
  Sense strand starting at position 2196 of SEQ ID NO: 585408
ggaguuuguuaagauuaug

SEQ ID NO: 637539 - RNA, 19 nt, Artificial Sequence
  Description of Artificial Sequence: Synthetic oligonucleotide
  Antisense strand to SEQ ID NO: 637538
cauaaucuuaacaaacucc

SEQ ID NO: 637540 - RNA, 19 nt, Artificial Sequence
  Description of Artificial Sequence: Synthetic oligonucleotide
  Sense strand starting at position 2208 of SEQ ID NO: 585408
gauuaugaagugugcacuu

SEQ ID NO: 637541 - RNA, 19 nt, Artificial Sequence
  Description of Artificial Sequence: Synthetic oligonucleotide
  Antisense strand to SEQ ID NO: 637540
aagugcacacuucauaauc

SEQ ID NO: 637542 - RNA, 19 nt, Artificial Sequence
  Description of Artificial Sequence: Synthetic oligonucleotide
  Sense strand starting at position 2463 of SEQ ID NO: 585408
gucgcaggcuccuguaaua

SEQ ID NO: 637543 - RNA, 19 nt, Artificial Sequence
  Description of Artificial Sequence: Synthetic oligonucleotide
  Antisense strand to SEQ ID NO: 637542
uauuacaggagccugcgac

SEQ ID NO: 637544 - RNA, 19 nt, Artificial Sequence
  Description of Artificial Sequence: Synthetic oligonucleotide
  Sense strand starting at position 2777 of SEQ ID NO: 585408
cuguaaauccaggaggcau

SEQ ID NO: 637545 - RNA, 19 nt, Artificial Sequence
  Description of Artificial Sequence: Synthetic oligonucleotide
  Antisense strand to SEQ ID NO: 637544
augccuccuggauuuacag

SEQ ID NO: 637546 - RNA, 19 nt, Artificial Sequence
  Description of Artificial Sequence: Synthetic oligonucleotide
  Sense strand starting at position 2874 of SEQ ID NO: 585408
aauguugaggccuguaaau

SEQ ID NO: 637547 - RNA, 19 nt, Artificial Sequence
  Description of Artificial Sequence: Synthetic oligonucleotide
  Antisense strand to SEQ ID NO: 637546
auuuacaggccucaacauu

SEQ ID NO: 637548 - RNA, 19 nt, Artificial Sequence
  Description of Artificial Sequence: Synthetic oligonucleotide
  Sense strand starting at position 2938 of SEQ ID NO: 585408
gaguuacagugagcuacaa

SEQ ID NO: 637549 - RNA, 19 nt, Artificial Sequence
  Description of Artificial Sequence: Synthetic oligonucleotide
  Antisense strand to SEQ ID NO: 637548
uuguagcucacuguaacuc

SEQ ID NO: 637550 - RNA, 19 nt, Artificial Sequence
  Description of Artificial Sequence: Synthetic oligonucleotide
  Sense strand starting at position 3151 of SEQ ID NO: 585408
ugccaagacuguccuguaa

SEQ ID NO: 637551 - RNA, 19 nt, Artificial Sequence
  Description of Artificial Sequence: Synthetic oligonucleotide
  Antisense strand to SEQ ID NO: 637550
uuacaggacagucuuggca

SEQ ID NO: 637552 - RNA, 19 nt, Artificial Sequence
  Description of Artificial Sequence: Synthetic oligonucleotide
  Sense strand starting at position 3153 of SEQ ID NO: 585408
ccaagacuguccuguaaag

SEQ ID NO: 637553 - RNA, 19 nt, Artificial Sequence
  Description of Artificial Sequence: Synthetic oligonucleotide
  Antisense strand to SEQ ID NO: 637552
cuuuacaggacagucuugg

SEQ ID NO: 637554 - RNA, 19 nt, Artificial Sequence
  Description of Artificial Sequence: Synthetic oligonucleotide
  Sense strand starting at position 3163 of SEQ ID NO: 585408
ccuguaaaggacuguguaa

SEQ ID NO: 637555 - RNA, 19 nt, Artificial Sequence
  Description of Artificial Sequence: Synthetic oligonucleotide
  Antisense strand to SEQ ID NO: 637554
uuacacaguccuuuacagg

SEQ ID NO: 637556 - RNA, 19 nt, Artificial Sequence
  Description of Artificial Sequence: Synthetic oligonucleotide
  Sense strand starting at position 3189 of SEQ ID NO: 585408
gagacuguggcucacagau

SEQ ID NO: 637557 - RNA, 19 nt, Artificial Sequence
  Description of Artificial Sequence: Synthetic oligonucleotide
  Antisense strand to SEQ ID NO: 637556
aucugugagccacagucuc

SEQ ID NO: 637558 - RNA, 19 nt, Artificial Sequence
  Description of Artificial Sequence: Synthetic oligonucleotide
  Sense strand starting at position 3267 of SEQ ID NO: 585408
gcaguuacauauuauucua

SEQ ID NO: 637559 - RNA, 19 nt, Artificial Sequence
  Description of Artificial Sequence: Synthetic oligonucleotide
  Antisense strand to SEQ ID NO: 637558
uagaauaauauguaacugc

SEQ ID NO: 637560 - RNA, 19 nt, Artificial Sequence
  Description of Artificial Sequence: Synthetic oligonucleotide
  Sense strand starting at position 3668 of SEQ ID NO: 585408
uuguauuugucaucuugca

SEQ ID NO: 637561 - RNA, 19 nt, Artificial Sequence
  Description of Artificial Sequence: Synthetic oligonucleotide
  Antisense strand to SEQ ID NO: 637560
ugcaagaugacaaauacaa

SEQ ID NO: 637562 - RNA, 19 nt, Artificial Sequence
  Description of Artificial Sequence: Synthetic oligonucleotide
  Sense strand starting at position 3673 of SEQ ID NO: 585408
uuugucaucuugcauagac

SEQ ID NO: 637563 - RNA, 19 nt, Artificial Sequence
  Description of Artificial Sequence: Synthetic oligonucleotide
  Antisense strand to SEQ ID NO: 637562
gucuaugcaagaugacaaa

SEQ ID NO: 637564 - RNA, 19 nt, Artificial Sequence
  Description of Artificial Sequence: Synthetic oligonucleotide
  Sense strand starting at position 3675 of SEQ ID NO: 585408
ugucaucuugcauagacau

SEQ ID NO: 637565 - RNA, 19 nt, Artificial Sequence
  Description of Artificial Sequence: Synthetic oligonucleotide
  Antisense strand to SEQ ID NO: 637564
augucuaugcaagaugaca

SEQ ID NO: 637566 - RNA, 19 nt, Artificial Sequence
  Description of Artificial Sequence: Synthetic oligonucleotide
  Sense strand starting at position 3692 of SEQ ID NO: 585408
auacuuauuugucaagagu

SEQ ID NO: 637567 - RNA, 19 nt, Artificial Sequence
  Description of Artificial Sequence: Synthetic oligonucleotide
  Antisense strand to SEQ ID NO: 637566
acucuugacaaauaaguau

SEQ ID NO: 637568 - RNA, 19 nt, Artificial Sequence
  Description of Artificial Sequence: Synthetic oligonucleotide
  Sense strand starting at position 3700 of SEQ ID NO: 585408
uugucaagaguuuguuaua

SEQ ID NO: 637569 - RNA, 19 nt, Artificial Sequence
  Description of Artificial Sequence: Synthetic oligonucleotide
  Antisense strand to SEQ ID NO: 637568
uauaacaaacucuugacaa

SEQ ID NO: 637570 - RNA, 19 nt, Artificial Sequence
  Description of Artificial Sequence: Synthetic oligonucleotide
  Sense strand starting at position 3701 of SEQ ID NO: 585408
ugucaagaguuuguuauag

SEQ ID NO: 637571 - RNA, 19 nt, Artificial Sequence
  Description of Artificial Sequence: Synthetic oligonucleotide
  Antisense strand to SEQ ID NO: 637570
cuauaacaaacucuugaca

SEQ ID NO: 637572 - RNA, 19 nt, Artificial Sequence
  Description of Artificial Sequence: Synthetic oligonucleotide
  Sense strand starting at position 3703 of SEQ ID NO: 585408
ucaagaguuuguuauagaa

SEQ ID NO: 637573 - RNA, 19 nt, Artificial Sequence
  Description of Artificial Sequence: Synthetic oligonucleotide
  Antisense strand to SEQ ID NO: 637572
uucuauaacaaacucuuga

SEQ ID NO: 637574 - RNA, 19 nt, Artificial Sequence
  Description of Artificial Sequence: Synthetic oligonucleotide
  Sense strand starting at position 21 of SEQ ID NO: 585409
ccaggucugaccuggaaag

SEQ ID NO: 637575 - RNA, 19 nt, Artificial Sequence
  Description of Artificial Sequence: Synthetic oligonucleotide
  Antisense strand to SEQ ID NO: 637574
cuuuccaggucagaccugg

SEQ ID NO: 637576 - RNA, 19 nt, Artificial Sequence
  Description of Artificial Sequence: Synthetic oligonucleotide
  Sense strand starting at position 133 of SEQ ID NO: 585409
gagccugauuguccugaga

SEQ ID NO: 637577 - RNA, 19 nt, Artificial Sequence
  Description of Artificial Sequence: Synthetic oligonucleotide
  Antisense strand to SEQ ID NO: 637576
ucucaggacaaucaggcuc

SEQ ID NO: 637578 - RNA, 19 nt, Artificial Sequence
  Description of Artificial Sequence: Synthetic oligonucleotide
  Sense strand starting at position 154 of SEQ ID NO: 585409
ugggaaggaucagauauga

SEQ ID NO: 637579 - RNA, 19 nt, Artificial Sequence
  Description of Artificial Sequence: Synthetic oligonucleotide
  Antisense strand to SEQ ID NO: 637578
ucauaucugauccuuccca

SEQ ID NO: 637580 - RNA, 19 nt, Artificial Sequence
  Description of Artificial Sequence: Synthetic oligonucleotide
  Sense strand starting at position 235 of SEQ ID NO: 585409
gagcuugggucccugaaca

SEQ ID NO: 637581 - RNA, 19 nt, Artificial Sequence
  Description of Artificial Sequence: Synthetic oligonucleotide
  Antisense strand to SEQ ID NO: 637580
uguucagggacccaagcuc

SEQ ID NO: 637582 - RNA, 19 nt, Artificial Sequence
  Description of Artificial Sequence: Synthetic oligonucleotide
  Sense strand starting at position 243 of SEQ ID NO: 585409
gucccugaacacugucauu

SEQ ID NO: 637583 - RNA, 19 nt, Artificial Sequence
  Description of Artificial Sequence: Synthetic oligonucleotide
  Antisense strand to SEQ ID NO: 637582
aaugacaguguucagggac

SEQ ID NO: 637584 - RNA, 19 nt, Artificial Sequence
  Description of Artificial Sequence: Synthetic oligonucleotide
  Sense strand starting at position 723 of SEQ ID NO: 585409
gucagauccuucccuguga

SEQ ID NO: 637585 - RNA, 19 nt, Artificial Sequence
  Description of Artificial Sequence: Synthetic oligonucleotide
  Antisense strand to SEQ ID NO: 637584
ucacagggaaggaucugac

SEQ ID NO: 637586 - RNA, 19 nt, Artificial Sequence
  Description of Artificial Sequence: Synthetic oligonucleotide
  Sense strand starting at position 725 of SEQ ID NO: 585409
cagauccuucccugugagu

SEQ ID NO: 637587 - RNA, 19 nt, Artificial Sequence
  Description of Artificial Sequence: Synthetic oligonucleotide
  Antisense strand to SEQ ID NO: 637586
acucacagggaaggaucug

SEQ ID NO: 637588 - RNA, 19 nt, Artificial Sequence
  Description of Artificial Sequence: Synthetic oligonucleotide
  Sense strand starting at position 727 of SEQ ID NO: 585409
gauccuucccugugaguuc

SEQ ID NO: 637589 - RNA, 19 nt, Artificial Sequence
  Description of Artificial Sequence: Synthetic oligonucleotide
  Antisense strand to SEQ ID NO: 637588
gaacucacagggaaggauc

SEQ ID NO: 637590 - RNA, 19 nt, Artificial Sequence
  Description of Artificial Sequence: Synthetic oligonucleotide
  Sense strand starting at position 849 of SEQ ID NO: 585409
cacuauguuguccaggauu

SEQ ID NO: 637591 - RNA, 19 nt, Artificial Sequence
  Description of Artificial Sequence: Synthetic oligonucleotide
  Antisense strand to SEQ ID NO: 637590
aauccuggacaacauagug

SEQ ID NO: 637592 - RNA, 19 nt, Artificial Sequence
  Description of Artificial Sequence: Synthetic oligonucleotide
  Sense strand starting at position 851 of SEQ ID NO: 585409
cuauguuguccaggauugu

SEQ ID NO: 637593 - RNA, 19 nt, Artificial Sequence
  Description of Artificial Sequence: Synthetic oligonucleotide
  Antisense strand to SEQ ID NO: 637592
acaauccuggacaacauag

SEQ ID NO: 637594 - RNA, 19 nt, Artificial Sequence
  Description of Artificial Sequence: Synthetic oligonucleotide
  Sense strand starting at position 1053 of SEQ ID NO: 585409
cuugguuucugucucauuu

SEQ ID NO: 637595 - RNA, 19 nt, Artificial Sequence
  Description of Artificial Sequence: Synthetic oligonucleotide
  Antisense strand to SEQ ID NO: 637594
aaaugagacagaaaccaag

SEQ ID NO: 637596 - RNA, 19 nt, Artificial Sequence
  Description of Artificial Sequence: Synthetic oligonucleotide
  Sense strand starting at position 1377 of SEQ ID NO: 585409
ggcaguguucugggaaagc

SEQ ID NO: 637597 - RNA, 19 nt, Artificial Sequence
  Description of Artificial Sequence: Synthetic oligonucleotide
  Antisense strand to SEQ ID NO: 637596
gcuuucccagaacacugcc

SEQ ID NO: 637598 - RNA, 19 nt, Artificial Sequence
  Description of Artificial Sequence: Synthetic oligonucleotide
  Sense strand starting at position 1627 of SEQ ID NO: 585409
gguugcagcuuucucagau

SEQ ID NO: 637599 - RNA, 19 nt, Artificial Sequence
  Description of Artificial Sequence: Synthetic oligonucleotide
  Antisense strand to SEQ ID NO: 637598
aucugagaaagcugcaacc

SEQ ID NO: 637600 - RNA, 19 nt, Artificial Sequence
  Description of Artificial Sequence: Synthetic oligonucleotide
  Sense strand starting at position 1628 of SEQ ID NO: 585409
guugcagcuuucucagauu

SEQ ID NO: 637601 - RNA, 19 nt, Artificial Sequence
  Description of Artificial Sequence: Synthetic oligonucleotide
  Antisense strand to SEQ ID NO: 637600
aaucugagaaagcugcaac

SEQ ID NO: 637602 - RNA, 19 nt, Artificial Sequence
  Description of Artificial Sequence: Synthetic oligonucleotide
  Sense strand starting at position 1795 of SEQ ID NO: 585409
agucaugagcugcauacau

SEQ ID NO: 637603 - RNA, 19 nt, Artificial Sequence
  Description of Artificial Sequence: Synthetic oligonucleotide
  Antisense strand to SEQ ID NO: 637602
auguaugcagcucaugacu

SEQ ID NO: 637604 - RNA, 19 nt, Artificial Sequence
  Description of Artificial Sequence: Synthetic oligonucleotide
  Sense strand starting at position 1797 of SEQ ID NO: 585409
ucaugagcugcauacauca

SEQ ID NO: 637605 - RNA, 19 nt, Artificial Sequence
  Description of Artificial Sequence: Synthetic oligonucleotide
  Antisense strand to SEQ ID NO: 637604
ugauguaugcagcucauga

SEQ ID NO: 637606 - RNA, 19 nt, Artificial Sequence
  Description of Artificial Sequence: Synthetic oligonucleotide
  Sense strand starting at position 1989 of SEQ ID NO: 585409
ucaaguuccucaucuguga

SEQ ID NO: 637607 - RNA, 19 nt, Artificial Sequence
  Description of Artificial Sequence: Synthetic oligonucleotide
  Antisense strand to SEQ ID NO: 637606
ucacagaugaggaacuuga

SEQ ID NO: 637608 - RNA, 19 nt, Artificial Sequence
  Description of Artificial Sequence: Synthetic oligonucleotide
  Sense strand starting at position 2021 of SEQ ID NO: 585409
cuguuauaaucguucccag

SEQ ID NO: 637609 - RNA, 19 nt, Artificial Sequence
  Description of Artificial Sequence: Synthetic oligonucleotide
  Antisense strand to SEQ ID NO: 637608
cugggaacgauuauaacag

SEQ ID NO: 637610 - RNA, 19 nt, Artificial Sequence
  Description of Artificial Sequence: Synthetic oligonucleotide
  Sense strand starting at position 2616 of SEQ ID NO: 585409
cagauauacugacuagggu

SEQ ID NO: 637611 - RNA, 19 nt, Artificial Sequence
  Description of Artificial Sequence: Synthetic oligonucleotide
  Antisense strand to SEQ ID NO: 637610
acccuagucaguauaucug

SEQ ID NO: 637612 - RNA, 19 nt, Artificial Sequence
  Description of Artificial Sequence: Synthetic oligonucleotide
  Sense strand starting at position 2644 of SEQ ID NO: 585409
gggacccuucuggguuuaa

SEQ ID NO: 637613 - RNA, 19 nt, Artificial Sequence
  Description of Artificial Sequence: Synthetic oligonucleotide
  Antisense strand to SEQ ID NO: 637612
uuaaacccagaaggguccc

SEQ ID NO: 637614 - RNA, 19 nt, Artificial Sequence
  Description of Artificial Sequence: Synthetic oligonucleotide
  Sense strand starting at position 2653 of SEQ ID NO: 585409
cuggguuuaagaggaauuc

SEQ ID NO: 637615 - RNA, 19 nt, Artificial Sequence
  Description of Artificial Sequence: Synthetic oligonucleotide
  Antisense strand to SEQ ID NO: 637614
gaauuccucuuaaacccag

SEQ ID NO: 637616 - RNA, 19 nt, Artificial Sequence
  Description of Artificial Sequence: Synthetic oligonucleotide
  Sense strand starting at position 2753 of SEQ ID NO: 585409
agcagagacucagaggauu

SEQ ID NO: 637617 - RNA, 19 nt, Artificial Sequence
  Description of Artificial Sequence: Synthetic oligonucleotide
  Antisense strand to SEQ ID NO: 637616
aauccucugagucucugcu

SEQ ID NO: 637618 - RNA, 19 nt, Artificial Sequence
  Description of Artificial Sequence: Synthetic oligonucleotide
  Sense strand starting at position 3019 of SEQ ID NO: 585409
cagcauuguuaggagagga

SEQ ID NO: 637619 - RNA, 19 nt, Artificial Sequence
  Description of Artificial Sequence: Synthetic oligonucleotide
  Antisense strand to SEQ ID NO: 637618
uccucuccuaacaaugcug

SEQ ID NO: 637620 - RNA, 19 nt, Artificial Sequence
  Description of Artificial Sequence: Synthetic oligonucleotide
  Sense strand starting at position 3101 of SEQ ID NO: 585409
gccauaaucugccucagcu

SEQ ID NO: 637621 - RNA, 19 nt, Artificial Sequence
  Description of Artificial Sequence: Synthetic oligonucleotide
  Antisense strand to SEQ ID NO: 637620
agcugaggcagauuauggc

SEQ ID NO: 637622 - RNA, 19 nt, Artificial Sequence
  Description of Artificial Sequence: Synthetic oligonucleotide
  Sense strand starting at position 3168 of SEQ ID NO: 585409
ucaggugucuuccuugauu

SEQ ID NO: 637623 - RNA, 19 nt, Artificial Sequence
  Description of Artificial Sequence: Synthetic oligonucleotide
  Antisense strand to SEQ ID NO: 637622
aaucaaggaagacaccuga

SEQ ID NO: 637624 - RNA, 19 nt, Artificial Sequence
  Description of Artificial Sequence: Synthetic oligonucleotide
  Sense strand starting at position 3170 of SEQ ID NO: 585409
aggugucuuccuugauuaa

SEQ ID NO: 637625 - RNA, 19 nt, Artificial Sequence
  Description of Artificial Sequence: Synthetic oligonucleotide
  Antisense strand to SEQ ID NO: 637624
uuaaucaaggaagacaccu

SEQ ID NO: 637626 - RNA, 19 nt, Artificial Sequence
  Description of Artificial Sequence: Synthetic oligonucleotide
  Sense strand starting at position 3171 of SEQ ID NO: 585409
ggugucuuccuugauuaac

SEQ ID NO: 637627 - RNA, 19 nt, Artificial Sequence
  Description of Artificial Sequence: Synthetic oligonucleotide
  Antisense strand to SEQ ID NO: 637626
guuaaucaaggaagacacc

SEQ ID NO: 637628 - RNA, 19 nt, Artificial Sequence
  Description of Artificial Sequence: Synthetic oligonucleotide
  Sense strand starting at position 3226 of SEQ ID NO: 585409
ccucuugaucuuggcauau

SEQ ID NO: 637629 - RNA, 19 nt, Artificial Sequence
  Description of Artificial Sequence: Synthetic oligonucleotide
  Antisense strand to SEQ ID NO: 637628
auaugccaagaucaagagg

SEQ ID NO: 637630 - RNA, 19 nt, Artificial Sequence
  Description of Artificial Sequence: Synthetic oligonucleotide
  Sense strand starting at position 3237 of SEQ ID NO: 585409
uggcauaugucuguggaca

SEQ ID NO: 637631 - RNA, 19 nt, Artificial Sequence
  Description of Artificial Sequence: Synthetic oligonucleotide
  Antisense strand to SEQ ID NO: 637630
uguccacagacauaugcca

SEQ ID NO: 637632 - RNA, 19 nt, Artificial Sequence
  Description of Artificial Sequence: Synthetic oligonucleotide
  Sense strand starting at position 3238 of SEQ ID NO: 585409
ggcauaugucuguggacac

SEQ ID NO: 637633 - RNA, 19 nt, Artificial Sequence
  Description of Artificial Sequence: Synthetic oligonucleotide
  Antisense strand to SEQ ID NO: 637632
guguccacagacauaugcc

SEQ ID NO: 637634 - RNA, 19 nt, Artificial Sequence
  Description of Artificial Sequence: Synthetic oligonucleotide
  Sense strand starting at position 3318 of SEQ ID NO: 585409
ugguguucugcagcucuau

SEQ ID NO: 637635 - RNA, 19 nt, Artificial Sequence
  Description of Artificial Sequence: Synthetic oligonucleotide
  Antisense strand to SEQ ID NO: 637634
auagagcugcagaacacca

SEQ ID NO: 637636 - RNA, 19 nt, Artificial Sequence
  Description of Artificial Sequence: Synthetic oligonucleotide
  Sense strand starting at position 3344 of SEQ ID NO: 585409
gcugcuuggcugucugauu

SEQ ID NO: 637637 - RNA, 19 nt, Artificial Sequence
  Description of Artificial Sequence: Synthetic oligonucleotide
  Antisense strand to SEQ ID NO: 637636
aaucagacagccaagcagc

SEQ ID NO: 637638 - RNA, 19 nt, Artificial Sequence
  Description of Artificial Sequence: Synthetic oligonucleotide
  Sense strand starting at position 3345 of SEQ ID NO: 585409
cugcuuggcugucugauua

SEQ ID NO: 637639 - RNA, 19 nt, Artificial Sequence
  Description of Artificial Sequence: Synthetic oligonucleotide
  Antisense strand to SEQ ID NO: 637638
uaaucagacagccaagcag

SEQ ID NO: 637640 - RNA, 19 nt, Artificial Sequence
  Description of Artificial Sequence: Synthetic oligonucleotide
  Sense strand starting at position 3349 of SEQ ID NO: 585409
uuggcugucugauuaacaa

SEQ ID NO: 637641 - RNA, 19 nt, Artificial Sequence
  Description of Artificial Sequence: Synthetic oligonucleotide
  Antisense strand to SEQ ID NO: 637640
uuguuaaucagacagccaa

SEQ ID NO: 637642 - RNA, 19 nt, Artificial Sequence
  Description of Artificial Sequence: Synthetic oligonucleotide
  Sense strand starting at position 3398 of SEQ ID NO: 585409
cuacaugagcccuguggau

SEQ ID NO: 637643 - RNA, 19 nt, Artificial Sequence
  Description of Artificial Sequence: Synthetic oligonucleotide
  Antisense strand to SEQ ID NO: 637642
auccacagggcucauguag

SEQ ID NO: 637644 - RNA, 19 nt, Artificial Sequence
  Description of Artificial Sequence: Synthetic oligonucleotide
  Sense strand starting at position 3404 of SEQ ID NO: 585409
gagcccuguggauagauca

SEQ ID NO: 637645 - RNA, 19 nt, Artificial Sequence
  Description of Artificial Sequence: Synthetic oligonucleotide
  Antisense strand to SEQ ID NO: 637644
ugaucuauccacagggcuc

SEQ ID NO: 637646 - RNA, 19 nt, Artificial Sequence
  Description of Artificial Sequence: Synthetic oligonucleotide
  Sense strand starting at position 3440 of SEQ ID NO: 585409
acaaguuggugacaggaaa

SEQ ID NO: 637647 - RNA, 19 nt, Artificial Sequence
  Description of Artificial Sequence: Synthetic oligonucleotide
  Antisense strand to SEQ ID NO: 637646
uuuccugucaccaacuugu

SEQ ID NO: 637648 - RNA, 19 nt, Artificial Sequence
  Description of Artificial Sequence: Synthetic oligonucleotide
  Sense strand starting at position 3456 of SEQ ID NO: 585409
aaaggaggugugggcaaua

SEQ ID NO: 637649 - RNA, 19 nt, Artificial Sequence
  Description of Artificial Sequence: Synthetic oligonucleotide
  Antisense strand to SEQ ID NO: 637648
uauugcccacaccuccuuu

SEQ ID NO: 637650 - RNA, 19 nt, Artificial Sequence
  Description of Artificial Sequence: Synthetic oligonucleotide
  Sense strand starting at position 3870 of SEQ ID NO: 585409
ugagaauaauuguacagug

SEQ ID NO: 637651 - RNA, 19 nt, Artificial Sequence
  Description of Artificial Sequence: Synthetic oligonucleotide
  Antisense strand to SEQ ID NO: 637650
cacuguacaauuauucuca

SEQ ID NO: 637652 - RNA, 19 nt, Artificial Sequence
  Description of Artificial Sequence: Synthetic oligonucleotide
  Sense strand starting at position 3875 of SEQ ID NO: 585409
auaauuguacagugaacau

SEQ ID NO: 637653 - RNA, 19 nt, Artificial Sequence
  Description of Artificial Sequence: Synthetic oligonucleotide
  Antisense strand to SEQ ID NO: 637652
auguucacuguacaauuau

SEQ ID NO: 637654 - RNA, 19 nt, Artificial Sequence
  Description of Artificial Sequence: Synthetic oligonucleotide
  Sense strand starting at position 222 of SEQ ID NO: 585410
gucagauccuucccuguga

SEQ ID NO: 637655 - RNA, 19 nt, Artificial Sequence
  Description of Artificial Sequence: Synthetic oligonucleotide
  Antisense strand to SEQ ID NO: 637654
ucacagggaaggaucugac

SEQ ID NO: 637656 - RNA, 19 nt, Artificial Sequence
  Description of Artificial Sequence: Synthetic oligonucleotide
  Sense strand starting at position 224 of SEQ ID NO: 585410
cagauccuucccugugagu

SEQ ID NO: 637657 - RNA, 19 nt, Artificial Sequence
  Description of Artificial Sequence: Synthetic oligonucleotide
  Antisense strand to SEQ ID NO: 637656
acucacagggaaggaucug

SEQ ID NO: 637658 - RNA, 19 nt, Artificial Sequence
  Description of Artificial Sequence: Synthetic oligonucleotide
  Sense strand starting at position 226 of SEQ ID NO: 585410
gauccuucccugugaguuc

SEQ ID NO: 637659 - RNA, 19 nt, Artificial Sequence
  Description of Artificial Sequence: Synthetic oligonucleotide
  Antisense strand to SEQ ID NO: 637658
gaacucacagggaaggauc

SEQ ID NO: 637660 - RNA, 19 nt, Artificial Sequence
  Description of Artificial Sequence: Synthetic oligonucleotide
  Sense strand starting at position 348 of SEQ ID NO: 585410
cacuauguuguccaggauu

SEQ ID NO: 637661 - RNA, 19 nt, Artificial Sequence
  Description of Artificial Sequence: Synthetic oligonucleotide
  Antisense strand to SEQ ID NO: 637660
aauccuggacaacauagug

SEQ ID NO: 637662 - RNA, 19 nt, Artificial Sequence
  Description of Artificial Sequence: Synthetic oligonucleotide
  Sense strand starting at position 350 of SEQ ID NO: 585410
cuauguuguccaggauugu

SEQ ID NO: 637663 - RNA, 19 nt, Artificial Sequence
  Description of Artificial Sequence: Synthetic oligonucleotide
  Antisense strand to SEQ ID NO: 637662
acaauccuggacaacauag

SEQ ID NO: 637664 - RNA, 19 nt, Artificial Sequence
  Description of Artificial Sequence: Synthetic oligonucleotide
  Sense strand starting at position 552 of SEQ ID NO: 585410
cuugguuucugucucauuu

SEQ ID NO: 637665 - RNA, 19 nt, Artificial Sequence
  Description of Artificial Sequence: Synthetic oligonucleotide
  Antisense strand to SEQ ID NO: 637664
aaaugagacagaaaccaag

SEQ ID NO: 637666 - RNA, 19 nt, Artificial Sequence
  Description of Artificial Sequence: Synthetic oligonucleotide
  Sense strand starting at position 876 of SEQ ID NO: 585410
ggcaguguucugggaaagc

SEQ ID NO: 637667 - RNA, 19 nt, Artificial Sequence
  Description of Artificial Sequence: Synthetic oligonucleotide
  Antisense strand to SEQ ID NO: 637666
gcuuucccagaacacugcc

SEQ ID NO: 637668 - RNA, 19 nt, Artificial Sequence
  Description of Artificial Sequence: Synthetic oligonucleotide
  Sense strand starting at position 1126 of SEQ ID NO: 585410
gguugcagcuuucucagau

SEQ ID NO: 637669 - RNA, 19 nt, Artificial Sequence
  Description of Artificial Sequence: Synthetic oligonucleotide
  Antisense strand to SEQ ID NO: 637668
aucugagaaagcugcaacc

SEQ ID NO: 637670 - RNA, 19 nt, Artificial Sequence
  Description of Artificial Sequence: Synthetic oligonucleotide
  Sense strand starting at position 1127 of SEQ ID NO: 585410
guugcagcuuucucagauu

SEQ ID NO: 637671 - RNA, 19 nt, Artificial Sequence
  Description of Artificial Sequence: Synthetic oligonucleotide
  Antisense strand to SEQ ID NO: 637670
aaucugagaaagcugcaac

SEQ ID NO: 637672 - RNA, 19 nt, Artificial Sequence
  Description of Artificial Sequence: Synthetic oligonucleotide
  Sense strand starting at position 1294 of SEQ ID NO: 585410
agucaugagcugcauacau

SEQ ID NO: 637673 - RNA, 19 nt, Artificial Sequence
  Description of Artificial Sequence: Synthetic oligonucleotide
  Antisense strand to SEQ ID NO: 637672
auguaugcagcucaugacu

SEQ ID NO: 637674 - RNA, 19 nt, Artificial Sequence
  Description of Artificial Sequence: Synthetic oligonucleotide
  Sense strand starting at position 1296 of SEQ ID NO: 585410
ucaugagcugcauacauca

SEQ ID NO: 637675 - RNA, 19 nt, Artificial Sequence
  Description of Artificial Sequence: Synthetic oligonucleotide
  Antisense strand to SEQ ID NO: 637674
ugauguaugcagcucauga

SEQ ID NO: 637676 - RNA, 19 nt, Artificial Sequence
  Description of Artificial Sequence: Synthetic oligonucleotide
  Sense strand starting at position 1488 of SEQ ID NO: 585410
ucaaguuccucaucuguga

SEQ ID NO: 637677 - RNA, 19 nt, Artificial Sequence
  Description of Artificial Sequence: Synthetic oligonucleotide
  Antisense strand to SEQ ID NO: 637676
ucacagaugaggaacuuga

SEQ ID NO: 637678 - RNA, 19 nt, Artificial Sequence
  Description of Artificial Sequence: Synthetic oligonucleotide
  Sense strand starting at position 1520 of SEQ ID NO: 585410
cuguuauaaucguucccag

SEQ ID NO: 637679 - RNA, 19 nt, Artificial Sequence
  Description of Artificial Sequence: Synthetic oligonucleotide
  Antisense strand to SEQ ID NO: 637678
cugggaacgauuauaacag

SEQ ID NO: 637680 - RNA, 19 nt, Artificial Sequence
  Description of Artificial Sequence: Synthetic oligonucleotide
  Sense strand starting at position 2115 of SEQ ID NO: 585410
cagauauacugacuagggu

SEQ ID NO: 637681 - RNA, 19 nt, Artificial Sequence
  Description of Artificial Sequence: Synthetic oligonucleotide
  Antisense strand to SEQ ID NO: 637680
acccuagucaguauaucug

SEQ ID NO: 637682 - RNA, 19 nt, Artificial Sequence
  Description of Artificial Sequence: Synthetic oligonucleotide
  Sense strand starting at position 2124 of SEQ ID NO: 585410
ugacuagggucuggaaacu

SEQ ID NO: 637683 - RNA, 19 nt, Artificial Sequence
  Description of Artificial Sequence: Synthetic oligonucleotide
  Antisense strand to SEQ ID NO: 637682
aguuuccagacccuaguca

SEQ ID NO: 637684 - RNA, 19 nt, Artificial Sequence
  Description of Artificial Sequence: Synthetic oligonucleotide
  Sense strand starting at position 2143 of SEQ ID NO: 585410
gggacccuucuggguuuaa

SEQ ID NO: 637685 - RNA, 19 nt, Artificial Sequence
  Description of Artificial Sequence: Synthetic oligonucleotide
  Antisense strand to SEQ ID NO: 637684
uuaaacccagaaggguccc

SEQ ID NO: 637686 - RNA, 19 nt, Artificial Sequence
  Description of Artificial Sequence: Synthetic oligonucleotide
  Sense strand starting at position 2152 of SEQ ID NO: 585410
cuggguuuaagaggaauuc

SEQ ID NO: 637687 - RNA, 19 nt, Artificial Sequence
  Description of Artificial Sequence: Synthetic oligonucleotide
  Antisense strand to SEQ ID NO: 637686
gaauuccucuuaaacccag

SEQ ID NO: 637688 - RNA, 19 nt, Artificial Sequence
  Description of Artificial Sequence: Synthetic oligonucleotide
  Sense strand starting at position 2252 of SEQ ID NO: 585410
agcagagacucagaggauu

SEQ ID NO: 637689 - RNA, 19 nt, Artificial Sequence
  Description of Artificial Sequence: Synthetic oligonucleotide
  Antisense strand to SEQ ID NO: 637688
aauccucugagucucugcu

SEQ ID NO: 637690 - RNA, 19 nt, Artificial Sequence
  Description of Artificial Sequence: Synthetic oligonucleotide
  Sense strand starting at position 2518 of SEQ ID NO: 585410
cagcauuguuaggagagga

SEQ ID NO: 637691 - RNA, 19 nt, Artificial Sequence
  Description of Artificial Sequence: Synthetic oligonucleotide
  Antisense strand to SEQ ID NO: 637690
uccucuccuaacaaugcug

SEQ ID NO: 637692 - RNA, 19 nt, Artificial Sequence
  Description of Artificial Sequence: Synthetic oligonucleotide
  Sense strand starting at position 2600 of SEQ ID NO: 585410
gccauaaucugccucagcu

SEQ ID NO: 637693 - RNA, 19 nt, Artificial Sequence
  Description of Artificial Sequence: Synthetic oligonucleotide
  Antisense strand to SEQ ID NO: 637692
agcugaggcagauuauggc

SEQ ID NO: 637694 - RNA, 19 nt, Artificial Sequence
  Description of Artificial Sequence: Synthetic oligonucleotide
  Sense strand starting at position 2667 of SEQ ID NO: 585410
ucaggugucuuccuugauu

SEQ ID NO: 637695 - RNA, 19 nt, Artificial Sequence
  Description of Artificial Sequence: Synthetic oligonucleotide
  Antisense strand to SEQ ID NO: 637694
aaucaaggaagacaccuga

SEQ ID NO: 637696 - RNA, 19 nt, Artificial Sequence
  Description of Artificial Sequence: Synthetic oligonucleotide
  Sense strand starting at position 2669 of SEQ ID NO: 585410
aggugucuuccuugauuaa

SEQ ID NO: 637697 - RNA, 19 nt, Artificial Sequence
  Description of Artificial Sequence: Synthetic oligonucleotide
  Antisense strand to SEQ ID NO: 637696
uuaaucaaggaagacaccu

SEQ ID NO: 637698 - RNA, 19 nt, Artificial Sequence
  Description of Artificial Sequence: Synthetic oligonucleotide
  Sense strand starting at position 2670 of SEQ ID NO: 585410
ggugucuuccuugauuaac

SEQ ID NO: 637699 - RNA, 19 nt, Artificial Sequence
  Description of Artificial Sequence: Synthetic oligonucleotide
  Antisense strand to SEQ ID NO: 637698
guuaaucaaggaagacacc

SEQ ID NO: 637700 - RNA, 19 nt, Artificial Sequence
  Description of Artificial Sequence: Synthetic oligonucleotide
  Sense strand starting at position 2725 of SEQ ID NO: 585410
ccucuugaucuuggcauau

SEQ ID NO: 637701 - RNA, 19 nt, Artificial Sequence
  Description of Artificial Sequence: Synthetic oligonucleotide
  Antisense strand to SEQ ID NO: 637700
auaugccaagaucaagagg

SEQ ID NO: 637702 - RNA, 19 nt, Artificial Sequence
  Description of Artificial Sequence: Synthetic oligonucleotide
  Sense strand starting at position 2736 of SEQ ID NO: 585410
uggcauaugucuguggaca

SEQ ID NO: 637703 - RNA, 19 nt, Artificial Sequence
  Description of Artificial Sequence: Synthetic oligonucleotide
  Antisense strand to SEQ ID NO: 637702
uguccacagacauaugcca

SEQ ID NO: 637704 - RNA, 19 nt, Artificial Sequence
  Description of Artificial Sequence: Synthetic oligonucleotide
  Sense strand starting at position 2737 of SEQ ID NO: 585410
ggcauaugucuguggacac

SEQ ID NO: 637705 - RNA, 19 nt, Artificial Sequence
  Description of Artificial Sequence: Synthetic oligonucleotide
  Antisense strand to SEQ ID NO: 637704
guguccacagacauaugcc

SEQ ID NO: 637706 - RNA, 19 nt, Artificial Sequence
  Description of Artificial Sequence: Synthetic oligonucleotide
  Sense strand starting at position 2817 of SEQ ID NO: 585410
ugguguucugcagcucuau

SEQ ID NO: 637707 - RNA, 19 nt, Artificial Sequence
  Description of Artificial Sequence: Synthetic oligonucleotide
  Antisense strand to SEQ ID NO: 637706
auagagcugcagaacacca

SEQ ID NO: 637708 - RNA, 19 nt, Artificial Sequence
  Description of Artificial Sequence: Synthetic oligonucleotide
  Sense strand starting at position 2843 of SEQ ID NO: 585410
gcugcuuggcugucugauu

SEQ ID NO: 637709 - RNA, 19 nt, Artificial Sequence
  Description of Artificial Sequence: Synthetic oligonucleotide
  Antisense strand to SEQ ID NO: 637708
aaucagacagccaagcagc

SEQ ID NO: 637710 - RNA, 19 nt, Artificial Sequence
  Description of Artificial Sequence: Synthetic oligonucleotide
  Sense strand starting at position 2844 of SEQ ID NO: 585410
cugcuuggcugucugauua

SEQ ID NO: 637711 - RNA, 19 nt, Artificial Sequence
  Description of Artificial Sequence: Synthetic oligonucleotide
  Antisense strand to SEQ ID NO: 637710
uaaucagacagccaagcag

SEQ ID NO: 637712 - RNA, 19 nt, Artificial Sequence
  Description of Artificial Sequence: Synthetic oligonucleotide
  Sense strand starting at position 2848 of SEQ ID NO: 585410
uuggcugucugauuaacaa

SEQ ID NO: 637713 - RNA, 19 nt, Artificial Sequence
  Description of Artificial Sequence: Synthetic oligonucleotide
  Antisense strand to SEQ ID NO: 637712
uuguuaaucagacagccaa

SEQ ID NO: 637714 - RNA, 19 nt, Artificial Sequence
  Description of Artificial Sequence: Synthetic oligonucleotide
  Sense strand starting at position 2897 of SEQ ID NO: 585410
cuacaugagcccuguggau

SEQ ID NO: 637715 - RNA, 19 nt, Artificial Sequence
  Description of Artificial Sequence: Synthetic oligonucleotide
  Antisense strand to SEQ ID NO: 637714
auccacagggcucauguag

SEQ ID NO: 637716 - RNA, 19 nt, Artificial Sequence
  Description of Artificial Sequence: Synthetic oligonucleotide
  Sense strand starting at position 2903 of SEQ ID NO: 585410
gagcccuguggauagauca

SEQ ID NO: 637717 - RNA, 19 nt, Artificial Sequence
  Description of Artificial Sequence: Synthetic oligonucleotide
  Antisense strand to SEQ ID NO: 637716
ugaucuauccacagggcuc

SEQ ID NO: 637718 - RNA, 19 nt, Artificial Sequence
  Description of Artificial Sequence: Synthetic oligonucleotide
  Sense strand starting at position 2925 of SEQ ID NO: 585410
acagaaaguuggugacaag

SEQ ID NO: 637719 - RNA, 19 nt, Artificial Sequence
  Description of Artificial Sequence: Synthetic oligonucleotide
  Antisense strand to SEQ ID NO: 637718
cuugucaccaacuuucugu

SEQ ID NO: 637720 - RNA, 19 nt, Artificial Sequence
  Description of Artificial Sequence: Synthetic oligonucleotide
  Sense strand starting at position 2939 of SEQ ID NO: 585410
acaaguuggugacaggaaa

SEQ ID NO: 637721 - RNA, 19 nt, Artificial Sequence
  Description of Artificial Sequence: Synthetic oligonucleotide
  Antisense strand to SEQ ID NO: 637720
uuuccugucaccaacuugu

SEQ ID NO: 637722 - RNA, 19 nt, Artificial Sequence
  Description of Artificial Sequence: Synthetic oligonucleotide
  Sense strand starting at position 2955 of SEQ ID NO: 585410
aaaggaggugugggcaaua

SEQ ID NO: 637723 - RNA, 19 nt, Artificial Sequence
  Description of Artificial Sequence: Synthetic oligonucleotide
  Antisense strand to SEQ ID NO: 637722
uauugcccacaccuccuuu

SEQ ID NO: 637724 - RNA, 19 nt, Artificial Sequence
  Description of Artificial Sequence: Synthetic oligonucleotide
  Sense strand starting at position 3369 of SEQ ID NO: 585410
ugagaauaauuguacagug

SEQ ID NO: 637725 - RNA, 19 nt, Artificial Sequence
  Description of Artificial Sequence: Synthetic oligonucleotide
  Antisense strand to SEQ ID NO: 637724
cacuguacaauuauucuca

SEQ ID NO: 637726 - RNA, 19 nt, Artificial Sequence
  Description of Artificial Sequence: Synthetic oligonucleotide
  Sense strand starting at position 3374 of SEQ ID NO: 585410
auaauuguacagugaacau

SEQ ID NO: 637727 - RNA, 19 nt, Artificial Sequence
  Description of Artificial Sequence: Synthetic oligonucleotide
  Antisense strand to SEQ ID NO: 637726
auguucacuguacaauuau

SEQ ID NO: 637728 - RNA, 19 nt, Artificial Sequence
  Description of Artificial Sequence: Synthetic oligonucleotide
  Sense strand starting at position 3581 of SEQ ID NO: 585410
acaugaggcuuuguagaaa

SEQ ID NO: 637729 - RNA, 19 nt, Artificial Sequence
  Description of Artificial Sequence: Synthetic oligonucleotide
  Antisense strand to SEQ ID NO: 637728
uuucuacaaagccucaugu

SEQ ID NO: 637730 - RNA, 19 nt, Artificial Sequence
  Description of Artificial Sequence: Synthetic oligonucleotide
  Sense strand starting at position 3821 of SEQ ID NO: 585410
gcuuaacauugacuggagu

SEQ ID NO: 637731 - RNA, 19 nt, Artificial Sequence
  Description of Artificial Sequence: Synthetic oligonucleotide
  Antisense strand to SEQ ID NO: 637730
acuccagucaauguuaagc

SEQ ID NO: 637732 - RNA, 19 nt, Artificial Sequence
  Description of Artificial Sequence: Synthetic oligonucleotide
  Sense strand starting at position 3822 of SEQ ID NO: 585410
cuuaacauugacuggaguu

SEQ ID NO: 637733 - RNA, 19 nt, Artificial Sequence
  Description of Artificial Sequence: Synthetic oligonucleotide
  Antisense strand to SEQ ID NO: 637732
aacuccagucaauguuaag

SEQ ID NO: 637734 - RNA, 19 nt, Artificial Sequence
  Description of Artificial Sequence: Synthetic oligonucleotide
  Sense strand starting at position 32 of SEQ ID NO: 585411
cuugguuucugucucauuu

SEQ ID NO: 637735 - RNA, 19 nt, Artificial Sequence
  Description of Artificial Sequence: Synthetic oligonucleotide
  Antisense strand to SEQ ID NO: 637734
aaaugagacagaaaccaag

SEQ ID NO: 637736 - RNA, 19 nt, Artificial Sequence
  Description of Artificial Sequence: Synthetic oligonucleotide
  Sense strand starting at position 356 of SEQ ID NO: 585411
ggcaguguucugggaaagc

SEQ ID NO: 637737 - RNA, 19 nt, Artificial Sequence
  Description of Artificial Sequence: Synthetic oligonucleotide
  Antisense strand to SEQ ID NO: 637736
gcuuucccagaacacugcc

SEQ ID NO: 637738 - RNA, 19 nt, Artificial Sequence
  Description of Artificial Sequence: Synthetic oligonucleotide
  Sense strand starting at position 606 of SEQ ID NO: 585411
gguugcagcuuucucagau

SEQ ID NO: 637739 - RNA, 19 nt, Artificial Sequence
  Description of Artificial Sequence: Synthetic oligonucleotide
  Antisense strand to SEQ ID NO: 637738
aucugagaaagcugcaacc

SEQ ID NO: 637740 - RNA, 19 nt, Artificial Sequence
  Description of Artificial Sequence: Synthetic oligonucleotide
  Sense strand starting at position 607 of SEQ ID NO: 585411
guugcagcuuucucagauu

SEQ ID NO: 637741 - RNA, 19 nt, Artificial Sequence
  Description of Artificial Sequence: Synthetic oligonucleotide
  Antisense strand to SEQ ID NO: 637740
aaucugagaaagcugcaac

SEQ ID NO: 637742 - RNA, 19 nt, Artificial Sequence
  Description of Artificial Sequence: Synthetic oligonucleotide
  Sense strand starting at position 774 of SEQ ID NO: 585411
agucaugagcugcauacau

SEQ ID NO: 637743 - RNA, 19 nt, Artificial Sequence
  Description of Artificial Sequence: Synthetic oligonucleotide
  Antisense strand to SEQ ID NO: 637742
auguaugcagcucaugacu

SEQ ID NO: 637744 - RNA, 19 nt, Artificial Sequence
  Description of Artificial Sequence: Synthetic oligonucleotide
  Sense strand starting at position 776 of SEQ ID NO: 585411
ucaugagcugcauacauca

SEQ ID NO: 637745 - RNA, 19 nt, Artificial Sequence
  Description of Artificial Sequence: Synthetic oligonucleotide
  Antisense strand to SEQ ID NO: 637744
ugauguaugcagcucauga

SEQ ID NO: 637746 - RNA, 19 nt, Artificial Sequence
  Description of Artificial Sequence: Synthetic oligonucleotide
  Sense strand starting at position 968 of SEQ ID NO: 585411
ucaaguuccucaucuguga

SEQ ID NO: 637747 - RNA, 19 nt, Artificial Sequence
  Description of Artificial Sequence: Synthetic oligonucleotide
  Antisense strand to SEQ ID NO: 637746
ucacagaugaggaacuuga

SEQ ID NO: 637748 - RNA, 19 nt, Artificial Sequence
  Description of Artificial Sequence: Synthetic oligonucleotide
  Sense strand starting at position 1000 of SEQ ID NO: 585411
cuguuauaaucguucccag

SEQ ID NO: 637749 - RNA, 19 nt, Artificial Sequence
  Description of Artificial Sequence: Synthetic oligonucleotide
  Antisense strand to SEQ ID NO: 637748
cugggaacgauuauaacag

SEQ ID NO: 637750 - RNA, 19 nt, Artificial Sequence
  Description of Artificial Sequence: Synthetic oligonucleotide
  Sense strand starting at position 1595 of SEQ ID NO: 585411
cagauauacugacuagggu

SEQ ID NO: 637751 - RNA, 19 nt, Artificial Sequence
  Description of Artificial Sequence: Synthetic oligonucleotide
  Antisense strand to SEQ ID NO: 637750
acccuagucaguauaucug

SEQ ID NO: 637752 - RNA, 19 nt, Artificial Sequence
  Description of Artificial Sequence: Synthetic oligonucleotide
  Sense strand starting at position 1604 of SEQ ID NO: 585411
ugacuagggucuggaaacu

SEQ ID NO: 637753 - RNA, 19 nt, Artificial Sequence
  Description of Artificial Sequence: Synthetic oligonucleotide
  Antisense strand to SEQ ID NO: 637752
aguuuccagacccuaguca

SEQ ID NO: 637754 - RNA, 19 nt, Artificial Sequence
  Description of Artificial Sequence: Synthetic oligonucleotide
  Sense strand starting at position 1623 of SEQ ID NO: 585411
gggacccuucuggguuuaa

SEQ ID NO: 637755 - RNA, 19 nt, Artificial Sequence
  Description of Artificial Sequence: Synthetic oligonucleotide
  Antisense strand to SEQ ID NO: 637754
uuaaacccagaaggguccc

SEQ ID NO: 637756 - RNA, 19 nt, Artificial Sequence
  Description of Artificial Sequence: Synthetic oligonucleotide
  Sense strand starting at position 1632 of SEQ ID NO: 585411
cuggguuuaagaggaauuc

SEQ ID NO: 637757 - RNA, 19 nt, Artificial Sequence
  Description of Artificial Sequence: Synthetic oligonucleotide
  Antisense strand to SEQ ID NO: 637756
gaauuccucuuaaacccag

SEQ ID NO: 637758 - RNA, 19 nt, Artificial Sequence
  Description of Artificial Sequence: Synthetic oligonucleotide
  Sense strand starting at position 1732 of SEQ ID NO: 585411
agcagagacucagaggauu

SEQ ID NO: 637759 - RNA, 19 nt, Artificial Sequence
  Description of Artificial Sequence: Synthetic oligonucleotide
  Antisense strand to SEQ ID NO: 637758
aauccucugagucucugcu

SEQ ID NO: 637760 - RNA, 19 nt, Artificial Sequence
  Description of Artificial Sequence: Synthetic oligonucleotide
  Sense strand starting at position 1998 of SEQ ID NO: 585411
cagcauuguuaggagagga

SEQ ID NO: 637761 - RNA, 19 nt, Artificial Sequence
  Description of Artificial Sequence: Synthetic oligonucleotide
  Antisense strand to SEQ ID NO: 637760
uccucuccuaacaaugcug

SEQ ID NO: 637762 - RNA, 19 nt, Artificial Sequence
  Description of Artificial Sequence: Synthetic oligonucleotide
  Sense strand starting at position 2080 of SEQ ID NO: 585411
gccauaaucugccucagcu

SEQ ID NO: 637763 - RNA, 19 nt, Artificial Sequence
  Description of Artificial Sequence: Synthetic oligonucleotide
  Antisense strand to SEQ ID NO: 637762
agcugaggcagauuauggc

SEQ ID NO: 637764 - RNA, 19 nt, Artificial Sequence
  Description of Artificial Sequence: Synthetic oligonucleotide
  Sense strand starting at position 2147 of SEQ ID NO: 585411
ucaggugucuuccuugauu

SEQ ID NO: 637765 - RNA, 19 nt, Artificial Sequence
  Description of Artificial Sequence: Synthetic oligonucleotide
  Antisense strand to SEQ ID NO: 637764
aaucaaggaagacaccuga

SEQ ID NO: 637766 - RNA, 19 nt, Artificial Sequence
  Description of Artificial Sequence: Synthetic oligonucleotide
  Sense strand starting at position 2149 of SEQ ID NO: 585411
aggugucuuccuugauuaa

SEQ ID NO: 637767 - RNA, 19 nt, Artificial Sequence
  Description of Artificial Sequence: Synthetic oligonucleotide
  Antisense strand to SEQ ID NO: 637766
uuaaucaaggaagacaccu

SEQ ID NO: 637768 - RNA, 19 nt, Artificial Sequence
  Description of Artificial Sequence: Synthetic oligonucleotide
  Sense strand starting at position 2150 of SEQ ID NO: 585411
ggugucuuccuugauuaac

SEQ ID NO: 637769 - RNA, 19 nt, Artificial Sequence
  Description of Artificial Sequence: Synthetic oligonucleotide
  Antisense strand to SEQ ID NO: 637768
guuaaucaaggaagacacc

SEQ ID NO: 637770 - RNA, 19 nt, Artificial Sequence
  Description of Artificial Sequence: Synthetic oligonucleotide
  Sense strand starting at position 2204 of SEQ ID NO: 585411
accucuugaucuuggcaua

SEQ ID NO: 637771 - RNA, 19 nt, Artificial Sequence
  Description of Artificial Sequence: Synthetic oligonucleotide
  Antisense strand to SEQ ID NO: 637770
uaugccaagaucaagaggu

SEQ ID NO: 637772 - RNA, 19 nt, Artificial Sequence
  Description of Artificial Sequence: Synthetic oligonucleotide
  Sense strand starting at position 2205 of SEQ ID NO: 585411
ccucuugaucuuggcauau

SEQ ID NO: 637773 - RNA, 19 nt, Artificial Sequence
  Description of Artificial Sequence: Synthetic oligonucleotide
  Antisense strand to SEQ ID NO: 637772
auaugccaagaucaagagg

SEQ ID NO: 637774 - RNA, 19 nt, Artificial Sequence
  Description of Artificial Sequence: Synthetic oligonucleotide
  Sense strand starting at position 2207 of SEQ ID NO: 585411
ucuugaucuuggcauaugu

SEQ ID NO: 637775 - RNA, 19 nt, Artificial Sequence
  Description of Artificial Sequence: Synthetic oligonucleotide
  Antisense strand to SEQ ID NO: 637774
acauaugccaagaucaaga

SEQ ID NO: 637776 - RNA, 19 nt, Artificial Sequence
  Description of Artificial Sequence: Synthetic oligonucleotide
  Sense strand starting at position 2216 of SEQ ID NO: 585411
uggcauaugucuguggaca

SEQ ID NO: 637777 - RNA, 19 nt, Artificial Sequence
  Description of Artificial Sequence: Synthetic oligonucleotide
  Antisense strand to SEQ ID NO: 637776
uguccacagacauaugcca

SEQ ID NO: 637778 - RNA, 19 nt, Artificial Sequence
  Description of Artificial Sequence: Synthetic oligonucleotide
  Sense strand starting at position 2217 of SEQ ID NO: 585411
ggcauaugucuguggacac

SEQ ID NO: 637779 - RNA, 19 nt, Artificial Sequence
  Description of Artificial Sequence: Synthetic oligonucleotide
  Antisense strand to SEQ ID NO: 637778
guguccacagacauaugcc

SEQ ID NO: 637780 - RNA, 19 nt, Artificial Sequence
  Description of Artificial Sequence: Synthetic oligonucleotide
  Sense strand starting at position 2297 of SEQ ID NO: 585411
ugguguucugcagcucuau

SEQ ID NO: 637781 - RNA, 19 nt, Artificial Sequence
  Description of Artificial Sequence: Synthetic oligonucleotide
  Antisense strand to SEQ ID NO: 637780
auagagcugcagaacacca

SEQ ID NO: 637782 - RNA, 19 nt, Artificial Sequence
  Description of Artificial Sequence: Synthetic oligonucleotide
  Sense strand starting at position 2323 of SEQ ID NO: 585411
gcugcuuggcugucugauu

SEQ ID NO: 637783 - RNA, 19 nt, Artificial Sequence
  Description of Artificial Sequence: Synthetic oligonucleotide
  Antisense strand to SEQ ID NO: 637782
aaucagacagccaagcagc

SEQ ID NO: 637784 - RNA, 19 nt, Artificial Sequence
  Description of Artificial Sequence: Synthetic oligonucleotide
  Sense strand starting at position 2324 of SEQ ID NO: 585411
cugcuuggcugucugauua

SEQ ID NO: 637785 - RNA, 19 nt, Artificial Sequence
  Description of Artificial Sequence: Synthetic oligonucleotide
  Antisense strand to SEQ ID NO: 637784
uaaucagacagccaagcag

SEQ ID NO: 637786 - RNA, 19 nt, Artificial Sequence
  Description of Artificial Sequence: Synthetic oligonucleotide
  Sense strand starting at position 2328 of SEQ ID NO: 585411
uuggcugucugauuaacaa

SEQ ID NO: 637787 - RNA, 19 nt, Artificial Sequence
  Description of Artificial Sequence: Synthetic oligonucleotide
  Antisense strand to SEQ ID NO: 637786
uuguuaaucagacagccaa

SEQ ID NO: 637788 - RNA, 19 nt, Artificial Sequence
  Description of Artificial Sequence: Synthetic oligonucleotide
  Sense strand starting at position 2377 of SEQ ID NO: 585411
cuacaugagcccuguggau

SEQ ID NO: 637789 - RNA, 19 nt, Artificial Sequence
  Description of Artificial Sequence: Synthetic oligonucleotide
  Antisense strand to SEQ ID NO: 637788
auccacagggcucauguag

SEQ ID NO: 637790 - RNA, 19 nt, Artificial Sequence
  Description of Artificial Sequence: Synthetic oligonucleotide
  Sense strand starting at position 2383 of SEQ ID NO: 585411
gagcccuguggauagauca

SEQ ID NO: 637791 - RNA, 19 nt, Artificial Sequence
  Description of Artificial Sequence: Synthetic oligonucleotide
  Antisense strand to SEQ ID NO: 637790
ugaucuauccacagggcuc

SEQ ID NO: 637792 - RNA, 19 nt, Artificial Sequence
  Description of Artificial Sequence: Synthetic oligonucleotide
  Sense strand starting at position 2405 of SEQ ID NO: 585411
acagaaaguuggugacaag

SEQ ID NO: 637793 - RNA, 19 nt, Artificial Sequence
  Description of Artificial Sequence: Synthetic oligonucleotide
  Antisense strand to SEQ ID NO: 637792
cuugucaccaacuuucugu

SEQ ID NO: 637794 - RNA, 19 nt, Artificial Sequence
  Description of Artificial Sequence: Synthetic oligonucleotide
  Sense strand starting at position 2419 of SEQ ID NO: 585411
acaaguuggugacaggaaa

SEQ ID NO: 637795 - RNA, 19 nt, Artificial Sequence
  Description of Artificial Sequence: Synthetic oligonucleotide
  Antisense strand to SEQ ID NO: 637794
uuuccugucaccaacuugu

SEQ ID NO: 637796 - RNA, 19 nt, Artificial Sequence
  Description of Artificial Sequence: Synthetic oligonucleotide
  Sense strand starting at position 2435 of SEQ ID NO: 585411
aaaggaggugugggcaaua

SEQ ID NO: 637797 - RNA, 19 nt, Artificial Sequence
  Description of Artificial Sequence: Synthetic oligonucleotide
  Antisense strand to SEQ ID NO: 637796
uauugcccacaccuccuuu

SEQ ID NO: 637798 - RNA, 19 nt, Artificial Sequence
  Description of Artificial Sequence: Synthetic oligonucleotide
  Sense strand starting at position 2557 of SEQ ID NO: 585411
guggcacugugauggagaa

SEQ ID NO: 637799 - RNA, 19 nt, Artificial Sequence
  Description of Artificial Sequence: Synthetic oligonucleotide
  Antisense strand to SEQ ID NO: 637798
uucuccaucacagugccac

SEQ ID NO: 637800 - RNA, 19 nt, Artificial Sequence
  Description of Artificial Sequence: Synthetic oligonucleotide
  Sense strand starting at position 2830 of SEQ ID NO: 585411
gugcaaacauagggugaaa

SEQ ID NO: 637801 - RNA, 19 nt, Artificial Sequence
  Description of Artificial Sequence: Synthetic oligonucleotide
  Antisense strand to SEQ ID NO: 637800
uuucacccuauguuugcac

SEQ ID NO: 637802 - RNA, 19 nt, Artificial Sequence
  Description of Artificial Sequence: Synthetic oligonucleotide
  Sense strand starting at position 2849 of SEQ ID NO: 585411
ugagaauaauuguacagug

SEQ ID NO: 637803 - RNA, 19 nt, Artificial Sequence
  Description of Artificial Sequence: Synthetic oligonucleotide
  Antisense strand to SEQ ID NO: 637802
cacuguacaauuauucuca

SEQ ID NO: 637804 - RNA, 19 nt, Artificial Sequence
  Description of Artificial Sequence: Synthetic oligonucleotide
  Sense strand starting at position 2854 of SEQ ID NO: 585411
auaauuguacagugaacau

SEQ ID NO: 637805 - RNA, 19 nt, Artificial Sequence
  Description of Artificial Sequence: Synthetic oligonucleotide
  Antisense strand to SEQ ID NO: 637804
auguucacuguacaauuau

SEQ ID NO: 637806 - RNA, 19 nt, Artificial Sequence
  Description of Artificial Sequence: Synthetic oligonucleotide
  Sense strand starting at position 3061 of SEQ ID NO: 585411
acaugaggcuuuguagaaa

SEQ ID NO: 637807 - RNA, 19 nt, Artificial Sequence
  Description of Artificial Sequence: Synthetic oligonucleotide
  Antisense strand to SEQ ID NO: 637806
uuucuacaaagccucaugu

SEQ ID NO: 637808 - RNA, 19 nt, Artificial Sequence
  Description of Artificial Sequence: Synthetic oligonucleotide
  Sense strand starting at position 3301 of SEQ ID NO: 585411
gcuuaacauugacuggagu

SEQ ID NO: 637809 - RNA, 19 nt, Artificial Sequence
  Description of Artificial Sequence: Synthetic oligonucleotide
  Antisense strand to SEQ ID NO: 637808
acuccagucaauguuaagc

SEQ ID NO: 637810 - RNA, 19 nt, Artificial Sequence
  Description of Artificial Sequence: Synthetic oligonucleotide
  Sense strand starting at position 3302 of SEQ ID NO: 585411
cuuaacauugacuggaguu

SEQ ID NO: 637811 - RNA, 19 nt, Artificial Sequence
  Description of Artificial Sequence: Synthetic oligonucleotide
  Antisense strand to SEQ ID NO: 637810
aacuccagucaauguuaag

SEQ ID NO: 637812 - RNA, 19 nt, Artificial Sequence
  Description of Artificial Sequence: Synthetic oligonucleotide
  Sense strand starting at position 3968 of SEQ ID NO: 585411
gcugguauuauaggcaaga

SEQ ID NO: 637813 - RNA, 19 nt, Artificial Sequence
  Description of Artificial Sequence: Synthetic oligonucleotide
  Antisense strand to SEQ ID NO: 637812
ucuugccuauaauaccagc

SEQ ID NO: 637814 - RNA, 19 nt, Artificial Sequence
  Description of Artificial Sequence: Synthetic oligonucleotide
  Sense strand starting at position 1066 of SEQ ID NO: 585412
ggucucaaucccugaggaa

SEQ ID NO: 637815 - RNA, 19 nt, Artificial Sequence
  Description of Artificial Sequence: Synthetic oligonucleotide
  Antisense strand to SEQ ID NO: 637814
uuccucagggauugagacc

SEQ ID NO: 637816 - RNA, 19 nt, Artificial Sequence
  Description of Artificial Sequence: Synthetic oligonucleotide
  Sense strand starting at position 1230 of SEQ ID NO: 585412
ggacaugucugggagguca

SEQ ID NO: 637817 - RNA, 19 nt, Artificial Sequence
  Description of Artificial Sequence: Synthetic oligonucleotide
  Antisense strand to SEQ ID NO: 637816
ugaccucccagacaugucc

SEQ ID NO: 637818 - RNA, 19 nt, Artificial Sequence
  Description of Artificial Sequence: Synthetic oligonucleotide
  Sense strand starting at position 1249 of SEQ ID NO: 585412
gguggauguuuaccaauga

SEQ ID NO: 637819 - RNA, 19 nt, Artificial Sequence
  Description of Artificial Sequence: Synthetic oligonucleotide
  Antisense strand to SEQ ID NO: 637818
ucauugguaaacauccacc

SEQ ID NO: 637820 - RNA, 19 nt, Artificial Sequence
  Description of Artificial Sequence: Synthetic oligonucleotide
  Sense strand starting at position 1253 of SEQ ID NO: 585412
gauguuuaccaaugaggug

SEQ ID NO: 637821 - RNA, 19 nt, Artificial Sequence
  Description of Artificial Sequence: Synthetic oligonucleotide
  Antisense strand to SEQ ID NO: 637820
caccucauugguaaacauc

SEQ ID NO: 637822 - RNA, 19 nt, Artificial Sequence
  Description of Artificial Sequence: Synthetic oligonucleotide
  Sense strand starting at position 1753 of SEQ ID NO: 585412
gaggaaucauggcagaaac

SEQ ID NO: 637823 - RNA, 19 nt, Artificial Sequence
  Description of Artificial Sequence: Synthetic oligonucleotide
  Antisense strand to SEQ ID NO: 637822
guuucugccaugauuccuc

SEQ ID NO: 637824 - RNA, 19 nt, Artificial Sequence
  Description of Artificial Sequence: Synthetic oligonucleotide
  Sense strand starting at position 2191 of SEQ ID NO: 585412
gcgacugaguucugggaaa

SEQ ID NO: 637825 - RNA, 19 nt, Artificial Sequence
  Description of Artificial Sequence: Synthetic oligonucleotide
  Antisense strand to SEQ ID NO: 637824
uuucccagaacucagucgc

SEQ ID NO: 637826 - RNA, 19 nt, Artificial Sequence
  Description of Artificial Sequence: Synthetic oligonucleotide
  Sense strand starting at position 2261 of SEQ ID NO: 585412
ggccuagaguuccaaagaa

SEQ ID NO: 637827 - RNA, 19 nt, Artificial Sequence
  Description of Artificial Sequence: Synthetic oligonucleotide
  Antisense strand to SEQ ID NO: 637826
uucuuuggaacucuaggcc

SEQ ID NO: 637828 - RNA, 19 nt, Artificial Sequence
  Description of Artificial Sequence: Synthetic oligonucleotide
  Sense strand starting at position 2426 of SEQ ID NO: 585412
cuguccuugucccaaacaa

SEQ ID NO: 637829 - RNA, 19 nt, Artificial Sequence
  Description of Artificial Sequence: Synthetic oligonucleotide
  Antisense strand to SEQ ID NO: 637828
uuguuugggacaaggacag

SEQ ID NO: 637830 - RNA, 19 nt, Artificial Sequence
  Description of Artificial Sequence: Synthetic oligonucleotide
  Sense strand starting at position 2451 of SEQ ID NO: 585412
ucauacuugucccaguaua

SEQ ID NO: 637831 - RNA, 19 nt, Artificial Sequence
  Description of Artificial Sequence: Synthetic oligonucleotide
  Antisense strand to SEQ ID NO: 637830
uauacugggacaaguauga

SEQ ID NO: 637832 - RNA, 19 nt, Artificial Sequence
  Description of Artificial Sequence: Synthetic oligonucleotide
  Sense strand starting at position 2544 of SEQ ID NO: 585412
gguguuugccucuugucca

SEQ ID NO: 637833 - RNA, 19 nt, Artificial Sequence
  Description of Artificial Sequence: Synthetic oligonucleotide
  Antisense strand to SEQ ID NO: 637832
uggacaagaggcaaacacc

SEQ ID NO: 637834 - RNA, 19 nt, Artificial Sequence
  Description of Artificial Sequence: Synthetic oligonucleotide
  Sense strand starting at position 2551 of SEQ ID NO: 585412
gccucuuguccaggugaaa

SEQ ID NO: 637835 - RNA, 19 nt, Artificial Sequence
  Description of Artificial Sequence: Synthetic oligonucleotide
  Antisense strand to SEQ ID NO: 637834
uuucaccuggacaagaggc

SEQ ID NO: 637836 - RNA, 19 nt, Artificial Sequence
  Description of Artificial Sequence: Synthetic oligonucleotide
  Sense strand starting at position 2602 of SEQ ID NO: 585412
uguccuaguuuggaagaua

SEQ ID NO: 637837 - RNA, 19 nt, Artificial Sequence
  Description of Artificial Sequence: Synthetic oligonucleotide
  Antisense strand to SEQ ID NO: 637836
uaucuuccaaacuaggaca

SEQ ID NO: 637838 - RNA, 19 nt, Artificial Sequence
  Description of Artificial Sequence: Synthetic oligonucleotide
  Sense strand starting at position 2642 of SEQ ID NO: 585412
agagaugaugcuggacagu

SEQ ID NO: 637839 - RNA, 19 nt, Artificial Sequence
  Description of Artificial Sequence: Synthetic oligonucleotide
  Antisense strand to SEQ ID NO: 637838
acuguccagcaucaucucu

SEQ ID NO: 637840 - RNA, 19 nt, Artificial Sequence
  Description of Artificial Sequence: Synthetic oligonucleotide
  Sense strand starting at position 2661 of SEQ ID NO: 585412
caaguaugaugaggucuca

SEQ ID NO: 637841 - RNA, 19 nt, Artificial Sequence
  Description of Artificial Sequence: Synthetic oligonucleotide
  Antisense strand to SEQ ID NO: 637840
ugagaccucaucauacuug

SEQ ID NO: 637842 - RNA, 19 nt, Artificial Sequence
  Description of Artificial Sequence: Synthetic oligonucleotide
  Sense strand starting at position 2673 of SEQ ID NO: 585412
ggucucaucucacuccuga

SEQ ID NO: 637843 - RNA, 19 nt, Artificial Sequence
  Description of Artificial Sequence: Synthetic oligonucleotide
  Antisense strand to SEQ ID NO: 637842
ucaggagugagaugagacc

SEQ ID NO: 637844 - RNA, 19 nt, Artificial Sequence
  Description of Artificial Sequence: Synthetic oligonucleotide
  Sense strand starting at position 2677 of SEQ ID NO: 585412
ucaucucacuccugaagga

SEQ ID NO: 637845 - RNA, 19 nt, Artificial Sequence
  Description of Artificial Sequence: Synthetic oligonucleotide
  Antisense strand to SEQ ID NO: 637844
uccuucaggagugagauga

SEQ ID NO: 637846 - RNA, 19 nt, Artificial Sequence
  Description of Artificial Sequence: Synthetic oligonucleotide
  Sense strand starting at position 2718 of SEQ ID NO: 585412
ucagguggcuuccacagaa

SEQ ID NO: 637847 - RNA, 19 nt, Artificial Sequence
  Description of Artificial Sequence: Synthetic oligonucleotide
  Antisense strand to SEQ ID NO: 637846
uucuguggaagccaccuga

SEQ ID NO: 637848 - RNA, 19 nt, Artificial Sequence
  Description of Artificial Sequence: Synthetic oligonucleotide
  Sense strand starting at position 2722 of SEQ ID NO: 585412
guggcuuccacagaacaga

SEQ ID NO: 637849 - RNA, 19 nt, Artificial Sequence
  Description of Artificial Sequence: Synthetic oligonucleotide
  Antisense strand to SEQ ID NO: 637848
ucuguucuguggaagccac

SEQ ID NO: 637850 - RNA, 19 nt, Artificial Sequence
  Description of Artificial Sequence: Synthetic oligonucleotide
  Sense strand starting at position 2769 of SEQ ID NO: 585412
ccaggaucaauguggcaga

SEQ ID NO: 637851 - RNA, 19 nt, Artificial Sequence
  Description of Artificial Sequence: Synthetic oligonucleotide
  Antisense strand to SEQ ID NO: 637850
ucugccacauugauccugg

SEQ ID NO: 637852 - RNA, 19 nt, Artificial Sequence
  Description of Artificial Sequence: Synthetic oligonucleotide
  Sense strand starting at position 2783 of SEQ ID NO: 585412
gcagacaccuuccaaaguu

SEQ ID NO: 637853 - RNA, 19 nt, Artificial Sequence
  Description of Artificial Sequence: Synthetic oligonucleotide
  Antisense strand to SEQ ID NO: 637852
aacuuuggaaggugucugc

SEQ ID NO: 637854 - RNA, 19 nt, Artificial Sequence
  Description of Artificial Sequence: Synthetic oligonucleotide
  Sense strand starting at position 2878 of SEQ ID NO: 585412
agggacuuguucugaagcu

SEQ ID NO: 637855 - RNA, 19 nt, Artificial Sequence
  Description of Artificial Sequence: Synthetic oligonucleotide
  Antisense strand to SEQ ID NO: 637854
agcuucagaacaagucccu

SEQ ID NO: 637856 - RNA, 19 nt, Artificial Sequence
  Description of Artificial Sequence: Synthetic oligonucleotide
  Sense strand starting at position 2894 of SEQ ID NO: 585412
gcugcauuugcagagccaa

SEQ ID NO: 637857 - RNA, 19 nt, Artificial Sequence
  Description of Artificial Sequence: Synthetic oligonucleotide
  Antisense strand to SEQ ID NO: 637856
uuggcucugcaaaugcagc

SEQ ID NO: 637858 - RNA, 19 nt, Artificial Sequence
  Description of Artificial Sequence: Synthetic oligonucleotide
  Sense strand starting at position 3262 of SEQ ID NO: 585412
auauguaacuuagguauga

SEQ ID NO: 637859 - RNA, 19 nt, Artificial Sequence
  Description of Artificial Sequence: Synthetic oligonucleotide
  Antisense strand to SEQ ID NO: 637858
ucauaccuaaguuacauau

SEQ ID NO: 637860 - RNA, 19 nt, Artificial Sequence
  Description of Artificial Sequence: Synthetic oligonucleotide
  Sense strand starting at position 3282 of SEQ ID NO: 585412
guggacaccucuuaagugu

SEQ ID NO: 637861 - RNA, 19 nt, Artificial Sequence
  Description of Artificial Sequence: Synthetic oligonucleotide
  Antisense strand to SEQ ID NO: 637860
acacuuaagagguguccac

SEQ ID NO: 637862 - RNA, 19 nt, Artificial Sequence
  Description of Artificial Sequence: Synthetic oligonucleotide
  Sense strand starting at position 3295 of SEQ ID NO: 585412
aaguguacagcugaugaau

SEQ ID NO: 637863 - RNA, 19 nt, Artificial Sequence
  Description of Artificial Sequence: Synthetic oligonucleotide
  Antisense strand to SEQ ID NO: 637862
auucaucagcuguacacuu

SEQ ID NO: 637864 - RNA, 19 nt, Artificial Sequence
  Description of Artificial Sequence: Synthetic oligonucleotide
  Sense strand starting at position 3297 of SEQ ID NO: 585412
guguacagcugaugaauuu

SEQ ID NO: 637865 - RNA, 19 nt, Artificial Sequence
  Description of Artificial Sequence: Synthetic oligonucleotide
  Antisense strand to SEQ ID NO: 637864
aaauucaucagcuguacac

SEQ ID NO: 637866 - RNA, 19 nt, Artificial Sequence
  Description of Artificial Sequence: Synthetic oligonucleotide
  Sense strand starting at position 3391 of SEQ ID NO: 585412
gcugauacccuccaaagau

SEQ ID NO: 637867 - RNA, 19 nt, Artificial Sequence
  Description of Artificial Sequence: Synthetic oligonucleotide
  Antisense strand to SEQ ID NO: 637866
aucuuuggaggguaucagc

SEQ ID NO: 637868 - RNA, 19 nt, Artificial Sequence
  Description of Artificial Sequence: Synthetic oligonucleotide
  Sense strand starting at position 3490 of SEQ ID NO: 585412
uguacucauuucuguuuga

SEQ ID NO: 637869 - RNA, 19 nt, Artificial Sequence
  Description of Artificial Sequence: Synthetic oligonucleotide
  Antisense strand to SEQ ID NO: 637868
ucaaacagaaaugaguaca

SEQ ID NO: 637870 - RNA, 19 nt, Artificial Sequence
  Description of Artificial Sequence: Synthetic oligonucleotide
  Sense strand starting at position 3538 of SEQ ID NO: 585412
auucauauacgugguugua

SEQ ID NO: 637871 - RNA, 19 nt, Artificial Sequence
  Description of Artificial Sequence: Synthetic oligonucleotide
  Antisense strand to SEQ ID NO: 637870
uacaaccacguauaugaau

SEQ ID NO: 637872 - RNA, 19 nt, Artificial Sequence
  Description of Artificial Sequence: Synthetic oligonucleotide
  Sense strand starting at position 3547 of SEQ ID NO: 585412
cgugguuguauguaucagu

SEQ ID NO: 637873 - RNA, 19 nt, Artificial Sequence
  Description of Artificial Sequence: Synthetic oligonucleotide
  Antisense strand to SEQ ID NO: 637872
acugauacauacaaccacg

SEQ ID NO: 637874 - RNA, 19 nt, Artificial Sequence
  Description of Artificial Sequence: Synthetic oligonucleotide
  Sense strand starting at position 3550 of SEQ ID NO: 585412
gguuguauguaucaguaau

SEQ ID NO: 637875 - RNA, 19 nt, Artificial Sequence
  Description of Artificial Sequence: Synthetic oligonucleotide
  Antisense strand to SEQ ID NO: 637874
auuacugauacauacaacc

SEQ ID NO: 637876 - RNA, 19 nt, Artificial Sequence
  Description of Artificial Sequence: Synthetic oligonucleotide
  Sense strand starting at position 3616 of SEQ ID NO: 585412
cuaauauauucuguugaug

SEQ ID NO: 637877 - RNA, 19 nt, Artificial Sequence
  Description of Artificial Sequence: Synthetic oligonucleotide
  Antisense strand to SEQ ID NO: 637876
caucaacagaauauauuag

SEQ ID NO: 637878 - RNA, 19 nt, Artificial Sequence
  Description of Artificial Sequence: Synthetic oligonucleotide
  Sense strand starting at position 3684 of SEQ ID NO: 585412
cgaacauucucauacauga

SEQ ID NO: 637879 - RNA, 19 nt, Artificial Sequence
  Description of Artificial Sequence: Synthetic oligonucleotide
  Antisense strand to SEQ ID NO: 637878
ucauguaugagaauguucg

SEQ ID NO: 637880 - RNA, 19 nt, Artificial Sequence
  Description of Artificial Sequence: Synthetic oligonucleotide
  Sense strand starting at position 3711 of SEQ ID NO: 585412
ucacuuagcuugcaaguua

SEQ ID NO: 637881 - RNA, 19 nt, Artificial Sequence
  Description of Artificial Sequence: Synthetic oligonucleotide
  Antisense strand to SEQ ID NO: 637880
uaacuugcaagcuaaguga

SEQ ID NO: 637882 - RNA, 19 nt, Artificial Sequence
  Description of Artificial Sequence: Synthetic oligonucleotide
  Sense strand starting at position 3773 of SEQ ID NO: 585412
uuuccuaaguuugagauaa

SEQ ID NO: 637883 - RNA, 19 nt, Artificial Sequence
  Description of Artificial Sequence: Synthetic oligonucleotide
  Antisense strand to SEQ ID NO: 637882
uuaucucaaacuuaggaaa

SEQ ID NO: 637884 - RNA, 19 nt, Artificial Sequence
  Description of Artificial Sequence: Synthetic oligonucleotide
  Sense strand starting at position 3775 of SEQ ID NO: 585412
uccuaaguuugagauaaua

SEQ ID NO: 637885 - RNA, 19 nt, Artificial Sequence
  Description of Artificial Sequence: Synthetic oligonucleotide
  Antisense strand to SEQ ID NO: 637884
uauuaucucaaacuuagga

SEQ ID NO: 637886 - RNA, 19 nt, Artificial Sequence
  Description of Artificial Sequence: Synthetic oligonucleotide
  Sense strand starting at position 3837 of SEQ ID NO: 585412
uuacuuggagaguguuaga

SEQ ID NO: 637887 - RNA, 19 nt, Artificial Sequence
  Description of Artificial Sequence: Synthetic oligonucleotide
  Antisense strand to SEQ ID NO: 637886
ucuaacacucuccaaguaa

SEQ ID NO: 637888 - RNA, 19 nt, Artificial Sequence
  Description of Artificial Sequence: Synthetic oligonucleotide
  Sense strand starting at position 3961 of SEQ ID NO: 585412
cauggagggacauguaagu

SEQ ID NO: 637889 - RNA, 19 nt, Artificial Sequence
  Description of Artificial Sequence: Synthetic oligonucleotide
  Antisense strand to SEQ ID NO: 637888
acuuacaugucccuccaug

SEQ ID NO: 637890 - RNA, 19 nt, Artificial Sequence
  Description of Artificial Sequence: Synthetic oligonucleotide
  Sense strand starting at position 3978 of SEQ ID NO: 585412
guaacauucugggugugua

SEQ ID NO: 637891 - RNA, 19 nt, Artificial Sequence
  Description of Artificial Sequence: Synthetic oligonucleotide
  Antisense strand to SEQ ID NO: 637890
uacacacccagaauguuac

SEQ ID NO: 637892 - RNA, 19 nt, Artificial Sequence
  Description of Artificial Sequence: Synthetic oligonucleotide
  Sense strand starting at position 3979 of SEQ ID NO: 585412
uaacauucuggguguguau

SEQ ID NO: 637893 - RNA, 19 nt, Artificial Sequence
  Description of Artificial Sequence: Synthetic oligonucleotide
  Antisense strand to SEQ ID NO: 637892
auacacacccagaauguua

SEQ ID NO: 637894 - RNA, 19 nt, Artificial Sequence
  Description of Artificial Sequence: Synthetic oligonucleotide
  Sense strand starting at position 871 of SEQ ID NO: 585413
ggucucaaucccugaggaa

SEQ ID NO: 637895 - RNA, 19 nt, Artificial Sequence
  Description of Artificial Sequence: Synthetic oligonucleotide
  Antisense strand to SEQ ID NO: 637894
uuccucagggauugagacc

SEQ ID NO: 637896 - RNA, 19 nt, Artificial Sequence
  Description of Artificial Sequence: Synthetic oligonucleotide
  Sense strand starting at position 1035 of SEQ ID NO: 585413
ggacaugucugggagguca

SEQ ID NO: 637897 - RNA, 19 nt, Artificial Sequence
  Description of Artificial Sequence: Synthetic oligonucleotide
  Antisense strand to SEQ ID NO: 637896
ugaccucccagacaugucc

SEQ ID NO: 637898 - RNA, 19 nt, Artificial Sequence
  Description of Artificial Sequence: Synthetic oligonucleotide
  Sense strand starting at position 1054 of SEQ ID NO: 585413
gguggauguuuaccaauga

SEQ ID NO: 637899 - RNA, 19 nt, Artificial Sequence
  Description of Artificial Sequence: Synthetic oligonucleotide
  Antisense strand to SEQ ID NO: 637898
ucauugguaaacauccacc

SEQ ID NO: 637900 - RNA, 19 nt, Artificial Sequence
  Description of Artificial Sequence: Synthetic oligonucleotide
  Sense strand starting at position 1058 of SEQ ID NO: 585413
gauguuuaccaaugaggug

SEQ ID NO: 637901 - RNA, 19 nt, Artificial Sequence
  Description of Artificial Sequence: Synthetic oligonucleotide
  Antisense strand to SEQ ID NO: 637900
caccucauugguaaacauc

SEQ ID NO: 637902 - RNA, 19 nt, Artificial Sequence
  Description of Artificial Sequence: Synthetic oligonucleotide
  Sense strand starting at position 1558 of SEQ ID NO: 585413
gaggaaucauggcagaaac

SEQ ID NO: 637903 - RNA, 19 nt, Artificial Sequence
  Description of Artificial Sequence: Synthetic oligonucleotide
  Antisense strand to SEQ ID NO: 637902
guuucugccaugauuccuc

SEQ ID NO: 637904 - RNA, 19 nt, Artificial Sequence
  Description of Artificial Sequence: Synthetic oligonucleotide
  Sense strand starting at position 2066 of SEQ ID NO: 585413
ggccuagaguuccaaagaa

SEQ ID NO: 637905 - RNA, 19 nt, Artificial Sequence
  Description of Artificial Sequence: Synthetic oligonucleotide
  Antisense strand to SEQ ID NO: 637904
uucuuuggaacucuaggcc

SEQ ID NO: 637906 - RNA, 19 nt, Artificial Sequence
  Description of Artificial Sequence: Synthetic oligonucleotide
  Sense strand starting at position 2349 of SEQ ID NO: 585413
gguguuugccucuugucca

SEQ ID NO: 637907 - RNA, 19 nt, Artificial Sequence
  Description of Artificial Sequence: Synthetic oligonucleotide
  Antisense strand to SEQ ID NO: 637906
uggacaagaggcaaacacc

SEQ ID NO: 637908 - RNA, 19 nt, Artificial Sequence
  Description of Artificial Sequence: Synthetic oligonucleotide
  Sense strand starting at position 2356 of SEQ ID NO: 585413
gccucuuguccaggugaaa

SEQ ID NO: 637909 - RNA, 19 nt, Artificial Sequence
  Description of Artificial Sequence: Synthetic oligonucleotide
  Antisense strand to SEQ ID NO: 637908
uuucaccuggacaagaggc

SEQ ID NO: 637910 - RNA, 19 nt, Artificial Sequence
  Description of Artificial Sequence: Synthetic oligonucleotide
  Sense strand starting at position 2407 of SEQ ID NO: 585413
uguccuaguuuggaagaua

SEQ ID NO: 637911 - RNA, 19 nt, Artificial Sequence
  Description of Artificial Sequence: Synthetic oligonucleotide
  Antisense strand to SEQ ID NO: 637910
uaucuuccaaacuaggaca

SEQ ID NO: 637912 - RNA, 19 nt, Artificial Sequence
  Description of Artificial Sequence: Synthetic oligonucleotide
  Sense strand starting at position 2447 of SEQ ID NO: 585413
agagaugaugcuggacagu

SEQ ID NO: 637913 - RNA, 19 nt, Artificial Sequence
  Description of Artificial Sequence: Synthetic oligonucleotide
  Antisense strand to SEQ ID NO: 637912
acuguccagcaucaucucu

SEQ ID NO: 637914 - RNA, 19 nt, Artificial Sequence
  Description of Artificial Sequence: Synthetic oligonucleotide
  Sense strand starting at position 2478 of SEQ ID NO: 585413
ggucucaucucacuccuga

SEQ ID NO: 637915 - RNA, 19 nt, Artificial Sequence
  Description of Artificial Sequence: Synthetic oligonucleotide
  Antisense strand to SEQ ID NO: 637914
ucaggagugagaugagacc

SEQ ID NO: 637916 - RNA, 19 nt, Artificial Sequence
  Description of Artificial Sequence: Synthetic oligonucleotide
  Sense strand starting at position 2482 of SEQ ID NO: 585413
ucaucucacuccugaagga

SEQ ID NO: 637917 - RNA, 19 nt, Artificial Sequence
  Description of Artificial Sequence: Synthetic oligonucleotide
  Antisense strand to SEQ ID NO: 637916
uccuucaggagugagauga

SEQ ID NO: 637918 - RNA, 19 nt, Artificial Sequence
  Description of Artificial Sequence: Synthetic oligonucleotide
  Sense strand starting at position 2523 of SEQ ID NO: 585413
ucagguggcuuccacagaa

SEQ ID NO: 637919 - RNA, 19 nt, Artificial Sequence
  Description of Artificial Sequence: Synthetic oligonucleotide
  Antisense strand to SEQ ID NO: 637918
uucuguggaagccaccuga

SEQ ID NO: 637920 - RNA, 19 nt, Artificial Sequence
  Description of Artificial Sequence: Synthetic oligonucleotide
  Sense strand starting at position 2527 of SEQ ID NO: 585413
guggcuuccacagaacaga

SEQ ID NO: 637921 - RNA, 19 nt, Artificial Sequence
  Description of Artificial Sequence: Synthetic oligonucleotide
  Antisense strand to SEQ ID NO: 637920
ucuguucuguggaagccac

SEQ ID NO: 637922 - RNA, 19 nt, Artificial Sequence
  Description of Artificial Sequence: Synthetic oligonucleotide
  Sense strand starting at position 2574 of SEQ ID NO: 585413
ccaggaucaauguggcaga

SEQ ID NO: 637923 - RNA, 19 nt, Artificial Sequence
  Description of Artificial Sequence: Synthetic oligonucleotide
  Antisense strand to SEQ ID NO: 637922
ucugccacauugauccugg

SEQ ID NO: 637924 - RNA, 19 nt, Artificial Sequence
  Description of Artificial Sequence: Synthetic oligonucleotide
  Sense strand starting at position 2588 of SEQ ID NO: 585413
gcagacaccuuccaaaguu

SEQ ID NO: 637925 - RNA, 19 nt, Artificial Sequence
  Description of Artificial Sequence: Synthetic oligonucleotide
  Antisense strand to SEQ ID NO: 637924
aacuuuggaaggugucugc

SEQ ID NO: 637926 - RNA, 19 nt, Artificial Sequence
  Description of Artificial Sequence: Synthetic oligonucleotide
  Sense strand starting at position 2699 of SEQ ID NO: 585413
gcugcauuugcagagccaa

SEQ ID NO: 637927 - RNA, 19 nt, Artificial Sequence
  Description of Artificial Sequence: Synthetic oligonucleotide
  Antisense strand to SEQ ID NO: 637926
uuggcucugcaaaugcagc

SEQ ID NO: 637928 - RNA, 19 nt, Artificial Sequence
  Description of Artificial Sequence: Synthetic oligonucleotide
  Sense strand starting at position 3100 of SEQ ID NO: 585413
aaguguacagcugaugaau

SEQ ID NO: 637929 - RNA, 19 nt, Artificial Sequence
  Description of Artificial Sequence: Synthetic oligonucleotide
  Antisense strand to SEQ ID NO: 637928
auucaucagcuguacacuu

SEQ ID NO: 637930 - RNA, 19 nt, Artificial Sequence
  Description of Artificial Sequence: Synthetic oligonucleotide
  Sense strand starting at position 3102 of SEQ ID NO: 585413
guguacagcugaugaauuu

SEQ ID NO: 637931 - RNA, 19 nt, Artificial Sequence
  Description of Artificial Sequence: Synthetic oligonucleotide
  Antisense strand to SEQ ID NO: 637930
aaauucaucagcuguacac

SEQ ID NO: 637932 - RNA, 19 nt, Artificial Sequence
  Description of Artificial Sequence: Synthetic oligonucleotide
  Sense strand starting at position 3196 of SEQ ID NO: 585413
gcugauacccuccaaagau

SEQ ID NO: 637933 - RNA, 19 nt, Artificial Sequence
  Description of Artificial Sequence: Synthetic oligonucleotide
  Antisense strand to SEQ ID NO: 637932
aucuuuggaggguaucagc

SEQ ID NO: 637934 - RNA, 19 nt, Artificial Sequence
  Description of Artificial Sequence: Synthetic oligonucleotide
  Sense strand starting at position 3295 of SEQ ID NO: 585413
uguacucauuucuguuuga

SEQ ID NO: 637935 - RNA, 19 nt, Artificial Sequence
  Description of Artificial Sequence: Synthetic oligonucleotide
  Antisense strand to SEQ ID NO: 637934
ucaaacagaaaugaguaca

SEQ ID NO: 637936 - RNA, 19 nt, Artificial Sequence
  Description of Artificial Sequence: Synthetic oligonucleotide
  Sense strand starting at position 3343 of SEQ ID NO: 585413
auucauauacgugguugua

SEQ ID NO: 637937 - RNA, 19 nt, Artificial Sequence
  Description of Artificial Sequence: Synthetic oligonucleotide
  Antisense strand to SEQ ID NO: 637936
uacaaccacguauaugaau

SEQ ID NO: 637938 - RNA, 19 nt, Artificial Sequence
  Description of Artificial Sequence: Synthetic oligonucleotide
  Sense strand starting at position 3352 of SEQ ID NO: 585413
cgugguuguauguaucagu

SEQ ID NO: 637939 - RNA, 19 nt, Artificial Sequence
  Description of Artificial Sequence: Synthetic oligonucleotide
  Antisense strand to SEQ ID NO: 637938
acugauacauacaaccacg

SEQ ID NO: 637940 - RNA, 19 nt, Artificial Sequence
  Description of Artificial Sequence: Synthetic oligonucleotide
  Sense strand starting at position 3421 of SEQ ID NO: 585413
cuaauauauucuguugaug

SEQ ID NO: 637941 - RNA, 19 nt, Artificial Sequence
  Description of Artificial Sequence: Synthetic oligonucleotide
  Antisense strand to SEQ ID NO: 637940
caucaacagaauauauuag

SEQ ID NO: 637942 - RNA, 19 nt, Artificial Sequence
  Description of Artificial Sequence: Synthetic oligonucleotide
  Sense strand starting at position 3489 of SEQ ID NO: 585413
cgaacauucucauacauga

SEQ ID NO: 637943 - RNA, 19 nt, Artificial Sequence
  Description of Artificial Sequence: Synthetic oligonucleotide
  Antisense strand to SEQ ID NO: 637942
ucauguaugagaauguucg

SEQ ID NO: 637944 - RNA, 19 nt, Artificial Sequence
  Description of Artificial Sequence: Synthetic oligonucleotide
  Sense strand starting at position 3578 of SEQ ID NO: 585413
uuuccuaaguuugagauaa

SEQ ID NO: 637945 - RNA, 19 nt, Artificial Sequence
  Description of Artificial Sequence: Synthetic oligonucleotide
  Antisense strand to SEQ ID NO: 637944
uuaucucaaacuuaggaaa

SEQ ID NO: 637946 - RNA, 19 nt, Artificial Sequence
  Description of Artificial Sequence: Synthetic oligonucleotide
  Sense strand starting at position 3580 of SEQ ID NO: 585413
uccuaaguuugagauaaua

SEQ ID NO: 637947 - RNA, 19 nt, Artificial Sequence
  Description of Artificial Sequence: Synthetic oligonucleotide
  Antisense strand to SEQ ID NO: 637946
uauuaucucaaacuuagga

SEQ ID NO: 637948 - RNA, 19 nt, Artificial Sequence
  Description of Artificial Sequence: Synthetic oligonucleotide
  Sense strand starting at position 3642 of SEQ ID NO: 585413
uuacuuggagaguguuaga

SEQ ID NO: 637949 - RNA, 19 nt, Artificial Sequence
  Description of Artificial Sequence: Synthetic oligonucleotide
  Antisense strand to SEQ ID NO: 637948
ucuaacacucuccaaguaa

SEQ ID NO: 637950 - RNA, 19 nt, Artificial Sequence
  Description of Artificial Sequence: Synthetic oligonucleotide
  Sense strand starting at position 3766 of SEQ ID NO: 585413
cauggagggacauguaagu

SEQ ID NO: 637951 - RNA, 19 nt, Artificial Sequence
  Description of Artificial Sequence: Synthetic oligonucleotide
  Antisense strand to SEQ ID NO: 637950
acuuacaugucccuccaug

SEQ ID NO: 637952 - RNA, 19 nt, Artificial Sequence
  Description of Artificial Sequence: Synthetic oligonucleotide
  Sense strand starting at position 3783 of SEQ ID NO: 585413
guaacauucugggugugua

SEQ ID NO: 637953 - RNA, 19 nt, Artificial Sequence
  Description of Artificial Sequence: Synthetic oligonucleotide
  Antisense strand to SEQ ID NO: 637952
uacacacccagaauguuac

SEQ ID NO: 637954 - RNA, 19 nt, Artificial Sequence
  Description of Artificial Sequence: Synthetic oligonucleotide
  Sense strand starting at position 3784 of SEQ ID NO: 585413
uaacauucuggguguguau

SEQ ID NO: 637955 - RNA, 19 nt, Artificial Sequence
  Description of Artificial Sequence: Synthetic oligonucleotide
  Antisense strand to SEQ ID NO: 637954
auacacacccagaauguua

SEQ ID NO: 637956 - RNA, 19 nt, Artificial Sequence
  Description of Artificial Sequence: Synthetic oligonucleotide
  Sense strand starting at position 3793 of SEQ ID NO: 585413
ggguguguaugagcuauuu

SEQ ID NO: 637957 - RNA, 19 nt, Artificial Sequence
  Description of Artificial Sequence: Synthetic oligonucleotide
  Antisense strand to SEQ ID NO: 637956
aaauagcucauacacaccc

SEQ ID NO: 637958 - RNA, 19 nt, Artificial Sequence
  Description of Artificial Sequence: Synthetic oligonucleotide
  Sense strand starting at position 3795 of SEQ ID NO: 585413
guguguaugagcuauuucu

SEQ ID NO: 637959 - RNA, 19 nt, Artificial Sequence
  Description of Artificial Sequence: Synthetic oligonucleotide
  Antisense strand to SEQ ID NO: 637958
agaaauagcucauacacac

SEQ ID NO: 637960 - RNA, 19 nt, Artificial Sequence
  Description of Artificial Sequence: Synthetic oligonucleotide
  Sense strand starting at position 3801 of SEQ ID NO: 585413
augagcuauuucuccuguu

SEQ ID NO: 637961 - RNA, 19 nt, Artificial Sequence
  Description of Artificial Sequence: Synthetic oligonucleotide
  Antisense strand to SEQ ID NO: 637960
aacaggagaaauagcucau

SEQ ID NO: 637962 - RNA, 19 nt, Artificial Sequence
  Description of Artificial Sequence: Synthetic oligonucleotide
  Sense strand starting at position 3817 of SEQ ID NO: 585413
guucuucucuacuugagga

SEQ ID NO: 637963 - RNA, 19 nt, Artificial Sequence
  Description of Artificial Sequence: Synthetic oligonucleotide
  Antisense strand to SEQ ID NO: 637962
uccucaaguagagaagaac

SEQ ID NO: 637964 - RNA, 19 nt, Artificial Sequence
  Description of Artificial Sequence: Synthetic oligonucleotide
  Sense strand starting at position 3859 of SEQ ID NO: 585413
uuacuagucuuagcuauua

SEQ ID NO: 637965 - RNA, 19 nt, Artificial Sequence
  Description of Artificial Sequence: Synthetic oligonucleotide
  Antisense strand to SEQ ID NO: 637964
uaauagcuaagacuaguaa

SEQ ID NO: 637966 - RNA, 19 nt, Artificial Sequence
  Description of Artificial Sequence: Synthetic oligonucleotide
  Sense strand starting at position 3864 of SEQ ID NO: 585413
agucuuagcuauuauuucu

SEQ ID NO: 637967 - RNA, 19 nt, Artificial Sequence
  Description of Artificial Sequence: Synthetic oligonucleotide
  Antisense strand to SEQ ID NO: 637966
agaaauaauagcuaagacu

SEQ ID NO: 637968 - RNA, 19 nt, Artificial Sequence
  Description of Artificial Sequence: Synthetic oligonucleotide
  Sense strand starting at position 3867 of SEQ ID NO: 585413
cuuagcuauuauuucugua

SEQ ID NO: 637969 - RNA, 19 nt, Artificial Sequence
  Description of Artificial Sequence: Synthetic oligonucleotide
  Antisense strand to SEQ ID NO: 637968
uacagaaauaauagcuaag

SEQ ID NO: 637970 - RNA, 19 nt, Artificial Sequence
  Description of Artificial Sequence: Synthetic oligonucleotide
  Sense strand starting at position 3912 of SEQ ID NO: 585413
gacccaucauaaggguuau

SEQ ID NO: 637971 - RNA, 19 nt, Artificial Sequence
  Description of Artificial Sequence: Synthetic oligonucleotide
  Antisense strand to SEQ ID NO: 637970
auaacccuuaugauggguc

SEQ ID NO: 637972 - RNA, 19 nt, Artificial Sequence
  Description of Artificial Sequence: Synthetic oligonucleotide
  Sense strand starting at position 3922 of SEQ ID NO: 585413
aaggguuauggccaauacu

SEQ ID NO: 637973 - RNA, 19 nt, Artificial Sequence
  Description of Artificial Sequence: Synthetic oligonucleotide
  Antisense strand to SEQ ID NO: 637972
aguauuggccauaacccuu

SEQ ID NO: 637974 - RNA, 19 nt, Artificial Sequence
  Description of Artificial Sequence: Synthetic oligonucleotide
  Sense strand starting at position 24 of SEQ ID NO: 585414
uacacuguguugugaugaa

SEQ ID NO: 637975 - RNA, 19 nt, Artificial Sequence
  Description of Artificial Sequence: Synthetic oligonucleotide
  Antisense strand to SEQ ID NO: 637974
uucaucacaacacagugua

SEQ ID NO: 637976 - RNA, 19 nt, Artificial Sequence
  Description of Artificial Sequence: Synthetic oligonucleotide
  Sense strand starting at position 28 of SEQ ID NO: 585414
cuguguugugaugaauugu

SEQ ID NO: 637977 - RNA, 19 nt, Artificial Sequence
  Description of Artificial Sequence: Synthetic oligonucleotide
  Antisense strand to SEQ ID NO: 637976
acaauucaucacaacacag

SEQ ID NO: 637978 - RNA, 19 nt, Artificial Sequence
  Description of Artificial Sequence: Synthetic oligonucleotide
  Sense strand starting at position 56 of SEQ ID NO: 585414
ccagaagaguacugagaau

SEQ ID NO: 637979 - RNA, 19 nt, Artificial Sequence
  Description of Artificial Sequence: Synthetic oligonucleotide
  Antisense strand to SEQ ID NO: 637978
auucucaguacucuucugg

SEQ ID NO: 637980 - RNA, 19 nt, Artificial Sequence
  Description of Artificial Sequence: Synthetic oligonucleotide
  Sense strand starting at position 90 of SEQ ID NO: 585414
gugcacccacccugaauua

SEQ ID NO: 637981 - RNA, 19 nt, Artificial Sequence
  Description of Artificial Sequence: Synthetic oligonucleotide
  Antisense strand to SEQ ID NO: 637980
uaauucagggugggugcac

SEQ ID NO: 637982 - RNA, 19 nt, Artificial Sequence
  Description of Artificial Sequence: Synthetic oligonucleotide
  Sense strand starting at position 100 of SEQ ID NO: 585414
ccugaauuaagacgugugu

SEQ ID NO: 637983 - RNA, 19 nt, Artificial Sequence
  Description of Artificial Sequence: Synthetic oligonucleotide
  Antisense strand to SEQ ID NO: 637982
acacacgucuuaauucagg

SEQ ID NO: 637984 - RNA, 19 nt, Artificial Sequence
  Description of Artificial Sequence: Synthetic oligonucleotide
  Sense strand starting at position 104 of SEQ ID NO: 585414
aauuaagacgugugucgca

SEQ ID NO: 637985 - RNA, 19 nt, Artificial Sequence
  Description of Artificial Sequence: Synthetic oligonucleotide
  Antisense strand to SEQ ID NO: 637984
ugcgacacacgucuuaauu

SEQ ID NO: 637986 - RNA, 19 nt, Artificial Sequence
  Description of Artificial Sequence: Synthetic oligonucleotide
  Sense strand starting at position 604 of SEQ ID NO: 585414
cgagacaguagagguaaua

SEQ ID NO: 637987 - RNA, 19 nt, Artificial Sequence
  Description of Artificial Sequence: Synthetic oligonucleotide
  Antisense strand to SEQ ID NO: 637986
uauuaccucuacugucucg

SEQ ID NO: 637988 - RNA, 19 nt, Artificial Sequence
  Description of Artificial Sequence: Synthetic oligonucleotide
  Sense strand starting at position 667 of SEQ ID NO: 585414
gcgucccgcucgucagaaa

SEQ ID NO: 637989 - RNA, 19 nt, Artificial Sequence
  Description of Artificial Sequence: Synthetic oligonucleotide
  Antisense strand to SEQ ID NO: 637988
uuucugacgagcgggacgc

SEQ ID NO: 637990 - RNA, 19 nt, Artificial Sequence
  Description of Artificial Sequence: Synthetic oligonucleotide
  Sense strand starting at position 858 of SEQ ID NO: 585414
ugcuguuucugggaugagu

SEQ ID NO: 637991 - RNA, 19 nt, Artificial Sequence
  Description of Artificial Sequence: Synthetic oligonucleotide
  Antisense strand to SEQ ID NO: 637990
acucaucccagaaacagca

SEQ ID NO: 637992 - RNA, 19 nt, Artificial Sequence
  Description of Artificial Sequence: Synthetic oligonucleotide
  Sense strand starting at position 1082 of SEQ ID NO: 585414
acuggaaccuucggauuau

SEQ ID NO: 637993 - RNA, 19 nt, Artificial Sequence
  Description of Artificial Sequence: Synthetic oligonucleotide
  Antisense strand to SEQ ID NO: 637992
auaauccgaagguuccagu

SEQ ID NO: 637994 - RNA, 19 nt, Artificial Sequence
  Description of Artificial Sequence: Synthetic oligonucleotide
  Sense strand starting at position 1083 of SEQ ID NO: 585414
cuggaaccuucggauuauu

SEQ ID NO: 637995 - RNA, 19 nt, Artificial Sequence
  Description of Artificial Sequence: Synthetic oligonucleotide
  Antisense strand to SEQ ID NO: 637994
aauaauccgaagguuccag

SEQ ID NO: 637996 - RNA, 19 nt, Artificial Sequence
  Description of Artificial Sequence: Synthetic oligonucleotide
  Sense strand starting at position 1119 of SEQ ID NO: 585414
cuuggagguccuuaccuau

SEQ ID NO: 637997 - RNA, 19 nt, Artificial Sequence
  Description of Artificial Sequence: Synthetic oligonucleotide
  Antisense strand to SEQ ID NO: 637996
auagguaaggaccuccaag

SEQ ID NO: 637998 - RNA, 19 nt, Artificial Sequence
  Description of Artificial Sequence: Synthetic oligonucleotide
  Sense strand starting at position 1213 of SEQ ID NO: 585414
gggcaaagaguccacgauu

SEQ ID NO: 637999 - RNA, 19 nt, Artificial Sequence
  Description of Artificial Sequence: Synthetic oligonucleotide
  Antisense strand to SEQ ID NO: 637998
aaucguggacucuuugccc

SEQ ID NO: 638000 - RNA, 19 nt, Artificial Sequence
  Description of Artificial Sequence: Synthetic oligonucleotide
  Sense strand starting at position 1253 of SEQ ID NO: 585414
gcaggcuacccuugagaga

SEQ ID NO: 638001 - RNA, 19 nt, Artificial Sequence
  Description of Artificial Sequence: Synthetic oligonucleotide
  Antisense strand to SEQ ID NO: 638000
ucucucaaggguagccugc

SEQ ID NO: 638002 - RNA, 19 nt, Artificial Sequence
  Description of Artificial Sequence: Synthetic oligonucleotide
  Sense strand starting at position 1369 of SEQ ID NO: 585414
gagagacagucugcucuua

SEQ ID NO: 638003 - RNA, 19 nt, Artificial Sequence
  Description of Artificial Sequence: Synthetic oligonucleotide
  Antisense strand to SEQ ID NO: 638002
uaagagcagacugucucuc

SEQ ID NO: 638004 - RNA, 19 nt, Artificial Sequence
  Description of Artificial Sequence: Synthetic oligonucleotide
  Sense strand starting at position 1587 of SEQ ID NO: 585414
agguacuugggcggagaaa

SEQ ID NO: 638005 - RNA, 19 nt, Artificial Sequence
  Description of Artificial Sequence: Synthetic oligonucleotide
  Antisense strand to SEQ ID NO: 638004
uuucuccgcccaaguaccu

SEQ ID NO: 638006 - RNA, 19 nt, Artificial Sequence
  Description of Artificial Sequence: Synthetic oligonucleotide
  Sense strand starting at position 1607 of SEQ ID NO: 585414
agauguaccucgggaagag

SEQ ID NO: 638007 - RNA, 19 nt, Artificial Sequence
  Description of Artificial Sequence: Synthetic oligonucleotide
  Antisense strand to SEQ ID NO: 638006
cucuucccgagguacaucu

SEQ ID NO: 638008 - RNA, 19 nt, Artificial Sequence
  Description of Artificial Sequence: Synthetic oligonucleotide
  Sense strand starting at position 1641 of SEQ ID NO: 585414
gggcuuaugucgggacaca

SEQ ID NO: 638009 - RNA, 19 nt, Artificial Sequence
  Description of Artificial Sequence: Synthetic oligonucleotide
  Antisense strand to SEQ ID NO: 638008
ugugucccgacauaagccc

SEQ ID NO: 638010 - RNA, 19 nt, Artificial Sequence
  Description of Artificial Sequence: Synthetic oligonucleotide
  Sense strand starting at position 1642 of SEQ ID NO: 585414
ggcuuaugucgggacacaa

SEQ ID NO: 638011 - RNA, 19 nt, Artificial Sequence
  Description of Artificial Sequence: Synthetic oligonucleotide
  Antisense strand to SEQ ID NO: 638010
uugugucccgacauaagcc

SEQ ID NO: 638012 - RNA, 19 nt, Artificial Sequence
  Description of Artificial Sequence: Synthetic oligonucleotide
  Sense strand starting at position 2223 of SEQ ID NO: 585414
uuagacaucuucuggcuca

SEQ ID NO: 638013 - RNA, 19 nt, Artificial Sequence
  Description of Artificial Sequence: Synthetic oligonucleotide
  Antisense strand to SEQ ID NO: 638012
ugagccagaagaugucuaa

SEQ ID NO: 638014 - RNA, 19 nt, Artificial Sequence
  Description of Artificial Sequence: Synthetic oligonucleotide
  Sense strand starting at position 2324 of SEQ ID NO: 585414
ccagguuuccaaugugguu

SEQ ID NO: 638015 - RNA, 19 nt, Artificial Sequence
  Description of Artificial Sequence: Synthetic oligonucleotide
  Antisense strand to SEQ ID NO: 638014
aaccacauuggaaaccugg

SEQ ID NO: 638016 - RNA, 19 nt, Artificial Sequence
  Description of Artificial Sequence: Synthetic oligonucleotide
  Sense strand starting at position 2329 of SEQ ID NO: 585414
uuuccaaugugguuugcau

SEQ ID NO: 638017 - RNA, 19 nt, Artificial Sequence
  Description of Artificial Sequence: Synthetic oligonucleotide
  Antisense strand to SEQ ID NO: 638016
augcaaaccacauuggaaa

SEQ ID NO: 638018 - RNA, 19 nt, Artificial Sequence
  Description of Artificial Sequence: Synthetic oligonucleotide
  Sense strand starting at position 2338 of SEQ ID NO: 585414
ugguuugcauucuucuaua

SEQ ID NO: 638019 - RNA, 19 nt, Artificial Sequence
  Description of Artificial Sequence: Synthetic oligonucleotide
  Antisense strand to SEQ ID NO: 638018
uauagaagaaugcaaacca

SEQ ID NO: 638020 - RNA, 19 nt, Artificial Sequence
  Description of Artificial Sequence: Synthetic oligonucleotide
  Sense strand starting at position 2445 of SEQ ID NO: 585414
augucuggguucccugaga

SEQ ID NO: 638021 - RNA, 19 nt, Artificial Sequence
  Description of Artificial Sequence: Synthetic oligonucleotide
  Antisense strand to SEQ ID NO: 638020
ucucagggaacccagacau

SEQ ID NO: 638022 - RNA, 19 nt, Artificial Sequence
  Description of Artificial Sequence: Synthetic oligonucleotide
  Sense strand starting at position 2450 of SEQ ID NO: 585414
uggguucccugagaagaac

SEQ ID NO: 638023 - RNA, 19 nt, Artificial Sequence
  Description of Artificial Sequence: Synthetic oligonucleotide
  Antisense strand to SEQ ID NO: 638022
guucuucucagggaaccca

SEQ ID NO: 638024 - RNA, 19 nt, Artificial Sequence
  Description of Artificial Sequence: Synthetic oligonucleotide
  Sense strand starting at position 2520 of SEQ ID NO: 585414
cccugugcugagugagaaa

SEQ ID NO: 638025 - RNA, 19 nt, Artificial Sequence
  Description of Artificial Sequence: Synthetic oligonucleotide
  Antisense strand to SEQ ID NO: 638024
uuucucacucagcacaggg

SEQ ID NO: 638026 - RNA, 19 nt, Artificial Sequence
  Description of Artificial Sequence: Synthetic oligonucleotide
  Sense strand starting at position 2693 of SEQ ID NO: 585414
auuaguaggugcuuacuaa

SEQ ID NO: 638027 - RNA, 19 nt, Artificial Sequence
  Description of Artificial Sequence: Synthetic oligonucleotide
  Antisense strand to SEQ ID NO: 638026
uuaguaagcaccuacuaau

SEQ ID NO: 638028 - RNA, 19 nt, Artificial Sequence
  Description of Artificial Sequence: Synthetic oligonucleotide
  Sense strand starting at position 2694 of SEQ ID NO: 585414
uuaguaggugcuuacuaaa

SEQ ID NO: 638029 - RNA, 19 nt, Artificial Sequence
  Description of Artificial Sequence: Synthetic oligonucleotide
  Antisense strand to SEQ ID NO: 638028
uuuaguaagcaccuacuaa

SEQ ID NO: 638030 - RNA, 19 nt, Artificial Sequence
  Description of Artificial Sequence: Synthetic oligonucleotide
  Sense strand starting at position 2778 of SEQ ID NO: 585414
ccacaugaaugguagaugu

SEQ ID NO: 638031 - RNA, 19 nt, Artificial Sequence
  Description of Artificial Sequence: Synthetic oligonucleotide
  Antisense strand to SEQ ID NO: 638030
acaucuaccauucaugugg

SEQ ID NO: 638032 - RNA, 19 nt, Artificial Sequence
  Description of Artificial Sequence: Synthetic oligonucleotide
  Sense strand starting at position 2800 of SEQ ID NO: 585414
cagcaugagugguuaagag

SEQ ID NO: 638033 - RNA, 19 nt, Artificial Sequence
  Description of Artificial Sequence: Synthetic oligonucleotide
  Antisense strand to SEQ ID NO: 638032
cucuuaaccacucaugcug

SEQ ID NO: 638034 - RNA, 19 nt, Artificial Sequence
  Description of Artificial Sequence: Synthetic oligonucleotide
  Sense strand starting at position 2804 of SEQ ID NO: 585414
augagugguuaagagucaa

SEQ ID NO: 638035 - RNA, 19 nt, Artificial Sequence
  Description of Artificial Sequence: Synthetic oligonucleotide
  Antisense strand to SEQ ID NO: 638034
uugacucuuaaccacucau

SEQ ID NO: 638036 - RNA, 19 nt, Artificial Sequence
  Description of Artificial Sequence: Synthetic oligonucleotide
  Sense strand starting at position 2810 of SEQ ID NO: 585414
gguuaagagucaagggagu

SEQ ID NO: 638037 - RNA, 19 nt, Artificial Sequence
  Description of Artificial Sequence: Synthetic oligonucleotide
  Antisense strand to SEQ ID NO: 638036
acucccuugacucuuaacc

SEQ ID NO: 638038 - RNA, 19 nt, Artificial Sequence
  Description of Artificial Sequence: Synthetic oligonucleotide
  Sense strand starting at position 3201 of SEQ ID NO: 585414
ugguaacaucucuaugugu

SEQ ID NO: 638039 - RNA, 19 nt, Artificial Sequence
  Description of Artificial Sequence: Synthetic oligonucleotide
  Antisense strand to SEQ ID NO: 638038
acacauagagauguuacca

SEQ ID NO: 638040 - RNA, 19 nt, Artificial Sequence
  Description of Artificial Sequence: Synthetic oligonucleotide
  Sense strand starting at position 3203 of SEQ ID NO: 585414
guaacaucucuauguguuu

SEQ ID NO: 638041 - RNA, 19 nt, Artificial Sequence
  Description of Artificial Sequence: Synthetic oligonucleotide
  Antisense strand to SEQ ID NO: 638040
aaacacauagagauguuac

SEQ ID NO: 638042 - RNA, 19 nt, Artificial Sequence
  Description of Artificial Sequence: Synthetic oligonucleotide
  Sense strand starting at position 3208 of SEQ ID NO: 585414
aucucuauguguuuccgua

SEQ ID NO: 638043 - RNA, 19 nt, Artificial Sequence
  Description of Artificial Sequence: Synthetic oligonucleotide
  Antisense strand to SEQ ID NO: 638042
uacggaaacacauagagau

SEQ ID NO: 638044 - RNA, 19 nt, Artificial Sequence
  Description of Artificial Sequence: Synthetic oligonucleotide
  Sense strand starting at position 3210 of SEQ ID NO: 585414
cucuauguguuuccguaau

SEQ ID NO: 638045 - RNA, 19 nt, Artificial Sequence
  Description of Artificial Sequence: Synthetic oligonucleotide
  Antisense strand to SEQ ID NO: 638044
auuacggaaacacauagag

SEQ ID NO: 638046 - RNA, 19 nt, Artificial Sequence
  Description of Artificial Sequence: Synthetic oligonucleotide
  Sense strand starting at position 3212 of SEQ ID NO: 585414
cuauguguuuccguaauac

SEQ ID NO: 638047 - RNA, 19 nt, Artificial Sequence
  Description of Artificial Sequence: Synthetic oligonucleotide
  Antisense strand to SEQ ID NO: 638046
guauuacggaaacacauag

SEQ ID NO: 638048 - RNA, 19 nt, Artificial Sequence
  Description of Artificial Sequence: Synthetic oligonucleotide
  Sense strand starting at position 3216 of SEQ ID NO: 585414
guguuuccguaauacuaau

SEQ ID NO: 638049 - RNA, 19 nt, Artificial Sequence
  Description of Artificial Sequence: Synthetic oligonucleotide
  Antisense strand to SEQ ID NO: 638048
auuaguauuacggaaacac

SEQ ID NO: 638050 - RNA, 19 nt, Artificial Sequence
  Description of Artificial Sequence: Synthetic oligonucleotide
  Sense strand starting at position 3646 of SEQ ID NO: 585414
uuaagaaacuuauggagcu

SEQ ID NO: 638051 - RNA, 19 nt, Artificial Sequence
  Description of Artificial Sequence: Synthetic oligonucleotide
  Antisense strand to SEQ ID NO: 638050
agcuccauaaguuucuuaa

SEQ ID NO: 638052 - RNA, 19 nt, Artificial Sequence
  Description of Artificial Sequence: Synthetic oligonucleotide
  Sense strand starting at position 3708 of SEQ ID NO: 585414
gcuccagagccuugauaac

SEQ ID NO: 638053 - RNA, 19 nt, Artificial Sequence
  Description of Artificial Sequence: Synthetic oligonucleotide
  Antisense strand to SEQ ID NO: 638052
guuaucaaggcucuggagc

SEQ ID NO: 638054 - RNA, 19 nt, Artificial Sequence
  Description of Artificial Sequence: Synthetic oligonucleotide
  Sense strand starting at position 79 of SEQ ID NO: 585415
ccaguacucuguuucccaa

SEQ ID NO: 638055 - RNA, 19 nt, Artificial Sequence
  Description of Artificial Sequence: Synthetic oligonucleotide
  Antisense strand to SEQ ID NO: 638054
uugggaaacagaguacugg

SEQ ID NO: 638056 - RNA, 19 nt, Artificial Sequence
  Description of Artificial Sequence: Synthetic oligonucleotide
  Sense strand starting at position 125 of SEQ ID NO: 585415
auaaguguuguguaacauu

SEQ ID NO: 638057 - RNA, 19 nt, Artificial Sequence
  Description of Artificial Sequence: Synthetic oligonucleotide
  Antisense strand to SEQ ID NO: 638056
aauguuacacaacacuuau

SEQ ID NO: 638058 - RNA, 19 nt, Artificial Sequence
  Description of Artificial Sequence: Synthetic oligonucleotide
  Sense strand starting at position 146 of SEQ ID NO: 585415
gagucuuaauaaguagagu

SEQ ID NO: 638059 - RNA, 19 nt, Artificial Sequence
  Description of Artificial Sequence: Synthetic oligonucleotide
  Antisense strand to SEQ ID NO: 638058
acucuacuuauuaagacuc

SEQ ID NO: 638060 - RNA, 19 nt, Artificial Sequence
  Description of Artificial Sequence: Synthetic oligonucleotide
  Sense strand starting at position 149 of SEQ ID NO: 585415
ucuuaauaaguagagucua

SEQ ID NO: 638061 - RNA, 19 nt, Artificial Sequence
  Description of Artificial Sequence: Synthetic oligonucleotide
  Antisense strand to SEQ ID NO: 638060
uagacucuacuuauuaaga

SEQ ID NO: 638062 - RNA, 19 nt, Artificial Sequence
  Description of Artificial Sequence: Synthetic oligonucleotide
  Sense strand starting at position 308 of SEQ ID NO: 585415
agcacaguuugagcauaua

SEQ ID NO: 638063 - RNA, 19 nt, Artificial Sequence
  Description of Artificial Sequence: Synthetic oligonucleotide
  Antisense strand to SEQ ID NO: 638062
uauaugcucaaacugugcu

SEQ ID NO: 638064 - RNA, 19 nt, Artificial Sequence
  Description of Artificial Sequence: Synthetic oligonucleotide
  Sense strand starting at position 391 of SEQ ID NO: 585415
cuacaagauuugcucguuu

SEQ ID NO: 638065 - RNA, 19 nt, Artificial Sequence
  Description of Artificial Sequence: Synthetic oligonucleotide
  Antisense strand to SEQ ID NO: 638064
aaacgagcaaaucuuguag

SEQ ID NO: 638066 - RNA, 19 nt, Artificial Sequence
  Description of Artificial Sequence: Synthetic oligonucleotide
  Sense strand starting at position 393 of SEQ ID NO: 585415
acaagauuugcucguuuaa

SEQ ID NO: 638067 - RNA, 19 nt, Artificial Sequence
  Description of Artificial Sequence: Synthetic oligonucleotide
  Antisense strand to SEQ ID NO: 638066
uuaaacgagcaaaucuugu

SEQ ID NO: 638068 - RNA, 19 nt, Artificial Sequence
  Description of Artificial Sequence: Synthetic oligonucleotide
  Sense strand starting at position 510 of SEQ ID NO: 585415
gaauaucaguuaucugaga

SEQ ID NO: 638069 - RNA, 19 nt, Artificial Sequence
  Description of Artificial Sequence: Synthetic oligonucleotide
  Antisense strand to SEQ ID NO: 638068
ucucagauaacugauauuc

SEQ ID NO: 638070 - RNA, 19 nt, Artificial Sequence
  Description of Artificial Sequence: Synthetic oligonucleotide
  Sense strand starting at position 529 of SEQ ID NO: 585415
auaacagcuggcuaacaau

SEQ ID NO: 638071 - RNA, 19 nt, Artificial Sequence
  Description of Artificial Sequence: Synthetic oligonucleotide
  Antisense strand to SEQ ID NO: 638070
auuguuagccagcuguuau

SEQ ID NO: 638072 - RNA, 19 nt, Artificial Sequence
  Description of Artificial Sequence: Synthetic oligonucleotide
  Sense strand starting at position 1028 of SEQ ID NO: 585415
cuguguucugcagaaucca

SEQ ID NO: 638073 - RNA, 19 nt, Artificial Sequence
  Description of Artificial Sequence: Synthetic oligonucleotide
  Antisense strand to SEQ ID NO: 638072
uggauucugcagaacacag

SEQ ID NO: 638074 - RNA, 19 nt, Artificial Sequence
  Description of Artificial Sequence: Synthetic oligonucleotide
  Sense strand starting at position 1439 of SEQ ID NO: 585415
ccaauuaaguggcuuuacu

SEQ ID NO: 638075 - RNA, 19 nt, Artificial Sequence
  Description of Artificial Sequence: Synthetic oligonucleotide
  Antisense strand to SEQ ID NO: 638074
aguaaagccacuuaauugg

SEQ ID NO: 638076 - RNA, 19 nt, Artificial Sequence
  Description of Artificial Sequence: Synthetic oligonucleotide
  Sense strand starting at position 1639 of SEQ ID NO: 585415
gcaggcucccagggauaaa

SEQ ID NO: 638077 - RNA, 19 nt, Artificial Sequence
  Description of Artificial Sequence: Synthetic oligonucleotide
  Antisense strand to SEQ ID NO: 638076
uuuaucccugggagccugc

SEQ ID NO: 638078 - RNA, 19 nt, Artificial Sequence
  Description of Artificial Sequence: Synthetic oligonucleotide
  Sense strand starting at position 1709 of SEQ ID NO: 585415
gggagacuguaacuugcaa

SEQ ID NO: 638079 - RNA, 19 nt, Artificial Sequence
  Description of Artificial Sequence: Synthetic oligonucleotide
  Antisense strand to SEQ ID NO: 638078
uugcaaguuacagucuccc

SEQ ID NO: 638080 - RNA, 19 nt, Artificial Sequence
  Description of Artificial Sequence: Synthetic oligonucleotide
  Sense strand starting at position 1817 of SEQ ID NO: 585415
aagguauuaccggaagcag

SEQ ID NO: 638081 - RNA, 19 nt, Artificial Sequence
  Description of Artificial Sequence: Synthetic oligonucleotide
  Antisense strand to SEQ ID NO: 638080
cugcuuccgguaauaccuu

SEQ ID NO: 638082 - RNA, 19 nt, Artificial Sequence
  Description of Artificial Sequence: Synthetic oligonucleotide
  Sense strand starting at position 2324 of SEQ ID NO: 585415
acuugugucccuuaccuau

SEQ ID NO: 638083 - RNA, 19 nt, Artificial Sequence
  Description of Artificial Sequence: Synthetic oligonucleotide
  Antisense strand to SEQ ID NO: 638082
auagguaagggacacaagu

SEQ ID NO: 638084 - RNA, 19 nt, Artificial Sequence
  Description of Artificial Sequence: Synthetic oligonucleotide
  Sense strand starting at position 2473 of SEQ ID NO: 585415
gggccuugccuuuauagac

SEQ ID NO: 638085 - RNA, 19 nt, Artificial Sequence
  Description of Artificial Sequence: Synthetic oligonucleotide
  Antisense strand to SEQ ID NO: 638084
gucuauaaaggcaaggccc

SEQ ID NO: 638086 - RNA, 19 nt, Artificial Sequence
  Description of Artificial Sequence: Synthetic oligonucleotide
  Sense strand starting at position 2482 of SEQ ID NO: 585415
cuuuauagacugcaucaga

SEQ ID NO: 638087 - RNA, 19 nt, Artificial Sequence
  Description of Artificial Sequence: Synthetic oligonucleotide
  Antisense strand to SEQ ID NO: 638086
ucugaugcagucuauaaag

SEQ ID NO: 638088 - RNA, 19 nt, Artificial Sequence
  Description of Artificial Sequence: Synthetic oligonucleotide
  Sense strand starting at position 2568 of SEQ ID NO: 585415
agacucuguuaacuguaga

SEQ ID NO: 638089 - RNA, 19 nt, Artificial Sequence
  Description of Artificial Sequence: Synthetic oligonucleotide
  Antisense strand to SEQ ID NO: 638088
ucuacaguuaacagagucu

SEQ ID NO: 638090 - RNA, 19 nt, Artificial Sequence
  Description of Artificial Sequence: Synthetic oligonucleotide
  Sense strand starting at position 2573 of SEQ ID NO: 585415
cuguuaacuguagaggcau

SEQ ID NO: 638091 - RNA, 19 nt, Artificial Sequence
  Description of Artificial Sequence: Synthetic oligonucleotide
  Antisense strand to SEQ ID NO: 638090
augccucuacaguuaacag

SEQ ID NO: 638092 - RNA, 19 nt, Artificial Sequence
  Description of Artificial Sequence: Synthetic oligonucleotide
  Sense strand starting at position 2728 of SEQ ID NO: 585415
ggacgaaagugugugguaa

SEQ ID NO: 638093 - RNA, 19 nt, Artificial Sequence
  Description of Artificial Sequence: Synthetic oligonucleotide
  Antisense strand to SEQ ID NO: 638092
uuaccacacacuuucgucc

SEQ ID NO: 638094 - RNA, 19 nt, Artificial Sequence
  Description of Artificial Sequence: Synthetic oligonucleotide
  Sense strand starting at position 2729 of SEQ ID NO: 585415
gacgaaagugugugguaaa

SEQ ID NO: 638095 - RNA, 19 nt, Artificial Sequence
  Description of Artificial Sequence: Synthetic oligonucleotide
  Antisense strand to SEQ ID NO: 638094
uuuaccacacacuuucguc

SEQ ID NO: 638096 - RNA, 19 nt, Artificial Sequence
  Description of Artificial Sequence: Synthetic oligonucleotide
  Sense strand starting at position 2834 of SEQ ID NO: 585415
ccuggauugugucuuuaug

SEQ ID NO: 638097 - RNA, 19 nt, Artificial Sequence
  Description of Artificial Sequence: Synthetic oligonucleotide
  Antisense strand to SEQ ID NO: 638096
cauaaagacacaauccagg

SEQ ID NO: 638098 - RNA, 19 nt, Artificial Sequence
  Description of Artificial Sequence: Synthetic oligonucleotide
  Sense strand starting at position 2843 of SEQ ID NO: 585415
ugucuuuaugccguaggca

SEQ ID NO: 638099 - RNA, 19 nt, Artificial Sequence
  Description of Artificial Sequence: Synthetic oligonucleotide
  Antisense strand to SEQ ID NO: 638098
ugccuacggcauaaagaca

SEQ ID NO: 638100 - RNA, 19 nt, Artificial Sequence
  Description of Artificial Sequence: Synthetic oligonucleotide
  Sense strand starting at position 2856 of SEQ ID NO: 585415
uaggcauuaucacuguaag

SEQ ID NO: 638101 - RNA, 19 nt, Artificial Sequence
  Description of Artificial Sequence: Synthetic oligonucleotide
  Antisense strand to SEQ ID NO: 638100
cuuacagugauaaugccua

SEQ ID NO: 638102 - RNA, 19 nt, Artificial Sequence
  Description of Artificial Sequence: Synthetic oligonucleotide
  Sense strand starting at position 2857 of SEQ ID NO: 585415
aggcauuaucacuguaagu

SEQ ID NO: 638103 - RNA, 19 nt, Artificial Sequence
  Description of Artificial Sequence: Synthetic oligonucleotide
  Antisense strand to SEQ ID NO: 638102
acuuacagugauaaugccu

SEQ ID NO: 638104 - RNA, 19 nt, Artificial Sequence
  Description of Artificial Sequence: Synthetic oligonucleotide
  Sense strand starting at position 2859 of SEQ ID NO: 585415
gcauuaucacuguaaguau

SEQ ID NO: 638105 - RNA, 19 nt, Artificial Sequence
  Description of Artificial Sequence: Synthetic oligonucleotide
  Antisense strand to SEQ ID NO: 638104
auacuuacagugauaaugc

SEQ ID NO: 638106 - RNA, 19 nt, Artificial Sequence
  Description of Artificial Sequence: Synthetic oligonucleotide
  Sense strand starting at position 2868 of SEQ ID NO: 585415
cuguaaguauuuguggagu

SEQ ID NO: 638107 - RNA, 19 nt, Artificial Sequence
  Description of Artificial Sequence: Synthetic oligonucleotide
  Antisense strand to SEQ ID NO: 638106
acuccacaaauacuuacag

SEQ ID NO: 638108 - RNA, 19 nt, Artificial Sequence
  Description of Artificial Sequence: Synthetic oligonucleotide
  Sense strand starting at position 3255 of SEQ ID NO: 585415
uuaggauauugcuuuguaa

SEQ ID NO: 638109 - RNA, 19 nt, Artificial Sequence
  Description of Artificial Sequence: Synthetic oligonucleotide
  Antisense strand to SEQ ID NO: 638108
uuacaaagcaauauccuaa

SEQ ID NO: 638110 - RNA, 19 nt, Artificial Sequence
  Description of Artificial Sequence: Synthetic oligonucleotide
  Sense strand starting at position 3257 of SEQ ID NO: 585415
aggauauugcuuuguaaca

SEQ ID NO: 638111 - RNA, 19 nt, Artificial Sequence
  Description of Artificial Sequence: Synthetic oligonucleotide
  Antisense strand to SEQ ID NO: 638110
uguuacaaagcaauauccu

SEQ ID NO: 638112 - RNA, 19 nt, Artificial Sequence
  Description of Artificial Sequence: Synthetic oligonucleotide
  Sense strand starting at position 3258 of SEQ ID NO: 585415
ggauauugcuuuguaacag

SEQ ID NO: 638113 - RNA, 19 nt, Artificial Sequence
  Description of Artificial Sequence: Synthetic oligonucleotide
  Antisense strand to SEQ ID NO: 638112
cuguuacaaagcaauaucc

SEQ ID NO: 638114 - RNA, 19 nt, Artificial Sequence
  Description of Artificial Sequence: Synthetic oligonucleotide
  Sense strand starting at position 3293 of SEQ ID NO: 585415
uccuaugugccagagauuc

SEQ ID NO: 638115 - RNA, 19 nt, Artificial Sequence
  Description of Artificial Sequence: Synthetic oligonucleotide
  Antisense strand to SEQ ID NO: 638114
gaaucucuggcacauagga

SEQ ID NO: 638116 - RNA, 19 nt, Artificial Sequence
  Description of Artificial Sequence: Synthetic oligonucleotide
  Sense strand starting at position 3304 of SEQ ID NO: 585415
agagauucguuguuauuau

SEQ ID NO: 638117 - RNA, 19 nt, Artificial Sequence
  Description of Artificial Sequence: Synthetic oligonucleotide
  Antisense strand to SEQ ID NO: 638116
auaauaacaacgaaucucu

SEQ ID NO: 638118 - RNA, 19 nt, Artificial Sequence
  Description of Artificial Sequence: Synthetic oligonucleotide
  Sense strand starting at position 3416 of SEQ ID NO: 585415
gggcauauaugcucaguaa

SEQ ID NO: 638119 - RNA, 19 nt, Artificial Sequence
  Description of Artificial Sequence: Synthetic oligonucleotide
  Antisense strand to SEQ ID NO: 638118
uuacugagcauauaugccc

SEQ ID NO: 638120 - RNA, 19 nt, Artificial Sequence
  Description of Artificial Sequence: Synthetic oligonucleotide
  Sense strand starting at position 3417 of SEQ ID NO: 585415
ggcauauaugcucaguaag

SEQ ID NO: 638121 - RNA, 19 nt, Artificial Sequence
  Description of Artificial Sequence: Synthetic oligonucleotide
  Antisense strand to SEQ ID NO: 638120
cuuacugagcauauaugcc

SEQ ID NO: 638122 - RNA, 19 nt, Artificial Sequence
  Description of Artificial Sequence: Synthetic oligonucleotide
  Sense strand starting at position 3420 of SEQ ID NO: 585415
auauaugcucaguaaguau

SEQ ID NO: 638123 - RNA, 19 nt, Artificial Sequence
  Description of Artificial Sequence: Synthetic oligonucleotide
  Antisense strand to SEQ ID NO: 638122
auacuuacugagcauauau

SEQ ID NO: 638124 - RNA, 19 nt, Artificial Sequence
  Description of Artificial Sequence: Synthetic oligonucleotide
  Sense strand starting at position 3447 of SEQ ID NO: 585415
augaauuaauguucuggca

SEQ ID NO: 638125 - RNA, 19 nt, Artificial Sequence
  Description of Artificial Sequence: Synthetic oligonucleotide
  Antisense strand to SEQ ID NO: 638124
ugccagaacauuaauucau

SEQ ID NO: 638126 - RNA, 19 nt, Artificial Sequence
  Description of Artificial Sequence: Synthetic oligonucleotide
  Sense strand starting at position 3459 of SEQ ID NO: 585415
ucuggcacuuuaucugaau

SEQ ID NO: 638127 - RNA, 19 nt, Artificial Sequence
  Description of Artificial Sequence: Synthetic oligonucleotide
  Antisense strand to SEQ ID NO: 638126
auucagauaaagugccaga

SEQ ID NO: 638128 - RNA, 19 nt, Artificial Sequence
  Description of Artificial Sequence: Synthetic oligonucleotide
  Sense strand starting at position 3644 of SEQ ID NO: 585415
ugaguucuugcuuugccuu

SEQ ID NO: 638129 - RNA, 19 nt, Artificial Sequence
  Description of Artificial Sequence: Synthetic oligonucleotide
  Antisense strand to SEQ ID NO: 638128
aaggcaaagcaagaacuca

SEQ ID NO: 638130 - RNA, 19 nt, Artificial Sequence
  Description of Artificial Sequence: Synthetic oligonucleotide
  Sense strand starting at position 3649 of SEQ ID NO: 585415
ucuugcuuugccuuguuau

SEQ ID NO: 638131 - RNA, 19 nt, Artificial Sequence
  Description of Artificial Sequence: Synthetic oligonucleotide
  Antisense strand to SEQ ID NO: 638130
auaacaaggcaaagcaaga

SEQ ID NO: 638132 - RNA, 19 nt, Artificial Sequence
  Description of Artificial Sequence: Synthetic oligonucleotide
  Sense strand starting at position 3694 of SEQ ID NO: 585415
ggcuuucuucccuaaggga

SEQ ID NO: 638133 - RNA, 19 nt, Artificial Sequence
  Description of Artificial Sequence: Synthetic oligonucleotide
  Antisense strand to SEQ ID NO: 638132
ucccuuagggaagaaagcc

SEQ ID NO: 638134 - RNA, 19 nt, Artificial Sequence
  Description of Artificial Sequence: Synthetic oligonucleotide
  Sense strand starting at position 41 of SEQ ID NO: 585416
gcuagaugucaauaggcag

SEQ ID NO: 638135 - RNA, 19 nt, Artificial Sequence
  Description of Artificial Sequence: Synthetic oligonucleotide
  Antisense strand to SEQ ID NO: 638134
cugccuauugacaucuagc

SEQ ID NO: 638136 - RNA, 19 nt, Artificial Sequence
  Description of Artificial Sequence: Synthetic oligonucleotide
  Sense strand starting at position 88 of SEQ ID NO: 585416
cuggaacacucagaugaug

SEQ ID NO: 638137 - RNA, 19 nt, Artificial Sequence
  Description of Artificial Sequence: Synthetic oligonucleotide
  Antisense strand to SEQ ID NO: 638136
caucaucugaguguuccag

SEQ ID NO: 638138 - RNA, 19 nt, Artificial Sequence
  Description of Artificial Sequence: Synthetic oligonucleotide
  Sense strand starting at position 144 of SEQ ID NO: 585416
cagccugucugggcagaau

SEQ ID NO: 638139 - RNA, 19 nt, Artificial Sequence
  Description of Artificial Sequence: Synthetic oligonucleotide
  Antisense strand to SEQ ID NO: 638138
auucugcccagacaggcug

SEQ ID NO: 638140 - RNA, 19 nt, Artificial Sequence
  Description of Artificial Sequence: Synthetic oligonucleotide
  Sense strand starting at position 1261 of SEQ ID NO: 585416
uuccaagauucuucugguu

SEQ ID NO: 638141 - RNA, 19 nt, Artificial Sequence
  Description of Artificial Sequence: Synthetic oligonucleotide
  Antisense strand to SEQ ID NO: 638140
aaccagaagaaucuuggaa

SEQ ID NO: 638142 - RNA, 19 nt, Artificial Sequence
  Description of Artificial Sequence: Synthetic oligonucleotide
  Sense strand starting at position 1291 of SEQ ID NO: 585416
agggucuagcucuguuacu

SEQ ID NO: 638143 - RNA, 19 nt, Artificial Sequence
  Description of Artificial Sequence: Synthetic oligonucleotide
  Antisense strand to SEQ ID NO: 638142
aguaacagagcuagacccu

SEQ ID NO: 638144 - RNA, 19 nt, Artificial Sequence
  Description of Artificial Sequence: Synthetic oligonucleotide
  Sense strand starting at position 1357 of SEQ ID NO: 585416
uccugaguuuaagagaucu

SEQ ID NO: 638145 - RNA, 19 nt, Artificial Sequence
  Description of Artificial Sequence: Synthetic oligonucleotide
  Antisense strand to SEQ ID NO: 638144
agaucucuuaaacucagga

SEQ ID NO: 638146 - RNA, 19 nt, Artificial Sequence
  Description of Artificial Sequence: Synthetic oligonucleotide
  Sense strand starting at position 1475 of SEQ ID NO: 585416
ucuugaacucuagagcuua

SEQ ID NO: 638147 - RNA, 19 nt, Artificial Sequence
  Description of Artificial Sequence: Synthetic oligonucleotide
  Antisense strand to SEQ ID NO: 638146
uaagcucuagaguucaaga

SEQ ID NO: 638148 - RNA, 19 nt, Artificial Sequence
  Description of Artificial Sequence: Synthetic oligonucleotide
  Sense strand starting at position 1480 of SEQ ID NO: 585416
aacucuagagcuuaaguga

SEQ ID NO: 638149 - RNA, 19 nt, Artificial Sequence
  Description of Artificial Sequence: Synthetic oligonucleotide
  Antisense strand to SEQ ID NO: 638148
ucacuuaagcucuagaguu

SEQ ID NO: 638150 - RNA, 19 nt, Artificial Sequence
  Description of Artificial Sequence: Synthetic oligonucleotide
  Sense strand starting at position 1589 of SEQ ID NO: 585416
gcagcccugaucugugaga

SEQ ID NO: 638151 - RNA, 19 nt, Artificial Sequence
  Description of Artificial Sequence: Synthetic oligonucleotide
  Antisense strand to SEQ ID NO: 638150
ucucacagaucagggcugc

SEQ ID NO: 638152 - RNA, 19 nt, Artificial Sequence
  Description of Artificial Sequence: Synthetic oligonucleotide
  Sense strand starting at position 2121 of SEQ ID NO: 585416
gcuguaaaugcagagcuau

SEQ ID NO: 638153 - RNA, 19 nt, Artificial Sequence
  Description of Artificial Sequence: Synthetic oligonucleotide
  Antisense strand to SEQ ID NO: 638152
auagcucugcauuuacagc

SEQ ID NO: 638154 - RNA, 19 nt, Artificial Sequence
  Description of Artificial Sequence: Synthetic oligonucleotide
  Sense strand starting at position 2174 of SEQ ID NO: 585416
aaguuauuacuuggcagga

SEQ ID NO: 638155 - RNA, 19 nt, Artificial Sequence
  Description of Artificial Sequence: Synthetic oligonucleotide
  Antisense strand to SEQ ID NO: 638154
uccugccaaguaauaacuu

SEQ ID NO: 638156 - RNA, 19 nt, Artificial Sequence
  Description of Artificial Sequence: Synthetic oligonucleotide
  Sense strand starting at position 2216 of SEQ ID NO: 585416
acgucugguuccugagugu

SEQ ID NO: 638157 - RNA, 19 nt, Artificial Sequence
  Description of Artificial Sequence: Synthetic oligonucleotide
  Antisense strand to SEQ ID NO: 638156
acacucaggaaccagacgu

SEQ ID NO: 638158 - RNA, 19 nt, Artificial Sequence
  Description of Artificial Sequence: Synthetic oligonucleotide
  Sense strand starting at position 2223 of SEQ ID NO: 585416
guuccugagugugggagua

SEQ ID NO: 638159 - RNA, 19 nt, Artificial Sequence
  Description of Artificial Sequence: Synthetic oligonucleotide
  Antisense strand to SEQ ID NO: 638158
uacucccacacucaggaac

SEQ ID NO: 638160 - RNA, 19 nt, Artificial Sequence
  Description of Artificial Sequence: Synthetic oligonucleotide
  Sense strand starting at position 2225 of SEQ ID NO: 585416
uccugagugugggaguaau

SEQ ID NO: 638161 - RNA, 19 nt, Artificial Sequence
  Description of Artificial Sequence: Synthetic oligonucleotide
  Antisense strand to SEQ ID NO: 638160
auuacucccacacucagga

SEQ ID NO: 638162 - RNA, 19 nt, Artificial Sequence
  Description of Artificial Sequence: Synthetic oligonucleotide
  Sense strand starting at position 2254 of SEQ ID NO: 585416
ggguaauaccugggcacua

SEQ ID NO: 638163 - RNA, 19 nt, Artificial Sequence
  Description of Artificial Sequence: Synthetic oligonucleotide
  Antisense strand to SEQ ID NO: 638162
uagugcccagguauuaccc

SEQ ID NO: 638164 - RNA, 19 nt, Artificial Sequence
  Description of Artificial Sequence: Synthetic oligonucleotide
  Sense strand starting at position 2278 of SEQ ID NO: 585416
uucuuuauccagugucuac

SEQ ID NO: 638165 - RNA, 19 nt, Artificial Sequence
  Description of Artificial Sequence: Synthetic oligonucleotide
  Antisense strand to SEQ ID NO: 638164
guagacacuggauaaagaa

SEQ ID NO: 638166 - RNA, 19 nt, Artificial Sequence
  Description of Artificial Sequence: Synthetic oligonucleotide
  Sense strand starting at position 2335 of SEQ ID NO: 585416
uuggaaaguccauggguua

SEQ ID NO: 638167 - RNA, 19 nt, Artificial Sequence
  Description of Artificial Sequence: Synthetic oligonucleotide
  Antisense strand to SEQ ID NO: 638166
uaacccauggacuuuccaa

SEQ ID NO: 638168 - RNA, 19 nt, Artificial Sequence
  Description of Artificial Sequence: Synthetic oligonucleotide
  Sense strand starting at position 2338 of SEQ ID NO: 585416
gaaaguccauggguuagua

SEQ ID NO: 638169 - RNA, 19 nt, Artificial Sequence
  Description of Artificial Sequence: Synthetic oligonucleotide
  Antisense strand to SEQ ID NO: 638168
uacuaacccauggacuuuc

SEQ ID NO: 638170 - RNA, 19 nt, Artificial Sequence
  Description of Artificial Sequence: Synthetic oligonucleotide
  Sense strand starting at position 2342 of SEQ ID NO: 585416
guccauggguuaguaucua

SEQ ID NO: 638171 - RNA, 19 nt, Artificial Sequence
  Description of Artificial Sequence: Synthetic oligonucleotide
  Antisense strand to SEQ ID NO: 638170
uagauacuaacccauggac

SEQ ID NO: 638172 - RNA, 19 nt, Artificial Sequence
  Description of Artificial Sequence: Synthetic oligonucleotide
  Sense strand starting at position 2372 of SEQ ID NO: 585416
augugcugucuucgucaua

SEQ ID NO: 638173 - RNA, 19 nt, Artificial Sequence
  Description of Artificial Sequence: Synthetic oligonucleotide
  Antisense strand to SEQ ID NO: 638172
uaugacgaagacagcacau

SEQ ID NO: 638174 - RNA, 19 nt, Artificial Sequence
  Description of Artificial Sequence: Synthetic oligonucleotide
  Sense strand starting at position 2375 of SEQ ID NO: 585416
ugcugucuucgucauacaa

SEQ ID NO: 638175 - RNA, 19 nt, Artificial Sequence
  Description of Artificial Sequence: Synthetic oligonucleotide
  Antisense strand to SEQ ID NO: 638174
uuguaugacgaagacagca

SEQ ID NO: 638176 - RNA, 19 nt, Artificial Sequence
  Description of Artificial Sequence: Synthetic oligonucleotide
  Sense strand starting at position 2377 of SEQ ID NO: 585416
cugucuucgucauacaaca

SEQ ID NO: 638177 - RNA, 19 nt, Artificial Sequence
  Description of Artificial Sequence: Synthetic oligonucleotide
  Antisense strand to SEQ ID NO: 638176
uguuguaugacgaagacag

SEQ ID NO: 638178 - RNA, 19 nt, Artificial Sequence
  Description of Artificial Sequence: Synthetic oligonucleotide
  Sense strand starting at position 2533 of SEQ ID NO: 585416
cguuccacccuuuaguuau

SEQ ID NO: 638179 - RNA, 19 nt, Artificial Sequence
  Description of Artificial Sequence: Synthetic oligonucleotide
  Antisense strand to SEQ ID NO: 638178
auaacuaaaggguggaacg

SEQ ID NO: 638180 - RNA, 19 nt, Artificial Sequence
  Description of Artificial Sequence: Synthetic oligonucleotide
  Sense strand starting at position 2593 of SEQ ID NO: 585416
gauggagcugcugauuaag

SEQ ID NO: 638181 - RNA, 19 nt, Artificial Sequence
  Description of Artificial Sequence: Synthetic oligonucleotide
  Antisense strand to SEQ ID NO: 638180
cuuaaucagcagcuccauc

SEQ ID NO: 638182 - RNA, 19 nt, Artificial Sequence
  Description of Artificial Sequence: Synthetic oligonucleotide
  Sense strand starting at position 2667 of SEQ ID NO: 585416
ugaaauaugcuuugucuuu

SEQ ID NO: 638183 - RNA, 19 nt, Artificial Sequence
  Description of Artificial Sequence: Synthetic oligonucleotide
  Antisense strand to SEQ ID NO: 638182
aaagacaaagcauauuuca

SEQ ID NO: 638184 - RNA, 19 nt, Artificial Sequence
  Description of Artificial Sequence: Synthetic oligonucleotide
  Sense strand starting at position 2722 of SEQ ID NO: 585416
ggaauucuguucugcucca

SEQ ID NO: 638185 - RNA, 19 nt, Artificial Sequence
  Description of Artificial Sequence: Synthetic oligonucleotide
  Antisense strand to SEQ ID NO: 638184
uggagcagaacagaauucc

SEQ ID NO: 638186 - RNA, 19 nt, Artificial Sequence
  Description of Artificial Sequence: Synthetic oligonucleotide
  Sense strand starting at position 2727 of SEQ ID NO: 585416
ucuguucugcuccauacua

SEQ ID NO: 638187 - RNA, 19 nt, Artificial Sequence
  Description of Artificial Sequence: Synthetic oligonucleotide
  Antisense strand to SEQ ID NO: 638186
uaguauggagcagaacaga

SEQ ID NO: 638188 - RNA, 19 nt, Artificial Sequence
  Description of Artificial Sequence: Synthetic oligonucleotide
  Sense strand starting at position 2768 of SEQ ID NO: 585416
gcacaaaucuguccugguu

SEQ ID NO: 638189 - RNA, 19 nt, Artificial Sequence
  Description of Artificial Sequence: Synthetic oligonucleotide
  Antisense strand to SEQ ID NO: 638188
aaccaggacagauuugugc

SEQ ID NO: 638190 - RNA, 19 nt, Artificial Sequence
  Description of Artificial Sequence: Synthetic oligonucleotide
  Sense strand starting at position 3224 of SEQ ID NO: 585416
gagcuaaagccucgugguu

SEQ ID NO: 638191 - RNA, 19 nt, Artificial Sequence
  Description of Artificial Sequence: Synthetic oligonucleotide
  Antisense strand to SEQ ID NO: 638190
aaccacgaggcuuuagcuc

SEQ ID NO: 638192 - RNA, 19 nt, Artificial Sequence
  Description of Artificial Sequence: Synthetic oligonucleotide
  Sense strand starting at position 3326 of SEQ ID NO: 585416
gggagaugcccugauucug

SEQ ID NO: 638193 - RNA, 19 nt, Artificial Sequence
  Description of Artificial Sequence: Synthetic oligonucleotide
  Antisense strand to SEQ ID NO: 638192
cagaaucagggcaucuccc

SEQ ID NO: 638194 - RNA, 19 nt, Artificial Sequence
  Description of Artificial Sequence: Synthetic oligonucleotide
  Sense strand starting at position 3332 of SEQ ID NO: 585416
ugcccugauucugggagaa

SEQ ID NO: 638195 - RNA, 19 nt, Artificial Sequence
  Description of Artificial Sequence: Synthetic oligonucleotide
  Antisense strand to SEQ ID NO: 638194
uucucccagaaucagggca

SEQ ID NO: 638196 - RNA, 19 nt, Artificial Sequence
  Description of Artificial Sequence: Synthetic oligonucleotide
  Sense strand starting at position 3623 of SEQ ID NO: 585416
gucugaaaggccugggaga

SEQ ID NO: 638197 - RNA, 19 nt, Artificial Sequence
  Description of Artificial Sequence: Synthetic oligonucleotide
  Antisense strand to SEQ ID NO: 638196
ucucccaggccuuucagac

SEQ ID NO: 638198 - RNA, 19 nt, Artificial Sequence
  Description of Artificial Sequence: Synthetic oligonucleotide
  Sense strand starting at position 41 of SEQ ID NO: 585417
gaccaaaccuuggugaaca

SEQ ID NO: 638199 - RNA, 19 nt, Artificial Sequence
  Description of Artificial Sequence: Synthetic oligonucleotide
  Antisense strand to SEQ ID NO: 638198
uguucaccaagguuugguc

SEQ ID NO: 638200 - RNA, 19 nt, Artificial Sequence
  Description of Artificial Sequence: Synthetic oligonucleotide
  Sense strand starting at position 42 of SEQ ID NO: 585417
accaaaccuuggugaacau

SEQ ID NO: 638201 - RNA, 19 nt, Artificial Sequence
  Description of Artificial Sequence: Synthetic oligonucleotide
  Antisense strand to SEQ ID NO: 638200
auguucaccaagguuuggu

SEQ ID NO: 638202 - RNA, 19 nt, Artificial Sequence
  Description of Artificial Sequence: Synthetic oligonucleotide
  Sense strand starting at position 65 of SEQ ID NO: 585417
cacuaagggucagagagaa

SEQ ID NO: 638203 - RNA, 19 nt, Artificial Sequence
  Description of Artificial Sequence: Synthetic oligonucleotide
  Antisense strand to SEQ ID NO: 638202
uucucucugacccuuagug

SEQ ID NO: 638204 - RNA, 19 nt, Artificial Sequence
  Description of Artificial Sequence: Synthetic oligonucleotide
  Sense strand starting at position 142 of SEQ ID NO: 585417
gcaguaacugcagacagau

SEQ ID NO: 638205 - RNA, 19 nt, Artificial Sequence
  Description of Artificial Sequence: Synthetic oligonucleotide
  Antisense strand to SEQ ID NO: 638204
aucugucugcaguuacugc

SEQ ID NO: 638206 - RNA, 19 nt, Artificial Sequence
  Description of Artificial Sequence: Synthetic oligonucleotide
  Sense strand starting at position 255 of SEQ ID NO: 585417
gcuacagauugaggagaga

SEQ ID NO: 638207 - RNA, 19 nt, Artificial Sequence
  Description of Artificial Sequence: Synthetic oligonucleotide
  Antisense strand to SEQ ID NO: 638206
ucucuccucaaucuguagc

SEQ ID NO: 638208 - RNA, 19 nt, Artificial Sequence
  Description of Artificial Sequence: Synthetic oligonucleotide
  Sense strand starting at position 291 of SEQ ID NO: 585417
gacagaguguggcucugaa

SEQ ID NO: 638209 - RNA, 19 nt, Artificial Sequence
  Description of Artificial Sequence: Synthetic oligonucleotide
  Antisense strand to SEQ ID NO: 638208
uucagagccacacucuguc

SEQ ID NO: 638210 - RNA, 19 nt, Artificial Sequence
  Description of Artificial Sequence: Synthetic oligonucleotide
  Sense strand starting at position 617 of SEQ ID NO: 585417
ggagcaaugucuuauggga

SEQ ID NO: 638211 - RNA, 19 nt, Artificial Sequence
  Description of Artificial Sequence: Synthetic oligonucleotide
  Antisense strand to SEQ ID NO: 638210
ucccauaagacauugcucc

SEQ ID NO: 638212 - RNA, 19 nt, Artificial Sequence
  Description of Artificial Sequence: Synthetic oligonucleotide
  Sense strand starting at position 622 of SEQ ID NO: 585417
aaugucuuaugggauuaug

SEQ ID NO: 638213 - RNA, 19 nt, Artificial Sequence
  Description of Artificial Sequence: Synthetic oligonucleotide
  Antisense strand to SEQ ID NO: 638212
cauaaucccauaagacauu

SEQ ID NO: 638214 - RNA, 19 nt, Artificial Sequence
  Description of Artificial Sequence: Synthetic oligonucleotide
  Sense strand starting at position 630 of SEQ ID NO: 585417
augggauuaugggaacaag

SEQ ID NO: 638215 - RNA, 19 nt, Artificial Sequence
  Description of Artificial Sequence: Synthetic oligonucleotide
  Antisense strand to SEQ ID NO: 638214
cuuguucccauaaucccau

SEQ ID NO: 638216 - RNA, 19 nt, Artificial Sequence
  Description of Artificial Sequence: Synthetic oligonucleotide
  Sense strand starting at position 676 of SEQ ID NO: 585417
agaguuuccguuugggaga

SEQ ID NO: 638217 - RNA, 19 nt, Artificial Sequence
  Description of Artificial Sequence: Synthetic oligonucleotide
  Antisense strand to SEQ ID NO: 638216
ucucccaaacggaaacucu

SEQ ID NO: 638218 - RNA, 19 nt, Artificial Sequence
  Description of Artificial Sequence: Synthetic oligonucleotide
  Sense strand starting at position 693 of SEQ ID NO: 585417
gagugcugggcccaugaca

SEQ ID NO: 638219 - RNA, 19 nt, Artificial Sequence
  Description of Artificial Sequence: Synthetic oligonucleotide
  Antisense strand to SEQ ID NO: 638218
ugucaugggcccagcacuc

SEQ ID NO: 638220 - RNA, 19 nt, Artificial Sequence
  Description of Artificial Sequence: Synthetic oligonucleotide
  Sense strand starting at position 807 of SEQ ID NO: 585417
cuuggucuccaagaggcau

SEQ ID NO: 638221 - RNA, 19 nt, Artificial Sequence
  Description of Artificial Sequence: Synthetic oligonucleotide
  Antisense strand to SEQ ID NO: 638220
augccucuuggagaccaag

SEQ ID NO: 638222 - RNA, 19 nt, Artificial Sequence
  Description of Artificial Sequence: Synthetic oligonucleotide
  Sense strand starting at position 1116 of SEQ ID NO: 585417
agcagagcacuugguguua

SEQ ID NO: 638223 - RNA, 19 nt, Artificial Sequence
  Description of Artificial Sequence: Synthetic oligonucleotide
  Antisense strand to SEQ ID NO: 638222
uaacaccaagugcucugcu

SEQ ID NO: 638224 - RNA, 19 nt, Artificial Sequence
  Description of Artificial Sequence: Synthetic oligonucleotide
  Sense strand starting at position 1127 of SEQ ID NO: 585417
ugguguuaggcagaggaaa

SEQ ID NO: 638225 - RNA, 19 nt, Artificial Sequence
  Description of Artificial Sequence: Synthetic oligonucleotide
  Antisense strand to SEQ ID NO: 638224
uuuccucugccuaacacca

SEQ ID NO: 638226 - RNA, 19 nt, Artificial Sequence
  Description of Artificial Sequence: Synthetic oligonucleotide
  Sense strand starting at position 1129 of SEQ ID NO: 585417
guguuaggcagaggaaagu

SEQ ID NO: 638227 - RNA, 19 nt, Artificial Sequence
  Description of Artificial Sequence: Synthetic oligonucleotide
  Antisense strand to SEQ ID NO: 638226
acuuuccucugccuaacac

SEQ ID NO: 638228 - RNA, 19 nt, Artificial Sequence
  Description of Artificial Sequence: Synthetic oligonucleotide
  Sense strand starting at position 1138 of SEQ ID NO: 585417
agaggaaagugcuaaacca

SEQ ID NO: 638229 - RNA, 19 nt, Artificial Sequence
  Description of Artificial Sequence: Synthetic oligonucleotide
  Antisense strand to SEQ ID NO: 638228
ugguuuagcacuuuccucu

SEQ ID NO: 638230 - RNA, 19 nt, Artificial Sequence
  Description of Artificial Sequence: Synthetic oligonucleotide
  Sense strand starting at position 1160 of SEQ ID NO: 585417
cuuugaauccugugucucu

SEQ ID NO: 638231 - RNA, 19 nt, Artificial Sequence
  Description of Artificial Sequence: Synthetic oligonucleotide
  Antisense strand to SEQ ID NO: 638230
agagacacaggauucaaag

SEQ ID NO: 638232 - RNA, 19 nt, Artificial Sequence
  Description of Artificial Sequence: Synthetic oligonucleotide
  Sense strand starting at position 1231 of SEQ ID NO: 585417
uguucuauccuguggauuc

SEQ ID NO: 638233 - RNA, 19 nt, Artificial Sequence
  Description of Artificial Sequence: Synthetic oligonucleotide
  Antisense strand to SEQ ID NO: 638232
gaauccacaggauagaaca

SEQ ID NO: 638234 - RNA, 19 nt, Artificial Sequence
  Description of Artificial Sequence: Synthetic oligonucleotide
  Sense strand starting at position 1286 of SEQ ID NO: 585417
auucuauguugcccucaga

SEQ ID NO: 638235 - RNA, 19 nt, Artificial Sequence
  Description of Artificial Sequence: Synthetic oligonucleotide
  Antisense strand to SEQ ID NO: 638234
ucugagggcaacauagaau

SEQ ID NO: 638236 - RNA, 19 nt, Artificial Sequence
  Description of Artificial Sequence: Synthetic oligonucleotide
  Sense strand starting at position 1731 of SEQ ID NO: 585417
gcaggcauucccuaccaaa

SEQ ID NO: 638237 - RNA, 19 nt, Artificial Sequence
  Description of Artificial Sequence: Synthetic oligonucleotide
  Antisense strand to SEQ ID NO: 638236
uuugguagggaaugccugc

SEQ ID NO: 638238 - RNA, 19 nt, Artificial Sequence
  Description of Artificial Sequence: Synthetic oligonucleotide
  Sense strand starting at position 2014 of SEQ ID NO: 585417
ccuccaguuugggcuuaua

SEQ ID NO: 638239 - RNA, 19 nt, Artificial Sequence
  Description of Artificial Sequence: Synthetic oligonucleotide
  Antisense strand to SEQ ID NO: 638238
uauaagcccaaacuggagg

SEQ ID NO: 638240 - RNA, 19 nt, Artificial Sequence
  Description of Artificial Sequence: Synthetic oligonucleotide
  Sense strand starting at position 2023 of SEQ ID NO: 585417
ugggcuuauauugguggaa

SEQ ID NO: 638241 - RNA, 19 nt, Artificial Sequence
  Description of Artificial Sequence: Synthetic oligonucleotide
  Antisense strand to SEQ ID NO: 638240
uuccaccaauauaagccca

SEQ ID NO: 638242 - RNA, 19 nt, Artificial Sequence
  Description of Artificial Sequence: Synthetic oligonucleotide
  Sense strand starting at position 2024 of SEQ ID NO: 585417
gggcuuauauugguggaag

SEQ ID NO: 638243 - RNA, 19 nt, Artificial Sequence
  Description of Artificial Sequence: Synthetic oligonucleotide
  Antisense strand to SEQ ID NO: 638242
cuuccaccaauauaagccc

SEQ ID NO: 638244 - RNA, 19 nt, Artificial Sequence
  Description of Artificial Sequence: Synthetic oligonucleotide
  Sense strand starting at position 2026 of SEQ ID NO: 585417
gcuuauauugguggaagag

SEQ ID NO: 638245 - RNA, 19 nt, Artificial Sequence
  Description of Artificial Sequence: Synthetic oligonucleotide
  Antisense strand to SEQ ID NO: 638244
cucuuccaccaauauaagc

SEQ ID NO: 638246 - RNA, 19 nt, Artificial Sequence
  Description of Artificial Sequence: Synthetic oligonucleotide
  Sense strand starting at position 2085 of SEQ ID NO: 585417
gguggaaaucagugccaga

SEQ ID NO: 638247 - RNA, 19 nt, Artificial Sequence
  Description of Artificial Sequence: Synthetic oligonucleotide
  Antisense strand to SEQ ID NO: 638246
ucuggcacugauuuccacc

SEQ ID NO: 638248 - RNA, 19 nt, Artificial Sequence
  Description of Artificial Sequence: Synthetic oligonucleotide
  Sense strand starting at position 2115 of SEQ ID NO: 585417
ggcagaauguucgcaccca

SEQ ID NO: 638249 - RNA, 19 nt, Artificial Sequence
  Description of Artificial Sequence: Synthetic oligonucleotide
  Antisense strand to SEQ ID NO: 638248
ugggugcgaacauucugcc

SEQ ID NO: 638250 - RNA, 19 nt, Artificial Sequence
  Description of Artificial Sequence: Synthetic oligonucleotide
  Sense strand starting at position 2198 of SEQ ID NO: 585417
ggaacugucuuuccuauua

SEQ ID NO: 638251 - RNA, 19 nt, Artificial Sequence
  Description of Artificial Sequence: Synthetic oligonucleotide
  Antisense strand to SEQ ID NO: 638250
uaauaggaaagacaguucc

SEQ ID NO: 638252 - RNA, 19 nt, Artificial Sequence
  Description of Artificial Sequence: Synthetic oligonucleotide
  Sense strand starting at position 2209 of SEQ ID NO: 585417
uccuauuaauuggacagau

SEQ ID NO: 638253 - RNA, 19 nt, Artificial Sequence
  Description of Artificial Sequence: Synthetic oligonucleotide
  Antisense strand to SEQ ID NO: 638252
aucuguccaauuaauagga

SEQ ID NO: 638254 - RNA, 19 nt, Artificial Sequence
  Description of Artificial Sequence: Synthetic oligonucleotide
  Sense strand starting at position 2218 of SEQ ID NO: 585417
uuggacagauguuuauuga

SEQ ID NO: 638255 - RNA, 19 nt, Artificial Sequence
  Description of Artificial Sequence: Synthetic oligonucleotide
  Antisense strand to SEQ ID NO: 638254
ucaauaaacaucuguccaa

SEQ ID NO: 638256 - RNA, 19 nt, Artificial Sequence
  Description of Artificial Sequence: Synthetic oligonucleotide
  Sense strand starting at position 2221 of SEQ ID NO: 585417
gacagauguuuauugaauc

SEQ ID NO: 638257 - RNA, 19 nt, Artificial Sequence
  Description of Artificial Sequence: Synthetic oligonucleotide
  Antisense strand to SEQ ID NO: 638256
gauucaauaaacaucuguc

SEQ ID NO: 638258 - RNA, 19 nt, Artificial Sequence
  Description of Artificial Sequence: Synthetic oligonucleotide
  Sense strand starting at position 2222 of SEQ ID NO: 585417
acagauguuuauugaauca

SEQ ID NO: 638259 - RNA, 19 nt, Artificial Sequence
  Description of Artificial Sequence: Synthetic oligonucleotide
  Antisense strand to SEQ ID NO: 638258
ugauucaauaaacaucugu

SEQ ID NO: 638260 - RNA, 19 nt, Artificial Sequence
  Description of Artificial Sequence: Synthetic oligonucleotide
  Sense strand starting at position 2310 of SEQ ID NO: 585417
agacaaguccaccagcaau

SEQ ID NO: 638261 - RNA, 19 nt, Artificial Sequence
  Description of Artificial Sequence: Synthetic oligonucleotide
  Antisense strand to SEQ ID NO: 638260
auugcugguggacuugucu

SEQ ID NO: 638262 - RNA, 19 nt, Artificial Sequence
  Description of Artificial Sequence: Synthetic oligonucleotide
  Sense strand starting at position 2355 of SEQ ID NO: 585417
ggagcaccucgacaguuaa

SEQ ID NO: 638263 - RNA, 19 nt, Artificial Sequence
  Description of Artificial Sequence: Synthetic oligonucleotide
  Antisense strand to SEQ ID NO: 638262
uuaacugucgaggugcucc

SEQ ID NO: 638264 - RNA, 19 nt, Artificial Sequence
  Description of Artificial Sequence: Synthetic oligonucleotide
  Sense strand starting at position 2401 of SEQ ID NO: 585417
ggaguaacuugaucggauu

SEQ ID NO: 638265 - RNA, 19 nt, Artificial Sequence
  Description of Artificial Sequence: Synthetic oligonucleotide
  Antisense strand to SEQ ID NO: 638264
aauccgaucaaguuacucc

SEQ ID NO: 638266 - RNA, 19 nt, Artificial Sequence
  Description of Artificial Sequence: Synthetic oligonucleotide
  Sense strand starting at position 2404 of SEQ ID NO: 585417
guaacuugaucggauuucu

SEQ ID NO: 638267 - RNA, 19 nt, Artificial Sequence
  Description of Artificial Sequence: Synthetic oligonucleotide
  Antisense strand to SEQ ID NO: 638266
agaaauccgaucaaguuac

SEQ ID NO: 638268 - RNA, 19 nt, Artificial Sequence
  Description of Artificial Sequence: Synthetic oligonucleotide
  Sense strand starting at position 2574 of SEQ ID NO: 585417
gagauacaguuagaagacu

SEQ ID NO: 638269 - RNA, 19 nt, Artificial Sequence
  Description of Artificial Sequence: Synthetic oligonucleotide
  Antisense strand to SEQ ID NO: 638268
agucuucuaacuguaucuc

SEQ ID NO: 638270 - RNA, 19 nt, Artificial Sequence
  Description of Artificial Sequence: Synthetic oligonucleotide
  Sense strand starting at position 2676 of SEQ ID NO: 585417
ggaaacauguggucugucu

SEQ ID NO: 638271 - RNA, 19 nt, Artificial Sequence
  Description of Artificial Sequence: Synthetic oligonucleotide
  Antisense strand to SEQ ID NO: 638270
agacagaccacauguuucc

SEQ ID NO: 638272 - RNA, 19 nt, Artificial Sequence
  Description of Artificial Sequence: Synthetic oligonucleotide
  Sense strand starting at position 2678 of SEQ ID NO: 585417
aaacauguggucugucuca

SEQ ID NO: 638273 - RNA, 19 nt, Artificial Sequence
  Description of Artificial Sequence: Synthetic oligonucleotide
  Antisense strand to SEQ ID NO: 638272
ugagacagaccacauguuu

SEQ ID NO: 638274 - RNA, 19 nt, Artificial Sequence
  Description of Artificial Sequence: Synthetic oligonucleotide
  Sense strand starting at position 3243 of SEQ ID NO: 585417
agucuugacucagaaacuc

SEQ ID NO: 638275 - RNA, 19 nt, Artificial Sequence
  Description of Artificial Sequence: Synthetic oligonucleotide
  Antisense strand to SEQ ID NO: 638274
gaguuucugagucaagacu

SEQ ID NO: 638276 - RNA, 19 nt, Artificial Sequence
  Description of Artificial Sequence: Synthetic oligonucleotide
  Sense strand starting at position 3418 of SEQ ID NO: 585417
uauccagucccaggaugau

SEQ ID NO: 638277 - RNA, 19 nt, Artificial Sequence
  Description of Artificial Sequence: Synthetic oligonucleotide
  Antisense strand to SEQ ID NO: 638276
aucauccugggacuggaua

SEQ ID NO: 638278 - RNA, 19 nt, Artificial Sequence
  Description of Artificial Sequence: Synthetic oligonucleotide
  Sense strand starting at position 155 of SEQ ID NO: 585418
aucacaggguugucaugaa

SEQ ID NO: 638279 - RNA, 19 nt, Artificial Sequence
  Description of Artificial Sequence: Synthetic oligonucleotide
  Antisense strand to SEQ ID NO: 638278
uucaugacaacccugugau

SEQ ID NO: 638280 - RNA, 19 nt, Artificial Sequence
  Description of Artificial Sequence: Synthetic oligonucleotide
  Sense strand starting at position 159 of SEQ ID NO: 585418
caggguugucaugaacauu

SEQ ID NO: 638281 - RNA, 19 nt, Artificial Sequence
  Description of Artificial Sequence: Synthetic oligonucleotide
  Antisense strand to SEQ ID NO: 638280
aauguucaugacaacccug

SEQ ID NO: 638282 - RNA, 19 nt, Artificial Sequence
  Description of Artificial Sequence: Synthetic oligonucleotide
  Sense strand starting at position 162 of SEQ ID NO: 585418
gguugucaugaacauuaau

SEQ ID NO: 638283 - RNA, 19 nt, Artificial Sequence
  Description of Artificial Sequence: Synthetic oligonucleotide
  Antisense strand to SEQ ID NO: 638282
auuaauguucaugacaacc

SEQ ID NO: 638284 - RNA, 19 nt, Artificial Sequence
  Description of Artificial Sequence: Synthetic oligonucleotide
  Sense strand starting at position 204 of SEQ ID NO: 585418
uaggauguugccuggcaca

SEQ ID NO: 638285 - RNA, 19 nt, Artificial Sequence
  Description of Artificial Sequence: Synthetic oligonucleotide
  Antisense strand to SEQ ID NO: 638284
ugugccaggcaacauccua

SEQ ID NO: 638286 - RNA, 19 nt, Artificial Sequence
  Description of Artificial Sequence: Synthetic oligonucleotide
  Sense strand starting at position 294 of SEQ ID NO: 585418
ggccucaguccuggucaua

SEQ ID NO: 638287 - RNA, 19 nt, Artificial Sequence
  Description of Artificial Sequence: Synthetic oligonucleotide
  Antisense strand to SEQ ID NO: 638286
uaugaccaggacugaggcc

SEQ ID NO: 638288 - RNA, 19 nt, Artificial Sequence
  Description of Artificial Sequence: Synthetic oligonucleotide
  Sense strand starting at position 459 of SEQ ID NO: 585418
gcgaaugucagcugggaag

SEQ ID NO: 638289 - RNA, 19 nt, Artificial Sequence
  Description of Artificial Sequence: Synthetic oligonucleotide
  Antisense strand to SEQ ID NO: 638288
cuucccagcugacauucgc

SEQ ID NO: 638290 - RNA, 19 nt, Artificial Sequence
  Description of Artificial Sequence: Synthetic oligonucleotide
  Sense strand starting at position 590 of SEQ ID NO: 585418
ggcuguuuggucuagcaag

SEQ ID NO: 638291 - RNA, 19 nt, Artificial Sequence
  Description of Artificial Sequence: Synthetic oligonucleotide
  Antisense strand to SEQ ID NO: 638290
cuugcuagaccaaacagcc

SEQ ID NO: 638292 - RNA, 19 nt, Artificial Sequence
  Description of Artificial Sequence: Synthetic oligonucleotide
  Sense strand starting at position 662 of SEQ ID NO: 585418
uagagcuguugcuuuguga

SEQ ID NO: 638293 - RNA, 19 nt, Artificial Sequence
  Description of Artificial Sequence: Synthetic oligonucleotide
  Antisense strand to SEQ ID NO: 638292
ucacaaagcaacagcucua

SEQ ID NO: 638294 - RNA, 19 nt, Artificial Sequence
  Description of Artificial Sequence: Synthetic oligonucleotide
  Sense strand starting at position 665 of SEQ ID NO: 585418
agcuguugcuuugugaaag

SEQ ID NO: 638295 - RNA, 19 nt, Artificial Sequence
  Description of Artificial Sequence: Synthetic oligonucleotide
  Antisense strand to SEQ ID NO: 638294
cuuucacaaagcaacagcu

SEQ ID NO: 638296 - RNA, 19 nt, Artificial Sequence
  Description of Artificial Sequence: Synthetic oligonucleotide
  Sense strand starting at position 776 of SEQ ID NO: 585418
gauggaaugugaggaagau

SEQ ID NO: 638297 - RNA, 19 nt, Artificial Sequence
  Description of Artificial Sequence: Synthetic oligonucleotide
  Antisense strand to SEQ ID NO: 638296
aucuuccucacauuccauc

SEQ ID NO: 638298 - RNA, 19 nt, Artificial Sequence
  Description of Artificial Sequence: Synthetic oligonucleotide
  Sense strand starting at position 875 of SEQ ID NO: 585418
ggguuacaacacugucaga

SEQ ID NO: 638299 - RNA, 19 nt, Artificial Sequence
  Description of Artificial Sequence: Synthetic oligonucleotide
  Antisense strand to SEQ ID NO: 638298
ucugacaguguuguaaccc

SEQ ID NO: 638300 - RNA, 19 nt, Artificial Sequence
  Description of Artificial Sequence: Synthetic oligonucleotide
  Sense strand starting at position 889 of SEQ ID NO: 585418
ucagaaaugccuuggaacu

SEQ ID NO: 638301 - RNA, 19 nt, Artificial Sequence
  Description of Artificial Sequence: Synthetic oligonucleotide
  Antisense strand to SEQ ID NO: 638300
aguuccaaggcauuucuga

SEQ ID NO: 638302 - RNA, 19 nt, Artificial Sequence
  Description of Artificial Sequence: Synthetic oligonucleotide
  Sense strand starting at position 1196 of SEQ ID NO: 585418
guggaagagccugguaagu

SEQ ID NO: 638303 - RNA, 19 nt, Artificial Sequence
  Description of Artificial Sequence: Synthetic oligonucleotide
  Antisense strand to SEQ ID NO: 638302
acuuaccaggcucuuccac

SEQ ID NO: 638304 - RNA, 19 nt, Artificial Sequence
  Description of Artificial Sequence: Synthetic oligonucleotide
  Sense strand starting at position 1209 of SEQ ID NO: 585418
guaaguguaccucagugaa

SEQ ID NO: 638305 - RNA, 19 nt, Artificial Sequence
  Description of Artificial Sequence: Synthetic oligonucleotide
  Antisense strand to SEQ ID NO: 638304
uucacugagguacacuuac

SEQ ID NO: 638306 - RNA, 19 nt, Artificial Sequence
  Description of Artificial Sequence: Synthetic oligonucleotide
  Sense strand starting at position 1212 of SEQ ID NO: 585418
aguguaccucagugaaauc

SEQ ID NO: 638307 - RNA, 19 nt, Artificial Sequence
  Description of Artificial Sequence: Synthetic oligonucleotide
  Antisense strand to SEQ ID NO: 638306
gauuucacugagguacacu

SEQ ID NO: 638308 - RNA, 19 nt, Artificial Sequence
  Description of Artificial Sequence: Synthetic oligonucleotide
  Sense strand starting at position 1321 of SEQ ID NO: 585418
ugcaaccaucuagaaaguu

SEQ ID NO: 638309 - RNA, 19 nt, Artificial Sequence
  Description of Artificial Sequence: Synthetic oligonucleotide
  Antisense strand to SEQ ID NO: 638308
aacuuucuagaugguugca

SEQ ID NO: 638310 - RNA, 19 nt, Artificial Sequence
  Description of Artificial Sequence: Synthetic oligonucleotide
  Sense strand starting at position 1412 of SEQ ID NO: 585418
agagacugaacaugugagu

SEQ ID NO: 638311 - RNA, 19 nt, Artificial Sequence
  Description of Artificial Sequence: Synthetic oligonucleotide
  Antisense strand to SEQ ID NO: 638310
acucacauguucagucucu

SEQ ID NO: 638312 - RNA, 19 nt, Artificial Sequence
  Description of Artificial Sequence: Synthetic oligonucleotide
  Sense strand starting at position 1423 of SEQ ID NO: 585418
augugagucccugauggag

SEQ ID NO: 638313 - RNA, 19 nt, Artificial Sequence
  Description of Artificial Sequence: Synthetic oligonucleotide
  Antisense strand to SEQ ID NO: 638312
cuccaucagggacucacau

SEQ ID NO: 638314 - RNA, 19 nt, Artificial Sequence
  Description of Artificial Sequence: Synthetic oligonucleotide
  Sense strand starting at position 1486 of SEQ ID NO: 585418
cuaggucuucgagaggaca

SEQ ID NO: 638315 - RNA, 19 nt, Artificial Sequence
  Description of Artificial Sequence: Synthetic oligonucleotide
  Antisense strand to SEQ ID NO: 638314
uguccucucgaagaccuag

SEQ ID NO: 638316 - RNA, 19 nt, Artificial Sequence
  Description of Artificial Sequence: Synthetic oligonucleotide
  Sense strand starting at position 1657 of SEQ ID NO: 585418
gugagagaaaugggucuuu

SEQ ID NO: 638317 - RNA, 19 nt, Artificial Sequence
  Description of Artificial Sequence: Synthetic oligonucleotide
  Antisense strand to SEQ ID NO: 638316
aaagacccauuucucucac

SEQ ID NO: 638318 - RNA, 19 nt, Artificial Sequence
  Description of Artificial Sequence: Synthetic oligonucleotide
  Sense strand starting at position 1722 of SEQ ID NO: 585418
gagcaaggaggcugucaua

SEQ ID NO: 638319 - RNA, 19 nt, Artificial Sequence
  Description of Artificial Sequence: Synthetic oligonucleotide
  Antisense strand to SEQ ID NO: 638318
uaugacagccuccuugcuc

SEQ ID NO: 638320 - RNA, 19 nt, Artificial Sequence
  Description of Artificial Sequence: Synthetic oligonucleotide
  Sense strand starting at position 2202 of SEQ ID NO: 585418
ggccaaugccauugugguu

SEQ ID NO: 638321 - RNA, 19 nt, Artificial Sequence
  Description of Artificial Sequence: Synthetic oligonucleotide
  Antisense strand to SEQ ID NO: 638320
aaccacaauggcauuggcc

SEQ ID NO: 638322 - RNA, 19 nt, Artificial Sequence
  Description of Artificial Sequence: Synthetic oligonucleotide
  Sense strand starting at position 2269 of SEQ ID NO: 585418
gcugcucaguccucugaau

SEQ ID NO: 638323 - RNA, 19 nt, Artificial Sequence
  Description of Artificial Sequence: Synthetic oligonucleotide
  Antisense strand to SEQ ID NO: 638322
auucagaggacugagcagc

SEQ ID NO: 638324 - RNA, 19 nt, Artificial Sequence
  Description of Artificial Sequence: Synthetic oligonucleotide
  Sense strand starting at position 2271 of SEQ ID NO: 585418
ugcucaguccucugaauga

SEQ ID NO: 638325 - RNA, 19 nt, Artificial Sequence
  Description of Artificial Sequence: Synthetic oligonucleotide
  Antisense strand to SEQ ID NO: 638324
ucauucagaggacugagca

SEQ ID NO: 638326 - RNA, 19 nt, Artificial Sequence
  Description of Artificial Sequence: Synthetic oligonucleotide
  Sense strand starting at position 2275 of SEQ ID NO: 585418
caguccucugaaugagcau

SEQ ID NO: 638327 - RNA, 19 nt, Artificial Sequence
  Description of Artificial Sequence: Synthetic oligonucleotide
  Antisense strand to SEQ ID NO: 638326
augcucauucagaggacug

SEQ ID NO: 638328 - RNA, 19 nt, Artificial Sequence
  Description of Artificial Sequence: Synthetic oligonucleotide
  Sense strand starting at position 2307 of SEQ ID NO: 585418
ugugauuuacaguguccau

SEQ ID NO: 638329 - RNA, 19 nt, Artificial Sequence
  Description of Artificial Sequence: Synthetic oligonucleotide
  Antisense strand to SEQ ID NO: 638328
auggacacuguaaaucaca

SEQ ID NO: 638330 - RNA, 19 nt, Artificial Sequence
  Description of Artificial Sequence: Synthetic oligonucleotide
  Sense strand starting at position 2335 of SEQ ID NO: 585418
uucugcugguuccuggaaa

SEQ ID NO: 638331 - RNA, 19 nt, Artificial Sequence
  Description of Artificial Sequence: Synthetic oligonucleotide
  Antisense strand to SEQ ID NO: 638330
uuuccaggaaccagcagaa

SEQ ID NO: 638332 - RNA, 19 nt, Artificial Sequence
  Description of Artificial Sequence: Synthetic oligonucleotide
  Sense strand starting at position 2424 of SEQ ID NO: 585418
gggcaugcugguggaaauu

SEQ ID NO: 638333 - RNA, 19 nt, Artificial Sequence
  Description of Artificial Sequence: Synthetic oligonucleotide
  Antisense strand to SEQ ID NO: 638332
aauuuccaccagcaugccc

SEQ ID NO: 638334 - RNA, 19 nt, Artificial Sequence
  Description of Artificial Sequence: Synthetic oligonucleotide
  Sense strand starting at position 2454 of SEQ ID NO: 585418
gggucaaauuaaucuccau

SEQ ID NO: 638335 - RNA, 19 nt, Artificial Sequence
  Description of Artificial Sequence: Synthetic oligonucleotide
  Antisense strand to SEQ ID NO: 638334
auggagauuaauuugaccc

SEQ ID NO: 638336 - RNA, 19 nt, Artificial Sequence
  Description of Artificial Sequence: Synthetic oligonucleotide
  Sense strand starting at position 2499 of SEQ ID NO: 585418
ccugcucagcaauaaguga

SEQ ID NO: 638337 - RNA, 19 nt, Artificial Sequence
  Description of Artificial Sequence: Synthetic oligonucleotide
  Antisense strand to SEQ ID NO: 638336
ucacuuauugcugagcagg

SEQ ID NO: 638338 - RNA, 19 nt, Artificial Sequence
  Description of Artificial Sequence: Synthetic oligonucleotide
  Sense strand starting at position 2621 of SEQ ID NO: 585418
ccaugaagguucucaggau

SEQ ID NO: 638339 - RNA, 19 nt, Artificial Sequence
  Description of Artificial Sequence: Synthetic oligonucleotide
  Antisense strand to SEQ ID NO: 638338
auccugagaaccuucaugg

SEQ ID NO: 638340 - RNA, 19 nt, Artificial Sequence
  Description of Artificial Sequence: Synthetic oligonucleotide
  Sense strand starting at position 2622 of SEQ ID NO: 585418
caugaagguucucaggaug

SEQ ID NO: 638341 - RNA, 19 nt, Artificial Sequence
  Description of Artificial Sequence: Synthetic oligonucleotide
  Antisense strand to SEQ ID NO: 638340
cauccugagaaccuucaug

SEQ ID NO: 638342 - RNA, 19 nt, Artificial Sequence
  Description of Artificial Sequence: Synthetic oligonucleotide
  Sense strand starting at position 2625 of SEQ ID NO: 585418
gaagguucucaggauguca

SEQ ID NO: 638343 - RNA, 19 nt, Artificial Sequence
  Description of Artificial Sequence: Synthetic oligonucleotide
  Antisense strand to SEQ ID NO: 638342
ugacauccugagaaccuuc

SEQ ID NO: 638344 - RNA, 19 nt, Artificial Sequence
  Description of Artificial Sequence: Synthetic oligonucleotide
  Sense strand starting at position 3162 of SEQ ID NO: 585418
cuuacauagugauccuaug

SEQ ID NO: 638345 - RNA, 19 nt, Artificial Sequence
  Description of Artificial Sequence: Synthetic oligonucleotide
  Antisense strand to SEQ ID NO: 638344
cauaggaucacuauguaag

SEQ ID NO: 638346 - RNA, 19 nt, Artificial Sequence
  Description of Artificial Sequence: Synthetic oligonucleotide
  Sense strand starting at position 3413 of SEQ ID NO: 585418
ggccaaagcauuuguguaa

SEQ ID NO: 638347 - RNA, 19 nt, Artificial Sequence
  Description of Artificial Sequence: Synthetic oligonucleotide
  Antisense strand to SEQ ID NO: 638346
uuacacaaaugcuuuggcc

SEQ ID NO: 638348 - RNA, 19 nt, Artificial Sequence
  Description of Artificial Sequence: Synthetic oligonucleotide
  Sense strand starting at position 3414 of SEQ ID NO: 585418
gccaaagcauuuguguaaa

SEQ ID NO: 638349 - RNA, 19 nt, Artificial Sequence
  Description of Artificial Sequence: Synthetic oligonucleotide
  Antisense strand to SEQ ID NO: 638348
uuuacacaaaugcuuuggc

SEQ ID NO: 638350 - RNA, 19 nt, Artificial Sequence
  Description of Artificial Sequence: Synthetic oligonucleotide
  Sense strand starting at position 3455 of SEQ ID NO: 585418
ugagaaccauuugaagacu

SEQ ID NO: 638351 - RNA, 19 nt, Artificial Sequence
  Description of Artificial Sequence: Synthetic oligonucleotide
  Antisense strand to SEQ ID NO: 638350
agucuucaaaugguucuca

SEQ ID NO: 638352 - RNA, 19 nt, Artificial Sequence
  Description of Artificial Sequence: Synthetic oligonucleotide
  Sense strand starting at position 3475 of SEQ ID NO: 585418
cgaguuugccugcgaggau

SEQ ID NO: 638353 - RNA, 19 nt, Artificial Sequence
  Description of Artificial Sequence: Synthetic oligonucleotide
  Antisense strand to SEQ ID NO: 638352
auccucgcaggcaaacucg

SEQ ID NO: 638354 - RNA, 19 nt, Artificial Sequence
  Description of Artificial Sequence: Synthetic oligonucleotide
  Sense strand starting at position 3711 of SEQ ID NO: 585418
guaagcgaucccugggaga

SEQ ID NO: 638355 - RNA, 19 nt, Artificial Sequence
  Description of Artificial Sequence: Synthetic oligonucleotide
  Antisense strand to SEQ ID NO: 638354
ucucccagggaucgcuuac

SEQ ID NO: 638356 - RNA, 19 nt, Artificial Sequence
  Description of Artificial Sequence: Synthetic oligonucleotide
  Sense strand starting at position 3713 of SEQ ID NO: 585418
aagcgaucccugggagagu

SEQ ID NO: 638357 - RNA, 19 nt, Artificial Sequence
  Description of Artificial Sequence: Synthetic oligonucleotide
  Antisense strand to SEQ ID NO: 638356
acucucccagggaucgcuu

SEQ ID NO: 638358 - RNA, 19 nt, Artificial Sequence
  Description of Artificial Sequence: Synthetic oligonucleotide
  Sense strand starting at position 20 of SEQ ID NO: 585419
uggcaaauaucagauaaau

SEQ ID NO: 638359 - RNA, 19 nt, Artificial Sequence
  Description of Artificial Sequence: Synthetic oligonucleotide
  Antisense strand to SEQ ID NO: 638358
auuuaucugauauuugcca

SEQ ID NO: 638360 - RNA, 19 nt, Artificial Sequence
  Description of Artificial Sequence: Synthetic oligonucleotide
  Sense strand starting at position 33 of SEQ ID NO: 585419
auaaauaaauaucgaggga

SEQ ID NO: 638361 - RNA, 19 nt, Artificial Sequence
  Description of Artificial Sequence: Synthetic oligonucleotide
  Antisense strand to SEQ ID NO: 638360
ucccucgauauuuauuuau

SEQ ID NO: 638362 - RNA, 19 nt, Artificial Sequence
  Description of Artificial Sequence: Synthetic oligonucleotide
  Sense strand starting at position 377 of SEQ ID NO: 585419
cugcauccggcacguaauu

SEQ ID NO: 638363 - RNA, 19 nt, Artificial Sequence
  Description of Artificial Sequence: Synthetic oligonucleotide
  Antisense strand to SEQ ID NO: 638362
aauuacgugccggaugcag

SEQ ID NO: 638364 - RNA, 19 nt, Artificial Sequence
  Description of Artificial Sequence: Synthetic oligonucleotide
  Sense strand starting at position 536 of SEQ ID NO: 585419
ucaggaaacugagauuaca

SEQ ID NO: 638365 - RNA, 19 nt, Artificial Sequence
  Description of Artificial Sequence: Synthetic oligonucleotide
  Antisense strand to SEQ ID NO: 638364
uguaaucucaguuuccuga

SEQ ID NO: 638366 - RNA, 19 nt, Artificial Sequence
  Description of Artificial Sequence: Synthetic oligonucleotide
  Sense strand starting at position 1103 of SEQ ID NO: 585419
augugucagggucaugaaa

SEQ ID NO: 638367 - RNA, 19 nt, Artificial Sequence
  Description of Artificial Sequence: Synthetic oligonucleotide
  Antisense strand to SEQ ID NO: 638366
uuucaugacccugacacau

SEQ ID NO: 638368 - RNA, 19 nt, Artificial Sequence
  Description of Artificial Sequence: Synthetic oligonucleotide
  Sense strand starting at position 1174 of SEQ ID NO: 585419
agcuaaaugcaauguagga

SEQ ID NO: 638369 - RNA, 19 nt, Artificial Sequence
  Description of Artificial Sequence: Synthetic oligonucleotide
  Antisense strand to SEQ ID NO: 638368
uccuacauugcauuuagcu

SEQ ID NO: 638370 - RNA, 19 nt, Artificial Sequence
  Description of Artificial Sequence: Synthetic oligonucleotide
  Sense strand starting at position 1184 of SEQ ID NO: 585419
aauguaggaucuugcuaaa

SEQ ID NO: 638371 - RNA, 19 nt, Artificial Sequence
  Description of Artificial Sequence: Synthetic oligonucleotide
  Antisense strand to SEQ ID NO: 638370
uuuagcaagauccuacauu

SEQ ID NO: 638372 - RNA, 19 nt, Artificial Sequence
  Description of Artificial Sequence: Synthetic oligonucleotide
  Sense strand starting at position 1187 of SEQ ID NO: 585419
guaggaucuugcuaaauca

SEQ ID NO: 638373 - RNA, 19 nt, Artificial Sequence
  Description of Artificial Sequence: Synthetic oligonucleotide
  Antisense strand to SEQ ID NO: 638372
ugauuuagcaagauccuac

SEQ ID NO: 638374 - RNA, 19 nt, Artificial Sequence
  Description of Artificial Sequence: Synthetic oligonucleotide
  Sense strand starting at position 1203 of SEQ ID NO: 585419
ucaaauaaagucuguagau

SEQ ID NO: 638375 - RNA, 19 nt, Artificial Sequence
  Description of Artificial Sequence: Synthetic oligonucleotide
  Antisense strand to SEQ ID NO: 638374
aucuacagacuuuauuuga

SEQ ID NO: 638376 - RNA, 19 nt, Artificial Sequence
  Description of Artificial Sequence: Synthetic oligonucleotide
  Sense strand starting at position 1212 of SEQ ID NO: 585419
gucuguagauuaguuagua

SEQ ID NO: 638377 - RNA, 19 nt, Artificial Sequence
  Description of Artificial Sequence: Synthetic oligonucleotide
  Antisense strand to SEQ ID NO: 638376
uacuaacuaaucuacagac

SEQ ID NO: 638378 - RNA, 19 nt, Artificial Sequence
  Description of Artificial Sequence: Synthetic oligonucleotide
  Sense strand starting at position 1216 of SEQ ID NO: 585419
guagauuaguuaguaguau

SEQ ID NO: 638379 - RNA, 19 nt, Artificial Sequence
  Description of Artificial Sequence: Synthetic oligonucleotide
  Antisense strand to SEQ ID NO: 638378
auacuacuaacuaaucuac

SEQ ID NO: 638380 - RNA, 19 nt, Artificial Sequence
  Description of Artificial Sequence: Synthetic oligonucleotide
  Sense strand starting at position 1300 of SEQ ID NO: 585419
aguugaguauuucugcaac

SEQ ID NO: 638381 - RNA, 19 nt, Artificial Sequence
  Description of Artificial Sequence: Synthetic oligonucleotide
  Antisense strand to SEQ ID NO: 638380
guugcagaaauacucaacu

SEQ ID NO: 638382 - RNA, 19 nt, Artificial Sequence
  Description of Artificial Sequence: Synthetic oligonucleotide
  Sense strand starting at position 1302 of SEQ ID NO: 585419
uugaguauuucugcaacuu

SEQ ID NO: 638383 - RNA, 19 nt, Artificial Sequence
  Description of Artificial Sequence: Synthetic oligonucleotide
  Antisense strand to SEQ ID NO: 638382
aaguugcagaaauacucaa

SEQ ID NO: 638384 - RNA, 19 nt, Artificial Sequence
  Description of Artificial Sequence: Synthetic oligonucleotide
  Sense strand starting at position 1490 of SEQ ID NO: 585419
agcuaaugggccuaugaga

SEQ ID NO: 638385 - RNA, 19 nt, Artificial Sequence
  Description of Artificial Sequence: Synthetic oligonucleotide
  Antisense strand to SEQ ID NO: 638384
ucucauaggcccauuagcu

SEQ ID NO: 638386 - RNA, 19 nt, Artificial Sequence
  Description of Artificial Sequence: Synthetic oligonucleotide
  Sense strand starting at position 1848 of SEQ ID NO: 585419
ucgguuuccuggcaggaga

SEQ ID NO: 638387 - RNA, 19 nt, Artificial Sequence
  Description of Artificial Sequence: Synthetic oligonucleotide
  Antisense strand to SEQ ID NO: 638386
ucuccugccaggaaaccga

SEQ ID NO: 638388 - RNA, 19 nt, Artificial Sequence
  Description of Artificial Sequence: Synthetic oligonucleotide
  Sense strand starting at position 1850 of SEQ ID NO: 585419
gguuuccuggcaggagaaa

SEQ ID NO: 638389 - RNA, 19 nt, Artificial Sequence
  Description of Artificial Sequence: Synthetic oligonucleotide
  Antisense strand to SEQ ID NO: 638388
uuucuccugccaggaaacc

SEQ ID NO: 638390 - RNA, 19 nt, Artificial Sequence
  Description of Artificial Sequence: Synthetic oligonucleotide
  Sense strand starting at position 1906 of SEQ ID NO: 585419
gcagaaggccugugugaga

SEQ ID NO: 638391 - RNA, 19 nt, Artificial Sequence
  Description of Artificial Sequence: Synthetic oligonucleotide
  Antisense strand to SEQ ID NO: 638390
ucucacacaggccuucugc

SEQ ID NO: 638392 - RNA, 19 nt, Artificial Sequence
  Description of Artificial Sequence: Synthetic oligonucleotide
  Sense strand starting at position 2058 of SEQ ID NO: 585419
cggcucugccugccuuaua

SEQ ID NO: 638393 - RNA, 19 nt, Artificial Sequence
  Description of Artificial Sequence: Synthetic oligonucleotide
  Antisense strand to SEQ ID NO: 638392
uauaaggcaggcagagccg

SEQ ID NO: 638394 - RNA, 19 nt, Artificial Sequence
  Description of Artificial Sequence: Synthetic oligonucleotide
  Sense strand starting at position 2081 of SEQ ID NO: 585419
ccgugccuugagcuuuaua

SEQ ID NO: 638395 - RNA, 19 nt, Artificial Sequence
  Description of Artificial Sequence: Synthetic oligonucleotide
  Antisense strand to SEQ ID NO: 638394
uauaaagcucaaggcacgg

SEQ ID NO: 638396 - RNA, 19 nt, Artificial Sequence
  Description of Artificial Sequence: Synthetic oligonucleotide
  Sense strand starting at position 2299 of SEQ ID NO: 585419
gcaacuaucuguguaaggu

SEQ ID NO: 638397 - RNA, 19 nt, Artificial Sequence
  Description of Artificial Sequence: Synthetic oligonucleotide
  Antisense strand to SEQ ID NO: 638396
accuuacacagauaguugc

SEQ ID NO: 638398 - RNA, 19 nt, Artificial Sequence
  Description of Artificial Sequence: Synthetic oligonucleotide
  Sense strand starting at position 2300 of SEQ ID NO: 585419
caacuaucuguguaagguc

SEQ ID NO: 638399 - RNA, 19 nt, Artificial Sequence
  Description of Artificial Sequence: Synthetic oligonucleotide
  Antisense strand to SEQ ID NO: 638398
gaccuuacacagauaguug

SEQ ID NO: 638400 - RNA, 19 nt, Artificial Sequence
  Description of Artificial Sequence: Synthetic oligonucleotide
  Sense strand starting at position 2456 of SEQ ID NO: 585419
cucacugugcuguggagaa

SEQ ID NO: 638401 - RNA, 19 nt, Artificial Sequence
  Description of Artificial Sequence: Synthetic oligonucleotide
  Antisense strand to SEQ ID NO: 638400
uucuccacagcacagugag

SEQ ID NO: 638402 - RNA, 19 nt, Artificial Sequence
  Description of Artificial Sequence: Synthetic oligonucleotide
  Sense strand starting at position 2458 of SEQ ID NO: 585419
cacugugcuguggagaaau

SEQ ID NO: 638403 - RNA, 19 nt, Artificial Sequence
  Description of Artificial Sequence: Synthetic oligonucleotide
  Antisense strand to SEQ ID NO: 638402
auuucuccacagcacagug

SEQ ID NO: 638404 - RNA, 19 nt, Artificial Sequence
  Description of Artificial Sequence: Synthetic oligonucleotide
  Sense strand starting at position 2460 of SEQ ID NO: 585419
cugugcuguggagaaauaa

SEQ ID NO: 638405 - RNA, 19 nt, Artificial Sequence
  Description of Artificial Sequence: Synthetic oligonucleotide
  Antisense strand to SEQ ID NO: 638404
uuauuucuccacagcacag

SEQ ID NO: 638406 - RNA, 19 nt, Artificial Sequence
  Description of Artificial Sequence: Synthetic oligonucleotide
  Sense strand starting at position 2506 of SEQ ID NO: 585419
guuagcauguaauacuuua

SEQ ID NO: 638407 - RNA, 19 nt, Artificial Sequence
  Description of Artificial Sequence: Synthetic oligonucleotide
  Antisense strand to SEQ ID NO: 638406
uaaaguauuacaugcuaac

SEQ ID NO: 638408 - RNA, 19 nt, Artificial Sequence
  Description of Artificial Sequence: Synthetic oligonucleotide
  Sense strand starting at position 2631 of SEQ ID NO: 585419
agucuuaaguaacuuugaa

SEQ ID NO: 638409 - RNA, 19 nt, Artificial Sequence
  Description of Artificial Sequence: Synthetic oligonucleotide
  Antisense strand to SEQ ID NO: 638408
uucaaaguuacuuaagacu

SEQ ID NO: 638410 - RNA, 19 nt, Artificial Sequence
  Description of Artificial Sequence: Synthetic oligonucleotide
  Sense strand starting at position 2728 of SEQ ID NO: 585419
cccuguuccuagucuuacu

SEQ ID NO: 638411 - RNA, 19 nt, Artificial Sequence
  Description of Artificial Sequence: Synthetic oligonucleotide
  Antisense strand to SEQ ID NO: 638410
aguaagacuaggaacaggg

SEQ ID NO: 638412 - RNA, 19 nt, Artificial Sequence
  Description of Artificial Sequence: Synthetic oligonucleotide
  Sense strand starting at position 2753 of SEQ ID NO: 585419
gguacaugcuggcucugau

SEQ ID NO: 638413 - RNA, 19 nt, Artificial Sequence
  Description of Artificial Sequence: Synthetic oligonucleotide
  Antisense strand to SEQ ID NO: 638412
aucagagccagcauguacc

SEQ ID NO: 638414 - RNA, 19 nt, Artificial Sequence
  Description of Artificial Sequence: Synthetic oligonucleotide
  Sense strand starting at position 2858 of SEQ ID NO: 585419
augccuuccuuucuaguga

SEQ ID NO: 638415 - RNA, 19 nt, Artificial Sequence
  Description of Artificial Sequence: Synthetic oligonucleotide
  Antisense strand to SEQ ID NO: 638414
ucacuagaaaggaaggcau

SEQ ID NO: 638416 - RNA, 19 nt, Artificial Sequence
  Description of Artificial Sequence: Synthetic oligonucleotide
  Sense strand starting at position 2862 of SEQ ID NO: 585419
cuuccuuucuagugauuuc

SEQ ID NO: 638417 - RNA, 19 nt, Artificial Sequence
  Description of Artificial Sequence: Synthetic oligonucleotide
  Antisense strand to SEQ ID NO: 638416
gaaaucacuagaaaggaag

SEQ ID NO: 638418 - RNA, 19 nt, Artificial Sequence
  Description of Artificial Sequence: Synthetic oligonucleotide
  Sense strand starting at position 2948 of SEQ ID NO: 585419
uaaagcuggcagggauaau

SEQ ID NO: 638419 - RNA, 19 nt, Artificial Sequence
  Description of Artificial Sequence: Synthetic oligonucleotide
  Antisense strand to SEQ ID NO: 638418
auuaucccugccagcuuua

SEQ ID NO: 638420 - RNA, 19 nt, Artificial Sequence
  Description of Artificial Sequence: Synthetic oligonucleotide
  Sense strand starting at position 2957 of SEQ ID NO: 585419
cagggauaauuacagggua

SEQ ID NO: 638421 - RNA, 19 nt, Artificial Sequence
  Description of Artificial Sequence: Synthetic oligonucleotide
  Antisense strand to SEQ ID NO: 638420
uacccuguaauuaucccug

SEQ ID NO: 638422 - RNA, 19 nt, Artificial Sequence
  Description of Artificial Sequence: Synthetic oligonucleotide
  Sense strand starting at position 3074 of SEQ ID NO: 585419
ggguauuguugauucuaca

SEQ ID NO: 638423 - RNA, 19 nt, Artificial Sequence
  Description of Artificial Sequence: Synthetic oligonucleotide
  Antisense strand to SEQ ID NO: 638422
uguagaaucaacaauaccc

SEQ ID NO: 638424 - RNA, 19 nt, Artificial Sequence
  Description of Artificial Sequence: Synthetic oligonucleotide
  Sense strand starting at position 3293 of SEQ ID NO: 585419
gagacaacaugcugagaga

SEQ ID NO: 638425 - RNA, 19 nt, Artificial Sequence
  Description of Artificial Sequence: Synthetic oligonucleotide
  Antisense strand to SEQ ID NO: 638424
ucucucagcauguugucuc

SEQ ID NO: 638426 - RNA, 19 nt, Artificial Sequence
  Description of Artificial Sequence: Synthetic oligonucleotide
  Sense strand starting at position 3389 of SEQ ID NO: 585419
uggugaaucuggucauggu

SEQ ID NO: 638427 - RNA, 19 nt, Artificial Sequence
  Description of Artificial Sequence: Synthetic oligonucleotide
  Antisense strand to SEQ ID NO: 638426
accaugaccagauucacca

SEQ ID NO: 638428 - RNA, 19 nt, Artificial Sequence
  Description of Artificial Sequence: Synthetic oligonucleotide
  Sense strand starting at position 3390 of SEQ ID NO: 585419
ggugaaucuggucaugguu

SEQ ID NO: 638429 - RNA, 19 nt, Artificial Sequence
  Description of Artificial Sequence: Synthetic oligonucleotide
  Antisense strand to SEQ ID NO: 638428
aaccaugaccagauucacc

SEQ ID NO: 638430 - RNA, 19 nt, Artificial Sequence
  Description of Artificial Sequence: Synthetic oligonucleotide
  Sense strand starting at position 3429 of SEQ ID NO: 585419
cuagguguguuuguuuacu

SEQ ID NO: 638431 - RNA, 19 nt, Artificial Sequence
  Description of Artificial Sequence: Synthetic oligonucleotide
  Antisense strand to SEQ ID NO: 638430
aguaaacaaacacaccuag

SEQ ID NO: 638432 - RNA, 19 nt, Artificial Sequence
  Description of Artificial Sequence: Synthetic oligonucleotide
  Sense strand starting at position 3480 of SEQ ID NO: 585419
ucuacaaaucccgggaucu

SEQ ID NO: 638433 - RNA, 19 nt, Artificial Sequence
  Description of Artificial Sequence: Synthetic oligonucleotide
  Antisense strand to SEQ ID NO: 638432
agaucccgggauuuguaga

SEQ ID NO: 638434 - RNA, 19 nt, Artificial Sequence
  Description of Artificial Sequence: Synthetic oligonucleotide
  Sense strand starting at position 3893 of SEQ ID NO: 585419
cccuuuggucaaugucaau

SEQ ID NO: 638435 - RNA, 19 nt, Artificial Sequence
  Description of Artificial Sequence: Synthetic oligonucleotide
  Antisense strand to SEQ ID NO: 638434
auugacauugaccaaaggg

SEQ ID NO: 638436 - RNA, 19 nt, Artificial Sequence
  Description of Artificial Sequence: Synthetic oligonucleotide
  Sense strand starting at position 3934 of SEQ ID NO: 585419
ggugccauuuacuuaacuu

SEQ ID NO: 638437 - RNA, 19 nt, Artificial Sequence
  Description of Artificial Sequence: Synthetic oligonucleotide
  Antisense strand to SEQ ID NO: 638436
aaguuaaguaaauggcacc

SEQ ID NO: 638438 - RNA, 19 nt, Artificial Sequence
  Description of Artificial Sequence: Synthetic oligonucleotide
  Sense strand starting at position 754 of SEQ ID NO: 585420
cgucuccuuccucaguuua

SEQ ID NO: 638439 - RNA, 19 nt, Artificial Sequence
  Description of Artificial Sequence: Synthetic oligonucleotide
  Antisense strand to SEQ ID NO: 638438
uaaacugaggaaggagacg

SEQ ID NO: 638440 - RNA, 19 nt, Artificial Sequence
  Description of Artificial Sequence: Synthetic oligonucleotide
  Sense strand starting at position 1051 of SEQ ID NO: 585420
agggauuccucaguucuuc

SEQ ID NO: 638441 - RNA, 19 nt, Artificial Sequence
  Description of Artificial Sequence: Synthetic oligonucleotide
  Antisense strand to SEQ ID NO: 638440
gaagaacugaggaaucccu

SEQ ID NO: 638442 - RNA, 19 nt, Artificial Sequence
  Description of Artificial Sequence: Synthetic oligonucleotide
  Sense strand starting at position 1440 of SEQ ID NO: 585420
cugcauguugucuguggga

SEQ ID NO: 638443 - RNA, 19 nt, Artificial Sequence
  Description of Artificial Sequence: Synthetic oligonucleotide
  Antisense strand to SEQ ID NO: 638442
ucccacagacaacaugcag

SEQ ID NO: 638444 - RNA, 19 nt, Artificial Sequence
  Description of Artificial Sequence: Synthetic oligonucleotide
  Sense strand starting at position 1442 of SEQ ID NO: 585420
gcauguugucugugggaag

SEQ ID NO: 638445 - RNA, 19 nt, Artificial Sequence
  Description of Artificial Sequence: Synthetic oligonucleotide
  Antisense strand to SEQ ID NO: 638444
cuucccacagacaacaugc

SEQ ID NO: 638446 - RNA, 19 nt, Artificial Sequence
  Description of Artificial Sequence: Synthetic oligonucleotide
  Sense strand starting at position 1443 of SEQ ID NO: 585420
cauguugucugugggaaga

SEQ ID NO: 638447 - RNA, 19 nt, Artificial Sequence
  Description of Artificial Sequence: Synthetic oligonucleotide
  Antisense strand to SEQ ID NO: 638446
ucuucccacagacaacaug

SEQ ID NO: 638448 - RNA, 19 nt, Artificial Sequence
  Description of Artificial Sequence: Synthetic oligonucleotide
  Sense strand starting at position 1454 of SEQ ID NO: 585420
ugggaagaggguuguauga

SEQ ID NO: 638449 - RNA, 19 nt, Artificial Sequence
  Description of Artificial Sequence: Synthetic oligonucleotide
  Antisense strand to SEQ ID NO: 638448
ucauacaacccucuuccca

SEQ ID NO: 638450 - RNA, 19 nt, Artificial Sequence
  Description of Artificial Sequence: Synthetic oligonucleotide
  Sense strand starting at position 1680 of SEQ ID NO: 585420
ggcugaaaguuggcaaaug

SEQ ID NO: 638451 - RNA, 19 nt, Artificial Sequence
  Description of Artificial Sequence: Synthetic oligonucleotide
  Antisense strand to SEQ ID NO: 638450
cauuugccaacuuucagcc

SEQ ID NO: 638452 - RNA, 19 nt, Artificial Sequence
  Description of Artificial Sequence: Synthetic oligonucleotide
  Sense strand starting at position 1798 of SEQ ID NO: 585420
ggucuucccuagugucaga

SEQ ID NO: 638453 - RNA, 19 nt, Artificial Sequence
  Description of Artificial Sequence: Synthetic oligonucleotide
  Antisense strand to SEQ ID NO: 638452
ucugacacuagggaagacc

SEQ ID NO: 638454 - RNA, 19 nt, Artificial Sequence
  Description of Artificial Sequence: Synthetic oligonucleotide
  Sense strand starting at position 1836 of SEQ ID NO: 585420
ggguaauucuaucuucuug

SEQ ID NO: 638455 - RNA, 19 nt, Artificial Sequence
  Description of Artificial Sequence: Synthetic oligonucleotide
  Antisense strand to SEQ ID NO: 638454
caagaagauagaauuaccc

SEQ ID NO: 638456 - RNA, 19 nt, Artificial Sequence
  Description of Artificial Sequence: Synthetic oligonucleotide
  Sense strand starting at position 1838 of SEQ ID NO: 585420
guaauucuaucuucuugag

SEQ ID NO: 638457 - RNA, 19 nt, Artificial Sequence
  Description of Artificial Sequence: Synthetic oligonucleotide
  Antisense strand to SEQ ID NO: 638456
cucaagaagauagaauuac

SEQ ID NO: 638458 - RNA, 19 nt, Artificial Sequence
  Description of Artificial Sequence: Synthetic oligonucleotide
  Sense strand starting at position 1841 of SEQ ID NO: 585420
auucuaucuucuugaguca

SEQ ID NO: 638459 - RNA, 19 nt, Artificial Sequence
  Description of Artificial Sequence: Synthetic oligonucleotide
  Antisense strand to SEQ ID NO: 638458
ugacucaagaagauagaau

SEQ ID NO: 638460 - RNA, 19 nt, Artificial Sequence
  Description of Artificial Sequence: Synthetic oligonucleotide
  Sense strand starting at position 1844 of SEQ ID NO: 585420
cuaucuucuugagucagau

SEQ ID NO: 638461 - RNA, 19 nt, Artificial Sequence
  Description of Artificial Sequence: Synthetic oligonucleotide
  Antisense strand to SEQ ID NO: 638460
aucugacucaagaagauag

SEQ ID NO: 638462 - RNA, 19 nt, Artificial Sequence
  Description of Artificial Sequence: Synthetic oligonucleotide
  Sense strand starting at position 1921 of SEQ ID NO: 585420
uaaggaaucccguaccucu

SEQ ID NO: 638463 - RNA, 19 nt, Artificial Sequence
  Description of Artificial Sequence: Synthetic oligonucleotide
  Antisense strand to SEQ ID NO: 638462
agagguacgggauuccuua

SEQ ID NO: 638464 - RNA, 19 nt, Artificial Sequence
  Description of Artificial Sequence: Synthetic oligonucleotide
  Sense strand starting at position 2144 of SEQ ID NO: 585420
cagcaugucuacuagggau

SEQ ID NO: 638465 - RNA, 19 nt, Artificial Sequence
  Description of Artificial Sequence: Synthetic oligonucleotide
  Antisense strand to SEQ ID NO: 638464
aucccuaguagacaugcug

SEQ ID NO: 638466 - RNA, 19 nt, Artificial Sequence
  Description of Artificial Sequence: Synthetic oligonucleotide
  Sense strand starting at position 2146 of SEQ ID NO: 585420
gcaugucuacuagggauaa

SEQ ID NO: 638467 - RNA, 19 nt, Artificial Sequence
  Description of Artificial Sequence: Synthetic oligonucleotide
  Antisense strand to SEQ ID NO: 638466
uuaucccuaguagacaugc

SEQ ID NO: 638468 - RNA, 19 nt, Artificial Sequence
  Description of Artificial Sequence: Synthetic oligonucleotide
  Sense strand starting at position 2147 of SEQ ID NO: 585420
caugucuacuagggauaaa

SEQ ID NO: 638469 - RNA, 19 nt, Artificial Sequence
  Description of Artificial Sequence: Synthetic oligonucleotide
  Antisense strand to SEQ ID NO: 638468
uuuaucccuaguagacaug

SEQ ID NO: 638470 - RNA, 19 nt, Artificial Sequence
  Description of Artificial Sequence: Synthetic oligonucleotide
  Sense strand starting at position 2322 of SEQ ID NO: 585420
ucuugucagucuggaagua

SEQ ID NO: 638471 - RNA, 19 nt, Artificial Sequence
  Description of Artificial Sequence: Synthetic oligonucleotide
  Antisense strand to SEQ ID NO: 638470
uacuuccagacugacaaga

SEQ ID NO: 638472 - RNA, 19 nt, Artificial Sequence
  Description of Artificial Sequence: Synthetic oligonucleotide
  Sense strand starting at position 2364 of SEQ ID NO: 585420
uaagaaaggucagccauga

SEQ ID NO: 638473 - RNA, 19 nt, Artificial Sequence
  Description of Artificial Sequence: Synthetic oligonucleotide
  Antisense strand to SEQ ID NO: 638472
ucauggcugaccuuucuua

SEQ ID NO: 638474 - RNA, 19 nt, Artificial Sequence
  Description of Artificial Sequence: Synthetic oligonucleotide
  Sense strand starting at position 2377 of SEQ ID NO: 585420
ccaugaguuggguggauca

SEQ ID NO: 638475 - RNA, 19 nt, Artificial Sequence
  Description of Artificial Sequence: Synthetic oligonucleotide
  Antisense strand to SEQ ID NO: 638474
ugauccacccaacucaugg

SEQ ID NO: 638476 - RNA, 19 nt, Artificial Sequence
  Description of Artificial Sequence: Synthetic oligonucleotide
  Sense strand starting at position 2662 of SEQ ID NO: 585420
aaagaaaugucagcuauga

SEQ ID NO: 638477 - RNA, 19 nt, Artificial Sequence
  Description of Artificial Sequence: Synthetic oligonucleotide
  Antisense strand to SEQ ID NO: 638476
ucauagcugacauuucuuu

SEQ ID NO: 638478 - RNA, 19 nt, Artificial Sequence
  Description of Artificial Sequence: Synthetic oligonucleotide
  Sense strand starting at position 2664 of SEQ ID NO: 585420
agaaaugucagcuaugagu

SEQ ID NO: 638479 - RNA, 19 nt, Artificial Sequence
  Description of Artificial Sequence: Synthetic oligonucleotide
  Antisense strand to SEQ ID NO: 638478
acucauagcugacauuucu

SEQ ID NO: 638480 - RNA, 19 nt, Artificial Sequence
  Description of Artificial Sequence: Synthetic oligonucleotide
  Sense strand starting at position 2666 of SEQ ID NO: 585420
aaaugucagcuaugaguga

SEQ ID NO: 638481 - RNA, 19 nt, Artificial Sequence
  Description of Artificial Sequence: Synthetic oligonucleotide
  Antisense strand to SEQ ID NO: 638480
ucacucauagcugacauuu

SEQ ID NO: 638482 - RNA, 19 nt, Artificial Sequence
  Description of Artificial Sequence: Synthetic oligonucleotide
  Sense strand starting at position 2667 of SEQ ID NO: 585420
aaugucagcuaugagugaa

SEQ ID NO: 638483 - RNA, 19 nt, Artificial Sequence
  Description of Artificial Sequence: Synthetic oligonucleotide
  Antisense strand to SEQ ID NO: 638482
uucacucauagcugacauu

SEQ ID NO: 638484 - RNA, 19 nt, Artificial Sequence
  Description of Artificial Sequence: Synthetic oligonucleotide
  Sense strand starting at position 2670 of SEQ ID NO: 585420
gucagcuaugagugaagaa

SEQ ID NO: 638485 - RNA, 19 nt, Artificial Sequence
  Description of Artificial Sequence: Synthetic oligonucleotide
  Antisense strand to SEQ ID NO: 638484
uucuucacucauagcugac

SEQ ID NO: 638486 - RNA, 19 nt, Artificial Sequence
  Description of Artificial Sequence: Synthetic oligonucleotide
  Sense strand starting at position 2685 of SEQ ID NO: 585420
agaaacugaguuugaguuu

SEQ ID NO: 638487 - RNA, 19 nt, Artificial Sequence
  Description of Artificial Sequence: Synthetic oligonucleotide
  Antisense strand to SEQ ID NO: 638486
aaacucaaacucaguuucu

SEQ ID NO: 638488 - RNA, 19 nt, Artificial Sequence
  Description of Artificial Sequence: Synthetic oligonucleotide
  Sense strand starting at position 2737 of SEQ ID NO: 585420
cuguguaucgagucagugu

SEQ ID NO: 638489 - RNA, 19 nt, Artificial Sequence
  Description of Artificial Sequence: Synthetic oligonucleotide
  Antisense strand to SEQ ID NO: 638488
acacugacucgauacacag

SEQ ID NO: 638490 - RNA, 19 nt, Artificial Sequence
  Description of Artificial Sequence: Synthetic oligonucleotide
  Sense strand starting at position 2744 of SEQ ID NO: 585420
ucgagucagugucccguaa

SEQ ID NO: 638491 - RNA, 19 nt, Artificial Sequence
  Description of Artificial Sequence: Synthetic oligonucleotide
  Antisense strand to SEQ ID NO: 638490
uuacgggacacugacucga

SEQ ID NO: 638492 - RNA, 19 nt, Artificial Sequence
  Description of Artificial Sequence: Synthetic oligonucleotide
  Sense strand starting at position 2748 of SEQ ID NO: 585420
gucagugucccguaaauga

SEQ ID NO: 638493 - RNA, 19 nt, Artificial Sequence
  Description of Artificial Sequence: Synthetic oligonucleotide
  Antisense strand to SEQ ID NO: 638492
ucauuuacgggacacugac

SEQ ID NO: 638494 - RNA, 19 nt, Artificial Sequence
  Description of Artificial Sequence: Synthetic oligonucleotide
  Sense strand starting at position 2758 of SEQ ID NO: 585420
cguaaaugauuuggaauga

SEQ ID NO: 638495 - RNA, 19 nt, Artificial Sequence
  Description of Artificial Sequence: Synthetic oligonucleotide
  Antisense strand to SEQ ID NO: 638494
ucauuccaaaucauuuacg

SEQ ID NO: 638496 - RNA, 19 nt, Artificial Sequence
  Description of Artificial Sequence: Synthetic oligonucleotide
  Sense strand starting at position 2759 of SEQ ID NO: 585420
guaaaugauuuggaaugac

SEQ ID NO: 638497 - RNA, 19 nt, Artificial Sequence
  Description of Artificial Sequence: Synthetic oligonucleotide
  Antisense strand to SEQ ID NO: 638496
gucauuccaaaucauuuac

SEQ ID NO: 638498 - RNA, 19 nt, Artificial Sequence
  Description of Artificial Sequence: Synthetic oligonucleotide
  Sense strand starting at position 2771 of SEQ ID NO: 585420
gaaugacuuucccuguggu

SEQ ID NO: 638499 - RNA, 19 nt, Artificial Sequence
  Description of Artificial Sequence: Synthetic oligonucleotide
  Antisense strand to SEQ ID NO: 638498
accacagggaaagucauuc

SEQ ID NO: 638500 - RNA, 19 nt, Artificial Sequence
  Description of Artificial Sequence: Synthetic oligonucleotide
  Sense strand starting at position 2772 of SEQ ID NO: 585420
aaugacuuucccugugguu

SEQ ID NO: 638501 - RNA, 19 nt, Artificial Sequence
  Description of Artificial Sequence: Synthetic oligonucleotide
  Antisense strand to SEQ ID NO: 638500
aaccacagggaaagucauu

SEQ ID NO: 638502 - RNA, 19 nt, Artificial Sequence
  Description of Artificial Sequence: Synthetic oligonucleotide
  Sense strand starting at position 2856 of SEQ ID NO: 585420
ggcuaacgggcugauucau

SEQ ID NO: 638503 - RNA, 19 nt, Artificial Sequence
  Description of Artificial Sequence: Synthetic oligonucleotide
  Antisense strand to SEQ ID NO: 638502
augaaucagcccguuagcc

SEQ ID NO: 638504 - RNA, 19 nt, Artificial Sequence
  Description of Artificial Sequence: Synthetic oligonucleotide
  Sense strand starting at position 3016 of SEQ ID NO: 585420
auaaaugcuuaacagagua

SEQ ID NO: 638505 - RNA, 19 nt, Artificial Sequence
  Description of Artificial Sequence: Synthetic oligonucleotide
  Antisense strand to SEQ ID NO: 638504
uacucuguuaagcauuuau

SEQ ID NO: 638506 - RNA, 19 nt, Artificial Sequence
  Description of Artificial Sequence: Synthetic oligonucleotide
  Sense strand starting at position 3058 of SEQ ID NO: 585420
gaacaaaccuagugauuug

SEQ ID NO: 638507 - RNA, 19 nt, Artificial Sequence
  Description of Artificial Sequence: Synthetic oligonucleotide
  Antisense strand to SEQ ID NO: 638506
caaaucacuagguuuguuc

SEQ ID NO: 638508 - RNA, 19 nt, Artificial Sequence
  Description of Artificial Sequence: Synthetic oligonucleotide
  Sense strand starting at position 3091 of SEQ ID NO: 585420
cucacaauauaaugagagu

SEQ ID NO: 638509 - RNA, 19 nt, Artificial Sequence
  Description of Artificial Sequence: Synthetic oligonucleotide
  Antisense strand to SEQ ID NO: 638508
acucucauuauauugugag

SEQ ID NO: 638510 - RNA, 19 nt, Artificial Sequence
  Description of Artificial Sequence: Synthetic oligonucleotide
  Sense strand starting at position 3180 of SEQ ID NO: 585420
guugauugaagccagaagu

SEQ ID NO: 638511 - RNA, 19 nt, Artificial Sequence
  Description of Artificial Sequence: Synthetic oligonucleotide
  Antisense strand to SEQ ID NO: 638510
acuucuggcuucaaucaac

SEQ ID NO: 638512 - RNA, 19 nt, Artificial Sequence
  Description of Artificial Sequence: Synthetic oligonucleotide
  Sense strand starting at position 3188 of SEQ ID NO: 585420
aagccagaaguuugagguu

SEQ ID NO: 638513 - RNA, 19 nt, Artificial Sequence
  Description of Artificial Sequence: Synthetic oligonucleotide
  Antisense strand to SEQ ID NO: 638512
aaccucaaacuucuggcuu

SEQ ID NO: 638514 - RNA, 19 nt, Artificial Sequence
  Description of Artificial Sequence: Synthetic oligonucleotide
  Sense strand starting at position 3194 of SEQ ID NO: 585420
gaaguuugagguugggcaa

SEQ ID NO: 638515 - RNA, 19 nt, Artificial Sequence
  Description of Artificial Sequence: Synthetic oligonucleotide
  Antisense strand to SEQ ID NO: 638514
uugcccaaccucaaacuuc

SEQ ID NO: 638516 - RNA, 19 nt, Artificial Sequence
  Description of Artificial Sequence: Synthetic oligonucleotide
  Sense strand starting at position 3563 of SEQ ID NO: 585420
uagaauauuccaggccgga

SEQ ID NO: 638517 - RNA, 19 nt, Artificial Sequence
  Description of Artificial Sequence: Synthetic oligonucleotide
  Antisense strand to SEQ ID NO: 638516
uccggccuggaauauucua

SEQ ID NO: 638518 - RNA, 19 nt, Artificial Sequence
  Description of Artificial Sequence: Synthetic oligonucleotide
  Sense strand starting at position 13 of SEQ ID NO: 585421
uccaaaguggcagauauca

SEQ ID NO: 638519 - RNA, 19 nt, Artificial Sequence
  Description of Artificial Sequence: Synthetic oligonucleotide
  Antisense strand to SEQ ID NO: 638518
ugauaucugccacuuugga

SEQ ID NO: 638520 - RNA, 19 nt, Artificial Sequence
  Description of Artificial Sequence: Synthetic oligonucleotide
  Sense strand starting at position 118 of SEQ ID NO: 585421
cccuguaugggaugaauug

SEQ ID NO: 638521 - RNA, 19 nt, Artificial Sequence
  Description of Artificial Sequence: Synthetic oligonucleotide
  Antisense strand to SEQ ID NO: 638520
caauucaucccauacaggg

SEQ ID NO: 638522 - RNA, 19 nt, Artificial Sequence
  Description of Artificial Sequence: Synthetic oligonucleotide
  Sense strand starting at position 344 of SEQ ID NO: 585421
gaacacgaauugucuagaa

SEQ ID NO: 638523 - RNA, 19 nt, Artificial Sequence
  Description of Artificial Sequence: Synthetic oligonucleotide
  Antisense strand to SEQ ID NO: 638522
uucuagacaauucguguuc

SEQ ID NO: 638524 - RNA, 19 nt, Artificial Sequence
  Description of Artificial Sequence: Synthetic oligonucleotide
  Sense strand starting at position 348 of SEQ ID NO: 585421
acgaauugucuagaauauc

SEQ ID NO: 638525 - RNA, 19 nt, Artificial Sequence
  Description of Artificial Sequence: Synthetic oligonucleotide
  Antisense strand to SEQ ID NO: 638524
gauauucuagacaauucgu

SEQ ID NO: 638526 - RNA, 19 nt, Artificial Sequence
  Description of Artificial Sequence: Synthetic oligonucleotide
  Sense strand starting at position 402 of SEQ ID NO: 585421
guagcugucucauuuauug

SEQ ID NO: 638527 - RNA, 19 nt, Artificial Sequence
  Description of Artificial Sequence: Synthetic oligonucleotide
  Antisense strand to SEQ ID NO: 638526
caauaaaugagacagcuac

SEQ ID NO: 638528 - RNA, 19 nt, Artificial Sequence
  Description of Artificial Sequence: Synthetic oligonucleotide
  Sense strand starting at position 516 of SEQ ID NO: 585421
ggacuacgguaucuuagaa

SEQ ID NO: 638529 - RNA, 19 nt, Artificial Sequence
  Description of Artificial Sequence: Synthetic oligonucleotide
  Antisense strand to SEQ ID NO: 638528
uucuaagauaccguagucc

SEQ ID NO: 638530 - RNA, 19 nt, Artificial Sequence
  Description of Artificial Sequence: Synthetic oligonucleotide
  Sense strand starting at position 528 of SEQ ID NO: 585421
cuuagaaugugacuguaug

SEQ ID NO: 638531 - RNA, 19 nt, Artificial Sequence
  Description of Artificial Sequence: Synthetic oligonucleotide
  Antisense strand to SEQ ID NO: 638530
cauacagucacauucuaag

SEQ ID NO: 638532 - RNA, 19 nt, Artificial Sequence
  Description of Artificial Sequence: Synthetic oligonucleotide
  Sense strand starting at position 882 of SEQ ID NO: 585421
agcugauuaagcuaaagug

SEQ ID NO: 638533 - RNA, 19 nt, Artificial Sequence
  Description of Artificial Sequence: Synthetic oligonucleotide
  Antisense strand to SEQ ID NO: 638532
cacuuuagcuuaaucagcu

SEQ ID NO: 638534 - RNA, 19 nt, Artificial Sequence
  Description of Artificial Sequence: Synthetic oligonucleotide
  Sense strand starting at position 925 of SEQ ID NO: 585421
ugauaugauuguguacuua

SEQ ID NO: 638535 - RNA, 19 nt, Artificial Sequence
  Description of Artificial Sequence: Synthetic oligonucleotide
  Antisense strand to SEQ ID NO: 638534
uaaguacacaaucauauca

SEQ ID NO: 638536 - RNA, 19 nt, Artificial Sequence
  Description of Artificial Sequence: Synthetic oligonucleotide
  Sense strand starting at position 929 of SEQ ID NO: 585421
augauuguguacuuauaag

SEQ ID NO: 638537 - RNA, 19 nt, Artificial Sequence
  Description of Artificial Sequence: Synthetic oligonucleotide
  Antisense strand to SEQ ID NO: 638536
cuuauaaguacacaaucau

SEQ ID NO: 638538 - RNA, 19 nt, Artificial Sequence
  Description of Artificial Sequence: Synthetic oligonucleotide
  Sense strand starting at position 1161 of SEQ ID NO: 585421
ugacacuucuuaccacagu

SEQ ID NO: 638539 - RNA, 19 nt, Artificial Sequence
  Description of Artificial Sequence: Synthetic oligonucleotide
  Antisense strand to SEQ ID NO: 638538
acugugguaagaaguguca

SEQ ID NO: 638540 - RNA, 19 nt, Artificial Sequence
  Description of Artificial Sequence: Synthetic oligonucleotide
  Sense strand starting at position 1203 of SEQ ID NO: 585421
ugcaauuaucuguuggcgu

SEQ ID NO: 638541 - RNA, 19 nt, Artificial Sequence
  Description of Artificial Sequence: Synthetic oligonucleotide
  Antisense strand to SEQ ID NO: 638540
acgccaacagauaauugca

SEQ ID NO: 638542 - RNA, 19 nt, Artificial Sequence
  Description of Artificial Sequence: Synthetic oligonucleotide
  Sense strand starting at position 1280 of SEQ ID NO: 585421
cugagaaacccuggcauug

SEQ ID NO: 638543 - RNA, 19 nt, Artificial Sequence
  Description of Artificial Sequence: Synthetic oligonucleotide
  Antisense strand to SEQ ID NO: 638542
caaugccaggguuucucag

SEQ ID NO: 638544 - RNA, 19 nt, Artificial Sequence
  Description of Artificial Sequence: Synthetic oligonucleotide
  Sense strand starting at position 1308 of SEQ ID NO: 585421
ugcgaagugcuugcugaau

SEQ ID NO: 638545 - RNA, 19 nt, Artificial Sequence
  Description of Artificial Sequence: Synthetic oligonucleotide
  Antisense strand to SEQ ID NO: 638544
auucagcaagcacuucgca

SEQ ID NO: 638546 - RNA, 19 nt, Artificial Sequence
  Description of Artificial Sequence: Synthetic oligonucleotide
  Sense strand starting at position 1354 of SEQ ID NO: 585421
cucugaaaguguccagaga

SEQ ID NO: 638547 - RNA, 19 nt, Artificial Sequence
  Description of Artificial Sequence: Synthetic oligonucleotide
  Antisense strand to SEQ ID NO: 638546
ucucuggacacuuucagag

SEQ ID NO: 638548 - RNA, 19 nt, Artificial Sequence
  Description of Artificial Sequence: Synthetic oligonucleotide
  Sense strand starting at position 1379 of SEQ ID NO: 585421
ggaaucuucucuuugggca

SEQ ID NO: 638549 - RNA, 19 nt, Artificial Sequence
  Description of Artificial Sequence: Synthetic oligonucleotide
  Antisense strand to SEQ ID NO: 638548
ugcccaaagagaagauucc

SEQ ID NO: 638550 - RNA, 19 nt, Artificial Sequence
  Description of Artificial Sequence: Synthetic oligonucleotide
  Sense strand starting at position 1384 of SEQ ID NO: 585421
cuucucuuugggcagaagu

SEQ ID NO: 638551 - RNA, 19 nt, Artificial Sequence
  Description of Artificial Sequence: Synthetic oligonucleotide
  Antisense strand to SEQ ID NO: 638550
acuucugcccaaagagaag

SEQ ID NO: 638552 - RNA, 19 nt, Artificial Sequence
  Description of Artificial Sequence: Synthetic oligonucleotide
  Sense strand starting at position 1386 of SEQ ID NO: 585421
ucucuuugggcagaaguga

SEQ ID NO: 638553 - RNA, 19 nt, Artificial Sequence
  Description of Artificial Sequence: Synthetic oligonucleotide
  Antisense strand to SEQ ID NO: 638552
ucacuucugcccaaagaga

SEQ ID NO: 638554 - RNA, 19 nt, Artificial Sequence
  Description of Artificial Sequence: Synthetic oligonucleotide
  Sense strand starting at position 1522 of SEQ ID NO: 585421
uugguagacucacugauca

SEQ ID NO: 638555 - RNA, 19 nt, Artificial Sequence
  Description of Artificial Sequence: Synthetic oligonucleotide
  Antisense strand to SEQ ID NO: 638554
ugaucagugagucuaccaa

SEQ ID NO: 638556 - RNA, 19 nt, Artificial Sequence
  Description of Artificial Sequence: Synthetic oligonucleotide
  Sense strand starting at position 2292 of SEQ ID NO: 585421
ggcuguaaacuugggaaag

SEQ ID NO: 638557 - RNA, 19 nt, Artificial Sequence
  Description of Artificial Sequence: Synthetic oligonucleotide
  Antisense strand to SEQ ID NO: 638556
cuuucccaaguuuacagcc

SEQ ID NO: 638558 - RNA, 19 nt, Artificial Sequence
  Description of Artificial Sequence: Synthetic oligonucleotide
  Sense strand starting at position 2442 of SEQ ID NO: 585421
gaaugacauuuggaaucug

SEQ ID NO: 638559 - RNA, 19 nt, Artificial Sequence
  Description of Artificial Sequence: Synthetic oligonucleotide
  Antisense strand to SEQ ID NO: 638558
cagauuccaaaugucauuc

SEQ ID NO: 638560 - RNA, 19 nt, Artificial Sequence
  Description of Artificial Sequence: Synthetic oligonucleotide
  Sense strand starting at position 2579 of SEQ ID NO: 585421
agauguggucucuggagau

SEQ ID NO: 638561 - RNA, 19 nt, Artificial Sequence
  Description of Artificial Sequence: Synthetic oligonucleotide
  Antisense strand to SEQ ID NO: 638560
aucuccagagaccacaucu

SEQ ID NO: 638562 - RNA, 19 nt, Artificial Sequence
  Description of Artificial Sequence: Synthetic oligonucleotide
  Sense strand starting at position 2605 of SEQ ID NO: 585421
aggcaauagcccugagaag

SEQ ID NO: 638563 - RNA, 19 nt, Artificial Sequence
  Description of Artificial Sequence: Synthetic oligonucleotide
  Antisense strand to SEQ ID NO: 638562
cuucucagggcuauugccu

SEQ ID NO: 638564 - RNA, 19 nt, Artificial Sequence
  Description of Artificial Sequence: Synthetic oligonucleotide
  Sense strand starting at position 2606 of SEQ ID NO: 585421
ggcaauagcccugagaagu

SEQ ID NO: 638565 - RNA, 19 nt, Artificial Sequence
  Description of Artificial Sequence: Synthetic oligonucleotide
  Antisense strand to SEQ ID NO: 638564
acuucucagggcuauugcc

SEQ ID NO: 638566 - RNA, 19 nt, Artificial Sequence
  Description of Artificial Sequence: Synthetic oligonucleotide
  Sense strand starting at position 2948 of SEQ ID NO: 585421
uucugaaugcacuagguaa

SEQ ID NO: 638567 - RNA, 19 nt, Artificial Sequence
  Description of Artificial Sequence: Synthetic oligonucleotide
  Antisense strand to SEQ ID NO: 638566
uuaccuagugcauucagaa

SEQ ID NO: 638568 - RNA, 19 nt, Artificial Sequence
  Description of Artificial Sequence: Synthetic oligonucleotide
  Sense strand starting at position 2950 of SEQ ID NO: 585421
cugaaugcacuagguaaau

SEQ ID NO: 638569 - RNA, 19 nt, Artificial Sequence
  Description of Artificial Sequence: Synthetic oligonucleotide
  Antisense strand to SEQ ID NO: 638568
auuuaccuagugcauucag

SEQ ID NO: 638570 - RNA, 19 nt, Artificial Sequence
  Description of Artificial Sequence: Synthetic oligonucleotide
  Sense strand starting at position 3070 of SEQ ID NO: 585421
uggauuucuugauagacau

SEQ ID NO: 638571 - RNA, 19 nt, Artificial Sequence
  Description of Artificial Sequence: Synthetic oligonucleotide
  Antisense strand to SEQ ID NO: 638570
augucuaucaagaaaucca

SEQ ID NO: 638572 - RNA, 19 nt, Artificial Sequence
  Description of Artificial Sequence: Synthetic oligonucleotide
  Sense strand starting at position 3084 of SEQ ID NO: 585421
gacaucagagaguggucau

SEQ ID NO: 638573 - RNA, 19 nt, Artificial Sequence
  Description of Artificial Sequence: Synthetic oligonucleotide
  Antisense strand to SEQ ID NO: 638572
augaccacucucugauguc

SEQ ID NO: 638574 - RNA, 19 nt, Artificial Sequence
  Description of Artificial Sequence: Synthetic oligonucleotide
  Sense strand starting at position 3085 of SEQ ID NO: 585421
acaucagagaguggucauu

SEQ ID NO: 638575 - RNA, 19 nt, Artificial Sequence
  Description of Artificial Sequence: Synthetic oligonucleotide
  Antisense strand to SEQ ID NO: 638574
aaugaccacucucugaugu

SEQ ID NO: 638576 - RNA, 19 nt, Artificial Sequence
  Description of Artificial Sequence: Synthetic oligonucleotide
  Sense strand starting at position 3114 of SEQ ID NO: 585421
acaguuguggauugauuau

SEQ ID NO: 638577 - RNA, 19 nt, Artificial Sequence
  Description of Artificial Sequence: Synthetic oligonucleotide
  Antisense strand to SEQ ID NO: 638576
auaaucaauccacaacugu

SEQ ID NO: 638578 - RNA, 19 nt, Artificial Sequence
  Description of Artificial Sequence: Synthetic oligonucleotide
  Sense strand starting at position 3229 of SEQ ID NO: 585421
gggcuuguuagagaugcaa

SEQ ID NO: 638579 - RNA, 19 nt, Artificial Sequence
  Description of Artificial Sequence: Synthetic oligonucleotide
  Antisense strand to SEQ ID NO: 638578
uugcaucucuaacaagccc

SEQ ID NO: 638580 - RNA, 19 nt, Artificial Sequence
  Description of Artificial Sequence: Synthetic oligonucleotide
  Sense strand starting at position 3252 of SEQ ID NO: 585421
ugggcuacucaagaccuau

SEQ ID NO: 638581 - RNA, 19 nt, Artificial Sequence
  Description of Artificial Sequence: Synthetic oligonucleotide
  Antisense strand to SEQ ID NO: 638580
auaggucuugaguagccca

SEQ ID NO: 638582 - RNA, 19 nt, Artificial Sequence
  Description of Artificial Sequence: Synthetic oligonucleotide
  Sense strand starting at position 3341 of SEQ ID NO: 585421
cagucucaaguuugagaac

SEQ ID NO: 638583 - RNA, 19 nt, Artificial Sequence
  Description of Artificial Sequence: Synthetic oligonucleotide
  Antisense strand to SEQ ID NO: 638582
guucucaaacuugagacug

SEQ ID NO: 638584 - RNA, 19 nt, Artificial Sequence
  Description of Artificial Sequence: Synthetic oligonucleotide
  Sense strand starting at position 3478 of SEQ ID NO: 585421
gagcaagaucucgggagau

SEQ ID NO: 638585 - RNA, 19 nt, Artificial Sequence
  Description of Artificial Sequence: Synthetic oligonucleotide
  Antisense strand to SEQ ID NO: 638584
aucucccgagaucuugcuc

SEQ ID NO: 638586 - RNA, 19 nt, Artificial Sequence
  Description of Artificial Sequence: Synthetic oligonucleotide
  Sense strand starting at position 3505 of SEQ ID NO: 585421
gaagcuuauggugagagca

SEQ ID NO: 638587 - RNA, 19 nt, Artificial Sequence
  Description of Artificial Sequence: Synthetic oligonucleotide
  Antisense strand to SEQ ID NO: 638586
ugcucucaccauaagcuuc

SEQ ID NO: 638588 - RNA, 19 nt, Artificial Sequence
  Description of Artificial Sequence: Synthetic oligonucleotide
  Sense strand starting at position 3575 of SEQ ID NO: 585421
gaagcuuucccuugggaua

SEQ ID NO: 638589 - RNA, 19 nt, Artificial Sequence
  Description of Artificial Sequence: Synthetic oligonucleotide
  Antisense strand to SEQ ID NO: 638588
uaucccaagggaaagcuuc

SEQ ID NO: 638590 - RNA, 19 nt, Artificial Sequence
  Description of Artificial Sequence: Synthetic oligonucleotide
  Sense strand starting at position 3580 of SEQ ID NO: 585421
uuucccuugggauauguga

SEQ ID NO: 638591 - RNA, 19 nt, Artificial Sequence
  Description of Artificial Sequence: Synthetic oligonucleotide
  Antisense strand to SEQ ID NO: 638590
ucacauaucccaagggaaa

SEQ ID NO: 638592 - RNA, 19 nt, Artificial Sequence
  Description of Artificial Sequence: Synthetic oligonucleotide
  Sense strand starting at position 3618 of SEQ ID NO: 585421
gagagcucugaacauaugu

SEQ ID NO: 638593 - RNA, 19 nt, Artificial Sequence
  Description of Artificial Sequence: Synthetic oligonucleotide
  Antisense strand to SEQ ID NO: 638592
acauauguucagagcucuc

SEQ ID NO: 638594 - RNA, 19 nt, Artificial Sequence
  Description of Artificial Sequence: Synthetic oligonucleotide
  Sense strand starting at position 3645 of SEQ ID NO: 585421
agagcaauugagggugaga

SEQ ID NO: 638595 - RNA, 19 nt, Artificial Sequence
  Description of Artificial Sequence: Synthetic oligonucleotide
  Antisense strand to SEQ ID NO: 638594
ucucacccucaauugcucu

SEQ ID NO: 638596 - RNA, 19 nt, Artificial Sequence
  Description of Artificial Sequence: Synthetic oligonucleotide
  Sense strand starting at position 3877 of SEQ ID NO: 585421
uggagauuaaggugcuaga

SEQ ID NO: 638597 - RNA, 19 nt, Artificial Sequence
  Description of Artificial Sequence: Synthetic oligonucleotide
  Antisense strand to SEQ ID NO: 638596
ucuagcaccuuaaucucca

SEQ ID NO: 638598 - RNA, 19 nt, Artificial Sequence
  Description of Artificial Sequence: Synthetic oligonucleotide
  Sense strand starting at position 574 of SEQ ID NO: 585422
gaguaaucaucauccggau

SEQ ID NO: 638599 - RNA, 19 nt, Artificial Sequence
  Description of Artificial Sequence: Synthetic oligonucleotide
  Antisense strand to SEQ ID NO: 638598
auccggaugaugauuacuc

SEQ ID NO: 638600 - RNA, 19 nt, Artificial Sequence
  Description of Artificial Sequence: Synthetic oligonucleotide
  Sense strand starting at position 578 of SEQ ID NO: 585422
aaucaucauccggauugua

SEQ ID NO: 638601 - RNA, 19 nt, Artificial Sequence
  Description of Artificial Sequence: Synthetic oligonucleotide
  Antisense strand to SEQ ID NO: 638600
uacaauccggaugaugauu

SEQ ID NO: 638602 - RNA, 19 nt, Artificial Sequence
  Description of Artificial Sequence: Synthetic oligonucleotide
  Sense strand starting at position 590 of SEQ ID NO: 585422
gauuguauccuguagaaua

SEQ ID NO: 638603 - RNA, 19 nt, Artificial Sequence
  Description of Artificial Sequence: Synthetic oligonucleotide
  Antisense strand to SEQ ID NO: 638602
uauucuacaggauacaauc

SEQ ID NO: 638604 - RNA, 19 nt, Artificial Sequence
  Description of Artificial Sequence: Synthetic oligonucleotide
  Sense strand starting at position 592 of SEQ ID NO: 585422
uuguauccuguagaauaaa

SEQ ID NO: 638605 - RNA, 19 nt, Artificial Sequence
  Description of Artificial Sequence: Synthetic oligonucleotide
  Antisense strand to SEQ ID NO: 638604
uuuauucuacaggauacaa

SEQ ID NO: 638606 - RNA, 19 nt, Artificial Sequence
  Description of Artificial Sequence: Synthetic oligonucleotide
  Sense strand starting at position 610 of SEQ ID NO: 585422
agugaaaucugguuauagu

SEQ ID NO: 638607 - RNA, 19 nt, Artificial Sequence
  Description of Artificial Sequence: Synthetic oligonucleotide
  Antisense strand to SEQ ID NO: 638606
acuauaaccagauuucacu

SEQ ID NO: 638608 - RNA, 19 nt, Artificial Sequence
  Description of Artificial Sequence: Synthetic oligonucleotide
  Sense strand starting at position 611 of SEQ ID NO: 585422
gugaaaucugguuauaguu

SEQ ID NO: 638609 - RNA, 19 nt, Artificial Sequence
  Description of Artificial Sequence: Synthetic oligonucleotide
  Antisense strand to SEQ ID NO: 638608
aacuauaaccagauuucac

SEQ ID NO: 638610 - RNA, 19 nt, Artificial Sequence
  Description of Artificial Sequence: Synthetic oligonucleotide
  Sense strand starting at position 636 of SEQ ID NO: 585422
gguuaaacaagguauagcu

SEQ ID NO: 638611 - RNA, 19 nt, Artificial Sequence
  Description of Artificial Sequence: Synthetic oligonucleotide
  Antisense strand to SEQ ID NO: 638610
agcuauaccuuguuuaacc

SEQ ID NO: 638612 - RNA, 19 nt, Artificial Sequence
  Description of Artificial Sequence: Synthetic oligonucleotide
  Sense strand starting at position 770 of SEQ ID NO: 585422
agugaugaugcugaagagu

SEQ ID NO: 638613 - RNA, 19 nt, Artificial Sequence
  Description of Artificial Sequence: Synthetic oligonucleotide
  Antisense strand to SEQ ID NO: 638612
acucuucagcaucaucacu

SEQ ID NO: 638614 - RNA, 19 nt, Artificial Sequence
  Description of Artificial Sequence: Synthetic oligonucleotide
  Sense strand starting at position 776 of SEQ ID NO: 585422
gaugcugaagaguguagau

SEQ ID NO: 638615 - RNA, 19 nt, Artificial Sequence
  Description of Artificial Sequence: Synthetic oligonucleotide
  Antisense strand to SEQ ID NO: 638614
aucuacacucuucagcauc

SEQ ID NO: 638616 - RNA, 19 nt, Artificial Sequence
  Description of Artificial Sequence: Synthetic oligonucleotide
  Sense strand starting at position 898 of SEQ ID NO: 585422
auuccaagaugucugcuaa

SEQ ID NO: 638617 - RNA, 19 nt, Artificial Sequence
  Description of Artificial Sequence: Synthetic oligonucleotide
  Antisense strand to SEQ ID NO: 638616
uuagcagacaucuuggaau

SEQ ID NO: 638618 - RNA, 19 nt, Artificial Sequence
  Description of Artificial Sequence: Synthetic oligonucleotide
  Sense strand starting at position 899 of SEQ ID NO: 585422
uuccaagaugucugcuaaa

SEQ ID NO: 638619 - RNA, 19 nt, Artificial Sequence
  Description of Artificial Sequence: Synthetic oligonucleotide
  Antisense strand to SEQ ID NO: 638618
uuuagcagacaucuuggaa

SEQ ID NO: 638620 - RNA, 19 nt, Artificial Sequence
  Description of Artificial Sequence: Synthetic oligonucleotide
  Sense strand starting at position 950 of SEQ ID NO: 585422
ggguuaggaucuguccuca

SEQ ID NO: 638621 - RNA, 19 nt, Artificial Sequence
  Description of Artificial Sequence: Synthetic oligonucleotide
  Antisense strand to SEQ ID NO: 638620
ugaggacagauccuaaccc

SEQ ID NO: 638622 - RNA, 19 nt, Artificial Sequence
  Description of Artificial Sequence: Synthetic oligonucleotide
  Sense strand starting at position 958 of SEQ ID NO: 585422
aucuguccucaccaugauu

SEQ ID NO: 638623 - RNA, 19 nt, Artificial Sequence
  Description of Artificial Sequence: Synthetic oligonucleotide
  Antisense strand to SEQ ID NO: 638622
aaucauggugaggacagau

SEQ ID NO: 638624 - RNA, 19 nt, Artificial Sequence
  Description of Artificial Sequence: Synthetic oligonucleotide
  Sense strand starting at position 1217 of SEQ ID NO: 585422
acuucucguuggucaauuu

SEQ ID NO: 638625 - RNA, 19 nt, Artificial Sequence
  Description of Artificial Sequence: Synthetic oligonucleotide
  Antisense strand to SEQ ID NO: 638624
aaauugaccaacgagaagu

SEQ ID NO: 638626 - RNA, 19 nt, Artificial Sequence
  Description of Artificial Sequence: Synthetic oligonucleotide
  Sense strand starting at position 1347 of SEQ ID NO: 585422
ggaggucuaagcugaggua

SEQ ID NO: 638627 - RNA, 19 nt, Artificial Sequence
  Description of Artificial Sequence: Synthetic oligonucleotide
  Antisense strand to SEQ ID NO: 638626
uaccucagcuuagaccucc

SEQ ID NO: 638628 - RNA, 19 nt, Artificial Sequence
  Description of Artificial Sequence: Synthetic oligonucleotide
  Sense strand starting at position 1348 of SEQ ID NO: 585422
gaggucuaagcugagguaa

SEQ ID NO: 638629 - RNA, 19 nt, Artificial Sequence
  Description of Artificial Sequence: Synthetic oligonucleotide
  Antisense strand to SEQ ID NO: 638628
uuaccucagcuuagaccuc

SEQ ID NO: 638630 - RNA, 19 nt, Artificial Sequence
  Description of Artificial Sequence: Synthetic oligonucleotide
  Sense strand starting at position 1599 of SEQ ID NO: 585422
uugguaaucucauuugcug

SEQ ID NO: 638631 - RNA, 19 nt, Artificial Sequence
  Description of Artificial Sequence: Synthetic oligonucleotide
  Antisense strand to SEQ ID NO: 638630
cagcaaaugagauuaccaa

SEQ ID NO: 638632 - RNA, 19 nt, Artificial Sequence
  Description of Artificial Sequence: Synthetic oligonucleotide
  Sense strand starting at position 1626 of SEQ ID NO: 585422
agcucagugcaauagacuu

SEQ ID NO: 638633 - RNA, 19 nt, Artificial Sequence
  Description of Artificial Sequence: Synthetic oligonucleotide
  Antisense strand to SEQ ID NO: 638632
aagucuauugcacugagcu

SEQ ID NO: 638634 - RNA, 19 nt, Artificial Sequence
  Description of Artificial Sequence: Synthetic oligonucleotide
  Sense strand starting at position 2765 of SEQ ID NO: 585422
acaugccuuuggguuaaau

SEQ ID NO: 638635 - RNA, 19 nt, Artificial Sequence
  Description of Artificial Sequence: Synthetic oligonucleotide
  Antisense strand to SEQ ID NO: 638634
auuuaacccaaaggcaugu

SEQ ID NO: 638636 - RNA, 19 nt, Artificial Sequence
  Description of Artificial Sequence: Synthetic oligonucleotide
  Sense strand starting at position 2767 of SEQ ID NO: 585422
augccuuuggguuaaauca

SEQ ID NO: 638637 - RNA, 19 nt, Artificial Sequence
  Description of Artificial Sequence: Synthetic oligonucleotide
  Antisense strand to SEQ ID NO: 638636
ugauuuaacccaaaggcau

SEQ ID NO: 638638 - RNA, 19 nt, Artificial Sequence
  Description of Artificial Sequence: Synthetic oligonucleotide
  Sense strand starting at position 2782 of SEQ ID NO: 585422
aucacuagaaguggaguua

SEQ ID NO: 638639 - RNA, 19 nt, Artificial Sequence
  Description of Artificial Sequence: Synthetic oligonucleotide
  Antisense strand to SEQ ID NO: 638638
uaacuccacuucuagugau

SEQ ID NO: 638640 - RNA, 19 nt, Artificial Sequence
  Description of Artificial Sequence: Synthetic oligonucleotide
  Sense strand starting at position 2791 of SEQ ID NO: 585422
aguggaguuagcgaaucuu

SEQ ID NO: 638641 - RNA, 19 nt, Artificial Sequence
  Description of Artificial Sequence: Synthetic oligonucleotide
  Antisense strand to SEQ ID NO: 638640
aagauucgcuaacuccacu

SEQ ID NO: 638642 - RNA, 19 nt, Artificial Sequence
  Description of Artificial Sequence: Synthetic oligonucleotide
  Sense strand starting at position 2830 of SEQ ID NO: 585422
ugguguuguaucgaauuaa

SEQ ID NO: 638643 - RNA, 19 nt, Artificial Sequence
  Description of Artificial Sequence: Synthetic oligonucleotide
  Antisense strand to SEQ ID NO: 638642
uuaauucgauacaacacca

SEQ ID NO: 638644 - RNA, 19 nt, Artificial Sequence
  Description of Artificial Sequence: Synthetic oligonucleotide
  Sense strand starting at position 3032 of SEQ ID NO: 585422
gguccuggcacauguaaga

SEQ ID NO: 638645 - RNA, 19 nt, Artificial Sequence
  Description of Artificial Sequence: Synthetic oligonucleotide
  Antisense strand to SEQ ID NO: 638644
ucuuacaugugccaggacc

SEQ ID NO: 638646 - RNA, 19 nt, Artificial Sequence
  Description of Artificial Sequence: Synthetic oligonucleotide
  Sense strand starting at position 3080 of SEQ ID NO: 585422
ccaggcauuguaugaauga

SEQ ID NO: 638647 - RNA, 19 nt, Artificial Sequence
  Description of Artificial Sequence: Synthetic oligonucleotide
  Antisense strand to SEQ ID NO: 638646
ucauucauacaaugccugg

SEQ ID NO: 638648 - RNA, 19 nt, Artificial Sequence
  Description of Artificial Sequence: Synthetic oligonucleotide
  Sense strand starting at position 3093 of SEQ ID NO: 585422
gaaugaugcuaacugcaug

SEQ ID NO: 638649 - RNA, 19 nt, Artificial Sequence
  Description of Artificial Sequence: Synthetic oligonucleotide
  Antisense strand to SEQ ID NO: 638648
caugcaguuagcaucauuc

SEQ ID NO: 638650 - RNA, 19 nt, Artificial Sequence
  Description of Artificial Sequence: Synthetic oligonucleotide
  Sense strand starting at position 3098 of SEQ ID NO: 585422
augcuaacugcaugaucau

SEQ ID NO: 638651 - RNA, 19 nt, Artificial Sequence
  Description of Artificial Sequence: Synthetic oligonucleotide
  Antisense strand to SEQ ID NO: 638650
augaucaugcaguuagcau

SEQ ID NO: 638652 - RNA, 19 nt, Artificial Sequence
  Description of Artificial Sequence: Synthetic oligonucleotide
  Sense strand starting at position 3099 of SEQ ID NO: 585422
ugcuaacugcaugaucaua

SEQ ID NO: 638653 - RNA, 19 nt, Artificial Sequence
  Description of Artificial Sequence: Synthetic oligonucleotide
  Antisense strand to SEQ ID NO: 638652
uaugaucaugcaguuagca

SEQ ID NO: 638654 - RNA, 19 nt, Artificial Sequence
  Description of Artificial Sequence: Synthetic oligonucleotide
  Sense strand starting at position 3148 of SEQ ID NO: 585422
auacauuagcuguaauagu

SEQ ID NO: 638655 - RNA, 19 nt, Artificial Sequence
  Description of Artificial Sequence: Synthetic oligonucleotide
  Antisense strand to SEQ ID NO: 638654
acuauuacagcuaauguau

SEQ ID NO: 638656 - RNA, 19 nt, Artificial Sequence
  Description of Artificial Sequence: Synthetic oligonucleotide
  Sense strand starting at position 3254 of SEQ ID NO: 585422
uccguuuaugaugaggaca

SEQ ID NO: 638657 - RNA, 19 nt, Artificial Sequence
  Description of Artificial Sequence: Synthetic oligonucleotide
  Antisense strand to SEQ ID NO: 638656
uguccucaucauaaacgga

SEQ ID NO: 638658 - RNA, 19 nt, Artificial Sequence
  Description of Artificial Sequence: Synthetic oligonucleotide
  Sense strand starting at position 3476 of SEQ ID NO: 585422
gauguuaagcuguaucaau

SEQ ID NO: 638659 - RNA, 19 nt, Artificial Sequence
  Description of Artificial Sequence: Synthetic oligonucleotide
  Antisense strand to SEQ ID NO: 638658
auugauacagcuuaacauc

SEQ ID NO: 638660 - RNA, 19 nt, Artificial Sequence
  Description of Artificial Sequence: Synthetic oligonucleotide
  Sense strand starting at position 3577 of SEQ ID NO: 585422
ugaguaaucuguccagaau

SEQ ID NO: 638661 - RNA, 19 nt, Artificial Sequence
  Description of Artificial Sequence: Synthetic oligonucleotide
  Antisense strand to SEQ ID NO: 638660
auucuggacagauuacuca

SEQ ID NO: 638662 - RNA, 19 nt, Artificial Sequence
  Description of Artificial Sequence: Synthetic oligonucleotide
  Sense strand starting at position 3578 of SEQ ID NO: 585422
gaguaaucuguccagaauu

SEQ ID NO: 638663 - RNA, 19 nt, Artificial Sequence
  Description of Artificial Sequence: Synthetic oligonucleotide
  Antisense strand to SEQ ID NO: 638662
aauucuggacagauuacuc

SEQ ID NO: 638664 - RNA, 19 nt, Artificial Sequence
  Description of Artificial Sequence: Synthetic oligonucleotide
  Sense strand starting at position 3580 of SEQ ID NO: 585422
guaaucuguccagaauugu

SEQ ID NO: 638665 - RNA, 19 nt, Artificial Sequence
  Description of Artificial Sequence: Synthetic oligonucleotide
  Antisense strand to SEQ ID NO: 638664
acaauucuggacagauuac

SEQ ID NO: 638666 - RNA, 19 nt, Artificial Sequence
  Description of Artificial Sequence: Synthetic oligonucleotide
  Sense strand starting at position 3653 of SEQ ID NO: 585422
ggacucuaguuucuuguaa

SEQ ID NO: 638667 - RNA, 19 nt, Artificial Sequence
  Description of Artificial Sequence: Synthetic oligonucleotide
  Antisense strand to SEQ ID NO: 638666
uuacaagaaacuagagucc

SEQ ID NO: 638668 - RNA, 19 nt, Artificial Sequence
  Description of Artificial Sequence: Synthetic oligonucleotide
  Sense strand starting at position 3680 of SEQ ID NO: 585422
uuaguacuguucucuauaa

SEQ ID NO: 638669 - RNA, 19 nt, Artificial Sequence
  Description of Artificial Sequence: Synthetic oligonucleotide
  Antisense strand to SEQ ID NO: 638668
uuauagagaacaguacuaa

SEQ ID NO: 638670 - RNA, 19 nt, Artificial Sequence
  Description of Artificial Sequence: Synthetic oligonucleotide
  Sense strand starting at position 3682 of SEQ ID NO: 585422
aguacuguucucuauaauc

SEQ ID NO: 638671 - RNA, 19 nt, Artificial Sequence
  Description of Artificial Sequence: Synthetic oligonucleotide
  Antisense strand to SEQ ID NO: 638670
gauuauagagaacaguacu

SEQ ID NO: 638672 - RNA, 19 nt, Artificial Sequence
  Description of Artificial Sequence: Synthetic oligonucleotide
  Sense strand starting at position 3738 of SEQ ID NO: 585422
uugugaucuugguuggaau

SEQ ID NO: 638673 - RNA, 19 nt, Artificial Sequence
  Description of Artificial Sequence: Synthetic oligonucleotide
  Antisense strand to SEQ ID NO: 638672
auuccaaccaagaucacaa

SEQ ID NO: 638674 - RNA, 19 nt, Artificial Sequence
  Description of Artificial Sequence: Synthetic oligonucleotide
  Sense strand starting at position 3739 of SEQ ID NO: 585422
ugugaucuugguuggaauu

SEQ ID NO: 638675 - RNA, 19 nt, Artificial Sequence
  Description of Artificial Sequence: Synthetic oligonucleotide
  Antisense strand to SEQ ID NO: 638674
aauuccaaccaagaucaca

SEQ ID NO: 638676 - RNA, 19 nt, Artificial Sequence
  Description of Artificial Sequence: Synthetic oligonucleotide
  Sense strand starting at position 3759 of SEQ ID NO: 585422
ugaaguaguguugaaucua

SEQ ID NO: 638677 - RNA, 19 nt, Artificial Sequence
  Description of Artificial Sequence: Synthetic oligonucleotide
  Antisense strand to SEQ ID NO: 638676
uagauucaacacuacuuca

SEQ ID NO: 638678 - RNA, 19 nt, Artificial Sequence
  Description of Artificial Sequence: Synthetic oligonucleotide
  Sense strand starting at position 5 of SEQ ID NO: 585423
gggccucauuugcucauaa

SEQ ID NO: 638679 - RNA, 19 nt, Artificial Sequence
  Description of Artificial Sequence: Synthetic oligonucleotide
  Antisense strand to SEQ ID NO: 638678
uuaugagcaaaugaggccc

SEQ ID NO: 638680 - RNA, 19 nt, Artificial Sequence
  Description of Artificial Sequence: Synthetic oligonucleotide
  Sense strand starting at position 57 of SEQ ID NO: 585423
guccuuagagauugucuag

SEQ ID NO: 638681 - RNA, 19 nt, Artificial Sequence
  Description of Artificial Sequence: Synthetic oligonucleotide
  Antisense strand to SEQ ID NO: 638680
cuagacaaucucuaaggac

SEQ ID NO: 638682 - RNA, 19 nt, Artificial Sequence
  Description of Artificial Sequence: Synthetic oligonucleotide
  Sense strand starting at position 64 of SEQ ID NO: 585423
gagauugucuaguccaaca

SEQ ID NO: 638683 - RNA, 19 nt, Artificial Sequence
  Description of Artificial Sequence: Synthetic oligonucleotide
  Antisense strand to SEQ ID NO: 638682
uguuggacuagacaaucuc

SEQ ID NO: 638684 - RNA, 19 nt, Artificial Sequence
  Description of Artificial Sequence: Synthetic oligonucleotide
  Sense strand starting at position 66 of SEQ ID NO: 585423
gauugucuaguccaacagu

SEQ ID NO: 638685 - RNA, 19 nt, Artificial Sequence
  Description of Artificial Sequence: Synthetic oligonucleotide
  Antisense strand to SEQ ID NO: 638684
acuguuggacuagacaauc

SEQ ID NO: 638686 - RNA, 19 nt, Artificial Sequence
  Description of Artificial Sequence: Synthetic oligonucleotide
  Sense strand starting at position 69 of SEQ ID NO: 585423
ugucuaguccaacagucua

SEQ ID NO: 638687 - RNA, 19 nt, Artificial Sequence
  Description of Artificial Sequence: Synthetic oligonucleotide
  Antisense strand to SEQ ID NO: 638686
uagacuguuggacuagaca

SEQ ID NO: 638688 - RNA, 19 nt, Artificial Sequence
  Description of Artificial Sequence: Synthetic oligonucleotide
  Sense strand starting at position 119 of SEQ ID NO: 585423
uugagagacuuguccaagu

SEQ ID NO: 638689 - RNA, 19 nt, Artificial Sequence
  Description of Artificial Sequence: Synthetic oligonucleotide
  Antisense strand to SEQ ID NO: 638688
acuuggacaagucucucaa

SEQ ID NO: 638690 - RNA, 19 nt, Artificial Sequence
  Description of Artificial Sequence: Synthetic oligonucleotide
  Sense strand starting at position 248 of SEQ ID NO: 585423
cugaguaagcuuuaaugac

SEQ ID NO: 638691 - RNA, 19 nt, Artificial Sequence
  Description of Artificial Sequence: Synthetic oligonucleotide
  Antisense strand to SEQ ID NO: 638690
gucauuaaagcuuacucag

SEQ ID NO: 638692 - RNA, 19 nt, Artificial Sequence
  Description of Artificial Sequence: Synthetic oligonucleotide
  Sense strand starting at position 289 of SEQ ID NO: 585423
ggugaaaucaaaugguuuc

SEQ ID NO: 638693 - RNA, 19 nt, Artificial Sequence
  Description of Artificial Sequence: Synthetic oligonucleotide
  Antisense strand to SEQ ID NO: 638692
gaaaccauuugauuucacc

SEQ ID NO: 638694 - RNA, 19 nt, Artificial Sequence
  Description of Artificial Sequence: Synthetic oligonucleotide
  Sense strand starting at position 333 of SEQ ID NO: 585423
guguuuccucaacagacuu

SEQ ID NO: 638695 - RNA, 19 nt, Artificial Sequence
  Description of Artificial Sequence: Synthetic oligonucleotide
  Antisense strand to SEQ ID NO: 638694
aagucuguugaggaaacac

SEQ ID NO: 638696 - RNA, 19 nt, Artificial Sequence
  Description of Artificial Sequence: Synthetic oligonucleotide
  Sense strand starting at position 341 of SEQ ID NO: 585423
ucaacagacuugguuaagu

SEQ ID NO: 638697 - RNA, 19 nt, Artificial Sequence
  Description of Artificial Sequence: Synthetic oligonucleotide
  Antisense strand to SEQ ID NO: 638696
acuuaaccaagucuguuga

SEQ ID NO: 638698 - RNA, 19 nt, Artificial Sequence
  Description of Artificial Sequence: Synthetic oligonucleotide
  Sense strand starting at position 436 of SEQ ID NO: 585423
agucaaagucauuaaguaa

SEQ ID NO: 638699 - RNA, 19 nt, Artificial Sequence
  Description of Artificial Sequence: Synthetic oligonucleotide
  Antisense strand to SEQ ID NO: 638698
uuacuuaaugacuuugacu

SEQ ID NO: 638700 - RNA, 19 nt, Artificial Sequence
  Description of Artificial Sequence: Synthetic oligonucleotide
  Sense strand starting at position 480 of SEQ ID NO: 585423
ccacuuaacuggguggaua

SEQ ID NO: 638701 - RNA, 19 nt, Artificial Sequence
  Description of Artificial Sequence: Synthetic oligonucleotide
  Antisense strand to SEQ ID NO: 638700
uauccacccaguuaagugg

SEQ ID NO: 638702 - RNA, 19 nt, Artificial Sequence
  Description of Artificial Sequence: Synthetic oligonucleotide
  Sense strand starting at position 495 of SEQ ID NO: 585423
gauacaaccucagugguau

SEQ ID NO: 638703 - RNA, 19 nt, Artificial Sequence
  Description of Artificial Sequence: Synthetic oligonucleotide
  Antisense strand to SEQ ID NO: 638702
auaccacugagguuguauc

SEQ ID NO: 638704 - RNA, 19 nt, Artificial Sequence
  Description of Artificial Sequence: Synthetic oligonucleotide
  Sense strand starting at position 578 of SEQ ID NO: 585423
gagagucauugcuuaagag

SEQ ID NO: 638705 - RNA, 19 nt, Artificial Sequence
  Description of Artificial Sequence: Synthetic oligonucleotide
  Antisense strand to SEQ ID NO: 638704
cucuuaagcaaugacucuc

SEQ ID NO: 638706 - RNA, 19 nt, Artificial Sequence
  Description of Artificial Sequence: Synthetic oligonucleotide
  Sense strand starting at position 620 of SEQ ID NO: 585423
agagguuguacugggcaga

SEQ ID NO: 638707 - RNA, 19 nt, Artificial Sequence
  Description of Artificial Sequence: Synthetic oligonucleotide
  Antisense strand to SEQ ID NO: 638706
ucugcccaguacaaccucu

SEQ ID NO: 638708 - RNA, 19 nt, Artificial Sequence
  Description of Artificial Sequence: Synthetic oligonucleotide
  Sense strand starting at position 743 of SEQ ID NO: 585423
uggccagucaccuaaguga

SEQ ID NO: 638709 - RNA, 19 nt, Artificial Sequence
  Description of Artificial Sequence: Synthetic oligonucleotide
  Antisense strand to SEQ ID NO: 638708
ucacuuaggugacuggcca

SEQ ID NO: 638710 - RNA, 19 nt, Artificial Sequence
  Description of Artificial Sequence: Synthetic oligonucleotide
  Sense strand starting at position 754 of SEQ ID NO: 585423
cuaagugaggcuugaggua

SEQ ID NO: 638711 - RNA, 19 nt, Artificial Sequence
  Description of Artificial Sequence: Synthetic oligonucleotide
  Antisense strand to SEQ ID NO: 638710
uaccucaagccucacuuag

SEQ ID NO: 638712 - RNA, 19 nt, Artificial Sequence
  Description of Artificial Sequence: Synthetic oligonucleotide
  Sense strand starting at position 796 of SEQ ID NO: 585423
auucuuucucaugggaaua

SEQ ID NO: 638713 - RNA, 19 nt, Artificial Sequence
  Description of Artificial Sequence: Synthetic oligonucleotide
  Antisense strand to SEQ ID NO: 638712
uauucccaugagaaagaau

SEQ ID NO: 638714 - RNA, 19 nt, Artificial Sequence
  Description of Artificial Sequence: Synthetic oligonucleotide
  Sense strand starting at position 831 of SEQ ID NO: 585423
agagacagguaguuaguaa

SEQ ID NO: 638715 - RNA, 19 nt, Artificial Sequence
  Description of Artificial Sequence: Synthetic oligonucleotide
  Antisense strand to SEQ ID NO: 638714
uuacuaacuaccugucucu

SEQ ID NO: 638716 - RNA, 19 nt, Artificial Sequence
  Description of Artificial Sequence: Synthetic oligonucleotide
  Sense strand starting at position 1053 of SEQ ID NO: 585423
aguuuaggcccucaauauc

SEQ ID NO: 638717 - RNA, 19 nt, Artificial Sequence
  Description of Artificial Sequence: Synthetic oligonucleotide
  Antisense strand to SEQ ID NO: 638716
gauauugagggccuaaacu

SEQ ID NO: 638718 - RNA, 19 nt, Artificial Sequence
  Description of Artificial Sequence: Synthetic oligonucleotide
  Sense strand starting at position 1104 of SEQ ID NO: 585423
ucuggugagccaggagaaa

SEQ ID NO: 638719 - RNA, 19 nt, Artificial Sequence
  Description of Artificial Sequence: Synthetic oligonucleotide
  Antisense strand to SEQ ID NO: 638718
uuucuccuggcucaccaga

SEQ ID NO: 638720 - RNA, 19 nt, Artificial Sequence
  Description of Artificial Sequence: Synthetic oligonucleotide
  Sense strand starting at position 1225 of SEQ ID NO: 585423
uuacgacaccuaggaaauu

SEQ ID NO: 638721 - RNA, 19 nt, Artificial Sequence
  Description of Artificial Sequence: Synthetic oligonucleotide
  Antisense strand to SEQ ID NO: 638720
aauuuccuaggugucguaa

SEQ ID NO: 638722 - RNA, 19 nt, Artificial Sequence
  Description of Artificial Sequence: Synthetic oligonucleotide
  Sense strand starting at position 1270 of SEQ ID NO: 585423
agcuuugucgcaguguacu

SEQ ID NO: 638723 - RNA, 19 nt, Artificial Sequence
  Description of Artificial Sequence: Synthetic oligonucleotide
  Antisense strand to SEQ ID NO: 638722
aguacacugcgacaaagcu

SEQ ID NO: 638724 - RNA, 19 nt, Artificial Sequence
  Description of Artificial Sequence: Synthetic oligonucleotide
  Sense strand starting at position 1318 of SEQ ID NO: 585423
uccagugcucaagggaagu

SEQ ID NO: 638725 - RNA, 19 nt, Artificial Sequence
  Description of Artificial Sequence: Synthetic oligonucleotide
  Antisense strand to SEQ ID NO: 638724
acuucccuugagcacugga

SEQ ID NO: 638726 - RNA, 19 nt, Artificial Sequence
  Description of Artificial Sequence: Synthetic oligonucleotide
  Sense strand starting at position 1689 of SEQ ID NO: 585423
cugggucaccuguaauugu

SEQ ID NO: 638727 - RNA, 19 nt, Artificial Sequence
  Description of Artificial Sequence: Synthetic oligonucleotide
  Antisense strand to SEQ ID NO: 638726
acaauuacaggugacccag

SEQ ID NO: 638728 - RNA, 19 nt, Artificial Sequence
  Description of Artificial Sequence: Synthetic oligonucleotide
  Sense strand starting at position 2236 of SEQ ID NO: 585423
ggcggagacauuuguguuu

SEQ ID NO: 638729 - RNA, 19 nt, Artificial Sequence
  Description of Artificial Sequence: Synthetic oligonucleotide
  Antisense strand to SEQ ID NO: 638728
aaacacaaaugucuccgcc

SEQ ID NO: 638730 - RNA, 19 nt, Artificial Sequence
  Description of Artificial Sequence: Synthetic oligonucleotide
  Sense strand starting at position 2771 of SEQ ID NO: 585423
uuacauuggccguggauuu

SEQ ID NO: 638731 - RNA, 19 nt, Artificial Sequence
  Description of Artificial Sequence: Synthetic oligonucleotide
  Antisense strand to SEQ ID NO: 638730
aaauccacggccaauguaa

SEQ ID NO: 638732 - RNA, 19 nt, Artificial Sequence
  Description of Artificial Sequence: Synthetic oligonucleotide
  Sense strand starting at position 2874 of SEQ ID NO: 585423
gguuguagacuuuggagaa

SEQ ID NO: 638733 - RNA, 19 nt, Artificial Sequence
  Description of Artificial Sequence: Synthetic oligonucleotide
  Antisense strand to SEQ ID NO: 638732
uucuccaaagucuacaacc

SEQ ID NO: 638734 - RNA, 19 nt, Artificial Sequence
  Description of Artificial Sequence: Synthetic oligonucleotide
  Sense strand starting at position 2887 of SEQ ID NO: 585423
ggagaauaauuagagaccu

SEQ ID NO: 638735 - RNA, 19 nt, Artificial Sequence
  Description of Artificial Sequence: Synthetic oligonucleotide
  Antisense strand to SEQ ID NO: 638734
aggucucuaauuauucucc

SEQ ID NO: 638736 - RNA, 19 nt, Artificial Sequence
  Description of Artificial Sequence: Synthetic oligonucleotide
  Sense strand starting at position 2914 of SEQ ID NO: 585423
uuaggcuuucuccaagaag

SEQ ID NO: 638737 - RNA, 19 nt, Artificial Sequence
  Description of Artificial Sequence: Synthetic oligonucleotide
  Antisense strand to SEQ ID NO: 638736
cuucuuggagaaagccuaa

SEQ ID NO: 638738 - RNA, 19 nt, Artificial Sequence
  Description of Artificial Sequence: Synthetic oligonucleotide
  Sense strand starting at position 2987 of SEQ ID NO: 585423
aucuuauuaaaguggugga

SEQ ID NO: 638739 - RNA, 19 nt, Artificial Sequence
  Description of Artificial Sequence: Synthetic oligonucleotide
  Antisense strand to SEQ ID NO: 638738
uccaccacuuuaauaagau

SEQ ID NO: 638740 - RNA, 19 nt, Artificial Sequence
  Description of Artificial Sequence: Synthetic oligonucleotide
  Sense strand starting at position 2988 of SEQ ID NO: 585423
ucuuauuaaagugguggau

SEQ ID NO: 638741 - RNA, 19 nt, Artificial Sequence
  Description of Artificial Sequence: Synthetic oligonucleotide
  Antisense strand to SEQ ID NO: 638740
auccaccacuuuaauaaga

SEQ ID NO: 638742 - RNA, 19 nt, Artificial Sequence
  Description of Artificial Sequence: Synthetic oligonucleotide
  Sense strand starting at position 2991 of SEQ ID NO: 585423
uauuaaagugguggauaaa

SEQ ID NO: 638743 - RNA, 19 nt, Artificial Sequence
  Description of Artificial Sequence: Synthetic oligonucleotide
  Antisense strand to SEQ ID NO: 638742
uuuauccaccacuuuaaua

SEQ ID NO: 638744 - RNA, 19 nt, Artificial Sequence
  Description of Artificial Sequence: Synthetic oligonucleotide
  Sense strand starting at position 2994 of SEQ ID NO: 585423
uaaagugguggauaaaguu

SEQ ID NO: 638745 - RNA, 19 nt, Artificial Sequence
  Description of Artificial Sequence: Synthetic oligonucleotide
  Antisense strand to SEQ ID NO: 638744
aacuuuauccaccacuuua

SEQ ID NO: 638746 - RNA, 19 nt, Artificial Sequence
  Description of Artificial Sequence: Synthetic oligonucleotide
  Sense strand starting at position 3099 of SEQ ID NO: 585423
uuuggaaucuugcuuuaug

SEQ ID NO: 638747 - RNA, 19 nt, Artificial Sequence
  Description of Artificial Sequence: Synthetic oligonucleotide
  Antisense strand to SEQ ID NO: 638746
cauaaagcaagauuccaaa

SEQ ID NO: 638748 - RNA, 19 nt, Artificial Sequence
  Description of Artificial Sequence: Synthetic oligonucleotide
  Sense strand starting at position 3102 of SEQ ID NO: 585423
ggaaucuugcuuuauguaa

SEQ ID NO: 638749 - RNA, 19 nt, Artificial Sequence
  Description of Artificial Sequence: Synthetic oligonucleotide
  Antisense strand to SEQ ID NO: 638748
uuacauaaagcaagauucc

SEQ ID NO: 638750 - RNA, 19 nt, Artificial Sequence
  Description of Artificial Sequence: Synthetic oligonucleotide
  Sense strand starting at position 3252 of SEQ ID NO: 585423
gcuuuaguguauuugguuu

SEQ ID NO: 638751 - RNA, 19 nt, Artificial Sequence
  Description of Artificial Sequence: Synthetic oligonucleotide
  Antisense strand to SEQ ID NO: 638750
aaaccaaauacacuaaagc

SEQ ID NO: 638752 - RNA, 19 nt, Artificial Sequence
  Description of Artificial Sequence: Synthetic oligonucleotide
  Sense strand starting at position 3673 of SEQ ID NO: 585423
cuuaccauucuuuagugua

SEQ ID NO: 638753 - RNA, 19 nt, Artificial Sequence
  Description of Artificial Sequence: Synthetic oligonucleotide
  Antisense strand to SEQ ID NO: 638752
uacacuaaagaaugguaag

SEQ ID NO: 638754 - RNA, 19 nt, Artificial Sequence
  Description of Artificial Sequence: Synthetic oligonucleotide
  Sense strand starting at position 3888 of SEQ ID NO: 585423
uggucaggucauugagcaa

SEQ ID NO: 638755 - RNA, 19 nt, Artificial Sequence
  Description of Artificial Sequence: Synthetic oligonucleotide
  Antisense strand to SEQ ID NO: 638754
uugcucaaugaccugacca

SEQ ID NO: 638756 - RNA, 19 nt, Artificial Sequence
  Description of Artificial Sequence: Synthetic oligonucleotide
  Sense strand starting at position 3892 of SEQ ID NO: 585423
caggucauugagcaaaucu

SEQ ID NO: 638757 - RNA, 19 nt, Artificial Sequence
  Description of Artificial Sequence: Synthetic oligonucleotide
  Antisense strand to SEQ ID NO: 638756
agauuugcucaaugaccug

SEQ ID NO: 638758 - RNA, 19 nt, Artificial Sequence
  Description of Artificial Sequence: Synthetic oligonucleotide
  Sense strand starting at position 82 of SEQ ID NO: 585424
ggacacauguuaucagaca

SEQ ID NO: 638759 - RNA, 19 nt, Artificial Sequence
  Description of Artificial Sequence: Synthetic oligonucleotide
  Antisense strand to SEQ ID NO: 638758
ugucugauaacaugugucc

SEQ ID NO: 638760 - RNA, 19 nt, Artificial Sequence
  Description of Artificial Sequence: Synthetic oligonucleotide
  Sense strand starting at position 155 of SEQ ID NO: 585424
uugggagaauggucuuauc

SEQ ID NO: 638761 - RNA, 19 nt, Artificial Sequence
  Description of Artificial Sequence: Synthetic oligonucleotide
  Antisense strand to SEQ ID NO: 638760
gauaagaccauucucccaa

SEQ ID NO: 638762 - RNA, 19 nt, Artificial Sequence
  Description of Artificial Sequence: Synthetic oligonucleotide
  Sense strand starting at position 200 of SEQ ID NO: 585424
gagaucucucacugaguuc

SEQ ID NO: 638763 - RNA, 19 nt, Artificial Sequence
  Description of Artificial Sequence: Synthetic oligonucleotide
  Antisense strand to SEQ ID NO: 638762
gaacucagugagagaucuc

SEQ ID NO: 638764 - RNA, 19 nt, Artificial Sequence
  Description of Artificial Sequence: Synthetic oligonucleotide
  Sense strand starting at position 274 of SEQ ID NO: 585424
cauugaccucuacggcaua

SEQ ID NO: 638765 - RNA, 19 nt, Artificial Sequence
  Description of Artificial Sequence: Synthetic oligonucleotide
  Antisense strand to SEQ ID NO: 638764
uaugccguagaggucaaug

SEQ ID NO: 638766 - RNA, 19 nt, Artificial Sequence
  Description of Artificial Sequence: Synthetic oligonucleotide
  Sense strand starting at position 355 of SEQ ID NO: 585424
acauaauuggccuaugguc

SEQ ID NO: 638767 - RNA, 19 nt, Artificial Sequence
  Description of Artificial Sequence: Synthetic oligonucleotide
  Antisense strand to SEQ ID NO: 638766
gaccauaggccaauuaugu

SEQ ID NO: 638768 - RNA, 19 nt, Artificial Sequence
  Description of Artificial Sequence: Synthetic oligonucleotide
  Sense strand starting at position 407 of SEQ ID NO: 585424
cucucacugcuuugggaaa

SEQ ID NO: 638769 - RNA, 19 nt, Artificial Sequence
  Description of Artificial Sequence: Synthetic oligonucleotide
  Antisense strand to SEQ ID NO: 638768
uuucccaaagcagugagag

SEQ ID NO: 638770 - RNA, 19 nt, Artificial Sequence
  Description of Artificial Sequence: Synthetic oligonucleotide
  Sense strand starting at position 418 of SEQ ID NO: 585424
uugggaaauuaugcuaugu

SEQ ID NO: 638771 - RNA, 19 nt, Artificial Sequence
  Description of Artificial Sequence: Synthetic oligonucleotide
  Antisense strand to SEQ ID NO: 638770
acauagcauaauuucccaa

SEQ ID NO: 638772 - RNA, 19 nt, Artificial Sequence
  Description of Artificial Sequence: Synthetic oligonucleotide
  Sense strand starting at position 422 of SEQ ID NO: 585424
gaaauuaugcuauguggac

SEQ ID NO: 638773 - RNA, 19 nt, Artificial Sequence
  Description of Artificial Sequence: Synthetic oligonucleotide
  Antisense strand to SEQ ID NO: 638772
guccacauagcauaauuuc

SEQ ID NO: 638774 - RNA, 19 nt, Artificial Sequence
  Description of Artificial Sequence: Synthetic oligonucleotide
  Sense strand starting at position 423 of SEQ ID NO: 585424
aaauuaugcuauguggaca

SEQ ID NO: 638775 - RNA, 19 nt, Artificial Sequence
  Description of Artificial Sequence: Synthetic oligonucleotide
  Antisense strand to SEQ ID NO: 638774
uguccacauagcauaauuu

SEQ ID NO: 638776 - RNA, 19 nt, Artificial Sequence
  Description of Artificial Sequence: Synthetic oligonucleotide
  Sense strand starting at position 436 of SEQ ID NO: 585424
uggacagcaugaucaguaa

SEQ ID NO: 638777 - RNA, 19 nt, Artificial Sequence
  Description of Artificial Sequence: Synthetic oligonucleotide
  Antisense strand to SEQ ID NO: 638776
uuacugaucaugcugucca

SEQ ID NO: 638778 - RNA, 19 nt, Artificial Sequence
  Description of Artificial Sequence: Synthetic oligonucleotide
  Sense strand starting at position 519 of SEQ ID NO: 585424
gggaucaccagagguaagu

SEQ ID NO: 638779 - RNA, 19 nt, Artificial Sequence
  Description of Artificial Sequence: Synthetic oligonucleotide
  Antisense strand to SEQ ID NO: 638778
acuuaccucuggugauccc

SEQ ID NO: 638780 - RNA, 19 nt, Artificial Sequence
  Description of Artificial Sequence: Synthetic oligonucleotide
  Sense strand starting at position 529 of SEQ ID NO: 585424
gagguaagucauuauugcu

SEQ ID NO: 638781 - RNA, 19 nt, Artificial Sequence
  Description of Artificial Sequence: Synthetic oligonucleotide
  Antisense strand to SEQ ID NO: 638780
agcaauaaugacuuaccuc

SEQ ID NO: 638782 - RNA, 19 nt, Artificial Sequence
  Description of Artificial Sequence: Synthetic oligonucleotide
  Sense strand starting at position 581 of SEQ ID NO: 585424
agagaagaguugcuuaauu

SEQ ID NO: 638783 - RNA, 19 nt, Artificial Sequence
  Description of Artificial Sequence: Synthetic oligonucleotide
  Antisense strand to SEQ ID NO: 638782
aauuaagcaacucuucucu

SEQ ID NO: 638784 - RNA, 19 nt, Artificial Sequence
  Description of Artificial Sequence: Synthetic oligonucleotide
  Sense strand starting at position 1093 of SEQ ID NO: 585424
uuaauuucuugaccgugua

SEQ ID NO: 638785 - RNA, 19 nt, Artificial Sequence
  Description of Artificial Sequence: Synthetic oligonucleotide
  Antisense strand to SEQ ID NO: 638784
uacacggucaagaaauuaa

SEQ ID NO: 638786 - RNA, 19 nt, Artificial Sequence
  Description of Artificial Sequence: Synthetic oligonucleotide
  Sense strand starting at position 1094 of SEQ ID NO: 585424
uaauuucuugaccguguau

SEQ ID NO: 638787 - RNA, 19 nt, Artificial Sequence
  Description of Artificial Sequence: Synthetic oligonucleotide
  Antisense strand to SEQ ID NO: 638786
auacacggucaagaaauua

SEQ ID NO: 638788 - RNA, 19 nt, Artificial Sequence
  Description of Artificial Sequence: Synthetic oligonucleotide
  Sense strand starting at position 1096 of SEQ ID NO: 585424
auuucuugaccguguauga

SEQ ID NO: 638789 - RNA, 19 nt, Artificial Sequence
  Description of Artificial Sequence: Synthetic oligonucleotide
  Antisense strand to SEQ ID NO: 638788
ucauacacggucaagaaau

SEQ ID NO: 638790 - RNA, 19 nt, Artificial Sequence
  Description of Artificial Sequence: Synthetic oligonucleotide
  Sense strand starting at position 1158 of SEQ ID NO: 585424
aguggucugagucaugaga

SEQ ID NO: 638791 - RNA, 19 nt, Artificial Sequence
  Description of Artificial Sequence: Synthetic oligonucleotide
  Antisense strand to SEQ ID NO: 638790
ucucaugacucagaccacu

SEQ ID NO: 638792 - RNA, 19 nt, Artificial Sequence
  Description of Artificial Sequence: Synthetic oligonucleotide
  Sense strand starting at position 1178 of SEQ ID NO: 585424
agccaugcggcugugaauu

SEQ ID NO: 638793 - RNA, 19 nt, Artificial Sequence
  Description of Artificial Sequence: Synthetic oligonucleotide
  Antisense strand to SEQ ID NO: 638792
aauucacagccgcauggcu

SEQ ID NO: 638794 - RNA, 19 nt, Artificial Sequence
  Description of Artificial Sequence: Synthetic oligonucleotide
  Sense strand starting at position 1284 of SEQ ID NO: 585424
gaauguauguacucuguag

SEQ ID NO: 638795 - RNA, 19 nt, Artificial Sequence
  Description of Artificial Sequence: Synthetic oligonucleotide
  Antisense strand to SEQ ID NO: 638794
cuacagaguacauacauuc

SEQ ID NO: 638796 - RNA, 19 nt, Artificial Sequence
  Description of Artificial Sequence: Synthetic oligonucleotide
  Sense strand starting at position 1286 of SEQ ID NO: 585424
auguauguacucuguagag

SEQ ID NO: 638797 - RNA, 19 nt, Artificial Sequence
  Description of Artificial Sequence: Synthetic oligonucleotide
  Antisense strand to SEQ ID NO: 638796
cucuacagaguacauacau

SEQ ID NO: 638798 - RNA, 19 nt, Artificial Sequence
  Description of Artificial Sequence: Synthetic oligonucleotide
  Sense strand starting at position 1288 of SEQ ID NO: 585424
guauguacucuguagagug

SEQ ID NO: 638799 - RNA, 19 nt, Artificial Sequence
  Description of Artificial Sequence: Synthetic oligonucleotide
  Antisense strand to SEQ ID NO: 638798
cacucuacagaguacauac

SEQ ID NO: 638800 - RNA, 19 nt, Artificial Sequence
  Description of Artificial Sequence: Synthetic oligonucleotide
  Sense strand starting at position 1312 of SEQ ID NO: 585424
gcacuaaagagcuggagau

SEQ ID NO: 638801 - RNA, 19 nt, Artificial Sequence
  Description of Artificial Sequence: Synthetic oligonucleotide
  Antisense strand to SEQ ID NO: 638800
aucuccagcucuuuagugc

SEQ ID NO: 638802 - RNA, 19 nt, Artificial Sequence
  Description of Artificial Sequence: Synthetic oligonucleotide
  Sense strand starting at position 1313 of SEQ ID NO: 585424
cacuaaagagcuggagauu

SEQ ID NO: 638803 - RNA, 19 nt, Artificial Sequence
  Description of Artificial Sequence: Synthetic oligonucleotide
  Antisense strand to SEQ ID NO: 638802
aaucuccagcucuuuagug

SEQ ID NO: 638804 - RNA, 19 nt, Artificial Sequence
  Description of Artificial Sequence: Synthetic oligonucleotide
  Sense strand starting at position 1496 of SEQ ID NO: 585424
ucaguucuucccgauuggu

SEQ ID NO: 638805 - RNA, 19 nt, Artificial Sequence
  Description of Artificial Sequence: Synthetic oligonucleotide
  Antisense strand to SEQ ID NO: 638804
accaaucgggaagaacuga

SEQ ID NO: 638806 - RNA, 19 nt, Artificial Sequence
  Description of Artificial Sequence: Synthetic oligonucleotide
  Sense strand starting at position 1619 of SEQ ID NO: 585424
cggugccuccgguuauuaa

SEQ ID NO: 638807 - RNA, 19 nt, Artificial Sequence
  Description of Artificial Sequence: Synthetic oligonucleotide
  Antisense strand to SEQ ID NO: 638806
uuaauaaccggaggcaccg

SEQ ID NO: 638808 - RNA, 19 nt, Artificial Sequence
  Description of Artificial Sequence: Synthetic oligonucleotide
  Sense strand starting at position 1620 of SEQ ID NO: 585424
ggugccuccgguuauuaaa

SEQ ID NO: 638809 - RNA, 19 nt, Artificial Sequence
  Description of Artificial Sequence: Synthetic oligonucleotide
  Antisense strand to SEQ ID NO: 638808
uuuaauaaccggaggcacc

SEQ ID NO: 638810 - RNA, 19 nt, Artificial Sequence
  Description of Artificial Sequence: Synthetic oligonucleotide
  Sense strand starting at position 1665 of SEQ ID NO: 585424
guaauaaagcagugacuac

SEQ ID NO: 638811 - RNA, 19 nt, Artificial Sequence
  Description of Artificial Sequence: Synthetic oligonucleotide
  Antisense strand to SEQ ID NO: 638810
guagucacugcuuuauuac

SEQ ID NO: 638812 - RNA, 19 nt, Artificial Sequence
  Description of Artificial Sequence: Synthetic oligonucleotide
  Sense strand starting at position 1674 of SEQ ID NO: 585424
cagugacuacuauguaaag

SEQ ID NO: 638813 - RNA, 19 nt, Artificial Sequence
  Description of Artificial Sequence: Synthetic oligonucleotide
  Antisense strand to SEQ ID NO: 638812
cuuuacauaguagucacug

SEQ ID NO: 638814 - RNA, 19 nt, Artificial Sequence
  Description of Artificial Sequence: Synthetic oligonucleotide
  Sense strand starting at position 1676 of SEQ ID NO: 585424
gugacuacuauguaaaggu

SEQ ID NO: 638815 - RNA, 19 nt, Artificial Sequence
  Description of Artificial Sequence: Synthetic oligonucleotide
  Antisense strand to SEQ ID NO: 638814
accuuuacauaguagucac

SEQ ID NO: 638816 - RNA, 19 nt, Artificial Sequence
  Description of Artificial Sequence: Synthetic oligonucleotide
  Sense strand starting at position 1718 of SEQ ID NO: 585424
agccguaauuuggcuaauc

SEQ ID NO: 638817 - RNA, 19 nt, Artificial Sequence
  Description of Artificial Sequence: Synthetic oligonucleotide
  Antisense strand to SEQ ID NO: 638816
gauuagccaaauuacggcu

SEQ ID NO: 638818 - RNA, 19 nt, Artificial Sequence
  Description of Artificial Sequence: Synthetic oligonucleotide
  Sense strand starting at position 1719 of SEQ ID NO: 585424
gccguaauuuggcuaauca

SEQ ID NO: 638819 - RNA, 19 nt, Artificial Sequence
  Description of Artificial Sequence: Synthetic oligonucleotide
  Antisense strand to SEQ ID NO: 638818
ugauuagccaaauuacggc

SEQ ID NO: 638820 - RNA, 19 nt, Artificial Sequence
  Description of Artificial Sequence: Synthetic oligonucleotide
  Sense strand starting at position 2152 of SEQ ID NO: 585424
ggcgacgugucauuuaagu

SEQ ID NO: 638821 - RNA, 19 nt, Artificial Sequence
  Description of Artificial Sequence: Synthetic oligonucleotide
  Antisense strand to SEQ ID NO: 638820
acuuaaaugacacgucgcc

SEQ ID NO: 638822 - RNA, 19 nt, Artificial Sequence
  Description of Artificial Sequence: Synthetic oligonucleotide
  Sense strand starting at position 2154 of SEQ ID NO: 585424
cgacgugucauuuaaguga

SEQ ID NO: 638823 - RNA, 19 nt, Artificial Sequence
  Description of Artificial Sequence: Synthetic oligonucleotide
  Antisense strand to SEQ ID NO: 638822
ucacuuaaaugacacgucg

SEQ ID NO: 638824 - RNA, 19 nt, Artificial Sequence
  Description of Artificial Sequence: Synthetic oligonucleotide
  Sense strand starting at position 2157 of SEQ ID NO: 585424
cgugucauuuaagugaauu

SEQ ID NO: 638825 - RNA, 19 nt, Artificial Sequence
  Description of Artificial Sequence: Synthetic oligonucleotide
  Antisense strand to SEQ ID NO: 638824
aauucacuuaaaugacacg

SEQ ID NO: 638826 - RNA, 19 nt, Artificial Sequence
  Description of Artificial Sequence: Synthetic oligonucleotide
  Sense strand starting at position 2565 of SEQ ID NO: 585424
aggugagcaccugagaagu

SEQ ID NO: 638827 - RNA, 19 nt, Artificial Sequence
  Description of Artificial Sequence: Synthetic oligonucleotide
  Antisense strand to SEQ ID NO: 638826
acuucucaggugcucaccu

SEQ ID NO: 638828 - RNA, 19 nt, Artificial Sequence
  Description of Artificial Sequence: Synthetic oligonucleotide
  Sense strand starting at position 2941 of SEQ ID NO: 585424
acuuguuccacagggagaa

SEQ ID NO: 638829 - RNA, 19 nt, Artificial Sequence
  Description of Artificial Sequence: Synthetic oligonucleotide
  Antisense strand to SEQ ID NO: 638828
uucucccuguggaacaagu

SEQ ID NO: 638830 - RNA, 19 nt, Artificial Sequence
  Description of Artificial Sequence: Synthetic oligonucleotide
  Sense strand starting at position 3002 of SEQ ID NO: 585424
acacacaguacucgggaaa

SEQ ID NO: 638831 - RNA, 19 nt, Artificial Sequence
  Description of Artificial Sequence: Synthetic oligonucleotide
  Antisense strand to SEQ ID NO: 638830
uuucccgaguacugugugu

SEQ ID NO: 638832 - RNA, 19 nt, Artificial Sequence
  Description of Artificial Sequence: Synthetic oligonucleotide
  Sense strand starting at position 3075 of SEQ ID NO: 585424
cuaagccagugguuaucaa

SEQ ID NO: 638833 - RNA, 19 nt, Artificial Sequence
  Description of Artificial Sequence: Synthetic oligonucleotide
  Antisense strand to SEQ ID NO: 638832
uugauaaccacuggcuuag

SEQ ID NO: 638834 - RNA, 19 nt, Artificial Sequence
  Description of Artificial Sequence: Synthetic oligonucleotide
  Sense strand starting at position 3253 of SEQ ID NO: 585424
ggguucucaagcgauucuu

SEQ ID NO: 638835 - RNA, 19 nt, Artificial Sequence
  Description of Artificial Sequence: Synthetic oligonucleotide
  Antisense strand to SEQ ID NO: 638834
aagaaucgcuugagaaccc

SEQ ID NO: 638836 - RNA, 19 nt, Artificial Sequence
  Description of Artificial Sequence: Synthetic oligonucleotide
  Sense strand starting at position 3980 of SEQ ID NO: 585424
cgagucuguccgcuucauu

SEQ ID NO: 638837 - RNA, 19 nt, Artificial Sequence
  Description of Artificial Sequence: Synthetic oligonucleotide
  Antisense strand to SEQ ID NO: 638836
aaugaagcggacagacucg

SEQ ID NO: 638838 - RNA, 19 nt, Artificial Sequence
  Description of Artificial Sequence: Synthetic oligonucleotide
  Sense strand starting at position 446 of SEQ ID NO: 585425
acaacaggaugcuauuaaa

SEQ ID NO: 638839 - RNA, 19 nt, Artificial Sequence
  Description of Artificial Sequence: Synthetic oligonucleotide
  Antisense strand to SEQ ID NO: 638838
uuuaauagcauccuguugu

SEQ ID NO: 638840 - RNA, 19 nt, Artificial Sequence
  Description of Artificial Sequence: Synthetic oligonucleotide
  Sense strand starting at position 449 of SEQ ID NO: 585425
acaggaugcuauuaaagaa

SEQ ID NO: 638841 - RNA, 19 nt, Artificial Sequence
  Description of Artificial Sequence: Synthetic oligonucleotide
  Antisense strand to SEQ ID NO: 638840
uucuuuaauagcauccugu

SEQ ID NO: 638842 - RNA, 19 nt, Artificial Sequence
  Description of Artificial Sequence: Synthetic oligonucleotide
  Sense strand starting at position 1094 of SEQ ID NO: 585425
ucucucaggcuuugaagau

SEQ ID NO: 638843 - RNA, 19 nt, Artificial Sequence
  Description of Artificial Sequence: Synthetic oligonucleotide
  Antisense strand to SEQ ID NO: 638842
aucuucaaagccugagaga

SEQ ID NO: 638844 - RNA, 19 nt, Artificial Sequence
  Description of Artificial Sequence: Synthetic oligonucleotide
  Sense strand starting at position 1453 of SEQ ID NO: 585425
cuccaaaucugguagauga

SEQ ID NO: 638845 - RNA, 19 nt, Artificial Sequence
  Description of Artificial Sequence: Synthetic oligonucleotide
  Antisense strand to SEQ ID NO: 638844
ucaucuaccagauuuggag

SEQ ID NO: 638846 - RNA, 19 nt, Artificial Sequence
  Description of Artificial Sequence: Synthetic oligonucleotide
  Sense strand starting at position 1508 of SEQ ID NO: 585425
gccagucagucuucucauu

SEQ ID NO: 638847 - RNA, 19 nt, Artificial Sequence
  Description of Artificial Sequence: Synthetic oligonucleotide
  Antisense strand to SEQ ID NO: 638846
aaugagaagacugacuggc

SEQ ID NO: 638848 - RNA, 19 nt, Artificial Sequence
  Description of Artificial Sequence: Synthetic oligonucleotide
  Sense strand starting at position 1619 of SEQ ID NO: 585425
agagauuccugaucccugu

SEQ ID NO: 638849 - RNA, 19 nt, Artificial Sequence
  Description of Artificial Sequence: Synthetic oligonucleotide
  Antisense strand to SEQ ID NO: 638848
acagggaucaggaaucucu

SEQ ID NO: 638850 - RNA, 19 nt, Artificial Sequence
  Description of Artificial Sequence: Synthetic oligonucleotide
  Sense strand starting at position 1650 of SEQ ID NO: 585425
uuuaaucgacugcaagaua

SEQ ID NO: 638851 - RNA, 19 nt, Artificial Sequence
  Description of Artificial Sequence: Synthetic oligonucleotide
  Antisense strand to SEQ ID NO: 638850
uaucuugcagucgauuaaa

SEQ ID NO: 638852 - RNA, 19 nt, Artificial Sequence
  Description of Artificial Sequence: Synthetic oligonucleotide
  Sense strand starting at position 1984 of SEQ ID NO: 585425
acuccuugcgguuagaaua

SEQ ID NO: 638853 - RNA, 19 nt, Artificial Sequence
  Description of Artificial Sequence: Synthetic oligonucleotide
  Antisense strand to SEQ ID NO: 638852
uauucuaaccgcaaggagu

SEQ ID NO: 638854 - RNA, 19 nt, Artificial Sequence
  Description of Artificial Sequence: Synthetic oligonucleotide
  Sense strand starting at position 2121 of SEQ ID NO: 585425
cugcguuccuccuuuaaca

SEQ ID NO: 638855 - RNA, 19 nt, Artificial Sequence
  Description of Artificial Sequence: Synthetic oligonucleotide
  Antisense strand to SEQ ID NO: 638854
uguuaaaggaggaacgcag

SEQ ID NO: 638856 - RNA, 19 nt, Artificial Sequence
  Description of Artificial Sequence: Synthetic oligonucleotide
  Sense strand starting at position 2195 of SEQ ID NO: 585425
cacugagcgcugcuuucua

SEQ ID NO: 638857 - RNA, 19 nt, Artificial Sequence
  Description of Artificial Sequence: Synthetic oligonucleotide
  Antisense strand to SEQ ID NO: 638856
uagaaagcagcgcucagug

SEQ ID NO: 638858 - RNA, 19 nt, Artificial Sequence
  Description of Artificial Sequence: Synthetic oligonucleotide
  Sense strand starting at position 2344 of SEQ ID NO: 585425
ggguucacugccuguagau

SEQ ID NO: 638859 - RNA, 19 nt, Artificial Sequence
  Description of Artificial Sequence: Synthetic oligonucleotide
  Antisense strand to SEQ ID NO: 638858
aucuacaggcagugaaccc

SEQ ID NO: 638860 - RNA, 19 nt, Artificial Sequence
  Description of Artificial Sequence: Synthetic oligonucleotide
  Sense strand starting at position 2363 of SEQ ID NO: 585425
acaauacaaugugaugaau

SEQ ID NO: 638861 - RNA, 19 nt, Artificial Sequence
  Description of Artificial Sequence: Synthetic oligonucleotide
  Antisense strand to SEQ ID NO: 638860
auucaucacauuguauugu

SEQ ID NO: 638862 - RNA, 19 nt, Artificial Sequence
  Description of Artificial Sequence: Synthetic oligonucleotide
  Sense strand starting at position 2372 of SEQ ID NO: 585425
ugugaugaauuauacagaa

SEQ ID NO: 638863 - RNA, 19 nt, Artificial Sequence
  Description of Artificial Sequence: Synthetic oligonucleotide
  Antisense strand to SEQ ID NO: 638862
uucuguauaauucaucaca

SEQ ID NO: 638864 - RNA, 19 nt, Artificial Sequence
  Description of Artificial Sequence: Synthetic oligonucleotide
  Sense strand starting at position 2468 of SEQ ID NO: 585425
agaagaaaugugugaagcu

SEQ ID NO: 638865 - RNA, 19 nt, Artificial Sequence
  Description of Artificial Sequence: Synthetic oligonucleotide
  Antisense strand to SEQ ID NO: 638864
agcuucacacauuucuucu

SEQ ID NO: 638866 - RNA, 19 nt, Artificial Sequence
  Description of Artificial Sequence: Synthetic oligonucleotide
  Sense strand starting at position 2481 of SEQ ID NO: 585425
gaagcugugaccuguagga

SEQ ID NO: 638867 - RNA, 19 nt, Artificial Sequence
  Description of Artificial Sequence: Synthetic oligonucleotide
  Antisense strand to SEQ ID NO: 638866
uccuacaggucacagcuuc

SEQ ID NO: 638868 - RNA, 19 nt, Artificial Sequence
  Description of Artificial Sequence: Synthetic oligonucleotide
  Sense strand starting at position 2483 of SEQ ID NO: 585425
agcugugaccuguaggaua

SEQ ID NO: 638869 - RNA, 19 nt, Artificial Sequence
  Description of Artificial Sequence: Synthetic oligonucleotide
  Antisense strand to SEQ ID NO: 638868
uauccuacaggucacagcu

SEQ ID NO: 638870 - RNA, 19 nt, Artificial Sequence
  Description of Artificial Sequence: Synthetic oligonucleotide
  Sense strand starting at position 2552 of SEQ ID NO: 585425
agagcauacucuguacaag

SEQ ID NO: 638871 - RNA, 19 nt, Artificial Sequence
  Description of Artificial Sequence: Synthetic oligonucleotide
  Antisense strand to SEQ ID NO: 638870
cuuguacagaguaugcucu

SEQ ID NO: 638872 - RNA, 19 nt, Artificial Sequence
  Description of Artificial Sequence: Synthetic oligonucleotide
  Sense strand starting at position 2555 of SEQ ID NO: 585425
gcauacucuguacaaggaa

SEQ ID NO: 638873 - RNA, 19 nt, Artificial Sequence
  Description of Artificial Sequence: Synthetic oligonucleotide
  Antisense strand to SEQ ID NO: 638872
uuccuuguacagaguaugc

SEQ ID NO: 638874 - RNA, 19 nt, Artificial Sequence
  Description of Artificial Sequence: Synthetic oligonucleotide
  Sense strand starting at position 2596 of SEQ ID NO: 585425
gaguuaaggcuguagugaa

SEQ ID NO: 638875 - RNA, 19 nt, Artificial Sequence
  Description of Artificial Sequence: Synthetic oligonucleotide
  Antisense strand to SEQ ID NO: 638874
uucacuacagccuuaacuc

SEQ ID NO: 638876 - RNA, 19 nt, Artificial Sequence
  Description of Artificial Sequence: Synthetic oligonucleotide
  Sense strand starting at position 2640 of SEQ ID NO: 585425
ccguauaagccacgugaga

SEQ ID NO: 638877 - RNA, 19 nt, Artificial Sequence
  Description of Artificial Sequence: Synthetic oligonucleotide
  Antisense strand to SEQ ID NO: 638876
ucucacguggcuuauacgg

SEQ ID NO: 638878 - RNA, 19 nt, Artificial Sequence
  Description of Artificial Sequence: Synthetic oligonucleotide
  Sense strand starting at position 2642 of SEQ ID NO: 585425
guauaagccacgugagagu

SEQ ID NO: 638879 - RNA, 19 nt, Artificial Sequence
  Description of Artificial Sequence: Synthetic oligonucleotide
  Antisense strand to SEQ ID NO: 638878
acucucacguggcuuauac

SEQ ID NO: 638880 - RNA, 19 nt, Artificial Sequence
  Description of Artificial Sequence: Synthetic oligonucleotide
  Sense strand starting at position 2656 of SEQ ID NO: 585425
agaguuuggacuugauccu

SEQ ID NO: 638881 - RNA, 19 nt, Artificial Sequence
  Description of Artificial Sequence: Synthetic oligonucleotide
  Antisense strand to SEQ ID NO: 638880
aggaucaaguccaaacucu

SEQ ID NO: 638882 - RNA, 19 nt, Artificial Sequence
  Description of Artificial Sequence: Synthetic oligonucleotide
  Sense strand starting at position 2698 of SEQ ID NO: 585425
aagguuuaaguaggagagu

SEQ ID NO: 638883 - RNA, 19 nt, Artificial Sequence
  Description of Artificial Sequence: Synthetic oligonucleotide
  Antisense strand to SEQ ID NO: 638882
acucuccuacuuaaaccuu

SEQ ID NO: 638884 - RNA, 19 nt, Artificial Sequence
  Description of Artificial Sequence: Synthetic oligonucleotide
  Sense strand starting at position 2824 of SEQ ID NO: 585425
agugcaauuacccgaguac

SEQ ID NO: 638885 - RNA, 19 nt, Artificial Sequence
  Description of Artificial Sequence: Synthetic oligonucleotide
  Antisense strand to SEQ ID NO: 638884
guacucggguaauugcacu

SEQ ID NO: 638886 - RNA, 19 nt, Artificial Sequence
  Description of Artificial Sequence: Synthetic oligonucleotide
  Sense strand starting at position 2825 of SEQ ID NO: 585425
gugcaauuacccgaguacu

SEQ ID NO: 638887 - RNA, 19 nt, Artificial Sequence
  Description of Artificial Sequence: Synthetic oligonucleotide
  Antisense strand to SEQ ID NO: 638886
aguacucggguaauugcac

SEQ ID NO: 638888 - RNA, 19 nt, Artificial Sequence
  Description of Artificial Sequence: Synthetic oligonucleotide
  Sense strand starting at position 2828 of SEQ ID NO: 585425
caauuacccgaguacuuga

SEQ ID NO: 638889 - RNA, 19 nt, Artificial Sequence
  Description of Artificial Sequence: Synthetic oligonucleotide
  Antisense strand to SEQ ID NO: 638888
ucaaguacucggguaauug

SEQ ID NO: 638890 - RNA, 19 nt, Artificial Sequence
  Description of Artificial Sequence: Synthetic oligonucleotide
  Sense strand starting at position 2836 of SEQ ID NO: 585425
cgaguacuugaugaaagca

SEQ ID NO: 638891 - RNA, 19 nt, Artificial Sequence
  Description of Artificial Sequence: Synthetic oligonucleotide
  Antisense strand to SEQ ID NO: 638890
ugcuuucaucaaguacucg

SEQ ID NO: 638892 - RNA, 19 nt, Artificial Sequence
  Description of Artificial Sequence: Synthetic oligonucleotide
  Sense strand starting at position 2880 of SEQ ID NO: 585425
gguggagauaauuggguaa

SEQ ID NO: 638893 - RNA, 19 nt, Artificial Sequence
  Description of Artificial Sequence: Synthetic oligonucleotide
  Antisense strand to SEQ ID NO: 638892
uuacccaauuaucuccacc

SEQ ID NO: 638894 - RNA, 19 nt, Artificial Sequence
  Description of Artificial Sequence: Synthetic oligonucleotide
  Sense strand starting at position 2882 of SEQ ID NO: 585425
uggagauaauuggguaaac

SEQ ID NO: 638895 - RNA, 19 nt, Artificial Sequence
  Description of Artificial Sequence: Synthetic oligonucleotide
  Antisense strand to SEQ ID NO: 638894
guuuacccaauuaucucca

SEQ ID NO: 638896 - RNA, 19 nt, Artificial Sequence
  Description of Artificial Sequence: Synthetic oligonucleotide
  Sense strand starting at position 3288 of SEQ ID NO: 585425
gaaagagacugacaagaaa

SEQ ID NO: 638897 - RNA, 19 nt, Artificial Sequence
  Description of Artificial Sequence: Synthetic oligonucleotide
  Antisense strand to SEQ ID NO: 638896
uuucuugucagucucuuuc

SEQ ID NO: 638898 - RNA, 19 nt, Artificial Sequence
  Description of Artificial Sequence: Synthetic oligonucleotide
  Sense strand starting at position 3325 of SEQ ID NO: 585425
ucagcaauuguaugggaaa

SEQ ID NO: 638899 - RNA, 19 nt, Artificial Sequence
  Description of Artificial Sequence: Synthetic oligonucleotide
  Antisense strand to SEQ ID NO: 638898
uuucccauacaauugcuga

SEQ ID NO: 638900 - RNA, 19 nt, Artificial Sequence
  Description of Artificial Sequence: Synthetic oligonucleotide
  Sense strand starting at position 3327 of SEQ ID NO: 585425
agcaauuguaugggaaauu

SEQ ID NO: 638901 - RNA, 19 nt, Artificial Sequence
  Description of Artificial Sequence: Synthetic oligonucleotide
  Antisense strand to SEQ ID NO: 638900
aauuucccauacaauugcu

SEQ ID NO: 638902 - RNA, 19 nt, Artificial Sequence
  Description of Artificial Sequence: Synthetic oligonucleotide
  Sense strand starting at position 3526 of SEQ ID NO: 585425
ccaggaguucgacacuuac

SEQ ID NO: 638903 - RNA, 19 nt, Artificial Sequence
  Description of Artificial Sequence: Synthetic oligonucleotide
  Antisense strand to SEQ ID NO: 638902
guaagugucgaacuccugg

SEQ ID NO: 638904 - RNA, 19 nt, Artificial Sequence
  Description of Artificial Sequence: Synthetic oligonucleotide
  Sense strand starting at position 3535 of SEQ ID NO: 585425
cgacacuuacagugagcua

SEQ ID NO: 638905 - RNA, 19 nt, Artificial Sequence
  Description of Artificial Sequence: Synthetic oligonucleotide
  Antisense strand to SEQ ID NO: 638904
uagcucacuguaagugucg

SEQ ID NO: 638906 - RNA, 19 nt, Artificial Sequence
  Description of Artificial Sequence: Synthetic oligonucleotide
  Sense strand starting at position 3664 of SEQ ID NO: 585425
gaaauaagaccagguuugu

SEQ ID NO: 638907 - RNA, 19 nt, Artificial Sequence
  Description of Artificial Sequence: Synthetic oligonucleotide
  Antisense strand to SEQ ID NO: 638906
acaaaccuggucuuauuuc

SEQ ID NO: 638908 - RNA, 19 nt, Artificial Sequence
  Description of Artificial Sequence: Synthetic oligonucleotide
  Sense strand starting at position 3794 of SEQ ID NO: 585425
guauguauuuaagagccau

SEQ ID NO: 638909 - RNA, 19 nt, Artificial Sequence
  Description of Artificial Sequence: Synthetic oligonucleotide
  Antisense strand to SEQ ID NO: 638908
auggcucuuaaauacauac

SEQ ID NO: 638910 - RNA, 19 nt, Artificial Sequence
  Description of Artificial Sequence: Synthetic oligonucleotide
  Sense strand starting at position 3804 of SEQ ID NO: 585425
aagagccaucagcauguua

SEQ ID NO: 638911 - RNA, 19 nt, Artificial Sequence
  Description of Artificial Sequence: Synthetic oligonucleotide
  Antisense strand to SEQ ID NO: 638910
uaacaugcugauggcucuu

SEQ ID NO: 638912 - RNA, 19 nt, Artificial Sequence
  Description of Artificial Sequence: Synthetic oligonucleotide
  Sense strand starting at position 3811 of SEQ ID NO: 585425
aucagcauguuagugaaua

SEQ ID NO: 638913 - RNA, 19 nt, Artificial Sequence
  Description of Artificial Sequence: Synthetic oligonucleotide
  Antisense strand to SEQ ID NO: 638912
uauucacuaacaugcugau

SEQ ID NO: 638914 - RNA, 19 nt, Artificial Sequence
  Description of Artificial Sequence: Synthetic oligonucleotide
  Sense strand starting at position 3848 of SEQ ID NO: 585425
guagaaugagaaugggcua

SEQ ID NO: 638915 - RNA, 19 nt, Artificial Sequence
  Description of Artificial Sequence: Synthetic oligonucleotide
  Antisense strand to SEQ ID NO: 638914
uagcccauucucauucuac

SEQ ID NO: 638916 - RNA, 19 nt, Artificial Sequence
  Description of Artificial Sequence: Synthetic oligonucleotide
  Sense strand starting at position 3855 of SEQ ID NO: 585425
gagaaugggcuaggauauu

SEQ ID NO: 638917 - RNA, 19 nt, Artificial Sequence
  Description of Artificial Sequence: Synthetic oligonucleotide
  Antisense strand to SEQ ID NO: 638916
aauauccuagcccauucuc

SEQ ID NO: 638918 - RNA, 19 nt, Artificial Sequence
  Description of Artificial Sequence: Synthetic oligonucleotide
  Sense strand starting at position 5 of SEQ ID NO: 585426
agucuauguuccuuaaaca

SEQ ID NO: 638919 - RNA, 19 nt, Artificial Sequence
  Description of Artificial Sequence: Synthetic oligonucleotide
  Antisense strand to SEQ ID NO: 638918
uguuuaaggaacauagacu

SEQ ID NO: 638920 - RNA, 19 nt, Artificial Sequence
  Description of Artificial Sequence: Synthetic oligonucleotide
  Sense strand starting at position 6 of SEQ ID NO: 585426
gucuauguuccuuaaacac

SEQ ID NO: 638921 - RNA, 19 nt, Artificial Sequence
  Description of Artificial Sequence: Synthetic oligonucleotide
  Antisense strand to SEQ ID NO: 638920
guguuuaaggaacauagac

SEQ ID NO: 638922 - RNA, 19 nt, Artificial Sequence
  Description of Artificial Sequence: Synthetic oligonucleotide
  Sense strand starting at position 78 of SEQ ID NO: 585426
auauauucuucucuguuga

SEQ ID NO: 638923 - RNA, 19 nt, Artificial Sequence
  Description of Artificial Sequence: Synthetic oligonucleotide
  Antisense strand to SEQ ID NO: 638922
ucaacagagaagaauauau

SEQ ID NO: 638924 - RNA, 19 nt, Artificial Sequence
  Description of Artificial Sequence: Synthetic oligonucleotide
  Sense strand starting at position 139 of SEQ ID NO: 585426
guuucuuauguacaugaau

SEQ ID NO: 638925 - RNA, 19 nt, Artificial Sequence
  Description of Artificial Sequence: Synthetic oligonucleotide
  Antisense strand to SEQ ID NO: 638924
auucauguacauaagaaac

SEQ ID NO: 638926 - RNA, 19 nt, Artificial Sequence
  Description of Artificial Sequence: Synthetic oligonucleotide
  Sense strand starting at position 272 of SEQ ID NO: 585426
uugaccuuccuauggguua

SEQ ID NO: 638927 - RNA, 19 nt, Artificial Sequence
  Description of Artificial Sequence: Synthetic oligonucleotide
  Antisense strand to SEQ ID NO: 638926
uaacccauaggaaggucaa

SEQ ID NO: 638928 - RNA, 19 nt, Artificial Sequence
  Description of Artificial Sequence: Synthetic oligonucleotide
  Sense strand starting at position 545 of SEQ ID NO: 585426
agagauaaggcuuggaugu

SEQ ID NO: 638929 - RNA, 19 nt, Artificial Sequence
  Description of Artificial Sequence: Synthetic oligonucleotide
  Antisense strand to SEQ ID NO: 638928
acauccaagccuuaucucu

SEQ ID NO: 638930 - RNA, 19 nt, Artificial Sequence
  Description of Artificial Sequence: Synthetic oligonucleotide
  Sense strand starting at position 570 of SEQ ID NO: 585426
cguggcuuucuagaacaua

SEQ ID NO: 638931 - RNA, 19 nt, Artificial Sequence
  Description of Artificial Sequence: Synthetic oligonucleotide
  Antisense strand to SEQ ID NO: 638930
uauguucuagaaagccacg

SEQ ID NO: 638932 - RNA, 19 nt, Artificial Sequence
  Description of Artificial Sequence: Synthetic oligonucleotide
  Sense strand starting at position 573 of SEQ ID NO: 585426
ggcuuucuagaacauauua

SEQ ID NO: 638933 - RNA, 19 nt, Artificial Sequence
  Description of Artificial Sequence: Synthetic oligonucleotide
  Antisense strand to SEQ ID NO: 638932
uaauauguucuagaaagcc

SEQ ID NO: 638934 - RNA, 19 nt, Artificial Sequence
  Description of Artificial Sequence: Synthetic oligonucleotide
  Sense strand starting at position 843 of SEQ ID NO: 585426
cgacgaagagauuaaacgu

SEQ ID NO: 638935 - RNA, 19 nt, Artificial Sequence
  Description of Artificial Sequence: Synthetic oligonucleotide
  Antisense strand to SEQ ID NO: 638934
acguuuaaucucuucgucg

SEQ ID NO: 638936 - RNA, 19 nt, Artificial Sequence
  Description of Artificial Sequence: Synthetic oligonucleotide
  Sense strand starting at position 1050 of SEQ ID NO: 585426
uggcuucccucuuugagaa

SEQ ID NO: 638937 - RNA, 19 nt, Artificial Sequence
  Description of Artificial Sequence: Synthetic oligonucleotide
  Antisense strand to SEQ ID NO: 638936
uucucaaagagggaagcca

SEQ ID NO: 638938 - RNA, 19 nt, Artificial Sequence
  Description of Artificial Sequence: Synthetic oligonucleotide
  Sense strand starting at position 1063 of SEQ ID NO: 585426
ugagaauuccguuaucauu

SEQ ID NO: 638939 - RNA, 19 nt, Artificial Sequence
  Description of Artificial Sequence: Synthetic oligonucleotide
  Antisense strand to SEQ ID NO: 638938
aaugauaacggaauucuca

SEQ ID NO: 638940 - RNA, 19 nt, Artificial Sequence
  Description of Artificial Sequence: Synthetic oligonucleotide
  Sense strand starting at position 1065 of SEQ ID NO: 585426
agaauuccguuaucauuag

SEQ ID NO: 638941 - RNA, 19 nt, Artificial Sequence
  Description of Artificial Sequence: Synthetic oligonucleotide
  Antisense strand to SEQ ID NO: 638940
cuaaugauaacggaauucu

SEQ ID NO: 638942 - RNA, 19 nt, Artificial Sequence
  Description of Artificial Sequence: Synthetic oligonucleotide
  Sense strand starting at position 1069 of SEQ ID NO: 585426
uuccguuaucauuagaaca

SEQ ID NO: 638943 - RNA, 19 nt, Artificial Sequence
  Description of Artificial Sequence: Synthetic oligonucleotide
  Antisense strand to SEQ ID NO: 638942
uguucuaaugauaacggaa

SEQ ID NO: 638944 - RNA, 19 nt, Artificial Sequence
  Description of Artificial Sequence: Synthetic oligonucleotide
  Sense strand starting at position 1082 of SEQ ID NO: 585426
agaacaaaugucuguuucu

SEQ ID NO: 638945 - RNA, 19 nt, Artificial Sequence
  Description of Artificial Sequence: Synthetic oligonucleotide
  Antisense strand to SEQ ID NO: 638944
agaaacagacauuuguucu

SEQ ID NO: 638946 - RNA, 19 nt, Artificial Sequence
  Description of Artificial Sequence: Synthetic oligonucleotide
  Sense strand starting at position 1202 of SEQ ID NO: 585426
ucgaccugucccuaaauua

SEQ ID NO: 638947 - RNA, 19 nt, Artificial Sequence
  Description of Artificial Sequence: Synthetic oligonucleotide
  Antisense strand to SEQ ID NO: 638946
uaauuuagggacaggucga

SEQ ID NO: 638948 - RNA, 19 nt, Artificial Sequence
  Description of Artificial Sequence: Synthetic oligonucleotide
  Sense strand starting at position 1676 of SEQ ID NO: 585426
gcgggaaaguggucaagag

SEQ ID NO: 638949 - RNA, 19 nt, Artificial Sequence
  Description of Artificial Sequence: Synthetic oligonucleotide
  Antisense strand to SEQ ID NO: 638948
cucuugaccacuuucccgc

SEQ ID NO: 638950 - RNA, 19 nt, Artificial Sequence
  Description of Artificial Sequence: Synthetic oligonucleotide
  Sense strand starting at position 1686 of SEQ ID NO: 585426
ggucaagaggucugggaga

SEQ ID NO: 638951 - RNA, 19 nt, Artificial Sequence
  Description of Artificial Sequence: Synthetic oligonucleotide
  Antisense strand to SEQ ID NO: 638950
ucucccagaccucuugacc

SEQ ID NO: 638952 - RNA, 19 nt, Artificial Sequence
  Description of Artificial Sequence: Synthetic oligonucleotide
  Sense strand starting at position 1949 of SEQ ID NO: 585426
ucguucgcucccuugugaa

SEQ ID NO: 638953 - RNA, 19 nt, Artificial Sequence
  Description of Artificial Sequence: Synthetic oligonucleotide
  Antisense strand to SEQ ID NO: 638952
uucacaagggagcgaacga

SEQ ID NO: 638954 - RNA, 19 nt, Artificial Sequence
  Description of Artificial Sequence: Synthetic oligonucleotide
  Sense strand starting at position 1974 of SEQ ID NO: 585426
gcgucuuguguguuucauc

SEQ ID NO: 638955 - RNA, 19 nt, Artificial Sequence
  Description of Artificial Sequence: Synthetic oligonucleotide
  Antisense strand to SEQ ID NO: 638954
gaugaaacacacaagacgc

SEQ ID NO: 638956 - RNA, 19 nt, Artificial Sequence
  Description of Artificial Sequence: Synthetic oligonucleotide
  Sense strand starting at position 2389 of SEQ ID NO: 585426
ggucaauuccuuggguaug

SEQ ID NO: 638957 - RNA, 19 nt, Artificial Sequence
  Description of Artificial Sequence: Synthetic oligonucleotide
  Antisense strand to SEQ ID NO: 638956
cauacccaaggaauugacc

SEQ ID NO: 638958 - RNA, 19 nt, Artificial Sequence
  Description of Artificial Sequence: Synthetic oligonucleotide
  Sense strand starting at position 2391 of SEQ ID NO: 585426
ucaauuccuuggguaugua

SEQ ID NO: 638959 - RNA, 19 nt, Artificial Sequence
  Description of Artificial Sequence: Synthetic oligonucleotide
  Antisense strand to SEQ ID NO: 638958
uacauacccaaggaauuga

SEQ ID NO: 638960 - RNA, 19 nt, Artificial Sequence
  Description of Artificial Sequence: Synthetic oligonucleotide
  Sense strand starting at position 2392 of SEQ ID NO: 585426
caauuccuuggguauguau

SEQ ID NO: 638961 - RNA, 19 nt, Artificial Sequence
  Description of Artificial Sequence: Synthetic oligonucleotide
  Antisense strand to SEQ ID NO: 638960
auacauacccaaggaauug

SEQ ID NO: 638962 - RNA, 19 nt, Artificial Sequence
  Description of Artificial Sequence: Synthetic oligonucleotide
  Sense strand starting at position 2455 of SEQ ID NO: 585426
cagagaaccugccuaguau

SEQ ID NO: 638963 - RNA, 19 nt, Artificial Sequence
  Description of Artificial Sequence: Synthetic oligonucleotide
  Antisense strand to SEQ ID NO: 638962
auacuaggcagguucucug

SEQ ID NO: 638964 - RNA, 19 nt, Artificial Sequence
  Description of Artificial Sequence: Synthetic oligonucleotide
  Sense strand starting at position 2456 of SEQ ID NO: 585426
agagaaccugccuaguauc

SEQ ID NO: 638965 - RNA, 19 nt, Artificial Sequence
  Description of Artificial Sequence: Synthetic oligonucleotide
  Antisense strand to SEQ ID NO: 638964
gauacuaggcagguucucu

SEQ ID NO: 638966 - RNA, 19 nt, Artificial Sequence
  Description of Artificial Sequence: Synthetic oligonucleotide
  Sense strand starting at position 2468 of SEQ ID NO: 585426
uaguaucagccacagaguu

SEQ ID NO: 638967 - RNA, 19 nt, Artificial Sequence
  Description of Artificial Sequence: Synthetic oligonucleotide
  Antisense strand to SEQ ID NO: 638966
aacucuguggcugauacua

SEQ ID NO: 638968 - RNA, 19 nt, Artificial Sequence
  Description of Artificial Sequence: Synthetic oligonucleotide
  Sense strand starting at position 2482 of SEQ ID NO: 585426
gaguuagauagugguaauu

SEQ ID NO: 638969 - RNA, 19 nt, Artificial Sequence
  Description of Artificial Sequence: Synthetic oligonucleotide
  Antisense strand to SEQ ID NO: 638968
aauuaccacuaucuaacuc

SEQ ID NO: 638970 - RNA, 19 nt, Artificial Sequence
  Description of Artificial Sequence: Synthetic oligonucleotide
  Sense strand starting at position 2510 of SEQ ID NO: 585426
augacugaaugugugaaua

SEQ ID NO: 638971 - RNA, 19 nt, Artificial Sequence
  Description of Artificial Sequence: Synthetic oligonucleotide
  Antisense strand to SEQ ID NO: 638970
uauucacacauucagucau

SEQ ID NO: 638972 - RNA, 19 nt, Artificial Sequence
  Description of Artificial Sequence: Synthetic oligonucleotide
  Sense strand starting at position 2520 of SEQ ID NO: 585426
gugugaauaaauggguaaa

SEQ ID NO: 638973 - RNA, 19 nt, Artificial Sequence
  Description of Artificial Sequence: Synthetic oligonucleotide
  Antisense strand to SEQ ID NO: 638972
uuuacccauuuauucacac

SEQ ID NO: 638974 - RNA, 19 nt, Artificial Sequence
  Description of Artificial Sequence: Synthetic oligonucleotide
  Sense strand starting at position 2522 of SEQ ID NO: 585426
gugaauaaauggguaaauu

SEQ ID NO: 638975 - RNA, 19 nt, Artificial Sequence
  Description of Artificial Sequence: Synthetic oligonucleotide
  Antisense strand to SEQ ID NO: 638974
aauuuacccauuuauucac

SEQ ID NO: 638976 - RNA, 19 nt, Artificial Sequence
  Description of Artificial Sequence: Synthetic oligonucleotide
  Sense strand starting at position 2533 of SEQ ID NO: 585426
gguaaauuguaacuagucu

SEQ ID NO: 638977 - RNA, 19 nt, Artificial Sequence
  Description of Artificial Sequence: Synthetic oligonucleotide
  Antisense strand to SEQ ID NO: 638976
agacuaguuacaauuuacc

SEQ ID NO: 638978 - RNA, 19 nt, Artificial Sequence
  Description of Artificial Sequence: Synthetic oligonucleotide
  Sense strand starting at position 2539 of SEQ ID NO: 585426
uuguaacuagucuagaauu

SEQ ID NO: 638979 - RNA, 19 nt, Artificial Sequence
  Description of Artificial Sequence: Synthetic oligonucleotide
  Antisense strand to SEQ ID NO: 638978
aauucuagacuaguuacaa

SEQ ID NO: 638980 - RNA, 19 nt, Artificial Sequence
  Description of Artificial Sequence: Synthetic oligonucleotide
  Sense strand starting at position 2655 of SEQ ID NO: 585426
gcaaguuaguaauuauuag

SEQ ID NO: 638981 - RNA, 19 nt, Artificial Sequence
  Description of Artificial Sequence: Synthetic oligonucleotide
  Antisense strand to SEQ ID NO: 638980
cuaauaauuacuaacuugc

SEQ ID NO: 638982 - RNA, 19 nt, Artificial Sequence
  Description of Artificial Sequence: Synthetic oligonucleotide
  Sense strand starting at position 2697 of SEQ ID NO: 585426
caagaauagcgccaaggua

SEQ ID NO: 638983 - RNA, 19 nt, Artificial Sequence
  Description of Artificial Sequence: Synthetic oligonucleotide
  Antisense strand to SEQ ID NO: 638982
uaccuuggcgcuauucuug

SEQ ID NO: 638984 - RNA, 19 nt, Artificial Sequence
  Description of Artificial Sequence: Synthetic oligonucleotide
  Sense strand starting at position 2760 of SEQ ID NO: 585426
aggcuuucacgcguauguu

SEQ ID NO: 638985 - RNA, 19 nt, Artificial Sequence
  Description of Artificial Sequence: Synthetic oligonucleotide
  Antisense strand to SEQ ID NO: 638984
aacauacgcgugaaagccu

SEQ ID NO: 638986 - RNA, 19 nt, Artificial Sequence
  Description of Artificial Sequence: Synthetic oligonucleotide
  Sense strand starting at position 2935 of SEQ ID NO: 585426
gugggagguccuuauucua

SEQ ID NO: 638987 - RNA, 19 nt, Artificial Sequence
  Description of Artificial Sequence: Synthetic oligonucleotide
  Antisense strand to SEQ ID NO: 638986
uagaauaaggaccucccac

SEQ ID NO: 638988 - RNA, 19 nt, Artificial Sequence
  Description of Artificial Sequence: Synthetic oligonucleotide
  Sense strand starting at position 2958 of SEQ ID NO: 585426
aaguaauacaggcguggaa

SEQ ID NO: 638989 - RNA, 19 nt, Artificial Sequence
  Description of Artificial Sequence: Synthetic oligonucleotide
  Antisense strand to SEQ ID NO: 638988
uuccacgccuguauuacuu

SEQ ID NO: 638990 - RNA, 19 nt, Artificial Sequence
  Description of Artificial Sequence: Synthetic oligonucleotide
  Sense strand starting at position 3009 of SEQ ID NO: 585426
aaagccaagcuaugaguau

SEQ ID NO: 638991 - RNA, 19 nt, Artificial Sequence
  Description of Artificial Sequence: Synthetic oligonucleotide
  Antisense strand to SEQ ID NO: 638990
auacucauagcuuggcuuu

SEQ ID NO: 638992 - RNA, 19 nt, Artificial Sequence
  Description of Artificial Sequence: Synthetic oligonucleotide
  Sense strand starting at position 3032 of SEQ ID NO: 585426
aggcauacacagugaaaua

SEQ ID NO: 638993 - RNA, 19 nt, Artificial Sequence
  Description of Artificial Sequence: Synthetic oligonucleotide
  Antisense strand to SEQ ID NO: 638992
uauuucacuguguaugccu

SEQ ID NO: 638994 - RNA, 19 nt, Artificial Sequence
  Description of Artificial Sequence: Synthetic oligonucleotide
  Sense strand starting at position 3910 of SEQ ID NO: 585426
gcauaaguuagauagguca

SEQ ID NO: 638995 - RNA, 19 nt, Artificial Sequence
  Description of Artificial Sequence: Synthetic oligonucleotide
  Antisense strand to SEQ ID NO: 638994
ugaccuaucuaacuuaugc

SEQ ID NO: 638996 - RNA, 19 nt, Artificial Sequence
  Description of Artificial Sequence: Synthetic oligonucleotide
  Sense strand starting at position 3947 of SEQ ID NO: 585426
aguuaugaagccuaagcuu

SEQ ID NO: 638997 - RNA, 19 nt, Artificial Sequence
  Description of Artificial Sequence: Synthetic oligonucleotide
  Antisense strand to SEQ ID NO: 638996
aagcuuaggcuucauaacu

SEQ ID NO: 638998 - RNA, 19 nt, Artificial Sequence
  Description of Artificial Sequence: Synthetic oligonucleotide
  Sense strand starting at position 19 of SEQ ID NO: 585427
auguuuauccuggauuaac

SEQ ID NO: 638999 - RNA, 19 nt, Artificial Sequence
  Description of Artificial Sequence: Synthetic oligonucleotide
  Antisense strand to SEQ ID NO: 638998
guuaauccaggauaaacau

SEQ ID NO: 639000 - RNA, 19 nt, Artificial Sequence
  Description of Artificial Sequence: Synthetic oligonucleotide
  Sense strand starting at position 30 of SEQ ID NO: 585427
ggauuaacuuugucaccau

SEQ ID NO: 639001 - RNA, 19 nt, Artificial Sequence
  Description of Artificial Sequence: Synthetic oligonucleotide
  Antisense strand to SEQ ID NO: 639000
auggugacaaaguuaaucc

SEQ ID NO: 639002 - RNA, 19 nt, Artificial Sequence
  Description of Artificial Sequence: Synthetic oligonucleotide
  Sense strand starting at position 91 of SEQ ID NO: 585427
ccuauuucuggcugugcau

SEQ ID NO: 639003 - RNA, 19 nt, Artificial Sequence
  Description of Artificial Sequence: Synthetic oligonucleotide
  Antisense strand to SEQ ID NO: 639002
augcacagccagaaauagg

SEQ ID NO: 639004 - RNA, 19 nt, Artificial Sequence
  Description of Artificial Sequence: Synthetic oligonucleotide
  Sense strand starting at position 93 of SEQ ID NO: 585427
uauuucuggcugugcauua

SEQ ID NO: 639005 - RNA, 19 nt, Artificial Sequence
  Description of Artificial Sequence: Synthetic oligonucleotide
  Antisense strand to SEQ ID NO: 639004
uaaugcacagccagaaaua

SEQ ID NO: 639006 - RNA, 19 nt, Artificial Sequence
  Description of Artificial Sequence: Synthetic oligonucleotide
  Sense strand starting at position 98 of SEQ ID NO: 585427
cuggcugugcauuagaaau

SEQ ID NO: 639007 - RNA, 19 nt, Artificial Sequence
  Description of Artificial Sequence: Synthetic oligonucleotide
  Antisense strand to SEQ ID NO: 639006
auuucuaaugcacagccag

SEQ ID NO: 639008 - RNA, 19 nt, Artificial Sequence
  Description of Artificial Sequence: Synthetic oligonucleotide
  Sense strand starting at position 167 of SEQ ID NO: 585427
acaauaguaucccucgaug

SEQ ID NO: 639009 - RNA, 19 nt, Artificial Sequence
  Description of Artificial Sequence: Synthetic oligonucleotide
  Antisense strand to SEQ ID NO: 639008
caucgagggauacuauugu

SEQ ID NO: 639010 - RNA, 19 nt, Artificial Sequence
  Description of Artificial Sequence: Synthetic oligonucleotide
  Sense strand starting at position 169 of SEQ ID NO: 585427
aauaguaucccucgaugau

SEQ ID NO: 639011 - RNA, 19 nt, Artificial Sequence
  Description of Artificial Sequence: Synthetic oligonucleotide
  Antisense strand to SEQ ID NO: 639010
aucaucgagggauacuauu

SEQ ID NO: 639012 - RNA, 19 nt, Artificial Sequence
  Description of Artificial Sequence: Synthetic oligonucleotide
  Sense strand starting at position 170 of SEQ ID NO: 585427
auaguaucccucgaugaug

SEQ ID NO: 639013 - RNA, 19 nt, Artificial Sequence
  Description of Artificial Sequence: Synthetic oligonucleotide
  Antisense strand to SEQ ID NO: 639012
caucaucgagggauacuau

SEQ ID NO: 639014 - RNA, 19 nt, Artificial Sequence
  Description of Artificial Sequence: Synthetic oligonucleotide
  Sense strand starting at position 206 of SEQ ID NO: 585427
accuuuauagucugaaagu

SEQ ID NO: 639015 - RNA, 19 nt, Artificial Sequence
  Description of Artificial Sequence: Synthetic oligonucleotide
  Antisense strand to SEQ ID NO: 639014
acuuucagacuauaaaggu

SEQ ID NO: 639016 - RNA, 19 nt, Artificial Sequence
  Description of Artificial Sequence: Synthetic oligonucleotide
  Sense strand starting at position 284 of SEQ ID NO: 585427
uagcuuuaccacgcgugaa

SEQ ID NO: 639017 - RNA, 19 nt, Artificial Sequence
  Description of Artificial Sequence: Synthetic oligonucleotide
  Antisense strand to SEQ ID NO: 639016
uucacgcgugguaaagcua

SEQ ID NO: 639018 - RNA, 19 nt, Artificial Sequence
  Description of Artificial Sequence: Synthetic oligonucleotide
  Sense strand starting at position 297 of SEQ ID NO: 585427
cgugaagacucacuuuaaa

SEQ ID NO: 639019 - RNA, 19 nt, Artificial Sequence
  Description of Artificial Sequence: Synthetic oligonucleotide
  Antisense strand to SEQ ID NO: 639018
uuuaaagugagucuucacg

SEQ ID NO: 639020 - RNA, 19 nt, Artificial Sequence
  Description of Artificial Sequence: Synthetic oligonucleotide
  Sense strand starting at position 382 of SEQ ID NO: 585427
cguguagcggccagagaau

SEQ ID NO: 639021 - RNA, 19 nt, Artificial Sequence
  Description of Artificial Sequence: Synthetic oligonucleotide
  Antisense strand to SEQ ID NO: 639020
auucucuggccgcuacacg

SEQ ID NO: 639022 - RNA, 19 nt, Artificial Sequence
  Description of Artificial Sequence: Synthetic oligonucleotide
  Sense strand starting at position 847 of SEQ ID NO: 585427
uaggaugucucuuuggauc

SEQ ID NO: 639023 - RNA, 19 nt, Artificial Sequence
  Description of Artificial Sequence: Synthetic oligonucleotide
  Antisense strand to SEQ ID NO: 639022
gauccaaagagacauccua

SEQ ID NO: 639024 - RNA, 19 nt, Artificial Sequence
  Description of Artificial Sequence: Synthetic oligonucleotide
  Sense strand starting at position 1548 of SEQ ID NO: 585427
aguaauuacggcgaugaua

SEQ ID NO: 639025 - RNA, 19 nt, Artificial Sequence
  Description of Artificial Sequence: Synthetic oligonucleotide
  Antisense strand to SEQ ID NO: 639024
uaucaucgccguaauuacu

SEQ ID NO: 639026 - RNA, 19 nt, Artificial Sequence
  Description of Artificial Sequence: Synthetic oligonucleotide
  Sense strand starting at position 1550 of SEQ ID NO: 585427
uaauuacggcgaugauaaa

SEQ ID NO: 639027 - RNA, 19 nt, Artificial Sequence
  Description of Artificial Sequence: Synthetic oligonucleotide
  Antisense strand to SEQ ID NO: 639026
uuuaucaucgccguaauua

SEQ ID NO: 639028 - RNA, 19 nt, Artificial Sequence
  Description of Artificial Sequence: Synthetic oligonucleotide
  Sense strand starting at position 2761 of SEQ ID NO: 585427
cucauagaaguuggucaaa

SEQ ID NO: 639029 - RNA, 19 nt, Artificial Sequence
  Description of Artificial Sequence: Synthetic oligonucleotide
  Antisense strand to SEQ ID NO: 639028
uuugaccaacuucuaugag

SEQ ID NO: 639030 - RNA, 19 nt, Artificial Sequence
  Description of Artificial Sequence: Synthetic oligonucleotide
  Sense strand starting at position 2763 of SEQ ID NO: 585427
cauagaaguuggucaaauu

SEQ ID NO: 639031 - RNA, 19 nt, Artificial Sequence
  Description of Artificial Sequence: Synthetic oligonucleotide
  Antisense strand to SEQ ID NO: 639030
aauuugaccaacuucuaug

SEQ ID NO: 639032 - RNA, 19 nt, Artificial Sequence
  Description of Artificial Sequence: Synthetic oligonucleotide
  Sense strand starting at position 2781 of SEQ ID NO: 585427
uuuccauucgaagacgagu

SEQ ID NO: 639033 - RNA, 19 nt, Artificial Sequence
  Description of Artificial Sequence: Synthetic oligonucleotide
  Antisense strand to SEQ ID NO: 639032
acucgucuucgaauggaaa

SEQ ID NO: 639034 - RNA, 19 nt, Artificial Sequence
  Description of Artificial Sequence: Synthetic oligonucleotide
  Sense strand starting at position 2863 of SEQ ID NO: 585427
acuacuuccagcgaaguga

SEQ ID NO: 639035 - RNA, 19 nt, Artificial Sequence
  Description of Artificial Sequence: Synthetic oligonucleotide
  Antisense strand to SEQ ID NO: 639034
ucacuucgcuggaaguagu

SEQ ID NO: 639036 - RNA, 19 nt, Artificial Sequence
  Description of Artificial Sequence: Synthetic oligonucleotide
  Sense strand starting at position 2876 of SEQ ID NO: 585427
aagugaggaguugguccaa

SEQ ID NO: 639037 - RNA, 19 nt, Artificial Sequence
  Description of Artificial Sequence: Synthetic oligonucleotide
  Antisense strand to SEQ ID NO: 639036
uuggaccaacuccucacuu

SEQ ID NO: 639038 - RNA, 19 nt, Artificial Sequence
  Description of Artificial Sequence: Synthetic oligonucleotide
  Sense strand starting at position 3050 of SEQ ID NO: 585427
ucuguuugugcuuaagaca

SEQ ID NO: 639039 - RNA, 19 nt, Artificial Sequence
  Description of Artificial Sequence: Synthetic oligonucleotide
  Antisense strand to SEQ ID NO: 639038
ugucuuaagcacaaacaga

SEQ ID NO: 639040 - RNA, 19 nt, Artificial Sequence
  Description of Artificial Sequence: Synthetic oligonucleotide
  Sense strand starting at position 3121 of SEQ ID NO: 585427
gguguuaagcuguaugaga

SEQ ID NO: 639041 - RNA, 19 nt, Artificial Sequence
  Description of Artificial Sequence: Synthetic oligonucleotide
  Antisense strand to SEQ ID NO: 639040
ucucauacagcuuaacacc

SEQ ID NO: 639042 - RNA, 19 nt, Artificial Sequence
  Description of Artificial Sequence: Synthetic oligonucleotide
  Sense strand starting at position 3123 of SEQ ID NO: 585427
uguuaagcuguaugagaaa

SEQ ID NO: 639043 - RNA, 19 nt, Artificial Sequence
  Description of Artificial Sequence: Synthetic oligonucleotide
  Antisense strand to SEQ ID NO: 639042
uuucucauacagcuuaaca

SEQ ID NO: 639044 - RNA, 19 nt, Artificial Sequence
  Description of Artificial Sequence: Synthetic oligonucleotide
  Sense strand starting at position 3282 of SEQ ID NO: 585427
ugauaaagcuggcuuuaug

SEQ ID NO: 639045 - RNA, 19 nt, Artificial Sequence
  Description of Artificial Sequence: Synthetic oligonucleotide
  Antisense strand to SEQ ID NO: 639044
cauaaagccagcuuuauca

SEQ ID NO: 639046 - RNA, 19 nt, Artificial Sequence
  Description of Artificial Sequence: Synthetic oligonucleotide
  Sense strand starting at position 3294 of SEQ ID NO: 585427
cuuuauggcuugguuauuu

SEQ ID NO: 639047 - RNA, 19 nt, Artificial Sequence
  Description of Artificial Sequence: Synthetic oligonucleotide
  Antisense strand to SEQ ID NO: 639046
aaauaaccaagccauaaag

SEQ ID NO: 639048 - RNA, 19 nt, Artificial Sequence
  Description of Artificial Sequence: Synthetic oligonucleotide
  Sense strand starting at position 3313 of SEQ ID NO: 585427
ugauaccugcuaugaaauu

SEQ ID NO: 639049 - RNA, 19 nt, Artificial Sequence
  Description of Artificial Sequence: Synthetic oligonucleotide
  Antisense strand to SEQ ID NO: 639048
aauuucauagcagguauca

SEQ ID NO: 639050 - RNA, 19 nt, Artificial Sequence
  Description of Artificial Sequence: Synthetic oligonucleotide
  Sense strand starting at position 3324 of SEQ ID NO: 585427
augaaauucuauguccaga

SEQ ID NO: 639051 - RNA, 19 nt, Artificial Sequence
  Description of Artificial Sequence: Synthetic oligonucleotide
  Antisense strand to SEQ ID NO: 639050
ucuggacauagaauuucau

SEQ ID NO: 639052 - RNA, 19 nt, Artificial Sequence
  Description of Artificial Sequence: Synthetic oligonucleotide
  Sense strand starting at position 3326 of SEQ ID NO: 585427
gaaauucuauguccagaag

SEQ ID NO: 639053 - RNA, 19 nt, Artificial Sequence
  Description of Artificial Sequence: Synthetic oligonucleotide
  Antisense strand to SEQ ID NO: 639052
cuucuggacauagaauuuc

SEQ ID NO: 639054 - RNA, 19 nt, Artificial Sequence
  Description of Artificial Sequence: Synthetic oligonucleotide
  Sense strand starting at position 3337 of SEQ ID NO: 585427
uccagaagagugcagcaua

SEQ ID NO: 639055 - RNA, 19 nt, Artificial Sequence
  Description of Artificial Sequence: Synthetic oligonucleotide
  Antisense strand to SEQ ID NO: 639054
uaugcugcacucuucugga

SEQ ID NO: 639056 - RNA, 19 nt, Artificial Sequence
  Description of Artificial Sequence: Synthetic oligonucleotide
  Sense strand starting at position 3444 of SEQ ID NO: 585427
cgauuaugcauuuguaggu

SEQ ID NO: 639057 - RNA, 19 nt, Artificial Sequence
  Description of Artificial Sequence: Synthetic oligonucleotide
  Antisense strand to SEQ ID NO: 639056
accuacaaaugcauaaucg

SEQ ID NO: 639058 - RNA, 19 nt, Artificial Sequence
  Description of Artificial Sequence: Synthetic oligonucleotide
  Sense strand starting at position 3471 of SEQ ID NO: 585427
ggcugaaagguuugaauca

SEQ ID NO: 639059 - RNA, 19 nt, Artificial Sequence
  Description of Artificial Sequence: Synthetic oligonucleotide
  Antisense strand to SEQ ID NO: 639058
ugauucaaaccuuucagcc

SEQ ID NO: 639060 - RNA, 19 nt, Artificial Sequence
  Description of Artificial Sequence: Synthetic oligonucleotide
  Sense strand starting at position 3478 of SEQ ID NO: 585427
agguuugaaucacugugaa

SEQ ID NO: 639061 - RNA, 19 nt, Artificial Sequence
  Description of Artificial Sequence: Synthetic oligonucleotide
  Antisense strand to SEQ ID NO: 639060
uucacagugauucaaaccu

SEQ ID NO: 639062 - RNA, 19 nt, Artificial Sequence
  Description of Artificial Sequence: Synthetic oligonucleotide
  Sense strand starting at position 3481 of SEQ ID NO: 585427
uuugaaucacugugaaaua

SEQ ID NO: 639063 - RNA, 19 nt, Artificial Sequence
  Description of Artificial Sequence: Synthetic oligonucleotide
  Antisense strand to SEQ ID NO: 639062
uauuucacagugauucaaa

SEQ ID NO: 639064 - RNA, 19 nt, Artificial Sequence
  Description of Artificial Sequence: Synthetic oligonucleotide
  Sense strand starting at position 3492 of SEQ ID NO: 585427
gugaaauaauguuucuaac

SEQ ID NO: 639065 - RNA, 19 nt, Artificial Sequence
  Description of Artificial Sequence: Synthetic oligonucleotide
  Antisense strand to SEQ ID NO: 639064
guuagaaacauuauuucac

SEQ ID NO: 639066 - RNA, 19 nt, Artificial Sequence
  Description of Artificial Sequence: Synthetic oligonucleotide
  Sense strand starting at position 3578 of SEQ ID NO: 585427
cgcuaaucucuuuaugauc

SEQ ID NO: 639067 - RNA, 19 nt, Artificial Sequence
  Description of Artificial Sequence: Synthetic oligonucleotide
  Antisense strand to SEQ ID NO: 639066
gaucauaaagagauuagcg

SEQ ID NO: 639068 - RNA, 19 nt, Artificial Sequence
  Description of Artificial Sequence: Synthetic oligonucleotide
  Sense strand starting at position 3633 of SEQ ID NO: 585427
uguuguaagaauggaauua

SEQ ID NO: 639069 - RNA, 19 nt, Artificial Sequence
  Description of Artificial Sequence: Synthetic oligonucleotide
  Antisense strand to SEQ ID NO: 639068
uaauuccauucuuacaaca

SEQ ID NO: 639070 - RNA, 19 nt, Artificial Sequence
  Description of Artificial Sequence: Synthetic oligonucleotide
  Sense strand starting at position 3658 of SEQ ID NO: 585427
cggaaauauuuagaagcuu

SEQ ID NO: 639071 - RNA, 19 nt, Artificial Sequence
  Description of Artificial Sequence: Synthetic oligonucleotide
  Antisense strand to SEQ ID NO: 639070
aagcuucuaaauauuuccg

SEQ ID NO: 639072 - RNA, 19 nt, Artificial Sequence
  Description of Artificial Sequence: Synthetic oligonucleotide
  Sense strand starting at position 3799 of SEQ ID NO: 585427
accaaaucaguuugggcau

SEQ ID NO: 639073 - RNA, 19 nt, Artificial Sequence
  Description of Artificial Sequence: Synthetic oligonucleotide
  Antisense strand to SEQ ID NO: 639072
augcccaaacugauuuggu

SEQ ID NO: 639074 - RNA, 19 nt, Artificial Sequence
  Description of Artificial Sequence: Synthetic oligonucleotide
  Sense strand starting at position 3843 of SEQ ID NO: 585427
aaauuuaguacguggguuu

SEQ ID NO: 639075 - RNA, 19 nt, Artificial Sequence
  Description of Artificial Sequence: Synthetic oligonucleotide
  Antisense strand to SEQ ID NO: 639074
aaacccacguacuaaauuu

SEQ ID NO: 639076 - RNA, 19 nt, Artificial Sequence
  Description of Artificial Sequence: Synthetic oligonucleotide
  Sense strand starting at position 3844 of SEQ ID NO: 585427
aauuuaguacguggguuua

SEQ ID NO: 639077 - RNA, 19 nt, Artificial Sequence
  Description of Artificial Sequence: Synthetic oligonucleotide
  Antisense strand to SEQ ID NO: 639076
uaaacccacguacuaaauu

SEQ ID NO: 639078 - RNA, 19 nt, Artificial Sequence
  Description of Artificial Sequence: Synthetic oligonucleotide
  Sense strand starting at position 54 of SEQ ID NO: 585428
acuuguacccucugguuaa

SEQ ID NO: 639079 - RNA, 19 nt, Artificial Sequence
  Description of Artificial Sequence: Synthetic oligonucleotide
  Antisense strand to SEQ ID NO: 639078
uuaaccagaggguacaagu

SEQ ID NO: 639080 - RNA, 19 nt, Artificial Sequence
  Description of Artificial Sequence: Synthetic oligonucleotide
  Sense strand starting at position 58 of SEQ ID NO: 585428
guacccucugguuaacaga

SEQ ID NO: 639081 - RNA, 19 nt, Artificial Sequence
  Description of Artificial Sequence: Synthetic oligonucleotide
  Antisense strand to SEQ ID NO: 639080
ucuguuaaccagaggguac

SEQ ID NO: 639082 - RNA, 19 nt, Artificial Sequence
  Description of Artificial Sequence: Synthetic oligonucleotide
  Sense strand starting at position 534 of SEQ ID NO: 585428
gaucgagucuggcucaaga

SEQ ID NO: 639083 - RNA, 19 nt, Artificial Sequence
  Description of Artificial Sequence: Synthetic oligonucleotide
  Antisense strand to SEQ ID NO: 639082
ucuugagccagacucgauc

SEQ ID NO: 639084 - RNA, 19 nt, Artificial Sequence
  Description of Artificial Sequence: Synthetic oligonucleotide
  Sense strand starting at position 576 of SEQ ID NO: 585428
ucugccuuccuuuaaggua

SEQ ID NO: 639085 - RNA, 19 nt, Artificial Sequence
  Description of Artificial Sequence: Synthetic oligonucleotide
  Antisense strand to SEQ ID NO: 639084
uaccuuaaaggaaggcaga

SEQ ID NO: 639086 - RNA, 19 nt, Artificial Sequence
  Description of Artificial Sequence: Synthetic oligonucleotide
  Sense strand starting at position 654 of SEQ ID NO: 585428
cugcuauaugguuauguuu

SEQ ID NO: 639087 - RNA, 19 nt, Artificial Sequence
  Description of Artificial Sequence: Synthetic oligonucleotide
  Antisense strand to SEQ ID NO: 639086
aaacauaaccauauagcag

SEQ ID NO: 639088 - RNA, 19 nt, Artificial Sequence
  Description of Artificial Sequence: Synthetic oligonucleotide
  Sense strand starting at position 932 of SEQ ID NO: 585428
auagauguauugucaugaa

SEQ ID NO: 639089 - RNA, 19 nt, Artificial Sequence
  Description of Artificial Sequence: Synthetic oligonucleotide
  Antisense strand to SEQ ID NO: 639088
uucaugacaauacaucuau

SEQ ID NO: 639090 - RNA, 19 nt, Artificial Sequence
  Description of Artificial Sequence: Synthetic oligonucleotide
  Sense strand starting at position 936 of SEQ ID NO: 585428
auguauugucaugaaagug

SEQ ID NO: 639091 - RNA, 19 nt, Artificial Sequence
  Description of Artificial Sequence: Synthetic oligonucleotide
  Antisense strand to SEQ ID NO: 639090
cacuuucaugacaauacau

SEQ ID NO: 639092 - RNA, 19 nt, Artificial Sequence
  Description of Artificial Sequence: Synthetic oligonucleotide
  Sense strand starting at position 1198 of SEQ ID NO: 585428
ucaaguugcuucuuuggaa

SEQ ID NO: 639093 - RNA, 19 nt, Artificial Sequence
  Description of Artificial Sequence: Synthetic oligonucleotide
  Antisense strand to SEQ ID NO: 639092
uuccaaagaagcaacuuga

SEQ ID NO: 639094 - RNA, 19 nt, Artificial Sequence
  Description of Artificial Sequence: Synthetic oligonucleotide
  Sense strand starting at position 1199 of SEQ ID NO: 585428
caaguugcuucuuuggaaa

SEQ ID NO: 639095 - RNA, 19 nt, Artificial Sequence
  Description of Artificial Sequence: Synthetic oligonucleotide
  Antisense strand to SEQ ID NO: 639094
uuuccaaagaagcaacuug

SEQ ID NO: 639096 - RNA, 19 nt, Artificial Sequence
  Description of Artificial Sequence: Synthetic oligonucleotide
  Sense strand starting at position 1279 of SEQ ID NO: 585428
cuaagaugacagugccaaa

SEQ ID NO: 639097 - RNA, 19 nt, Artificial Sequence
  Description of Artificial Sequence: Synthetic oligonucleotide
  Antisense strand to SEQ ID NO: 639096
uuuggcacugucaucuuag

SEQ ID NO: 639098 - RNA, 19 nt, Artificial Sequence
  Description of Artificial Sequence: Synthetic oligonucleotide
  Sense strand starting at position 1648 of SEQ ID NO: 585428
agugacagccuagguuaau

SEQ ID NO: 639099 - RNA, 19 nt, Artificial Sequence
  Description of Artificial Sequence: Synthetic oligonucleotide
  Antisense strand to SEQ ID NO: 639098
auuaaccuaggcugucacu

SEQ ID NO: 639100 - RNA, 19 nt, Artificial Sequence
  Description of Artificial Sequence: Synthetic oligonucleotide
  Sense strand starting at position 2107 of SEQ ID NO: 585428
gaaagagaggacugcguuu

SEQ ID NO: 639101 - RNA, 19 nt, Artificial Sequence
  Description of Artificial Sequence: Synthetic oligonucleotide
  Antisense strand to SEQ ID NO: 639100
aaacgcaguccucucuuuc

SEQ ID NO: 639102 - RNA, 19 nt, Artificial Sequence
  Description of Artificial Sequence: Synthetic oligonucleotide
  Sense strand starting at position 2180 of SEQ ID NO: 585428
cgcccuauuucugcaagua

SEQ ID NO: 639103 - RNA, 19 nt, Artificial Sequence
  Description of Artificial Sequence: Synthetic oligonucleotide
  Antisense strand to SEQ ID NO: 639102
uacuugcagaaauagggcg

SEQ ID NO: 639104 - RNA, 19 nt, Artificial Sequence
  Description of Artificial Sequence: Synthetic oligonucleotide
  Sense strand starting at position 2195 of SEQ ID NO: 585428
aguagaacucacugccuuu

SEQ ID NO: 639105 - RNA, 19 nt, Artificial Sequence
  Description of Artificial Sequence: Synthetic oligonucleotide
  Antisense strand to SEQ ID NO: 639104
aaaggcagugaguucuacu

SEQ ID NO: 639106 - RNA, 19 nt, Artificial Sequence
  Description of Artificial Sequence: Synthetic oligonucleotide
  Sense strand starting at position 2198 of SEQ ID NO: 585428
agaacucacugccuuuaga

SEQ ID NO: 639107 - RNA, 19 nt, Artificial Sequence
  Description of Artificial Sequence: Synthetic oligonucleotide
  Antisense strand to SEQ ID NO: 639106
ucuaaaggcagugaguucu

SEQ ID NO: 639108 - RNA, 19 nt, Artificial Sequence
  Description of Artificial Sequence: Synthetic oligonucleotide
  Sense strand starting at position 2240 of SEQ ID NO: 585428
ggaggcucuaacuguauua

SEQ ID NO: 639109 - RNA, 19 nt, Artificial Sequence
  Description of Artificial Sequence: Synthetic oligonucleotide
  Antisense strand to SEQ ID NO: 639108
uaauacaguuagagccucc

SEQ ID NO: 639110 - RNA, 19 nt, Artificial Sequence
  Description of Artificial Sequence: Synthetic oligonucleotide
  Sense strand starting at position 2242 of SEQ ID NO: 585428
aggcucuaacuguauuaca

SEQ ID NO: 639111 - RNA, 19 nt, Artificial Sequence
  Description of Artificial Sequence: Synthetic oligonucleotide
  Antisense strand to SEQ ID NO: 639110
uguaauacaguuagagccu

SEQ ID NO: 639112 - RNA, 19 nt, Artificial Sequence
  Description of Artificial Sequence: Synthetic oligonucleotide
  Sense strand starting at position 2429 of SEQ ID NO: 585428
uuaauuugcgaauguauuc

SEQ ID NO: 639113 - RNA, 19 nt, Artificial Sequence
  Description of Artificial Sequence: Synthetic oligonucleotide
  Antisense strand to SEQ ID NO: 639112
gaauacauucgcaaauuaa

SEQ ID NO: 639114 - RNA, 19 nt, Artificial Sequence
  Description of Artificial Sequence: Synthetic oligonucleotide
  Sense strand starting at position 2434 of SEQ ID NO: 585428
uugcgaauguauucuauaa

SEQ ID NO: 639115 - RNA, 19 nt, Artificial Sequence
  Description of Artificial Sequence: Synthetic oligonucleotide
  Antisense strand to SEQ ID NO: 639114
uuauagaauacauucgcaa

SEQ ID NO: 639116 - RNA, 19 nt, Artificial Sequence
  Description of Artificial Sequence: Synthetic oligonucleotide
  Sense strand starting at position 2476 of SEQ ID NO: 585428
agaaauaauugaggauaag

SEQ ID NO: 639117 - RNA, 19 nt, Artificial Sequence
  Description of Artificial Sequence: Synthetic oligonucleotide
  Antisense strand to SEQ ID NO: 639116
cuuauccucaauuauuucu

SEQ ID NO: 639118 - RNA, 19 nt, Artificial Sequence
  Description of Artificial Sequence: Synthetic oligonucleotide
  Sense strand starting at position 2488 of SEQ ID NO: 585428
ggauaagucagaugugaag

SEQ ID NO: 639119 - RNA, 19 nt, Artificial Sequence
  Description of Artificial Sequence: Synthetic oligonucleotide
  Antisense strand to SEQ ID NO: 639118
cuucacaucugacuuaucc

SEQ ID NO: 639120 - RNA, 19 nt, Artificial Sequence
  Description of Artificial Sequence: Synthetic oligonucleotide
  Sense strand starting at position 2624 of SEQ ID NO: 585428
cuagaacuugcugauguga

SEQ ID NO: 639121 - RNA, 19 nt, Artificial Sequence
  Description of Artificial Sequence: Synthetic oligonucleotide
  Antisense strand to SEQ ID NO: 639120
ucacaucagcaaguucuag

SEQ ID NO: 639122 - RNA, 19 nt, Artificial Sequence
  Description of Artificial Sequence: Synthetic oligonucleotide
  Sense strand starting at position 2705 of SEQ ID NO: 585428
auaugaguauaucucaugu

SEQ ID NO: 639123 - RNA, 19 nt, Artificial Sequence
  Description of Artificial Sequence: Synthetic oligonucleotide
  Antisense strand to SEQ ID NO: 639122
acaugagauauacucauau

SEQ ID NO: 639124 - RNA, 19 nt, Artificial Sequence
  Description of Artificial Sequence: Synthetic oligonucleotide
  Sense strand starting at position 2715 of SEQ ID NO: 585428
aucucaugugcauaucuua

SEQ ID NO: 639125 - RNA, 19 nt, Artificial Sequence
  Description of Artificial Sequence: Synthetic oligonucleotide
  Antisense strand to SEQ ID NO: 639124
uaagauaugcacaugagau

SEQ ID NO: 639126 - RNA, 19 nt, Artificial Sequence
  Description of Artificial Sequence: Synthetic oligonucleotide
  Sense strand starting at position 3010 of SEQ ID NO: 585428
ugagauucgucuguauaca

SEQ ID NO: 639127 - RNA, 19 nt, Artificial Sequence
  Description of Artificial Sequence: Synthetic oligonucleotide
  Antisense strand to SEQ ID NO: 639126
uguauacagacgaaucuca

SEQ ID NO: 639128 - RNA, 19 nt, Artificial Sequence
  Description of Artificial Sequence: Synthetic oligonucleotide
  Sense strand starting at position 3011 of SEQ ID NO: 585428
gagauucgucuguauacaa

SEQ ID NO: 639129 - RNA, 19 nt, Artificial Sequence
  Description of Artificial Sequence: Synthetic oligonucleotide
  Antisense strand to SEQ ID NO: 639128
uuguauacagacgaaucuc

SEQ ID NO: 639130 - RNA, 19 nt, Artificial Sequence
  Description of Artificial Sequence: Synthetic oligonucleotide
  Sense strand starting at position 3232 of SEQ ID NO: 585428
guuuaauucucucuuguaa

SEQ ID NO: 639131 - RNA, 19 nt, Artificial Sequence
  Description of Artificial Sequence: Synthetic oligonucleotide
  Antisense strand to SEQ ID NO: 639130
uuacaagagagaauuaaac

SEQ ID NO: 639132 - RNA, 19 nt, Artificial Sequence
  Description of Artificial Sequence: Synthetic oligonucleotide
  Sense strand starting at position 3239 of SEQ ID NO: 585428
ucucucuuguaaguuacau

SEQ ID NO: 639133 - RNA, 19 nt, Artificial Sequence
  Description of Artificial Sequence: Synthetic oligonucleotide
  Antisense strand to SEQ ID NO: 639132
auguaacuuacaagagaga

SEQ ID NO: 639134 - RNA, 19 nt, Artificial Sequence
  Description of Artificial Sequence: Synthetic oligonucleotide
  Sense strand starting at position 3308 of SEQ ID NO: 585428
gauguuucuugauugccaa

SEQ ID NO: 639135 - RNA, 19 nt, Artificial Sequence
  Description of Artificial Sequence: Synthetic oligonucleotide
  Antisense strand to SEQ ID NO: 639134
uuggcaaucaagaaacauc

SEQ ID NO: 639136 - RNA, 19 nt, Artificial Sequence
  Description of Artificial Sequence: Synthetic oligonucleotide
  Sense strand starting at position 3309 of SEQ ID NO: 585428
auguuucuugauugccaaa

SEQ ID NO: 639137 - RNA, 19 nt, Artificial Sequence
  Description of Artificial Sequence: Synthetic oligonucleotide
  Antisense strand to SEQ ID NO: 639136
uuuggcaaucaagaaacau

SEQ ID NO: 639138 - RNA, 19 nt, Artificial Sequence
  Description of Artificial Sequence: Synthetic oligonucleotide
  Sense strand starting at position 3394 of SEQ ID NO: 585428
ugcuuucuugcuuacaaga

SEQ ID NO: 639139 - RNA, 19 nt, Artificial Sequence
  Description of Artificial Sequence: Synthetic oligonucleotide
  Antisense strand to SEQ ID NO: 639138
ucuuguaagcaagaaagca

SEQ ID NO: 639140 - RNA, 19 nt, Artificial Sequence
  Description of Artificial Sequence: Synthetic oligonucleotide
  Sense strand starting at position 3712 of SEQ ID NO: 585428
agugaaaugucuucuuauc

SEQ ID NO: 639141 - RNA, 19 nt, Artificial Sequence
  Description of Artificial Sequence: Synthetic oligonucleotide
  Antisense strand to SEQ ID NO: 639140
gauaagaagacauuucacu

SEQ ID NO: 639142 - RNA, 19 nt, Artificial Sequence
  Description of Artificial Sequence: Synthetic oligonucleotide
  Sense strand starting at position 3913 of SEQ ID NO: 585428
uugguacuaucuccagaag

SEQ ID NO: 639143 - RNA, 19 nt, Artificial Sequence
  Description of Artificial Sequence: Synthetic oligonucleotide
  Antisense strand to SEQ ID NO: 639142
cuucuggagauaguaccaa

SEQ ID NO: 639144 - RNA, 19 nt, Artificial Sequence
  Description of Artificial Sequence: Synthetic oligonucleotide
  Sense strand starting at position 3916 of SEQ ID NO: 585428
guacuaucuccagaagcuu

SEQ ID NO: 639145 - RNA, 19 nt, Artificial Sequence
  Description of Artificial Sequence: Synthetic oligonucleotide
  Antisense strand to SEQ ID NO: 639144
aagcuucuggagauaguac

SEQ ID NO: 639146 - RNA, 19 nt, Artificial Sequence
  Description of Artificial Sequence: Synthetic oligonucleotide
  Sense strand starting at position 3947 of SEQ ID NO: 585428
uugauugcuugcuuuauuu

SEQ ID NO: 639147 - RNA, 19 nt, Artificial Sequence
  Description of Artificial Sequence: Synthetic oligonucleotide
  Antisense strand to SEQ ID NO: 639146
aaauaaagcaagcaaucaa

SEQ ID NO: 639148 - RNA, 19 nt, Artificial Sequence
  Description of Artificial Sequence: Synthetic oligonucleotide
  Sense strand starting at position 3955 of SEQ ID NO: 585428
uugcuuuauuucccuguua

SEQ ID NO: 639149 - RNA, 19 nt, Artificial Sequence
  Description of Artificial Sequence: Synthetic oligonucleotide
  Antisense strand to SEQ ID NO: 639148
uaacagggaaauaaagcaa

SEQ ID NO: 639150 - RNA, 19 nt, Artificial Sequence
  Description of Artificial Sequence: Synthetic oligonucleotide
  Sense strand starting at position 3957 of SEQ ID NO: 585428
gcuuuauuucccuguuaca

SEQ ID NO: 639151 - RNA, 19 nt, Artificial Sequence
  Description of Artificial Sequence: Synthetic oligonucleotide
  Antisense strand to SEQ ID NO: 639150
uguaacagggaaauaaagc

SEQ ID NO: 639152 - RNA, 19 nt, Artificial Sequence
  Description of Artificial Sequence: Synthetic oligonucleotide
  Sense strand starting at position 3967 of SEQ ID NO: 585428
ccuguuacaucuuuggaug

SEQ ID NO: 639153 - RNA, 19 nt, Artificial Sequence
  Description of Artificial Sequence: Synthetic oligonucleotide
  Antisense strand to SEQ ID NO: 639152
cauccaaagauguaacagg

SEQ ID NO: 639154 - RNA, 19 nt, Artificial Sequence
  Description of Artificial Sequence: Synthetic oligonucleotide
  Sense strand starting at position 3968 of SEQ ID NO: 585428
cuguuacaucuuuggauga

SEQ ID NO: 639155 - RNA, 19 nt, Artificial Sequence
  Description of Artificial Sequence: Synthetic oligonucleotide
  Antisense strand to SEQ ID NO: 639154
ucauccaaagauguaacag

SEQ ID NO: 639156 - RNA, 19 nt, Artificial Sequence
  Description of Artificial Sequence: Synthetic oligonucleotide
  Sense strand starting at position 3975 of SEQ ID NO: 585428
aucuuuggaugaccuauau

SEQ ID NO: 639157 - RNA, 19 nt, Artificial Sequence
  Description of Artificial Sequence: Synthetic oligonucleotide
  Antisense strand to SEQ ID NO: 639156
auauaggucauccaaagau

SEQ ID NO: 639158 - RNA, 19 nt, Artificial Sequence
  Description of Artificial Sequence: Synthetic oligonucleotide
  Sense strand starting at position 69 of SEQ ID NO: 585429
guccauuucuuuccggagu

SEQ ID NO: 639159 - RNA, 19 nt, Artificial Sequence
  Description of Artificial Sequence: Synthetic oligonucleotide
  Antisense strand to SEQ ID NO: 639158
acuccggaaagaaauggac

SEQ ID NO: 639160 - RNA, 19 nt, Artificial Sequence
  Description of Artificial Sequence: Synthetic oligonucleotide
  Sense strand starting at position 496 of SEQ ID NO: 585429
cagagaaguuguuccuuag

SEQ ID NO: 639161 - RNA, 19 nt, Artificial Sequence
  Description of Artificial Sequence: Synthetic oligonucleotide
  Antisense strand to SEQ ID NO: 639160
cuaaggaacaacuucucug

SEQ ID NO: 639162 - RNA, 19 nt, Artificial Sequence
  Description of Artificial Sequence: Synthetic oligonucleotide
  Sense strand starting at position 499 of SEQ ID NO: 585429
agaaguuguuccuuagaag

SEQ ID NO: 639163 - RNA, 19 nt, Artificial Sequence
  Description of Artificial Sequence: Synthetic oligonucleotide
  Antisense strand to SEQ ID NO: 639162
cuucuaaggaacaacuucu

SEQ ID NO: 639164 - RNA, 19 nt, Artificial Sequence
  Description of Artificial Sequence: Synthetic oligonucleotide
  Sense strand starting at position 500 of SEQ ID NO: 585429
gaaguuguuccuuagaagu

SEQ ID NO: 639165 - RNA, 19 nt, Artificial Sequence
  Description of Artificial Sequence: Synthetic oligonucleotide
  Antisense strand to SEQ ID NO: 639164
acuucuaaggaacaacuuc

SEQ ID NO: 639166 - RNA, 19 nt, Artificial Sequence
  Description of Artificial Sequence: Synthetic oligonucleotide
  Sense strand starting at position 740 of SEQ ID NO: 585429
aggagcugccgagguauuu

SEQ ID NO: 639167 - RNA, 19 nt, Artificial Sequence
  Description of Artificial Sequence: Synthetic oligonucleotide
  Antisense strand to SEQ ID NO: 639166
aaauaccucggcagcuccu

SEQ ID NO: 639168 - RNA, 19 nt, Artificial Sequence
  Description of Artificial Sequence: Synthetic oligonucleotide
  Sense strand starting at position 786 of SEQ ID NO: 585429
uugcaaguuuacucuggga

SEQ ID NO: 639169 - RNA, 19 nt, Artificial Sequence
  Description of Artificial Sequence: Synthetic oligonucleotide
  Antisense strand to SEQ ID NO: 639168
ucccagaguaaacuugcaa

SEQ ID NO: 639170 - RNA, 19 nt, Artificial Sequence
  Description of Artificial Sequence: Synthetic oligonucleotide
  Sense strand starting at position 788 of SEQ ID NO: 585429
gcaaguuuacucugggaug

SEQ ID NO: 639171 - RNA, 19 nt, Artificial Sequence
  Description of Artificial Sequence: Synthetic oligonucleotide
  Antisense strand to SEQ ID NO: 639170
caucccagaguaaacuugc

SEQ ID NO: 639172 - RNA, 19 nt, Artificial Sequence
  Description of Artificial Sequence: Synthetic oligonucleotide
  Sense strand starting at position 790 of SEQ ID NO: 585429
aaguuuacucugggaugca

SEQ ID NO: 639173 - RNA, 19 nt, Artificial Sequence
  Description of Artificial Sequence: Synthetic oligonucleotide
  Antisense strand to SEQ ID NO: 639172
ugcaucccagaguaaacuu

SEQ ID NO: 639174 - RNA, 19 nt, Artificial Sequence
  Description of Artificial Sequence: Synthetic oligonucleotide
  Sense strand starting at position 863 of SEQ ID NO: 585429
gggaaauucucaguuaugg

SEQ ID NO: 639175 - RNA, 19 nt, Artificial Sequence
  Description of Artificial Sequence: Synthetic oligonucleotide
  Antisense strand to SEQ ID NO: 639174
ccauaacugagaauuuccc

SEQ ID NO: 639176 - RNA, 19 nt, Artificial Sequence
  Description of Artificial Sequence: Synthetic oligonucleotide
  Sense strand starting at position 956 of SEQ ID NO: 585429
aaaugcuuugguuaccgaa

SEQ ID NO: 639177 - RNA, 19 nt, Artificial Sequence
  Description of Artificial Sequence: Synthetic oligonucleotide
  Antisense strand to SEQ ID NO: 639176
uucgguaaccaaagcauuu

SEQ ID NO: 639178 - RNA, 19 nt, Artificial Sequence
  Description of Artificial Sequence: Synthetic oligonucleotide
  Sense strand starting at position 1220 of SEQ ID NO: 585429
ucgauuuccgaaugucucu

SEQ ID NO: 639179 - RNA, 19 nt, Artificial Sequence
  Description of Artificial Sequence: Synthetic oligonucleotide
  Antisense strand to SEQ ID NO: 639178
agagacauucggaaaucga

SEQ ID NO: 639180 - RNA, 19 nt, Artificial Sequence
  Description of Artificial Sequence: Synthetic oligonucleotide
  Sense strand starting at position 1450 of SEQ ID NO: 585429
ggaggagucgccggacaga

SEQ ID NO: 639181 - RNA, 19 nt, Artificial Sequence
  Description of Artificial Sequence: Synthetic oligonucleotide
  Antisense strand to SEQ ID NO: 639180
ucuguccggcgacuccucc

SEQ ID NO: 639182 - RNA, 19 nt, Artificial Sequence
  Description of Artificial Sequence: Synthetic oligonucleotide
  Sense strand starting at position 2415 of SEQ ID NO: 585429
gacauaaagucuccggaau

SEQ ID NO: 639183 - RNA, 19 nt, Artificial Sequence
  Description of Artificial Sequence: Synthetic oligonucleotide
  Antisense strand to SEQ ID NO: 639182
auuccggagacuuuauguc

SEQ ID NO: 639184 - RNA, 19 nt, Artificial Sequence
  Description of Artificial Sequence: Synthetic oligonucleotide
  Sense strand starting at position 2416 of SEQ ID NO: 585429
acauaaagucuccggaauu

SEQ ID NO: 639185 - RNA, 19 nt, Artificial Sequence
  Description of Artificial Sequence: Synthetic oligonucleotide
  Antisense strand to SEQ ID NO: 639184
aauuccggagacuuuaugu

SEQ ID NO: 639186 - RNA, 19 nt, Artificial Sequence
  Description of Artificial Sequence: Synthetic oligonucleotide
  Sense strand starting at position 2426 of SEQ ID NO: 585429
uccggaauuccagauuauu

SEQ ID NO: 639187 - RNA, 19 nt, Artificial Sequence
  Description of Artificial Sequence: Synthetic oligonucleotide
  Antisense strand to SEQ ID NO: 639186
aauaaucuggaauuccgga

SEQ ID NO: 639188 - RNA, 19 nt, Artificial Sequence
  Description of Artificial Sequence: Synthetic oligonucleotide
  Sense strand starting at position 2505 of SEQ ID NO: 585429
agcgaucucccagaaacuu

SEQ ID NO: 639189 - RNA, 19 nt, Artificial Sequence
  Description of Artificial Sequence: Synthetic oligonucleotide
  Antisense strand to SEQ ID NO: 639188
aaguuucugggagaucgcu

SEQ ID NO: 639190 - RNA, 19 nt, Artificial Sequence
  Description of Artificial Sequence: Synthetic oligonucleotide
  Sense strand starting at position 2772 of SEQ ID NO: 585429
ugagcuuugauaggugaaa

SEQ ID NO: 639191 - RNA, 19 nt, Artificial Sequence
  Description of Artificial Sequence: Synthetic oligonucleotide
  Antisense strand to SEQ ID NO: 639190
uuucaccuaucaaagcuca

SEQ ID NO: 639192 - RNA, 19 nt, Artificial Sequence
  Description of Artificial Sequence: Synthetic oligonucleotide
  Sense strand starting at position 2773 of SEQ ID NO: 585429
gagcuuugauaggugaaac

SEQ ID NO: 639193 - RNA, 19 nt, Artificial Sequence
  Description of Artificial Sequence: Synthetic oligonucleotide
  Antisense strand to SEQ ID NO: 639192
guuucaccuaucaaagcuc

SEQ ID NO: 639194 - RNA, 19 nt, Artificial Sequence
  Description of Artificial Sequence: Synthetic oligonucleotide
  Sense strand starting at position 2868 of SEQ ID NO: 585429
ugaaauuagcuauauugug

SEQ ID NO: 639195 - RNA, 19 nt, Artificial Sequence
  Description of Artificial Sequence: Synthetic oligonucleotide
  Antisense strand to SEQ ID NO: 639194
cacaauauagcuaauuuca

SEQ ID NO: 639196 - RNA, 19 nt, Artificial Sequence
  Description of Artificial Sequence: Synthetic oligonucleotide
  Sense strand starting at position 2877 of SEQ ID NO: 585429
cuauauugugcucaaagua

SEQ ID NO: 639197 - RNA, 19 nt, Artificial Sequence
  Description of Artificial Sequence: Synthetic oligonucleotide
  Antisense strand to SEQ ID NO: 639196
uacuuugagcacaauauag

SEQ ID NO: 639198 - RNA, 19 nt, Artificial Sequence
  Description of Artificial Sequence: Synthetic oligonucleotide
  Sense strand starting at position 2882 of SEQ ID NO: 585429
uugugcucaaaguauguua

SEQ ID NO: 639199 - RNA, 19 nt, Artificial Sequence
  Description of Artificial Sequence: Synthetic oligonucleotide
  Antisense strand to SEQ ID NO: 639198
uaacauacuuugagcacaa

SEQ ID NO: 639200 - RNA, 19 nt, Artificial Sequence
  Description of Artificial Sequence: Synthetic oligonucleotide
  Sense strand starting at position 2901 of SEQ ID NO: 585429
cugacauuucuccgucguu

SEQ ID NO: 639201 - RNA, 19 nt, Artificial Sequence
  Description of Artificial Sequence: Synthetic oligonucleotide
  Antisense strand to SEQ ID NO: 639200
aacgacggagaaaugucag

SEQ ID NO: 639202 - RNA, 19 nt, Artificial Sequence
  Description of Artificial Sequence: Synthetic oligonucleotide
  Sense strand starting at position 2902 of SEQ ID NO: 585429
ugacauuucuccgucguua

SEQ ID NO: 639203 - RNA, 19 nt, Artificial Sequence
  Description of Artificial Sequence: Synthetic oligonucleotide
  Antisense strand to SEQ ID NO: 639202
uaacgacggagaaauguca

SEQ ID NO: 639204 - RNA, 19 nt, Artificial Sequence
  Description of Artificial Sequence: Synthetic oligonucleotide
  Sense strand starting at position 2904 of SEQ ID NO: 585429
acauuucuccgucguuaaa

SEQ ID NO: 639205 - RNA, 19 nt, Artificial Sequence
  Description of Artificial Sequence: Synthetic oligonucleotide
  Antisense strand to SEQ ID NO: 639204
uuuaacgacggagaaaugu

SEQ ID NO: 639206 - RNA, 19 nt, Artificial Sequence
  Description of Artificial Sequence: Synthetic oligonucleotide
  Sense strand starting at position 2954 of SEQ ID NO: 585429
gucuguauuauguauauag

SEQ ID NO: 639207 - RNA, 19 nt, Artificial Sequence
  Description of Artificial Sequence: Synthetic oligonucleotide
  Antisense strand to SEQ ID NO: 639206
cuauauacauaauacagac

SEQ ID NO: 639208 - RNA, 19 nt, Artificial Sequence
  Description of Artificial Sequence: Synthetic oligonucleotide
  Sense strand starting at position 2961 of SEQ ID NO: 585429
uuauguauauagccugaua

SEQ ID NO: 639209 - RNA, 19 nt, Artificial Sequence
  Description of Artificial Sequence: Synthetic oligonucleotide
  Antisense strand to SEQ ID NO: 639208
uaucaggcuauauacauaa

SEQ ID NO: 639210 - RNA, 19 nt, Artificial Sequence
  Description of Artificial Sequence: Synthetic oligonucleotide
  Sense strand starting at position 2963 of SEQ ID NO: 585429
auguauauagccugauagu

SEQ ID NO: 639211 - RNA, 19 nt, Artificial Sequence
  Description of Artificial Sequence: Synthetic oligonucleotide
  Antisense strand to SEQ ID NO: 639210
acuaucaggcuauauacau

SEQ ID NO: 639212 - RNA, 19 nt, Artificial Sequence
  Description of Artificial Sequence: Synthetic oligonucleotide
  Sense strand starting at position 2981 of SEQ ID NO: 585429
ugcugaauuucugaauuga

SEQ ID NO: 639213 - RNA, 19 nt, Artificial Sequence
  Description of Artificial Sequence: Synthetic oligonucleotide
  Antisense strand to SEQ ID NO: 639212
ucaauucagaaauucagca

SEQ ID NO: 639214 - RNA, 19 nt, Artificial Sequence
  Description of Artificial Sequence: Synthetic oligonucleotide
  Sense strand starting at position 3120 of SEQ ID NO: 585429
cuuaguaaagggugaggua

SEQ ID NO: 639215 - RNA, 19 nt, Artificial Sequence
  Description of Artificial Sequence: Synthetic oligonucleotide
  Antisense strand to SEQ ID NO: 639214
uaccucacccuuuacuaag

SEQ ID NO: 639216 - RNA, 19 nt, Artificial Sequence
  Description of Artificial Sequence: Synthetic oligonucleotide
  Sense strand starting at position 3215 of SEQ ID NO: 585429
acaaauugguauccaugua

SEQ ID NO: 639217 - RNA, 19 nt, Artificial Sequence
  Description of Artificial Sequence: Synthetic oligonucleotide
  Antisense strand to SEQ ID NO: 639216
uacauggauaccaauuugu

SEQ ID NO: 639218 - RNA, 19 nt, Artificial Sequence
  Description of Artificial Sequence: Synthetic oligonucleotide
  Sense strand starting at position 3300 of SEQ ID NO: 585429
auucuaguucucuacucga

SEQ ID NO: 639219 - RNA, 19 nt, Artificial Sequence
  Description of Artificial Sequence: Synthetic oligonucleotide
  Antisense strand to SEQ ID NO: 639218
ucgaguagagaacuagaau

SEQ ID NO: 639220 - RNA, 19 nt, Artificial Sequence
  Description of Artificial Sequence: Synthetic oligonucleotide
  Sense strand starting at position 3303 of SEQ ID NO: 585429
cuaguucucuacucgauuu

SEQ ID NO: 639221 - RNA, 19 nt, Artificial Sequence
  Description of Artificial Sequence: Synthetic oligonucleotide
  Antisense strand to SEQ ID NO: 639220
aaaucgaguagagaacuag

SEQ ID NO: 639222 - RNA, 19 nt, Artificial Sequence
  Description of Artificial Sequence: Synthetic oligonucleotide
  Sense strand starting at position 3347 of SEQ ID NO: 585429
cccuucuuagaaggcauau

SEQ ID NO: 639223 - RNA, 19 nt, Artificial Sequence
  Description of Artificial Sequence: Synthetic oligonucleotide
  Antisense strand to SEQ ID NO: 639222
auaugccuucuaagaaggg

SEQ ID NO: 639224 - RNA, 19 nt, Artificial Sequence
  Description of Artificial Sequence: Synthetic oligonucleotide
  Sense strand starting at position 3616 of SEQ ID NO: 585429
augcaucauguauagaaac

SEQ ID NO: 639225 - RNA, 19 nt, Artificial Sequence
  Description of Artificial Sequence: Synthetic oligonucleotide
  Antisense strand to SEQ ID NO: 639224
guuucuauacaugaugcau

SEQ ID NO: 639226 - RNA, 19 nt, Artificial Sequence
  Description of Artificial Sequence: Synthetic oligonucleotide
  Sense strand starting at position 3691 of SEQ ID NO: 585429
ccaugcuggguccaggaaa

SEQ ID NO: 639227 - RNA, 19 nt, Artificial Sequence
  Description of Artificial Sequence: Synthetic oligonucleotide
  Antisense strand to SEQ ID NO: 639226
uuuccuggacccagcaugg

SEQ ID NO: 639228 - RNA, 19 nt, Artificial Sequence
  Description of Artificial Sequence: Synthetic oligonucleotide
  Sense strand starting at position 3840 of SEQ ID NO: 585429
gaaagaagcuguucuuccu

SEQ ID NO: 639229 - RNA, 19 nt, Artificial Sequence
  Description of Artificial Sequence: Synthetic oligonucleotide
  Antisense strand to SEQ ID NO: 639228
aggaagaacagcuucuuuc

SEQ ID NO: 639230 - RNA, 19 nt, Artificial Sequence
  Description of Artificial Sequence: Synthetic oligonucleotide
  Sense strand starting at position 3863 of SEQ ID NO: 585429
cugaccuuugccuagggau

SEQ ID NO: 639231 - RNA, 19 nt, Artificial Sequence
  Description of Artificial Sequence: Synthetic oligonucleotide
  Antisense strand to SEQ ID NO: 639230
aucccuaggcaaaggucag

SEQ ID NO: 639232 - RNA, 19 nt, Artificial Sequence
  Description of Artificial Sequence: Synthetic oligonucleotide
  Sense strand starting at position 3865 of SEQ ID NO: 585429
gaccuuugccuagggauca

SEQ ID NO: 639233 - RNA, 19 nt, Artificial Sequence
  Description of Artificial Sequence: Synthetic oligonucleotide
  Antisense strand to SEQ ID NO: 639232
ugaucccuaggcaaagguc

SEQ ID NO: 639234 - RNA, 19 nt, Artificial Sequence
  Description of Artificial Sequence: Synthetic oligonucleotide
  Sense strand starting at position 3908 of SEQ ID NO: 585429
guuaguagaacucaguaag

SEQ ID NO: 639235 - RNA, 19 nt, Artificial Sequence
  Description of Artificial Sequence: Synthetic oligonucleotide
  Antisense strand to SEQ ID NO: 639234
cuuacugaguucuacuaac

SEQ ID NO: 639236 - RNA, 19 nt, Artificial Sequence
  Description of Artificial Sequence: Synthetic oligonucleotide
  Sense strand starting at position 3911 of SEQ ID NO: 585429
aguagaacucaguaaguau

SEQ ID NO: 639237 - RNA, 19 nt, Artificial Sequence
  Description of Artificial Sequence: Synthetic oligonucleotide
  Antisense strand to SEQ ID NO: 639236
auacuuacugaguucuacu

SEQ ID NO: 639238 - RNA, 19 nt, Artificial Sequence
  Description of Artificial Sequence: Synthetic oligonucleotide
  Sense strand starting at position 48 of SEQ ID NO: 585430
aaggucuuguuguucucaa

SEQ ID NO: 639239 - RNA, 19 nt, Artificial Sequence
  Description of Artificial Sequence: Synthetic oligonucleotide
  Antisense strand to SEQ ID NO: 639238
uugagaacaacaagaccuu

SEQ ID NO: 639240 - RNA, 19 nt, Artificial Sequence
  Description of Artificial Sequence: Synthetic oligonucleotide
  Sense strand starting at position 49 of SEQ ID NO: 585430
aggucuuguuguucucaaa

SEQ ID NO: 639241 - RNA, 19 nt, Artificial Sequence
  Description of Artificial Sequence: Synthetic oligonucleotide
  Antisense strand to SEQ ID NO: 639240
uuugagaacaacaagaccu

SEQ ID NO: 639242 - RNA, 19 nt, Artificial Sequence
  Description of Artificial Sequence: Synthetic oligonucleotide
  Sense strand starting at position 108 of SEQ ID NO: 585430
acuucagguguuuggaaga

SEQ ID NO: 639243 - RNA, 19 nt, Artificial Sequence
  Description of Artificial Sequence: Synthetic oligonucleotide
  Antisense strand to SEQ ID NO: 639242
ucuuccaaacaccugaagu

SEQ ID NO: 639244 - RNA, 19 nt, Artificial Sequence
  Description of Artificial Sequence: Synthetic oligonucleotide
  Sense strand starting at position 188 of SEQ ID NO: 585430
augcaagaaguguauuguu

SEQ ID NO: 639245 - RNA, 19 nt, Artificial Sequence
  Description of Artificial Sequence: Synthetic oligonucleotide
  Antisense strand to SEQ ID NO: 639244
aacaauacacuucuugcau

SEQ ID NO: 639246 - RNA, 19 nt, Artificial Sequence
  Description of Artificial Sequence: Synthetic oligonucleotide
  Sense strand starting at position 373 of SEQ ID NO: 585430
ucugaaauuugagauaggu

SEQ ID NO: 639247 - RNA, 19 nt, Artificial Sequence
  Description of Artificial Sequence: Synthetic oligonucleotide
  Antisense strand to SEQ ID NO: 639246
accuaucucaaauuucaga

SEQ ID NO: 639248 - RNA, 19 nt, Artificial Sequence
  Description of Artificial Sequence: Synthetic oligonucleotide
  Sense strand starting at position 437 of SEQ ID NO: 585430
uggcgaaacuaaucuuauu

SEQ ID NO: 639249 - RNA, 19 nt, Artificial Sequence
  Description of Artificial Sequence: Synthetic oligonucleotide
  Antisense strand to SEQ ID NO: 639248
aauaagauuaguuucgcca

SEQ ID NO: 639250 - RNA, 19 nt, Artificial Sequence
  Description of Artificial Sequence: Synthetic oligonucleotide
  Sense strand starting at position 582 of SEQ ID NO: 585430
aguucaguguaaguuguaa

SEQ ID NO: 639251 - RNA, 19 nt, Artificial Sequence
  Description of Artificial Sequence: Synthetic oligonucleotide
  Antisense strand to SEQ ID NO: 639250
uuacaacuuacacugaacu

SEQ ID NO: 639252 - RNA, 19 nt, Artificial Sequence
  Description of Artificial Sequence: Synthetic oligonucleotide
  Sense strand starting at position 594 of SEQ ID NO: 585430
guuguaauguuauugccuu

SEQ ID NO: 639253 - RNA, 19 nt, Artificial Sequence
  Description of Artificial Sequence: Synthetic oligonucleotide
  Antisense strand to SEQ ID NO: 639252
aaggcaauaacauuacaac

SEQ ID NO: 639254 - RNA, 19 nt, Artificial Sequence
  Description of Artificial Sequence: Synthetic oligonucleotide
  Sense strand starting at position 598 of SEQ ID NO: 585430
uaauguuauugccuuugga

SEQ ID NO: 639255 - RNA, 19 nt, Artificial Sequence
  Description of Artificial Sequence: Synthetic oligonucleotide
  Antisense strand to SEQ ID NO: 639254
uccaaaggcaauaacauua

SEQ ID NO: 639256 - RNA, 19 nt, Artificial Sequence
  Description of Artificial Sequence: Synthetic oligonucleotide
  Sense strand starting at position 696 of SEQ ID NO: 585430
ggaagaucaucacauggca

SEQ ID NO: 639257 - RNA, 19 nt, Artificial Sequence
  Description of Artificial Sequence: Synthetic oligonucleotide
  Antisense strand to SEQ ID NO: 639256
ugccaugugaugaucuucc

SEQ ID NO: 639258 - RNA, 19 nt, Artificial Sequence
  Description of Artificial Sequence: Synthetic oligonucleotide
  Sense strand starting at position 748 of SEQ ID NO: 585430
guaugucaucguucccgua

SEQ ID NO: 639259 - RNA, 19 nt, Artificial Sequence
  Description of Artificial Sequence: Synthetic oligonucleotide
  Antisense strand to SEQ ID NO: 639258
uacgggaacgaugacauac

SEQ ID NO: 639260 - RNA, 19 nt, Artificial Sequence
  Description of Artificial Sequence: Synthetic oligonucleotide
  Sense strand starting at position 966 of SEQ ID NO: 585430
gguggauccauaggucuau

SEQ ID NO: 639261 - RNA, 19 nt, Artificial Sequence
  Description of Artificial Sequence: Synthetic oligonucleotide
  Antisense strand to SEQ ID NO: 639260
auagaccuauggauccacc

SEQ ID NO: 639262 - RNA, 19 nt, Artificial Sequence
  Description of Artificial Sequence: Synthetic oligonucleotide
  Sense strand starting at position 970 of SEQ ID NO: 585430
gauccauaggucuaucgca

SEQ ID NO: 639263 - RNA, 19 nt, Artificial Sequence
  Description of Artificial Sequence: Synthetic oligonucleotide
  Antisense strand to SEQ ID NO: 639262
ugcgauagaccuauggauc

SEQ ID NO: 639264 - RNA, 19 nt, Artificial Sequence
  Description of Artificial Sequence: Synthetic oligonucleotide
  Sense strand starting at position 1128 of SEQ ID NO: 585430
cgaagaccgccagauuaaa

SEQ ID NO: 639265 - RNA, 19 nt, Artificial Sequence
  Description of Artificial Sequence: Synthetic oligonucleotide
  Antisense strand to SEQ ID NO: 639264
uuuaaucuggcggucuucg

SEQ ID NO: 639266 - RNA, 19 nt, Artificial Sequence
  Description of Artificial Sequence: Synthetic oligonucleotide
  Sense strand starting at position 1339 of SEQ ID NO: 585430
ucgcuucguugaucacaua

SEQ ID NO: 639267 - RNA, 19 nt, Artificial Sequence
  Description of Artificial Sequence: Synthetic oligonucleotide
  Antisense strand to SEQ ID NO: 639266
uaugugaucaacgaagcga

SEQ ID NO: 639268 - RNA, 19 nt, Artificial Sequence
  Description of Artificial Sequence: Synthetic oligonucleotide
  Sense strand starting at position 1340 of SEQ ID NO: 585430
cgcuucguugaucacauau

SEQ ID NO: 639269 - RNA, 19 nt, Artificial Sequence
  Description of Artificial Sequence: Synthetic oligonucleotide
  Antisense strand to SEQ ID NO: 639268
auaugugaucaacgaagcg

SEQ ID NO: 639270 - RNA, 19 nt, Artificial Sequence
  Description of Artificial Sequence: Synthetic oligonucleotide
  Sense strand starting at position 2215 of SEQ ID NO: 585430
gccuucaucggguggauuu

SEQ ID NO: 639271 - RNA, 19 nt, Artificial Sequence
  Description of Artificial Sequence: Synthetic oligonucleotide
  Antisense strand to SEQ ID NO: 639270
aaauccacccgaugaaggc

SEQ ID NO: 639272 - RNA, 19 nt, Artificial Sequence
  Description of Artificial Sequence: Synthetic oligonucleotide
  Sense strand starting at position 2784 of SEQ ID NO: 585430
uccagaaguggcuggcuaa

SEQ ID NO: 639273 - RNA, 19 nt, Artificial Sequence
  Description of Artificial Sequence: Synthetic oligonucleotide
  Antisense strand to SEQ ID NO: 639272
uuagccagccacuucugga

SEQ ID NO: 639274 - RNA, 19 nt, Artificial Sequence
  Description of Artificial Sequence: Synthetic oligonucleotide
  Sense strand starting at position 2785 of SEQ ID NO: 585430
ccagaaguggcuggcuaaa

SEQ ID NO: 639275 - RNA, 19 nt, Artificial Sequence
  Description of Artificial Sequence: Synthetic oligonucleotide
  Antisense strand to SEQ ID NO: 639274
uuuagccagccacuucugg

SEQ ID NO: 639276 - RNA, 19 nt, Artificial Sequence
  Description of Artificial Sequence: Synthetic oligonucleotide
  Sense strand starting at position 2787 of SEQ ID NO: 585430
agaaguggcuggcuaaauu

SEQ ID NO: 639277 - RNA, 19 nt, Artificial Sequence
  Description of Artificial Sequence: Synthetic oligonucleotide
  Antisense strand to SEQ ID NO: 639276
aauuuagccagccacuucu

SEQ ID NO: 639278 - RNA, 19 nt, Artificial Sequence
  Description of Artificial Sequence: Synthetic oligonucleotide
  Sense strand starting at position 2796 of SEQ ID NO: 585430
uggcuaaauugaucagguu

SEQ ID NO: 639279 - RNA, 19 nt, Artificial Sequence
  Description of Artificial Sequence: Synthetic oligonucleotide
  Antisense strand to SEQ ID NO: 639278
aaccugaucaauuuagcca

SEQ ID NO: 639280 - RNA, 19 nt, Artificial Sequence
  Description of Artificial Sequence: Synthetic oligonucleotide
  Sense strand starting at position 2846 of SEQ ID NO: 585430
guggcucauuccguuauca

SEQ ID NO: 639281 - RNA, 19 nt, Artificial Sequence
  Description of Artificial Sequence: Synthetic oligonucleotide
  Antisense strand to SEQ ID NO: 639280
ugauaacggaaugagccac

SEQ ID NO: 639282 - RNA, 19 nt, Artificial Sequence
  Description of Artificial Sequence: Synthetic oligonucleotide
  Sense strand starting at position 2848 of SEQ ID NO: 585430
ggcucauuccguuaucagu

SEQ ID NO: 639283 - RNA, 19 nt, Artificial Sequence
  Description of Artificial Sequence: Synthetic oligonucleotide
  Antisense strand to SEQ ID NO: 639282
acugauaacggaaugagcc

SEQ ID NO: 639284 - RNA, 19 nt, Artificial Sequence
  Description of Artificial Sequence: Synthetic oligonucleotide
  Sense strand starting at position 2850 of SEQ ID NO: 585430
cucauuccguuaucaguaa

SEQ ID NO: 639285 - RNA, 19 nt, Artificial Sequence
  Description of Artificial Sequence: Synthetic oligonucleotide
  Antisense strand to SEQ ID NO: 639284
uuacugauaacggaaugag

SEQ ID NO: 639286 - RNA, 19 nt, Artificial Sequence
  Description of Artificial Sequence: Synthetic oligonucleotide
  Sense strand starting at position 2854 of SEQ ID NO: 585430
uuccguuaucaguaaugag

SEQ ID NO: 639287 - RNA, 19 nt, Artificial Sequence
  Description of Artificial Sequence: Synthetic oligonucleotide
  Antisense strand to SEQ ID NO: 639286
cucauuacugauaacggaa

SEQ ID NO: 639288 - RNA, 19 nt, Artificial Sequence
  Description of Artificial Sequence: Synthetic oligonucleotide
  Sense strand starting at position 2871 of SEQ ID NO: 585430
aguaauugauuagugccaa

SEQ ID NO: 639289 - RNA, 19 nt, Artificial Sequence
  Description of Artificial Sequence: Synthetic oligonucleotide
  Antisense strand to SEQ ID NO: 639288
uuggcacuaaucaauuacu

SEQ ID NO: 639290 - RNA, 19 nt, Artificial Sequence
  Description of Artificial Sequence: Synthetic oligonucleotide
  Sense strand starting at position 2891 of SEQ ID NO: 585430
ugccgaaggacuuaguauu

SEQ ID NO: 639291 - RNA, 19 nt, Artificial Sequence
  Description of Artificial Sequence: Synthetic oligonucleotide
  Antisense strand to SEQ ID NO: 639290
aauacuaaguccuucggca

SEQ ID NO: 639292 - RNA, 19 nt, Artificial Sequence
  Description of Artificial Sequence: Synthetic oligonucleotide
  Sense strand starting at position 2897 of SEQ ID NO: 585430
aggacuuaguauucucauu

SEQ ID NO: 639293 - RNA, 19 nt, Artificial Sequence
  Description of Artificial Sequence: Synthetic oligonucleotide
  Antisense strand to SEQ ID NO: 639292
aaugagaauacuaaguccu

SEQ ID NO: 639294 - RNA, 19 nt, Artificial Sequence
  Description of Artificial Sequence: Synthetic oligonucleotide
  Sense strand starting at position 2937 of SEQ ID NO: 585430
agcgccagauacuuaagau

SEQ ID NO: 639295 - RNA, 19 nt, Artificial Sequence
  Description of Artificial Sequence: Synthetic oligonucleotide
  Antisense strand to SEQ ID NO: 639294
aucuuaaguaucuggcgcu

SEQ ID NO: 639296 - RNA, 19 nt, Artificial Sequence
  Description of Artificial Sequence: Synthetic oligonucleotide
  Sense strand starting at position 2938 of SEQ ID NO: 585430
gcgccagauacuuaagaua

SEQ ID NO: 639297 - RNA, 19 nt, Artificial Sequence
  Description of Artificial Sequence: Synthetic oligonucleotide
  Antisense strand to SEQ ID NO: 639296
uaucuuaaguaucuggcgc

SEQ ID NO: 639298 - RNA, 19 nt, Artificial Sequence
  Description of Artificial Sequence: Synthetic oligonucleotide
  Sense strand starting at position 2941 of SEQ ID NO: 585430
ccagauacuuaagauagaa

SEQ ID NO: 639299 - RNA, 19 nt, Artificial Sequence
  Description of Artificial Sequence: Synthetic oligonucleotide
  Antisense strand to SEQ ID NO: 639298
uucuaucuuaaguaucugg

SEQ ID NO: 639300 - RNA, 19 nt, Artificial Sequence
  Description of Artificial Sequence: Synthetic oligonucleotide
  Sense strand starting at position 3008 of SEQ ID NO: 585430
ggaauaacgugaccuauuc

SEQ ID NO: 639301 - RNA, 19 nt, Artificial Sequence
  Description of Artificial Sequence: Synthetic oligonucleotide
  Antisense strand to SEQ ID NO: 639300
gaauaggucacguuauucc

SEQ ID NO: 639302 - RNA, 19 nt, Artificial Sequence
  Description of Artificial Sequence: Synthetic oligonucleotide
  Sense strand starting at position 3064 of SEQ ID NO: 585430
auacccagauuguuuaaga

SEQ ID NO: 639303 - RNA, 19 nt, Artificial Sequence
  Description of Artificial Sequence: Synthetic oligonucleotide
  Antisense strand to SEQ ID NO: 639302
ucuuaaacaaucuggguau

SEQ ID NO: 639304 - RNA, 19 nt, Artificial Sequence
  Description of Artificial Sequence: Synthetic oligonucleotide
  Sense strand starting at position 3065 of SEQ ID NO: 585430
uacccagauuguuuaagag

SEQ ID NO: 639305 - RNA, 19 nt, Artificial Sequence
  Description of Artificial Sequence: Synthetic oligonucleotide
  Antisense strand to SEQ ID NO: 639304
cucuuaaacaaucugggua

SEQ ID NO: 639306 - RNA, 19 nt, Artificial Sequence
  Description of Artificial Sequence: Synthetic oligonucleotide
  Sense strand starting at position 3072 of SEQ ID NO: 585430
auuguuuaagagcaaucaa

SEQ ID NO: 639307 - RNA, 19 nt, Artificial Sequence
  Description of Artificial Sequence: Synthetic oligonucleotide
  Antisense strand to SEQ ID NO: 639306
uugauugcucuuaaacaau

SEQ ID NO: 639308 - RNA, 19 nt, Artificial Sequence
  Description of Artificial Sequence: Synthetic oligonucleotide
  Sense strand starting at position 3119 of SEQ ID NO: 585430
agaacagauguguaaguuc

SEQ ID NO: 639309 - RNA, 19 nt, Artificial Sequence
  Description of Artificial Sequence: Synthetic oligonucleotide
  Antisense strand to SEQ ID NO: 639308
gaacuuacacaucuguucu

SEQ ID NO: 639310 - RNA, 19 nt, Artificial Sequence
  Description of Artificial Sequence: Synthetic oligonucleotide
  Sense strand starting at position 3126 of SEQ ID NO: 585430
auguguaaguucccagaga

SEQ ID NO: 639311 - RNA, 19 nt, Artificial Sequence
  Description of Artificial Sequence: Synthetic oligonucleotide
  Antisense strand to SEQ ID NO: 639310
ucucugggaacuuacacau

SEQ ID NO: 639312 - RNA, 19 nt, Artificial Sequence
  Description of Artificial Sequence: Synthetic oligonucleotide
  Sense strand starting at position 3147 of SEQ ID NO: 585430
cccagaaugcuguaauugu

SEQ ID NO: 639313 - RNA, 19 nt, Artificial Sequence
  Description of Artificial Sequence: Synthetic oligonucleotide
  Antisense strand to SEQ ID NO: 639312
acaauuacagcauucuggg

SEQ ID NO: 639314 - RNA, 19 nt, Artificial Sequence
  Description of Artificial Sequence: Synthetic oligonucleotide
  Sense strand starting at position 3630 of SEQ ID NO: 585430
auagcugaauaguaaagaa

SEQ ID NO: 639315 - RNA, 19 nt, Artificial Sequence
  Description of Artificial Sequence: Synthetic oligonucleotide
  Antisense strand to SEQ ID NO: 639314
uucuuuacuauucagcuau

SEQ ID NO: 639316 - RNA, 19 nt, Artificial Sequence
  Description of Artificial Sequence: Synthetic oligonucleotide
  Sense strand starting at position 3967 of SEQ ID NO: 585430
aggaaagaguucuuuaauu

SEQ ID NO: 639317 - RNA, 19 nt, Artificial Sequence
  Description of Artificial Sequence: Synthetic oligonucleotide
  Antisense strand to SEQ ID NO: 639316
aauuaaagaacucuuuccu

SEQ ID NO: 639318 - RNA, 19 nt, Artificial Sequence
  Description of Artificial Sequence: Synthetic oligonucleotide
  Sense strand starting at position 75 of SEQ ID NO: 585431
uuauuuguugaacguuauc

SEQ ID NO: 639319 - RNA, 19 nt, Artificial Sequence
  Description of Artificial Sequence: Synthetic oligonucleotide
  Antisense strand to SEQ ID NO: 639318
gauaacguucaacaaauaa

SEQ ID NO: 639320 - RNA, 19 nt, Artificial Sequence
  Description of Artificial Sequence: Synthetic oligonucleotide
  Sense strand starting at position 145 of SEQ ID NO: 585431
agacauaacucguugacaa

SEQ ID NO: 639321 - RNA, 19 nt, Artificial Sequence
  Description of Artificial Sequence: Synthetic oligonucleotide
  Antisense strand to SEQ ID NO: 639320
uugucaacgaguuaugucu

SEQ ID NO: 639322 - RNA, 19 nt, Artificial Sequence
  Description of Artificial Sequence: Synthetic oligonucleotide
  Sense strand starting at position 146 of SEQ ID NO: 585431
gacauaacucguugacaau

SEQ ID NO: 639323 - RNA, 19 nt, Artificial Sequence
  Description of Artificial Sequence: Synthetic oligonucleotide
  Antisense strand to SEQ ID NO: 639322
auugucaacgaguuauguc

SEQ ID NO: 639324 - RNA, 19 nt, Artificial Sequence
  Description of Artificial Sequence: Synthetic oligonucleotide
  Sense strand starting at position 147 of SEQ ID NO: 585431
acauaacucguugacaauc

SEQ ID NO: 639325 - RNA, 19 nt, Artificial Sequence
  Description of Artificial Sequence: Synthetic oligonucleotide
  Antisense strand to SEQ ID NO: 639324
gauugucaacgaguuaugu

SEQ ID NO: 639326 - RNA, 19 nt, Artificial Sequence
  Description of Artificial Sequence: Synthetic oligonucleotide
  Sense strand starting at position 201 of SEQ ID NO: 585431
acgcaaagugcuuaauaaa

SEQ ID NO: 639327 - RNA, 19 nt, Artificial Sequence
  Description of Artificial Sequence: Synthetic oligonucleotide
  Antisense strand to SEQ ID NO: 639326
uuuauuaagcacuuugcgu

SEQ ID NO: 639328 - RNA, 19 nt, Artificial Sequence
  Description of Artificial Sequence: Synthetic oligonucleotide
  Sense strand starting at position 229 of SEQ ID NO: 585431
uggcaaauaaaugguaaga

SEQ ID NO: 639329 - RNA, 19 nt, Artificial Sequence
  Description of Artificial Sequence: Synthetic oligonucleotide
  Antisense strand to SEQ ID NO: 639328
ucuuaccauuuauuugcca

SEQ ID NO: 639330 - RNA, 19 nt, Artificial Sequence
  Description of Artificial Sequence: Synthetic oligonucleotide
  Sense strand starting at position 468 of SEQ ID NO: 585431
auuauauucugauugucac

SEQ ID NO: 639331 - RNA, 19 nt, Artificial Sequence
  Description of Artificial Sequence: Synthetic oligonucleotide
  Antisense strand to SEQ ID NO: 639330
gugacaaucagaauauaau

SEQ ID NO: 639332 - RNA, 19 nt, Artificial Sequence
  Description of Artificial Sequence: Synthetic oligonucleotide
  Sense strand starting at position 509 of SEQ ID NO: 585431
agaauaugcuacuugaaac

SEQ ID NO: 639333 - RNA, 19 nt, Artificial Sequence
  Description of Artificial Sequence: Synthetic oligonucleotide
  Antisense strand to SEQ ID NO: 639332
guuucaaguagcauauucu

SEQ ID NO: 639334 - RNA, 19 nt, Artificial Sequence
  Description of Artificial Sequence: Synthetic oligonucleotide
  Sense strand starting at position 553 of SEQ ID NO: 585431
guuacuuauggugaaauuc

SEQ ID NO: 639335 - RNA, 19 nt, Artificial Sequence
  Description of Artificial Sequence: Synthetic oligonucleotide
  Antisense strand to SEQ ID NO: 639334
gaauuucaccauaaguaac

SEQ ID NO: 639336 - RNA, 19 nt, Artificial Sequence
  Description of Artificial Sequence: Synthetic oligonucleotide
  Sense strand starting at position 605 of SEQ ID NO: 585431
aaacauuacgaguauugcu

SEQ ID NO: 639337 - RNA, 19 nt, Artificial Sequence
  Description of Artificial Sequence: Synthetic oligonucleotide
  Antisense strand to SEQ ID NO: 639336
agcaauacucguaauguuu

SEQ ID NO: 639338 - RNA, 19 nt, Artificial Sequence
  Description of Artificial Sequence: Synthetic oligonucleotide
  Sense strand starting at position 612 of SEQ ID NO: 585431
acgaguauugcugugcggu

SEQ ID NO: 639339 - RNA, 19 nt, Artificial Sequence
  Description of Artificial Sequence: Synthetic oligonucleotide
  Antisense strand to SEQ ID NO: 639338
accgcacagcaauacucgu

SEQ ID NO: 639340 - RNA, 19 nt, Artificial Sequence
  Description of Artificial Sequence: Synthetic oligonucleotide
  Sense strand starting at position 737 of SEQ ID NO: 585431
ugaaguagaagucgaauau

SEQ ID NO: 639341 - RNA, 19 nt, Artificial Sequence
  Description of Artificial Sequence: Synthetic oligonucleotide
  Antisense strand to SEQ ID NO: 639340
auauucgacuucuacuuca

SEQ ID NO: 639342 - RNA, 19 nt, Artificial Sequence
  Description of Artificial Sequence: Synthetic oligonucleotide
  Sense strand starting at position 762 of SEQ ID NO: 585431
aucuuuggccauuaagaac

SEQ ID NO: 639343 - RNA, 19 nt, Artificial Sequence
  Description of Artificial Sequence: Synthetic oligonucleotide
  Antisense strand to SEQ ID NO: 639342
guucuuaauggccaaagau

SEQ ID NO: 639344 - RNA, 19 nt, Artificial Sequence
  Description of Artificial Sequence: Synthetic oligonucleotide
  Sense strand starting at position 1211 of SEQ ID NO: 585431
uguuuaucaccggaauauc

SEQ ID NO: 639345 - RNA, 19 nt, Artificial Sequence
  Description of Artificial Sequence: Synthetic oligonucleotide
  Antisense strand to SEQ ID NO: 639344
gauauuccggugauaaaca

SEQ ID NO: 639346 - RNA, 19 nt, Artificial Sequence
  Description of Artificial Sequence: Synthetic oligonucleotide
  Sense strand starting at position 1979 of SEQ ID NO: 585431
ggaugauaccgcgagagag

SEQ ID NO: 639347 - RNA, 19 nt, Artificial Sequence
  Description of Artificial Sequence: Synthetic oligonucleotide
  Antisense strand to SEQ ID NO: 639346
cucucucgcgguaucaucc

SEQ ID NO: 639348 - RNA, 19 nt, Artificial Sequence
  Description of Artificial Sequence: Synthetic oligonucleotide
  Sense strand starting at position 2235 of SEQ ID NO: 585431
uugaccuguuucuuuaaga

SEQ ID NO: 639349 - RNA, 19 nt, Artificial Sequence
  Description of Artificial Sequence: Synthetic oligonucleotide
  Antisense strand to SEQ ID NO: 639348
ucuuaaagaaacaggucaa

SEQ ID NO: 639350 - RNA, 19 nt, Artificial Sequence
  Description of Artificial Sequence: Synthetic oligonucleotide
  Sense strand starting at position 2236 of SEQ ID NO: 585431
ugaccuguuucuuuaagac

SEQ ID NO: 639351 - RNA, 19 nt, Artificial Sequence
  Description of Artificial Sequence: Synthetic oligonucleotide
  Antisense strand to SEQ ID NO: 639350
gucuuaaagaaacagguca

SEQ ID NO: 639352 - RNA, 19 nt, Artificial Sequence
  Description of Artificial Sequence: Synthetic oligonucleotide
  Sense strand starting at position 2323 of SEQ ID NO: 585431
aguaccugacgcuaugaga

SEQ ID NO: 639353 - RNA, 19 nt, Artificial Sequence
  Description of Artificial Sequence: Synthetic oligonucleotide
  Antisense strand to SEQ ID NO: 639352
ucucauagcgucagguacu

SEQ ID NO: 639354 - RNA, 19 nt, Artificial Sequence
  Description of Artificial Sequence: Synthetic oligonucleotide
  Sense strand starting at position 2353 of SEQ ID NO: 585431
agcgaaucagaucaugcaa

SEQ ID NO: 639355 - RNA, 19 nt, Artificial Sequence
  Description of Artificial Sequence: Synthetic oligonucleotide
  Antisense strand to SEQ ID NO: 639354
uugcaugaucugauucgcu

SEQ ID NO: 639356 - RNA, 19 nt, Artificial Sequence
  Description of Artificial Sequence: Synthetic oligonucleotide
  Sense strand starting at position 2386 of SEQ ID NO: 585431
gaggcugagugaucaagaa

SEQ ID NO: 639357 - RNA, 19 nt, Artificial Sequence
  Description of Artificial Sequence: Synthetic oligonucleotide
  Antisense strand to SEQ ID NO: 639356
uucuugaucacucagccuc

SEQ ID NO: 639358 - RNA, 19 nt, Artificial Sequence
  Description of Artificial Sequence: Synthetic oligonucleotide
  Sense strand starting at position 2427 of SEQ ID NO: 585431
acaaacuuuccacggauua

SEQ ID NO: 639359 - RNA, 19 nt, Artificial Sequence
  Description of Artificial Sequence: Synthetic oligonucleotide
  Antisense strand to SEQ ID NO: 639358
uaauccguggaaaguuugu

SEQ ID NO: 639360 - RNA, 19 nt, Artificial Sequence
  Description of Artificial Sequence: Synthetic oligonucleotide
  Sense strand starting at position 2482 of SEQ ID NO: 585431
caaguuauggauuacgagu

SEQ ID NO: 639361 - RNA, 19 nt, Artificial Sequence
  Description of Artificial Sequence: Synthetic oligonucleotide
  Antisense strand to SEQ ID NO: 639360
acucguaauccauaacuug

SEQ ID NO: 639362 - RNA, 19 nt, Artificial Sequence
  Description of Artificial Sequence: Synthetic oligonucleotide
  Sense strand starting at position 2738 of SEQ ID NO: 585431
agccuaacuguggaauuau

SEQ ID NO: 639363 - RNA, 19 nt, Artificial Sequence
  Description of Artificial Sequence: Synthetic oligonucleotide
  Antisense strand to SEQ ID NO: 639362
auaauuccacaguuaggcu

SEQ ID NO: 639364 - RNA, 19 nt, Artificial Sequence
  Description of Artificial Sequence: Synthetic oligonucleotide
  Sense strand starting at position 2776 of SEQ ID NO: 585431
gcaaauagaucauuggauu

SEQ ID NO: 639365 - RNA, 19 nt, Artificial Sequence
  Description of Artificial Sequence: Synthetic oligonucleotide
  Antisense strand to SEQ ID NO: 639364
aauccaaugaucuauuugc

SEQ ID NO: 639366 - RNA, 19 nt, Artificial Sequence
  Description of Artificial Sequence: Synthetic oligonucleotide
  Sense strand starting at position 2821 of SEQ ID NO: 585431
gggaaacauucugucacuu

SEQ ID NO: 639367 - RNA, 19 nt, Artificial Sequence
  Description of Artificial Sequence: Synthetic oligonucleotide
  Antisense strand to SEQ ID NO: 639366
aagugacagaauguuuccc

SEQ ID NO: 639368 - RNA, 19 nt, Artificial Sequence
  Description of Artificial Sequence: Synthetic oligonucleotide
  Sense strand starting at position 2869 of SEQ ID NO: 585431
acaguuugaugaguggaua

SEQ ID NO: 639369 - RNA, 19 nt, Artificial Sequence
  Description of Artificial Sequence: Synthetic oligonucleotide
  Antisense strand to SEQ ID NO: 639368
uauccacucaucaaacugu

SEQ ID NO: 639370 - RNA, 19 nt, Artificial Sequence
  Description of Artificial Sequence: Synthetic oligonucleotide
  Sense strand starting at position 2870 of SEQ ID NO: 585431
caguuugaugaguggauaa

SEQ ID NO: 639371 - RNA, 19 nt, Artificial Sequence
  Description of Artificial Sequence: Synthetic oligonucleotide
  Antisense strand to SEQ ID NO: 639370
uuauccacucaucaaacug

SEQ ID NO: 639372 - RNA, 19 nt, Artificial Sequence
  Description of Artificial Sequence: Synthetic oligonucleotide
  Sense strand starting at position 3026 of SEQ ID NO: 585431
ggaccuauuggucaucucu

SEQ ID NO: 639373 - RNA, 19 nt, Artificial Sequence
  Description of Artificial Sequence: Synthetic oligonucleotide
  Antisense strand to SEQ ID NO: 639372
agagaugaccaauaggucc

SEQ ID NO: 639374 - RNA, 19 nt, Artificial Sequence
  Description of Artificial Sequence: Synthetic oligonucleotide
  Sense strand starting at position 3035 of SEQ ID NO: 585431
ggucaucucuacuuagaca

SEQ ID NO: 639375 - RNA, 19 nt, Artificial Sequence
  Description of Artificial Sequence: Synthetic oligonucleotide
  Antisense strand to SEQ ID NO: 639374
ugucuaaguagagaugacc

SEQ ID NO: 639376 - RNA, 19 nt, Artificial Sequence
  Description of Artificial Sequence: Synthetic oligonucleotide
  Sense strand starting at position 3091 of SEQ ID NO: 585431
guugucacccaccacaaau

SEQ ID NO: 639377 - RNA, 19 nt, Artificial Sequence
  Description of Artificial Sequence: Synthetic oligonucleotide
  Antisense strand to SEQ ID NO: 639376
auuuguggugggugacaac

SEQ ID NO: 639378 - RNA, 19 nt, Artificial Sequence
  Description of Artificial Sequence: Synthetic oligonucleotide
  Sense strand starting at position 3174 of SEQ ID NO: 585431
gaaaucagggcaugugaaa

SEQ ID NO: 639379 - RNA, 19 nt, Artificial Sequence
  Description of Artificial Sequence: Synthetic oligonucleotide
  Antisense strand to SEQ ID NO: 639378
uuucacaugcccugauuuc

SEQ ID NO: 639380 - RNA, 19 nt, Artificial Sequence
  Description of Artificial Sequence: Synthetic oligonucleotide
  Sense strand starting at position 3224 of SEQ ID NO: 585431
cugauauaaucagugggac

SEQ ID NO: 639381 - RNA, 19 nt, Artificial Sequence
  Description of Artificial Sequence: Synthetic oligonucleotide
  Antisense strand to SEQ ID NO: 639380
gucccacugauuauaucag

SEQ ID NO: 639382 - RNA, 19 nt, Artificial Sequence
  Description of Artificial Sequence: Synthetic oligonucleotide
  Sense strand starting at position 3280 of SEQ ID NO: 585431
caaggauggucacuucuua

SEQ ID NO: 639383 - RNA, 19 nt, Artificial Sequence
  Description of Artificial Sequence: Synthetic oligonucleotide
  Antisense strand to SEQ ID NO: 639382
uaagaagugaccauccuug

SEQ ID NO: 639384 - RNA, 19 nt, Artificial Sequence
  Description of Artificial Sequence: Synthetic oligonucleotide
  Sense strand starting at position 3316 of SEQ ID NO: 585431
gcaggucuauauccgauuu

SEQ ID NO: 639385 - RNA, 19 nt, Artificial Sequence
  Description of Artificial Sequence: Synthetic oligonucleotide
  Antisense strand to SEQ ID NO: 639384
aaaucggauauagaccugc

SEQ ID NO: 639386 - RNA, 19 nt, Artificial Sequence
  Description of Artificial Sequence: Synthetic oligonucleotide
  Sense strand starting at position 3425 of SEQ ID NO: 585431
uucccuggaguguaagaua

SEQ ID NO: 639387 - RNA, 19 nt, Artificial Sequence
  Description of Artificial Sequence: Synthetic oligonucleotide
  Antisense strand to SEQ ID NO: 639386
uaucuuacacuccagggaa

SEQ ID NO: 639388 - RNA, 19 nt, Artificial Sequence
  Description of Artificial Sequence: Synthetic oligonucleotide
  Sense strand starting at position 3430 of SEQ ID NO: 585431
uggaguguaagauauguuu

SEQ ID NO: 639389 - RNA, 19 nt, Artificial Sequence
  Description of Artificial Sequence: Synthetic oligonucleotide
  Antisense strand to SEQ ID NO: 639388
aaacauaucuuacacucca

SEQ ID NO: 639390 - RNA, 19 nt, Artificial Sequence
  Description of Artificial Sequence: Synthetic oligonucleotide
  Sense strand starting at position 3579 of SEQ ID NO: 585431
gaaagaauuuauggugaac

SEQ ID NO: 639391 - RNA, 19 nt, Artificial Sequence
  Description of Artificial Sequence: Synthetic oligonucleotide
  Antisense strand to SEQ ID NO: 639390
guucaccauaaauucuuuc

SEQ ID NO: 639392 - RNA, 19 nt, Artificial Sequence
  Description of Artificial Sequence: Synthetic oligonucleotide
  Sense strand starting at position 3894 of SEQ ID NO: 585431
cuaguaauagauggaaagu

SEQ ID NO: 639393 - RNA, 19 nt, Artificial Sequence
  Description of Artificial Sequence: Synthetic oligonucleotide
  Antisense strand to SEQ ID NO: 639392
acuuuccaucuauuacuag

SEQ ID NO: 639394 - RNA, 19 nt, Artificial Sequence
  Description of Artificial Sequence: Synthetic oligonucleotide
  Sense strand starting at position 3972 of SEQ ID NO: 585431
uucugugauuugguuaugu

SEQ ID NO: 639395 - RNA, 19 nt, Artificial Sequence
  Description of Artificial Sequence: Synthetic oligonucleotide
  Antisense strand to SEQ ID NO: 639394
acauaaccaaaucacagaa

SEQ ID NO: 639396 - RNA, 19 nt, Artificial Sequence
  Description of Artificial Sequence: Synthetic oligonucleotide
  Sense strand starting at position 3983 of SEQ ID NO: 585431
gguuaugugagcuaguaaa

SEQ ID NO: 639397 - RNA, 19 nt, Artificial Sequence
  Description of Artificial Sequence: Synthetic oligonucleotide
  Antisense strand to SEQ ID NO: 639396
uuuacuagcucacauaacc

SEQ ID NO: 639398 - RNA, 19 nt, Artificial Sequence
  Description of Artificial Sequence: Synthetic oligonucleotide
  Sense strand starting at position 68 of SEQ ID NO: 585432
auggauggcuauccuaagu

SEQ ID NO: 639399 - RNA, 19 nt, Artificial Sequence
  Description of Artificial Sequence: Synthetic oligonucleotide
  Antisense strand to SEQ ID NO: 639398
acuuaggauagccauccau

SEQ ID NO: 639400 - RNA, 19 nt, Artificial Sequence
  Description of Artificial Sequence: Synthetic oligonucleotide
  Sense strand starting at position 81 of SEQ ID NO: 585432
cuaaguuacuguccaagac

SEQ ID NO: 639401 - RNA, 19 nt, Artificial Sequence
  Description of Artificial Sequence: Synthetic oligonucleotide
  Antisense strand to SEQ ID NO: 639400
gucuuggacaguaacuuag

SEQ ID NO: 639402 - RNA, 19 nt, Artificial Sequence
  Description of Artificial Sequence: Synthetic oligonucleotide
  Sense strand starting at position 327 of SEQ ID NO: 585432
ucauuugauuucugagguc

SEQ ID NO: 639403 - RNA, 19 nt, Artificial Sequence
  Description of Artificial Sequence: Synthetic oligonucleotide
  Antisense strand to SEQ ID NO: 639402
gaccucagaaaucaaauga

SEQ ID NO: 639404 - RNA, 19 nt, Artificial Sequence
  Description of Artificial Sequence: Synthetic oligonucleotide
  Sense strand starting at position 401 of SEQ ID NO: 585432
guaagauucuacuuauuag

SEQ ID NO: 639405 - RNA, 19 nt, Artificial Sequence
  Description of Artificial Sequence: Synthetic oligonucleotide
  Antisense strand to SEQ ID NO: 639404
cuaauaaguagaaucuuac

SEQ ID NO: 639406 - RNA, 19 nt, Artificial Sequence
  Description of Artificial Sequence: Synthetic oligonucleotide
  Sense strand starting at position 508 of SEQ ID NO: 585432
guaagauuaauucgagaaa

SEQ ID NO: 639407 - RNA, 19 nt, Artificial Sequence
  Description of Artificial Sequence: Synthetic oligonucleotide
  Antisense strand to SEQ ID NO: 639406
uuucucgaauuaaucuuac

SEQ ID NO: 639408 - RNA, 19 nt, Artificial Sequence
  Description of Artificial Sequence: Synthetic oligonucleotide
  Sense strand starting at position 645 of SEQ ID NO: 585432
uuugauaccucagugacag

SEQ ID NO: 639409 - RNA, 19 nt, Artificial Sequence
  Description of Artificial Sequence: Synthetic oligonucleotide
  Antisense strand to SEQ ID NO: 639408
cugucacugagguaucaaa

SEQ ID NO: 639410 - RNA, 19 nt, Artificial Sequence
  Description of Artificial Sequence: Synthetic oligonucleotide
  Sense strand starting at position 646 of SEQ ID NO: 585432
uugauaccucagugacaga

SEQ ID NO: 639411 - RNA, 19 nt, Artificial Sequence
  Description of Artificial Sequence: Synthetic oligonucleotide
  Antisense strand to SEQ ID NO: 639410
ucugucacugagguaucaa

SEQ ID NO: 639412 - RNA, 19 nt, Artificial Sequence
  Description of Artificial Sequence: Synthetic oligonucleotide
  Sense strand starting at position 662 of SEQ ID NO: 585432
agaauaauuuaagagcaag

SEQ ID NO: 639413 - RNA, 19 nt, Artificial Sequence
  Description of Artificial Sequence: Synthetic oligonucleotide
  Antisense strand to SEQ ID NO: 639412
cuugcucuuaaauuauucu

SEQ ID NO: 639414 - RNA, 19 nt, Artificial Sequence
  Description of Artificial Sequence: Synthetic oligonucleotide
  Sense strand starting at position 835 of SEQ ID NO: 585432
cugucucuggcugauaauu

SEQ ID NO: 639415 - RNA, 19 nt, Artificial Sequence
  Description of Artificial Sequence: Synthetic oligonucleotide
  Antisense strand to SEQ ID NO: 639414
aauuaucagccagagacag

SEQ ID NO: 639416 - RNA, 19 nt, Artificial Sequence
  Description of Artificial Sequence: Synthetic oligonucleotide
  Sense strand starting at position 1019 of SEQ ID NO: 585432
aguuaucaucaacaguuau

SEQ ID NO: 639417 - RNA, 19 nt, Artificial Sequence
  Description of Artificial Sequence: Synthetic oligonucleotide
  Antisense strand to SEQ ID NO: 639416
auaacuguugaugauaacu

SEQ ID NO: 639418 - RNA, 19 nt, Artificial Sequence
  Description of Artificial Sequence: Synthetic oligonucleotide
  Sense strand starting at position 1275 of SEQ ID NO: 585432
cguuuaaaccuugauaacu

SEQ ID NO: 639419 - RNA, 19 nt, Artificial Sequence
  Description of Artificial Sequence: Synthetic oligonucleotide
  Antisense strand to SEQ ID NO: 639418
aguuaucaagguuuaaacg

SEQ ID NO: 639420 - RNA, 19 nt, Artificial Sequence
  Description of Artificial Sequence: Synthetic oligonucleotide
  Sense strand starting at position 1317 of SEQ ID NO: 585432
gacagagugacuggucacu

SEQ ID NO: 639421 - RNA, 19 nt, Artificial Sequence
  Description of Artificial Sequence: Synthetic oligonucleotide
  Antisense strand to SEQ ID NO: 639420
agugaccagucacucuguc

SEQ ID NO: 639422 - RNA, 19 nt, Artificial Sequence
  Description of Artificial Sequence: Synthetic oligonucleotide
  Sense strand starting at position 1373 of SEQ ID NO: 585432
ccaagaaaguagcuuaagu

SEQ ID NO: 639423 - RNA, 19 nt, Artificial Sequence
  Description of Artificial Sequence: Synthetic oligonucleotide
  Antisense strand to SEQ ID NO: 639422
acuuaagcuacuuucuugg

SEQ ID NO: 639424 - RNA, 19 nt, Artificial Sequence
  Description of Artificial Sequence: Synthetic oligonucleotide
  Sense strand starting at position 1375 of SEQ ID NO: 585432
aagaaaguagcuuaaguca

SEQ ID NO: 639425 - RNA, 19 nt, Artificial Sequence
  Description of Artificial Sequence: Synthetic oligonucleotide
  Antisense strand to SEQ ID NO: 639424
ugacuuaagcuacuuucuu

SEQ ID NO: 639426 - RNA, 19 nt, Artificial Sequence
  Description of Artificial Sequence: Synthetic oligonucleotide
  Sense strand starting at position 1408 of SEQ ID NO: 585432
ucugaaauacaccgaaucu

SEQ ID NO: 639427 - RNA, 19 nt, Artificial Sequence
  Description of Artificial Sequence: Synthetic oligonucleotide
  Antisense strand to SEQ ID NO: 639426
agauucgguguauuucaga

SEQ ID NO: 639428 - RNA, 19 nt, Artificial Sequence
  Description of Artificial Sequence: Synthetic oligonucleotide
  Sense strand starting at position 1604 of SEQ ID NO: 585432
ggagcuaaugcauaccuuu

SEQ ID NO: 639429 - RNA, 19 nt, Artificial Sequence
  Description of Artificial Sequence: Synthetic oligonucleotide
  Antisense strand to SEQ ID NO: 639428
aaagguaugcauuagcucc

SEQ ID NO: 639430 - RNA, 19 nt, Artificial Sequence
  Description of Artificial Sequence: Synthetic oligonucleotide
  Sense strand starting at position 2482 of SEQ ID NO: 585432
guagacuccucaguaugga

SEQ ID NO: 639431 - RNA, 19 nt, Artificial Sequence
  Description of Artificial Sequence: Synthetic oligonucleotide
  Antisense strand to SEQ ID NO: 639430
uccauacugaggagucuac

SEQ ID NO: 639432 - RNA, 19 nt, Artificial Sequence
  Description of Artificial Sequence: Synthetic oligonucleotide
  Sense strand starting at position 2707 of SEQ ID NO: 585432
ccugaaacccucuggugaa

SEQ ID NO: 639433 - RNA, 19 nt, Artificial Sequence
  Description of Artificial Sequence: Synthetic oligonucleotide
  Antisense strand to SEQ ID NO: 639432
uucaccagaggguuucagg

SEQ ID NO: 639434 - RNA, 19 nt, Artificial Sequence
  Description of Artificial Sequence: Synthetic oligonucleotide
  Sense strand starting at position 2747 of SEQ ID NO: 585432
gcuggcucccaccagagau

SEQ ID NO: 639435 - RNA, 19 nt, Artificial Sequence
  Description of Artificial Sequence: Synthetic oligonucleotide
  Antisense strand to SEQ ID NO: 639434
aucucuggugggagccagc

SEQ ID NO: 639436 - RNA, 19 nt, Artificial Sequence
  Description of Artificial Sequence: Synthetic oligonucleotide
  Sense strand starting at position 2916 of SEQ ID NO: 585432
cugagcaaugcucaacacu

SEQ ID NO: 639437 - RNA, 19 nt, Artificial Sequence
  Description of Artificial Sequence: Synthetic oligonucleotide
  Antisense strand to SEQ ID NO: 639436
aguguugagcauugcucag

SEQ ID NO: 639438 - RNA, 19 nt, Artificial Sequence
  Description of Artificial Sequence: Synthetic oligonucleotide
  Sense strand starting at position 2979 of SEQ ID NO: 585432
agaaucaugugacuauugu

SEQ ID NO: 639439 - RNA, 19 nt, Artificial Sequence
  Description of Artificial Sequence: Synthetic oligonucleotide
  Antisense strand to SEQ ID NO: 639438
acaauagucacaugauucu

SEQ ID NO: 639440 - RNA, 19 nt, Artificial Sequence
  Description of Artificial Sequence: Synthetic oligonucleotide
  Sense strand starting at position 2980 of SEQ ID NO: 585432
gaaucaugugacuauuguu

SEQ ID NO: 639441 - RNA, 19 nt, Artificial Sequence
  Description of Artificial Sequence: Synthetic oligonucleotide
  Antisense strand to SEQ ID NO: 639440
aacaauagucacaugauuc

SEQ ID NO: 639442 - RNA, 19 nt, Artificial Sequence
  Description of Artificial Sequence: Synthetic oligonucleotide
  Sense strand starting at position 3364 of SEQ ID NO: 585432
ggugaugacuaucauuuac

SEQ ID NO: 639443 - RNA, 19 nt, Artificial Sequence
  Description of Artificial Sequence: Synthetic oligonucleotide
  Antisense strand to SEQ ID NO: 639442
guaaaugauagucaucacc

SEQ ID NO: 639444 - RNA, 19 nt, Artificial Sequence
  Description of Artificial Sequence: Synthetic oligonucleotide
  Sense strand starting at position 3385 of SEQ ID NO: 585432
augguauuagggugaggau

SEQ ID NO: 639445 - RNA, 19 nt, Artificial Sequence
  Description of Artificial Sequence: Synthetic oligonucleotide
  Antisense strand to SEQ ID NO: 639444
auccucacccuaauaccau

SEQ ID NO: 639446 - RNA, 19 nt, Artificial Sequence
  Description of Artificial Sequence: Synthetic oligonucleotide
  Sense strand starting at position 3407 of SEQ ID NO: 585432
augcguguagugcuagcaa

SEQ ID NO: 639447 - RNA, 19 nt, Artificial Sequence
  Description of Artificial Sequence: Synthetic oligonucleotide
  Antisense strand to SEQ ID NO: 639446
uugcuagcacuacacgcau

SEQ ID NO: 639448 - RNA, 19 nt, Artificial Sequence
  Description of Artificial Sequence: Synthetic oligonucleotide
  Sense strand starting at position 3410 of SEQ ID NO: 585432
cguguagugcuagcaacuu

SEQ ID NO: 639449 - RNA, 19 nt, Artificial Sequence
  Description of Artificial Sequence: Synthetic oligonucleotide
  Antisense strand to SEQ ID NO: 639448
aaguugcuagcacuacacg

SEQ ID NO: 639450 - RNA, 19 nt, Artificial Sequence
  Description of Artificial Sequence: Synthetic oligonucleotide
  Sense strand starting at position 3425 of SEQ ID NO: 585432
acuugaagugcuuaauaaa

SEQ ID NO: 639451 - RNA, 19 nt, Artificial Sequence
  Description of Artificial Sequence: Synthetic oligonucleotide
  Antisense strand to SEQ ID NO: 639450
uuuauuaagcacuucaagu

SEQ ID NO: 639452 - RNA, 19 nt, Artificial Sequence
  Description of Artificial Sequence: Synthetic oligonucleotide
  Sense strand starting at position 3467 of SEQ ID NO: 585432
aauaguuugcuguaacuag

SEQ ID NO: 639453 - RNA, 19 nt, Artificial Sequence
  Description of Artificial Sequence: Synthetic oligonucleotide
  Antisense strand to SEQ ID NO: 639452
cuaguuacagcaaacuauu

SEQ ID NO: 639454 - RNA, 19 nt, Artificial Sequence
  Description of Artificial Sequence: Synthetic oligonucleotide
  Sense strand starting at position 3474 of SEQ ID NO: 585432
ugcuguaacuaguccauuu

SEQ ID NO: 639455 - RNA, 19 nt, Artificial Sequence
  Description of Artificial Sequence: Synthetic oligonucleotide
  Antisense strand to SEQ ID NO: 639454
aaauggacuaguuacagca

SEQ ID NO: 639456 - RNA, 19 nt, Artificial Sequence
  Description of Artificial Sequence: Synthetic oligonucleotide
  Sense strand starting at position 3599 of SEQ ID NO: 585432
acuaaauugugagcaaaca

SEQ ID NO: 639457 - RNA, 19 nt, Artificial Sequence
  Description of Artificial Sequence: Synthetic oligonucleotide
  Antisense strand to SEQ ID NO: 639456
uguuugcucacaauuuagu

SEQ ID NO: 639458 - RNA, 19 nt, Artificial Sequence
  Description of Artificial Sequence: Synthetic oligonucleotide
  Sense strand starting at position 3697 of SEQ ID NO: 585432
agaucucuggcaugaagaa

SEQ ID NO: 639459 - RNA, 19 nt, Artificial Sequence
  Description of Artificial Sequence: Synthetic oligonucleotide
  Antisense strand to SEQ ID NO: 639458
uucuucaugccagagaucu

SEQ ID NO: 639460 - RNA, 19 nt, Artificial Sequence
  Description of Artificial Sequence: Synthetic oligonucleotide
  Sense strand starting at position 3709 of SEQ ID NO: 585432
ugaagaaacgcaggaaauu

SEQ ID NO: 639461 - RNA, 19 nt, Artificial Sequence
  Description of Artificial Sequence: Synthetic oligonucleotide
  Antisense strand to SEQ ID NO: 639460
aauuuccugcguuucuuca

SEQ ID NO: 639462 - RNA, 19 nt, Artificial Sequence
  Description of Artificial Sequence: Synthetic oligonucleotide
  Sense strand starting at position 3804 of SEQ ID NO: 585432
gcugaaugggccugagaaa

SEQ ID NO: 639463 - RNA, 19 nt, Artificial Sequence
  Description of Artificial Sequence: Synthetic oligonucleotide
  Antisense strand to SEQ ID NO: 639462
uuucucaggcccauucagc

SEQ ID NO: 639464 - RNA, 19 nt, Artificial Sequence
  Description of Artificial Sequence: Synthetic oligonucleotide
  Sense strand starting at position 3857 of SEQ ID NO: 585432
gcugaaucucacgaaguga

SEQ ID NO: 639465 - RNA, 19 nt, Artificial Sequence
  Description of Artificial Sequence: Synthetic oligonucleotide
  Antisense strand to SEQ ID NO: 639464
ucacuucgugagauucagc

SEQ ID NO: 639466 - RNA, 19 nt, Artificial Sequence
  Description of Artificial Sequence: Synthetic oligonucleotide
  Sense strand starting at position 3905 of SEQ ID NO: 585432
gcagcaagucuacaauuaa

SEQ ID NO: 639467 - RNA, 19 nt, Artificial Sequence
  Description of Artificial Sequence: Synthetic oligonucleotide
  Antisense strand to SEQ ID NO: 639466
uuaauuguagacuugcugc

SEQ ID NO: 639468 - RNA, 19 nt, Artificial Sequence
  Description of Artificial Sequence: Synthetic oligonucleotide
  Sense strand starting at position 3953 of SEQ ID NO: 585432
gcuucucccgaugacaaau

SEQ ID NO: 639469 - RNA, 19 nt, Artificial Sequence
  Description of Artificial Sequence: Synthetic oligonucleotide
  Antisense strand to SEQ ID NO: 639468
auuugucaucgggagaagc

SEQ ID NO: 639470 - RNA, 19 nt, Artificial Sequence
  Description of Artificial Sequence: Synthetic oligonucleotide
  Sense strand starting at position 3959 of SEQ ID NO: 585432
cccgaugacaaauguuuga

SEQ ID NO: 639471 - RNA, 19 nt, Artificial Sequence
  Description of Artificial Sequence: Synthetic oligonucleotide
  Antisense strand to SEQ ID NO: 639470
ucaaacauuugucaucggg

SEQ ID NO: 639472 - RNA, 19 nt, Artificial Sequence
  Description of Artificial Sequence: Synthetic oligonucleotide
  Sense strand starting at position 3963 of SEQ ID NO: 585432
augacaaauguuugaccca

SEQ ID NO: 639473 - RNA, 19 nt, Artificial Sequence
  Description of Artificial Sequence: Synthetic oligonucleotide
  Antisense strand to SEQ ID NO: 639472
ugggucaaacauuugucau

SEQ ID NO: 639474 - RNA, 19 nt, Artificial Sequence
  Description of Artificial Sequence: Synthetic oligonucleotide
  Sense strand starting at position 3966 of SEQ ID NO: 585432
acaaauguuugacccagau

SEQ ID NO: 639475 - RNA, 19 nt, Artificial Sequence
  Description of Artificial Sequence: Synthetic oligonucleotide
  Antisense strand to SEQ ID NO: 639474
aucugggucaaacauuugu

SEQ ID NO: 639476 - RNA, 19 nt, Artificial Sequence
  Description of Artificial Sequence: Synthetic oligonucleotide
  Sense strand starting at position 3970 of SEQ ID NO: 585432
auguuugacccagauguuu

SEQ ID NO: 639477 - RNA, 19 nt, Artificial Sequence
  Description of Artificial Sequence: Synthetic oligonucleotide
  Antisense strand to SEQ ID NO: 639476
aaacaucugggucaaacau

SEQ ID NO: 639478 - RNA, 19 nt, Artificial Sequence
  Description of Artificial Sequence: Synthetic oligonucleotide
  Sense strand starting at position 8 of SEQ ID NO: 585433
guaagauucuacuuauuag

SEQ ID NO: 639479 - RNA, 19 nt, Artificial Sequence
  Description of Artificial Sequence: Synthetic oligonucleotide
  Antisense strand to SEQ ID NO: 639478
cuaauaaguagaaucuuac

SEQ ID NO: 639480 - RNA, 19 nt, Artificial Sequence
  Description of Artificial Sequence: Synthetic oligonucleotide
  Sense strand starting at position 22 of SEQ ID NO: 585433
auuagaacuucccugugua

SEQ ID NO: 639481 - RNA, 19 nt, Artificial Sequence
  Description of Artificial Sequence: Synthetic oligonucleotide
  Antisense strand to SEQ ID NO: 639480
uacacagggaaguucuaau

SEQ ID NO: 639482 - RNA, 19 nt, Artificial Sequence
  Description of Artificial Sequence: Synthetic oligonucleotide
  Sense strand starting at position 115 of SEQ ID NO: 585433
guaagauuaauucgagaaa

SEQ ID NO: 639483 - RNA, 19 nt, Artificial Sequence
  Description of Artificial Sequence: Synthetic oligonucleotide
  Antisense strand to SEQ ID NO: 639482
uuucucgaauuaaucuuac

SEQ ID NO: 639484 - RNA, 19 nt, Artificial Sequence
  Description of Artificial Sequence: Synthetic oligonucleotide
  Sense strand starting at position 252 of SEQ ID NO: 585433
uuugauaccucagugacag

SEQ ID NO: 639485 - RNA, 19 nt, Artificial Sequence
  Description of Artificial Sequence: Synthetic oligonucleotide
  Antisense strand to SEQ ID NO: 639484
cugucacugagguaucaaa

SEQ ID NO: 639486 - RNA, 19 nt, Artificial Sequence
  Description of Artificial Sequence: Synthetic oligonucleotide
  Sense strand starting at position 253 of SEQ ID NO: 585433
uugauaccucagugacaga

SEQ ID NO: 639487 - RNA, 19 nt, Artificial Sequence
  Description of Artificial Sequence: Synthetic oligonucleotide
  Antisense strand to SEQ ID NO: 639486
ucugucacugagguaucaa

SEQ ID NO: 639488 - RNA, 19 nt, Artificial Sequence
  Description of Artificial Sequence: Synthetic oligonucleotide
  Sense strand starting at position 269 of SEQ ID NO: 585433
agaauaauuuaagagcaag

SEQ ID NO: 639489 - RNA, 19 nt, Artificial Sequence
  Description of Artificial Sequence: Synthetic oligonucleotide
  Antisense strand to SEQ ID NO: 639488
cuugcucuuaaauuauucu

SEQ ID NO: 639490 - RNA, 19 nt, Artificial Sequence
  Description of Artificial Sequence: Synthetic oligonucleotide
  Sense strand starting at position 442 of SEQ ID NO: 585433
cugucucuggcugauaauu

SEQ ID NO: 639491 - RNA, 19 nt, Artificial Sequence
  Description of Artificial Sequence: Synthetic oligonucleotide
  Antisense strand to SEQ ID NO: 639490
aauuaucagccagagacag

SEQ ID NO: 639492 - RNA, 19 nt, Artificial Sequence
  Description of Artificial Sequence: Synthetic oligonucleotide
  Sense strand starting at position 626 of SEQ ID NO: 585433
aguuaucaucaacaguuau

SEQ ID NO: 639493 - RNA, 19 nt, Artificial Sequence
  Description of Artificial Sequence: Synthetic oligonucleotide
  Antisense strand to SEQ ID NO: 639492
auaacuguugaugauaacu

SEQ ID NO: 639494 - RNA, 19 nt, Artificial Sequence
  Description of Artificial Sequence: Synthetic oligonucleotide
  Sense strand starting at position 872 of SEQ ID NO: 585433
gggagauguucguuuaaac

SEQ ID NO: 639495 - RNA, 19 nt, Artificial Sequence
  Description of Artificial Sequence: Synthetic oligonucleotide
  Antisense strand to SEQ ID NO: 639494
guuuaaacgaacaucuccc

SEQ ID NO: 639496 - RNA, 19 nt, Artificial Sequence
  Description of Artificial Sequence: Synthetic oligonucleotide
  Sense strand starting at position 881 of SEQ ID NO: 585433
ucguuuaaaccuugauaac

SEQ ID NO: 639497 - RNA, 19 nt, Artificial Sequence
  Description of Artificial Sequence: Synthetic oligonucleotide
  Antisense strand to SEQ ID NO: 639496
guuaucaagguuuaaacga

SEQ ID NO: 639498 - RNA, 19 nt, Artificial Sequence
  Description of Artificial Sequence: Synthetic oligonucleotide
  Sense strand starting at position 882 of SEQ ID NO: 585433
cguuuaaaccuugauaacu

SEQ ID NO: 639499 - RNA, 19 nt, Artificial Sequence
  Description of Artificial Sequence: Synthetic oligonucleotide
  Antisense strand to SEQ ID NO: 639498
aguuaucaagguuuaaacg

SEQ ID NO: 639500 - RNA, 19 nt, Artificial Sequence
  Description of Artificial Sequence: Synthetic oligonucleotide
  Sense strand starting at position 924 of SEQ ID NO: 585433
gacagagugacuggucacu

SEQ ID NO: 639501 - RNA, 19 nt, Artificial Sequence
  Description of Artificial Sequence: Synthetic oligonucleotide
  Antisense strand to SEQ ID NO: 639500
agugaccagucacucuguc

SEQ ID NO: 639502 - RNA, 19 nt, Artificial Sequence
  Description of Artificial Sequence: Synthetic oligonucleotide
  Sense strand starting at position 980 of SEQ ID NO: 585433
ccaagaaaguagcuuaagu

SEQ ID NO: 639503 - RNA, 19 nt, Artificial Sequence
  Description of Artificial Sequence: Synthetic oligonucleotide
  Antisense strand to SEQ ID NO: 639502
acuuaagcuacuuucuugg

SEQ ID NO: 639504 - RNA, 19 nt, Artificial Sequence
  Description of Artificial Sequence: Synthetic oligonucleotide
  Sense strand starting at position 982 of SEQ ID NO: 585433
aagaaaguagcuuaaguca

SEQ ID NO: 639505 - RNA, 19 nt, Artificial Sequence
  Description of Artificial Sequence: Synthetic oligonucleotide
  Antisense strand to SEQ ID NO: 639504
ugacuuaagcuacuuucuu

SEQ ID NO: 639506 - RNA, 19 nt, Artificial Sequence
  Description of Artificial Sequence: Synthetic oligonucleotide
  Sense strand starting at position 1015 of SEQ ID NO: 585433
ucugaaauacaccgaaucu

SEQ ID NO: 639507 - RNA, 19 nt, Artificial Sequence
  Description of Artificial Sequence: Synthetic oligonucleotide
  Antisense strand to SEQ ID NO: 639506
agauucgguguauuucaga

SEQ ID NO: 639508 - RNA, 19 nt, Artificial Sequence
  Description of Artificial Sequence: Synthetic oligonucleotide
  Sense strand starting at position 1211 of SEQ ID NO: 585433
ggagcuaaugcauaccuuu

SEQ ID NO: 639509 - RNA, 19 nt, Artificial Sequence
  Description of Artificial Sequence: Synthetic oligonucleotide
  Antisense strand to SEQ ID NO: 639508
aaagguaugcauuagcucc

SEQ ID NO: 639510 - RNA, 19 nt, Artificial Sequence
  Description of Artificial Sequence: Synthetic oligonucleotide
  Sense strand starting at position 2089 of SEQ ID NO: 585433
guagacuccucaguaugga

SEQ ID NO: 639511 - RNA, 19 nt, Artificial Sequence
  Description of Artificial Sequence: Synthetic oligonucleotide
  Antisense strand to SEQ ID NO: 639510
uccauacugaggagucuac

SEQ ID NO: 639512 - RNA, 19 nt, Artificial Sequence
  Description of Artificial Sequence: Synthetic oligonucleotide
  Sense strand starting at position 2314 of SEQ ID NO: 585433
ccugaaacccucuggugaa

SEQ ID NO: 639513 - RNA, 19 nt, Artificial Sequence
  Description of Artificial Sequence: Synthetic oligonucleotide
  Antisense strand to SEQ ID NO: 639512
uucaccagaggguuucagg

SEQ ID NO: 639514 - RNA, 19 nt, Artificial Sequence
  Description of Artificial Sequence: Synthetic oligonucleotide
  Sense strand starting at position 2354 of SEQ ID NO: 585433
gcuggcucccaccagagau

SEQ ID NO: 639515 - RNA, 19 nt, Artificial Sequence
  Description of Artificial Sequence: Synthetic oligonucleotide
  Antisense strand to SEQ ID NO: 639514
aucucuggugggagccagc

SEQ ID NO: 639516 - RNA, 19 nt, Artificial Sequence
  Description of Artificial Sequence: Synthetic oligonucleotide
  Sense strand starting at position 2523 of SEQ ID NO: 585433
cugagcaaugcucaacacu

SEQ ID NO: 639517 - RNA, 19 nt, Artificial Sequence
  Description of Artificial Sequence: Synthetic oligonucleotide
  Antisense strand to SEQ ID NO: 639516
aguguugagcauugcucag

SEQ ID NO: 639518 - RNA, 19 nt, Artificial Sequence
  Description of Artificial Sequence: Synthetic oligonucleotide
  Sense strand starting at position 2586 of SEQ ID NO: 585433
agaaucaugugacuauugu

SEQ ID NO: 639519 - RNA, 19 nt, Artificial Sequence
  Description of Artificial Sequence: Synthetic oligonucleotide
  Antisense strand to SEQ ID NO: 639518
acaauagucacaugauucu

SEQ ID NO: 639520 - RNA, 19 nt, Artificial Sequence
  Description of Artificial Sequence: Synthetic oligonucleotide
  Sense strand starting at position 2587 of SEQ ID NO: 585433
gaaucaugugacuauuguu

SEQ ID NO: 639521 - RNA, 19 nt, Artificial Sequence
  Description of Artificial Sequence: Synthetic oligonucleotide
  Antisense strand to SEQ ID NO: 639520
aacaauagucacaugauuc

SEQ ID NO: 639522 - RNA, 19 nt, Artificial Sequence
  Description of Artificial Sequence: Synthetic oligonucleotide
  Sense strand starting at position 2971 of SEQ ID NO: 585433
ggugaugacuaucauuuac

SEQ ID NO: 639523 - RNA, 19 nt, Artificial Sequence
  Description of Artificial Sequence: Synthetic oligonucleotide
  Antisense strand to SEQ ID NO: 639522
guaaaugauagucaucacc

SEQ ID NO: 639524 - RNA, 19 nt, Artificial Sequence
  Description of Artificial Sequence: Synthetic oligonucleotide
  Sense strand starting at position 2992 of SEQ ID NO: 585433
augguauuagggugaggau

SEQ ID NO: 639525 - RNA, 19 nt, Artificial Sequence
  Description of Artificial Sequence: Synthetic oligonucleotide
  Antisense strand to SEQ ID NO: 639524
auccucacccuaauaccau

SEQ ID NO: 639526 - RNA, 19 nt, Artificial Sequence
  Description of Artificial Sequence: Synthetic oligonucleotide
  Sense strand starting at position 3014 of SEQ ID NO: 585433
augcguguagugcuagcaa

SEQ ID NO: 639527 - RNA, 19 nt, Artificial Sequence
  Description of Artificial Sequence: Synthetic oligonucleotide
  Antisense strand to SEQ ID NO: 639526
uugcuagcacuacacgcau

SEQ ID NO: 639528 - RNA, 19 nt, Artificial Sequence
  Description of Artificial Sequence: Synthetic oligonucleotide
  Sense strand starting at position 3017 of SEQ ID NO: 585433
cguguagugcuagcaacuu

SEQ ID NO: 639529 - RNA, 19 nt, Artificial Sequence
  Description of Artificial Sequence: Synthetic oligonucleotide
  Antisense strand to SEQ ID NO: 639528
aaguugcuagcacuacacg

SEQ ID NO: 639530 - RNA, 19 nt, Artificial Sequence
  Description of Artificial Sequence: Synthetic oligonucleotide
  Sense strand starting at position 3032 of SEQ ID NO: 585433
acuugaagugcuuaauaaa

SEQ ID NO: 639531 - RNA, 19 nt, Artificial Sequence
  Description of Artificial Sequence: Synthetic oligonucleotide
  Antisense strand to SEQ ID NO: 639530
uuuauuaagcacuucaagu

SEQ ID NO: 639532 - RNA, 19 nt, Artificial Sequence
  Description of Artificial Sequence: Synthetic oligonucleotide
  Sense strand starting at position 3074 of SEQ ID NO: 585433
aauaguuugcuguaacuag

SEQ ID NO: 639533 - RNA, 19 nt, Artificial Sequence
  Description of Artificial Sequence: Synthetic oligonucleotide
  Antisense strand to SEQ ID NO: 639532
cuaguuacagcaaacuauu

SEQ ID NO: 639534 - RNA, 19 nt, Artificial Sequence
  Description of Artificial Sequence: Synthetic oligonucleotide
  Sense strand starting at position 3081 of SEQ ID NO: 585433
ugcuguaacuaguccauuu

SEQ ID NO: 639535 - RNA, 19 nt, Artificial Sequence
  Description of Artificial Sequence: Synthetic oligonucleotide
  Antisense strand to SEQ ID NO: 639534
aaauggacuaguuacagca

SEQ ID NO: 639536 - RNA, 19 nt, Artificial Sequence
  Description of Artificial Sequence: Synthetic oligonucleotide
  Sense strand starting at position 3206 of SEQ ID NO: 585433
acuaaauugugagcaaaca

SEQ ID NO: 639537 - RNA, 19 nt, Artificial Sequence
  Description of Artificial Sequence: Synthetic oligonucleotide
  Antisense strand to SEQ ID NO: 639536
uguuugcucacaauuuagu

SEQ ID NO: 639538 - RNA, 19 nt, Artificial Sequence
  Description of Artificial Sequence: Synthetic oligonucleotide
  Sense strand starting at position 3304 of SEQ ID NO: 585433
agaucucuggcaugaagaa

SEQ ID NO: 639539 - RNA, 19 nt, Artificial Sequence
  Description of Artificial Sequence: Synthetic oligonucleotide
  Antisense strand to SEQ ID NO: 639538
uucuucaugccagagaucu

SEQ ID NO: 639540 - RNA, 19 nt, Artificial Sequence
  Description of Artificial Sequence: Synthetic oligonucleotide
  Sense strand starting at position 3316 of SEQ ID NO: 585433
ugaagaaacgcaggaaauu

SEQ ID NO: 639541 - RNA, 19 nt, Artificial Sequence
  Description of Artificial Sequence: Synthetic oligonucleotide
  Antisense strand to SEQ ID NO: 639540
aauuuccugcguuucuuca

SEQ ID NO: 639542 - RNA, 19 nt, Artificial Sequence
  Description of Artificial Sequence: Synthetic oligonucleotide
  Sense strand starting at position 3411 of SEQ ID NO: 585433
gcugaaugggccugagaaa

SEQ ID NO: 639543 - RNA, 19 nt, Artificial Sequence
  Description of Artificial Sequence: Synthetic oligonucleotide
  Antisense strand to SEQ ID NO: 639542
uuucucaggcccauucagc

SEQ ID NO: 639544 - RNA, 19 nt, Artificial Sequence
  Description of Artificial Sequence: Synthetic oligonucleotide
  Sense strand starting at position 3464 of SEQ ID NO: 585433
gcugaaucucacgaaguga

SEQ ID NO: 639545 - RNA, 19 nt, Artificial Sequence
  Description of Artificial Sequence: Synthetic oligonucleotide
  Antisense strand to SEQ ID NO: 639544
ucacuucgugagauucagc

SEQ ID NO: 639546 - RNA, 19 nt, Artificial Sequence
  Description of Artificial Sequence: Synthetic oligonucleotide
  Sense strand starting at position 3512 of SEQ ID NO: 585433
gcagcaagucuacaauuaa

SEQ ID NO: 639547 - RNA, 19 nt, Artificial Sequence
  Description of Artificial Sequence: Synthetic oligonucleotide
  Antisense strand to SEQ ID NO: 639546
uuaauuguagacuugcugc

SEQ ID NO: 639548 - RNA, 19 nt, Artificial Sequence
  Description of Artificial Sequence: Synthetic oligonucleotide
  Sense strand starting at position 3560 of SEQ ID NO: 585433
gcuucucccgaugacaaau

SEQ ID NO: 639549 - RNA, 19 nt, Artificial Sequence
  Description of Artificial Sequence: Synthetic oligonucleotide
  Antisense strand to SEQ ID NO: 639548
auuugucaucgggagaagc

SEQ ID NO: 639550 - RNA, 19 nt, Artificial Sequence
  Description of Artificial Sequence: Synthetic oligonucleotide
  Sense strand starting at position 3566 of SEQ ID NO: 585433
cccgaugacaaauguuuga

SEQ ID NO: 639551 - RNA, 19 nt, Artificial Sequence
  Description of Artificial Sequence: Synthetic oligonucleotide
  Antisense strand to SEQ ID NO: 639550
ucaaacauuugucaucggg

SEQ ID NO: 639552 - RNA, 19 nt, Artificial Sequence
  Description of Artificial Sequence: Synthetic oligonucleotide
  Sense strand starting at position 3570 of SEQ ID NO: 585433
augacaaauguuugaccca

SEQ ID NO: 639553 - RNA, 19 nt, Artificial Sequence
  Description of Artificial Sequence: Synthetic oligonucleotide
  Antisense strand to SEQ ID NO: 639552
ugggucaaacauuugucau

SEQ ID NO: 639554 - RNA, 19 nt, Artificial Sequence
  Description of Artificial Sequence: Synthetic oligonucleotide
  Sense strand starting at position 3573 of SEQ ID NO: 585433
acaaauguuugacccagau

SEQ ID NO: 639555 - RNA, 19 nt, Artificial Sequence
  Description of Artificial Sequence: Synthetic oligonucleotide
  Antisense strand to SEQ ID NO: 639554
aucugggucaaacauuugu

SEQ ID NO: 639556 - RNA, 19 nt, Artificial Sequence
  Description of Artificial Sequence: Synthetic oligonucleotide
  Sense strand starting at position 3577 of SEQ ID NO: 585433
auguuugacccagauguuu

SEQ ID NO: 639557 - RNA, 19 nt, Artificial Sequence
  Description of Artificial Sequence: Synthetic oligonucleotide
  Antisense strand to SEQ ID NO: 639556
aaacaucugggucaaacau

SEQ ID NO: 639558 - RNA, 19 nt, Artificial Sequence
  Description of Artificial Sequence: Synthetic oligonucleotide
  Sense strand starting at position 203 of SEQ ID NO: 585434
gccguaugucgaguacaca

SEQ ID NO: 639559 - RNA, 19 nt, Artificial Sequence
  Description of Artificial Sequence: Synthetic oligonucleotide
  Antisense strand to SEQ ID NO: 639558
uguguacucgacauacggc

SEQ ID NO: 639560 - RNA, 19 nt, Artificial Sequence
  Description of Artificial Sequence: Synthetic oligonucleotide
  Sense strand starting at position 291 of SEQ ID NO: 585434
gcagcuucuguguuaucua

SEQ ID NO: 639561 - RNA, 19 nt, Artificial Sequence
  Description of Artificial Sequence: Synthetic oligonucleotide
  Antisense strand to SEQ ID NO: 639560
uagauaacacagaagcugc

SEQ ID NO: 639562 - RNA, 19 nt, Artificial Sequence
  Description of Artificial Sequence: Synthetic oligonucleotide
  Sense strand starting at position 390 of SEQ ID NO: 585434
uugaccaauuaucuggauu

SEQ ID NO: 639563 - RNA, 19 nt, Artificial Sequence
  Description of Artificial Sequence: Synthetic oligonucleotide
  Antisense strand to SEQ ID NO: 639562
aauccagauaauuggucaa

SEQ ID NO: 639564 - RNA, 19 nt, Artificial Sequence
  Description of Artificial Sequence: Synthetic oligonucleotide
  Sense strand starting at position 657 of SEQ ID NO: 585434
caguuagccgauuaaauau

SEQ ID NO: 639565 - RNA, 19 nt, Artificial Sequence
  Description of Artificial Sequence: Synthetic oligonucleotide
  Antisense strand to SEQ ID NO: 639564
auauuuaaucggcuaacug

SEQ ID NO: 639566 - RNA, 19 nt, Artificial Sequence
  Description of Artificial Sequence: Synthetic oligonucleotide
  Sense strand starting at position 715 of SEQ ID NO: 585434
cccugaacauuugagauua

SEQ ID NO: 639567 - RNA, 19 nt, Artificial Sequence
  Description of Artificial Sequence: Synthetic oligonucleotide
  Antisense strand to SEQ ID NO: 639566
uaaucucaaauguucaggg

SEQ ID NO: 639568 - RNA, 19 nt, Artificial Sequence
  Description of Artificial Sequence: Synthetic oligonucleotide
  Sense strand starting at position 717 of SEQ ID NO: 585434
cugaacauuugagauuauu

SEQ ID NO: 639569 - RNA, 19 nt, Artificial Sequence
  Description of Artificial Sequence: Synthetic oligonucleotide
  Antisense strand to SEQ ID NO: 639568
aauaaucucaaauguucag

SEQ ID NO: 639570 - RNA, 19 nt, Artificial Sequence
  Description of Artificial Sequence: Synthetic oligonucleotide
  Sense strand starting at position 965 of SEQ ID NO: 585434
guaugucuccuacaugaaa

SEQ ID NO: 639571 - RNA, 19 nt, Artificial Sequence
  Description of Artificial Sequence: Synthetic oligonucleotide
  Antisense strand to SEQ ID NO: 639570
uuucauguaggagacauac

SEQ ID NO: 639572 - RNA, 19 nt, Artificial Sequence
  Description of Artificial Sequence: Synthetic oligonucleotide
  Sense strand starting at position 1162 of SEQ ID NO: 585434
cccgaaauguagucuauaa

SEQ ID NO: 639573 - RNA, 19 nt, Artificial Sequence
  Description of Artificial Sequence: Synthetic oligonucleotide
  Antisense strand to SEQ ID NO: 639572
uuauagacuacauuucggg

SEQ ID NO: 639574 - RNA, 19 nt, Artificial Sequence
  Description of Artificial Sequence: Synthetic oligonucleotide
  Sense strand starting at position 1164 of SEQ ID NO: 585434
cgaaauguagucuauaaag

SEQ ID NO: 639575 - RNA, 19 nt, Artificial Sequence
  Description of Artificial Sequence: Synthetic oligonucleotide
  Antisense strand to SEQ ID NO: 639574
cuuuauagacuacauuucg

SEQ ID NO: 639576 - RNA, 19 nt, Artificial Sequence
  Description of Artificial Sequence: Synthetic oligonucleotide
  Sense strand starting at position 1181 of SEQ ID NO: 585434
aguuccaaugcuuguauuu

SEQ ID NO: 639577 - RNA, 19 nt, Artificial Sequence
  Description of Artificial Sequence: Synthetic oligonucleotide
  Antisense strand to SEQ ID NO: 639576
aaauacaagcauuggaacu

SEQ ID NO: 639578 - RNA, 19 nt, Artificial Sequence
  Description of Artificial Sequence: Synthetic oligonucleotide
  Sense strand starting at position 1218 of SEQ ID NO: 585434
gugacucacuguuuacaua

SEQ ID NO: 639579 - RNA, 19 nt, Artificial Sequence
  Description of Artificial Sequence: Synthetic oligonucleotide
  Antisense strand to SEQ ID NO: 639578
uauguaaacagugagucac

SEQ ID NO: 639580 - RNA, 19 nt, Artificial Sequence
  Description of Artificial Sequence: Synthetic oligonucleotide
  Sense strand starting at position 1219 of SEQ ID NO: 585434
ugacucacuguuuacauau

SEQ ID NO: 639581 - RNA, 19 nt, Artificial Sequence
  Description of Artificial Sequence: Synthetic oligonucleotide
  Antisense strand to SEQ ID NO: 639580
auauguaaacagugaguca

SEQ ID NO: 639582 - RNA, 19 nt, Artificial Sequence
  Description of Artificial Sequence: Synthetic oligonucleotide
  Sense strand starting at position 1328 of SEQ ID NO: 585434
aggcaagauaaaugugauc

SEQ ID NO: 639583 - RNA, 19 nt, Artificial Sequence
  Description of Artificial Sequence: Synthetic oligonucleotide
  Antisense strand to SEQ ID NO: 639582
gaucacauuuaucuugccu

SEQ ID NO: 639584 - RNA, 19 nt, Artificial Sequence
  Description of Artificial Sequence: Synthetic oligonucleotide
  Sense strand starting at position 1591 of SEQ ID NO: 585434
gaaugaugaugguuugccu

SEQ ID NO: 639585 - RNA, 19 nt, Artificial Sequence
  Description of Artificial Sequence: Synthetic oligonucleotide
  Antisense strand to SEQ ID NO: 639584
aggcaaaccaucaucauuc

SEQ ID NO: 639586 - RNA, 19 nt, Artificial Sequence
  Description of Artificial Sequence: Synthetic oligonucleotide
  Sense strand starting at position 1833 of SEQ ID NO: 585434
cuugaacguccuuauuaag

SEQ ID NO: 639587 - RNA, 19 nt, Artificial Sequence
  Description of Artificial Sequence: Synthetic oligonucleotide
  Antisense strand to SEQ ID NO: 639586
cuuaauaaggacguucaag

SEQ ID NO: 639588 - RNA, 19 nt, Artificial Sequence
  Description of Artificial Sequence: Synthetic oligonucleotide
  Sense strand starting at position 2221 of SEQ ID NO: 585434
uuaagaaaugguugcuaaa

SEQ ID NO: 639589 - RNA, 19 nt, Artificial Sequence
  Description of Artificial Sequence: Synthetic oligonucleotide
  Antisense strand to SEQ ID NO: 639588
uuuagcaaccauuucuuaa

SEQ ID NO: 639590 - RNA, 19 nt, Artificial Sequence
  Description of Artificial Sequence: Synthetic oligonucleotide
  Sense strand starting at position 2529 of SEQ ID NO: 585434
ugagaaaguguauggaaug

SEQ ID NO: 639591 - RNA, 19 nt, Artificial Sequence
  Description of Artificial Sequence: Synthetic oligonucleotide
  Antisense strand to SEQ ID NO: 639590
cauuccauacacuuucuca

SEQ ID NO: 639592 - RNA, 19 nt, Artificial Sequence
  Description of Artificial Sequence: Synthetic oligonucleotide
  Sense strand starting at position 2534 of SEQ ID NO: 585434
aaguguauggaaugacauu

SEQ ID NO: 639593 - RNA, 19 nt, Artificial Sequence
  Description of Artificial Sequence: Synthetic oligonucleotide
  Antisense strand to SEQ ID NO: 639592
aaugucauuccauacacuu

SEQ ID NO: 639594 - RNA, 19 nt, Artificial Sequence
  Description of Artificial Sequence: Synthetic oligonucleotide
  Sense strand starting at position 2595 of SEQ ID NO: 585434
guaaguucugaauaauucu

SEQ ID NO: 639595 - RNA, 19 nt, Artificial Sequence
  Description of Artificial Sequence: Synthetic oligonucleotide
  Antisense strand to SEQ ID NO: 639594
agaauuauucagaacuuac

SEQ ID NO: 639596 - RNA, 19 nt, Artificial Sequence
  Description of Artificial Sequence: Synthetic oligonucleotide
  Sense strand starting at position 2598 of SEQ ID NO: 585434
aguucugaauaauucugaa

SEQ ID NO: 639597 - RNA, 19 nt, Artificial Sequence
  Description of Artificial Sequence: Synthetic oligonucleotide
  Antisense strand to SEQ ID NO: 639596
uucagaauuauucagaacu

SEQ ID NO: 639598 - RNA, 19 nt, Artificial Sequence
  Description of Artificial Sequence: Synthetic oligonucleotide
  Sense strand starting at position 2685 of SEQ ID NO: 585434
uguuaaauauugguccuca

SEQ ID NO: 639599 - RNA, 19 nt, Artificial Sequence
  Description of Artificial Sequence: Synthetic oligonucleotide
  Antisense strand to SEQ ID NO: 639598
ugaggaccaauauuuaaca

SEQ ID NO: 639600 - RNA, 19 nt, Artificial Sequence
  Description of Artificial Sequence: Synthetic oligonucleotide
  Sense strand starting at position 2686 of SEQ ID NO: 585434
guuaaauauugguccucag

SEQ ID NO: 639601 - RNA, 19 nt, Artificial Sequence
  Description of Artificial Sequence: Synthetic oligonucleotide
  Antisense strand to SEQ ID NO: 639600
cugaggaccaauauuuaac

SEQ ID NO: 639602 - RNA, 19 nt, Artificial Sequence
  Description of Artificial Sequence: Synthetic oligonucleotide
  Sense strand starting at position 2689 of SEQ ID NO: 585434
aaauauugguccucagagu

SEQ ID NO: 639603 - RNA, 19 nt, Artificial Sequence
  Description of Artificial Sequence: Synthetic oligonucleotide
  Antisense strand to SEQ ID NO: 639602
acucugaggaccaauauuu

SEQ ID NO: 639604 - RNA, 19 nt, Artificial Sequence
  Description of Artificial Sequence: Synthetic oligonucleotide
  Sense strand starting at position 2690 of SEQ ID NO: 585434
aauauugguccucagaguu

SEQ ID NO: 639605 - RNA, 19 nt, Artificial Sequence
  Description of Artificial Sequence: Synthetic oligonucleotide
  Antisense strand to SEQ ID NO: 639604
aacucugaggaccaauauu

SEQ ID NO: 639606 - RNA, 19 nt, Artificial Sequence
  Description of Artificial Sequence: Synthetic oligonucleotide
  Sense strand starting at position 2697 of SEQ ID NO: 585434
guccucagaguuuaucauu

SEQ ID NO: 639607 - RNA, 19 nt, Artificial Sequence
  Description of Artificial Sequence: Synthetic oligonucleotide
  Antisense strand to SEQ ID NO: 639606
aaugauaaacucugaggac

SEQ ID NO: 639608 - RNA, 19 nt, Artificial Sequence
  Description of Artificial Sequence: Synthetic oligonucleotide
  Sense strand starting at position 2745 of SEQ ID NO: 585434
cugugaacucaacaugucu

SEQ ID NO: 639609 - RNA, 19 nt, Artificial Sequence
  Description of Artificial Sequence: Synthetic oligonucleotide
  Antisense strand to SEQ ID NO: 639608
agacauguugaguucacag

SEQ ID NO: 639610 - RNA, 19 nt, Artificial Sequence
  Description of Artificial Sequence: Synthetic oligonucleotide
  Sense strand starting at position 2802 of SEQ ID NO: 585434
uuuguuuagggucauagag

SEQ ID NO: 639611 - RNA, 19 nt, Artificial Sequence
  Description of Artificial Sequence: Synthetic oligonucleotide
  Antisense strand to SEQ ID NO: 639610
cucuaugacccuaaacaaa

SEQ ID NO: 639612 - RNA, 19 nt, Artificial Sequence
  Description of Artificial Sequence: Synthetic oligonucleotide
  Sense strand starting at position 2895 of SEQ ID NO: 585434
gccagaacacuuugauuac

SEQ ID NO: 639613 - RNA, 19 nt, Artificial Sequence
  Description of Artificial Sequence: Synthetic oligonucleotide
  Antisense strand to SEQ ID NO: 639612
guaaucaaaguguucuggc

SEQ ID NO: 639614 - RNA, 19 nt, Artificial Sequence
  Description of Artificial Sequence: Synthetic oligonucleotide
  Sense strand starting at position 2923 of SEQ ID NO: 585434
acuuaaugaguuuggguga

SEQ ID NO: 639615 - RNA, 19 nt, Artificial Sequence
  Description of Artificial Sequence: Synthetic oligonucleotide
  Antisense strand to SEQ ID NO: 639614
ucacccaaacucauuaagu

SEQ ID NO: 639616 - RNA, 19 nt, Artificial Sequence
  Description of Artificial Sequence: Synthetic oligonucleotide
  Sense strand starting at position 2926 of SEQ ID NO: 585434
uaaugaguuugggugagca

SEQ ID NO: 639617 - RNA, 19 nt, Artificial Sequence
  Description of Artificial Sequence: Synthetic oligonucleotide
  Antisense strand to SEQ ID NO: 639616
ugcucacccaaacucauua

SEQ ID NO: 639618 - RNA, 19 nt, Artificial Sequence
  Description of Artificial Sequence: Synthetic oligonucleotide
  Sense strand starting at position 3106 of SEQ ID NO: 585434
ggcaacuaaccuuguuaau

SEQ ID NO: 639619 - RNA, 19 nt, Artificial Sequence
  Description of Artificial Sequence: Synthetic oligonucleotide
  Antisense strand to SEQ ID NO: 639618
auuaacaagguuaguugcc

SEQ ID NO: 639620 - RNA, 19 nt, Artificial Sequence
  Description of Artificial Sequence: Synthetic oligonucleotide
  Sense strand starting at position 3118 of SEQ ID NO: 585434
uguuaauacccuuggaacu

SEQ ID NO: 639621 - RNA, 19 nt, Artificial Sequence
  Description of Artificial Sequence: Synthetic oligonucleotide
  Antisense strand to SEQ ID NO: 639620
aguuccaaggguauuaaca

SEQ ID NO: 639622 - RNA, 19 nt, Artificial Sequence
  Description of Artificial Sequence: Synthetic oligonucleotide
  Sense strand starting at position 3119 of SEQ ID NO: 585434
guuaauacccuuggaacua

SEQ ID NO: 639623 - RNA, 19 nt, Artificial Sequence
  Description of Artificial Sequence: Synthetic oligonucleotide
  Antisense strand to SEQ ID NO: 639622
uaguuccaaggguauuaac

SEQ ID NO: 639624 - RNA, 19 nt, Artificial Sequence
  Description of Artificial Sequence: Synthetic oligonucleotide
  Sense strand starting at position 3535 of SEQ ID NO: 585434
gaagauguuaaguggcaga

SEQ ID NO: 639625 - RNA, 19 nt, Artificial Sequence
  Description of Artificial Sequence: Synthetic oligonucleotide
  Antisense strand to SEQ ID NO: 639624
ucugccacuuaacaucuuc

SEQ ID NO: 639626 - RNA, 19 nt, Artificial Sequence
  Description of Artificial Sequence: Synthetic oligonucleotide
  Sense strand starting at position 3540 of SEQ ID NO: 585434
uguuaaguggcagacucuu

SEQ ID NO: 639627 - RNA, 19 nt, Artificial Sequence
  Description of Artificial Sequence: Synthetic oligonucleotide
  Antisense strand to SEQ ID NO: 639626
aagagucugccacuuaaca

SEQ ID NO: 639628 - RNA, 19 nt, Artificial Sequence
  Description of Artificial Sequence: Synthetic oligonucleotide
  Sense strand starting at position 3697 of SEQ ID NO: 585434
ugcuaagaacacugacauu

SEQ ID NO: 639629 - RNA, 19 nt, Artificial Sequence
  Description of Artificial Sequence: Synthetic oligonucleotide
  Antisense strand to SEQ ID NO: 639628
aaugucaguguucuuagca

SEQ ID NO: 639630 - RNA, 19 nt, Artificial Sequence
  Description of Artificial Sequence: Synthetic oligonucleotide
  Sense strand starting at position 3708 of SEQ ID NO: 585434
cugacauuaggcuauaguu

SEQ ID NO: 639631 - RNA, 19 nt, Artificial Sequence
  Description of Artificial Sequence: Synthetic oligonucleotide
  Antisense strand to SEQ ID NO: 639630
aacuauagccuaaugucag

SEQ ID NO: 639632 - RNA, 19 nt, Artificial Sequence
  Description of Artificial Sequence: Synthetic oligonucleotide
  Sense strand starting at position 3811 of SEQ ID NO: 585434
gaaacagaauuguuguaug

SEQ ID NO: 639633 - RNA, 19 nt, Artificial Sequence
  Description of Artificial Sequence: Synthetic oligonucleotide
  Antisense strand to SEQ ID NO: 639632
cauacaacaauucuguuuc

SEQ ID NO: 639634 - RNA, 19 nt, Artificial Sequence
  Description of Artificial Sequence: Synthetic oligonucleotide
  Sense strand starting at position 3954 of SEQ ID NO: 585434
ggaggugacuucucacuuc

SEQ ID NO: 639635 - RNA, 19 nt, Artificial Sequence
  Description of Artificial Sequence: Synthetic oligonucleotide
  Antisense strand to SEQ ID NO: 639634
gaagugagaagucaccucc

SEQ ID NO: 639636 - RNA, 19 nt, Artificial Sequence
  Description of Artificial Sequence: Synthetic oligonucleotide
  Sense strand starting at position 3965 of SEQ ID NO: 585434
cucacuuccgagcaacaaa

SEQ ID NO: 639637 - RNA, 19 nt, Artificial Sequence
  Description of Artificial Sequence: Synthetic oligonucleotide
  Antisense strand to SEQ ID NO: 639636
uuuguugcucggaagugag

SEQ ID NO: 639638 - RNA, 19 nt, Artificial Sequence
  Description of Artificial Sequence: Synthetic oligonucleotide
  Sense strand starting at position 165 of SEQ ID NO: 585435
uugcgaacacauuaagaca

SEQ ID NO: 639639 - RNA, 19 nt, Artificial Sequence
  Description of Artificial Sequence: Synthetic oligonucleotide
  Antisense strand to SEQ ID NO: 639638
ugucuuaauguguucgcaa

SEQ ID NO: 639640 - RNA, 19 nt, Artificial Sequence
  Description of Artificial Sequence: Synthetic oligonucleotide
  Sense strand starting at position 219 of SEQ ID NO: 585435
ucaagauacuuugucaguc

SEQ ID NO: 639641 - RNA, 19 nt, Artificial Sequence
  Description of Artificial Sequence: Synthetic oligonucleotide
  Antisense strand to SEQ ID NO: 639640
gacugacaaaguaucuuga

SEQ ID NO: 639642 - RNA, 19 nt, Artificial Sequence
  Description of Artificial Sequence: Synthetic oligonucleotide
  Sense strand starting at position 244 of SEQ ID NO: 585435
ucagguaucuuggcugaag

SEQ ID NO: 639643 - RNA, 19 nt, Artificial Sequence
  Description of Artificial Sequence: Synthetic oligonucleotide
  Antisense strand to SEQ ID NO: 639642
cuucagccaagauaccuga

SEQ ID NO: 639644 - RNA, 19 nt, Artificial Sequence
  Description of Artificial Sequence: Synthetic oligonucleotide
  Sense strand starting at position 247 of SEQ ID NO: 585435
gguaucuuggcugaaggga

SEQ ID NO: 639645 - RNA, 19 nt, Artificial Sequence
  Description of Artificial Sequence: Synthetic oligonucleotide
  Antisense strand to SEQ ID NO: 639644
ucccuucagccaagauacc

SEQ ID NO: 639646 - RNA, 19 nt, Artificial Sequence
  Description of Artificial Sequence: Synthetic oligonucleotide
  Sense strand starting at position 300 of SEQ ID NO: 585435
cuagcaauagcagauacau

SEQ ID NO: 639647 - RNA, 19 nt, Artificial Sequence
  Description of Artificial Sequence: Synthetic oligonucleotide
  Antisense strand to SEQ ID NO: 639646
auguaucugcuauugcuag

SEQ ID NO: 639648 - RNA, 19 nt, Artificial Sequence
  Description of Artificial Sequence: Synthetic oligonucleotide
  Sense strand starting at position 408 of SEQ ID NO: 585435
ggaaacaaaugcuuccgau

SEQ ID NO: 639649 - RNA, 19 nt, Artificial Sequence
  Description of Artificial Sequence: Synthetic oligonucleotide
  Antisense strand to SEQ ID NO: 639648
aucggaagcauuuguuucc

SEQ ID NO: 639650 - RNA, 19 nt, Artificial Sequence
  Description of Artificial Sequence: Synthetic oligonucleotide
  Sense strand starting at position 453 of SEQ ID NO: 585435
cuugcaauuggagagucua

SEQ ID NO: 639651 - RNA, 19 nt, Artificial Sequence
  Description of Artificial Sequence: Synthetic oligonucleotide
  Antisense strand to SEQ ID NO: 639650
uagacucuccaauugcaag

SEQ ID NO: 639652 - RNA, 19 nt, Artificial Sequence
  Description of Artificial Sequence: Synthetic oligonucleotide
  Sense strand starting at position 543 of SEQ ID NO: 585435
acagcuuacuggccaagaa

SEQ ID NO: 639653 - RNA, 19 nt, Artificial Sequence
  Description of Artificial Sequence: Synthetic oligonucleotide
  Antisense strand to SEQ ID NO: 639652
uucuuggccaguaagcugu

SEQ ID NO: 639654 - RNA, 19 nt, Artificial Sequence
  Description of Artificial Sequence: Synthetic oligonucleotide
  Sense strand starting at position 596 of SEQ ID NO: 585435
caagauagccucuggagaa

SEQ ID NO: 639655 - RNA, 19 nt, Artificial Sequence
  Description of Artificial Sequence: Synthetic oligonucleotide
  Antisense strand to SEQ ID NO: 639654
uucuccagaggcuaucuug

SEQ ID NO: 639656 - RNA, 19 nt, Artificial Sequence
  Description of Artificial Sequence: Synthetic oligonucleotide
  Sense strand starting at position 869 of SEQ ID NO: 585435
ccgacaagucaacgaaagu

SEQ ID NO: 639657 - RNA, 19 nt, Artificial Sequence
  Description of Artificial Sequence: Synthetic oligonucleotide
  Antisense strand to SEQ ID NO: 639656
acuuucguugacuugucgg

SEQ ID NO: 639658 - RNA, 19 nt, Artificial Sequence
  Description of Artificial Sequence: Synthetic oligonucleotide
  Sense strand starting at position 1441 of SEQ ID NO: 585435
gggugauuucggugccagc

SEQ ID NO: 639659 - RNA, 19 nt, Artificial Sequence
  Description of Artificial Sequence: Synthetic oligonucleotide
  Antisense strand to SEQ ID NO: 639658
gcuggcaccgaaaucaccc

SEQ ID NO: 639660 - RNA, 19 nt, Artificial Sequence
  Description of Artificial Sequence: Synthetic oligonucleotide
  Sense strand starting at position 1988 of SEQ ID NO: 585435
gacgcuauuucccuccgaa

SEQ ID NO: 639661 - RNA, 19 nt, Artificial Sequence
  Description of Artificial Sequence: Synthetic oligonucleotide
  Antisense strand to SEQ ID NO: 639660
uucggagggaaauagcguc

SEQ ID NO: 639662 - RNA, 19 nt, Artificial Sequence
  Description of Artificial Sequence: Synthetic oligonucleotide
  Sense strand starting at position 2181 of SEQ ID NO: 585435
ggacuucgcaucugaugag

SEQ ID NO: 639663 - RNA, 19 nt, Artificial Sequence
  Description of Artificial Sequence: Synthetic oligonucleotide
  Antisense strand to SEQ ID NO: 639662
cucaucagaugcgaagucc

SEQ ID NO: 639664 - RNA, 19 nt, Artificial Sequence
  Description of Artificial Sequence: Synthetic oligonucleotide
  Sense strand starting at position 2256 of SEQ ID NO: 585435
uuaguuuccguuuaguaaa

SEQ ID NO: 639665 - RNA, 19 nt, Artificial Sequence
  Description of Artificial Sequence: Synthetic oligonucleotide
  Antisense strand to SEQ ID NO: 639664
uuuacuaaacggaaacuaa

SEQ ID NO: 639666 - RNA, 19 nt, Artificial Sequence
  Description of Artificial Sequence: Synthetic oligonucleotide
  Sense strand starting at position 2269 of SEQ ID NO: 585435
aguaaacgaccuugugacu

SEQ ID NO: 639667 - RNA, 19 nt, Artificial Sequence
  Description of Artificial Sequence: Synthetic oligonucleotide
  Antisense strand to SEQ ID NO: 639666
agucacaaggucguuuacu

SEQ ID NO: 639668 - RNA, 19 nt, Artificial Sequence
  Description of Artificial Sequence: Synthetic oligonucleotide
  Sense strand starting at position 2353 of SEQ ID NO: 585435
acagauuauuggccgagga

SEQ ID NO: 639669 - RNA, 19 nt, Artificial Sequence
  Description of Artificial Sequence: Synthetic oligonucleotide
  Antisense strand to SEQ ID NO: 639668
uccucggccaauaaucugu

SEQ ID NO: 639670 - RNA, 19 nt, Artificial Sequence
  Description of Artificial Sequence: Synthetic oligonucleotide
  Sense strand starting at position 2354 of SEQ ID NO: 585435
cagauuauuggccgaggaa

SEQ ID NO: 639671 - RNA, 19 nt, Artificial Sequence
  Description of Artificial Sequence: Synthetic oligonucleotide
  Antisense strand to SEQ ID NO: 639670
uuccucggccaauaaucug

SEQ ID NO: 639672 - RNA, 19 nt, Artificial Sequence
  Description of Artificial Sequence: Synthetic oligonucleotide
  Sense strand starting at position 2383 of SEQ ID NO: 585435
cgcucuaaaggauaagcaa

SEQ ID NO: 639673 - RNA, 19 nt, Artificial Sequence
  Description of Artificial Sequence: Synthetic oligonucleotide
  Antisense strand to SEQ ID NO: 639672
uugcuuauccuuuagagcg

SEQ ID NO: 639674 - RNA, 19 nt, Artificial Sequence
  Description of Artificial Sequence: Synthetic oligonucleotide
  Sense strand starting at position 2509 of SEQ ID NO: 585435
ucuggcuuggcugaagaua

SEQ ID NO: 639675 - RNA, 19 nt, Artificial Sequence
  Description of Artificial Sequence: Synthetic oligonucleotide
  Antisense strand to SEQ ID NO: 639674
uaucuucagccaagccaga

SEQ ID NO: 639676 - RNA, 19 nt, Artificial Sequence
  Description of Artificial Sequence: Synthetic oligonucleotide
  Sense strand starting at position 2532 of SEQ ID NO: 585435
gcaagcucugaacaguuua

SEQ ID NO: 639677 - RNA, 19 nt, Artificial Sequence
  Description of Artificial Sequence: Synthetic oligonucleotide
  Antisense strand to SEQ ID NO: 639676
uaaacuguucagagcuugc

SEQ ID NO: 639678 - RNA, 19 nt, Artificial Sequence
  Description of Artificial Sequence: Synthetic oligonucleotide
  Sense strand starting at position 2589 of SEQ ID NO: 585435
gagagucgagaacaguauu

SEQ ID NO: 639679 - RNA, 19 nt, Artificial Sequence
  Description of Artificial Sequence: Synthetic oligonucleotide
  Antisense strand to SEQ ID NO: 639678
aauacuguucucgacucuc

SEQ ID NO: 639680 - RNA, 19 nt, Artificial Sequence
  Description of Artificial Sequence: Synthetic oligonucleotide
  Sense strand starting at position 2592 of SEQ ID NO: 585435
agucgagaacaguauugga

SEQ ID NO: 639681 - RNA, 19 nt, Artificial Sequence
  Description of Artificial Sequence: Synthetic oligonucleotide
  Antisense strand to SEQ ID NO: 639680
uccaauacuguucucgacu

SEQ ID NO: 639682 - RNA, 19 nt, Artificial Sequence
  Description of Artificial Sequence: Synthetic oligonucleotide
  Sense strand starting at position 2597 of SEQ ID NO: 585435
agaacaguauuggauuuau

SEQ ID NO: 639683 - RNA, 19 nt, Artificial Sequence
  Description of Artificial Sequence: Synthetic oligonucleotide
  Antisense strand to SEQ ID NO: 639682
auaaauccaauacuguucu

SEQ ID NO: 639684 - RNA, 19 nt, Artificial Sequence
  Description of Artificial Sequence: Synthetic oligonucleotide
  Sense strand starting at position 2613 of SEQ ID NO: 585435
uauuguuaggguuacaauu

SEQ ID NO: 639685 - RNA, 19 nt, Artificial Sequence
  Description of Artificial Sequence: Synthetic oligonucleotide
  Antisense strand to SEQ ID NO: 639684
aauuguaacccuaacaaua

SEQ ID NO: 639686 - RNA, 19 nt, Artificial Sequence
  Description of Artificial Sequence: Synthetic oligonucleotide
  Sense strand starting at position 2661 of SEQ ID NO: 585435
cucugagcccagugaacua

SEQ ID NO: 639687 - RNA, 19 nt, Artificial Sequence
  Description of Artificial Sequence: Synthetic oligonucleotide
  Antisense strand to SEQ ID NO: 639686
uaguucacugggcucagag

SEQ ID NO: 639688 - RNA, 19 nt, Artificial Sequence
  Description of Artificial Sequence: Synthetic oligonucleotide
  Sense strand starting at position 2700 of SEQ ID NO: 585435
uggcuuucuggaugacuag

SEQ ID NO: 639689 - RNA, 19 nt, Artificial Sequence
  Description of Artificial Sequence: Synthetic oligonucleotide
  Antisense strand to SEQ ID NO: 639688
cuagucauccagaaagcca

SEQ ID NO: 639690 - RNA, 19 nt, Artificial Sequence
  Description of Artificial Sequence: Synthetic oligonucleotide
  Sense strand starting at position 2716 of SEQ ID NO: 585435
uagguagagcuuuaacuaa

SEQ ID NO: 639691 - RNA, 19 nt, Artificial Sequence
  Description of Artificial Sequence: Synthetic oligonucleotide
  Antisense strand to SEQ ID NO: 639690
uuaguuaaagcucuaccua

SEQ ID NO: 639692 - RNA, 19 nt, Artificial Sequence
  Description of Artificial Sequence: Synthetic oligonucleotide
  Sense strand starting at position 2749 of SEQ ID NO: 585435
guggucugugaugaugaau

SEQ ID NO: 639693 - RNA, 19 nt, Artificial Sequence
  Description of Artificial Sequence: Synthetic oligonucleotide
  Antisense strand to SEQ ID NO: 639692
auucaucaucacagaccac

SEQ ID NO: 639694 - RNA, 19 nt, Artificial Sequence
  Description of Artificial Sequence: Synthetic oligonucleotide
  Sense strand starting at position 2771 of SEQ ID NO: 585435
cccguagugucauuucuau

SEQ ID NO: 639695 - RNA, 19 nt, Artificial Sequence
  Description of Artificial Sequence: Synthetic oligonucleotide
  Antisense strand to SEQ ID NO: 639694
auagaaaugacacuacggg

SEQ ID NO: 639696 - RNA, 19 nt, Artificial Sequence
  Description of Artificial Sequence: Synthetic oligonucleotide
  Sense strand starting at position 2984 of SEQ ID NO: 585435
uucuuugagcaucagaaau

SEQ ID NO: 639697 - RNA, 19 nt, Artificial Sequence
  Description of Artificial Sequence: Synthetic oligonucleotide
  Antisense strand to SEQ ID NO: 639696
auuucugaugcucaaagaa

SEQ ID NO: 639698 - RNA, 19 nt, Artificial Sequence
  Description of Artificial Sequence: Synthetic oligonucleotide
  Sense strand starting at position 3021 of SEQ ID NO: 585435
aguugaacuauccggaaga

SEQ ID NO: 639699 - RNA, 19 nt, Artificial Sequence
  Description of Artificial Sequence: Synthetic oligonucleotide
  Antisense strand to SEQ ID NO: 639698
ucuuccggauaguucaacu

SEQ ID NO: 639700 - RNA, 19 nt, Artificial Sequence
  Description of Artificial Sequence: Synthetic oligonucleotide
  Sense strand starting at position 3104 of SEQ ID NO: 585435
ugaguucuuucuuugacca

SEQ ID NO: 639701 - RNA, 19 nt, Artificial Sequence
  Description of Artificial Sequence: Synthetic oligonucleotide
  Antisense strand to SEQ ID NO: 639700
uggucaaagaaagaacuca

SEQ ID NO: 639702 - RNA, 19 nt, Artificial Sequence
  Description of Artificial Sequence: Synthetic oligonucleotide
  Sense strand starting at position 3315 of SEQ ID NO: 585435
uauagacaguguguuccaa

SEQ ID NO: 639703 - RNA, 19 nt, Artificial Sequence
  Description of Artificial Sequence: Synthetic oligonucleotide
  Antisense strand to SEQ ID NO: 639702
uuggaacacacugucuaua

SEQ ID NO: 639704 - RNA, 19 nt, Artificial Sequence
  Description of Artificial Sequence: Synthetic oligonucleotide
  Sense strand starting at position 3317 of SEQ ID NO: 585435
uagacaguguguuccaaac

SEQ ID NO: 639705 - RNA, 19 nt, Artificial Sequence
  Description of Artificial Sequence: Synthetic oligonucleotide
  Antisense strand to SEQ ID NO: 639704
guuuggaacacacugucua

SEQ ID NO: 639706 - RNA, 19 nt, Artificial Sequence
  Description of Artificial Sequence: Synthetic oligonucleotide
  Sense strand starting at position 3337 of SEQ ID NO: 585435
uaaggaggugucugcaaca

SEQ ID NO: 639707 - RNA, 19 nt, Artificial Sequence
  Description of Artificial Sequence: Synthetic oligonucleotide
  Antisense strand to SEQ ID NO: 639706
uguugcagacaccuccuua

SEQ ID NO: 639708 - RNA, 19 nt, Artificial Sequence
  Description of Artificial Sequence: Synthetic oligonucleotide
  Sense strand starting at position 3366 of SEQ ID NO: 585435
cugagugacucugcagaga

SEQ ID NO: 639709 - RNA, 19 nt, Artificial Sequence
  Description of Artificial Sequence: Synthetic oligonucleotide
  Antisense strand to SEQ ID NO: 639708
ucucugcagagucacucag

SEQ ID NO: 639710 - RNA, 19 nt, Artificial Sequence
  Description of Artificial Sequence: Synthetic oligonucleotide
  Sense strand starting at position 3431 of SEQ ID NO: 585435
aguuguacuuuacuuggaa

SEQ ID NO: 639711 - RNA, 19 nt, Artificial Sequence
  Description of Artificial Sequence: Synthetic oligonucleotide
  Antisense strand to SEQ ID NO: 639710
uuccaaguaaaguacaacu

SEQ ID NO: 639712 - RNA, 19 nt, Artificial Sequence
  Description of Artificial Sequence: Synthetic oligonucleotide
  Sense strand starting at position 3434 of SEQ ID NO: 585435
uguacuuuacuuggaacau

SEQ ID NO: 639713 - RNA, 19 nt, Artificial Sequence
  Description of Artificial Sequence: Synthetic oligonucleotide
  Antisense strand to SEQ ID NO: 639712
auguuccaaguaaaguaca

SEQ ID NO: 639714 - RNA, 19 nt, Artificial Sequence
  Description of Artificial Sequence: Synthetic oligonucleotide
  Sense strand starting at position 3632 of SEQ ID NO: 585435
agcuaagacucuuugauuc

SEQ ID NO: 639715 - RNA, 19 nt, Artificial Sequence
  Description of Artificial Sequence: Synthetic oligonucleotide
  Antisense strand to SEQ ID NO: 639714
gaaucaaagagucuuagcu

SEQ ID NO: 639716 - RNA, 19 nt, Artificial Sequence
  Description of Artificial Sequence: Synthetic oligonucleotide
  Sense strand starting at position 3910 of SEQ ID NO: 585435
guagcaguccuuucgucuu

SEQ ID NO: 639717 - RNA, 19 nt, Artificial Sequence
  Description of Artificial Sequence: Synthetic oligonucleotide
  Antisense strand to SEQ ID NO: 639716
aagacgaaaggacugcuac

SEQ ID NO: 639718 - RNA, 19 nt, Artificial Sequence
  Description of Artificial Sequence: Synthetic oligonucleotide
  Sense strand starting at position 11 of SEQ ID NO: 585436
guaagauuaauucgagaaa

SEQ ID NO: 639719 - RNA, 19 nt, Artificial Sequence
  Description of Artificial Sequence: Synthetic oligonucleotide
  Antisense strand to SEQ ID NO: 639718
uuucucgaauuaaucuuac

SEQ ID NO: 639720 - RNA, 19 nt, Artificial Sequence
  Description of Artificial Sequence: Synthetic oligonucleotide
  Sense strand starting at position 148 of SEQ ID NO: 585436
uuugauaccucagugacag

SEQ ID NO: 639721 - RNA, 19 nt, Artificial Sequence
  Description of Artificial Sequence: Synthetic oligonucleotide
  Antisense strand to SEQ ID NO: 639720
cugucacugagguaucaaa

SEQ ID NO: 639722 - RNA, 19 nt, Artificial Sequence
  Description of Artificial Sequence: Synthetic oligonucleotide
  Sense strand starting at position 149 of SEQ ID NO: 585436
uugauaccucagugacaga

SEQ ID NO: 639723 - RNA, 19 nt, Artificial Sequence
  Description of Artificial Sequence: Synthetic oligonucleotide
  Antisense strand to SEQ ID NO: 639722
ucugucacugagguaucaa

SEQ ID NO: 639724 - RNA, 19 nt, Artificial Sequence
  Description of Artificial Sequence: Synthetic oligonucleotide
  Sense strand starting at position 165 of SEQ ID NO: 585436
agaauaauuuaagagcaag

SEQ ID NO: 639725 - RNA, 19 nt, Artificial Sequence
  Description of Artificial Sequence: Synthetic oligonucleotide
  Antisense strand to SEQ ID NO: 639724
cuugcucuuaaauuauucu

SEQ ID NO: 639726 - RNA, 19 nt, Artificial Sequence
  Description of Artificial Sequence: Synthetic oligonucleotide
  Sense strand starting at position 338 of SEQ ID NO: 585436
cugucucuggcugauaauu

SEQ ID NO: 639727 - RNA, 19 nt, Artificial Sequence
  Description of Artificial Sequence: Synthetic oligonucleotide
  Antisense strand to SEQ ID NO: 639726
aauuaucagccagagacag

SEQ ID NO: 639728 - RNA, 19 nt, Artificial Sequence
  Description of Artificial Sequence: Synthetic oligonucleotide
  Sense strand starting at position 522 of SEQ ID NO: 585436
aguuaucaucaacaguuau

SEQ ID NO: 639729 - RNA, 19 nt, Artificial Sequence
  Description of Artificial Sequence: Synthetic oligonucleotide
  Antisense strand to SEQ ID NO: 639728
auaacuguugaugauaacu

SEQ ID NO: 639730 - RNA, 19 nt, Artificial Sequence
  Description of Artificial Sequence: Synthetic oligonucleotide
  Sense strand starting at position 768 of SEQ ID NO: 585436
gggagauguucguuuaaac

SEQ ID NO: 639731 - RNA, 19 nt, Artificial Sequence
  Description of Artificial Sequence: Synthetic oligonucleotide
  Antisense strand to SEQ ID NO: 639730
guuuaaacgaacaucuccc

SEQ ID NO: 639732 - RNA, 19 nt, Artificial Sequence
  Description of Artificial Sequence: Synthetic oligonucleotide
  Sense strand starting at position 777 of SEQ ID NO: 585436
ucguuuaaaccuugauaac

SEQ ID NO: 639733 - RNA, 19 nt, Artificial Sequence
  Description of Artificial Sequence: Synthetic oligonucleotide
  Antisense strand to SEQ ID NO: 639732
guuaucaagguuuaaacga

SEQ ID NO: 639734 - RNA, 19 nt, Artificial Sequence
  Description of Artificial Sequence: Synthetic oligonucleotide
  Sense strand starting at position 778 of SEQ ID NO: 585436
cguuuaaaccuugauaacu

SEQ ID NO: 639735 - RNA, 19 nt, Artificial Sequence
  Description of Artificial Sequence: Synthetic oligonucleotide
  Antisense strand to SEQ ID NO: 639734
aguuaucaagguuuaaacg

SEQ ID NO: 639736 - RNA, 19 nt, Artificial Sequence
  Description of Artificial Sequence: Synthetic oligonucleotide
  Sense strand starting at position 820 of SEQ ID NO: 585436
gacagagugacuggucacu

SEQ ID NO: 639737 - RNA, 19 nt, Artificial Sequence
  Description of Artificial Sequence: Synthetic oligonucleotide
  Antisense strand to SEQ ID NO: 639736
agugaccagucacucuguc

SEQ ID NO: 639738 - RNA, 19 nt, Artificial Sequence
  Description of Artificial Sequence: Synthetic oligonucleotide
  Sense strand starting at position 876 of SEQ ID NO: 585436
ccaagaaaguagcuuaagu

SEQ ID NO: 639739 - RNA, 19 nt, Artificial Sequence
  Description of Artificial Sequence: Synthetic oligonucleotide
  Antisense strand to SEQ ID NO: 639738
acuuaagcuacuuucuugg

SEQ ID NO: 639740 - RNA, 19 nt, Artificial Sequence
  Description of Artificial Sequence: Synthetic oligonucleotide
  Sense strand starting at position 878 of SEQ ID NO: 585436
aagaaaguagcuuaaguca

SEQ ID NO: 639741 - RNA, 19 nt, Artificial Sequence
  Description of Artificial Sequence: Synthetic oligonucleotide
  Antisense strand to SEQ ID NO: 639740
ugacuuaagcuacuuucuu

SEQ ID NO: 639742 - RNA, 19 nt, Artificial Sequence
  Description of Artificial Sequence: Synthetic oligonucleotide
  Sense strand starting at position 911 of SEQ ID NO: 585436
ucugaaauacaccgaaucu

SEQ ID NO: 639743 - RNA, 19 nt, Artificial Sequence
  Description of Artificial Sequence: Synthetic oligonucleotide
  Antisense strand to SEQ ID NO: 639742
agauucgguguauuucaga

SEQ ID NO: 639744 - RNA, 19 nt, Artificial Sequence
  Description of Artificial Sequence: Synthetic oligonucleotide
  Sense strand starting at position 1107 of SEQ ID NO: 585436
ggagcuaaugcauaccuuu

SEQ ID NO: 639745 - RNA, 19 nt, Artificial Sequence
  Description of Artificial Sequence: Synthetic oligonucleotide
  Antisense strand to SEQ ID NO: 639744
aaagguaugcauuagcucc

SEQ ID NO: 639746 - RNA, 19 nt, Artificial Sequence
  Description of Artificial Sequence: Synthetic oligonucleotide
  Sense strand starting at position 1985 of SEQ ID NO: 585436
guagacuccucaguaugga

SEQ ID NO: 639747 - RNA, 19 nt, Artificial Sequence
  Description of Artificial Sequence: Synthetic oligonucleotide
  Antisense strand to SEQ ID NO: 639746
uccauacugaggagucuac

SEQ ID NO: 639748 - RNA, 19 nt, Artificial Sequence
  Description of Artificial Sequence: Synthetic oligonucleotide
  Sense strand starting at position 2210 of SEQ ID NO: 585436
ccugaaacccucuggugaa

SEQ ID NO: 639749 - RNA, 19 nt, Artificial Sequence
  Description of Artificial Sequence: Synthetic oligonucleotide
  Antisense strand to SEQ ID NO: 639748
uucaccagaggguuucagg

SEQ ID NO: 639750 - RNA, 19 nt, Artificial Sequence
  Description of Artificial Sequence: Synthetic oligonucleotide
  Sense strand starting at position 2250 of SEQ ID NO: 585436
gcuggcucccaccagagau

SEQ ID NO: 639751 - RNA, 19 nt, Artificial Sequence
  Description of Artificial Sequence: Synthetic oligonucleotide
  Antisense strand to SEQ ID NO: 639750
aucucuggugggagccagc

SEQ ID NO: 639752 - RNA, 19 nt, Artificial Sequence
  Description of Artificial Sequence: Synthetic oligonucleotide
  Sense strand starting at position 2419 of SEQ ID NO: 585436
cugagcaaugcucaacacu

SEQ ID NO: 639753 - RNA, 19 nt, Artificial Sequence
  Description of Artificial Sequence: Synthetic oligonucleotide
  Antisense strand to SEQ ID NO: 639752
aguguugagcauugcucag

SEQ ID NO: 639754 - RNA, 19 nt, Artificial Sequence
  Description of Artificial Sequence: Synthetic oligonucleotide
  Sense strand starting at position 2482 of SEQ ID NO: 585436
agaaucaugugacuauugu

SEQ ID NO: 639755 - RNA, 19 nt, Artificial Sequence
  Description of Artificial Sequence: Synthetic oligonucleotide
  Antisense strand to SEQ ID NO: 639754
acaauagucacaugauucu

SEQ ID NO: 639756 - RNA, 19 nt, Artificial Sequence
  Description of Artificial Sequence: Synthetic oligonucleotide
  Sense strand starting at position 2483 of SEQ ID NO: 585436
gaaucaugugacuauuguu

SEQ ID NO: 639757 - RNA, 19 nt, Artificial Sequence
  Description of Artificial Sequence: Synthetic oligonucleotide
  Antisense strand to SEQ ID NO: 639756
aacaauagucacaugauuc

SEQ ID NO: 639758 - RNA, 19 nt, Artificial Sequence
  Description of Artificial Sequence: Synthetic oligonucleotide
  Sense strand starting at position 2867 of SEQ ID NO: 585436
ggugaugacuaucauuuac

SEQ ID NO: 639759 - RNA, 19 nt, Artificial Sequence
  Description of Artificial Sequence: Synthetic oligonucleotide
  Antisense strand to SEQ ID NO: 639758
guaaaugauagucaucacc

SEQ ID NO: 639760 - RNA, 19 nt, Artificial Sequence
  Description of Artificial Sequence: Synthetic oligonucleotide
  Sense strand starting at position 2888 of SEQ ID NO: 585436
augguauuagggugaggau

SEQ ID NO: 639761 - RNA, 19 nt, Artificial Sequence
  Description of Artificial Sequence: Synthetic oligonucleotide
  Antisense strand to SEQ ID NO: 639760
auccucacccuaauaccau

SEQ ID NO: 639762 - RNA, 19 nt, Artificial Sequence
  Description of Artificial Sequence: Synthetic oligonucleotide
  Sense strand starting at position 2910 of SEQ ID NO: 585436
augcguguagugcuagcaa

SEQ ID NO: 639763 - RNA, 19 nt, Artificial Sequence
  Description of Artificial Sequence: Synthetic oligonucleotide
  Antisense strand to SEQ ID NO: 639762
uugcuagcacuacacgcau

SEQ ID NO: 639764 - RNA, 19 nt, Artificial Sequence
  Description of Artificial Sequence: Synthetic oligonucleotide
  Sense strand starting at position 2913 of SEQ ID NO: 585436
cguguagugcuagcaacuu

SEQ ID NO: 639765 - RNA, 19 nt, Artificial Sequence
  Description of Artificial Sequence: Synthetic oligonucleotide
  Antisense strand to SEQ ID NO: 639764
aaguugcuagcacuacacg

SEQ ID NO: 639766 - RNA, 19 nt, Artificial Sequence
  Description of Artificial Sequence: Synthetic oligonucleotide
  Sense strand starting at position 2928 of SEQ ID NO: 585436
acuugaagugcuuaauaaa

SEQ ID NO: 639767 - RNA, 19 nt, Artificial Sequence
  Description of Artificial Sequence: Synthetic oligonucleotide
  Antisense strand to SEQ ID NO: 639766
uuuauuaagcacuucaagu

SEQ ID NO: 639768 - RNA, 19 nt, Artificial Sequence
  Description of Artificial Sequence: Synthetic oligonucleotide
  Sense strand starting at position 2970 of SEQ ID NO: 585436
aauaguuugcuguaacuag

SEQ ID NO: 639769 - RNA, 19 nt, Artificial Sequence
  Description of Artificial Sequence: Synthetic oligonucleotide
  Antisense strand to SEQ ID NO: 639768
cuaguuacagcaaacuauu

SEQ ID NO: 639770 - RNA, 19 nt, Artificial Sequence
  Description of Artificial Sequence: Synthetic oligonucleotide
  Sense strand starting at position 2977 of SEQ ID NO: 585436
ugcuguaacuaguccauuu

SEQ ID NO: 639771 - RNA, 19 nt, Artificial Sequence
  Description of Artificial Sequence: Synthetic oligonucleotide
  Antisense strand to SEQ ID NO: 639770
aaauggacuaguuacagca

SEQ ID NO: 639772 - RNA, 19 nt, Artificial Sequence
  Description of Artificial Sequence: Synthetic oligonucleotide
  Sense strand starting at position 3049 of SEQ ID NO: 585436
ggaaguacuucuuuguauc

SEQ ID NO: 639773 - RNA, 19 nt, Artificial Sequence
  Description of Artificial Sequence: Synthetic oligonucleotide
  Antisense strand to SEQ ID NO: 639772
gauacaaagaaguacuucc

SEQ ID NO: 639774 - RNA, 19 nt, Artificial Sequence
  Description of Artificial Sequence: Synthetic oligonucleotide
  Sense strand starting at position 3102 of SEQ ID NO: 585436
acuaaauugugagcaaaca

SEQ ID NO: 639775 - RNA, 19 nt, Artificial Sequence
  Description of Artificial Sequence: Synthetic oligonucleotide
  Antisense strand to SEQ ID NO: 639774
uguuugcucacaauuuagu

SEQ ID NO: 639776 - RNA, 19 nt, Artificial Sequence
  Description of Artificial Sequence: Synthetic oligonucleotide
  Sense strand starting at position 3200 of SEQ ID NO: 585436
agaucucuggcaugaagaa

SEQ ID NO: 639777 - RNA, 19 nt, Artificial Sequence
  Description of Artificial Sequence: Synthetic oligonucleotide
  Antisense strand to SEQ ID NO: 639776
uucuucaugccagagaucu

SEQ ID NO: 639778 - RNA, 19 nt, Artificial Sequence
  Description of Artificial Sequence: Synthetic oligonucleotide
  Sense strand starting at position 3212 of SEQ ID NO: 585436
ugaagaaacgcaggaaauu

SEQ ID NO: 639779 - RNA, 19 nt, Artificial Sequence
  Description of Artificial Sequence: Synthetic oligonucleotide
  Antisense strand to SEQ ID NO: 639778
aauuuccugcguuucuuca

SEQ ID NO: 639780 - RNA, 19 nt, Artificial Sequence
  Description of Artificial Sequence: Synthetic oligonucleotide
  Sense strand starting at position 3307 of SEQ ID NO: 585436
gcugaaugggccugagaaa

SEQ ID NO: 639781 - RNA, 19 nt, Artificial Sequence
  Description of Artificial Sequence: Synthetic oligonucleotide
  Antisense strand to SEQ ID NO: 639780
uuucucaggcccauucagc

SEQ ID NO: 639782 - RNA, 19 nt, Artificial Sequence
  Description of Artificial Sequence: Synthetic oligonucleotide
  Sense strand starting at position 3360 of SEQ ID NO: 585436
gcugaaucucacgaaguga

SEQ ID NO: 639783 - RNA, 19 nt, Artificial Sequence
  Description of Artificial Sequence: Synthetic oligonucleotide
  Antisense strand to SEQ ID NO: 639782
ucacuucgugagauucagc

SEQ ID NO: 639784 - RNA, 19 nt, Artificial Sequence
  Description of Artificial Sequence: Synthetic oligonucleotide
  Sense strand starting at position 3374 of SEQ ID NO: 585436
agugaaauuccuugccuag

SEQ ID NO: 639785 - RNA, 19 nt, Artificial Sequence
  Description of Artificial Sequence: Synthetic oligonucleotide
  Antisense strand to SEQ ID NO: 639784
cuaggcaaggaauuucacu

SEQ ID NO: 639786 - RNA, 19 nt, Artificial Sequence
  Description of Artificial Sequence: Synthetic oligonucleotide
  Sense strand starting at position 3408 of SEQ ID NO: 585436
gcagcaagucuacaauuaa

SEQ ID NO: 639787 - RNA, 19 nt, Artificial Sequence
  Description of Artificial Sequence: Synthetic oligonucleotide
  Antisense strand to SEQ ID NO: 639786
uuaauuguagacuugcugc

SEQ ID NO: 639788 - RNA, 19 nt, Artificial Sequence
  Description of Artificial Sequence: Synthetic oligonucleotide
  Sense strand starting at position 3456 of SEQ ID NO: 585436
gcuucucccgaugacaaau

SEQ ID NO: 639789 - RNA, 19 nt, Artificial Sequence
  Description of Artificial Sequence: Synthetic oligonucleotide
  Antisense strand to SEQ ID NO: 639788
auuugucaucgggagaagc

SEQ ID NO: 639790 - RNA, 19 nt, Artificial Sequence
  Description of Artificial Sequence: Synthetic oligonucleotide
  Sense strand starting at position 3462 of SEQ ID NO: 585436
cccgaugacaaauguuuga

SEQ ID NO: 639791 - RNA, 19 nt, Artificial Sequence
  Description of Artificial Sequence: Synthetic oligonucleotide
  Antisense strand to SEQ ID NO: 639790
ucaaacauuugucaucggg

SEQ ID NO: 639792 - RNA, 19 nt, Artificial Sequence
  Description of Artificial Sequence: Synthetic oligonucleotide
  Sense strand starting at position 3466 of SEQ ID NO: 585436
augacaaauguuugaccca

SEQ ID NO: 639793 - RNA, 19 nt, Artificial Sequence
  Description of Artificial Sequence: Synthetic oligonucleotide
  Antisense strand to SEQ ID NO: 639792
ugggucaaacauuugucau

SEQ ID NO: 639794 - RNA, 19 nt, Artificial Sequence
  Description of Artificial Sequence: Synthetic oligonucleotide
  Sense strand starting at position 3469 of SEQ ID NO: 585436
acaaauguuugacccagau

SEQ ID NO: 639795 - RNA, 19 nt, Artificial Sequence
  Description of Artificial Sequence: Synthetic oligonucleotide
  Antisense strand to SEQ ID NO: 639794
aucugggucaaacauuugu

SEQ ID NO: 639796 - RNA, 19 nt, Artificial Sequence
  Description of Artificial Sequence: Synthetic oligonucleotide
  Sense strand starting at position 3473 of SEQ ID NO: 585436
auguuugacccagauguuu

SEQ ID NO: 639797 - RNA, 19 nt, Artificial Sequence
  Description of Artificial Sequence: Synthetic oligonucleotide
  Antisense strand to SEQ ID NO: 639796
aaacaucugggucaaacau

SEQ ID NO: 639798 - RNA, 19 nt, Artificial Sequence
  Description of Artificial Sequence: Synthetic oligonucleotide
  Sense strand starting at position 105 of SEQ ID NO: 585437
gggagaaugaugugugcuc

SEQ ID NO: 639799 - RNA, 19 nt, Artificial Sequence
  Description of Artificial Sequence: Synthetic oligonucleotide
  Antisense strand to SEQ ID NO: 639798
gagcacacaucauucuccc

SEQ ID NO: 639800 - RNA, 19 nt, Artificial Sequence
  Description of Artificial Sequence: Synthetic oligonucleotide
  Sense strand starting at position 106 of SEQ ID NO: 585437
ggagaaugaugugugcuca

SEQ ID NO: 639801 - RNA, 19 nt, Artificial Sequence
  Description of Artificial Sequence: Synthetic oligonucleotide
  Antisense strand to SEQ ID NO: 639800
ugagcacacaucauucucc

SEQ ID NO: 639802 - RNA, 19 nt, Artificial Sequence
  Description of Artificial Sequence: Synthetic oligonucleotide
  Sense strand starting at position 107 of SEQ ID NO: 585437
gagaaugaugugugcucau

SEQ ID NO: 639803 - RNA, 19 nt, Artificial Sequence
  Description of Artificial Sequence: Synthetic oligonucleotide
  Antisense strand to SEQ ID NO: 639802
augagcacacaucauucuc

SEQ ID NO: 639804 - RNA, 19 nt, Artificial Sequence
  Description of Artificial Sequence: Synthetic oligonucleotide
  Sense strand starting at position 118 of SEQ ID NO: 585437
gugcucauugcugucaagu

SEQ ID NO: 639805 - RNA, 19 nt, Artificial Sequence
  Description of Artificial Sequence: Synthetic oligonucleotide
  Antisense strand to SEQ ID NO: 639804
acuugacagcaaugagcac

SEQ ID NO: 639806 - RNA, 19 nt, Artificial Sequence
  Description of Artificial Sequence: Synthetic oligonucleotide
  Sense strand starting at position 119 of SEQ ID NO: 585437
ugcucauugcugucaaguc

SEQ ID NO: 639807 - RNA, 19 nt, Artificial Sequence
  Description of Artificial Sequence: Synthetic oligonucleotide
  Antisense strand to SEQ ID NO: 639806
gacuugacagcaaugagca

SEQ ID NO: 639808 - RNA, 19 nt, Artificial Sequence
  Description of Artificial Sequence: Synthetic oligonucleotide
  Sense strand starting at position 416 of SEQ ID NO: 585437
ugaaaugucugcccuccaa

SEQ ID NO: 639809 - RNA, 19 nt, Artificial Sequence
  Description of Artificial Sequence: Synthetic oligonucleotide
  Antisense strand to SEQ ID NO: 639808
uuggagggcagacauuuca

SEQ ID NO: 639810 - RNA, 19 nt, Artificial Sequence
  Description of Artificial Sequence: Synthetic oligonucleotide
  Sense strand starting at position 547 of SEQ ID NO: 585437
ccucgcugccgagauugaa

SEQ ID NO: 639811 - RNA, 19 nt, Artificial Sequence
  Description of Artificial Sequence: Synthetic oligonucleotide
  Antisense strand to SEQ ID NO: 639810
uucaaucucggcagcgagg

SEQ ID NO: 639812 - RNA, 19 nt, Artificial Sequence
  Description of Artificial Sequence: Synthetic oligonucleotide
  Sense strand starting at position 589 of SEQ ID NO: 585437
ccaucuaaucugugagccu

SEQ ID NO: 639813 - RNA, 19 nt, Artificial Sequence
  Description of Artificial Sequence: Synthetic oligonucleotide
  Antisense strand to SEQ ID NO: 639812
aggcucacagauuagaugg

SEQ ID NO: 639814 - RNA, 19 nt, Artificial Sequence
  Description of Artificial Sequence: Synthetic oligonucleotide
  Sense strand starting at position 618 of SEQ ID NO: 585437
uaguuuccugucugugaca

SEQ ID NO: 639815 - RNA, 19 nt, Artificial Sequence
  Description of Artificial Sequence: Synthetic oligonucleotide
  Antisense strand to SEQ ID NO: 639814
ugucacagacaggaaacua

SEQ ID NO: 639816 - RNA, 19 nt, Artificial Sequence
  Description of Artificial Sequence: Synthetic oligonucleotide
  Sense strand starting at position 619 of SEQ ID NO: 585437
aguuuccugucugugacau

SEQ ID NO: 639817 - RNA, 19 nt, Artificial Sequence
  Description of Artificial Sequence: Synthetic oligonucleotide
  Antisense strand to SEQ ID NO: 639816
augucacagacaggaaacu

SEQ ID NO: 639818 - RNA, 19 nt, Artificial Sequence
  Description of Artificial Sequence: Synthetic oligonucleotide
  Sense strand starting at position 705 of SEQ ID NO: 585437
ggaagugcucaauaugugu

SEQ ID NO: 639819 - RNA, 19 nt, Artificial Sequence
  Description of Artificial Sequence: Synthetic oligonucleotide
  Antisense strand to SEQ ID NO: 639818
acacauauugagcacuucc

SEQ ID NO: 639820 - RNA, 19 nt, Artificial Sequence
  Description of Artificial Sequence: Synthetic oligonucleotide
  Sense strand starting at position 708 of SEQ ID NO: 585437
agugcucaauauguguaua

SEQ ID NO: 639821 - RNA, 19 nt, Artificial Sequence
  Description of Artificial Sequence: Synthetic oligonucleotide
  Antisense strand to SEQ ID NO: 639820
uauacacauauugagcacu

SEQ ID NO: 639822 - RNA, 19 nt, Artificial Sequence
  Description of Artificial Sequence: Synthetic oligonucleotide
  Sense strand starting at position 710 of SEQ ID NO: 585437
ugcucaauauguguauauu

SEQ ID NO: 639823 - RNA, 19 nt, Artificial Sequence
  Description of Artificial Sequence: Synthetic oligonucleotide
  Antisense strand to SEQ ID NO: 639822
aauauacacauauugagca

SEQ ID NO: 639824 - RNA, 19 nt, Artificial Sequence
  Description of Artificial Sequence: Synthetic oligonucleotide
  Sense strand starting at position 711 of SEQ ID NO: 585437
gcucaauauguguauauug

SEQ ID NO: 639825 - RNA, 19 nt, Artificial Sequence
  Description of Artificial Sequence: Synthetic oligonucleotide
  Antisense strand to SEQ ID NO: 639824
caauauacacauauugagc

SEQ ID NO: 639826 - RNA, 19 nt, Artificial Sequence
  Description of Artificial Sequence: Synthetic oligonucleotide
  Sense strand starting at position 727 of SEQ ID NO: 585437
uugcuauuguuaucagggu

SEQ ID NO: 639827 - RNA, 19 nt, Artificial Sequence
  Description of Artificial Sequence: Synthetic oligonucleotide
  Antisense strand to SEQ ID NO: 639826
acccugauaacaauagcaa

SEQ ID NO: 639828 - RNA, 19 nt, Artificial Sequence
  Description of Artificial Sequence: Synthetic oligonucleotide
  Sense strand starting at position 828 of SEQ ID NO: 585437
gugccaauuuccucuguag

SEQ ID NO: 639829 - RNA, 19 nt, Artificial Sequence
  Description of Artificial Sequence: Synthetic oligonucleotide
  Antisense strand to SEQ ID NO: 639828
cuacagaggaaauuggcac

SEQ ID NO: 639830 - RNA, 19 nt, Artificial Sequence
  Description of Artificial Sequence: Synthetic oligonucleotide
  Sense strand starting at position 894 of SEQ ID NO: 585437
uuugaccucuuccuggaaa

SEQ ID NO: 639831 - RNA, 19 nt, Artificial Sequence
  Description of Artificial Sequence: Synthetic oligonucleotide
  Antisense strand to SEQ ID NO: 639830
uuuccaggaagaggucaaa

SEQ ID NO: 639832 - RNA, 19 nt, Artificial Sequence
  Description of Artificial Sequence: Synthetic oligonucleotide
  Sense strand starting at position 896 of SEQ ID NO: 585437
ugaccucuuccuggaaagu

SEQ ID NO: 639833 - RNA, 19 nt, Artificial Sequence
  Description of Artificial Sequence: Synthetic oligonucleotide
  Antisense strand to SEQ ID NO: 639832
acuuuccaggaagagguca

SEQ ID NO: 639834 - RNA, 19 nt, Artificial Sequence
  Description of Artificial Sequence: Synthetic oligonucleotide
  Sense strand starting at position 1498 of SEQ ID NO: 585437
cucgguguacucgucugua

SEQ ID NO: 639835 - RNA, 19 nt, Artificial Sequence
  Description of Artificial Sequence: Synthetic oligonucleotide
  Antisense strand to SEQ ID NO: 639834
uacagacgaguacaccgag

SEQ ID NO: 639836 - RNA, 19 nt, Artificial Sequence
  Description of Artificial Sequence: Synthetic oligonucleotide
  Sense strand starting at position 1500 of SEQ ID NO: 585437
cgguguacucgucuguaac

SEQ ID NO: 639837 - RNA, 19 nt, Artificial Sequence
  Description of Artificial Sequence: Synthetic oligonucleotide
  Antisense strand to SEQ ID NO: 639836
guuacagacgaguacaccg

SEQ ID NO: 639838 - RNA, 19 nt, Artificial Sequence
  Description of Artificial Sequence: Synthetic oligonucleotide
  Sense strand starting at position 1503 of SEQ ID NO: 585437
uguacucgucuguaacagu

SEQ ID NO: 639839 - RNA, 19 nt, Artificial Sequence
  Description of Artificial Sequence: Synthetic oligonucleotide
  Antisense strand to SEQ ID NO: 639838
acuguuacagacgaguaca

SEQ ID NO: 639840 - RNA, 19 nt, Artificial Sequence
  Description of Artificial Sequence: Synthetic oligonucleotide
  Sense strand starting at position 1510 of SEQ ID NO: 585437
gucuguaacagugaggauc

SEQ ID NO: 639841 - RNA, 19 nt, Artificial Sequence
  Description of Artificial Sequence: Synthetic oligonucleotide
  Antisense strand to SEQ ID NO: 639840
gauccucacuguuacagac

SEQ ID NO: 639842 - RNA, 19 nt, Artificial Sequence
  Description of Artificial Sequence: Synthetic oligonucleotide
  Sense strand starting at position 1521 of SEQ ID NO: 585437
ugaggaucugcccgaugaa

SEQ ID NO: 639843 - RNA, 19 nt, Artificial Sequence
  Description of Artificial Sequence: Synthetic oligonucleotide
  Antisense strand to SEQ ID NO: 639842
uucaucgggcagauccuca

SEQ ID NO: 639844 - RNA, 19 nt, Artificial Sequence
  Description of Artificial Sequence: Synthetic oligonucleotide
  Sense strand starting at position 1522 of SEQ ID NO: 585437
gaggaucugcccgaugaac

SEQ ID NO: 639845 - RNA, 19 nt, Artificial Sequence
  Description of Artificial Sequence: Synthetic oligonucleotide
  Antisense strand to SEQ ID NO: 639844
guucaucgggcagauccuc

SEQ ID NO: 639846 - RNA, 19 nt, Artificial Sequence
  Description of Artificial Sequence: Synthetic oligonucleotide
  Sense strand starting at position 1545 of SEQ ID NO: 585437
gggucuugcaaguguacag

SEQ ID NO: 639847 - RNA, 19 nt, Artificial Sequence
  Description of Artificial Sequence: Synthetic oligonucleotide
  Antisense strand to SEQ ID NO: 639846
cuguacacuugcaagaccc

SEQ ID NO: 639848 - RNA, 19 nt, Artificial Sequence
  Description of Artificial Sequence: Synthetic oligonucleotide
  Sense strand starting at position 1556 of SEQ ID NO: 585437
guguacaguccuggagaac

SEQ ID NO: 639849 - RNA, 19 nt, Artificial Sequence
  Description of Artificial Sequence: Synthetic oligonucleotide
  Antisense strand to SEQ ID NO: 639848
guucuccaggacuguacac

SEQ ID NO: 639850 - RNA, 19 nt, Artificial Sequence
  Description of Artificial Sequence: Synthetic oligonucleotide
  Sense strand starting at position 1611 of SEQ ID NO: 585437
ucagccacucggugagaaa

SEQ ID NO: 639851 - RNA, 19 nt, Artificial Sequence
  Description of Artificial Sequence: Synthetic oligonucleotide
  Antisense strand to SEQ ID NO: 639850
uuucucaccgaguggcuga

SEQ ID NO: 639852 - RNA, 19 nt, Artificial Sequence
  Description of Artificial Sequence: Synthetic oligonucleotide
  Sense strand starting at position 2291 of SEQ ID NO: 585437
ggaagagcucccugugacu

SEQ ID NO: 639853 - RNA, 19 nt, Artificial Sequence
  Description of Artificial Sequence: Synthetic oligonucleotide
  Antisense strand to SEQ ID NO: 639852
agucacagggagcucuucc

SEQ ID NO: 639854 - RNA, 19 nt, Artificial Sequence
  Description of Artificial Sequence: Synthetic oligonucleotide
  Sense strand starting at position 2538 of SEQ ID NO: 585437
ccacaucugauaggagguu

SEQ ID NO: 639855 - RNA, 19 nt, Artificial Sequence
  Description of Artificial Sequence: Synthetic oligonucleotide
  Antisense strand to SEQ ID NO: 639854
aaccuccuaucagaugugg

SEQ ID NO: 639856 - RNA, 19 nt, Artificial Sequence
  Description of Artificial Sequence: Synthetic oligonucleotide
  Sense strand starting at position 3074 of SEQ ID NO: 585437
gguucaaaugugcaggauu

SEQ ID NO: 639857 - RNA, 19 nt, Artificial Sequence
  Description of Artificial Sequence: Synthetic oligonucleotide
  Antisense strand to SEQ ID NO: 639856
aauccugcacauuugaacc

SEQ ID NO: 639858 - RNA, 19 nt, Artificial Sequence
  Description of Artificial Sequence: Synthetic oligonucleotide
  Sense strand starting at position 3491 of SEQ ID NO: 585437
gauggagauucuuugcuca

SEQ ID NO: 639859 - RNA, 19 nt, Artificial Sequence
  Description of Artificial Sequence: Synthetic oligonucleotide
  Antisense strand to SEQ ID NO: 639858
ugagcaaagaaucuccauc

SEQ ID NO: 639860 - RNA, 19 nt, Artificial Sequence
  Description of Artificial Sequence: Synthetic oligonucleotide
  Sense strand starting at position 3493 of SEQ ID NO: 585437
uggagauucuuugcucaaa

SEQ ID NO: 639861 - RNA, 19 nt, Artificial Sequence
  Description of Artificial Sequence: Synthetic oligonucleotide
  Antisense strand to SEQ ID NO: 639860
uuugagcaaagaaucucca

SEQ ID NO: 639862 - RNA, 19 nt, Artificial Sequence
  Description of Artificial Sequence: Synthetic oligonucleotide
  Sense strand starting at position 3494 of SEQ ID NO: 585437
ggagauucuuugcucaaac

SEQ ID NO: 639863 - RNA, 19 nt, Artificial Sequence
  Description of Artificial Sequence: Synthetic oligonucleotide
  Antisense strand to SEQ ID NO: 639862
guuugagcaaagaaucucc

SEQ ID NO: 639864 - RNA, 19 nt, Artificial Sequence
  Description of Artificial Sequence: Synthetic oligonucleotide
  Sense strand starting at position 3799 of SEQ ID NO: 585437
gaagaucauucugagauga

SEQ ID NO: 639865 - RNA, 19 nt, Artificial Sequence
  Description of Artificial Sequence: Synthetic oligonucleotide
  Antisense strand to SEQ ID NO: 639864
ucaucucagaaugaucuuc

SEQ ID NO: 639866 - RNA, 19 nt, Artificial Sequence
  Description of Artificial Sequence: Synthetic oligonucleotide
  Sense strand starting at position 3801 of SEQ ID NO: 585437
agaucauucugagaugagg

SEQ ID NO: 639867 - RNA, 19 nt, Artificial Sequence
  Description of Artificial Sequence: Synthetic oligonucleotide
  Antisense strand to SEQ ID NO: 639866
ccucaucucagaaugaucu

SEQ ID NO: 639868 - RNA, 19 nt, Artificial Sequence
  Description of Artificial Sequence: Synthetic oligonucleotide
  Sense strand starting at position 3803 of SEQ ID NO: 585437
aucauucugagaugagggu

SEQ ID NO: 639869 - RNA, 19 nt, Artificial Sequence
  Description of Artificial Sequence: Synthetic oligonucleotide
  Antisense strand to SEQ ID NO: 639868
acccucaucucagaaugau

SEQ ID NO: 639870 - RNA, 19 nt, Artificial Sequence
  Description of Artificial Sequence: Synthetic oligonucleotide
  Sense strand starting at position 3889 of SEQ ID NO: 585437
ggcacauggcaauauaaca

SEQ ID NO: 639871 - RNA, 19 nt, Artificial Sequence
  Description of Artificial Sequence: Synthetic oligonucleotide
  Antisense strand to SEQ ID NO: 639870
uguuauauugccaugugcc

SEQ ID NO: 639872 - RNA, 19 nt, Artificial Sequence
  Description of Artificial Sequence: Synthetic oligonucleotide
  Sense strand starting at position 3933 of SEQ ID NO: 585437
gagucagcccauuagaugu

SEQ ID NO: 639873 - RNA, 19 nt, Artificial Sequence
  Description of Artificial Sequence: Synthetic oligonucleotide
  Antisense strand to SEQ ID NO: 639872
acaucuaaugggcugacuc

SEQ ID NO: 639874 - RNA, 19 nt, Artificial Sequence
  Description of Artificial Sequence: Synthetic oligonucleotide
  Sense strand starting at position 3981 of SEQ ID NO: 585437
ugccaugugcccgucauua

SEQ ID NO: 639875 - RNA, 19 nt, Artificial Sequence
  Description of Artificial Sequence: Synthetic oligonucleotide
  Antisense strand to SEQ ID NO: 639874
uaaugacgggcacauggca

SEQ ID NO: 639876 - RNA, 19 nt, Artificial Sequence
  Description of Artificial Sequence: Synthetic oligonucleotide
  Sense strand starting at position 3983 of SEQ ID NO: 585437
ccaugugcccgucauuaag

SEQ ID NO: 639877 - RNA, 19 nt, Artificial Sequence
  Description of Artificial Sequence: Synthetic oligonucleotide
  Antisense strand to SEQ ID NO: 639876
cuuaaugacgggcacaugg

SEQ ID NO: 639878 - RNA, 19 nt, Artificial Sequence
  Description of Artificial Sequence: Synthetic oligonucleotide
  Sense strand starting at position 187 of SEQ ID NO: 585438
aucugauacuuaguuuaag

SEQ ID NO: 639879 - RNA, 19 nt, Artificial Sequence
  Description of Artificial Sequence: Synthetic oligonucleotide
  Antisense strand to SEQ ID NO: 639878
cuuaaacuaaguaucagau

SEQ ID NO: 639880 - RNA, 19 nt, Artificial Sequence
  Description of Artificial Sequence: Synthetic oligonucleotide
  Sense strand starting at position 188 of SEQ ID NO: 585438
ucugauacuuaguuuaaga

SEQ ID NO: 639881 - RNA, 19 nt, Artificial Sequence
  Description of Artificial Sequence: Synthetic oligonucleotide
  Antisense strand to SEQ ID NO: 639880
ucuuaaacuaaguaucaga

SEQ ID NO: 639882 - RNA, 19 nt, Artificial Sequence
  Description of Artificial Sequence: Synthetic oligonucleotide
  Sense strand starting at position 267 of SEQ ID NO: 585438
agagcaguuagugaaauau

SEQ ID NO: 639883 - RNA, 19 nt, Artificial Sequence
  Description of Artificial Sequence: Synthetic oligonucleotide
  Antisense strand to SEQ ID NO: 639882
auauuucacuaacugcucu

SEQ ID NO: 639884 - RNA, 19 nt, Artificial Sequence
  Description of Artificial Sequence: Synthetic oligonucleotide
  Sense strand starting at position 327 of SEQ ID NO: 585438
acacucacgguguaaauua

SEQ ID NO: 639885 - RNA, 19 nt, Artificial Sequence
  Description of Artificial Sequence: Synthetic oligonucleotide
  Antisense strand to SEQ ID NO: 639884
uaauuuacaccgugagugu

SEQ ID NO: 639886 - RNA, 19 nt, Artificial Sequence
  Description of Artificial Sequence: Synthetic oligonucleotide
  Sense strand starting at position 383 of SEQ ID NO: 585438
guuccauauccuuacgaaa

SEQ ID NO: 639887 - RNA, 19 nt, Artificial Sequence
  Description of Artificial Sequence: Synthetic oligonucleotide
  Antisense strand to SEQ ID NO: 639886
uuucguaaggauauggaac

SEQ ID NO: 639888 - RNA, 19 nt, Artificial Sequence
  Description of Artificial Sequence: Synthetic oligonucleotide
  Sense strand starting at position 409 of SEQ ID NO: 585438
uguaccucaggccauaaau

SEQ ID NO: 639889 - RNA, 19 nt, Artificial Sequence
  Description of Artificial Sequence: Synthetic oligonucleotide
  Antisense strand to SEQ ID NO: 639888
auuuauggccugagguaca

SEQ ID NO: 639890 - RNA, 19 nt, Artificial Sequence
  Description of Artificial Sequence: Synthetic oligonucleotide
  Sense strand starting at position 419 of SEQ ID NO: 585438
gccauaaaugcagauaacu

SEQ ID NO: 639891 - RNA, 19 nt, Artificial Sequence
  Description of Artificial Sequence: Synthetic oligonucleotide
  Antisense strand to SEQ ID NO: 639890
aguuaucugcauuuauggc

SEQ ID NO: 639892 - RNA, 19 nt, Artificial Sequence
  Description of Artificial Sequence: Synthetic oligonucleotide
  Sense strand starting at position 436 of SEQ ID NO: 585438
cuagauaacucccugcaag

SEQ ID NO: 639893 - RNA, 19 nt, Artificial Sequence
  Description of Artificial Sequence: Synthetic oligonucleotide
  Antisense strand to SEQ ID NO: 639892
cuugcagggaguuaucuag

SEQ ID NO: 639894 - RNA, 19 nt, Artificial Sequence
  Description of Artificial Sequence: Synthetic oligonucleotide
  Sense strand starting at position 448 of SEQ ID NO: 585438
cugcaagcucucuaaggga

SEQ ID NO: 639895 - RNA, 19 nt, Artificial Sequence
  Description of Artificial Sequence: Synthetic oligonucleotide
  Antisense strand to SEQ ID NO: 639894
ucccuuagagagcuugcag

SEQ ID NO: 639896 - RNA, 19 nt, Artificial Sequence
  Description of Artificial Sequence: Synthetic oligonucleotide
  Sense strand starting at position 474 of SEQ ID NO: 585438
aacacaguauucgcaggaa

SEQ ID NO: 639897 - RNA, 19 nt, Artificial Sequence
  Description of Artificial Sequence: Synthetic oligonucleotide
  Antisense strand to SEQ ID NO: 639896
uuccugcgaauacuguguu

SEQ ID NO: 639898 - RNA, 19 nt, Artificial Sequence
  Description of Artificial Sequence: Synthetic oligonucleotide
  Sense strand starting at position 478 of SEQ ID NO: 585438
caguauucgcaggaauuau

SEQ ID NO: 639899 - RNA, 19 nt, Artificial Sequence
  Description of Artificial Sequence: Synthetic oligonucleotide
  Antisense strand to SEQ ID NO: 639898
auaauuccugcgaauacug

SEQ ID NO: 639900 - RNA, 19 nt, Artificial Sequence
  Description of Artificial Sequence: Synthetic oligonucleotide
  Sense strand starting at position 602 of SEQ ID NO: 585438
gucgaacaauacuuaaaug

SEQ ID NO: 639901 - RNA, 19 nt, Artificial Sequence
  Description of Artificial Sequence: Synthetic oligonucleotide
  Antisense strand to SEQ ID NO: 639900
cauuuaaguauuguucgac

SEQ ID NO: 639902 - RNA, 19 nt, Artificial Sequence
  Description of Artificial Sequence: Synthetic oligonucleotide
  Sense strand starting at position 625 of SEQ ID NO: 585438
gugguaugugacuaaucag

SEQ ID NO: 639903 - RNA, 19 nt, Artificial Sequence
  Description of Artificial Sequence: Synthetic oligonucleotide
  Antisense strand to SEQ ID NO: 639902
cugauuagucacauaccac

SEQ ID NO: 639904 - RNA, 19 nt, Artificial Sequence
  Description of Artificial Sequence: Synthetic oligonucleotide
  Sense strand starting at position 666 of SEQ ID NO: 585438
ugcaguguucuugcaggca

SEQ ID NO: 639905 - RNA, 19 nt, Artificial Sequence
  Description of Artificial Sequence: Synthetic oligonucleotide
  Antisense strand to SEQ ID NO: 639904
ugccugcaagaacacugca

SEQ ID NO: 639906 - RNA, 19 nt, Artificial Sequence
  Description of Artificial Sequence: Synthetic oligonucleotide
  Sense strand starting at position 759 of SEQ ID NO: 585438
agugcucaccgagauaaag

SEQ ID NO: 639907 - RNA, 19 nt, Artificial Sequence
  Description of Artificial Sequence: Synthetic oligonucleotide
  Antisense strand to SEQ ID NO: 639906
cuuuaucucggugagcacu

SEQ ID NO: 639908 - RNA, 19 nt, Artificial Sequence
  Description of Artificial Sequence: Synthetic oligonucleotide
  Sense strand starting at position 2015 of SEQ ID NO: 585438
gcaguucucgcgagaagag

SEQ ID NO: 639909 - RNA, 19 nt, Artificial Sequence
  Description of Artificial Sequence: Synthetic oligonucleotide
  Antisense strand to SEQ ID NO: 639908
cucuucucgcgagaacugc

SEQ ID NO: 639910 - RNA, 19 nt, Artificial Sequence
  Description of Artificial Sequence: Synthetic oligonucleotide
  Sense strand starting at position 2651 of SEQ ID NO: 585438
ccaucugcucaaggacaua

SEQ ID NO: 639911 - RNA, 19 nt, Artificial Sequence
  Description of Artificial Sequence: Synthetic oligonucleotide
  Antisense strand to SEQ ID NO: 639910
uauguccuugagcagaugg

SEQ ID NO: 639912 - RNA, 19 nt, Artificial Sequence
  Description of Artificial Sequence: Synthetic oligonucleotide
  Sense strand starting at position 2669 of SEQ ID NO: 585438
auggguuacucuuugagau

SEQ ID NO: 639913 - RNA, 19 nt, Artificial Sequence
  Description of Artificial Sequence: Synthetic oligonucleotide
  Antisense strand to SEQ ID NO: 639912
aucucaaagaguaacccau

SEQ ID NO: 639914 - RNA, 19 nt, Artificial Sequence
  Description of Artificial Sequence: Synthetic oligonucleotide
  Sense strand starting at position 2670 of SEQ ID NO: 585438
uggguuacucuuugagaug

SEQ ID NO: 639915 - RNA, 19 nt, Artificial Sequence
  Description of Artificial Sequence: Synthetic oligonucleotide
  Antisense strand to SEQ ID NO: 639914
caucucaaagaguaaccca

SEQ ID NO: 639916 - RNA, 19 nt, Artificial Sequence
  Description of Artificial Sequence: Synthetic oligonucleotide
  Sense strand starting at position 2679 of SEQ ID NO: 585438
cuuugagaugcugacgaaa

SEQ ID NO: 639917 - RNA, 19 nt, Artificial Sequence
  Description of Artificial Sequence: Synthetic oligonucleotide
  Antisense strand to SEQ ID NO: 639916
uuucgucagcaucucaaag

SEQ ID NO: 639918 - RNA, 19 nt, Artificial Sequence
  Description of Artificial Sequence: Synthetic oligonucleotide
  Sense strand starting at position 2691 of SEQ ID NO: 585438
gacgaaauaugucccaaag

SEQ ID NO: 639919 - RNA, 19 nt, Artificial Sequence
  Description of Artificial Sequence: Synthetic oligonucleotide
  Antisense strand to SEQ ID NO: 639918
cuuugggacauauuucguc

SEQ ID NO: 639920 - RNA, 19 nt, Artificial Sequence
  Description of Artificial Sequence: Synthetic oligonucleotide
  Sense strand starting at position 3145 of SEQ ID NO: 585438
cagggagucuaauugggua

SEQ ID NO: 639921 - RNA, 19 nt, Artificial Sequence
  Description of Artificial Sequence: Synthetic oligonucleotide
  Antisense strand to SEQ ID NO: 639920
uacccaauuagacucccug

SEQ ID NO: 639922 - RNA, 19 nt, Artificial Sequence
  Description of Artificial Sequence: Synthetic oligonucleotide
  Sense strand starting at position 3150 of SEQ ID NO: 585438
agucuaauuggguagguca

SEQ ID NO: 639923 - RNA, 19 nt, Artificial Sequence
  Description of Artificial Sequence: Synthetic oligonucleotide
  Antisense strand to SEQ ID NO: 639922
ugaccuacccaauuagacu

SEQ ID NO: 639924 - RNA, 19 nt, Artificial Sequence
  Description of Artificial Sequence: Synthetic oligonucleotide
  Sense strand starting at position 3152 of SEQ ID NO: 585438
ucuaauuggguaggucaga

SEQ ID NO: 639925 - RNA, 19 nt, Artificial Sequence
  Description of Artificial Sequence: Synthetic oligonucleotide
  Antisense strand to SEQ ID NO: 639924
ucugaccuacccaauuaga

SEQ ID NO: 639926 - RNA, 19 nt, Artificial Sequence
  Description of Artificial Sequence: Synthetic oligonucleotide
  Sense strand starting at position 3174 of SEQ ID NO: 585438
ggucuugaucaagagcaug

SEQ ID NO: 639927 - RNA, 19 nt, Artificial Sequence
  Description of Artificial Sequence: Synthetic oligonucleotide
  Antisense strand to SEQ ID NO: 639926
caugcucuugaucaagacc

SEQ ID NO: 639928 - RNA, 19 nt, Artificial Sequence
  Description of Artificial Sequence: Synthetic oligonucleotide
  Sense strand starting at position 3212 of SEQ ID NO: 585438
aggugauucugauucagga

SEQ ID NO: 639929 - RNA, 19 nt, Artificial Sequence
  Description of Artificial Sequence: Synthetic oligonucleotide
  Antisense strand to SEQ ID NO: 639928
uccugaaucagaaucaccu

SEQ ID NO: 639930 - RNA, 19 nt, Artificial Sequence
  Description of Artificial Sequence: Synthetic oligonucleotide
  Sense strand starting at position 3225 of SEQ ID NO: 585438
ucaggaaagucucugauau

SEQ ID NO: 639931 - RNA, 19 nt, Artificial Sequence
  Description of Artificial Sequence: Synthetic oligonucleotide
  Antisense strand to SEQ ID NO: 639930
auaucagagacuuuccuga

SEQ ID NO: 639932 - RNA, 19 nt, Artificial Sequence
  Description of Artificial Sequence: Synthetic oligonucleotide
  Sense strand starting at position 3226 of SEQ ID NO: 585438
caggaaagucucugauauc

SEQ ID NO: 639933 - RNA, 19 nt, Artificial Sequence
  Description of Artificial Sequence: Synthetic oligonucleotide
  Antisense strand to SEQ ID NO: 639932
gauaucagagacuuuccug

SEQ ID NO: 639934 - RNA, 19 nt, Artificial Sequence
  Description of Artificial Sequence: Synthetic oligonucleotide
  Sense strand starting at position 3236 of SEQ ID NO: 585438
ucugauaucucccuuugag

SEQ ID NO: 639935 - RNA, 19 nt, Artificial Sequence
  Description of Artificial Sequence: Synthetic oligonucleotide
  Antisense strand to SEQ ID NO: 639934
cucaaagggagauaucaga

SEQ ID NO: 639936 - RNA, 19 nt, Artificial Sequence
  Description of Artificial Sequence: Synthetic oligonucleotide
  Sense strand starting at position 3345 of SEQ ID NO: 585438
ggccucuucgaguaaggag

SEQ ID NO: 639937 - RNA, 19 nt, Artificial Sequence
  Description of Artificial Sequence: Synthetic oligonucleotide
  Antisense strand to SEQ ID NO: 639936
cuccuuacucgaagaggcc

SEQ ID NO: 639938 - RNA, 19 nt, Artificial Sequence
  Description of Artificial Sequence: Synthetic oligonucleotide
  Sense strand starting at position 3425 of SEQ ID NO: 585438
cagcuucuacgagagaauu

SEQ ID NO: 639939 - RNA, 19 nt, Artificial Sequence
  Description of Artificial Sequence: Synthetic oligonucleotide
  Antisense strand to SEQ ID NO: 639938
aauucucucguagaagcug

SEQ ID NO: 639940 - RNA, 19 nt, Artificial Sequence
  Description of Artificial Sequence: Synthetic oligonucleotide
  Sense strand starting at position 3451 of SEQ ID NO: 585438
ugcauucccgacuaacaga

SEQ ID NO: 639941 - RNA, 19 nt, Artificial Sequence
  Description of Artificial Sequence: Synthetic oligonucleotide
  Antisense strand to SEQ ID NO: 639940
ucuguuagucgggaaugca

SEQ ID NO: 639942 - RNA, 19 nt, Artificial Sequence
  Description of Artificial Sequence: Synthetic oligonucleotide
  Sense strand starting at position 3492 of SEQ ID NO: 585438
gauaaaugugaaugggcaa

SEQ ID NO: 639943 - RNA, 19 nt, Artificial Sequence
  Description of Artificial Sequence: Synthetic oligonucleotide
  Antisense strand to SEQ ID NO: 639942
uugcccauucacauuuauc

SEQ ID NO: 639944 - RNA, 19 nt, Artificial Sequence
  Description of Artificial Sequence: Synthetic oligonucleotide
  Sense strand starting at position 3562 of SEQ ID NO: 585438
gcuuguuacaaugagcaga

SEQ ID NO: 639945 - RNA, 19 nt, Artificial Sequence
  Description of Artificial Sequence: Synthetic oligonucleotide
  Antisense strand to SEQ ID NO: 639944
ucugcucauuguaacaagc

SEQ ID NO: 639946 - RNA, 19 nt, Artificial Sequence
  Description of Artificial Sequence: Synthetic oligonucleotide
  Sense strand starting at position 3659 of SEQ ID NO: 585438
ucccgugauuauucuauuu

SEQ ID NO: 639947 - RNA, 19 nt, Artificial Sequence
  Description of Artificial Sequence: Synthetic oligonucleotide
  Antisense strand to SEQ ID NO: 639946
aaauagaauaaucacggga

SEQ ID NO: 639948 - RNA, 19 nt, Artificial Sequence
  Description of Artificial Sequence: Synthetic oligonucleotide
  Sense strand starting at position 3733 of SEQ ID NO: 585438
gcacaaugucuagaacaua

SEQ ID NO: 639949 - RNA, 19 nt, Artificial Sequence
  Description of Artificial Sequence: Synthetic oligonucleotide
  Antisense strand to SEQ ID NO: 639948
uauguucuagacauugugc

SEQ ID NO: 639950 - RNA, 19 nt, Artificial Sequence
  Description of Artificial Sequence: Synthetic oligonucleotide
  Sense strand starting at position 3859 of SEQ ID NO: 585438
acagauagucaugggugau

SEQ ID NO: 639951 - RNA, 19 nt, Artificial Sequence
  Description of Artificial Sequence: Synthetic oligonucleotide
  Antisense strand to SEQ ID NO: 639950
aucacccaugacuaucugu

SEQ ID NO: 639952 - RNA, 19 nt, Artificial Sequence
  Description of Artificial Sequence: Synthetic oligonucleotide
  Sense strand starting at position 3860 of SEQ ID NO: 585438
cagauagucaugggugauu

SEQ ID NO: 639953 - RNA, 19 nt, Artificial Sequence
  Description of Artificial Sequence: Synthetic oligonucleotide
  Antisense strand to SEQ ID NO: 639952
aaucacccaugacuaucug

SEQ ID NO: 639954 - RNA, 19 nt, Artificial Sequence
  Description of Artificial Sequence: Synthetic oligonucleotide
  Sense strand starting at position 3935 of SEQ ID NO: 585438
aaacauguugcuugagaau

SEQ ID NO: 639955 - RNA, 19 nt, Artificial Sequence
  Description of Artificial Sequence: Synthetic oligonucleotide
  Antisense strand to SEQ ID NO: 639954
auucucaagcaacauguuu

SEQ ID NO: 639956 - RNA, 19 nt, Artificial Sequence
  Description of Artificial Sequence: Synthetic oligonucleotide
  Sense strand starting at position 3944 of SEQ ID NO: 585438
gcuugagaauguuccaaac

SEQ ID NO: 639957 - RNA, 19 nt, Artificial Sequence
  Description of Artificial Sequence: Synthetic oligonucleotide
  Antisense strand to SEQ ID NO: 639956
guuuggaacauucucaagc

SEQ ID NO: 639958 - RNA, 19 nt, Artificial Sequence
  Description of Artificial Sequence: Synthetic oligonucleotide
  Sense strand starting at position 604 of SEQ ID NO: 585439
cacgaucucuucucuagga

SEQ ID NO: 639959 - RNA, 19 nt, Artificial Sequence
  Description of Artificial Sequence: Synthetic oligonucleotide
  Antisense strand to SEQ ID NO: 639958
uccuagagaagagaucgug

SEQ ID NO: 639960 - RNA, 19 nt, Artificial Sequence
  Description of Artificial Sequence: Synthetic oligonucleotide
  Sense strand starting at position 605 of SEQ ID NO: 585439
acgaucucuucucuaggaa

SEQ ID NO: 639961 - RNA, 19 nt, Artificial Sequence
  Description of Artificial Sequence: Synthetic oligonucleotide
  Antisense strand to SEQ ID NO: 639960
uuccuagagaagagaucgu

SEQ ID NO: 639962 - RNA, 19 nt, Artificial Sequence
  Description of Artificial Sequence: Synthetic oligonucleotide
  Sense strand starting at position 606 of SEQ ID NO: 585439
cgaucucuucucuaggaaa

SEQ ID NO: 639963 - RNA, 19 nt, Artificial Sequence
  Description of Artificial Sequence: Synthetic oligonucleotide
  Antisense strand to SEQ ID NO: 639962
uuuccuagagaagagaucg

SEQ ID NO: 639964 - RNA, 19 nt, Artificial Sequence
  Description of Artificial Sequence: Synthetic oligonucleotide
  Sense strand starting at position 862 of SEQ ID NO: 585439
aaaucaaauggauguguaa

SEQ ID NO: 639965 - RNA, 19 nt, Artificial Sequence
  Description of Artificial Sequence: Synthetic oligonucleotide
  Antisense strand to SEQ ID NO: 639964
uuacacauccauuugauuu

SEQ ID NO: 639966 - RNA, 19 nt, Artificial Sequence
  Description of Artificial Sequence: Synthetic oligonucleotide
  Sense strand starting at position 869 of SEQ ID NO: 585439
auggauguguaauuccaca

SEQ ID NO: 639967 - RNA, 19 nt, Artificial Sequence
  Description of Artificial Sequence: Synthetic oligonucleotide
  Antisense strand to SEQ ID NO: 639966
uguggaauuacacauccau

SEQ ID NO: 639968 - RNA, 19 nt, Artificial Sequence
  Description of Artificial Sequence: Synthetic oligonucleotide
  Sense strand starting at position 874 of SEQ ID NO: 585439
uguguaauuccacagacag

SEQ ID NO: 639969 - RNA, 19 nt, Artificial Sequence
  Description of Artificial Sequence: Synthetic oligonucleotide
  Antisense strand to SEQ ID NO: 639968
cugucuguggaauuacaca

SEQ ID NO: 639970 - RNA, 19 nt, Artificial Sequence
  Description of Artificial Sequence: Synthetic oligonucleotide
  Sense strand starting at position 898 of SEQ ID NO: 585439
aauaaagauuuaggacagu

SEQ ID NO: 639971 - RNA, 19 nt, Artificial Sequence
  Description of Artificial Sequence: Synthetic oligonucleotide
  Antisense strand to SEQ ID NO: 639970
acuguccuaaaucuuuauu

SEQ ID NO: 639972 - RNA, 19 nt, Artificial Sequence
  Description of Artificial Sequence: Synthetic oligonucleotide
  Sense strand starting at position 1222 of SEQ ID NO: 585439
gcuagucacguucugccaa

SEQ ID NO: 639973 - RNA, 19 nt, Artificial Sequence
  Description of Artificial Sequence: Synthetic oligonucleotide
  Antisense strand to SEQ ID NO: 639972
uuggcagaacgugacuagc

SEQ ID NO: 639974 - RNA, 19 nt, Artificial Sequence
  Description of Artificial Sequence: Synthetic oligonucleotide
  Sense strand starting at position 1285 of SEQ ID NO: 585439
ccgucuacucaagaauucu

SEQ ID NO: 639975 - RNA, 19 nt, Artificial Sequence
  Description of Artificial Sequence: Synthetic oligonucleotide
  Antisense strand to SEQ ID NO: 639974
agaauucuugaguagacgg

SEQ ID NO: 639976 - RNA, 19 nt, Artificial Sequence
  Description of Artificial Sequence: Synthetic oligonucleotide
  Sense strand starting at position 1491 of SEQ ID NO: 585439
guagaauuuaccuguccgu

SEQ ID NO: 639977 - RNA, 19 nt, Artificial Sequence
  Description of Artificial Sequence: Synthetic oligonucleotide
  Antisense strand to SEQ ID NO: 639976
acggacagguaaauucuac

SEQ ID NO: 639978 - RNA, 19 nt, Artificial Sequence
  Description of Artificial Sequence: Synthetic oligonucleotide
  Sense strand starting at position 2142 of SEQ ID NO: 585439
gccucagaccgagaauuaa

SEQ ID NO: 639979 - RNA, 19 nt, Artificial Sequence
  Description of Artificial Sequence: Synthetic oligonucleotide
  Antisense strand to SEQ ID NO: 639978
uuaauucucggucugaggc

SEQ ID NO: 639980 - RNA, 19 nt, Artificial Sequence
  Description of Artificial Sequence: Synthetic oligonucleotide
  Sense strand starting at position 2298 of SEQ ID NO: 585439
cggagaaagcguuaacuug

SEQ ID NO: 639981 - RNA, 19 nt, Artificial Sequence
  Description of Artificial Sequence: Synthetic oligonucleotide
  Antisense strand to SEQ ID NO: 639980
caaguuaacgcuuucuccg

SEQ ID NO: 639982 - RNA, 19 nt, Artificial Sequence
  Description of Artificial Sequence: Synthetic oligonucleotide
  Sense strand starting at position 2380 of SEQ ID NO: 585439
ccaucuuuccguguguuua

SEQ ID NO: 639983 - RNA, 19 nt, Artificial Sequence
  Description of Artificial Sequence: Synthetic oligonucleotide
  Antisense strand to SEQ ID NO: 639982
uaaacacacggaaagaugg

SEQ ID NO: 639984 - RNA, 19 nt, Artificial Sequence
  Description of Artificial Sequence: Synthetic oligonucleotide
  Sense strand starting at position 2408 of SEQ ID NO: 585439
guguguaugcgaguguuaa

SEQ ID NO: 639985 - RNA, 19 nt, Artificial Sequence
  Description of Artificial Sequence: Synthetic oligonucleotide
  Antisense strand to SEQ ID NO: 639984
uuaacacucgcauacacac

SEQ ID NO: 639986 - RNA, 19 nt, Artificial Sequence
  Description of Artificial Sequence: Synthetic oligonucleotide
  Sense strand starting at position 2416 of SEQ ID NO: 585439
gcgaguguuaaagacaaug

SEQ ID NO: 639987 - RNA, 19 nt, Artificial Sequence
  Description of Artificial Sequence: Synthetic oligonucleotide
  Antisense strand to SEQ ID NO: 639986
cauugucuuuaacacucgc

SEQ ID NO: 639988 - RNA, 19 nt, Artificial Sequence
  Description of Artificial Sequence: Synthetic oligonucleotide
  Sense strand starting at position 2418 of SEQ ID NO: 585439
gaguguuaaagacaauggu

SEQ ID NO: 639989 - RNA, 19 nt, Artificial Sequence
  Description of Artificial Sequence: Synthetic oligonucleotide
  Antisense strand to SEQ ID NO: 639988
accauugucuuuaacacuc

SEQ ID NO: 639990 - RNA, 19 nt, Artificial Sequence
  Description of Artificial Sequence: Synthetic oligonucleotide
  Sense strand starting at position 2425 of SEQ ID NO: 585439
aaagacaaugguugcgauu

SEQ ID NO: 639991 - RNA, 19 nt, Artificial Sequence
  Description of Artificial Sequence: Synthetic oligonucleotide
  Antisense strand to SEQ ID NO: 639990
aaucgcaaccauugucuuu

SEQ ID NO: 639992 - RNA, 19 nt, Artificial Sequence
  Description of Artificial Sequence: Synthetic oligonucleotide
  Sense strand starting at position 2489 of SEQ ID NO: 585439
acagauaaugcucaggguu

SEQ ID NO: 639993 - RNA, 19 nt, Artificial Sequence
  Description of Artificial Sequence: Synthetic oligonucleotide
  Antisense strand to SEQ ID NO: 639992
aacccugagcauuaucugu

SEQ ID NO: 639994 - RNA, 19 nt, Artificial Sequence
  Description of Artificial Sequence: Synthetic oligonucleotide
  Sense strand starting at position 2527 of SEQ ID NO: 585439
augguuaaaucgucccaaa

SEQ ID NO: 639995 - RNA, 19 nt, Artificial Sequence
  Description of Artificial Sequence: Synthetic oligonucleotide
  Antisense strand to SEQ ID NO: 639994
uuugggacgauuuaaccau

SEQ ID NO: 639996 - RNA, 19 nt, Artificial Sequence
  Description of Artificial Sequence: Synthetic oligonucleotide
  Sense strand starting at position 2593 of SEQ ID NO: 585439
gcaaguuagaauuaggucu

SEQ ID NO: 639997 - RNA, 19 nt, Artificial Sequence
  Description of Artificial Sequence: Synthetic oligonucleotide
  Antisense strand to SEQ ID NO: 639996
agaccuaauucuaacuugc

SEQ ID NO: 639998 - RNA, 19 nt, Artificial Sequence
  Description of Artificial Sequence: Synthetic oligonucleotide
  Sense strand starting at position 2601 of SEQ ID NO: 585439
gaauuaggucuguaggcca

SEQ ID NO: 639999 - RNA, 19 nt, Artificial Sequence
  Description of Artificial Sequence: Synthetic oligonucleotide
  Antisense strand to SEQ ID NO: 639998
uggccuacagaccuaauuc

SEQ ID NO: 640000 - RNA, 19 nt, Artificial Sequence
  Description of Artificial Sequence: Synthetic oligonucleotide
  Sense strand starting at position 2672 of SEQ ID NO: 585439
cccacauuggcaugaaaua

SEQ ID NO: 640001 - RNA, 19 nt, Artificial Sequence
  Description of Artificial Sequence: Synthetic oligonucleotide
  Antisense strand to SEQ ID NO: 640000
uauuucaugccaauguggg

SEQ ID NO: 640002 - RNA, 19 nt, Artificial Sequence
  Description of Artificial Sequence: Synthetic oligonucleotide
  Sense strand starting at position 2782 of SEQ ID NO: 585439
gagagccauuuacagaaga

SEQ ID NO: 640003 - RNA, 19 nt, Artificial Sequence
  Description of Artificial Sequence: Synthetic oligonucleotide
  Antisense strand to SEQ ID NO: 640002
ucuucuguaaauggcucuc

SEQ ID NO: 640004 - RNA, 19 nt, Artificial Sequence
  Description of Artificial Sequence: Synthetic oligonucleotide
  Sense strand starting at position 3062 of SEQ ID NO: 585439
agaaauguucuguauguug

SEQ ID NO: 640005 - RNA, 19 nt, Artificial Sequence
  Description of Artificial Sequence: Synthetic oligonucleotide
  Antisense strand to SEQ ID NO: 640004
caacauacagaacauuucu

SEQ ID NO: 640006 - RNA, 19 nt, Artificial Sequence
  Description of Artificial Sequence: Synthetic oligonucleotide
  Sense strand starting at position 3065 of SEQ ID NO: 585439
aauguucuguauguugaga

SEQ ID NO: 640007 - RNA, 19 nt, Artificial Sequence
  Description of Artificial Sequence: Synthetic oligonucleotide
  Antisense strand to SEQ ID NO: 640006
ucucaacauacagaacauu

SEQ ID NO: 640008 - RNA, 19 nt, Artificial Sequence
  Description of Artificial Sequence: Synthetic oligonucleotide
  Sense strand starting at position 3095 of SEQ ID NO: 585439
cccugagcucuccaagucu

SEQ ID NO: 640009 - RNA, 19 nt, Artificial Sequence
  Description of Artificial Sequence: Synthetic oligonucleotide
  Antisense strand to SEQ ID NO: 640008
agacuuggagagcucaggg

SEQ ID NO: 640010 - RNA, 19 nt, Artificial Sequence
  Description of Artificial Sequence: Synthetic oligonucleotide
  Sense strand starting at position 3149 of SEQ ID NO: 585439
acaggauaccuccaucugu

SEQ ID NO: 640011 - RNA, 19 nt, Artificial Sequence
  Description of Artificial Sequence: Synthetic oligonucleotide
  Antisense strand to SEQ ID NO: 640010
acagauggagguauccugu

SEQ ID NO: 640012 - RNA, 19 nt, Artificial Sequence
  Description of Artificial Sequence: Synthetic oligonucleotide
  Sense strand starting at position 3214 of SEQ ID NO: 585439
gagacaaggcacugacuua

SEQ ID NO: 640013 - RNA, 19 nt, Artificial Sequence
  Description of Artificial Sequence: Synthetic oligonucleotide
  Antisense strand to SEQ ID NO: 640012
uaagucagugccuugucuc

SEQ ID NO: 640014 - RNA, 19 nt, Artificial Sequence
  Description of Artificial Sequence: Synthetic oligonucleotide
  Sense strand starting at position 3323 of SEQ ID NO: 585439
cucguuuacauuuggugau

SEQ ID NO: 640015 - RNA, 19 nt, Artificial Sequence
  Description of Artificial Sequence: Synthetic oligonucleotide
  Antisense strand to SEQ ID NO: 640014
aucaccaaauguaaacgag

SEQ ID NO: 640016 - RNA, 19 nt, Artificial Sequence
  Description of Artificial Sequence: Synthetic oligonucleotide
  Sense strand starting at position 3337 of SEQ ID NO: 585439
gugaucuugcaaggaauaa

SEQ ID NO: 640017 - RNA, 19 nt, Artificial Sequence
  Description of Artificial Sequence: Synthetic oligonucleotide
  Antisense strand to SEQ ID NO: 640016
uuauuccuugcaagaucac

SEQ ID NO: 640018 - RNA, 19 nt, Artificial Sequence
  Description of Artificial Sequence: Synthetic oligonucleotide
  Sense strand starting at position 3359 of SEQ ID NO: 585439
uucgcuuaugaaggugaga

SEQ ID NO: 640019 - RNA, 19 nt, Artificial Sequence
  Description of Artificial Sequence: Synthetic oligonucleotide
  Antisense strand to SEQ ID NO: 640018
ucucaccuucauaagcgaa

SEQ ID NO: 640020 - RNA, 19 nt, Artificial Sequence
  Description of Artificial Sequence: Synthetic oligonucleotide
  Sense strand starting at position 3361 of SEQ ID NO: 585439
cgcuuaugaaggugagaag

SEQ ID NO: 640021 - RNA, 19 nt, Artificial Sequence
  Description of Artificial Sequence: Synthetic oligonucleotide
  Antisense strand to SEQ ID NO: 640020
cuucucaccuucauaagcg

SEQ ID NO: 640022 - RNA, 19 nt, Artificial Sequence
  Description of Artificial Sequence: Synthetic oligonucleotide
  Sense strand starting at position 3413 of SEQ ID NO: 585439
ggcucugaauucucaaaca

SEQ ID NO: 640023 - RNA, 19 nt, Artificial Sequence
  Description of Artificial Sequence: Synthetic oligonucleotide
  Antisense strand to SEQ ID NO: 640022
uguuugagaauucagagcc

SEQ ID NO: 640024 - RNA, 19 nt, Artificial Sequence
  Description of Artificial Sequence: Synthetic oligonucleotide
  Sense strand starting at position 3442 of SEQ ID NO: 585439
cugcucauuguagggaaau

SEQ ID NO: 640025 - RNA, 19 nt, Artificial Sequence
  Description of Artificial Sequence: Synthetic oligonucleotide
  Antisense strand to SEQ ID NO: 640024
auuucccuacaaugagcag

SEQ ID NO: 640026 - RNA, 19 nt, Artificial Sequence
  Description of Artificial Sequence: Synthetic oligonucleotide
  Sense strand starting at position 3592 of SEQ ID NO: 585439
gcauuauucgaccaugguc

SEQ ID NO: 640027 - RNA, 19 nt, Artificial Sequence
  Description of Artificial Sequence: Synthetic oligonucleotide
  Antisense strand to SEQ ID NO: 640026
gaccauggucgaauaaugc

SEQ ID NO: 640028 - RNA, 19 nt, Artificial Sequence
  Description of Artificial Sequence: Synthetic oligonucleotide
  Sense strand starting at position 3594 of SEQ ID NO: 585439
auuauucgaccauggucau

SEQ ID NO: 640029 - RNA, 19 nt, Artificial Sequence
  Description of Artificial Sequence: Synthetic oligonucleotide
  Antisense strand to SEQ ID NO: 640028
augaccauggucgaauaau

SEQ ID NO: 640030 - RNA, 19 nt, Artificial Sequence
  Description of Artificial Sequence: Synthetic oligonucleotide
  Sense strand starting at position 3595 of SEQ ID NO: 585439
uuauucgaccauggucaua

SEQ ID NO: 640031 - RNA, 19 nt, Artificial Sequence
  Description of Artificial Sequence: Synthetic oligonucleotide
  Antisense strand to SEQ ID NO: 640030
uaugaccauggucgaauaa

SEQ ID NO: 640032 - RNA, 19 nt, Artificial Sequence
  Description of Artificial Sequence: Synthetic oligonucleotide
  Sense strand starting at position 3597 of SEQ ID NO: 585439
auucgaccauggucauauu

SEQ ID NO: 640033 - RNA, 19 nt, Artificial Sequence
  Description of Artificial Sequence: Synthetic oligonucleotide
  Antisense strand to SEQ ID NO: 640032
aauaugaccauggucgaau

SEQ ID NO: 640034 - RNA, 19 nt, Artificial Sequence
  Description of Artificial Sequence: Synthetic oligonucleotide
  Sense strand starting at position 3631 of SEQ ID NO: 585439
aaagacguuuccguagaaa

SEQ ID NO: 640035 - RNA, 19 nt, Artificial Sequence
  Description of Artificial Sequence: Synthetic oligonucleotide
  Antisense strand to SEQ ID NO: 640034
uuucuacggaaacgucuuu

SEQ ID NO: 640036 - RNA, 19 nt, Artificial Sequence
  Description of Artificial Sequence: Synthetic oligonucleotide
  Sense strand starting at position 3813 of SEQ ID NO: 585439
auuuaaggcucuugauuuc

SEQ ID NO: 640037 - RNA, 19 nt, Artificial Sequence
  Description of Artificial Sequence: Synthetic oligonucleotide
  Antisense strand to SEQ ID NO: 640036
gaaaucaagagccuuaaau

SEQ ID NO: 640038 - RNA, 19 nt, Artificial Sequence
  Description of Artificial Sequence: Synthetic oligonucleotide
  Sense strand starting at position 16 of SEQ ID NO: 585440
aggugagaacucuggcuac

SEQ ID NO: 640039 - RNA, 19 nt, Artificial Sequence
  Description of Artificial Sequence: Synthetic oligonucleotide
  Antisense strand to SEQ ID NO: 640038
guagccagaguucucaccu

SEQ ID NO: 640040 - RNA, 19 nt, Artificial Sequence
  Description of Artificial Sequence: Synthetic oligonucleotide
  Sense strand starting at position 19 of SEQ ID NO: 585440
ugagaacucuggcuacaaa

SEQ ID NO: 640041 - RNA, 19 nt, Artificial Sequence
  Description of Artificial Sequence: Synthetic oligonucleotide
  Antisense strand to SEQ ID NO: 640040
uuuguagccagaguucuca

SEQ ID NO: 640042 - RNA, 19 nt, Artificial Sequence
  Description of Artificial Sequence: Synthetic oligonucleotide
  Sense strand starting at position 247 of SEQ ID NO: 585440
gcacauggcuuguuagauc

SEQ ID NO: 640043 - RNA, 19 nt, Artificial Sequence
  Description of Artificial Sequence: Synthetic oligonucleotide
  Antisense strand to SEQ ID NO: 640042
gaucuaacaagccaugugc

SEQ ID NO: 640044 - RNA, 19 nt, Artificial Sequence
  Description of Artificial Sequence: Synthetic oligonucleotide
  Sense strand starting at position 265 of SEQ ID NO: 585440
cauaacauccgcgauguuu

SEQ ID NO: 640045 - RNA, 19 nt, Artificial Sequence
  Description of Artificial Sequence: Synthetic oligonucleotide
  Antisense strand to SEQ ID NO: 640044
aaacaucgcggauguuaug

SEQ ID NO: 640046 - RNA, 19 nt, Artificial Sequence
  Description of Artificial Sequence: Synthetic oligonucleotide
  Sense strand starting at position 293 of SEQ ID NO: 585440
gguguaaugccaugaaaug

SEQ ID NO: 640047 - RNA, 19 nt, Artificial Sequence
  Description of Artificial Sequence: Synthetic oligonucleotide
  Antisense strand to SEQ ID NO: 640046
cauuucauggcauuacacc

SEQ ID NO: 640048 - RNA, 19 nt, Artificial Sequence
  Description of Artificial Sequence: Synthetic oligonucleotide
  Sense strand starting at position 332 of SEQ ID NO: 585440
agaagaccuucguaaauuu

SEQ ID NO: 640049 - RNA, 19 nt, Artificial Sequence
  Description of Artificial Sequence: Synthetic oligonucleotide
  Antisense strand to SEQ ID NO: 640048
aaauuuacgaaggucuucu

SEQ ID NO: 640050 - RNA, 19 nt, Artificial Sequence
  Description of Artificial Sequence: Synthetic oligonucleotide
  Sense strand starting at position 386 of SEQ ID NO: 585440
acaugauagagcugugugu

SEQ ID NO: 640051 - RNA, 19 nt, Artificial Sequence
  Description of Artificial Sequence: Synthetic oligonucleotide
  Antisense strand to SEQ ID NO: 640050
acacacagcucuaucaugu

SEQ ID NO: 640052 - RNA, 19 nt, Artificial Sequence
  Description of Artificial Sequence: Synthetic oligonucleotide
  Sense strand starting at position 480 of SEQ ID NO: 585440
aggagagacugauauuugu

SEQ ID NO: 640053 - RNA, 19 nt, Artificial Sequence
  Description of Artificial Sequence: Synthetic oligonucleotide
  Antisense strand to SEQ ID NO: 640052
acaaauaucagucucuccu

SEQ ID NO: 640054 - RNA, 19 nt, Artificial Sequence
  Description of Artificial Sequence: Synthetic oligonucleotide
  Sense strand starting at position 487 of SEQ ID NO: 585440
acugauauuuguugaacau

SEQ ID NO: 640055 - RNA, 19 nt, Artificial Sequence
  Description of Artificial Sequence: Synthetic oligonucleotide
  Antisense strand to SEQ ID NO: 640054
auguucaacaaauaucagu

SEQ ID NO: 640056 - RNA, 19 nt, Artificial Sequence
  Description of Artificial Sequence: Synthetic oligonucleotide
  Sense strand starting at position 575 of SEQ ID NO: 585440
agacuauugccgcaaccau

SEQ ID NO: 640057 - RNA, 19 nt, Artificial Sequence
  Description of Artificial Sequence: Synthetic oligonucleotide
  Antisense strand to SEQ ID NO: 640056
augguugcggcaauagucu

SEQ ID NO: 640058 - RNA, 19 nt, Artificial Sequence
  Description of Artificial Sequence: Synthetic oligonucleotide
  Sense strand starting at position 611 of SEQ ID NO: 585440
gaggcucugagagguuuaa

SEQ ID NO: 640059 - RNA, 19 nt, Artificial Sequence
  Description of Artificial Sequence: Synthetic oligonucleotide
  Antisense strand to SEQ ID NO: 640058
uuaaaccucucagagccuc

SEQ ID NO: 640060 - RNA, 19 nt, Artificial Sequence
  Description of Artificial Sequence: Synthetic oligonucleotide
  Sense strand starting at position 726 of SEQ ID NO: 585440
cguacacaucuguaaaucu

SEQ ID NO: 640061 - RNA, 19 nt, Artificial Sequence
  Description of Artificial Sequence: Synthetic oligonucleotide
  Antisense strand to SEQ ID NO: 640060
agauuuacagauguguacg

SEQ ID NO: 640062 - RNA, 19 nt, Artificial Sequence
  Description of Artificial Sequence: Synthetic oligonucleotide
  Sense strand starting at position 800 of SEQ ID NO: 585440
gaaauagagucuuugucaa

SEQ ID NO: 640063 - RNA, 19 nt, Artificial Sequence
  Description of Artificial Sequence: Synthetic oligonucleotide
  Antisense strand to SEQ ID NO: 640062
uugacaaagacucuauuuc

SEQ ID NO: 640064 - RNA, 19 nt, Artificial Sequence
  Description of Artificial Sequence: Synthetic oligonucleotide
  Sense strand starting at position 802 of SEQ ID NO: 585440
aauagagucuuugucaagu

SEQ ID NO: 640065 - RNA, 19 nt, Artificial Sequence
  Description of Artificial Sequence: Synthetic oligonucleotide
  Antisense strand to SEQ ID NO: 640064
acuugacaaagacucuauu

SEQ ID NO: 640066 - RNA, 19 nt, Artificial Sequence
  Description of Artificial Sequence: Synthetic oligonucleotide
  Sense strand starting at position 810 of SEQ ID NO: 585440
cuuugucaaguacagaaau

SEQ ID NO: 640067 - RNA, 19 nt, Artificial Sequence
  Description of Artificial Sequence: Synthetic oligonucleotide
  Antisense strand to SEQ ID NO: 640066
auuucuguacuugacaaag

SEQ ID NO: 640068 - RNA, 19 nt, Artificial Sequence
  Description of Artificial Sequence: Synthetic oligonucleotide
  Sense strand starting at position 2022 of SEQ ID NO: 585440
uucuguaaauauguccaga

SEQ ID NO: 640069 - RNA, 19 nt, Artificial Sequence
  Description of Artificial Sequence: Synthetic oligonucleotide
  Antisense strand to SEQ ID NO: 640068
ucuggacauauuuacagaa

SEQ ID NO: 640070 - RNA, 19 nt, Artificial Sequence
  Description of Artificial Sequence: Synthetic oligonucleotide
  Sense strand starting at position 2024 of SEQ ID NO: 585440
cuguaaauauguccagaac

SEQ ID NO: 640071 - RNA, 19 nt, Artificial Sequence
  Description of Artificial Sequence: Synthetic oligonucleotide
  Antisense strand to SEQ ID NO: 640070
guucuggacauauuuacag

SEQ ID NO: 640072 - RNA, 19 nt, Artificial Sequence
  Description of Artificial Sequence: Synthetic oligonucleotide
  Sense strand starting at position 2149 of SEQ ID NO: 585440
acaguuaucuuugucacaa

SEQ ID NO: 640073 - RNA, 19 nt, Artificial Sequence
  Description of Artificial Sequence: Synthetic oligonucleotide
  Antisense strand to SEQ ID NO: 640072
uugugacaaagauaacugu

SEQ ID NO: 640074 - RNA, 19 nt, Artificial Sequence
  Description of Artificial Sequence: Synthetic oligonucleotide
  Sense strand starting at position 2168 of SEQ ID NO: 585440
ugauaagauuaggccuuua

SEQ ID NO: 640075 - RNA, 19 nt, Artificial Sequence
  Description of Artificial Sequence: Synthetic oligonucleotide
  Antisense strand to SEQ ID NO: 640074
uaaaggccuaaucuuauca

SEQ ID NO: 640076 - RNA, 19 nt, Artificial Sequence
  Description of Artificial Sequence: Synthetic oligonucleotide
  Sense strand starting at position 2180 of SEQ ID NO: 585440
gccuuuaggaccugauaag

SEQ ID NO: 640077 - RNA, 19 nt, Artificial Sequence
  Description of Artificial Sequence: Synthetic oligonucleotide
  Antisense strand to SEQ ID NO: 640076
cuuaucagguccuaaaggc

SEQ ID NO: 640078 - RNA, 19 nt, Artificial Sequence
  Description of Artificial Sequence: Synthetic oligonucleotide
  Sense strand starting at position 2214 of SEQ ID NO: 585440
ugauaagacugagaacuga

SEQ ID NO: 640079 - RNA, 19 nt, Artificial Sequence
  Description of Artificial Sequence: Synthetic oligonucleotide
  Antisense strand to SEQ ID NO: 640078
ucaguucucagucuuauca

SEQ ID NO: 640080 - RNA, 19 nt, Artificial Sequence
  Description of Artificial Sequence: Synthetic oligonucleotide
  Sense strand starting at position 2439 of SEQ ID NO: 585440
gguggacugcauuaagacu

SEQ ID NO: 640081 - RNA, 19 nt, Artificial Sequence
  Description of Artificial Sequence: Synthetic oligonucleotide
  Antisense strand to SEQ ID NO: 640080
agucuuaaugcaguccacc

SEQ ID NO: 640082 - RNA, 19 nt, Artificial Sequence
  Description of Artificial Sequence: Synthetic oligonucleotide
  Sense strand starting at position 2543 of SEQ ID NO: 585440
cugggacaauggguuuaau

SEQ ID NO: 640083 - RNA, 19 nt, Artificial Sequence
  Description of Artificial Sequence: Synthetic oligonucleotide
  Antisense strand to SEQ ID NO: 640082
auuaaacccauugucccag

SEQ ID NO: 640084 - RNA, 19 nt, Artificial Sequence
  Description of Artificial Sequence: Synthetic oligonucleotide
  Sense strand starting at position 2565 of SEQ ID NO: 585440
guaccaauauugcuuaaag

SEQ ID NO: 640085 - RNA, 19 nt, Artificial Sequence
  Description of Artificial Sequence: Synthetic oligonucleotide
  Antisense strand to SEQ ID NO: 640084
cuuuaagcaauauugguac

SEQ ID NO: 640086 - RNA, 19 nt, Artificial Sequence
  Description of Artificial Sequence: Synthetic oligonucleotide
  Sense strand starting at position 2567 of SEQ ID NO: 585440
accaauauugcuuaaagug

SEQ ID NO: 640087 - RNA, 19 nt, Artificial Sequence
  Description of Artificial Sequence: Synthetic oligonucleotide
  Antisense strand to SEQ ID NO: 640086
cacuuuaagcaauauuggu

SEQ ID NO: 640088 - RNA, 19 nt, Artificial Sequence
  Description of Artificial Sequence: Synthetic oligonucleotide
  Sense strand starting at position 2574 of SEQ ID NO: 585440
uugcuuaaagugugaacaa

SEQ ID NO: 640089 - RNA, 19 nt, Artificial Sequence
  Description of Artificial Sequence: Synthetic oligonucleotide
  Antisense strand to SEQ ID NO: 640088
uuguucacacuuuaagcaa

SEQ ID NO: 640090 - RNA, 19 nt, Artificial Sequence
  Description of Artificial Sequence: Synthetic oligonucleotide
  Sense strand starting at position 2673 of SEQ ID NO: 585440
cauugauguguggacugga

SEQ ID NO: 640091 - RNA, 19 nt, Artificial Sequence
  Description of Artificial Sequence: Synthetic oligonucleotide
  Antisense strand to SEQ ID NO: 640090
uccaguccacacaucaaug

SEQ ID NO: 640092 - RNA, 19 nt, Artificial Sequence
  Description of Artificial Sequence: Synthetic oligonucleotide
  Sense strand starting at position 2698 of SEQ ID NO: 585440
gcccuaacaagacguaugu

SEQ ID NO: 640093 - RNA, 19 nt, Artificial Sequence
  Description of Artificial Sequence: Synthetic oligonucleotide
  Antisense strand to SEQ ID NO: 640092
acauacgucuuguuagggc

SEQ ID NO: 640094 - RNA, 19 nt, Artificial Sequence
  Description of Artificial Sequence: Synthetic oligonucleotide
  Sense strand starting at position 2855 of SEQ ID NO: 585440
ucugaacuuuguccauaag

SEQ ID NO: 640095 - RNA, 19 nt, Artificial Sequence
  Description of Artificial Sequence: Synthetic oligonucleotide
  Antisense strand to SEQ ID NO: 640094
cuuauggacaaaguucaga

SEQ ID NO: 640096 - RNA, 19 nt, Artificial Sequence
  Description of Artificial Sequence: Synthetic oligonucleotide
  Sense strand starting at position 2943 of SEQ ID NO: 585440
gugagauguuagcucacug

SEQ ID NO: 640097 - RNA, 19 nt, Artificial Sequence
  Description of Artificial Sequence: Synthetic oligonucleotide
  Antisense strand to SEQ ID NO: 640096
cagugagcuaacaucucac

SEQ ID NO: 640098 - RNA, 19 nt, Artificial Sequence
  Description of Artificial Sequence: Synthetic oligonucleotide
  Sense strand starting at position 3202 of SEQ ID NO: 585440
gugaauagauaucugucuu

SEQ ID NO: 640099 - RNA, 19 nt, Artificial Sequence
  Description of Artificial Sequence: Synthetic oligonucleotide
  Antisense strand to SEQ ID NO: 640098
aagacagauaucuauucac

SEQ ID NO: 640100 - RNA, 19 nt, Artificial Sequence
  Description of Artificial Sequence: Synthetic oligonucleotide
  Sense strand starting at position 3260 of SEQ ID NO: 585440
guguuauuucguggcacuu

SEQ ID NO: 640101 - RNA, 19 nt, Artificial Sequence
  Description of Artificial Sequence: Synthetic oligonucleotide
  Antisense strand to SEQ ID NO: 640100
aagugccacgaaauaacac

SEQ ID NO: 640102 - RNA, 19 nt, Artificial Sequence
  Description of Artificial Sequence: Synthetic oligonucleotide
  Sense strand starting at position 3280 of SEQ ID NO: 585440
aaugguucuggugauauua

SEQ ID NO: 640103 - RNA, 19 nt, Artificial Sequence
  Description of Artificial Sequence: Synthetic oligonucleotide
  Antisense strand to SEQ ID NO: 640102
uaauaucaccagaaccauu

SEQ ID NO: 640104 - RNA, 19 nt, Artificial Sequence
  Description of Artificial Sequence: Synthetic oligonucleotide
  Sense strand starting at position 3393 of SEQ ID NO: 585440
uagccuuuggguuggugaa

SEQ ID NO: 640105 - RNA, 19 nt, Artificial Sequence
  Description of Artificial Sequence: Synthetic oligonucleotide
  Antisense strand to SEQ ID NO: 640104
uucaccaacccaaaggcua

SEQ ID NO: 640106 - RNA, 19 nt, Artificial Sequence
  Description of Artificial Sequence: Synthetic oligonucleotide
  Sense strand starting at position 3394 of SEQ ID NO: 585440
agccuuuggguuggugaaa

SEQ ID NO: 640107 - RNA, 19 nt, Artificial Sequence
  Description of Artificial Sequence: Synthetic oligonucleotide
  Antisense strand to SEQ ID NO: 640106
uuucaccaacccaaaggcu

SEQ ID NO: 640108 - RNA, 19 nt, Artificial Sequence
  Description of Artificial Sequence: Synthetic oligonucleotide
  Sense strand starting at position 3419 of SEQ ID NO: 585440
uuuccuuccagcgauguga

SEQ ID NO: 640109 - RNA, 19 nt, Artificial Sequence
  Description of Artificial Sequence: Synthetic oligonucleotide
  Antisense strand to SEQ ID NO: 640108
ucacaucgcuggaaggaaa

SEQ ID NO: 640110 - RNA, 19 nt, Artificial Sequence
  Description of Artificial Sequence: Synthetic oligonucleotide
  Sense strand starting at position 3508 of SEQ ID NO: 585440
guucuaaugggaugcagga

SEQ ID NO: 640111 - RNA, 19 nt, Artificial Sequence
  Description of Artificial Sequence: Synthetic oligonucleotide
  Antisense strand to SEQ ID NO: 640110
uccugcaucccauuagaac

SEQ ID NO: 640112 - RNA, 19 nt, Artificial Sequence
  Description of Artificial Sequence: Synthetic oligonucleotide
  Sense strand starting at position 3649 of SEQ ID NO: 585440
gagaccaggccuuguuaga

SEQ ID NO: 640113 - RNA, 19 nt, Artificial Sequence
  Description of Artificial Sequence: Synthetic oligonucleotide
  Antisense strand to SEQ ID NO: 640112
ucuaacaaggccuggucuc

SEQ ID NO: 640114 - RNA, 19 nt, Artificial Sequence
  Description of Artificial Sequence: Synthetic oligonucleotide
  Sense strand starting at position 3784 of SEQ ID NO: 585440
uggagucuguaucccagua

SEQ ID NO: 640115 - RNA, 19 nt, Artificial Sequence
  Description of Artificial Sequence: Synthetic oligonucleotide
  Antisense strand to SEQ ID NO: 640114
uacugggauacagacucca

SEQ ID NO: 640116 - RNA, 19 nt, Artificial Sequence
  Description of Artificial Sequence: Synthetic oligonucleotide
  Sense strand starting at position 3946 of SEQ ID NO: 585440
ggaaacgucucacucauga

SEQ ID NO: 640117 - RNA, 19 nt, Artificial Sequence
  Description of Artificial Sequence: Synthetic oligonucleotide
  Antisense strand to SEQ ID NO: 640116
ucaugagugagacguuucc

SEQ ID NO: 640118 - RNA, 19 nt, Artificial Sequence
  Description of Artificial Sequence: Synthetic oligonucleotide
  Sense strand starting at position 78 of SEQ ID NO: 585441
ugguauuaaguuggagaga

SEQ ID NO: 640119 - RNA, 19 nt, Artificial Sequence
  Description of Artificial Sequence: Synthetic oligonucleotide
  Antisense strand to SEQ ID NO: 640118
ucucuccaacuuaauacca

SEQ ID NO: 640120 - RNA, 19 nt, Artificial Sequence
  Description of Artificial Sequence: Synthetic oligonucleotide
  Sense strand starting at position 102 of SEQ ID NO: 585441
agguaaauuugcuuucuuc

SEQ ID NO: 640121 - RNA, 19 nt, Artificial Sequence
  Description of Artificial Sequence: Synthetic oligonucleotide
  Antisense strand to SEQ ID NO: 640120
gaagaaagcaaauuuaccu

SEQ ID NO: 640122 - RNA, 19 nt, Artificial Sequence
  Description of Artificial Sequence: Synthetic oligonucleotide
  Sense strand starting at position 128 of SEQ ID NO: 585441
aagguuuggguguaaauuc

SEQ ID NO: 640123 - RNA, 19 nt, Artificial Sequence
  Description of Artificial Sequence: Synthetic oligonucleotide
  Antisense strand to SEQ ID NO: 640122
gaauuuacacccaaaccuu

SEQ ID NO: 640124 - RNA, 19 nt, Artificial Sequence
  Description of Artificial Sequence: Synthetic oligonucleotide
  Sense strand starting at position 138 of SEQ ID NO: 585441
uguaaauucuaaccuagug

SEQ ID NO: 640125 - RNA, 19 nt, Artificial Sequence
  Description of Artificial Sequence: Synthetic oligonucleotide
  Antisense strand to SEQ ID NO: 640124
cacuagguuagaauuuaca

SEQ ID NO: 640126 - RNA, 19 nt, Artificial Sequence
  Description of Artificial Sequence: Synthetic oligonucleotide
  Sense strand starting at position 150 of SEQ ID NO: 585441
ccuagugaggagggauuau

SEQ ID NO: 640127 - RNA, 19 nt, Artificial Sequence
  Description of Artificial Sequence: Synthetic oligonucleotide
  Antisense strand to SEQ ID NO: 640126
auaaucccuccucacuagg

SEQ ID NO: 640128 - RNA, 19 nt, Artificial Sequence
  Description of Artificial Sequence: Synthetic oligonucleotide
  Sense strand starting at position 162 of SEQ ID NO: 585441
ggauuauauuauccaacgu

SEQ ID NO: 640129 - RNA, 19 nt, Artificial Sequence
  Description of Artificial Sequence: Synthetic oligonucleotide
  Antisense strand to SEQ ID NO: 640128
acguuggauaauauaaucc

SEQ ID NO: 640130 - RNA, 19 nt, Artificial Sequence
  Description of Artificial Sequence: Synthetic oligonucleotide
  Sense strand starting at position 265 of SEQ ID NO: 585441
caaggaguccuguauauuc

SEQ ID NO: 640131 - RNA, 19 nt, Artificial Sequence
  Description of Artificial Sequence: Synthetic oligonucleotide
  Antisense strand to SEQ ID NO: 640130
gaauauacaggacuccuug

SEQ ID NO: 640132 - RNA, 19 nt, Artificial Sequence
  Description of Artificial Sequence: Synthetic oligonucleotide
  Sense strand starting at position 336 of SEQ ID NO: 585441
ccuccucuugcauaagaug

SEQ ID NO: 640133 - RNA, 19 nt, Artificial Sequence
  Description of Artificial Sequence: Synthetic oligonucleotide
  Antisense strand to SEQ ID NO: 640132
caucuuaugcaagaggagg

SEQ ID NO: 640134 - RNA, 19 nt, Artificial Sequence
  Description of Artificial Sequence: Synthetic oligonucleotide
  Sense strand starting at position 389 of SEQ ID NO: 585441
acaugcuuugaaugggaga

SEQ ID NO: 640135 - RNA, 19 nt, Artificial Sequence
  Description of Artificial Sequence: Synthetic oligonucleotide
  Antisense strand to SEQ ID NO: 640134
ucucccauucaaagcaugu

SEQ ID NO: 640136 - RNA, 19 nt, Artificial Sequence
  Description of Artificial Sequence: Synthetic oligonucleotide
  Sense strand starting at position 423 of SEQ ID NO: 585441
aaggcaaucuggguccaaa

SEQ ID NO: 640137 - RNA, 19 nt, Artificial Sequence
  Description of Artificial Sequence: Synthetic oligonucleotide
  Antisense strand to SEQ ID NO: 640136
uuuggacccagauugccuu

SEQ ID NO: 640138 - RNA, 19 nt, Artificial Sequence
  Description of Artificial Sequence: Synthetic oligonucleotide
  Sense strand starting at position 450 of SEQ ID NO: 585441
ucuuacucuuaugugauga

SEQ ID NO: 640139 - RNA, 19 nt, Artificial Sequence
  Description of Artificial Sequence: Synthetic oligonucleotide
  Antisense strand to SEQ ID NO: 640138
ucaucacauaagaguaaga

SEQ ID NO: 640140 - RNA, 19 nt, Artificial Sequence
  Description of Artificial Sequence: Synthetic oligonucleotide
  Sense strand starting at position 591 of SEQ ID NO: 585441
uuuguauggucuuuauuug

SEQ ID NO: 640141 - RNA, 19 nt, Artificial Sequence
  Description of Artificial Sequence: Synthetic oligonucleotide
  Antisense strand to SEQ ID NO: 640140
caaauaaagaccauacaaa

SEQ ID NO: 640142 - RNA, 19 nt, Artificial Sequence
  Description of Artificial Sequence: Synthetic oligonucleotide
  Sense strand starting at position 745 of SEQ ID NO: 585441
uugaaaguccaugaaagcu

SEQ ID NO: 640143 - RNA, 19 nt, Artificial Sequence
  Description of Artificial Sequence: Synthetic oligonucleotide
  Antisense strand to SEQ ID NO: 640142
agcuuucauggacuuucaa

SEQ ID NO: 640144 - RNA, 19 nt, Artificial Sequence
  Description of Artificial Sequence: Synthetic oligonucleotide
  Sense strand starting at position 760 of SEQ ID NO: 585441
agcugaacuugauuagaau

SEQ ID NO: 640145 - RNA, 19 nt, Artificial Sequence
  Description of Artificial Sequence: Synthetic oligonucleotide
  Antisense strand to SEQ ID NO: 640144
auucuaaucaaguucagcu

SEQ ID NO: 640146 - RNA, 19 nt, Artificial Sequence
  Description of Artificial Sequence: Synthetic oligonucleotide
  Sense strand starting at position 824 of SEQ ID NO: 585441
gguuacuauguguacaauu

SEQ ID NO: 640147 - RNA, 19 nt, Artificial Sequence
  Description of Artificial Sequence: Synthetic oligonucleotide
  Antisense strand to SEQ ID NO: 640146
aauuguacacauaguaacc

SEQ ID NO: 640148 - RNA, 19 nt, Artificial Sequence
  Description of Artificial Sequence: Synthetic oligonucleotide
  Sense strand starting at position 845 of SEQ ID NO: 585441
ccagcucagaugugggaaa

SEQ ID NO: 640149 - RNA, 19 nt, Artificial Sequence
  Description of Artificial Sequence: Synthetic oligonucleotide
  Antisense strand to SEQ ID NO: 640148
uuucccacaucugagcugg

SEQ ID NO: 640150 - RNA, 19 nt, Artificial Sequence
  Description of Artificial Sequence: Synthetic oligonucleotide
  Sense strand starting at position 847 of SEQ ID NO: 585441
agcucagaugugggaaauu

SEQ ID NO: 640151 - RNA, 19 nt, Artificial Sequence
  Description of Artificial Sequence: Synthetic oligonucleotide
  Antisense strand to SEQ ID NO: 640150
aauuucccacaucugagcu

SEQ ID NO: 640152 - RNA, 19 nt, Artificial Sequence
  Description of Artificial Sequence: Synthetic oligonucleotide
  Sense strand starting at position 856 of SEQ ID NO: 585441
gugggaaauuauguuucca

SEQ ID NO: 640153 - RNA, 19 nt, Artificial Sequence
  Description of Artificial Sequence: Synthetic oligonucleotide
  Antisense strand to SEQ ID NO: 640152
uggaaacauaauuucccac

SEQ ID NO: 640154 - RNA, 19 nt, Artificial Sequence
  Description of Artificial Sequence: Synthetic oligonucleotide
  Sense strand starting at position 858 of SEQ ID NO: 585441
gggaaauuauguuuccaca

SEQ ID NO: 640155 - RNA, 19 nt, Artificial Sequence
  Description of Artificial Sequence: Synthetic oligonucleotide
  Antisense strand to SEQ ID NO: 640154
uguggaaacauaauuuccc

SEQ ID NO: 640156 - RNA, 19 nt, Artificial Sequence
  Description of Artificial Sequence: Synthetic oligonucleotide
  Sense strand starting at position 895 of SEQ ID NO: 585441
ggaagaagguucuccacau

SEQ ID NO: 640157 - RNA, 19 nt, Artificial Sequence
  Description of Artificial Sequence: Synthetic oligonucleotide
  Antisense strand to SEQ ID NO: 640156
auguggagaaccuucuucc

SEQ ID NO: 640158 - RNA, 19 nt, Artificial Sequence
  Description of Artificial Sequence: Synthetic oligonucleotide
  Sense strand starting at position 896 of SEQ ID NO: 585441
gaagaagguucuccacaug

SEQ ID NO: 640159 - RNA, 19 nt, Artificial Sequence
  Description of Artificial Sequence: Synthetic oligonucleotide
  Antisense strand to SEQ ID NO: 640158
cauguggagaaccuucuuc

SEQ ID NO: 640160 - RNA, 19 nt, Artificial Sequence
  Description of Artificial Sequence: Synthetic oligonucleotide
  Sense strand starting at position 1080 of SEQ ID NO: 585441
gcuguuuauaaugaggaac

SEQ ID NO: 640161 - RNA, 19 nt, Artificial Sequence
  Description of Artificial Sequence: Synthetic oligonucleotide
  Antisense strand to SEQ ID NO: 640160
guuccucauuauaaacagc

SEQ ID NO: 640162 - RNA, 19 nt, Artificial Sequence
  Description of Artificial Sequence: Synthetic oligonucleotide
  Sense strand starting at position 1250 of SEQ ID NO: 585441
ggaaucuaaugaguagagu

SEQ ID NO: 640163 - RNA, 19 nt, Artificial Sequence
  Description of Artificial Sequence: Synthetic oligonucleotide
  Antisense strand to SEQ ID NO: 640162
acucuacucauuagauucc

SEQ ID NO: 640164 - RNA, 19 nt, Artificial Sequence
  Description of Artificial Sequence: Synthetic oligonucleotide
  Sense strand starting at position 1348 of SEQ ID NO: 585441
acauguuuccaguaaguua

SEQ ID NO: 640165 - RNA, 19 nt, Artificial Sequence
  Description of Artificial Sequence: Synthetic oligonucleotide
  Antisense strand to SEQ ID NO: 640164
uaacuuacuggaaacaugu

SEQ ID NO: 640166 - RNA, 19 nt, Artificial Sequence
  Description of Artificial Sequence: Synthetic oligonucleotide
  Sense strand starting at position 1544 of SEQ ID NO: 585441
acaauauggccaggaaauc

SEQ ID NO: 640167 - RNA, 19 nt, Artificial Sequence
  Description of Artificial Sequence: Synthetic oligonucleotide
  Antisense strand to SEQ ID NO: 640166
gauuuccuggccauauugu

SEQ ID NO: 640168 - RNA, 19 nt, Artificial Sequence
  Description of Artificial Sequence: Synthetic oligonucleotide
  Sense strand starting at position 1574 of SEQ ID NO: 585441
acacgacuccaugauaagu

SEQ ID NO: 640169 - RNA, 19 nt, Artificial Sequence
  Description of Artificial Sequence: Synthetic oligonucleotide
  Antisense strand to SEQ ID NO: 640168
acuuaucauggagucgugu

SEQ ID NO: 640170 - RNA, 19 nt, Artificial Sequence
  Description of Artificial Sequence: Synthetic oligonucleotide
  Sense strand starting at position 1926 of SEQ ID NO: 585441
gagagauaucugugacuca

SEQ ID NO: 640171 - RNA, 19 nt, Artificial Sequence
  Description of Artificial Sequence: Synthetic oligonucleotide
  Antisense strand to SEQ ID NO: 640170
ugagucacagauaucucuc

SEQ ID NO: 640172 - RNA, 19 nt, Artificial Sequence
  Description of Artificial Sequence: Synthetic oligonucleotide
  Sense strand starting at position 1933 of SEQ ID NO: 585441
aucugugacucagcaaaca

SEQ ID NO: 640173 - RNA, 19 nt, Artificial Sequence
  Description of Artificial Sequence: Synthetic oligonucleotide
  Antisense strand to SEQ ID NO: 640172
uguuugcugagucacagau

SEQ ID NO: 640174 - RNA, 19 nt, Artificial Sequence
  Description of Artificial Sequence: Synthetic oligonucleotide
  Sense strand starting at position 2309 of SEQ ID NO: 585441
ggcacuaaacauugggaau

SEQ ID NO: 640175 - RNA, 19 nt, Artificial Sequence
  Description of Artificial Sequence: Synthetic oligonucleotide
  Antisense strand to SEQ ID NO: 640174
auucccaauguuuagugcc

SEQ ID NO: 640176 - RNA, 19 nt, Artificial Sequence
  Description of Artificial Sequence: Synthetic oligonucleotide
  Sense strand starting at position 2329 of SEQ ID NO: 585441
gagauuugugucuggucca

SEQ ID NO: 640177 - RNA, 19 nt, Artificial Sequence
  Description of Artificial Sequence: Synthetic oligonucleotide
  Antisense strand to SEQ ID NO: 640176
uggaccagacacaaaucuc

SEQ ID NO: 640178 - RNA, 19 nt, Artificial Sequence
  Description of Artificial Sequence: Synthetic oligonucleotide
  Sense strand starting at position 2755 of SEQ ID NO: 585441
gcauuucccugggcucaga

SEQ ID NO: 640179 - RNA, 19 nt, Artificial Sequence
  Description of Artificial Sequence: Synthetic oligonucleotide
  Antisense strand to SEQ ID NO: 640178
ucugagcccagggaaaugc

SEQ ID NO: 640180 - RNA, 19 nt, Artificial Sequence
  Description of Artificial Sequence: Synthetic oligonucleotide
  Sense strand starting at position 2817 of SEQ ID NO: 585441
agcaguuggcaccaaagaa

SEQ ID NO: 640181 - RNA, 19 nt, Artificial Sequence
  Description of Artificial Sequence: Synthetic oligonucleotide
  Antisense strand to SEQ ID NO: 640180
uucuuuggugccaacugcu

SEQ ID NO: 640182 - RNA, 19 nt, Artificial Sequence
  Description of Artificial Sequence: Synthetic oligonucleotide
  Sense strand starting at position 2945 of SEQ ID NO: 585441
ccaaaugucagcugaggag

SEQ ID NO: 640183 - RNA, 19 nt, Artificial Sequence
  Description of Artificial Sequence: Synthetic oligonucleotide
  Antisense strand to SEQ ID NO: 640182
cuccucagcugacauuugg

SEQ ID NO: 640184 - RNA, 19 nt, Artificial Sequence
  Description of Artificial Sequence: Synthetic oligonucleotide
  Sense strand starting at position 3233 of SEQ ID NO: 585441
uuaugcuaucaaggauauu

SEQ ID NO: 640185 - RNA, 19 nt, Artificial Sequence
  Description of Artificial Sequence: Synthetic oligonucleotide
  Antisense strand to SEQ ID NO: 640184
aauauccuugauagcauaa

SEQ ID NO: 640186 - RNA, 19 nt, Artificial Sequence
  Description of Artificial Sequence: Synthetic oligonucleotide
  Sense strand starting at position 3343 of SEQ ID NO: 585441
uguauauuacagcauugga

SEQ ID NO: 640187 - RNA, 19 nt, Artificial Sequence
  Description of Artificial Sequence: Synthetic oligonucleotide
  Antisense strand to SEQ ID NO: 640186
uccaaugcuguaauauaca

SEQ ID NO: 640188 - RNA, 19 nt, Artificial Sequence
  Description of Artificial Sequence: Synthetic oligonucleotide
  Sense strand starting at position 3346 of SEQ ID NO: 585441
auauuacagcauuggagaa

SEQ ID NO: 640189 - RNA, 19 nt, Artificial Sequence
  Description of Artificial Sequence: Synthetic oligonucleotide
  Antisense strand to SEQ ID NO: 640188
uucuccaaugcuguaauau

SEQ ID NO: 640190 - RNA, 19 nt, Artificial Sequence
  Description of Artificial Sequence: Synthetic oligonucleotide
  Sense strand starting at position 3476 of SEQ ID NO: 585441
caggaucuacuucgaugau

SEQ ID NO: 640191 - RNA, 19 nt, Artificial Sequence
  Description of Artificial Sequence: Synthetic oligonucleotide
  Antisense strand to SEQ ID NO: 640190
aucaucgaaguagauccug

SEQ ID NO: 640192 - RNA, 19 nt, Artificial Sequence
  Description of Artificial Sequence: Synthetic oligonucleotide
  Sense strand starting at position 3488 of SEQ ID NO: 585441
cgaugaucuccugauccag

SEQ ID NO: 640193 - RNA, 19 nt, Artificial Sequence
  Description of Artificial Sequence: Synthetic oligonucleotide
  Antisense strand to SEQ ID NO: 640192
cuggaucaggagaucaucg

SEQ ID NO: 640194 - RNA, 19 nt, Artificial Sequence
  Description of Artificial Sequence: Synthetic oligonucleotide
  Sense strand starting at position 3780 of SEQ ID NO: 585441
ugggucuuuggucauuaau

SEQ ID NO: 640195 - RNA, 19 nt, Artificial Sequence
  Description of Artificial Sequence: Synthetic oligonucleotide
  Antisense strand to SEQ ID NO: 640194
auuaaugaccaaagaccca

SEQ ID NO: 640196 - RNA, 19 nt, Artificial Sequence
  Description of Artificial Sequence: Synthetic oligonucleotide
  Sense strand starting at position 3783 of SEQ ID NO: 585441
gucuuuggucauuaauauu

SEQ ID NO: 640197 - RNA, 19 nt, Artificial Sequence
  Description of Artificial Sequence: Synthetic oligonucleotide
  Antisense strand to SEQ ID NO: 640196
aauauuaaugaccaaagac

SEQ ID NO: 640198 - RNA, 19 nt, Artificial Sequence
  Description of Artificial Sequence: Synthetic oligonucleotide
  Sense strand starting at position 140 of SEQ ID NO: 585442
aaucucuugcugggcaaga

SEQ ID NO: 640199 - RNA, 19 nt, Artificial Sequence
  Description of Artificial Sequence: Synthetic oligonucleotide
  Antisense strand to SEQ ID NO: 640198
ucuugcccagcaagagauu

SEQ ID NO: 640200 - RNA, 19 nt, Artificial Sequence
  Description of Artificial Sequence: Synthetic oligonucleotide
  Sense strand starting at position 141 of SEQ ID NO: 585442
aucucuugcugggcaagaa

SEQ ID NO: 640201 - RNA, 19 nt, Artificial Sequence
  Description of Artificial Sequence: Synthetic oligonucleotide
  Antisense strand to SEQ ID NO: 640200
uucuugcccagcaagagau

SEQ ID NO: 640202 - RNA, 19 nt, Artificial Sequence
  Description of Artificial Sequence: Synthetic oligonucleotide
  Sense strand starting at position 142 of SEQ ID NO: 585442
ucucuugcugggcaagaaa

SEQ ID NO: 640203 - RNA, 19 nt, Artificial Sequence
  Description of Artificial Sequence: Synthetic oligonucleotide
  Antisense strand to SEQ ID NO: 640202
uuucuugcccagcaagaga

SEQ ID NO: 640204 - RNA, 19 nt, Artificial Sequence
  Description of Artificial Sequence: Synthetic oligonucleotide
  Sense strand starting at position 174 of SEQ ID NO: 585442
ggaaccugcuucuaaacuu

SEQ ID NO: 640205 - RNA, 19 nt, Artificial Sequence
  Description of Artificial Sequence: Synthetic oligonucleotide
  Antisense strand to SEQ ID NO: 640204
aaguuuagaagcagguucc

SEQ ID NO: 640206 - RNA, 19 nt, Artificial Sequence
  Description of Artificial Sequence: Synthetic oligonucleotide
  Sense strand starting at position 204 of SEQ ID NO: 585442
aggaaugauuaaugacuca

SEQ ID NO: 640207 - RNA, 19 nt, Artificial Sequence
  Description of Artificial Sequence: Synthetic oligonucleotide
  Antisense strand to SEQ ID NO: 640206
ugagucauuaaucauuccu

SEQ ID NO: 640208 - RNA, 19 nt, Artificial Sequence
  Description of Artificial Sequence: Synthetic oligonucleotide
  Sense strand starting at position 233 of SEQ ID NO: 585442
agcaaauggagcuguguaa

SEQ ID NO: 640209 - RNA, 19 nt, Artificial Sequence
  Description of Artificial Sequence: Synthetic oligonucleotide
  Antisense strand to SEQ ID NO: 640208
uuacacagcuccauuugcu

SEQ ID NO: 640210 - RNA, 19 nt, Artificial Sequence
  Description of Artificial Sequence: Synthetic oligonucleotide
  Sense strand starting at position 237 of SEQ ID NO: 585442
aauggagcuguguaauaca

SEQ ID NO: 640211 - RNA, 19 nt, Artificial Sequence
  Description of Artificial Sequence: Synthetic oligonucleotide
  Antisense strand to SEQ ID NO: 640210
uguauuacacagcuccauu

SEQ ID NO: 640212 - RNA, 19 nt, Artificial Sequence
  Description of Artificial Sequence: Synthetic oligonucleotide
  Sense strand starting at position 246 of SEQ ID NO: 585442
guguaauacacacgucgaa

SEQ ID NO: 640213 - RNA, 19 nt, Artificial Sequence
  Description of Artificial Sequence: Synthetic oligonucleotide
  Antisense strand to SEQ ID NO: 640212
uucgacguguguauuacac

SEQ ID NO: 640214 - RNA, 19 nt, Artificial Sequence
  Description of Artificial Sequence: Synthetic oligonucleotide
  Sense strand starting at position 263 of SEQ ID NO: 585442
aagcaauuauacggaaugu

SEQ ID NO: 640215 - RNA, 19 nt, Artificial Sequence
  Description of Artificial Sequence: Synthetic oligonucleotide
  Antisense strand to SEQ ID NO: 640214
acauuccguauaauugcuu

SEQ ID NO: 640216 - RNA, 19 nt, Artificial Sequence
  Description of Artificial Sequence: Synthetic oligonucleotide
  Sense strand starting at position 267 of SEQ ID NO: 585442
aauuauacggaauguguau

SEQ ID NO: 640217 - RNA, 19 nt, Artificial Sequence
  Description of Artificial Sequence: Synthetic oligonucleotide
  Antisense strand to SEQ ID NO: 640216
auacacauuccguauaauu

SEQ ID NO: 640218 - RNA, 19 nt, Artificial Sequence
  Description of Artificial Sequence: Synthetic oligonucleotide
  Sense strand starting at position 274 of SEQ ID NO: 585442
cggaauguguaucuagaaa

SEQ ID NO: 640219 - RNA, 19 nt, Artificial Sequence
  Description of Artificial Sequence: Synthetic oligonucleotide
  Antisense strand to SEQ ID NO: 640218
uuucuagauacacauuccg

SEQ ID NO: 640220 - RNA, 19 nt, Artificial Sequence
  Description of Artificial Sequence: Synthetic oligonucleotide
  Sense strand starting at position 298 of SEQ ID NO: 585442
uuaguaucuguaggagaua

SEQ ID NO: 640221 - RNA, 19 nt, Artificial Sequence
  Description of Artificial Sequence: Synthetic oligonucleotide
  Antisense strand to SEQ ID NO: 640220
uaucuccuacagauacuaa

SEQ ID NO: 640222 - RNA, 19 nt, Artificial Sequence
  Description of Artificial Sequence: Synthetic oligonucleotide
  Sense strand starting at position 299 of SEQ ID NO: 585442
uaguaucuguaggagauau

SEQ ID NO: 640223 - RNA, 19 nt, Artificial Sequence
  Description of Artificial Sequence: Synthetic oligonucleotide
  Antisense strand to SEQ ID NO: 640222
auaucuccuacagauacua

SEQ ID NO: 640224 - RNA, 19 nt, Artificial Sequence
  Description of Artificial Sequence: Synthetic oligonucleotide
  Sense strand starting at position 301 of SEQ ID NO: 585442
guaucuguaggagauauuc

SEQ ID NO: 640225 - RNA, 19 nt, Artificial Sequence
  Description of Artificial Sequence: Synthetic oligonucleotide
  Antisense strand to SEQ ID NO: 640224
gaauaucuccuacagauac

SEQ ID NO: 640226 - RNA, 19 nt, Artificial Sequence
  Description of Artificial Sequence: Synthetic oligonucleotide
  Sense strand starting at position 309 of SEQ ID NO: 585442
aggagauauucuuauuugu

SEQ ID NO: 640227 - RNA, 19 nt, Artificial Sequence
  Description of Artificial Sequence: Synthetic oligonucleotide
  Antisense strand to SEQ ID NO: 640226
acaaauaagaauaucuccu

SEQ ID NO: 640228 - RNA, 19 nt, Artificial Sequence
  Description of Artificial Sequence: Synthetic oligonucleotide
  Sense strand starting at position 342 of SEQ ID NO: 585442
acuguaagcuucccaugau

SEQ ID NO: 640229 - RNA, 19 nt, Artificial Sequence
  Description of Artificial Sequence: Synthetic oligonucleotide
  Antisense strand to SEQ ID NO: 640228
aucaugggaagcuuacagu

SEQ ID NO: 640230 - RNA, 19 nt, Artificial Sequence
  Description of Artificial Sequence: Synthetic oligonucleotide
  Sense strand starting at position 343 of SEQ ID NO: 585442
cuguaagcuucccaugauu

SEQ ID NO: 640231 - RNA, 19 nt, Artificial Sequence
  Description of Artificial Sequence: Synthetic oligonucleotide
  Antisense strand to SEQ ID NO: 640230
aaucaugggaagcuuacag

SEQ ID NO: 640232 - RNA, 19 nt, Artificial Sequence
  Description of Artificial Sequence: Synthetic oligonucleotide
  Sense strand starting at position 345 of SEQ ID NO: 585442
guaagcuucccaugauuuc

SEQ ID NO: 640233 - RNA, 19 nt, Artificial Sequence
  Description of Artificial Sequence: Synthetic oligonucleotide
  Antisense strand to SEQ ID NO: 640232
gaaaucaugggaagcuuac

SEQ ID NO: 640234 - RNA, 19 nt, Artificial Sequence
  Description of Artificial Sequence: Synthetic oligonucleotide
  Sense strand starting at position 351 of SEQ ID NO: 585442
uucccaugauuucugugua

SEQ ID NO: 640235 - RNA, 19 nt, Artificial Sequence
  Description of Artificial Sequence: Synthetic oligonucleotide
  Antisense strand to SEQ ID NO: 640234
uacacagaaaucaugggaa

SEQ ID NO: 640236 - RNA, 19 nt, Artificial Sequence
  Description of Artificial Sequence: Synthetic oligonucleotide
  Sense strand starting at position 798 of SEQ ID NO: 585442
aggucuuccucauaggaaa

SEQ ID NO: 640237 - RNA, 19 nt, Artificial Sequence
  Description of Artificial Sequence: Synthetic oligonucleotide
  Antisense strand to SEQ ID NO: 640236
uuuccuaugaggaagaccu

SEQ ID NO: 640238 - RNA, 19 nt, Artificial Sequence
  Description of Artificial Sequence: Synthetic oligonucleotide
  Sense strand starting at position 860 of SEQ ID NO: 585442
gucaauaucugacucggga

SEQ ID NO: 640239 - RNA, 19 nt, Artificial Sequence
  Description of Artificial Sequence: Synthetic oligonucleotide
  Antisense strand to SEQ ID NO: 640238
ucccgagucagauauugac

SEQ ID NO: 640240 - RNA, 19 nt, Artificial Sequence
  Description of Artificial Sequence: Synthetic oligonucleotide
  Sense strand starting at position 912 of SEQ ID NO: 585442
acggaaacucgauacaugu

SEQ ID NO: 640241 - RNA, 19 nt, Artificial Sequence
  Description of Artificial Sequence: Synthetic oligonucleotide
  Antisense strand to SEQ ID NO: 640240
acauguaucgaguuuccgu

SEQ ID NO: 640242 - RNA, 19 nt, Artificial Sequence
  Description of Artificial Sequence: Synthetic oligonucleotide
  Sense strand starting at position 921 of SEQ ID NO: 585442
cgauacaugucggcuugca

SEQ ID NO: 640243 - RNA, 19 nt, Artificial Sequence
  Description of Artificial Sequence: Synthetic oligonucleotide
  Antisense strand to SEQ ID NO: 640242
ugcaagccgacauguaucg

SEQ ID NO: 640244 - RNA, 19 nt, Artificial Sequence
  Description of Artificial Sequence: Synthetic oligonucleotide
  Sense strand starting at position 926 of SEQ ID NO: 585442
caugucggcuugcaugaau

SEQ ID NO: 640245 - RNA, 19 nt, Artificial Sequence
  Description of Artificial Sequence: Synthetic oligonucleotide
  Antisense strand to SEQ ID NO: 640244
auucaugcaagccgacaug

SEQ ID NO: 640246 - RNA, 19 nt, Artificial Sequence
  Description of Artificial Sequence: Synthetic oligonucleotide
  Sense strand starting at position 929 of SEQ ID NO: 585442
gucggcuugcaugaaugaa

SEQ ID NO: 640247 - RNA, 19 nt, Artificial Sequence
  Description of Artificial Sequence: Synthetic oligonucleotide
  Antisense strand to SEQ ID NO: 640246
uucauucaugcaagccgac

SEQ ID NO: 640248 - RNA, 19 nt, Artificial Sequence
  Description of Artificial Sequence: Synthetic oligonucleotide
  Sense strand starting at position 970 of SEQ ID NO: 585442
ggagcagugucuugaaauu

SEQ ID NO: 640249 - RNA, 19 nt, Artificial Sequence
  Description of Artificial Sequence: Synthetic oligonucleotide
  Antisense strand to SEQ ID NO: 640248
aauuucaagacacugcucc

SEQ ID NO: 640250 - RNA, 19 nt, Artificial Sequence
  Description of Artificial Sequence: Synthetic oligonucleotide
  Sense strand starting at position 979 of SEQ ID NO: 585442
ucuugaaauuagccagcaa

SEQ ID NO: 640251 - RNA, 19 nt, Artificial Sequence
  Description of Artificial Sequence: Synthetic oligonucleotide
  Antisense strand to SEQ ID NO: 640250
uugcuggcuaauuucaaga

SEQ ID NO: 640252 - RNA, 19 nt, Artificial Sequence
  Description of Artificial Sequence: Synthetic oligonucleotide
  Sense strand starting at position 1012 of SEQ ID NO: 585442
uugucugaucguuggaugu

SEQ ID NO: 640253 - RNA, 19 nt, Artificial Sequence
  Description of Artificial Sequence: Synthetic oligonucleotide
  Antisense strand to SEQ ID NO: 640252
acauccaacgaucagacaa

SEQ ID NO: 640254 - RNA, 19 nt, Artificial Sequence
  Description of Artificial Sequence: Synthetic oligonucleotide
  Sense strand starting at position 1018 of SEQ ID NO: 585442
gaucguuggauguguagau

SEQ ID NO: 640255 - RNA, 19 nt, Artificial Sequence
  Description of Artificial Sequence: Synthetic oligonucleotide
  Antisense strand to SEQ ID NO: 640254
aucuacacauccaacgauc

SEQ ID NO: 640256 - RNA, 19 nt, Artificial Sequence
  Description of Artificial Sequence: Synthetic oligonucleotide
  Sense strand starting at position 1022 of SEQ ID NO: 585442
guuggauguguagaugaau

SEQ ID NO: 640257 - RNA, 19 nt, Artificial Sequence
  Description of Artificial Sequence: Synthetic oligonucleotide
  Antisense strand to SEQ ID NO: 640256
auucaucuacacauccaac

SEQ ID NO: 640258 - RNA, 19 nt, Artificial Sequence
  Description of Artificial Sequence: Synthetic oligonucleotide
  Sense strand starting at position 1093 of SEQ ID NO: 585442
agucuaaguuacuuccgaa

SEQ ID NO: 640259 - RNA, 19 nt, Artificial Sequence
  Description of Artificial Sequence: Synthetic oligonucleotide
  Antisense strand to SEQ ID NO: 640258
uucggaaguaacuuagacu

SEQ ID NO: 640260 - RNA, 19 nt, Artificial Sequence
  Description of Artificial Sequence: Synthetic oligonucleotide
  Sense strand starting at position 1097 of SEQ ID NO: 585442
uaaguuacuuccgaaggga

SEQ ID NO: 640261 - RNA, 19 nt, Artificial Sequence
  Description of Artificial Sequence: Synthetic oligonucleotide
  Antisense strand to SEQ ID NO: 640260
ucccuucggaaguaacuua

SEQ ID NO: 640262 - RNA, 19 nt, Artificial Sequence
  Description of Artificial Sequence: Synthetic oligonucleotide
  Sense strand starting at position 1100 of SEQ ID NO: 585442
guuacuuccgaagggaagu

SEQ ID NO: 640263 - RNA, 19 nt, Artificial Sequence
  Description of Artificial Sequence: Synthetic oligonucleotide
  Antisense strand to SEQ ID NO: 640262
acuucccuucggaaguaac

SEQ ID NO: 640264 - RNA, 19 nt, Artificial Sequence
  Description of Artificial Sequence: Synthetic oligonucleotide
  Sense strand starting at position 1321 of SEQ ID NO: 585442
uggagauaucaucgcggcu

SEQ ID NO: 640265 - RNA, 19 nt, Artificial Sequence
  Description of Artificial Sequence: Synthetic oligonucleotide
  Antisense strand to SEQ ID NO: 640264
agccgcgaugauaucucca

SEQ ID NO: 640266 - RNA, 19 nt, Artificial Sequence
  Description of Artificial Sequence: Synthetic oligonucleotide
  Sense strand starting at position 1390 of SEQ ID NO: 585442
caucccuccguacgagaau

SEQ ID NO: 640267 - RNA, 19 nt, Artificial Sequence
  Description of Artificial Sequence: Synthetic oligonucleotide
  Antisense strand to SEQ ID NO: 640266
auucucguacggagggaug

SEQ ID NO: 640268 - RNA, 19 nt, Artificial Sequence
  Description of Artificial Sequence: Synthetic oligonucleotide
  Sense strand starting at position 2047 of SEQ ID NO: 585442
ggccuuuccugaggcuaca

SEQ ID NO: 640269 - RNA, 19 nt, Artificial Sequence
  Description of Artificial Sequence: Synthetic oligonucleotide
  Antisense strand to SEQ ID NO: 640268
uguagccucaggaaaggcc

SEQ ID NO: 640270 - RNA, 19 nt, Artificial Sequence
  Description of Artificial Sequence: Synthetic oligonucleotide
  Sense strand starting at position 2070 of SEQ ID NO: 585442
ucucgaaguuucuaacucu

SEQ ID NO: 640271 - RNA, 19 nt, Artificial Sequence
  Description of Artificial Sequence: Synthetic oligonucleotide
  Antisense strand to SEQ ID NO: 640270
agaguuagaaacuucgaga

SEQ ID NO: 640272 - RNA, 19 nt, Artificial Sequence
  Description of Artificial Sequence: Synthetic oligonucleotide
  Sense strand starting at position 2073 of SEQ ID NO: 585442
cgaaguuucuaacucucca

SEQ ID NO: 640273 - RNA, 19 nt, Artificial Sequence
  Description of Artificial Sequence: Synthetic oligonucleotide
  Antisense strand to SEQ ID NO: 640272
uggagaguuagaaacuucg

SEQ ID NO: 640274 - RNA, 19 nt, Artificial Sequence
  Description of Artificial Sequence: Synthetic oligonucleotide
  Sense strand starting at position 2077 of SEQ ID NO: 585442
guuucuaacucuccaggca

SEQ ID NO: 640275 - RNA, 19 nt, Artificial Sequence
  Description of Artificial Sequence: Synthetic oligonucleotide
  Antisense strand to SEQ ID NO: 640274
ugccuggagaguuagaaac

SEQ ID NO: 640276 - RNA, 19 nt, Artificial Sequence
  Description of Artificial Sequence: Synthetic oligonucleotide
  Sense strand starting at position 2108 of SEQ ID NO: 585442
gucuuaagaagaugaggua

SEQ ID NO: 640277 - RNA, 19 nt, Artificial Sequence
  Description of Artificial Sequence: Synthetic oligonucleotide
  Antisense strand to SEQ ID NO: 640276
uaccucaucuucuuaagac

SEQ ID NO: 640278 - RNA, 19 nt, Artificial Sequence
  Description of Artificial Sequence: Synthetic oligonucleotide
  Sense strand starting at position 29 of SEQ ID NO: 585443
gguggucagacugaccuaa

SEQ ID NO: 640279 - RNA, 19 nt, Artificial Sequence
  Description of Artificial Sequence: Synthetic oligonucleotide
  Antisense strand to SEQ ID NO: 640278
uuaggucagucugaccacc

SEQ ID NO: 640280 - RNA, 19 nt, Artificial Sequence
  Description of Artificial Sequence: Synthetic oligonucleotide
  Sense strand starting at position 84 of SEQ ID NO: 585443
acauuucuccuucgguuua

SEQ ID NO: 640281 - RNA, 19 nt, Artificial Sequence
  Description of Artificial Sequence: Synthetic oligonucleotide
  Antisense strand to SEQ ID NO: 640280
uaaaccgaaggagaaaugu

SEQ ID NO: 640282 - RNA, 19 nt, Artificial Sequence
  Description of Artificial Sequence: Synthetic oligonucleotide
  Sense strand starting at position 96 of SEQ ID NO: 585443
cgguuuaucccagaagucu

SEQ ID NO: 640283 - RNA, 19 nt, Artificial Sequence
  Description of Artificial Sequence: Synthetic oligonucleotide
  Antisense strand to SEQ ID NO: 640282
agacuucugggauaaaccg

SEQ ID NO: 640284 - RNA, 19 nt, Artificial Sequence
  Description of Artificial Sequence: Synthetic oligonucleotide
  Sense strand starting at position 314 of SEQ ID NO: 585443
uuucuagcuguguagaaga

SEQ ID NO: 640285 - RNA, 19 nt, Artificial Sequence
  Description of Artificial Sequence: Synthetic oligonucleotide
  Antisense strand to SEQ ID NO: 640284
ucuucuacacagcuagaaa

SEQ ID NO: 640286 - RNA, 19 nt, Artificial Sequence
  Description of Artificial Sequence: Synthetic oligonucleotide
  Sense strand starting at position 563 of SEQ ID NO: 585443
guuucugacuuucuguauu

SEQ ID NO: 640287 - RNA, 19 nt, Artificial Sequence
  Description of Artificial Sequence: Synthetic oligonucleotide
  Antisense strand to SEQ ID NO: 640286
aauacagaaagucagaaac

SEQ ID NO: 640288 - RNA, 19 nt, Artificial Sequence
  Description of Artificial Sequence: Synthetic oligonucleotide
  Sense strand starting at position 573 of SEQ ID NO: 585443
uucuguauucugcaacuga

SEQ ID NO: 640289 - RNA, 19 nt, Artificial Sequence
  Description of Artificial Sequence: Synthetic oligonucleotide
  Antisense strand to SEQ ID NO: 640288
ucaguugcagaauacagaa

SEQ ID NO: 640290 - RNA, 19 nt, Artificial Sequence
  Description of Artificial Sequence: Synthetic oligonucleotide
  Sense strand starting at position 604 of SEQ ID NO: 585443
ggucacaucagguggaguu

SEQ ID NO: 640291 - RNA, 19 nt, Artificial Sequence
  Description of Artificial Sequence: Synthetic oligonucleotide
  Antisense strand to SEQ ID NO: 640290
aacuccaccugaugugacc

SEQ ID NO: 640292 - RNA, 19 nt, Artificial Sequence
  Description of Artificial Sequence: Synthetic oligonucleotide
  Sense strand starting at position 624 of SEQ ID NO: 585443
ucagucagguccucagagu

SEQ ID NO: 640293 - RNA, 19 nt, Artificial Sequence
  Description of Artificial Sequence: Synthetic oligonucleotide
  Antisense strand to SEQ ID NO: 640292
acucugaggaccugacuga

SEQ ID NO: 640294 - RNA, 19 nt, Artificial Sequence
  Description of Artificial Sequence: Synthetic oligonucleotide
  Sense strand starting at position 637 of SEQ ID NO: 585443
cagagugagccagguauga

SEQ ID NO: 640295 - RNA, 19 nt, Artificial Sequence
  Description of Artificial Sequence: Synthetic oligonucleotide
  Antisense strand to SEQ ID NO: 640294
ucauaccuggcucacucug

SEQ ID NO: 640296 - RNA, 19 nt, Artificial Sequence
  Description of Artificial Sequence: Synthetic oligonucleotide
  Sense strand starting at position 654 of SEQ ID NO: 585443
gaggguggcucaguaaaca

SEQ ID NO: 640297 - RNA, 19 nt, Artificial Sequence
  Description of Artificial Sequence: Synthetic oligonucleotide
  Antisense strand to SEQ ID NO: 640296
uguuuacugagccacccuc

SEQ ID NO: 640298 - RNA, 19 nt, Artificial Sequence
  Description of Artificial Sequence: Synthetic oligonucleotide
  Sense strand starting at position 685 of SEQ ID NO: 585443
ggcaaauguccaggucuca

SEQ ID NO: 640299 - RNA, 19 nt, Artificial Sequence
  Description of Artificial Sequence: Synthetic oligonucleotide
  Antisense strand to SEQ ID NO: 640298
ugagaccuggacauuugcc

SEQ ID NO: 640300 - RNA, 19 nt, Artificial Sequence
  Description of Artificial Sequence: Synthetic oligonucleotide
  Sense strand starting at position 739 of SEQ ID NO: 585443
gcaggugugcucuuguuaa

SEQ ID NO: 640301 - RNA, 19 nt, Artificial Sequence
  Description of Artificial Sequence: Synthetic oligonucleotide
  Antisense strand to SEQ ID NO: 640300
uuaacaagagcacaccugc

SEQ ID NO: 640302 - RNA, 19 nt, Artificial Sequence
  Description of Artificial Sequence: Synthetic oligonucleotide
  Sense strand starting at position 883 of SEQ ID NO: 585443
uuuacugauugggucacua

SEQ ID NO: 640303 - RNA, 19 nt, Artificial Sequence
  Description of Artificial Sequence: Synthetic oligonucleotide
  Antisense strand to SEQ ID NO: 640302
uagugacccaaucaguaaa

SEQ ID NO: 640304 - RNA, 19 nt, Artificial Sequence
  Description of Artificial Sequence: Synthetic oligonucleotide
  Sense strand starting at position 885 of SEQ ID NO: 585443
uacugauugggucacuacu

SEQ ID NO: 640305 - RNA, 19 nt, Artificial Sequence
  Description of Artificial Sequence: Synthetic oligonucleotide
  Antisense strand to SEQ ID NO: 640304
aguagugacccaaucagua

SEQ ID NO: 640306 - RNA, 19 nt, Artificial Sequence
  Description of Artificial Sequence: Synthetic oligonucleotide
  Sense strand starting at position 887 of SEQ ID NO: 585443
cugauugggucacuacuaa

SEQ ID NO: 640307 - RNA, 19 nt, Artificial Sequence
  Description of Artificial Sequence: Synthetic oligonucleotide
  Antisense strand to SEQ ID NO: 640306
uuaguagugacccaaucag

SEQ ID NO: 640308 - RNA, 19 nt, Artificial Sequence
  Description of Artificial Sequence: Synthetic oligonucleotide
  Sense strand starting at position 902 of SEQ ID NO: 585443
cuaaguaucccgcagaucu

SEQ ID NO: 640309 - RNA, 19 nt, Artificial Sequence
  Description of Artificial Sequence: Synthetic oligonucleotide
  Antisense strand to SEQ ID NO: 640308
agaucugcgggauacuuag

SEQ ID NO: 640310 - RNA, 19 nt, Artificial Sequence
  Description of Artificial Sequence: Synthetic oligonucleotide
  Sense strand starting at position 975 of SEQ ID NO: 585443
gaagguuucuugccaggaa

SEQ ID NO: 640311 - RNA, 19 nt, Artificial Sequence
  Description of Artificial Sequence: Synthetic oligonucleotide
  Antisense strand to SEQ ID NO: 640310
uuccuggcaagaaaccuuc

SEQ ID NO: 640312 - RNA, 19 nt, Artificial Sequence
  Description of Artificial Sequence: Synthetic oligonucleotide
  Sense strand starting at position 978 of SEQ ID NO: 585443
gguuucuugccaggaauca

SEQ ID NO: 640313 - RNA, 19 nt, Artificial Sequence
  Description of Artificial Sequence: Synthetic oligonucleotide
  Antisense strand to SEQ ID NO: 640312
ugauuccuggcaagaaacc

SEQ ID NO: 640314 - RNA, 19 nt, Artificial Sequence
  Description of Artificial Sequence: Synthetic oligonucleotide
  Sense strand starting at position 979 of SEQ ID NO: 585443
guuucuugccaggaaucac

SEQ ID NO: 640315 - RNA, 19 nt, Artificial Sequence
  Description of Artificial Sequence: Synthetic oligonucleotide
  Antisense strand to SEQ ID NO: 640314
gugauuccuggcaagaaac

SEQ ID NO: 640316 - RNA, 19 nt, Artificial Sequence
  Description of Artificial Sequence: Synthetic oligonucleotide
  Sense strand starting at position 991 of SEQ ID NO: 585443
gaaucacuguuguugccau

SEQ ID NO: 640317 - RNA, 19 nt, Artificial Sequence
  Description of Artificial Sequence: Synthetic oligonucleotide
  Antisense strand to SEQ ID NO: 640316
auggcaacaacagugauuc

SEQ ID NO: 640318 - RNA, 19 nt, Artificial Sequence
  Description of Artificial Sequence: Synthetic oligonucleotide
  Sense strand starting at position 1028 of SEQ ID NO: 585443
uagauaauuccuggacagu

SEQ ID NO: 640319 - RNA, 19 nt, Artificial Sequence
  Description of Artificial Sequence: Synthetic oligonucleotide
  Antisense strand to SEQ ID NO: 640318
acuguccaggaauuaucua

SEQ ID NO: 640320 - RNA, 19 nt, Artificial Sequence
  Description of Artificial Sequence: Synthetic oligonucleotide
  Sense strand starting at position 1250 of SEQ ID NO: 585443
uagacuaccgucuacagau

SEQ ID NO: 640321 - RNA, 19 nt, Artificial Sequence
  Description of Artificial Sequence: Synthetic oligonucleotide
  Antisense strand to SEQ ID NO: 640320
aucuguagacgguagucua

SEQ ID NO: 640322 - RNA, 19 nt, Artificial Sequence
  Description of Artificial Sequence: Synthetic oligonucleotide
  Sense strand starting at position 1265 of SEQ ID NO: 585443
agauucaucgcgcuuguuu

SEQ ID NO: 640323 - RNA, 19 nt, Artificial Sequence
  Description of Artificial Sequence: Synthetic oligonucleotide
  Antisense strand to SEQ ID NO: 640322
aaacaagcgcgaugaaucu

SEQ ID NO: 640324 - RNA, 19 nt, Artificial Sequence
  Description of Artificial Sequence: Synthetic oligonucleotide
  Sense strand starting at position 1286 of SEQ ID NO: 585443
uaaguagggucaucuaaau

SEQ ID NO: 640325 - RNA, 19 nt, Artificial Sequence
  Description of Artificial Sequence: Synthetic oligonucleotide
  Antisense strand to SEQ ID NO: 640324
auuuagaugacccuacuua

SEQ ID NO: 640326 - RNA, 19 nt, Artificial Sequence
  Description of Artificial Sequence: Synthetic oligonucleotide
  Sense strand starting at position 1322 of SEQ ID NO: 585443
ugaggacacugaugaaaga

SEQ ID NO: 640327 - RNA, 19 nt, Artificial Sequence
  Description of Artificial Sequence: Synthetic oligonucleotide
  Antisense strand to SEQ ID NO: 640326
ucuuucaucaguguccuca

SEQ ID NO: 640328 - RNA, 19 nt, Artificial Sequence
  Description of Artificial Sequence: Synthetic oligonucleotide
  Sense strand starting at position 1370 of SEQ ID NO: 585443
agaacuugauuacaggaaa

SEQ ID NO: 640329 - RNA, 19 nt, Artificial Sequence
  Description of Artificial Sequence: Synthetic oligonucleotide
  Antisense strand to SEQ ID NO: 640328
uuuccuguaaucaaguucu

SEQ ID NO: 640330 - RNA, 19 nt, Artificial Sequence
  Description of Artificial Sequence: Synthetic oligonucleotide
  Sense strand starting at position 2563 of SEQ ID NO: 585443
gucucuguggagugagagu

SEQ ID NO: 640331 - RNA, 19 nt, Artificial Sequence
  Description of Artificial Sequence: Synthetic oligonucleotide
  Antisense strand to SEQ ID NO: 640330
acucucacuccacagagac

SEQ ID NO: 640332 - RNA, 19 nt, Artificial Sequence
  Description of Artificial Sequence: Synthetic oligonucleotide
  Sense strand starting at position 2707 of SEQ ID NO: 585443
acaucaauguuacuuggaa

SEQ ID NO: 640333 - RNA, 19 nt, Artificial Sequence
  Description of Artificial Sequence: Synthetic oligonucleotide
  Antisense strand to SEQ ID NO: 640332
uuccaaguaacauugaugu

SEQ ID NO: 640334 - RNA, 19 nt, Artificial Sequence
  Description of Artificial Sequence: Synthetic oligonucleotide
  Sense strand starting at position 2736 of SEQ ID NO: 585443
aguuauugcuagguucuga

SEQ ID NO: 640335 - RNA, 19 nt, Artificial Sequence
  Description of Artificial Sequence: Synthetic oligonucleotide
  Antisense strand to SEQ ID NO: 640334
ucagaaccuagcaauaacu

SEQ ID NO: 640336 - RNA, 19 nt, Artificial Sequence
  Description of Artificial Sequence: Synthetic oligonucleotide
  Sense strand starting at position 2785 of SEQ ID NO: 585443
ggaaucgcuagcugaugaa

SEQ ID NO: 640337 - RNA, 19 nt, Artificial Sequence
  Description of Artificial Sequence: Synthetic oligonucleotide
  Antisense strand to SEQ ID NO: 640336
uucaucagcuagcgauucc

SEQ ID NO: 640338 - RNA, 19 nt, Artificial Sequence
  Description of Artificial Sequence: Synthetic oligonucleotide
  Sense strand starting at position 2807 of SEQ ID NO: 585443
ggguuucaggaagguaaua

SEQ ID NO: 640339 - RNA, 19 nt, Artificial Sequence
  Description of Artificial Sequence: Synthetic oligonucleotide
  Antisense strand to SEQ ID NO: 640338
uauuaccuuccugaaaccc

SEQ ID NO: 640340 - RNA, 19 nt, Artificial Sequence
  Description of Artificial Sequence: Synthetic oligonucleotide
  Sense strand starting at position 3064 of SEQ ID NO: 585443
auuaaauugccaggccaga

SEQ ID NO: 640341 - RNA, 19 nt, Artificial Sequence
  Description of Artificial Sequence: Synthetic oligonucleotide
  Antisense strand to SEQ ID NO: 640340
ucuggccuggcaauuuaau

SEQ ID NO: 640342 - RNA, 19 nt, Artificial Sequence
  Description of Artificial Sequence: Synthetic oligonucleotide
  Sense strand starting at position 3253 of SEQ ID NO: 585443
ugaggaucacuaggcuaga

SEQ ID NO: 640343 - RNA, 19 nt, Artificial Sequence
  Description of Artificial Sequence: Synthetic oligonucleotide
  Antisense strand to SEQ ID NO: 640342
ucuagccuagugauccuca

SEQ ID NO: 640344 - RNA, 19 nt, Artificial Sequence
  Description of Artificial Sequence: Synthetic oligonucleotide
  Sense strand starting at position 3254 of SEQ ID NO: 585443
gaggaucacuaggcuagau

SEQ ID NO: 640345 - RNA, 19 nt, Artificial Sequence
  Description of Artificial Sequence: Synthetic oligonucleotide
  Antisense strand to SEQ ID NO: 640344
aucuagccuagugauccuc

SEQ ID NO: 640346 - RNA, 19 nt, Artificial Sequence
  Description of Artificial Sequence: Synthetic oligonucleotide
  Sense strand starting at position 3308 of SEQ ID NO: 585443
ccagcauuggagcaacauu

SEQ ID NO: 640347 - RNA, 19 nt, Artificial Sequence
  Description of Artificial Sequence: Synthetic oligonucleotide
  Antisense strand to SEQ ID NO: 640346
aauguugcuccaaugcugg

SEQ ID NO: 640348 - RNA, 19 nt, Artificial Sequence
  Description of Artificial Sequence: Synthetic oligonucleotide
  Sense strand starting at position 3351 of SEQ ID NO: 585443
gcugaagugagguauauga

SEQ ID NO: 640349 - RNA, 19 nt, Artificial Sequence
  Description of Artificial Sequence: Synthetic oligonucleotide
  Antisense strand to SEQ ID NO: 640348
ucauauaccucacuucagc

SEQ ID NO: 640350 - RNA, 19 nt, Artificial Sequence
  Description of Artificial Sequence: Synthetic oligonucleotide
  Sense strand starting at position 3412 of SEQ ID NO: 585443
ucagauaugaguugcugga

SEQ ID NO: 640351 - RNA, 19 nt, Artificial Sequence
  Description of Artificial Sequence: Synthetic oligonucleotide
  Antisense strand to SEQ ID NO: 640350
uccagcaacucauaucuga

SEQ ID NO: 640352 - RNA, 19 nt, Artificial Sequence
  Description of Artificial Sequence: Synthetic oligonucleotide
  Sense strand starting at position 3414 of SEQ ID NO: 585443
agauaugaguugcuggaaa

SEQ ID NO: 640353 - RNA, 19 nt, Artificial Sequence
  Description of Artificial Sequence: Synthetic oligonucleotide
  Antisense strand to SEQ ID NO: 640352
uuuccagcaacucauaucu

SEQ ID NO: 640354 - RNA, 19 nt, Artificial Sequence
  Description of Artificial Sequence: Synthetic oligonucleotide
  Sense strand starting at position 3452 of SEQ ID NO: 585443
ggaaguauuucuggagcaa

SEQ ID NO: 640355 - RNA, 19 nt, Artificial Sequence
  Description of Artificial Sequence: Synthetic oligonucleotide
  Antisense strand to SEQ ID NO: 640354
uugcuccagaaauacuucc

SEQ ID NO: 640356 - RNA, 19 nt, Artificial Sequence
  Description of Artificial Sequence: Synthetic oligonucleotide
  Sense strand starting at position 3764 of SEQ ID NO: 585443
auguauuagccuuacacag

SEQ ID NO: 640357 - RNA, 19 nt, Artificial Sequence
  Description of Artificial Sequence: Synthetic oligonucleotide
  Antisense strand to SEQ ID NO: 640356
cuguguaaggcuaauacau

SEQ ID NO: 640358 - RNA, 19 nt, Artificial Sequence
  Description of Artificial Sequence: Synthetic oligonucleotide
  Sense strand starting at position 77 of SEQ ID NO: 585444
ucacauuuguguccgauga

SEQ ID NO: 640359 - RNA, 19 nt, Artificial Sequence
  Description of Artificial Sequence: Synthetic oligonucleotide
  Antisense strand to SEQ ID NO: 640358
ucaucggacacaaauguga

SEQ ID NO: 640360 - RNA, 19 nt, Artificial Sequence
  Description of Artificial Sequence: Synthetic oligonucleotide
  Sense strand starting at position 78 of SEQ ID NO: 585444
cacauuuguguccgaugag

SEQ ID NO: 640361 - RNA, 19 nt, Artificial Sequence
  Description of Artificial Sequence: Synthetic oligonucleotide
  Antisense strand to SEQ ID NO: 640360
cucaucggacacaaaugug

SEQ ID NO: 640362 - RNA, 19 nt, Artificial Sequence
  Description of Artificial Sequence: Synthetic oligonucleotide
  Sense strand starting at position 102 of SEQ ID NO: 585444
ugccaagauccucaaugau

SEQ ID NO: 640363 - RNA, 19 nt, Artificial Sequence
  Description of Artificial Sequence: Synthetic oligonucleotide
  Antisense strand to SEQ ID NO: 640362
aucauugaggaucuuggca

SEQ ID NO: 640364 - RNA, 19 nt, Artificial Sequence
  Description of Artificial Sequence: Synthetic oligonucleotide
  Sense strand starting at position 111 of SEQ ID NO: 585444
ccucaaugaugugcaggau

SEQ ID NO: 640365 - RNA, 19 nt, Artificial Sequence
  Description of Artificial Sequence: Synthetic oligonucleotide
  Antisense strand to SEQ ID NO: 640364
auccugcacaucauugagg

SEQ ID NO: 640366 - RNA, 19 nt, Artificial Sequence
  Description of Artificial Sequence: Synthetic oligonucleotide
  Sense strand starting at position 129 of SEQ ID NO: 585444
ucgcuuugaggucaauauu

SEQ ID NO: 640367 - RNA, 19 nt, Artificial Sequence
  Description of Artificial Sequence: Synthetic oligonucleotide
  Antisense strand to SEQ ID NO: 640366
aauauugaccucaaagcga

SEQ ID NO: 640368 - RNA, 19 nt, Artificial Sequence
  Description of Artificial Sequence: Synthetic oligonucleotide
  Sense strand starting at position 132 of SEQ ID NO: 585444
cuuugaggucaauauuagu

SEQ ID NO: 640369 - RNA, 19 nt, Artificial Sequence
  Description of Artificial Sequence: Synthetic oligonucleotide
  Antisense strand to SEQ ID NO: 640368
acuaauauugaccucaaag

SEQ ID NO: 640370 - RNA, 19 nt, Artificial Sequence
  Description of Artificial Sequence: Synthetic oligonucleotide
  Sense strand starting at position 526 of SEQ ID NO: 585444
guagaagacucgcccauuu

SEQ ID NO: 640371 - RNA, 19 nt, Artificial Sequence
  Description of Artificial Sequence: Synthetic oligonucleotide
  Antisense strand to SEQ ID NO: 640370
aaaugggcgagucuucuac

SEQ ID NO: 640372 - RNA, 19 nt, Artificial Sequence
  Description of Artificial Sequence: Synthetic oligonucleotide
  Sense strand starting at position 728 of SEQ ID NO: 585444
gucugugguaucuauaagu

SEQ ID NO: 640373 - RNA, 19 nt, Artificial Sequence
  Description of Artificial Sequence: Synthetic oligonucleotide
  Antisense strand to SEQ ID NO: 640372
acuuauagauaccacagac

SEQ ID NO: 640374 - RNA, 19 nt, Artificial Sequence
  Description of Artificial Sequence: Synthetic oligonucleotide
  Sense strand starting at position 1213 of SEQ ID NO: 585444
ggcccuggucagggaauua

SEQ ID NO: 640375 - RNA, 19 nt, Artificial Sequence
  Description of Artificial Sequence: Synthetic oligonucleotide
  Antisense strand to SEQ ID NO: 640374
uaauucccugaccagggcc

SEQ ID NO: 640376 - RNA, 19 nt, Artificial Sequence
  Description of Artificial Sequence: Synthetic oligonucleotide
  Sense strand starting at position 1291 of SEQ ID NO: 585444
guggcuggaagugagaaau

SEQ ID NO: 640377 - RNA, 19 nt, Artificial Sequence
  Description of Artificial Sequence: Synthetic oligonucleotide
  Antisense strand to SEQ ID NO: 640376
auuucucacuuccagccac

SEQ ID NO: 640378 - RNA, 19 nt, Artificial Sequence
  Description of Artificial Sequence: Synthetic oligonucleotide
  Sense strand starting at position 1420 of SEQ ID NO: 585444
aauagaguucccuggccca

SEQ ID NO: 640379 - RNA, 19 nt, Artificial Sequence
  Description of Artificial Sequence: Synthetic oligonucleotide
  Antisense strand to SEQ ID NO: 640378
ugggccagggaacucuauu

SEQ ID NO: 640380 - RNA, 19 nt, Artificial Sequence
  Description of Artificial Sequence: Synthetic oligonucleotide
  Sense strand starting at position 1637 of SEQ ID NO: 585444
aggaguugguagcugaacu

SEQ ID NO: 640381 - RNA, 19 nt, Artificial Sequence
  Description of Artificial Sequence: Synthetic oligonucleotide
  Antisense strand to SEQ ID NO: 640380
aguucagcuaccaacuccu

SEQ ID NO: 640382 - RNA, 19 nt, Artificial Sequence
  Description of Artificial Sequence: Synthetic oligonucleotide
  Sense strand starting at position 1638 of SEQ ID NO: 585444
ggaguugguagcugaacua

SEQ ID NO: 640383 - RNA, 19 nt, Artificial Sequence
  Description of Artificial Sequence: Synthetic oligonucleotide
  Antisense strand to SEQ ID NO: 640382
uaguucagcuaccaacucc

SEQ ID NO: 640384 - RNA, 19 nt, Artificial Sequence
  Description of Artificial Sequence: Synthetic oligonucleotide
  Sense strand starting at position 2134 of SEQ ID NO: 585444
acuccuguuccugauguga

SEQ ID NO: 640385 - RNA, 19 nt, Artificial Sequence
  Description of Artificial Sequence: Synthetic oligonucleotide
  Antisense strand to SEQ ID NO: 640384
ucacaucaggaacaggagu

SEQ ID NO: 640386 - RNA, 19 nt, Artificial Sequence
  Description of Artificial Sequence: Synthetic oligonucleotide
  Sense strand starting at position 2206 of SEQ ID NO: 585444
cuaccacaggucugugauu

SEQ ID NO: 640387 - RNA, 19 nt, Artificial Sequence
  Description of Artificial Sequence: Synthetic oligonucleotide
  Antisense strand to SEQ ID NO: 640386
aaucacagaccugugguag

SEQ ID NO: 640388 - RNA, 19 nt, Artificial Sequence
  Description of Artificial Sequence: Synthetic oligonucleotide
  Sense strand starting at position 2240 of SEQ ID NO: 585444
aguguuuauuagguaugaa

SEQ ID NO: 640389 - RNA, 19 nt, Artificial Sequence
  Description of Artificial Sequence: Synthetic oligonucleotide
  Antisense strand to SEQ ID NO: 640388
uucauaccuaauaaacacu

SEQ ID NO: 640390 - RNA, 19 nt, Artificial Sequence
  Description of Artificial Sequence: Synthetic oligonucleotide
  Sense strand starting at position 2241 of SEQ ID NO: 585444
guguuuauuagguaugaau

SEQ ID NO: 640391 - RNA, 19 nt, Artificial Sequence
  Description of Artificial Sequence: Synthetic oligonucleotide
  Antisense strand to SEQ ID NO: 640390
auucauaccuaauaaacac

SEQ ID NO: 640392 - RNA, 19 nt, Artificial Sequence
  Description of Artificial Sequence: Synthetic oligonucleotide
  Sense strand starting at position 2333 of SEQ ID NO: 585444
aauagugugguagaacuua

SEQ ID NO: 640393 - RNA, 19 nt, Artificial Sequence
  Description of Artificial Sequence: Synthetic oligonucleotide
  Antisense strand to SEQ ID NO: 640392
uaaguucuaccacacuauu

SEQ ID NO: 640394 - RNA, 19 nt, Artificial Sequence
  Description of Artificial Sequence: Synthetic oligonucleotide
  Sense strand starting at position 2450 of SEQ ID NO: 585444
guguuauggaauggaucaa

SEQ ID NO: 640395 - RNA, 19 nt, Artificial Sequence
  Description of Artificial Sequence: Synthetic oligonucleotide
  Antisense strand to SEQ ID NO: 640394
uugauccauuccauaacac

SEQ ID NO: 640396 - RNA, 19 nt, Artificial Sequence
  Description of Artificial Sequence: Synthetic oligonucleotide
  Sense strand starting at position 2505 of SEQ ID NO: 585444
uaaccagcccagugagaau

SEQ ID NO: 640397 - RNA, 19 nt, Artificial Sequence
  Description of Artificial Sequence: Synthetic oligonucleotide
  Antisense strand to SEQ ID NO: 640396
auucucacugggcugguua

SEQ ID NO: 640398 - RNA, 19 nt, Artificial Sequence
  Description of Artificial Sequence: Synthetic oligonucleotide
  Sense strand starting at position 2555 of SEQ ID NO: 585444
cuugcucuucuguaacaga

SEQ ID NO: 640399 - RNA, 19 nt, Artificial Sequence
  Description of Artificial Sequence: Synthetic oligonucleotide
  Antisense strand to SEQ ID NO: 640398
ucuguuacagaagagcaag

SEQ ID NO: 640400 - RNA, 19 nt, Artificial Sequence
  Description of Artificial Sequence: Synthetic oligonucleotide
  Sense strand starting at position 2572 of SEQ ID NO: 585444
gacugaaggcuuuaagcaa

SEQ ID NO: 640401 - RNA, 19 nt, Artificial Sequence
  Description of Artificial Sequence: Synthetic oligonucleotide
  Antisense strand to SEQ ID NO: 640400
uugcuuaaagccuucaguc

SEQ ID NO: 640402 - RNA, 19 nt, Artificial Sequence
  Description of Artificial Sequence: Synthetic oligonucleotide
  Sense strand starting at position 2628 of SEQ ID NO: 585444
uaaguugccuucuuaggaa

SEQ ID NO: 640403 - RNA, 19 nt, Artificial Sequence
  Description of Artificial Sequence: Synthetic oligonucleotide
  Antisense strand to SEQ ID NO: 640402
uuccuaagaaggcaacuua

SEQ ID NO: 640404 - RNA, 19 nt, Artificial Sequence
  Description of Artificial Sequence: Synthetic oligonucleotide
  Sense strand starting at position 2666 of SEQ ID NO: 585444
ggcgcuuauauguaacaua

SEQ ID NO: 640405 - RNA, 19 nt, Artificial Sequence
  Description of Artificial Sequence: Synthetic oligonucleotide
  Antisense strand to SEQ ID NO: 640404
uauguuacauauaagcgcc

SEQ ID NO: 640406 - RNA, 19 nt, Artificial Sequence
  Description of Artificial Sequence: Synthetic oligonucleotide
  Sense strand starting at position 2702 of SEQ ID NO: 585444
cccaguagcgugcuuuauu

SEQ ID NO: 640407 - RNA, 19 nt, Artificial Sequence
  Description of Artificial Sequence: Synthetic oligonucleotide
  Antisense strand to SEQ ID NO: 640406
aauaaagcacgcuacuggg

SEQ ID NO: 640408 - RNA, 19 nt, Artificial Sequence
  Description of Artificial Sequence: Synthetic oligonucleotide
  Sense strand starting at position 3256 of SEQ ID NO: 585444
ggaauuaccucacugguuu

SEQ ID NO: 640409 - RNA, 19 nt, Artificial Sequence
  Description of Artificial Sequence: Synthetic oligonucleotide
  Antisense strand to SEQ ID NO: 640408
aaaccagugagguaauucc

SEQ ID NO: 640410 - RNA, 19 nt, Artificial Sequence
  Description of Artificial Sequence: Synthetic oligonucleotide
  Sense strand starting at position 3257 of SEQ ID NO: 585444
gaauuaccucacugguuug

SEQ ID NO: 640411 - RNA, 19 nt, Artificial Sequence
  Description of Artificial Sequence: Synthetic oligonucleotide
  Antisense strand to SEQ ID NO: 640410
caaaccagugagguaauuc

SEQ ID NO: 640412 - RNA, 19 nt, Artificial Sequence
  Description of Artificial Sequence: Synthetic oligonucleotide
  Sense strand starting at position 3268 of SEQ ID NO: 585444
cugguuugcaccugaggaa

SEQ ID NO: 640413 - RNA, 19 nt, Artificial Sequence
  Description of Artificial Sequence: Synthetic oligonucleotide
  Antisense strand to SEQ ID NO: 640412
uuccucaggugcaaaccag

SEQ ID NO: 640414 - RNA, 19 nt, Artificial Sequence
  Description of Artificial Sequence: Synthetic oligonucleotide
  Sense strand starting at position 3269 of SEQ ID NO: 585444
ugguuugcaccugaggaaa

SEQ ID NO: 640415 - RNA, 19 nt, Artificial Sequence
  Description of Artificial Sequence: Synthetic oligonucleotide
  Antisense strand to SEQ ID NO: 640414
uuuccucaggugcaaacca

SEQ ID NO: 640416 - RNA, 19 nt, Artificial Sequence
  Description of Artificial Sequence: Synthetic oligonucleotide
  Sense strand starting at position 3407 of SEQ ID NO: 585444
agguccaccugacuugaaa

SEQ ID NO: 640417 - RNA, 19 nt, Artificial Sequence
  Description of Artificial Sequence: Synthetic oligonucleotide
  Antisense strand to SEQ ID NO: 640416
uuucaagucagguggaccu

SEQ ID NO: 640418 - RNA, 19 nt, Artificial Sequence
  Description of Artificial Sequence: Synthetic oligonucleotide
  Sense strand starting at position 3419 of SEQ ID NO: 585444
cuugaaagcucauccugac

SEQ ID NO: 640419 - RNA, 19 nt, Artificial Sequence
  Description of Artificial Sequence: Synthetic oligonucleotide
  Antisense strand to SEQ ID NO: 640418
gucaggaugagcuuucaag

SEQ ID NO: 640420 - RNA, 19 nt, Artificial Sequence
  Description of Artificial Sequence: Synthetic oligonucleotide
  Sense strand starting at position 3602 of SEQ ID NO: 585444
acaucaugucuccauguca

SEQ ID NO: 640421 - RNA, 19 nt, Artificial Sequence
  Description of Artificial Sequence: Synthetic oligonucleotide
  Antisense strand to SEQ ID NO: 640420
ugacauggagacaugaugu

SEQ ID NO: 640422 - RNA, 19 nt, Artificial Sequence
  Description of Artificial Sequence: Synthetic oligonucleotide
  Sense strand starting at position 3666 of SEQ ID NO: 585444
uuguuacagugaccuguaa

SEQ ID NO: 640423 - RNA, 19 nt, Artificial Sequence
  Description of Artificial Sequence: Synthetic oligonucleotide
  Antisense strand to SEQ ID NO: 640422
uuacaggucacuguaacaa

SEQ ID NO: 640424 - RNA, 19 nt, Artificial Sequence
  Description of Artificial Sequence: Synthetic oligonucleotide
  Sense strand starting at position 3668 of SEQ ID NO: 585444
guuacagugaccuguaauc

SEQ ID NO: 640425 - RNA, 19 nt, Artificial Sequence
  Description of Artificial Sequence: Synthetic oligonucleotide
  Antisense strand to SEQ ID NO: 640424
gauuacaggucacuguaac

SEQ ID NO: 640426 - RNA, 19 nt, Artificial Sequence
  Description of Artificial Sequence: Synthetic oligonucleotide
  Sense strand starting at position 3670 of SEQ ID NO: 585444
uacagugaccuguaaucag

SEQ ID NO: 640427 - RNA, 19 nt, Artificial Sequence
  Description of Artificial Sequence: Synthetic oligonucleotide
  Antisense strand to SEQ ID NO: 640426
cugauuacaggucacugua

SEQ ID NO: 640428 - RNA, 19 nt, Artificial Sequence
  Description of Artificial Sequence: Synthetic oligonucleotide
  Sense strand starting at position 3673 of SEQ ID NO: 585444
agugaccuguaaucaguua

SEQ ID NO: 640429 - RNA, 19 nt, Artificial Sequence
  Description of Artificial Sequence: Synthetic oligonucleotide
  Antisense strand to SEQ ID NO: 640428
uaacugauuacaggucacu

SEQ ID NO: 640430 - RNA, 19 nt, Artificial Sequence
  Description of Artificial Sequence: Synthetic oligonucleotide
  Sense strand starting at position 3680 of SEQ ID NO: 585444
uguaaucaguuacugaagu

SEQ ID NO: 640431 - RNA, 19 nt, Artificial Sequence
  Description of Artificial Sequence: Synthetic oligonucleotide
  Antisense strand to SEQ ID NO: 640430
acuucaguaacugauuaca

SEQ ID NO: 640432 - RNA, 19 nt, Artificial Sequence
  Description of Artificial Sequence: Synthetic oligonucleotide
  Sense strand starting at position 3726 of SEQ ID NO: 585444
augagcgaugcucauauaa

SEQ ID NO: 640433 - RNA, 19 nt, Artificial Sequence
  Description of Artificial Sequence: Synthetic oligonucleotide
  Antisense strand to SEQ ID NO: 640432
uuauaugagcaucgcucau

SEQ ID NO: 640434 - RNA, 19 nt, Artificial Sequence
  Description of Artificial Sequence: Synthetic oligonucleotide
  Sense strand starting at position 3856 of SEQ ID NO: 585444
aggaauaauccaugcggca

SEQ ID NO: 640435 - RNA, 19 nt, Artificial Sequence
  Description of Artificial Sequence: Synthetic oligonucleotide
  Antisense strand to SEQ ID NO: 640434
ugccgcauggauuauuccu

SEQ ID NO: 640436 - RNA, 19 nt, Artificial Sequence
  Description of Artificial Sequence: Synthetic oligonucleotide
  Sense strand starting at position 3878 of SEQ ID NO: 585444
ggcaaacaucauugucuua

SEQ ID NO: 640437 - RNA, 19 nt, Artificial Sequence
  Description of Artificial Sequence: Synthetic oligonucleotide
  Antisense strand to SEQ ID NO: 640436
uaagacaaugauguuugcc

SEQ ID NO: 640438 - RNA, 19 nt, Artificial Sequence
  Description of Artificial Sequence: Synthetic oligonucleotide
  Sense strand starting at position 25 of SEQ ID NO: 585445
aguucuaaugggcauccaa

SEQ ID NO: 640439 - RNA, 19 nt, Artificial Sequence
  Description of Artificial Sequence: Synthetic oligonucleotide
  Antisense strand to SEQ ID NO: 640438
uuggaugcccauuagaacu

SEQ ID NO: 640440 - RNA, 19 nt, Artificial Sequence
  Description of Artificial Sequence: Synthetic oligonucleotide
  Sense strand starting at position 154 of SEQ ID NO: 585445
cccacaacuuggguuaaau

SEQ ID NO: 640441 - RNA, 19 nt, Artificial Sequence
  Description of Artificial Sequence: Synthetic oligonucleotide
  Antisense strand to SEQ ID NO: 640440
auuuaacccaaguuguggg

SEQ ID NO: 640442 - RNA, 19 nt, Artificial Sequence
  Description of Artificial Sequence: Synthetic oligonucleotide
  Sense strand starting at position 164 of SEQ ID NO: 585445
ggguuaaaucuacaggcuu

SEQ ID NO: 640443 - RNA, 19 nt, Artificial Sequence
  Description of Artificial Sequence: Synthetic oligonucleotide
  Antisense strand to SEQ ID NO: 640442
aagccuguagauuuaaccc

SEQ ID NO: 640444 - RNA, 19 nt, Artificial Sequence
  Description of Artificial Sequence: Synthetic oligonucleotide
  Sense strand starting at position 281 of SEQ ID NO: 585445
ugaaauugguucucucaca

SEQ ID NO: 640445 - RNA, 19 nt, Artificial Sequence
  Description of Artificial Sequence: Synthetic oligonucleotide
  Antisense strand to SEQ ID NO: 640444
ugugagagaaccaauuuca

SEQ ID NO: 640446 - RNA, 19 nt, Artificial Sequence
  Description of Artificial Sequence: Synthetic oligonucleotide
  Sense strand starting at position 282 of SEQ ID NO: 585445
gaaauugguucucucacag

SEQ ID NO: 640447 - RNA, 19 nt, Artificial Sequence
  Description of Artificial Sequence: Synthetic oligonucleotide
  Antisense strand to SEQ ID NO: 640446
cugugagagaaccaauuuc

SEQ ID NO: 640448 - RNA, 19 nt, Artificial Sequence
  Description of Artificial Sequence: Synthetic oligonucleotide
  Sense strand starting at position 504 of SEQ ID NO: 585445
aggcuaagagucgaauaac

SEQ ID NO: 640449 - RNA, 19 nt, Artificial Sequence
  Description of Artificial Sequence: Synthetic oligonucleotide
  Antisense strand to SEQ ID NO: 640448
guuauucgacucuuagccu

SEQ ID NO: 640450 - RNA, 19 nt, Artificial Sequence
  Description of Artificial Sequence: Synthetic oligonucleotide
  Sense strand starting at position 541 of SEQ ID NO: 585445
uugucauagccauaagaca

SEQ ID NO: 640451 - RNA, 19 nt, Artificial Sequence
  Description of Artificial Sequence: Synthetic oligonucleotide
  Antisense strand to SEQ ID NO: 640450
ugucuuauggcuaugacaa

SEQ ID NO: 640452 - RNA, 19 nt, Artificial Sequence
  Description of Artificial Sequence: Synthetic oligonucleotide
  Sense strand starting at position 549 of SEQ ID NO: 585445
gccauaagacaguaaguga

SEQ ID NO: 640453 - RNA, 19 nt, Artificial Sequence
  Description of Artificial Sequence: Synthetic oligonucleotide
  Antisense strand to SEQ ID NO: 640452
ucacuuacugucuuauggc

SEQ ID NO: 640454 - RNA, 19 nt, Artificial Sequence
  Description of Artificial Sequence: Synthetic oligonucleotide
  Sense strand starting at position 798 of SEQ ID NO: 585445
cccauuugcgcugagcuaa

SEQ ID NO: 640455 - RNA, 19 nt, Artificial Sequence
  Description of Artificial Sequence: Synthetic oligonucleotide
  Antisense strand to SEQ ID NO: 640454
uuagcucagcgcaaauggg

SEQ ID NO: 640456 - RNA, 19 nt, Artificial Sequence
  Description of Artificial Sequence: Synthetic oligonucleotide
  Sense strand starting at position 1160 of SEQ ID NO: 585445
uaaguuaacuaagugggaa

SEQ ID NO: 640457 - RNA, 19 nt, Artificial Sequence
  Description of Artificial Sequence: Synthetic oligonucleotide
  Antisense strand to SEQ ID NO: 640456
uucccacuuaguuaacuua

SEQ ID NO: 640458 - RNA, 19 nt, Artificial Sequence
  Description of Artificial Sequence: Synthetic oligonucleotide
  Sense strand starting at position 2086 of SEQ ID NO: 585445
cuagacugguagucacuaa

SEQ ID NO: 640459 - RNA, 19 nt, Artificial Sequence
  Description of Artificial Sequence: Synthetic oligonucleotide
  Antisense strand to SEQ ID NO: 640458
uuagugacuaccagucuag

SEQ ID NO: 640460 - RNA, 19 nt, Artificial Sequence
  Description of Artificial Sequence: Synthetic oligonucleotide
  Sense strand starting at position 2090 of SEQ ID NO: 585445
acugguagucacuaaaguu

SEQ ID NO: 640461 - RNA, 19 nt, Artificial Sequence
  Description of Artificial Sequence: Synthetic oligonucleotide
  Antisense strand to SEQ ID NO: 640460
aacuuuagugacuaccagu

SEQ ID NO: 640462 - RNA, 19 nt, Artificial Sequence
  Description of Artificial Sequence: Synthetic oligonucleotide
  Sense strand starting at position 2132 of SEQ ID NO: 585445
ucagcuaagcaguaauaga

SEQ ID NO: 640463 - RNA, 19 nt, Artificial Sequence
  Description of Artificial Sequence: Synthetic oligonucleotide
  Antisense strand to SEQ ID NO: 640462
ucuauuacugcuuagcuga

SEQ ID NO: 640464 - RNA, 19 nt, Artificial Sequence
  Description of Artificial Sequence: Synthetic oligonucleotide
  Sense strand starting at position 2171 of SEQ ID NO: 585445
ugaacaaguguuuauugau

SEQ ID NO: 640465 - RNA, 19 nt, Artificial Sequence
  Description of Artificial Sequence: Synthetic oligonucleotide
  Antisense strand to SEQ ID NO: 640464
aucaauaaacacuuguuca

SEQ ID NO: 640466 - RNA, 19 nt, Artificial Sequence
  Description of Artificial Sequence: Synthetic oligonucleotide
  Sense strand starting at position 2296 of SEQ ID NO: 585445
guacaacugcuuuauaaug

SEQ ID NO: 640467 - RNA, 19 nt, Artificial Sequence
  Description of Artificial Sequence: Synthetic oligonucleotide
  Antisense strand to SEQ ID NO: 640466
cauuauaaagcaguuguac

SEQ ID NO: 640468 - RNA, 19 nt, Artificial Sequence
  Description of Artificial Sequence: Synthetic oligonucleotide
  Sense strand starting at position 2397 of SEQ ID NO: 585445
ggaguuggaucacuuucca

SEQ ID NO: 640469 - RNA, 19 nt, Artificial Sequence
  Description of Artificial Sequence: Synthetic oligonucleotide
  Antisense strand to SEQ ID NO: 640468
uggaaagugauccaacucc

SEQ ID NO: 640470 - RNA, 19 nt, Artificial Sequence
  Description of Artificial Sequence: Synthetic oligonucleotide
  Sense strand starting at position 2531 of SEQ ID NO: 585445
cucaguugcucauuuggua

SEQ ID NO: 640471 - RNA, 19 nt, Artificial Sequence
  Description of Artificial Sequence: Synthetic oligonucleotide
  Antisense strand to SEQ ID NO: 640470
uaccaaaugagcaacugag

SEQ ID NO: 640472 - RNA, 19 nt, Artificial Sequence
  Description of Artificial Sequence: Synthetic oligonucleotide
  Sense strand starting at position 2544 of SEQ ID NO: 585445
uugguacuaccagaauugu

SEQ ID NO: 640473 - RNA, 19 nt, Artificial Sequence
  Description of Artificial Sequence: Synthetic oligonucleotide
  Antisense strand to SEQ ID NO: 640472
acaauucugguaguaccaa

SEQ ID NO: 640474 - RNA, 19 nt, Artificial Sequence
  Description of Artificial Sequence: Synthetic oligonucleotide
  Sense strand starting at position 2653 of SEQ ID NO: 585445
auauguggucccuaugaua

SEQ ID NO: 640475 - RNA, 19 nt, Artificial Sequence
  Description of Artificial Sequence: Synthetic oligonucleotide
  Antisense strand to SEQ ID NO: 640474
uaucauagggaccacauau

SEQ ID NO: 640476 - RNA, 19 nt, Artificial Sequence
  Description of Artificial Sequence: Synthetic oligonucleotide
  Sense strand starting at position 2711 of SEQ ID NO: 585445
ucuauaagaugaguaguca

SEQ ID NO: 640477 - RNA, 19 nt, Artificial Sequence
  Description of Artificial Sequence: Synthetic oligonucleotide
  Antisense strand to SEQ ID NO: 640476
ugacuacucaucuuauaga

SEQ ID NO: 640478 - RNA, 19 nt, Artificial Sequence
  Description of Artificial Sequence: Synthetic oligonucleotide
  Sense strand starting at position 2715 of SEQ ID NO: 585445
uaagaugaguagucagagu

SEQ ID NO: 640479 - RNA, 19 nt, Artificial Sequence
  Description of Artificial Sequence: Synthetic oligonucleotide
  Antisense strand to SEQ ID NO: 640478
acucugacuacucaucuua

SEQ ID NO: 640480 - RNA, 19 nt, Artificial Sequence
  Description of Artificial Sequence: Synthetic oligonucleotide
  Sense strand starting at position 2785 of SEQ ID NO: 585445
cuugaaagguuagugaaau

SEQ ID NO: 640481 - RNA, 19 nt, Artificial Sequence
  Description of Artificial Sequence: Synthetic oligonucleotide
  Antisense strand to SEQ ID NO: 640480
auuucacuaaccuuucaag

SEQ ID NO: 640482 - RNA, 19 nt, Artificial Sequence
  Description of Artificial Sequence: Synthetic oligonucleotide
  Sense strand starting at position 2793 of SEQ ID NO: 585445
guuagugaaauugguuaaa

SEQ ID NO: 640483 - RNA, 19 nt, Artificial Sequence
  Description of Artificial Sequence: Synthetic oligonucleotide
  Antisense strand to SEQ ID NO: 640482
uuuaaccaauuucacuaac

SEQ ID NO: 640484 - RNA, 19 nt, Artificial Sequence
  Description of Artificial Sequence: Synthetic oligonucleotide
  Sense strand starting at position 3055 of SEQ ID NO: 585445
uuauuaggcugauuaucua

SEQ ID NO: 640485 - RNA, 19 nt, Artificial Sequence
  Description of Artificial Sequence: Synthetic oligonucleotide
  Antisense strand to SEQ ID NO: 640484
uagauaaucagccuaauaa

SEQ ID NO: 640486 - RNA, 19 nt, Artificial Sequence
  Description of Artificial Sequence: Synthetic oligonucleotide
  Sense strand starting at position 3082 of SEQ ID NO: 585445
cuacaauacccuuguggaa

SEQ ID NO: 640487 - RNA, 19 nt, Artificial Sequence
  Description of Artificial Sequence: Synthetic oligonucleotide
  Antisense strand to SEQ ID NO: 640486
uuccacaaggguauuguag

SEQ ID NO: 640488 - RNA, 19 nt, Artificial Sequence
  Description of Artificial Sequence: Synthetic oligonucleotide
  Sense strand starting at position 3136 of SEQ ID NO: 585445
aguccacuauaaguuuaua

SEQ ID NO: 640489 - RNA, 19 nt, Artificial Sequence
  Description of Artificial Sequence: Synthetic oligonucleotide
  Antisense strand to SEQ ID NO: 640488
uauaaacuuauaguggacu

SEQ ID NO: 640490 - RNA, 19 nt, Artificial Sequence
  Description of Artificial Sequence: Synthetic oligonucleotide
  Sense strand starting at position 3255 of SEQ ID NO: 585445
guggcuugucuugaauuuc

SEQ ID NO: 640491 - RNA, 19 nt, Artificial Sequence
  Description of Artificial Sequence: Synthetic oligonucleotide
  Antisense strand to SEQ ID NO: 640490
gaaauucaagacaagccac

SEQ ID NO: 640492 - RNA, 19 nt, Artificial Sequence
  Description of Artificial Sequence: Synthetic oligonucleotide
  Sense strand starting at position 3269 of SEQ ID NO: 585445
auuucucauuuguaggcaa

SEQ ID NO: 640493 - RNA, 19 nt, Artificial Sequence
  Description of Artificial Sequence: Synthetic oligonucleotide
  Antisense strand to SEQ ID NO: 640492
uugccuacaaaugagaaau

SEQ ID NO: 640494 - RNA, 19 nt, Artificial Sequence
  Description of Artificial Sequence: Synthetic oligonucleotide
  Sense strand starting at position 3346 of SEQ ID NO: 585445
guuccagugauugauaaug

SEQ ID NO: 640495 - RNA, 19 nt, Artificial Sequence
  Description of Artificial Sequence: Synthetic oligonucleotide
  Antisense strand to SEQ ID NO: 640494
cauuaucaaucacuggaac

SEQ ID NO: 640496 - RNA, 19 nt, Artificial Sequence
  Description of Artificial Sequence: Synthetic oligonucleotide
  Sense strand starting at position 3373 of SEQ ID NO: 585445
gaugauguugacgaauucu

SEQ ID NO: 640497 - RNA, 19 nt, Artificial Sequence
  Description of Artificial Sequence: Synthetic oligonucleotide
  Antisense strand to SEQ ID NO: 640496
agaauucgucaacaucauc

SEQ ID NO: 640498 - RNA, 19 nt, Artificial Sequence
  Description of Artificial Sequence: Synthetic oligonucleotide
  Sense strand starting at position 3396 of SEQ ID NO: 585445
aguuguguacucuaaauga

SEQ ID NO: 640499 - RNA, 19 nt, Artificial Sequence
  Description of Artificial Sequence: Synthetic oligonucleotide
  Antisense strand to SEQ ID NO: 640498
ucauuuagaguacacaacu

SEQ ID NO: 640500 - RNA, 19 nt, Artificial Sequence
  Description of Artificial Sequence: Synthetic oligonucleotide
  Sense strand starting at position 3400 of SEQ ID NO: 585445
guguacucuaaaugaagga

SEQ ID NO: 640501 - RNA, 19 nt, Artificial Sequence
  Description of Artificial Sequence: Synthetic oligonucleotide
  Antisense strand to SEQ ID NO: 640500
uccuucauuuagaguacac

SEQ ID NO: 640502 - RNA, 19 nt, Artificial Sequence
  Description of Artificial Sequence: Synthetic oligonucleotide
  Sense strand starting at position 3607 of SEQ ID NO: 585445
auuggugucaauggaggau

SEQ ID NO: 640503 - RNA, 19 nt, Artificial Sequence
  Description of Artificial Sequence: Synthetic oligonucleotide
  Antisense strand to SEQ ID NO: 640502
auccuccauugacaccaau

SEQ ID NO: 640504 - RNA, 19 nt, Artificial Sequence
  Description of Artificial Sequence: Synthetic oligonucleotide
  Sense strand starting at position 3611 of SEQ ID NO: 585445
gugucaauggaggauaugu

SEQ ID NO: 640505 - RNA, 19 nt, Artificial Sequence
  Description of Artificial Sequence: Synthetic oligonucleotide
  Antisense strand to SEQ ID NO: 640504
acauauccuccauugacac

SEQ ID NO: 640506 - RNA, 19 nt, Artificial Sequence
  Description of Artificial Sequence: Synthetic oligonucleotide
  Sense strand starting at position 3712 of SEQ ID NO: 585445
acacaagauggguguuauc

SEQ ID NO: 640507 - RNA, 19 nt, Artificial Sequence
  Description of Artificial Sequence: Synthetic oligonucleotide
  Antisense strand to SEQ ID NO: 640506
gauaacacccaucuugugu

SEQ ID NO: 640508 - RNA, 19 nt, Artificial Sequence
  Description of Artificial Sequence: Synthetic oligonucleotide
  Sense strand starting at position 3839 of SEQ ID NO: 585445
gagcuuucugaugagguaa

SEQ ID NO: 640509 - RNA, 19 nt, Artificial Sequence
  Description of Artificial Sequence: Synthetic oligonucleotide
  Antisense strand to SEQ ID NO: 640508
uuaccucaucagaaagcuc

SEQ ID NO: 640510 - RNA, 19 nt, Artificial Sequence
  Description of Artificial Sequence: Synthetic oligonucleotide
  Sense strand starting at position 3851 of SEQ ID NO: 585445
gagguaacauucuuuagau

SEQ ID NO: 640511 - RNA, 19 nt, Artificial Sequence
  Description of Artificial Sequence: Synthetic oligonucleotide
  Antisense strand to SEQ ID NO: 640510
aucuaaagaauguuaccuc

SEQ ID NO: 640512 - RNA, 19 nt, Artificial Sequence
  Description of Artificial Sequence: Synthetic oligonucleotide
  Sense strand starting at position 3852 of SEQ ID NO: 585445
agguaacauucuuuagaua

SEQ ID NO: 640513 - RNA, 19 nt, Artificial Sequence
  Description of Artificial Sequence: Synthetic oligonucleotide
  Antisense strand to SEQ ID NO: 640512
uaucuaaagaauguuaccu

SEQ ID NO: 640514 - RNA, 19 nt, Artificial Sequence
  Description of Artificial Sequence: Synthetic oligonucleotide
  Sense strand starting at position 3946 of SEQ ID NO: 585445
cugggaaguuugucagaca

SEQ ID NO: 640515 - RNA, 19 nt, Artificial Sequence
  Description of Artificial Sequence: Synthetic oligonucleotide
  Antisense strand to SEQ ID NO: 640514
ugucugacaaacuucccag

SEQ ID NO: 640516 - RNA, 19 nt, Artificial Sequence
  Description of Artificial Sequence: Synthetic oligonucleotide
  Sense strand starting at position 3982 of SEQ ID NO: 585445
ggcaauuuaugugcuggga

SEQ ID NO: 640517 - RNA, 19 nt, Artificial Sequence
  Description of Artificial Sequence: Synthetic oligonucleotide
  Antisense strand to SEQ ID NO: 640516
ucccagcacauaaauugcc

SEQ ID NO: 640518 - RNA, 19 nt, Artificial Sequence
  Description of Artificial Sequence: Synthetic oligonucleotide
  Sense strand starting at position 10 of SEQ ID NO: 585446
aguucuaaugggcauccaa

SEQ ID NO: 640519 - RNA, 19 nt, Artificial Sequence
  Description of Artificial Sequence: Synthetic oligonucleotide
  Antisense strand to SEQ ID NO: 640518
uuggaugcccauuagaacu

SEQ ID NO: 640520 - RNA, 19 nt, Artificial Sequence
  Description of Artificial Sequence: Synthetic oligonucleotide
  Sense strand starting at position 139 of SEQ ID NO: 585446
cccacaacuuggguuaaau

SEQ ID NO: 640521 - RNA, 19 nt, Artificial Sequence
  Description of Artificial Sequence: Synthetic oligonucleotide
  Antisense strand to SEQ ID NO: 640520
auuuaacccaaguuguggg

SEQ ID NO: 640522 - RNA, 19 nt, Artificial Sequence
  Description of Artificial Sequence: Synthetic oligonucleotide
  Sense strand starting at position 149 of SEQ ID NO: 585446
ggguuaaaucuacaggcuu

SEQ ID NO: 640523 - RNA, 19 nt, Artificial Sequence
  Description of Artificial Sequence: Synthetic oligonucleotide
  Antisense strand to SEQ ID NO: 640522
aagccuguagauuuaaccc

SEQ ID NO: 640524 - RNA, 19 nt, Artificial Sequence
  Description of Artificial Sequence: Synthetic oligonucleotide
  Sense strand starting at position 266 of SEQ ID NO: 585446
ugaaauugguucucucaca

SEQ ID NO: 640525 - RNA, 19 nt, Artificial Sequence
  Description of Artificial Sequence: Synthetic oligonucleotide
  Antisense strand to SEQ ID NO: 640524
ugugagagaaccaauuuca

SEQ ID NO: 640526 - RNA, 19 nt, Artificial Sequence
  Description of Artificial Sequence: Synthetic oligonucleotide
  Sense strand starting at position 267 of SEQ ID NO: 585446
gaaauugguucucucacag

SEQ ID NO: 640527 - RNA, 19 nt, Artificial Sequence
  Description of Artificial Sequence: Synthetic oligonucleotide
  Antisense strand to SEQ ID NO: 640526
cugugagagaaccaauuuc

SEQ ID NO: 640528 - RNA, 19 nt, Artificial Sequence
  Description of Artificial Sequence: Synthetic oligonucleotide
  Sense strand starting at position 489 of SEQ ID NO: 585446
aggcuaagagucgaauaac

SEQ ID NO: 640529 - RNA, 19 nt, Artificial Sequence
  Description of Artificial Sequence: Synthetic oligonucleotide
  Antisense strand to SEQ ID NO: 640528
guuauucgacucuuagccu

SEQ ID NO: 640530 - RNA, 19 nt, Artificial Sequence
  Description of Artificial Sequence: Synthetic oligonucleotide
  Sense strand starting at position 526 of SEQ ID NO: 585446
uugucauagccauaagaca

SEQ ID NO: 640531 - RNA, 19 nt, Artificial Sequence
  Description of Artificial Sequence: Synthetic oligonucleotide
  Antisense strand to SEQ ID NO: 640530
ugucuuauggcuaugacaa

SEQ ID NO: 640532 - RNA, 19 nt, Artificial Sequence
  Description of Artificial Sequence: Synthetic oligonucleotide
  Sense strand starting at position 534 of SEQ ID NO: 585446
gccauaagacaguaaguga

SEQ ID NO: 640533 - RNA, 19 nt, Artificial Sequence
  Description of Artificial Sequence: Synthetic oligonucleotide
  Antisense strand to SEQ ID NO: 640532
ucacuuacugucuuauggc

SEQ ID NO: 640534 - RNA, 19 nt, Artificial Sequence
  Description of Artificial Sequence: Synthetic oligonucleotide
  Sense strand starting at position 783 of SEQ ID NO: 585446
cccauuugcgcugagcuaa

SEQ ID NO: 640535 - RNA, 19 nt, Artificial Sequence
  Description of Artificial Sequence: Synthetic oligonucleotide
  Antisense strand to SEQ ID NO: 640534
uuagcucagcgcaaauggg

SEQ ID NO: 640536 - RNA, 19 nt, Artificial Sequence
  Description of Artificial Sequence: Synthetic oligonucleotide
  Sense strand starting at position 1145 of SEQ ID NO: 585446
uaaguuaacuaagugggaa

SEQ ID NO: 640537 - RNA, 19 nt, Artificial Sequence
  Description of Artificial Sequence: Synthetic oligonucleotide
  Antisense strand to SEQ ID NO: 640536
uucccacuuaguuaacuua

SEQ ID NO: 640538 - RNA, 19 nt, Artificial Sequence
  Description of Artificial Sequence: Synthetic oligonucleotide
  Sense strand starting at position 2071 of SEQ ID NO: 585446
cuagacugguagucacuaa

SEQ ID NO: 640539 - RNA, 19 nt, Artificial Sequence
  Description of Artificial Sequence: Synthetic oligonucleotide
  Antisense strand to SEQ ID NO: 640538
uuagugacuaccagucuag

SEQ ID NO: 640540 - RNA, 19 nt, Artificial Sequence
  Description of Artificial Sequence: Synthetic oligonucleotide
  Sense strand starting at position 2075 of SEQ ID NO: 585446
acugguagucacuaaaguu

SEQ ID NO: 640541 - RNA, 19 nt, Artificial Sequence
  Description of Artificial Sequence: Synthetic oligonucleotide
  Antisense strand to SEQ ID NO: 640540
aacuuuagugacuaccagu

SEQ ID NO: 640542 - RNA, 19 nt, Artificial Sequence
  Description of Artificial Sequence: Synthetic oligonucleotide
  Sense strand starting at position 2117 of SEQ ID NO: 585446
ucagcuaagcaguaauaga

SEQ ID NO: 640543 - RNA, 19 nt, Artificial Sequence
  Description of Artificial Sequence: Synthetic oligonucleotide
  Antisense strand to SEQ ID NO: 640542
ucuauuacugcuuagcuga

SEQ ID NO: 640544 - RNA, 19 nt, Artificial Sequence
  Description of Artificial Sequence: Synthetic oligonucleotide
  Sense strand starting at position 2156 of SEQ ID NO: 585446
ugaacaaguguuuauugau

SEQ ID NO: 640545 - RNA, 19 nt, Artificial Sequence
  Description of Artificial Sequence: Synthetic oligonucleotide
  Antisense strand to SEQ ID NO: 640544
aucaauaaacacuuguuca

SEQ ID NO: 640546 - RNA, 19 nt, Artificial Sequence
  Description of Artificial Sequence: Synthetic oligonucleotide
  Sense strand starting at position 2281 of SEQ ID NO: 585446
guacaacugcuuuauaaug

SEQ ID NO: 640547 - RNA, 19 nt, Artificial Sequence
  Description of Artificial Sequence: Synthetic oligonucleotide
  Antisense strand to SEQ ID NO: 640546
cauuauaaagcaguuguac

SEQ ID NO: 640548 - RNA, 19 nt, Artificial Sequence
  Description of Artificial Sequence: Synthetic oligonucleotide
  Sense strand starting at position 2382 of SEQ ID NO: 585446
ggaguuggaucacuuucca

SEQ ID NO: 640549 - RNA, 19 nt, Artificial Sequence
  Description of Artificial Sequence: Synthetic oligonucleotide
  Antisense strand to SEQ ID NO: 640548
uggaaagugauccaacucc

SEQ ID NO: 640550 - RNA, 19 nt, Artificial Sequence
  Description of Artificial Sequence: Synthetic oligonucleotide
  Sense strand starting at position 2516 of SEQ ID NO: 585446
cucaguugcucauuuggua

SEQ ID NO: 640551 - RNA, 19 nt, Artificial Sequence
  Description of Artificial Sequence: Synthetic oligonucleotide
  Antisense strand to SEQ ID NO: 640550
uaccaaaugagcaacugag

SEQ ID NO: 640552 - RNA, 19 nt, Artificial Sequence
  Description of Artificial Sequence: Synthetic oligonucleotide
  Sense strand starting at position 2529 of SEQ ID NO: 585446
uugguacuaccagaauugu

SEQ ID NO: 640553 - RNA, 19 nt, Artificial Sequence
  Description of Artificial Sequence: Synthetic oligonucleotide
  Antisense strand to SEQ ID NO: 640552
acaauucugguaguaccaa

SEQ ID NO: 640554 - RNA, 19 nt, Artificial Sequence
  Description of Artificial Sequence: Synthetic oligonucleotide
  Sense strand starting at position 2638 of SEQ ID NO: 585446
auauguggucccuaugaua

SEQ ID NO: 640555 - RNA, 19 nt, Artificial Sequence
  Description of Artificial Sequence: Synthetic oligonucleotide
  Antisense strand to SEQ ID NO: 640554
uaucauagggaccacauau

SEQ ID NO: 640556 - RNA, 19 nt, Artificial Sequence
  Description of Artificial Sequence: Synthetic oligonucleotide
  Sense strand starting at position 2696 of SEQ ID NO: 585446
ucuauaagaugaguaguca

SEQ ID NO: 640557 - RNA, 19 nt, Artificial Sequence
  Description of Artificial Sequence: Synthetic oligonucleotide
  Antisense strand to SEQ ID NO: 640556
ugacuacucaucuuauaga

SEQ ID NO: 640558 - RNA, 19 nt, Artificial Sequence
  Description of Artificial Sequence: Synthetic oligonucleotide
  Sense strand starting at position 2700 of SEQ ID NO: 585446
uaagaugaguagucagagu

SEQ ID NO: 640559 - RNA, 19 nt, Artificial Sequence
  Description of Artificial Sequence: Synthetic oligonucleotide
  Antisense strand to SEQ ID NO: 640558
acucugacuacucaucuua

SEQ ID NO: 640560 - RNA, 19 nt, Artificial Sequence
  Description of Artificial Sequence: Synthetic oligonucleotide
  Sense strand starting at position 2770 of SEQ ID NO: 585446
cuugaaagguuagugaaau

SEQ ID NO: 640561 - RNA, 19 nt, Artificial Sequence
  Description of Artificial Sequence: Synthetic oligonucleotide
  Antisense strand to SEQ ID NO: 640560
auuucacuaaccuuucaag

SEQ ID NO: 640562 - RNA, 19 nt, Artificial Sequence
  Description of Artificial Sequence: Synthetic oligonucleotide
  Sense strand starting at position 2778 of SEQ ID NO: 585446
guuagugaaauugguuaaa

SEQ ID NO: 640563 - RNA, 19 nt, Artificial Sequence
  Description of Artificial Sequence: Synthetic oligonucleotide
  Antisense strand to SEQ ID NO: 640562
uuuaaccaauuucacuaac

SEQ ID NO: 640564 - RNA, 19 nt, Artificial Sequence
  Description of Artificial Sequence: Synthetic oligonucleotide
  Sense strand starting at position 3040 of SEQ ID NO: 585446
uuauuaggcugauuaucua

SEQ ID NO: 640565 - RNA, 19 nt, Artificial Sequence
  Description of Artificial Sequence: Synthetic oligonucleotide
  Antisense strand to SEQ ID NO: 640564
uagauaaucagccuaauaa

SEQ ID NO: 640566 - RNA, 19 nt, Artificial Sequence
  Description of Artificial Sequence: Synthetic oligonucleotide
  Sense strand starting at position 3067 of SEQ ID NO: 585446
cuacaauacccuuguggaa

SEQ ID NO: 640567 - RNA, 19 nt, Artificial Sequence
  Description of Artificial Sequence: Synthetic oligonucleotide
  Antisense strand to SEQ ID NO: 640566
uuccacaaggguauuguag

SEQ ID NO: 640568 - RNA, 19 nt, Artificial Sequence
  Description of Artificial Sequence: Synthetic oligonucleotide
  Sense strand starting at position 3121 of SEQ ID NO: 585446
aguccacuauaaguuuaua

SEQ ID NO: 640569 - RNA, 19 nt, Artificial Sequence
  Description of Artificial Sequence: Synthetic oligonucleotide
  Antisense strand to SEQ ID NO: 640568
uauaaacuuauaguggacu

SEQ ID NO: 640570 - RNA, 19 nt, Artificial Sequence
  Description of Artificial Sequence: Synthetic oligonucleotide
  Sense strand starting at position 3240 of SEQ ID NO: 585446
guggcuugucuugaauuuc

SEQ ID NO: 640571 - RNA, 19 nt, Artificial Sequence
  Description of Artificial Sequence: Synthetic oligonucleotide
  Antisense strand to SEQ ID NO: 640570
gaaauucaagacaagccac

SEQ ID NO: 640572 - RNA, 19 nt, Artificial Sequence
  Description of Artificial Sequence: Synthetic oligonucleotide
  Sense strand starting at position 3254 of SEQ ID NO: 585446
auuucucauuuguaggcaa

SEQ ID NO: 640573 - RNA, 19 nt, Artificial Sequence
  Description of Artificial Sequence: Synthetic oligonucleotide
  Antisense strand to SEQ ID NO: 640572
uugccuacaaaugagaaau

SEQ ID NO: 640574 - RNA, 19 nt, Artificial Sequence
  Description of Artificial Sequence: Synthetic oligonucleotide
  Sense strand starting at position 3331 of SEQ ID NO: 585446
guuccagugauugauaaug

SEQ ID NO: 640575 - RNA, 19 nt, Artificial Sequence
  Description of Artificial Sequence: Synthetic oligonucleotide
  Antisense strand to SEQ ID NO: 640574
cauuaucaaucacuggaac

SEQ ID NO: 640576 - RNA, 19 nt, Artificial Sequence
  Description of Artificial Sequence: Synthetic oligonucleotide
  Sense strand starting at position 3358 of SEQ ID NO: 585446
gaugauguugacgaauucu

SEQ ID NO: 640577 - RNA, 19 nt, Artificial Sequence
  Description of Artificial Sequence: Synthetic oligonucleotide
  Antisense strand to SEQ ID NO: 640576
agaauucgucaacaucauc

SEQ ID NO: 640578 - RNA, 19 nt, Artificial Sequence
  Description of Artificial Sequence: Synthetic oligonucleotide
  Sense strand starting at position 3381 of SEQ ID NO: 585446
aguuguguacucuaaauga

SEQ ID NO: 640579 - RNA, 19 nt, Artificial Sequence
  Description of Artificial Sequence: Synthetic oligonucleotide
  Antisense strand to SEQ ID NO: 640578
ucauuuagaguacacaacu

SEQ ID NO: 640580 - RNA, 19 nt, Artificial Sequence
  Description of Artificial Sequence: Synthetic oligonucleotide
  Sense strand starting at position 3385 of SEQ ID NO: 585446
guguacucuaaaugaagga

SEQ ID NO: 640581 - RNA, 19 nt, Artificial Sequence
  Description of Artificial Sequence: Synthetic oligonucleotide
  Antisense strand to SEQ ID NO: 640580
uccuucauuuagaguacac

SEQ ID NO: 640582 - RNA, 19 nt, Artificial Sequence
  Description of Artificial Sequence: Synthetic oligonucleotide
  Sense strand starting at position 3592 of SEQ ID NO: 585446
auuggugucaauggaggau

SEQ ID NO: 640583 - RNA, 19 nt, Artificial Sequence
  Description of Artificial Sequence: Synthetic oligonucleotide
  Antisense strand to SEQ ID NO: 640582
auccuccauugacaccaau

SEQ ID NO: 640584 - RNA, 19 nt, Artificial Sequence
  Description of Artificial Sequence: Synthetic oligonucleotide
  Sense strand starting at position 3596 of SEQ ID NO: 585446
gugucaauggaggauaugu

SEQ ID NO: 640585 - RNA, 19 nt, Artificial Sequence
  Description of Artificial Sequence: Synthetic oligonucleotide
  Antisense strand to SEQ ID NO: 640584
acauauccuccauugacac

SEQ ID NO: 640586 - RNA, 19 nt, Artificial Sequence
  Description of Artificial Sequence: Synthetic oligonucleotide
  Sense strand starting at position 3697 of SEQ ID NO: 585446
acacaagauggguguuauc

SEQ ID NO: 640587 - RNA, 19 nt, Artificial Sequence
  Description of Artificial Sequence: Synthetic oligonucleotide
  Antisense strand to SEQ ID NO: 640586
gauaacacccaucuugugu

SEQ ID NO: 640588 - RNA, 19 nt, Artificial Sequence
  Description of Artificial Sequence: Synthetic oligonucleotide
  Sense strand starting at position 3824 of SEQ ID NO: 585446
gagcuuucugaugagguaa

SEQ ID NO: 640589 - RNA, 19 nt, Artificial Sequence
  Description of Artificial Sequence: Synthetic oligonucleotide
  Antisense strand to SEQ ID NO: 640588
uuaccucaucagaaagcuc

SEQ ID NO: 640590 - RNA, 19 nt, Artificial Sequence
  Description of Artificial Sequence: Synthetic oligonucleotide
  Sense strand starting at position 3836 of SEQ ID NO: 585446
gagguaacauucuuuagau

SEQ ID NO: 640591 - RNA, 19 nt, Artificial Sequence
  Description of Artificial Sequence: Synthetic oligonucleotide
  Antisense strand to SEQ ID NO: 640590
aucuaaagaauguuaccuc

SEQ ID NO: 640592 - RNA, 19 nt, Artificial Sequence
  Description of Artificial Sequence: Synthetic oligonucleotide
  Sense strand starting at position 3837 of SEQ ID NO: 585446
agguaacauucuuuagaua

SEQ ID NO: 640593 - RNA, 19 nt, Artificial Sequence
  Description of Artificial Sequence: Synthetic oligonucleotide
  Antisense strand to SEQ ID NO: 640592
uaucuaaagaauguuaccu

SEQ ID NO: 640594 - RNA, 19 nt, Artificial Sequence
  Description of Artificial Sequence: Synthetic oligonucleotide
  Sense strand starting at position 3931 of SEQ ID NO: 585446
cugggaaguuugucagaca

SEQ ID NO: 640595 - RNA, 19 nt, Artificial Sequence
  Description of Artificial Sequence: Synthetic oligonucleotide
  Antisense strand to SEQ ID NO: 640594
ugucugacaaacuucccag

SEQ ID NO: 640596 - RNA, 19 nt, Artificial Sequence
  Description of Artificial Sequence: Synthetic oligonucleotide
  Sense strand starting at position 3967 of SEQ ID NO: 585446
ggcaauuuaugugcuggga

SEQ ID NO: 640597 - RNA, 19 nt, Artificial Sequence
  Description of Artificial Sequence: Synthetic oligonucleotide
  Antisense strand to SEQ ID NO: 640596
ucccagcacauaaauugcc

SEQ ID NO: 640598 - RNA, 19 nt, Artificial Sequence
  Description of Artificial Sequence: Synthetic oligonucleotide
  Sense strand starting at position 370 of SEQ ID NO: 585447
gagccauucucacugacag

SEQ ID NO: 640599 - RNA, 19 nt, Artificial Sequence
  Description of Artificial Sequence: Synthetic oligonucleotide
  Antisense strand to SEQ ID NO: 640598
cugucagugagaauggcuc

SEQ ID NO: 640600 - RNA, 19 nt, Artificial Sequence
  Description of Artificial Sequence: Synthetic oligonucleotide
  Sense strand starting at position 752 of SEQ ID NO: 585447
uguuauucccaucaucaug

SEQ ID NO: 640601 - RNA, 19 nt, Artificial Sequence
  Description of Artificial Sequence: Synthetic oligonucleotide
  Antisense strand to SEQ ID NO: 640600
caugaugaugggaauaaca

SEQ ID NO: 640602 - RNA, 19 nt, Artificial Sequence
  Description of Artificial Sequence: Synthetic oligonucleotide
  Sense strand starting at position 787 of SEQ ID NO: 585447
gcuguaauuucugucuuua

SEQ ID NO: 640603 - RNA, 19 nt, Artificial Sequence
  Description of Artificial Sequence: Synthetic oligonucleotide
  Antisense strand to SEQ ID NO: 640602
uaaagacagaaauuacagc

SEQ ID NO: 640604 - RNA, 19 nt, Artificial Sequence
  Description of Artificial Sequence: Synthetic oligonucleotide
  Sense strand starting at position 789 of SEQ ID NO: 585447
uguaauuucugucuuuagu

SEQ ID NO: 640605 - RNA, 19 nt, Artificial Sequence
  Description of Artificial Sequence: Synthetic oligonucleotide
  Antisense strand to SEQ ID NO: 640604
acuaaagacagaaauuaca

SEQ ID NO: 640606 - RNA, 19 nt, Artificial Sequence
  Description of Artificial Sequence: Synthetic oligonucleotide
  Sense strand starting at position 797 of SEQ ID NO: 585447
cugucuuuaguggagaauu

SEQ ID NO: 640607 - RNA, 19 nt, Artificial Sequence
  Description of Artificial Sequence: Synthetic oligonucleotide
  Antisense strand to SEQ ID NO: 640606
aauucuccacuaaagacag

SEQ ID NO: 640608 - RNA, 19 nt, Artificial Sequence
  Description of Artificial Sequence: Synthetic oligonucleotide
  Sense strand starting at position 890 of SEQ ID NO: 585447
gugaauguuaaagguaaca

SEQ ID NO: 640609 - RNA, 19 nt, Artificial Sequence
  Description of Artificial Sequence: Synthetic oligonucleotide
  Antisense strand to SEQ ID NO: 640608
uguuaccuuuaacauucac

SEQ ID NO: 640610 - RNA, 19 nt, Artificial Sequence
  Description of Artificial Sequence: Synthetic oligonucleotide
  Sense strand starting at position 909 of SEQ ID NO: 585447
acgugaauagauggauaug

SEQ ID NO: 640611 - RNA, 19 nt, Artificial Sequence
  Description of Artificial Sequence: Synthetic oligonucleotide
  Antisense strand to SEQ ID NO: 640610
cauauccaucuauucacgu

SEQ ID NO: 640612 - RNA, 19 nt, Artificial Sequence
  Description of Artificial Sequence: Synthetic oligonucleotide
  Sense strand starting at position 910 of SEQ ID NO: 585447
cgugaauagauggauaugu

SEQ ID NO: 640613 - RNA, 19 nt, Artificial Sequence
  Description of Artificial Sequence: Synthetic oligonucleotide
  Antisense strand to SEQ ID NO: 640612
acauauccaucuauucacg

SEQ ID NO: 640614 - RNA, 19 nt, Artificial Sequence
  Description of Artificial Sequence: Synthetic oligonucleotide
  Sense strand starting at position 1135 of SEQ ID NO: 585447
ucagcuauuuggucacauc

SEQ ID NO: 640615 - RNA, 19 nt, Artificial Sequence
  Description of Artificial Sequence: Synthetic oligonucleotide
  Antisense strand to SEQ ID NO: 640614
gaugugaccaaauagcuga

SEQ ID NO: 640616 - RNA, 19 nt, Artificial Sequence
  Description of Artificial Sequence: Synthetic oligonucleotide
  Sense strand starting at position 1272 of SEQ ID NO: 585447
aagaaugcagccgaauuau

SEQ ID NO: 640617 - RNA, 19 nt, Artificial Sequence
  Description of Artificial Sequence: Synthetic oligonucleotide
  Antisense strand to SEQ ID NO: 640616
auaauucggcugcauucuu

SEQ ID NO: 640618 - RNA, 19 nt, Artificial Sequence
  Description of Artificial Sequence: Synthetic oligonucleotide
  Sense strand starting at position 1280 of SEQ ID NO: 585447
agccgaauuauggagucuu

SEQ ID NO: 640619 - RNA, 19 nt, Artificial Sequence
  Description of Artificial Sequence: Synthetic oligonucleotide
  Antisense strand to SEQ ID NO: 640618
aagacuccauaauucggcu

SEQ ID NO: 640620 - RNA, 19 nt, Artificial Sequence
  Description of Artificial Sequence: Synthetic oligonucleotide
  Sense strand starting at position 1492 of SEQ ID NO: 585447
aucgcuuguacuuaagaga

SEQ ID NO: 640621 - RNA, 19 nt, Artificial Sequence
  Description of Artificial Sequence: Synthetic oligonucleotide
  Antisense strand to SEQ ID NO: 640620
ucucuuaaguacaagcgau

SEQ ID NO: 640622 - RNA, 19 nt, Artificial Sequence
  Description of Artificial Sequence: Synthetic oligonucleotide
  Sense strand starting at position 1551 of SEQ ID NO: 585447
gcgaguccggcguugagaa

SEQ ID NO: 640623 - RNA, 19 nt, Artificial Sequence
  Description of Artificial Sequence: Synthetic oligonucleotide
  Antisense strand to SEQ ID NO: 640622
uucucaacgccggacucgc

SEQ ID NO: 640624 - RNA, 19 nt, Artificial Sequence
  Description of Artificial Sequence: Synthetic oligonucleotide
  Sense strand starting at position 1724 of SEQ ID NO: 585447
ccaggaaguccagguaauc

SEQ ID NO: 640625 - RNA, 19 nt, Artificial Sequence
  Description of Artificial Sequence: Synthetic oligonucleotide
  Antisense strand to SEQ ID NO: 640624
gauuaccuggacuuccugg

SEQ ID NO: 640626 - RNA, 19 nt, Artificial Sequence
  Description of Artificial Sequence: Synthetic oligonucleotide
  Sense strand starting at position 1921 of SEQ ID NO: 585447
gggagcauauaagcauuau

SEQ ID NO: 640627 - RNA, 19 nt, Artificial Sequence
  Description of Artificial Sequence: Synthetic oligonucleotide
  Antisense strand to SEQ ID NO: 640626
auaaugcuuauaugcuccc

SEQ ID NO: 640628 - RNA, 19 nt, Artificial Sequence
  Description of Artificial Sequence: Synthetic oligonucleotide
  Sense strand starting at position 1925 of SEQ ID NO: 585447
gcauauaagcauuaugauu

SEQ ID NO: 640629 - RNA, 19 nt, Artificial Sequence
  Description of Artificial Sequence: Synthetic oligonucleotide
  Antisense strand to SEQ ID NO: 640628
aaucauaaugcuuauaugc

SEQ ID NO: 640630 - RNA, 19 nt, Artificial Sequence
  Description of Artificial Sequence: Synthetic oligonucleotide
  Sense strand starting at position 1936 of SEQ ID NO: 585447
uuaugauuggcugaguucu

SEQ ID NO: 640631 - RNA, 19 nt, Artificial Sequence
  Description of Artificial Sequence: Synthetic oligonucleotide
  Antisense strand to SEQ ID NO: 640630
agaacucagccaaucauaa

SEQ ID NO: 640632 - RNA, 19 nt, Artificial Sequence
  Description of Artificial Sequence: Synthetic oligonucleotide
  Sense strand starting at position 2274 of SEQ ID NO: 585447
agaggauggugcuuuauaa

SEQ ID NO: 640633 - RNA, 19 nt, Artificial Sequence
  Description of Artificial Sequence: Synthetic oligonucleotide
  Antisense strand to SEQ ID NO: 640632
uuauaaagcaccauccucu

SEQ ID NO: 640634 - RNA, 19 nt, Artificial Sequence
  Description of Artificial Sequence: Synthetic oligonucleotide
  Sense strand starting at position 2285 of SEQ ID NO: 585447
cuuuauaacgcagggagau

SEQ ID NO: 640635 - RNA, 19 nt, Artificial Sequence
  Description of Artificial Sequence: Synthetic oligonucleotide
  Antisense strand to SEQ ID NO: 640634
aucucccugcguuauaaag

SEQ ID NO: 640636 - RNA, 19 nt, Artificial Sequence
  Description of Artificial Sequence: Synthetic oligonucleotide
  Sense strand starting at position 2485 of SEQ ID NO: 585447
aagacaucgccgcagagaa

SEQ ID NO: 640637 - RNA, 19 nt, Artificial Sequence
  Description of Artificial Sequence: Synthetic oligonucleotide
  Antisense strand to SEQ ID NO: 640636
uucucugcggcgaugucuu

SEQ ID NO: 640638 - RNA, 19 nt, Artificial Sequence
  Description of Artificial Sequence: Synthetic oligonucleotide
  Sense strand starting at position 2572 of SEQ ID NO: 585447
uuuggaaaccguuacuacu

SEQ ID NO: 640639 - RNA, 19 nt, Artificial Sequence
  Description of Artificial Sequence: Synthetic oligonucleotide
  Antisense strand to SEQ ID NO: 640638
aguaguaacgguuuccaaa

SEQ ID NO: 640640 - RNA, 19 nt, Artificial Sequence
  Description of Artificial Sequence: Synthetic oligonucleotide
  Sense strand starting at position 2659 of SEQ ID NO: 585447
aguaacuuagcuuacugaa

SEQ ID NO: 640641 - RNA, 19 nt, Artificial Sequence
  Description of Artificial Sequence: Synthetic oligonucleotide
  Antisense strand to SEQ ID NO: 640640
uucaguaagcuaaguuacu

SEQ ID NO: 640642 - RNA, 19 nt, Artificial Sequence
  Description of Artificial Sequence: Synthetic oligonucleotide
  Sense strand starting at position 2708 of SEQ ID NO: 585447
acgucacuuugauuaaaua

SEQ ID NO: 640643 - RNA, 19 nt, Artificial Sequence
  Description of Artificial Sequence: Synthetic oligonucleotide
  Antisense strand to SEQ ID NO: 640642
uauuuaaucaaagugacgu

SEQ ID NO: 640644 - RNA, 19 nt, Artificial Sequence
  Description of Artificial Sequence: Synthetic oligonucleotide
  Sense strand starting at position 2709 of SEQ ID NO: 585447
cgucacuuugauuaaauau

SEQ ID NO: 640645 - RNA, 19 nt, Artificial Sequence
  Description of Artificial Sequence: Synthetic oligonucleotide
  Antisense strand to SEQ ID NO: 640644
auauuuaaucaaagugacg

SEQ ID NO: 640646 - RNA, 19 nt, Artificial Sequence
  Description of Artificial Sequence: Synthetic oligonucleotide
  Sense strand starting at position 2783 of SEQ ID NO: 585447
uccaaauuuguauguuugu

SEQ ID NO: 640647 - RNA, 19 nt, Artificial Sequence
  Description of Artificial Sequence: Synthetic oligonucleotide
  Antisense strand to SEQ ID NO: 640646
acaaacauacaaauuugga

SEQ ID NO: 640648 - RNA, 19 nt, Artificial Sequence
  Description of Artificial Sequence: Synthetic oligonucleotide
  Sense strand starting at position 2784 of SEQ ID NO: 585447
ccaaauuuguauguuuguu

SEQ ID NO: 640649 - RNA, 19 nt, Artificial Sequence
  Description of Artificial Sequence: Synthetic oligonucleotide
  Antisense strand to SEQ ID NO: 640648
aacaaacauacaaauuugg

SEQ ID NO: 640650 - RNA, 19 nt, Artificial Sequence
  Description of Artificial Sequence: Synthetic oligonucleotide
  Sense strand starting at position 3148 of SEQ ID NO: 585447
ccaucuauuugugugggua

SEQ ID NO: 640651 - RNA, 19 nt, Artificial Sequence
  Description of Artificial Sequence: Synthetic oligonucleotide
  Antisense strand to SEQ ID NO: 640650
uacccacacaaauagaugg

SEQ ID NO: 640652 - RNA, 19 nt, Artificial Sequence
  Description of Artificial Sequence: Synthetic oligonucleotide
  Sense strand starting at position 3149 of SEQ ID NO: 585447
caucuauuuguguggguau

SEQ ID NO: 640653 - RNA, 19 nt, Artificial Sequence
  Description of Artificial Sequence: Synthetic oligonucleotide
  Antisense strand to SEQ ID NO: 640652
auacccacacaaauagaug

SEQ ID NO: 640654 - RNA, 19 nt, Artificial Sequence
  Description of Artificial Sequence: Synthetic oligonucleotide
  Sense strand starting at position 3151 of SEQ ID NO: 585447
ucuauuuguguggguauau

SEQ ID NO: 640655 - RNA, 19 nt, Artificial Sequence
  Description of Artificial Sequence: Synthetic oligonucleotide
  Antisense strand to SEQ ID NO: 640654
auauacccacacaaauaga

SEQ ID NO: 640656 - RNA, 19 nt, Artificial Sequence
  Description of Artificial Sequence: Synthetic oligonucleotide
  Sense strand starting at position 3152 of SEQ ID NO: 585447
cuauuuguguggguauaug

SEQ ID NO: 640657 - RNA, 19 nt, Artificial Sequence
  Description of Artificial Sequence: Synthetic oligonucleotide
  Antisense strand to SEQ ID NO: 640656
cauauacccacacaaauag

SEQ ID NO: 640658 - RNA, 19 nt, Artificial Sequence
  Description of Artificial Sequence: Synthetic oligonucleotide
  Sense strand starting at position 3216 of SEQ ID NO: 585447
cauccuagugggcagauaa

SEQ ID NO: 640659 - RNA, 19 nt, Artificial Sequence
  Description of Artificial Sequence: Synthetic oligonucleotide
  Antisense strand to SEQ ID NO: 640658
uuaucugcccacuaggaug

SEQ ID NO: 640660 - RNA, 19 nt, Artificial Sequence
  Description of Artificial Sequence: Synthetic oligonucleotide
  Sense strand starting at position 3226 of SEQ ID NO: 585447
ggcagauaaaucgauccuu

SEQ ID NO: 640661 - RNA, 19 nt, Artificial Sequence
  Description of Artificial Sequence: Synthetic oligonucleotide
  Antisense strand to SEQ ID NO: 640660
aaggaucgauuuaucugcc

SEQ ID NO: 640662 - RNA, 19 nt, Artificial Sequence
  Description of Artificial Sequence: Synthetic oligonucleotide
  Sense strand starting at position 3340 of SEQ ID NO: 585447
guuauauagcaagagguaa

SEQ ID NO: 640663 - RNA, 19 nt, Artificial Sequence
  Description of Artificial Sequence: Synthetic oligonucleotide
  Antisense strand to SEQ ID NO: 640662
uuaccucuugcuauauaac

SEQ ID NO: 640664 - RNA, 19 nt, Artificial Sequence
  Description of Artificial Sequence: Synthetic oligonucleotide
  Sense strand starting at position 3429 of SEQ ID NO: 585447
uccucugcucuggaaacaa

SEQ ID NO: 640665 - RNA, 19 nt, Artificial Sequence
  Description of Artificial Sequence: Synthetic oligonucleotide
  Antisense strand to SEQ ID NO: 640664
uuguuuccagagcagagga

SEQ ID NO: 640666 - RNA, 19 nt, Artificial Sequence
  Description of Artificial Sequence: Synthetic oligonucleotide
  Sense strand starting at position 3491 of SEQ ID NO: 585447
agcaaagaagucgagucau

SEQ ID NO: 640667 - RNA, 19 nt, Artificial Sequence
  Description of Artificial Sequence: Synthetic oligonucleotide
  Antisense strand to SEQ ID NO: 640666
augacucgacuucuuugcu

SEQ ID NO: 640668 - RNA, 19 nt, Artificial Sequence
  Description of Artificial Sequence: Synthetic oligonucleotide
  Sense strand starting at position 3497 of SEQ ID NO: 585447
gaagucgagucauuuguag

SEQ ID NO: 640669 - RNA, 19 nt, Artificial Sequence
  Description of Artificial Sequence: Synthetic oligonucleotide
  Antisense strand to SEQ ID NO: 640668
cuacaaaugacucgacuuc

SEQ ID NO: 640670 - RNA, 19 nt, Artificial Sequence
  Description of Artificial Sequence: Synthetic oligonucleotide
  Sense strand starting at position 3499 of SEQ ID NO: 585447
agucgagucauuuguagua

SEQ ID NO: 640671 - RNA, 19 nt, Artificial Sequence
  Description of Artificial Sequence: Synthetic oligonucleotide
  Antisense strand to SEQ ID NO: 640670
uacuacaaaugacucgacu

SEQ ID NO: 640672 - RNA, 19 nt, Artificial Sequence
  Description of Artificial Sequence: Synthetic oligonucleotide
  Sense strand starting at position 3665 of SEQ ID NO: 585447
auggcaaauuuggaaacua

SEQ ID NO: 640673 - RNA, 19 nt, Artificial Sequence
  Description of Artificial Sequence: Synthetic oligonucleotide
  Antisense strand to SEQ ID NO: 640672
uaguuuccaaauuugccau

SEQ ID NO: 640674 - RNA, 19 nt, Artificial Sequence
  Description of Artificial Sequence: Synthetic oligonucleotide
  Sense strand starting at position 3843 of SEQ ID NO: 585447
auguauuuccuuuguuauc

SEQ ID NO: 640675 - RNA, 19 nt, Artificial Sequence
  Description of Artificial Sequence: Synthetic oligonucleotide
  Antisense strand to SEQ ID NO: 640674
gauaacaaaggaaauacau

SEQ ID NO: 640676 - RNA, 19 nt, Artificial Sequence
  Description of Artificial Sequence: Synthetic oligonucleotide
  Sense strand starting at position 3958 of SEQ ID NO: 585447
gcccguaguccuccucuau

SEQ ID NO: 640677 - RNA, 19 nt, Artificial Sequence
  Description of Artificial Sequence: Synthetic oligonucleotide
  Antisense strand to SEQ ID NO: 640676
auagaggaggacuacgggc

SEQ ID NO: 640678 - RNA, 19 nt, Artificial Sequence
  Description of Artificial Sequence: Synthetic oligonucleotide
  Sense strand starting at position 116 of SEQ ID NO: 585448
ucaagagauuaucuaguac

SEQ ID NO: 640679 - RNA, 19 nt, Artificial Sequence
  Description of Artificial Sequence: Synthetic oligonucleotide
  Antisense strand to SEQ ID NO: 640678
guacuagauaaucucuuga

SEQ ID NO: 640680 - RNA, 19 nt, Artificial Sequence
  Description of Artificial Sequence: Synthetic oligonucleotide
  Sense strand starting at position 178 of SEQ ID NO: 585448
aguguaacugcagacaaua

SEQ ID NO: 640681 - RNA, 19 nt, Artificial Sequence
  Description of Artificial Sequence: Synthetic oligonucleotide
  Antisense strand to SEQ ID NO: 640680
uauugucugcaguuacacu

SEQ ID NO: 640682 - RNA, 19 nt, Artificial Sequence
  Description of Artificial Sequence: Synthetic oligonucleotide
  Sense strand starting at position 236 of SEQ ID NO: 585448
uuaacuugccuccaagaag

SEQ ID NO: 640683 - RNA, 19 nt, Artificial Sequence
  Description of Artificial Sequence: Synthetic oligonucleotide
  Antisense strand to SEQ ID NO: 640682
cuucuuggaggcaaguuaa

SEQ ID NO: 640684 - RNA, 19 nt, Artificial Sequence
  Description of Artificial Sequence: Synthetic oligonucleotide
  Sense strand starting at position 699 of SEQ ID NO: 585448
ggguauguauguucuccaa

SEQ ID NO: 640685 - RNA, 19 nt, Artificial Sequence
  Description of Artificial Sequence: Synthetic oligonucleotide
  Antisense strand to SEQ ID NO: 640684
uuggagaacauacauaccc

SEQ ID NO: 640686 - RNA, 19 nt, Artificial Sequence
  Description of Artificial Sequence: Synthetic oligonucleotide
  Sense strand starting at position 703 of SEQ ID NO: 585448
auguauguucuccaacuua

SEQ ID NO: 640687 - RNA, 19 nt, Artificial Sequence
  Description of Artificial Sequence: Synthetic oligonucleotide
  Antisense strand to SEQ ID NO: 640686
uaaguuggagaacauacau

SEQ ID NO: 640688 - RNA, 19 nt, Artificial Sequence
  Description of Artificial Sequence: Synthetic oligonucleotide
  Sense strand starting at position 879 of SEQ ID NO: 585448
ugguuugcaagugaagaaa

SEQ ID NO: 640689 - RNA, 19 nt, Artificial Sequence
  Description of Artificial Sequence: Synthetic oligonucleotide
  Antisense strand to SEQ ID NO: 640688
uuucuucacuugcaaacca

SEQ ID NO: 640690 - RNA, 19 nt, Artificial Sequence
  Description of Artificial Sequence: Synthetic oligonucleotide
  Sense strand starting at position 1312 of SEQ ID NO: 585448
uucugaagaucccuggaca

SEQ ID NO: 640691 - RNA, 19 nt, Artificial Sequence
  Description of Artificial Sequence: Synthetic oligonucleotide
  Antisense strand to SEQ ID NO: 640690
uguccagggaucuucagaa

SEQ ID NO: 640692 - RNA, 19 nt, Artificial Sequence
  Description of Artificial Sequence: Synthetic oligonucleotide
  Sense strand starting at position 1368 of SEQ ID NO: 585448
ccuuuauuguuaguaacca

SEQ ID NO: 640693 - RNA, 19 nt, Artificial Sequence
  Description of Artificial Sequence: Synthetic oligonucleotide
  Antisense strand to SEQ ID NO: 640692
ugguuacuaacaauaaagg

SEQ ID NO: 640694 - RNA, 19 nt, Artificial Sequence
  Description of Artificial Sequence: Synthetic oligonucleotide
  Sense strand starting at position 1490 of SEQ ID NO: 585448
gugggcaagacucauacuu

SEQ ID NO: 640695 - RNA, 19 nt, Artificial Sequence
  Description of Artificial Sequence: Synthetic oligonucleotide
  Antisense strand to SEQ ID NO: 640694
aaguaugagucuugcccac

SEQ ID NO: 640696 - RNA, 19 nt, Artificial Sequence
  Description of Artificial Sequence: Synthetic oligonucleotide
  Sense strand starting at position 1644 of SEQ ID NO: 585448
agaagauagcauggcagua

SEQ ID NO: 640697 - RNA, 19 nt, Artificial Sequence
  Description of Artificial Sequence: Synthetic oligonucleotide
  Antisense strand to SEQ ID NO: 640696
uacugccaugcuaucuucu

SEQ ID NO: 640698 - RNA, 19 nt, Artificial Sequence
  Description of Artificial Sequence: Synthetic oligonucleotide
  Sense strand starting at position 1674 of SEQ ID NO: 585448
ugauuuaccugauauccug

SEQ ID NO: 640699 - RNA, 19 nt, Artificial Sequence
  Description of Artificial Sequence: Synthetic oligonucleotide
  Antisense strand to SEQ ID NO: 640698
caggauaucagguaaauca

SEQ ID NO: 640700 - RNA, 19 nt, Artificial Sequence
  Description of Artificial Sequence: Synthetic oligonucleotide
  Sense strand starting at position 1680 of SEQ ID NO: 585448
accugauauccuggcauga

SEQ ID NO: 640701 - RNA, 19 nt, Artificial Sequence
  Description of Artificial Sequence: Synthetic oligonucleotide
  Antisense strand to SEQ ID NO: 640700
ucaugccaggauaucaggu

SEQ ID NO: 640702 - RNA, 19 nt, Artificial Sequence
  Description of Artificial Sequence: Synthetic oligonucleotide
  Sense strand starting at position 1684 of SEQ ID NO: 585448
gauauccuggcaugaagau

SEQ ID NO: 640703 - RNA, 19 nt, Artificial Sequence
  Description of Artificial Sequence: Synthetic oligonucleotide
  Antisense strand to SEQ ID NO: 640702
aucuucaugccaggauauc

SEQ ID NO: 640704 - RNA, 19 nt, Artificial Sequence
  Description of Artificial Sequence: Synthetic oligonucleotide
  Sense strand starting at position 1743 of SEQ ID NO: 585448
gagaauugucaaggcugac

SEQ ID NO: 640705 - RNA, 19 nt, Artificial Sequence
  Description of Artificial Sequence: Synthetic oligonucleotide
  Antisense strand to SEQ ID NO: 640704
gucagccuugacaauucuc

SEQ ID NO: 640706 - RNA, 19 nt, Artificial Sequence
  Description of Artificial Sequence: Synthetic oligonucleotide
  Sense strand starting at position 1763 of SEQ ID NO: 585448
uucgcagugcacuaucaaa

SEQ ID NO: 640707 - RNA, 19 nt, Artificial Sequence
  Description of Artificial Sequence: Synthetic oligonucleotide
  Antisense strand to SEQ ID NO: 640706
uuugauagugcacugcgaa

SEQ ID NO: 640708 - RNA, 19 nt, Artificial Sequence
  Description of Artificial Sequence: Synthetic oligonucleotide
  Sense strand starting at position 1847 of SEQ ID NO: 585448
gagucauggcauuaaccac

SEQ ID NO: 640709 - RNA, 19 nt, Artificial Sequence
  Description of Artificial Sequence: Synthetic oligonucleotide
  Antisense strand to SEQ ID NO: 640708
gugguuaaugccaugacuc

SEQ ID NO: 640710 - RNA, 19 nt, Artificial Sequence
  Description of Artificial Sequence: Synthetic oligonucleotide
  Sense strand starting at position 1909 of SEQ ID NO: 585448
agaauaucauucuuauggu

SEQ ID NO: 640711 - RNA, 19 nt, Artificial Sequence
  Description of Artificial Sequence: Synthetic oligonucleotide
  Antisense strand to SEQ ID NO: 640710
accauaagaaugauauucu

SEQ ID NO: 640712 - RNA, 19 nt, Artificial Sequence
  Description of Artificial Sequence: Synthetic oligonucleotide
  Sense strand starting at position 1918 of SEQ ID NO: 585448
uucuuaugguauuccgaaa

SEQ ID NO: 640713 - RNA, 19 nt, Artificial Sequence
  Description of Artificial Sequence: Synthetic oligonucleotide
  Antisense strand to SEQ ID NO: 640712
uuucggaauaccauaagaa

SEQ ID NO: 640714 - RNA, 19 nt, Artificial Sequence
  Description of Artificial Sequence: Synthetic oligonucleotide
  Sense strand starting at position 1985 of SEQ ID NO: 585448
ucuugaaucuagguaacua

SEQ ID NO: 640715 - RNA, 19 nt, Artificial Sequence
  Description of Artificial Sequence: Synthetic oligonucleotide
  Antisense strand to SEQ ID NO: 640714
uaguuaccuagauucaaga

SEQ ID NO: 640716 - RNA, 19 nt, Artificial Sequence
  Description of Artificial Sequence: Synthetic oligonucleotide
  Sense strand starting at position 2087 of SEQ ID NO: 585448
cuggcuuugggucauacua

SEQ ID NO: 640717 - RNA, 19 nt, Artificial Sequence
  Description of Artificial Sequence: Synthetic oligonucleotide
  Antisense strand to SEQ ID NO: 640716
uaguaugacccaaagccag

SEQ ID NO: 640718 - RNA, 19 nt, Artificial Sequence
  Description of Artificial Sequence: Synthetic oligonucleotide
  Sense strand starting at position 2145 of SEQ ID NO: 585448
ucugaauuaucuguuacag

SEQ ID NO: 640719 - RNA, 19 nt, Artificial Sequence
  Description of Artificial Sequence: Synthetic oligonucleotide
  Antisense strand to SEQ ID NO: 640718
cuguaacagauaauucaga

SEQ ID NO: 640720 - RNA, 19 nt, Artificial Sequence
  Description of Artificial Sequence: Synthetic oligonucleotide
  Sense strand starting at position 2189 of SEQ ID NO: 585448
agugaagucaaauguaagu

SEQ ID NO: 640721 - RNA, 19 nt, Artificial Sequence
  Description of Artificial Sequence: Synthetic oligonucleotide
  Antisense strand to SEQ ID NO: 640720
acuuacauuugacuucacu

SEQ ID NO: 640722 - RNA, 19 nt, Artificial Sequence
  Description of Artificial Sequence: Synthetic oligonucleotide
  Sense strand starting at position 2211 of SEQ ID NO: 585448
agaacuauguugguacuga

SEQ ID NO: 640723 - RNA, 19 nt, Artificial Sequence
  Description of Artificial Sequence: Synthetic oligonucleotide
  Antisense strand to SEQ ID NO: 640722
ucaguaccaacauaguucu

SEQ ID NO: 640724 - RNA, 19 nt, Artificial Sequence
  Description of Artificial Sequence: Synthetic oligonucleotide
  Sense strand starting at position 2219 of SEQ ID NO: 585448
guugguacugauuaucaaa

SEQ ID NO: 640725 - RNA, 19 nt, Artificial Sequence
  Description of Artificial Sequence: Synthetic oligonucleotide
  Antisense strand to SEQ ID NO: 640724
uuugauaaucaguaccaac

SEQ ID NO: 640726 - RNA, 19 nt, Artificial Sequence
  Description of Artificial Sequence: Synthetic oligonucleotide
  Sense strand starting at position 2342 of SEQ ID NO: 585448
uuauaauaguggucucaua

SEQ ID NO: 640727 - RNA, 19 nt, Artificial Sequence
  Description of Artificial Sequence: Synthetic oligonucleotide
  Antisense strand to SEQ ID NO: 640726
uaugagaccacuauuauaa

SEQ ID NO: 640728 - RNA, 19 nt, Artificial Sequence
  Description of Artificial Sequence: Synthetic oligonucleotide
  Sense strand starting at position 2371 of SEQ ID NO: 585448
acuguauccuuauuguauc

SEQ ID NO: 640729 - RNA, 19 nt, Artificial Sequence
  Description of Artificial Sequence: Synthetic oligonucleotide
  Antisense strand to SEQ ID NO: 640728
gauacaauaaggauacagu

SEQ ID NO: 640730 - RNA, 19 nt, Artificial Sequence
  Description of Artificial Sequence: Synthetic oligonucleotide
  Sense strand starting at position 2718 of SEQ ID NO: 585448
ggcuuaagucaguaacagu

SEQ ID NO: 640731 - RNA, 19 nt, Artificial Sequence
  Description of Artificial Sequence: Synthetic oligonucleotide
  Antisense strand to SEQ ID NO: 640730
acuguuacugacuuaagcc

SEQ ID NO: 640732 - RNA, 19 nt, Artificial Sequence
  Description of Artificial Sequence: Synthetic oligonucleotide
  Sense strand starting at position 2734 of SEQ ID NO: 585448
aguggaguucuuugcaaga

SEQ ID NO: 640733 - RNA, 19 nt, Artificial Sequence
  Description of Artificial Sequence: Synthetic oligonucleotide
  Antisense strand to SEQ ID NO: 640732
ucuugcaaagaacuccacu

SEQ ID NO: 640734 - RNA, 19 nt, Artificial Sequence
  Description of Artificial Sequence: Synthetic oligonucleotide
  Sense strand starting at position 2775 of SEQ ID NO: 585448
auaugaacacagugucauu

SEQ ID NO: 640735 - RNA, 19 nt, Artificial Sequence
  Description of Artificial Sequence: Synthetic oligonucleotide
  Antisense strand to SEQ ID NO: 640734
aaugacacuguguucauau

SEQ ID NO: 640736 - RNA, 19 nt, Artificial Sequence
  Description of Artificial Sequence: Synthetic oligonucleotide
  Sense strand starting at position 2906 of SEQ ID NO: 585448
uuaacagacuguccuuaga

SEQ ID NO: 640737 - RNA, 19 nt, Artificial Sequence
  Description of Artificial Sequence: Synthetic oligonucleotide
  Antisense strand to SEQ ID NO: 640736
ucuaaggacagucuguuaa

SEQ ID NO: 640738 - RNA, 19 nt, Artificial Sequence
  Description of Artificial Sequence: Synthetic oligonucleotide
  Sense strand starting at position 2940 of SEQ ID NO: 585448
gugaauuuguuuccuucuu

SEQ ID NO: 640739 - RNA, 19 nt, Artificial Sequence
  Description of Artificial Sequence: Synthetic oligonucleotide
  Antisense strand to SEQ ID NO: 640738
aagaaggaaacaaauucac

SEQ ID NO: 640740 - RNA, 19 nt, Artificial Sequence
  Description of Artificial Sequence: Synthetic oligonucleotide
  Sense strand starting at position 2961 of SEQ ID NO: 585448
ucuuucuuaccguaggaaa

SEQ ID NO: 640741 - RNA, 19 nt, Artificial Sequence
  Description of Artificial Sequence: Synthetic oligonucleotide
  Antisense strand to SEQ ID NO: 640740
uuuccuacgguaagaaaga

SEQ ID NO: 640742 - RNA, 19 nt, Artificial Sequence
  Description of Artificial Sequence: Synthetic oligonucleotide
  Sense strand starting at position 2963 of SEQ ID NO: 585448
uuucuuaccguaggaaauc

SEQ ID NO: 640743 - RNA, 19 nt, Artificial Sequence
  Description of Artificial Sequence: Synthetic oligonucleotide
  Antisense strand to SEQ ID NO: 640742
gauuuccuacgguaagaaa

SEQ ID NO: 640744 - RNA, 19 nt, Artificial Sequence
  Description of Artificial Sequence: Synthetic oligonucleotide
  Sense strand starting at position 2974 of SEQ ID NO: 585448
aggaaaucuacuggguucu

SEQ ID NO: 640745 - RNA, 19 nt, Artificial Sequence
  Description of Artificial Sequence: Synthetic oligonucleotide
  Antisense strand to SEQ ID NO: 640744
agaacccaguagauuuccu

SEQ ID NO: 640746 - RNA, 19 nt, Artificial Sequence
  Description of Artificial Sequence: Synthetic oligonucleotide
  Sense strand starting at position 3262 of SEQ ID NO: 585448
aggcacuaugcuggcaaau

SEQ ID NO: 640747 - RNA, 19 nt, Artificial Sequence
  Description of Artificial Sequence: Synthetic oligonucleotide
  Antisense strand to SEQ ID NO: 640746
auuugccagcauagugccu

SEQ ID NO: 640748 - RNA, 19 nt, Artificial Sequence
  Description of Artificial Sequence: Synthetic oligonucleotide
  Sense strand starting at position 3297 of SEQ ID NO: 585448
gguucucuauguccucaga

SEQ ID NO: 640749 - RNA, 19 nt, Artificial Sequence
  Description of Artificial Sequence: Synthetic oligonucleotide
  Antisense strand to SEQ ID NO: 640748
ucugaggacauagagaacc

SEQ ID NO: 640750 - RNA, 19 nt, Artificial Sequence
  Description of Artificial Sequence: Synthetic oligonucleotide
  Sense strand starting at position 3366 of SEQ ID NO: 585448
gcaauaugaauaggaguca

SEQ ID NO: 640751 - RNA, 19 nt, Artificial Sequence
  Description of Artificial Sequence: Synthetic oligonucleotide
  Antisense strand to SEQ ID NO: 640750
ugacuccuauucauauugc

SEQ ID NO: 640752 - RNA, 19 nt, Artificial Sequence
  Description of Artificial Sequence: Synthetic oligonucleotide
  Sense strand starting at position 3793 of SEQ ID NO: 585448
uuauuucguuuggaaagag

SEQ ID NO: 640753 - RNA, 19 nt, Artificial Sequence
  Description of Artificial Sequence: Synthetic oligonucleotide
  Antisense strand to SEQ ID NO: 640752
cucuuuccaaacgaaauaa

SEQ ID NO: 640754 - RNA, 19 nt, Artificial Sequence
  Description of Artificial Sequence: Synthetic oligonucleotide
  Sense strand starting at position 3897 of SEQ ID NO: 585448
auuaaaggagacugcuaua

SEQ ID NO: 640755 - RNA, 19 nt, Artificial Sequence
  Description of Artificial Sequence: Synthetic oligonucleotide
  Antisense strand to SEQ ID NO: 640754
uauagcagucuccuuuaau

SEQ ID NO: 640756 - RNA, 19 nt, Artificial Sequence
  Description of Artificial Sequence: Synthetic oligonucleotide
  Sense strand starting at position 3950 of SEQ ID NO: 585448
acacgcuauuugcuauauu

SEQ ID NO: 640757 - RNA, 19 nt, Artificial Sequence
  Description of Artificial Sequence: Synthetic oligonucleotide
  Antisense strand to SEQ ID NO: 640756
aauauagcaaauagcgugu

SEQ ID NO: 640758 - RNA, 19 nt, Artificial Sequence
  Description of Artificial Sequence: Synthetic oligonucleotide
  Sense strand starting at position 369 of SEQ ID NO: 585449
uuauuucguuuggaaagag

SEQ ID NO: 640759 - RNA, 19 nt, Artificial Sequence
  Description of Artificial Sequence: Synthetic oligonucleotide
  Antisense strand to SEQ ID NO: 640758
cucuuuccaaacgaaauaa

SEQ ID NO: 640760 - RNA, 19 nt, Artificial Sequence
  Description of Artificial Sequence: Synthetic oligonucleotide
  Sense strand starting at position 473 of SEQ ID NO: 585449
auuaaaggagacugcuaua

SEQ ID NO: 640761 - RNA, 19 nt, Artificial Sequence
  Description of Artificial Sequence: Synthetic oligonucleotide
  Antisense strand to SEQ ID NO: 640760
uauagcagucuccuuuaau

SEQ ID NO: 640762 - RNA, 19 nt, Artificial Sequence
  Description of Artificial Sequence: Synthetic oligonucleotide
  Sense strand starting at position 476 of SEQ ID NO: 585449
aaaggagacugcuauaaag

SEQ ID NO: 640763 - RNA, 19 nt, Artificial Sequence
  Description of Artificial Sequence: Synthetic oligonucleotide
  Antisense strand to SEQ ID NO: 640762
cuuuauagcagucuccuuu

SEQ ID NO: 640764 - RNA, 19 nt, Artificial Sequence
  Description of Artificial Sequence: Synthetic oligonucleotide
  Sense strand starting at position 526 of SEQ ID NO: 585449
acacgcuauuugcuauauu

SEQ ID NO: 640765 - RNA, 19 nt, Artificial Sequence
  Description of Artificial Sequence: Synthetic oligonucleotide
  Antisense strand to SEQ ID NO: 640764
aauauagcaaauagcgugu

SEQ ID NO: 640766 - RNA, 19 nt, Artificial Sequence
  Description of Artificial Sequence: Synthetic oligonucleotide
  Sense strand starting at position 570 of SEQ ID NO: 585449
ccgcaaggugugaaacguu

SEQ ID NO: 640767 - RNA, 19 nt, Artificial Sequence
  Description of Artificial Sequence: Synthetic oligonucleotide
  Antisense strand to SEQ ID NO: 640766
aacguuucacaccuugcgg

SEQ ID NO: 640768 - RNA, 19 nt, Artificial Sequence
  Description of Artificial Sequence: Synthetic oligonucleotide
  Sense strand starting at position 573 of SEQ ID NO: 585449
caaggugugaaacguuuaa

SEQ ID NO: 640769 - RNA, 19 nt, Artificial Sequence
  Description of Artificial Sequence: Synthetic oligonucleotide
  Antisense strand to SEQ ID NO: 640768
uuaaacguuucacaccuug

SEQ ID NO: 640770 - RNA, 19 nt, Artificial Sequence
  Description of Artificial Sequence: Synthetic oligonucleotide
  Sense strand starting at position 577 of SEQ ID NO: 585449
gugugaaacguuuaagaag

SEQ ID NO: 640771 - RNA, 19 nt, Artificial Sequence
  Description of Artificial Sequence: Synthetic oligonucleotide
  Antisense strand to SEQ ID NO: 640770
cuucuuaaacguuucacac

SEQ ID NO: 640772 - RNA, 19 nt, Artificial Sequence
  Description of Artificial Sequence: Synthetic oligonucleotide
  Sense strand starting at position 605 of SEQ ID NO: 585449
caguuaggucaagaauccu

SEQ ID NO: 640773 - RNA, 19 nt, Artificial Sequence
  Description of Artificial Sequence: Synthetic oligonucleotide
  Antisense strand to SEQ ID NO: 640772
aggauucuugaccuaacug

SEQ ID NO: 640774 - RNA, 19 nt, Artificial Sequence
  Description of Artificial Sequence: Synthetic oligonucleotide
  Sense strand starting at position 993 of SEQ ID NO: 585449
cuagcauuucuaugguuau

SEQ ID NO: 640775 - RNA, 19 nt, Artificial Sequence
  Description of Artificial Sequence: Synthetic oligonucleotide
  Antisense strand to SEQ ID NO: 640774
auaaccauagaaaugcuag

SEQ ID NO: 640776 - RNA, 19 nt, Artificial Sequence
  Description of Artificial Sequence: Synthetic oligonucleotide
  Sense strand starting at position 1006 of SEQ ID NO: 585449
gguuauauggaccaucguu

SEQ ID NO: 640777 - RNA, 19 nt, Artificial Sequence
  Description of Artificial Sequence: Synthetic oligonucleotide
  Antisense strand to SEQ ID NO: 640776
aacgaugguccauauaacc

SEQ ID NO: 640778 - RNA, 19 nt, Artificial Sequence
  Description of Artificial Sequence: Synthetic oligonucleotide
  Sense strand starting at position 1057 of SEQ ID NO: 585449
acuaaucaacuguguuauc

SEQ ID NO: 640779 - RNA, 19 nt, Artificial Sequence
  Description of Artificial Sequence: Synthetic oligonucleotide
  Antisense strand to SEQ ID NO: 640778
gauaacacaguugauuagu

SEQ ID NO: 640780 - RNA, 19 nt, Artificial Sequence
  Description of Artificial Sequence: Synthetic oligonucleotide
  Sense strand starting at position 1058 of SEQ ID NO: 585449
cuaaucaacuguguuauca

SEQ ID NO: 640781 - RNA, 19 nt, Artificial Sequence
  Description of Artificial Sequence: Synthetic oligonucleotide
  Antisense strand to SEQ ID NO: 640780
ugauaacacaguugauuag

SEQ ID NO: 640782 - RNA, 19 nt, Artificial Sequence
  Description of Artificial Sequence: Synthetic oligonucleotide
  Sense strand starting at position 1066 of SEQ ID NO: 585449
cuguguuaucagcaguuug

SEQ ID NO: 640783 - RNA, 19 nt, Artificial Sequence
  Description of Artificial Sequence: Synthetic oligonucleotide
  Antisense strand to SEQ ID NO: 640782
caaacugcugauaacacag

SEQ ID NO: 640784 - RNA, 19 nt, Artificial Sequence
  Description of Artificial Sequence: Synthetic oligonucleotide
  Sense strand starting at position 1068 of SEQ ID NO: 585449
guguuaucagcaguuugcu

SEQ ID NO: 640785 - RNA, 19 nt, Artificial Sequence
  Description of Artificial Sequence: Synthetic oligonucleotide
  Antisense strand to SEQ ID NO: 640784
agcaaacugcugauaacac

SEQ ID NO: 640786 - RNA, 19 nt, Artificial Sequence
  Description of Artificial Sequence: Synthetic oligonucleotide
  Sense strand starting at position 1071 of SEQ ID NO: 585449
uuaucagcaguuugcuaaa

SEQ ID NO: 640787 - RNA, 19 nt, Artificial Sequence
  Description of Artificial Sequence: Synthetic oligonucleotide
  Antisense strand to SEQ ID NO: 640786
uuuagcaaacugcugauaa

SEQ ID NO: 640788 - RNA, 19 nt, Artificial Sequence
  Description of Artificial Sequence: Synthetic oligonucleotide
  Sense strand starting at position 1723 of SEQ ID NO: 585449
acuuacuggcugugucaga

SEQ ID NO: 640789 - RNA, 19 nt, Artificial Sequence
  Description of Artificial Sequence: Synthetic oligonucleotide
  Antisense strand to SEQ ID NO: 640788
ucugacacagccaguaagu

SEQ ID NO: 640790 - RNA, 19 nt, Artificial Sequence
  Description of Artificial Sequence: Synthetic oligonucleotide
  Sense strand starting at position 1724 of SEQ ID NO: 585449
cuuacuggcugugucagaa

SEQ ID NO: 640791 - RNA, 19 nt, Artificial Sequence
  Description of Artificial Sequence: Synthetic oligonucleotide
  Antisense strand to SEQ ID NO: 640790
uucugacacagccaguaag

SEQ ID NO: 640792 - RNA, 19 nt, Artificial Sequence
  Description of Artificial Sequence: Synthetic oligonucleotide
  Sense strand starting at position 2246 of SEQ ID NO: 585449
uauugaggucugugaucca

SEQ ID NO: 640793 - RNA, 19 nt, Artificial Sequence
  Description of Artificial Sequence: Synthetic oligonucleotide
  Antisense strand to SEQ ID NO: 640792
uggaucacagaccucaaua

SEQ ID NO: 640794 - RNA, 19 nt, Artificial Sequence
  Description of Artificial Sequence: Synthetic oligonucleotide
  Sense strand starting at position 2249 of SEQ ID NO: 585449
ugaggucugugauccaauu

SEQ ID NO: 640795 - RNA, 19 nt, Artificial Sequence
  Description of Artificial Sequence: Synthetic oligonucleotide
  Antisense strand to SEQ ID NO: 640794
aauuggaucacagaccuca

SEQ ID NO: 640796 - RNA, 19 nt, Artificial Sequence
  Description of Artificial Sequence: Synthetic oligonucleotide
  Sense strand starting at position 2251 of SEQ ID NO: 585449
aggucugugauccaauuag

SEQ ID NO: 640797 - RNA, 19 nt, Artificial Sequence
  Description of Artificial Sequence: Synthetic oligonucleotide
  Antisense strand to SEQ ID NO: 640796
cuaauuggaucacagaccu

SEQ ID NO: 640798 - RNA, 19 nt, Artificial Sequence
  Description of Artificial Sequence: Synthetic oligonucleotide
  Sense strand starting at position 2288 of SEQ ID NO: 585449
gugcaaaguauggaucuua

SEQ ID NO: 640799 - RNA, 19 nt, Artificial Sequence
  Description of Artificial Sequence: Synthetic oligonucleotide
  Antisense strand to SEQ ID NO: 640798
uaagauccauacuuugcac

SEQ ID NO: 640800 - RNA, 19 nt, Artificial Sequence
  Description of Artificial Sequence: Synthetic oligonucleotide
  Sense strand starting at position 2324 of SEQ ID NO: 585449
ugaauagugucauuuguuu

SEQ ID NO: 640801 - RNA, 19 nt, Artificial Sequence
  Description of Artificial Sequence: Synthetic oligonucleotide
  Antisense strand to SEQ ID NO: 640800
aaacaaaugacacuauuca

SEQ ID NO: 640802 - RNA, 19 nt, Artificial Sequence
  Description of Artificial Sequence: Synthetic oligonucleotide
  Sense strand starting at position 2391 of SEQ ID NO: 585449
aucaguugucccuaaagca

SEQ ID NO: 640803 - RNA, 19 nt, Artificial Sequence
  Description of Artificial Sequence: Synthetic oligonucleotide
  Antisense strand to SEQ ID NO: 640802
ugcuuuagggacaacugau

SEQ ID NO: 640804 - RNA, 19 nt, Artificial Sequence
  Description of Artificial Sequence: Synthetic oligonucleotide
  Sense strand starting at position 2416 of SEQ ID NO: 585449
gugggucuauucuuagacu

SEQ ID NO: 640805 - RNA, 19 nt, Artificial Sequence
  Description of Artificial Sequence: Synthetic oligonucleotide
  Antisense strand to SEQ ID NO: 640804
agucuaagaauagacccac

SEQ ID NO: 640806 - RNA, 19 nt, Artificial Sequence
  Description of Artificial Sequence: Synthetic oligonucleotide
  Sense strand starting at position 2434 of SEQ ID NO: 585449
uuucuauucuguuccgaca

SEQ ID NO: 640807 - RNA, 19 nt, Artificial Sequence
  Description of Artificial Sequence: Synthetic oligonucleotide
  Antisense strand to SEQ ID NO: 640806
ugucggaacagaauagaaa

SEQ ID NO: 640808 - RNA, 19 nt, Artificial Sequence
  Description of Artificial Sequence: Synthetic oligonucleotide
  Sense strand starting at position 2486 of SEQ ID NO: 585449
uugucuugauuccuguaga

SEQ ID NO: 640809 - RNA, 19 nt, Artificial Sequence
  Description of Artificial Sequence: Synthetic oligonucleotide
  Antisense strand to SEQ ID NO: 640808
ucuacaggaaucaagacaa

SEQ ID NO: 640810 - RNA, 19 nt, Artificial Sequence
  Description of Artificial Sequence: Synthetic oligonucleotide
  Sense strand starting at position 2489 of SEQ ID NO: 585449
ucuugauuccuguagauuc

SEQ ID NO: 640811 - RNA, 19 nt, Artificial Sequence
  Description of Artificial Sequence: Synthetic oligonucleotide
  Antisense strand to SEQ ID NO: 640810
gaaucuacaggaaucaaga

SEQ ID NO: 640812 - RNA, 19 nt, Artificial Sequence
  Description of Artificial Sequence: Synthetic oligonucleotide
  Sense strand starting at position 2496 of SEQ ID NO: 585449
uccuguagauucguaagag

SEQ ID NO: 640813 - RNA, 19 nt, Artificial Sequence
  Description of Artificial Sequence: Synthetic oligonucleotide
  Antisense strand to SEQ ID NO: 640812
cucuuacgaaucuacagga

SEQ ID NO: 640814 - RNA, 19 nt, Artificial Sequence
  Description of Artificial Sequence: Synthetic oligonucleotide
  Sense strand starting at position 2528 of SEQ ID NO: 585449
ucguguuuggccuccaauu

SEQ ID NO: 640815 - RNA, 19 nt, Artificial Sequence
  Description of Artificial Sequence: Synthetic oligonucleotide
  Antisense strand to SEQ ID NO: 640814
aauuggaggccaaacacga

SEQ ID NO: 640816 - RNA, 19 nt, Artificial Sequence
  Description of Artificial Sequence: Synthetic oligonucleotide
  Sense strand starting at position 2576 of SEQ ID NO: 585449
caucuagucccuuggguuu

SEQ ID NO: 640817 - RNA, 19 nt, Artificial Sequence
  Description of Artificial Sequence: Synthetic oligonucleotide
  Antisense strand to SEQ ID NO: 640816
aaacccaagggacuagaug

SEQ ID NO: 640818 - RNA, 19 nt, Artificial Sequence
  Description of Artificial Sequence: Synthetic oligonucleotide
  Sense strand starting at position 2633 of SEQ ID NO: 585449
uugggauugugauugguua

SEQ ID NO: 640819 - RNA, 19 nt, Artificial Sequence
  Description of Artificial Sequence: Synthetic oligonucleotide
  Antisense strand to SEQ ID NO: 640818
uaaccaaucacaaucccaa

SEQ ID NO: 640820 - RNA, 19 nt, Artificial Sequence
  Description of Artificial Sequence: Synthetic oligonucleotide
  Sense strand starting at position 2635 of SEQ ID NO: 585449
gggauugugauugguuaca

SEQ ID NO: 640821 - RNA, 19 nt, Artificial Sequence
  Description of Artificial Sequence: Synthetic oligonucleotide
  Antisense strand to SEQ ID NO: 640820
uguaaccaaucacaauccc

SEQ ID NO: 640822 - RNA, 19 nt, Artificial Sequence
  Description of Artificial Sequence: Synthetic oligonucleotide
  Sense strand starting at position 2637 of SEQ ID NO: 585449
gauugugauugguuacauu

SEQ ID NO: 640823 - RNA, 19 nt, Artificial Sequence
  Description of Artificial Sequence: Synthetic oligonucleotide
  Antisense strand to SEQ ID NO: 640822
aauguaaccaaucacaauc

SEQ ID NO: 640824 - RNA, 19 nt, Artificial Sequence
  Description of Artificial Sequence: Synthetic oligonucleotide
  Sense strand starting at position 2646 of SEQ ID NO: 585449
ugguuacauuucgucuaua

SEQ ID NO: 640825 - RNA, 19 nt, Artificial Sequence
  Description of Artificial Sequence: Synthetic oligonucleotide
  Antisense strand to SEQ ID NO: 640824
uauagacgaaauguaacca

SEQ ID NO: 640826 - RNA, 19 nt, Artificial Sequence
  Description of Artificial Sequence: Synthetic oligonucleotide
  Sense strand starting at position 2647 of SEQ ID NO: 585449
gguuacauuucgucuauag

SEQ ID NO: 640827 - RNA, 19 nt, Artificial Sequence
  Description of Artificial Sequence: Synthetic oligonucleotide
  Antisense strand to SEQ ID NO: 640826
cuauagacgaaauguaacc

SEQ ID NO: 640828 - RNA, 19 nt, Artificial Sequence
  Description of Artificial Sequence: Synthetic oligonucleotide
  Sense strand starting at position 2659 of SEQ ID NO: 585449
ucuauagauccauguaaga

SEQ ID NO: 640829 - RNA, 19 nt, Artificial Sequence
  Description of Artificial Sequence: Synthetic oligonucleotide
  Antisense strand to SEQ ID NO: 640828
ucuuacauggaucuauaga

SEQ ID NO: 640830 - RNA, 19 nt, Artificial Sequence
  Description of Artificial Sequence: Synthetic oligonucleotide
  Sense strand starting at position 3007 of SEQ ID NO: 585449
ugugauaccucacucacua

SEQ ID NO: 640831 - RNA, 19 nt, Artificial Sequence
  Description of Artificial Sequence: Synthetic oligonucleotide
  Antisense strand to SEQ ID NO: 640830
uagugagugagguaucaca

SEQ ID NO: 640832 - RNA, 19 nt, Artificial Sequence
  Description of Artificial Sequence: Synthetic oligonucleotide
  Sense strand starting at position 3099 of SEQ ID NO: 585449
ggauuaugguaacuacagu

SEQ ID NO: 640833 - RNA, 19 nt, Artificial Sequence
  Description of Artificial Sequence: Synthetic oligonucleotide
  Antisense strand to SEQ ID NO: 640832
acuguaguuaccauaaucc

SEQ ID NO: 640834 - RNA, 19 nt, Artificial Sequence
  Description of Artificial Sequence: Synthetic oligonucleotide
  Sense strand starting at position 3153 of SEQ ID NO: 585449
auaucacccuaugucagau

SEQ ID NO: 640835 - RNA, 19 nt, Artificial Sequence
  Description of Artificial Sequence: Synthetic oligonucleotide
  Antisense strand to SEQ ID NO: 640834
aucugacauagggugauau

SEQ ID NO: 640836 - RNA, 19 nt, Artificial Sequence
  Description of Artificial Sequence: Synthetic oligonucleotide
  Sense strand starting at position 3776 of SEQ ID NO: 585449
cuaaguagcugggugauau

SEQ ID NO: 640837 - RNA, 19 nt, Artificial Sequence
  Description of Artificial Sequence: Synthetic oligonucleotide
  Antisense strand to SEQ ID NO: 640836
auaucacccagcuacuuag

SEQ ID NO: 640838 - RNA, 19 nt, Artificial Sequence
  Description of Artificial Sequence: Synthetic oligonucleotide
  Sense strand starting at position 169 of SEQ ID NO: 585450
ggccuaucuguugaagaaa

SEQ ID NO: 640839 - RNA, 19 nt, Artificial Sequence
  Description of Artificial Sequence: Synthetic oligonucleotide
  Antisense strand to SEQ ID NO: 640838
uuucuucaacagauaggcc

SEQ ID NO: 640840 - RNA, 19 nt, Artificial Sequence
  Description of Artificial Sequence: Synthetic oligonucleotide
  Sense strand starting at position 204 of SEQ ID NO: 585450
guuagugauggcuacuaau

SEQ ID NO: 640841 - RNA, 19 nt, Artificial Sequence
  Description of Artificial Sequence: Synthetic oligonucleotide
  Antisense strand to SEQ ID NO: 640840
auuaguagccaucacuaac

SEQ ID NO: 640842 - RNA, 19 nt, Artificial Sequence
  Description of Artificial Sequence: Synthetic oligonucleotide
  Sense strand starting at position 214 of SEQ ID NO: 585450
gcuacuaaugaauauguau

SEQ ID NO: 640843 - RNA, 19 nt, Artificial Sequence
  Description of Artificial Sequence: Synthetic oligonucleotide
  Antisense strand to SEQ ID NO: 640842
auacauauucauuaguagc

SEQ ID NO: 640844 - RNA, 19 nt, Artificial Sequence
  Description of Artificial Sequence: Synthetic oligonucleotide
  Sense strand starting at position 259 of SEQ ID NO: 585450
aagucuguugauuaucaga

SEQ ID NO: 640845 - RNA, 19 nt, Artificial Sequence
  Description of Artificial Sequence: Synthetic oligonucleotide
  Antisense strand to SEQ ID NO: 640844
ucugauaaucaacagacuu

SEQ ID NO: 640846 - RNA, 19 nt, Artificial Sequence
  Description of Artificial Sequence: Synthetic oligonucleotide
  Sense strand starting at position 261 of SEQ ID NO: 585450
gucuguugauuaucagaaa

SEQ ID NO: 640847 - RNA, 19 nt, Artificial Sequence
  Description of Artificial Sequence: Synthetic oligonucleotide
  Antisense strand to SEQ ID NO: 640846
uuucugauaaucaacagac

SEQ ID NO: 640848 - RNA, 19 nt, Artificial Sequence
  Description of Artificial Sequence: Synthetic oligonucleotide
  Sense strand starting at position 423 of SEQ ID NO: 585450
acacgacaguggucuauga

SEQ ID NO: 640849 - RNA, 19 nt, Artificial Sequence
  Description of Artificial Sequence: Synthetic oligonucleotide
  Antisense strand to SEQ ID NO: 640848
ucauagaccacugucgugu

SEQ ID NO: 640850 - RNA, 19 nt, Artificial Sequence
  Description of Artificial Sequence: Synthetic oligonucleotide
  Sense strand starting at position 425 of SEQ ID NO: 585450
acgacaguggucuaugaga

SEQ ID NO: 640851 - RNA, 19 nt, Artificial Sequence
  Description of Artificial Sequence: Synthetic oligonucleotide
  Antisense strand to SEQ ID NO: 640850
ucucauagaccacugucgu

SEQ ID NO: 640852 - RNA, 19 nt, Artificial Sequence
  Description of Artificial Sequence: Synthetic oligonucleotide
  Sense strand starting at position 427 of SEQ ID NO: 585450
gacaguggucuaugagacu

SEQ ID NO: 640853 - RNA, 19 nt, Artificial Sequence
  Description of Artificial Sequence: Synthetic oligonucleotide
  Antisense strand to SEQ ID NO: 640852
agucucauagaccacuguc

SEQ ID NO: 640854 - RNA, 19 nt, Artificial Sequence
  Description of Artificial Sequence: Synthetic oligonucleotide
  Sense strand starting at position 485 of SEQ ID NO: 585450
gcgcaaauaccauuguguu

SEQ ID NO: 640855 - RNA, 19 nt, Artificial Sequence
  Description of Artificial Sequence: Synthetic oligonucleotide
  Antisense strand to SEQ ID NO: 640854
aacacaaugguauuugcgc

SEQ ID NO: 640856 - RNA, 19 nt, Artificial Sequence
  Description of Artificial Sequence: Synthetic oligonucleotide
  Sense strand starting at position 503 of SEQ ID NO: 585450
ucagauugccucuaguauu

SEQ ID NO: 640857 - RNA, 19 nt, Artificial Sequence
  Description of Artificial Sequence: Synthetic oligonucleotide
  Antisense strand to SEQ ID NO: 640856
aauacuagaggcaaucuga

SEQ ID NO: 640858 - RNA, 19 nt, Artificial Sequence
  Description of Artificial Sequence: Synthetic oligonucleotide
  Sense strand starting at position 646 of SEQ ID NO: 585450
gaagaagucgccuaaugac

SEQ ID NO: 640859 - RNA, 19 nt, Artificial Sequence
  Description of Artificial Sequence: Synthetic oligonucleotide
  Antisense strand to SEQ ID NO: 640858
gucauuaggcgacuucuuc

SEQ ID NO: 640860 - RNA, 19 nt, Artificial Sequence
  Description of Artificial Sequence: Synthetic oligonucleotide
  Sense strand starting at position 678 of SEQ ID NO: 585450
ggcgacuguccugaagaga

SEQ ID NO: 640861 - RNA, 19 nt, Artificial Sequence
  Description of Artificial Sequence: Synthetic oligonucleotide
  Antisense strand to SEQ ID NO: 640860
ucucuucaggacagucgcc

SEQ ID NO: 640862 - RNA, 19 nt, Artificial Sequence
  Description of Artificial Sequence: Synthetic oligonucleotide
  Sense strand starting at position 689 of SEQ ID NO: 585450
ugaagagaugcaugacucu

SEQ ID NO: 640863 - RNA, 19 nt, Artificial Sequence
  Description of Artificial Sequence: Synthetic oligonucleotide
  Antisense strand to SEQ ID NO: 640862
agagucaugcaucucuuca

SEQ ID NO: 640864 - RNA, 19 nt, Artificial Sequence
  Description of Artificial Sequence: Synthetic oligonucleotide
  Sense strand starting at position 692 of SEQ ID NO: 585450
agagaugcaugacucuaau

SEQ ID NO: 640865 - RNA, 19 nt, Artificial Sequence
  Description of Artificial Sequence: Synthetic oligonucleotide
  Antisense strand to SEQ ID NO: 640864
auuagagucaugcaucucu

SEQ ID NO: 640866 - RNA, 19 nt, Artificial Sequence
  Description of Artificial Sequence: Synthetic oligonucleotide
  Sense strand starting at position 698 of SEQ ID NO: 585450
gcaugacucuaauuaaaug

SEQ ID NO: 640867 - RNA, 19 nt, Artificial Sequence
  Description of Artificial Sequence: Synthetic oligonucleotide
  Antisense strand to SEQ ID NO: 640866
cauuuaauuagagucaugc

SEQ ID NO: 640868 - RNA, 19 nt, Artificial Sequence
  Description of Artificial Sequence: Synthetic oligonucleotide
  Sense strand starting at position 735 of SEQ ID NO: 585450
cgauucugaucacccuauu

SEQ ID NO: 640869 - RNA, 19 nt, Artificial Sequence
  Description of Artificial Sequence: Synthetic oligonucleotide
  Antisense strand to SEQ ID NO: 640868
aauagggugaucagaaucg

SEQ ID NO: 640870 - RNA, 19 nt, Artificial Sequence
  Description of Artificial Sequence: Synthetic oligonucleotide
  Sense strand starting at position 866 of SEQ ID NO: 585450
aucaauuaugcauacguau

SEQ ID NO: 640871 - RNA, 19 nt, Artificial Sequence
  Description of Artificial Sequence: Synthetic oligonucleotide
  Antisense strand to SEQ ID NO: 640870
auacguaugcauaauugau

SEQ ID NO: 640872 - RNA, 19 nt, Artificial Sequence
  Description of Artificial Sequence: Synthetic oligonucleotide
  Sense strand starting at position 906 of SEQ ID NO: 585450
gcgucugcucugcuagaau

SEQ ID NO: 640873 - RNA, 19 nt, Artificial Sequence
  Description of Artificial Sequence: Synthetic oligonucleotide
  Antisense strand to SEQ ID NO: 640872
auucuagcagagcagacgc

SEQ ID NO: 640874 - RNA, 19 nt, Artificial Sequence
  Description of Artificial Sequence: Synthetic oligonucleotide
  Sense strand starting at position 909 of SEQ ID NO: 585450
ucugcucugcuagaauuaa

SEQ ID NO: 640875 - RNA, 19 nt, Artificial Sequence
  Description of Artificial Sequence: Synthetic oligonucleotide
  Antisense strand to SEQ ID NO: 640874
uuaauucuagcagagcaga

SEQ ID NO: 640876 - RNA, 19 nt, Artificial Sequence
  Description of Artificial Sequence: Synthetic oligonucleotide
  Sense strand starting at position 996 of SEQ ID NO: 585450
acgcuaggacuccacgaau

SEQ ID NO: 640877 - RNA, 19 nt, Artificial Sequence
  Description of Artificial Sequence: Synthetic oligonucleotide
  Antisense strand to SEQ ID NO: 640876
auucguggaguccuagcgu

SEQ ID NO: 640878 - RNA, 19 nt, Artificial Sequence
  Description of Artificial Sequence: Synthetic oligonucleotide
  Sense strand starting at position 1009 of SEQ ID NO: 585450
acgaauuaaugauuccauc

SEQ ID NO: 640879 - RNA, 19 nt, Artificial Sequence
  Description of Artificial Sequence: Synthetic oligonucleotide
  Antisense strand to SEQ ID NO: 640878
gauggaaucauuaauucgu

SEQ ID NO: 640880 - RNA, 19 nt, Artificial Sequence
  Description of Artificial Sequence: Synthetic oligonucleotide
  Sense strand starting at position 1017 of SEQ ID NO: 585450
augauuccaucagaauuug

SEQ ID NO: 640881 - RNA, 19 nt, Artificial Sequence
  Description of Artificial Sequence: Synthetic oligonucleotide
  Antisense strand to SEQ ID NO: 640880
caaauucugauggaaucau

SEQ ID NO: 640882 - RNA, 19 nt, Artificial Sequence
  Description of Artificial Sequence: Synthetic oligonucleotide
  Sense strand starting at position 1231 of SEQ ID NO: 585450
ccgggauucccaggaauuc

SEQ ID NO: 640883 - RNA, 19 nt, Artificial Sequence
  Description of Artificial Sequence: Synthetic oligonucleotide
  Antisense strand to SEQ ID NO: 640882
gaauuccugggaaucccgg

SEQ ID NO: 640884 - RNA, 19 nt, Artificial Sequence
  Description of Artificial Sequence: Synthetic oligonucleotide
  Sense strand starting at position 1451 of SEQ ID NO: 585450
ucaccucuccugcaggaaa

SEQ ID NO: 640885 - RNA, 19 nt, Artificial Sequence
  Description of Artificial Sequence: Synthetic oligonucleotide
  Antisense strand to SEQ ID NO: 640884
uuuccugcaggagagguga

SEQ ID NO: 640886 - RNA, 19 nt, Artificial Sequence
  Description of Artificial Sequence: Synthetic oligonucleotide
  Sense strand starting at position 2165 of SEQ ID NO: 585450
gagcuuguugcugucacga

SEQ ID NO: 640887 - RNA, 19 nt, Artificial Sequence
  Description of Artificial Sequence: Synthetic oligonucleotide
  Antisense strand to SEQ ID NO: 640886
ucgugacagcaacaagcuc

SEQ ID NO: 640888 - RNA, 19 nt, Artificial Sequence
  Description of Artificial Sequence: Synthetic oligonucleotide
  Sense strand starting at position 2432 of SEQ ID NO: 585450
gguagcaaucugggaacuu

SEQ ID NO: 640889 - RNA, 19 nt, Artificial Sequence
  Description of Artificial Sequence: Synthetic oligonucleotide
  Antisense strand to SEQ ID NO: 640888
aaguucccagauugcuacc

SEQ ID NO: 640890 - RNA, 19 nt, Artificial Sequence
  Description of Artificial Sequence: Synthetic oligonucleotide
  Sense strand starting at position 2475 of SEQ ID NO: 585450
augagaccugucggguaua

SEQ ID NO: 640891 - RNA, 19 nt, Artificial Sequence
  Description of Artificial Sequence: Synthetic oligonucleotide
  Antisense strand to SEQ ID NO: 640890
uauacccgacaggucucau

SEQ ID NO: 640892 - RNA, 19 nt, Artificial Sequence
  Description of Artificial Sequence: Synthetic oligonucleotide
  Sense strand starting at position 2550 of SEQ ID NO: 585450
acagauaacuggucccuua

SEQ ID NO: 640893 - RNA, 19 nt, Artificial Sequence
  Description of Artificial Sequence: Synthetic oligonucleotide
  Antisense strand to SEQ ID NO: 640892
uaagggaccaguuaucugu

SEQ ID NO: 640894 - RNA, 19 nt, Artificial Sequence
  Description of Artificial Sequence: Synthetic oligonucleotide
  Sense strand starting at position 2578 of SEQ ID NO: 585450
ggaagauguuaguugaaua

SEQ ID NO: 640895 - RNA, 19 nt, Artificial Sequence
  Description of Artificial Sequence: Synthetic oligonucleotide
  Antisense strand to SEQ ID NO: 640894
uauucaacuaacaucuucc

SEQ ID NO: 640896 - RNA, 19 nt, Artificial Sequence
  Description of Artificial Sequence: Synthetic oligonucleotide
  Sense strand starting at position 2706 of SEQ ID NO: 585450
uguacacauacgugaugga

SEQ ID NO: 640897 - RNA, 19 nt, Artificial Sequence
  Description of Artificial Sequence: Synthetic oligonucleotide
  Antisense strand to SEQ ID NO: 640896
uccaucacguauguguaca

SEQ ID NO: 640898 - RNA, 19 nt, Artificial Sequence
  Description of Artificial Sequence: Synthetic oligonucleotide
  Sense strand starting at position 2707 of SEQ ID NO: 585450
guacacauacgugauggaa

SEQ ID NO: 640899 - RNA, 19 nt, Artificial Sequence
  Description of Artificial Sequence: Synthetic oligonucleotide
  Antisense strand to SEQ ID NO: 640898
uuccaucacguauguguac

SEQ ID NO: 640900 - RNA, 19 nt, Artificial Sequence
  Description of Artificial Sequence: Synthetic oligonucleotide
  Sense strand starting at position 2710 of SEQ ID NO: 585450
cacauacgugauggaagaa

SEQ ID NO: 640901 - RNA, 19 nt, Artificial Sequence
  Description of Artificial Sequence: Synthetic oligonucleotide
  Antisense strand to SEQ ID NO: 640900
uucuuccaucacguaugug

SEQ ID NO: 640902 - RNA, 19 nt, Artificial Sequence
  Description of Artificial Sequence: Synthetic oligonucleotide
  Sense strand starting at position 2729 of SEQ ID NO: 585450
uguguuaugagccaugaga

SEQ ID NO: 640903 - RNA, 19 nt, Artificial Sequence
  Description of Artificial Sequence: Synthetic oligonucleotide
  Antisense strand to SEQ ID NO: 640902
ucucauggcucauaacaca

SEQ ID NO: 640904 - RNA, 19 nt, Artificial Sequence
  Description of Artificial Sequence: Synthetic oligonucleotide
  Sense strand starting at position 2731 of SEQ ID NO: 585450
uguuaugagccaugagaga

SEQ ID NO: 640905 - RNA, 19 nt, Artificial Sequence
  Description of Artificial Sequence: Synthetic oligonucleotide
  Antisense strand to SEQ ID NO: 640904
ucucucauggcucauaaca

SEQ ID NO: 640906 - RNA, 19 nt, Artificial Sequence
  Description of Artificial Sequence: Synthetic oligonucleotide
  Sense strand starting at position 2738 of SEQ ID NO: 585450
agccaugagagauguacaa

SEQ ID NO: 640907 - RNA, 19 nt, Artificial Sequence
  Description of Artificial Sequence: Synthetic oligonucleotide
  Antisense strand to SEQ ID NO: 640906
uuguacaucucucauggcu

SEQ ID NO: 640908 - RNA, 19 nt, Artificial Sequence
  Description of Artificial Sequence: Synthetic oligonucleotide
  Sense strand starting at position 2751 of SEQ ID NO: 585450
guacaaagugcugggaaga

SEQ ID NO: 640909 - RNA, 19 nt, Artificial Sequence
  Description of Artificial Sequence: Synthetic oligonucleotide
  Antisense strand to SEQ ID NO: 640908
ucuucccagcacuuuguac

SEQ ID NO: 640910 - RNA, 19 nt, Artificial Sequence
  Description of Artificial Sequence: Synthetic oligonucleotide
  Sense strand starting at position 2783 of SEQ ID NO: 585450
auggaugugcaagauaagu

SEQ ID NO: 640911 - RNA, 19 nt, Artificial Sequence
  Description of Artificial Sequence: Synthetic oligonucleotide
  Antisense strand to SEQ ID NO: 640910
acuuaucuugcacauccau

SEQ ID NO: 640912 - RNA, 19 nt, Artificial Sequence
  Description of Artificial Sequence: Synthetic oligonucleotide
  Sense strand starting at position 2785 of SEQ ID NO: 585450
ggaugugcaagauaagugu

SEQ ID NO: 640913 - RNA, 19 nt, Artificial Sequence
  Description of Artificial Sequence: Synthetic oligonucleotide
  Antisense strand to SEQ ID NO: 640912
acacuuaucuugcacaucc

SEQ ID NO: 640914 - RNA, 19 nt, Artificial Sequence
  Description of Artificial Sequence: Synthetic oligonucleotide
  Sense strand starting at position 3064 of SEQ ID NO: 585450
aucuacuagguuugacuau

SEQ ID NO: 640915 - RNA, 19 nt, Artificial Sequence
  Description of Artificial Sequence: Synthetic oligonucleotide
  Antisense strand to SEQ ID NO: 640914
auagucaaaccuaguagau

SEQ ID NO: 640916 - RNA, 19 nt, Artificial Sequence
  Description of Artificial Sequence: Synthetic oligonucleotide
  Sense strand starting at position 3983 of SEQ ID NO: 585450
gccauuugcuuugcuuaua

SEQ ID NO: 640917 - RNA, 19 nt, Artificial Sequence
  Description of Artificial Sequence: Synthetic oligonucleotide
  Antisense strand to SEQ ID NO: 640916
uauaagcaaagcaaauggc

SEQ ID NO: 640918 - RNA, 19 nt, Artificial Sequence
  Description of Artificial Sequence: Synthetic oligonucleotide
  Sense strand starting at position 5 of SEQ ID NO: 585451
accucaguuugaucagaug

SEQ ID NO: 640919 - RNA, 19 nt, Artificial Sequence
  Description of Artificial Sequence: Synthetic oligonucleotide
  Antisense strand to SEQ ID NO: 640918
caucugaucaaacugaggu

SEQ ID NO: 640920 - RNA, 19 nt, Artificial Sequence
  Description of Artificial Sequence: Synthetic oligonucleotide
  Sense strand starting at position 97 of SEQ ID NO: 585451
uuauaucgacucugacuca

SEQ ID NO: 640921 - RNA, 19 nt, Artificial Sequence
  Description of Artificial Sequence: Synthetic oligonucleotide
  Antisense strand to SEQ ID NO: 640920
ugagucagagucgauauaa

SEQ ID NO: 640922 - RNA, 19 nt, Artificial Sequence
  Description of Artificial Sequence: Synthetic oligonucleotide
  Sense strand starting at position 181 of SEQ ID NO: 585451
gcaacauagcuggguuaag

SEQ ID NO: 640923 - RNA, 19 nt, Artificial Sequence
  Description of Artificial Sequence: Synthetic oligonucleotide
  Antisense strand to SEQ ID NO: 640922
cuuaacccagcuauguugc

SEQ ID NO: 640924 - RNA, 19 nt, Artificial Sequence
  Description of Artificial Sequence: Synthetic oligonucleotide
  Sense strand starting at position 182 of SEQ ID NO: 585451
caacauagcuggguuaaga

SEQ ID NO: 640925 - RNA, 19 nt, Artificial Sequence
  Description of Artificial Sequence: Synthetic oligonucleotide
  Antisense strand to SEQ ID NO: 640924
ucuuaacccagcuauguug

SEQ ID NO: 640926 - RNA, 19 nt, Artificial Sequence
  Description of Artificial Sequence: Synthetic oligonucleotide
  Sense strand starting at position 915 of SEQ ID NO: 585451
ggucaauggauuugugcuu

SEQ ID NO: 640927 - RNA, 19 nt, Artificial Sequence
  Description of Artificial Sequence: Synthetic oligonucleotide
  Antisense strand to SEQ ID NO: 640926
aagcacaaauccauugacc

SEQ ID NO: 640928 - RNA, 19 nt, Artificial Sequence
  Description of Artificial Sequence: Synthetic oligonucleotide
  Sense strand starting at position 916 of SEQ ID NO: 585451
gucaauggauuugugcuua

SEQ ID NO: 640929 - RNA, 19 nt, Artificial Sequence
  Description of Artificial Sequence: Synthetic oligonucleotide
  Antisense strand to SEQ ID NO: 640928
uaagcacaaauccauugac

SEQ ID NO: 640930 - RNA, 19 nt, Artificial Sequence
  Description of Artificial Sequence: Synthetic oligonucleotide
  Sense strand starting at position 920 of SEQ ID NO: 585451
auggauuugugcuuacucu

SEQ ID NO: 640931 - RNA, 19 nt, Artificial Sequence
  Description of Artificial Sequence: Synthetic oligonucleotide
  Antisense strand to SEQ ID NO: 640930
agaguaagcacaaauccau

SEQ ID NO: 640932 - RNA, 19 nt, Artificial Sequence
  Description of Artificial Sequence: Synthetic oligonucleotide
  Sense strand starting at position 926 of SEQ ID NO: 585451
uugugcuuacucuaagauc

SEQ ID NO: 640933 - RNA, 19 nt, Artificial Sequence
  Description of Artificial Sequence: Synthetic oligonucleotide
  Antisense strand to SEQ ID NO: 640932
gaucuuagaguaagcacaa

SEQ ID NO: 640934 - RNA, 19 nt, Artificial Sequence
  Description of Artificial Sequence: Synthetic oligonucleotide
  Sense strand starting at position 1063 of SEQ ID NO: 585451
gguauaccuguuugaagua

SEQ ID NO: 640935 - RNA, 19 nt, Artificial Sequence
  Description of Artificial Sequence: Synthetic oligonucleotide
  Antisense strand to SEQ ID NO: 640934
uacuucaaacagguauacc

SEQ ID NO: 640936 - RNA, 19 nt, Artificial Sequence
  Description of Artificial Sequence: Synthetic oligonucleotide
  Sense strand starting at position 1075 of SEQ ID NO: 585451
ugaaguauuugguauacau

SEQ ID NO: 640937 - RNA, 19 nt, Artificial Sequence
  Description of Artificial Sequence: Synthetic oligonucleotide
  Antisense strand to SEQ ID NO: 640936
auguauaccaaauacuuca

SEQ ID NO: 640938 - RNA, 19 nt, Artificial Sequence
  Description of Artificial Sequence: Synthetic oligonucleotide
  Sense strand starting at position 1085 of SEQ ID NO: 585451
gguauacaucugugaacca

SEQ ID NO: 640939 - RNA, 19 nt, Artificial Sequence
  Description of Artificial Sequence: Synthetic oligonucleotide
  Antisense strand to SEQ ID NO: 640938
ugguucacagauguauacc

SEQ ID NO: 640940 - RNA, 19 nt, Artificial Sequence
  Description of Artificial Sequence: Synthetic oligonucleotide
  Sense strand starting at position 1435 of SEQ ID NO: 585451
aguauuacaguccgagaag

SEQ ID NO: 640941 - RNA, 19 nt, Artificial Sequence
  Description of Artificial Sequence: Synthetic oligonucleotide
  Antisense strand to SEQ ID NO: 640940
cuucucggacuguaauacu

SEQ ID NO: 640942 - RNA, 19 nt, Artificial Sequence
  Description of Artificial Sequence: Synthetic oligonucleotide
  Sense strand starting at position 1747 of SEQ ID NO: 585451
ggcugcugagaucaguuaa

SEQ ID NO: 640943 - RNA, 19 nt, Artificial Sequence
  Description of Artificial Sequence: Synthetic oligonucleotide
  Antisense strand to SEQ ID NO: 640942
uuaacugaucucagcagcc

SEQ ID NO: 640944 - RNA, 19 nt, Artificial Sequence
  Description of Artificial Sequence: Synthetic oligonucleotide
  Sense strand starting at position 1760 of SEQ ID NO: 585451
aguuaaugagacgguaauu

SEQ ID NO: 640945 - RNA, 19 nt, Artificial Sequence
  Description of Artificial Sequence: Synthetic oligonucleotide
  Antisense strand to SEQ ID NO: 640944
aauuaccgucucauuaacu

SEQ ID NO: 640946 - RNA, 19 nt, Artificial Sequence
  Description of Artificial Sequence: Synthetic oligonucleotide
  Sense strand starting at position 2129 of SEQ ID NO: 585451
ugguuuguaguagaaguaa

SEQ ID NO: 640947 - RNA, 19 nt, Artificial Sequence
  Description of Artificial Sequence: Synthetic oligonucleotide
  Antisense strand to SEQ ID NO: 640946
uuacuucuacuacaaacca

SEQ ID NO: 640948 - RNA, 19 nt, Artificial Sequence
  Description of Artificial Sequence: Synthetic oligonucleotide
  Sense strand starting at position 2147 of SEQ ID NO: 585451
auaucuuucuuccugggaa

SEQ ID NO: 640949 - RNA, 19 nt, Artificial Sequence
  Description of Artificial Sequence: Synthetic oligonucleotide
  Antisense strand to SEQ ID NO: 640948
uucccaggaagaaagauau

SEQ ID NO: 640950 - RNA, 19 nt, Artificial Sequence
  Description of Artificial Sequence: Synthetic oligonucleotide
  Sense strand starting at position 2149 of SEQ ID NO: 585451
aucuuucuuccugggaaua

SEQ ID NO: 640951 - RNA, 19 nt, Artificial Sequence
  Description of Artificial Sequence: Synthetic oligonucleotide
  Antisense strand to SEQ ID NO: 640950
uauucccaggaagaaagau

SEQ ID NO: 640952 - RNA, 19 nt, Artificial Sequence
  Description of Artificial Sequence: Synthetic oligonucleotide
  Sense strand starting at position 2150 of SEQ ID NO: 585451
ucuuucuuccugggaauac

SEQ ID NO: 640953 - RNA, 19 nt, Artificial Sequence
  Description of Artificial Sequence: Synthetic oligonucleotide
  Antisense strand to SEQ ID NO: 640952
guauucccaggaagaaaga

SEQ ID NO: 640954 - RNA, 19 nt, Artificial Sequence
  Description of Artificial Sequence: Synthetic oligonucleotide
  Sense strand starting at position 2162 of SEQ ID NO: 585451
ggaauacgucucugacgga

SEQ ID NO: 640955 - RNA, 19 nt, Artificial Sequence
  Description of Artificial Sequence: Synthetic oligonucleotide
  Antisense strand to SEQ ID NO: 640954
uccgucagagacguauucc

SEQ ID NO: 640956 - RNA, 19 nt, Artificial Sequence
  Description of Artificial Sequence: Synthetic oligonucleotide
  Sense strand starting at position 2212 of SEQ ID NO: 585451
ccuaaagaucuguagucga

SEQ ID NO: 640957 - RNA, 19 nt, Artificial Sequence
  Description of Artificial Sequence: Synthetic oligonucleotide
  Antisense strand to SEQ ID NO: 640956
ucgacuacagaucuuuagg

SEQ ID NO: 640958 - RNA, 19 nt, Artificial Sequence
  Description of Artificial Sequence: Synthetic oligonucleotide
  Sense strand starting at position 2215 of SEQ ID NO: 585451
aaagaucuguagucgaaca

SEQ ID NO: 640959 - RNA, 19 nt, Artificial Sequence
  Description of Artificial Sequence: Synthetic oligonucleotide
  Antisense strand to SEQ ID NO: 640958
uguucgacuacagaucuuu

SEQ ID NO: 640960 - RNA, 19 nt, Artificial Sequence
  Description of Artificial Sequence: Synthetic oligonucleotide
  Sense strand starting at position 2217 of SEQ ID NO: 585451
agaucuguagucgaacaga

SEQ ID NO: 640961 - RNA, 19 nt, Artificial Sequence
  Description of Artificial Sequence: Synthetic oligonucleotide
  Antisense strand to SEQ ID NO: 640960
ucuguucgacuacagaucu

SEQ ID NO: 640962 - RNA, 19 nt, Artificial Sequence
  Description of Artificial Sequence: Synthetic oligonucleotide
  Sense strand starting at position 2220 of SEQ ID NO: 585451
ucuguagucgaacagagaa

SEQ ID NO: 640963 - RNA, 19 nt, Artificial Sequence
  Description of Artificial Sequence: Synthetic oligonucleotide
  Antisense strand to SEQ ID NO: 640962
uucucuguucgacuacaga

SEQ ID NO: 640964 - RNA, 19 nt, Artificial Sequence
  Description of Artificial Sequence: Synthetic oligonucleotide
  Sense strand starting at position 3120 of SEQ ID NO: 585451
ugaaacaaguuaucugauu

SEQ ID NO: 640965 - RNA, 19 nt, Artificial Sequence
  Description of Artificial Sequence: Synthetic oligonucleotide
  Antisense strand to SEQ ID NO: 640964
aaucagauaacuuguuuca

SEQ ID NO: 640966 - RNA, 19 nt, Artificial Sequence
  Description of Artificial Sequence: Synthetic oligonucleotide
  Sense strand starting at position 3121 of SEQ ID NO: 585451
gaaacaaguuaucugauug

SEQ ID NO: 640967 - RNA, 19 nt, Artificial Sequence
  Description of Artificial Sequence: Synthetic oligonucleotide
  Antisense strand to SEQ ID NO: 640966
caaucagauaacuuguuuc

SEQ ID NO: 640968 - RNA, 19 nt, Artificial Sequence
  Description of Artificial Sequence: Synthetic oligonucleotide
  Sense strand starting at position 3125 of SEQ ID NO: 585451
caaguuaucugauugugua

SEQ ID NO: 640969 - RNA, 19 nt, Artificial Sequence
  Description of Artificial Sequence: Synthetic oligonucleotide
  Antisense strand to SEQ ID NO: 640968
uacacaaucagauaacuug

SEQ ID NO: 640970 - RNA, 19 nt, Artificial Sequence
  Description of Artificial Sequence: Synthetic oligonucleotide
  Sense strand starting at position 3236 of SEQ ID NO: 585451
aguugauguucccucauuu

SEQ ID NO: 640971 - RNA, 19 nt, Artificial Sequence
  Description of Artificial Sequence: Synthetic oligonucleotide
  Antisense strand to SEQ ID NO: 640970
aaaugagggaacaucaacu

SEQ ID NO: 640972 - RNA, 19 nt, Artificial Sequence
  Description of Artificial Sequence: Synthetic oligonucleotide
  Sense strand starting at position 3422 of SEQ ID NO: 585451
gaaauacauugaucugugu

SEQ ID NO: 640973 - RNA, 19 nt, Artificial Sequence
  Description of Artificial Sequence: Synthetic oligonucleotide
  Antisense strand to SEQ ID NO: 640972
acacagaucaauguauuuc

SEQ ID NO: 640974 - RNA, 19 nt, Artificial Sequence
  Description of Artificial Sequence: Synthetic oligonucleotide
  Sense strand starting at position 3425 of SEQ ID NO: 585451
auacauugaucugugugau

SEQ ID NO: 640975 - RNA, 19 nt, Artificial Sequence
  Description of Artificial Sequence: Synthetic oligonucleotide
  Antisense strand to SEQ ID NO: 640974
aucacacagaucaauguau

SEQ ID NO: 640976 - RNA, 19 nt, Artificial Sequence
  Description of Artificial Sequence: Synthetic oligonucleotide
  Sense strand starting at position 3426 of SEQ ID NO: 585451
uacauugaucugugugauc

SEQ ID NO: 640977 - RNA, 19 nt, Artificial Sequence
  Description of Artificial Sequence: Synthetic oligonucleotide
  Antisense strand to SEQ ID NO: 640976
gaucacacagaucaaugua

SEQ ID NO: 640978 - RNA, 19 nt, Artificial Sequence
  Description of Artificial Sequence: Synthetic oligonucleotide
  Sense strand starting at position 3431 of SEQ ID NO: 585451
ugaucugugugaucgaaug

SEQ ID NO: 640979 - RNA, 19 nt, Artificial Sequence
  Description of Artificial Sequence: Synthetic oligonucleotide
  Antisense strand to SEQ ID NO: 640978
cauucgaucacacagauca

SEQ ID NO: 640980 - RNA, 19 nt, Artificial Sequence
  Description of Artificial Sequence: Synthetic oligonucleotide
  Sense strand starting at position 3438 of SEQ ID NO: 585451
ugugaucgaaugugaauua

SEQ ID NO: 640981 - RNA, 19 nt, Artificial Sequence
  Description of Artificial Sequence: Synthetic oligonucleotide
  Antisense strand to SEQ ID NO: 640980
uaauucacauucgaucaca

SEQ ID NO: 640982 - RNA, 19 nt, Artificial Sequence
  Description of Artificial Sequence: Synthetic oligonucleotide
  Sense strand starting at position 3449 of SEQ ID NO: 585451
gugaauuaacaaugacguu

SEQ ID NO: 640983 - RNA, 19 nt, Artificial Sequence
  Description of Artificial Sequence: Synthetic oligonucleotide
  Antisense strand to SEQ ID NO: 640982
aacgucauuguuaauucac

SEQ ID NO: 640984 - RNA, 19 nt, Artificial Sequence
  Description of Artificial Sequence: Synthetic oligonucleotide
  Sense strand starting at position 3458 of SEQ ID NO: 585451
caaugacguugacuugaua

SEQ ID NO: 640985 - RNA, 19 nt, Artificial Sequence
  Description of Artificial Sequence: Synthetic oligonucleotide
  Antisense strand to SEQ ID NO: 640984
uaucaagucaacgucauug

SEQ ID NO: 640986 - RNA, 19 nt, Artificial Sequence
  Description of Artificial Sequence: Synthetic oligonucleotide
  Sense strand starting at position 3461 of SEQ ID NO: 585451
ugacguugacuugauacua

SEQ ID NO: 640987 - RNA, 19 nt, Artificial Sequence
  Description of Artificial Sequence: Synthetic oligonucleotide
  Antisense strand to SEQ ID NO: 640986
uaguaucaagucaacguca

SEQ ID NO: 640988 - RNA, 19 nt, Artificial Sequence
  Description of Artificial Sequence: Synthetic oligonucleotide
  Sense strand starting at position 3549 of SEQ ID NO: 585451
gggagcuaauucuuaauca

SEQ ID NO: 640989 - RNA, 19 nt, Artificial Sequence
  Description of Artificial Sequence: Synthetic oligonucleotide
  Antisense strand to SEQ ID NO: 640988
ugauuaagaauuagcuccc

SEQ ID NO: 640990 - RNA, 19 nt, Artificial Sequence
  Description of Artificial Sequence: Synthetic oligonucleotide
  Sense strand starting at position 3742 of SEQ ID NO: 585451
ccaccuggucagugaaauc

SEQ ID NO: 640991 - RNA, 19 nt, Artificial Sequence
  Description of Artificial Sequence: Synthetic oligonucleotide
  Antisense strand to SEQ ID NO: 640990
gauuucacugaccaggugg

SEQ ID NO: 640992 - RNA, 19 nt, Artificial Sequence
  Description of Artificial Sequence: Synthetic oligonucleotide
  Sense strand starting at position 3751 of SEQ ID NO: 585451
cagugaaaucagcgaauug

SEQ ID NO: 640993 - RNA, 19 nt, Artificial Sequence
  Description of Artificial Sequence: Synthetic oligonucleotide
  Antisense strand to SEQ ID NO: 640992
caauucgcugauuucacug

SEQ ID NO: 640994 - RNA, 19 nt, Artificial Sequence
  Description of Artificial Sequence: Synthetic oligonucleotide
  Sense strand starting at position 3752 of SEQ ID NO: 585451
agugaaaucagcgaauuga

SEQ ID NO: 640995 - RNA, 19 nt, Artificial Sequence
  Description of Artificial Sequence: Synthetic oligonucleotide
  Antisense strand to SEQ ID NO: 640994
ucaauucgcugauuucacu

SEQ ID NO: 640996 - RNA, 19 nt, Artificial Sequence
  Description of Artificial Sequence: Synthetic oligonucleotide
  Sense strand starting at position 3845 of SEQ ID NO: 585451
auaguucccuguuugacaa

SEQ ID NO: 640997 - RNA, 19 nt, Artificial Sequence
  Description of Artificial Sequence: Synthetic oligonucleotide
  Antisense strand to SEQ ID NO: 640996
uugucaaacagggaacuau

SEQ ID NO: 640998 - RNA, 19 nt, Artificial Sequence
  Description of Artificial Sequence: Synthetic oligonucleotide
  Sense strand starting at position 16 of SEQ ID NO: 585452
ggcagaaacaguugagaca

SEQ ID NO: 640999 - RNA, 19 nt, Artificial Sequence
  Description of Artificial Sequence: Synthetic oligonucleotide
  Antisense strand to SEQ ID NO: 640998
ugucucaacuguuucugcc

SEQ ID NO: 641000 - RNA, 19 nt, Artificial Sequence
  Description of Artificial Sequence: Synthetic oligonucleotide
  Sense strand starting at position 1077 of SEQ ID NO: 585452
cguggaacugucugaauaa

SEQ ID NO: 641001 - RNA, 19 nt, Artificial Sequence
  Description of Artificial Sequence: Synthetic oligonucleotide
  Antisense strand to SEQ ID NO: 641000
uuauucagacaguuccacg

SEQ ID NO: 641002 - RNA, 19 nt, Artificial Sequence
  Description of Artificial Sequence: Synthetic oligonucleotide
  Sense strand starting at position 1078 of SEQ ID NO: 585452
guggaacugucugaauaau

SEQ ID NO: 641003 - RNA, 19 nt, Artificial Sequence
  Description of Artificial Sequence: Synthetic oligonucleotide
  Antisense strand to SEQ ID NO: 641002
auuauucagacaguuccac

SEQ ID NO: 641004 - RNA, 19 nt, Artificial Sequence
  Description of Artificial Sequence: Synthetic oligonucleotide
  Sense strand starting at position 1121 of SEQ ID NO: 585452
caaagaugggcgcgaucaa

SEQ ID NO: 641005 - RNA, 19 nt, Artificial Sequence
  Description of Artificial Sequence: Synthetic oligonucleotide
  Antisense strand to SEQ ID NO: 641004
uugaucgcgcccaucuuug

SEQ ID NO: 641006 - RNA, 19 nt, Artificial Sequence
  Description of Artificial Sequence: Synthetic oligonucleotide
  Sense strand starting at position 1133 of SEQ ID NO: 585452
cgaucaaguuucucaguca

SEQ ID NO: 641007 - RNA, 19 nt, Artificial Sequence
  Description of Artificial Sequence: Synthetic oligonucleotide
  Antisense strand to SEQ ID NO: 641006
ugacugagaaacuugaucg

SEQ ID NO: 641008 - RNA, 19 nt, Artificial Sequence
  Description of Artificial Sequence: Synthetic oligonucleotide
  Sense strand starting at position 1136 of SEQ ID NO: 585452
ucaaguuucucagucacgu

SEQ ID NO: 641009 - RNA, 19 nt, Artificial Sequence
  Description of Artificial Sequence: Synthetic oligonucleotide
  Antisense strand to SEQ ID NO: 641008
acgugacugagaaacuuga

SEQ ID NO: 641010 - RNA, 19 nt, Artificial Sequence
  Description of Artificial Sequence: Synthetic oligonucleotide
  Sense strand starting at position 1237 of SEQ ID NO: 585452
agaguugucuguccgggaa

SEQ ID NO: 641011 - RNA, 19 nt, Artificial Sequence
  Description of Artificial Sequence: Synthetic oligonucleotide
  Antisense strand to SEQ ID NO: 641010
uucccggacagacaacucu

SEQ ID NO: 641012 - RNA, 19 nt, Artificial Sequence
  Description of Artificial Sequence: Synthetic oligonucleotide
  Sense strand starting at position 1239 of SEQ ID NO: 585452
aguugucuguccgggaaau

SEQ ID NO: 641013 - RNA, 19 nt, Artificial Sequence
  Description of Artificial Sequence: Synthetic oligonucleotide
  Antisense strand to SEQ ID NO: 641012
auuucccggacagacaacu

SEQ ID NO: 641014 - RNA, 19 nt, Artificial Sequence
  Description of Artificial Sequence: Synthetic oligonucleotide
  Sense strand starting at position 1240 of SEQ ID NO: 585452
guugucuguccgggaaauc

SEQ ID NO: 641015 - RNA, 19 nt, Artificial Sequence
  Description of Artificial Sequence: Synthetic oligonucleotide
  Antisense strand to SEQ ID NO: 641014
gauuucccggacagacaac

SEQ ID NO: 641016 - RNA, 19 nt, Artificial Sequence
  Description of Artificial Sequence: Synthetic oligonucleotide
  Sense strand starting at position 1251 of SEQ ID NO: 585452
gggaaauccgguuagugac

SEQ ID NO: 641017 - RNA, 19 nt, Artificial Sequence
  Description of Artificial Sequence: Synthetic oligonucleotide
  Antisense strand to SEQ ID NO: 641016
gucacuaaccggauuuccc

SEQ ID NO: 641018 - RNA, 19 nt, Artificial Sequence
  Description of Artificial Sequence: Synthetic oligonucleotide
  Sense strand starting at position 1326 of SEQ ID NO: 585452
accagcugugcgugggaau

SEQ ID NO: 641019 - RNA, 19 nt, Artificial Sequence
  Description of Artificial Sequence: Synthetic oligonucleotide
  Antisense strand to SEQ ID NO: 641018
auucccacgcacagcuggu

SEQ ID NO: 641020 - RNA, 19 nt, Artificial Sequence
  Description of Artificial Sequence: Synthetic oligonucleotide
  Sense strand starting at position 1336 of SEQ ID NO: 585452
cgugggaaugugugucaga

SEQ ID NO: 641021 - RNA, 19 nt, Artificial Sequence
  Description of Artificial Sequence: Synthetic oligonucleotide
  Antisense strand to SEQ ID NO: 641020
ucugacacacauucccacg

SEQ ID NO: 641022 - RNA, 19 nt, Artificial Sequence
  Description of Artificial Sequence: Synthetic oligonucleotide
  Sense strand starting at position 1337 of SEQ ID NO: 585452
gugggaaugugugucagaa

SEQ ID NO: 641023 - RNA, 19 nt, Artificial Sequence
  Description of Artificial Sequence: Synthetic oligonucleotide
  Antisense strand to SEQ ID NO: 641022
uucugacacacauucccac

SEQ ID NO: 641024 - RNA, 19 nt, Artificial Sequence
  Description of Artificial Sequence: Synthetic oligonucleotide
  Sense strand starting at position 2301 of SEQ ID NO: 585452
ccguuuccucccgcguaua

SEQ ID NO: 641025 - RNA, 19 nt, Artificial Sequence
  Description of Artificial Sequence: Synthetic oligonucleotide
  Antisense strand to SEQ ID NO: 641024
uauacgcgggaggaaacgg

SEQ ID NO: 641026 - RNA, 19 nt, Artificial Sequence
  Description of Artificial Sequence: Synthetic oligonucleotide
  Sense strand starting at position 2363 of SEQ ID NO: 585452
ccugcuuucucgucucaau

SEQ ID NO: 641027 - RNA, 19 nt, Artificial Sequence
  Description of Artificial Sequence: Synthetic oligonucleotide
  Antisense strand to SEQ ID NO: 641026
auugagacgagaaagcagg

SEQ ID NO: 641028 - RNA, 19 nt, Artificial Sequence
  Description of Artificial Sequence: Synthetic oligonucleotide
  Sense strand starting at position 2366 of SEQ ID NO: 585452
gcuuucucgucucaaucca

SEQ ID NO: 641029 - RNA, 19 nt, Artificial Sequence
  Description of Artificial Sequence: Synthetic oligonucleotide
  Antisense strand to SEQ ID NO: 641028
uggauugagacgagaaagc

SEQ ID NO: 641030 - RNA, 19 nt, Artificial Sequence
  Description of Artificial Sequence: Synthetic oligonucleotide
  Sense strand starting at position 2435 of SEQ ID NO: 585452
ucgccugcuugaucucaaa

SEQ ID NO: 641031 - RNA, 19 nt, Artificial Sequence
  Description of Artificial Sequence: Synthetic oligonucleotide
  Antisense strand to SEQ ID NO: 641030
uuugagaucaagcaggcga

SEQ ID NO: 641032 - RNA, 19 nt, Artificial Sequence
  Description of Artificial Sequence: Synthetic oligonucleotide
  Sense strand starting at position 2458 of SEQ ID NO: 585452
cucugaaucuggcccagua

SEQ ID NO: 641033 - RNA, 19 nt, Artificial Sequence
  Description of Artificial Sequence: Synthetic oligonucleotide
  Antisense strand to SEQ ID NO: 641032
uacugggccagauucagag

SEQ ID NO: 641034 - RNA, 19 nt, Artificial Sequence
  Description of Artificial Sequence: Synthetic oligonucleotide
  Sense strand starting at position 2523 of SEQ ID NO: 585452
cacgcaugcugguuauaca

SEQ ID NO: 641035 - RNA, 19 nt, Artificial Sequence
  Description of Artificial Sequence: Synthetic oligonucleotide
  Antisense strand to SEQ ID NO: 641034
uguauaaccagcaugcgug

SEQ ID NO: 641036 - RNA, 19 nt, Artificial Sequence
  Description of Artificial Sequence: Synthetic oligonucleotide
  Sense strand starting at position 2534 of SEQ ID NO: 585452
guuauacaggugugcucau

SEQ ID NO: 641037 - RNA, 19 nt, Artificial Sequence
  Description of Artificial Sequence: Synthetic oligonucleotide
  Antisense strand to SEQ ID NO: 641036
augagcacaccuguauaac

SEQ ID NO: 641038 - RNA, 19 nt, Artificial Sequence
  Description of Artificial Sequence: Synthetic oligonucleotide
  Sense strand starting at position 2571 of SEQ ID NO: 585452
gcugaacauuuaugaugca

SEQ ID NO: 641039 - RNA, 19 nt, Artificial Sequence
  Description of Artificial Sequence: Synthetic oligonucleotide
  Antisense strand to SEQ ID NO: 641038
ugcaucauaaauguucagc

SEQ ID NO: 641040 - RNA, 19 nt, Artificial Sequence
  Description of Artificial Sequence: Synthetic oligonucleotide
  Sense strand starting at position 2588 of SEQ ID NO: 585452
caggcacuuguuuguauga

SEQ ID NO: 641041 - RNA, 19 nt, Artificial Sequence
  Description of Artificial Sequence: Synthetic oligonucleotide
  Antisense strand to SEQ ID NO: 641040
ucauacaaacaagugccug

SEQ ID NO: 641042 - RNA, 19 nt, Artificial Sequence
  Description of Artificial Sequence: Synthetic oligonucleotide
  Sense strand starting at position 2590 of SEQ ID NO: 585452
ggcacuuguuuguaugacu

SEQ ID NO: 641043 - RNA, 19 nt, Artificial Sequence
  Description of Artificial Sequence: Synthetic oligonucleotide
  Antisense strand to SEQ ID NO: 641042
agucauacaaacaagugcc

SEQ ID NO: 641044 - RNA, 19 nt, Artificial Sequence
  Description of Artificial Sequence: Synthetic oligonucleotide
  Sense strand starting at position 2593 of SEQ ID NO: 585452
acuuguuuguaugacuauu

SEQ ID NO: 641045 - RNA, 19 nt, Artificial Sequence
  Description of Artificial Sequence: Synthetic oligonucleotide
  Antisense strand to SEQ ID NO: 641044
aauagucauacaaacaagu

SEQ ID NO: 641046 - RNA, 19 nt, Artificial Sequence
  Description of Artificial Sequence: Synthetic oligonucleotide
  Sense strand starting at position 2601 of SEQ ID NO: 585452
guaugacuauuauacuuga

SEQ ID NO: 641047 - RNA, 19 nt, Artificial Sequence
  Description of Artificial Sequence: Synthetic oligonucleotide
  Antisense strand to SEQ ID NO: 641046
ucaaguauaauagucauac

SEQ ID NO: 641048 - RNA, 19 nt, Artificial Sequence
  Description of Artificial Sequence: Synthetic oligonucleotide
  Sense strand starting at position 2751 of SEQ ID NO: 585452
gggaaaucccuuugccucu

SEQ ID NO: 641049 - RNA, 19 nt, Artificial Sequence
  Description of Artificial Sequence: Synthetic oligonucleotide
  Antisense strand to SEQ ID NO: 641048
agaggcaaagggauuuccc

SEQ ID NO: 641050 - RNA, 19 nt, Artificial Sequence
  Description of Artificial Sequence: Synthetic oligonucleotide
  Sense strand starting at position 2833 of SEQ ID NO: 585452
ucaccuggugugcaagauu

SEQ ID NO: 641051 - RNA, 19 nt, Artificial Sequence
  Description of Artificial Sequence: Synthetic oligonucleotide
  Antisense strand to SEQ ID NO: 641050
aaucuugcacaccagguga

SEQ ID NO: 641052 - RNA, 19 nt, Artificial Sequence
  Description of Artificial Sequence: Synthetic oligonucleotide
  Sense strand starting at position 3127 of SEQ ID NO: 585452
ugcccagacugaugaggaa

SEQ ID NO: 641053 - RNA, 19 nt, Artificial Sequence
  Description of Artificial Sequence: Synthetic oligonucleotide
  Antisense strand to SEQ ID NO: 641052
uuccucaucagucugggca

SEQ ID NO: 641054 - RNA, 19 nt, Artificial Sequence
  Description of Artificial Sequence: Synthetic oligonucleotide
  Sense strand starting at position 3130 of SEQ ID NO: 585452
ccagacugaugaggaauau

SEQ ID NO: 641055 - RNA, 19 nt, Artificial Sequence
  Description of Artificial Sequence: Synthetic oligonucleotide
  Antisense strand to SEQ ID NO: 641054
auauuccucaucagucugg

SEQ ID NO: 641056 - RNA, 19 nt, Artificial Sequence
  Description of Artificial Sequence: Synthetic oligonucleotide
  Sense strand starting at position 3254 of SEQ ID NO: 585452
gguaauuaaucacgcaagu

SEQ ID NO: 641057 - RNA, 19 nt, Artificial Sequence
  Description of Artificial Sequence: Synthetic oligonucleotide
  Antisense strand to SEQ ID NO: 641056
acuugcgugauuaauuacc

SEQ ID NO: 641058 - RNA, 19 nt, Artificial Sequence
  Description of Artificial Sequence: Synthetic oligonucleotide
  Sense strand starting at position 3278 of SEQ ID NO: 585452
gucagauccugucuuuauc

SEQ ID NO: 641059 - RNA, 19 nt, Artificial Sequence
  Description of Artificial Sequence: Synthetic oligonucleotide
  Antisense strand to SEQ ID NO: 641058
gauaaagacaggaucugac

SEQ ID NO: 641060 - RNA, 19 nt, Artificial Sequence
  Description of Artificial Sequence: Synthetic oligonucleotide
  Sense strand starting at position 3479 of SEQ ID NO: 585452
guuauugucucuuccugaa

SEQ ID NO: 641061 - RNA, 19 nt, Artificial Sequence
  Description of Artificial Sequence: Synthetic oligonucleotide
  Antisense strand to SEQ ID NO: 641060
uucaggaagagacaauaac

SEQ ID NO: 641062 - RNA, 19 nt, Artificial Sequence
  Description of Artificial Sequence: Synthetic oligonucleotide
  Sense strand starting at position 3482 of SEQ ID NO: 585452
auugucucuuccugaagga

SEQ ID NO: 641063 - RNA, 19 nt, Artificial Sequence
  Description of Artificial Sequence: Synthetic oligonucleotide
  Antisense strand to SEQ ID NO: 641062
uccuucaggaagagacaau

SEQ ID NO: 641064 - RNA, 19 nt, Artificial Sequence
  Description of Artificial Sequence: Synthetic oligonucleotide
  Sense strand starting at position 3506 of SEQ ID NO: 585452
ccaggaagccaggguaaau

SEQ ID NO: 641065 - RNA, 19 nt, Artificial Sequence
  Description of Artificial Sequence: Synthetic oligonucleotide
  Antisense strand to SEQ ID NO: 641064
auuuacccuggcuuccugg

SEQ ID NO: 641066 - RNA, 19 nt, Artificial Sequence
  Description of Artificial Sequence: Synthetic oligonucleotide
  Sense strand starting at position 3652 of SEQ ID NO: 585452
gcgcaaagucccucagucu

SEQ ID NO: 641067 - RNA, 19 nt, Artificial Sequence
  Description of Artificial Sequence: Synthetic oligonucleotide
  Antisense strand to SEQ ID NO: 641066
agacugagggacuuugcgc

SEQ ID NO: 641068 - RNA, 19 nt, Artificial Sequence
  Description of Artificial Sequence: Synthetic oligonucleotide
  Sense strand starting at position 3793 of SEQ ID NO: 585452
gcucuuuccucugcccaga

SEQ ID NO: 641069 - RNA, 19 nt, Artificial Sequence
  Description of Artificial Sequence: Synthetic oligonucleotide
  Antisense strand to SEQ ID NO: 641068
ucugggcagaggaaagagc

SEQ ID NO: 641070 - RNA, 19 nt, Artificial Sequence
  Description of Artificial Sequence: Synthetic oligonucleotide
  Sense strand starting at position 3850 of SEQ ID NO: 585452
guuucuucugcuuauguca

SEQ ID NO: 641071 - RNA, 19 nt, Artificial Sequence
  Description of Artificial Sequence: Synthetic oligonucleotide
  Antisense strand to SEQ ID NO: 641070
ugacauaagcagaagaaac

SEQ ID NO: 641072 - RNA, 19 nt, Artificial Sequence
  Description of Artificial Sequence: Synthetic oligonucleotide
  Sense strand starting at position 3857 of SEQ ID NO: 585452
cugcuuaugucagcuucua

SEQ ID NO: 641073 - RNA, 19 nt, Artificial Sequence
  Description of Artificial Sequence: Synthetic oligonucleotide
  Antisense strand to SEQ ID NO: 641072
uagaagcugacauaagcag

SEQ ID NO: 641074 - RNA, 19 nt, Artificial Sequence
  Description of Artificial Sequence: Synthetic oligonucleotide
  Sense strand starting at position 3862 of SEQ ID NO: 585452
uaugucagcuucuaagaga

SEQ ID NO: 641075 - RNA, 19 nt, Artificial Sequence
  Description of Artificial Sequence: Synthetic oligonucleotide
  Antisense strand to SEQ ID NO: 641074
ucucuuagaagcugacaua

SEQ ID NO: 641076 - RNA, 19 nt, Artificial Sequence
  Description of Artificial Sequence: Synthetic oligonucleotide
  Sense strand starting at position 3968 of SEQ ID NO: 585452
gcucaucuguugguagagu

SEQ ID NO: 641077 - RNA, 19 nt, Artificial Sequence
  Description of Artificial Sequence: Synthetic oligonucleotide
  Antisense strand to SEQ ID NO: 641076
acucuaccaacagaugagc

SEQ ID NO: 641078 - RNA, 19 nt, Artificial Sequence
  Description of Artificial Sequence: Synthetic oligonucleotide
  Sense strand starting at position 186 of SEQ ID NO: 585453
ggagaaagcuggagagagu

SEQ ID NO: 641079 - RNA, 19 nt, Artificial Sequence
  Description of Artificial Sequence: Synthetic oligonucleotide
  Antisense strand to SEQ ID NO: 641078
acucucuccagcuuucucc

SEQ ID NO: 641080 - RNA, 19 nt, Artificial Sequence
  Description of Artificial Sequence: Synthetic oligonucleotide
  Sense strand starting at position 458 of SEQ ID NO: 585453
cuggcuguuggccagacau

SEQ ID NO: 641081 - RNA, 19 nt, Artificial Sequence
  Description of Artificial Sequence: Synthetic oligonucleotide
  Antisense strand to SEQ ID NO: 641080
augucuggccaacagccag

SEQ ID NO: 641082 - RNA, 19 nt, Artificial Sequence
  Description of Artificial Sequence: Synthetic oligonucleotide
  Sense strand starting at position 460 of SEQ ID NO: 585453
ggcuguuggccagacaucu

SEQ ID NO: 641083 - RNA, 19 nt, Artificial Sequence
  Description of Artificial Sequence: Synthetic oligonucleotide
  Antisense strand to SEQ ID NO: 641082
agaugucuggccaacagcc

SEQ ID NO: 641084 - RNA, 19 nt, Artificial Sequence
  Description of Artificial Sequence: Synthetic oligonucleotide
  Sense strand starting at position 651 of SEQ ID NO: 585453
gggaguucgugucagaggu

SEQ ID NO: 641085 - RNA, 19 nt, Artificial Sequence
  Description of Artificial Sequence: Synthetic oligonucleotide
  Antisense strand to SEQ ID NO: 641084
accucugacacgaacuccc

SEQ ID NO: 641086 - RNA, 19 nt, Artificial Sequence
  Description of Artificial Sequence: Synthetic oligonucleotide
  Sense strand starting at position 652 of SEQ ID NO: 585453
ggaguucgugucagagguu

SEQ ID NO: 641087 - RNA, 19 nt, Artificial Sequence
  Description of Artificial Sequence: Synthetic oligonucleotide
  Antisense strand to SEQ ID NO: 641086
aaccucugacacgaacucc

SEQ ID NO: 641088 - RNA, 19 nt, Artificial Sequence
  Description of Artificial Sequence: Synthetic oligonucleotide
  Sense strand starting at position 742 of SEQ ID NO: 585453
cgacuuagacaguggagau

SEQ ID NO: 641089 - RNA, 19 nt, Artificial Sequence
  Description of Artificial Sequence: Synthetic oligonucleotide
  Antisense strand to SEQ ID NO: 641088
aucuccacugucuaagucg

SEQ ID NO: 641090 - RNA, 19 nt, Artificial Sequence
  Description of Artificial Sequence: Synthetic oligonucleotide
  Sense strand starting at position 827 of SEQ ID NO: 585453
guuccugacuucuccuuga

SEQ ID NO: 641091 - RNA, 19 nt, Artificial Sequence
  Description of Artificial Sequence: Synthetic oligonucleotide
  Antisense strand to SEQ ID NO: 641090
ucaaggagaagucaggaac

SEQ ID NO: 641092 - RNA, 19 nt, Artificial Sequence
  Description of Artificial Sequence: Synthetic oligonucleotide
  Sense strand starting at position 862 of SEQ ID NO: 585453
ggagcuucggcuuaggcau

SEQ ID NO: 641093 - RNA, 19 nt, Artificial Sequence
  Description of Artificial Sequence: Synthetic oligonucleotide
  Antisense strand to SEQ ID NO: 641092
augccuaagccgaagcucc

SEQ ID NO: 641094 - RNA, 19 nt, Artificial Sequence
  Description of Artificial Sequence: Synthetic oligonucleotide
  Sense strand starting at position 955 of SEQ ID NO: 585453
aaccguacuuggcgugaga

SEQ ID NO: 641095 - RNA, 19 nt, Artificial Sequence
  Description of Artificial Sequence: Synthetic oligonucleotide
  Antisense strand to SEQ ID NO: 641094
ucucacgccaaguacgguu

SEQ ID NO: 641096 - RNA, 19 nt, Artificial Sequence
  Description of Artificial Sequence: Synthetic oligonucleotide
  Sense strand starting at position 1296 of SEQ ID NO: 585453
ggcagaaacaguugagaca

SEQ ID NO: 641097 - RNA, 19 nt, Artificial Sequence
  Description of Artificial Sequence: Synthetic oligonucleotide
  Antisense strand to SEQ ID NO: 641096
ugucucaacuguuucugcc

SEQ ID NO: 641098 - RNA, 19 nt, Artificial Sequence
  Description of Artificial Sequence: Synthetic oligonucleotide
  Sense strand starting at position 2357 of SEQ ID NO: 585453
cguggaacugucugaauaa

SEQ ID NO: 641099 - RNA, 19 nt, Artificial Sequence
  Description of Artificial Sequence: Synthetic oligonucleotide
  Antisense strand to SEQ ID NO: 641098
uuauucagacaguuccacg

SEQ ID NO: 641100 - RNA, 19 nt, Artificial Sequence
  Description of Artificial Sequence: Synthetic oligonucleotide
  Sense strand starting at position 2358 of SEQ ID NO: 585453
guggaacugucugaauaau

SEQ ID NO: 641101 - RNA, 19 nt, Artificial Sequence
  Description of Artificial Sequence: Synthetic oligonucleotide
  Antisense strand to SEQ ID NO: 641100
auuauucagacaguuccac

SEQ ID NO: 641102 - RNA, 19 nt, Artificial Sequence
  Description of Artificial Sequence: Synthetic oligonucleotide
  Sense strand starting at position 2401 of SEQ ID NO: 585453
caaagaugggcgcgaucaa

SEQ ID NO: 641103 - RNA, 19 nt, Artificial Sequence
  Description of Artificial Sequence: Synthetic oligonucleotide
  Antisense strand to SEQ ID NO: 641102
uugaucgcgcccaucuuug

SEQ ID NO: 641104 - RNA, 19 nt, Artificial Sequence
  Description of Artificial Sequence: Synthetic oligonucleotide
  Sense strand starting at position 2413 of SEQ ID NO: 585453
cgaucaaguuucucaguca

SEQ ID NO: 641105 - RNA, 19 nt, Artificial Sequence
  Description of Artificial Sequence: Synthetic oligonucleotide
  Antisense strand to SEQ ID NO: 641104
ugacugagaaacuugaucg

SEQ ID NO: 641106 - RNA, 19 nt, Artificial Sequence
  Description of Artificial Sequence: Synthetic oligonucleotide
  Sense strand starting at position 2416 of SEQ ID NO: 585453
ucaaguuucucagucacgu

SEQ ID NO: 641107 - RNA, 19 nt, Artificial Sequence
  Description of Artificial Sequence: Synthetic oligonucleotide
  Antisense strand to SEQ ID NO: 641106
acgugacugagaaacuuga

SEQ ID NO: 641108 - RNA, 19 nt, Artificial Sequence
  Description of Artificial Sequence: Synthetic oligonucleotide
  Sense strand starting at position 2517 of SEQ ID NO: 585453
agaguugucuguccgggaa

SEQ ID NO: 641109 - RNA, 19 nt, Artificial Sequence
  Description of Artificial Sequence: Synthetic oligonucleotide
  Antisense strand to SEQ ID NO: 641108
uucccggacagacaacucu

SEQ ID NO: 641110 - RNA, 19 nt, Artificial Sequence
  Description of Artificial Sequence: Synthetic oligonucleotide
  Sense strand starting at position 2519 of SEQ ID NO: 585453
aguugucuguccgggaaau

SEQ ID NO: 641111 - RNA, 19 nt, Artificial Sequence
  Description of Artificial Sequence: Synthetic oligonucleotide
  Antisense strand to SEQ ID NO: 641110
auuucccggacagacaacu

SEQ ID NO: 641112 - RNA, 19 nt, Artificial Sequence
  Description of Artificial Sequence: Synthetic oligonucleotide
  Sense strand starting at position 2520 of SEQ ID NO: 585453
guugucuguccgggaaauc

SEQ ID NO: 641113 - RNA, 19 nt, Artificial Sequence
  Description of Artificial Sequence: Synthetic oligonucleotide
  Antisense strand to SEQ ID NO: 641112
gauuucccggacagacaac

SEQ ID NO: 641114 - RNA, 19 nt, Artificial Sequence
  Description of Artificial Sequence: Synthetic oligonucleotide
  Sense strand starting at position 2531 of SEQ ID NO: 585453
gggaaauccgguuagugac

SEQ ID NO: 641115 - RNA, 19 nt, Artificial Sequence
  Description of Artificial Sequence: Synthetic oligonucleotide
  Antisense strand to SEQ ID NO: 641114
gucacuaaccggauuuccc

SEQ ID NO: 641116 - RNA, 19 nt, Artificial Sequence
  Description of Artificial Sequence: Synthetic oligonucleotide
  Sense strand starting at position 2606 of SEQ ID NO: 585453
accagcugugcgugggaau

SEQ ID NO: 641117 - RNA, 19 nt, Artificial Sequence
  Description of Artificial Sequence: Synthetic oligonucleotide
  Antisense strand to SEQ ID NO: 641116
auucccacgcacagcuggu

SEQ ID NO: 641118 - RNA, 19 nt, Artificial Sequence
  Description of Artificial Sequence: Synthetic oligonucleotide
  Sense strand starting at position 2616 of SEQ ID NO: 585453
cgugggaaugugugucaga

SEQ ID NO: 641119 - RNA, 19 nt, Artificial Sequence
  Description of Artificial Sequence: Synthetic oligonucleotide
  Antisense strand to SEQ ID NO: 641118
ucugacacacauucccacg

SEQ ID NO: 641120 - RNA, 19 nt, Artificial Sequence
  Description of Artificial Sequence: Synthetic oligonucleotide
  Sense strand starting at position 2617 of SEQ ID NO: 585453
gugggaaugugugucagaa

SEQ ID NO: 641121 - RNA, 19 nt, Artificial Sequence
  Description of Artificial Sequence: Synthetic oligonucleotide
  Antisense strand to SEQ ID NO: 641120
uucugacacacauucccac

SEQ ID NO: 641122 - RNA, 19 nt, Artificial Sequence
  Description of Artificial Sequence: Synthetic oligonucleotide
  Sense strand starting at position 3581 of SEQ ID NO: 585453
ccguuuccucccgcguaua

SEQ ID NO: 641123 - RNA, 19 nt, Artificial Sequence
  Description of Artificial Sequence: Synthetic oligonucleotide
  Antisense strand to SEQ ID NO: 641122
uauacgcgggaggaaacgg

SEQ ID NO: 641124 - RNA, 19 nt, Artificial Sequence
  Description of Artificial Sequence: Synthetic oligonucleotide
  Sense strand starting at position 3643 of SEQ ID NO: 585453
ccugcuuucucgucucaau

SEQ ID NO: 641125 - RNA, 19 nt, Artificial Sequence
  Description of Artificial Sequence: Synthetic oligonucleotide
  Antisense strand to SEQ ID NO: 641124
auugagacgagaaagcagg

SEQ ID NO: 641126 - RNA, 19 nt, Artificial Sequence
  Description of Artificial Sequence: Synthetic oligonucleotide
  Sense strand starting at position 3646 of SEQ ID NO: 585453
gcuuucucgucucaaucca

SEQ ID NO: 641127 - RNA, 19 nt, Artificial Sequence
  Description of Artificial Sequence: Synthetic oligonucleotide
  Antisense strand to SEQ ID NO: 641126
uggauugagacgagaaagc

SEQ ID NO: 641128 - RNA, 19 nt, Artificial Sequence
  Description of Artificial Sequence: Synthetic oligonucleotide
  Sense strand starting at position 3715 of SEQ ID NO: 585453
ucgccugcuugaucucaaa

SEQ ID NO: 641129 - RNA, 19 nt, Artificial Sequence
  Description of Artificial Sequence: Synthetic oligonucleotide
  Antisense strand to SEQ ID NO: 641128
uuugagaucaagcaggcga

SEQ ID NO: 641130 - RNA, 19 nt, Artificial Sequence
  Description of Artificial Sequence: Synthetic oligonucleotide
  Sense strand starting at position 3738 of SEQ ID NO: 585453
cucugaaucuggcccagua

SEQ ID NO: 641131 - RNA, 19 nt, Artificial Sequence
  Description of Artificial Sequence: Synthetic oligonucleotide
  Antisense strand to SEQ ID NO: 641130
uacugggccagauucagag

SEQ ID NO: 641132 - RNA, 19 nt, Artificial Sequence
  Description of Artificial Sequence: Synthetic oligonucleotide
  Sense strand starting at position 3803 of SEQ ID NO: 585453
cacgcaugcugguuauaca

SEQ ID NO: 641133 - RNA, 19 nt, Artificial Sequence
  Description of Artificial Sequence: Synthetic oligonucleotide
  Antisense strand to SEQ ID NO: 641132
uguauaaccagcaugcgug

SEQ ID NO: 641134 - RNA, 19 nt, Artificial Sequence
  Description of Artificial Sequence: Synthetic oligonucleotide
  Sense strand starting at position 3814 of SEQ ID NO: 585453
guuauacaggugugcucau

SEQ ID NO: 641135 - RNA, 19 nt, Artificial Sequence
  Description of Artificial Sequence: Synthetic oligonucleotide
  Antisense strand to SEQ ID NO: 641134
augagcacaccuguauaac

SEQ ID NO: 641136 - RNA, 19 nt, Artificial Sequence
  Description of Artificial Sequence: Synthetic oligonucleotide
  Sense strand starting at position 3851 of SEQ ID NO: 585453
gcugaacauuuaugaugca

SEQ ID NO: 641137 - RNA, 19 nt, Artificial Sequence
  Description of Artificial Sequence: Synthetic oligonucleotide
  Antisense strand to SEQ ID NO: 641136
ugcaucauaaauguucagc

SEQ ID NO: 641138 - RNA, 19 nt, Artificial Sequence
  Description of Artificial Sequence: Synthetic oligonucleotide
  Sense strand starting at position 3868 of SEQ ID NO: 585453
caggcacuuguuuguauga

SEQ ID NO: 641139 - RNA, 19 nt, Artificial Sequence
  Description of Artificial Sequence: Synthetic oligonucleotide
  Antisense strand to SEQ ID NO: 641138
ucauacaaacaagugccug

SEQ ID NO: 641140 - RNA, 19 nt, Artificial Sequence
  Description of Artificial Sequence: Synthetic oligonucleotide
  Sense strand starting at position 3870 of SEQ ID NO: 585453
ggcacuuguuuguaugacu

SEQ ID NO: 641141 - RNA, 19 nt, Artificial Sequence
  Description of Artificial Sequence: Synthetic oligonucleotide
  Antisense strand to SEQ ID NO: 641140
agucauacaaacaagugcc

SEQ ID NO: 641142 - RNA, 19 nt, Artificial Sequence
  Description of Artificial Sequence: Synthetic oligonucleotide
  Sense strand starting at position 3873 of SEQ ID NO: 585453
acuuguuuguaugacuauu

SEQ ID NO: 641143 - RNA, 19 nt, Artificial Sequence
  Description of Artificial Sequence: Synthetic oligonucleotide
  Antisense strand to SEQ ID NO: 641142
aauagucauacaaacaagu

SEQ ID NO: 641144 - RNA, 19 nt, Artificial Sequence
  Description of Artificial Sequence: Synthetic oligonucleotide
  Sense strand starting at position 3881 of SEQ ID NO: 585453
guaugacuauuauacuuga

SEQ ID NO: 641145 - RNA, 19 nt, Artificial Sequence
  Description of Artificial Sequence: Synthetic oligonucleotide
  Antisense strand to SEQ ID NO: 641144
ucaaguauaauagucauac

SEQ ID NO: 641146 - RNA, 19 nt, Artificial Sequence
  Description of Artificial Sequence: Synthetic oligonucleotide
  Sense strand starting at position 88 of SEQ ID NO: 585454
gggaugguggcugaaugua

SEQ ID NO: 641147 - RNA, 19 nt, Artificial Sequence
  Description of Artificial Sequence: Synthetic oligonucleotide
  Antisense strand to SEQ ID NO: 641146
uacauucagccaccauccc

SEQ ID NO: 641148 - RNA, 19 nt, Artificial Sequence
  Description of Artificial Sequence: Synthetic oligonucleotide
  Sense strand starting at position 97 of SEQ ID NO: 585454
gcugaauguaucugugugu

SEQ ID NO: 641149 - RNA, 19 nt, Artificial Sequence
  Description of Artificial Sequence: Synthetic oligonucleotide
  Antisense strand to SEQ ID NO: 641148
acacacagauacauucagc

SEQ ID NO: 641150 - RNA, 19 nt, Artificial Sequence
  Description of Artificial Sequence: Synthetic oligonucleotide
  Sense strand starting at position 240 of SEQ ID NO: 585454
uccugaucagggugucaag

SEQ ID NO: 641151 - RNA, 19 nt, Artificial Sequence
  Description of Artificial Sequence: Synthetic oligonucleotide
  Antisense strand to SEQ ID NO: 641150
cuugacacccugaucagga

SEQ ID NO: 641152 - RNA, 19 nt, Artificial Sequence
  Description of Artificial Sequence: Synthetic oligonucleotide
  Sense strand starting at position 251 of SEQ ID NO: 585454
gugucaagcccugaguaga

SEQ ID NO: 641153 - RNA, 19 nt, Artificial Sequence
  Description of Artificial Sequence: Synthetic oligonucleotide
  Antisense strand to SEQ ID NO: 641152
ucuacucagggcuugacac

SEQ ID NO: 641154 - RNA, 19 nt, Artificial Sequence
  Description of Artificial Sequence: Synthetic oligonucleotide
  Sense strand starting at position 406 of SEQ ID NO: 585454
acgagguuucggugcaagu

SEQ ID NO: 641155 - RNA, 19 nt, Artificial Sequence
  Description of Artificial Sequence: Synthetic oligonucleotide
  Antisense strand to SEQ ID NO: 641154
acuugcaccgaaaccucgu

SEQ ID NO: 641156 - RNA, 19 nt, Artificial Sequence
  Description of Artificial Sequence: Synthetic oligonucleotide
  Sense strand starting at position 407 of SEQ ID NO: 585454
cgagguuucggugcaaguc

SEQ ID NO: 641157 - RNA, 19 nt, Artificial Sequence
  Description of Artificial Sequence: Synthetic oligonucleotide
  Antisense strand to SEQ ID NO: 641156
gacuugcaccgaaaccucg

SEQ ID NO: 641158 - RNA, 19 nt, Artificial Sequence
  Description of Artificial Sequence: Synthetic oligonucleotide
  Sense strand starting at position 578 of SEQ ID NO: 585454
cuguguuccgaagcagcua

SEQ ID NO: 641159 - RNA, 19 nt, Artificial Sequence
  Description of Artificial Sequence: Synthetic oligonucleotide
  Antisense strand to SEQ ID NO: 641158
uagcugcuucggaacacag

SEQ ID NO: 641160 - RNA, 19 nt, Artificial Sequence
  Description of Artificial Sequence: Synthetic oligonucleotide
  Sense strand starting at position 655 of SEQ ID NO: 585454
agucgaggucuccaccaaa

SEQ ID NO: 641161 - RNA, 19 nt, Artificial Sequence
  Description of Artificial Sequence: Synthetic oligonucleotide
  Antisense strand to SEQ ID NO: 641160
uuugguggagaccucgacu

SEQ ID NO: 641162 - RNA, 19 nt, Artificial Sequence
  Description of Artificial Sequence: Synthetic oligonucleotide
  Sense strand starting at position 703 of SEQ ID NO: 585454
caaaguuuccgcgcgaggu

SEQ ID NO: 641163 - RNA, 19 nt, Artificial Sequence
  Description of Artificial Sequence: Synthetic oligonucleotide
  Antisense strand to SEQ ID NO: 641162
accucgcgcggaaacuuug

SEQ ID NO: 641164 - RNA, 19 nt, Artificial Sequence
  Description of Artificial Sequence: Synthetic oligonucleotide
  Sense strand starting at position 704 of SEQ ID NO: 585454
aaaguuuccgcgcgagguu

SEQ ID NO: 641165 - RNA, 19 nt, Artificial Sequence
  Description of Artificial Sequence: Synthetic oligonucleotide
  Antisense strand to SEQ ID NO: 641164
aaccucgcgcggaaacuuu

SEQ ID NO: 641166 - RNA, 19 nt, Artificial Sequence
  Description of Artificial Sequence: Synthetic oligonucleotide
  Sense strand starting at position 705 of SEQ ID NO: 585454
aaguuuccgcgcgagguua

SEQ ID NO: 641167 - RNA, 19 nt, Artificial Sequence
  Description of Artificial Sequence: Synthetic oligonucleotide
  Antisense strand to SEQ ID NO: 641166
uaaccucgcgcggaaacuu

SEQ ID NO: 641168 - RNA, 19 nt, Artificial Sequence
  Description of Artificial Sequence: Synthetic oligonucleotide
  Sense strand starting at position 916 of SEQ ID NO: 585454
cccuuucccugagagguga

SEQ ID NO: 641169 - RNA, 19 nt, Artificial Sequence
  Description of Artificial Sequence: Synthetic oligonucleotide
  Antisense strand to SEQ ID NO: 641168
ucaccucucagggaaaggg

SEQ ID NO: 641170 - RNA, 19 nt, Artificial Sequence
  Description of Artificial Sequence: Synthetic oligonucleotide
  Sense strand starting at position 1275 of SEQ ID NO: 585454
gggcuccgcucgaguuaau

SEQ ID NO: 641171 - RNA, 19 nt, Artificial Sequence
  Description of Artificial Sequence: Synthetic oligonucleotide
  Antisense strand to SEQ ID NO: 641170
auuaacucgagcggagccc

SEQ ID NO: 641172 - RNA, 19 nt, Artificial Sequence
  Description of Artificial Sequence: Synthetic oligonucleotide
  Sense strand starting at position 1278 of SEQ ID NO: 585454
cuccgcucgaguuaaucaa

SEQ ID NO: 641173 - RNA, 19 nt, Artificial Sequence
  Description of Artificial Sequence: Synthetic oligonucleotide
  Antisense strand to SEQ ID NO: 641172
uugauuaacucgagcggag

SEQ ID NO: 641174 - RNA, 19 nt, Artificial Sequence
  Description of Artificial Sequence: Synthetic oligonucleotide
  Sense strand starting at position 1282 of SEQ ID NO: 585454
gcucgaguuaaucaaucug

SEQ ID NO: 641175 - RNA, 19 nt, Artificial Sequence
  Description of Artificial Sequence: Synthetic oligonucleotide
  Antisense strand to SEQ ID NO: 641174
cagauugauuaacucgagc

SEQ ID NO: 641176 - RNA, 19 nt, Artificial Sequence
  Description of Artificial Sequence: Synthetic oligonucleotide
  Sense strand starting at position 1524 of SEQ ID NO: 585454
gcgggaaucuggagagcaa

SEQ ID NO: 641177 - RNA, 19 nt, Artificial Sequence
  Description of Artificial Sequence: Synthetic oligonucleotide
  Antisense strand to SEQ ID NO: 641176
uugcucuccagauucccgc

SEQ ID NO: 641178 - RNA, 19 nt, Artificial Sequence
  Description of Artificial Sequence: Synthetic oligonucleotide
  Sense strand starting at position 1536 of SEQ ID NO: 585454
agagcaauuccaggcaaga

SEQ ID NO: 641179 - RNA, 19 nt, Artificial Sequence
  Description of Artificial Sequence: Synthetic oligonucleotide
  Antisense strand to SEQ ID NO: 641178
ucuugccuggaauugcucu

SEQ ID NO: 641180 - RNA, 19 nt, Artificial Sequence
  Description of Artificial Sequence: Synthetic oligonucleotide
  Sense strand starting at position 1577 of SEQ ID NO: 585454
ggaggaaaguuugagucuu

SEQ ID NO: 641181 - RNA, 19 nt, Artificial Sequence
  Description of Artificial Sequence: Synthetic oligonucleotide
  Antisense strand to SEQ ID NO: 641180
aagacucaaacuuuccucc

SEQ ID NO: 641182 - RNA, 19 nt, Artificial Sequence
  Description of Artificial Sequence: Synthetic oligonucleotide
  Sense strand starting at position 2012 of SEQ ID NO: 585454
gcucgcucuccuguuugau

SEQ ID NO: 641183 - RNA, 19 nt, Artificial Sequence
  Description of Artificial Sequence: Synthetic oligonucleotide
  Antisense strand to SEQ ID NO: 641182
aucaaacaggagagcgagc

SEQ ID NO: 641184 - RNA, 19 nt, Artificial Sequence
  Description of Artificial Sequence: Synthetic oligonucleotide
  Sense strand starting at position 2013 of SEQ ID NO: 585454
cucgcucuccuguuugauu

SEQ ID NO: 641185 - RNA, 19 nt, Artificial Sequence
  Description of Artificial Sequence: Synthetic oligonucleotide
  Antisense strand to SEQ ID NO: 641184
aaucaaacaggagagcgag

SEQ ID NO: 641186 - RNA, 19 nt, Artificial Sequence
  Description of Artificial Sequence: Synthetic oligonucleotide
  Sense strand starting at position 2424 of SEQ ID NO: 585454
uccaucuaucccgaggaca

SEQ ID NO: 641187 - RNA, 19 nt, Artificial Sequence
  Description of Artificial Sequence: Synthetic oligonucleotide
  Antisense strand to SEQ ID NO: 641186
uguccucgggauagaugga

SEQ ID NO: 641188 - RNA, 19 nt, Artificial Sequence
  Description of Artificial Sequence: Synthetic oligonucleotide
  Sense strand starting at position 2426 of SEQ ID NO: 585454
caucuaucccgaggacagu

SEQ ID NO: 641189 - RNA, 19 nt, Artificial Sequence
  Description of Artificial Sequence: Synthetic oligonucleotide
  Antisense strand to SEQ ID NO: 641188
acuguccucgggauagaug

SEQ ID NO: 641190 - RNA, 19 nt, Artificial Sequence
  Description of Artificial Sequence: Synthetic oligonucleotide
  Sense strand starting at position 2894 of SEQ ID NO: 585454
gccagagcuucccuaaguc

SEQ ID NO: 641191 - RNA, 19 nt, Artificial Sequence
  Description of Artificial Sequence: Synthetic oligonucleotide
  Antisense strand to SEQ ID NO: 641190
gacuuagggaagcucuggc

SEQ ID NO: 641192 - RNA, 19 nt, Artificial Sequence
  Description of Artificial Sequence: Synthetic oligonucleotide
  Sense strand starting at position 3095 of SEQ ID NO: 585454
ggagaacgcuccucccaaa

SEQ ID NO: 641193 - RNA, 19 nt, Artificial Sequence
  Description of Artificial Sequence: Synthetic oligonucleotide
  Antisense strand to SEQ ID NO: 641192
uuugggaggagcguucucc

SEQ ID NO: 641194 - RNA, 19 nt, Artificial Sequence
  Description of Artificial Sequence: Synthetic oligonucleotide
  Sense strand starting at position 3219 of SEQ ID NO: 585454
accugucgccguuauuuau

SEQ ID NO: 641195 - RNA, 19 nt, Artificial Sequence
  Description of Artificial Sequence: Synthetic oligonucleotide
  Antisense strand to SEQ ID NO: 641194
auaaauaacggcgacaggu

SEQ ID NO: 641196 - RNA, 19 nt, Artificial Sequence
  Description of Artificial Sequence: Synthetic oligonucleotide
  Sense strand starting at position 3242 of SEQ ID NO: 585454
gcgugugcgcaagaauugu

SEQ ID NO: 641197 - RNA, 19 nt, Artificial Sequence
  Description of Artificial Sequence: Synthetic oligonucleotide
  Antisense strand to SEQ ID NO: 641196
acaauucuugcgcacacgc

SEQ ID NO: 641198 - RNA, 19 nt, Artificial Sequence
  Description of Artificial Sequence: Synthetic oligonucleotide
  Sense strand starting at position 3340 of SEQ ID NO: 585454
ccuggaacugcucaauauc

SEQ ID NO: 641199 - RNA, 19 nt, Artificial Sequence
  Description of Artificial Sequence: Synthetic oligonucleotide
  Antisense strand to SEQ ID NO: 641198
gauauugagcaguuccagg

SEQ ID NO: 641200 - RNA, 19 nt, Artificial Sequence
  Description of Artificial Sequence: Synthetic oligonucleotide
  Sense strand starting at position 3349 of SEQ ID NO: 585454
gcucaauaucuugauggug

SEQ ID NO: 641201 - RNA, 19 nt, Artificial Sequence
  Description of Artificial Sequence: Synthetic oligonucleotide
  Antisense strand to SEQ ID NO: 641200
caccaucaagauauugagc

SEQ ID NO: 641202 - RNA, 19 nt, Artificial Sequence
  Description of Artificial Sequence: Synthetic oligonucleotide
  Sense strand starting at position 3418 of SEQ ID NO: 585454
aaagguuagucugcauaua

SEQ ID NO: 641203 - RNA, 19 nt, Artificial Sequence
  Description of Artificial Sequence: Synthetic oligonucleotide
  Antisense strand to SEQ ID NO: 641202
uauaugcagacuaaccuuu

SEQ ID NO: 641204 - RNA, 19 nt, Artificial Sequence
  Description of Artificial Sequence: Synthetic oligonucleotide
  Sense strand starting at position 3419 of SEQ ID NO: 585454
aagguuagucugcauauaa

SEQ ID NO: 641205 - RNA, 19 nt, Artificial Sequence
  Description of Artificial Sequence: Synthetic oligonucleotide
  Antisense strand to SEQ ID NO: 641204
uuauaugcagacuaaccuu

SEQ ID NO: 641206 - RNA, 19 nt, Artificial Sequence
  Description of Artificial Sequence: Synthetic oligonucleotide
  Sense strand starting at position 3518 of SEQ ID NO: 585454
uugacucuccagggcuuaa

SEQ ID NO: 641207 - RNA, 19 nt, Artificial Sequence
  Description of Artificial Sequence: Synthetic oligonucleotide
  Antisense strand to SEQ ID NO: 641206
uuaagcccuggagagucaa

SEQ ID NO: 641208 - RNA, 19 nt, Artificial Sequence
  Description of Artificial Sequence: Synthetic oligonucleotide
  Sense strand starting at position 3554 of SEQ ID NO: 585454
gcuccugacugcuggaaga

SEQ ID NO: 641209 - RNA, 19 nt, Artificial Sequence
  Description of Artificial Sequence: Synthetic oligonucleotide
  Antisense strand to SEQ ID NO: 641208
ucuuccagcagucaggagc

SEQ ID NO: 641210 - RNA, 19 nt, Artificial Sequence
  Description of Artificial Sequence: Synthetic oligonucleotide
  Sense strand starting at position 3659 of SEQ ID NO: 585454
ccgagaacauccgaagauu

SEQ ID NO: 641211 - RNA, 19 nt, Artificial Sequence
  Description of Artificial Sequence: Synthetic oligonucleotide
  Antisense strand to SEQ ID NO: 641210
aaucuucggauguucucgg

SEQ ID NO: 641212 - RNA, 19 nt, Artificial Sequence
  Description of Artificial Sequence: Synthetic oligonucleotide
  Sense strand starting at position 3667 of SEQ ID NO: 585454
auccgaagauuccuauucu

SEQ ID NO: 641213 - RNA, 19 nt, Artificial Sequence
  Description of Artificial Sequence: Synthetic oligonucleotide
  Antisense strand to SEQ ID NO: 641212
agaauaggaaucuucggau

SEQ ID NO: 641214 - RNA, 19 nt, Artificial Sequence
  Description of Artificial Sequence: Synthetic oligonucleotide
  Sense strand starting at position 3668 of SEQ ID NO: 585454
uccgaagauuccuauucuc

SEQ ID NO: 641215 - RNA, 19 nt, Artificial Sequence
  Description of Artificial Sequence: Synthetic oligonucleotide
  Antisense strand to SEQ ID NO: 641214
gagaauaggaaucuucgga

SEQ ID NO: 641216 - RNA, 19 nt, Artificial Sequence
  Description of Artificial Sequence: Synthetic oligonucleotide
  Sense strand starting at position 3834 of SEQ ID NO: 585454
acgaaugaugcccaucaug

SEQ ID NO: 641217 - RNA, 19 nt, Artificial Sequence
  Description of Artificial Sequence: Synthetic oligonucleotide
  Antisense strand to SEQ ID NO: 641216
caugaugggcaucauucgu

SEQ ID NO: 641218 - RNA, 19 nt, Artificial Sequence
  Description of Artificial Sequence: Synthetic oligonucleotide
  Sense strand starting at position 3842 of SEQ ID NO: 585454
ugcccaucauggccagaua

SEQ ID NO: 641219 - RNA, 19 nt, Artificial Sequence
  Description of Artificial Sequence: Synthetic oligonucleotide
  Antisense strand to SEQ ID NO: 641218
uaucuggccaugaugggca

SEQ ID NO: 641220 - RNA, 19 nt, Artificial Sequence
  Description of Artificial Sequence: Synthetic oligonucleotide
  Sense strand starting at position 3843 of SEQ ID NO: 585454
gcccaucauggccagauau

SEQ ID NO: 641221 - RNA, 19 nt, Artificial Sequence
  Description of Artificial Sequence: Synthetic oligonucleotide
  Antisense strand to SEQ ID NO: 641220
auaucuggccaugaugggc

SEQ ID NO: 641222 - RNA, 19 nt, Artificial Sequence
  Description of Artificial Sequence: Synthetic oligonucleotide
  Sense strand starting at position 3845 of SEQ ID NO: 585454
ccaucauggccagauauca

SEQ ID NO: 641223 - RNA, 19 nt, Artificial Sequence
  Description of Artificial Sequence: Synthetic oligonucleotide
  Antisense strand to SEQ ID NO: 641222
ugauaucuggccaugaugg

SEQ ID NO: 641224 - RNA, 19 nt, Artificial Sequence
  Description of Artificial Sequence: Synthetic oligonucleotide
  Sense strand starting at position 3909 of SEQ ID NO: 585454
cccggacuguuaccucaaa

SEQ ID NO: 641225 - RNA, 19 nt, Artificial Sequence
  Description of Artificial Sequence: Synthetic oligonucleotide
  Antisense strand to SEQ ID NO: 641224
uuugagguaacaguccggg

SEQ ID NO: 641226 - RNA, 19 nt, Artificial Sequence
  Description of Artificial Sequence: Synthetic oligonucleotide
  Sense strand starting at position 129 of SEQ ID NO: 585455
cauaaugaauaguugugau

SEQ ID NO: 641227 - RNA, 19 nt, Artificial Sequence
  Description of Artificial Sequence: Synthetic oligonucleotide
  Antisense strand to SEQ ID NO: 641226
aucacaacuauucauuaug

SEQ ID NO: 641228 - RNA, 19 nt, Artificial Sequence
  Description of Artificial Sequence: Synthetic oligonucleotide
  Sense strand starting at position 132 of SEQ ID NO: 585455
aaugaauaguugugauaac

SEQ ID NO: 641229 - RNA, 19 nt, Artificial Sequence
  Description of Artificial Sequence: Synthetic oligonucleotide
  Antisense strand to SEQ ID NO: 641228
guuaucacaacuauucauu

SEQ ID NO: 641230 - RNA, 19 nt, Artificial Sequence
  Description of Artificial Sequence: Synthetic oligonucleotide
  Sense strand starting at position 150 of SEQ ID NO: 585455
ccauaaaggucuccagauu

SEQ ID NO: 641231 - RNA, 19 nt, Artificial Sequence
  Description of Artificial Sequence: Synthetic oligonucleotide
  Antisense strand to SEQ ID NO: 641230
aaucuggagaccuuuaugg

SEQ ID NO: 641232 - RNA, 19 nt, Artificial Sequence
  Description of Artificial Sequence: Synthetic oligonucleotide
  Sense strand starting at position 203 of SEQ ID NO: 585455
aacaauugggcuugagaua

SEQ ID NO: 641233 - RNA, 19 nt, Artificial Sequence
  Description of Artificial Sequence: Synthetic oligonucleotide
  Antisense strand to SEQ ID NO: 641232
uaucucaagcccaauuguu

SEQ ID NO: 641234 - RNA, 19 nt, Artificial Sequence
  Description of Artificial Sequence: Synthetic oligonucleotide
  Sense strand starting at position 1049 of SEQ ID NO: 585455
aggagucaaugagaagguu

SEQ ID NO: 641235 - RNA, 19 nt, Artificial Sequence
  Description of Artificial Sequence: Synthetic oligonucleotide
  Antisense strand to SEQ ID NO: 641234
aaccuucucauugacuccu

SEQ ID NO: 641236 - RNA, 19 nt, Artificial Sequence
  Description of Artificial Sequence: Synthetic oligonucleotide
  Sense strand starting at position 1052 of SEQ ID NO: 585455
agucaaugagaagguucuu

SEQ ID NO: 641237 - RNA, 19 nt, Artificial Sequence
  Description of Artificial Sequence: Synthetic oligonucleotide
  Antisense strand to SEQ ID NO: 641236
aagaaccuucucauugacu

SEQ ID NO: 641238 - RNA, 19 nt, Artificial Sequence
  Description of Artificial Sequence: Synthetic oligonucleotide
  Sense strand starting at position 1119 of SEQ ID NO: 585455
uuguauaguuaguuacagu

SEQ ID NO: 641239 - RNA, 19 nt, Artificial Sequence
  Description of Artificial Sequence: Synthetic oligonucleotide
  Antisense strand to SEQ ID NO: 641238
acuguaacuaacuauacaa

SEQ ID NO: 641240 - RNA, 19 nt, Artificial Sequence
  Description of Artificial Sequence: Synthetic oligonucleotide
  Sense strand starting at position 1126 of SEQ ID NO: 585455
guuaguuacagugaguaug

SEQ ID NO: 641241 - RNA, 19 nt, Artificial Sequence
  Description of Artificial Sequence: Synthetic oligonucleotide
  Antisense strand to SEQ ID NO: 641240
cauacucacuguaacuaac

SEQ ID NO: 641242 - RNA, 19 nt, Artificial Sequence
  Description of Artificial Sequence: Synthetic oligonucleotide
  Sense strand starting at position 1136 of SEQ ID NO: 585455
gugaguaugagcugucuug

SEQ ID NO: 641243 - RNA, 19 nt, Artificial Sequence
  Description of Artificial Sequence: Synthetic oligonucleotide
  Antisense strand to SEQ ID NO: 641242
caagacagcucauacucac

SEQ ID NO: 641244 - RNA, 19 nt, Artificial Sequence
  Description of Artificial Sequence: Synthetic oligonucleotide
  Sense strand starting at position 1140 of SEQ ID NO: 585455
guaugagcugucuugcucu

SEQ ID NO: 641245 - RNA, 19 nt, Artificial Sequence
  Description of Artificial Sequence: Synthetic oligonucleotide
  Antisense strand to SEQ ID NO: 641244
agagcaagacagcucauac

SEQ ID NO: 641246 - RNA, 19 nt, Artificial Sequence
  Description of Artificial Sequence: Synthetic oligonucleotide
  Sense strand starting at position 1143 of SEQ ID NO: 585455
ugagcugucuugcucugua

SEQ ID NO: 641247 - RNA, 19 nt, Artificial Sequence
  Description of Artificial Sequence: Synthetic oligonucleotide
  Antisense strand to SEQ ID NO: 641246
uacagagcaagacagcuca

SEQ ID NO: 641248 - RNA, 19 nt, Artificial Sequence
  Description of Artificial Sequence: Synthetic oligonucleotide
  Sense strand starting at position 1170 of SEQ ID NO: 585455
guuguaaguguuuacgaac

SEQ ID NO: 641249 - RNA, 19 nt, Artificial Sequence
  Description of Artificial Sequence: Synthetic oligonucleotide
  Antisense strand to SEQ ID NO: 641248
guucguaaacacuuacaac

SEQ ID NO: 641250 - RNA, 19 nt, Artificial Sequence
  Description of Artificial Sequence: Synthetic oligonucleotide
  Sense strand starting at position 1215 of SEQ ID NO: 585455
ccucauggcagagaucgua

SEQ ID NO: 641251 - RNA, 19 nt, Artificial Sequence
  Description of Artificial Sequence: Synthetic oligonucleotide
  Antisense strand to SEQ ID NO: 641250
uacgaucucugccaugagg

SEQ ID NO: 641252 - RNA, 19 nt, Artificial Sequence
  Description of Artificial Sequence: Synthetic oligonucleotide
  Sense strand starting at position 1223 of SEQ ID NO: 585455
cagagaucguaacgaauuu

SEQ ID NO: 641253 - RNA, 19 nt, Artificial Sequence
  Description of Artificial Sequence: Synthetic oligonucleotide
  Antisense strand to SEQ ID NO: 641252
aaauucguuacgaucucug

SEQ ID NO: 641254 - RNA, 19 nt, Artificial Sequence
  Description of Artificial Sequence: Synthetic oligonucleotide
  Sense strand starting at position 1293 of SEQ ID NO: 585455
gcaaucaguauuugucgau

SEQ ID NO: 641255 - RNA, 19 nt, Artificial Sequence
  Description of Artificial Sequence: Synthetic oligonucleotide
  Antisense strand to SEQ ID NO: 641254
aucgacaaauacugauugc

SEQ ID NO: 641256 - RNA, 19 nt, Artificial Sequence
  Description of Artificial Sequence: Synthetic oligonucleotide
  Sense strand starting at position 1297 of SEQ ID NO: 585455
ucaguauuugucgaugguu

SEQ ID NO: 641257 - RNA, 19 nt, Artificial Sequence
  Description of Artificial Sequence: Synthetic oligonucleotide
  Antisense strand to SEQ ID NO: 641256
aaccaucgacaaauacuga

SEQ ID NO: 641258 - RNA, 19 nt, Artificial Sequence
  Description of Artificial Sequence: Synthetic oligonucleotide
  Sense strand starting at position 1351 of SEQ ID NO: 585455
uuaggugauacguacacuu

SEQ ID NO: 641259 - RNA, 19 nt, Artificial Sequence
  Description of Artificial Sequence: Synthetic oligonucleotide
  Antisense strand to SEQ ID NO: 641258
aaguguacguaucaccuaa

SEQ ID NO: 641260 - RNA, 19 nt, Artificial Sequence
  Description of Artificial Sequence: Synthetic oligonucleotide
  Sense strand starting at position 1353 of SEQ ID NO: 585455
aggugauacguacacuugu

SEQ ID NO: 641261 - RNA, 19 nt, Artificial Sequence
  Description of Artificial Sequence: Synthetic oligonucleotide
  Antisense strand to SEQ ID NO: 641260
acaaguguacguaucaccu

SEQ ID NO: 641262 - RNA, 19 nt, Artificial Sequence
  Description of Artificial Sequence: Synthetic oligonucleotide
  Sense strand starting at position 1411 of SEQ ID NO: 585455
accacauuccuuugggaag

SEQ ID NO: 641263 - RNA, 19 nt, Artificial Sequence
  Description of Artificial Sequence: Synthetic oligonucleotide
  Antisense strand to SEQ ID NO: 641262
cuucccaaaggaauguggu

SEQ ID NO: 641264 - RNA, 19 nt, Artificial Sequence
  Description of Artificial Sequence: Synthetic oligonucleotide
  Sense strand starting at position 1447 of SEQ ID NO: 585455
cagccaaagcgcuugcaua

SEQ ID NO: 641265 - RNA, 19 nt, Artificial Sequence
  Description of Artificial Sequence: Synthetic oligonucleotide
  Antisense strand to SEQ ID NO: 641264
uaugcaagcgcuuuggcug

SEQ ID NO: 641266 - RNA, 19 nt, Artificial Sequence
  Description of Artificial Sequence: Synthetic oligonucleotide
  Sense strand starting at position 1616 of SEQ ID NO: 585455
cacuuaaagcggcgaguau

SEQ ID NO: 641267 - RNA, 19 nt, Artificial Sequence
  Description of Artificial Sequence: Synthetic oligonucleotide
  Antisense strand to SEQ ID NO: 641266
auacucgccgcuuuaagug

SEQ ID NO: 641268 - RNA, 19 nt, Artificial Sequence
  Description of Artificial Sequence: Synthetic oligonucleotide
  Sense strand starting at position 1752 of SEQ ID NO: 585455
ucguucuuggcugcgauua

SEQ ID NO: 641269 - RNA, 19 nt, Artificial Sequence
  Description of Artificial Sequence: Synthetic oligonucleotide
  Antisense strand to SEQ ID NO: 641268
uaaucgcagccaagaacga

SEQ ID NO: 641270 - RNA, 19 nt, Artificial Sequence
  Description of Artificial Sequence: Synthetic oligonucleotide
  Sense strand starting at position 1753 of SEQ ID NO: 585455
cguucuuggcugcgauuaa

SEQ ID NO: 641271 - RNA, 19 nt, Artificial Sequence
  Description of Artificial Sequence: Synthetic oligonucleotide
  Antisense strand to SEQ ID NO: 641270
uuaaucgcagccaagaacg

SEQ ID NO: 641272 - RNA, 19 nt, Artificial Sequence
  Description of Artificial Sequence: Synthetic oligonucleotide
  Sense strand starting at position 1801 of SEQ ID NO: 585455
agaagugcuccaugaccca

SEQ ID NO: 641273 - RNA, 19 nt, Artificial Sequence
  Description of Artificial Sequence: Synthetic oligonucleotide
  Antisense strand to SEQ ID NO: 641272
ugggucauggagcacuucu

SEQ ID NO: 641274 - RNA, 19 nt, Artificial Sequence
  Description of Artificial Sequence: Synthetic oligonucleotide
  Sense strand starting at position 2245 of SEQ ID NO: 585455
acggaaagaucagauguga

SEQ ID NO: 641275 - RNA, 19 nt, Artificial Sequence
  Description of Artificial Sequence: Synthetic oligonucleotide
  Antisense strand to SEQ ID NO: 641274
ucacaucugaucuuuccgu

SEQ ID NO: 641276 - RNA, 19 nt, Artificial Sequence
  Description of Artificial Sequence: Synthetic oligonucleotide
  Sense strand starting at position 2250 of SEQ ID NO: 585455
aagaucagaugugagagaa

SEQ ID NO: 641277 - RNA, 19 nt, Artificial Sequence
  Description of Artificial Sequence: Synthetic oligonucleotide
  Antisense strand to SEQ ID NO: 641276
uucucucacaucugaucuu

SEQ ID NO: 641278 - RNA, 19 nt, Artificial Sequence
  Description of Artificial Sequence: Synthetic oligonucleotide
  Sense strand starting at position 2294 of SEQ ID NO: 585455
ggcgcaugucuuuauccca

SEQ ID NO: 641279 - RNA, 19 nt, Artificial Sequence
  Description of Artificial Sequence: Synthetic oligonucleotide
  Antisense strand to SEQ ID NO: 641278
ugggauaaagacaugcgcc

SEQ ID NO: 641280 - RNA, 19 nt, Artificial Sequence
  Description of Artificial Sequence: Synthetic oligonucleotide
  Sense strand starting at position 2832 of SEQ ID NO: 585455
accuguugacuugaaguuu

SEQ ID NO: 641281 - RNA, 19 nt, Artificial Sequence
  Description of Artificial Sequence: Synthetic oligonucleotide
  Antisense strand to SEQ ID NO: 641280
aaacuucaagucaacaggu

SEQ ID NO: 641282 - RNA, 19 nt, Artificial Sequence
  Description of Artificial Sequence: Synthetic oligonucleotide
  Sense strand starting at position 2900 of SEQ ID NO: 585455
agaucuuacugggaagcua

SEQ ID NO: 641283 - RNA, 19 nt, Artificial Sequence
  Description of Artificial Sequence: Synthetic oligonucleotide
  Antisense strand to SEQ ID NO: 641282
uagcuucccaguaagaucu

SEQ ID NO: 641284 - RNA, 19 nt, Artificial Sequence
  Description of Artificial Sequence: Synthetic oligonucleotide
  Sense strand starting at position 2966 of SEQ ID NO: 585455
cccggugaacguuagagaa

SEQ ID NO: 641285 - RNA, 19 nt, Artificial Sequence
  Description of Artificial Sequence: Synthetic oligonucleotide
  Antisense strand to SEQ ID NO: 641284
uucucuaacguucaccggg

SEQ ID NO: 641286 - RNA, 19 nt, Artificial Sequence
  Description of Artificial Sequence: Synthetic oligonucleotide
  Sense strand starting at position 2998 of SEQ ID NO: 585455
gccugaccaucguuugauu

SEQ ID NO: 641287 - RNA, 19 nt, Artificial Sequence
  Description of Artificial Sequence: Synthetic oligonucleotide
  Antisense strand to SEQ ID NO: 641286
aaucaaacgauggucaggc

SEQ ID NO: 641288 - RNA, 19 nt, Artificial Sequence
  Description of Artificial Sequence: Synthetic oligonucleotide
  Sense strand starting at position 3009 of SEQ ID NO: 585455
guuugauugucacccaaua

SEQ ID NO: 641289 - RNA, 19 nt, Artificial Sequence
  Description of Artificial Sequence: Synthetic oligonucleotide
  Antisense strand to SEQ ID NO: 641288
uauugggugacaaucaaac

SEQ ID NO: 641290 - RNA, 19 nt, Artificial Sequence
  Description of Artificial Sequence: Synthetic oligonucleotide
  Sense strand starting at position 3021 of SEQ ID NO: 585455
cccaauaguccugguaugu

SEQ ID NO: 641291 - RNA, 19 nt, Artificial Sequence
  Description of Artificial Sequence: Synthetic oligonucleotide
  Antisense strand to SEQ ID NO: 641290
acauaccaggacuauuggg

SEQ ID NO: 641292 - RNA, 19 nt, Artificial Sequence
  Description of Artificial Sequence: Synthetic oligonucleotide
  Sense strand starting at position 3115 of SEQ ID NO: 585455
gacucuagccugcggaaau

SEQ ID NO: 641293 - RNA, 19 nt, Artificial Sequence
  Description of Artificial Sequence: Synthetic oligonucleotide
  Antisense strand to SEQ ID NO: 641292
auuuccgcaggcuagaguc

SEQ ID NO: 641294 - RNA, 19 nt, Artificial Sequence
  Description of Artificial Sequence: Synthetic oligonucleotide
  Sense strand starting at position 3125 of SEQ ID NO: 585455
ugcggaaauccucacuaag

SEQ ID NO: 641295 - RNA, 19 nt, Artificial Sequence
  Description of Artificial Sequence: Synthetic oligonucleotide
  Antisense strand to SEQ ID NO: 641294
cuuagugaggauuuccgca

SEQ ID NO: 641296 - RNA, 19 nt, Artificial Sequence
  Description of Artificial Sequence: Synthetic oligonucleotide
  Sense strand starting at position 3127 of SEQ ID NO: 585455
cggaaauccucacuaagug

SEQ ID NO: 641297 - RNA, 19 nt, Artificial Sequence
  Description of Artificial Sequence: Synthetic oligonucleotide
  Antisense strand to SEQ ID NO: 641296
cacuuagugaggauuuccg

SEQ ID NO: 641298 - RNA, 19 nt, Artificial Sequence
  Description of Artificial Sequence: Synthetic oligonucleotide
  Sense strand starting at position 3128 of SEQ ID NO: 585455
ggaaauccucacuaagugu

SEQ ID NO: 641299 - RNA, 19 nt, Artificial Sequence
  Description of Artificial Sequence: Synthetic oligonucleotide
  Antisense strand to SEQ ID NO: 641298
acacuuagugaggauuucc

SEQ ID NO: 641300 - RNA, 19 nt, Artificial Sequence
  Description of Artificial Sequence: Synthetic oligonucleotide
  Sense strand starting at position 3134 of SEQ ID NO: 585455
ccucacuaagugugacaaa

SEQ ID NO: 641301 - RNA, 19 nt, Artificial Sequence
  Description of Artificial Sequence: Synthetic oligonucleotide
  Antisense strand to SEQ ID NO: 641300
uuugucacacuuagugagg

SEQ ID NO: 641302 - RNA, 19 nt, Artificial Sequence
  Description of Artificial Sequence: Synthetic oligonucleotide
  Sense strand starting at position 3229 of SEQ ID NO: 585455
guuauagcauauucuggaa

SEQ ID NO: 641303 - RNA, 19 nt, Artificial Sequence
  Description of Artificial Sequence: Synthetic oligonucleotide
  Antisense strand to SEQ ID NO: 641302
uuccagaauaugcuauaac

SEQ ID NO: 641304 - RNA, 19 nt, Artificial Sequence
  Description of Artificial Sequence: Synthetic oligonucleotide
  Sense strand starting at position 3233 of SEQ ID NO: 585455
uagcauauucuggaaguca

SEQ ID NO: 641305 - RNA, 19 nt, Artificial Sequence
  Description of Artificial Sequence: Synthetic oligonucleotide
  Antisense strand to SEQ ID NO: 641304
ugacuuccagaauaugcua

SEQ ID NO: 641306 - RNA, 19 nt, Artificial Sequence
  Description of Artificial Sequence: Synthetic oligonucleotide
  Sense strand starting at position 98 of SEQ ID NO: 585456
auuacucuugcucagggau

SEQ ID NO: 641307 - RNA, 19 nt, Artificial Sequence
  Description of Artificial Sequence: Synthetic oligonucleotide
  Antisense strand to SEQ ID NO: 641306
aucccugagcaagaguaau

SEQ ID NO: 641308 - RNA, 19 nt, Artificial Sequence
  Description of Artificial Sequence: Synthetic oligonucleotide
  Sense strand starting at position 244 of SEQ ID NO: 585456
gcaggugacacauacaagu

SEQ ID NO: 641309 - RNA, 19 nt, Artificial Sequence
  Description of Artificial Sequence: Synthetic oligonucleotide
  Antisense strand to SEQ ID NO: 641308
acuuguaugugucaccugc

SEQ ID NO: 641310 - RNA, 19 nt, Artificial Sequence
  Description of Artificial Sequence: Synthetic oligonucleotide
  Sense strand starting at position 313 of SEQ ID NO: 585456
guggcaaaccugcagaaua

SEQ ID NO: 641311 - RNA, 19 nt, Artificial Sequence
  Description of Artificial Sequence: Synthetic oligonucleotide
  Antisense strand to SEQ ID NO: 641310
uauucugcagguuugccac

SEQ ID NO: 641312 - RNA, 19 nt, Artificial Sequence
  Description of Artificial Sequence: Synthetic oligonucleotide
  Sense strand starting at position 315 of SEQ ID NO: 585456
ggcaaaccugcagaauaau

SEQ ID NO: 641313 - RNA, 19 nt, Artificial Sequence
  Description of Artificial Sequence: Synthetic oligonucleotide
  Antisense strand to SEQ ID NO: 641312
auuauucugcagguuugcc

SEQ ID NO: 641314 - RNA, 19 nt, Artificial Sequence
  Description of Artificial Sequence: Synthetic oligonucleotide
  Sense strand starting at position 521 of SEQ ID NO: 585456
ucaugucuuuaagucauua

SEQ ID NO: 641315 - RNA, 19 nt, Artificial Sequence
  Description of Artificial Sequence: Synthetic oligonucleotide
  Antisense strand to SEQ ID NO: 641314
uaaugacuuaaagacauga

SEQ ID NO: 641316 - RNA, 19 nt, Artificial Sequence
  Description of Artificial Sequence: Synthetic oligonucleotide
  Sense strand starting at position 600 of SEQ ID NO: 585456
ugaaaugcaguccaccaaa

SEQ ID NO: 641317 - RNA, 19 nt, Artificial Sequence
  Description of Artificial Sequence: Synthetic oligonucleotide
  Antisense strand to SEQ ID NO: 641316
uuugguggacugcauuuca

SEQ ID NO: 641318 - RNA, 19 nt, Artificial Sequence
  Description of Artificial Sequence: Synthetic oligonucleotide
  Sense strand starting at position 736 of SEQ ID NO: 585456
agacaaaccuggcuguaaa

SEQ ID NO: 641319 - RNA, 19 nt, Artificial Sequence
  Description of Artificial Sequence: Synthetic oligonucleotide
  Antisense strand to SEQ ID NO: 641318
uuuacagccagguuugucu

SEQ ID NO: 641320 - RNA, 19 nt, Artificial Sequence
  Description of Artificial Sequence: Synthetic oligonucleotide
  Sense strand starting at position 800 of SEQ ID NO: 585456
gagagacaucccgagugcu

SEQ ID NO: 641321 - RNA, 19 nt, Artificial Sequence
  Description of Artificial Sequence: Synthetic oligonucleotide
  Antisense strand to SEQ ID NO: 641320
agcacucgggaugucucuc

SEQ ID NO: 641322 - RNA, 19 nt, Artificial Sequence
  Description of Artificial Sequence: Synthetic oligonucleotide
  Sense strand starting at position 817 of SEQ ID NO: 585456
cuuauauugcaucaccagu

SEQ ID NO: 641323 - RNA, 19 nt, Artificial Sequence
  Description of Artificial Sequence: Synthetic oligonucleotide
  Antisense strand to SEQ ID NO: 641322
acuggugaugcaauauaag

SEQ ID NO: 641324 - RNA, 19 nt, Artificial Sequence
  Description of Artificial Sequence: Synthetic oligonucleotide
  Sense strand starting at position 823 of SEQ ID NO: 585456
uugcaucaccagugaagga

SEQ ID NO: 641325 - RNA, 19 nt, Artificial Sequence
  Description of Artificial Sequence: Synthetic oligonucleotide
  Antisense strand to SEQ ID NO: 641324
uccuucacuggugaugcaa

SEQ ID NO: 641326 - RNA, 19 nt, Artificial Sequence
  Description of Artificial Sequence: Synthetic oligonucleotide
  Sense strand starting at position 1024 of SEQ ID NO: 585456
gucccaugucugggacaga

SEQ ID NO: 641327 - RNA, 19 nt, Artificial Sequence
  Description of Artificial Sequence: Synthetic oligonucleotide
  Antisense strand to SEQ ID NO: 641326
ucugucccagacaugggac

SEQ ID NO: 641328 - RNA, 19 nt, Artificial Sequence
  Description of Artificial Sequence: Synthetic oligonucleotide
  Sense strand starting at position 1027 of SEQ ID NO: 585456
ccaugucugggacagaguu

SEQ ID NO: 641329 - RNA, 19 nt, Artificial Sequence
  Description of Artificial Sequence: Synthetic oligonucleotide
  Antisense strand to SEQ ID NO: 641328
aacucugucccagacaugg

SEQ ID NO: 641330 - RNA, 19 nt, Artificial Sequence
  Description of Artificial Sequence: Synthetic oligonucleotide
  Sense strand starting at position 1059 of SEQ ID NO: 585456
augcaaaguguccaagaca

SEQ ID NO: 641331 - RNA, 19 nt, Artificial Sequence
  Description of Artificial Sequence: Synthetic oligonucleotide
  Antisense strand to SEQ ID NO: 641330
ugucuuggacacuuugcau

SEQ ID NO: 641332 - RNA, 19 nt, Artificial Sequence
  Description of Artificial Sequence: Synthetic oligonucleotide
  Sense strand starting at position 1149 of SEQ ID NO: 585456
gauugcuaacgugaucuga

SEQ ID NO: 641333 - RNA, 19 nt, Artificial Sequence
  Description of Artificial Sequence: Synthetic oligonucleotide
  Antisense strand to SEQ ID NO: 641332
ucagaucacguuagcaauc

SEQ ID NO: 641334 - RNA, 19 nt, Artificial Sequence
  Description of Artificial Sequence: Synthetic oligonucleotide
  Sense strand starting at position 1301 of SEQ ID NO: 585456
ucacacacuuugucugaua

SEQ ID NO: 641335 - RNA, 19 nt, Artificial Sequence
  Description of Artificial Sequence: Synthetic oligonucleotide
  Antisense strand to SEQ ID NO: 641334
uaucagacaaaguguguga

SEQ ID NO: 641336 - RNA, 19 nt, Artificial Sequence
  Description of Artificial Sequence: Synthetic oligonucleotide
  Sense strand starting at position 1303 of SEQ ID NO: 585456
acacacuuugucugauacu

SEQ ID NO: 641337 - RNA, 19 nt, Artificial Sequence
  Description of Artificial Sequence: Synthetic oligonucleotide
  Antisense strand to SEQ ID NO: 641336
aguaucagacaaagugugu

SEQ ID NO: 641338 - RNA, 19 nt, Artificial Sequence
  Description of Artificial Sequence: Synthetic oligonucleotide
  Sense strand starting at position 1600 of SEQ ID NO: 585456
gggcccugacccugauaga

SEQ ID NO: 641339 - RNA, 19 nt, Artificial Sequence
  Description of Artificial Sequence: Synthetic oligonucleotide
  Antisense strand to SEQ ID NO: 641338
ucuaucagggucagggccc

SEQ ID NO: 641340 - RNA, 19 nt, Artificial Sequence
  Description of Artificial Sequence: Synthetic oligonucleotide
  Sense strand starting at position 1953 of SEQ ID NO: 585456
cgagaagcgcugagucaug

SEQ ID NO: 641341 - RNA, 19 nt, Artificial Sequence
  Description of Artificial Sequence: Synthetic oligonucleotide
  Antisense strand to SEQ ID NO: 641340
caugacucagcgcuucucg

SEQ ID NO: 641342 - RNA, 19 nt, Artificial Sequence
  Description of Artificial Sequence: Synthetic oligonucleotide
  Sense strand starting at position 2575 of SEQ ID NO: 585456
gcgccacaccugucaguuu

SEQ ID NO: 641343 - RNA, 19 nt, Artificial Sequence
  Description of Artificial Sequence: Synthetic oligonucleotide
  Antisense strand to SEQ ID NO: 641342
aaacugacagguguggcgc

SEQ ID NO: 641344 - RNA, 19 nt, Artificial Sequence
  Description of Artificial Sequence: Synthetic oligonucleotide
  Sense strand starting at position 2582 of SEQ ID NO: 585456
accugucaguuucuacaga

SEQ ID NO: 641345 - RNA, 19 nt, Artificial Sequence
  Description of Artificial Sequence: Synthetic oligonucleotide
  Antisense strand to SEQ ID NO: 641344
ucuguagaaacugacaggu

SEQ ID NO: 641346 - RNA, 19 nt, Artificial Sequence
  Description of Artificial Sequence: Synthetic oligonucleotide
  Sense strand starting at position 2616 of SEQ ID NO: 585456
guauuugaaugucaauaag

SEQ ID NO: 641347 - RNA, 19 nt, Artificial Sequence
  Description of Artificial Sequence: Synthetic oligonucleotide
  Antisense strand to SEQ ID NO: 641346
cuuauugacauucaaauac

SEQ ID NO: 641348 - RNA, 19 nt, Artificial Sequence
  Description of Artificial Sequence: Synthetic oligonucleotide
  Sense strand starting at position 2747 of SEQ ID NO: 585456
gaauaaugaugaguaagca

SEQ ID NO: 641349 - RNA, 19 nt, Artificial Sequence
  Description of Artificial Sequence: Synthetic oligonucleotide
  Antisense strand to SEQ ID NO: 641348
ugcuuacucaucauuauuc

SEQ ID NO: 641350 - RNA, 19 nt, Artificial Sequence
  Description of Artificial Sequence: Synthetic oligonucleotide
  Sense strand starting at position 2931 of SEQ ID NO: 585456
aggagugccugucugauaa

SEQ ID NO: 641351 - RNA, 19 nt, Artificial Sequence
  Description of Artificial Sequence: Synthetic oligonucleotide
  Antisense strand to SEQ ID NO: 641350
uuaucagacaggcacuccu

SEQ ID NO: 641352 - RNA, 19 nt, Artificial Sequence
  Description of Artificial Sequence: Synthetic oligonucleotide
  Sense strand starting at position 3005 of SEQ ID NO: 585456
guuaaauaggauugcuagu

SEQ ID NO: 641353 - RNA, 19 nt, Artificial Sequence
  Description of Artificial Sequence: Synthetic oligonucleotide
  Antisense strand to SEQ ID NO: 641352
acuagcaauccuauuuaac

SEQ ID NO: 641354 - RNA, 19 nt, Artificial Sequence
  Description of Artificial Sequence: Synthetic oligonucleotide
  Sense strand starting at position 3007 of SEQ ID NO: 585456
uaaauaggauugcuaguuu

SEQ ID NO: 641355 - RNA, 19 nt, Artificial Sequence
  Description of Artificial Sequence: Synthetic oligonucleotide
  Antisense strand to SEQ ID NO: 641354
aaacuagcaauccuauuua

SEQ ID NO: 641356 - RNA, 19 nt, Artificial Sequence
  Description of Artificial Sequence: Synthetic oligonucleotide
  Sense strand starting at position 3018 of SEQ ID NO: 585456
gcuaguuucugucccauuu

SEQ ID NO: 641357 - RNA, 19 nt, Artificial Sequence
  Description of Artificial Sequence: Synthetic oligonucleotide
  Antisense strand to SEQ ID NO: 641356
aaaugggacagaaacuagc

SEQ ID NO: 641358 - RNA, 19 nt, Artificial Sequence
  Description of Artificial Sequence: Synthetic oligonucleotide
  Sense strand starting at position 3029 of SEQ ID NO: 585456
ucccauuugucucugcaua

SEQ ID NO: 641359 - RNA, 19 nt, Artificial Sequence
  Description of Artificial Sequence: Synthetic oligonucleotide
  Antisense strand to SEQ ID NO: 641358
uaugcagagacaaauggga

SEQ ID NO: 641360 - RNA, 19 nt, Artificial Sequence
  Description of Artificial Sequence: Synthetic oligonucleotide
  Sense strand starting at position 3030 of SEQ ID NO: 585456
cccauuugucucugcauac

SEQ ID NO: 641361 - RNA, 19 nt, Artificial Sequence
  Description of Artificial Sequence: Synthetic oligonucleotide
  Antisense strand to SEQ ID NO: 641360
guaugcagagacaaauggg

SEQ ID NO: 641362 - RNA, 19 nt, Artificial Sequence
  Description of Artificial Sequence: Synthetic oligonucleotide
  Sense strand starting at position 3031 of SEQ ID NO: 585456
ccauuugucucugcauacu

SEQ ID NO: 641363 - RNA, 19 nt, Artificial Sequence
  Description of Artificial Sequence: Synthetic oligonucleotide
  Antisense strand to SEQ ID NO: 641362
aguaugcagagacaaaugg

SEQ ID NO: 641364 - RNA, 19 nt, Artificial Sequence
  Description of Artificial Sequence: Synthetic oligonucleotide
  Sense strand starting at position 3034 of SEQ ID NO: 585456
uuugucucugcauacugau

SEQ ID NO: 641365 - RNA, 19 nt, Artificial Sequence
  Description of Artificial Sequence: Synthetic oligonucleotide
  Antisense strand to SEQ ID NO: 641364
aucaguaugcagagacaaa

SEQ ID NO: 641366 - RNA, 19 nt, Artificial Sequence
  Description of Artificial Sequence: Synthetic oligonucleotide
  Sense strand starting at position 3058 of SEQ ID NO: 585456
aaaggauaguguuugagau

SEQ ID NO: 641367 - RNA, 19 nt, Artificial Sequence
  Description of Artificial Sequence: Synthetic oligonucleotide
  Antisense strand to SEQ ID NO: 641366
aucucaaacacuauccuuu

SEQ ID NO: 641368 - RNA, 19 nt, Artificial Sequence
  Description of Artificial Sequence: Synthetic oligonucleotide
  Sense strand starting at position 3059 of SEQ ID NO: 585456
aaggauaguguuugagauu

SEQ ID NO: 641369 - RNA, 19 nt, Artificial Sequence
  Description of Artificial Sequence: Synthetic oligonucleotide
  Antisense strand to SEQ ID NO: 641368
aaucucaaacacuauccuu

SEQ ID NO: 641370 - RNA, 19 nt, Artificial Sequence
  Description of Artificial Sequence: Synthetic oligonucleotide
  Sense strand starting at position 3217 of SEQ ID NO: 585456
uugaccucgccugaauuau

SEQ ID NO: 641371 - RNA, 19 nt, Artificial Sequence
  Description of Artificial Sequence: Synthetic oligonucleotide
  Antisense strand to SEQ ID NO: 641370
auaauucaggcgaggucaa

SEQ ID NO: 641372 - RNA, 19 nt, Artificial Sequence
  Description of Artificial Sequence: Synthetic oligonucleotide
  Sense strand starting at position 3223 of SEQ ID NO: 585456
ucgccugaauuaucuagaa

SEQ ID NO: 641373 - RNA, 19 nt, Artificial Sequence
  Description of Artificial Sequence: Synthetic oligonucleotide
  Antisense strand to SEQ ID NO: 641372
uucuagauaauucaggcga

SEQ ID NO: 641374 - RNA, 19 nt, Artificial Sequence
  Description of Artificial Sequence: Synthetic oligonucleotide
  Sense strand starting at position 3613 of SEQ ID NO: 585456
guuauaaguacagggagua

SEQ ID NO: 641375 - RNA, 19 nt, Artificial Sequence
  Description of Artificial Sequence: Synthetic oligonucleotide
  Antisense strand to SEQ ID NO: 641374
uacucccuguacuuauaac

SEQ ID NO: 641376 - RNA, 19 nt, Artificial Sequence
  Description of Artificial Sequence: Synthetic oligonucleotide
  Sense strand starting at position 3614 of SEQ ID NO: 585456
uuauaaguacagggaguaa

SEQ ID NO: 641377 - RNA, 19 nt, Artificial Sequence
  Description of Artificial Sequence: Synthetic oligonucleotide
  Antisense strand to SEQ ID NO: 641376
uuacucccuguacuuauaa

SEQ ID NO: 641378 - RNA, 19 nt, Artificial Sequence
  Description of Artificial Sequence: Synthetic oligonucleotide
  Sense strand starting at position 3758 of SEQ ID NO: 585456
cgucaucuugaaugaaaca

SEQ ID NO: 641379 - RNA, 19 nt, Artificial Sequence
  Description of Artificial Sequence: Synthetic oligonucleotide
  Antisense strand to SEQ ID NO: 641378
uguuucauucaagaugacg

SEQ ID NO: 641380 - RNA, 19 nt, Artificial Sequence
  Description of Artificial Sequence: Synthetic oligonucleotide
  Sense strand starting at position 3854 of SEQ ID NO: 585456
acauaaauguuagcuagaa

SEQ ID NO: 641381 - RNA, 19 nt, Artificial Sequence
  Description of Artificial Sequence: Synthetic oligonucleotide
  Antisense strand to SEQ ID NO: 641380
uucuagcuaacauuuaugu

SEQ ID NO: 641382 - RNA, 19 nt, Artificial Sequence
  Description of Artificial Sequence: Synthetic oligonucleotide
  Sense strand starting at position 3964 of SEQ ID NO: 585456
ugcuuuaauuugccuugua

SEQ ID NO: 641383 - RNA, 19 nt, Artificial Sequence
  Description of Artificial Sequence: Synthetic oligonucleotide
  Antisense strand to SEQ ID NO: 641382
uacaaggcaaauuaaagca

SEQ ID NO: 641384 - RNA, 19 nt, Artificial Sequence
  Description of Artificial Sequence: Synthetic oligonucleotide
  Sense strand starting at position 3965 of SEQ ID NO: 585456
gcuuuaauuugccuuguaa

SEQ ID NO: 641385 - RNA, 19 nt, Artificial Sequence
  Description of Artificial Sequence: Synthetic oligonucleotide
  Antisense strand to SEQ ID NO: 641384
uuacaaggcaaauuaaagc

SEQ ID NO: 641386 - RNA, 19 nt, Artificial Sequence
  Description of Artificial Sequence: Synthetic oligonucleotide
  Sense strand starting at position 454 of SEQ ID NO: 585457
cucugagaagucugaugug

SEQ ID NO: 641387 - RNA, 19 nt, Artificial Sequence
  Description of Artificial Sequence: Synthetic oligonucleotide
  Antisense strand to SEQ ID NO: 641386
cacaucagacuucucagag

SEQ ID NO: 641388 - RNA, 19 nt, Artificial Sequence
  Description of Artificial Sequence: Synthetic oligonucleotide
  Sense strand starting at position 545 of SEQ ID NO: 585457
gguucuggccuggaaugua

SEQ ID NO: 641389 - RNA, 19 nt, Artificial Sequence
  Description of Artificial Sequence: Synthetic oligonucleotide
  Antisense strand to SEQ ID NO: 641388
uacauuccaggccagaacc

SEQ ID NO: 641390 - RNA, 19 nt, Artificial Sequence
  Description of Artificial Sequence: Synthetic oligonucleotide
  Sense strand starting at position 553 of SEQ ID NO: 585457
ccuggaauguaggaauaua

SEQ ID NO: 641391 - RNA, 19 nt, Artificial Sequence
  Description of Artificial Sequence: Synthetic oligonucleotide
  Antisense strand to SEQ ID NO: 641390
uauauuccuacauuccagg

SEQ ID NO: 641392 - RNA, 19 nt, Artificial Sequence
  Description of Artificial Sequence: Synthetic oligonucleotide
  Sense strand starting at position 623 of SEQ ID NO: 585457
gagggcuuucuguaccaca

SEQ ID NO: 641393 - RNA, 19 nt, Artificial Sequence
  Description of Artificial Sequence: Synthetic oligonucleotide
  Antisense strand to SEQ ID NO: 641392
ugugguacagaaagcccuc

SEQ ID NO: 641394 - RNA, 19 nt, Artificial Sequence
  Description of Artificial Sequence: Synthetic oligonucleotide
  Sense strand starting at position 658 of SEQ ID NO: 585457
ccgauaucucccgagccca

SEQ ID NO: 641395 - RNA, 19 nt, Artificial Sequence
  Description of Artificial Sequence: Synthetic oligonucleotide
  Antisense strand to SEQ ID NO: 641394
ugggcucgggagauaucgg

SEQ ID NO: 641396 - RNA, 19 nt, Artificial Sequence
  Description of Artificial Sequence: Synthetic oligonucleotide
  Sense strand starting at position 729 of SEQ ID NO: 585457
agcucuacauguucugaaa

SEQ ID NO: 641397 - RNA, 19 nt, Artificial Sequence
  Description of Artificial Sequence: Synthetic oligonucleotide
  Antisense strand to SEQ ID NO: 641396
uuucagaacauguagagcu

SEQ ID NO: 641398 - RNA, 19 nt, Artificial Sequence
  Description of Artificial Sequence: Synthetic oligonucleotide
  Sense strand starting at position 959 of SEQ ID NO: 585457
agggucuuccucugaaacu

SEQ ID NO: 641399 - RNA, 19 nt, Artificial Sequence
  Description of Artificial Sequence: Synthetic oligonucleotide
  Antisense strand to SEQ ID NO: 641398
aguuucagaggaagacccu

SEQ ID NO: 641400 - RNA, 19 nt, Artificial Sequence
  Description of Artificial Sequence: Synthetic oligonucleotide
  Sense strand starting at position 960 of SEQ ID NO: 585457
gggucuuccucugaaacuu

SEQ ID NO: 641401 - RNA, 19 nt, Artificial Sequence
  Description of Artificial Sequence: Synthetic oligonucleotide
  Antisense strand to SEQ ID NO: 641400
aaguuucagaggaagaccc

SEQ ID NO: 641402 - RNA, 19 nt, Artificial Sequence
  Description of Artificial Sequence: Synthetic oligonucleotide
  Sense strand starting at position 1055 of SEQ ID NO: 585457
ugggaauagagcugugguu

SEQ ID NO: 641403 - RNA, 19 nt, Artificial Sequence
  Description of Artificial Sequence: Synthetic oligonucleotide
  Antisense strand to SEQ ID NO: 641402
aaccacagcucuauuccca

SEQ ID NO: 641404 - RNA, 19 nt, Artificial Sequence
  Description of Artificial Sequence: Synthetic oligonucleotide
  Sense strand starting at position 1057 of SEQ ID NO: 585457
ggaauagagcugugguugu

SEQ ID NO: 641405 - RNA, 19 nt, Artificial Sequence
  Description of Artificial Sequence: Synthetic oligonucleotide
  Antisense strand to SEQ ID NO: 641404
acaaccacagcucuauucc

SEQ ID NO: 641406 - RNA, 19 nt, Artificial Sequence
  Description of Artificial Sequence: Synthetic oligonucleotide
  Sense strand starting at position 1068 of SEQ ID NO: 585457
gugguuguucaacgcugua

SEQ ID NO: 641407 - RNA, 19 nt, Artificial Sequence
  Description of Artificial Sequence: Synthetic oligonucleotide
  Antisense strand to SEQ ID NO: 641406
uacagcguugaacaaccac

SEQ ID NO: 641408 - RNA, 19 nt, Artificial Sequence
  Description of Artificial Sequence: Synthetic oligonucleotide
  Sense strand starting at position 1425 of SEQ ID NO: 585457
cccaguuccucagucugau

SEQ ID NO: 641409 - RNA, 19 nt, Artificial Sequence
  Description of Artificial Sequence: Synthetic oligonucleotide
  Antisense strand to SEQ ID NO: 641408
aucagacugaggaacuggg

SEQ ID NO: 641410 - RNA, 19 nt, Artificial Sequence
  Description of Artificial Sequence: Synthetic oligonucleotide
  Sense strand starting at position 1466 of SEQ ID NO: 585457
cauggugucuccuccuaga

SEQ ID NO: 641411 - RNA, 19 nt, Artificial Sequence
  Description of Artificial Sequence: Synthetic oligonucleotide
  Antisense strand to SEQ ID NO: 641410
ucuaggaggagacaccaug

SEQ ID NO: 641412 - RNA, 19 nt, Artificial Sequence
  Description of Artificial Sequence: Synthetic oligonucleotide
  Sense strand starting at position 1469 of SEQ ID NO: 585457
ggugucuccuccuagaacu

SEQ ID NO: 641413 - RNA, 19 nt, Artificial Sequence
  Description of Artificial Sequence: Synthetic oligonucleotide
  Antisense strand to SEQ ID NO: 641412
aguucuaggaggagacacc

SEQ ID NO: 641414 - RNA, 19 nt, Artificial Sequence
  Description of Artificial Sequence: Synthetic oligonucleotide
  Sense strand starting at position 1583 of SEQ ID NO: 585457
uguagucuccugcgugcaa

SEQ ID NO: 641415 - RNA, 19 nt, Artificial Sequence
  Description of Artificial Sequence: Synthetic oligonucleotide
  Antisense strand to SEQ ID NO: 641414
uugcacgcaggagacuaca

SEQ ID NO: 641416 - RNA, 19 nt, Artificial Sequence
  Description of Artificial Sequence: Synthetic oligonucleotide
  Sense strand starting at position 1584 of SEQ ID NO: 585457
guagucuccugcgugcaaa

SEQ ID NO: 641417 - RNA, 19 nt, Artificial Sequence
  Description of Artificial Sequence: Synthetic oligonucleotide
  Antisense strand to SEQ ID NO: 641416
uuugcacgcaggagacuac

SEQ ID NO: 641418 - RNA, 19 nt, Artificial Sequence
  Description of Artificial Sequence: Synthetic oligonucleotide
  Sense strand starting at position 1685 of SEQ ID NO: 585457
ggguucuuaucuugaacca

SEQ ID NO: 641419 - RNA, 19 nt, Artificial Sequence
  Description of Artificial Sequence: Synthetic oligonucleotide
  Antisense strand to SEQ ID NO: 641418
ugguucaagauaagaaccc

SEQ ID NO: 641420 - RNA, 19 nt, Artificial Sequence
  Description of Artificial Sequence: Synthetic oligonucleotide
  Sense strand starting at position 1822 of SEQ ID NO: 585457
ugggaacucugggucauca

SEQ ID NO: 641421 - RNA, 19 nt, Artificial Sequence
  Description of Artificial Sequence: Synthetic oligonucleotide
  Antisense strand to SEQ ID NO: 641420
ugaugacccagaguuccca

SEQ ID NO: 641422 - RNA, 19 nt, Artificial Sequence
  Description of Artificial Sequence: Synthetic oligonucleotide
  Sense strand starting at position 1826 of SEQ ID NO: 585457
aacucugggucaucagacu

SEQ ID NO: 641423 - RNA, 19 nt, Artificial Sequence
  Description of Artificial Sequence: Synthetic oligonucleotide
  Antisense strand to SEQ ID NO: 641422
agucugaugacccagaguu

SEQ ID NO: 641424 - RNA, 19 nt, Artificial Sequence
  Description of Artificial Sequence: Synthetic oligonucleotide
  Sense strand starting at position 1898 of SEQ ID NO: 585457
cucuguaccgccugacaga

SEQ ID NO: 641425 - RNA, 19 nt, Artificial Sequence
  Description of Artificial Sequence: Synthetic oligonucleotide
  Antisense strand to SEQ ID NO: 641424
ucugucaggcgguacagag

SEQ ID NO: 641426 - RNA, 19 nt, Artificial Sequence
  Description of Artificial Sequence: Synthetic oligonucleotide
  Sense strand starting at position 1899 of SEQ ID NO: 585457
ucuguaccgccugacagau

SEQ ID NO: 641427 - RNA, 19 nt, Artificial Sequence
  Description of Artificial Sequence: Synthetic oligonucleotide
  Antisense strand to SEQ ID NO: 641426
aucugucaggcgguacaga

SEQ ID NO: 641428 - RNA, 19 nt, Artificial Sequence
  Description of Artificial Sequence: Synthetic oligonucleotide
  Sense strand starting at position 2720 of SEQ ID NO: 585457
cagggaagcugagcauaau

SEQ ID NO: 641429 - RNA, 19 nt, Artificial Sequence
  Description of Artificial Sequence: Synthetic oligonucleotide
  Antisense strand to SEQ ID NO: 641428
auuaugcucagcuucccug

SEQ ID NO: 641430 - RNA, 19 nt, Artificial Sequence
  Description of Artificial Sequence: Synthetic oligonucleotide
  Sense strand starting at position 2800 of SEQ ID NO: 585457
gggauagagucauaugcag

SEQ ID NO: 641431 - RNA, 19 nt, Artificial Sequence
  Description of Artificial Sequence: Synthetic oligonucleotide
  Antisense strand to SEQ ID NO: 641430
cugcauaugacucuauccc

SEQ ID NO: 641432 - RNA, 19 nt, Artificial Sequence
  Description of Artificial Sequence: Synthetic oligonucleotide
  Sense strand starting at position 2824 of SEQ ID NO: 585457
gguaucguggucagugcau

SEQ ID NO: 641433 - RNA, 19 nt, Artificial Sequence
  Description of Artificial Sequence: Synthetic oligonucleotide
  Antisense strand to SEQ ID NO: 641432
augcacugaccacgauacc

SEQ ID NO: 641434 - RNA, 19 nt, Artificial Sequence
  Description of Artificial Sequence: Synthetic oligonucleotide
  Sense strand starting at position 2830 of SEQ ID NO: 585457
guggucagugcaugcuaau

SEQ ID NO: 641435 - RNA, 19 nt, Artificial Sequence
  Description of Artificial Sequence: Synthetic oligonucleotide
  Antisense strand to SEQ ID NO: 641434
auuagcaugcacugaccac

SEQ ID NO: 641436 - RNA, 19 nt, Artificial Sequence
  Description of Artificial Sequence: Synthetic oligonucleotide
  Sense strand starting at position 2890 of SEQ ID NO: 585457
gguggagcuuggaauggua

SEQ ID NO: 641437 - RNA, 19 nt, Artificial Sequence
  Description of Artificial Sequence: Synthetic oligonucleotide
  Antisense strand to SEQ ID NO: 641436
uaccauuccaagcuccacc

SEQ ID NO: 641438 - RNA, 19 nt, Artificial Sequence
  Description of Artificial Sequence: Synthetic oligonucleotide
  Sense strand starting at position 3095 of SEQ ID NO: 585457
gcuuguucuccuugaauuu

SEQ ID NO: 641439 - RNA, 19 nt, Artificial Sequence
  Description of Artificial Sequence: Synthetic oligonucleotide
  Antisense strand to SEQ ID NO: 641438
aaauucaaggagaacaagc

SEQ ID NO: 641440 - RNA, 19 nt, Artificial Sequence
  Description of Artificial Sequence: Synthetic oligonucleotide
  Sense strand starting at position 3117 of SEQ ID NO: 585457
uuguuuauauggcagagaa

SEQ ID NO: 641441 - RNA, 19 nt, Artificial Sequence
  Description of Artificial Sequence: Synthetic oligonucleotide
  Antisense strand to SEQ ID NO: 641440
uucucugccauauaaacaa

SEQ ID NO: 641442 - RNA, 19 nt, Artificial Sequence
  Description of Artificial Sequence: Synthetic oligonucleotide
  Sense strand starting at position 3205 of SEQ ID NO: 585457
cuugacauaucugaaggga

SEQ ID NO: 641443 - RNA, 19 nt, Artificial Sequence
  Description of Artificial Sequence: Synthetic oligonucleotide
  Antisense strand to SEQ ID NO: 641442
ucccuucagauaugucaag

SEQ ID NO: 641444 - RNA, 19 nt, Artificial Sequence
  Description of Artificial Sequence: Synthetic oligonucleotide
  Sense strand starting at position 3246 of SEQ ID NO: 585457
auggaagacuuccauucuu

SEQ ID NO: 641445 - RNA, 19 nt, Artificial Sequence
  Description of Artificial Sequence: Synthetic oligonucleotide
  Antisense strand to SEQ ID NO: 641444
aagaauggaagucuuccau

SEQ ID NO: 641446 - RNA, 19 nt, Artificial Sequence
  Description of Artificial Sequence: Synthetic oligonucleotide
  Sense strand starting at position 3313 of SEQ ID NO: 585457
uuuggagagcgggaguaau

SEQ ID NO: 641447 - RNA, 19 nt, Artificial Sequence
  Description of Artificial Sequence: Synthetic oligonucleotide
  Antisense strand to SEQ ID NO: 641446
auuacucccgcucuccaaa

SEQ ID NO: 641448 - RNA, 19 nt, Artificial Sequence
  Description of Artificial Sequence: Synthetic oligonucleotide
  Sense strand starting at position 3324 of SEQ ID NO: 585457
ggaguaaugaagugagagu

SEQ ID NO: 641449 - RNA, 19 nt, Artificial Sequence
  Description of Artificial Sequence: Synthetic oligonucleotide
  Antisense strand to SEQ ID NO: 641448
acucucacuucauuacucc

SEQ ID NO: 641450 - RNA, 19 nt, Artificial Sequence
  Description of Artificial Sequence: Synthetic oligonucleotide
  Sense strand starting at position 3473 of SEQ ID NO: 585457
ucccuuauuugagcuguuu

SEQ ID NO: 641451 - RNA, 19 nt, Artificial Sequence
  Description of Artificial Sequence: Synthetic oligonucleotide
  Antisense strand to SEQ ID NO: 641450
aaacagcucaaauaaggga

SEQ ID NO: 641452 - RNA, 19 nt, Artificial Sequence
  Description of Artificial Sequence: Synthetic oligonucleotide
  Sense strand starting at position 3571 of SEQ ID NO: 585457
aggagaugcuugccagcaa

SEQ ID NO: 641453 - RNA, 19 nt, Artificial Sequence
  Description of Artificial Sequence: Synthetic oligonucleotide
  Antisense strand to SEQ ID NO: 641452
uugcuggcaagcaucuccu

SEQ ID NO: 641454 - RNA, 19 nt, Artificial Sequence
  Description of Artificial Sequence: Synthetic oligonucleotide
  Sense strand starting at position 3572 of SEQ ID NO: 585457
ggagaugcuugccagcaaa

SEQ ID NO: 641455 - RNA, 19 nt, Artificial Sequence
  Description of Artificial Sequence: Synthetic oligonucleotide
  Antisense strand to SEQ ID NO: 641454
uuugcuggcaagcaucucc

SEQ ID NO: 641456 - RNA, 19 nt, Artificial Sequence
  Description of Artificial Sequence: Synthetic oligonucleotide
  Sense strand starting at position 3589 of SEQ ID NO: 585457
aaagcauugucaguugcaa

SEQ ID NO: 641457 - RNA, 19 nt, Artificial Sequence
  Description of Artificial Sequence: Synthetic oligonucleotide
  Antisense strand to SEQ ID NO: 641456
uugcaacugacaaugcuuu

SEQ ID NO: 641458 - RNA, 19 nt, Artificial Sequence
  Description of Artificial Sequence: Synthetic oligonucleotide
  Sense strand starting at position 3593 of SEQ ID NO: 585457
cauugucaguugcaaggau

SEQ ID NO: 641459 - RNA, 19 nt, Artificial Sequence
  Description of Artificial Sequence: Synthetic oligonucleotide
  Antisense strand to SEQ ID NO: 641458
auccuugcaacugacaaug

SEQ ID NO: 641460 - RNA, 19 nt, Artificial Sequence
  Description of Artificial Sequence: Synthetic oligonucleotide
  Sense strand starting at position 3601 of SEQ ID NO: 585457
guugcaaggauuugccuga

SEQ ID NO: 641461 - RNA, 19 nt, Artificial Sequence
  Description of Artificial Sequence: Synthetic oligonucleotide
  Antisense strand to SEQ ID NO: 641460
ucaggcaaauccuugcaac

SEQ ID NO: 641462 - RNA, 19 nt, Artificial Sequence
  Description of Artificial Sequence: Synthetic oligonucleotide
  Sense strand starting at position 3661 of SEQ ID NO: 585457
acagguuguguuuaagaga

SEQ ID NO: 641463 - RNA, 19 nt, Artificial Sequence
  Description of Artificial Sequence: Synthetic oligonucleotide
  Antisense strand to SEQ ID NO: 641462
ucucuuaaacacaaccugu

SEQ ID NO: 641464 - RNA, 19 nt, Artificial Sequence
  Description of Artificial Sequence: Synthetic oligonucleotide
  Sense strand starting at position 3664 of SEQ ID NO: 585457
gguuguguuuaagagacca

SEQ ID NO: 641465 - RNA, 19 nt, Artificial Sequence
  Description of Artificial Sequence: Synthetic oligonucleotide
  Antisense strand to SEQ ID NO: 641464
uggucucuuaaacacaacc

SEQ ID NO: 641466 - RNA, 19 nt, Artificial Sequence
  Description of Artificial Sequence: Synthetic oligonucleotide
  Sense strand starting at position 65 of SEQ ID NO: 585458
acaguuaaugggugguaca

SEQ ID NO: 641467 - RNA, 19 nt, Artificial Sequence
  Description of Artificial Sequence: Synthetic oligonucleotide
  Antisense strand to SEQ ID NO: 641466
uguaccacccauuaacugu

SEQ ID NO: 641468 - RNA, 19 nt, Artificial Sequence
  Description of Artificial Sequence: Synthetic oligonucleotide
  Sense strand starting at position 155 of SEQ ID NO: 585458
ggauguagugccuguuaaa

SEQ ID NO: 641469 - RNA, 19 nt, Artificial Sequence
  Description of Artificial Sequence: Synthetic oligonucleotide
  Antisense strand to SEQ ID NO: 641468
uuuaacaggcacuacaucc

SEQ ID NO: 641470 - RNA, 19 nt, Artificial Sequence
  Description of Artificial Sequence: Synthetic oligonucleotide
  Sense strand starting at position 217 of SEQ ID NO: 585458
agcaguacuuagcuauaua

SEQ ID NO: 641471 - RNA, 19 nt, Artificial Sequence
  Description of Artificial Sequence: Synthetic oligonucleotide
  Antisense strand to SEQ ID NO: 641470
uauauagcuaaguacugcu

SEQ ID NO: 641472 - RNA, 19 nt, Artificial Sequence
  Description of Artificial Sequence: Synthetic oligonucleotide
  Sense strand starting at position 220 of SEQ ID NO: 585458
aguacuuagcuauauagaa

SEQ ID NO: 641473 - RNA, 19 nt, Artificial Sequence
  Description of Artificial Sequence: Synthetic oligonucleotide
  Antisense strand to SEQ ID NO: 641472
uucuauauagcuaaguacu

SEQ ID NO: 641474 - RNA, 19 nt, Artificial Sequence
  Description of Artificial Sequence: Synthetic oligonucleotide
  Sense strand starting at position 256 of SEQ ID NO: 585458
agaugacauugcuuuauga

SEQ ID NO: 641475 - RNA, 19 nt, Artificial Sequence
  Description of Artificial Sequence: Synthetic oligonucleotide
  Antisense strand to SEQ ID NO: 641474
ucauaaagcaaugucaucu

SEQ ID NO: 641476 - RNA, 19 nt, Artificial Sequence
  Description of Artificial Sequence: Synthetic oligonucleotide
  Sense strand starting at position 258 of SEQ ID NO: 585458
augacauugcuuuaugauc

SEQ ID NO: 641477 - RNA, 19 nt, Artificial Sequence
  Description of Artificial Sequence: Synthetic oligonucleotide
  Antisense strand to SEQ ID NO: 641476
gaucauaaagcaaugucau

SEQ ID NO: 641478 - RNA, 19 nt, Artificial Sequence
  Description of Artificial Sequence: Synthetic oligonucleotide
  Sense strand starting at position 294 of SEQ ID NO: 585458
aagguagaguccuucuguu

SEQ ID NO: 641479 - RNA, 19 nt, Artificial Sequence
  Description of Artificial Sequence: Synthetic oligonucleotide
  Antisense strand to SEQ ID NO: 641478
aacagaaggacucuaccuu

SEQ ID NO: 641480 - RNA, 19 nt, Artificial Sequence
  Description of Artificial Sequence: Synthetic oligonucleotide
  Sense strand starting at position 360 of SEQ ID NO: 585458
guugcuaaugugccuuauu

SEQ ID NO: 641481 - RNA, 19 nt, Artificial Sequence
  Description of Artificial Sequence: Synthetic oligonucleotide
  Antisense strand to SEQ ID NO: 641480
aauaaggcacauuagcaac

SEQ ID NO: 641482 - RNA, 19 nt, Artificial Sequence
  Description of Artificial Sequence: Synthetic oligonucleotide
  Sense strand starting at position 361 of SEQ ID NO: 585458
uugcuaaugugccuuauuu

SEQ ID NO: 641483 - RNA, 19 nt, Artificial Sequence
  Description of Artificial Sequence: Synthetic oligonucleotide
  Antisense strand to SEQ ID NO: 641482
aaauaaggcacauuagcaa

SEQ ID NO: 641484 - RNA, 19 nt, Artificial Sequence
  Description of Artificial Sequence: Synthetic oligonucleotide
  Sense strand starting at position 418 of SEQ ID NO: 585458
acagaaguccuaggauucu

SEQ ID NO: 641485 - RNA, 19 nt, Artificial Sequence
  Description of Artificial Sequence: Synthetic oligonucleotide
  Antisense strand to SEQ ID NO: 641484
agaauccuaggacuucugu

SEQ ID NO: 641486 - RNA, 19 nt, Artificial Sequence
  Description of Artificial Sequence: Synthetic oligonucleotide
  Sense strand starting at position 477 of SEQ ID NO: 585458
ggagcugccuucuccauuu

SEQ ID NO: 641487 - RNA, 19 nt, Artificial Sequence
  Description of Artificial Sequence: Synthetic oligonucleotide
  Antisense strand to SEQ ID NO: 641486
aaauggagaaggcagcucc

SEQ ID NO: 641488 - RNA, 19 nt, Artificial Sequence
  Description of Artificial Sequence: Synthetic oligonucleotide
  Sense strand starting at position 568 of SEQ ID NO: 585458
cucgcuugaguucaggaau

SEQ ID NO: 641489 - RNA, 19 nt, Artificial Sequence
  Description of Artificial Sequence: Synthetic oligonucleotide
  Antisense strand to SEQ ID NO: 641488
auuccugaacucaagcgag

SEQ ID NO: 641490 - RNA, 19 nt, Artificial Sequence
  Description of Artificial Sequence: Synthetic oligonucleotide
  Sense strand starting at position 587 of SEQ ID NO: 585458
ucaagaccugcauguacaa

SEQ ID NO: 641491 - RNA, 19 nt, Artificial Sequence
  Description of Artificial Sequence: Synthetic oligonucleotide
  Antisense strand to SEQ ID NO: 641490
uuguacaugcaggucuuga

SEQ ID NO: 641492 - RNA, 19 nt, Artificial Sequence
  Description of Artificial Sequence: Synthetic oligonucleotide
  Sense strand starting at position 701 of SEQ ID NO: 585458
ucuugcuuccauuaaggaa

SEQ ID NO: 641493 - RNA, 19 nt, Artificial Sequence
  Description of Artificial Sequence: Synthetic oligonucleotide
  Antisense strand to SEQ ID NO: 641492
uuccuuaauggaagcaaga

SEQ ID NO: 641494 - RNA, 19 nt, Artificial Sequence
  Description of Artificial Sequence: Synthetic oligonucleotide
  Sense strand starting at position 752 of SEQ ID NO: 585458
gagugcaaucacugagaaa

SEQ ID NO: 641495 - RNA, 19 nt, Artificial Sequence
  Description of Artificial Sequence: Synthetic oligonucleotide
  Antisense strand to SEQ ID NO: 641494
uuucucagugauugcacuc

SEQ ID NO: 641496 - RNA, 19 nt, Artificial Sequence
  Description of Artificial Sequence: Synthetic oligonucleotide
  Sense strand starting at position 867 of SEQ ID NO: 585458
ccggauuucucccacggga

SEQ ID NO: 641497 - RNA, 19 nt, Artificial Sequence
  Description of Artificial Sequence: Synthetic oligonucleotide
  Antisense strand to SEQ ID NO: 641496
ucccgugggagaaauccgg

SEQ ID NO: 641498 - RNA, 19 nt, Artificial Sequence
  Description of Artificial Sequence: Synthetic oligonucleotide
  Sense strand starting at position 1398 of SEQ ID NO: 585458
auugauagguuccugggau

SEQ ID NO: 641499 - RNA, 19 nt, Artificial Sequence
  Description of Artificial Sequence: Synthetic oligonucleotide
  Antisense strand to SEQ ID NO: 641498
aucccaggaaccuaucaau

SEQ ID NO: 641500 - RNA, 19 nt, Artificial Sequence
  Description of Artificial Sequence: Synthetic oligonucleotide
  Sense strand starting at position 1692 of SEQ ID NO: 585458
cgcaucucugaggaaacaa

SEQ ID NO: 641501 - RNA, 19 nt, Artificial Sequence
  Description of Artificial Sequence: Synthetic oligonucleotide
  Antisense strand to SEQ ID NO: 641500
uuguuuccucagagaugcg

SEQ ID NO: 641502 - RNA, 19 nt, Artificial Sequence
  Description of Artificial Sequence: Synthetic oligonucleotide
  Sense strand starting at position 2076 of SEQ ID NO: 585458
cugacaucaucugcggauu

SEQ ID NO: 641503 - RNA, 19 nt, Artificial Sequence
  Description of Artificial Sequence: Synthetic oligonucleotide
  Antisense strand to SEQ ID NO: 641502
aauccgcagaugaugucag

SEQ ID NO: 641504 - RNA, 19 nt, Artificial Sequence
  Description of Artificial Sequence: Synthetic oligonucleotide
  Sense strand starting at position 2887 of SEQ ID NO: 585458
aaguuaggccaacaguaau

SEQ ID NO: 641505 - RNA, 19 nt, Artificial Sequence
  Description of Artificial Sequence: Synthetic oligonucleotide
  Antisense strand to SEQ ID NO: 641504
auuacuguuggccuaacuu

SEQ ID NO: 641506 - RNA, 19 nt, Artificial Sequence
  Description of Artificial Sequence: Synthetic oligonucleotide
  Sense strand starting at position 2901 of SEQ ID NO: 585458
guaaucgaucgcgccacua

SEQ ID NO: 641507 - RNA, 19 nt, Artificial Sequence
  Description of Artificial Sequence: Synthetic oligonucleotide
  Antisense strand to SEQ ID NO: 641506
uaguggcgcgaucgauuac

SEQ ID NO: 641508 - RNA, 19 nt, Artificial Sequence
  Description of Artificial Sequence: Synthetic oligonucleotide
  Sense strand starting at position 2992 of SEQ ID NO: 585458
cggaauucuaucgaauguu

SEQ ID NO: 641509 - RNA, 19 nt, Artificial Sequence
  Description of Artificial Sequence: Synthetic oligonucleotide
  Antisense strand to SEQ ID NO: 641508
aacauucgauagaauuccg

SEQ ID NO: 641510 - RNA, 19 nt, Artificial Sequence
  Description of Artificial Sequence: Synthetic oligonucleotide
  Sense strand starting at position 3002 of SEQ ID NO: 585458
ucgaauguuuggguacaga

SEQ ID NO: 641511 - RNA, 19 nt, Artificial Sequence
  Description of Artificial Sequence: Synthetic oligonucleotide
  Antisense strand to SEQ ID NO: 641510
ucuguacccaaacauucga

SEQ ID NO: 641512 - RNA, 19 nt, Artificial Sequence
  Description of Artificial Sequence: Synthetic oligonucleotide
  Sense strand starting at position 3005 of SEQ ID NO: 585458
aauguuuggguacagaagu

SEQ ID NO: 641513 - RNA, 19 nt, Artificial Sequence
  Description of Artificial Sequence: Synthetic oligonucleotide
  Antisense strand to SEQ ID NO: 641512
acuucuguacccaaacauu

SEQ ID NO: 641514 - RNA, 19 nt, Artificial Sequence
  Description of Artificial Sequence: Synthetic oligonucleotide
  Sense strand starting at position 3114 of SEQ ID NO: 585458
gauaaaguaucguuucccu

SEQ ID NO: 641515 - RNA, 19 nt, Artificial Sequence
  Description of Artificial Sequence: Synthetic oligonucleotide
  Antisense strand to SEQ ID NO: 641514
agggaaacgauacuuuauc

SEQ ID NO: 641516 - RNA, 19 nt, Artificial Sequence
  Description of Artificial Sequence: Synthetic oligonucleotide
  Sense strand starting at position 3121 of SEQ ID NO: 585458
uaucguuucccugguaaca

SEQ ID NO: 641517 - RNA, 19 nt, Artificial Sequence
  Description of Artificial Sequence: Synthetic oligonucleotide
  Antisense strand to SEQ ID NO: 641516
uguuaccagggaaacgaua

SEQ ID NO: 641518 - RNA, 19 nt, Artificial Sequence
  Description of Artificial Sequence: Synthetic oligonucleotide
  Sense strand starting at position 3152 of SEQ ID NO: 585458
uugagaagcuucuccgauu

SEQ ID NO: 641519 - RNA, 19 nt, Artificial Sequence
  Description of Artificial Sequence: Synthetic oligonucleotide
  Antisense strand to SEQ ID NO: 641518
aaucggagaagcuucucaa

SEQ ID NO: 641520 - RNA, 19 nt, Artificial Sequence
  Description of Artificial Sequence: Synthetic oligonucleotide
  Sense strand starting at position 3153 of SEQ ID NO: 585458
ugagaagcuucuccgauug

SEQ ID NO: 641521 - RNA, 19 nt, Artificial Sequence
  Description of Artificial Sequence: Synthetic oligonucleotide
  Antisense strand to SEQ ID NO: 641520
caaucggagaagcuucuca

SEQ ID NO: 641522 - RNA, 19 nt, Artificial Sequence
  Description of Artificial Sequence: Synthetic oligonucleotide
  Sense strand starting at position 3262 of SEQ ID NO: 585458
ugaauugaaagacgucuga

SEQ ID NO: 641523 - RNA, 19 nt, Artificial Sequence
  Description of Artificial Sequence: Synthetic oligonucleotide
  Antisense strand to SEQ ID NO: 641522
ucagacgucuuucaauuca

SEQ ID NO: 641524 - RNA, 19 nt, Artificial Sequence
  Description of Artificial Sequence: Synthetic oligonucleotide
  Sense strand starting at position 3266 of SEQ ID NO: 585458
uugaaagacgucugauguu

SEQ ID NO: 641525 - RNA, 19 nt, Artificial Sequence
  Description of Artificial Sequence: Synthetic oligonucleotide
  Antisense strand to SEQ ID NO: 641524
aacaucagacgucuuucaa

SEQ ID NO: 641526 - RNA, 19 nt, Artificial Sequence
  Description of Artificial Sequence: Synthetic oligonucleotide
  Sense strand starting at position 3391 of SEQ ID NO: 585458
auccuuacuuggguucuaa

SEQ ID NO: 641527 - RNA, 19 nt, Artificial Sequence
  Description of Artificial Sequence: Synthetic oligonucleotide
  Antisense strand to SEQ ID NO: 641526
uuagaacccaaguaaggau

SEQ ID NO: 641528 - RNA, 19 nt, Artificial Sequence
  Description of Artificial Sequence: Synthetic oligonucleotide
  Sense strand starting at position 3446 of SEQ ID NO: 585458
ucaguauccuuggcugacu

SEQ ID NO: 641529 - RNA, 19 nt, Artificial Sequence
  Description of Artificial Sequence: Synthetic oligonucleotide
  Antisense strand to SEQ ID NO: 641528
agucagccaaggauacuga

SEQ ID NO: 641530 - RNA, 19 nt, Artificial Sequence
  Description of Artificial Sequence: Synthetic oligonucleotide
  Sense strand starting at position 3457 of SEQ ID NO: 585458
ggcugacucuuauugcaac

SEQ ID NO: 641531 - RNA, 19 nt, Artificial Sequence
  Description of Artificial Sequence: Synthetic oligonucleotide
  Antisense strand to SEQ ID NO: 641530
guugcaauaagagucagcc

SEQ ID NO: 641532 - RNA, 19 nt, Artificial Sequence
  Description of Artificial Sequence: Synthetic oligonucleotide
  Sense strand starting at position 3502 of SEQ ID NO: 585458
ucaaauauucucuggugcu

SEQ ID NO: 641533 - RNA, 19 nt, Artificial Sequence
  Description of Artificial Sequence: Synthetic oligonucleotide
  Antisense strand to SEQ ID NO: 641532
agcaccagagaauauuuga

SEQ ID NO: 641534 - RNA, 19 nt, Artificial Sequence
  Description of Artificial Sequence: Synthetic oligonucleotide
  Sense strand starting at position 3549 of SEQ ID NO: 585458
uugagugacuacuccuaac

SEQ ID NO: 641535 - RNA, 19 nt, Artificial Sequence
  Description of Artificial Sequence: Synthetic oligonucleotide
  Antisense strand to SEQ ID NO: 641534
guuaggaguagucacucaa

SEQ ID NO: 641536 - RNA, 19 nt, Artificial Sequence
  Description of Artificial Sequence: Synthetic oligonucleotide
  Sense strand starting at position 3568 of SEQ ID NO: 585458
uuuauagucuagcccugau

SEQ ID NO: 641537 - RNA, 19 nt, Artificial Sequence
  Description of Artificial Sequence: Synthetic oligonucleotide
  Antisense strand to SEQ ID NO: 641536
aucagggcuagacuauaaa

SEQ ID NO: 641538 - RNA, 19 nt, Artificial Sequence
  Description of Artificial Sequence: Synthetic oligonucleotide
  Sense strand starting at position 3831 of SEQ ID NO: 585458
cacaucugaucuguaagga

SEQ ID NO: 641539 - RNA, 19 nt, Artificial Sequence
  Description of Artificial Sequence: Synthetic oligonucleotide
  Antisense strand to SEQ ID NO: 641538
uccuuacagaucagaugug

SEQ ID NO: 641540 - RNA, 19 nt, Artificial Sequence
  Description of Artificial Sequence: Synthetic oligonucleotide
  Sense strand starting at position 3935 of SEQ ID NO: 585458
agucucucaccuggauuau

SEQ ID NO: 641541 - RNA, 19 nt, Artificial Sequence
  Description of Artificial Sequence: Synthetic oligonucleotide
  Antisense strand to SEQ ID NO: 641540
auaauccaggugagagacu

SEQ ID NO: 641542 - RNA, 19 nt, Artificial Sequence
  Description of Artificial Sequence: Synthetic oligonucleotide
  Sense strand starting at position 3957 of SEQ ID NO: 585458
aguagccuccucguuagua

SEQ ID NO: 641543 - RNA, 19 nt, Artificial Sequence
  Description of Artificial Sequence: Synthetic oligonucleotide
  Antisense strand to SEQ ID NO: 641542
uacuaacgaggaggcuacu

SEQ ID NO: 641544 - RNA, 19 nt, Artificial Sequence
  Description of Artificial Sequence: Synthetic oligonucleotide
  Sense strand starting at position 3965 of SEQ ID NO: 585458
ccucguuaguaucucauau

SEQ ID NO: 641545 - RNA, 19 nt, Artificial Sequence
  Description of Artificial Sequence: Synthetic oligonucleotide
  Antisense strand to SEQ ID NO: 641544
auaugagauacuaacgagg

SEQ ID NO: 641546 - RNA, 19 nt, Artificial Sequence
  Description of Artificial Sequence: Synthetic oligonucleotide
  Sense strand starting at position 65 of SEQ ID NO: 585459
aucacagcauugguuaaau

SEQ ID NO: 641547 - RNA, 19 nt, Artificial Sequence
  Description of Artificial Sequence: Synthetic oligonucleotide
  Antisense strand to SEQ ID NO: 641546
auuuaaccaaugcugugau

SEQ ID NO: 641548 - RNA, 19 nt, Artificial Sequence
  Description of Artificial Sequence: Synthetic oligonucleotide
  Sense strand starting at position 95 of SEQ ID NO: 585459
agaagaaacuuagaagaca

SEQ ID NO: 641549 - RNA, 19 nt, Artificial Sequence
  Description of Artificial Sequence: Synthetic oligonucleotide
  Antisense strand to SEQ ID NO: 641548
ugucuucuaaguuucuucu

SEQ ID NO: 641550 - RNA, 19 nt, Artificial Sequence
  Description of Artificial Sequence: Synthetic oligonucleotide
  Sense strand starting at position 111 of SEQ ID NO: 585459
acaguagaagauugguuaa

SEQ ID NO: 641551 - RNA, 19 nt, Artificial Sequence
  Description of Artificial Sequence: Synthetic oligonucleotide
  Antisense strand to SEQ ID NO: 641550
uuaaccaaucuucuacugu

SEQ ID NO: 641552 - RNA, 19 nt, Artificial Sequence
  Description of Artificial Sequence: Synthetic oligonucleotide
  Sense strand starting at position 232 of SEQ ID NO: 585459
uguagauuauuauuaggag

SEQ ID NO: 641553 - RNA, 19 nt, Artificial Sequence
  Description of Artificial Sequence: Synthetic oligonucleotide
  Antisense strand to SEQ ID NO: 641552
cuccuaauaauaaucuaca

SEQ ID NO: 641554 - RNA, 19 nt, Artificial Sequence
  Description of Artificial Sequence: Synthetic oligonucleotide
  Sense strand starting at position 264 of SEQ ID NO: 585459
auuaaugaacaguguacau

SEQ ID NO: 641555 - RNA, 19 nt, Artificial Sequence
  Description of Artificial Sequence: Synthetic oligonucleotide
  Antisense strand to SEQ ID NO: 641554
auguacacuguucauuaau

SEQ ID NO: 641556 - RNA, 19 nt, Artificial Sequence
  Description of Artificial Sequence: Synthetic oligonucleotide
  Sense strand starting at position 281 of SEQ ID NO: 585459
augguauaugaucaugcua

SEQ ID NO: 641557 - RNA, 19 nt, Artificial Sequence
  Description of Artificial Sequence: Synthetic oligonucleotide
  Antisense strand to SEQ ID NO: 641556
uagcaugaucauauaccau

SEQ ID NO: 641558 - RNA, 19 nt, Artificial Sequence
  Description of Artificial Sequence: Synthetic oligonucleotide
  Sense strand starting at position 348 of SEQ ID NO: 585459
ugaggauauuggcuacaga

SEQ ID NO: 641559 - RNA, 19 nt, Artificial Sequence
  Description of Artificial Sequence: Synthetic oligonucleotide
  Antisense strand to SEQ ID NO: 641558
ucuguagccaauauccuca

SEQ ID NO: 641560 - RNA, 19 nt, Artificial Sequence
  Description of Artificial Sequence: Synthetic oligonucleotide
  Sense strand starting at position 497 of SEQ ID NO: 585459
cuguauuggcauuauauga

SEQ ID NO: 641561 - RNA, 19 nt, Artificial Sequence
  Description of Artificial Sequence: Synthetic oligonucleotide
  Antisense strand to SEQ ID NO: 641560
ucauauaaugccaauacag

SEQ ID NO: 641562 - RNA, 19 nt, Artificial Sequence
  Description of Artificial Sequence: Synthetic oligonucleotide
  Sense strand starting at position 508 of SEQ ID NO: 585459
uuauaugauccaugucuga

SEQ ID NO: 641563 - RNA, 19 nt, Artificial Sequence
  Description of Artificial Sequence: Synthetic oligonucleotide
  Antisense strand to SEQ ID NO: 641562
ucagacauggaucauauaa

SEQ ID NO: 641564 - RNA, 19 nt, Artificial Sequence
  Description of Artificial Sequence: Synthetic oligonucleotide
  Sense strand starting at position 581 of SEQ ID NO: 585459
uauaguguaccaugagaag

SEQ ID NO: 641565 - RNA, 19 nt, Artificial Sequence
  Description of Artificial Sequence: Synthetic oligonucleotide
  Antisense strand to SEQ ID NO: 641564
cuucucaugguacacuaua

SEQ ID NO: 641566 - RNA, 19 nt, Artificial Sequence
  Description of Artificial Sequence: Synthetic oligonucleotide
  Sense strand starting at position 620 of SEQ ID NO: 585459
gagcucuucgaggaugaca

SEQ ID NO: 641567 - RNA, 19 nt, Artificial Sequence
  Description of Artificial Sequence: Synthetic oligonucleotide
  Antisense strand to SEQ ID NO: 641566
ugucauccucgaagagcuc

SEQ ID NO: 641568 - RNA, 19 nt, Artificial Sequence
  Description of Artificial Sequence: Synthetic oligonucleotide
  Sense strand starting at position 1058 of SEQ ID NO: 585459
ucuuaagagcagcaugaaa

SEQ ID NO: 641569 - RNA, 19 nt, Artificial Sequence
  Description of Artificial Sequence: Synthetic oligonucleotide
  Antisense strand to SEQ ID NO: 641568
uuucaugcugcucuuaaga

SEQ ID NO: 641570 - RNA, 19 nt, Artificial Sequence
  Description of Artificial Sequence: Synthetic oligonucleotide
  Sense strand starting at position 1066 of SEQ ID NO: 585459
gcagcaugaaaguaaaugu

SEQ ID NO: 641571 - RNA, 19 nt, Artificial Sequence
  Description of Artificial Sequence: Synthetic oligonucleotide
  Antisense strand to SEQ ID NO: 641570
acauuuacuuucaugcugc

SEQ ID NO: 641572 - RNA, 19 nt, Artificial Sequence
  Description of Artificial Sequence: Synthetic oligonucleotide
  Sense strand starting at position 1599 of SEQ ID NO: 585459
uugacagcaguuugagaau

SEQ ID NO: 641573 - RNA, 19 nt, Artificial Sequence
  Description of Artificial Sequence: Synthetic oligonucleotide
  Antisense strand to SEQ ID NO: 641572
auucucaaacugcugucaa

SEQ ID NO: 641574 - RNA, 19 nt, Artificial Sequence
  Description of Artificial Sequence: Synthetic oligonucleotide
  Sense strand starting at position 1608 of SEQ ID NO: 585459
guuugagaaucacuaaacu

SEQ ID NO: 641575 - RNA, 19 nt, Artificial Sequence
  Description of Artificial Sequence: Synthetic oligonucleotide
  Antisense strand to SEQ ID NO: 641574
aguuuagugauucucaaac

SEQ ID NO: 641576 - RNA, 19 nt, Artificial Sequence
  Description of Artificial Sequence: Synthetic oligonucleotide
  Sense strand starting at position 1859 of SEQ ID NO: 585459
agacucgagcucugggaau

SEQ ID NO: 641577 - RNA, 19 nt, Artificial Sequence
  Description of Artificial Sequence: Synthetic oligonucleotide
  Antisense strand to SEQ ID NO: 641576
auucccagagcucgagucu

SEQ ID NO: 641578 - RNA, 19 nt, Artificial Sequence
  Description of Artificial Sequence: Synthetic oligonucleotide
  Sense strand starting at position 2378 of SEQ ID NO: 585459
cuaugauaaccucagugca

SEQ ID NO: 641579 - RNA, 19 nt, Artificial Sequence
  Description of Artificial Sequence: Synthetic oligonucleotide
  Antisense strand to SEQ ID NO: 641578
ugcacugagguuaucauag

SEQ ID NO: 641580 - RNA, 19 nt, Artificial Sequence
  Description of Artificial Sequence: Synthetic oligonucleotide
  Sense strand starting at position 2380 of SEQ ID NO: 585459
augauaaccucagugcaaa

SEQ ID NO: 641581 - RNA, 19 nt, Artificial Sequence
  Description of Artificial Sequence: Synthetic oligonucleotide
  Antisense strand to SEQ ID NO: 641580
uuugcacugagguuaucau

SEQ ID NO: 641582 - RNA, 19 nt, Artificial Sequence
  Description of Artificial Sequence: Synthetic oligonucleotide
  Sense strand starting at position 2381 of SEQ ID NO: 585459
ugauaaccucagugcaaau

SEQ ID NO: 641583 - RNA, 19 nt, Artificial Sequence
  Description of Artificial Sequence: Synthetic oligonucleotide
  Antisense strand to SEQ ID NO: 641582
auuugcacugagguuauca

SEQ ID NO: 641584 - RNA, 19 nt, Artificial Sequence
  Description of Artificial Sequence: Synthetic oligonucleotide
  Sense strand starting at position 2450 of SEQ ID NO: 585459
augcuacuuggucauaaua

SEQ ID NO: 641585 - RNA, 19 nt, Artificial Sequence
  Description of Artificial Sequence: Synthetic oligonucleotide
  Antisense strand to SEQ ID NO: 641584
uauuaugaccaaguagcau

SEQ ID NO: 641586 - RNA, 19 nt, Artificial Sequence
  Description of Artificial Sequence: Synthetic oligonucleotide
  Sense strand starting at position 2490 of SEQ ID NO: 585459
gcuagauucuauuugcuau

SEQ ID NO: 641587 - RNA, 19 nt, Artificial Sequence
  Description of Artificial Sequence: Synthetic oligonucleotide
  Antisense strand to SEQ ID NO: 641586
auagcaaauagaaucuagc

SEQ ID NO: 641588 - RNA, 19 nt, Artificial Sequence
  Description of Artificial Sequence: Synthetic oligonucleotide
  Sense strand starting at position 2571 of SEQ ID NO: 585459
cuguuaugucuugaaugau

SEQ ID NO: 641589 - RNA, 19 nt, Artificial Sequence
  Description of Artificial Sequence: Synthetic oligonucleotide
  Antisense strand to SEQ ID NO: 641588
aucauucaagacauaacag

SEQ ID NO: 641590 - RNA, 19 nt, Artificial Sequence
  Description of Artificial Sequence: Synthetic oligonucleotide
  Sense strand starting at position 2574 of SEQ ID NO: 585459
uuaugucuugaaugaucag

SEQ ID NO: 641591 - RNA, 19 nt, Artificial Sequence
  Description of Artificial Sequence: Synthetic oligonucleotide
  Antisense strand to SEQ ID NO: 641590
cugaucauucaagacauaa

SEQ ID NO: 641592 - RNA, 19 nt, Artificial Sequence
  Description of Artificial Sequence: Synthetic oligonucleotide
  Sense strand starting at position 2813 of SEQ ID NO: 585459
ccauguuguccacacaaua

SEQ ID NO: 641593 - RNA, 19 nt, Artificial Sequence
  Description of Artificial Sequence: Synthetic oligonucleotide
  Antisense strand to SEQ ID NO: 641592
uauuguguggacaacaugg

SEQ ID NO: 641594 - RNA, 19 nt, Artificial Sequence
  Description of Artificial Sequence: Synthetic oligonucleotide
  Sense strand starting at position 3011 of SEQ ID NO: 585459
uaggguuaguuucuauaga

SEQ ID NO: 641595 - RNA, 19 nt, Artificial Sequence
  Description of Artificial Sequence: Synthetic oligonucleotide
  Antisense strand to SEQ ID NO: 641594
ucuauagaaacuaacccua

SEQ ID NO: 641596 - RNA, 19 nt, Artificial Sequence
  Description of Artificial Sequence: Synthetic oligonucleotide
  Sense strand starting at position 3161 of SEQ ID NO: 585459
ucuaaagagcuuuagcuua

SEQ ID NO: 641597 - RNA, 19 nt, Artificial Sequence
  Description of Artificial Sequence: Synthetic oligonucleotide
  Antisense strand to SEQ ID NO: 641596
uaagcuaaagcucuuuaga

SEQ ID NO: 641598 - RNA, 19 nt, Artificial Sequence
  Description of Artificial Sequence: Synthetic oligonucleotide
  Sense strand starting at position 3202 of SEQ ID NO: 585459
accauaauagagugugaua

SEQ ID NO: 641599 - RNA, 19 nt, Artificial Sequence
  Description of Artificial Sequence: Synthetic oligonucleotide
  Antisense strand to SEQ ID NO: 641598
uaucacacucuauuauggu

SEQ ID NO: 641600 - RNA, 19 nt, Artificial Sequence
  Description of Artificial Sequence: Synthetic oligonucleotide
  Sense strand starting at position 3204 of SEQ ID NO: 585459
cauaauagagugugauaug

SEQ ID NO: 641601 - RNA, 19 nt, Artificial Sequence
  Description of Artificial Sequence: Synthetic oligonucleotide
  Antisense strand to SEQ ID NO: 641600
cauaucacacucuauuaug

SEQ ID NO: 641602 - RNA, 19 nt, Artificial Sequence
  Description of Artificial Sequence: Synthetic oligonucleotide
  Sense strand starting at position 3216 of SEQ ID NO: 585459
ugauaugugcaauacuagu

SEQ ID NO: 641603 - RNA, 19 nt, Artificial Sequence
  Description of Artificial Sequence: Synthetic oligonucleotide
  Antisense strand to SEQ ID NO: 641602
acuaguauugcacauauca

SEQ ID NO: 641604 - RNA, 19 nt, Artificial Sequence
  Description of Artificial Sequence: Synthetic oligonucleotide
  Sense strand starting at position 3324 of SEQ ID NO: 585459
gauugcugugaacagcaua

SEQ ID NO: 641605 - RNA, 19 nt, Artificial Sequence
  Description of Artificial Sequence: Synthetic oligonucleotide
  Antisense strand to SEQ ID NO: 641604
uaugcuguucacagcaauc

SEQ ID NO: 641606 - RNA, 19 nt, Artificial Sequence
  Description of Artificial Sequence: Synthetic oligonucleotide
  Sense strand starting at position 3329 of SEQ ID NO: 585459
cugugaacagcauacuaua

SEQ ID NO: 641607 - RNA, 19 nt, Artificial Sequence
  Description of Artificial Sequence: Synthetic oligonucleotide
  Antisense strand to SEQ ID NO: 641606
uauaguaugcuguucacag

SEQ ID NO: 641608 - RNA, 19 nt, Artificial Sequence
  Description of Artificial Sequence: Synthetic oligonucleotide
  Sense strand starting at position 3514 of SEQ ID NO: 585459
gggacauuguuucuuggag

SEQ ID NO: 641609 - RNA, 19 nt, Artificial Sequence
  Description of Artificial Sequence: Synthetic oligonucleotide
  Antisense strand to SEQ ID NO: 641608
cuccaagaaacaauguccc

SEQ ID NO: 641610 - RNA, 19 nt, Artificial Sequence
  Description of Artificial Sequence: Synthetic oligonucleotide
  Sense strand starting at position 3515 of SEQ ID NO: 585459
ggacauuguuucuuggaga

SEQ ID NO: 641611 - RNA, 19 nt, Artificial Sequence
  Description of Artificial Sequence: Synthetic oligonucleotide
  Antisense strand to SEQ ID NO: 641610
ucuccaagaaacaaugucc

SEQ ID NO: 641612 - RNA, 19 nt, Artificial Sequence
  Description of Artificial Sequence: Synthetic oligonucleotide
  Sense strand starting at position 3607 of SEQ ID NO: 585459
cuuacaaguggguaaaguu

SEQ ID NO: 641613 - RNA, 19 nt, Artificial Sequence
  Description of Artificial Sequence: Synthetic oligonucleotide
  Antisense strand to SEQ ID NO: 641612
aacuuuacccacuuguaag

SEQ ID NO: 641614 - RNA, 19 nt, Artificial Sequence
  Description of Artificial Sequence: Synthetic oligonucleotide
  Sense strand starting at position 3729 of SEQ ID NO: 585459
gaacaagaagccugaguuc

SEQ ID NO: 641615 - RNA, 19 nt, Artificial Sequence
  Description of Artificial Sequence: Synthetic oligonucleotide
  Antisense strand to SEQ ID NO: 641614
gaacucaggcuucuuguuc

SEQ ID NO: 641616 - RNA, 19 nt, Artificial Sequence
  Description of Artificial Sequence: Synthetic oligonucleotide
  Sense strand starting at position 3743 of SEQ ID NO: 585459
aguucucagcguucaguuu

SEQ ID NO: 641617 - RNA, 19 nt, Artificial Sequence
  Description of Artificial Sequence: Synthetic oligonucleotide
  Antisense strand to SEQ ID NO: 641616
aaacugaacgcugagaacu

SEQ ID NO: 641618 - RNA, 19 nt, Artificial Sequence
  Description of Artificial Sequence: Synthetic oligonucleotide
  Sense strand starting at position 3887 of SEQ ID NO: 585459
cuuuauuagcacuacuagu

SEQ ID NO: 641619 - RNA, 19 nt, Artificial Sequence
  Description of Artificial Sequence: Synthetic oligonucleotide
  Antisense strand to SEQ ID NO: 641618
acuaguagugcuaauaaag

SEQ ID NO: 641620 - RNA, 19 nt, Artificial Sequence
  Description of Artificial Sequence: Synthetic oligonucleotide
  Sense strand starting at position 3900 of SEQ ID NO: 585459
acuaguauugcacagauua

SEQ ID NO: 641621 - RNA, 19 nt, Artificial Sequence
  Description of Artificial Sequence: Synthetic oligonucleotide
  Antisense strand to SEQ ID NO: 641620
uaaucugugcaauacuagu

SEQ ID NO: 641622 - RNA, 19 nt, Artificial Sequence
  Description of Artificial Sequence: Synthetic oligonucleotide
  Sense strand starting at position 3958 of SEQ ID NO: 585459
acuaaagcucuuuagagua

SEQ ID NO: 641623 - RNA, 19 nt, Artificial Sequence
  Description of Artificial Sequence: Synthetic oligonucleotide
  Antisense strand to SEQ ID NO: 641622
uacucuaaagagcuuuagu

SEQ ID NO: 641624 - RNA, 19 nt, Artificial Sequence
  Description of Artificial Sequence: Synthetic oligonucleotide
  Sense strand starting at position 3963 of SEQ ID NO: 585459
agcucuuuagaguagauac

SEQ ID NO: 641625 - RNA, 19 nt, Artificial Sequence
  Description of Artificial Sequence: Synthetic oligonucleotide
  Antisense strand to SEQ ID NO: 641624
guaucuacucuaaagagcu

SEQ ID NO: 641626 - RNA, 19 nt, Artificial Sequence
  Description of Artificial Sequence: Synthetic oligonucleotide
  Sense strand starting at position 104 of SEQ ID NO: 585460
cucacuauuccuuauguag

SEQ ID NO: 641627 - RNA, 19 nt, Artificial Sequence
  Description of Artificial Sequence: Synthetic oligonucleotide
  Antisense strand to SEQ ID NO: 641626
cuacauaaggaauagugag

SEQ ID NO: 641628 - RNA, 19 nt, Artificial Sequence
  Description of Artificial Sequence: Synthetic oligonucleotide
  Sense strand starting at position 115 of SEQ ID NO: 585460
uuauguaggcuuuagucaa

SEQ ID NO: 641629 - RNA, 19 nt, Artificial Sequence
  Description of Artificial Sequence: Synthetic oligonucleotide
  Antisense strand to SEQ ID NO: 641628
uugacuaaagccuacauaa

SEQ ID NO: 641630 - RNA, 19 nt, Artificial Sequence
  Description of Artificial Sequence: Synthetic oligonucleotide
  Sense strand starting at position 211 of SEQ ID NO: 585460
gguauuugcugaucaccuu

SEQ ID NO: 641631 - RNA, 19 nt, Artificial Sequence
  Description of Artificial Sequence: Synthetic oligonucleotide
  Antisense strand to SEQ ID NO: 641630
aaggugaucagcaaauacc

SEQ ID NO: 641632 - RNA, 19 nt, Artificial Sequence
  Description of Artificial Sequence: Synthetic oligonucleotide
  Sense strand starting at position 281 of SEQ ID NO: 585460
aaaggucucuccucaguga

SEQ ID NO: 641633 - RNA, 19 nt, Artificial Sequence
  Description of Artificial Sequence: Synthetic oligonucleotide
  Antisense strand to SEQ ID NO: 641632
ucacugaggagagaccuuu

SEQ ID NO: 641634 - RNA, 19 nt, Artificial Sequence
  Description of Artificial Sequence: Synthetic oligonucleotide
  Sense strand starting at position 284 of SEQ ID NO: 585460
ggucucuccucagugaaca

SEQ ID NO: 641635 - RNA, 19 nt, Artificial Sequence
  Description of Artificial Sequence: Synthetic oligonucleotide
  Antisense strand to SEQ ID NO: 641634
uguucacugaggagagacc

SEQ ID NO: 641636 - RNA, 19 nt, Artificial Sequence
  Description of Artificial Sequence: Synthetic oligonucleotide
  Sense strand starting at position 645 of SEQ ID NO: 585460
cuaucagaagccugaaucu

SEQ ID NO: 641637 - RNA, 19 nt, Artificial Sequence
  Description of Artificial Sequence: Synthetic oligonucleotide
  Antisense strand to SEQ ID NO: 641636
agauucaggcuucugauag

SEQ ID NO: 641638 - RNA, 19 nt, Artificial Sequence
  Description of Artificial Sequence: Synthetic oligonucleotide
  Sense strand starting at position 762 of SEQ ID NO: 585460
ucccaaucaugagugucaa

SEQ ID NO: 641639 - RNA, 19 nt, Artificial Sequence
  Description of Artificial Sequence: Synthetic oligonucleotide
  Antisense strand to SEQ ID NO: 641638
uugacacucaugauuggga

SEQ ID NO: 641640 - RNA, 19 nt, Artificial Sequence
  Description of Artificial Sequence: Synthetic oligonucleotide
  Sense strand starting at position 763 of SEQ ID NO: 585460
cccaaucaugagugucaau

SEQ ID NO: 641641 - RNA, 19 nt, Artificial Sequence
  Description of Artificial Sequence: Synthetic oligonucleotide
  Antisense strand to SEQ ID NO: 641640
auugacacucaugauuggg

SEQ ID NO: 641642 - RNA, 19 nt, Artificial Sequence
  Description of Artificial Sequence: Synthetic oligonucleotide
  Sense strand starting at position 802 of SEQ ID NO: 585460
aguggcuccugauuaauag

SEQ ID NO: 641643 - RNA, 19 nt, Artificial Sequence
  Description of Artificial Sequence: Synthetic oligonucleotide
  Antisense strand to SEQ ID NO: 641642
cuauuaaucaggagccacu

SEQ ID NO: 641644 - RNA, 19 nt, Artificial Sequence
  Description of Artificial Sequence: Synthetic oligonucleotide
  Sense strand starting at position 871 of SEQ ID NO: 585460
uucccaguguaauuauuaa

SEQ ID NO: 641645 - RNA, 19 nt, Artificial Sequence
  Description of Artificial Sequence: Synthetic oligonucleotide
  Antisense strand to SEQ ID NO: 641644
uuaauaauuacacugggaa

SEQ ID NO: 641646 - RNA, 19 nt, Artificial Sequence
  Description of Artificial Sequence: Synthetic oligonucleotide
  Sense strand starting at position 941 of SEQ ID NO: 585460
auggcuaacuuacugauaa

SEQ ID NO: 641647 - RNA, 19 nt, Artificial Sequence
  Description of Artificial Sequence: Synthetic oligonucleotide
  Antisense strand to SEQ ID NO: 641646
uuaucaguaaguuagccau

SEQ ID NO: 641648 - RNA, 19 nt, Artificial Sequence
  Description of Artificial Sequence: Synthetic oligonucleotide
  Sense strand starting at position 1086 of SEQ ID NO: 585460
aaauguaaugauggcagua

SEQ ID NO: 641649 - RNA, 19 nt, Artificial Sequence
  Description of Artificial Sequence: Synthetic oligonucleotide
  Antisense strand to SEQ ID NO: 641648
uacugccaucauuacauuu

SEQ ID NO: 641650 - RNA, 19 nt, Artificial Sequence
  Description of Artificial Sequence: Synthetic oligonucleotide
  Sense strand starting at position 1105 of SEQ ID NO: 585460
uucugaaugcaauauguau

SEQ ID NO: 641651 - RNA, 19 nt, Artificial Sequence
  Description of Artificial Sequence: Synthetic oligonucleotide
  Antisense strand to SEQ ID NO: 641650
auacauauugcauucagaa

SEQ ID NO: 641652 - RNA, 19 nt, Artificial Sequence
  Description of Artificial Sequence: Synthetic oligonucleotide
  Sense strand starting at position 1159 of SEQ ID NO: 585460
cuuacuggauguucuguaa

SEQ ID NO: 641653 - RNA, 19 nt, Artificial Sequence
  Description of Artificial Sequence: Synthetic oligonucleotide
  Antisense strand to SEQ ID NO: 641652
uuacagaacauccaguaag

SEQ ID NO: 641654 - RNA, 19 nt, Artificial Sequence
  Description of Artificial Sequence: Synthetic oligonucleotide
  Sense strand starting at position 1162 of SEQ ID NO: 585460
acuggauguucuguaacca

SEQ ID NO: 641655 - RNA, 19 nt, Artificial Sequence
  Description of Artificial Sequence: Synthetic oligonucleotide
  Antisense strand to SEQ ID NO: 641654
ugguuacagaacauccagu

SEQ ID NO: 641656 - RNA, 19 nt, Artificial Sequence
  Description of Artificial Sequence: Synthetic oligonucleotide
  Sense strand starting at position 1163 of SEQ ID NO: 585460
cuggauguucuguaaccau

SEQ ID NO: 641657 - RNA, 19 nt, Artificial Sequence
  Description of Artificial Sequence: Synthetic oligonucleotide
  Antisense strand to SEQ ID NO: 641656
augguuacagaacauccag

SEQ ID NO: 641658 - RNA, 19 nt, Artificial Sequence
  Description of Artificial Sequence: Synthetic oligonucleotide
  Sense strand starting at position 1262 of SEQ ID NO: 585460
uuugucagucucuauuaua

SEQ ID NO: 641659 - RNA, 19 nt, Artificial Sequence
  Description of Artificial Sequence: Synthetic oligonucleotide
  Antisense strand to SEQ ID NO: 641658
uauaauagagacugacaaa

SEQ ID NO: 641660 - RNA, 19 nt, Artificial Sequence
  Description of Artificial Sequence: Synthetic oligonucleotide
  Sense strand starting at position 1285 of SEQ ID NO: 585460
guaucacaacuagguuaau

SEQ ID NO: 641661 - RNA, 19 nt, Artificial Sequence
  Description of Artificial Sequence: Synthetic oligonucleotide
  Antisense strand to SEQ ID NO: 641660
auuaaccuaguugugauac

SEQ ID NO: 641662 - RNA, 19 nt, Artificial Sequence
  Description of Artificial Sequence: Synthetic oligonucleotide
  Sense strand starting at position 1326 of SEQ ID NO: 585460
gcuagaaugguagacacuu

SEQ ID NO: 641663 - RNA, 19 nt, Artificial Sequence
  Description of Artificial Sequence: Synthetic oligonucleotide
  Antisense strand to SEQ ID NO: 641662
aagugucuaccauucuagc

SEQ ID NO: 641664 - RNA, 19 nt, Artificial Sequence
  Description of Artificial Sequence: Synthetic oligonucleotide
  Sense strand starting at position 1334 of SEQ ID NO: 585460
gguagacacuuaguagcaa

SEQ ID NO: 641665 - RNA, 19 nt, Artificial Sequence
  Description of Artificial Sequence: Synthetic oligonucleotide
  Antisense strand to SEQ ID NO: 641664
uugcuacuaagugucuacc

SEQ ID NO: 641666 - RNA, 19 nt, Artificial Sequence
  Description of Artificial Sequence: Synthetic oligonucleotide
  Sense strand starting at position 1432 of SEQ ID NO: 585460
cugcuagauuaacuacuga

SEQ ID NO: 641667 - RNA, 19 nt, Artificial Sequence
  Description of Artificial Sequence: Synthetic oligonucleotide
  Antisense strand to SEQ ID NO: 641666
ucaguaguuaaucuagcag

SEQ ID NO: 641668 - RNA, 19 nt, Artificial Sequence
  Description of Artificial Sequence: Synthetic oligonucleotide
  Sense strand starting at position 1562 of SEQ ID NO: 585460
aagucaaauguaggaaagu

SEQ ID NO: 641669 - RNA, 19 nt, Artificial Sequence
  Description of Artificial Sequence: Synthetic oligonucleotide
  Antisense strand to SEQ ID NO: 641668
acuuuccuacauuugacuu

SEQ ID NO: 641670 - RNA, 19 nt, Artificial Sequence
  Description of Artificial Sequence: Synthetic oligonucleotide
  Sense strand starting at position 1628 of SEQ ID NO: 585460
cuagaagaugucgagcuuu

SEQ ID NO: 641671 - RNA, 19 nt, Artificial Sequence
  Description of Artificial Sequence: Synthetic oligonucleotide
  Antisense strand to SEQ ID NO: 641670
aaagcucgacaucuucuag

SEQ ID NO: 641672 - RNA, 19 nt, Artificial Sequence
  Description of Artificial Sequence: Synthetic oligonucleotide
  Sense strand starting at position 2279 of SEQ ID NO: 585460
aguuguuucuaaccagaga

SEQ ID NO: 641673 - RNA, 19 nt, Artificial Sequence
  Description of Artificial Sequence: Synthetic oligonucleotide
  Antisense strand to SEQ ID NO: 641672
ucucugguuagaaacaacu

SEQ ID NO: 641674 - RNA, 19 nt, Artificial Sequence
  Description of Artificial Sequence: Synthetic oligonucleotide
  Sense strand starting at position 2306 of SEQ ID NO: 585460
agaaucucugagggagcuu

SEQ ID NO: 641675 - RNA, 19 nt, Artificial Sequence
  Description of Artificial Sequence: Synthetic oligonucleotide
  Antisense strand to SEQ ID NO: 641674
aagcucccucagagauucu

SEQ ID NO: 641676 - RNA, 19 nt, Artificial Sequence
  Description of Artificial Sequence: Synthetic oligonucleotide
  Sense strand starting at position 2759 of SEQ ID NO: 585460
uccuccaggcuuuauuaga

SEQ ID NO: 641677 - RNA, 19 nt, Artificial Sequence
  Description of Artificial Sequence: Synthetic oligonucleotide
  Antisense strand to SEQ ID NO: 641676
ucuaauaaagccuggagga

SEQ ID NO: 641678 - RNA, 19 nt, Artificial Sequence
  Description of Artificial Sequence: Synthetic oligonucleotide
  Sense strand starting at position 2767 of SEQ ID NO: 585460
gcuuuauuagauuaucaug

SEQ ID NO: 641679 - RNA, 19 nt, Artificial Sequence
  Description of Artificial Sequence: Synthetic oligonucleotide
  Antisense strand to SEQ ID NO: 641678
caugauaaucuaauaaagc

SEQ ID NO: 641680 - RNA, 19 nt, Artificial Sequence
  Description of Artificial Sequence: Synthetic oligonucleotide
  Sense strand starting at position 2783 of SEQ ID NO: 585460
augagaguugugcacauaa

SEQ ID NO: 641681 - RNA, 19 nt, Artificial Sequence
  Description of Artificial Sequence: Synthetic oligonucleotide
  Antisense strand to SEQ ID NO: 641680
uuaugugcacaacucucau

SEQ ID NO: 641682 - RNA, 19 nt, Artificial Sequence
  Description of Artificial Sequence: Synthetic oligonucleotide
  Sense strand starting at position 2956 of SEQ ID NO: 585460
uuccauauugguuggauca

SEQ ID NO: 641683 - RNA, 19 nt, Artificial Sequence
  Description of Artificial Sequence: Synthetic oligonucleotide
  Antisense strand to SEQ ID NO: 641682
ugauccaaccaauauggaa

SEQ ID NO: 641684 - RNA, 19 nt, Artificial Sequence
  Description of Artificial Sequence: Synthetic oligonucleotide
  Sense strand starting at position 2996 of SEQ ID NO: 585460
aguguacuccuguacacau

SEQ ID NO: 641685 - RNA, 19 nt, Artificial Sequence
  Description of Artificial Sequence: Synthetic oligonucleotide
  Antisense strand to SEQ ID NO: 641684
auguguacaggaguacacu

SEQ ID NO: 641686 - RNA, 19 nt, Artificial Sequence
  Description of Artificial Sequence: Synthetic oligonucleotide
  Sense strand starting at position 3080 of SEQ ID NO: 585460
cugugcacccuuuaaagaa

SEQ ID NO: 641687 - RNA, 19 nt, Artificial Sequence
  Description of Artificial Sequence: Synthetic oligonucleotide
  Antisense strand to SEQ ID NO: 641686
uucuuuaaagggugcacag

SEQ ID NO: 641688 - RNA, 19 nt, Artificial Sequence
  Description of Artificial Sequence: Synthetic oligonucleotide
  Sense strand starting at position 3145 of SEQ ID NO: 585460
cacagcgauguguaacuaa

SEQ ID NO: 641689 - RNA, 19 nt, Artificial Sequence
  Description of Artificial Sequence: Synthetic oligonucleotide
  Antisense strand to SEQ ID NO: 641688
uuaguuacacaucgcugug

SEQ ID NO: 641690 - RNA, 19 nt, Artificial Sequence
  Description of Artificial Sequence: Synthetic oligonucleotide
  Sense strand starting at position 3385 of SEQ ID NO: 585460
uuuguauuagccugagaaa

SEQ ID NO: 641691 - RNA, 19 nt, Artificial Sequence
  Description of Artificial Sequence: Synthetic oligonucleotide
  Antisense strand to SEQ ID NO: 641690
uuucucaggcuaauacaaa

SEQ ID NO: 641692 - RNA, 19 nt, Artificial Sequence
  Description of Artificial Sequence: Synthetic oligonucleotide
  Sense strand starting at position 3386 of SEQ ID NO: 585460
uuguauuagccugagaaag

SEQ ID NO: 641693 - RNA, 19 nt, Artificial Sequence
  Description of Artificial Sequence: Synthetic oligonucleotide
  Antisense strand to SEQ ID NO: 641692
cuuucucaggcuaauacaa

SEQ ID NO: 641694 - RNA, 19 nt, Artificial Sequence
  Description of Artificial Sequence: Synthetic oligonucleotide
  Sense strand starting at position 3502 of SEQ ID NO: 585460
acuguagaauuauugguga

SEQ ID NO: 641695 - RNA, 19 nt, Artificial Sequence
  Description of Artificial Sequence: Synthetic oligonucleotide
  Antisense strand to SEQ ID NO: 641694
ucaccaauaauucuacagu

SEQ ID NO: 641696 - RNA, 19 nt, Artificial Sequence
  Description of Artificial Sequence: Synthetic oligonucleotide
  Sense strand starting at position 3504 of SEQ ID NO: 585460
uguagaauuauuggugauu

SEQ ID NO: 641697 - RNA, 19 nt, Artificial Sequence
  Description of Artificial Sequence: Synthetic oligonucleotide
  Antisense strand to SEQ ID NO: 641696
aaucaccaauaauucuaca

SEQ ID NO: 641698 - RNA, 19 nt, Artificial Sequence
  Description of Artificial Sequence: Synthetic oligonucleotide
  Sense strand starting at position 3626 of SEQ ID NO: 585460
aguacacagcuuuguauuu

SEQ ID NO: 641699 - RNA, 19 nt, Artificial Sequence
  Description of Artificial Sequence: Synthetic oligonucleotide
  Antisense strand to SEQ ID NO: 641698
aaauacaaagcuguguacu

SEQ ID NO: 641700 - RNA, 19 nt, Artificial Sequence
  Description of Artificial Sequence: Synthetic oligonucleotide
  Sense strand starting at position 3764 of SEQ ID NO: 585460
ucugucaucagcgauagga

SEQ ID NO: 641701 - RNA, 19 nt, Artificial Sequence
  Description of Artificial Sequence: Synthetic oligonucleotide
  Antisense strand to SEQ ID NO: 641700
uccuaucgcugaugacaga

SEQ ID NO: 641702 - RNA, 19 nt, Artificial Sequence
  Description of Artificial Sequence: Synthetic oligonucleotide
  Sense strand starting at position 3866 of SEQ ID NO: 585460
agaaguaaguuugcuaaua

SEQ ID NO: 641703 - RNA, 19 nt, Artificial Sequence
  Description of Artificial Sequence: Synthetic oligonucleotide
  Antisense strand to SEQ ID NO: 641702
uauuagcaaacuuacuucu

SEQ ID NO: 641704 - RNA, 19 nt, Artificial Sequence
  Description of Artificial Sequence: Synthetic oligonucleotide
  Sense strand starting at position 3867 of SEQ ID NO: 585460
gaaguaaguuugcuaauac

SEQ ID NO: 641705 - RNA, 19 nt, Artificial Sequence
  Description of Artificial Sequence: Synthetic oligonucleotide
  Antisense strand to SEQ ID NO: 641704
guauuagcaaacuuacuuc

SEQ ID NO: 641706 - RNA, 19 nt, Artificial Sequence
  Description of Artificial Sequence: Synthetic oligonucleotide
  Sense strand starting at position 76 of SEQ ID NO: 585461
gaucgaguagaucgaauaa

SEQ ID NO: 641707 - RNA, 19 nt, Artificial Sequence
  Description of Artificial Sequence: Synthetic oligonucleotide
  Antisense strand to SEQ ID NO: 641706
uuauucgaucuacucgauc

SEQ ID NO: 641708 - RNA, 19 nt, Artificial Sequence
  Description of Artificial Sequence: Synthetic oligonucleotide
  Sense strand starting at position 152 of SEQ ID NO: 585461
cuaacauucugagccgaaa

SEQ ID NO: 641709 - RNA, 19 nt, Artificial Sequence
  Description of Artificial Sequence: Synthetic oligonucleotide
  Antisense strand to SEQ ID NO: 641708
uuucggcucagaauguuag

SEQ ID NO: 641710 - RNA, 19 nt, Artificial Sequence
  Description of Artificial Sequence: Synthetic oligonucleotide
  Sense strand starting at position 388 of SEQ ID NO: 585461
aaagaagauuuacauggua

SEQ ID NO: 641711 - RNA, 19 nt, Artificial Sequence
  Description of Artificial Sequence: Synthetic oligonucleotide
  Antisense strand to SEQ ID NO: 641710
uaccauguaaaucuucuuu

SEQ ID NO: 641712 - RNA, 19 nt, Artificial Sequence
  Description of Artificial Sequence: Synthetic oligonucleotide
  Sense strand starting at position 393 of SEQ ID NO: 585461
agauuuacaugguaaugag

SEQ ID NO: 641713 - RNA, 19 nt, Artificial Sequence
  Description of Artificial Sequence: Synthetic oligonucleotide
  Antisense strand to SEQ ID NO: 641712
cucauuaccauguaaaucu

SEQ ID NO: 641714 - RNA, 19 nt, Artificial Sequence
  Description of Artificial Sequence: Synthetic oligonucleotide
  Sense strand starting at position 556 of SEQ ID NO: 585461
acagcagauucucugaacu

SEQ ID NO: 641715 - RNA, 19 nt, Artificial Sequence
  Description of Artificial Sequence: Synthetic oligonucleotide
  Antisense strand to SEQ ID NO: 641714
aguucagagaaucugcugu

SEQ ID NO: 641716 - RNA, 19 nt, Artificial Sequence
  Description of Artificial Sequence: Synthetic oligonucleotide
  Sense strand starting at position 733 of SEQ ID NO: 585461
uucucugugagugagacaa

SEQ ID NO: 641717 - RNA, 19 nt, Artificial Sequence
  Description of Artificial Sequence: Synthetic oligonucleotide
  Antisense strand to SEQ ID NO: 641716
uugucucacucacagagaa

SEQ ID NO: 641718 - RNA, 19 nt, Artificial Sequence
  Description of Artificial Sequence: Synthetic oligonucleotide
  Sense strand starting at position 828 of SEQ ID NO: 585461
ggcuacaagaucuggaagu

SEQ ID NO: 641719 - RNA, 19 nt, Artificial Sequence
  Description of Artificial Sequence: Synthetic oligonucleotide
  Antisense strand to SEQ ID NO: 641718
acuuccagaucuuguagcc

SEQ ID NO: 641720 - RNA, 19 nt, Artificial Sequence
  Description of Artificial Sequence: Synthetic oligonucleotide
  Sense strand starting at position 882 of SEQ ID NO: 585461
ucacucuacccaugagaag

SEQ ID NO: 641721 - RNA, 19 nt, Artificial Sequence
  Description of Artificial Sequence: Synthetic oligonucleotide
  Antisense strand to SEQ ID NO: 641720
cuucucauggguagaguga

SEQ ID NO: 641722 - RNA, 19 nt, Artificial Sequence
  Description of Artificial Sequence: Synthetic oligonucleotide
  Sense strand starting at position 999 of SEQ ID NO: 585461
agguacuuauuaucaugaa

SEQ ID NO: 641723 - RNA, 19 nt, Artificial Sequence
  Description of Artificial Sequence: Synthetic oligonucleotide
  Antisense strand to SEQ ID NO: 641722
uucaugauaauaaguaccu

SEQ ID NO: 641724 - RNA, 19 nt, Artificial Sequence
  Description of Artificial Sequence: Synthetic oligonucleotide
  Sense strand starting at position 1127 of SEQ ID NO: 585461
cucuccucucaguaaugga

SEQ ID NO: 641725 - RNA, 19 nt, Artificial Sequence
  Description of Artificial Sequence: Synthetic oligonucleotide
  Antisense strand to SEQ ID NO: 641724
uccauuacugagaggagag

SEQ ID NO: 641726 - RNA, 19 nt, Artificial Sequence
  Description of Artificial Sequence: Synthetic oligonucleotide
  Sense strand starting at position 1134 of SEQ ID NO: 585461
cucaguaauggaugagacu

SEQ ID NO: 641727 - RNA, 19 nt, Artificial Sequence
  Description of Artificial Sequence: Synthetic oligonucleotide
  Antisense strand to SEQ ID NO: 641726
agucucauccauuacugag

SEQ ID NO: 641728 - RNA, 19 nt, Artificial Sequence
  Description of Artificial Sequence: Synthetic oligonucleotide
  Sense strand starting at position 1143 of SEQ ID NO: 585461
ggaugagacugaugaauuu

SEQ ID NO: 641729 - RNA, 19 nt, Artificial Sequence
  Description of Artificial Sequence: Synthetic oligonucleotide
  Antisense strand to SEQ ID NO: 641728
aaauucaucagucucaucc

SEQ ID NO: 641730 - RNA, 19 nt, Artificial Sequence
  Description of Artificial Sequence: Synthetic oligonucleotide
  Sense strand starting at position 1184 of SEQ ID NO: 585461
ugagaugucuaaguggaga

SEQ ID NO: 641731 - RNA, 19 nt, Artificial Sequence
  Description of Artificial Sequence: Synthetic oligonucleotide
  Antisense strand to SEQ ID NO: 641730
ucuccacuuagacaucuca

SEQ ID NO: 641732 - RNA, 19 nt, Artificial Sequence
  Description of Artificial Sequence: Synthetic oligonucleotide
  Sense strand starting at position 1186 of SEQ ID NO: 585461
agaugucuaaguggagauu

SEQ ID NO: 641733 - RNA, 19 nt, Artificial Sequence
  Description of Artificial Sequence: Synthetic oligonucleotide
  Antisense strand to SEQ ID NO: 641732
aaucuccacuuagacaucu

SEQ ID NO: 641734 - RNA, 19 nt, Artificial Sequence
  Description of Artificial Sequence: Synthetic oligonucleotide
  Sense strand starting at position 1197 of SEQ ID NO: 585461
uggagauugcuuuacacuc

SEQ ID NO: 641735 - RNA, 19 nt, Artificial Sequence
  Description of Artificial Sequence: Synthetic oligonucleotide
  Antisense strand to SEQ ID NO: 641734
gaguguaaagcaaucucca

SEQ ID NO: 641736 - RNA, 19 nt, Artificial Sequence
  Description of Artificial Sequence: Synthetic oligonucleotide
  Sense strand starting at position 1235 of SEQ ID NO: 585461
ggaguuguuagugaauaug

SEQ ID NO: 641737 - RNA, 19 nt, Artificial Sequence
  Description of Artificial Sequence: Synthetic oligonucleotide
  Antisense strand to SEQ ID NO: 641736
cauauucacuaacaacucc

SEQ ID NO: 641738 - RNA, 19 nt, Artificial Sequence
  Description of Artificial Sequence: Synthetic oligonucleotide
  Sense strand starting at position 1238 of SEQ ID NO: 585461
guuguuagugaauaugaug

SEQ ID NO: 641739 - RNA, 19 nt, Artificial Sequence
  Description of Artificial Sequence: Synthetic oligonucleotide
  Antisense strand to SEQ ID NO: 641738
caucauauucacuaacaac

SEQ ID NO: 641740 - RNA, 19 nt, Artificial Sequence
  Description of Artificial Sequence: Synthetic oligonucleotide
  Sense strand starting at position 1298 of SEQ ID NO: 585461
accagaggcuuauucuuau

SEQ ID NO: 641741 - RNA, 19 nt, Artificial Sequence
  Description of Artificial Sequence: Synthetic oligonucleotide
  Antisense strand to SEQ ID NO: 641740
auaagaauaagccucuggu

SEQ ID NO: 641742 - RNA, 19 nt, Artificial Sequence
  Description of Artificial Sequence: Synthetic oligonucleotide
  Sense strand starting at position 1301 of SEQ ID NO: 585461
agaggcuuauucuuauauu

SEQ ID NO: 641743 - RNA, 19 nt, Artificial Sequence
  Description of Artificial Sequence: Synthetic oligonucleotide
  Antisense strand to SEQ ID NO: 641742
aauauaagaauaagccucu

SEQ ID NO: 641744 - RNA, 19 nt, Artificial Sequence
  Description of Artificial Sequence: Synthetic oligonucleotide
  Sense strand starting at position 1440 of SEQ ID NO: 585461
cuagcucuccuagaaaguc

SEQ ID NO: 641745 - RNA, 19 nt, Artificial Sequence
  Description of Artificial Sequence: Synthetic oligonucleotide
  Antisense strand to SEQ ID NO: 641744
gacuuucuaggagagcuag

SEQ ID NO: 641746 - RNA, 19 nt, Artificial Sequence
  Description of Artificial Sequence: Synthetic oligonucleotide
  Sense strand starting at position 1450 of SEQ ID NO: 585461
uagaaagucuggucuaacu

SEQ ID NO: 641747 - RNA, 19 nt, Artificial Sequence
  Description of Artificial Sequence: Synthetic oligonucleotide
  Antisense strand to SEQ ID NO: 641746
aguuagaccagacuuucua

SEQ ID NO: 641748 - RNA, 19 nt, Artificial Sequence
  Description of Artificial Sequence: Synthetic oligonucleotide
  Sense strand starting at position 1720 of SEQ ID NO: 585461
auuagucuugccgaaggaa

SEQ ID NO: 641749 - RNA, 19 nt, Artificial Sequence
  Description of Artificial Sequence: Synthetic oligonucleotide
  Antisense strand to SEQ ID NO: 641748
uuccuucggcaagacuaau

SEQ ID NO: 641750 - RNA, 19 nt, Artificial Sequence
  Description of Artificial Sequence: Synthetic oligonucleotide
  Sense strand starting at position 1996 of SEQ ID NO: 585461
auaaauaccguuuagacuu

SEQ ID NO: 641751 - RNA, 19 nt, Artificial Sequence
  Description of Artificial Sequence: Synthetic oligonucleotide
  Antisense strand to SEQ ID NO: 641750
aagucuaaacgguauuuau

SEQ ID NO: 641752 - RNA, 19 nt, Artificial Sequence
  Description of Artificial Sequence: Synthetic oligonucleotide
  Sense strand starting at position 2065 of SEQ ID NO: 585461
gccaauaaagguugucaaa

SEQ ID NO: 641753 - RNA, 19 nt, Artificial Sequence
  Description of Artificial Sequence: Synthetic oligonucleotide
  Antisense strand to SEQ ID NO: 641752
uuugacaaccuuuauuggc

SEQ ID NO: 641754 - RNA, 19 nt, Artificial Sequence
  Description of Artificial Sequence: Synthetic oligonucleotide
  Sense strand starting at position 2095 of SEQ ID NO: 585461
ugacucuuucgaggacaaa

SEQ ID NO: 641755 - RNA, 19 nt, Artificial Sequence
  Description of Artificial Sequence: Synthetic oligonucleotide
  Antisense strand to SEQ ID NO: 641754
uuuguccucgaaagaguca

SEQ ID NO: 641756 - RNA, 19 nt, Artificial Sequence
  Description of Artificial Sequence: Synthetic oligonucleotide
  Sense strand starting at position 2346 of SEQ ID NO: 585461
gcaauuauugaaggacaua

SEQ ID NO: 641757 - RNA, 19 nt, Artificial Sequence
  Description of Artificial Sequence: Synthetic oligonucleotide
  Antisense strand to SEQ ID NO: 641756
uauguccuucaauaauugc

SEQ ID NO: 641758 - RNA, 19 nt, Artificial Sequence
  Description of Artificial Sequence: Synthetic oligonucleotide
  Sense strand starting at position 2508 of SEQ ID NO: 585461
auucgcaugaaagaguaaa

SEQ ID NO: 641759 - RNA, 19 nt, Artificial Sequence
  Description of Artificial Sequence: Synthetic oligonucleotide
  Antisense strand to SEQ ID NO: 641758
uuuacucuuucaugcgaau

SEQ ID NO: 641760 - RNA, 19 nt, Artificial Sequence
  Description of Artificial Sequence: Synthetic oligonucleotide
  Sense strand starting at position 2610 of SEQ ID NO: 585461
aaguuacaguaauuagagu

SEQ ID NO: 641761 - RNA, 19 nt, Artificial Sequence
  Description of Artificial Sequence: Synthetic oligonucleotide
  Antisense strand to SEQ ID NO: 641760
acucuaauuacuguaacuu

SEQ ID NO: 641762 - RNA, 19 nt, Artificial Sequence
  Description of Artificial Sequence: Synthetic oligonucleotide
  Sense strand starting at position 2616 of SEQ ID NO: 585461
caguaauuagaguguaaua

SEQ ID NO: 641763 - RNA, 19 nt, Artificial Sequence
  Description of Artificial Sequence: Synthetic oligonucleotide
  Antisense strand to SEQ ID NO: 641762
uauuacacucuaauuacug

SEQ ID NO: 641764 - RNA, 19 nt, Artificial Sequence
  Description of Artificial Sequence: Synthetic oligonucleotide
  Sense strand starting at position 2618 of SEQ ID NO: 585461
guaauuagaguguaauagu

SEQ ID NO: 641765 - RNA, 19 nt, Artificial Sequence
  Description of Artificial Sequence: Synthetic oligonucleotide
  Antisense strand to SEQ ID NO: 641764
acuauuacacucuaauuac

SEQ ID NO: 641766 - RNA, 19 nt, Artificial Sequence
  Description of Artificial Sequence: Synthetic oligonucleotide
  Sense strand starting at position 2783 of SEQ ID NO: 585461
gcauuuccauaugaggaaa

SEQ ID NO: 641767 - RNA, 19 nt, Artificial Sequence
  Description of Artificial Sequence: Synthetic oligonucleotide
  Antisense strand to SEQ ID NO: 641766
uuuccucauauggaaaugc

SEQ ID NO: 641768 - RNA, 19 nt, Artificial Sequence
  Description of Artificial Sequence: Synthetic oligonucleotide
  Sense strand starting at position 2785 of SEQ ID NO: 585461
auuuccauaugaggaaaua

SEQ ID NO: 641769 - RNA, 19 nt, Artificial Sequence
  Description of Artificial Sequence: Synthetic oligonucleotide
  Antisense strand to SEQ ID NO: 641768
uauuuccucauauggaaau

SEQ ID NO: 641770 - RNA, 19 nt, Artificial Sequence
  Description of Artificial Sequence: Synthetic oligonucleotide
  Sense strand starting at position 3054 of SEQ ID NO: 585461
agaugauauguauacugca

SEQ ID NO: 641771 - RNA, 19 nt, Artificial Sequence
  Description of Artificial Sequence: Synthetic oligonucleotide
  Antisense strand to SEQ ID NO: 641770
ugcaguauacauaucaucu

SEQ ID NO: 641772 - RNA, 19 nt, Artificial Sequence
  Description of Artificial Sequence: Synthetic oligonucleotide
  Sense strand starting at position 3230 of SEQ ID NO: 585461
ccucguaaguaaucagaaa

SEQ ID NO: 641773 - RNA, 19 nt, Artificial Sequence
  Description of Artificial Sequence: Synthetic oligonucleotide
  Antisense strand to SEQ ID NO: 641772
uuucugauuacuuacgagg

SEQ ID NO: 641774 - RNA, 19 nt, Artificial Sequence
  Description of Artificial Sequence: Synthetic oligonucleotide
  Sense strand starting at position 3282 of SEQ ID NO: 585461
ucaagcuaagauuggcaua

SEQ ID NO: 641775 - RNA, 19 nt, Artificial Sequence
  Description of Artificial Sequence: Synthetic oligonucleotide
  Antisense strand to SEQ ID NO: 641774
uaugccaaucuuagcuuga

SEQ ID NO: 641776 - RNA, 19 nt, Artificial Sequence
  Description of Artificial Sequence: Synthetic oligonucleotide
  Sense strand starting at position 3426 of SEQ ID NO: 585461
cuucuaggucuauaugcua

SEQ ID NO: 641777 - RNA, 19 nt, Artificial Sequence
  Description of Artificial Sequence: Synthetic oligonucleotide
  Antisense strand to SEQ ID NO: 641776
uagcauauagaccuagaag

SEQ ID NO: 641778 - RNA, 19 nt, Artificial Sequence
  Description of Artificial Sequence: Synthetic oligonucleotide
  Sense strand starting at position 3708 of SEQ ID NO: 585461
gaaugcaguguugggaaga

SEQ ID NO: 641779 - RNA, 19 nt, Artificial Sequence
  Description of Artificial Sequence: Synthetic oligonucleotide
  Antisense strand to SEQ ID NO: 641778
ucuucccaacacugcauuc

SEQ ID NO: 641780 - RNA, 19 nt, Artificial Sequence
  Description of Artificial Sequence: Synthetic oligonucleotide
  Sense strand starting at position 3792 of SEQ ID NO: 585461
uugccugcaccagauauaa

SEQ ID NO: 641781 - RNA, 19 nt, Artificial Sequence
  Description of Artificial Sequence: Synthetic oligonucleotide
  Antisense strand to SEQ ID NO: 641780
uuauaucuggugcaggcaa

SEQ ID NO: 641782 - RNA, 19 nt, Artificial Sequence
  Description of Artificial Sequence: Synthetic oligonucleotide
  Sense strand starting at position 3805 of SEQ ID NO: 585461
auauaagaaucuuuggcau

SEQ ID NO: 641783 - RNA, 19 nt, Artificial Sequence
  Description of Artificial Sequence: Synthetic oligonucleotide
  Antisense strand to SEQ ID NO: 641782
augccaaagauucuuauau

SEQ ID NO: 641784 - RNA, 19 nt, Artificial Sequence
  Description of Artificial Sequence: Synthetic oligonucleotide
  Sense strand starting at position 3817 of SEQ ID NO: 585461
uuggcauuagagcaaucuu

SEQ ID NO: 641785 - RNA, 19 nt, Artificial Sequence
  Description of Artificial Sequence: Synthetic oligonucleotide
  Antisense strand to SEQ ID NO: 641784
aagauugcucuaaugccaa

SEQ ID NO: 641786 - RNA, 19 nt, Artificial Sequence
  Description of Artificial Sequence: Synthetic oligonucleotide
  Sense strand starting at position 430 of SEQ ID NO: 585462
ugguaucacggacagugaa

SEQ ID NO: 641787 - RNA, 19 nt, Artificial Sequence
  Description of Artificial Sequence: Synthetic oligonucleotide
  Antisense strand to SEQ ID NO: 641786
uucacuguccgugauacca

SEQ ID NO: 641788 - RNA, 19 nt, Artificial Sequence
  Description of Artificial Sequence: Synthetic oligonucleotide
  Sense strand starting at position 515 of SEQ ID NO: 585462
ugagguuugcgagauagaa

SEQ ID NO: 641789 - RNA, 19 nt, Artificial Sequence
  Description of Artificial Sequence: Synthetic oligonucleotide
  Antisense strand to SEQ ID NO: 641788
uucuaucucgcaaaccuca

SEQ ID NO: 641790 - RNA, 19 nt, Artificial Sequence
  Description of Artificial Sequence: Synthetic oligonucleotide
  Sense strand starting at position 543 of SEQ ID NO: 585462
ucaguuuauccaggaaguu

SEQ ID NO: 641791 - RNA, 19 nt, Artificial Sequence
  Description of Artificial Sequence: Synthetic oligonucleotide
  Antisense strand to SEQ ID NO: 641790
aacuuccuggauaaacuga

SEQ ID NO: 641792 - RNA, 19 nt, Artificial Sequence
  Description of Artificial Sequence: Synthetic oligonucleotide
  Sense strand starting at position 544 of SEQ ID NO: 585462
caguuuauccaggaaguua

SEQ ID NO: 641793 - RNA, 19 nt, Artificial Sequence
  Description of Artificial Sequence: Synthetic oligonucleotide
  Antisense strand to SEQ ID NO: 641792
uaacuuccuggauaaacug

SEQ ID NO: 641794 - RNA, 19 nt, Artificial Sequence
  Description of Artificial Sequence: Synthetic oligonucleotide
  Sense strand starting at position 846 of SEQ ID NO: 585462
gcaggaguugauggguaaa

SEQ ID NO: 641795 - RNA, 19 nt, Artificial Sequence
  Description of Artificial Sequence: Synthetic oligonucleotide
  Antisense strand to SEQ ID NO: 641794
uuuacccaucaacuccugc

SEQ ID NO: 641796 - RNA, 19 nt, Artificial Sequence
  Description of Artificial Sequence: Synthetic oligonucleotide
  Sense strand starting at position 903 of SEQ ID NO: 585462
ccauguacgacgcaaauua

SEQ ID NO: 641797 - RNA, 19 nt, Artificial Sequence
  Description of Artificial Sequence: Synthetic oligonucleotide
  Antisense strand to SEQ ID NO: 641796
uaauuugcgucguacaugg

SEQ ID NO: 641798 - RNA, 19 nt, Artificial Sequence
  Description of Artificial Sequence: Synthetic oligonucleotide
  Sense strand starting at position 975 of SEQ ID NO: 585462
uggacuaaucagugaggug

SEQ ID NO: 641799 - RNA, 19 nt, Artificial Sequence
  Description of Artificial Sequence: Synthetic oligonucleotide
  Antisense strand to SEQ ID NO: 641798
caccucacugauuagucca

SEQ ID NO: 641800 - RNA, 19 nt, Artificial Sequence
  Description of Artificial Sequence: Synthetic oligonucleotide
  Sense strand starting at position 976 of SEQ ID NO: 585462
ggacuaaucagugaggugu

SEQ ID NO: 641801 - RNA, 19 nt, Artificial Sequence
  Description of Artificial Sequence: Synthetic oligonucleotide
  Antisense strand to SEQ ID NO: 641800
acaccucacugauuagucc

SEQ ID NO: 641802 - RNA, 19 nt, Artificial Sequence
  Description of Artificial Sequence: Synthetic oligonucleotide
  Sense strand starting at position 990 of SEQ ID NO: 585462
gguguaagccaagaaguua

SEQ ID NO: 641803 - RNA, 19 nt, Artificial Sequence
  Description of Artificial Sequence: Synthetic oligonucleotide
  Antisense strand to SEQ ID NO: 641802
uaacuucuuggcuuacacc

SEQ ID NO: 641804 - RNA, 19 nt, Artificial Sequence
  Description of Artificial Sequence: Synthetic oligonucleotide
  Sense strand starting at position 1024 of SEQ ID NO: 585462
caacacggucgagaguuau

SEQ ID NO: 641805 - RNA, 19 nt, Artificial Sequence
  Description of Artificial Sequence: Synthetic oligonucleotide
  Antisense strand to SEQ ID NO: 641804
auaacucucgaccguguug

SEQ ID NO: 641806 - RNA, 19 nt, Artificial Sequence
  Description of Artificial Sequence: Synthetic oligonucleotide
  Sense strand starting at position 1028 of SEQ ID NO: 585462
acggucgagaguuauaaga

SEQ ID NO: 641807 - RNA, 19 nt, Artificial Sequence
  Description of Artificial Sequence: Synthetic oligonucleotide
  Antisense strand to SEQ ID NO: 641806
ucuuauaacucucgaccgu

SEQ ID NO: 641808 - RNA, 19 nt, Artificial Sequence
  Description of Artificial Sequence: Synthetic oligonucleotide
  Sense strand starting at position 1060 of SEQ ID NO: 585462
uuacuuggguccucgagga

SEQ ID NO: 641809 - RNA, 19 nt, Artificial Sequence
  Description of Artificial Sequence: Synthetic oligonucleotide
  Antisense strand to SEQ ID NO: 641808
uccucgaggacccaaguaa

SEQ ID NO: 641810 - RNA, 19 nt, Artificial Sequence
  Description of Artificial Sequence: Synthetic oligonucleotide
  Sense strand starting at position 1371 of SEQ ID NO: 585462
uguauccuccgugagaaca

SEQ ID NO: 641811 - RNA, 19 nt, Artificial Sequence
  Description of Artificial Sequence: Synthetic oligonucleotide
  Antisense strand to SEQ ID NO: 641810
uguucucacggaggauaca

SEQ ID NO: 641812 - RNA, 19 nt, Artificial Sequence
  Description of Artificial Sequence: Synthetic oligonucleotide
  Sense strand starting at position 1451 of SEQ ID NO: 585462
ccaaguacuggcugaauag

SEQ ID NO: 641813 - RNA, 19 nt, Artificial Sequence
  Description of Artificial Sequence: Synthetic oligonucleotide
  Antisense strand to SEQ ID NO: 641812
cuauucagccaguacuugg

SEQ ID NO: 641814 - RNA, 19 nt, Artificial Sequence
  Description of Artificial Sequence: Synthetic oligonucleotide
  Sense strand starting at position 1452 of SEQ ID NO: 585462
caaguacuggcugaauagu

SEQ ID NO: 641815 - RNA, 19 nt, Artificial Sequence
  Description of Artificial Sequence: Synthetic oligonucleotide
  Antisense strand to SEQ ID NO: 641814
acuauucagccaguacuug

SEQ ID NO: 641816 - RNA, 19 nt, Artificial Sequence
  Description of Artificial Sequence: Synthetic oligonucleotide
  Sense strand starting at position 1497 of SEQ ID NO: 585462
agucuaucugggcacugaa

SEQ ID NO: 641817 - RNA, 19 nt, Artificial Sequence
  Description of Artificial Sequence: Synthetic oligonucleotide
  Antisense strand to SEQ ID NO: 641816
uucagugcccagauagacu

SEQ ID NO: 641818 - RNA, 19 nt, Artificial Sequence
  Description of Artificial Sequence: Synthetic oligonucleotide
  Sense strand starting at position 1500 of SEQ ID NO: 585462
cuaucugggcacugaaaga

SEQ ID NO: 641819 - RNA, 19 nt, Artificial Sequence
  Description of Artificial Sequence: Synthetic oligonucleotide
  Antisense strand to SEQ ID NO: 641818
ucuuucagugcccagauag

SEQ ID NO: 641820 - RNA, 19 nt, Artificial Sequence
  Description of Artificial Sequence: Synthetic oligonucleotide
  Sense strand starting at position 2381 of SEQ ID NO: 585462
auuaguguuguuggagaaa

SEQ ID NO: 641821 - RNA, 19 nt, Artificial Sequence
  Description of Artificial Sequence: Synthetic oligonucleotide
  Antisense strand to SEQ ID NO: 641820
uuucuccaacaacacuaau

SEQ ID NO: 641822 - RNA, 19 nt, Artificial Sequence
  Description of Artificial Sequence: Synthetic oligonucleotide
  Sense strand starting at position 2384 of SEQ ID NO: 585462
aguguuguuggagaaacac

SEQ ID NO: 641823 - RNA, 19 nt, Artificial Sequence
  Description of Artificial Sequence: Synthetic oligonucleotide
  Antisense strand to SEQ ID NO: 641822
guguuucuccaacaacacu

SEQ ID NO: 641824 - RNA, 19 nt, Artificial Sequence
  Description of Artificial Sequence: Synthetic oligonucleotide
  Sense strand starting at position 2438 of SEQ ID NO: 585462
agcaguuugcaccauuaag

SEQ ID NO: 641825 - RNA, 19 nt, Artificial Sequence
  Description of Artificial Sequence: Synthetic oligonucleotide
  Antisense strand to SEQ ID NO: 641824
cuuaauggugcaaacugcu

SEQ ID NO: 641826 - RNA, 19 nt, Artificial Sequence
  Description of Artificial Sequence: Synthetic oligonucleotide
  Sense strand starting at position 2547 of SEQ ID NO: 585462
gcacucaaugcagaauaau

SEQ ID NO: 641827 - RNA, 19 nt, Artificial Sequence
  Description of Artificial Sequence: Synthetic oligonucleotide
  Antisense strand to SEQ ID NO: 641826
auuauucugcauugagugc

SEQ ID NO: 641828 - RNA, 19 nt, Artificial Sequence
  Description of Artificial Sequence: Synthetic oligonucleotide
  Sense strand starting at position 2572 of SEQ ID NO: 585462
agaguuauucuaugucuaa

SEQ ID NO: 641829 - RNA, 19 nt, Artificial Sequence
  Description of Artificial Sequence: Synthetic oligonucleotide
  Antisense strand to SEQ ID NO: 641828
uuagacauagaauaacucu

SEQ ID NO: 641830 - RNA, 19 nt, Artificial Sequence
  Description of Artificial Sequence: Synthetic oligonucleotide
  Sense strand starting at position 2584 of SEQ ID NO: 585462
ugucuaaauucugccugaa

SEQ ID NO: 641831 - RNA, 19 nt, Artificial Sequence
  Description of Artificial Sequence: Synthetic oligonucleotide
  Antisense strand to SEQ ID NO: 641830
uucaggcagaauuuagaca

SEQ ID NO: 641832 - RNA, 19 nt, Artificial Sequence
  Description of Artificial Sequence: Synthetic oligonucleotide
  Sense strand starting at position 2602 of SEQ ID NO: 585462
agccaauucgugcuuucuu

SEQ ID NO: 641833 - RNA, 19 nt, Artificial Sequence
  Description of Artificial Sequence: Synthetic oligonucleotide
  Antisense strand to SEQ ID NO: 641832
aagaaagcacgaauuggcu

SEQ ID NO: 641834 - RNA, 19 nt, Artificial Sequence
  Description of Artificial Sequence: Synthetic oligonucleotide
  Sense strand starting at position 2715 of SEQ ID NO: 585462
agaaguuaccauggcauga

SEQ ID NO: 641835 - RNA, 19 nt, Artificial Sequence
  Description of Artificial Sequence: Synthetic oligonucleotide
  Antisense strand to SEQ ID NO: 641834
ucaugccaugguaacuucu

SEQ ID NO: 641836 - RNA, 19 nt, Artificial Sequence
  Description of Artificial Sequence: Synthetic oligonucleotide
  Sense strand starting at position 2720 of SEQ ID NO: 585462
uuaccauggcaugauguaa

SEQ ID NO: 641837 - RNA, 19 nt, Artificial Sequence
  Description of Artificial Sequence: Synthetic oligonucleotide
  Antisense strand to SEQ ID NO: 641836
uuacaucaugccaugguaa

SEQ ID NO: 641838 - RNA, 19 nt, Artificial Sequence
  Description of Artificial Sequence: Synthetic oligonucleotide
  Sense strand starting at position 3197 of SEQ ID NO: 585462
cucuuccuggcuuaagaaa

SEQ ID NO: 641839 - RNA, 19 nt, Artificial Sequence
  Description of Artificial Sequence: Synthetic oligonucleotide
  Antisense strand to SEQ ID NO: 641838
uuucuuaagccaggaagag

SEQ ID NO: 641840 - RNA, 19 nt, Artificial Sequence
  Description of Artificial Sequence: Synthetic oligonucleotide
  Sense strand starting at position 3336 of SEQ ID NO: 585462
uuccauuaggauugacuuu

SEQ ID NO: 641841 - RNA, 19 nt, Artificial Sequence
  Description of Artificial Sequence: Synthetic oligonucleotide
  Antisense strand to SEQ ID NO: 641840
aaagucaauccuaauggaa

SEQ ID NO: 641842 - RNA, 19 nt, Artificial Sequence
  Description of Artificial Sequence: Synthetic oligonucleotide
  Sense strand starting at position 3454 of SEQ ID NO: 585462
ccucacauccugugacuau

SEQ ID NO: 641843 - RNA, 19 nt, Artificial Sequence
  Description of Artificial Sequence: Synthetic oligonucleotide
  Antisense strand to SEQ ID NO: 641842
auagucacaggaugugagg

SEQ ID NO: 641844 - RNA, 19 nt, Artificial Sequence
  Description of Artificial Sequence: Synthetic oligonucleotide
  Sense strand starting at position 3473 of SEQ ID NO: 585462
uuacuugaacuguguuuga

SEQ ID NO: 641845 - RNA, 19 nt, Artificial Sequence
  Description of Artificial Sequence: Synthetic oligonucleotide
  Antisense strand to SEQ ID NO: 641844
ucaaacacaguucaaguaa

SEQ ID NO: 641846 - RNA, 19 nt, Artificial Sequence
  Description of Artificial Sequence: Synthetic oligonucleotide
  Sense strand starting at position 3477 of SEQ ID NO: 585462
uugaacuguguuugaacca

SEQ ID NO: 641847 - RNA, 19 nt, Artificial Sequence
  Description of Artificial Sequence: Synthetic oligonucleotide
  Antisense strand to SEQ ID NO: 641846
ugguucaaacacaguucaa

SEQ ID NO: 641848 - RNA, 19 nt, Artificial Sequence
  Description of Artificial Sequence: Synthetic oligonucleotide
  Sense strand starting at position 3536 of SEQ ID NO: 585462
acuggaccucucugaguuu

SEQ ID NO: 641849 - RNA, 19 nt, Artificial Sequence
  Description of Artificial Sequence: Synthetic oligonucleotide
  Antisense strand to SEQ ID NO: 641848
aaacucagagagguccagu

SEQ ID NO: 641850 - RNA, 19 nt, Artificial Sequence
  Description of Artificial Sequence: Synthetic oligonucleotide
  Sense strand starting at position 3674 of SEQ ID NO: 585462
uuuguuauuuaccauggaa

SEQ ID NO: 641851 - RNA, 19 nt, Artificial Sequence
  Description of Artificial Sequence: Synthetic oligonucleotide
  Antisense strand to SEQ ID NO: 641850
uuccaugguaaauaacaaa

SEQ ID NO: 641852 - RNA, 19 nt, Artificial Sequence
  Description of Artificial Sequence: Synthetic oligonucleotide
  Sense strand starting at position 3867 of SEQ ID NO: 585462
guauaaggcucuuuaagac

SEQ ID NO: 641853 - RNA, 19 nt, Artificial Sequence
  Description of Artificial Sequence: Synthetic oligonucleotide
  Antisense strand to SEQ ID NO: 641852
gucuuaaagagccuuauac

SEQ ID NO: 641854 - RNA, 19 nt, Artificial Sequence
  Description of Artificial Sequence: Synthetic oligonucleotide
  Sense strand starting at position 3873 of SEQ ID NO: 585462
ggcucuuuaagacagaguu

SEQ ID NO: 641855 - RNA, 19 nt, Artificial Sequence
  Description of Artificial Sequence: Synthetic oligonucleotide
  Antisense strand to SEQ ID NO: 641854
aacucugucuuaaagagcc

SEQ ID NO: 641856 - RNA, 19 nt, Artificial Sequence
  Description of Artificial Sequence: Synthetic oligonucleotide
  Sense strand starting at position 3900 of SEQ ID NO: 585462
gcuugauaaaccuggauug

SEQ ID NO: 641857 - RNA, 19 nt, Artificial Sequence
  Description of Artificial Sequence: Synthetic oligonucleotide
  Antisense strand to SEQ ID NO: 641856
caauccagguuuaucaagc

SEQ ID NO: 641858 - RNA, 19 nt, Artificial Sequence
  Description of Artificial Sequence: Synthetic oligonucleotide
  Sense strand starting at position 3905 of SEQ ID NO: 585462
auaaaccuggauugguaau

SEQ ID NO: 641859 - RNA, 19 nt, Artificial Sequence
  Description of Artificial Sequence: Synthetic oligonucleotide
  Antisense strand to SEQ ID NO: 641858
auuaccaauccagguuuau

SEQ ID NO: 641860 - RNA, 19 nt, Artificial Sequence
  Description of Artificial Sequence: Synthetic oligonucleotide
  Sense strand starting at position 3928 of SEQ ID NO: 585462
gauguagacuuugcuggaa

SEQ ID NO: 641861 - RNA, 19 nt, Artificial Sequence
  Description of Artificial Sequence: Synthetic oligonucleotide
  Antisense strand to SEQ ID NO: 641860
uuccagcaaagucuacauc

SEQ ID NO: 641862 - RNA, 19 nt, Artificial Sequence
  Description of Artificial Sequence: Synthetic oligonucleotide
  Sense strand starting at position 3932 of SEQ ID NO: 585462
uagacuuugcuggaaguuu

SEQ ID NO: 641863 - RNA, 19 nt, Artificial Sequence
  Description of Artificial Sequence: Synthetic oligonucleotide
  Antisense strand to SEQ ID NO: 641862
aaacuuccagcaaagucua

SEQ ID NO: 641864 - RNA, 19 nt, Artificial Sequence
  Description of Artificial Sequence: Synthetic oligonucleotide
  Sense strand starting at position 3976 of SEQ ID NO: 585462
ccgcuaacuagagaaguca

SEQ ID NO: 641865 - RNA, 19 nt, Artificial Sequence
  Description of Artificial Sequence: Synthetic oligonucleotide
  Antisense strand to SEQ ID NO: 641864
ugacuucucuaguuagcgg

SEQ ID NO: 641866 - RNA, 19 nt, Artificial Sequence
  Description of Artificial Sequence: Synthetic oligonucleotide
  Sense strand starting at position 531 of SEQ ID NO: 585463
gggaaagaugcucagcacu

SEQ ID NO: 641867 - RNA, 19 nt, Artificial Sequence
  Description of Artificial Sequence: Synthetic oligonucleotide
  Antisense strand to SEQ ID NO: 641866
agugcugagcaucuuuccc

SEQ ID NO: 641868 - RNA, 19 nt, Artificial Sequence
  Description of Artificial Sequence: Synthetic oligonucleotide
  Sense strand starting at position 533 of SEQ ID NO: 585463
gaaagaugcucagcacugu

SEQ ID NO: 641869 - RNA, 19 nt, Artificial Sequence
  Description of Artificial Sequence: Synthetic oligonucleotide
  Antisense strand to SEQ ID NO: 641868
acagugcugagcaucuuuc

SEQ ID NO: 641870 - RNA, 19 nt, Artificial Sequence
  Description of Artificial Sequence: Synthetic oligonucleotide
  Sense strand starting at position 537 of SEQ ID NO: 585463
gaugcucagcacugucaua

SEQ ID NO: 641871 - RNA, 19 nt, Artificial Sequence
  Description of Artificial Sequence: Synthetic oligonucleotide
  Antisense strand to SEQ ID NO: 641870
uaugacagugcugagcauc

SEQ ID NO: 641872 - RNA, 19 nt, Artificial Sequence
  Description of Artificial Sequence: Synthetic oligonucleotide
  Sense strand starting at position 1172 of SEQ ID NO: 585463
guccuuagaucacugguca

SEQ ID NO: 641873 - RNA, 19 nt, Artificial Sequence
  Description of Artificial Sequence: Synthetic oligonucleotide
  Antisense strand to SEQ ID NO: 641872
ugaccagugaucuaaggac

SEQ ID NO: 641874 - RNA, 19 nt, Artificial Sequence
  Description of Artificial Sequence: Synthetic oligonucleotide
  Sense strand starting at position 1173 of SEQ ID NO: 585463
uccuuagaucacuggucau

SEQ ID NO: 641875 - RNA, 19 nt, Artificial Sequence
  Description of Artificial Sequence: Synthetic oligonucleotide
  Antisense strand to SEQ ID NO: 641874
augaccagugaucuaagga

SEQ ID NO: 641876 - RNA, 19 nt, Artificial Sequence
  Description of Artificial Sequence: Synthetic oligonucleotide
  Sense strand starting at position 1176 of SEQ ID NO: 585463
uuagaucacuggucauuag

SEQ ID NO: 641877 - RNA, 19 nt, Artificial Sequence
  Description of Artificial Sequence: Synthetic oligonucleotide
  Antisense strand to SEQ ID NO: 641876
cuaaugaccagugaucuaa

SEQ ID NO: 641878 - RNA, 19 nt, Artificial Sequence
  Description of Artificial Sequence: Synthetic oligonucleotide
  Sense strand starting at position 1177 of SEQ ID NO: 585463
uagaucacuggucauuagu

SEQ ID NO: 641879 - RNA, 19 nt, Artificial Sequence
  Description of Artificial Sequence: Synthetic oligonucleotide
  Antisense strand to SEQ ID NO: 641878
acuaaugaccagugaucua

SEQ ID NO: 641880 - RNA, 19 nt, Artificial Sequence
  Description of Artificial Sequence: Synthetic oligonucleotide
  Sense strand starting at position 1263 of SEQ ID NO: 585463
agagaagucgcaggaagaa

SEQ ID NO: 641881 - RNA, 19 nt, Artificial Sequence
  Description of Artificial Sequence: Synthetic oligonucleotide
  Antisense strand to SEQ ID NO: 641880
uucuuccugcgacuucucu

SEQ ID NO: 641882 - RNA, 19 nt, Artificial Sequence
  Description of Artificial Sequence: Synthetic oligonucleotide
  Sense strand starting at position 2025 of SEQ ID NO: 585463
ccgcucauccaaugaaacu

SEQ ID NO: 641883 - RNA, 19 nt, Artificial Sequence
  Description of Artificial Sequence: Synthetic oligonucleotide
  Antisense strand to SEQ ID NO: 641882
aguuucauuggaugagcgg

SEQ ID NO: 641884 - RNA, 19 nt, Artificial Sequence
  Description of Artificial Sequence: Synthetic oligonucleotide
  Sense strand starting at position 2202 of SEQ ID NO: 585463
cuucgaguagcugagagua

SEQ ID NO: 641885 - RNA, 19 nt, Artificial Sequence
  Description of Artificial Sequence: Synthetic oligonucleotide
  Antisense strand to SEQ ID NO: 641884
uacucucagcuacucgaag

SEQ ID NO: 641886 - RNA, 19 nt, Artificial Sequence
  Description of Artificial Sequence: Synthetic oligonucleotide
  Sense strand starting at position 2364 of SEQ ID NO: 585463
uuguuccuuccaggacaga

SEQ ID NO: 641887 - RNA, 19 nt, Artificial Sequence
  Description of Artificial Sequence: Synthetic oligonucleotide
  Antisense strand to SEQ ID NO: 641886
ucuguccuggaaggaacaa

SEQ ID NO: 641888 - RNA, 19 nt, Artificial Sequence
  Description of Artificial Sequence: Synthetic oligonucleotide
  Sense strand starting at position 2615 of SEQ ID NO: 585463
uccucuaagugucugaagu

SEQ ID NO: 641889 - RNA, 19 nt, Artificial Sequence
  Description of Artificial Sequence: Synthetic oligonucleotide
  Antisense strand to SEQ ID NO: 641888
acuucagacacuuagagga

SEQ ID NO: 641890 - RNA, 19 nt, Artificial Sequence
  Description of Artificial Sequence: Synthetic oligonucleotide
  Sense strand starting at position 2616 of SEQ ID NO: 585463
ccucuaagugucugaaguc

SEQ ID NO: 641891 - RNA, 19 nt, Artificial Sequence
  Description of Artificial Sequence: Synthetic oligonucleotide
  Antisense strand to SEQ ID NO: 641890
gacuucagacacuuagagg

SEQ ID NO: 641892 - RNA, 19 nt, Artificial Sequence
  Description of Artificial Sequence: Synthetic oligonucleotide
  Sense strand starting at position 2777 of SEQ ID NO: 585463
ccuccaaugugagagaucu

SEQ ID NO: 641893 - RNA, 19 nt, Artificial Sequence
  Description of Artificial Sequence: Synthetic oligonucleotide
  Antisense strand to SEQ ID NO: 641892
agaucucucacauuggagg

SEQ ID NO: 641894 - RNA, 19 nt, Artificial Sequence
  Description of Artificial Sequence: Synthetic oligonucleotide
  Sense strand starting at position 2897 of SEQ ID NO: 585463
ccaucaucuccgggaguca

SEQ ID NO: 641895 - RNA, 19 nt, Artificial Sequence
  Description of Artificial Sequence: Synthetic oligonucleotide
  Antisense strand to SEQ ID NO: 641894
ugacucccggagaugaugg

SEQ ID NO: 641896 - RNA, 19 nt, Artificial Sequence
  Description of Artificial Sequence: Synthetic oligonucleotide
  Sense strand starting at position 2898 of SEQ ID NO: 585463
caucaucuccgggagucaa

SEQ ID NO: 641897 - RNA, 19 nt, Artificial Sequence
  Description of Artificial Sequence: Synthetic oligonucleotide
  Antisense strand to SEQ ID NO: 641896
uugacucccggagaugaug

SEQ ID NO: 641898 - RNA, 19 nt, Artificial Sequence
  Description of Artificial Sequence: Synthetic oligonucleotide
  Sense strand starting at position 3070 of SEQ ID NO: 585463
ugcugaaugucacacauga

SEQ ID NO: 641899 - RNA, 19 nt, Artificial Sequence
  Description of Artificial Sequence: Synthetic oligonucleotide
  Antisense strand to SEQ ID NO: 641898
ucaugugugacauucagca

SEQ ID NO: 641900 - RNA, 19 nt, Artificial Sequence
  Description of Artificial Sequence: Synthetic oligonucleotide
  Sense strand starting at position 3087 of SEQ ID NO: 585463
gauggaugcuucuacucua

SEQ ID NO: 641901 - RNA, 19 nt, Artificial Sequence
  Description of Artificial Sequence: Synthetic oligonucleotide
  Antisense strand to SEQ ID NO: 641900
uagaguagaagcauccauc

SEQ ID NO: 641902 - RNA, 19 nt, Artificial Sequence
  Description of Artificial Sequence: Synthetic oligonucleotide
  Sense strand starting at position 3151 of SEQ ID NO: 585463
ccauuucucuggugacauc

SEQ ID NO: 641903 - RNA, 19 nt, Artificial Sequence
  Description of Artificial Sequence: Synthetic oligonucleotide
  Antisense strand to SEQ ID NO: 641902
gaugucaccagagaaaugg

SEQ ID NO: 641904 - RNA, 19 nt, Artificial Sequence
  Description of Artificial Sequence: Synthetic oligonucleotide
  Sense strand starting at position 3360 of SEQ ID NO: 585463
aguuauagaugucuuuguu

SEQ ID NO: 641905 - RNA, 19 nt, Artificial Sequence
  Description of Artificial Sequence: Synthetic oligonucleotide
  Antisense strand to SEQ ID NO: 641904
aacaaagacaucuauaacu

SEQ ID NO: 641906 - RNA, 19 nt, Artificial Sequence
  Description of Artificial Sequence: Synthetic oligonucleotide
  Sense strand starting at position 3364 of SEQ ID NO: 585463
auagaugucuuuguuucuu

SEQ ID NO: 641907 - RNA, 19 nt, Artificial Sequence
  Description of Artificial Sequence: Synthetic oligonucleotide
  Antisense strand to SEQ ID NO: 641906
aagaaacaaagacaucuau

SEQ ID NO: 641908 - RNA, 19 nt, Artificial Sequence
  Description of Artificial Sequence: Synthetic oligonucleotide
  Sense strand starting at position 3487 of SEQ ID NO: 585463
caaccuugugauuacgcua

SEQ ID NO: 641909 - RNA, 19 nt, Artificial Sequence
  Description of Artificial Sequence: Synthetic oligonucleotide
  Antisense strand to SEQ ID NO: 641908
uagcguaaucacaagguug

SEQ ID NO: 641910 - RNA, 19 nt, Artificial Sequence
  Description of Artificial Sequence: Synthetic oligonucleotide
  Sense strand starting at position 3490 of SEQ ID NO: 585463
ccuugugauuacgcuagaa

SEQ ID NO: 641911 - RNA, 19 nt, Artificial Sequence
  Description of Artificial Sequence: Synthetic oligonucleotide
  Antisense strand to SEQ ID NO: 641910
uucuagcguaaucacaagg

SEQ ID NO: 641912 - RNA, 19 nt, Artificial Sequence
  Description of Artificial Sequence: Synthetic oligonucleotide
  Sense strand starting at position 3492 of SEQ ID NO: 585463
uugugauuacgcuagaagc

SEQ ID NO: 641913 - RNA, 19 nt, Artificial Sequence
  Description of Artificial Sequence: Synthetic oligonucleotide
  Antisense strand to SEQ ID NO: 641912
gcuucuagcguaaucacaa

SEQ ID NO: 641914 - RNA, 19 nt, Artificial Sequence
  Description of Artificial Sequence: Synthetic oligonucleotide
  Sense strand starting at position 3494 of SEQ ID NO: 585463
gugauuacgcuagaagcca

SEQ ID NO: 641915 - RNA, 19 nt, Artificial Sequence
  Description of Artificial Sequence: Synthetic oligonucleotide
  Antisense strand to SEQ ID NO: 641914
uggcuucuagcguaaucac

SEQ ID NO: 641916 - RNA, 19 nt, Artificial Sequence
  Description of Artificial Sequence: Synthetic oligonucleotide
  Sense strand starting at position 3532 of SEQ ID NO: 585463
aggauaaauuguguggcau

SEQ ID NO: 641917 - RNA, 19 nt, Artificial Sequence
  Description of Artificial Sequence: Synthetic oligonucleotide
  Antisense strand to SEQ ID NO: 641916
augccacacaauuuauccu

SEQ ID NO: 641918 - RNA, 19 nt, Artificial Sequence
  Description of Artificial Sequence: Synthetic oligonucleotide
  Sense strand starting at position 3533 of SEQ ID NO: 585463
ggauaaauuguguggcaua

SEQ ID NO: 641919 - RNA, 19 nt, Artificial Sequence
  Description of Artificial Sequence: Synthetic oligonucleotide
  Antisense strand to SEQ ID NO: 641918
uaugccacacaauuuaucc

SEQ ID NO: 641920 - RNA, 19 nt, Artificial Sequence
  Description of Artificial Sequence: Synthetic oligonucleotide
  Sense strand starting at position 3540 of SEQ ID NO: 585463
uuguguggcauaugaauuc

SEQ ID NO: 641921 - RNA, 19 nt, Artificial Sequence
  Description of Artificial Sequence: Synthetic oligonucleotide
  Antisense strand to SEQ ID NO: 641920
gaauucauaugccacacaa

SEQ ID NO: 641922 - RNA, 19 nt, Artificial Sequence
  Description of Artificial Sequence: Synthetic oligonucleotide
  Sense strand starting at position 3573 of SEQ ID NO: 585463
uaagaaugcugucccgaaa

SEQ ID NO: 641923 - RNA, 19 nt, Artificial Sequence
  Description of Artificial Sequence: Synthetic oligonucleotide
  Antisense strand to SEQ ID NO: 641922
uuucgggacagcauucuua

SEQ ID NO: 641924 - RNA, 19 nt, Artificial Sequence
  Description of Artificial Sequence: Synthetic oligonucleotide
  Sense strand starting at position 3586 of SEQ ID NO: 585463
ccgaaagccucuuucuacu

SEQ ID NO: 641925 - RNA, 19 nt, Artificial Sequence
  Description of Artificial Sequence: Synthetic oligonucleotide
  Antisense strand to SEQ ID NO: 641924
aguagaaagaggcuuucgg

SEQ ID NO: 641926 - RNA, 19 nt, Artificial Sequence
  Description of Artificial Sequence: Synthetic oligonucleotide
  Sense strand starting at position 3592 of SEQ ID NO: 585463
gccucuuucuacuaagaga

SEQ ID NO: 641927 - RNA, 19 nt, Artificial Sequence
  Description of Artificial Sequence: Synthetic oligonucleotide
  Antisense strand to SEQ ID NO: 641926
ucucuuaguagaaagaggc

SEQ ID NO: 641928 - RNA, 19 nt, Artificial Sequence
  Description of Artificial Sequence: Synthetic oligonucleotide
  Sense strand starting at position 3633 of SEQ ID NO: 585463
ucucuuagucguugggaca

SEQ ID NO: 641929 - RNA, 19 nt, Artificial Sequence
  Description of Artificial Sequence: Synthetic oligonucleotide
  Antisense strand to SEQ ID NO: 641928
ugucccaacgacuaagaga

SEQ ID NO: 641930 - RNA, 19 nt, Artificial Sequence
  Description of Artificial Sequence: Synthetic oligonucleotide
  Sense strand starting at position 3634 of SEQ ID NO: 585463
cucuuagucguugggacau

SEQ ID NO: 641931 - RNA, 19 nt, Artificial Sequence
  Description of Artificial Sequence: Synthetic oligonucleotide
  Antisense strand to SEQ ID NO: 641930
augucccaacgacuaagag

SEQ ID NO: 641932 - RNA, 19 nt, Artificial Sequence
  Description of Artificial Sequence: Synthetic oligonucleotide
  Sense strand starting at position 3730 of SEQ ID NO: 585463
gccacaaccuagguuguua

SEQ ID NO: 641933 - RNA, 19 nt, Artificial Sequence
  Description of Artificial Sequence: Synthetic oligonucleotide
  Antisense strand to SEQ ID NO: 641932
uaacaaccuagguuguggc

SEQ ID NO: 641934 - RNA, 19 nt, Artificial Sequence
  Description of Artificial Sequence: Synthetic oligonucleotide
  Sense strand starting at position 3767 of SEQ ID NO: 585463
ggaccuaaaucuuaguauc

SEQ ID NO: 641935 - RNA, 19 nt, Artificial Sequence
  Description of Artificial Sequence: Synthetic oligonucleotide
  Antisense strand to SEQ ID NO: 641934
gauacuaagauuuaggucc

SEQ ID NO: 641936 - RNA, 19 nt, Artificial Sequence
  Description of Artificial Sequence: Synthetic oligonucleotide
  Sense strand starting at position 3834 of SEQ ID NO: 585463
acugauuuagcccgugguu

SEQ ID NO: 641937 - RNA, 19 nt, Artificial Sequence
  Description of Artificial Sequence: Synthetic oligonucleotide
  Antisense strand to SEQ ID NO: 641936
aaccacgggcuaaaucagu

SEQ ID NO: 641938 - RNA, 19 nt, Artificial Sequence
  Description of Artificial Sequence: Synthetic oligonucleotide
  Sense strand starting at position 3837 of SEQ ID NO: 585463
gauuuagcccgugguuuga

SEQ ID NO: 641939 - RNA, 19 nt, Artificial Sequence
  Description of Artificial Sequence: Synthetic oligonucleotide
  Antisense strand to SEQ ID NO: 641938
ucaaaccacgggcuaaauc

SEQ ID NO: 641940 - RNA, 19 nt, Artificial Sequence
  Description of Artificial Sequence: Synthetic oligonucleotide
  Sense strand starting at position 3850 of SEQ ID NO: 585463
guuugaaccuuccugauag

SEQ ID NO: 641941 - RNA, 19 nt, Artificial Sequence
  Description of Artificial Sequence: Synthetic oligonucleotide
  Antisense strand to SEQ ID NO: 641940
cuaucaggaagguucaaac

SEQ ID NO: 641942 - RNA, 19 nt, Artificial Sequence
  Description of Artificial Sequence: Synthetic oligonucleotide
  Sense strand starting at position 3852 of SEQ ID NO: 585463
uugaaccuuccugauagua

SEQ ID NO: 641943 - RNA, 19 nt, Artificial Sequence
  Description of Artificial Sequence: Synthetic oligonucleotide
  Antisense strand to SEQ ID NO: 641942
uacuaucaggaagguucaa

SEQ ID NO: 641944 - RNA, 19 nt, Artificial Sequence
  Description of Artificial Sequence: Synthetic oligonucleotide
  Sense strand starting at position 3860 of SEQ ID NO: 585463
uccugauaguacucauugu

SEQ ID NO: 641945 - RNA, 19 nt, Artificial Sequence
  Description of Artificial Sequence: Synthetic oligonucleotide
  Antisense strand to SEQ ID NO: 641944
acaaugaguacuaucagga

SEQ ID NO: 641946 - RNA, 19 nt, Artificial Sequence
  Description of Artificial Sequence: Synthetic oligonucleotide
  Sense strand starting at position 15 of SEQ ID NO: 585464
cuaggugauuccgaugugu

SEQ ID NO: 641947 - RNA, 19 nt, Artificial Sequence
  Description of Artificial Sequence: Synthetic oligonucleotide
  Antisense strand to SEQ ID NO: 641946
acacaucggaaucaccuag

SEQ ID NO: 641948 - RNA, 19 nt, Artificial Sequence
  Description of Artificial Sequence: Synthetic oligonucleotide
  Sense strand starting at position 51 of SEQ ID NO: 585464
acugauuuagcccgugguu

SEQ ID NO: 641949 - RNA, 19 nt, Artificial Sequence
  Description of Artificial Sequence: Synthetic oligonucleotide
  Antisense strand to SEQ ID NO: 641948
aaccacgggcuaaaucagu

SEQ ID NO: 641950 - RNA, 19 nt, Artificial Sequence
  Description of Artificial Sequence: Synthetic oligonucleotide
  Sense strand starting at position 54 of SEQ ID NO: 585464
gauuuagcccgugguuuga

SEQ ID NO: 641951 - RNA, 19 nt, Artificial Sequence
  Description of Artificial Sequence: Synthetic oligonucleotide
  Antisense strand to SEQ ID NO: 641950
ucaaaccacgggcuaaauc

SEQ ID NO: 641952 - RNA, 19 nt, Artificial Sequence
  Description of Artificial Sequence: Synthetic oligonucleotide
  Sense strand starting at position 67 of SEQ ID NO: 585464
guuugaaccuuccugauag

SEQ ID NO: 641953 - RNA, 19 nt, Artificial Sequence
  Description of Artificial Sequence: Synthetic oligonucleotide
  Antisense strand to SEQ ID NO: 641952
cuaucaggaagguucaaac

SEQ ID NO: 641954 - RNA, 19 nt, Artificial Sequence
  Description of Artificial Sequence: Synthetic oligonucleotide
  Sense strand starting at position 68 of SEQ ID NO: 585464
uuugaaccuuccugauagu

SEQ ID NO: 641955 - RNA, 19 nt, Artificial Sequence
  Description of Artificial Sequence: Synthetic oligonucleotide
  Antisense strand to SEQ ID NO: 641954
acuaucaggaagguucaaa

SEQ ID NO: 641956 - RNA, 19 nt, Artificial Sequence
  Description of Artificial Sequence: Synthetic oligonucleotide
  Sense strand starting at position 69 of SEQ ID NO: 585464
uugaaccuuccugauagua

SEQ ID NO: 641957 - RNA, 19 nt, Artificial Sequence
  Description of Artificial Sequence: Synthetic oligonucleotide
  Antisense strand to SEQ ID NO: 641956
uacuaucaggaagguucaa

SEQ ID NO: 641958 - RNA, 19 nt, Artificial Sequence
  Description of Artificial Sequence: Synthetic oligonucleotide
  Sense strand starting at position 77 of SEQ ID NO: 585464
uccugauaguacucauugu

SEQ ID NO: 641959 - RNA, 19 nt, Artificial Sequence
  Description of Artificial Sequence: Synthetic oligonucleotide
  Antisense strand to SEQ ID NO: 641958
acaaugaguacuaucagga

SEQ ID NO: 641960 - RNA, 19 nt, Artificial Sequence
  Description of Artificial Sequence: Synthetic oligonucleotide
  Sense strand starting at position 310 of SEQ ID NO: 585464
caggaaauguguccguuuc

SEQ ID NO: 641961 - RNA, 19 nt, Artificial Sequence
  Description of Artificial Sequence: Synthetic oligonucleotide
  Antisense strand to SEQ ID NO: 641960
gaaacggacacauuuccug

SEQ ID NO: 641962 - RNA, 19 nt, Artificial Sequence
  Description of Artificial Sequence: Synthetic oligonucleotide
  Sense strand starting at position 311 of SEQ ID NO: 585464
aggaaauguguccguuucu

SEQ ID NO: 641963 - RNA, 19 nt, Artificial Sequence
  Description of Artificial Sequence: Synthetic oligonucleotide
  Antisense strand to SEQ ID NO: 641962
agaaacggacacauuuccu

SEQ ID NO: 641964 - RNA, 19 nt, Artificial Sequence
  Description of Artificial Sequence: Synthetic oligonucleotide
  Sense strand starting at position 312 of SEQ ID NO: 585464
ggaaauguguccguuucuu

SEQ ID NO: 641965 - RNA, 19 nt, Artificial Sequence
  Description of Artificial Sequence: Synthetic oligonucleotide
  Antisense strand to SEQ ID NO: 641964
aagaaacggacacauuucc

SEQ ID NO: 641966 - RNA, 19 nt, Artificial Sequence
  Description of Artificial Sequence: Synthetic oligonucleotide
  Sense strand starting at position 320 of SEQ ID NO: 585464
guccguuucuucuuuguca

SEQ ID NO: 641967 - RNA, 19 nt, Artificial Sequence
  Description of Artificial Sequence: Synthetic oligonucleotide
  Antisense strand to SEQ ID NO: 641966
ugacaaagaagaaacggac

SEQ ID NO: 641968 - RNA, 19 nt, Artificial Sequence
  Description of Artificial Sequence: Synthetic oligonucleotide
  Sense strand starting at position 576 of SEQ ID NO: 585464
ucauaagccuagugagaga

SEQ ID NO: 641969 - RNA, 19 nt, Artificial Sequence
  Description of Artificial Sequence: Synthetic oligonucleotide
  Antisense strand to SEQ ID NO: 641968
ucucucacuaggcuuauga

SEQ ID NO: 641970 - RNA, 19 nt, Artificial Sequence
  Description of Artificial Sequence: Synthetic oligonucleotide
  Sense strand starting at position 608 of SEQ ID NO: 585464
ggaccuagcucuccugaca

SEQ ID NO: 641971 - RNA, 19 nt, Artificial Sequence
  Description of Artificial Sequence: Synthetic oligonucleotide
  Antisense strand to SEQ ID NO: 641970
ugucaggagagcuaggucc

SEQ ID NO: 641972 - RNA, 19 nt, Artificial Sequence
  Description of Artificial Sequence: Synthetic oligonucleotide
  Sense strand starting at position 757 of SEQ ID NO: 585464
auaugcaagguuuguucua

SEQ ID NO: 641973 - RNA, 19 nt, Artificial Sequence
  Description of Artificial Sequence: Synthetic oligonucleotide
  Antisense strand to SEQ ID NO: 641972
uagaacaaaccuugcauau

SEQ ID NO: 641974 - RNA, 19 nt, Artificial Sequence
  Description of Artificial Sequence: Synthetic oligonucleotide
  Sense strand starting at position 758 of SEQ ID NO: 585464
uaugcaagguuuguucuaa

SEQ ID NO: 641975 - RNA, 19 nt, Artificial Sequence
  Description of Artificial Sequence: Synthetic oligonucleotide
  Antisense strand to SEQ ID NO: 641974
uuagaacaaaccuugcaua

SEQ ID NO: 641976 - RNA, 19 nt, Artificial Sequence
  Description of Artificial Sequence: Synthetic oligonucleotide
  Sense strand starting at position 759 of SEQ ID NO: 585464
augcaagguuuguucuaag

SEQ ID NO: 641977 - RNA, 19 nt, Artificial Sequence
  Description of Artificial Sequence: Synthetic oligonucleotide
  Antisense strand to SEQ ID NO: 641976
cuuagaacaaaccuugcau

SEQ ID NO: 641978 - RNA, 19 nt, Artificial Sequence
  Description of Artificial Sequence: Synthetic oligonucleotide
  Sense strand starting at position 762 of SEQ ID NO: 585464
caagguuuguucuaaggca

SEQ ID NO: 641979 - RNA, 19 nt, Artificial Sequence
  Description of Artificial Sequence: Synthetic oligonucleotide
  Antisense strand to SEQ ID NO: 641978
ugccuuagaacaaaccuug

SEQ ID NO: 641980 - RNA, 19 nt, Artificial Sequence
  Description of Artificial Sequence: Synthetic oligonucleotide
  Sense strand starting at position 836 of SEQ ID NO: 585464
ccgagauggucuugagcuc

SEQ ID NO: 641981 - RNA, 19 nt, Artificial Sequence
  Description of Artificial Sequence: Synthetic oligonucleotide
  Antisense strand to SEQ ID NO: 641980
gagcucaagaccaucucgg

SEQ ID NO: 641982 - RNA, 19 nt, Artificial Sequence
  Description of Artificial Sequence: Synthetic oligonucleotide
  Sense strand starting at position 2084 of SEQ ID NO: 585464
cggagaaguuuguuggccu

SEQ ID NO: 641983 - RNA, 19 nt, Artificial Sequence
  Description of Artificial Sequence: Synthetic oligonucleotide
  Antisense strand to SEQ ID NO: 641982
aggccaacaaacuucuccg

SEQ ID NO: 641984 - RNA, 19 nt, Artificial Sequence
  Description of Artificial Sequence: Synthetic oligonucleotide
  Sense strand starting at position 2640 of SEQ ID NO: 585464
cuguaaauaugcugcuauu

SEQ ID NO: 641985 - RNA, 19 nt, Artificial Sequence
  Description of Artificial Sequence: Synthetic oligonucleotide
  Antisense strand to SEQ ID NO: 641984
aauagcagcauauuuacag

SEQ ID NO: 641986 - RNA, 19 nt, Artificial Sequence
  Description of Artificial Sequence: Synthetic oligonucleotide
  Sense strand starting at position 2816 of SEQ ID NO: 585464
aucaucuuauugggacaua

SEQ ID NO: 641987 - RNA, 19 nt, Artificial Sequence
  Description of Artificial Sequence: Synthetic oligonucleotide
  Antisense strand to SEQ ID NO: 641986
uaugucccaauaagaugau

SEQ ID NO: 641988 - RNA, 19 nt, Artificial Sequence
  Description of Artificial Sequence: Synthetic oligonucleotide
  Sense strand starting at position 2939 of SEQ ID NO: 585464
uuaaucgucucccaaagaa

SEQ ID NO: 641989 - RNA, 19 nt, Artificial Sequence
  Description of Artificial Sequence: Synthetic oligonucleotide
  Antisense strand to SEQ ID NO: 641988
uucuuugggagacgauuaa

SEQ ID NO: 641990 - RNA, 19 nt, Artificial Sequence
  Description of Artificial Sequence: Synthetic oligonucleotide
  Sense strand starting at position 3026 of SEQ ID NO: 585464
agaugugcccagcauacuu

SEQ ID NO: 641991 - RNA, 19 nt, Artificial Sequence
  Description of Artificial Sequence: Synthetic oligonucleotide
  Antisense strand to SEQ ID NO: 641990
aaguaugcugggcacaucu

SEQ ID NO: 641992 - RNA, 19 nt, Artificial Sequence
  Description of Artificial Sequence: Synthetic oligonucleotide
  Sense strand starting at position 3114 of SEQ ID NO: 585464
ggcuauggcaggcagauaa

SEQ ID NO: 641993 - RNA, 19 nt, Artificial Sequence
  Description of Artificial Sequence: Synthetic oligonucleotide
  Antisense strand to SEQ ID NO: 641992
uuaucugccugccauagcc

SEQ ID NO: 641994 - RNA, 19 nt, Artificial Sequence
  Description of Artificial Sequence: Synthetic oligonucleotide
  Sense strand starting at position 3423 of SEQ ID NO: 585464
uccagagacugggauaacu

SEQ ID NO: 641995 - RNA, 19 nt, Artificial Sequence
  Description of Artificial Sequence: Synthetic oligonucleotide
  Antisense strand to SEQ ID NO: 641994
aguuaucccagucucugga

SEQ ID NO: 641996 - RNA, 19 nt, Artificial Sequence
  Description of Artificial Sequence: Synthetic oligonucleotide
  Sense strand starting at position 3518 of SEQ ID NO: 585464
guacucagacaccgauauu

SEQ ID NO: 641997 - RNA, 19 nt, Artificial Sequence
  Description of Artificial Sequence: Synthetic oligonucleotide
  Antisense strand to SEQ ID NO: 641996
aauaucggugucugaguac

SEQ ID NO: 641998 - RNA, 19 nt, Artificial Sequence
  Description of Artificial Sequence: Synthetic oligonucleotide
  Sense strand starting at position 3672 of SEQ ID NO: 585464
gguaauuaaucuggucgca

SEQ ID NO: 641999 - RNA, 19 nt, Artificial Sequence
  Description of Artificial Sequence: Synthetic oligonucleotide
  Antisense strand to SEQ ID NO: 641998
ugcgaccagauuaauuacc

SEQ ID NO: 642000 - RNA, 19 nt, Artificial Sequence
  Description of Artificial Sequence: Synthetic oligonucleotide
  Sense strand starting at position 3674 of SEQ ID NO: 585464
uaauuaaucuggucgcagu

SEQ ID NO: 642001 - RNA, 19 nt, Artificial Sequence
  Description of Artificial Sequence: Synthetic oligonucleotide
  Antisense strand to SEQ ID NO: 642000
acugcgaccagauuaauua

SEQ ID NO: 642002 - RNA, 19 nt, Artificial Sequence
  Description of Artificial Sequence: Synthetic oligonucleotide
  Sense strand starting at position 3725 of SEQ ID NO: 585464
agguaaacaugcucuuuag

SEQ ID NO: 642003 - RNA, 19 nt, Artificial Sequence
  Description of Artificial Sequence: Synthetic oligonucleotide
  Antisense strand to SEQ ID NO: 642002
cuaaagagcauguuuaccu

SEQ ID NO: 642004 - RNA, 19 nt, Artificial Sequence
  Description of Artificial Sequence: Synthetic oligonucleotide
  Sense strand starting at position 3750 of SEQ ID NO: 585464
ucucuuacaugucuuugua

SEQ ID NO: 642005 - RNA, 19 nt, Artificial Sequence
  Description of Artificial Sequence: Synthetic oligonucleotide
  Antisense strand to SEQ ID NO: 642004
uacaaagacauguaagaga

SEQ ID NO: 642006 - RNA, 19 nt, Artificial Sequence
  Description of Artificial Sequence: Synthetic oligonucleotide
  Sense strand starting at position 3753 of SEQ ID NO: 585464
cuuacaugucuuuguacuu

SEQ ID NO: 642007 - RNA, 19 nt, Artificial Sequence
  Description of Artificial Sequence: Synthetic oligonucleotide
  Antisense strand to SEQ ID NO: 642006
aaguacaaagacauguaag

SEQ ID NO: 642008 - RNA, 19 nt, Artificial Sequence
  Description of Artificial Sequence: Synthetic oligonucleotide
  Sense strand starting at position 3754 of SEQ ID NO: 585464
uuacaugucuuuguacuua

SEQ ID NO: 642009 - RNA, 19 nt, Artificial Sequence
  Description of Artificial Sequence: Synthetic oligonucleotide
  Antisense strand to SEQ ID NO: 642008
uaaguacaaagacauguaa

SEQ ID NO: 642010 - RNA, 19 nt, Artificial Sequence
  Description of Artificial Sequence: Synthetic oligonucleotide
  Sense strand starting at position 3764 of SEQ ID NO: 585464
uuguacuuacucgaagcua

SEQ ID NO: 642011 - RNA, 19 nt, Artificial Sequence
  Description of Artificial Sequence: Synthetic oligonucleotide
  Antisense strand to SEQ ID NO: 642010
uagcuucgaguaaguacaa

SEQ ID NO: 642012 - RNA, 19 nt, Artificial Sequence
  Description of Artificial Sequence: Synthetic oligonucleotide
  Sense strand starting at position 3772 of SEQ ID NO: 585464
acucgaagcuauuaacuca

SEQ ID NO: 642013 - RNA, 19 nt, Artificial Sequence
  Description of Artificial Sequence: Synthetic oligonucleotide
  Antisense strand to SEQ ID NO: 642012
ugaguuaauagcuucgagu

SEQ ID NO: 642014 - RNA, 19 nt, Artificial Sequence
  Description of Artificial Sequence: Synthetic oligonucleotide
  Sense strand starting at position 3969 of SEQ ID NO: 585464
gguggauugcagugguuca

SEQ ID NO: 642015 - RNA, 19 nt, Artificial Sequence
  Description of Artificial Sequence: Synthetic oligonucleotide
  Antisense strand to SEQ ID NO: 642014
ugaaccacugcaauccacc

SEQ ID NO: 642016 - RNA, 19 nt, Artificial Sequence
  Description of Artificial Sequence: Synthetic oligonucleotide
  Sense strand starting at position 23 of SEQ ID NO: 585465
gugacuuggcgcuccagua

SEQ ID NO: 642017 - RNA, 19 nt, Artificial Sequence
  Description of Artificial Sequence: Synthetic oligonucleotide
  Antisense strand to SEQ ID NO: 642016
uacuggagcgccaagucac

SEQ ID NO: 642018 - RNA, 19 nt, Artificial Sequence
  Description of Artificial Sequence: Synthetic oligonucleotide
  Sense strand starting at position 44 of SEQ ID NO: 585465
ugagcugguccuugaucuu

SEQ ID NO: 642019 - RNA, 19 nt, Artificial Sequence
  Description of Artificial Sequence: Synthetic oligonucleotide
  Antisense strand to SEQ ID NO: 642018
aagaucaaggaccagcuca

SEQ ID NO: 642020 - RNA, 19 nt, Artificial Sequence
  Description of Artificial Sequence: Synthetic oligonucleotide
  Sense strand starting at position 446 of SEQ ID NO: 585465
uugccaaauuuggaaguga

SEQ ID NO: 642021 - RNA, 19 nt, Artificial Sequence
  Description of Artificial Sequence: Synthetic oligonucleotide
  Antisense strand to SEQ ID NO: 642020
ucacuuccaaauuuggcaa

SEQ ID NO: 642022 - RNA, 19 nt, Artificial Sequence
  Description of Artificial Sequence: Synthetic oligonucleotide
  Sense strand starting at position 467 of SEQ ID NO: 585465
aacauuagucuugggcaca

SEQ ID NO: 642023 - RNA, 19 nt, Artificial Sequence
  Description of Artificial Sequence: Synthetic oligonucleotide
  Antisense strand to SEQ ID NO: 642022
ugugcccaagacuaauguu

SEQ ID NO: 642024 - RNA, 19 nt, Artificial Sequence
  Description of Artificial Sequence: Synthetic oligonucleotide
  Sense strand starting at position 758 of SEQ ID NO: 585465
gugucugagaagugucuca

SEQ ID NO: 642025 - RNA, 19 nt, Artificial Sequence
  Description of Artificial Sequence: Synthetic oligonucleotide
  Antisense strand to SEQ ID NO: 642024
ugagacacuucucagacac

SEQ ID NO: 642026 - RNA, 19 nt, Artificial Sequence
  Description of Artificial Sequence: Synthetic oligonucleotide
  Sense strand starting at position 804 of SEQ ID NO: 585465
ucgugcuugccuccugaca

SEQ ID NO: 642027 - RNA, 19 nt, Artificial Sequence
  Description of Artificial Sequence: Synthetic oligonucleotide
  Antisense strand to SEQ ID NO: 642026
ugucaggaggcaagcacga

SEQ ID NO: 642028 - RNA, 19 nt, Artificial Sequence
  Description of Artificial Sequence: Synthetic oligonucleotide
  Sense strand starting at position 950 of SEQ ID NO: 585465
acacuuccucugugaaugu

SEQ ID NO: 642029 - RNA, 19 nt, Artificial Sequence
  Description of Artificial Sequence: Synthetic oligonucleotide
  Antisense strand to SEQ ID NO: 642028
acauucacagaggaagugu

SEQ ID NO: 642030 - RNA, 19 nt, Artificial Sequence
  Description of Artificial Sequence: Synthetic oligonucleotide
  Sense strand starting at position 961 of SEQ ID NO: 585465
gugaaugugcccuacucca

SEQ ID NO: 642031 - RNA, 19 nt, Artificial Sequence
  Description of Artificial Sequence: Synthetic oligonucleotide
  Antisense strand to SEQ ID NO: 642030
uggaguagggcacauucac

SEQ ID NO: 642032 - RNA, 19 nt, Artificial Sequence
  Description of Artificial Sequence: Synthetic oligonucleotide
  Sense strand starting at position 1184 of SEQ ID NO: 585465
gaagguaucagaggguaug

SEQ ID NO: 642033 - RNA, 19 nt, Artificial Sequence
  Description of Artificial Sequence: Synthetic oligonucleotide
  Antisense strand to SEQ ID NO: 642032
cauacccucugauaccuuc

SEQ ID NO: 642034 - RNA, 19 nt, Artificial Sequence
  Description of Artificial Sequence: Synthetic oligonucleotide
  Sense strand starting at position 1424 of SEQ ID NO: 585465
gaggaagaccucggcgaaa

SEQ ID NO: 642035 - RNA, 19 nt, Artificial Sequence
  Description of Artificial Sequence: Synthetic oligonucleotide
  Antisense strand to SEQ ID NO: 642034
uuucgccgaggucuuccuc

SEQ ID NO: 642036 - RNA, 19 nt, Artificial Sequence
  Description of Artificial Sequence: Synthetic oligonucleotide
  Sense strand starting at position 2456 of SEQ ID NO: 585465
gauuaaaguccuggaaacu

SEQ ID NO: 642037 - RNA, 19 nt, Artificial Sequence
  Description of Artificial Sequence: Synthetic oligonucleotide
  Antisense strand to SEQ ID NO: 642036
aguuuccaggacuuuaauc

SEQ ID NO: 642038 - RNA, 19 nt, Artificial Sequence
  Description of Artificial Sequence: Synthetic oligonucleotide
  Sense strand starting at position 2465 of SEQ ID NO: 585465
ccuggaaacucagcaaucu

SEQ ID NO: 642039 - RNA, 19 nt, Artificial Sequence
  Description of Artificial Sequence: Synthetic oligonucleotide
  Antisense strand to SEQ ID NO: 642038
agauugcugaguuuccagg

SEQ ID NO: 642040 - RNA, 19 nt, Artificial Sequence
  Description of Artificial Sequence: Synthetic oligonucleotide
  Sense strand starting at position 2491 of SEQ ID NO: 585465
ccaaauggauaugagaagu

SEQ ID NO: 642041 - RNA, 19 nt, Artificial Sequence
  Description of Artificial Sequence: Synthetic oligonucleotide
  Antisense strand to SEQ ID NO: 642040
acuucucauauccauuugg

SEQ ID NO: 642042 - RNA, 19 nt, Artificial Sequence
  Description of Artificial Sequence: Synthetic oligonucleotide
  Sense strand starting at position 2621 of SEQ ID NO: 585465
acgggacugucugcugaaa

SEQ ID NO: 642043 - RNA, 19 nt, Artificial Sequence
  Description of Artificial Sequence: Synthetic oligonucleotide
  Antisense strand to SEQ ID NO: 642042
uuucagcagacagucccgu

SEQ ID NO: 642044 - RNA, 19 nt, Artificial Sequence
  Description of Artificial Sequence: Synthetic oligonucleotide
  Sense strand starting at position 2666 of SEQ ID NO: 585465
cuucgucguauucccgaua

SEQ ID NO: 642045 - RNA, 19 nt, Artificial Sequence
  Description of Artificial Sequence: Synthetic oligonucleotide
  Antisense strand to SEQ ID NO: 642044
uaucgggaauacgacgaag

SEQ ID NO: 642046 - RNA, 19 nt, Artificial Sequence
  Description of Artificial Sequence: Synthetic oligonucleotide
  Sense strand starting at position 2669 of SEQ ID NO: 585465
cgucguauucccgauaagg

SEQ ID NO: 642047 - RNA, 19 nt, Artificial Sequence
  Description of Artificial Sequence: Synthetic oligonucleotide
  Antisense strand to SEQ ID NO: 642046
ccuuaucgggaauacgacg

SEQ ID NO: 642048 - RNA, 19 nt, Artificial Sequence
  Description of Artificial Sequence: Synthetic oligonucleotide
  Sense strand starting at position 2671 of SEQ ID NO: 585465
ucguauucccgauaaggaa

SEQ ID NO: 642049 - RNA, 19 nt, Artificial Sequence
  Description of Artificial Sequence: Synthetic oligonucleotide
  Antisense strand to SEQ ID NO: 642048
uuccuuaucgggaauacga

SEQ ID NO: 642050 - RNA, 19 nt, Artificial Sequence
  Description of Artificial Sequence: Synthetic oligonucleotide
  Sense strand starting at position 2752 of SEQ ID NO: 585465
ucauuuauugaccgucauc

SEQ ID NO: 642051 - RNA, 19 nt, Artificial Sequence
  Description of Artificial Sequence: Synthetic oligonucleotide
  Antisense strand to SEQ ID NO: 642050
gaugacggucaauaaauga

SEQ ID NO: 642052 - RNA, 19 nt, Artificial Sequence
  Description of Artificial Sequence: Synthetic oligonucleotide
  Sense strand starting at position 2755 of SEQ ID NO: 585465
uuuauugaccgucauccua

SEQ ID NO: 642053 - RNA, 19 nt, Artificial Sequence
  Description of Artificial Sequence: Synthetic oligonucleotide
  Antisense strand to SEQ ID NO: 642052
uaggaugacggucaauaaa

SEQ ID NO: 642054 - RNA, 19 nt, Artificial Sequence
  Description of Artificial Sequence: Synthetic oligonucleotide
  Sense strand starting at position 2762 of SEQ ID NO: 585465
accgucauccuaugaguau

SEQ ID NO: 642055 - RNA, 19 nt, Artificial Sequence
  Description of Artificial Sequence: Synthetic oligonucleotide
  Antisense strand to SEQ ID NO: 642054
auacucauaggaugacggu

SEQ ID NO: 642056 - RNA, 19 nt, Artificial Sequence
  Description of Artificial Sequence: Synthetic oligonucleotide
  Sense strand starting at position 2777 of SEQ ID NO: 585465
guauuaccucaacaucagu

SEQ ID NO: 642057 - RNA, 19 nt, Artificial Sequence
  Description of Artificial Sequence: Synthetic oligonucleotide
  Antisense strand to SEQ ID NO: 642056
acugauguugagguaauac

SEQ ID NO: 642058 - RNA, 19 nt, Artificial Sequence
  Description of Artificial Sequence: Synthetic oligonucleotide
  Sense strand starting at position 2832 of SEQ ID NO: 585465
agucacagauguucuguga

SEQ ID NO: 642059 - RNA, 19 nt, Artificial Sequence
  Description of Artificial Sequence: Synthetic oligonucleotide
  Antisense strand to SEQ ID NO: 642058
ucacagaacaucugugacu

SEQ ID NO: 642060 - RNA, 19 nt, Artificial Sequence
  Description of Artificial Sequence: Synthetic oligonucleotide
  Sense strand starting at position 2835 of SEQ ID NO: 585465
cacagauguucugugaucu

SEQ ID NO: 642061 - RNA, 19 nt, Artificial Sequence
  Description of Artificial Sequence: Synthetic oligonucleotide
  Antisense strand to SEQ ID NO: 642060
agaucacagaacaucugug

SEQ ID NO: 642062 - RNA, 19 nt, Artificial Sequence
  Description of Artificial Sequence: Synthetic oligonucleotide
  Sense strand starting at position 2836 of SEQ ID NO: 585465
acagauguucugugaucug

SEQ ID NO: 642063 - RNA, 19 nt, Artificial Sequence
  Description of Artificial Sequence: Synthetic oligonucleotide
  Antisense strand to SEQ ID NO: 642062
cagaucacagaacaucugu

SEQ ID NO: 642064 - RNA, 19 nt, Artificial Sequence
  Description of Artificial Sequence: Synthetic oligonucleotide
  Sense strand starting at position 2845 of SEQ ID NO: 585465
cugugaucugcacacagca

SEQ ID NO: 642065 - RNA, 19 nt, Artificial Sequence
  Description of Artificial Sequence: Synthetic oligonucleotide
  Antisense strand to SEQ ID NO: 642064
ugcugugugcagaucacag

SEQ ID NO: 642066 - RNA, 19 nt, Artificial Sequence
  Description of Artificial Sequence: Synthetic oligonucleotide
  Sense strand starting at position 2930 of SEQ ID NO: 585465
gcaugaaaggcuggcauua

SEQ ID NO: 642067 - RNA, 19 nt, Artificial Sequence
  Description of Artificial Sequence: Synthetic oligonucleotide
  Antisense strand to SEQ ID NO: 642066
uaaugccagccuuucaugc

SEQ ID NO: 642068 - RNA, 19 nt, Artificial Sequence
  Description of Artificial Sequence: Synthetic oligonucleotide
  Sense strand starting at position 2942 of SEQ ID NO: 585465
ggcauuauaagaugcuguu

SEQ ID NO: 642069 - RNA, 19 nt, Artificial Sequence
  Description of Artificial Sequence: Synthetic oligonucleotide
  Antisense strand to SEQ ID NO: 642068
aacagcaucuuauaaugcc

SEQ ID NO: 642070 - RNA, 19 nt, Artificial Sequence
  Description of Artificial Sequence: Synthetic oligonucleotide
  Sense strand starting at position 2961 of SEQ ID NO: 585465
ucuuguuuagacgaaguga

SEQ ID NO: 642071 - RNA, 19 nt, Artificial Sequence
  Description of Artificial Sequence: Synthetic oligonucleotide
  Antisense strand to SEQ ID NO: 642070
ucacuucgucuaaacaaga

SEQ ID NO: 642072 - RNA, 19 nt, Artificial Sequence
  Description of Artificial Sequence: Synthetic oligonucleotide
  Sense strand starting at position 3026 of SEQ ID NO: 585465
gguugcuguccuugagauc

SEQ ID NO: 642073 - RNA, 19 nt, Artificial Sequence
  Description of Artificial Sequence: Synthetic oligonucleotide
  Antisense strand to SEQ ID NO: 642072
gaucucaaggacagcaacc

SEQ ID NO: 642074 - RNA, 19 nt, Artificial Sequence
  Description of Artificial Sequence: Synthetic oligonucleotide
  Sense strand starting at position 3289 of SEQ ID NO: 585465
uugagugugacacgucauu

SEQ ID NO: 642075 - RNA, 19 nt, Artificial Sequence
  Description of Artificial Sequence: Synthetic oligonucleotide
  Antisense strand to SEQ ID NO: 642074
aaugacgugucacacucaa

SEQ ID NO: 642076 - RNA, 19 nt, Artificial Sequence
  Description of Artificial Sequence: Synthetic oligonucleotide
  Sense strand starting at position 3298 of SEQ ID NO: 585465
acacgucauuuggcuugaa

SEQ ID NO: 642077 - RNA, 19 nt, Artificial Sequence
  Description of Artificial Sequence: Synthetic oligonucleotide
  Antisense strand to SEQ ID NO: 642076
uucaagccaaaugacgugu

SEQ ID NO: 642078 - RNA, 19 nt, Artificial Sequence
  Description of Artificial Sequence: Synthetic oligonucleotide
  Sense strand starting at position 3299 of SEQ ID NO: 585465
cacgucauuuggcuugaaa

SEQ ID NO: 642079 - RNA, 19 nt, Artificial Sequence
  Description of Artificial Sequence: Synthetic oligonucleotide
  Antisense strand to SEQ ID NO: 642078
uuucaagccaaaugacgug

SEQ ID NO: 642080 - RNA, 19 nt, Artificial Sequence
  Description of Artificial Sequence: Synthetic oligonucleotide
  Sense strand starting at position 3301 of SEQ ID NO: 585465
cgucauuuggcuugaaaug

SEQ ID NO: 642081 - RNA, 19 nt, Artificial Sequence
  Description of Artificial Sequence: Synthetic oligonucleotide
  Antisense strand to SEQ ID NO: 642080
cauuucaagccaaaugacg

SEQ ID NO: 642082 - RNA, 19 nt, Artificial Sequence
  Description of Artificial Sequence: Synthetic oligonucleotide
  Sense strand starting at position 3459 of SEQ ID NO: 585465
agcuaugucuuguuuagag

SEQ ID NO: 642083 - RNA, 19 nt, Artificial Sequence
  Description of Artificial Sequence: Synthetic oligonucleotide
  Antisense strand to SEQ ID NO: 642082
cucuaaacaagacauagcu

SEQ ID NO: 642084 - RNA, 19 nt, Artificial Sequence
  Description of Artificial Sequence: Synthetic oligonucleotide
  Sense strand starting at position 3461 of SEQ ID NO: 585465
cuaugucuuguuuagagga

SEQ ID NO: 642085 - RNA, 19 nt, Artificial Sequence
  Description of Artificial Sequence: Synthetic oligonucleotide
  Antisense strand to SEQ ID NO: 642084
uccucuaaacaagacauag

SEQ ID NO: 642086 - RNA, 19 nt, Artificial Sequence
  Description of Artificial Sequence: Synthetic oligonucleotide
  Sense strand starting at position 3466 of SEQ ID NO: 585465
ucuuguuuagaggaaguga

SEQ ID NO: 642087 - RNA, 19 nt, Artificial Sequence
  Description of Artificial Sequence: Synthetic oligonucleotide
  Antisense strand to SEQ ID NO: 642086
ucacuuccucuaaacaaga

SEQ ID NO: 642088 - RNA, 19 nt, Artificial Sequence
  Description of Artificial Sequence: Synthetic oligonucleotide
  Sense strand starting at position 3484 of SEQ ID NO: 585465
aacugucacgcuggaaaca

SEQ ID NO: 642089 - RNA, 19 nt, Artificial Sequence
  Description of Artificial Sequence: Synthetic oligonucleotide
  Antisense strand to SEQ ID NO: 642088
uguuuccagcgugacaguu

SEQ ID NO: 642090 - RNA, 19 nt, Artificial Sequence
  Description of Artificial Sequence: Synthetic oligonucleotide
  Sense strand starting at position 3756 of SEQ ID NO: 585465
uggcucuaugaaugacaca

SEQ ID NO: 642091 - RNA, 19 nt, Artificial Sequence
  Description of Artificial Sequence: Synthetic oligonucleotide
  Antisense strand to SEQ ID NO: 642090
ugugucauucauagagcca

SEQ ID NO: 642092 - RNA, 19 nt, Artificial Sequence
  Description of Artificial Sequence: Synthetic oligonucleotide
  Sense strand starting at position 3897 of SEQ ID NO: 585465
gggaauacauuguucugga

SEQ ID NO: 642093 - RNA, 19 nt, Artificial Sequence
  Description of Artificial Sequence: Synthetic oligonucleotide
  Antisense strand to SEQ ID NO: 642092
uccagaacaauguauuccc

SEQ ID NO: 642094 - RNA, 19 nt, Artificial Sequence
  Description of Artificial Sequence: Synthetic oligonucleotide
  Sense strand starting at position 3898 of SEQ ID NO: 585465
ggaauacauuguucuggaa

SEQ ID NO: 642095 - RNA, 19 nt, Artificial Sequence
  Description of Artificial Sequence: Synthetic oligonucleotide
  Antisense strand to SEQ ID NO: 642094
uuccagaacaauguauucc

SEQ ID NO: 642096 - RNA, 19 nt, Artificial Sequence
  Description of Artificial Sequence: Synthetic oligonucleotide
  Sense strand starting at position 21 of SEQ ID NO: 585466
agcuauccagagugaguaa

SEQ ID NO: 642097 - RNA, 19 nt, Artificial Sequence
  Description of Artificial Sequence: Synthetic oligonucleotide
  Antisense strand to SEQ ID NO: 642096
uuacucacucuggauagcu

SEQ ID NO: 642098 - RNA, 19 nt, Artificial Sequence
  Description of Artificial Sequence: Synthetic oligonucleotide
  Sense strand starting at position 22 of SEQ ID NO: 585466
gcuauccagagugaguaaa

SEQ ID NO: 642099 - RNA, 19 nt, Artificial Sequence
  Description of Artificial Sequence: Synthetic oligonucleotide
  Antisense strand to SEQ ID NO: 642098
uuuacucacucuggauagc

SEQ ID NO: 642100 - RNA, 19 nt, Artificial Sequence
  Description of Artificial Sequence: Synthetic oligonucleotide
  Sense strand starting at position 222 of SEQ ID NO: 585466
uuaacauuaguuugguuga

SEQ ID NO: 642101 - RNA, 19 nt, Artificial Sequence
  Description of Artificial Sequence: Synthetic oligonucleotide
  Antisense strand to SEQ ID NO: 642100
ucaaccaaacuaauguuaa

SEQ ID NO: 642102 - RNA, 19 nt, Artificial Sequence
  Description of Artificial Sequence: Synthetic oligonucleotide
  Sense strand starting at position 224 of SEQ ID NO: 585466
aacauuaguuugguugaua

SEQ ID NO: 642103 - RNA, 19 nt, Artificial Sequence
  Description of Artificial Sequence: Synthetic oligonucleotide
  Antisense strand to SEQ ID NO: 642102
uaucaaccaaacuaauguu

SEQ ID NO: 642104 - RNA, 19 nt, Artificial Sequence
  Description of Artificial Sequence: Synthetic oligonucleotide
  Sense strand starting at position 225 of SEQ ID NO: 585466
acauuaguuugguugauac

SEQ ID NO: 642105 - RNA, 19 nt, Artificial Sequence
  Description of Artificial Sequence: Synthetic oligonucleotide
  Antisense strand to SEQ ID NO: 642104
guaucaaccaaacuaaugu

SEQ ID NO: 642106 - RNA, 19 nt, Artificial Sequence
  Description of Artificial Sequence: Synthetic oligonucleotide
  Sense strand starting at position 227 of SEQ ID NO: 585466
auuaguuugguugauacau

SEQ ID NO: 642107 - RNA, 19 nt, Artificial Sequence
  Description of Artificial Sequence: Synthetic oligonucleotide
  Antisense strand to SEQ ID NO: 642106
auguaucaaccaaacuaau

SEQ ID NO: 642108 - RNA, 19 nt, Artificial Sequence
  Description of Artificial Sequence: Synthetic oligonucleotide
  Sense strand starting at position 557 of SEQ ID NO: 585466
ucaauaagcuuagcuugaa

SEQ ID NO: 642109 - RNA, 19 nt, Artificial Sequence
  Description of Artificial Sequence: Synthetic oligonucleotide
  Antisense strand to SEQ ID NO: 642108
uucaagcuaagcuuauuga

SEQ ID NO: 642110 - RNA, 19 nt, Artificial Sequence
  Description of Artificial Sequence: Synthetic oligonucleotide
  Sense strand starting at position 653 of SEQ ID NO: 585466
gucucugaggcucaaaguu

SEQ ID NO: 642111 - RNA, 19 nt, Artificial Sequence
  Description of Artificial Sequence: Synthetic oligonucleotide
  Antisense strand to SEQ ID NO: 642110
aacuuugagccucagagac

SEQ ID NO: 642112 - RNA, 19 nt, Artificial Sequence
  Description of Artificial Sequence: Synthetic oligonucleotide
  Sense strand starting at position 1037 of SEQ ID NO: 585466
ugaagaaagcuuuaccuuc

SEQ ID NO: 642113 - RNA, 19 nt, Artificial Sequence
  Description of Artificial Sequence: Synthetic oligonucleotide
  Antisense strand to SEQ ID NO: 642112
gaagguaaagcuuucuuca

SEQ ID NO: 642114 - RNA, 19 nt, Artificial Sequence
  Description of Artificial Sequence: Synthetic oligonucleotide
  Sense strand starting at position 1098 of SEQ ID NO: 585466
ggugaaugucuugauccaa

SEQ ID NO: 642115 - RNA, 19 nt, Artificial Sequence
  Description of Artificial Sequence: Synthetic oligonucleotide
  Antisense strand to SEQ ID NO: 642114
uuggaucaagacauucacc

SEQ ID NO: 642116 - RNA, 19 nt, Artificial Sequence
  Description of Artificial Sequence: Synthetic oligonucleotide
  Sense strand starting at position 1261 of SEQ ID NO: 585466
cugaguuuaugaguuugaa

SEQ ID NO: 642117 - RNA, 19 nt, Artificial Sequence
  Description of Artificial Sequence: Synthetic oligonucleotide
  Antisense strand to SEQ ID NO: 642116
uucaaacucauaaacucag

SEQ ID NO: 642118 - RNA, 19 nt, Artificial Sequence
  Description of Artificial Sequence: Synthetic oligonucleotide
  Sense strand starting at position 1264 of SEQ ID NO: 585466
aguuuaugaguuugaaucu

SEQ ID NO: 642119 - RNA, 19 nt, Artificial Sequence
  Description of Artificial Sequence: Synthetic oligonucleotide
  Antisense strand to SEQ ID NO: 642118
agauucaaacucauaaacu

SEQ ID NO: 642120 - RNA, 19 nt, Artificial Sequence
  Description of Artificial Sequence: Synthetic oligonucleotide
  Sense strand starting at position 1271 of SEQ ID NO: 585466
gaguuugaaucuuucugaa

SEQ ID NO: 642121 - RNA, 19 nt, Artificial Sequence
  Description of Artificial Sequence: Synthetic oligonucleotide
  Antisense strand to SEQ ID NO: 642120
uucagaaagauucaaacuc

SEQ ID NO: 642122 - RNA, 19 nt, Artificial Sequence
  Description of Artificial Sequence: Synthetic oligonucleotide
  Sense strand starting at position 1273 of SEQ ID NO: 585466
guuugaaucuuucugaagu

SEQ ID NO: 642123 - RNA, 19 nt, Artificial Sequence
  Description of Artificial Sequence: Synthetic oligonucleotide
  Antisense strand to SEQ ID NO: 642122
acuucagaaagauucaaac

SEQ ID NO: 642124 - RNA, 19 nt, Artificial Sequence
  Description of Artificial Sequence: Synthetic oligonucleotide
  Sense strand starting at position 1335 of SEQ ID NO: 585466
gaggguuacuuugucuuag

SEQ ID NO: 642125 - RNA, 19 nt, Artificial Sequence
  Description of Artificial Sequence: Synthetic oligonucleotide
  Antisense strand to SEQ ID NO: 642124
cuaagacaaaguaacccuc

SEQ ID NO: 642126 - RNA, 19 nt, Artificial Sequence
  Description of Artificial Sequence: Synthetic oligonucleotide
  Sense strand starting at position 1399 of SEQ ID NO: 585466
cugucauauuuagcccuga

SEQ ID NO: 642127 - RNA, 19 nt, Artificial Sequence
  Description of Artificial Sequence: Synthetic oligonucleotide
  Antisense strand to SEQ ID NO: 642126
ucagggcuaaauaugacag

SEQ ID NO: 642128 - RNA, 19 nt, Artificial Sequence
  Description of Artificial Sequence: Synthetic oligonucleotide
  Sense strand starting at position 1434 of SEQ ID NO: 585466
aacuguguugccuaagaaa

SEQ ID NO: 642129 - RNA, 19 nt, Artificial Sequence
  Description of Artificial Sequence: Synthetic oligonucleotide
  Antisense strand to SEQ ID NO: 642128
uuucuuaggcaacacaguu

SEQ ID NO: 642130 - RNA, 19 nt, Artificial Sequence
  Description of Artificial Sequence: Synthetic oligonucleotide
  Sense strand starting at position 1553 of SEQ ID NO: 585466
aaccuauggcugugaacau

SEQ ID NO: 642131 - RNA, 19 nt, Artificial Sequence
  Description of Artificial Sequence: Synthetic oligonucleotide
  Antisense strand to SEQ ID NO: 642130
auguucacagccauagguu

SEQ ID NO: 642132 - RNA, 19 nt, Artificial Sequence
  Description of Artificial Sequence: Synthetic oligonucleotide
  Sense strand starting at position 1970 of SEQ ID NO: 585466
cugagcuggaucugaagua

SEQ ID NO: 642133 - RNA, 19 nt, Artificial Sequence
  Description of Artificial Sequence: Synthetic oligonucleotide
  Antisense strand to SEQ ID NO: 642132
uacuucagauccagcucag

SEQ ID NO: 642134 - RNA, 19 nt, Artificial Sequence
  Description of Artificial Sequence: Synthetic oligonucleotide
  Sense strand starting at position 2019 of SEQ ID NO: 585466
ucuugaugggcaugaagau

SEQ ID NO: 642135 - RNA, 19 nt, Artificial Sequence
  Description of Artificial Sequence: Synthetic oligonucleotide
  Antisense strand to SEQ ID NO: 642134
aucuucaugcccaucaaga

SEQ ID NO: 642136 - RNA, 19 nt, Artificial Sequence
  Description of Artificial Sequence: Synthetic oligonucleotide
  Sense strand starting at position 2142 of SEQ ID NO: 585466
uccuguugagcugaaagaa

SEQ ID NO: 642137 - RNA, 19 nt, Artificial Sequence
  Description of Artificial Sequence: Synthetic oligonucleotide
  Antisense strand to SEQ ID NO: 642136
uucuuucagcucaacagga

SEQ ID NO: 642138 - RNA, 19 nt, Artificial Sequence
  Description of Artificial Sequence: Synthetic oligonucleotide
  Sense strand starting at position 2158 of SEQ ID NO: 585466
gaauuaaauucugcaguug

SEQ ID NO: 642139 - RNA, 19 nt, Artificial Sequence
  Description of Artificial Sequence: Synthetic oligonucleotide
  Antisense strand to SEQ ID NO: 642138
caacugcagaauuuaauuc

SEQ ID NO: 642140 - RNA, 19 nt, Artificial Sequence
  Description of Artificial Sequence: Synthetic oligonucleotide
  Sense strand starting at position 2284 of SEQ ID NO: 585466
aauugauguuauguacaga

SEQ ID NO: 642141 - RNA, 19 nt, Artificial Sequence
  Description of Artificial Sequence: Synthetic oligonucleotide
  Antisense strand to SEQ ID NO: 642140
ucuguacauaacaucaauu

SEQ ID NO: 642142 - RNA, 19 nt, Artificial Sequence
  Description of Artificial Sequence: Synthetic oligonucleotide
  Sense strand starting at position 2287 of SEQ ID NO: 585466
ugauguuauguacagaauc

SEQ ID NO: 642143 - RNA, 19 nt, Artificial Sequence
  Description of Artificial Sequence: Synthetic oligonucleotide
  Antisense strand to SEQ ID NO: 642142
gauucuguacauaacauca

SEQ ID NO: 642144 - RNA, 19 nt, Artificial Sequence
  Description of Artificial Sequence: Synthetic oligonucleotide
  Sense strand starting at position 2297 of SEQ ID NO: 585466
uacagaaucgguuacgaga

SEQ ID NO: 642145 - RNA, 19 nt, Artificial Sequence
  Description of Artificial Sequence: Synthetic oligonucleotide
  Antisense strand to SEQ ID NO: 642144
ucucguaaccgauucugua

SEQ ID NO: 642146 - RNA, 19 nt, Artificial Sequence
  Description of Artificial Sequence: Synthetic oligonucleotide
  Sense strand starting at position 2337 of SEQ ID NO: 585466
gagguagagaguugauaug

SEQ ID NO: 642147 - RNA, 19 nt, Artificial Sequence
  Description of Artificial Sequence: Synthetic oligonucleotide
  Antisense strand to SEQ ID NO: 642146
cauaucaacucucuaccuc

SEQ ID NO: 642148 - RNA, 19 nt, Artificial Sequence
  Description of Artificial Sequence: Synthetic oligonucleotide
  Sense strand starting at position 2348 of SEQ ID NO: 585466
uugauauggcuguagcuga

SEQ ID NO: 642149 - RNA, 19 nt, Artificial Sequence
  Description of Artificial Sequence: Synthetic oligonucleotide
  Antisense strand to SEQ ID NO: 642148
ucagcuacagccauaucaa

SEQ ID NO: 642150 - RNA, 19 nt, Artificial Sequence
  Description of Artificial Sequence: Synthetic oligonucleotide
  Sense strand starting at position 2353 of SEQ ID NO: 585466
auggcuguagcugaagaau

SEQ ID NO: 642151 - RNA, 19 nt, Artificial Sequence
  Description of Artificial Sequence: Synthetic oligonucleotide
  Antisense strand to SEQ ID NO: 642150
auucuucagcuacagccau

SEQ ID NO: 642152 - RNA, 19 nt, Artificial Sequence
  Description of Artificial Sequence: Synthetic oligonucleotide
  Sense strand starting at position 2356 of SEQ ID NO: 585466
gcuguagcugaagaauauu

SEQ ID NO: 642153 - RNA, 19 nt, Artificial Sequence
  Description of Artificial Sequence: Synthetic oligonucleotide
  Antisense strand to SEQ ID NO: 642152
aauauucuucagcuacagc

SEQ ID NO: 642154 - RNA, 19 nt, Artificial Sequence
  Description of Artificial Sequence: Synthetic oligonucleotide
  Sense strand starting at position 2377 of SEQ ID NO: 585466
ugaccucuucuguauuacu

SEQ ID NO: 642155 - RNA, 19 nt, Artificial Sequence
  Description of Artificial Sequence: Synthetic oligonucleotide
  Antisense strand to SEQ ID NO: 642154
aguaauacagaagagguca

SEQ ID NO: 642156 - RNA, 19 nt, Artificial Sequence
  Description of Artificial Sequence: Synthetic oligonucleotide
  Sense strand starting at position 2485 of SEQ ID NO: 585466
guaaguuacacucagggca

SEQ ID NO: 642157 - RNA, 19 nt, Artificial Sequence
  Description of Artificial Sequence: Synthetic oligonucleotide
  Antisense strand to SEQ ID NO: 642156
ugcccugaguguaacuuac

SEQ ID NO: 642158 - RNA, 19 nt, Artificial Sequence
  Description of Artificial Sequence: Synthetic oligonucleotide
  Sense strand starting at position 2511 of SEQ ID NO: 585466
ggcuucuugccagugugua

SEQ ID NO: 642159 - RNA, 19 nt, Artificial Sequence
  Description of Artificial Sequence: Synthetic oligonucleotide
  Antisense strand to SEQ ID NO: 642158
uacacacuggcaagaagcc

SEQ ID NO: 642160 - RNA, 19 nt, Artificial Sequence
  Description of Artificial Sequence: Synthetic oligonucleotide
  Sense strand starting at position 2858 of SEQ ID NO: 585466
augauuccacaguauguau

SEQ ID NO: 642161 - RNA, 19 nt, Artificial Sequence
  Description of Artificial Sequence: Synthetic oligonucleotide
  Antisense strand to SEQ ID NO: 642160
auacauacuguggaaucau

SEQ ID NO: 642162 - RNA, 19 nt, Artificial Sequence
  Description of Artificial Sequence: Synthetic oligonucleotide
  Sense strand starting at position 3135 of SEQ ID NO: 585466
auuuaagcuuuggaccaau

SEQ ID NO: 642163 - RNA, 19 nt, Artificial Sequence
  Description of Artificial Sequence: Synthetic oligonucleotide
  Antisense strand to SEQ ID NO: 642162
auugguccaaagcuuaaau

SEQ ID NO: 642164 - RNA, 19 nt, Artificial Sequence
  Description of Artificial Sequence: Synthetic oligonucleotide
  Sense strand starting at position 3643 of SEQ ID NO: 585466
gaaugaggccuccaugcga

SEQ ID NO: 642165 - RNA, 19 nt, Artificial Sequence
  Description of Artificial Sequence: Synthetic oligonucleotide
  Antisense strand to SEQ ID NO: 642164
ucgcauggaggccucauuc

SEQ ID NO: 642166 - RNA, 19 nt, Artificial Sequence
  Description of Artificial Sequence: Synthetic oligonucleotide
  Sense strand starting at position 3708 of SEQ ID NO: 585466
aagagaacucuuugcugug

SEQ ID NO: 642167 - RNA, 19 nt, Artificial Sequence
  Description of Artificial Sequence: Synthetic oligonucleotide
  Antisense strand to SEQ ID NO: 642166
cacagcaaagaguucucuu

SEQ ID NO: 642168 - RNA, 19 nt, Artificial Sequence
  Description of Artificial Sequence: Synthetic oligonucleotide
  Sense strand starting at position 3709 of SEQ ID NO: 585466
agagaacucuuugcuguga

SEQ ID NO: 642169 - RNA, 19 nt, Artificial Sequence
  Description of Artificial Sequence: Synthetic oligonucleotide
  Antisense strand to SEQ ID NO: 642168
ucacagcaaagaguucucu

SEQ ID NO: 642170 - RNA, 19 nt, Artificial Sequence
  Description of Artificial Sequence: Synthetic oligonucleotide
  Sense strand starting at position 3710 of SEQ ID NO: 585466
gagaacucuuugcugugaa

SEQ ID NO: 642171 - RNA, 19 nt, Artificial Sequence
  Description of Artificial Sequence: Synthetic oligonucleotide
  Antisense strand to SEQ ID NO: 642170
uucacagcaaagaguucuc

SEQ ID NO: 642172 - RNA, 19 nt, Artificial Sequence
  Description of Artificial Sequence: Synthetic oligonucleotide
  Sense strand starting at position 3713 of SEQ ID NO: 585466
aacucuuugcugugaaaga

SEQ ID NO: 642173 - RNA, 19 nt, Artificial Sequence
  Description of Artificial Sequence: Synthetic oligonucleotide
  Antisense strand to SEQ ID NO: 642172
ucuuucacagcaaagaguu

SEQ ID NO: 642174 - RNA, 19 nt, Artificial Sequence
  Description of Artificial Sequence: Synthetic oligonucleotide
  Sense strand starting at position 3747 of SEQ ID NO: 585466
acaaguaaauggcuucuca

SEQ ID NO: 642175 - RNA, 19 nt, Artificial Sequence
  Description of Artificial Sequence: Synthetic oligonucleotide
  Antisense strand to SEQ ID NO: 642174
ugagaagccauuuacuugu

SEQ ID NO: 642176 - RNA, 19 nt, Artificial Sequence
  Description of Artificial Sequence: Synthetic oligonucleotide
  Sense strand starting at position 84 of SEQ ID NO: 585467
cccaguuaggcuggucuga

SEQ ID NO: 642177 - RNA, 19 nt, Artificial Sequence
  Description of Artificial Sequence: Synthetic oligonucleotide
  Antisense strand to SEQ ID NO: 642176
ucagaccagccuaacuggg

SEQ ID NO: 642178 - RNA, 19 nt, Artificial Sequence
  Description of Artificial Sequence: Synthetic oligonucleotide
  Sense strand starting at position 86 of SEQ ID NO: 585467
caguuaggcuggucugagu

SEQ ID NO: 642179 - RNA, 19 nt, Artificial Sequence
  Description of Artificial Sequence: Synthetic oligonucleotide
  Antisense strand to SEQ ID NO: 642178
acucagaccagccuaacug

SEQ ID NO: 642180 - RNA, 19 nt, Artificial Sequence
  Description of Artificial Sequence: Synthetic oligonucleotide
  Sense strand starting at position 296 of SEQ ID NO: 585467
agagcauccugcuaacaca

SEQ ID NO: 642181 - RNA, 19 nt, Artificial Sequence
  Description of Artificial Sequence: Synthetic oligonucleotide
  Antisense strand to SEQ ID NO: 642180
uguguuagcaggaugcucu

SEQ ID NO: 642182 - RNA, 19 nt, Artificial Sequence
  Description of Artificial Sequence: Synthetic oligonucleotide
  Sense strand starting at position 560 of SEQ ID NO: 585467
ggcacaaccuugugauuau

SEQ ID NO: 642183 - RNA, 19 nt, Artificial Sequence
  Description of Artificial Sequence: Synthetic oligonucleotide
  Antisense strand to SEQ ID NO: 642182
auaaucacaagguugugcc

SEQ ID NO: 642184 - RNA, 19 nt, Artificial Sequence
  Description of Artificial Sequence: Synthetic oligonucleotide
  Sense strand starting at position 561 of SEQ ID NO: 585467
gcacaaccuugugauuaug

SEQ ID NO: 642185 - RNA, 19 nt, Artificial Sequence
  Description of Artificial Sequence: Synthetic oligonucleotide
  Antisense strand to SEQ ID NO: 642184
cauaaucacaagguugugc

SEQ ID NO: 642186 - RNA, 19 nt, Artificial Sequence
  Description of Artificial Sequence: Synthetic oligonucleotide
  Sense strand starting at position 567 of SEQ ID NO: 585467
ccuugugauuaugcuagaa

SEQ ID NO: 642187 - RNA, 19 nt, Artificial Sequence
  Description of Artificial Sequence: Synthetic oligonucleotide
  Antisense strand to SEQ ID NO: 642186
uucuagcauaaucacaagg

SEQ ID NO: 642188 - RNA, 19 nt, Artificial Sequence
  Description of Artificial Sequence: Synthetic oligonucleotide
  Sense strand starting at position 569 of SEQ ID NO: 585467
uugugauuaugcuagaagc

SEQ ID NO: 642189 - RNA, 19 nt, Artificial Sequence
  Description of Artificial Sequence: Synthetic oligonucleotide
  Antisense strand to SEQ ID NO: 642188
gcuucuagcauaaucacaa

SEQ ID NO: 642190 - RNA, 19 nt, Artificial Sequence
  Description of Artificial Sequence: Synthetic oligonucleotide
  Sense strand starting at position 571 of SEQ ID NO: 585467
gugauuaugcuagaagcca

SEQ ID NO: 642191 - RNA, 19 nt, Artificial Sequence
  Description of Artificial Sequence: Synthetic oligonucleotide
  Antisense strand to SEQ ID NO: 642190
uggcuucuagcauaaucac

SEQ ID NO: 642192 - RNA, 19 nt, Artificial Sequence
  Description of Artificial Sequence: Synthetic oligonucleotide
  Sense strand starting at position 579 of SEQ ID NO: 585467
gcuagaagccacugaucug

SEQ ID NO: 642193 - RNA, 19 nt, Artificial Sequence
  Description of Artificial Sequence: Synthetic oligonucleotide
  Antisense strand to SEQ ID NO: 642192
cagaucaguggcuucuagc

SEQ ID NO: 642194 - RNA, 19 nt, Artificial Sequence
  Description of Artificial Sequence: Synthetic oligonucleotide
  Sense strand starting at position 610 of SEQ ID NO: 585467
cgauaaauuauguguggca

SEQ ID NO: 642195 - RNA, 19 nt, Artificial Sequence
  Description of Artificial Sequence: Synthetic oligonucleotide
  Antisense strand to SEQ ID NO: 642194
ugccacacauaauuuaucg

SEQ ID NO: 642196 - RNA, 19 nt, Artificial Sequence
  Description of Artificial Sequence: Synthetic oligonucleotide
  Sense strand starting at position 611 of SEQ ID NO: 585467
gauaaauuauguguggcau

SEQ ID NO: 642197 - RNA, 19 nt, Artificial Sequence
  Description of Artificial Sequence: Synthetic oligonucleotide
  Antisense strand to SEQ ID NO: 642196
augccacacauaauuuauc

SEQ ID NO: 642198 - RNA, 19 nt, Artificial Sequence
  Description of Artificial Sequence: Synthetic oligonucleotide
  Sense strand starting at position 612 of SEQ ID NO: 585467
auaaauuauguguggcaug

SEQ ID NO: 642199 - RNA, 19 nt, Artificial Sequence
  Description of Artificial Sequence: Synthetic oligonucleotide
  Antisense strand to SEQ ID NO: 642198
caugccacacauaauuuau

SEQ ID NO: 642200 - RNA, 19 nt, Artificial Sequence
  Description of Artificial Sequence: Synthetic oligonucleotide
  Sense strand starting at position 613 of SEQ ID NO: 585467
uaaauuauguguggcaugu

SEQ ID NO: 642201 - RNA, 19 nt, Artificial Sequence
  Description of Artificial Sequence: Synthetic oligonucleotide
  Antisense strand to SEQ ID NO: 642200
acaugccacacauaauuua

SEQ ID NO: 642202 - RNA, 19 nt, Artificial Sequence
  Description of Artificial Sequence: Synthetic oligonucleotide
  Sense strand starting at position 615 of SEQ ID NO: 585467
aauuauguguggcauguga

SEQ ID NO: 642203 - RNA, 19 nt, Artificial Sequence
  Description of Artificial Sequence: Synthetic oligonucleotide
  Antisense strand to SEQ ID NO: 642202
ucacaugccacacauaauu

SEQ ID NO: 642204 - RNA, 19 nt, Artificial Sequence
  Description of Artificial Sequence: Synthetic oligonucleotide
  Sense strand starting at position 617 of SEQ ID NO: 585467
uuauguguggcaugugaau

SEQ ID NO: 642205 - RNA, 19 nt, Artificial Sequence
  Description of Artificial Sequence: Synthetic oligonucleotide
  Antisense strand to SEQ ID NO: 642204
auucacaugccacacauaa

SEQ ID NO: 642206 - RNA, 19 nt, Artificial Sequence
  Description of Artificial Sequence: Synthetic oligonucleotide
  Sense strand starting at position 619 of SEQ ID NO: 585467
auguguggcaugugaauuc

SEQ ID NO: 642207 - RNA, 19 nt, Artificial Sequence
  Description of Artificial Sequence: Synthetic oligonucleotide
  Antisense strand to SEQ ID NO: 642206
gaauucacaugccacacau

SEQ ID NO: 642208 - RNA, 19 nt, Artificial Sequence
  Description of Artificial Sequence: Synthetic oligonucleotide
  Sense strand starting at position 626 of SEQ ID NO: 585467
gcaugugaauucucaauuc

SEQ ID NO: 642209 - RNA, 19 nt, Artificial Sequence
  Description of Artificial Sequence: Synthetic oligonucleotide
  Antisense strand to SEQ ID NO: 642208
gaauugagaauucacaugc

SEQ ID NO: 642210 - RNA, 19 nt, Artificial Sequence
  Description of Artificial Sequence: Synthetic oligonucleotide
  Sense strand starting at position 654 of SEQ ID NO: 585467
agaauucugucuggaaagc

SEQ ID NO: 642211 - RNA, 19 nt, Artificial Sequence
  Description of Artificial Sequence: Synthetic oligonucleotide
  Antisense strand to SEQ ID NO: 642210
gcuuuccagacagaauucu

SEQ ID NO: 642212 - RNA, 19 nt, Artificial Sequence
  Description of Artificial Sequence: Synthetic oligonucleotide
  Sense strand starting at position 670 of SEQ ID NO: 585467
agccucuacuaagagaauu

SEQ ID NO: 642213 - RNA, 19 nt, Artificial Sequence
  Description of Artificial Sequence: Synthetic oligonucleotide
  Antisense strand to SEQ ID NO: 642212
aauucucuuaguagaggcu

SEQ ID NO: 642214 - RNA, 19 nt, Artificial Sequence
  Description of Artificial Sequence: Synthetic oligonucleotide
  Sense strand starting at position 700 of SEQ ID NO: 585467
agcgcacauucuuagucau

SEQ ID NO: 642215 - RNA, 19 nt, Artificial Sequence
  Description of Artificial Sequence: Synthetic oligonucleotide
  Antisense strand to SEQ ID NO: 642214
augacuaagaaugugcgcu

SEQ ID NO: 642216 - RNA, 19 nt, Artificial Sequence
  Description of Artificial Sequence: Synthetic oligonucleotide
  Sense strand starting at position 707 of SEQ ID NO: 585467
auucuuagucauugggaca

SEQ ID NO: 642217 - RNA, 19 nt, Artificial Sequence
  Description of Artificial Sequence: Synthetic oligonucleotide
  Antisense strand to SEQ ID NO: 642216
ugucccaaugacuaagaau

SEQ ID NO: 642218 - RNA, 19 nt, Artificial Sequence
  Description of Artificial Sequence: Synthetic oligonucleotide
  Sense strand starting at position 820 of SEQ ID NO: 585467
ucaguaaaccuagguugga

SEQ ID NO: 642219 - RNA, 19 nt, Artificial Sequence
  Description of Artificial Sequence: Synthetic oligonucleotide
  Antisense strand to SEQ ID NO: 642218
uccaaccuagguuuacuga

SEQ ID NO: 642220 - RNA, 19 nt, Artificial Sequence
  Description of Artificial Sequence: Synthetic oligonucleotide
  Sense strand starting at position 856 of SEQ ID NO: 585467
uuuaaaguucccuacguga

SEQ ID NO: 642221 - RNA, 19 nt, Artificial Sequence
  Description of Artificial Sequence: Synthetic oligonucleotide
  Antisense strand to SEQ ID NO: 642220
ucacguagggaacuuuaaa

SEQ ID NO: 642222 - RNA, 19 nt, Artificial Sequence
  Description of Artificial Sequence: Synthetic oligonucleotide
  Sense strand starting at position 858 of SEQ ID NO: 585467
uaaaguucccuacgugauu

SEQ ID NO: 642223 - RNA, 19 nt, Artificial Sequence
  Description of Artificial Sequence: Synthetic oligonucleotide
  Antisense strand to SEQ ID NO: 642222
aaucacguagggaacuuua

SEQ ID NO: 642224 - RNA, 19 nt, Artificial Sequence
  Description of Artificial Sequence: Synthetic oligonucleotide
  Sense strand starting at position 867 of SEQ ID NO: 585467
cuacgugauuccgaugugu

SEQ ID NO: 642225 - RNA, 19 nt, Artificial Sequence
  Description of Artificial Sequence: Synthetic oligonucleotide
  Antisense strand to SEQ ID NO: 642224
acacaucggaaucacguag

SEQ ID NO: 642226 - RNA, 19 nt, Artificial Sequence
  Description of Artificial Sequence: Synthetic oligonucleotide
  Sense strand starting at position 869 of SEQ ID NO: 585467
acgugauuccgauguguag

SEQ ID NO: 642227 - RNA, 19 nt, Artificial Sequence
  Description of Artificial Sequence: Synthetic oligonucleotide
  Antisense strand to SEQ ID NO: 642226
cuacacaucggaaucacgu

SEQ ID NO: 642228 - RNA, 19 nt, Artificial Sequence
  Description of Artificial Sequence: Synthetic oligonucleotide
  Sense strand starting at position 870 of SEQ ID NO: 585467
cgugauuccgauguguagu

SEQ ID NO: 642229 - RNA, 19 nt, Artificial Sequence
  Description of Artificial Sequence: Synthetic oligonucleotide
  Antisense strand to SEQ ID NO: 642228
acuacacaucggaaucacg

SEQ ID NO: 642230 - RNA, 19 nt, Artificial Sequence
  Description of Artificial Sequence: Synthetic oligonucleotide
  Sense strand starting at position 921 of SEQ ID NO: 585467
uugaaccuuccugauggua

SEQ ID NO: 642231 - RNA, 19 nt, Artificial Sequence
  Description of Artificial Sequence: Synthetic oligonucleotide
  Antisense strand to SEQ ID NO: 642230
uaccaucaggaagguucaa

SEQ ID NO: 642232 - RNA, 19 nt, Artificial Sequence
  Description of Artificial Sequence: Synthetic oligonucleotide
  Sense strand starting at position 946 of SEQ ID NO: 585467
gugcccugucuugaaucuu

SEQ ID NO: 642233 - RNA, 19 nt, Artificial Sequence
  Description of Artificial Sequence: Synthetic oligonucleotide
  Antisense strand to SEQ ID NO: 642232
aagauucaagacagggcac

SEQ ID NO: 642234 - RNA, 19 nt, Artificial Sequence
  Description of Artificial Sequence: Synthetic oligonucleotide
  Sense strand starting at position 1453 of SEQ ID NO: 585467
ugcuaaagaucauaagcau

SEQ ID NO: 642235 - RNA, 19 nt, Artificial Sequence
  Description of Artificial Sequence: Synthetic oligonucleotide
  Antisense strand to SEQ ID NO: 642234
augcuuaugaucuuuagca

SEQ ID NO: 642236 - RNA, 19 nt, Artificial Sequence
  Description of Artificial Sequence: Synthetic oligonucleotide
  Sense strand starting at position 1462 of SEQ ID NO: 585467
ucauaagcauaguuugaga

SEQ ID NO: 642237 - RNA, 19 nt, Artificial Sequence
  Description of Artificial Sequence: Synthetic oligonucleotide
  Antisense strand to SEQ ID NO: 642236
ucucaaacuaugcuuauga

SEQ ID NO: 642238 - RNA, 19 nt, Artificial Sequence
  Description of Artificial Sequence: Synthetic oligonucleotide
  Sense strand starting at position 1464 of SEQ ID NO: 585467
auaagcauaguuugagaca

SEQ ID NO: 642239 - RNA, 19 nt, Artificial Sequence
  Description of Artificial Sequence: Synthetic oligonucleotide
  Antisense strand to SEQ ID NO: 642238
ugucucaaacuaugcuuau

SEQ ID NO: 642240 - RNA, 19 nt, Artificial Sequence
  Description of Artificial Sequence: Synthetic oligonucleotide
  Sense strand starting at position 1648 of SEQ ID NO: 585467
uaagguuuguucuaaggca

SEQ ID NO: 642241 - RNA, 19 nt, Artificial Sequence
  Description of Artificial Sequence: Synthetic oligonucleotide
  Antisense strand to SEQ ID NO: 642240
ugccuuagaacaaaccuua

SEQ ID NO: 642242 - RNA, 19 nt, Artificial Sequence
  Description of Artificial Sequence: Synthetic oligonucleotide
  Sense strand starting at position 2424 of SEQ ID NO: 585467
cguguuuacugauacagaa

SEQ ID NO: 642243 - RNA, 19 nt, Artificial Sequence
  Description of Artificial Sequence: Synthetic oligonucleotide
  Antisense strand to SEQ ID NO: 642242
uucuguaucaguaaacacg

SEQ ID NO: 642244 - RNA, 19 nt, Artificial Sequence
  Description of Artificial Sequence: Synthetic oligonucleotide
  Sense strand starting at position 2584 of SEQ ID NO: 585467
gaaucugacucgcuggaaa

SEQ ID NO: 642245 - RNA, 19 nt, Artificial Sequence
  Description of Artificial Sequence: Synthetic oligonucleotide
  Antisense strand to SEQ ID NO: 642244
uuuccagcgagucagauuc

SEQ ID NO: 642246 - RNA, 19 nt, Artificial Sequence
  Description of Artificial Sequence: Synthetic oligonucleotide
  Sense strand starting at position 2586 of SEQ ID NO: 585467
aucugacucgcuggaaaca

SEQ ID NO: 642247 - RNA, 19 nt, Artificial Sequence
  Description of Artificial Sequence: Synthetic oligonucleotide
  Antisense strand to SEQ ID NO: 642246
uguuuccagcgagucagau

SEQ ID NO: 642248 - RNA, 19 nt, Artificial Sequence
  Description of Artificial Sequence: Synthetic oligonucleotide
  Sense strand starting at position 2910 of SEQ ID NO: 585467
cgcauagaaugcugugaca

SEQ ID NO: 642249 - RNA, 19 nt, Artificial Sequence
  Description of Artificial Sequence: Synthetic oligonucleotide
  Antisense strand to SEQ ID NO: 642248
ugucacagcauucuaugcg

SEQ ID NO: 642250 - RNA, 19 nt, Artificial Sequence
  Description of Artificial Sequence: Synthetic oligonucleotide
  Sense strand starting at position 3015 of SEQ ID NO: 585467
agugcagagaguggugaaa

SEQ ID NO: 642251 - RNA, 19 nt, Artificial Sequence
  Description of Artificial Sequence: Synthetic oligonucleotide
  Antisense strand to SEQ ID NO: 642250
uuucaccacucucugcacu

SEQ ID NO: 642252 - RNA, 19 nt, Artificial Sequence
  Description of Artificial Sequence: Synthetic oligonucleotide
  Sense strand starting at position 3383 of SEQ ID NO: 585467
aucaucauauugggacaua

SEQ ID NO: 642253 - RNA, 19 nt, Artificial Sequence
  Description of Artificial Sequence: Synthetic oligonucleotide
  Antisense strand to SEQ ID NO: 642252
uaugucccaauaugaugau

SEQ ID NO: 642254 - RNA, 19 nt, Artificial Sequence
  Description of Artificial Sequence: Synthetic oligonucleotide
  Sense strand starting at position 3593 of SEQ ID NO: 585467
agaagugcccagcauacuu

SEQ ID NO: 642255 - RNA, 19 nt, Artificial Sequence
  Description of Artificial Sequence: Synthetic oligonucleotide
  Antisense strand to SEQ ID NO: 642254
aaguaugcugggcacuucu

SEQ ID NO: 642256 - RNA, 19 nt, Artificial Sequence
  Description of Artificial Sequence: Synthetic oligonucleotide
  Sense strand starting at position 129 of SEQ ID NO: 585468
gggaaagauucucagcacu

SEQ ID NO: 642257 - RNA, 19 nt, Artificial Sequence
  Description of Artificial Sequence: Synthetic oligonucleotide
  Antisense strand to SEQ ID NO: 642256
agugcugagaaucuuuccc

SEQ ID NO: 642258 - RNA, 19 nt, Artificial Sequence
  Description of Artificial Sequence: Synthetic oligonucleotide
  Sense strand starting at position 131 of SEQ ID NO: 585468
gaaagauucucagcacugu

SEQ ID NO: 642259 - RNA, 19 nt, Artificial Sequence
  Description of Artificial Sequence: Synthetic oligonucleotide
  Antisense strand to SEQ ID NO: 642258
acagugcugagaaucuuuc

SEQ ID NO: 642260 - RNA, 19 nt, Artificial Sequence
  Description of Artificial Sequence: Synthetic oligonucleotide
  Sense strand starting at position 576 of SEQ ID NO: 585468
gaaggcugcuugcaggaaa

SEQ ID NO: 642261 - RNA, 19 nt, Artificial Sequence
  Description of Artificial Sequence: Synthetic oligonucleotide
  Antisense strand to SEQ ID NO: 642260
uuuccugcaagcagccuuc

SEQ ID NO: 642262 - RNA, 19 nt, Artificial Sequence
  Description of Artificial Sequence: Synthetic oligonucleotide
  Sense strand starting at position 770 of SEQ ID NO: 585468
guccuuagaucauugguca

SEQ ID NO: 642263 - RNA, 19 nt, Artificial Sequence
  Description of Artificial Sequence: Synthetic oligonucleotide
  Antisense strand to SEQ ID NO: 642262
ugaccaaugaucuaaggac

SEQ ID NO: 642264 - RNA, 19 nt, Artificial Sequence
  Description of Artificial Sequence: Synthetic oligonucleotide
  Sense strand starting at position 771 of SEQ ID NO: 585468
uccuuagaucauuggucau

SEQ ID NO: 642265 - RNA, 19 nt, Artificial Sequence
  Description of Artificial Sequence: Synthetic oligonucleotide
  Antisense strand to SEQ ID NO: 642264
augaccaaugaucuaagga

SEQ ID NO: 642266 - RNA, 19 nt, Artificial Sequence
  Description of Artificial Sequence: Synthetic oligonucleotide
  Sense strand starting at position 773 of SEQ ID NO: 585468
cuuagaucauuggucauua

SEQ ID NO: 642267 - RNA, 19 nt, Artificial Sequence
  Description of Artificial Sequence: Synthetic oligonucleotide
  Antisense strand to SEQ ID NO: 642266
uaaugaccaaugaucuaag

SEQ ID NO: 642268 - RNA, 19 nt, Artificial Sequence
  Description of Artificial Sequence: Synthetic oligonucleotide
  Sense strand starting at position 774 of SEQ ID NO: 585468
uuagaucauuggucauuag

SEQ ID NO: 642269 - RNA, 19 nt, Artificial Sequence
  Description of Artificial Sequence: Synthetic oligonucleotide
  Antisense strand to SEQ ID NO: 642268
cuaaugaccaaugaucuaa

SEQ ID NO: 642270 - RNA, 19 nt, Artificial Sequence
  Description of Artificial Sequence: Synthetic oligonucleotide
  Sense strand starting at position 775 of SEQ ID NO: 585468
uagaucauuggucauuagu

SEQ ID NO: 642271 - RNA, 19 nt, Artificial Sequence
  Description of Artificial Sequence: Synthetic oligonucleotide
  Antisense strand to SEQ ID NO: 642270
acuaaugaccaaugaucua

SEQ ID NO: 642272 - RNA, 19 nt, Artificial Sequence
  Description of Artificial Sequence: Synthetic oligonucleotide
  Sense strand starting at position 777 of SEQ ID NO: 585468
gaucauuggucauuaguag

SEQ ID NO: 642273 - RNA, 19 nt, Artificial Sequence
  Description of Artificial Sequence: Synthetic oligonucleotide
  Antisense strand to SEQ ID NO: 642272
cuacuaaugaccaaugauc

SEQ ID NO: 642274 - RNA, 19 nt, Artificial Sequence
  Description of Artificial Sequence: Synthetic oligonucleotide
  Sense strand starting at position 861 of SEQ ID NO: 585468
acagaagucgcaggaagaa

SEQ ID NO: 642275 - RNA, 19 nt, Artificial Sequence
  Description of Artificial Sequence: Synthetic oligonucleotide
  Antisense strand to SEQ ID NO: 642274
uucuuccugcgacuucugu

SEQ ID NO: 642276 - RNA, 19 nt, Artificial Sequence
  Description of Artificial Sequence: Synthetic oligonucleotide
  Sense strand starting at position 1997 of SEQ ID NO: 585468
ggccaaucaugaguggaga

SEQ ID NO: 642277 - RNA, 19 nt, Artificial Sequence
  Description of Artificial Sequence: Synthetic oligonucleotide
  Antisense strand to SEQ ID NO: 642276
ucuccacucaugauuggcc

SEQ ID NO: 642278 - RNA, 19 nt, Artificial Sequence
  Description of Artificial Sequence: Synthetic oligonucleotide
  Sense strand starting at position 2021 of SEQ ID NO: 585468
gggccacguucagaagaga

SEQ ID NO: 642279 - RNA, 19 nt, Artificial Sequence
  Description of Artificial Sequence: Synthetic oligonucleotide
  Antisense strand to SEQ ID NO: 642278
ucucuucugaacguggccc

SEQ ID NO: 642280 - RNA, 19 nt, Artificial Sequence
  Description of Artificial Sequence: Synthetic oligonucleotide
  Sense strand starting at position 2152 of SEQ ID NO: 585468
agaguacagcuccaaacuu

SEQ ID NO: 642281 - RNA, 19 nt, Artificial Sequence
  Description of Artificial Sequence: Synthetic oligonucleotide
  Antisense strand to SEQ ID NO: 642280
aaguuuggagcuguacucu

SEQ ID NO: 642282 - RNA, 19 nt, Artificial Sequence
  Description of Artificial Sequence: Synthetic oligonucleotide
  Sense strand starting at position 2302 of SEQ ID NO: 585468
uuguuccuuccgggacaga

SEQ ID NO: 642283 - RNA, 19 nt, Artificial Sequence
  Description of Artificial Sequence: Synthetic oligonucleotide
  Antisense strand to SEQ ID NO: 642282
ucugucccggaaggaacaa

SEQ ID NO: 642284 - RNA, 19 nt, Artificial Sequence
  Description of Artificial Sequence: Synthetic oligonucleotide
  Sense strand starting at position 2450 of SEQ ID NO: 585468
aguagaaacgcucagauca

SEQ ID NO: 642285 - RNA, 19 nt, Artificial Sequence
  Description of Artificial Sequence: Synthetic oligonucleotide
  Antisense strand to SEQ ID NO: 642284
ugaucugagcguuucuacu

SEQ ID NO: 642286 - RNA, 19 nt, Artificial Sequence
  Description of Artificial Sequence: Synthetic oligonucleotide
  Sense strand starting at position 2601 of SEQ ID NO: 585468
uggguaaucacagggccaa

SEQ ID NO: 642287 - RNA, 19 nt, Artificial Sequence
  Description of Artificial Sequence: Synthetic oligonucleotide
  Antisense strand to SEQ ID NO: 642286
uuggcccugugauuaccca

SEQ ID NO: 642288 - RNA, 19 nt, Artificial Sequence
  Description of Artificial Sequence: Synthetic oligonucleotide
  Sense strand starting at position 3014 of SEQ ID NO: 585468
gaaugucacacauggugga

SEQ ID NO: 642289 - RNA, 19 nt, Artificial Sequence
  Description of Artificial Sequence: Synthetic oligonucleotide
  Antisense strand to SEQ ID NO: 642288
uccaccaugugugacauuc

SEQ ID NO: 642290 - RNA, 19 nt, Artificial Sequence
  Description of Artificial Sequence: Synthetic oligonucleotide
  Sense strand starting at position 3027 of SEQ ID NO: 585468
gguggaugcuucuacucua

SEQ ID NO: 642291 - RNA, 19 nt, Artificial Sequence
  Description of Artificial Sequence: Synthetic oligonucleotide
  Antisense strand to SEQ ID NO: 642290
uagaguagaagcauccacc

SEQ ID NO: 642292 - RNA, 19 nt, Artificial Sequence
  Description of Artificial Sequence: Synthetic oligonucleotide
  Sense strand starting at position 3030 of SEQ ID NO: 585468
ggaugcuucuacucuacca

SEQ ID NO: 642293 - RNA, 19 nt, Artificial Sequence
  Description of Artificial Sequence: Synthetic oligonucleotide
  Antisense strand to SEQ ID NO: 642292
ugguagaguagaagcaucc

SEQ ID NO: 642294 - RNA, 19 nt, Artificial Sequence
  Description of Artificial Sequence: Synthetic oligonucleotide
  Sense strand starting at position 3090 of SEQ ID NO: 585468
ccauuucucuggugacauu

SEQ ID NO: 642295 - RNA, 19 nt, Artificial Sequence
  Description of Artificial Sequence: Synthetic oligonucleotide
  Antisense strand to SEQ ID NO: 642294
aaugucaccagagaaaugg

SEQ ID NO: 642296 - RNA, 19 nt, Artificial Sequence
  Description of Artificial Sequence: Synthetic oligonucleotide
  Sense strand starting at position 3253 of SEQ ID NO: 585468
cccaguuaggcuggucuga

SEQ ID NO: 642297 - RNA, 19 nt, Artificial Sequence
  Description of Artificial Sequence: Synthetic oligonucleotide
  Antisense strand to SEQ ID NO: 642296
ucagaccagccuaacuggg

SEQ ID NO: 642298 - RNA, 19 nt, Artificial Sequence
  Description of Artificial Sequence: Synthetic oligonucleotide
  Sense strand starting at position 3255 of SEQ ID NO: 585468
caguuaggcuggucugagu

SEQ ID NO: 642299 - RNA, 19 nt, Artificial Sequence
  Description of Artificial Sequence: Synthetic oligonucleotide
  Antisense strand to SEQ ID NO: 642298
acucagaccagccuaacug

SEQ ID NO: 642300 - RNA, 19 nt, Artificial Sequence
  Description of Artificial Sequence: Synthetic oligonucleotide
  Sense strand starting at position 3465 of SEQ ID NO: 585468
agagcauccugcuaacaca

SEQ ID NO: 642301 - RNA, 19 nt, Artificial Sequence
  Description of Artificial Sequence: Synthetic oligonucleotide
  Antisense strand to SEQ ID NO: 642300
uguguuagcaggaugcucu

SEQ ID NO: 642302 - RNA, 19 nt, Artificial Sequence
  Description of Artificial Sequence: Synthetic oligonucleotide
  Sense strand starting at position 3729 of SEQ ID NO: 585468
ggcacaaccuugugauuau

SEQ ID NO: 642303 - RNA, 19 nt, Artificial Sequence
  Description of Artificial Sequence: Synthetic oligonucleotide
  Antisense strand to SEQ ID NO: 642302
auaaucacaagguugugcc

SEQ ID NO: 642304 - RNA, 19 nt, Artificial Sequence
  Description of Artificial Sequence: Synthetic oligonucleotide
  Sense strand starting at position 3730 of SEQ ID NO: 585468
gcacaaccuugugauuaug

SEQ ID NO: 642305 - RNA, 19 nt, Artificial Sequence
  Description of Artificial Sequence: Synthetic oligonucleotide
  Antisense strand to SEQ ID NO: 642304
cauaaucacaagguugugc

SEQ ID NO: 642306 - RNA, 19 nt, Artificial Sequence
  Description of Artificial Sequence: Synthetic oligonucleotide
  Sense strand starting at position 3736 of SEQ ID NO: 585468
ccuugugauuaugcuagaa

SEQ ID NO: 642307 - RNA, 19 nt, Artificial Sequence
  Description of Artificial Sequence: Synthetic oligonucleotide
  Antisense strand to SEQ ID NO: 642306
uucuagcauaaucacaagg

SEQ ID NO: 642308 - RNA, 19 nt, Artificial Sequence
  Description of Artificial Sequence: Synthetic oligonucleotide
  Sense strand starting at position 3738 of SEQ ID NO: 585468
uugugauuaugcuagaagc

SEQ ID NO: 642309 - RNA, 19 nt, Artificial Sequence
  Description of Artificial Sequence: Synthetic oligonucleotide
  Antisense strand to SEQ ID NO: 642308
gcuucuagcauaaucacaa

SEQ ID NO: 642310 - RNA, 19 nt, Artificial Sequence
  Description of Artificial Sequence: Synthetic oligonucleotide
  Sense strand starting at position 3740 of SEQ ID NO: 585468
gugauuaugcuagaagcca

SEQ ID NO: 642311 - RNA, 19 nt, Artificial Sequence
  Description of Artificial Sequence: Synthetic oligonucleotide
  Antisense strand to SEQ ID NO: 642310
uggcuucuagcauaaucac

SEQ ID NO: 642312 - RNA, 19 nt, Artificial Sequence
  Description of Artificial Sequence: Synthetic oligonucleotide
  Sense strand starting at position 3748 of SEQ ID NO: 585468
gcuagaagccacugaucug

SEQ ID NO: 642313 - RNA, 19 nt, Artificial Sequence
  Description of Artificial Sequence: Synthetic oligonucleotide
  Antisense strand to SEQ ID NO: 642312
cagaucaguggcuucuagc

SEQ ID NO: 642314 - RNA, 19 nt, Artificial Sequence
  Description of Artificial Sequence: Synthetic oligonucleotide
  Sense strand starting at position 3779 of SEQ ID NO: 585468
cgauaaauuauguguggca

SEQ ID NO: 642315 - RNA, 19 nt, Artificial Sequence
  Description of Artificial Sequence: Synthetic oligonucleotide
  Antisense strand to SEQ ID NO: 642314
ugccacacauaauuuaucg

SEQ ID NO: 642316 - RNA, 19 nt, Artificial Sequence
  Description of Artificial Sequence: Synthetic oligonucleotide
  Sense strand starting at position 3780 of SEQ ID NO: 585468
gauaaauuauguguggcau

SEQ ID NO: 642317 - RNA, 19 nt, Artificial Sequence
  Description of Artificial Sequence: Synthetic oligonucleotide
  Antisense strand to SEQ ID NO: 642316
augccacacauaauuuauc

SEQ ID NO: 642318 - RNA, 19 nt, Artificial Sequence
  Description of Artificial Sequence: Synthetic oligonucleotide
  Sense strand starting at position 3781 of SEQ ID NO: 585468
auaaauuauguguggcaug

SEQ ID NO: 642319 - RNA, 19 nt, Artificial Sequence
  Description of Artificial Sequence: Synthetic oligonucleotide
  Antisense strand to SEQ ID NO: 642318
caugccacacauaauuuau

SEQ ID NO: 642320 - RNA, 19 nt, Artificial Sequence
  Description of Artificial Sequence: Synthetic oligonucleotide
  Sense strand starting at position 3784 of SEQ ID NO: 585468
aauuauguguggcauguga

SEQ ID NO: 642321 - RNA, 19 nt, Artificial Sequence
  Description of Artificial Sequence: Synthetic oligonucleotide
  Antisense strand to SEQ ID NO: 642320
ucacaugccacacauaauu

SEQ ID NO: 642322 - RNA, 19 nt, Artificial Sequence
  Description of Artificial Sequence: Synthetic oligonucleotide
  Sense strand starting at position 3786 of SEQ ID NO: 585468
uuauguguggcaugugaau

SEQ ID NO: 642323 - RNA, 19 nt, Artificial Sequence
  Description of Artificial Sequence: Synthetic oligonucleotide
  Antisense strand to SEQ ID NO: 642322
auucacaugccacacauaa

SEQ ID NO: 642324 - RNA, 19 nt, Artificial Sequence
  Description of Artificial Sequence: Synthetic oligonucleotide
  Sense strand starting at position 3788 of SEQ ID NO: 585468
auguguggcaugugaauuc

SEQ ID NO: 642325 - RNA, 19 nt, Artificial Sequence
  Description of Artificial Sequence: Synthetic oligonucleotide
  Antisense strand to SEQ ID NO: 642324
gaauucacaugccacacau

SEQ ID NO: 642326 - RNA, 19 nt, Artificial Sequence
  Description of Artificial Sequence: Synthetic oligonucleotide
  Sense strand starting at position 3795 of SEQ ID NO: 585468
gcaugugaauucucaauuc

SEQ ID NO: 642327 - RNA, 19 nt, Artificial Sequence
  Description of Artificial Sequence: Synthetic oligonucleotide
  Antisense strand to SEQ ID NO: 642326
gaauugagaauucacaugc

SEQ ID NO: 642328 - RNA, 19 nt, Artificial Sequence
  Description of Artificial Sequence: Synthetic oligonucleotide
  Sense strand starting at position 3823 of SEQ ID NO: 585468
agaauucugucuggaaagc

SEQ ID NO: 642329 - RNA, 19 nt, Artificial Sequence
  Description of Artificial Sequence: Synthetic oligonucleotide
  Antisense strand to SEQ ID NO: 642328
gcuuuccagacagaauucu

SEQ ID NO: 642330 - RNA, 19 nt, Artificial Sequence
  Description of Artificial Sequence: Synthetic oligonucleotide
  Sense strand starting at position 3839 of SEQ ID NO: 585468
agccucuacuaagagaauu

SEQ ID NO: 642331 - RNA, 19 nt, Artificial Sequence
  Description of Artificial Sequence: Synthetic oligonucleotide
  Antisense strand to SEQ ID NO: 642330
aauucucuuaguagaggcu

SEQ ID NO: 642332 - RNA, 19 nt, Artificial Sequence
  Description of Artificial Sequence: Synthetic oligonucleotide
  Sense strand starting at position 3869 of SEQ ID NO: 585468
agcgcacauucuuagucau

SEQ ID NO: 642333 - RNA, 19 nt, Artificial Sequence
  Description of Artificial Sequence: Synthetic oligonucleotide
  Antisense strand to SEQ ID NO: 642332
augacuaagaaugugcgcu

SEQ ID NO: 642334 - RNA, 19 nt, Artificial Sequence
  Description of Artificial Sequence: Synthetic oligonucleotide
  Sense strand starting at position 3876 of SEQ ID NO: 585468
auucuuagucauugggaca

SEQ ID NO: 642335 - RNA, 19 nt, Artificial Sequence
  Description of Artificial Sequence: Synthetic oligonucleotide
  Antisense strand to SEQ ID NO: 642334
ugucccaaugacuaagaau

SEQ ID NO: 642336 - RNA, 19 nt, Artificial Sequence
  Description of Artificial Sequence: Synthetic oligonucleotide
  Sense strand starting at position 70 of SEQ ID NO: 585469
guucguaugccucugaugu

SEQ ID NO: 642337 - RNA, 19 nt, Artificial Sequence
  Description of Artificial Sequence: Synthetic oligonucleotide
  Antisense strand to SEQ ID NO: 642336
acaucagaggcauacgaac

SEQ ID NO: 642338 - RNA, 19 nt, Artificial Sequence
  Description of Artificial Sequence: Synthetic oligonucleotide
  Sense strand starting at position 80 of SEQ ID NO: 585469
cucugaugugccgccauau

SEQ ID NO: 642339 - RNA, 19 nt, Artificial Sequence
  Description of Artificial Sequence: Synthetic oligonucleotide
  Antisense strand to SEQ ID NO: 642338
auauggcggcacaucagag

SEQ ID NO: 642340 - RNA, 19 nt, Artificial Sequence
  Description of Artificial Sequence: Synthetic oligonucleotide
  Sense strand starting at position 81 of SEQ ID NO: 585469
ucugaugugccgccauauu

SEQ ID NO: 642341 - RNA, 19 nt, Artificial Sequence
  Description of Artificial Sequence: Synthetic oligonucleotide
  Antisense strand to SEQ ID NO: 642340
aauauggcggcacaucaga

SEQ ID NO: 642342 - RNA, 19 nt, Artificial Sequence
  Description of Artificial Sequence: Synthetic oligonucleotide
  Sense strand starting at position 177 of SEQ ID NO: 585469
agcuacuuccucuaaggaa

SEQ ID NO: 642343 - RNA, 19 nt, Artificial Sequence
  Description of Artificial Sequence: Synthetic oligonucleotide
  Antisense strand to SEQ ID NO: 642342
uuccuuagaggaaguagcu

SEQ ID NO: 642344 - RNA, 19 nt, Artificial Sequence
  Description of Artificial Sequence: Synthetic oligonucleotide
  Sense strand starting at position 254 of SEQ ID NO: 585469
augucugacuuuccagaaa

SEQ ID NO: 642345 - RNA, 19 nt, Artificial Sequence
  Description of Artificial Sequence: Synthetic oligonucleotide
  Antisense strand to SEQ ID NO: 642344
uuucuggaaagucagacau

SEQ ID NO: 642346 - RNA, 19 nt, Artificial Sequence
  Description of Artificial Sequence: Synthetic oligonucleotide
  Sense strand starting at position 288 of SEQ ID NO: 585469
aucgaaucacuucgaauaa

SEQ ID NO: 642347 - RNA, 19 nt, Artificial Sequence
  Description of Artificial Sequence: Synthetic oligonucleotide
  Antisense strand to SEQ ID NO: 642346
uuauucgaagugauucgau

SEQ ID NO: 642348 - RNA, 19 nt, Artificial Sequence
  Description of Artificial Sequence: Synthetic oligonucleotide
  Sense strand starting at position 735 of SEQ ID NO: 585469
uggucuuauauuugguagu

SEQ ID NO: 642349 - RNA, 19 nt, Artificial Sequence
  Description of Artificial Sequence: Synthetic oligonucleotide
  Antisense strand to SEQ ID NO: 642348
acuaccaaauauaagacca

SEQ ID NO: 642350 - RNA, 19 nt, Artificial Sequence
  Description of Artificial Sequence: Synthetic oligonucleotide
  Sense strand starting at position 859 of SEQ ID NO: 585469
ccauuacaugucuggacaa

SEQ ID NO: 642351 - RNA, 19 nt, Artificial Sequence
  Description of Artificial Sequence: Synthetic oligonucleotide
  Antisense strand to SEQ ID NO: 642350
uuguccagacauguaaugg

SEQ ID NO: 642352 - RNA, 19 nt, Artificial Sequence
  Description of Artificial Sequence: Synthetic oligonucleotide
  Sense strand starting at position 917 of SEQ ID NO: 585469
ugaccugauuccuuuaaga

SEQ ID NO: 642353 - RNA, 19 nt, Artificial Sequence
  Description of Artificial Sequence: Synthetic oligonucleotide
  Antisense strand to SEQ ID NO: 642352
ucuuaaaggaaucagguca

SEQ ID NO: 642354 - RNA, 19 nt, Artificial Sequence
  Description of Artificial Sequence: Synthetic oligonucleotide
  Sense strand starting at position 1109 of SEQ ID NO: 585469
cuuauuaugggcuauauua

SEQ ID NO: 642355 - RNA, 19 nt, Artificial Sequence
  Description of Artificial Sequence: Synthetic oligonucleotide
  Antisense strand to SEQ ID NO: 642354
uaauauagcccauaauaag

SEQ ID NO: 642356 - RNA, 19 nt, Artificial Sequence
  Description of Artificial Sequence: Synthetic oligonucleotide
  Sense strand starting at position 1221 of SEQ ID NO: 585469
gugaccuaugcucaucaga

SEQ ID NO: 642357 - RNA, 19 nt, Artificial Sequence
  Description of Artificial Sequence: Synthetic oligonucleotide
  Antisense strand to SEQ ID NO: 642356
ucugaugagcauaggucac

SEQ ID NO: 642358 - RNA, 19 nt, Artificial Sequence
  Description of Artificial Sequence: Synthetic oligonucleotide
  Sense strand starting at position 1223 of SEQ ID NO: 585469
gaccuaugcucaucagaug

SEQ ID NO: 642359 - RNA, 19 nt, Artificial Sequence
  Description of Artificial Sequence: Synthetic oligonucleotide
  Antisense strand to SEQ ID NO: 642358
caucugaugagcauagguc

SEQ ID NO: 642360 - RNA, 19 nt, Artificial Sequence
  Description of Artificial Sequence: Synthetic oligonucleotide
  Sense strand starting at position 1224 of SEQ ID NO: 585469
accuaugcucaucagauga

SEQ ID NO: 642361 - RNA, 19 nt, Artificial Sequence
  Description of Artificial Sequence: Synthetic oligonucleotide
  Antisense strand to SEQ ID NO: 642360
ucaucugaugagcauaggu

SEQ ID NO: 642362 - RNA, 19 nt, Artificial Sequence
  Description of Artificial Sequence: Synthetic oligonucleotide
  Sense strand starting at position 1491 of SEQ ID NO: 585469
acucgcuaagcuucgcaua

SEQ ID NO: 642363 - RNA, 19 nt, Artificial Sequence
  Description of Artificial Sequence: Synthetic oligonucleotide
  Antisense strand to SEQ ID NO: 642362
uaugcgaagcuuagcgagu

SEQ ID NO: 642364 - RNA, 19 nt, Artificial Sequence
  Description of Artificial Sequence: Synthetic oligonucleotide
  Sense strand starting at position 1619 of SEQ ID NO: 585469
uugcccucauuuguguaau

SEQ ID NO: 642365 - RNA, 19 nt, Artificial Sequence
  Description of Artificial Sequence: Synthetic oligonucleotide
  Antisense strand to SEQ ID NO: 642364
auuacacaaaugagggcaa

SEQ ID NO: 642366 - RNA, 19 nt, Artificial Sequence
  Description of Artificial Sequence: Synthetic oligonucleotide
  Sense strand starting at position 2030 of SEQ ID NO: 585469
uagcgauaauuucugguua

SEQ ID NO: 642367 - RNA, 19 nt, Artificial Sequence
  Description of Artificial Sequence: Synthetic oligonucleotide
  Antisense strand to SEQ ID NO: 642366
uaaccagaaauuaucgcua

SEQ ID NO: 642368 - RNA, 19 nt, Artificial Sequence
  Description of Artificial Sequence: Synthetic oligonucleotide
  Sense strand starting at position 2112 of SEQ ID NO: 585469
gcuggccuuagauaaugau

SEQ ID NO: 642369 - RNA, 19 nt, Artificial Sequence
  Description of Artificial Sequence: Synthetic oligonucleotide
  Antisense strand to SEQ ID NO: 642368
aucauuaucuaaggccagc

SEQ ID NO: 642370 - RNA, 19 nt, Artificial Sequence
  Description of Artificial Sequence: Synthetic oligonucleotide
  Sense strand starting at position 2127 of SEQ ID NO: 585469
ugauaaaugucccuagaua

SEQ ID NO: 642371 - RNA, 19 nt, Artificial Sequence
  Description of Artificial Sequence: Synthetic oligonucleotide
  Antisense strand to SEQ ID NO: 642370
uaucuagggacauuuauca

SEQ ID NO: 642372 - RNA, 19 nt, Artificial Sequence
  Description of Artificial Sequence: Synthetic oligonucleotide
  Sense strand starting at position 2197 of SEQ ID NO: 585469
aauacagauguaugugaca

SEQ ID NO: 642373 - RNA, 19 nt, Artificial Sequence
  Description of Artificial Sequence: Synthetic oligonucleotide
  Antisense strand to SEQ ID NO: 642372
ugucacauacaucuguauu

SEQ ID NO: 642374 - RNA, 19 nt, Artificial Sequence
  Description of Artificial Sequence: Synthetic oligonucleotide
  Sense strand starting at position 2311 of SEQ ID NO: 585469
gugauagucagauagcaaa

SEQ ID NO: 642375 - RNA, 19 nt, Artificial Sequence
  Description of Artificial Sequence: Synthetic oligonucleotide
  Antisense strand to SEQ ID NO: 642374
uuugcuaucugacuaucac

SEQ ID NO: 642376 - RNA, 19 nt, Artificial Sequence
  Description of Artificial Sequence: Synthetic oligonucleotide
  Sense strand starting at position 2498 of SEQ ID NO: 585469
acuuuauuccauggagagu

SEQ ID NO: 642377 - RNA, 19 nt, Artificial Sequence
  Description of Artificial Sequence: Synthetic oligonucleotide
  Antisense strand to SEQ ID NO: 642376
acucuccauggaauaaagu

SEQ ID NO: 642378 - RNA, 19 nt, Artificial Sequence
  Description of Artificial Sequence: Synthetic oligonucleotide
  Sense strand starting at position 2683 of SEQ ID NO: 585469
uguuacaugccuuaaagaa

SEQ ID NO: 642379 - RNA, 19 nt, Artificial Sequence
  Description of Artificial Sequence: Synthetic oligonucleotide
  Antisense strand to SEQ ID NO: 642378
uucuuuaaggcauguaaca

SEQ ID NO: 642380 - RNA, 19 nt, Artificial Sequence
  Description of Artificial Sequence: Synthetic oligonucleotide
  Sense strand starting at position 2710 of SEQ ID NO: 585469
gggcaacuuaaugguaaau

SEQ ID NO: 642381 - RNA, 19 nt, Artificial Sequence
  Description of Artificial Sequence: Synthetic oligonucleotide
  Antisense strand to SEQ ID NO: 642380
auuuaccauuaaguugccc

SEQ ID NO: 642382 - RNA, 19 nt, Artificial Sequence
  Description of Artificial Sequence: Synthetic oligonucleotide
  Sense strand starting at position 2783 of SEQ ID NO: 585469
agaaacggauuucagagua

SEQ ID NO: 642383 - RNA, 19 nt, Artificial Sequence
  Description of Artificial Sequence: Synthetic oligonucleotide
  Antisense strand to SEQ ID NO: 642382
uacucugaaauccguuucu

SEQ ID NO: 642384 - RNA, 19 nt, Artificial Sequence
  Description of Artificial Sequence: Synthetic oligonucleotide
  Sense strand starting at position 3192 of SEQ ID NO: 585469
uauuuaugcugguuauugu

SEQ ID NO: 642385 - RNA, 19 nt, Artificial Sequence
  Description of Artificial Sequence: Synthetic oligonucleotide
  Antisense strand to SEQ ID NO: 642384
acaauaaccagcauaaaua

SEQ ID NO: 642386 - RNA, 19 nt, Artificial Sequence
  Description of Artificial Sequence: Synthetic oligonucleotide
  Sense strand starting at position 3293 of SEQ ID NO: 585469
aucuuaagugaacgaacuu

SEQ ID NO: 642387 - RNA, 19 nt, Artificial Sequence
  Description of Artificial Sequence: Synthetic oligonucleotide
  Antisense strand to SEQ ID NO: 642386
aaguucguucacuuaagau

SEQ ID NO: 642388 - RNA, 19 nt, Artificial Sequence
  Description of Artificial Sequence: Synthetic oligonucleotide
  Sense strand starting at position 3389 of SEQ ID NO: 585469
gaguuuaaugccugaagac

SEQ ID NO: 642389 - RNA, 19 nt, Artificial Sequence
  Description of Artificial Sequence: Synthetic oligonucleotide
  Antisense strand to SEQ ID NO: 642388
gucuucaggcauuaaacuc

SEQ ID NO: 642390 - RNA, 19 nt, Artificial Sequence
  Description of Artificial Sequence: Synthetic oligonucleotide
  Sense strand starting at position 3390 of SEQ ID NO: 585469
aguuuaaugccugaagacu

SEQ ID NO: 642391 - RNA, 19 nt, Artificial Sequence
  Description of Artificial Sequence: Synthetic oligonucleotide
  Antisense strand to SEQ ID NO: 642390
agucuucaggcauuaaacu

SEQ ID NO: 642392 - RNA, 19 nt, Artificial Sequence
  Description of Artificial Sequence: Synthetic oligonucleotide
  Sense strand starting at position 3459 of SEQ ID NO: 585469
uugguuggcagaugagaau

SEQ ID NO: 642393 - RNA, 19 nt, Artificial Sequence
  Description of Artificial Sequence: Synthetic oligonucleotide
  Antisense strand to SEQ ID NO: 642392
auucucaucugccaaccaa

SEQ ID NO: 642394 - RNA, 19 nt, Artificial Sequence
  Description of Artificial Sequence: Synthetic oligonucleotide
  Sense strand starting at position 3480 of SEQ ID NO: 585469
gguagugauuuggaagaga

SEQ ID NO: 642395 - RNA, 19 nt, Artificial Sequence
  Description of Artificial Sequence: Synthetic oligonucleotide
  Antisense strand to SEQ ID NO: 642394
ucucuuccaaaucacuacc

SEQ ID NO: 642396 - RNA, 19 nt, Artificial Sequence
  Description of Artificial Sequence: Synthetic oligonucleotide
  Sense strand starting at position 3496 of SEQ ID NO: 585469
agaugugguaggcaugaaa

SEQ ID NO: 642397 - RNA, 19 nt, Artificial Sequence
  Description of Artificial Sequence: Synthetic oligonucleotide
  Antisense strand to SEQ ID NO: 642396
uuucaugccuaccacaucu

SEQ ID NO: 642398 - RNA, 19 nt, Artificial Sequence
  Description of Artificial Sequence: Synthetic oligonucleotide
  Sense strand starting at position 3542 of SEQ ID NO: 585469
gugccuguaauagauaaag

SEQ ID NO: 642399 - RNA, 19 nt, Artificial Sequence
  Description of Artificial Sequence: Synthetic oligonucleotide
  Antisense strand to SEQ ID NO: 642398
cuuuaucuauuacaggcac

SEQ ID NO: 642400 - RNA, 19 nt, Artificial Sequence
  Description of Artificial Sequence: Synthetic oligonucleotide
  Sense strand starting at position 3675 of SEQ ID NO: 585469
uggauaguagcaggauaau

SEQ ID NO: 642401 - RNA, 19 nt, Artificial Sequence
  Description of Artificial Sequence: Synthetic oligonucleotide
  Antisense strand to SEQ ID NO: 642400
auuauccugcuacuaucca

SEQ ID NO: 642402 - RNA, 19 nt, Artificial Sequence
  Description of Artificial Sequence: Synthetic oligonucleotide
  Sense strand starting at position 3732 of SEQ ID NO: 585469
gcgcuagguaccgcuuuaa

SEQ ID NO: 642403 - RNA, 19 nt, Artificial Sequence
  Description of Artificial Sequence: Synthetic oligonucleotide
  Antisense strand to SEQ ID NO: 642402
uuaaagcgguaccuagcgc

SEQ ID NO: 642404 - RNA, 19 nt, Artificial Sequence
  Description of Artificial Sequence: Synthetic oligonucleotide
  Sense strand starting at position 3881 of SEQ ID NO: 585469
ccuagaaugugacuguaug

SEQ ID NO: 642405 - RNA, 19 nt, Artificial Sequence
  Description of Artificial Sequence: Synthetic oligonucleotide
  Antisense strand to SEQ ID NO: 642404
cauacagucacauucuagg

SEQ ID NO: 642406 - RNA, 19 nt, Artificial Sequence
  Description of Artificial Sequence: Synthetic oligonucleotide
  Sense strand starting at position 3888 of SEQ ID NO: 585469
ugugacuguauguaaagaa

SEQ ID NO: 642407 - RNA, 19 nt, Artificial Sequence
  Description of Artificial Sequence: Synthetic oligonucleotide
  Antisense strand to SEQ ID NO: 642406
uucuuuacauacagucaca

SEQ ID NO: 642408 - RNA, 19 nt, Artificial Sequence
  Description of Artificial Sequence: Synthetic oligonucleotide
  Sense strand starting at position 3898 of SEQ ID NO: 585469
uguaaagaauguucuugaa

SEQ ID NO: 642409 - RNA, 19 nt, Artificial Sequence
  Description of Artificial Sequence: Synthetic oligonucleotide
  Antisense strand to SEQ ID NO: 642408
uucaagaacauucuuuaca

SEQ ID NO: 642410 - RNA, 19 nt, Artificial Sequence
  Description of Artificial Sequence: Synthetic oligonucleotide
  Sense strand starting at position 3908 of SEQ ID NO: 585469
guucuugaaagagguaauu

SEQ ID NO: 642411 - RNA, 19 nt, Artificial Sequence
  Description of Artificial Sequence: Synthetic oligonucleotide
  Antisense strand to SEQ ID NO: 642410
aauuaccucuuucaagaac

SEQ ID NO: 642412 - RNA, 19 nt, Artificial Sequence
  Description of Artificial Sequence: Synthetic oligonucleotide
  Sense strand starting at position 3928 of SEQ ID NO: 585469
agguuaaaugaaggcauua

SEQ ID NO: 642413 - RNA, 19 nt, Artificial Sequence
  Description of Artificial Sequence: Synthetic oligonucleotide
  Antisense strand to SEQ ID NO: 642412
uaaugccuucauuuaaccu

SEQ ID NO: 642414 - RNA, 19 nt, Artificial Sequence
  Description of Artificial Sequence: Synthetic oligonucleotide
  Sense strand starting at position 3953 of SEQ ID NO: 585469
gcccuaauccauuaugagu

SEQ ID NO: 642415 - RNA, 19 nt, Artificial Sequence
  Description of Artificial Sequence: Synthetic oligonucleotide
  Antisense strand to SEQ ID NO: 642414
acucauaauggauuagggc

SEQ ID NO: 642416 - RNA, 19 nt, Artificial Sequence
  Description of Artificial Sequence: Synthetic oligonucleotide
  Sense strand starting at position 4 of SEQ ID NO: 585470
acaggccuucuagauguau

SEQ ID NO: 642417 - RNA, 19 nt, Artificial Sequence
  Description of Artificial Sequence: Synthetic oligonucleotide
  Antisense strand to SEQ ID NO: 642416
auacaucuagaaggccugu

SEQ ID NO: 642418 - RNA, 19 nt, Artificial Sequence
  Description of Artificial Sequence: Synthetic oligonucleotide
  Sense strand starting at position 13 of SEQ ID NO: 585470
cuagauguauuaucuucua

SEQ ID NO: 642419 - RNA, 19 nt, Artificial Sequence
  Description of Artificial Sequence: Synthetic oligonucleotide
  Antisense strand to SEQ ID NO: 642418
uagaagauaauacaucuag

SEQ ID NO: 642420 - RNA, 19 nt, Artificial Sequence
  Description of Artificial Sequence: Synthetic oligonucleotide
  Sense strand starting at position 229 of SEQ ID NO: 585470
uuuccaugucaugacuaua

SEQ ID NO: 642421 - RNA, 19 nt, Artificial Sequence
  Description of Artificial Sequence: Synthetic oligonucleotide
  Antisense strand to SEQ ID NO: 642420
uauagucaugacauggaaa

SEQ ID NO: 642422 - RNA, 19 nt, Artificial Sequence
  Description of Artificial Sequence: Synthetic oligonucleotide
  Sense strand starting at position 232 of SEQ ID NO: 585470
ccaugucaugacuauaggu

SEQ ID NO: 642423 - RNA, 19 nt, Artificial Sequence
  Description of Artificial Sequence: Synthetic oligonucleotide
  Antisense strand to SEQ ID NO: 642422
accuauagucaugacaugg

SEQ ID NO: 642424 - RNA, 19 nt, Artificial Sequence
  Description of Artificial Sequence: Synthetic oligonucleotide
  Sense strand starting at position 240 of SEQ ID NO: 585470
ugacuauaggucuaucuua

SEQ ID NO: 642425 - RNA, 19 nt, Artificial Sequence
  Description of Artificial Sequence: Synthetic oligonucleotide
  Antisense strand to SEQ ID NO: 642424
uaagauagaccuauaguca

SEQ ID NO: 642426 - RNA, 19 nt, Artificial Sequence
  Description of Artificial Sequence: Synthetic oligonucleotide
  Sense strand starting at position 502 of SEQ ID NO: 585470
aguugacagcuauaacuuu

SEQ ID NO: 642427 - RNA, 19 nt, Artificial Sequence
  Description of Artificial Sequence: Synthetic oligonucleotide
  Antisense strand to SEQ ID NO: 642426
aaaguuauagcugucaacu

SEQ ID NO: 642428 - RNA, 19 nt, Artificial Sequence
  Description of Artificial Sequence: Synthetic oligonucleotide
  Sense strand starting at position 837 of SEQ ID NO: 585470
ugaguuacuguuggagaau

SEQ ID NO: 642429 - RNA, 19 nt, Artificial Sequence
  Description of Artificial Sequence: Synthetic oligonucleotide
  Antisense strand to SEQ ID NO: 642428
auucuccaacaguaacuca

SEQ ID NO: 642430 - RNA, 19 nt, Artificial Sequence
  Description of Artificial Sequence: Synthetic oligonucleotide
  Sense strand starting at position 1110 of SEQ ID NO: 585470
uuuaaucccuuguuuagga

SEQ ID NO: 642431 - RNA, 19 nt, Artificial Sequence
  Description of Artificial Sequence: Synthetic oligonucleotide
  Antisense strand to SEQ ID NO: 642430
uccuaaacaagggauuaaa

SEQ ID NO: 642432 - RNA, 19 nt, Artificial Sequence
  Description of Artificial Sequence: Synthetic oligonucleotide
  Sense strand starting at position 1174 of SEQ ID NO: 585470
uccaauguagccuaagaau

SEQ ID NO: 642433 - RNA, 19 nt, Artificial Sequence
  Description of Artificial Sequence: Synthetic oligonucleotide
  Antisense strand to SEQ ID NO: 642432
auucuuaggcuacauugga

SEQ ID NO: 642434 - RNA, 19 nt, Artificial Sequence
  Description of Artificial Sequence: Synthetic oligonucleotide
  Sense strand starting at position 1190 of SEQ ID NO: 585470
aaugaauugcuauggugau

SEQ ID NO: 642435 - RNA, 19 nt, Artificial Sequence
  Description of Artificial Sequence: Synthetic oligonucleotide
  Antisense strand to SEQ ID NO: 642434
aucaccauagcaauucauu

SEQ ID NO: 642436 - RNA, 19 nt, Artificial Sequence
  Description of Artificial Sequence: Synthetic oligonucleotide
  Sense strand starting at position 1313 of SEQ ID NO: 585470
uaguuucuauccuugggaa

SEQ ID NO: 642437 - RNA, 19 nt, Artificial Sequence
  Description of Artificial Sequence: Synthetic oligonucleotide
  Antisense strand to SEQ ID NO: 642436
uucccaaggauagaaacua

SEQ ID NO: 642438 - RNA, 19 nt, Artificial Sequence
  Description of Artificial Sequence: Synthetic oligonucleotide
  Sense strand starting at position 1314 of SEQ ID NO: 585470
aguuucuauccuugggaaa

SEQ ID NO: 642439 - RNA, 19 nt, Artificial Sequence
  Description of Artificial Sequence: Synthetic oligonucleotide
  Antisense strand to SEQ ID NO: 642438
uuucccaaggauagaaacu

SEQ ID NO: 642440 - RNA, 19 nt, Artificial Sequence
  Description of Artificial Sequence: Synthetic oligonucleotide
  Sense strand starting at position 1435 of SEQ ID NO: 585470
gccuaauaauuugagaaac

SEQ ID NO: 642441 - RNA, 19 nt, Artificial Sequence
  Description of Artificial Sequence: Synthetic oligonucleotide
  Antisense strand to SEQ ID NO: 642440
guuucucaaauuauuaggc

SEQ ID NO: 642442 - RNA, 19 nt, Artificial Sequence
  Description of Artificial Sequence: Synthetic oligonucleotide
  Sense strand starting at position 1437 of SEQ ID NO: 585470
cuaauaauuugagaaacug

SEQ ID NO: 642443 - RNA, 19 nt, Artificial Sequence
  Description of Artificial Sequence: Synthetic oligonucleotide
  Antisense strand to SEQ ID NO: 642442
caguuucucaaauuauuag

SEQ ID NO: 642444 - RNA, 19 nt, Artificial Sequence
  Description of Artificial Sequence: Synthetic oligonucleotide
  Sense strand starting at position 1597 of SEQ ID NO: 585470
ggcauuacaggguaucuua

SEQ ID NO: 642445 - RNA, 19 nt, Artificial Sequence
  Description of Artificial Sequence: Synthetic oligonucleotide
  Antisense strand to SEQ ID NO: 642444
uaagauacccuguaaugcc

SEQ ID NO: 642446 - RNA, 19 nt, Artificial Sequence
  Description of Artificial Sequence: Synthetic oligonucleotide
  Sense strand starting at position 1607 of SEQ ID NO: 585470
gguaucuuacauuaucacu

SEQ ID NO: 642447 - RNA, 19 nt, Artificial Sequence
  Description of Artificial Sequence: Synthetic oligonucleotide
  Antisense strand to SEQ ID NO: 642446
agugauaauguaagauacc

SEQ ID NO: 642448 - RNA, 19 nt, Artificial Sequence
  Description of Artificial Sequence: Synthetic oligonucleotide
  Sense strand starting at position 1615 of SEQ ID NO: 585470
acauuaucacugugccaag

SEQ ID NO: 642449 - RNA, 19 nt, Artificial Sequence
  Description of Artificial Sequence: Synthetic oligonucleotide
  Antisense strand to SEQ ID NO: 642448
cuuggcacagugauaaugu

SEQ ID NO: 642450 - RNA, 19 nt, Artificial Sequence
  Description of Artificial Sequence: Synthetic oligonucleotide
  Sense strand starting at position 2337 of SEQ ID NO: 585470
caauaaucaguuggucaug

SEQ ID NO: 642451 - RNA, 19 nt, Artificial Sequence
  Description of Artificial Sequence: Synthetic oligonucleotide
  Antisense strand to SEQ ID NO: 642450
caugaccaacugauuauug

SEQ ID NO: 642452 - RNA, 19 nt, Artificial Sequence
  Description of Artificial Sequence: Synthetic oligonucleotide
  Sense strand starting at position 2361 of SEQ ID NO: 585470
agagaacauuuagagguau

SEQ ID NO: 642453 - RNA, 19 nt, Artificial Sequence
  Description of Artificial Sequence: Synthetic oligonucleotide
  Antisense strand to SEQ ID NO: 642452
auaccucuaaauguucucu

SEQ ID NO: 642454 - RNA, 19 nt, Artificial Sequence
  Description of Artificial Sequence: Synthetic oligonucleotide
  Sense strand starting at position 2444 of SEQ ID NO: 585470
guaacuuuauccuuaguau

SEQ ID NO: 642455 - RNA, 19 nt, Artificial Sequence
  Description of Artificial Sequence: Synthetic oligonucleotide
  Antisense strand to SEQ ID NO: 642454
auacuaaggauaaaguuac

SEQ ID NO: 642456 - RNA, 19 nt, Artificial Sequence
  Description of Artificial Sequence: Synthetic oligonucleotide
  Sense strand starting at position 2490 of SEQ ID NO: 585470
aucuguagugacugaaguu

SEQ ID NO: 642457 - RNA, 19 nt, Artificial Sequence
  Description of Artificial Sequence: Synthetic oligonucleotide
  Antisense strand to SEQ ID NO: 642456
aacuucagucacuacagau

SEQ ID NO: 642458 - RNA, 19 nt, Artificial Sequence
  Description of Artificial Sequence: Synthetic oligonucleotide
  Sense strand starting at position 2491 of SEQ ID NO: 585470
ucuguagugacugaaguua

SEQ ID NO: 642459 - RNA, 19 nt, Artificial Sequence
  Description of Artificial Sequence: Synthetic oligonucleotide
  Antisense strand to SEQ ID NO: 642458
uaacuucagucacuacaga

SEQ ID NO: 642460 - RNA, 19 nt, Artificial Sequence
  Description of Artificial Sequence: Synthetic oligonucleotide
  Sense strand starting at position 2496 of SEQ ID NO: 585470
agugacugaaguuauguua

SEQ ID NO: 642461 - RNA, 19 nt, Artificial Sequence
  Description of Artificial Sequence: Synthetic oligonucleotide
  Antisense strand to SEQ ID NO: 642460
uaacauaacuucagucacu

SEQ ID NO: 642462 - RNA, 19 nt, Artificial Sequence
  Description of Artificial Sequence: Synthetic oligonucleotide
  Sense strand starting at position 2499 of SEQ ID NO: 585470
gacugaaguuauguuauua

SEQ ID NO: 642463 - RNA, 19 nt, Artificial Sequence
  Description of Artificial Sequence: Synthetic oligonucleotide
  Antisense strand to SEQ ID NO: 642462
uaauaacauaacuucaguc

SEQ ID NO: 642464 - RNA, 19 nt, Artificial Sequence
  Description of Artificial Sequence: Synthetic oligonucleotide
  Sense strand starting at position 2597 of SEQ ID NO: 585470
ugagaauccugacugcaga

SEQ ID NO: 642465 - RNA, 19 nt, Artificial Sequence
  Description of Artificial Sequence: Synthetic oligonucleotide
  Antisense strand to SEQ ID NO: 642464
ucugcagucaggauucuca

SEQ ID NO: 642466 - RNA, 19 nt, Artificial Sequence
  Description of Artificial Sequence: Synthetic oligonucleotide
  Sense strand starting at position 2634 of SEQ ID NO: 585470
augugaaauugauuggagu

SEQ ID NO: 642467 - RNA, 19 nt, Artificial Sequence
  Description of Artificial Sequence: Synthetic oligonucleotide
  Antisense strand to SEQ ID NO: 642466
acuccaaucaauuucacau

SEQ ID NO: 642468 - RNA, 19 nt, Artificial Sequence
  Description of Artificial Sequence: Synthetic oligonucleotide
  Sense strand starting at position 2635 of SEQ ID NO: 585470
ugugaaauugauuggaguc

SEQ ID NO: 642469 - RNA, 19 nt, Artificial Sequence
  Description of Artificial Sequence: Synthetic oligonucleotide
  Antisense strand to SEQ ID NO: 642468
gacuccaaucaauuucaca

SEQ ID NO: 642470 - RNA, 19 nt, Artificial Sequence
  Description of Artificial Sequence: Synthetic oligonucleotide
  Sense strand starting at position 2636 of SEQ ID NO: 585470
gugaaauugauuggagucu

SEQ ID NO: 642471 - RNA, 19 nt, Artificial Sequence
  Description of Artificial Sequence: Synthetic oligonucleotide
  Antisense strand to SEQ ID NO: 642470
agacuccaaucaauuucac

SEQ ID NO: 642472 - RNA, 19 nt, Artificial Sequence
  Description of Artificial Sequence: Synthetic oligonucleotide
  Sense strand starting at position 2711 of SEQ ID NO: 585470
cuacauuugugcuuuggca

SEQ ID NO: 642473 - RNA, 19 nt, Artificial Sequence
  Description of Artificial Sequence: Synthetic oligonucleotide
  Antisense strand to SEQ ID NO: 642472
ugccaaagcacaaauguag

SEQ ID NO: 642474 - RNA, 19 nt, Artificial Sequence
  Description of Artificial Sequence: Synthetic oligonucleotide
  Sense strand starting at position 2713 of SEQ ID NO: 585470
acauuugugcuuuggcagu

SEQ ID NO: 642475 - RNA, 19 nt, Artificial Sequence
  Description of Artificial Sequence: Synthetic oligonucleotide
  Antisense strand to SEQ ID NO: 642474
acugccaaagcacaaaugu

SEQ ID NO: 642476 - RNA, 19 nt, Artificial Sequence
  Description of Artificial Sequence: Synthetic oligonucleotide
  Sense strand starting at position 2739 of SEQ ID NO: 585470
guuguauccaaaggacuag

SEQ ID NO: 642477 - RNA, 19 nt, Artificial Sequence
  Description of Artificial Sequence: Synthetic oligonucleotide
  Antisense strand to SEQ ID NO: 642476
cuaguccuuuggauacaac

SEQ ID NO: 642478 - RNA, 19 nt, Artificial Sequence
  Description of Artificial Sequence: Synthetic oligonucleotide
  Sense strand starting at position 2874 of SEQ ID NO: 585470
ugcuauaagugauucuauu

SEQ ID NO: 642479 - RNA, 19 nt, Artificial Sequence
  Description of Artificial Sequence: Synthetic oligonucleotide
  Antisense strand to SEQ ID NO: 642478
aauagaaucacuuauagca

SEQ ID NO: 642480 - RNA, 19 nt, Artificial Sequence
  Description of Artificial Sequence: Synthetic oligonucleotide
  Sense strand starting at position 3052 of SEQ ID NO: 585470
aagcuaaugguuugagaau

SEQ ID NO: 642481 - RNA, 19 nt, Artificial Sequence
  Description of Artificial Sequence: Synthetic oligonucleotide
  Antisense strand to SEQ ID NO: 642480
auucucaaaccauuagcuu

SEQ ID NO: 642482 - RNA, 19 nt, Artificial Sequence
  Description of Artificial Sequence: Synthetic oligonucleotide
  Sense strand starting at position 3216 of SEQ ID NO: 585470
agaccauucuggcuuauau

SEQ ID NO: 642483 - RNA, 19 nt, Artificial Sequence
  Description of Artificial Sequence: Synthetic oligonucleotide
  Antisense strand to SEQ ID NO: 642482
auauaagccagaauggucu

SEQ ID NO: 642484 - RNA, 19 nt, Artificial Sequence
  Description of Artificial Sequence: Synthetic oligonucleotide
  Sense strand starting at position 3595 of SEQ ID NO: 585470
acuuucuaaguguggagau

SEQ ID NO: 642485 - RNA, 19 nt, Artificial Sequence
  Description of Artificial Sequence: Synthetic oligonucleotide
  Antisense strand to SEQ ID NO: 642484
aucuccacacuuagaaagu

SEQ ID NO: 642486 - RNA, 19 nt, Artificial Sequence
  Description of Artificial Sequence: Synthetic oligonucleotide
  Sense strand starting at position 3597 of SEQ ID NO: 585470
uuucuaaguguggagaucu

SEQ ID NO: 642487 - RNA, 19 nt, Artificial Sequence
  Description of Artificial Sequence: Synthetic oligonucleotide
  Antisense strand to SEQ ID NO: 642486
agaucuccacacuuagaaa

SEQ ID NO: 642488 - RNA, 19 nt, Artificial Sequence
  Description of Artificial Sequence: Synthetic oligonucleotide
  Sense strand starting at position 3699 of SEQ ID NO: 585470
uuacacuuugaguagcaaa

SEQ ID NO: 642489 - RNA, 19 nt, Artificial Sequence
  Description of Artificial Sequence: Synthetic oligonucleotide
  Antisense strand to SEQ ID NO: 642488
uuugcuacucaaaguguaa

SEQ ID NO: 642490 - RNA, 19 nt, Artificial Sequence
  Description of Artificial Sequence: Synthetic oligonucleotide
  Sense strand starting at position 3721 of SEQ ID NO: 585470
agaggaauuucagagaacg

SEQ ID NO: 642491 - RNA, 19 nt, Artificial Sequence
  Description of Artificial Sequence: Synthetic oligonucleotide
  Antisense strand to SEQ ID NO: 642490
cguucucugaaauuccucu

SEQ ID NO: 642492 - RNA, 19 nt, Artificial Sequence
  Description of Artificial Sequence: Synthetic oligonucleotide
  Sense strand starting at position 3760 of SEQ ID NO: 585470
gcaguaauucaagauggug

SEQ ID NO: 642493 - RNA, 19 nt, Artificial Sequence
  Description of Artificial Sequence: Synthetic oligonucleotide
  Antisense strand to SEQ ID NO: 642492
caccaucuugaauuacugc

SEQ ID NO: 642494 - RNA, 19 nt, Artificial Sequence
  Description of Artificial Sequence: Synthetic oligonucleotide
  Sense strand starting at position 3783 of SEQ ID NO: 585470
uugggcugcacuuagaaga

SEQ ID NO: 642495 - RNA, 19 nt, Artificial Sequence
  Description of Artificial Sequence: Synthetic oligonucleotide
  Antisense strand to SEQ ID NO: 642494
ucuucuaagugcagcccaa

SEQ ID NO: 642496 - RNA, 19 nt, Artificial Sequence
  Description of Artificial Sequence: Synthetic oligonucleotide
  Sense strand starting at position 85 of SEQ ID NO: 585471
cuauaauguuucugauuug

SEQ ID NO: 642497 - RNA, 19 nt, Artificial Sequence
  Description of Artificial Sequence: Synthetic oligonucleotide
  Antisense strand to SEQ ID NO: 642496
caaaucagaaacauuauag

SEQ ID NO: 642498 - RNA, 19 nt, Artificial Sequence
  Description of Artificial Sequence: Synthetic oligonucleotide
  Sense strand starting at position 91 of SEQ ID NO: 585471
uguuucugauuugagauuu

SEQ ID NO: 642499 - RNA, 19 nt, Artificial Sequence
  Description of Artificial Sequence: Synthetic oligonucleotide
  Antisense strand to SEQ ID NO: 642498
aaaucucaaaucagaaaca

SEQ ID NO: 642500 - RNA, 19 nt, Artificial Sequence
  Description of Artificial Sequence: Synthetic oligonucleotide
  Sense strand starting at position 365 of SEQ ID NO: 585471
uacacuagucuaugaacga

SEQ ID NO: 642501 - RNA, 19 nt, Artificial Sequence
  Description of Artificial Sequence: Synthetic oligonucleotide
  Antisense strand to SEQ ID NO: 642500
ucguucauagacuagugua

SEQ ID NO: 642502 - RNA, 19 nt, Artificial Sequence
  Description of Artificial Sequence: Synthetic oligonucleotide
  Sense strand starting at position 366 of SEQ ID NO: 585471
acacuagucuaugaacgaa

SEQ ID NO: 642503 - RNA, 19 nt, Artificial Sequence
  Description of Artificial Sequence: Synthetic oligonucleotide
  Antisense strand to SEQ ID NO: 642502
uucguucauagacuagugu

SEQ ID NO: 642504 - RNA, 19 nt, Artificial Sequence
  Description of Artificial Sequence: Synthetic oligonucleotide
  Sense strand starting at position 458 of SEQ ID NO: 585471
ggaguaacuuaacauaaca

SEQ ID NO: 642505 - RNA, 19 nt, Artificial Sequence
  Description of Artificial Sequence: Synthetic oligonucleotide
  Antisense strand to SEQ ID NO: 642504
uguuauguuaaguuacucc

SEQ ID NO: 642506 - RNA, 19 nt, Artificial Sequence
  Description of Artificial Sequence: Synthetic oligonucleotide
  Sense strand starting at position 500 of SEQ ID NO: 585471
agccuaauggcguguguca

SEQ ID NO: 642507 - RNA, 19 nt, Artificial Sequence
  Description of Artificial Sequence: Synthetic oligonucleotide
  Antisense strand to SEQ ID NO: 642506
ugacacacgccauuaggcu

SEQ ID NO: 642508 - RNA, 19 nt, Artificial Sequence
  Description of Artificial Sequence: Synthetic oligonucleotide
  Sense strand starting at position 507 of SEQ ID NO: 585471
uggcgugugucaguauuca

SEQ ID NO: 642509 - RNA, 19 nt, Artificial Sequence
  Description of Artificial Sequence: Synthetic oligonucleotide
  Antisense strand to SEQ ID NO: 642508
ugaauacugacacacgcca

SEQ ID NO: 642510 - RNA, 19 nt, Artificial Sequence
  Description of Artificial Sequence: Synthetic oligonucleotide
  Sense strand starting at position 565 of SEQ ID NO: 585471
ugcagucacagguacagau

SEQ ID NO: 642511 - RNA, 19 nt, Artificial Sequence
  Description of Artificial Sequence: Synthetic oligonucleotide
  Antisense strand to SEQ ID NO: 642510
aucuguaccugugacugca

SEQ ID NO: 642512 - RNA, 19 nt, Artificial Sequence
  Description of Artificial Sequence: Synthetic oligonucleotide
  Sense strand starting at position 690 of SEQ ID NO: 585471
aggauuacauuucguaaga

SEQ ID NO: 642513 - RNA, 19 nt, Artificial Sequence
  Description of Artificial Sequence: Synthetic oligonucleotide
  Antisense strand to SEQ ID NO: 642512
ucuuacgaaauguaauccu

SEQ ID NO: 642514 - RNA, 19 nt, Artificial Sequence
  Description of Artificial Sequence: Synthetic oligonucleotide
  Sense strand starting at position 692 of SEQ ID NO: 585471
gauuacauuucguaagaau

SEQ ID NO: 642515 - RNA, 19 nt, Artificial Sequence
  Description of Artificial Sequence: Synthetic oligonucleotide
  Antisense strand to SEQ ID NO: 642514
auucuuacgaaauguaauc

SEQ ID NO: 642516 - RNA, 19 nt, Artificial Sequence
  Description of Artificial Sequence: Synthetic oligonucleotide
  Sense strand starting at position 695 of SEQ ID NO: 585471
uacauuucguaagaauguu

SEQ ID NO: 642517 - RNA, 19 nt, Artificial Sequence
  Description of Artificial Sequence: Synthetic oligonucleotide
  Antisense strand to SEQ ID NO: 642516
aacauucuuacgaaaugua

SEQ ID NO: 642518 - RNA, 19 nt, Artificial Sequence
  Description of Artificial Sequence: Synthetic oligonucleotide
  Sense strand starting at position 736 of SEQ ID NO: 585471
uugccuaggagcuaguauu

SEQ ID NO: 642519 - RNA, 19 nt, Artificial Sequence
  Description of Artificial Sequence: Synthetic oligonucleotide
  Antisense strand to SEQ ID NO: 642518
aauacuagcuccuaggcaa

SEQ ID NO: 642520 - RNA, 19 nt, Artificial Sequence
  Description of Artificial Sequence: Synthetic oligonucleotide
  Sense strand starting at position 906 of SEQ ID NO: 585471
acccuugcggagcgauuua

SEQ ID NO: 642521 - RNA, 19 nt, Artificial Sequence
  Description of Artificial Sequence: Synthetic oligonucleotide
  Antisense strand to SEQ ID NO: 642520
uaaaucgcuccgcaagggu

SEQ ID NO: 642522 - RNA, 19 nt, Artificial Sequence
  Description of Artificial Sequence: Synthetic oligonucleotide
  Sense strand starting at position 1025 of SEQ ID NO: 585471
ucagcagcuuugcuauaaa

SEQ ID NO: 642523 - RNA, 19 nt, Artificial Sequence
  Description of Artificial Sequence: Synthetic oligonucleotide
  Antisense strand to SEQ ID NO: 642522
uuuauagcaaagcugcuga

SEQ ID NO: 642524 - RNA, 19 nt, Artificial Sequence
  Description of Artificial Sequence: Synthetic oligonucleotide
  Sense strand starting at position 1028 of SEQ ID NO: 585471
gcagcuuugcuauaaacaa

SEQ ID NO: 642525 - RNA, 19 nt, Artificial Sequence
  Description of Artificial Sequence: Synthetic oligonucleotide
  Antisense strand to SEQ ID NO: 642524
uuguuuauagcaaagcugc

SEQ ID NO: 642526 - RNA, 19 nt, Artificial Sequence
  Description of Artificial Sequence: Synthetic oligonucleotide
  Sense strand starting at position 2352 of SEQ ID NO: 585471
cgcgcugcuggaucuaaau

SEQ ID NO: 642527 - RNA, 19 nt, Artificial Sequence
  Description of Artificial Sequence: Synthetic oligonucleotide
  Antisense strand to SEQ ID NO: 642526
auuuagauccagcagcgcg

SEQ ID NO: 642528 - RNA, 19 nt, Artificial Sequence
  Description of Artificial Sequence: Synthetic oligonucleotide
  Sense strand starting at position 2499 of SEQ ID NO: 585471
gugcuauguucgguucgga

SEQ ID NO: 642529 - RNA, 19 nt, Artificial Sequence
  Description of Artificial Sequence: Synthetic oligonucleotide
  Antisense strand to SEQ ID NO: 642528
uccgaaccgaacauagcac

SEQ ID NO: 642530 - RNA, 19 nt, Artificial Sequence
  Description of Artificial Sequence: Synthetic oligonucleotide
  Sense strand starting at position 2519 of SEQ ID NO: 585471
gggcggugcuaggucuaaa

SEQ ID NO: 642531 - RNA, 19 nt, Artificial Sequence
  Description of Artificial Sequence: Synthetic oligonucleotide
  Antisense strand to SEQ ID NO: 642530
uuuagaccuagcaccgccc

SEQ ID NO: 642532 - RNA, 19 nt, Artificial Sequence
  Description of Artificial Sequence: Synthetic oligonucleotide
  Sense strand starting at position 2604 of SEQ ID NO: 585471
gguccaaauggguggugau

SEQ ID NO: 642533 - RNA, 19 nt, Artificial Sequence
  Description of Artificial Sequence: Synthetic oligonucleotide
  Antisense strand to SEQ ID NO: 642532
aucaccacccauuuggacc

SEQ ID NO: 642534 - RNA, 19 nt, Artificial Sequence
  Description of Artificial Sequence: Synthetic oligonucleotide
  Sense strand starting at position 3049 of SEQ ID NO: 585471
ggguggugcugggucuaaa

SEQ ID NO: 642535 - RNA, 19 nt, Artificial Sequence
  Description of Artificial Sequence: Synthetic oligonucleotide
  Antisense strand to SEQ ID NO: 642534
uuuagacccagcaccaccc

SEQ ID NO: 642536 - RNA, 19 nt, Artificial Sequence
  Description of Artificial Sequence: Synthetic oligonucleotide
  Sense strand starting at position 3213 of SEQ ID NO: 585471
guguuucuuccagggugau

SEQ ID NO: 642537 - RNA, 19 nt, Artificial Sequence
  Description of Artificial Sequence: Synthetic oligonucleotide
  Antisense strand to SEQ ID NO: 642536
aucacccuggaagaaacac

SEQ ID NO: 642538 - RNA, 19 nt, Artificial Sequence
  Description of Artificial Sequence: Synthetic oligonucleotide
  Sense strand starting at position 3424 of SEQ ID NO: 585471
cuuugugugucuccuuaga

SEQ ID NO: 642539 - RNA, 19 nt, Artificial Sequence
  Description of Artificial Sequence: Synthetic oligonucleotide
  Antisense strand to SEQ ID NO: 642538
ucuaaggagacacacaaag

SEQ ID NO: 642540 - RNA, 19 nt, Artificial Sequence
  Description of Artificial Sequence: Synthetic oligonucleotide
  Sense strand starting at position 3426 of SEQ ID NO: 585471
uugugugucuccuuagaaa

SEQ ID NO: 642541 - RNA, 19 nt, Artificial Sequence
  Description of Artificial Sequence: Synthetic oligonucleotide
  Antisense strand to SEQ ID NO: 642540
uuucuaaggagacacacaa

SEQ ID NO: 642542 - RNA, 19 nt, Artificial Sequence
  Description of Artificial Sequence: Synthetic oligonucleotide
  Sense strand starting at position 3460 of SEQ ID NO: 585471
gacacaucguuaucugcca

SEQ ID NO: 642543 - RNA, 19 nt, Artificial Sequence
  Description of Artificial Sequence: Synthetic oligonucleotide
  Antisense strand to SEQ ID NO: 642542
uggcagauaacgauguguc

SEQ ID NO: 642544 - RNA, 19 nt, Artificial Sequence
  Description of Artificial Sequence: Synthetic oligonucleotide
  Sense strand starting at position 3558 of SEQ ID NO: 585471
agagaugccacgugaucgu

SEQ ID NO: 642545 - RNA, 19 nt, Artificial Sequence
  Description of Artificial Sequence: Synthetic oligonucleotide
  Antisense strand to SEQ ID NO: 642544
acgaucacguggcaucucu

SEQ ID NO: 642546 - RNA, 19 nt, Artificial Sequence
  Description of Artificial Sequence: Synthetic oligonucleotide
  Sense strand starting at position 3630 of SEQ ID NO: 585471
aguagcaagcuuugugaau

SEQ ID NO: 642547 - RNA, 19 nt, Artificial Sequence
  Description of Artificial Sequence: Synthetic oligonucleotide
  Antisense strand to SEQ ID NO: 642546
auucacaaagcuugcuacu

SEQ ID NO: 642548 - RNA, 19 nt, Artificial Sequence
  Description of Artificial Sequence: Synthetic oligonucleotide
  Sense strand starting at position 3631 of SEQ ID NO: 585471
guagcaagcuuugugaauu

SEQ ID NO: 642549 - RNA, 19 nt, Artificial Sequence
  Description of Artificial Sequence: Synthetic oligonucleotide
  Antisense strand to SEQ ID NO: 642548
aauucacaaagcuugcuac

SEQ ID NO: 642550 - RNA, 19 nt, Artificial Sequence
  Description of Artificial Sequence: Synthetic oligonucleotide
  Sense strand starting at position 3639 of SEQ ID NO: 585471
cuuugugaauuguagggau

SEQ ID NO: 642551 - RNA, 19 nt, Artificial Sequence
  Description of Artificial Sequence: Synthetic oligonucleotide
  Antisense strand to SEQ ID NO: 642550
aucccuacaauucacaaag

SEQ ID NO: 642552 - RNA, 19 nt, Artificial Sequence
  Description of Artificial Sequence: Synthetic oligonucleotide
  Sense strand starting at position 3753 of SEQ ID NO: 585471
gguucagucaggcgaaguu

SEQ ID NO: 642553 - RNA, 19 nt, Artificial Sequence
  Description of Artificial Sequence: Synthetic oligonucleotide
  Antisense strand to SEQ ID NO: 642552
aacuucgccugacugaacc

SEQ ID NO: 642554 - RNA, 19 nt, Artificial Sequence
  Description of Artificial Sequence: Synthetic oligonucleotide
  Sense strand starting at position 3762 of SEQ ID NO: 585471
aggcgaaguugcguuaucu

SEQ ID NO: 642555 - RNA, 19 nt, Artificial Sequence
  Description of Artificial Sequence: Synthetic oligonucleotide
  Antisense strand to SEQ ID NO: 642554
agauaacgcaacuucgccu

SEQ ID NO: 642556 - RNA, 19 nt, Artificial Sequence
  Description of Artificial Sequence: Synthetic oligonucleotide
  Sense strand starting at position 3763 of SEQ ID NO: 585471
ggcgaaguugcguuaucug

SEQ ID NO: 642557 - RNA, 19 nt, Artificial Sequence
  Description of Artificial Sequence: Synthetic oligonucleotide
  Antisense strand to SEQ ID NO: 642556
cagauaacgcaacuucgcc

SEQ ID NO: 642558 - RNA, 19 nt, Artificial Sequence
  Description of Artificial Sequence: Synthetic oligonucleotide
  Sense strand starting at position 3766 of SEQ ID NO: 585471
gaaguugcguuaucuguga

SEQ ID NO: 642559 - RNA, 19 nt, Artificial Sequence
  Description of Artificial Sequence: Synthetic oligonucleotide
  Antisense strand to SEQ ID NO: 642558
ucacagauaacgcaacuuc

SEQ ID NO: 642560 - RNA, 19 nt, Artificial Sequence
  Description of Artificial Sequence: Synthetic oligonucleotide
  Sense strand starting at position 3768 of SEQ ID NO: 585471
aguugcguuaucugugaug

SEQ ID NO: 642561 - RNA, 19 nt, Artificial Sequence
  Description of Artificial Sequence: Synthetic oligonucleotide
  Antisense strand to SEQ ID NO: 642560
caucacagauaacgcaacu

SEQ ID NO: 642562 - RNA, 19 nt, Artificial Sequence
  Description of Artificial Sequence: Synthetic oligonucleotide
  Sense strand starting at position 3770 of SEQ ID NO: 585471
uugcguuaucugugaugug

SEQ ID NO: 642563 - RNA, 19 nt, Artificial Sequence
  Description of Artificial Sequence: Synthetic oligonucleotide
  Antisense strand to SEQ ID NO: 642562
cacaucacagauaacgcaa

SEQ ID NO: 642564 - RNA, 19 nt, Artificial Sequence
  Description of Artificial Sequence: Synthetic oligonucleotide
  Sense strand starting at position 3775 of SEQ ID NO: 585471
uuaucugugauguguugua

SEQ ID NO: 642565 - RNA, 19 nt, Artificial Sequence
  Description of Artificial Sequence: Synthetic oligonucleotide
  Antisense strand to SEQ ID NO: 642564
uacaacacaucacagauaa

SEQ ID NO: 642566 - RNA, 19 nt, Artificial Sequence
  Description of Artificial Sequence: Synthetic oligonucleotide
  Sense strand starting at position 3780 of SEQ ID NO: 585471
ugugauguguuguaacaaa

SEQ ID NO: 642567 - RNA, 19 nt, Artificial Sequence
  Description of Artificial Sequence: Synthetic oligonucleotide
  Antisense strand to SEQ ID NO: 642566
uuuguuacaacacaucaca

SEQ ID NO: 642568 - RNA, 19 nt, Artificial Sequence
  Description of Artificial Sequence: Synthetic oligonucleotide
  Sense strand starting at position 3799 of SEQ ID NO: 585471
aagcguuuaucuuugaaac

SEQ ID NO: 642569 - RNA, 19 nt, Artificial Sequence
  Description of Artificial Sequence: Synthetic oligonucleotide
  Antisense strand to SEQ ID NO: 642568
guuucaaagauaaacgcuu

SEQ ID NO: 642570 - RNA, 19 nt, Artificial Sequence
  Description of Artificial Sequence: Synthetic oligonucleotide
  Sense strand starting at position 3800 of SEQ ID NO: 585471
agcguuuaucuuugaaaca

SEQ ID NO: 642571 - RNA, 19 nt, Artificial Sequence
  Description of Artificial Sequence: Synthetic oligonucleotide
  Antisense strand to SEQ ID NO: 642570
uguuucaaagauaaacgcu

SEQ ID NO: 642572 - RNA, 19 nt, Artificial Sequence
  Description of Artificial Sequence: Synthetic oligonucleotide
  Sense strand starting at position 3801 of SEQ ID NO: 585471
gcguuuaucuuugaaacac

SEQ ID NO: 642573 - RNA, 19 nt, Artificial Sequence
  Description of Artificial Sequence: Synthetic oligonucleotide
  Antisense strand to SEQ ID NO: 642572
guguuucaaagauaaacgc

SEQ ID NO: 642574 - RNA, 19 nt, Artificial Sequence
  Description of Artificial Sequence: Synthetic oligonucleotide
  Sense strand starting at position 3841 of SEQ ID NO: 585471
ugaacuauauuugacaaag

SEQ ID NO: 642575 - RNA, 19 nt, Artificial Sequence
  Description of Artificial Sequence: Synthetic oligonucleotide
  Antisense strand to SEQ ID NO: 642574
cuuugucaaauauaguuca

SEQ ID NO: 642576 - RNA, 19 nt, Artificial Sequence
  Description of Artificial Sequence: Synthetic oligonucleotide
  Sense strand starting at position 100 of SEQ ID NO: 585472
guacaaugcuucuguucuu

SEQ ID NO: 642577 - RNA, 19 nt, Artificial Sequence
  Description of Artificial Sequence: Synthetic oligonucleotide
  Antisense strand to SEQ ID NO: 642576
aagaacagaagcauuguac

SEQ ID NO: 642578 - RNA, 19 nt, Artificial Sequence
  Description of Artificial Sequence: Synthetic oligonucleotide
  Sense strand starting at position 105 of SEQ ID NO: 585472
augcuucuguucuugcaga

SEQ ID NO: 642579 - RNA, 19 nt, Artificial Sequence
  Description of Artificial Sequence: Synthetic oligonucleotide
  Antisense strand to SEQ ID NO: 642578
ucugcaagaacagaagcau

SEQ ID NO: 642580 - RNA, 19 nt, Artificial Sequence
  Description of Artificial Sequence: Synthetic oligonucleotide
  Sense strand starting at position 106 of SEQ ID NO: 585472
ugcuucuguucuugcagaa

SEQ ID NO: 642581 - RNA, 19 nt, Artificial Sequence
  Description of Artificial Sequence: Synthetic oligonucleotide
  Antisense strand to SEQ ID NO: 642580
uucugcaagaacagaagca

SEQ ID NO: 642582 - RNA, 19 nt, Artificial Sequence
  Description of Artificial Sequence: Synthetic oligonucleotide
  Sense strand starting at position 135 of SEQ ID NO: 585472
uuggacuugugauggccaa

SEQ ID NO: 642583 - RNA, 19 nt, Artificial Sequence
  Description of Artificial Sequence: Synthetic oligonucleotide
  Antisense strand to SEQ ID NO: 642582
uuggccaucacaaguccaa

SEQ ID NO: 642584 - RNA, 19 nt, Artificial Sequence
  Description of Artificial Sequence: Synthetic oligonucleotide
  Sense strand starting at position 136 of SEQ ID NO: 585472
uggacuugugauggccaaa

SEQ ID NO: 642585 - RNA, 19 nt, Artificial Sequence
  Description of Artificial Sequence: Synthetic oligonucleotide
  Antisense strand to SEQ ID NO: 642584
uuuggccaucacaagucca

SEQ ID NO: 642586 - RNA, 19 nt, Artificial Sequence
  Description of Artificial Sequence: Synthetic oligonucleotide
  Sense strand starting at position 139 of SEQ ID NO: 585472
acuugugauggccaaauag

SEQ ID NO: 642587 - RNA, 19 nt, Artificial Sequence
  Description of Artificial Sequence: Synthetic oligonucleotide
  Antisense strand to SEQ ID NO: 642586
cuauuuggccaucacaagu

SEQ ID NO: 642588 - RNA, 19 nt, Artificial Sequence
  Description of Artificial Sequence: Synthetic oligonucleotide
  Sense strand starting at position 219 of SEQ ID NO: 585472
ugaaacuguuggccuugaa

SEQ ID NO: 642589 - RNA, 19 nt, Artificial Sequence
  Description of Artificial Sequence: Synthetic oligonucleotide
  Antisense strand to SEQ ID NO: 642588
uucaaggccaacaguuuca

SEQ ID NO: 642590 - RNA, 19 nt, Artificial Sequence
  Description of Artificial Sequence: Synthetic oligonucleotide
  Sense strand starting at position 222 of SEQ ID NO: 585472
aacuguuggccuugaaaua

SEQ ID NO: 642591 - RNA, 19 nt, Artificial Sequence
  Description of Artificial Sequence: Synthetic oligonucleotide
  Antisense strand to SEQ ID NO: 642590
uauuucaaggccaacaguu

SEQ ID NO: 642592 - RNA, 19 nt, Artificial Sequence
  Description of Artificial Sequence: Synthetic oligonucleotide
  Sense strand starting at position 223 of SEQ ID NO: 585472
acuguuggccuugaaauac

SEQ ID NO: 642593 - RNA, 19 nt, Artificial Sequence
  Description of Artificial Sequence: Synthetic oligonucleotide
  Antisense strand to SEQ ID NO: 642592
guauuucaaggccaacagu

SEQ ID NO: 642594 - RNA, 19 nt, Artificial Sequence
  Description of Artificial Sequence: Synthetic oligonucleotide
  Sense strand starting at position 237 of SEQ ID NO: 585472
aauacuggcugagagaauu

SEQ ID NO: 642595 - RNA, 19 nt, Artificial Sequence
  Description of Artificial Sequence: Synthetic oligonucleotide
  Antisense strand to SEQ ID NO: 642594
aauucucucagccaguauu

SEQ ID NO: 642596 - RNA, 19 nt, Artificial Sequence
  Description of Artificial Sequence: Synthetic oligonucleotide
  Sense strand starting at position 342 of SEQ ID NO: 585472
acaggaaaguucucgagaa

SEQ ID NO: 642597 - RNA, 19 nt, Artificial Sequence
  Description of Artificial Sequence: Synthetic oligonucleotide
  Antisense strand to SEQ ID NO: 642596
uucucgagaacuuuccugu

SEQ ID NO: 642598 - RNA, 19 nt, Artificial Sequence
  Description of Artificial Sequence: Synthetic oligonucleotide
  Sense strand starting at position 343 of SEQ ID NO: 585472
caggaaaguucucgagaaa

SEQ ID NO: 642599 - RNA, 19 nt, Artificial Sequence
  Description of Artificial Sequence: Synthetic oligonucleotide
  Antisense strand to SEQ ID NO: 642598
uuucucgagaacuuuccug

SEQ ID NO: 642600 - RNA, 19 nt, Artificial Sequence
  Description of Artificial Sequence: Synthetic oligonucleotide
  Sense strand starting at position 449 of SEQ ID NO: 585472
augaaaggcuucuaauaca

SEQ ID NO: 642601 - RNA, 19 nt, Artificial Sequence
  Description of Artificial Sequence: Synthetic oligonucleotide
  Antisense strand to SEQ ID NO: 642600
uguauuagaagccuuucau

SEQ ID NO: 642602 - RNA, 19 nt, Artificial Sequence
  Description of Artificial Sequence: Synthetic oligonucleotide
  Sense strand starting at position 503 of SEQ ID NO: 585472
agauauaaguagggagaaa

SEQ ID NO: 642603 - RNA, 19 nt, Artificial Sequence
  Description of Artificial Sequence: Synthetic oligonucleotide
  Antisense strand to SEQ ID NO: 642602
uuucucccuacuuauaucu

SEQ ID NO: 642604 - RNA, 19 nt, Artificial Sequence
  Description of Artificial Sequence: Synthetic oligonucleotide
  Sense strand starting at position 729 of SEQ ID NO: 585472
cuauaauguuucugauuug

SEQ ID NO: 642605 - RNA, 19 nt, Artificial Sequence
  Description of Artificial Sequence: Synthetic oligonucleotide
  Antisense strand to SEQ ID NO: 642604
caaaucagaaacauuauag

SEQ ID NO: 642606 - RNA, 19 nt, Artificial Sequence
  Description of Artificial Sequence: Synthetic oligonucleotide
  Sense strand starting at position 735 of SEQ ID NO: 585472
uguuucugauuugagauuu

SEQ ID NO: 642607 - RNA, 19 nt, Artificial Sequence
  Description of Artificial Sequence: Synthetic oligonucleotide
  Antisense strand to SEQ ID NO: 642606
aaaucucaaaucagaaaca

SEQ ID NO: 642608 - RNA, 19 nt, Artificial Sequence
  Description of Artificial Sequence: Synthetic oligonucleotide
  Sense strand starting at position 1009 of SEQ ID NO: 585472
uacacuagucuaugaacga

SEQ ID NO: 642609 - RNA, 19 nt, Artificial Sequence
  Description of Artificial Sequence: Synthetic oligonucleotide
  Antisense strand to SEQ ID NO: 642608
ucguucauagacuagugua

SEQ ID NO: 642610 - RNA, 19 nt, Artificial Sequence
  Description of Artificial Sequence: Synthetic oligonucleotide
  Sense strand starting at position 1010 of SEQ ID NO: 585472
acacuagucuaugaacgaa

SEQ ID NO: 642611 - RNA, 19 nt, Artificial Sequence
  Description of Artificial Sequence: Synthetic oligonucleotide
  Antisense strand to SEQ ID NO: 642610
uucguucauagacuagugu

SEQ ID NO: 642612 - RNA, 19 nt, Artificial Sequence
  Description of Artificial Sequence: Synthetic oligonucleotide
  Sense strand starting at position 1102 of SEQ ID NO: 585472
ggaguaacuuaacauaaca

SEQ ID NO: 642613 - RNA, 19 nt, Artificial Sequence
  Description of Artificial Sequence: Synthetic oligonucleotide
  Antisense strand to SEQ ID NO: 642612
uguuauguuaaguuacucc

SEQ ID NO: 642614 - RNA, 19 nt, Artificial Sequence
  Description of Artificial Sequence: Synthetic oligonucleotide
  Sense strand starting at position 1144 of SEQ ID NO: 585472
agccuaauggcguguguca

SEQ ID NO: 642615 - RNA, 19 nt, Artificial Sequence
  Description of Artificial Sequence: Synthetic oligonucleotide
  Antisense strand to SEQ ID NO: 642614
ugacacacgccauuaggcu

SEQ ID NO: 642616 - RNA, 19 nt, Artificial Sequence
  Description of Artificial Sequence: Synthetic oligonucleotide
  Sense strand starting at position 1149 of SEQ ID NO: 585472
aauggcgugugucaguauu

SEQ ID NO: 642617 - RNA, 19 nt, Artificial Sequence
  Description of Artificial Sequence: Synthetic oligonucleotide
  Antisense strand to SEQ ID NO: 642616
aauacugacacacgccauu

SEQ ID NO: 642618 - RNA, 19 nt, Artificial Sequence
  Description of Artificial Sequence: Synthetic oligonucleotide
  Sense strand starting at position 1151 of SEQ ID NO: 585472
uggcgugugucaguauuca

SEQ ID NO: 642619 - RNA, 19 nt, Artificial Sequence
  Description of Artificial Sequence: Synthetic oligonucleotide
  Antisense strand to SEQ ID NO: 642618
ugaauacugacacacgcca

SEQ ID NO: 642620 - RNA, 19 nt, Artificial Sequence
  Description of Artificial Sequence: Synthetic oligonucleotide
  Sense strand starting at position 1209 of SEQ ID NO: 585472
ugcagucacagguacagau

SEQ ID NO: 642621 - RNA, 19 nt, Artificial Sequence
  Description of Artificial Sequence: Synthetic oligonucleotide
  Antisense strand to SEQ ID NO: 642620
aucuguaccugugacugca

SEQ ID NO: 642622 - RNA, 19 nt, Artificial Sequence
  Description of Artificial Sequence: Synthetic oligonucleotide
  Sense strand starting at position 1334 of SEQ ID NO: 585472
aggauuacauuucguaaga

SEQ ID NO: 642623 - RNA, 19 nt, Artificial Sequence
  Description of Artificial Sequence: Synthetic oligonucleotide
  Antisense strand to SEQ ID NO: 642622
ucuuacgaaauguaauccu

SEQ ID NO: 642624 - RNA, 19 nt, Artificial Sequence
  Description of Artificial Sequence: Synthetic oligonucleotide
  Sense strand starting at position 1336 of SEQ ID NO: 585472
gauuacauuucguaagaau

SEQ ID NO: 642625 - RNA, 19 nt, Artificial Sequence
  Description of Artificial Sequence: Synthetic oligonucleotide
  Antisense strand to SEQ ID NO: 642624
auucuuacgaaauguaauc

SEQ ID NO: 642626 - RNA, 19 nt, Artificial Sequence
  Description of Artificial Sequence: Synthetic oligonucleotide
  Sense strand starting at position 1339 of SEQ ID NO: 585472
uacauuucguaagaauguu

SEQ ID NO: 642627 - RNA, 19 nt, Artificial Sequence
  Description of Artificial Sequence: Synthetic oligonucleotide
  Antisense strand to SEQ ID NO: 642626
aacauucuuacgaaaugua

SEQ ID NO: 642628 - RNA, 19 nt, Artificial Sequence
  Description of Artificial Sequence: Synthetic oligonucleotide
  Sense strand starting at position 1380 of SEQ ID NO: 585472
uugccuaggagcuaguauu

SEQ ID NO: 642629 - RNA, 19 nt, Artificial Sequence
  Description of Artificial Sequence: Synthetic oligonucleotide
  Antisense strand to SEQ ID NO: 642628
aauacuagcuccuaggcaa

SEQ ID NO: 642630 - RNA, 19 nt, Artificial Sequence
  Description of Artificial Sequence: Synthetic oligonucleotide
  Sense strand starting at position 1550 of SEQ ID NO: 585472
acccuugcggagcgauuua

SEQ ID NO: 642631 - RNA, 19 nt, Artificial Sequence
  Description of Artificial Sequence: Synthetic oligonucleotide
  Antisense strand to SEQ ID NO: 642630
uaaaucgcuccgcaagggu

SEQ ID NO: 642632 - RNA, 19 nt, Artificial Sequence
  Description of Artificial Sequence: Synthetic oligonucleotide
  Sense strand starting at position 1669 of SEQ ID NO: 585472
ucagcagcuuugcuauaaa

SEQ ID NO: 642633 - RNA, 19 nt, Artificial Sequence
  Description of Artificial Sequence: Synthetic oligonucleotide
  Antisense strand to SEQ ID NO: 642632
uuuauagcaaagcugcuga

SEQ ID NO: 642634 - RNA, 19 nt, Artificial Sequence
  Description of Artificial Sequence: Synthetic oligonucleotide
  Sense strand starting at position 1672 of SEQ ID NO: 585472
gcagcuuugcuauaaacaa

SEQ ID NO: 642635 - RNA, 19 nt, Artificial Sequence
  Description of Artificial Sequence: Synthetic oligonucleotide
  Antisense strand to SEQ ID NO: 642634
uuguuuauagcaaagcugc

SEQ ID NO: 642636 - RNA, 19 nt, Artificial Sequence
  Description of Artificial Sequence: Synthetic oligonucleotide
  Sense strand starting at position 2996 of SEQ ID NO: 585472
cgcgcugcuggaucuaaau

SEQ ID NO: 642637 - RNA, 19 nt, Artificial Sequence
  Description of Artificial Sequence: Synthetic oligonucleotide
  Antisense strand to SEQ ID NO: 642636
auuuagauccagcagcgcg

SEQ ID NO: 642638 - RNA, 19 nt, Artificial Sequence
  Description of Artificial Sequence: Synthetic oligonucleotide
  Sense strand starting at position 3143 of SEQ ID NO: 585472
gugcuauguucgguucgga

SEQ ID NO: 642639 - RNA, 19 nt, Artificial Sequence
  Description of Artificial Sequence: Synthetic oligonucleotide
  Antisense strand to SEQ ID NO: 642638
uccgaaccgaacauagcac

SEQ ID NO: 642640 - RNA, 19 nt, Artificial Sequence
  Description of Artificial Sequence: Synthetic oligonucleotide
  Sense strand starting at position 3163 of SEQ ID NO: 585472
gggcggugcuaggucuaaa

SEQ ID NO: 642641 - RNA, 19 nt, Artificial Sequence
  Description of Artificial Sequence: Synthetic oligonucleotide
  Antisense strand to SEQ ID NO: 642640
uuuagaccuagcaccgccc

SEQ ID NO: 642642 - RNA, 19 nt, Artificial Sequence
  Description of Artificial Sequence: Synthetic oligonucleotide
  Sense strand starting at position 3248 of SEQ ID NO: 585472
gguccaaauggguggugau

SEQ ID NO: 642643 - RNA, 19 nt, Artificial Sequence
  Description of Artificial Sequence: Synthetic oligonucleotide
  Antisense strand to SEQ ID NO: 642642
aucaccacccauuuggacc

SEQ ID NO: 642644 - RNA, 19 nt, Artificial Sequence
  Description of Artificial Sequence: Synthetic oligonucleotide
  Sense strand starting at position 3693 of SEQ ID NO: 585472
ggguggugcugggucuaaa

SEQ ID NO: 642645 - RNA, 19 nt, Artificial Sequence
  Description of Artificial Sequence: Synthetic oligonucleotide
  Antisense strand to SEQ ID NO: 642644
uuuagacccagcaccaccc

SEQ ID NO: 642646 - RNA, 19 nt, Artificial Sequence
  Description of Artificial Sequence: Synthetic oligonucleotide
  Sense strand starting at position 3857 of SEQ ID NO: 585472
guguuucuuccagggugau

SEQ ID NO: 642647 - RNA, 19 nt, Artificial Sequence
  Description of Artificial Sequence: Synthetic oligonucleotide
  Antisense strand to SEQ ID NO: 642646
aucacccuggaagaaacac

SEQ ID NO: 642648 - RNA, 19 nt, Artificial Sequence
  Description of Artificial Sequence: Synthetic oligonucleotide
  Sense strand starting at position 379 of SEQ ID NO: 585473
ggauucugucggcaggaga

SEQ ID NO: 642649 - RNA, 19 nt, Artificial Sequence
  Description of Artificial Sequence: Synthetic oligonucleotide
  Antisense strand to SEQ ID NO: 642648
ucuccugccgacagaaucc

SEQ ID NO: 642650 - RNA, 19 nt, Artificial Sequence
  Description of Artificial Sequence: Synthetic oligonucleotide
  Sense strand starting at position 396 of SEQ ID NO: 585473
gagggucugcccuggaaag

SEQ ID NO: 642651 - RNA, 19 nt, Artificial Sequence
  Description of Artificial Sequence: Synthetic oligonucleotide
  Antisense strand to SEQ ID NO: 642650
cuuuccagggcagacccuc

SEQ ID NO: 642652 - RNA, 19 nt, Artificial Sequence
  Description of Artificial Sequence: Synthetic oligonucleotide
  Sense strand starting at position 666 of SEQ ID NO: 585473
aucccagcuguaugcaaau

SEQ ID NO: 642653 - RNA, 19 nt, Artificial Sequence
  Description of Artificial Sequence: Synthetic oligonucleotide
  Antisense strand to SEQ ID NO: 642652
auuugcauacagcugggau

SEQ ID NO: 642654 - RNA, 19 nt, Artificial Sequence
  Description of Artificial Sequence: Synthetic oligonucleotide
  Sense strand starting at position 832 of SEQ ID NO: 585473
gcgcguucccugaagaguc

SEQ ID NO: 642655 - RNA, 19 nt, Artificial Sequence
  Description of Artificial Sequence: Synthetic oligonucleotide
  Antisense strand to SEQ ID NO: 642654
gacucuucagggaacgcgc

SEQ ID NO: 642656 - RNA, 19 nt, Artificial Sequence
  Description of Artificial Sequence: Synthetic oligonucleotide
  Sense strand starting at position 880 of SEQ ID NO: 585473
acggaugugucacauuuau

SEQ ID NO: 642657 - RNA, 19 nt, Artificial Sequence
  Description of Artificial Sequence: Synthetic oligonucleotide
  Antisense strand to SEQ ID NO: 642656
auaaaugugacacauccgu

SEQ ID NO: 642658 - RNA, 19 nt, Artificial Sequence
  Description of Artificial Sequence: Synthetic oligonucleotide
  Sense strand starting at position 1062 of SEQ ID NO: 585473
auguguguucuggugagcu

SEQ ID NO: 642659 - RNA, 19 nt, Artificial Sequence
  Description of Artificial Sequence: Synthetic oligonucleotide
  Antisense strand to SEQ ID NO: 642658
agcucaccagaacacacau

SEQ ID NO: 642660 - RNA, 19 nt, Artificial Sequence
  Description of Artificial Sequence: Synthetic oligonucleotide
  Sense strand starting at position 1167 of SEQ ID NO: 585473
guguccagcucugcaugaa

SEQ ID NO: 642661 - RNA, 19 nt, Artificial Sequence
  Description of Artificial Sequence: Synthetic oligonucleotide
  Antisense strand to SEQ ID NO: 642660
uucaugcagagcuggacac

SEQ ID NO: 642662 - RNA, 19 nt, Artificial Sequence
  Description of Artificial Sequence: Synthetic oligonucleotide
  Sense strand starting at position 1774 of SEQ ID NO: 585473
cacugaugcccugggaauc

SEQ ID NO: 642663 - RNA, 19 nt, Artificial Sequence
  Description of Artificial Sequence: Synthetic oligonucleotide
  Antisense strand to SEQ ID NO: 642662
gauucccagggcaucagug

SEQ ID NO: 642664 - RNA, 19 nt, Artificial Sequence
  Description of Artificial Sequence: Synthetic oligonucleotide
  Sense strand starting at position 1775 of SEQ ID NO: 585473
acugaugcccugggaauca

SEQ ID NO: 642665 - RNA, 19 nt, Artificial Sequence
  Description of Artificial Sequence: Synthetic oligonucleotide
  Antisense strand to SEQ ID NO: 642664
ugauucccagggcaucagu

SEQ ID NO: 642666 - RNA, 19 nt, Artificial Sequence
  Description of Artificial Sequence: Synthetic oligonucleotide
  Sense strand starting at position 1963 of SEQ ID NO: 585473
ggaggagucucucugcuug

SEQ ID NO: 642667 - RNA, 19 nt, Artificial Sequence
  Description of Artificial Sequence: Synthetic oligonucleotide
  Antisense strand to SEQ ID NO: 642666
caagcagagagacuccucc

SEQ ID NO: 642668 - RNA, 19 nt, Artificial Sequence
  Description of Artificial Sequence: Synthetic oligonucleotide
  Sense strand starting at position 1996 of SEQ ID NO: 585473
gcugaucugacggguucuu

SEQ ID NO: 642669 - RNA, 19 nt, Artificial Sequence
  Description of Artificial Sequence: Synthetic oligonucleotide
  Antisense strand to SEQ ID NO: 642668
aagaacccgucagaucagc

SEQ ID NO: 642670 - RNA, 19 nt, Artificial Sequence
  Description of Artificial Sequence: Synthetic oligonucleotide
  Sense strand starting at position 2001 of SEQ ID NO: 585473
ucugacggguucuuauaua

SEQ ID NO: 642671 - RNA, 19 nt, Artificial Sequence
  Description of Artificial Sequence: Synthetic oligonucleotide
  Antisense strand to SEQ ID NO: 642670
uauauaagaacccgucaga

SEQ ID NO: 642672 - RNA, 19 nt, Artificial Sequence
  Description of Artificial Sequence: Synthetic oligonucleotide
  Sense strand starting at position 2099 of SEQ ID NO: 585473
auucuugaagcucguggaa

SEQ ID NO: 642673 - RNA, 19 nt, Artificial Sequence
  Description of Artificial Sequence: Synthetic oligonucleotide
  Antisense strand to SEQ ID NO: 642672
uuccacgagcuucaagaau

SEQ ID NO: 642674 - RNA, 19 nt, Artificial Sequence
  Description of Artificial Sequence: Synthetic oligonucleotide
  Sense strand starting at position 2151 of SEQ ID NO: 585473
cagggcuuuccuggaagga

SEQ ID NO: 642675 - RNA, 19 nt, Artificial Sequence
  Description of Artificial Sequence: Synthetic oligonucleotide
  Antisense strand to SEQ ID NO: 642674
uccuuccaggaaagcccug

SEQ ID NO: 642676 - RNA, 19 nt, Artificial Sequence
  Description of Artificial Sequence: Synthetic oligonucleotide
  Sense strand starting at position 2318 of SEQ ID NO: 585473
aggccaaugcucuagugau

SEQ ID NO: 642677 - RNA, 19 nt, Artificial Sequence
  Description of Artificial Sequence: Synthetic oligonucleotide
  Antisense strand to SEQ ID NO: 642676
aucacuagagcauuggccu

SEQ ID NO: 642678 - RNA, 19 nt, Artificial Sequence
  Description of Artificial Sequence: Synthetic oligonucleotide
  Sense strand starting at position 2324 of SEQ ID NO: 585473
augcucuagugaucagauu

SEQ ID NO: 642679 - RNA, 19 nt, Artificial Sequence
  Description of Artificial Sequence: Synthetic oligonucleotide
  Antisense strand to SEQ ID NO: 642678
aaucugaucacuagagcau

SEQ ID NO: 642680 - RNA, 19 nt, Artificial Sequence
  Description of Artificial Sequence: Synthetic oligonucleotide
  Sense strand starting at position 2351 of SEQ ID NO: 585473
gccugucagagcgcuguau

SEQ ID NO: 642681 - RNA, 19 nt, Artificial Sequence
  Description of Artificial Sequence: Synthetic oligonucleotide
  Antisense strand to SEQ ID NO: 642680
auacagcgcucugacaggc

SEQ ID NO: 642682 - RNA, 19 nt, Artificial Sequence
  Description of Artificial Sequence: Synthetic oligonucleotide
  Sense strand starting at position 2352 of SEQ ID NO: 585473
ccugucagagcgcuguauu

SEQ ID NO: 642683 - RNA, 19 nt, Artificial Sequence
  Description of Artificial Sequence: Synthetic oligonucleotide
  Antisense strand to SEQ ID NO: 642682
aauacagcgcucugacagg

SEQ ID NO: 642684 - RNA, 19 nt, Artificial Sequence
  Description of Artificial Sequence: Synthetic oligonucleotide
  Sense strand starting at position 2353 of SEQ ID NO: 585473
cugucagagcgcuguauua

SEQ ID NO: 642685 - RNA, 19 nt, Artificial Sequence
  Description of Artificial Sequence: Synthetic oligonucleotide
  Antisense strand to SEQ ID NO: 642684
uaauacagcgcucugacag

SEQ ID NO: 642686 - RNA, 19 nt, Artificial Sequence
  Description of Artificial Sequence: Synthetic oligonucleotide
  Sense strand starting at position 2355 of SEQ ID NO: 585473
gucagagcgcuguauuaga

SEQ ID NO: 642687 - RNA, 19 nt, Artificial Sequence
  Description of Artificial Sequence: Synthetic oligonucleotide
  Antisense strand to SEQ ID NO: 642686
ucuaauacagcgcucugac

SEQ ID NO: 642688 - RNA, 19 nt, Artificial Sequence
  Description of Artificial Sequence: Synthetic oligonucleotide
  Sense strand starting at position 2418 of SEQ ID NO: 585473
gaaaguguucaggaguuug

SEQ ID NO: 642689 - RNA, 19 nt, Artificial Sequence
  Description of Artificial Sequence: Synthetic oligonucleotide
  Antisense strand to SEQ ID NO: 642688
caaacuccugaacacuuuc

SEQ ID NO: 642690 - RNA, 19 nt, Artificial Sequence
  Description of Artificial Sequence: Synthetic oligonucleotide
  Sense strand starting at position 2423 of SEQ ID NO: 585473
uguucaggaguuugugaca

SEQ ID NO: 642691 - RNA, 19 nt, Artificial Sequence
  Description of Artificial Sequence: Synthetic oligonucleotide
  Antisense strand to SEQ ID NO: 642690
ugucacaaacuccugaaca

SEQ ID NO: 642692 - RNA, 19 nt, Artificial Sequence
  Description of Artificial Sequence: Synthetic oligonucleotide
  Sense strand starting at position 2500 of SEQ ID NO: 585473
gccagaugccgcgaaggaa

SEQ ID NO: 642693 - RNA, 19 nt, Artificial Sequence
  Description of Artificial Sequence: Synthetic oligonucleotide
  Antisense strand to SEQ ID NO: 642692
uuccuucgcggcaucuggc

SEQ ID NO: 642694 - RNA, 19 nt, Artificial Sequence
  Description of Artificial Sequence: Synthetic oligonucleotide
  Sense strand starting at position 2623 of SEQ ID NO: 585473
caaacaguauguguaaaga

SEQ ID NO: 642695 - RNA, 19 nt, Artificial Sequence
  Description of Artificial Sequence: Synthetic oligonucleotide
  Antisense strand to SEQ ID NO: 642694
ucuuuacacauacuguuug

SEQ ID NO: 642696 - RNA, 19 nt, Artificial Sequence
  Description of Artificial Sequence: Synthetic oligonucleotide
  Sense strand starting at position 2658 of SEQ ID NO: 585473
ggaagaggugaaugugauc

SEQ ID NO: 642697 - RNA, 19 nt, Artificial Sequence
  Description of Artificial Sequence: Synthetic oligonucleotide
  Antisense strand to SEQ ID NO: 642696
gaucacauucaccucuucc

SEQ ID NO: 642698 - RNA, 19 nt, Artificial Sequence
  Description of Artificial Sequence: Synthetic oligonucleotide
  Sense strand starting at position 2665 of SEQ ID NO: 585473
gugaaugugaucuggaguc

SEQ ID NO: 642699 - RNA, 19 nt, Artificial Sequence
  Description of Artificial Sequence: Synthetic oligonucleotide
  Antisense strand to SEQ ID NO: 642698
gacuccagaucacauucac

SEQ ID NO: 642700 - RNA, 19 nt, Artificial Sequence
  Description of Artificial Sequence: Synthetic oligonucleotide
  Sense strand starting at position 2730 of SEQ ID NO: 585473
cgcagcauuacccaggaaa

SEQ ID NO: 642701 - RNA, 19 nt, Artificial Sequence
  Description of Artificial Sequence: Synthetic oligonucleotide
  Antisense strand to SEQ ID NO: 642700
uuuccuggguaaugcugcg

SEQ ID NO: 642702 - RNA, 19 nt, Artificial Sequence
  Description of Artificial Sequence: Synthetic oligonucleotide
  Sense strand starting at position 2842 of SEQ ID NO: 585473
cuaaauagcucaucuguga

SEQ ID NO: 642703 - RNA, 19 nt, Artificial Sequence
  Description of Artificial Sequence: Synthetic oligonucleotide
  Antisense strand to SEQ ID NO: 642702
ucacagaugagcuauuuag

SEQ ID NO: 642704 - RNA, 19 nt, Artificial Sequence
  Description of Artificial Sequence: Synthetic oligonucleotide
  Sense strand starting at position 2853 of SEQ ID NO: 585473
aucugugacuccucugcaa

SEQ ID NO: 642705 - RNA, 19 nt, Artificial Sequence
  Description of Artificial Sequence: Synthetic oligonucleotide
  Antisense strand to SEQ ID NO: 642704
uugcagaggagucacagau

SEQ ID NO: 642706 - RNA, 19 nt, Artificial Sequence
  Description of Artificial Sequence: Synthetic oligonucleotide
  Sense strand starting at position 2865 of SEQ ID NO: 585473
ucugcaaggugucuuuaua

SEQ ID NO: 642707 - RNA, 19 nt, Artificial Sequence
  Description of Artificial Sequence: Synthetic oligonucleotide
  Antisense strand to SEQ ID NO: 642706
uauaaagacaccuugcaga

SEQ ID NO: 642708 - RNA, 19 nt, Artificial Sequence
  Description of Artificial Sequence: Synthetic oligonucleotide
  Sense strand starting at position 2875 of SEQ ID NO: 585473
gucuuuauacuagggugaa

SEQ ID NO: 642709 - RNA, 19 nt, Artificial Sequence
  Description of Artificial Sequence: Synthetic oligonucleotide
  Antisense strand to SEQ ID NO: 642708
uucacccuaguauaaagac

SEQ ID NO: 642710 - RNA, 19 nt, Artificial Sequence
  Description of Artificial Sequence: Synthetic oligonucleotide
  Sense strand starting at position 2876 of SEQ ID NO: 585473
ucuuuauacuagggugaag

SEQ ID NO: 642711 - RNA, 19 nt, Artificial Sequence
  Description of Artificial Sequence: Synthetic oligonucleotide
  Antisense strand to SEQ ID NO: 642710
cuucacccuaguauaaaga

SEQ ID NO: 642712 - RNA, 19 nt, Artificial Sequence
  Description of Artificial Sequence: Synthetic oligonucleotide
  Sense strand starting at position 2963 of SEQ ID NO: 585473
uuagaauggugucacagga

SEQ ID NO: 642713 - RNA, 19 nt, Artificial Sequence
  Description of Artificial Sequence: Synthetic oligonucleotide
  Antisense strand to SEQ ID NO: 642712
uccugugacaccauucuaa

SEQ ID NO: 642714 - RNA, 19 nt, Artificial Sequence
  Description of Artificial Sequence: Synthetic oligonucleotide
  Sense strand starting at position 3073 of SEQ ID NO: 585473
auggaauauugggcaucuu

SEQ ID NO: 642715 - RNA, 19 nt, Artificial Sequence
  Description of Artificial Sequence: Synthetic oligonucleotide
  Antisense strand to SEQ ID NO: 642714
aagaugcccaauauuccau

SEQ ID NO: 642716 - RNA, 19 nt, Artificial Sequence
  Description of Artificial Sequence: Synthetic oligonucleotide
  Sense strand starting at position 3131 of SEQ ID NO: 585473
ucuggaagaugucuaguuu

SEQ ID NO: 642717 - RNA, 19 nt, Artificial Sequence
  Description of Artificial Sequence: Synthetic oligonucleotide
  Antisense strand to SEQ ID NO: 642716
aaacuagacaucuuccaga

SEQ ID NO: 642718 - RNA, 19 nt, Artificial Sequence
  Description of Artificial Sequence: Synthetic oligonucleotide
  Sense strand starting at position 3247 of SEQ ID NO: 585473
cgacauacguuggccagua

SEQ ID NO: 642719 - RNA, 19 nt, Artificial Sequence
  Description of Artificial Sequence: Synthetic oligonucleotide
  Antisense strand to SEQ ID NO: 642718
uacuggccaacguaugucg

SEQ ID NO: 642720 - RNA, 19 nt, Artificial Sequence
  Description of Artificial Sequence: Synthetic oligonucleotide
  Sense strand starting at position 3432 of SEQ ID NO: 585473
cucagcaaggcuuaaugaa

SEQ ID NO: 642721 - RNA, 19 nt, Artificial Sequence
  Description of Artificial Sequence: Synthetic oligonucleotide
  Antisense strand to SEQ ID NO: 642720
uucauuaagccuugcugag

SEQ ID NO: 642722 - RNA, 19 nt, Artificial Sequence
  Description of Artificial Sequence: Synthetic oligonucleotide
  Sense strand starting at position 3562 of SEQ ID NO: 585473
ggcucugaagucugagacu

SEQ ID NO: 642723 - RNA, 19 nt, Artificial Sequence
  Description of Artificial Sequence: Synthetic oligonucleotide
  Antisense strand to SEQ ID NO: 642722
agucucagacuucagagcc

SEQ ID NO: 642724 - RNA, 19 nt, Artificial Sequence
  Description of Artificial Sequence: Synthetic oligonucleotide
  Sense strand starting at position 3565 of SEQ ID NO: 585473
ucugaagucugagacuuac

SEQ ID NO: 642725 - RNA, 19 nt, Artificial Sequence
  Description of Artificial Sequence: Synthetic oligonucleotide
  Antisense strand to SEQ ID NO: 642724
guaagucucagacuucaga

SEQ ID NO: 642726 - RNA, 19 nt, Artificial Sequence
  Description of Artificial Sequence: Synthetic oligonucleotide
  Sense strand starting at position 3576 of SEQ ID NO: 585473
agacuuacaucaggaauua

SEQ ID NO: 642727 - RNA, 19 nt, Artificial Sequence
  Description of Artificial Sequence: Synthetic oligonucleotide
  Antisense strand to SEQ ID NO: 642726
uaauuccugauguaagucu

SEQ ID NO: 642728 - RNA, 19 nt, Artificial Sequence
  Description of Artificial Sequence: Synthetic oligonucleotide
  Sense strand starting at position 69 of SEQ ID NO: 585474
augaaagaguucucuagau

SEQ ID NO: 642729 - RNA, 19 nt, Artificial Sequence
  Description of Artificial Sequence: Synthetic oligonucleotide
  Antisense strand to SEQ ID NO: 642728
aucuagagaacucuuucau

SEQ ID NO: 642730 - RNA, 19 nt, Artificial Sequence
  Description of Artificial Sequence: Synthetic oligonucleotide
  Sense strand starting at position 123 of SEQ ID NO: 585474
gccaaauauuuccaaggua

SEQ ID NO: 642731 - RNA, 19 nt, Artificial Sequence
  Description of Artificial Sequence: Synthetic oligonucleotide
  Antisense strand to SEQ ID NO: 642730
uaccuuggaaauauuuggc

SEQ ID NO: 642732 - RNA, 19 nt, Artificial Sequence
  Description of Artificial Sequence: Synthetic oligonucleotide
  Sense strand starting at position 331 of SEQ ID NO: 585474
uuacaauagcuagacugua

SEQ ID NO: 642733 - RNA, 19 nt, Artificial Sequence
  Description of Artificial Sequence: Synthetic oligonucleotide
  Antisense strand to SEQ ID NO: 642732
uacagucuagcuauuguaa

SEQ ID NO: 642734 - RNA, 19 nt, Artificial Sequence
  Description of Artificial Sequence: Synthetic oligonucleotide
  Sense strand starting at position 336 of SEQ ID NO: 585474
auagcuagacuguauuaaa

SEQ ID NO: 642735 - RNA, 19 nt, Artificial Sequence
  Description of Artificial Sequence: Synthetic oligonucleotide
  Antisense strand to SEQ ID NO: 642734
uuuaauacagucuagcuau

SEQ ID NO: 642736 - RNA, 19 nt, Artificial Sequence
  Description of Artificial Sequence: Synthetic oligonucleotide
  Sense strand starting at position 381 of SEQ ID NO: 585474
guacgacuaaaguguaaug

SEQ ID NO: 642737 - RNA, 19 nt, Artificial Sequence
  Description of Artificial Sequence: Synthetic oligonucleotide
  Antisense strand to SEQ ID NO: 642736
cauuacacuuuagucguac

SEQ ID NO: 642738 - RNA, 19 nt, Artificial Sequence
  Description of Artificial Sequence: Synthetic oligonucleotide
  Sense strand starting at position 383 of SEQ ID NO: 585474
acgacuaaaguguaaugua

SEQ ID NO: 642739 - RNA, 19 nt, Artificial Sequence
  Description of Artificial Sequence: Synthetic oligonucleotide
  Antisense strand to SEQ ID NO: 642738
uacauuacacuuuagucgu

SEQ ID NO: 642740 - RNA, 19 nt, Artificial Sequence
  Description of Artificial Sequence: Synthetic oligonucleotide
  Sense strand starting at position 391 of SEQ ID NO: 585474
aguguaauguaacuuaaga

SEQ ID NO: 642741 - RNA, 19 nt, Artificial Sequence
  Description of Artificial Sequence: Synthetic oligonucleotide
  Antisense strand to SEQ ID NO: 642740
ucuuaaguuacauuacacu

SEQ ID NO: 642742 - RNA, 19 nt, Artificial Sequence
  Description of Artificial Sequence: Synthetic oligonucleotide
  Sense strand starting at position 527 of SEQ ID NO: 585474
cugagccaugucuggagaa

SEQ ID NO: 642743 - RNA, 19 nt, Artificial Sequence
  Description of Artificial Sequence: Synthetic oligonucleotide
  Antisense strand to SEQ ID NO: 642742
uucuccagacauggcucag

SEQ ID NO: 642744 - RNA, 19 nt, Artificial Sequence
  Description of Artificial Sequence: Synthetic oligonucleotide
  Sense strand starting at position 557 of SEQ ID NO: 585474
uaaugaaguugaguauucu

SEQ ID NO: 642745 - RNA, 19 nt, Artificial Sequence
  Description of Artificial Sequence: Synthetic oligonucleotide
  Antisense strand to SEQ ID NO: 642744
agaauacucaacuucauua

SEQ ID NO: 642746 - RNA, 19 nt, Artificial Sequence
  Description of Artificial Sequence: Synthetic oligonucleotide
  Sense strand starting at position 725 of SEQ ID NO: 585474
ucuauaugugcagguagga

SEQ ID NO: 642747 - RNA, 19 nt, Artificial Sequence
  Description of Artificial Sequence: Synthetic oligonucleotide
  Antisense strand to SEQ ID NO: 642746
uccuaccugcacauauaga

SEQ ID NO: 642748 - RNA, 19 nt, Artificial Sequence
  Description of Artificial Sequence: Synthetic oligonucleotide
  Sense strand starting at position 769 of SEQ ID NO: 585474
auguuugucucucuuaaau

SEQ ID NO: 642749 - RNA, 19 nt, Artificial Sequence
  Description of Artificial Sequence: Synthetic oligonucleotide
  Antisense strand to SEQ ID NO: 642748
auuuaagagagacaaacau

SEQ ID NO: 642750 - RNA, 19 nt, Artificial Sequence
  Description of Artificial Sequence: Synthetic oligonucleotide
  Sense strand starting at position 916 of SEQ ID NO: 585474
aucaguuaccaaggaaguu

SEQ ID NO: 642751 - RNA, 19 nt, Artificial Sequence
  Description of Artificial Sequence: Synthetic oligonucleotide
  Antisense strand to SEQ ID NO: 642750
aacuuccuugguaacugau

SEQ ID NO: 642752 - RNA, 19 nt, Artificial Sequence
  Description of Artificial Sequence: Synthetic oligonucleotide
  Sense strand starting at position 1009 of SEQ ID NO: 585474
augauauacuaagcugauu

SEQ ID NO: 642753 - RNA, 19 nt, Artificial Sequence
  Description of Artificial Sequence: Synthetic oligonucleotide
  Antisense strand to SEQ ID NO: 642752
aaucagcuuaguauaucau

SEQ ID NO: 642754 - RNA, 19 nt, Artificial Sequence
  Description of Artificial Sequence: Synthetic oligonucleotide
  Sense strand starting at position 1053 of SEQ ID NO: 585474
aaaguuuaaugggcugaaa

SEQ ID NO: 642755 - RNA, 19 nt, Artificial Sequence
  Description of Artificial Sequence: Synthetic oligonucleotide
  Antisense strand to SEQ ID NO: 642754
uuucagcccauuaaacuuu

SEQ ID NO: 642756 - RNA, 19 nt, Artificial Sequence
  Description of Artificial Sequence: Synthetic oligonucleotide
  Sense strand starting at position 1055 of SEQ ID NO: 585474
aguuuaaugggcugaaaua

SEQ ID NO: 642757 - RNA, 19 nt, Artificial Sequence
  Description of Artificial Sequence: Synthetic oligonucleotide
  Antisense strand to SEQ ID NO: 642756
uauuucagcccauuaaacu

SEQ ID NO: 642758 - RNA, 19 nt, Artificial Sequence
  Description of Artificial Sequence: Synthetic oligonucleotide
  Sense strand starting at position 1193 of SEQ ID NO: 585474
cucuguugucaacagcaca

SEQ ID NO: 642759 - RNA, 19 nt, Artificial Sequence
  Description of Artificial Sequence: Synthetic oligonucleotide
  Antisense strand to SEQ ID NO: 642758
ugugcuguugacaacagag

SEQ ID NO: 642760 - RNA, 19 nt, Artificial Sequence
  Description of Artificial Sequence: Synthetic oligonucleotide
  Sense strand starting at position 1285 of SEQ ID NO: 585474
gcagaacaguucuccauug

SEQ ID NO: 642761 - RNA, 19 nt, Artificial Sequence
  Description of Artificial Sequence: Synthetic oligonucleotide
  Antisense strand to SEQ ID NO: 642760
caauggagaacuguucugc

SEQ ID NO: 642762 - RNA, 19 nt, Artificial Sequence
  Description of Artificial Sequence: Synthetic oligonucleotide
  Sense strand starting at position 1290 of SEQ ID NO: 585474
acaguucuccauuguuuac

SEQ ID NO: 642763 - RNA, 19 nt, Artificial Sequence
  Description of Artificial Sequence: Synthetic oligonucleotide
  Antisense strand to SEQ ID NO: 642762
guaaacaauggagaacugu

SEQ ID NO: 642764 - RNA, 19 nt, Artificial Sequence
  Description of Artificial Sequence: Synthetic oligonucleotide
  Sense strand starting at position 1509 of SEQ ID NO: 585474
guccaucaaggcugucaga

SEQ ID NO: 642765 - RNA, 19 nt, Artificial Sequence
  Description of Artificial Sequence: Synthetic oligonucleotide
  Antisense strand to SEQ ID NO: 642764
ucugacagccuugauggac

SEQ ID NO: 642766 - RNA, 19 nt, Artificial Sequence
  Description of Artificial Sequence: Synthetic oligonucleotide
  Sense strand starting at position 1621 of SEQ ID NO: 585474
caaagaaaugucugcagga

SEQ ID NO: 642767 - RNA, 19 nt, Artificial Sequence
  Description of Artificial Sequence: Synthetic oligonucleotide
  Antisense strand to SEQ ID NO: 642766
uccugcagacauuucuuug

SEQ ID NO: 642768 - RNA, 19 nt, Artificial Sequence
  Description of Artificial Sequence: Synthetic oligonucleotide
  Sense strand starting at position 1622 of SEQ ID NO: 585474
aaagaaaugucugcaggac

SEQ ID NO: 642769 - RNA, 19 nt, Artificial Sequence
  Description of Artificial Sequence: Synthetic oligonucleotide
  Antisense strand to SEQ ID NO: 642768
guccugcagacauuucuuu

SEQ ID NO: 642770 - RNA, 19 nt, Artificial Sequence
  Description of Artificial Sequence: Synthetic oligonucleotide
  Sense strand starting at position 2069 of SEQ ID NO: 585474
cuaccaaucgccucgcgau

SEQ ID NO: 642771 - RNA, 19 nt, Artificial Sequence
  Description of Artificial Sequence: Synthetic oligonucleotide
  Antisense strand to SEQ ID NO: 642770
aucgcgaggcgauugguag

SEQ ID NO: 642772 - RNA, 19 nt, Artificial Sequence
  Description of Artificial Sequence: Synthetic oligonucleotide
  Sense strand starting at position 2071 of SEQ ID NO: 585474
accaaucgccucgcgauau

SEQ ID NO: 642773 - RNA, 19 nt, Artificial Sequence
  Description of Artificial Sequence: Synthetic oligonucleotide
  Antisense strand to SEQ ID NO: 642772
auaucgcgaggcgauuggu

SEQ ID NO: 642774 - RNA, 19 nt, Artificial Sequence
  Description of Artificial Sequence: Synthetic oligonucleotide
  Sense strand starting at position 2114 of SEQ ID NO: 585474
acgaauucucgcgagaguc

SEQ ID NO: 642775 - RNA, 19 nt, Artificial Sequence
  Description of Artificial Sequence: Synthetic oligonucleotide
  Antisense strand to SEQ ID NO: 642774
gacucucgcgagaauucgu

SEQ ID NO: 642776 - RNA, 19 nt, Artificial Sequence
  Description of Artificial Sequence: Synthetic oligonucleotide
  Sense strand starting at position 2115 of SEQ ID NO: 585474
cgaauucucgcgagagucc

SEQ ID NO: 642777 - RNA, 19 nt, Artificial Sequence
  Description of Artificial Sequence: Synthetic oligonucleotide
  Antisense strand to SEQ ID NO: 642776
ggacucucgcgagaauucg

SEQ ID NO: 642778 - RNA, 19 nt, Artificial Sequence
  Description of Artificial Sequence: Synthetic oligonucleotide
  Sense strand starting at position 2526 of SEQ ID NO: 585474
cuaauugacguuuauaggu

SEQ ID NO: 642779 - RNA, 19 nt, Artificial Sequence
  Description of Artificial Sequence: Synthetic oligonucleotide
  Antisense strand to SEQ ID NO: 642778
accuauaaacgucaauuag

SEQ ID NO: 642780 - RNA, 19 nt, Artificial Sequence
  Description of Artificial Sequence: Synthetic oligonucleotide
  Sense strand starting at position 2531 of SEQ ID NO: 585474
ugacguuuauaggugacca

SEQ ID NO: 642781 - RNA, 19 nt, Artificial Sequence
  Description of Artificial Sequence: Synthetic oligonucleotide
  Antisense strand to SEQ ID NO: 642780
uggucaccuauaaacguca

SEQ ID NO: 642782 - RNA, 19 nt, Artificial Sequence
  Description of Artificial Sequence: Synthetic oligonucleotide
  Sense strand starting at position 2532 of SEQ ID NO: 585474
gacguuuauaggugaccaa

SEQ ID NO: 642783 - RNA, 19 nt, Artificial Sequence
  Description of Artificial Sequence: Synthetic oligonucleotide
  Antisense strand to SEQ ID NO: 642782
uuggucaccuauaaacguc

SEQ ID NO: 642784 - RNA, 19 nt, Artificial Sequence
  Description of Artificial Sequence: Synthetic oligonucleotide
  Sense strand starting at position 2576 of SEQ ID NO: 585474
cugucaagugcacaugaaa

SEQ ID NO: 642785 - RNA, 19 nt, Artificial Sequence
  Description of Artificial Sequence: Synthetic oligonucleotide
  Antisense strand to SEQ ID NO: 642784
uuucaugugcacuugacag

SEQ ID NO: 642786 - RNA, 19 nt, Artificial Sequence
  Description of Artificial Sequence: Synthetic oligonucleotide
  Sense strand starting at position 2652 of SEQ ID NO: 585474
agauuuaaaucguacaaag

SEQ ID NO: 642787 - RNA, 19 nt, Artificial Sequence
  Description of Artificial Sequence: Synthetic oligonucleotide
  Antisense strand to SEQ ID NO: 642786
cuuuguacgauuuaaaucu

SEQ ID NO: 642788 - RNA, 19 nt, Artificial Sequence
  Description of Artificial Sequence: Synthetic oligonucleotide
  Sense strand starting at position 2666 of SEQ ID NO: 585474
caaaguguauagucugauc

SEQ ID NO: 642789 - RNA, 19 nt, Artificial Sequence
  Description of Artificial Sequence: Synthetic oligonucleotide
  Antisense strand to SEQ ID NO: 642788
gaucagacuauacacuuug

SEQ ID NO: 642790 - RNA, 19 nt, Artificial Sequence
  Description of Artificial Sequence: Synthetic oligonucleotide
  Sense strand starting at position 2668 of SEQ ID NO: 585474
aaguguauagucugaucau

SEQ ID NO: 642791 - RNA, 19 nt, Artificial Sequence
  Description of Artificial Sequence: Synthetic oligonucleotide
  Antisense strand to SEQ ID NO: 642790
augaucagacuauacacuu

SEQ ID NO: 642792 - RNA, 19 nt, Artificial Sequence
  Description of Artificial Sequence: Synthetic oligonucleotide
  Sense strand starting at position 2671 of SEQ ID NO: 585474
uguauagucugaucauaau

SEQ ID NO: 642793 - RNA, 19 nt, Artificial Sequence
  Description of Artificial Sequence: Synthetic oligonucleotide
  Antisense strand to SEQ ID NO: 642792
auuaugaucagacuauaca

SEQ ID NO: 642794 - RNA, 19 nt, Artificial Sequence
  Description of Artificial Sequence: Synthetic oligonucleotide
  Sense strand starting at position 2843 of SEQ ID NO: 585474
acaguaccugcuuacauua

SEQ ID NO: 642795 - RNA, 19 nt, Artificial Sequence
  Description of Artificial Sequence: Synthetic oligonucleotide
  Antisense strand to SEQ ID NO: 642794
uaauguaagcagguacugu

SEQ ID NO: 642796 - RNA, 19 nt, Artificial Sequence
  Description of Artificial Sequence: Synthetic oligonucleotide
  Sense strand starting at position 2890 of SEQ ID NO: 585474
ugucuuaaguaacuagaaa

SEQ ID NO: 642797 - RNA, 19 nt, Artificial Sequence
  Description of Artificial Sequence: Synthetic oligonucleotide
  Antisense strand to SEQ ID NO: 642796
uuucuaguuacuuaagaca

SEQ ID NO: 642798 - RNA, 19 nt, Artificial Sequence
  Description of Artificial Sequence: Synthetic oligonucleotide
  Sense strand starting at position 3406 of SEQ ID NO: 585474
guagguggaucccuugaga

SEQ ID NO: 642799 - RNA, 19 nt, Artificial Sequence
  Description of Artificial Sequence: Synthetic oligonucleotide
  Antisense strand to SEQ ID NO: 642798
ucucaagggauccaccuac

SEQ ID NO: 642800 - RNA, 19 nt, Artificial Sequence
  Description of Artificial Sequence: Synthetic oligonucleotide
  Sense strand starting at position 3465 of SEQ ID NO: 585474
ugucccuugucuccacaaa

SEQ ID NO: 642801 - RNA, 19 nt, Artificial Sequence
  Description of Artificial Sequence: Synthetic oligonucleotide
  Antisense strand to SEQ ID NO: 642800
uuuguggagacaagggaca

SEQ ID NO: 642802 - RNA, 19 nt, Artificial Sequence
  Description of Artificial Sequence: Synthetic oligonucleotide
  Sense strand starting at position 3678 of SEQ ID NO: 585474
gccaaauggccuuacuauu

SEQ ID NO: 642803 - RNA, 19 nt, Artificial Sequence
  Description of Artificial Sequence: Synthetic oligonucleotide
  Antisense strand to SEQ ID NO: 642802
aauaguaaggccauuuggc

SEQ ID NO: 642804 - RNA, 19 nt, Artificial Sequence
  Description of Artificial Sequence: Synthetic oligonucleotide
  Sense strand starting at position 3799 of SEQ ID NO: 585474
gguaucgaaaccugacaaa

SEQ ID NO: 642805 - RNA, 19 nt, Artificial Sequence
  Description of Artificial Sequence: Synthetic oligonucleotide
  Antisense strand to SEQ ID NO: 642804
uuugucagguuucgauacc

SEQ ID NO: 642806 - RNA, 19 nt, Artificial Sequence
  Description of Artificial Sequence: Synthetic oligonucleotide
  Sense strand starting at position 3855 of SEQ ID NO: 585474
gcagaaauguuagcaagca

SEQ ID NO: 642807 - RNA, 19 nt, Artificial Sequence
  Description of Artificial Sequence: Synthetic oligonucleotide
  Antisense strand to SEQ ID NO: 642806
ugcuugcuaacauuucugc

SEQ ID NO: 642808 - RNA, 19 nt, Artificial Sequence
  Description of Artificial Sequence: Synthetic oligonucleotide
  Sense strand starting at position 70 of SEQ ID NO: 585475
ugcugaagauaauccuaau

SEQ ID NO: 642809 - RNA, 19 nt, Artificial Sequence
  Description of Artificial Sequence: Synthetic oligonucleotide
  Antisense strand to SEQ ID NO: 642808
auuaggauuaucuucagca

SEQ ID NO: 642810 - RNA, 19 nt, Artificial Sequence
  Description of Artificial Sequence: Synthetic oligonucleotide
  Sense strand starting at position 175 of SEQ ID NO: 585475
aguggcagcauggauaaua

SEQ ID NO: 642811 - RNA, 19 nt, Artificial Sequence
  Description of Artificial Sequence: Synthetic oligonucleotide
  Antisense strand to SEQ ID NO: 642810
uauuauccaugcugccacu

SEQ ID NO: 642812 - RNA, 19 nt, Artificial Sequence
  Description of Artificial Sequence: Synthetic oligonucleotide
  Sense strand starting at position 245 of SEQ ID NO: 585475
guucuaaguauauacguua

SEQ ID NO: 642813 - RNA, 19 nt, Artificial Sequence
  Description of Artificial Sequence: Synthetic oligonucleotide
  Antisense strand to SEQ ID NO: 642812
uaacguauauacuuagaac

SEQ ID NO: 642814 - RNA, 19 nt, Artificial Sequence
  Description of Artificial Sequence: Synthetic oligonucleotide
  Sense strand starting at position 248 of SEQ ID NO: 585475
cuaaguauauacguuaaca

SEQ ID NO: 642815 - RNA, 19 nt, Artificial Sequence
  Description of Artificial Sequence: Synthetic oligonucleotide
  Antisense strand to SEQ ID NO: 642814
uguuaacguauauacuuag

SEQ ID NO: 642816 - RNA, 19 nt, Artificial Sequence
  Description of Artificial Sequence: Synthetic oligonucleotide
  Sense strand starting at position 288 of SEQ ID NO: 585475
ugugacauccuaugaagua

SEQ ID NO: 642817 - RNA, 19 nt, Artificial Sequence
  Description of Artificial Sequence: Synthetic oligonucleotide
  Antisense strand to SEQ ID NO: 642816
uacuucauaggaugucaca

SEQ ID NO: 642818 - RNA, 19 nt, Artificial Sequence
  Description of Artificial Sequence: Synthetic oligonucleotide
  Sense strand starting at position 318 of SEQ ID NO: 585475
ucuuacuuugcagaugaga

SEQ ID NO: 642819 - RNA, 19 nt, Artificial Sequence
  Description of Artificial Sequence: Synthetic oligonucleotide
  Antisense strand to SEQ ID NO: 642818
ucucaucugcaaaguaaga

SEQ ID NO: 642820 - RNA, 19 nt, Artificial Sequence
  Description of Artificial Sequence: Synthetic oligonucleotide
  Sense strand starting at position 362 of SEQ ID NO: 585475
cuuggugaaucccuaauaa

SEQ ID NO: 642821 - RNA, 19 nt, Artificial Sequence
  Description of Artificial Sequence: Synthetic oligonucleotide
  Antisense strand to SEQ ID NO: 642820
uuauuagggauucaccaag

SEQ ID NO: 642822 - RNA, 19 nt, Artificial Sequence
  Description of Artificial Sequence: Synthetic oligonucleotide
  Sense strand starting at position 613 of SEQ ID NO: 585475
aggacuaaaugcuuccaca

SEQ ID NO: 642823 - RNA, 19 nt, Artificial Sequence
  Description of Artificial Sequence: Synthetic oligonucleotide
  Antisense strand to SEQ ID NO: 642822
uguggaagcauuuaguccu

SEQ ID NO: 642824 - RNA, 19 nt, Artificial Sequence
  Description of Artificial Sequence: Synthetic oligonucleotide
  Sense strand starting at position 629 of SEQ ID NO: 585475
acaugugagucacucaaca

SEQ ID NO: 642825 - RNA, 19 nt, Artificial Sequence
  Description of Artificial Sequence: Synthetic oligonucleotide
  Antisense strand to SEQ ID NO: 642824
uguugagugacucacaugu

SEQ ID NO: 642826 - RNA, 19 nt, Artificial Sequence
  Description of Artificial Sequence: Synthetic oligonucleotide
  Sense strand starting at position 775 of SEQ ID NO: 585475
auguucagaguuugaggau

SEQ ID NO: 642827 - RNA, 19 nt, Artificial Sequence
  Description of Artificial Sequence: Synthetic oligonucleotide
  Antisense strand to SEQ ID NO: 642826
auccucaaacucugaacau

SEQ ID NO: 642828 - RNA, 19 nt, Artificial Sequence
  Description of Artificial Sequence: Synthetic oligonucleotide
  Sense strand starting at position 876 of SEQ ID NO: 585475
gcggaagucauugagcaau

SEQ ID NO: 642829 - RNA, 19 nt, Artificial Sequence
  Description of Artificial Sequence: Synthetic oligonucleotide
  Antisense strand to SEQ ID NO: 642828
auugcucaaugacuuccgc

SEQ ID NO: 642830 - RNA, 19 nt, Artificial Sequence
  Description of Artificial Sequence: Synthetic oligonucleotide
  Sense strand starting at position 878 of SEQ ID NO: 585475
ggaagucauugagcaauau

SEQ ID NO: 642831 - RNA, 19 nt, Artificial Sequence
  Description of Artificial Sequence: Synthetic oligonucleotide
  Antisense strand to SEQ ID NO: 642830
auauugcucaaugacuucc

SEQ ID NO: 642832 - RNA, 19 nt, Artificial Sequence
  Description of Artificial Sequence: Synthetic oligonucleotide
  Sense strand starting at position 1184 of SEQ ID NO: 585475
ccuguucugcucuaggaua

SEQ ID NO: 642833 - RNA, 19 nt, Artificial Sequence
  Description of Artificial Sequence: Synthetic oligonucleotide
  Antisense strand to SEQ ID NO: 642832
uauccuagagcagaacagg

SEQ ID NO: 642834 - RNA, 19 nt, Artificial Sequence
  Description of Artificial Sequence: Synthetic oligonucleotide
  Sense strand starting at position 1313 of SEQ ID NO: 585475
auguuuagucagucgcacu

SEQ ID NO: 642835 - RNA, 19 nt, Artificial Sequence
  Description of Artificial Sequence: Synthetic oligonucleotide
  Antisense strand to SEQ ID NO: 642834
agugcgacugacuaaacau

SEQ ID NO: 642836 - RNA, 19 nt, Artificial Sequence
  Description of Artificial Sequence: Synthetic oligonucleotide
  Sense strand starting at position 1475 of SEQ ID NO: 585475
ccgaauuucuggccaagcu

SEQ ID NO: 642837 - RNA, 19 nt, Artificial Sequence
  Description of Artificial Sequence: Synthetic oligonucleotide
  Antisense strand to SEQ ID NO: 642836
agcuuggccagaaauucgg

SEQ ID NO: 642838 - RNA, 19 nt, Artificial Sequence
  Description of Artificial Sequence: Synthetic oligonucleotide
  Sense strand starting at position 2144 of SEQ ID NO: 585475
gauuuaggucgugguguga

SEQ ID NO: 642839 - RNA, 19 nt, Artificial Sequence
  Description of Artificial Sequence: Synthetic oligonucleotide
  Antisense strand to SEQ ID NO: 642838
ucacaccacgaccuaaauc

SEQ ID NO: 642840 - RNA, 19 nt, Artificial Sequence
  Description of Artificial Sequence: Synthetic oligonucleotide
  Sense strand starting at position 2235 of SEQ ID NO: 585475
guaaacugcgguuaucaaa

SEQ ID NO: 642841 - RNA, 19 nt, Artificial Sequence
  Description of Artificial Sequence: Synthetic oligonucleotide
  Antisense strand to SEQ ID NO: 642840
uuugauaaccgcaguuuac

SEQ ID NO: 642842 - RNA, 19 nt, Artificial Sequence
  Description of Artificial Sequence: Synthetic oligonucleotide
  Sense strand starting at position 2243 of SEQ ID NO: 585475
cgguuaucaaaguaaguaa

SEQ ID NO: 642843 - RNA, 19 nt, Artificial Sequence
  Description of Artificial Sequence: Synthetic oligonucleotide
  Antisense strand to SEQ ID NO: 642842
uuacuuacuuugauaaccg

SEQ ID NO: 642844 - RNA, 19 nt, Artificial Sequence
  Description of Artificial Sequence: Synthetic oligonucleotide
  Sense strand starting at position 2300 of SEQ ID NO: 585475
ucagaaguccgugaaauau

SEQ ID NO: 642845 - RNA, 19 nt, Artificial Sequence
  Description of Artificial Sequence: Synthetic oligonucleotide
  Antisense strand to SEQ ID NO: 642844
auauuucacggacuucuga

SEQ ID NO: 642846 - RNA, 19 nt, Artificial Sequence
  Description of Artificial Sequence: Synthetic oligonucleotide
  Sense strand starting at position 2593 of SEQ ID NO: 585475
guaugaauagaauguccuu

SEQ ID NO: 642847 - RNA, 19 nt, Artificial Sequence
  Description of Artificial Sequence: Synthetic oligonucleotide
  Antisense strand to SEQ ID NO: 642846
aaggacauucuauucauac

SEQ ID NO: 642848 - RNA, 19 nt, Artificial Sequence
  Description of Artificial Sequence: Synthetic oligonucleotide
  Sense strand starting at position 2698 of SEQ ID NO: 585475
aucugcuuucuacagucau

SEQ ID NO: 642849 - RNA, 19 nt, Artificial Sequence
  Description of Artificial Sequence: Synthetic oligonucleotide
  Antisense strand to SEQ ID NO: 642848
augacuguagaaagcagau

SEQ ID NO: 642850 - RNA, 19 nt, Artificial Sequence
  Description of Artificial Sequence: Synthetic oligonucleotide
  Sense strand starting at position 2947 of SEQ ID NO: 585475
gugggaauauagcuccuga

SEQ ID NO: 642851 - RNA, 19 nt, Artificial Sequence
  Description of Artificial Sequence: Synthetic oligonucleotide
  Antisense strand to SEQ ID NO: 642850
ucaggagcuauauucccac

SEQ ID NO: 642852 - RNA, 19 nt, Artificial Sequence
  Description of Artificial Sequence: Synthetic oligonucleotide
  Sense strand starting at position 2958 of SEQ ID NO: 585475
gcuccugaucuugaagaau

SEQ ID NO: 642853 - RNA, 19 nt, Artificial Sequence
  Description of Artificial Sequence: Synthetic oligonucleotide
  Antisense strand to SEQ ID NO: 642852
auucuucaagaucaggagc

SEQ ID NO: 642854 - RNA, 19 nt, Artificial Sequence
  Description of Artificial Sequence: Synthetic oligonucleotide
  Sense strand starting at position 3147 of SEQ ID NO: 585475
uguguuugaaacugaugag

SEQ ID NO: 642855 - RNA, 19 nt, Artificial Sequence
  Description of Artificial Sequence: Synthetic oligonucleotide
  Antisense strand to SEQ ID NO: 642854
cucaucaguuucaaacaca

SEQ ID NO: 642856 - RNA, 19 nt, Artificial Sequence
  Description of Artificial Sequence: Synthetic oligonucleotide
  Sense strand starting at position 3166 of SEQ ID NO: 585475
acaaguaugccagaggucu

SEQ ID NO: 642857 - RNA, 19 nt, Artificial Sequence
  Description of Artificial Sequence: Synthetic oligonucleotide
  Antisense strand to SEQ ID NO: 642856
agaccucuggcauacuugu

SEQ ID NO: 642858 - RNA, 19 nt, Artificial Sequence
  Description of Artificial Sequence: Synthetic oligonucleotide
  Sense strand starting at position 3239 of SEQ ID NO: 585475
aaguuuagauaugucugga

SEQ ID NO: 642859 - RNA, 19 nt, Artificial Sequence
  Description of Artificial Sequence: Synthetic oligonucleotide
  Antisense strand to SEQ ID NO: 642858
uccagacauaucuaaacuu

SEQ ID NO: 642860 - RNA, 19 nt, Artificial Sequence
  Description of Artificial Sequence: Synthetic oligonucleotide
  Sense strand starting at position 3315 of SEQ ID NO: 585475
auguaugaggcuugaagag

SEQ ID NO: 642861 - RNA, 19 nt, Artificial Sequence
  Description of Artificial Sequence: Synthetic oligonucleotide
  Antisense strand to SEQ ID NO: 642860
cucuucaagccucauacau

SEQ ID NO: 642862 - RNA, 19 nt, Artificial Sequence
  Description of Artificial Sequence: Synthetic oligonucleotide
  Sense strand starting at position 3408 of SEQ ID NO: 585475
cuuggagccucucuagauu

SEQ ID NO: 642863 - RNA, 19 nt, Artificial Sequence
  Description of Artificial Sequence: Synthetic oligonucleotide
  Antisense strand to SEQ ID NO: 642862
aaucuagagaggcuccaag

SEQ ID NO: 642864 - RNA, 19 nt, Artificial Sequence
  Description of Artificial Sequence: Synthetic oligonucleotide
  Sense strand starting at position 3438 of SEQ ID NO: 585475
auacaaguuguaugugauc

SEQ ID NO: 642865 - RNA, 19 nt, Artificial Sequence
  Description of Artificial Sequence: Synthetic oligonucleotide
  Antisense strand to SEQ ID NO: 642864
gaucacauacaacuuguau

SEQ ID NO: 642866 - RNA, 19 nt, Artificial Sequence
  Description of Artificial Sequence: Synthetic oligonucleotide
  Sense strand starting at position 3440 of SEQ ID NO: 585475
acaaguuguaugugaucau

SEQ ID NO: 642867 - RNA, 19 nt, Artificial Sequence
  Description of Artificial Sequence: Synthetic oligonucleotide
  Antisense strand to SEQ ID NO: 642866
augaucacauacaacuugu

SEQ ID NO: 642868 - RNA, 19 nt, Artificial Sequence
  Description of Artificial Sequence: Synthetic oligonucleotide
  Sense strand starting at position 3533 of SEQ ID NO: 585475
cuguuugaaggcugaaauc

SEQ ID NO: 642869 - RNA, 19 nt, Artificial Sequence
  Description of Artificial Sequence: Synthetic oligonucleotide
  Antisense strand to SEQ ID NO: 642868
gauuucagccuucaaacag

SEQ ID NO: 642870 - RNA, 19 nt, Artificial Sequence
  Description of Artificial Sequence: Synthetic oligonucleotide
  Sense strand starting at position 3699 of SEQ ID NO: 585475
uauggugauuaagugucau

SEQ ID NO: 642871 - RNA, 19 nt, Artificial Sequence
  Description of Artificial Sequence: Synthetic oligonucleotide
  Antisense strand to SEQ ID NO: 642870
augacacuuaaucaccaua

SEQ ID NO: 642872 - RNA, 19 nt, Artificial Sequence
  Description of Artificial Sequence: Synthetic oligonucleotide
  Sense strand starting at position 3732 of SEQ ID NO: 585475
cugcuaauggcugggaaua

SEQ ID NO: 642873 - RNA, 19 nt, Artificial Sequence
  Description of Artificial Sequence: Synthetic oligonucleotide
  Antisense strand to SEQ ID NO: 642872
uauucccagccauuagcag

SEQ ID NO: 642874 - RNA, 19 nt, Artificial Sequence
  Description of Artificial Sequence: Synthetic oligonucleotide
  Sense strand starting at position 3733 of SEQ ID NO: 585475
ugcuaauggcugggaauaa

SEQ ID NO: 642875 - RNA, 19 nt, Artificial Sequence
  Description of Artificial Sequence: Synthetic oligonucleotide
  Antisense strand to SEQ ID NO: 642874
uuauucccagccauuagca

SEQ ID NO: 642876 - RNA, 19 nt, Artificial Sequence
  Description of Artificial Sequence: Synthetic oligonucleotide
  Sense strand starting at position 3795 of SEQ ID NO: 585475
gugacaaguccauggauug

SEQ ID NO: 642877 - RNA, 19 nt, Artificial Sequence
  Description of Artificial Sequence: Synthetic oligonucleotide
  Antisense strand to SEQ ID NO: 642876
caauccauggacuugucac

SEQ ID NO: 642878 - RNA, 19 nt, Artificial Sequence
  Description of Artificial Sequence: Synthetic oligonucleotide
  Sense strand starting at position 3796 of SEQ ID NO: 585475
ugacaaguccauggauuga

SEQ ID NO: 642879 - RNA, 19 nt, Artificial Sequence
  Description of Artificial Sequence: Synthetic oligonucleotide
  Antisense strand to SEQ ID NO: 642878
ucaauccauggacuuguca

SEQ ID NO: 642880 - RNA, 19 nt, Artificial Sequence
  Description of Artificial Sequence: Synthetic oligonucleotide
  Sense strand starting at position 3807 of SEQ ID NO: 585475
uggauugauuuggaggguu

SEQ ID NO: 642881 - RNA, 19 nt, Artificial Sequence
  Description of Artificial Sequence: Synthetic oligonucleotide
  Antisense strand to SEQ ID NO: 642880
aacccuccaaaucaaucca

SEQ ID NO: 642882 - RNA, 19 nt, Artificial Sequence
  Description of Artificial Sequence: Synthetic oligonucleotide
  Sense strand starting at position 3835 of SEQ ID NO: 585475
ccugaacuugaaugcauaa

SEQ ID NO: 642883 - RNA, 19 nt, Artificial Sequence
  Description of Artificial Sequence: Synthetic oligonucleotide
  Antisense strand to SEQ ID NO: 642882
uuaugcauucaaguucagg

SEQ ID NO: 642884 - RNA, 19 nt, Artificial Sequence
  Description of Artificial Sequence: Synthetic oligonucleotide
  Sense strand starting at position 3888 of SEQ ID NO: 585475
uuugucacaugcucaaaga

SEQ ID NO: 642885 - RNA, 19 nt, Artificial Sequence
  Description of Artificial Sequence: Synthetic oligonucleotide
  Antisense strand to SEQ ID NO: 642884
ucuuugagcaugugacaaa

SEQ ID NO: 642886 - RNA, 19 nt, Artificial Sequence
  Description of Artificial Sequence: Synthetic oligonucleotide
  Sense strand starting at position 3914 of SEQ ID NO: 585475
ggaacauacuguccuagaa

SEQ ID NO: 642887 - RNA, 19 nt, Artificial Sequence
  Description of Artificial Sequence: Synthetic oligonucleotide
  Antisense strand to SEQ ID NO: 642886
uucuaggacaguauguucc

SEQ ID NO: 642888 - RNA, 19 nt, Artificial Sequence
  Description of Artificial Sequence: Synthetic oligonucleotide
  Sense strand starting at position 119 of SEQ ID NO: 585476
gcaguacugaccugaggga

SEQ ID NO: 642889 - RNA, 19 nt, Artificial Sequence
  Description of Artificial Sequence: Synthetic oligonucleotide
  Antisense strand to SEQ ID NO: 642888
ucccucaggucaguacugc

SEQ ID NO: 642890 - RNA, 19 nt, Artificial Sequence
  Description of Artificial Sequence: Synthetic oligonucleotide
  Sense strand starting at position 397 of SEQ ID NO: 585476
auggguuagagaugaagua

SEQ ID NO: 642891 - RNA, 19 nt, Artificial Sequence
  Description of Artificial Sequence: Synthetic oligonucleotide
  Antisense strand to SEQ ID NO: 642890
uacuucaucucuaacccau

SEQ ID NO: 642892 - RNA, 19 nt, Artificial Sequence
  Description of Artificial Sequence: Synthetic oligonucleotide
  Sense strand starting at position 681 of SEQ ID NO: 585476
cuuguucauggugagguau

SEQ ID NO: 642893 - RNA, 19 nt, Artificial Sequence
  Description of Artificial Sequence: Synthetic oligonucleotide
  Antisense strand to SEQ ID NO: 642892
auaccucaccaugaacaag

SEQ ID NO: 642894 - RNA, 19 nt, Artificial Sequence
  Description of Artificial Sequence: Synthetic oligonucleotide
  Sense strand starting at position 784 of SEQ ID NO: 585476
uaagguuugggucaagauc

SEQ ID NO: 642895 - RNA, 19 nt, Artificial Sequence
  Description of Artificial Sequence: Synthetic oligonucleotide
  Antisense strand to SEQ ID NO: 642894
gaucuugacccaaaccuua

SEQ ID NO: 642896 - RNA, 19 nt, Artificial Sequence
  Description of Artificial Sequence: Synthetic oligonucleotide
  Sense strand starting at position 791 of SEQ ID NO: 585476
ugggucaagaucuguuaga

SEQ ID NO: 642897 - RNA, 19 nt, Artificial Sequence
  Description of Artificial Sequence: Synthetic oligonucleotide
  Antisense strand to SEQ ID NO: 642896
ucuaacagaucuugaccca

SEQ ID NO: 642898 - RNA, 19 nt, Artificial Sequence
  Description of Artificial Sequence: Synthetic oligonucleotide
  Sense strand starting at position 792 of SEQ ID NO: 585476
gggucaagaucuguuagag

SEQ ID NO: 642899 - RNA, 19 nt, Artificial Sequence
  Description of Artificial Sequence: Synthetic oligonucleotide
  Antisense strand to SEQ ID NO: 642898
cucuaacagaucuugaccc

SEQ ID NO: 642900 - RNA, 19 nt, Artificial Sequence
  Description of Artificial Sequence: Synthetic oligonucleotide
  Sense strand starting at position 808 of SEQ ID NO: 585476
gagagucaugaaggcaaau

SEQ ID NO: 642901 - RNA, 19 nt, Artificial Sequence
  Description of Artificial Sequence: Synthetic oligonucleotide
  Antisense strand to SEQ ID NO: 642900
auuugccuucaugacucuc

SEQ ID NO: 642902 - RNA, 19 nt, Artificial Sequence
  Description of Artificial Sequence: Synthetic oligonucleotide
  Sense strand starting at position 841 of SEQ ID NO: 585476
cagaaccaguccuuugaga

SEQ ID NO: 642903 - RNA, 19 nt, Artificial Sequence
  Description of Artificial Sequence: Synthetic oligonucleotide
  Antisense strand to SEQ ID NO: 642902
ucucaaaggacugguucug

SEQ ID NO: 642904 - RNA, 19 nt, Artificial Sequence
  Description of Artificial Sequence: Synthetic oligonucleotide
  Sense strand starting at position 843 of SEQ ID NO: 585476
gaaccaguccuuugagacu

SEQ ID NO: 642905 - RNA, 19 nt, Artificial Sequence
  Description of Artificial Sequence: Synthetic oligonucleotide
  Antisense strand to SEQ ID NO: 642904
agucucaaaggacugguuc

SEQ ID NO: 642906 - RNA, 19 nt, Artificial Sequence
  Description of Artificial Sequence: Synthetic oligonucleotide
  Sense strand starting at position 849 of SEQ ID NO: 585476
guccuuugagacugaagag

SEQ ID NO: 642907 - RNA, 19 nt, Artificial Sequence
  Description of Artificial Sequence: Synthetic oligonucleotide
  Antisense strand to SEQ ID NO: 642906
cucuucagucucaaaggac

SEQ ID NO: 642908 - RNA, 19 nt, Artificial Sequence
  Description of Artificial Sequence: Synthetic oligonucleotide
  Sense strand starting at position 885 of SEQ ID NO: 585476
gaauguaaagcauauagua

SEQ ID NO: 642909 - RNA, 19 nt, Artificial Sequence
  Description of Artificial Sequence: Synthetic oligonucleotide
  Antisense strand to SEQ ID NO: 642908
uacuauaugcuuuacauuc

SEQ ID NO: 642910 - RNA, 19 nt, Artificial Sequence
  Description of Artificial Sequence: Synthetic oligonucleotide
  Sense strand starting at position 946 of SEQ ID NO: 585476
uuuauugggccaugaagua

SEQ ID NO: 642911 - RNA, 19 nt, Artificial Sequence
  Description of Artificial Sequence: Synthetic oligonucleotide
  Antisense strand to SEQ ID NO: 642910
uacuucauggcccaauaaa

SEQ ID NO: 642912 - RNA, 19 nt, Artificial Sequence
  Description of Artificial Sequence: Synthetic oligonucleotide
  Sense strand starting at position 966 of SEQ ID NO: 585476
cuuuauuucuuaucgugag

SEQ ID NO: 642913 - RNA, 19 nt, Artificial Sequence
  Description of Artificial Sequence: Synthetic oligonucleotide
  Antisense strand to SEQ ID NO: 642912
cucacgauaagaaauaaag

SEQ ID NO: 642914 - RNA, 19 nt, Artificial Sequence
  Description of Artificial Sequence: Synthetic oligonucleotide
  Sense strand starting at position 976 of SEQ ID NO: 585476
uaucgugagguauagugaa

SEQ ID NO: 642915 - RNA, 19 nt, Artificial Sequence
  Description of Artificial Sequence: Synthetic oligonucleotide
  Antisense strand to SEQ ID NO: 642914
uucacuauaccucacgaua

SEQ ID NO: 642916 - RNA, 19 nt, Artificial Sequence
  Description of Artificial Sequence: Synthetic oligonucleotide
  Sense strand starting at position 1127 of SEQ ID NO: 585476
cacucuuugggaggauuau

SEQ ID NO: 642917 - RNA, 19 nt, Artificial Sequence
  Description of Artificial Sequence: Synthetic oligonucleotide
  Antisense strand to SEQ ID NO: 642916
auaauccucccaaagagug

SEQ ID NO: 642918 - RNA, 19 nt, Artificial Sequence
  Description of Artificial Sequence: Synthetic oligonucleotide
  Sense strand starting at position 1604 of SEQ ID NO: 585476
gugacucacaucugagguu

SEQ ID NO: 642919 - RNA, 19 nt, Artificial Sequence
  Description of Artificial Sequence: Synthetic oligonucleotide
  Antisense strand to SEQ ID NO: 642918
aaccucagaugugagucac

SEQ ID NO: 642920 - RNA, 19 nt, Artificial Sequence
  Description of Artificial Sequence: Synthetic oligonucleotide
  Sense strand starting at position 1897 of SEQ ID NO: 585476
gucccucucguugagaaau

SEQ ID NO: 642921 - RNA, 19 nt, Artificial Sequence
  Description of Artificial Sequence: Synthetic oligonucleotide
  Antisense strand to SEQ ID NO: 642920
auuucucaacgagagggac

SEQ ID NO: 642922 - RNA, 19 nt, Artificial Sequence
  Description of Artificial Sequence: Synthetic oligonucleotide
  Sense strand starting at position 1974 of SEQ ID NO: 585476
gugaucucuacugggaaga

SEQ ID NO: 642923 - RNA, 19 nt, Artificial Sequence
  Description of Artificial Sequence: Synthetic oligonucleotide
  Antisense strand to SEQ ID NO: 642922
ucuucccaguagagaucac

SEQ ID NO: 642924 - RNA, 19 nt, Artificial Sequence
  Description of Artificial Sequence: Synthetic oligonucleotide
  Sense strand starting at position 2030 of SEQ ID NO: 585476
ggaaaucuauuagcccuua

SEQ ID NO: 642925 - RNA, 19 nt, Artificial Sequence
  Description of Artificial Sequence: Synthetic oligonucleotide
  Antisense strand to SEQ ID NO: 642924
uaagggcuaauagauuucc

SEQ ID NO: 642926 - RNA, 19 nt, Artificial Sequence
  Description of Artificial Sequence: Synthetic oligonucleotide
  Sense strand starting at position 2089 of SEQ ID NO: 585476
cauggucucgggcauaaau

SEQ ID NO: 642927 - RNA, 19 nt, Artificial Sequence
  Description of Artificial Sequence: Synthetic oligonucleotide
  Antisense strand to SEQ ID NO: 642926
auuuaugcccgagaccaug

SEQ ID NO: 642928 - RNA, 19 nt, Artificial Sequence
  Description of Artificial Sequence: Synthetic oligonucleotide
  Sense strand starting at position 2091 of SEQ ID NO: 585476
uggucucgggcauaaauga

SEQ ID NO: 642929 - RNA, 19 nt, Artificial Sequence
  Description of Artificial Sequence: Synthetic oligonucleotide
  Antisense strand to SEQ ID NO: 642928
ucauuuaugcccgagacca

SEQ ID NO: 642930 - RNA, 19 nt, Artificial Sequence
  Description of Artificial Sequence: Synthetic oligonucleotide
  Sense strand starting at position 2228 of SEQ ID NO: 585476
accuaucgguccuuggaga

SEQ ID NO: 642931 - RNA, 19 nt, Artificial Sequence
  Description of Artificial Sequence: Synthetic oligonucleotide
  Antisense strand to SEQ ID NO: 642930
ucuccaaggaccgauaggu

SEQ ID NO: 642932 - RNA, 19 nt, Artificial Sequence
  Description of Artificial Sequence: Synthetic oligonucleotide
  Sense strand starting at position 2274 of SEQ ID NO: 585476
augagauaauugcuccaag

SEQ ID NO: 642933 - RNA, 19 nt, Artificial Sequence
  Description of Artificial Sequence: Synthetic oligonucleotide
  Antisense strand to SEQ ID NO: 642932
cuuggagcaauuaucucau

SEQ ID NO: 642934 - RNA, 19 nt, Artificial Sequence
  Description of Artificial Sequence: Synthetic oligonucleotide
  Sense strand starting at position 2827 of SEQ ID NO: 585476
agaagucacuucucuagaa

SEQ ID NO: 642935 - RNA, 19 nt, Artificial Sequence
  Description of Artificial Sequence: Synthetic oligonucleotide
  Antisense strand to SEQ ID NO: 642934
uucuagagaagugacuucu

SEQ ID NO: 642936 - RNA, 19 nt, Artificial Sequence
  Description of Artificial Sequence: Synthetic oligonucleotide
  Sense strand starting at position 2916 of SEQ ID NO: 585476
auaagaaacccugguuucu

SEQ ID NO: 642937 - RNA, 19 nt, Artificial Sequence
  Description of Artificial Sequence: Synthetic oligonucleotide
  Antisense strand to SEQ ID NO: 642936
agaaaccaggguuucuuau

SEQ ID NO: 642938 - RNA, 19 nt, Artificial Sequence
  Description of Artificial Sequence: Synthetic oligonucleotide
  Sense strand starting at position 2938 of SEQ ID NO: 585476
guagguaugaccugguaca

SEQ ID NO: 642939 - RNA, 19 nt, Artificial Sequence
  Description of Artificial Sequence: Synthetic oligonucleotide
  Antisense strand to SEQ ID NO: 642938
uguaccaggucauaccuac

SEQ ID NO: 642940 - RNA, 19 nt, Artificial Sequence
  Description of Artificial Sequence: Synthetic oligonucleotide
  Sense strand starting at position 2948 of SEQ ID NO: 585476
ccugguacacugugaaagu

SEQ ID NO: 642941 - RNA, 19 nt, Artificial Sequence
  Description of Artificial Sequence: Synthetic oligonucleotide
  Antisense strand to SEQ ID NO: 642940
acuuucacaguguaccagg

SEQ ID NO: 642942 - RNA, 19 nt, Artificial Sequence
  Description of Artificial Sequence: Synthetic oligonucleotide
  Sense strand starting at position 2957 of SEQ ID NO: 585476
cugugaaagucccuuaacu

SEQ ID NO: 642943 - RNA, 19 nt, Artificial Sequence
  Description of Artificial Sequence: Synthetic oligonucleotide
  Antisense strand to SEQ ID NO: 642942
aguuaagggacuuucacag

SEQ ID NO: 642944 - RNA, 19 nt, Artificial Sequence
  Description of Artificial Sequence: Synthetic oligonucleotide
  Sense strand starting at position 3069 of SEQ ID NO: 585476
gugguaucagaagauggua

SEQ ID NO: 642945 - RNA, 19 nt, Artificial Sequence
  Description of Artificial Sequence: Synthetic oligonucleotide
  Antisense strand to SEQ ID NO: 642944
uaccaucuucugauaccac

SEQ ID NO: 642946 - RNA, 19 nt, Artificial Sequence
  Description of Artificial Sequence: Synthetic oligonucleotide
  Sense strand starting at position 3136 of SEQ ID NO: 585476
aaaggucuagcgcaacuau

SEQ ID NO: 642947 - RNA, 19 nt, Artificial Sequence
  Description of Artificial Sequence: Synthetic oligonucleotide
  Antisense strand to SEQ ID NO: 642946
auaguugcgcuagaccuuu

SEQ ID NO: 642948 - RNA, 19 nt, Artificial Sequence
  Description of Artificial Sequence: Synthetic oligonucleotide
  Sense strand starting at position 3146 of SEQ ID NO: 585476
cgcaacuaugccuacaauu

SEQ ID NO: 642949 - RNA, 19 nt, Artificial Sequence
  Description of Artificial Sequence: Synthetic oligonucleotide
  Antisense strand to SEQ ID NO: 642948
aauuguaggcauaguugcg

SEQ ID NO: 642950 - RNA, 19 nt, Artificial Sequence
  Description of Artificial Sequence: Synthetic oligonucleotide
  Sense strand starting at position 3321 of SEQ ID NO: 585476
gcccuugacugggucaaga

SEQ ID NO: 642951 - RNA, 19 nt, Artificial Sequence
  Description of Artificial Sequence: Synthetic oligonucleotide
  Antisense strand to SEQ ID NO: 642950
ucuugacccagucaagggc

SEQ ID NO: 642952 - RNA, 19 nt, Artificial Sequence
  Description of Artificial Sequence: Synthetic oligonucleotide
  Sense strand starting at position 3342 of SEQ ID NO: 585476
cacugaguggcucaaagau

SEQ ID NO: 642953 - RNA, 19 nt, Artificial Sequence
  Description of Artificial Sequence: Synthetic oligonucleotide
  Antisense strand to SEQ ID NO: 642952
aucuuugagccacucagug

SEQ ID NO: 642954 - RNA, 19 nt, Artificial Sequence
  Description of Artificial Sequence: Synthetic oligonucleotide
  Sense strand starting at position 3363 of SEQ ID NO: 585476
gagacaugagaguaugugu

SEQ ID NO: 642955 - RNA, 19 nt, Artificial Sequence
  Description of Artificial Sequence: Synthetic oligonucleotide
  Antisense strand to SEQ ID NO: 642954
acacauacucucaugucuc

SEQ ID NO: 642956 - RNA, 19 nt, Artificial Sequence
  Description of Artificial Sequence: Synthetic oligonucleotide
  Sense strand starting at position 3366 of SEQ ID NO: 585476
acaugagaguaugugugaa

SEQ ID NO: 642957 - RNA, 19 nt, Artificial Sequence
  Description of Artificial Sequence: Synthetic oligonucleotide
  Antisense strand to SEQ ID NO: 642956
uucacacauacucucaugu

SEQ ID NO: 642958 - RNA, 19 nt, Artificial Sequence
  Description of Artificial Sequence: Synthetic oligonucleotide
  Sense strand starting at position 3594 of SEQ ID NO: 585476
cacagauagccucaggguu

SEQ ID NO: 642959 - RNA, 19 nt, Artificial Sequence
  Description of Artificial Sequence: Synthetic oligonucleotide
  Antisense strand to SEQ ID NO: 642958
aacccugaggcuaucugug

SEQ ID NO: 642960 - RNA, 19 nt, Artificial Sequence
  Description of Artificial Sequence: Synthetic oligonucleotide
  Sense strand starting at position 3674 of SEQ ID NO: 585476
ugggaaucuggauguauug

SEQ ID NO: 642961 - RNA, 19 nt, Artificial Sequence
  Description of Artificial Sequence: Synthetic oligonucleotide
  Antisense strand to SEQ ID NO: 642960
caauacauccagauuccca

SEQ ID NO: 642962 - RNA, 19 nt, Artificial Sequence
  Description of Artificial Sequence: Synthetic oligonucleotide
  Sense strand starting at position 3676 of SEQ ID NO: 585476
ggaaucuggauguauugca

SEQ ID NO: 642963 - RNA, 19 nt, Artificial Sequence
  Description of Artificial Sequence: Synthetic oligonucleotide
  Antisense strand to SEQ ID NO: 642962
ugcaauacauccagauucc

SEQ ID NO: 642964 - RNA, 19 nt, Artificial Sequence
  Description of Artificial Sequence: Synthetic oligonucleotide
  Sense strand starting at position 3737 of SEQ ID NO: 585476
ucauguuagucacccuaga

SEQ ID NO: 642965 - RNA, 19 nt, Artificial Sequence
  Description of Artificial Sequence: Synthetic oligonucleotide
  Antisense strand to SEQ ID NO: 642964
ucuagggugacuaacauga

SEQ ID NO: 642966 - RNA, 19 nt, Artificial Sequence
  Description of Artificial Sequence: Synthetic oligonucleotide
  Sense strand starting at position 3908 of SEQ ID NO: 585476
agcagugugauggagcaau

SEQ ID NO: 642967 - RNA, 19 nt, Artificial Sequence
  Description of Artificial Sequence: Synthetic oligonucleotide
  Antisense strand to SEQ ID NO: 642966
auugcuccaucacacugcu

SEQ ID NO: 642968 - RNA, 19 nt, Artificial Sequence
  Description of Artificial Sequence: Synthetic oligonucleotide
  Sense strand starting at position 154 of SEQ ID NO: 585477
aguuuccuucuugagaaca

SEQ ID NO: 642969 - RNA, 19 nt, Artificial Sequence
  Description of Artificial Sequence: Synthetic oligonucleotide
  Antisense strand to SEQ ID NO: 642968
uguucucaagaaggaaacu

SEQ ID NO: 642970 - RNA, 19 nt, Artificial Sequence
  Description of Artificial Sequence: Synthetic oligonucleotide
  Sense strand starting at position 207 of SEQ ID NO: 585477
ugugaauguccuggacaga

SEQ ID NO: 642971 - RNA, 19 nt, Artificial Sequence
  Description of Artificial Sequence: Synthetic oligonucleotide
  Antisense strand to SEQ ID NO: 642970
ucuguccaggacauucaca

SEQ ID NO: 642972 - RNA, 19 nt, Artificial Sequence
  Description of Artificial Sequence: Synthetic oligonucleotide
  Sense strand starting at position 340 of SEQ ID NO: 585477
gagguugaauccuccuaug

SEQ ID NO: 642973 - RNA, 19 nt, Artificial Sequence
  Description of Artificial Sequence: Synthetic oligonucleotide
  Antisense strand to SEQ ID NO: 642972
cauaggaggauucaaccuc

SEQ ID NO: 642974 - RNA, 19 nt, Artificial Sequence
  Description of Artificial Sequence: Synthetic oligonucleotide
  Sense strand starting at position 366 of SEQ ID NO: 585477
cuguuaggacuuggccaaa

SEQ ID NO: 642975 - RNA, 19 nt, Artificial Sequence
  Description of Artificial Sequence: Synthetic oligonucleotide
  Antisense strand to SEQ ID NO: 642974
uuuggccaaguccuaacag

SEQ ID NO: 642976 - RNA, 19 nt, Artificial Sequence
  Description of Artificial Sequence: Synthetic oligonucleotide
  Sense strand starting at position 392 of SEQ ID NO: 585477
cuauucuacccuuagaggu

SEQ ID NO: 642977 - RNA, 19 nt, Artificial Sequence
  Description of Artificial Sequence: Synthetic oligonucleotide
  Antisense strand to SEQ ID NO: 642976
accucuaaggguagaauag

SEQ ID NO: 642978 - RNA, 19 nt, Artificial Sequence
  Description of Artificial Sequence: Synthetic oligonucleotide
  Sense strand starting at position 630 of SEQ ID NO: 585477
gucagauucugagcuacua

SEQ ID NO: 642979 - RNA, 19 nt, Artificial Sequence
  Description of Artificial Sequence: Synthetic oligonucleotide
  Antisense strand to SEQ ID NO: 642978
uaguagcucagaaucugac

SEQ ID NO: 642980 - RNA, 19 nt, Artificial Sequence
  Description of Artificial Sequence: Synthetic oligonucleotide
  Sense strand starting at position 726 of SEQ ID NO: 585477
augggaaacuuucuguuua

SEQ ID NO: 642981 - RNA, 19 nt, Artificial Sequence
  Description of Artificial Sequence: Synthetic oligonucleotide
  Antisense strand to SEQ ID NO: 642980
uaaacagaaaguuucccau

SEQ ID NO: 642982 - RNA, 19 nt, Artificial Sequence
  Description of Artificial Sequence: Synthetic oligonucleotide
  Sense strand starting at position 728 of SEQ ID NO: 585477
gggaaacuuucuguuuauu

SEQ ID NO: 642983 - RNA, 19 nt, Artificial Sequence
  Description of Artificial Sequence: Synthetic oligonucleotide
  Antisense strand to SEQ ID NO: 642982
aauaaacagaaaguuuccc

SEQ ID NO: 642984 - RNA, 19 nt, Artificial Sequence
  Description of Artificial Sequence: Synthetic oligonucleotide
  Sense strand starting at position 740 of SEQ ID NO: 585477
guuuauuucuccucugcac

SEQ ID NO: 642985 - RNA, 19 nt, Artificial Sequence
  Description of Artificial Sequence: Synthetic oligonucleotide
  Antisense strand to SEQ ID NO: 642984
gugcagaggagaaauaaac

SEQ ID NO: 642986 - RNA, 19 nt, Artificial Sequence
  Description of Artificial Sequence: Synthetic oligonucleotide
  Sense strand starting at position 795 of SEQ ID NO: 585477
ccugauuaugcagagcaaa

SEQ ID NO: 642987 - RNA, 19 nt, Artificial Sequence
  Description of Artificial Sequence: Synthetic oligonucleotide
  Antisense strand to SEQ ID NO: 642986
uuugcucugcauaaucagg

SEQ ID NO: 642988 - RNA, 19 nt, Artificial Sequence
  Description of Artificial Sequence: Synthetic oligonucleotide
  Sense strand starting at position 923 of SEQ ID NO: 585477
acuccaagagguuguuauu

SEQ ID NO: 642989 - RNA, 19 nt, Artificial Sequence
  Description of Artificial Sequence: Synthetic oligonucleotide
  Antisense strand to SEQ ID NO: 642988
aauaacaaccucuuggagu

SEQ ID NO: 642990 - RNA, 19 nt, Artificial Sequence
  Description of Artificial Sequence: Synthetic oligonucleotide
  Sense strand starting at position 947 of SEQ ID NO: 585477
aucucaauuugagagguga

SEQ ID NO: 642991 - RNA, 19 nt, Artificial Sequence
  Description of Artificial Sequence: Synthetic oligonucleotide
  Antisense strand to SEQ ID NO: 642990
ucaccucucaaauugagau

SEQ ID NO: 642992 - RNA, 19 nt, Artificial Sequence
  Description of Artificial Sequence: Synthetic oligonucleotide
  Sense strand starting at position 1001 of SEQ ID NO: 585477
caaggaaagccuugaguua

SEQ ID NO: 642993 - RNA, 19 nt, Artificial Sequence
  Description of Artificial Sequence: Synthetic oligonucleotide
  Antisense strand to SEQ ID NO: 642992
uaacucaaggcuuuccuug

SEQ ID NO: 642994 - RNA, 19 nt, Artificial Sequence
  Description of Artificial Sequence: Synthetic oligonucleotide
  Sense strand starting at position 1505 of SEQ ID NO: 585477
caucuugaaggcuguaaga

SEQ ID NO: 642995 - RNA, 19 nt, Artificial Sequence
  Description of Artificial Sequence: Synthetic oligonucleotide
  Antisense strand to SEQ ID NO: 642994
ucuuacagccuucaagaug

SEQ ID NO: 642996 - RNA, 19 nt, Artificial Sequence
  Description of Artificial Sequence: Synthetic oligonucleotide
  Sense strand starting at position 1507 of SEQ ID NO: 585477
ucuugaaggcuguaagaac

SEQ ID NO: 642997 - RNA, 19 nt, Artificial Sequence
  Description of Artificial Sequence: Synthetic oligonucleotide
  Antisense strand to SEQ ID NO: 642996
guucuuacagccuucaaga

SEQ ID NO: 642998 - RNA, 19 nt, Artificial Sequence
  Description of Artificial Sequence: Synthetic oligonucleotide
  Sense strand starting at position 1552 of SEQ ID NO: 585477
gaggcaugucaguaggucu

SEQ ID NO: 642999 - RNA, 19 nt, Artificial Sequence
  Description of Artificial Sequence: Synthetic oligonucleotide
  Antisense strand to SEQ ID NO: 642998
agaccuacugacaugccuc

SEQ ID NO: 643000 - RNA, 19 nt, Artificial Sequence
  Description of Artificial Sequence: Synthetic oligonucleotide
  Sense strand starting at position 1592 of SEQ ID NO: 585477
gcaacuugaggauguuuga

SEQ ID NO: 643001 - RNA, 19 nt, Artificial Sequence
  Description of Artificial Sequence: Synthetic oligonucleotide
  Antisense strand to SEQ ID NO: 643000
ucaaacauccucaaguugc

SEQ ID NO: 643002 - RNA, 19 nt, Artificial Sequence
  Description of Artificial Sequence: Synthetic oligonucleotide
  Sense strand starting at position 2196 of SEQ ID NO: 585477
agcccuacugacuagucaa

SEQ ID NO: 643003 - RNA, 19 nt, Artificial Sequence
  Description of Artificial Sequence: Synthetic oligonucleotide
  Antisense strand to SEQ ID NO: 643002
uugacuagucaguagggcu

SEQ ID NO: 643004 - RNA, 19 nt, Artificial Sequence
  Description of Artificial Sequence: Synthetic oligonucleotide
  Sense strand starting at position 2219 of SEQ ID NO: 585477
gagaaauuauuauugguuc

SEQ ID NO: 643005 - RNA, 19 nt, Artificial Sequence
  Description of Artificial Sequence: Synthetic oligonucleotide
  Antisense strand to SEQ ID NO: 643004
gaaccaauaauaauuucuc

SEQ ID NO: 643006 - RNA, 19 nt, Artificial Sequence
  Description of Artificial Sequence: Synthetic oligonucleotide
  Sense strand starting at position 2292 of SEQ ID NO: 585477
cugucaucaccagaccauu

SEQ ID NO: 643007 - RNA, 19 nt, Artificial Sequence
  Description of Artificial Sequence: Synthetic oligonucleotide
  Antisense strand to SEQ ID NO: 643006
aauggucuggugaugacag

SEQ ID NO: 643008 - RNA, 19 nt, Artificial Sequence
  Description of Artificial Sequence: Synthetic oligonucleotide
  Sense strand starting at position 2376 of SEQ ID NO: 585477
ugugauaggucacuuggga

SEQ ID NO: 643009 - RNA, 19 nt, Artificial Sequence
  Description of Artificial Sequence: Synthetic oligonucleotide
  Antisense strand to SEQ ID NO: 643008
ucccaagugaccuaucaca

SEQ ID NO: 643010 - RNA, 19 nt, Artificial Sequence
  Description of Artificial Sequence: Synthetic oligonucleotide
  Sense strand starting at position 2401 of SEQ ID NO: 585477
aguuucuuguucccaaaga

SEQ ID NO: 643011 - RNA, 19 nt, Artificial Sequence
  Description of Artificial Sequence: Synthetic oligonucleotide
  Antisense strand to SEQ ID NO: 643010
ucuuugggaacaagaaacu

SEQ ID NO: 643012 - RNA, 19 nt, Artificial Sequence
  Description of Artificial Sequence: Synthetic oligonucleotide
  Sense strand starting at position 2504 of SEQ ID NO: 585477
cuaacuaugucagucaaca

SEQ ID NO: 643013 - RNA, 19 nt, Artificial Sequence
  Description of Artificial Sequence: Synthetic oligonucleotide
  Antisense strand to SEQ ID NO: 643012
uguugacugacauaguuag

SEQ ID NO: 643014 - RNA, 19 nt, Artificial Sequence
  Description of Artificial Sequence: Synthetic oligonucleotide
  Sense strand starting at position 2645 of SEQ ID NO: 585477
cuuggcucagcugagaauu

SEQ ID NO: 643015 - RNA, 19 nt, Artificial Sequence
  Description of Artificial Sequence: Synthetic oligonucleotide
  Antisense strand to SEQ ID NO: 643014
aauucucagcugagccaag

SEQ ID NO: 643016 - RNA, 19 nt, Artificial Sequence
  Description of Artificial Sequence: Synthetic oligonucleotide
  Sense strand starting at position 2668 of SEQ ID NO: 585477
gugugagaccagcauuggu

SEQ ID NO: 643017 - RNA, 19 nt, Artificial Sequence
  Description of Artificial Sequence: Synthetic oligonucleotide
  Antisense strand to SEQ ID NO: 643016
accaaugcuggucucacac

SEQ ID NO: 643018 - RNA, 19 nt, Artificial Sequence
  Description of Artificial Sequence: Synthetic oligonucleotide
  Sense strand starting at position 2721 of SEQ ID NO: 585477
gcaaguaugccucaccaaa

SEQ ID NO: 643019 - RNA, 19 nt, Artificial Sequence
  Description of Artificial Sequence: Synthetic oligonucleotide
  Antisense strand to SEQ ID NO: 643018
uuuggugaggcauacuugc

SEQ ID NO: 643020 - RNA, 19 nt, Artificial Sequence
  Description of Artificial Sequence: Synthetic oligonucleotide
  Sense strand starting at position 2875 of SEQ ID NO: 585477
gcucaauagcacuacaguu

SEQ ID NO: 643021 - RNA, 19 nt, Artificial Sequence
  Description of Artificial Sequence: Synthetic oligonucleotide
  Antisense strand to SEQ ID NO: 643020
aacuguagugcuauugagc

SEQ ID NO: 643022 - RNA, 19 nt, Artificial Sequence
  Description of Artificial Sequence: Synthetic oligonucleotide
  Sense strand starting at position 2888 of SEQ ID NO: 585477
acaguuagugguuaucuca

SEQ ID NO: 643023 - RNA, 19 nt, Artificial Sequence
  Description of Artificial Sequence: Synthetic oligonucleotide
  Antisense strand to SEQ ID NO: 643022
ugagauaaccacuaacugu

SEQ ID NO: 643024 - RNA, 19 nt, Artificial Sequence
  Description of Artificial Sequence: Synthetic oligonucleotide
  Sense strand starting at position 2895 of SEQ ID NO: 585477
gugguuaucucaucagaca

SEQ ID NO: 643025 - RNA, 19 nt, Artificial Sequence
  Description of Artificial Sequence: Synthetic oligonucleotide
  Antisense strand to SEQ ID NO: 643024
ugucugaugagauaaccac

SEQ ID NO: 643026 - RNA, 19 nt, Artificial Sequence
  Description of Artificial Sequence: Synthetic oligonucleotide
  Sense strand starting at position 3054 of SEQ ID NO: 585477
acauuaaggucagcugagu

SEQ ID NO: 643027 - RNA, 19 nt, Artificial Sequence
  Description of Artificial Sequence: Synthetic oligonucleotide
  Antisense strand to SEQ ID NO: 643026
acucagcugaccuuaaugu

SEQ ID NO: 643028 - RNA, 19 nt, Artificial Sequence
  Description of Artificial Sequence: Synthetic oligonucleotide
  Sense strand starting at position 3073 of SEQ ID NO: 585477
uugggaacugcuuauucuu

SEQ ID NO: 643029 - RNA, 19 nt, Artificial Sequence
  Description of Artificial Sequence: Synthetic oligonucleotide
  Antisense strand to SEQ ID NO: 643028
aagaauaagcaguucccaa

SEQ ID NO: 643030 - RNA, 19 nt, Artificial Sequence
  Description of Artificial Sequence: Synthetic oligonucleotide
  Sense strand starting at position 3154 of SEQ ID NO: 585477
guugaaagucaagauugca

SEQ ID NO: 643031 - RNA, 19 nt, Artificial Sequence
  Description of Artificial Sequence: Synthetic oligonucleotide
  Antisense strand to SEQ ID NO: 643030
ugcaaucuugacuuucaac

SEQ ID NO: 643032 - RNA, 19 nt, Artificial Sequence
  Description of Artificial Sequence: Synthetic oligonucleotide
  Sense strand starting at position 3311 of SEQ ID NO: 585477
agaugcuucugggcaggau

SEQ ID NO: 643033 - RNA, 19 nt, Artificial Sequence
  Description of Artificial Sequence: Synthetic oligonucleotide
  Antisense strand to SEQ ID NO: 643032
auccugcccagaagcaucu

SEQ ID NO: 643034 - RNA, 19 nt, Artificial Sequence
  Description of Artificial Sequence: Synthetic oligonucleotide
  Sense strand starting at position 3312 of SEQ ID NO: 585477
gaugcuucugggcaggauu

SEQ ID NO: 643035 - RNA, 19 nt, Artificial Sequence
  Description of Artificial Sequence: Synthetic oligonucleotide
  Antisense strand to SEQ ID NO: 643034
aauccugcccagaagcauc

SEQ ID NO: 643036 - RNA, 19 nt, Artificial Sequence
  Description of Artificial Sequence: Synthetic oligonucleotide
  Sense strand starting at position 3647 of SEQ ID NO: 585477
gguaaaggaacuugcuaaa

SEQ ID NO: 643037 - RNA, 19 nt, Artificial Sequence
  Description of Artificial Sequence: Synthetic oligonucleotide
  Antisense strand to SEQ ID NO: 643036
uuuagcaaguuccuuuacc

SEQ ID NO: 643038 - RNA, 19 nt, Artificial Sequence
  Description of Artificial Sequence: Synthetic oligonucleotide
  Sense strand starting at position 3755 of SEQ ID NO: 585477
cucugaugagcucagcuua

SEQ ID NO: 643039 - RNA, 19 nt, Artificial Sequence
  Description of Artificial Sequence: Synthetic oligonucleotide
  Antisense strand to SEQ ID NO: 643038
uaagcugagcucaucagag

SEQ ID NO: 643040 - RNA, 19 nt, Artificial Sequence
  Description of Artificial Sequence: Synthetic oligonucleotide
  Sense strand starting at position 3796 of SEQ ID NO: 585477
ccucaaauuuccugaaagg

SEQ ID NO: 643041 - RNA, 19 nt, Artificial Sequence
  Description of Artificial Sequence: Synthetic oligonucleotide
  Antisense strand to SEQ ID NO: 643040
ccuuucaggaaauuugagg

SEQ ID NO: 643042 - RNA, 19 nt, Artificial Sequence
  Description of Artificial Sequence: Synthetic oligonucleotide
  Sense strand starting at position 3815 of SEQ ID NO: 585477
ggaggauuccuggagcugu

SEQ ID NO: 643043 - RNA, 19 nt, Artificial Sequence
  Description of Artificial Sequence: Synthetic oligonucleotide
  Antisense strand to SEQ ID NO: 643042
acagcuccaggaauccucc

SEQ ID NO: 643044 - RNA, 19 nt, Artificial Sequence
  Description of Artificial Sequence: Synthetic oligonucleotide
  Sense strand starting at position 3819 of SEQ ID NO: 585477
gauuccuggagcugugaga

SEQ ID NO: 643045 - RNA, 19 nt, Artificial Sequence
  Description of Artificial Sequence: Synthetic oligonucleotide
  Antisense strand to SEQ ID NO: 643044
ucucacagcuccaggaauc

SEQ ID NO: 643046 - RNA, 19 nt, Artificial Sequence
  Description of Artificial Sequence: Synthetic oligonucleotide
  Sense strand starting at position 3851 of SEQ ID NO: 585477
ugacauggucuuugggcaa

SEQ ID NO: 643047 - RNA, 19 nt, Artificial Sequence
  Description of Artificial Sequence: Synthetic oligonucleotide
  Antisense strand to SEQ ID NO: 643046
uugcccaaagaccauguca

SEQ ID NO: 643048 - RNA, 19 nt, Artificial Sequence
  Description of Artificial Sequence: Synthetic oligonucleotide
  Sense strand starting at position 13 of SEQ ID NO: 585478
ccuauuauggcauguugaa

SEQ ID NO: 643049 - RNA, 19 nt, Artificial Sequence
  Description of Artificial Sequence: Synthetic oligonucleotide
  Antisense strand to SEQ ID NO: 643048
uucaacaugccauaauagg

SEQ ID NO: 643050 - RNA, 19 nt, Artificial Sequence
  Description of Artificial Sequence: Synthetic oligonucleotide
  Sense strand starting at position 87 of SEQ ID NO: 585478
aaugcuacucuuugaggga

SEQ ID NO: 643051 - RNA, 19 nt, Artificial Sequence
  Description of Artificial Sequence: Synthetic oligonucleotide
  Antisense strand to SEQ ID NO: 643050
ucccucaaagaguagcauu

SEQ ID NO: 643052 - RNA, 19 nt, Artificial Sequence
  Description of Artificial Sequence: Synthetic oligonucleotide
  Sense strand starting at position 276 of SEQ ID NO: 585478
gguauugucuacuuuauau

SEQ ID NO: 643053 - RNA, 19 nt, Artificial Sequence
  Description of Artificial Sequence: Synthetic oligonucleotide
  Antisense strand to SEQ ID NO: 643052
auauaaaguagacaauacc

SEQ ID NO: 643054 - RNA, 19 nt, Artificial Sequence
  Description of Artificial Sequence: Synthetic oligonucleotide
  Sense strand starting at position 316 of SEQ ID NO: 585478
ccuagugaggccugcauuu

SEQ ID NO: 643055 - RNA, 19 nt, Artificial Sequence
  Description of Artificial Sequence: Synthetic oligonucleotide
  Antisense strand to SEQ ID NO: 643054
aaaugcaggccucacuagg

SEQ ID NO: 643056 - RNA, 19 nt, Artificial Sequence
  Description of Artificial Sequence: Synthetic oligonucleotide
  Sense strand starting at position 327 of SEQ ID NO: 585478
cugcauuuguggucaaaua

SEQ ID NO: 643057 - RNA, 19 nt, Artificial Sequence
  Description of Artificial Sequence: Synthetic oligonucleotide
  Antisense strand to SEQ ID NO: 643056
uauuugaccacaaaugcag

SEQ ID NO: 643058 - RNA, 19 nt, Artificial Sequence
  Description of Artificial Sequence: Synthetic oligonucleotide
  Sense strand starting at position 355 of SEQ ID NO: 585478
uaaaguuaaugucugagau

SEQ ID NO: 643059 - RNA, 19 nt, Artificial Sequence
  Description of Artificial Sequence: Synthetic oligonucleotide
  Antisense strand to SEQ ID NO: 643058
aucucagacauuaacuuua

SEQ ID NO: 643060 - RNA, 19 nt, Artificial Sequence
  Description of Artificial Sequence: Synthetic oligonucleotide
  Sense strand starting at position 356 of SEQ ID NO: 585478
aaaguuaaugucugagaug

SEQ ID NO: 643061 - RNA, 19 nt, Artificial Sequence
  Description of Artificial Sequence: Synthetic oligonucleotide
  Antisense strand to SEQ ID NO: 643060
caucucagacauuaacuuu

SEQ ID NO: 643062 - RNA, 19 nt, Artificial Sequence
  Description of Artificial Sequence: Synthetic oligonucleotide
  Sense strand starting at position 383 of SEQ ID NO: 585478
ggagaauauuuauacauca

SEQ ID NO: 643063 - RNA, 19 nt, Artificial Sequence
  Description of Artificial Sequence: Synthetic oligonucleotide
  Antisense strand to SEQ ID NO: 643062
ugauguauaaauauucucc

SEQ ID NO: 643064 - RNA, 19 nt, Artificial Sequence
  Description of Artificial Sequence: Synthetic oligonucleotide
  Sense strand starting at position 391 of SEQ ID NO: 585478
uuuauacaucagugacuuc

SEQ ID NO: 643065 - RNA, 19 nt, Artificial Sequence
  Description of Artificial Sequence: Synthetic oligonucleotide
  Antisense strand to SEQ ID NO: 643064
gaagucacugauguauaaa

SEQ ID NO: 643066 - RNA, 19 nt, Artificial Sequence
  Description of Artificial Sequence: Synthetic oligonucleotide
  Sense strand starting at position 641 of SEQ ID NO: 585478
cucuaaauccacggagaac

SEQ ID NO: 643067 - RNA, 19 nt, Artificial Sequence
  Description of Artificial Sequence: Synthetic oligonucleotide
  Antisense strand to SEQ ID NO: 643066
guucuccguggauuuagag

SEQ ID NO: 643068 - RNA, 19 nt, Artificial Sequence
  Description of Artificial Sequence: Synthetic oligonucleotide
  Sense strand starting at position 694 of SEQ ID NO: 585478
gccagaacaauucggaguu

SEQ ID NO: 643069 - RNA, 19 nt, Artificial Sequence
  Description of Artificial Sequence: Synthetic oligonucleotide
  Antisense strand to SEQ ID NO: 643068
aacuccgaauuguucuggc

SEQ ID NO: 643070 - RNA, 19 nt, Artificial Sequence
  Description of Artificial Sequence: Synthetic oligonucleotide
  Sense strand starting at position 740 of SEQ ID NO: 585478
gggcaguauguucggauga

SEQ ID NO: 643071 - RNA, 19 nt, Artificial Sequence
  Description of Artificial Sequence: Synthetic oligonucleotide
  Antisense strand to SEQ ID NO: 643070
ucauccgaacauacugccc

SEQ ID NO: 643072 - RNA, 19 nt, Artificial Sequence
  Description of Artificial Sequence: Synthetic oligonucleotide
  Sense strand starting at position 848 of SEQ ID NO: 585478
ucauucuggucaucucaca

SEQ ID NO: 643073 - RNA, 19 nt, Artificial Sequence
  Description of Artificial Sequence: Synthetic oligonucleotide
  Antisense strand to SEQ ID NO: 643072
ugugagaugaccagaauga

SEQ ID NO: 643074 - RNA, 19 nt, Artificial Sequence
  Description of Artificial Sequence: Synthetic oligonucleotide
  Sense strand starting at position 953 of SEQ ID NO: 585478
aucagcagcggucaaauua

SEQ ID NO: 643075 - RNA, 19 nt, Artificial Sequence
  Description of Artificial Sequence: Synthetic oligonucleotide
  Antisense strand to SEQ ID NO: 643074
uaauuugaccgcugcugau

SEQ ID NO: 643076 - RNA, 19 nt, Artificial Sequence
  Description of Artificial Sequence: Synthetic oligonucleotide
  Sense strand starting at position 961 of SEQ ID NO: 585478
cggucaaauuaacuuuauu

SEQ ID NO: 643077 - RNA, 19 nt, Artificial Sequence
  Description of Artificial Sequence: Synthetic oligonucleotide
  Antisense strand to SEQ ID NO: 643076
aauaaaguuaauuugaccg

SEQ ID NO: 643078 - RNA, 19 nt, Artificial Sequence
  Description of Artificial Sequence: Synthetic oligonucleotide
  Sense strand starting at position 1052 of SEQ ID NO: 585478
aaauguggcuuccugaaca

SEQ ID NO: 643079 - RNA, 19 nt, Artificial Sequence
  Description of Artificial Sequence: Synthetic oligonucleotide
  Antisense strand to SEQ ID NO: 643078
uguucaggaagccacauuu

SEQ ID NO: 643080 - RNA, 19 nt, Artificial Sequence
  Description of Artificial Sequence: Synthetic oligonucleotide
  Sense strand starting at position 1081 of SEQ ID NO: 585478
uaggaaagucccuaagcga

SEQ ID NO: 643081 - RNA, 19 nt, Artificial Sequence
  Description of Artificial Sequence: Synthetic oligonucleotide
  Antisense strand to SEQ ID NO: 643080
ucgcuuagggacuuuccua

SEQ ID NO: 643082 - RNA, 19 nt, Artificial Sequence
  Description of Artificial Sequence: Synthetic oligonucleotide
  Sense strand starting at position 1123 of SEQ ID NO: 585478
uggagaaugguguagcuga

SEQ ID NO: 643083 - RNA, 19 nt, Artificial Sequence
  Description of Artificial Sequence: Synthetic oligonucleotide
  Antisense strand to SEQ ID NO: 643082
ucagcuacaccauucucca

SEQ ID NO: 643084 - RNA, 19 nt, Artificial Sequence
  Description of Artificial Sequence: Synthetic oligonucleotide
  Sense strand starting at position 1327 of SEQ ID NO: 585478
gguguauugcaggugugua

SEQ ID NO: 643085 - RNA, 19 nt, Artificial Sequence
  Description of Artificial Sequence: Synthetic oligonucleotide
  Antisense strand to SEQ ID NO: 643084
uacacaccugcaauacacc

SEQ ID NO: 643086 - RNA, 19 nt, Artificial Sequence
  Description of Artificial Sequence: Synthetic oligonucleotide
  Sense strand starting at position 2401 of SEQ ID NO: 585478
gcaaguuuagccuggagag

SEQ ID NO: 643087 - RNA, 19 nt, Artificial Sequence
  Description of Artificial Sequence: Synthetic oligonucleotide
  Antisense strand to SEQ ID NO: 643086
cucuccaggcuaaacuugc

SEQ ID NO: 643088 - RNA, 19 nt, Artificial Sequence
  Description of Artificial Sequence: Synthetic oligonucleotide
  Sense strand starting at position 2419 of SEQ ID NO: 585478
ggaggaauugagugagcaa

SEQ ID NO: 643089 - RNA, 19 nt, Artificial Sequence
  Description of Artificial Sequence: Synthetic oligonucleotide
  Antisense strand to SEQ ID NO: 643088
uugcucacucaauuccucc

SEQ ID NO: 643090 - RNA, 19 nt, Artificial Sequence
  Description of Artificial Sequence: Synthetic oligonucleotide
  Sense strand starting at position 2535 of SEQ ID NO: 585478
cagugacgucccuauugca

SEQ ID NO: 643091 - RNA, 19 nt, Artificial Sequence
  Description of Artificial Sequence: Synthetic oligonucleotide
  Antisense strand to SEQ ID NO: 643090
ugcaauagggacgucacug

SEQ ID NO: 643092 - RNA, 19 nt, Artificial Sequence
  Description of Artificial Sequence: Synthetic oligonucleotide
  Sense strand starting at position 2728 of SEQ ID NO: 585478
cuacuuugccaucagcaga

SEQ ID NO: 643093 - RNA, 19 nt, Artificial Sequence
  Description of Artificial Sequence: Synthetic oligonucleotide
  Antisense strand to SEQ ID NO: 643092
ucugcugauggcaaaguag

SEQ ID NO: 643094 - RNA, 19 nt, Artificial Sequence
  Description of Artificial Sequence: Synthetic oligonucleotide
  Sense strand starting at position 2762 of SEQ ID NO: 585478
auugucauuugagaguuau

SEQ ID NO: 643095 - RNA, 19 nt, Artificial Sequence
  Description of Artificial Sequence: Synthetic oligonucleotide
  Antisense strand to SEQ ID NO: 643094
auaacucucaaaugacaau

SEQ ID NO: 643096 - RNA, 19 nt, Artificial Sequence
  Description of Artificial Sequence: Synthetic oligonucleotide
  Sense strand starting at position 2824 of SEQ ID NO: 585478
ccauaaccauguuugucaa

SEQ ID NO: 643097 - RNA, 19 nt, Artificial Sequence
  Description of Artificial Sequence: Synthetic oligonucleotide
  Antisense strand to SEQ ID NO: 643096
uugacaaacaugguuaugg

SEQ ID NO: 643098 - RNA, 19 nt, Artificial Sequence
  Description of Artificial Sequence: Synthetic oligonucleotide
  Sense strand starting at position 2885 of SEQ ID NO: 585478
cugucuuuagaaugcuaaa

SEQ ID NO: 643099 - RNA, 19 nt, Artificial Sequence
  Description of Artificial Sequence: Synthetic oligonucleotide
  Antisense strand to SEQ ID NO: 643098
uuuagcauucuaaagacag

SEQ ID NO: 643100 - RNA, 19 nt, Artificial Sequence
  Description of Artificial Sequence: Synthetic oligonucleotide
  Sense strand starting at position 3030 of SEQ ID NO: 585478
aagagagaauaucagauga

SEQ ID NO: 643101 - RNA, 19 nt, Artificial Sequence
  Description of Artificial Sequence: Synthetic oligonucleotide
  Antisense strand to SEQ ID NO: 643100
ucaucugauauucucucuu

SEQ ID NO: 643102 - RNA, 19 nt, Artificial Sequence
  Description of Artificial Sequence: Synthetic oligonucleotide
  Sense strand starting at position 3032 of SEQ ID NO: 585478
gagagaauaucagaugaga

SEQ ID NO: 643103 - RNA, 19 nt, Artificial Sequence
  Description of Artificial Sequence: Synthetic oligonucleotide
  Antisense strand to SEQ ID NO: 643102
ucucaucugauauucucuc

SEQ ID NO: 643104 - RNA, 19 nt, Artificial Sequence
  Description of Artificial Sequence: Synthetic oligonucleotide
  Sense strand starting at position 3165 of SEQ ID NO: 585478
caaaguuaccgucaugcau

SEQ ID NO: 643105 - RNA, 19 nt, Artificial Sequence
  Description of Artificial Sequence: Synthetic oligonucleotide
  Antisense strand to SEQ ID NO: 643104
augcaugacgguaacuuug

SEQ ID NO: 643106 - RNA, 19 nt, Artificial Sequence
  Description of Artificial Sequence: Synthetic oligonucleotide
  Sense strand starting at position 3196 of SEQ ID NO: 585478
cuucuaaggauacgggaau

SEQ ID NO: 643107 - RNA, 19 nt, Artificial Sequence
  Description of Artificial Sequence: Synthetic oligonucleotide
  Antisense strand to SEQ ID NO: 643106
auucccguauccuuagaag

SEQ ID NO: 643108 - RNA, 19 nt, Artificial Sequence
  Description of Artificial Sequence: Synthetic oligonucleotide
  Sense strand starting at position 3207 of SEQ ID NO: 585478
acgggaauauuugaucaug

SEQ ID NO: 643109 - RNA, 19 nt, Artificial Sequence
  Description of Artificial Sequence: Synthetic oligonucleotide
  Antisense strand to SEQ ID NO: 643108
caugaucaaauauucccgu

SEQ ID NO: 643110 - RNA, 19 nt, Artificial Sequence
  Description of Artificial Sequence: Synthetic oligonucleotide
  Sense strand starting at position 3246 of SEQ ID NO: 585478
uggaucugcuuaccaaagu

SEQ ID NO: 643111 - RNA, 19 nt, Artificial Sequence
  Description of Artificial Sequence: Synthetic oligonucleotide
  Antisense strand to SEQ ID NO: 643110
acuuugguaagcagaucca

SEQ ID NO: 643112 - RNA, 19 nt, Artificial Sequence
  Description of Artificial Sequence: Synthetic oligonucleotide
  Sense strand starting at position 3344 of SEQ ID NO: 585478
gccagcaucagagaagagu

SEQ ID NO: 643113 - RNA, 19 nt, Artificial Sequence
  Description of Artificial Sequence: Synthetic oligonucleotide
  Antisense strand to SEQ ID NO: 643112
acucuucucugaugcuggc

SEQ ID NO: 643114 - RNA, 19 nt, Artificial Sequence
  Description of Artificial Sequence: Synthetic oligonucleotide
  Sense strand starting at position 3350 of SEQ ID NO: 585478
aucagagaagagugauguu

SEQ ID NO: 643115 - RNA, 19 nt, Artificial Sequence
  Description of Artificial Sequence: Synthetic oligonucleotide
  Antisense strand to SEQ ID NO: 643114
aacaucacucuucucugau

SEQ ID NO: 643116 - RNA, 19 nt, Artificial Sequence
  Description of Artificial Sequence: Synthetic oligonucleotide
  Sense strand starting at position 3401 of SEQ ID NO: 585478
ccugcaaagccuuacaaga

SEQ ID NO: 643117 - RNA, 19 nt, Artificial Sequence
  Description of Artificial Sequence: Synthetic oligonucleotide
  Antisense strand to SEQ ID NO: 643116
ucuuguaaggcuuugcagg

SEQ ID NO: 643118 - RNA, 19 nt, Artificial Sequence
  Description of Artificial Sequence: Synthetic oligonucleotide
  Sense strand starting at position 3481 of SEQ ID NO: 585478
ggcaaaugucaagggcagu

SEQ ID NO: 643119 - RNA, 19 nt, Artificial Sequence
  Description of Artificial Sequence: Synthetic oligonucleotide
  Antisense strand to SEQ ID NO: 643118
acugcccuugacauuugcc

SEQ ID NO: 643120 - RNA, 19 nt, Artificial Sequence
  Description of Artificial Sequence: Synthetic oligonucleotide
  Sense strand starting at position 3482 of SEQ ID NO: 585478
gcaaaugucaagggcagua

SEQ ID NO: 643121 - RNA, 19 nt, Artificial Sequence
  Description of Artificial Sequence: Synthetic oligonucleotide
  Antisense strand to SEQ ID NO: 643120
uacugcccuugacauuugc

SEQ ID NO: 643122 - RNA, 19 nt, Artificial Sequence
  Description of Artificial Sequence: Synthetic oligonucleotide
  Sense strand starting at position 3711 of SEQ ID NO: 585478
gaaguuaaauuacugcaga

SEQ ID NO: 643123 - RNA, 19 nt, Artificial Sequence
  Description of Artificial Sequence: Synthetic oligonucleotide
  Antisense strand to SEQ ID NO: 643122
ucugcaguaauuuaacuuc

SEQ ID NO: 643124 - RNA, 19 nt, Artificial Sequence
  Description of Artificial Sequence: Synthetic oligonucleotide
  Sense strand starting at position 3714 of SEQ ID NO: 585478
guuaaauuacugcagagug

SEQ ID NO: 643125 - RNA, 19 nt, Artificial Sequence
  Description of Artificial Sequence: Synthetic oligonucleotide
  Antisense strand to SEQ ID NO: 643124
cacucugcaguaauuuaac

SEQ ID NO: 643126 - RNA, 19 nt, Artificial Sequence
  Description of Artificial Sequence: Synthetic oligonucleotide
  Sense strand starting at position 3968 of SEQ ID NO: 585478
gccuguagaccacaugaaa

SEQ ID NO: 643127 - RNA, 19 nt, Artificial Sequence
  Description of Artificial Sequence: Synthetic oligonucleotide
  Antisense strand to SEQ ID NO: 643126
uuucauguggucuacaggc

SEQ ID NO: 643128 - RNA, 19 nt, Artificial Sequence
  Description of Artificial Sequence: Synthetic oligonucleotide
  Sense strand starting at position 33 of SEQ ID NO: 585479
auguuauccuuagcuguac

SEQ ID NO: 643129 - RNA, 19 nt, Artificial Sequence
  Description of Artificial Sequence: Synthetic oligonucleotide
  Antisense strand to SEQ ID NO: 643128
guacagcuaaggauaacau

SEQ ID NO: 643130 - RNA, 19 nt, Artificial Sequence
  Description of Artificial Sequence: Synthetic oligonucleotide
  Sense strand starting at position 189 of SEQ ID NO: 585479
gauacauugcugugcucca

SEQ ID NO: 643131 - RNA, 19 nt, Artificial Sequence
  Description of Artificial Sequence: Synthetic oligonucleotide
  Antisense strand to SEQ ID NO: 643130
uggagcacagcaauguauc

SEQ ID NO: 643132 - RNA, 19 nt, Artificial Sequence
  Description of Artificial Sequence: Synthetic oligonucleotide
  Sense strand starting at position 280 of SEQ ID NO: 585479
agugaagcuucuguuuaca

SEQ ID NO: 643133 - RNA, 19 nt, Artificial Sequence
  Description of Artificial Sequence: Synthetic oligonucleotide
  Antisense strand to SEQ ID NO: 643132
uguaaacagaagcuucacu

SEQ ID NO: 643134 - RNA, 19 nt, Artificial Sequence
  Description of Artificial Sequence: Synthetic oligonucleotide
  Sense strand starting at position 282 of SEQ ID NO: 585479
ugaagcuucuguuuacaag

SEQ ID NO: 643135 - RNA, 19 nt, Artificial Sequence
  Description of Artificial Sequence: Synthetic oligonucleotide
  Antisense strand to SEQ ID NO: 643134
cuuguaaacagaagcuuca

SEQ ID NO: 643136 - RNA, 19 nt, Artificial Sequence
  Description of Artificial Sequence: Synthetic oligonucleotide
  Sense strand starting at position 283 of SEQ ID NO: 585479
gaagcuucuguuuacaagu

SEQ ID NO: 643137 - RNA, 19 nt, Artificial Sequence
  Description of Artificial Sequence: Synthetic oligonucleotide
  Antisense strand to SEQ ID NO: 643136
acuuguaaacagaagcuuc

SEQ ID NO: 643138 - RNA, 19 nt, Artificial Sequence
  Description of Artificial Sequence: Synthetic oligonucleotide
  Sense strand starting at position 291 of SEQ ID NO: 585479
uguuuacaaguuuaccaua

SEQ ID NO: 643139 - RNA, 19 nt, Artificial Sequence
  Description of Artificial Sequence: Synthetic oligonucleotide
  Antisense strand to SEQ ID NO: 643138
uaugguaaacuuguaaaca

SEQ ID NO: 643140 - RNA, 19 nt, Artificial Sequence
  Description of Artificial Sequence: Synthetic oligonucleotide
  Sense strand starting at position 296 of SEQ ID NO: 585479
acaaguuuaccauauggca

SEQ ID NO: 643141 - RNA, 19 nt, Artificial Sequence
  Description of Artificial Sequence: Synthetic oligonucleotide
  Antisense strand to SEQ ID NO: 643140
ugccauaugguaaacuugu

SEQ ID NO: 643142 - RNA, 19 nt, Artificial Sequence
  Description of Artificial Sequence: Synthetic oligonucleotide
  Sense strand starting at position 695 of SEQ ID NO: 585479
ccgcgaaugcucuuuguuu

SEQ ID NO: 643143 - RNA, 19 nt, Artificial Sequence
  Description of Artificial Sequence: Synthetic oligonucleotide
  Antisense strand to SEQ ID NO: 643142
aaacaaagagcauucgcgg

SEQ ID NO: 643144 - RNA, 19 nt, Artificial Sequence
  Description of Artificial Sequence: Synthetic oligonucleotide
  Sense strand starting at position 706 of SEQ ID NO: 585479
cuuuguuucuaacuggaaa

SEQ ID NO: 643145 - RNA, 19 nt, Artificial Sequence
  Description of Artificial Sequence: Synthetic oligonucleotide
  Antisense strand to SEQ ID NO: 643144
uuuccaguuagaaacaaag

SEQ ID NO: 643146 - RNA, 19 nt, Artificial Sequence
  Description of Artificial Sequence: Synthetic oligonucleotide
  Sense strand starting at position 770 of SEQ ID NO: 585479
agagacacgucacuuuacu

SEQ ID NO: 643147 - RNA, 19 nt, Artificial Sequence
  Description of Artificial Sequence: Synthetic oligonucleotide
  Antisense strand to SEQ ID NO: 643146
aguaaagugacgugucucu

SEQ ID NO: 643148 - RNA, 19 nt, Artificial Sequence
  Description of Artificial Sequence: Synthetic oligonucleotide
  Sense strand starting at position 782 of SEQ ID NO: 585479
cuuuacuuugguugacaga

SEQ ID NO: 643149 - RNA, 19 nt, Artificial Sequence
  Description of Artificial Sequence: Synthetic oligonucleotide
  Antisense strand to SEQ ID NO: 643148
ucugucaaccaaaguaaag

SEQ ID NO: 643150 - RNA, 19 nt, Artificial Sequence
  Description of Artificial Sequence: Synthetic oligonucleotide
  Sense strand starting at position 795 of SEQ ID NO: 585479
gacagaauuucguauauaa

SEQ ID NO: 643151 - RNA, 19 nt, Artificial Sequence
  Description of Artificial Sequence: Synthetic oligonucleotide
  Antisense strand to SEQ ID NO: 643150
uuauauacgaaauucuguc

SEQ ID NO: 643152 - RNA, 19 nt, Artificial Sequence
  Description of Artificial Sequence: Synthetic oligonucleotide
  Sense strand starting at position 841 of SEQ ID NO: 585479
agcuuaaaguccuuagaau

SEQ ID NO: 643153 - RNA, 19 nt, Artificial Sequence
  Description of Artificial Sequence: Synthetic oligonucleotide
  Antisense strand to SEQ ID NO: 643152
auucuaaggacuuuaagcu

SEQ ID NO: 643154 - RNA, 19 nt, Artificial Sequence
  Description of Artificial Sequence: Synthetic oligonucleotide
  Sense strand starting at position 842 of SEQ ID NO: 585479
gcuuaaaguccuuagaaug

SEQ ID NO: 643155 - RNA, 19 nt, Artificial Sequence
  Description of Artificial Sequence: Synthetic oligonucleotide
  Antisense strand to SEQ ID NO: 643154
cauucuaaggacuuuaagc

SEQ ID NO: 643156 - RNA, 19 nt, Artificial Sequence
  Description of Artificial Sequence: Synthetic oligonucleotide
  Sense strand starting at position 1797 of SEQ ID NO: 585479
ugagguagucccggaaauc

SEQ ID NO: 643157 - RNA, 19 nt, Artificial Sequence
  Description of Artificial Sequence: Synthetic oligonucleotide
  Antisense strand to SEQ ID NO: 643156
gauuuccgggacuaccuca

SEQ ID NO: 643158 - RNA, 19 nt, Artificial Sequence
  Description of Artificial Sequence: Synthetic oligonucleotide
  Sense strand starting at position 1808 of SEQ ID NO: 585479
cggaaauccuugcuucgga

SEQ ID NO: 643159 - RNA, 19 nt, Artificial Sequence
  Description of Artificial Sequence: Synthetic oligonucleotide
  Antisense strand to SEQ ID NO: 643158
uccgaagcaaggauuuccg

SEQ ID NO: 643160 - RNA, 19 nt, Artificial Sequence
  Description of Artificial Sequence: Synthetic oligonucleotide
  Sense strand starting at position 2657 of SEQ ID NO: 585479
aagccuuaggcucgaggaa

SEQ ID NO: 643161 - RNA, 19 nt, Artificial Sequence
  Description of Artificial Sequence: Synthetic oligonucleotide
  Antisense strand to SEQ ID NO: 643160
uuccucgagccuaaggcuu

SEQ ID NO: 643162 - RNA, 19 nt, Artificial Sequence
  Description of Artificial Sequence: Synthetic oligonucleotide
  Sense strand starting at position 2670 of SEQ ID NO: 585479
gaggaagcgugacugcuua

SEQ ID NO: 643163 - RNA, 19 nt, Artificial Sequence
  Description of Artificial Sequence: Synthetic oligonucleotide
  Antisense strand to SEQ ID NO: 643162
uaagcagucacgcuuccuc

SEQ ID NO: 643164 - RNA, 19 nt, Artificial Sequence
  Description of Artificial Sequence: Synthetic oligonucleotide
  Sense strand starting at position 2698 of SEQ ID NO: 585479
aauaaagguucuguaaguc

SEQ ID NO: 643165 - RNA, 19 nt, Artificial Sequence
  Description of Artificial Sequence: Synthetic oligonucleotide
  Antisense strand to SEQ ID NO: 643164
gacuuacagaaccuuuauu

SEQ ID NO: 643166 - RNA, 19 nt, Artificial Sequence
  Description of Artificial Sequence: Synthetic oligonucleotide
  Sense strand starting at position 2764 of SEQ ID NO: 585479
cucgccuaggaguauauaa

SEQ ID NO: 643167 - RNA, 19 nt, Artificial Sequence
  Description of Artificial Sequence: Synthetic oligonucleotide
  Antisense strand to SEQ ID NO: 643166
uuauauacuccuaggcgag

SEQ ID NO: 643168 - RNA, 19 nt, Artificial Sequence
  Description of Artificial Sequence: Synthetic oligonucleotide
  Sense strand starting at position 2766 of SEQ ID NO: 585479
cgccuaggaguauauaaac

SEQ ID NO: 643169 - RNA, 19 nt, Artificial Sequence
  Description of Artificial Sequence: Synthetic oligonucleotide
  Antisense strand to SEQ ID NO: 643168
guuuauauacuccuaggcg

SEQ ID NO: 643170 - RNA, 19 nt, Artificial Sequence
  Description of Artificial Sequence: Synthetic oligonucleotide
  Sense strand starting at position 2874 of SEQ ID NO: 585479
uucuaauguggacgaucau

SEQ ID NO: 643171 - RNA, 19 nt, Artificial Sequence
  Description of Artificial Sequence: Synthetic oligonucleotide
  Antisense strand to SEQ ID NO: 643170
augaucguccacauuagaa

SEQ ID NO: 643172 - RNA, 19 nt, Artificial Sequence
  Description of Artificial Sequence: Synthetic oligonucleotide
  Sense strand starting at position 2875 of SEQ ID NO: 585479
ucuaauguggacgaucauu

SEQ ID NO: 643173 - RNA, 19 nt, Artificial Sequence
  Description of Artificial Sequence: Synthetic oligonucleotide
  Antisense strand to SEQ ID NO: 643172
aaugaucguccacauuaga

SEQ ID NO: 643174 - RNA, 19 nt, Artificial Sequence
  Description of Artificial Sequence: Synthetic oligonucleotide
  Sense strand starting at position 2922 of SEQ ID NO: 585479
gacugacgccuguaaucac

SEQ ID NO: 643175 - RNA, 19 nt, Artificial Sequence
  Description of Artificial Sequence: Synthetic oligonucleotide
  Antisense strand to SEQ ID NO: 643174
gugauuacaggcgucaguc

SEQ ID NO: 643176 - RNA, 19 nt, Artificial Sequence
  Description of Artificial Sequence: Synthetic oligonucleotide
  Sense strand starting at position 3372 of SEQ ID NO: 585479
uggugaugcgcuccuguga

SEQ ID NO: 643177 - RNA, 19 nt, Artificial Sequence
  Description of Artificial Sequence: Synthetic oligonucleotide
  Antisense strand to SEQ ID NO: 643176
ucacaggagcgcaucacca

SEQ ID NO: 643178 - RNA, 19 nt, Artificial Sequence
  Description of Artificial Sequence: Synthetic oligonucleotide
  Sense strand starting at position 3373 of SEQ ID NO: 585479
ggugaugcgcuccugugau

SEQ ID NO: 643179 - RNA, 19 nt, Artificial Sequence
  Description of Artificial Sequence: Synthetic oligonucleotide
  Antisense strand to SEQ ID NO: 643178
aucacaggagcgcaucacc

SEQ ID NO: 643180 - RNA, 19 nt, Artificial Sequence
  Description of Artificial Sequence: Synthetic oligonucleotide
  Sense strand starting at position 3532 of SEQ ID NO: 585479
gccuuuggugaacaggaau

SEQ ID NO: 643181 - RNA, 19 nt, Artificial Sequence
  Description of Artificial Sequence: Synthetic oligonucleotide
  Antisense strand to SEQ ID NO: 643180
auuccuguucaccaaaggc

SEQ ID NO: 643182 - RNA, 19 nt, Artificial Sequence
  Description of Artificial Sequence: Synthetic oligonucleotide
  Sense strand starting at position 3558 of SEQ ID NO: 585479
auuagugacccgcagugua

SEQ ID NO: 643183 - RNA, 19 nt, Artificial Sequence
  Description of Artificial Sequence: Synthetic oligonucleotide
  Antisense strand to SEQ ID NO: 643182
uacacugcgggucacuaau

SEQ ID NO: 643184 - RNA, 19 nt, Artificial Sequence
  Description of Artificial Sequence: Synthetic oligonucleotide
  Sense strand starting at position 3623 of SEQ ID NO: 585479
gagauuuccuaggauagac

SEQ ID NO: 643185 - RNA, 19 nt, Artificial Sequence
  Description of Artificial Sequence: Synthetic oligonucleotide
  Antisense strand to SEQ ID NO: 643184
gucuauccuaggaaaucuc

SEQ ID NO: 643186 - RNA, 19 nt, Artificial Sequence
  Description of Artificial Sequence: Synthetic oligonucleotide
  Sense strand starting at position 3642 of SEQ ID NO: 585479
aagccaguuugugcaauuu

SEQ ID NO: 643187 - RNA, 19 nt, Artificial Sequence
  Description of Artificial Sequence: Synthetic oligonucleotide
  Antisense strand to SEQ ID NO: 643186
aaauugcacaaacuggcuu

SEQ ID NO: 643188 - RNA, 19 nt, Artificial Sequence
  Description of Artificial Sequence: Synthetic oligonucleotide
  Sense strand starting at position 3685 of SEQ ID NO: 585479
auggaaagauuagaguuua

SEQ ID NO: 643189 - RNA, 19 nt, Artificial Sequence
  Description of Artificial Sequence: Synthetic oligonucleotide
  Antisense strand to SEQ ID NO: 643188
uaaacucuaaucuuuccau

SEQ ID NO: 643190 - RNA, 19 nt, Artificial Sequence
  Description of Artificial Sequence: Synthetic oligonucleotide
  Sense strand starting at position 3740 of SEQ ID NO: 585479
ggugcauccguuuagugga

SEQ ID NO: 643191 - RNA, 19 nt, Artificial Sequence
  Description of Artificial Sequence: Synthetic oligonucleotide
  Antisense strand to SEQ ID NO: 643190
uccacuaaacggaugcacc

SEQ ID NO: 643192 - RNA, 19 nt, Artificial Sequence
  Description of Artificial Sequence: Synthetic oligonucleotide
  Sense strand starting at position 3745 of SEQ ID NO: 585479
auccguuuaguggauuagu

SEQ ID NO: 643193 - RNA, 19 nt, Artificial Sequence
  Description of Artificial Sequence: Synthetic oligonucleotide
  Antisense strand to SEQ ID NO: 643192
acuaauccacuaaacggau

SEQ ID NO: 643194 - RNA, 19 nt, Artificial Sequence
  Description of Artificial Sequence: Synthetic oligonucleotide
  Sense strand starting at position 3748 of SEQ ID NO: 585479
cguuuaguggauuaguaua

SEQ ID NO: 643195 - RNA, 19 nt, Artificial Sequence
  Description of Artificial Sequence: Synthetic oligonucleotide
  Antisense strand to SEQ ID NO: 643194
uauacuaauccacuaaacg

SEQ ID NO: 643196 - RNA, 19 nt, Artificial Sequence
  Description of Artificial Sequence: Synthetic oligonucleotide
  Sense strand starting at position 3750 of SEQ ID NO: 585479
uuuaguggauuaguauaca

SEQ ID NO: 643197 - RNA, 19 nt, Artificial Sequence
  Description of Artificial Sequence: Synthetic oligonucleotide
  Antisense strand to SEQ ID NO: 643196
uguauacuaauccacuaaa

SEQ ID NO: 643198 - RNA, 19 nt, Artificial Sequence
  Description of Artificial Sequence: Synthetic oligonucleotide
  Sense strand starting at position 3762 of SEQ ID NO: 585479
guauacagccauuaggaau

SEQ ID NO: 643199 - RNA, 19 nt, Artificial Sequence
  Description of Artificial Sequence: Synthetic oligonucleotide
  Antisense strand to SEQ ID NO: 643198
auuccuaauggcuguauac

SEQ ID NO: 643200 - RNA, 19 nt, Artificial Sequence
  Description of Artificial Sequence: Synthetic oligonucleotide
  Sense strand starting at position 3784 of SEQ ID NO: 585479
ggaauucuuuaugugcuga

SEQ ID NO: 643201 - RNA, 19 nt, Artificial Sequence
  Description of Artificial Sequence: Synthetic oligonucleotide
  Antisense strand to SEQ ID NO: 643200
ucagcacauaaagaauucc

SEQ ID NO: 643202 - RNA, 19 nt, Artificial Sequence
  Description of Artificial Sequence: Synthetic oligonucleotide
  Sense strand starting at position 3837 of SEQ ID NO: 585479
ccagguucugaauagugua

SEQ ID NO: 643203 - RNA, 19 nt, Artificial Sequence
  Description of Artificial Sequence: Synthetic oligonucleotide
  Antisense strand to SEQ ID NO: 643202
uacacuauucagaaccugg

SEQ ID NO: 643204 - RNA, 19 nt, Artificial Sequence
  Description of Artificial Sequence: Synthetic oligonucleotide
  Sense strand starting at position 3844 of SEQ ID NO: 585479
cugaauaguguauaaagua

SEQ ID NO: 643205 - RNA, 19 nt, Artificial Sequence
  Description of Artificial Sequence: Synthetic oligonucleotide
  Antisense strand to SEQ ID NO: 643204
uacuuuauacacuauucag

SEQ ID NO: 643206 - RNA, 19 nt, Artificial Sequence
  Description of Artificial Sequence: Synthetic oligonucleotide
  Sense strand starting at position 3936 of SEQ ID NO: 585479
aguggcugccucuaaggau

SEQ ID NO: 643207 - RNA, 19 nt, Artificial Sequence
  Description of Artificial Sequence: Synthetic oligonucleotide
  Antisense strand to SEQ ID NO: 643206
auccuuagaggcagccacu

SEQ ID NO: 643208 - RNA, 19 nt, Artificial Sequence
  Description of Artificial Sequence: Synthetic oligonucleotide
  Sense strand starting at position 263 of SEQ ID NO: 585480
ccugaucuauaucccagua

SEQ ID NO: 643209 - RNA, 19 nt, Artificial Sequence
  Description of Artificial Sequence: Synthetic oligonucleotide
  Antisense strand to SEQ ID NO: 643208
uacugggauauagaucagg

SEQ ID NO: 643210 - RNA, 19 nt, Artificial Sequence
  Description of Artificial Sequence: Synthetic oligonucleotide
  Sense strand starting at position 268 of SEQ ID NO: 585480
ucuauaucccaguagauug

SEQ ID NO: 643211 - RNA, 19 nt, Artificial Sequence
  Description of Artificial Sequence: Synthetic oligonucleotide
  Antisense strand to SEQ ID NO: 643210
caaucuacugggauauaga

SEQ ID NO: 643212 - RNA, 19 nt, Artificial Sequence
  Description of Artificial Sequence: Synthetic oligonucleotide
  Sense strand starting at position 275 of SEQ ID NO: 585480
cccaguagauugcuagaaa

SEQ ID NO: 643213 - RNA, 19 nt, Artificial Sequence
  Description of Artificial Sequence: Synthetic oligonucleotide
  Antisense strand to SEQ ID NO: 643212
uuucuagcaaucuacuggg

SEQ ID NO: 643214 - RNA, 19 nt, Artificial Sequence
  Description of Artificial Sequence: Synthetic oligonucleotide
  Sense strand starting at position 311 of SEQ ID NO: 585480
uggcguaaguauuuguaaa

SEQ ID NO: 643215 - RNA, 19 nt, Artificial Sequence
  Description of Artificial Sequence: Synthetic oligonucleotide
  Antisense strand to SEQ ID NO: 643214
uuuacaaauacuuacgcca

SEQ ID NO: 643216 - RNA, 19 nt, Artificial Sequence
  Description of Artificial Sequence: Synthetic oligonucleotide
  Sense strand starting at position 312 of SEQ ID NO: 585480
ggcguaaguauuuguaaau

SEQ ID NO: 643217 - RNA, 19 nt, Artificial Sequence
  Description of Artificial Sequence: Synthetic oligonucleotide
  Antisense strand to SEQ ID NO: 643216
auuuacaaauacuuacgcc

SEQ ID NO: 643218 - RNA, 19 nt, Artificial Sequence
  Description of Artificial Sequence: Synthetic oligonucleotide
  Sense strand starting at position 313 of SEQ ID NO: 585480
gcguaaguauuuguaaaug

SEQ ID NO: 643219 - RNA, 19 nt, Artificial Sequence
  Description of Artificial Sequence: Synthetic oligonucleotide
  Antisense strand to SEQ ID NO: 643218
cauuuacaaauacuuacgc

SEQ ID NO: 643220 - RNA, 19 nt, Artificial Sequence
  Description of Artificial Sequence: Synthetic oligonucleotide
  Sense strand starting at position 324 of SEQ ID NO: 585480
uguaaaugcuucccuaggu

SEQ ID NO: 643221 - RNA, 19 nt, Artificial Sequence
  Description of Artificial Sequence: Synthetic oligonucleotide
  Antisense strand to SEQ ID NO: 643220
accuagggaagcauuuaca

SEQ ID NO: 643222 - RNA, 19 nt, Artificial Sequence
  Description of Artificial Sequence: Synthetic oligonucleotide
  Sense strand starting at position 325 of SEQ ID NO: 585480
guaaaugcuucccuaggua

SEQ ID NO: 643223 - RNA, 19 nt, Artificial Sequence
  Description of Artificial Sequence: Synthetic oligonucleotide
  Antisense strand to SEQ ID NO: 643222
uaccuagggaagcauuuac

SEQ ID NO: 643224 - RNA, 19 nt, Artificial Sequence
  Description of Artificial Sequence: Synthetic oligonucleotide
  Sense strand starting at position 370 of SEQ ID NO: 585480
ucuagaauguugccaggau

SEQ ID NO: 643225 - RNA, 19 nt, Artificial Sequence
  Description of Artificial Sequence: Synthetic oligonucleotide
  Antisense strand to SEQ ID NO: 643224
auccuggcaacauucuaga

SEQ ID NO: 643226 - RNA, 19 nt, Artificial Sequence
  Description of Artificial Sequence: Synthetic oligonucleotide
  Sense strand starting at position 420 of SEQ ID NO: 585480
gguccauucucaucucuca

SEQ ID NO: 643227 - RNA, 19 nt, Artificial Sequence
  Description of Artificial Sequence: Synthetic oligonucleotide
  Antisense strand to SEQ ID NO: 643226
ugagagaugagaauggacc

SEQ ID NO: 643228 - RNA, 19 nt, Artificial Sequence
  Description of Artificial Sequence: Synthetic oligonucleotide
  Sense strand starting at position 640 of SEQ ID NO: 585480
acuggaugaucuuccucau

SEQ ID NO: 643229 - RNA, 19 nt, Artificial Sequence
  Description of Artificial Sequence: Synthetic oligonucleotide
  Antisense strand to SEQ ID NO: 643228
augaggaagaucauccagu

SEQ ID NO: 643230 - RNA, 19 nt, Artificial Sequence
  Description of Artificial Sequence: Synthetic oligonucleotide
  Sense strand starting at position 643 of SEQ ID NO: 585480
ggaugaucuuccucauaag

SEQ ID NO: 643231 - RNA, 19 nt, Artificial Sequence
  Description of Artificial Sequence: Synthetic oligonucleotide
  Antisense strand to SEQ ID NO: 643230
cuuaugaggaagaucaucc

SEQ ID NO: 643232 - RNA, 19 nt, Artificial Sequence
  Description of Artificial Sequence: Synthetic oligonucleotide
  Sense strand starting at position 662 of SEQ ID NO: 585480
aacgaaacuccuugugggu

SEQ ID NO: 643233 - RNA, 19 nt, Artificial Sequence
  Description of Artificial Sequence: Synthetic oligonucleotide
  Antisense strand to SEQ ID NO: 643232
acccacaaggaguuucguu

SEQ ID NO: 643234 - RNA, 19 nt, Artificial Sequence
  Description of Artificial Sequence: Synthetic oligonucleotide
  Sense strand starting at position 700 of SEQ ID NO: 585480
ucuggcuuuccugaccuua

SEQ ID NO: 643235 - RNA, 19 nt, Artificial Sequence
  Description of Artificial Sequence: Synthetic oligonucleotide
  Antisense strand to SEQ ID NO: 643234
uaaggucaggaaagccaga

SEQ ID NO: 643236 - RNA, 19 nt, Artificial Sequence
  Description of Artificial Sequence: Synthetic oligonucleotide
  Sense strand starting at position 1038 of SEQ ID NO: 585480
aaacuaaaugcagaguagu

SEQ ID NO: 643237 - RNA, 19 nt, Artificial Sequence
  Description of Artificial Sequence: Synthetic oligonucleotide
  Antisense strand to SEQ ID NO: 643236
acuacucugcauuuaguuu

SEQ ID NO: 643238 - RNA, 19 nt, Artificial Sequence
  Description of Artificial Sequence: Synthetic oligonucleotide
  Sense strand starting at position 1048 of SEQ ID NO: 585480
cagaguaguggcugagauu

SEQ ID NO: 643239 - RNA, 19 nt, Artificial Sequence
  Description of Artificial Sequence: Synthetic oligonucleotide
  Antisense strand to SEQ ID NO: 643238
aaucucagccacuacucug

SEQ ID NO: 643240 - RNA, 19 nt, Artificial Sequence
  Description of Artificial Sequence: Synthetic oligonucleotide
  Sense strand starting at position 1049 of SEQ ID NO: 585480
agaguaguggcugagauuc

SEQ ID NO: 643241 - RNA, 19 nt, Artificial Sequence
  Description of Artificial Sequence: Synthetic oligonucleotide
  Antisense strand to SEQ ID NO: 643240
gaaucucagccacuacucu

SEQ ID NO: 643242 - RNA, 19 nt, Artificial Sequence
  Description of Artificial Sequence: Synthetic oligonucleotide
  Sense strand starting at position 1059 of SEQ ID NO: 585480
cugagauucugugccaucu

SEQ ID NO: 643243 - RNA, 19 nt, Artificial Sequence
  Description of Artificial Sequence: Synthetic oligonucleotide
  Antisense strand to SEQ ID NO: 643242
agauggcacagaaucucag

SEQ ID NO: 643244 - RNA, 19 nt, Artificial Sequence
  Description of Artificial Sequence: Synthetic oligonucleotide
  Sense strand starting at position 1109 of SEQ ID NO: 585480
cagguuucugcagagacua

SEQ ID NO: 643245 - RNA, 19 nt, Artificial Sequence
  Description of Artificial Sequence: Synthetic oligonucleotide
  Antisense strand to SEQ ID NO: 643244
uagucucugcagaaaccug

SEQ ID NO: 643246 - RNA, 19 nt, Artificial Sequence
  Description of Artificial Sequence: Synthetic oligonucleotide
  Sense strand starting at position 1111 of SEQ ID NO: 585480
gguuucugcagagacuacu

SEQ ID NO: 643247 - RNA, 19 nt, Artificial Sequence
  Description of Artificial Sequence: Synthetic oligonucleotide
  Antisense strand to SEQ ID NO: 643246
aguagucucugcagaaacc

SEQ ID NO: 643248 - RNA, 19 nt, Artificial Sequence
  Description of Artificial Sequence: Synthetic oligonucleotide
  Sense strand starting at position 1120 of SEQ ID NO: 585480
agagacuacucuuugccuu

SEQ ID NO: 643249 - RNA, 19 nt, Artificial Sequence
  Description of Artificial Sequence: Synthetic oligonucleotide
  Antisense strand to SEQ ID NO: 643248
aaggcaaagaguagucucu

SEQ ID NO: 643250 - RNA, 19 nt, Artificial Sequence
  Description of Artificial Sequence: Synthetic oligonucleotide
  Sense strand starting at position 2076 of SEQ ID NO: 585480
ggaggugagcuuugcagau

SEQ ID NO: 643251 - RNA, 19 nt, Artificial Sequence
  Description of Artificial Sequence: Synthetic oligonucleotide
  Antisense strand to SEQ ID NO: 643250
aucugcaaagcucaccucc

SEQ ID NO: 643252 - RNA, 19 nt, Artificial Sequence
  Description of Artificial Sequence: Synthetic oligonucleotide
  Sense strand starting at position 2135 of SEQ ID NO: 585480
gccugagucagagaauucu

SEQ ID NO: 643253 - RNA, 19 nt, Artificial Sequence
  Description of Artificial Sequence: Synthetic oligonucleotide
  Antisense strand to SEQ ID NO: 643252
agaauucucugacucaggc

SEQ ID NO: 643254 - RNA, 19 nt, Artificial Sequence
  Description of Artificial Sequence: Synthetic oligonucleotide
  Sense strand starting at position 2141 of SEQ ID NO: 585480
gucagagaauucuuugcca

SEQ ID NO: 643255 - RNA, 19 nt, Artificial Sequence
  Description of Artificial Sequence: Synthetic oligonucleotide
  Antisense strand to SEQ ID NO: 643254
uggcaaagaauucucugac

SEQ ID NO: 643256 - RNA, 19 nt, Artificial Sequence
  Description of Artificial Sequence: Synthetic oligonucleotide
  Sense strand starting at position 2183 of SEQ ID NO: 585480
ucgggucaacuuuggguaa

SEQ ID NO: 643257 - RNA, 19 nt, Artificial Sequence
  Description of Artificial Sequence: Synthetic oligonucleotide
  Antisense strand to SEQ ID NO: 643256
uuacccaaaguugacccga

SEQ ID NO: 643258 - RNA, 19 nt, Artificial Sequence
  Description of Artificial Sequence: Synthetic oligonucleotide
  Sense strand starting at position 2204 of SEQ ID NO: 585480
ggaggagcucauuagcuga

SEQ ID NO: 643259 - RNA, 19 nt, Artificial Sequence
  Description of Artificial Sequence: Synthetic oligonucleotide
  Antisense strand to SEQ ID NO: 643258
ucagcuaaugagcuccucc

SEQ ID NO: 643260 - RNA, 19 nt, Artificial Sequence
  Description of Artificial Sequence: Synthetic oligonucleotide
  Sense strand starting at position 2424 of SEQ ID NO: 585480
ggaguaguuucagcauagc

SEQ ID NO: 643261 - RNA, 19 nt, Artificial Sequence
  Description of Artificial Sequence: Synthetic oligonucleotide
  Antisense strand to SEQ ID NO: 643260
gcuaugcugaaacuacucc

SEQ ID NO: 643262 - RNA, 19 nt, Artificial Sequence
  Description of Artificial Sequence: Synthetic oligonucleotide
  Sense strand starting at position 2565 of SEQ ID NO: 585480
aauacauaguaugugagau

SEQ ID NO: 643263 - RNA, 19 nt, Artificial Sequence
  Description of Artificial Sequence: Synthetic oligonucleotide
  Antisense strand to SEQ ID NO: 643262
aucucacauacuauguauu

SEQ ID NO: 643264 - RNA, 19 nt, Artificial Sequence
  Description of Artificial Sequence: Synthetic oligonucleotide
  Sense strand starting at position 2571 of SEQ ID NO: 585480
uaguaugugagauagugau

SEQ ID NO: 643265 - RNA, 19 nt, Artificial Sequence
  Description of Artificial Sequence: Synthetic oligonucleotide
  Antisense strand to SEQ ID NO: 643264
aucacuaucucacauacua

SEQ ID NO: 643266 - RNA, 19 nt, Artificial Sequence
  Description of Artificial Sequence: Synthetic oligonucleotide
  Sense strand starting at position 2622 of SEQ ID NO: 585480
ugggauaauguuuggaggu

SEQ ID NO: 643267 - RNA, 19 nt, Artificial Sequence
  Description of Artificial Sequence: Synthetic oligonucleotide
  Antisense strand to SEQ ID NO: 643266
accuccaaacauuauccca

SEQ ID NO: 643268 - RNA, 19 nt, Artificial Sequence
  Description of Artificial Sequence: Synthetic oligonucleotide
  Sense strand starting at position 2673 of SEQ ID NO: 585480
auggcuucacaguggagua

SEQ ID NO: 643269 - RNA, 19 nt, Artificial Sequence
  Description of Artificial Sequence: Synthetic oligonucleotide
  Antisense strand to SEQ ID NO: 643268
uacuccacugugaagccau

SEQ ID NO: 643270 - RNA, 19 nt, Artificial Sequence
  Description of Artificial Sequence: Synthetic oligonucleotide
  Sense strand starting at position 2675 of SEQ ID NO: 585480
ggcuucacaguggaguaaa

SEQ ID NO: 643271 - RNA, 19 nt, Artificial Sequence
  Description of Artificial Sequence: Synthetic oligonucleotide
  Antisense strand to SEQ ID NO: 643270
uuuacuccacugugaagcc

SEQ ID NO: 643272 - RNA, 19 nt, Artificial Sequence
  Description of Artificial Sequence: Synthetic oligonucleotide
  Sense strand starting at position 2766 of SEQ ID NO: 585480
cugagauguucuuuacugc

SEQ ID NO: 643273 - RNA, 19 nt, Artificial Sequence
  Description of Artificial Sequence: Synthetic oligonucleotide
  Antisense strand to SEQ ID NO: 643272
gcaguaaagaacaucucag

SEQ ID NO: 643274 - RNA, 19 nt, Artificial Sequence
  Description of Artificial Sequence: Synthetic oligonucleotide
  Sense strand starting at position 2767 of SEQ ID NO: 585480
ugagauguucuuuacugca

SEQ ID NO: 643275 - RNA, 19 nt, Artificial Sequence
  Description of Artificial Sequence: Synthetic oligonucleotide
  Antisense strand to SEQ ID NO: 643274
ugcaguaaagaacaucuca

SEQ ID NO: 643276 - RNA, 19 nt, Artificial Sequence
  Description of Artificial Sequence: Synthetic oligonucleotide
  Sense strand starting at position 2775 of SEQ ID NO: 585480
ucuuuacugcacuagucau

SEQ ID NO: 643277 - RNA, 19 nt, Artificial Sequence
  Description of Artificial Sequence: Synthetic oligonucleotide
  Antisense strand to SEQ ID NO: 643276
augacuagugcaguaaaga

SEQ ID NO: 643278 - RNA, 19 nt, Artificial Sequence
  Description of Artificial Sequence: Synthetic oligonucleotide
  Sense strand starting at position 2781 of SEQ ID NO: 585480
cugcacuagucauuucuuu

SEQ ID NO: 643279 - RNA, 19 nt, Artificial Sequence
  Description of Artificial Sequence: Synthetic oligonucleotide
  Antisense strand to SEQ ID NO: 643278
aaagaaaugacuagugcag

SEQ ID NO: 643280 - RNA, 19 nt, Artificial Sequence
  Description of Artificial Sequence: Synthetic oligonucleotide
  Sense strand starting at position 2865 of SEQ ID NO: 585480
guaacuuaggaagguuaaa

SEQ ID NO: 643281 - RNA, 19 nt, Artificial Sequence
  Description of Artificial Sequence: Synthetic oligonucleotide
  Antisense strand to SEQ ID NO: 643280
uuuaaccuuccuaaguuac

SEQ ID NO: 643282 - RNA, 19 nt, Artificial Sequence
  Description of Artificial Sequence: Synthetic oligonucleotide
  Sense strand starting at position 2897 of SEQ ID NO: 585480
gucauaugcuagucaauag

SEQ ID NO: 643283 - RNA, 19 nt, Artificial Sequence
  Description of Artificial Sequence: Synthetic oligonucleotide
  Antisense strand to SEQ ID NO: 643282
cuauugacuagcauaugac

SEQ ID NO: 643284 - RNA, 19 nt, Artificial Sequence
  Description of Artificial Sequence: Synthetic oligonucleotide
  Sense strand starting at position 3229 of SEQ ID NO: 585480
cgugguuugcugcauuuau

SEQ ID NO: 643285 - RNA, 19 nt, Artificial Sequence
  Description of Artificial Sequence: Synthetic oligonucleotide
  Antisense strand to SEQ ID NO: 643284
auaaaugcagcaaaccacg

SEQ ID NO: 643286 - RNA, 19 nt, Artificial Sequence
  Description of Artificial Sequence: Synthetic oligonucleotide
  Sense strand starting at position 3868 of SEQ ID NO: 585480
uuugacaaucugugauaag

SEQ ID NO: 643287 - RNA, 19 nt, Artificial Sequence
  Description of Artificial Sequence: Synthetic oligonucleotide
  Antisense strand to SEQ ID NO: 643286
cuuaucacagauugucaaa

SEQ ID NO: 643288 - RNA, 19 nt, Artificial Sequence
  Description of Artificial Sequence: Synthetic oligonucleotide
  Sense strand starting at position 106 of SEQ ID NO: 585481
gcauaagaauugcuagauc

SEQ ID NO: 643289 - RNA, 19 nt, Artificial Sequence
  Description of Artificial Sequence: Synthetic oligonucleotide
  Antisense strand to SEQ ID NO: 643288
gaucuagcaauucuuaugc

SEQ ID NO: 643290 - RNA, 19 nt, Artificial Sequence
  Description of Artificial Sequence: Synthetic oligonucleotide
  Sense strand starting at position 114 of SEQ ID NO: 585481
auugcuagaucccaggaga

SEQ ID NO: 643291 - RNA, 19 nt, Artificial Sequence
  Description of Artificial Sequence: Synthetic oligonucleotide
  Antisense strand to SEQ ID NO: 643290
ucuccugggaucuagcaau

SEQ ID NO: 643292 - RNA, 19 nt, Artificial Sequence
  Description of Artificial Sequence: Synthetic oligonucleotide
  Sense strand starting at position 528 of SEQ ID NO: 585481
cguacaguauuuccaguga

SEQ ID NO: 643293 - RNA, 19 nt, Artificial Sequence
  Description of Artificial Sequence: Synthetic oligonucleotide
  Antisense strand to SEQ ID NO: 643292
ucacuggaaauacuguacg

SEQ ID NO: 643294 - RNA, 19 nt, Artificial Sequence
  Description of Artificial Sequence: Synthetic oligonucleotide
  Sense strand starting at position 552 of SEQ ID NO: 585481
agugaacugucuuucgucu

SEQ ID NO: 643295 - RNA, 19 nt, Artificial Sequence
  Description of Artificial Sequence: Synthetic oligonucleotide
  Antisense strand to SEQ ID NO: 643294
agacgaaagacaguucacu

SEQ ID NO: 643296 - RNA, 19 nt, Artificial Sequence
  Description of Artificial Sequence: Synthetic oligonucleotide
  Sense strand starting at position 561 of SEQ ID NO: 585481
ucuuucgucucacacagua

SEQ ID NO: 643297 - RNA, 19 nt, Artificial Sequence
  Description of Artificial Sequence: Synthetic oligonucleotide
  Antisense strand to SEQ ID NO: 643296
uacugugugagacgaaaga

SEQ ID NO: 643298 - RNA, 19 nt, Artificial Sequence
  Description of Artificial Sequence: Synthetic oligonucleotide
  Sense strand starting at position 574 of SEQ ID NO: 585481
acaguaaccuccgugaaga

SEQ ID NO: 643299 - RNA, 19 nt, Artificial Sequence
  Description of Artificial Sequence: Synthetic oligonucleotide
  Antisense strand to SEQ ID NO: 643298
ucuucacggagguuacugu

SEQ ID NO: 643300 - RNA, 19 nt, Artificial Sequence
  Description of Artificial Sequence: Synthetic oligonucleotide
  Sense strand starting at position 575 of SEQ ID NO: 585481
caguaaccuccgugaagaa

SEQ ID NO: 643301 - RNA, 19 nt, Artificial Sequence
  Description of Artificial Sequence: Synthetic oligonucleotide
  Antisense strand to SEQ ID NO: 643300
uucuucacggagguuacug

SEQ ID NO: 643302 - RNA, 19 nt, Artificial Sequence
  Description of Artificial Sequence: Synthetic oligonucleotide
  Sense strand starting at position 593 of SEQ ID NO: 585481
agauccaccuuguucuuua

SEQ ID NO: 643303 - RNA, 19 nt, Artificial Sequence
  Description of Artificial Sequence: Synthetic oligonucleotide
  Antisense strand to SEQ ID NO: 643302
uaaagaacaagguggaucu

SEQ ID NO: 643304 - RNA, 19 nt, Artificial Sequence
  Description of Artificial Sequence: Synthetic oligonucleotide
  Sense strand starting at position 600 of SEQ ID NO: 585481
ccuuguucuuuacuguaua

SEQ ID NO: 643305 - RNA, 19 nt, Artificial Sequence
  Description of Artificial Sequence: Synthetic oligonucleotide
  Antisense strand to SEQ ID NO: 643304
uauacaguaaagaacaagg

SEQ ID NO: 643306 - RNA, 19 nt, Artificial Sequence
  Description of Artificial Sequence: Synthetic oligonucleotide
  Sense strand starting at position 601 of SEQ ID NO: 585481
cuuguucuuuacuguauau

SEQ ID NO: 643307 - RNA, 19 nt, Artificial Sequence
  Description of Artificial Sequence: Synthetic oligonucleotide
  Antisense strand to SEQ ID NO: 643306
auauacaguaaagaacaag

SEQ ID NO: 643308 - RNA, 19 nt, Artificial Sequence
  Description of Artificial Sequence: Synthetic oligonucleotide
  Sense strand starting at position 611 of SEQ ID NO: 585481
acuguauauuccuggcaug

SEQ ID NO: 643309 - RNA, 19 nt, Artificial Sequence
  Description of Artificial Sequence: Synthetic oligonucleotide
  Antisense strand to SEQ ID NO: 643308
caugccaggaauauacagu

SEQ ID NO: 643310 - RNA, 19 nt, Artificial Sequence
  Description of Artificial Sequence: Synthetic oligonucleotide
  Sense strand starting at position 614 of SEQ ID NO: 585481
guauauuccuggcaugcua

SEQ ID NO: 643311 - RNA, 19 nt, Artificial Sequence
  Description of Artificial Sequence: Synthetic oligonucleotide
  Antisense strand to SEQ ID NO: 643310
uagcaugccaggaauauac

SEQ ID NO: 643312 - RNA, 19 nt, Artificial Sequence
  Description of Artificial Sequence: Synthetic oligonucleotide
  Sense strand starting at position 786 of SEQ ID NO: 585481
guguguacaccugaagugu

SEQ ID NO: 643313 - RNA, 19 nt, Artificial Sequence
  Description of Artificial Sequence: Synthetic oligonucleotide
  Antisense strand to SEQ ID NO: 643312
acacuucagguguacacac

SEQ ID NO: 643314 - RNA, 19 nt, Artificial Sequence
  Description of Artificial Sequence: Synthetic oligonucleotide
  Sense strand starting at position 854 of SEQ ID NO: 585481
guggccgugaucuacuaaa

SEQ ID NO: 643315 - RNA, 19 nt, Artificial Sequence
  Description of Artificial Sequence: Synthetic oligonucleotide
  Antisense strand to SEQ ID NO: 643314
uuuaguagaucacggccac

SEQ ID NO: 643316 - RNA, 19 nt, Artificial Sequence
  Description of Artificial Sequence: Synthetic oligonucleotide
  Sense strand starting at position 934 of SEQ ID NO: 585481
aguugcauuccacaagcua

SEQ ID NO: 643317 - RNA, 19 nt, Artificial Sequence
  Description of Artificial Sequence: Synthetic oligonucleotide
  Antisense strand to SEQ ID NO: 643316
uagcuuguggaaugcaacu

SEQ ID NO: 643318 - RNA, 19 nt, Artificial Sequence
  Description of Artificial Sequence: Synthetic oligonucleotide
  Sense strand starting at position 1022 of SEQ ID NO: 585481
ugggcaguguccuucuguu

SEQ ID NO: 643319 - RNA, 19 nt, Artificial Sequence
  Description of Artificial Sequence: Synthetic oligonucleotide
  Antisense strand to SEQ ID NO: 643318
aacagaaggacacugccca

SEQ ID NO: 643320 - RNA, 19 nt, Artificial Sequence
  Description of Artificial Sequence: Synthetic oligonucleotide
  Sense strand starting at position 1097 of SEQ ID NO: 585481
cccagaguuucccaaguag

SEQ ID NO: 643321 - RNA, 19 nt, Artificial Sequence
  Description of Artificial Sequence: Synthetic oligonucleotide
  Antisense strand to SEQ ID NO: 643320
cuacuugggaaacucuggg

SEQ ID NO: 643322 - RNA, 19 nt, Artificial Sequence
  Description of Artificial Sequence: Synthetic oligonucleotide
  Sense strand starting at position 1115 of SEQ ID NO: 585481
gccugaggugucugucaua

SEQ ID NO: 643323 - RNA, 19 nt, Artificial Sequence
  Description of Artificial Sequence: Synthetic oligonucleotide
  Antisense strand to SEQ ID NO: 643322
uaugacagacaccucaggc

SEQ ID NO: 643324 - RNA, 19 nt, Artificial Sequence
  Description of Artificial Sequence: Synthetic oligonucleotide
  Sense strand starting at position 1169 of SEQ ID NO: 585481
cgucucuuacgguggcaaa

SEQ ID NO: 643325 - RNA, 19 nt, Artificial Sequence
  Description of Artificial Sequence: Synthetic oligonucleotide
  Antisense strand to SEQ ID NO: 643324
uuugccaccguaagagacg

SEQ ID NO: 643326 - RNA, 19 nt, Artificial Sequence
  Description of Artificial Sequence: Synthetic oligonucleotide
  Sense strand starting at position 1268 of SEQ ID NO: 585481
gcccguugugccuuuauga

SEQ ID NO: 643327 - RNA, 19 nt, Artificial Sequence
  Description of Artificial Sequence: Synthetic oligonucleotide
  Antisense strand to SEQ ID NO: 643326
ucauaaaggcacaacgggc

SEQ ID NO: 643328 - RNA, 19 nt, Artificial Sequence
  Description of Artificial Sequence: Synthetic oligonucleotide
  Sense strand starting at position 1269 of SEQ ID NO: 585481
cccguugugccuuuaugau

SEQ ID NO: 643329 - RNA, 19 nt, Artificial Sequence
  Description of Artificial Sequence: Synthetic oligonucleotide
  Antisense strand to SEQ ID NO: 643328
aucauaaaggcacaacggg

SEQ ID NO: 643330 - RNA, 19 nt, Artificial Sequence
  Description of Artificial Sequence: Synthetic oligonucleotide
  Sense strand starting at position 1275 of SEQ ID NO: 585481
gugccuuuaugaucuauuu

SEQ ID NO: 643331 - RNA, 19 nt, Artificial Sequence
  Description of Artificial Sequence: Synthetic oligonucleotide
  Antisense strand to SEQ ID NO: 643330
aaauagaucauaaaggcac

SEQ ID NO: 643332 - RNA, 19 nt, Artificial Sequence
  Description of Artificial Sequence: Synthetic oligonucleotide
  Sense strand starting at position 1286 of SEQ ID NO: 585481
aucuauuugugugggugau

SEQ ID NO: 643333 - RNA, 19 nt, Artificial Sequence
  Description of Artificial Sequence: Synthetic oligonucleotide
  Antisense strand to SEQ ID NO: 643332
aucacccacacaaauagau

SEQ ID NO: 643334 - RNA, 19 nt, Artificial Sequence
  Description of Artificial Sequence: Synthetic oligonucleotide
  Sense strand starting at position 1287 of SEQ ID NO: 585481
ucuauuugugugggugaua

SEQ ID NO: 643335 - RNA, 19 nt, Artificial Sequence
  Description of Artificial Sequence: Synthetic oligonucleotide
  Antisense strand to SEQ ID NO: 643334
uaucacccacacaaauaga

SEQ ID NO: 643336 - RNA, 19 nt, Artificial Sequence
  Description of Artificial Sequence: Synthetic oligonucleotide
  Sense strand starting at position 1288 of SEQ ID NO: 585481
cuauuugugugggugauau

SEQ ID NO: 643337 - RNA, 19 nt, Artificial Sequence
  Description of Artificial Sequence: Synthetic oligonucleotide
  Antisense strand to SEQ ID NO: 643336
auaucacccacacaaauag

SEQ ID NO: 643338 - RNA, 19 nt, Artificial Sequence
  Description of Artificial Sequence: Synthetic oligonucleotide
  Sense strand starting at position 1292 of SEQ ID NO: 585481
uugugugggugauauauag

SEQ ID NO: 643339 - RNA, 19 nt, Artificial Sequence
  Description of Artificial Sequence: Synthetic oligonucleotide
  Antisense strand to SEQ ID NO: 643338
cuauauaucacccacacaa

SEQ ID NO: 643340 - RNA, 19 nt, Artificial Sequence
  Description of Artificial Sequence: Synthetic oligonucleotide
  Sense strand starting at position 1342 of SEQ ID NO: 585481
agucuuaaucacugguaga

SEQ ID NO: 643341 - RNA, 19 nt, Artificial Sequence
  Description of Artificial Sequence: Synthetic oligonucleotide
  Antisense strand to SEQ ID NO: 643340
ucuaccagugauuaagacu

SEQ ID NO: 643342 - RNA, 19 nt, Artificial Sequence
  Description of Artificial Sequence: Synthetic oligonucleotide
  Sense strand starting at position 1358 of SEQ ID NO: 585481
agaugcagucucuggugaa

SEQ ID NO: 643343 - RNA, 19 nt, Artificial Sequence
  Description of Artificial Sequence: Synthetic oligonucleotide
  Antisense strand to SEQ ID NO: 643342
uucaccagagacugcaucu

SEQ ID NO: 643344 - RNA, 19 nt, Artificial Sequence
  Description of Artificial Sequence: Synthetic oligonucleotide
  Sense strand starting at position 1359 of SEQ ID NO: 585481
gaugcagucucuggugaaa

SEQ ID NO: 643345 - RNA, 19 nt, Artificial Sequence
  Description of Artificial Sequence: Synthetic oligonucleotide
  Antisense strand to SEQ ID NO: 643344
uuucaccagagacugcauc

SEQ ID NO: 643346 - RNA, 19 nt, Artificial Sequence
  Description of Artificial Sequence: Synthetic oligonucleotide
  Sense strand starting at position 1361 of SEQ ID NO: 585481
ugcagucucuggugaaaua

SEQ ID NO: 643347 - RNA, 19 nt, Artificial Sequence
  Description of Artificial Sequence: Synthetic oligonucleotide
  Antisense strand to SEQ ID NO: 643346
uauuucaccagagacugca

SEQ ID NO: 643348 - RNA, 19 nt, Artificial Sequence
  Description of Artificial Sequence: Synthetic oligonucleotide
  Sense strand starting at position 1362 of SEQ ID NO: 585481
gcagucucuggugaaauaa

SEQ ID NO: 643349 - RNA, 19 nt, Artificial Sequence
  Description of Artificial Sequence: Synthetic oligonucleotide
  Antisense strand to SEQ ID NO: 643348
uuauuucaccagagacugc

SEQ ID NO: 643350 - RNA, 19 nt, Artificial Sequence
  Description of Artificial Sequence: Synthetic oligonucleotide
  Sense strand starting at position 1416 of SEQ ID NO: 585481
acucaucagcguugacaga

SEQ ID NO: 643351 - RNA, 19 nt, Artificial Sequence
  Description of Artificial Sequence: Synthetic oligonucleotide
  Antisense strand to SEQ ID NO: 643350
ucugucaacgcugaugagu

SEQ ID NO: 643352 - RNA, 19 nt, Artificial Sequence
  Description of Artificial Sequence: Synthetic oligonucleotide
  Sense strand starting at position 2996 of SEQ ID NO: 585481
ggcugucuugaccgccuaa

SEQ ID NO: 643353 - RNA, 19 nt, Artificial Sequence
  Description of Artificial Sequence: Synthetic oligonucleotide
  Antisense strand to SEQ ID NO: 643352
uuaggcggucaagacagcc

SEQ ID NO: 643354 - RNA, 19 nt, Artificial Sequence
  Description of Artificial Sequence: Synthetic oligonucleotide
  Sense strand starting at position 3339 of SEQ ID NO: 585481
gugugcuggcagcgugauu

SEQ ID NO: 643355 - RNA, 19 nt, Artificial Sequence
  Description of Artificial Sequence: Synthetic oligonucleotide
  Antisense strand to SEQ ID NO: 643354
aaucacgcugccagcacac

SEQ ID NO: 643356 - RNA, 19 nt, Artificial Sequence
  Description of Artificial Sequence: Synthetic oligonucleotide
  Sense strand starting at position 3352 of SEQ ID NO: 585481
gugauuguccuccagggca

SEQ ID NO: 643357 - RNA, 19 nt, Artificial Sequence
  Description of Artificial Sequence: Synthetic oligonucleotide
  Antisense strand to SEQ ID NO: 643356
ugcccuggaggacaaucac

SEQ ID NO: 643358 - RNA, 19 nt, Artificial Sequence
  Description of Artificial Sequence: Synthetic oligonucleotide
  Sense strand starting at position 3520 of SEQ ID NO: 585481
ucaaguucucuccaaguau

SEQ ID NO: 643359 - RNA, 19 nt, Artificial Sequence
  Description of Artificial Sequence: Synthetic oligonucleotide
  Antisense strand to SEQ ID NO: 643358
auacuuggagagaacuuga

SEQ ID NO: 643360 - RNA, 19 nt, Artificial Sequence
  Description of Artificial Sequence: Synthetic oligonucleotide
  Sense strand starting at position 3531 of SEQ ID NO: 585481
ccaaguauagcagagucuu

SEQ ID NO: 643361 - RNA, 19 nt, Artificial Sequence
  Description of Artificial Sequence: Synthetic oligonucleotide
  Antisense strand to SEQ ID NO: 643360
aagacucugcuauacuugg

SEQ ID NO: 643362 - RNA, 19 nt, Artificial Sequence
  Description of Artificial Sequence: Synthetic oligonucleotide
  Sense strand starting at position 3537 of SEQ ID NO: 585481
auagcagagucuuagagac

SEQ ID NO: 643363 - RNA, 19 nt, Artificial Sequence
  Description of Artificial Sequence: Synthetic oligonucleotide
  Antisense strand to SEQ ID NO: 643362
gucucuaagacucugcuau

SEQ ID NO: 643364 - RNA, 19 nt, Artificial Sequence
  Description of Artificial Sequence: Synthetic oligonucleotide
  Sense strand starting at position 3591 of SEQ ID NO: 585481
gugugaccuugacaaguua

SEQ ID NO: 643365 - RNA, 19 nt, Artificial Sequence
  Description of Artificial Sequence: Synthetic oligonucleotide
  Antisense strand to SEQ ID NO: 643364
uaacuugucaaggucacac

SEQ ID NO: 643366 - RNA, 19 nt, Artificial Sequence
  Description of Artificial Sequence: Synthetic oligonucleotide
  Sense strand starting at position 3861 of SEQ ID NO: 585481
ccgagauuguggcacuuca

SEQ ID NO: 643367 - RNA, 19 nt, Artificial Sequence
  Description of Artificial Sequence: Synthetic oligonucleotide
  Antisense strand to SEQ ID NO: 643366
ugaagugccacaaucucgg

SEQ ID NO: 643368 - RNA, 19 nt, Artificial Sequence
  Description of Artificial Sequence: Synthetic oligonucleotide
  Sense strand starting at position 57 of SEQ ID NO: 585482
gcaagugauacagguauga

SEQ ID NO: 643369 - RNA, 19 nt, Artificial Sequence
  Description of Artificial Sequence: Synthetic oligonucleotide
  Antisense strand to SEQ ID NO: 643368
ucauaccuguaucacuugc

SEQ ID NO: 643370 - RNA, 19 nt, Artificial Sequence
  Description of Artificial Sequence: Synthetic oligonucleotide
  Sense strand starting at position 152 of SEQ ID NO: 585482
agaaguccuuaagaaauuc

SEQ ID NO: 643371 - RNA, 19 nt, Artificial Sequence
  Description of Artificial Sequence: Synthetic oligonucleotide
  Antisense strand to SEQ ID NO: 643370
gaauuucuuaaggacuucu

SEQ ID NO: 643372 - RNA, 19 nt, Artificial Sequence
  Description of Artificial Sequence: Synthetic oligonucleotide
  Sense strand starting at position 218 of SEQ ID NO: 585482
acuuacaugcuguaguaua

SEQ ID NO: 643373 - RNA, 19 nt, Artificial Sequence
  Description of Artificial Sequence: Synthetic oligonucleotide
  Antisense strand to SEQ ID NO: 643372
uauacuacagcauguaagu

SEQ ID NO: 643374 - RNA, 19 nt, Artificial Sequence
  Description of Artificial Sequence: Synthetic oligonucleotide
  Sense strand starting at position 257 of SEQ ID NO: 585482
uggcucugaggucaguuaa

SEQ ID NO: 643375 - RNA, 19 nt, Artificial Sequence
  Description of Artificial Sequence: Synthetic oligonucleotide
  Antisense strand to SEQ ID NO: 643374
uuaacugaccucagagcca

SEQ ID NO: 643376 - RNA, 19 nt, Artificial Sequence
  Description of Artificial Sequence: Synthetic oligonucleotide
  Sense strand starting at position 417 of SEQ ID NO: 585482
guagcauaauuccuggcaa

SEQ ID NO: 643377 - RNA, 19 nt, Artificial Sequence
  Description of Artificial Sequence: Synthetic oligonucleotide
  Antisense strand to SEQ ID NO: 643376
uugccaggaauuaugcuac

SEQ ID NO: 643378 - RNA, 19 nt, Artificial Sequence
  Description of Artificial Sequence: Synthetic oligonucleotide
  Sense strand starting at position 419 of SEQ ID NO: 585482
agcauaauuccuggcaaau

SEQ ID NO: 643379 - RNA, 19 nt, Artificial Sequence
  Description of Artificial Sequence: Synthetic oligonucleotide
  Antisense strand to SEQ ID NO: 643378
auuugccaggaauuaugcu

SEQ ID NO: 643380 - RNA, 19 nt, Artificial Sequence
  Description of Artificial Sequence: Synthetic oligonucleotide
  Sense strand starting at position 874 of SEQ ID NO: 585482
agcuuuaaauccucucgua

SEQ ID NO: 643381 - RNA, 19 nt, Artificial Sequence
  Description of Artificial Sequence: Synthetic oligonucleotide
  Antisense strand to SEQ ID NO: 643380
uacgagaggauuuaaagcu

SEQ ID NO: 643382 - RNA, 19 nt, Artificial Sequence
  Description of Artificial Sequence: Synthetic oligonucleotide
  Sense strand starting at position 890 of SEQ ID NO: 585482
guaguuucccacuauaaug

SEQ ID NO: 643383 - RNA, 19 nt, Artificial Sequence
  Description of Artificial Sequence: Synthetic oligonucleotide
  Antisense strand to SEQ ID NO: 643382
cauuauagugggaaacuac

SEQ ID NO: 643384 - RNA, 19 nt, Artificial Sequence
  Description of Artificial Sequence: Synthetic oligonucleotide
  Sense strand starting at position 916 of SEQ ID NO: 585482
agucuaaagugcucaucuu

SEQ ID NO: 643385 - RNA, 19 nt, Artificial Sequence
  Description of Artificial Sequence: Synthetic oligonucleotide
  Antisense strand to SEQ ID NO: 643384
aagaugagcacuuuagacu

SEQ ID NO: 643386 - RNA, 19 nt, Artificial Sequence
  Description of Artificial Sequence: Synthetic oligonucleotide
  Sense strand starting at position 1047 of SEQ ID NO: 585482
gcaguuuccuuugcuagga

SEQ ID NO: 643387 - RNA, 19 nt, Artificial Sequence
  Description of Artificial Sequence: Synthetic oligonucleotide
  Antisense strand to SEQ ID NO: 643386
uccuagcaaaggaaacugc

SEQ ID NO: 643388 - RNA, 19 nt, Artificial Sequence
  Description of Artificial Sequence: Synthetic oligonucleotide
  Sense strand starting at position 1069 of SEQ ID NO: 585482
cucuuucuggcagaugacu

SEQ ID NO: 643389 - RNA, 19 nt, Artificial Sequence
  Description of Artificial Sequence: Synthetic oligonucleotide
  Antisense strand to SEQ ID NO: 643388
agucaucugccagaaagag

SEQ ID NO: 643390 - RNA, 19 nt, Artificial Sequence
  Description of Artificial Sequence: Synthetic oligonucleotide
  Sense strand starting at position 1138 of SEQ ID NO: 585482
gcagguauccuguccgcua

SEQ ID NO: 643391 - RNA, 19 nt, Artificial Sequence
  Description of Artificial Sequence: Synthetic oligonucleotide
  Antisense strand to SEQ ID NO: 643390
uagcggacaggauaccugc

SEQ ID NO: 643392 - RNA, 19 nt, Artificial Sequence
  Description of Artificial Sequence: Synthetic oligonucleotide
  Sense strand starting at position 1256 of SEQ ID NO: 585482
ggagagugccuggaguuga

SEQ ID NO: 643393 - RNA, 19 nt, Artificial Sequence
  Description of Artificial Sequence: Synthetic oligonucleotide
  Antisense strand to SEQ ID NO: 643392
ucaacuccaggcacucucc

SEQ ID NO: 643394 - RNA, 19 nt, Artificial Sequence
  Description of Artificial Sequence: Synthetic oligonucleotide
  Sense strand starting at position 1261 of SEQ ID NO: 585482
gugccuggaguugaaugaa

SEQ ID NO: 643395 - RNA, 19 nt, Artificial Sequence
  Description of Artificial Sequence: Synthetic oligonucleotide
  Antisense strand to SEQ ID NO: 643394
uucauucaacuccaggcac

SEQ ID NO: 643396 - RNA, 19 nt, Artificial Sequence
  Description of Artificial Sequence: Synthetic oligonucleotide
  Sense strand starting at position 1326 of SEQ ID NO: 585482
uuuaauuaccugugccaga

SEQ ID NO: 643397 - RNA, 19 nt, Artificial Sequence
  Description of Artificial Sequence: Synthetic oligonucleotide
  Antisense strand to SEQ ID NO: 643396
ucuggcacagguaauuaaa

SEQ ID NO: 643398 - RNA, 19 nt, Artificial Sequence
  Description of Artificial Sequence: Synthetic oligonucleotide
  Sense strand starting at position 1327 of SEQ ID NO: 585482
uuaauuaccugugccagaa

SEQ ID NO: 643399 - RNA, 19 nt, Artificial Sequence
  Description of Artificial Sequence: Synthetic oligonucleotide
  Antisense strand to SEQ ID NO: 643398
uucuggcacagguaauuaa

SEQ ID NO: 643400 - RNA, 19 nt, Artificial Sequence
  Description of Artificial Sequence: Synthetic oligonucleotide
  Sense strand starting at position 2314 of SEQ ID NO: 585482
gguugucuuccucgaacca

SEQ ID NO: 643401 - RNA, 19 nt, Artificial Sequence
  Description of Artificial Sequence: Synthetic oligonucleotide
  Antisense strand to SEQ ID NO: 643400
ugguucgaggaagacaacc

SEQ ID NO: 643402 - RNA, 19 nt, Artificial Sequence
  Description of Artificial Sequence: Synthetic oligonucleotide
  Sense strand starting at position 2315 of SEQ ID NO: 585482
guugucuuccucgaaccaa

SEQ ID NO: 643403 - RNA, 19 nt, Artificial Sequence
  Description of Artificial Sequence: Synthetic oligonucleotide
  Antisense strand to SEQ ID NO: 643402
uugguucgaggaagacaac

SEQ ID NO: 643404 - RNA, 19 nt, Artificial Sequence
  Description of Artificial Sequence: Synthetic oligonucleotide
  Sense strand starting at position 2377 of SEQ ID NO: 585482
ccagguucgcgcccuuaaa

SEQ ID NO: 643405 - RNA, 19 nt, Artificial Sequence
  Description of Artificial Sequence: Synthetic oligonucleotide
  Antisense strand to SEQ ID NO: 643404
uuuaagggcgcgaaccugg

SEQ ID NO: 643406 - RNA, 19 nt, Artificial Sequence
  Description of Artificial Sequence: Synthetic oligonucleotide
  Sense strand starting at position 2619 of SEQ ID NO: 585482
guuugaggcgaagguucaa

SEQ ID NO: 643407 - RNA, 19 nt, Artificial Sequence
  Description of Artificial Sequence: Synthetic oligonucleotide
  Antisense strand to SEQ ID NO: 643406
uugaaccuucgccucaaac

SEQ ID NO: 643408 - RNA, 19 nt, Artificial Sequence
  Description of Artificial Sequence: Synthetic oligonucleotide
  Sense strand starting at position 2687 of SEQ ID NO: 585482
cuucccaucggcuaucuaa

SEQ ID NO: 643409 - RNA, 19 nt, Artificial Sequence
  Description of Artificial Sequence: Synthetic oligonucleotide
  Antisense strand to SEQ ID NO: 643408
uuagauagccgaugggaag

SEQ ID NO: 643410 - RNA, 19 nt, Artificial Sequence
  Description of Artificial Sequence: Synthetic oligonucleotide
  Sense strand starting at position 2694 of SEQ ID NO: 585482
ucggcuaucuaauuggaca

SEQ ID NO: 643411 - RNA, 19 nt, Artificial Sequence
  Description of Artificial Sequence: Synthetic oligonucleotide
  Antisense strand to SEQ ID NO: 643410
uguccaauuagauagccga

SEQ ID NO: 643412 - RNA, 19 nt, Artificial Sequence
  Description of Artificial Sequence: Synthetic oligonucleotide
  Sense strand starting at position 2857 of SEQ ID NO: 585482
ccaguagcuccugggacau

SEQ ID NO: 643413 - RNA, 19 nt, Artificial Sequence
  Description of Artificial Sequence: Synthetic oligonucleotide
  Antisense strand to SEQ ID NO: 643412
augucccaggagcuacugg

SEQ ID NO: 643414 - RNA, 19 nt, Artificial Sequence
  Description of Artificial Sequence: Synthetic oligonucleotide
  Sense strand starting at position 2961 of SEQ ID NO: 585482
agcagaauucgacguguau

SEQ ID NO: 643415 - RNA, 19 nt, Artificial Sequence
  Description of Artificial Sequence: Synthetic oligonucleotide
  Antisense strand to SEQ ID NO: 643414
auacacgucgaauucugcu

SEQ ID NO: 643416 - RNA, 19 nt, Artificial Sequence
  Description of Artificial Sequence: Synthetic oligonucleotide
  Sense strand starting at position 2973 of SEQ ID NO: 585482
cguguaucgcugccgucaa

SEQ ID NO: 643417 - RNA, 19 nt, Artificial Sequence
  Description of Artificial Sequence: Synthetic oligonucleotide
  Antisense strand to SEQ ID NO: 643416
uugacggcagcgauacacg

SEQ ID NO: 643418 - RNA, 19 nt, Artificial Sequence
  Description of Artificial Sequence: Synthetic oligonucleotide
  Sense strand starting at position 3142 of SEQ ID NO: 585482
cuccuuuaccuccgcagaa

SEQ ID NO: 643419 - RNA, 19 nt, Artificial Sequence
  Description of Artificial Sequence: Synthetic oligonucleotide
  Antisense strand to SEQ ID NO: 643418
uucugcggagguaaaggag

SEQ ID NO: 643420 - RNA, 19 nt, Artificial Sequence
  Description of Artificial Sequence: Synthetic oligonucleotide
  Sense strand starting at position 3143 of SEQ ID NO: 585482
uccuuuaccuccgcagaaa

SEQ ID NO: 643421 - RNA, 19 nt, Artificial Sequence
  Description of Artificial Sequence: Synthetic oligonucleotide
  Antisense strand to SEQ ID NO: 643420
uuucugcggagguaaagga

SEQ ID NO: 643422 - RNA, 19 nt, Artificial Sequence
  Description of Artificial Sequence: Synthetic oligonucleotide
  Sense strand starting at position 3553 of SEQ ID NO: 585482
guugacagcuucuuacagu

SEQ ID NO: 643423 - RNA, 19 nt, Artificial Sequence
  Description of Artificial Sequence: Synthetic oligonucleotide
  Antisense strand to SEQ ID NO: 643422
acuguaagaagcugucaac

SEQ ID NO: 643424 - RNA, 19 nt, Artificial Sequence
  Description of Artificial Sequence: Synthetic oligonucleotide
  Sense strand starting at position 3559 of SEQ ID NO: 585482
agcuucuuacaguagaguu

SEQ ID NO: 643425 - RNA, 19 nt, Artificial Sequence
  Description of Artificial Sequence: Synthetic oligonucleotide
  Antisense strand to SEQ ID NO: 643424
aacucuacuguaagaagcu

SEQ ID NO: 643426 - RNA, 19 nt, Artificial Sequence
  Description of Artificial Sequence: Synthetic oligonucleotide
  Sense strand starting at position 3653 of SEQ ID NO: 585482
gccuuuggauaccuacaga

SEQ ID NO: 643427 - RNA, 19 nt, Artificial Sequence
  Description of Artificial Sequence: Synthetic oligonucleotide
  Antisense strand to SEQ ID NO: 643426
ucuguagguauccaaaggc

SEQ ID NO: 643428 - RNA, 19 nt, Artificial Sequence
  Description of Artificial Sequence: Synthetic oligonucleotide
  Sense strand starting at position 3669 of SEQ ID NO: 585482
agagcuuacuguuucuuga

SEQ ID NO: 643429 - RNA, 19 nt, Artificial Sequence
  Description of Artificial Sequence: Synthetic oligonucleotide
  Antisense strand to SEQ ID NO: 643428
ucaagaaacaguaagcucu

SEQ ID NO: 643430 - RNA, 19 nt, Artificial Sequence
  Description of Artificial Sequence: Synthetic oligonucleotide
  Sense strand starting at position 3671 of SEQ ID NO: 585482
agcuuacuguuucuugaua

SEQ ID NO: 643431 - RNA, 19 nt, Artificial Sequence
  Description of Artificial Sequence: Synthetic oligonucleotide
  Antisense strand to SEQ ID NO: 643430
uaucaagaaacaguaagcu

SEQ ID NO: 643432 - RNA, 19 nt, Artificial Sequence
  Description of Artificial Sequence: Synthetic oligonucleotide
  Sense strand starting at position 3672 of SEQ ID NO: 585482
gcuuacuguuucuugauag

SEQ ID NO: 643433 - RNA, 19 nt, Artificial Sequence
  Description of Artificial Sequence: Synthetic oligonucleotide
  Antisense strand to SEQ ID NO: 643432
cuaucaagaaacaguaagc

SEQ ID NO: 643434 - RNA, 19 nt, Artificial Sequence
  Description of Artificial Sequence: Synthetic oligonucleotide
  Sense strand starting at position 3792 of SEQ ID NO: 585482
cuugcagaaucugaaggaa

SEQ ID NO: 643435 - RNA, 19 nt, Artificial Sequence
  Description of Artificial Sequence: Synthetic oligonucleotide
  Antisense strand to SEQ ID NO: 643434
uuccuucagauucugcaag

SEQ ID NO: 643436 - RNA, 19 nt, Artificial Sequence
  Description of Artificial Sequence: Synthetic oligonucleotide
  Sense strand starting at position 3815 of SEQ ID NO: 585482
cugguauagcuguacgaag

SEQ ID NO: 643437 - RNA, 19 nt, Artificial Sequence
  Description of Artificial Sequence: Synthetic oligonucleotide
  Antisense strand to SEQ ID NO: 643436
cuucguacagcuauaccag

SEQ ID NO: 643438 - RNA, 19 nt, Artificial Sequence
  Description of Artificial Sequence: Synthetic oligonucleotide
  Sense strand starting at position 3832 of SEQ ID NO: 585482
aguggcagagcaugaaauu

SEQ ID NO: 643439 - RNA, 19 nt, Artificial Sequence
  Description of Artificial Sequence: Synthetic oligonucleotide
  Antisense strand to SEQ ID NO: 643438
aauuucaugcucugccacu

SEQ ID NO: 643440 - RNA, 19 nt, Artificial Sequence
  Description of Artificial Sequence: Synthetic oligonucleotide
  Sense strand starting at position 3842 of SEQ ID NO: 585482
caugaaauuggugguuauu

SEQ ID NO: 643441 - RNA, 19 nt, Artificial Sequence
  Description of Artificial Sequence: Synthetic oligonucleotide
  Antisense strand to SEQ ID NO: 643440
aauaaccaccaauuucaug

SEQ ID NO: 643442 - RNA, 19 nt, Artificial Sequence
  Description of Artificial Sequence: Synthetic oligonucleotide
  Sense strand starting at position 3844 of SEQ ID NO: 585482
ugaaauuggugguuauuac

SEQ ID NO: 643443 - RNA, 19 nt, Artificial Sequence
  Description of Artificial Sequence: Synthetic oligonucleotide
  Antisense strand to SEQ ID NO: 643442
guaauaaccaccaauuuca

SEQ ID NO: 643444 - RNA, 19 nt, Artificial Sequence
  Description of Artificial Sequence: Synthetic oligonucleotide
  Sense strand starting at position 3845 of SEQ ID NO: 585482
gaaauuggugguuauuacu

SEQ ID NO: 643445 - RNA, 19 nt, Artificial Sequence
  Description of Artificial Sequence: Synthetic oligonucleotide
  Antisense strand to SEQ ID NO: 643444
aguaauaaccaccaauuuc

SEQ ID NO: 643446 - RNA, 19 nt, Artificial Sequence
  Description of Artificial Sequence: Synthetic oligonucleotide
  Sense strand starting at position 3898 of SEQ ID NO: 585482
gcaucaaagcugugccaaa

SEQ ID NO: 643447 - RNA, 19 nt, Artificial Sequence
  Description of Artificial Sequence: Synthetic oligonucleotide
  Antisense strand to SEQ ID NO: 643446
uuuggcacagcuuugaugc

SEQ ID NO: 643448 - RNA, 19 nt, Artificial Sequence
  Description of Artificial Sequence: Synthetic oligonucleotide
  Sense strand starting at position 307 of SEQ ID NO: 585483
cccaaauugucuuuagaag

SEQ ID NO: 643449 - RNA, 19 nt, Artificial Sequence
  Description of Artificial Sequence: Synthetic oligonucleotide
  Antisense strand to SEQ ID NO: 643448
cuucuaaagacaauuuggg

SEQ ID NO: 643450 - RNA, 19 nt, Artificial Sequence
  Description of Artificial Sequence: Synthetic oligonucleotide
  Sense strand starting at position 308 of SEQ ID NO: 585483
ccaaauugucuuuagaagc

SEQ ID NO: 643451 - RNA, 19 nt, Artificial Sequence
  Description of Artificial Sequence: Synthetic oligonucleotide
  Antisense strand to SEQ ID NO: 643450
gcuucuaaagacaauuugg

SEQ ID NO: 643452 - RNA, 19 nt, Artificial Sequence
  Description of Artificial Sequence: Synthetic oligonucleotide
  Sense strand starting at position 347 of SEQ ID NO: 585483
uuuguauucuacucucuga

SEQ ID NO: 643453 - RNA, 19 nt, Artificial Sequence
  Description of Artificial Sequence: Synthetic oligonucleotide
  Antisense strand to SEQ ID NO: 643452
ucagagaguagaauacaaa

SEQ ID NO: 643454 - RNA, 19 nt, Artificial Sequence
  Description of Artificial Sequence: Synthetic oligonucleotide
  Sense strand starting at position 360 of SEQ ID NO: 585483
cucugacuccuguacacau

SEQ ID NO: 643455 - RNA, 19 nt, Artificial Sequence
  Description of Artificial Sequence: Synthetic oligonucleotide
  Antisense strand to SEQ ID NO: 643454
auguguacaggagucagag

SEQ ID NO: 643456 - RNA, 19 nt, Artificial Sequence
  Description of Artificial Sequence: Synthetic oligonucleotide
  Sense strand starting at position 434 of SEQ ID NO: 585483
aagguacaagugugucaau

SEQ ID NO: 643457 - RNA, 19 nt, Artificial Sequence
  Description of Artificial Sequence: Synthetic oligonucleotide
  Antisense strand to SEQ ID NO: 643456
auugacacacuuguaccuu

SEQ ID NO: 643458 - RNA, 19 nt, Artificial Sequence
  Description of Artificial Sequence: Synthetic oligonucleotide
  Sense strand starting at position 435 of SEQ ID NO: 585483
agguacaagugugucaaua

SEQ ID NO: 643459 - RNA, 19 nt, Artificial Sequence
  Description of Artificial Sequence: Synthetic oligonucleotide
  Antisense strand to SEQ ID NO: 643458
uauugacacacuuguaccu

SEQ ID NO: 643460 - RNA, 19 nt, Artificial Sequence
  Description of Artificial Sequence: Synthetic oligonucleotide
  Sense strand starting at position 559 of SEQ ID NO: 585483
guguaaugguguacuuggu

SEQ ID NO: 643461 - RNA, 19 nt, Artificial Sequence
  Description of Artificial Sequence: Synthetic oligonucleotide
  Antisense strand to SEQ ID NO: 643460
accaaguacaccauuacac

SEQ ID NO: 643462 - RNA, 19 nt, Artificial Sequence
  Description of Artificial Sequence: Synthetic oligonucleotide
  Sense strand starting at position 578 of SEQ ID NO: 585483
acgacucuuccaggacaca

SEQ ID NO: 643463 - RNA, 19 nt, Artificial Sequence
  Description of Artificial Sequence: Synthetic oligonucleotide
  Antisense strand to SEQ ID NO: 643462
uguguccuggaagagucgu

SEQ ID NO: 643464 - RNA, 19 nt, Artificial Sequence
  Description of Artificial Sequence: Synthetic oligonucleotide
  Sense strand starting at position 591 of SEQ ID NO: 585483
gacacaaaguuggcauuaa

SEQ ID NO: 643465 - RNA, 19 nt, Artificial Sequence
  Description of Artificial Sequence: Synthetic oligonucleotide
  Antisense strand to SEQ ID NO: 643464
uuaaugccaacuuuguguc

SEQ ID NO: 643466 - RNA, 19 nt, Artificial Sequence
  Description of Artificial Sequence: Synthetic oligonucleotide
  Sense strand starting at position 667 of SEQ ID NO: 585483
ggaggaggccauuguucau

SEQ ID NO: 643467 - RNA, 19 nt, Artificial Sequence
  Description of Artificial Sequence: Synthetic oligonucleotide
  Antisense strand to SEQ ID NO: 643466
augaacaauggccuccucc

SEQ ID NO: 643468 - RNA, 19 nt, Artificial Sequence
  Description of Artificial Sequence: Synthetic oligonucleotide
  Sense strand starting at position 847 of SEQ ID NO: 585483
acaguaauguucucuccuu

SEQ ID NO: 643469 - RNA, 19 nt, Artificial Sequence
  Description of Artificial Sequence: Synthetic oligonucleotide
  Antisense strand to SEQ ID NO: 643468
aaggagagaacauuacugu

SEQ ID NO: 643470 - RNA, 19 nt, Artificial Sequence
  Description of Artificial Sequence: Synthetic oligonucleotide
  Sense strand starting at position 852 of SEQ ID NO: 585483
aauguucucuccuugguga

SEQ ID NO: 643471 - RNA, 19 nt, Artificial Sequence
  Description of Artificial Sequence: Synthetic oligonucleotide
  Antisense strand to SEQ ID NO: 643470
ucaccaaggagagaacauu

SEQ ID NO: 643472 - RNA, 19 nt, Artificial Sequence
  Description of Artificial Sequence: Synthetic oligonucleotide
  Sense strand starting at position 999 of SEQ ID NO: 585483
ucugcauuguuucugggaa

SEQ ID NO: 643473 - RNA, 19 nt, Artificial Sequence
  Description of Artificial Sequence: Synthetic oligonucleotide
  Antisense strand to SEQ ID NO: 643472
uucccagaaacaaugcaga

SEQ ID NO: 643474 - RNA, 19 nt, Artificial Sequence
  Description of Artificial Sequence: Synthetic oligonucleotide
  Sense strand starting at position 1053 of SEQ ID NO: 585483
acucuuguuccuugaugua

SEQ ID NO: 643475 - RNA, 19 nt, Artificial Sequence
  Description of Artificial Sequence: Synthetic oligonucleotide
  Antisense strand to SEQ ID NO: 643474
uacaucaaggaacaagagu

SEQ ID NO: 643476 - RNA, 19 nt, Artificial Sequence
  Description of Artificial Sequence: Synthetic oligonucleotide
  Sense strand starting at position 1063 of SEQ ID NO: 585483
cuugauguauucccagcau

SEQ ID NO: 643477 - RNA, 19 nt, Artificial Sequence
  Description of Artificial Sequence: Synthetic oligonucleotide
  Antisense strand to SEQ ID NO: 643476
augcugggaauacaucaag

SEQ ID NO: 643478 - RNA, 19 nt, Artificial Sequence
  Description of Artificial Sequence: Synthetic oligonucleotide
  Sense strand starting at position 1145 of SEQ ID NO: 585483
gccugaaagcuccagagga

SEQ ID NO: 643479 - RNA, 19 nt, Artificial Sequence
  Description of Artificial Sequence: Synthetic oligonucleotide
  Antisense strand to SEQ ID NO: 643478
uccucuggagcuuucaggc

SEQ ID NO: 643480 - RNA, 19 nt, Artificial Sequence
  Description of Artificial Sequence: Synthetic oligonucleotide
  Sense strand starting at position 1182 of SEQ ID NO: 585483
uugugugacucaccaguca

SEQ ID NO: 643481 - RNA, 19 nt, Artificial Sequence
  Description of Artificial Sequence: Synthetic oligonucleotide
  Antisense strand to SEQ ID NO: 643480
ugacuggugagucacacaa

SEQ ID NO: 643482 - RNA, 19 nt, Artificial Sequence
  Description of Artificial Sequence: Synthetic oligonucleotide
  Sense strand starting at position 1315 of SEQ ID NO: 585483
gagcacaggcucugaaaga

SEQ ID NO: 643483 - RNA, 19 nt, Artificial Sequence
  Description of Artificial Sequence: Synthetic oligonucleotide
  Antisense strand to SEQ ID NO: 643482
ucuuucagagccugugcuc

SEQ ID NO: 643484 - RNA, 19 nt, Artificial Sequence
  Description of Artificial Sequence: Synthetic oligonucleotide
  Sense strand starting at position 1334 of SEQ ID NO: 585483
cagacuguuuagcucugau

SEQ ID NO: 643485 - RNA, 19 nt, Artificial Sequence
  Description of Artificial Sequence: Synthetic oligonucleotide
  Antisense strand to SEQ ID NO: 643484
aucagagcuaaacagucug

SEQ ID NO: 643486 - RNA, 19 nt, Artificial Sequence
  Description of Artificial Sequence: Synthetic oligonucleotide
  Sense strand starting at position 1399 of SEQ ID NO: 585483
gggaauaguaacugccuua

SEQ ID NO: 643487 - RNA, 19 nt, Artificial Sequence
  Description of Artificial Sequence: Synthetic oligonucleotide
  Antisense strand to SEQ ID NO: 643486
uaaggcaguuacuauuccc

SEQ ID NO: 643488 - RNA, 19 nt, Artificial Sequence
  Description of Artificial Sequence: Synthetic oligonucleotide
  Sense strand starting at position 1404 of SEQ ID NO: 585483
uaguaacugccuuauagag

SEQ ID NO: 643489 - RNA, 19 nt, Artificial Sequence
  Description of Artificial Sequence: Synthetic oligonucleotide
  Antisense strand to SEQ ID NO: 643488
cucuauaaggcaguuacua

SEQ ID NO: 643490 - RNA, 19 nt, Artificial Sequence
  Description of Artificial Sequence: Synthetic oligonucleotide
  Sense strand starting at position 1416 of SEQ ID NO: 585483
uauagaguauuugaaagga

SEQ ID NO: 643491 - RNA, 19 nt, Artificial Sequence
  Description of Artificial Sequence: Synthetic oligonucleotide
  Antisense strand to SEQ ID NO: 643490
uccuuucaaauacucuaua

SEQ ID NO: 643492 - RNA, 19 nt, Artificial Sequence
  Description of Artificial Sequence: Synthetic oligonucleotide
  Sense strand starting at position 1484 of SEQ ID NO: 585483
cucgaaacguuauuacuga

SEQ ID NO: 643493 - RNA, 19 nt, Artificial Sequence
  Description of Artificial Sequence: Synthetic oligonucleotide
  Antisense strand to SEQ ID NO: 643492
ucaguaauaacguuucgag

SEQ ID NO: 643494 - RNA, 19 nt, Artificial Sequence
  Description of Artificial Sequence: Synthetic oligonucleotide
  Sense strand starting at position 1513 of SEQ ID NO: 585483
accggugaucugcaaagca

SEQ ID NO: 643495 - RNA, 19 nt, Artificial Sequence
  Description of Artificial Sequence: Synthetic oligonucleotide
  Antisense strand to SEQ ID NO: 643494
ugcuuugcagaucaccggu

SEQ ID NO: 643496 - RNA, 19 nt, Artificial Sequence
  Description of Artificial Sequence: Synthetic oligonucleotide
  Sense strand starting at position 1540 of SEQ ID NO: 585483
uuaaguaucucgucugaag

SEQ ID NO: 643497 - RNA, 19 nt, Artificial Sequence
  Description of Artificial Sequence: Synthetic oligonucleotide
  Antisense strand to SEQ ID NO: 643496
cuucagacgagauacuuaa

SEQ ID NO: 643498 - RNA, 19 nt, Artificial Sequence
  Description of Artificial Sequence: Synthetic oligonucleotide
  Sense strand starting at position 1542 of SEQ ID NO: 585483
aaguaucucgucugaagaa

SEQ ID NO: 643499 - RNA, 19 nt, Artificial Sequence
  Description of Artificial Sequence: Synthetic oligonucleotide
  Antisense strand to SEQ ID NO: 643498
uucuucagacgagauacuu

SEQ ID NO: 643500 - RNA, 19 nt, Artificial Sequence
  Description of Artificial Sequence: Synthetic oligonucleotide
  Sense strand starting at position 1606 of SEQ ID NO: 585483
cuaagugugccuuauccaa

SEQ ID NO: 643501 - RNA, 19 nt, Artificial Sequence
  Description of Artificial Sequence: Synthetic oligonucleotide
  Antisense strand to SEQ ID NO: 643500
uuggauaaggcacacuuag

SEQ ID NO: 643502 - RNA, 19 nt, Artificial Sequence
  Description of Artificial Sequence: Synthetic oligonucleotide
  Sense strand starting at position 1716 of SEQ ID NO: 585483
cuucuucccggguaagaug

SEQ ID NO: 643503 - RNA, 19 nt, Artificial Sequence
  Description of Artificial Sequence: Synthetic oligonucleotide
  Antisense strand to SEQ ID NO: 643502
caucuuacccgggaagaag

SEQ ID NO: 643504 - RNA, 19 nt, Artificial Sequence
  Description of Artificial Sequence: Synthetic oligonucleotide
  Sense strand starting at position 2009 of SEQ ID NO: 585483
cucuaaugucgcgugacua

SEQ ID NO: 643505 - RNA, 19 nt, Artificial Sequence
  Description of Artificial Sequence: Synthetic oligonucleotide
  Antisense strand to SEQ ID NO: 643504
uagucacgcgacauuagag

SEQ ID NO: 643506 - RNA, 19 nt, Artificial Sequence
  Description of Artificial Sequence: Synthetic oligonucleotide
  Sense strand starting at position 2197 of SEQ ID NO: 585483
cucgcacuaccagaaagau

SEQ ID NO: 643507 - RNA, 19 nt, Artificial Sequence
  Description of Artificial Sequence: Synthetic oligonucleotide
  Antisense strand to SEQ ID NO: 643506
aucuuucugguagugcgag

SEQ ID NO: 643508 - RNA, 19 nt, Artificial Sequence
  Description of Artificial Sequence: Synthetic oligonucleotide
  Sense strand starting at position 3131 of SEQ ID NO: 585483
gugggaaguauggguugaa

SEQ ID NO: 643509 - RNA, 19 nt, Artificial Sequence
  Description of Artificial Sequence: Synthetic oligonucleotide
  Antisense strand to SEQ ID NO: 643508
uucaacccauacuucccac

SEQ ID NO: 643510 - RNA, 19 nt, Artificial Sequence
  Description of Artificial Sequence: Synthetic oligonucleotide
  Sense strand starting at position 3134 of SEQ ID NO: 585483
ggaaguauggguugaaggu

SEQ ID NO: 643511 - RNA, 19 nt, Artificial Sequence
  Description of Artificial Sequence: Synthetic oligonucleotide
  Antisense strand to SEQ ID NO: 643510
accuucaacccauacuucc

SEQ ID NO: 643512 - RNA, 19 nt, Artificial Sequence
  Description of Artificial Sequence: Synthetic oligonucleotide
  Sense strand starting at position 3135 of SEQ ID NO: 585483
gaaguauggguugaagguu

SEQ ID NO: 643513 - RNA, 19 nt, Artificial Sequence
  Description of Artificial Sequence: Synthetic oligonucleotide
  Antisense strand to SEQ ID NO: 643512
aaccuucaacccauacuuc

SEQ ID NO: 643514 - RNA, 19 nt, Artificial Sequence
  Description of Artificial Sequence: Synthetic oligonucleotide
  Sense strand starting at position 3184 of SEQ ID NO: 585483
uggagaugcugggcuuagu

SEQ ID NO: 643515 - RNA, 19 nt, Artificial Sequence
  Description of Artificial Sequence: Synthetic oligonucleotide
  Antisense strand to SEQ ID NO: 643514
acuaagcccagcaucucca

SEQ ID NO: 643516 - RNA, 19 nt, Artificial Sequence
  Description of Artificial Sequence: Synthetic oligonucleotide
  Sense strand starting at position 3219 of SEQ ID NO: 585483
ccugaagaccuugagcuuu

SEQ ID NO: 643517 - RNA, 19 nt, Artificial Sequence
  Description of Artificial Sequence: Synthetic oligonucleotide
  Antisense strand to SEQ ID NO: 643516
aaagcucaaggucuucagg

SEQ ID NO: 643518 - RNA, 19 nt, Artificial Sequence
  Description of Artificial Sequence: Synthetic oligonucleotide
  Sense strand starting at position 3427 of SEQ ID NO: 585483
ugucucucaucccuugauu

SEQ ID NO: 643519 - RNA, 19 nt, Artificial Sequence
  Description of Artificial Sequence: Synthetic oligonucleotide
  Antisense strand to SEQ ID NO: 643518
aaucaagggaugagagaca

SEQ ID NO: 643520 - RNA, 19 nt, Artificial Sequence
  Description of Artificial Sequence: Synthetic oligonucleotide
  Sense strand starting at position 3589 of SEQ ID NO: 585483
uagcuuugaguuuagugau

SEQ ID NO: 643521 - RNA, 19 nt, Artificial Sequence
  Description of Artificial Sequence: Synthetic oligonucleotide
  Antisense strand to SEQ ID NO: 643520
aucacuaaacucaaagcua

SEQ ID NO: 643522 - RNA, 19 nt, Artificial Sequence
  Description of Artificial Sequence: Synthetic oligonucleotide
  Sense strand starting at position 3595 of SEQ ID NO: 585483
ugaguuuagugaucuaagc

SEQ ID NO: 643523 - RNA, 19 nt, Artificial Sequence
  Description of Artificial Sequence: Synthetic oligonucleotide
  Antisense strand to SEQ ID NO: 643522
gcuuagaucacuaaacuca

SEQ ID NO: 643524 - RNA, 19 nt, Artificial Sequence
  Description of Artificial Sequence: Synthetic oligonucleotide
  Sense strand starting at position 3701 of SEQ ID NO: 585483
ugagaaaguugcucagcuu

SEQ ID NO: 643525 - RNA, 19 nt, Artificial Sequence
  Description of Artificial Sequence: Synthetic oligonucleotide
  Antisense strand to SEQ ID NO: 643524
aagcugagcaacuuucuca

SEQ ID NO: 643526 - RNA, 19 nt, Artificial Sequence
  Description of Artificial Sequence: Synthetic oligonucleotide
  Sense strand starting at position 3702 of SEQ ID NO: 585483
gagaaaguugcucagcuuc

SEQ ID NO: 643527 - RNA, 19 nt, Artificial Sequence
  Description of Artificial Sequence: Synthetic oligonucleotide
  Antisense strand to SEQ ID NO: 643526
gaagcugagcaacuuucuc

SEQ ID NO: 643528 - RNA, 19 nt, Artificial Sequence
  Description of Artificial Sequence: Synthetic oligonucleotide
  Sense strand starting at position 32 of SEQ ID NO: 585484
ccacaaucgaguugugcaa

SEQ ID NO: 643529 - RNA, 19 nt, Artificial Sequence
  Description of Artificial Sequence: Synthetic oligonucleotide
  Antisense strand to SEQ ID NO: 643528
uugcacaacucgauugugg

SEQ ID NO: 643530 - RNA, 19 nt, Artificial Sequence
  Description of Artificial Sequence: Synthetic oligonucleotide
  Sense strand starting at position 452 of SEQ ID NO: 585484
cuuuguauuucuugagaga

SEQ ID NO: 643531 - RNA, 19 nt, Artificial Sequence
  Description of Artificial Sequence: Synthetic oligonucleotide
  Antisense strand to SEQ ID NO: 643530
ucucucaagaaauacaaag

SEQ ID NO: 643532 - RNA, 19 nt, Artificial Sequence
  Description of Artificial Sequence: Synthetic oligonucleotide
  Sense strand starting at position 542 of SEQ ID NO: 585484
gagggcugucuggguaaau

SEQ ID NO: 643533 - RNA, 19 nt, Artificial Sequence
  Description of Artificial Sequence: Synthetic oligonucleotide
  Antisense strand to SEQ ID NO: 643532
auuuacccagacagcccuc

SEQ ID NO: 643534 - RNA, 19 nt, Artificial Sequence
  Description of Artificial Sequence: Synthetic oligonucleotide
  Sense strand starting at position 543 of SEQ ID NO: 585484
agggcugucuggguaaauu

SEQ ID NO: 643535 - RNA, 19 nt, Artificial Sequence
  Description of Artificial Sequence: Synthetic oligonucleotide
  Antisense strand to SEQ ID NO: 643534
aauuuacccagacagcccu

SEQ ID NO: 643536 - RNA, 19 nt, Artificial Sequence
  Description of Artificial Sequence: Synthetic oligonucleotide
  Sense strand starting at position 1089 of SEQ ID NO: 585484
gacagccugaggugugaua

SEQ ID NO: 643537 - RNA, 19 nt, Artificial Sequence
  Description of Artificial Sequence: Synthetic oligonucleotide
  Antisense strand to SEQ ID NO: 643536
uaucacaccucaggcuguc

SEQ ID NO: 643538 - RNA, 19 nt, Artificial Sequence
  Description of Artificial Sequence: Synthetic oligonucleotide
  Sense strand starting at position 1091 of SEQ ID NO: 585484
cagccugaggugugauaua

SEQ ID NO: 643539 - RNA, 19 nt, Artificial Sequence
  Description of Artificial Sequence: Synthetic oligonucleotide
  Antisense strand to SEQ ID NO: 643538
uauaucacaccucaggcug

SEQ ID NO: 643540 - RNA, 19 nt, Artificial Sequence
  Description of Artificial Sequence: Synthetic oligonucleotide
  Sense strand starting at position 1126 of SEQ ID NO: 585484
agaagcagauuugaaucua

SEQ ID NO: 643541 - RNA, 19 nt, Artificial Sequence
  Description of Artificial Sequence: Synthetic oligonucleotide
  Antisense strand to SEQ ID NO: 643540
uagauucaaaucugcuucu

SEQ ID NO: 643542 - RNA, 19 nt, Artificial Sequence
  Description of Artificial Sequence: Synthetic oligonucleotide
  Sense strand starting at position 1358 of SEQ ID NO: 585484
aguccugaacuccgaaagu

SEQ ID NO: 643543 - RNA, 19 nt, Artificial Sequence
  Description of Artificial Sequence: Synthetic oligonucleotide
  Antisense strand to SEQ ID NO: 643542
acuuucggaguucaggacu

SEQ ID NO: 643544 - RNA, 19 nt, Artificial Sequence
  Description of Artificial Sequence: Synthetic oligonucleotide
  Sense strand starting at position 1374 of SEQ ID NO: 585484
aguguaaaguggucccaag

SEQ ID NO: 643545 - RNA, 19 nt, Artificial Sequence
  Description of Artificial Sequence: Synthetic oligonucleotide
  Antisense strand to SEQ ID NO: 643544
cuugggaccacuuuacacu

SEQ ID NO: 643546 - RNA, 19 nt, Artificial Sequence
  Description of Artificial Sequence: Synthetic oligonucleotide
  Sense strand starting at position 1466 of SEQ ID NO: 585484
ccacuucucuggcuugaga

SEQ ID NO: 643547 - RNA, 19 nt, Artificial Sequence
  Description of Artificial Sequence: Synthetic oligonucleotide
  Antisense strand to SEQ ID NO: 643546
ucucaagccagagaagugg

SEQ ID NO: 643548 - RNA, 19 nt, Artificial Sequence
  Description of Artificial Sequence: Synthetic oligonucleotide
  Sense strand starting at position 1494 of SEQ ID NO: 585484
aaauuuggaugccaggaaa

SEQ ID NO: 643549 - RNA, 19 nt, Artificial Sequence
  Description of Artificial Sequence: Synthetic oligonucleotide
  Antisense strand to SEQ ID NO: 643548
uuuccuggcauccaaauuu

SEQ ID NO: 643550 - RNA, 19 nt, Artificial Sequence
  Description of Artificial Sequence: Synthetic oligonucleotide
  Sense strand starting at position 1507 of SEQ ID NO: 585484
aggaaagcaucucaauuua

SEQ ID NO: 643551 - RNA, 19 nt, Artificial Sequence
  Description of Artificial Sequence: Synthetic oligonucleotide
  Antisense strand to SEQ ID NO: 643550
uaaauugagaugcuuuccu

SEQ ID NO: 643552 - RNA, 19 nt, Artificial Sequence
  Description of Artificial Sequence: Synthetic oligonucleotide
  Sense strand starting at position 1518 of SEQ ID NO: 585484
ucaauuuaguuccauggga

SEQ ID NO: 643553 - RNA, 19 nt, Artificial Sequence
  Description of Artificial Sequence: Synthetic oligonucleotide
  Antisense strand to SEQ ID NO: 643552
ucccauggaacuaaauuga

SEQ ID NO: 643554 - RNA, 19 nt, Artificial Sequence
  Description of Artificial Sequence: Synthetic oligonucleotide
  Sense strand starting at position 1522 of SEQ ID NO: 585484
uuuaguuccaugggaagag

SEQ ID NO: 643555 - RNA, 19 nt, Artificial Sequence
  Description of Artificial Sequence: Synthetic oligonucleotide
  Antisense strand to SEQ ID NO: 643554
cucuucccauggaacuaaa

SEQ ID NO: 643556 - RNA, 19 nt, Artificial Sequence
  Description of Artificial Sequence: Synthetic oligonucleotide
  Sense strand starting at position 1532 of SEQ ID NO: 585484
ugggaagagucugauaucu

SEQ ID NO: 643557 - RNA, 19 nt, Artificial Sequence
  Description of Artificial Sequence: Synthetic oligonucleotide
  Antisense strand to SEQ ID NO: 643556
agauaucagacucuuccca

SEQ ID NO: 643558 - RNA, 19 nt, Artificial Sequence
  Description of Artificial Sequence: Synthetic oligonucleotide
  Sense strand starting at position 1534 of SEQ ID NO: 585484
ggaagagucugauaucuug

SEQ ID NO: 643559 - RNA, 19 nt, Artificial Sequence
  Description of Artificial Sequence: Synthetic oligonucleotide
  Antisense strand to SEQ ID NO: 643558
caagauaucagacucuucc

SEQ ID NO: 643560 - RNA, 19 nt, Artificial Sequence
  Description of Artificial Sequence: Synthetic oligonucleotide
  Sense strand starting at position 1672 of SEQ ID NO: 585484
ucugacauucuacgauuau

SEQ ID NO: 643561 - RNA, 19 nt, Artificial Sequence
  Description of Artificial Sequence: Synthetic oligonucleotide
  Antisense strand to SEQ ID NO: 643560
auaaucguagaaugucaga

SEQ ID NO: 643562 - RNA, 19 nt, Artificial Sequence
  Description of Artificial Sequence: Synthetic oligonucleotide
  Sense strand starting at position 1684 of SEQ ID NO: 585484
cgauuauucuuguuccuau

SEQ ID NO: 643563 - RNA, 19 nt, Artificial Sequence
  Description of Artificial Sequence: Synthetic oligonucleotide
  Antisense strand to SEQ ID NO: 643562
auaggaacaagaauaaucg

SEQ ID NO: 643564 - RNA, 19 nt, Artificial Sequence
  Description of Artificial Sequence: Synthetic oligonucleotide
  Sense strand starting at position 1699 of SEQ ID NO: 585484
cuaucuuugccuggacuca

SEQ ID NO: 643565 - RNA, 19 nt, Artificial Sequence
  Description of Artificial Sequence: Synthetic oligonucleotide
  Antisense strand to SEQ ID NO: 643564
ugaguccaggcaaagauag

SEQ ID NO: 643566 - RNA, 19 nt, Artificial Sequence
  Description of Artificial Sequence: Synthetic oligonucleotide
  Sense strand starting at position 1729 of SEQ ID NO: 585484
uuaauuccaugagagaauu

SEQ ID NO: 643567 - RNA, 19 nt, Artificial Sequence
  Description of Artificial Sequence: Synthetic oligonucleotide
  Antisense strand to SEQ ID NO: 643566
aauucucucauggaauuaa

SEQ ID NO: 643568 - RNA, 19 nt, Artificial Sequence
  Description of Artificial Sequence: Synthetic oligonucleotide
  Sense strand starting at position 1737 of SEQ ID NO: 585484
augagagaauucugauaaa

SEQ ID NO: 643569 - RNA, 19 nt, Artificial Sequence
  Description of Artificial Sequence: Synthetic oligonucleotide
  Antisense strand to SEQ ID NO: 643568
uuuaucagaauucucucau

SEQ ID NO: 643570 - RNA, 19 nt, Artificial Sequence
  Description of Artificial Sequence: Synthetic oligonucleotide
  Sense strand starting at position 1767 of SEQ ID NO: 585484
ucucgucacuuuccuguaa

SEQ ID NO: 643571 - RNA, 19 nt, Artificial Sequence
  Description of Artificial Sequence: Synthetic oligonucleotide
  Antisense strand to SEQ ID NO: 643570
uuacaggaaagugacgaga

SEQ ID NO: 643572 - RNA, 19 nt, Artificial Sequence
  Description of Artificial Sequence: Synthetic oligonucleotide
  Sense strand starting at position 1768 of SEQ ID NO: 585484
cucgucacuuuccuguaaa

SEQ ID NO: 643573 - RNA, 19 nt, Artificial Sequence
  Description of Artificial Sequence: Synthetic oligonucleotide
  Antisense strand to SEQ ID NO: 643572
uuuacaggaaagugacgag

SEQ ID NO: 643574 - RNA, 19 nt, Artificial Sequence
  Description of Artificial Sequence: Synthetic oligonucleotide
  Sense strand starting at position 1789 of SEQ ID NO: 585484
gcgcgaggugagggauaaa

SEQ ID NO: 643575 - RNA, 19 nt, Artificial Sequence
  Description of Artificial Sequence: Synthetic oligonucleotide
  Antisense strand to SEQ ID NO: 643574
uuuaucccucaccucgcgc

SEQ ID NO: 643576 - RNA, 19 nt, Artificial Sequence
  Description of Artificial Sequence: Synthetic oligonucleotide
  Sense strand starting at position 1799 of SEQ ID NO: 585484
agggauaaauaucaggaaa

SEQ ID NO: 643577 - RNA, 19 nt, Artificial Sequence
  Description of Artificial Sequence: Synthetic oligonucleotide
  Antisense strand to SEQ ID NO: 643576
uuuccugauauuuaucccu

SEQ ID NO: 643578 - RNA, 19 nt, Artificial Sequence
  Description of Artificial Sequence: Synthetic oligonucleotide
  Sense strand starting at position 2001 of SEQ ID NO: 585484
guccucagaccauagaguu

SEQ ID NO: 643579 - RNA, 19 nt, Artificial Sequence
  Description of Artificial Sequence: Synthetic oligonucleotide
  Antisense strand to SEQ ID NO: 643578
aacucuauggucugaggac

SEQ ID NO: 643580 - RNA, 19 nt, Artificial Sequence
  Description of Artificial Sequence: Synthetic oligonucleotide
  Sense strand starting at position 2031 of SEQ ID NO: 585484
gagaguacauccucauguu

SEQ ID NO: 643581 - RNA, 19 nt, Artificial Sequence
  Description of Artificial Sequence: Synthetic oligonucleotide
  Antisense strand to SEQ ID NO: 643580
aacaugaggauguacucuc

SEQ ID NO: 643582 - RNA, 19 nt, Artificial Sequence
  Description of Artificial Sequence: Synthetic oligonucleotide
  Sense strand starting at position 2136 of SEQ ID NO: 585484
gugucuggauaguuaccaa

SEQ ID NO: 643583 - RNA, 19 nt, Artificial Sequence
  Description of Artificial Sequence: Synthetic oligonucleotide
  Antisense strand to SEQ ID NO: 643582
uugguaacuauccagacac

SEQ ID NO: 643584 - RNA, 19 nt, Artificial Sequence
  Description of Artificial Sequence: Synthetic oligonucleotide
  Sense strand starting at position 2434 of SEQ ID NO: 585484
ucauuauauugcucucguu

SEQ ID NO: 643585 - RNA, 19 nt, Artificial Sequence
  Description of Artificial Sequence: Synthetic oligonucleotide
  Antisense strand to SEQ ID NO: 643584
aacgagagcaauauaauga

SEQ ID NO: 643586 - RNA, 19 nt, Artificial Sequence
  Description of Artificial Sequence: Synthetic oligonucleotide
  Sense strand starting at position 2712 of SEQ ID NO: 585484
gccacucaguuaccuuauu

SEQ ID NO: 643587 - RNA, 19 nt, Artificial Sequence
  Description of Artificial Sequence: Synthetic oligonucleotide
  Antisense strand to SEQ ID NO: 643586
aauaagguaacugaguggc

SEQ ID NO: 643588 - RNA, 19 nt, Artificial Sequence
  Description of Artificial Sequence: Synthetic oligonucleotide
  Sense strand starting at position 2730 of SEQ ID NO: 585484
ugcagcggcuuucuaauua

SEQ ID NO: 643589 - RNA, 19 nt, Artificial Sequence
  Description of Artificial Sequence: Synthetic oligonucleotide
  Antisense strand to SEQ ID NO: 643588
uaauuagaaagccgcugca

SEQ ID NO: 643590 - RNA, 19 nt, Artificial Sequence
  Description of Artificial Sequence: Synthetic oligonucleotide
  Sense strand starting at position 2734 of SEQ ID NO: 585484
gcggcuuucuaauuauggu

SEQ ID NO: 643591 - RNA, 19 nt, Artificial Sequence
  Description of Artificial Sequence: Synthetic oligonucleotide
  Antisense strand to SEQ ID NO: 643590
accauaauuagaaagccgc

SEQ ID NO: 643592 - RNA, 19 nt, Artificial Sequence
  Description of Artificial Sequence: Synthetic oligonucleotide
  Sense strand starting at position 2735 of SEQ ID NO: 585484
cggcuuucuaauuaugguu

SEQ ID NO: 643593 - RNA, 19 nt, Artificial Sequence
  Description of Artificial Sequence: Synthetic oligonucleotide
  Antisense strand to SEQ ID NO: 643592
aaccauaauuagaaagccg

SEQ ID NO: 643594 - RNA, 19 nt, Artificial Sequence
  Description of Artificial Sequence: Synthetic oligonucleotide
  Sense strand starting at position 2783 of SEQ ID NO: 585484
uuggaauuccugugcucca

SEQ ID NO: 643595 - RNA, 19 nt, Artificial Sequence
  Description of Artificial Sequence: Synthetic oligonucleotide
  Antisense strand to SEQ ID NO: 643594
uggagcacaggaauuccaa

SEQ ID NO: 643596 - RNA, 19 nt, Artificial Sequence
  Description of Artificial Sequence: Synthetic oligonucleotide
  Sense strand starting at position 2784 of SEQ ID NO: 585484
uggaauuccugugcuccaa

SEQ ID NO: 643597 - RNA, 19 nt, Artificial Sequence
  Description of Artificial Sequence: Synthetic oligonucleotide
  Antisense strand to SEQ ID NO: 643596
uuggagcacaggaauucca

SEQ ID NO: 643598 - RNA, 19 nt, Artificial Sequence
  Description of Artificial Sequence: Synthetic oligonucleotide
  Sense strand starting at position 2849 of SEQ ID NO: 585484
uccuuauguuacucuagua

SEQ ID NO: 643599 - RNA, 19 nt, Artificial Sequence
  Description of Artificial Sequence: Synthetic oligonucleotide
  Antisense strand to SEQ ID NO: 643598
uacuagaguaacauaagga

SEQ ID NO: 643600 - RNA, 19 nt, Artificial Sequence
  Description of Artificial Sequence: Synthetic oligonucleotide
  Sense strand starting at position 2854 of SEQ ID NO: 585484
auguuacucuaguauuuag

SEQ ID NO: 643601 - RNA, 19 nt, Artificial Sequence
  Description of Artificial Sequence: Synthetic oligonucleotide
  Antisense strand to SEQ ID NO: 643600
cuaaauacuagaguaacau

SEQ ID NO: 643602 - RNA, 19 nt, Artificial Sequence
  Description of Artificial Sequence: Synthetic oligonucleotide
  Sense strand starting at position 3767 of SEQ ID NO: 585484
agagcacuggcuugaucau

SEQ ID NO: 643603 - RNA, 19 nt, Artificial Sequence
  Description of Artificial Sequence: Synthetic oligonucleotide
  Antisense strand to SEQ ID NO: 643602
augaucaagccagugcucu

SEQ ID NO: 643604 - RNA, 19 nt, Artificial Sequence
  Description of Artificial Sequence: Synthetic oligonucleotide
  Sense strand starting at position 3768 of SEQ ID NO: 585484
gagcacuggcuugaucaua

SEQ ID NO: 643605 - RNA, 19 nt, Artificial Sequence
  Description of Artificial Sequence: Synthetic oligonucleotide
  Antisense strand to SEQ ID NO: 643604
uaugaucaagccagugcuc

SEQ ID NO: 643606 - RNA, 19 nt, Artificial Sequence
  Description of Artificial Sequence: Synthetic oligonucleotide
  Sense strand starting at position 3903 of SEQ ID NO: 585484
gacagagacuugcuauguu

SEQ ID NO: 643607 - RNA, 19 nt, Artificial Sequence
  Description of Artificial Sequence: Synthetic oligonucleotide
  Antisense strand to SEQ ID NO: 643606
aacauagcaagucucuguc

SEQ ID NO: 643608 - RNA, 19 nt, Artificial Sequence
  Description of Artificial Sequence: Synthetic oligonucleotide
  Sense strand starting at position 35 of SEQ ID NO: 585485
uuugaagauaggugauucu

SEQ ID NO: 643609 - RNA, 19 nt, Artificial Sequence
  Description of Artificial Sequence: Synthetic oligonucleotide
  Antisense strand to SEQ ID NO: 643608
agaaucaccuaucuucaaa

SEQ ID NO: 643610 - RNA, 19 nt, Artificial Sequence
  Description of Artificial Sequence: Synthetic oligonucleotide
  Sense strand starting at position 287 of SEQ ID NO: 585485
uggcuuacaguccaucauu

SEQ ID NO: 643611 - RNA, 19 nt, Artificial Sequence
  Description of Artificial Sequence: Synthetic oligonucleotide
  Antisense strand to SEQ ID NO: 643610
aaugauggacuguaagcca

SEQ ID NO: 643612 - RNA, 19 nt, Artificial Sequence
  Description of Artificial Sequence: Synthetic oligonucleotide
  Sense strand starting at position 455 of SEQ ID NO: 585485
guuugacacuugguagacu

SEQ ID NO: 643613 - RNA, 19 nt, Artificial Sequence
  Description of Artificial Sequence: Synthetic oligonucleotide
  Antisense strand to SEQ ID NO: 643612
agucuaccaagugucaaac

SEQ ID NO: 643614 - RNA, 19 nt, Artificial Sequence
  Description of Artificial Sequence: Synthetic oligonucleotide
  Sense strand starting at position 547 of SEQ ID NO: 585485
cugcaugauuucuuuagug

SEQ ID NO: 643615 - RNA, 19 nt, Artificial Sequence
  Description of Artificial Sequence: Synthetic oligonucleotide
  Antisense strand to SEQ ID NO: 643614
cacuaaagaaaucaugcag

SEQ ID NO: 643616 - RNA, 19 nt, Artificial Sequence
  Description of Artificial Sequence: Synthetic oligonucleotide
  Sense strand starting at position 551 of SEQ ID NO: 585485
augauuucuuuagugucuu

SEQ ID NO: 643617 - RNA, 19 nt, Artificial Sequence
  Description of Artificial Sequence: Synthetic oligonucleotide
  Antisense strand to SEQ ID NO: 643616
aagacacuaaagaaaucau

SEQ ID NO: 643618 - RNA, 19 nt, Artificial Sequence
  Description of Artificial Sequence: Synthetic oligonucleotide
  Sense strand starting at position 567 of SEQ ID NO: 585485
cuuuauuaaugggucuacu

SEQ ID NO: 643619 - RNA, 19 nt, Artificial Sequence
  Description of Artificial Sequence: Synthetic oligonucleotide
  Antisense strand to SEQ ID NO: 643618
aguagacccauuaauaaag

SEQ ID NO: 643620 - RNA, 19 nt, Artificial Sequence
  Description of Artificial Sequence: Synthetic oligonucleotide
  Sense strand starting at position 588 of SEQ ID NO: 585485
uggauaaguuaaucaggca

SEQ ID NO: 643621 - RNA, 19 nt, Artificial Sequence
  Description of Artificial Sequence: Synthetic oligonucleotide
  Antisense strand to SEQ ID NO: 643620
ugccugauuaacuuaucca

SEQ ID NO: 643622 - RNA, 19 nt, Artificial Sequence
  Description of Artificial Sequence: Synthetic oligonucleotide
  Sense strand starting at position 743 of SEQ ID NO: 585485
ugaaauugcuguuugaaag

SEQ ID NO: 643623 - RNA, 19 nt, Artificial Sequence
  Description of Artificial Sequence: Synthetic oligonucleotide
  Antisense strand to SEQ ID NO: 643622
cuuucaaacagcaauuuca

SEQ ID NO: 643624 - RNA, 19 nt, Artificial Sequence
  Description of Artificial Sequence: Synthetic oligonucleotide
  Sense strand starting at position 860 of SEQ ID NO: 585485
acuggauacuucucagcuu

SEQ ID NO: 643625 - RNA, 19 nt, Artificial Sequence
  Description of Artificial Sequence: Synthetic oligonucleotide
  Antisense strand to SEQ ID NO: 643624
aagcugagaaguauccagu

SEQ ID NO: 643626 - RNA, 19 nt, Artificial Sequence
  Description of Artificial Sequence: Synthetic oligonucleotide
  Sense strand starting at position 871 of SEQ ID NO: 585485
cucagcuuucguuaaagga

SEQ ID NO: 643627 - RNA, 19 nt, Artificial Sequence
  Description of Artificial Sequence: Synthetic oligonucleotide
  Antisense strand to SEQ ID NO: 643626
uccuuuaacgaaagcugag

SEQ ID NO: 643628 - RNA, 19 nt, Artificial Sequence
  Description of Artificial Sequence: Synthetic oligonucleotide
  Sense strand starting at position 887 of SEQ ID NO: 585485
ggauaugcugcccaauacu

SEQ ID NO: 643629 - RNA, 19 nt, Artificial Sequence
  Description of Artificial Sequence: Synthetic oligonucleotide
  Antisense strand to SEQ ID NO: 643628
aguauugggcagcauaucc

SEQ ID NO: 643630 - RNA, 19 nt, Artificial Sequence
  Description of Artificial Sequence: Synthetic oligonucleotide
  Sense strand starting at position 960 of SEQ ID NO: 585485
uccugcuuccaggaguaca

SEQ ID NO: 643631 - RNA, 19 nt, Artificial Sequence
  Description of Artificial Sequence: Synthetic oligonucleotide
  Antisense strand to SEQ ID NO: 643630
uguacuccuggaagcagga

SEQ ID NO: 643632 - RNA, 19 nt, Artificial Sequence
  Description of Artificial Sequence: Synthetic oligonucleotide
  Sense strand starting at position 980 of SEQ ID NO: 585485
aaaggaaggcuauguccua

SEQ ID NO: 643633 - RNA, 19 nt, Artificial Sequence
  Description of Artificial Sequence: Synthetic oligonucleotide
  Antisense strand to SEQ ID NO: 643632
uaggacauagccuuccuuu

SEQ ID NO: 643634 - RNA, 19 nt, Artificial Sequence
  Description of Artificial Sequence: Synthetic oligonucleotide
  Sense strand starting at position 1080 of SEQ ID NO: 585485
ggguuugccguuuccagua

SEQ ID NO: 643635 - RNA, 19 nt, Artificial Sequence
  Description of Artificial Sequence: Synthetic oligonucleotide
  Antisense strand to SEQ ID NO: 643634
uacuggaaacggcaaaccc

SEQ ID NO: 643636 - RNA, 19 nt, Artificial Sequence
  Description of Artificial Sequence: Synthetic oligonucleotide
  Sense strand starting at position 1140 of SEQ ID NO: 585485
cauuuauuggaguguguau

SEQ ID NO: 643637 - RNA, 19 nt, Artificial Sequence
  Description of Artificial Sequence: Synthetic oligonucleotide
  Antisense strand to SEQ ID NO: 643636
auacacacuccaauaaaug

SEQ ID NO: 643638 - RNA, 19 nt, Artificial Sequence
  Description of Artificial Sequence: Synthetic oligonucleotide
  Sense strand starting at position 1256 of SEQ ID NO: 585485
aguaaacucucaguugaug

SEQ ID NO: 643639 - RNA, 19 nt, Artificial Sequence
  Description of Artificial Sequence: Synthetic oligonucleotide
  Antisense strand to SEQ ID NO: 643638
caucaacugagaguuuacu

SEQ ID NO: 643640 - RNA, 19 nt, Artificial Sequence
  Description of Artificial Sequence: Synthetic oligonucleotide
  Sense strand starting at position 1288 of SEQ ID NO: 585485
gcuuucccagauuaagauu

SEQ ID NO: 643641 - RNA, 19 nt, Artificial Sequence
  Description of Artificial Sequence: Synthetic oligonucleotide
  Antisense strand to SEQ ID NO: 643640
aaucuuaaucugggaaagc

SEQ ID NO: 643642 - RNA, 19 nt, Artificial Sequence
  Description of Artificial Sequence: Synthetic oligonucleotide
  Sense strand starting at position 1330 of SEQ ID NO: 585485
ugcauuugccuaugucuca

SEQ ID NO: 643643 - RNA, 19 nt, Artificial Sequence
  Description of Artificial Sequence: Synthetic oligonucleotide
  Antisense strand to SEQ ID NO: 643642
ugagacauaggcaaaugca

SEQ ID NO: 643644 - RNA, 19 nt, Artificial Sequence
  Description of Artificial Sequence: Synthetic oligonucleotide
  Sense strand starting at position 1493 of SEQ ID NO: 585485
ucgugauccagagacucuu

SEQ ID NO: 643645 - RNA, 19 nt, Artificial Sequence
  Description of Artificial Sequence: Synthetic oligonucleotide
  Antisense strand to SEQ ID NO: 643644
aagagucucuggaucacga

SEQ ID NO: 643646 - RNA, 19 nt, Artificial Sequence
  Description of Artificial Sequence: Synthetic oligonucleotide
  Sense strand starting at position 1520 of SEQ ID NO: 585485
gagacugcgauucggagaa

SEQ ID NO: 643647 - RNA, 19 nt, Artificial Sequence
  Description of Artificial Sequence: Synthetic oligonucleotide
  Antisense strand to SEQ ID NO: 643646
uucuccgaaucgcagucuc

SEQ ID NO: 643648 - RNA, 19 nt, Artificial Sequence
  Description of Artificial Sequence: Synthetic oligonucleotide
  Sense strand starting at position 1524 of SEQ ID NO: 585485
cugcgauucggagaacaug

SEQ ID NO: 643649 - RNA, 19 nt, Artificial Sequence
  Description of Artificial Sequence: Synthetic oligonucleotide
  Antisense strand to SEQ ID NO: 643648
cauguucuccgaaucgcag

SEQ ID NO: 643650 - RNA, 19 nt, Artificial Sequence
  Description of Artificial Sequence: Synthetic oligonucleotide
  Sense strand starting at position 1604 of SEQ ID NO: 585485
gugucugcuccugcuaagu

SEQ ID NO: 643651 - RNA, 19 nt, Artificial Sequence
  Description of Artificial Sequence: Synthetic oligonucleotide
  Antisense strand to SEQ ID NO: 643650
acuuagcaggagcagacac

SEQ ID NO: 643652 - RNA, 19 nt, Artificial Sequence
  Description of Artificial Sequence: Synthetic oligonucleotide
  Sense strand starting at position 2067 of SEQ ID NO: 585485
ucgcuugcuccugucacau

SEQ ID NO: 643653 - RNA, 19 nt, Artificial Sequence
  Description of Artificial Sequence: Synthetic oligonucleotide
  Antisense strand to SEQ ID NO: 643652
augugacaggagcaagcga

SEQ ID NO: 643654 - RNA, 19 nt, Artificial Sequence
  Description of Artificial Sequence: Synthetic oligonucleotide
  Sense strand starting at position 2128 of SEQ ID NO: 585485
cugcgucaagccuauauuu

SEQ ID NO: 643655 - RNA, 19 nt, Artificial Sequence
  Description of Artificial Sequence: Synthetic oligonucleotide
  Antisense strand to SEQ ID NO: 643654
aaauauaggcuugacgcag

SEQ ID NO: 643656 - RNA, 19 nt, Artificial Sequence
  Description of Artificial Sequence: Synthetic oligonucleotide
  Sense strand starting at position 2136 of SEQ ID NO: 585485
agccuauauuucguguuaa

SEQ ID NO: 643657 - RNA, 19 nt, Artificial Sequence
  Description of Artificial Sequence: Synthetic oligonucleotide
  Antisense strand to SEQ ID NO: 643656
uuaacacgaaauauaggcu

SEQ ID NO: 643658 - RNA, 19 nt, Artificial Sequence
  Description of Artificial Sequence: Synthetic oligonucleotide
  Sense strand starting at position 2327 of SEQ ID NO: 585485
gcuagaccucuacgggaga

SEQ ID NO: 643659 - RNA, 19 nt, Artificial Sequence
  Description of Artificial Sequence: Synthetic oligonucleotide
  Antisense strand to SEQ ID NO: 643658
ucucccguagaggucuagc

SEQ ID NO: 643660 - RNA, 19 nt, Artificial Sequence
  Description of Artificial Sequence: Synthetic oligonucleotide
  Sense strand starting at position 2340 of SEQ ID NO: 585485
gggagaggcugaaaugguu

SEQ ID NO: 643661 - RNA, 19 nt, Artificial Sequence
  Description of Artificial Sequence: Synthetic oligonucleotide
  Antisense strand to SEQ ID NO: 643660
aaccauuucagccucuccc

SEQ ID NO: 643662 - RNA, 19 nt, Artificial Sequence
  Description of Artificial Sequence: Synthetic oligonucleotide
  Sense strand starting at position 2514 of SEQ ID NO: 585485
gcucuuuagcugucuaguu

SEQ ID NO: 643663 - RNA, 19 nt, Artificial Sequence
  Description of Artificial Sequence: Synthetic oligonucleotide
  Antisense strand to SEQ ID NO: 643662
aacuagacagcuaaagagc

SEQ ID NO: 643664 - RNA, 19 nt, Artificial Sequence
  Description of Artificial Sequence: Synthetic oligonucleotide
  Sense strand starting at position 2620 of SEQ ID NO: 585485
aucuuagugcuugggacaa

SEQ ID NO: 643665 - RNA, 19 nt, Artificial Sequence
  Description of Artificial Sequence: Synthetic oligonucleotide
  Antisense strand to SEQ ID NO: 643664
uugucccaagcacuaagau

SEQ ID NO: 643666 - RNA, 19 nt, Artificial Sequence
  Description of Artificial Sequence: Synthetic oligonucleotide
  Sense strand starting at position 2666 of SEQ ID NO: 585485
gucuucucaccagacugua

SEQ ID NO: 643667 - RNA, 19 nt, Artificial Sequence
  Description of Artificial Sequence: Synthetic oligonucleotide
  Antisense strand to SEQ ID NO: 643666
uacagucuggugagaagac

SEQ ID NO: 643668 - RNA, 19 nt, Artificial Sequence
  Description of Artificial Sequence: Synthetic oligonucleotide
  Sense strand starting at position 3201 of SEQ ID NO: 585485
uaguuaauagagcaguuau

SEQ ID NO: 643669 - RNA, 19 nt, Artificial Sequence
  Description of Artificial Sequence: Synthetic oligonucleotide
  Antisense strand to SEQ ID NO: 643668
auaacugcucuauuaacua

SEQ ID NO: 643670 - RNA, 19 nt, Artificial Sequence
  Description of Artificial Sequence: Synthetic oligonucleotide
  Sense strand starting at position 3317 of SEQ ID NO: 585485
uugugagacguauaggaug

SEQ ID NO: 643671 - RNA, 19 nt, Artificial Sequence
  Description of Artificial Sequence: Synthetic oligonucleotide
  Antisense strand to SEQ ID NO: 643670
cauccuauacgucucacaa

SEQ ID NO: 643672 - RNA, 19 nt, Artificial Sequence
  Description of Artificial Sequence: Synthetic oligonucleotide
  Sense strand starting at position 3638 of SEQ ID NO: 585485
agucaaucaaggugguaga

SEQ ID NO: 643673 - RNA, 19 nt, Artificial Sequence
  Description of Artificial Sequence: Synthetic oligonucleotide
  Antisense strand to SEQ ID NO: 643672
ucuaccaccuugauugacu

SEQ ID NO: 643674 - RNA, 19 nt, Artificial Sequence
  Description of Artificial Sequence: Synthetic oligonucleotide
  Sense strand starting at position 3666 of SEQ ID NO: 585485
auggauuaggagugaagca

SEQ ID NO: 643675 - RNA, 19 nt, Artificial Sequence
  Description of Artificial Sequence: Synthetic oligonucleotide
  Antisense strand to SEQ ID NO: 643674
ugcuucacuccuaauccau

SEQ ID NO: 643676 - RNA, 19 nt, Artificial Sequence
  Description of Artificial Sequence: Synthetic oligonucleotide
  Sense strand starting at position 3759 of SEQ ID NO: 585485
aaguuuguucugcauagau

SEQ ID NO: 643677 - RNA, 19 nt, Artificial Sequence
  Description of Artificial Sequence: Synthetic oligonucleotide
  Antisense strand to SEQ ID NO: 643676
aucuaugcagaacaaacuu

SEQ ID NO: 643678 - RNA, 19 nt, Artificial Sequence
  Description of Artificial Sequence: Synthetic oligonucleotide
  Sense strand starting at position 3761 of SEQ ID NO: 585485
guuuguucugcauagauga

SEQ ID NO: 643679 - RNA, 19 nt, Artificial Sequence
  Description of Artificial Sequence: Synthetic oligonucleotide
  Antisense strand to SEQ ID NO: 643678
ucaucuaugcagaacaaac

SEQ ID NO: 643680 - RNA, 19 nt, Artificial Sequence
  Description of Artificial Sequence: Synthetic oligonucleotide
  Sense strand starting at position 3771 of SEQ ID NO: 585485
cauagaugaccuugagcuu

SEQ ID NO: 643681 - RNA, 19 nt, Artificial Sequence
  Description of Artificial Sequence: Synthetic oligonucleotide
  Antisense strand to SEQ ID NO: 643680
aagcucaaggucaucuaug

SEQ ID NO: 643682 - RNA, 19 nt, Artificial Sequence
  Description of Artificial Sequence: Synthetic oligonucleotide
  Sense strand starting at position 3774 of SEQ ID NO: 585485
agaugaccuugagcuuaua

SEQ ID NO: 643683 - RNA, 19 nt, Artificial Sequence
  Description of Artificial Sequence: Synthetic oligonucleotide
  Antisense strand to SEQ ID NO: 643682
uauaagcucaaggucaucu

SEQ ID NO: 643684 - RNA, 19 nt, Artificial Sequence
  Description of Artificial Sequence: Synthetic oligonucleotide
  Sense strand starting at position 3777 of SEQ ID NO: 585485
ugaccuugagcuuauagau

SEQ ID NO: 643685 - RNA, 19 nt, Artificial Sequence
  Description of Artificial Sequence: Synthetic oligonucleotide
  Antisense strand to SEQ ID NO: 643684
aucuauaagcucaagguca

SEQ ID NO: 643686 - RNA, 19 nt, Artificial Sequence
  Description of Artificial Sequence: Synthetic oligonucleotide
  Sense strand starting at position 3783 of SEQ ID NO: 585485
ugagcuuauagauguauag

SEQ ID NO: 643687 - RNA, 19 nt, Artificial Sequence
  Description of Artificial Sequence: Synthetic oligonucleotide
  Antisense strand to SEQ ID NO: 643686
cuauacaucuauaagcuca

SEQ ID NO: 643688 - RNA, 19 nt, Artificial Sequence
  Description of Artificial Sequence: Synthetic oligonucleotide
  Sense strand starting at position 21 of SEQ ID NO: 585486
aaguuauuccuggguggga

SEQ ID NO: 643689 - RNA, 19 nt, Artificial Sequence
  Description of Artificial Sequence: Synthetic oligonucleotide
  Antisense strand to SEQ ID NO: 643688
ucccacccaggaauaacuu

SEQ ID NO: 643690 - RNA, 19 nt, Artificial Sequence
  Description of Artificial Sequence: Synthetic oligonucleotide
  Sense strand starting at position 104 of SEQ ID NO: 585486
gguaccuucugauuccaga

SEQ ID NO: 643691 - RNA, 19 nt, Artificial Sequence
  Description of Artificial Sequence: Synthetic oligonucleotide
  Antisense strand to SEQ ID NO: 643690
ucuggaaucagaagguacc

SEQ ID NO: 643692 - RNA, 19 nt, Artificial Sequence
  Description of Artificial Sequence: Synthetic oligonucleotide
  Sense strand starting at position 824 of SEQ ID NO: 585486
gaaauaaauugacucuggu

SEQ ID NO: 643693 - RNA, 19 nt, Artificial Sequence
  Description of Artificial Sequence: Synthetic oligonucleotide
  Antisense strand to SEQ ID NO: 643692
accagagucaauuuauuuc

SEQ ID NO: 643694 - RNA, 19 nt, Artificial Sequence
  Description of Artificial Sequence: Synthetic oligonucleotide
  Sense strand starting at position 827 of SEQ ID NO: 585486
auaaauugacucuggugga

SEQ ID NO: 643695 - RNA, 19 nt, Artificial Sequence
  Description of Artificial Sequence: Synthetic oligonucleotide
  Antisense strand to SEQ ID NO: 643694
uccaccagagucaauuuau

SEQ ID NO: 643696 - RNA, 19 nt, Artificial Sequence
  Description of Artificial Sequence: Synthetic oligonucleotide
  Sense strand starting at position 861 of SEQ ID NO: 585486
gaaggauaucuagguucuu

SEQ ID NO: 643697 - RNA, 19 nt, Artificial Sequence
  Description of Artificial Sequence: Synthetic oligonucleotide
  Antisense strand to SEQ ID NO: 643696
aagaaccuagauauccuuc

SEQ ID NO: 643698 - RNA, 19 nt, Artificial Sequence
  Description of Artificial Sequence: Synthetic oligonucleotide
  Sense strand starting at position 916 of SEQ ID NO: 585486
acaggugagucuccaaauc

SEQ ID NO: 643699 - RNA, 19 nt, Artificial Sequence
  Description of Artificial Sequence: Synthetic oligonucleotide
  Antisense strand to SEQ ID NO: 643698
gauuuggagacucaccugu

SEQ ID NO: 643700 - RNA, 19 nt, Artificial Sequence
  Description of Artificial Sequence: Synthetic oligonucleotide
  Sense strand starting at position 939 of SEQ ID NO: 585486
caaugaagucacugaguug

SEQ ID NO: 643701 - RNA, 19 nt, Artificial Sequence
  Description of Artificial Sequence: Synthetic oligonucleotide
  Antisense strand to SEQ ID NO: 643700
caacucagugacuucauug

SEQ ID NO: 643702 - RNA, 19 nt, Artificial Sequence
  Description of Artificial Sequence: Synthetic oligonucleotide
  Sense strand starting at position 973 of SEQ ID NO: 585486
gcugaaggucaacauucua

SEQ ID NO: 643703 - RNA, 19 nt, Artificial Sequence
  Description of Artificial Sequence: Synthetic oligonucleotide
  Antisense strand to SEQ ID NO: 643702
uagaauguugaccuucagc

SEQ ID NO: 643704 - RNA, 19 nt, Artificial Sequence
  Description of Artificial Sequence: Synthetic oligonucleotide
  Sense strand starting at position 1041 of SEQ ID NO: 585486
cuguuauuauuucuguguu

SEQ ID NO: 643705 - RNA, 19 nt, Artificial Sequence
  Description of Artificial Sequence: Synthetic oligonucleotide
  Antisense strand to SEQ ID NO: 643704
aacacagaaauaauaacag

SEQ ID NO: 643706 - RNA, 19 nt, Artificial Sequence
  Description of Artificial Sequence: Synthetic oligonucleotide
  Sense strand starting at position 1043 of SEQ ID NO: 585486
guuauuauuucuguguuga

SEQ ID NO: 643707 - RNA, 19 nt, Artificial Sequence
  Description of Artificial Sequence: Synthetic oligonucleotide
  Antisense strand to SEQ ID NO: 643706
ucaacacagaaauaauaac

SEQ ID NO: 643708 - RNA, 19 nt, Artificial Sequence
  Description of Artificial Sequence: Synthetic oligonucleotide
  Sense strand starting at position 1044 of SEQ ID NO: 585486
uuauuauuucuguguugac

SEQ ID NO: 643709 - RNA, 19 nt, Artificial Sequence
  Description of Artificial Sequence: Synthetic oligonucleotide
  Antisense strand to SEQ ID NO: 643708
gucaacacagaaauaauaa

SEQ ID NO: 643710 - RNA, 19 nt, Artificial Sequence
  Description of Artificial Sequence: Synthetic oligonucleotide
  Sense strand starting at position 1203 of SEQ ID NO: 585486
cucucauaacuccgauaag

SEQ ID NO: 643711 - RNA, 19 nt, Artificial Sequence
  Description of Artificial Sequence: Synthetic oligonucleotide
  Antisense strand to SEQ ID NO: 643710
cuuaucggaguuaugagag

SEQ ID NO: 643712 - RNA, 19 nt, Artificial Sequence
  Description of Artificial Sequence: Synthetic oligonucleotide
  Sense strand starting at position 1245 of SEQ ID NO: 585486
gagaaacuguccucagguc

SEQ ID NO: 643713 - RNA, 19 nt, Artificial Sequence
  Description of Artificial Sequence: Synthetic oligonucleotide
  Antisense strand to SEQ ID NO: 643712
gaccugaggacaguuucuc

SEQ ID NO: 643714 - RNA, 19 nt, Artificial Sequence
  Description of Artificial Sequence: Synthetic oligonucleotide
  Sense strand starting at position 1288 of SEQ ID NO: 585486
gagaaauagcaagguuggu

SEQ ID NO: 643715 - RNA, 19 nt, Artificial Sequence
  Description of Artificial Sequence: Synthetic oligonucleotide
  Antisense strand to SEQ ID NO: 643714
accaaccuugcuauuucuc

SEQ ID NO: 643716 - RNA, 19 nt, Artificial Sequence
  Description of Artificial Sequence: Synthetic oligonucleotide
  Sense strand starting at position 1293 of SEQ ID NO: 585486
auagcaagguugguagaaa

SEQ ID NO: 643717 - RNA, 19 nt, Artificial Sequence
  Description of Artificial Sequence: Synthetic oligonucleotide
  Antisense strand to SEQ ID NO: 643716
uuucuaccaaccuugcuau

SEQ ID NO: 643718 - RNA, 19 nt, Artificial Sequence
  Description of Artificial Sequence: Synthetic oligonucleotide
  Sense strand starting at position 1709 of SEQ ID NO: 585486
caaccucgagaagguauaa

SEQ ID NO: 643719 - RNA, 19 nt, Artificial Sequence
  Description of Artificial Sequence: Synthetic oligonucleotide
  Antisense strand to SEQ ID NO: 643718
uuauaccuucucgagguug

SEQ ID NO: 643720 - RNA, 19 nt, Artificial Sequence
  Description of Artificial Sequence: Synthetic oligonucleotide
  Sense strand starting at position 1748 of SEQ ID NO: 585486
augucuuucgaagaguuac

SEQ ID NO: 643721 - RNA, 19 nt, Artificial Sequence
  Description of Artificial Sequence: Synthetic oligonucleotide
  Antisense strand to SEQ ID NO: 643720
guaacucuucgaaagacau

SEQ ID NO: 643722 - RNA, 19 nt, Artificial Sequence
  Description of Artificial Sequence: Synthetic oligonucleotide
  Sense strand starting at position 1754 of SEQ ID NO: 585486
uucgaagaguuaccugaac

SEQ ID NO: 643723 - RNA, 19 nt, Artificial Sequence
  Description of Artificial Sequence: Synthetic oligonucleotide
  Antisense strand to SEQ ID NO: 643722
guucagguaacucuucgaa

SEQ ID NO: 643724 - RNA, 19 nt, Artificial Sequence
  Description of Artificial Sequence: Synthetic oligonucleotide
  Sense strand starting at position 1756 of SEQ ID NO: 585486
cgaagaguuaccugaacuc

SEQ ID NO: 643725 - RNA, 19 nt, Artificial Sequence
  Description of Artificial Sequence: Synthetic oligonucleotide
  Antisense strand to SEQ ID NO: 643724
gaguucagguaacucuucg

SEQ ID NO: 643726 - RNA, 19 nt, Artificial Sequence
  Description of Artificial Sequence: Synthetic oligonucleotide
  Sense strand starting at position 1763 of SEQ ID NO: 585486
uuaccugaacucugugaga

SEQ ID NO: 643727 - RNA, 19 nt, Artificial Sequence
  Description of Artificial Sequence: Synthetic oligonucleotide
  Antisense strand to SEQ ID NO: 643726
ucucacagaguucagguaa

SEQ ID NO: 643728 - RNA, 19 nt, Artificial Sequence
  Description of Artificial Sequence: Synthetic oligonucleotide
  Sense strand starting at position 2160 of SEQ ID NO: 585486
cuaccaauccugggugaga

SEQ ID NO: 643729 - RNA, 19 nt, Artificial Sequence
  Description of Artificial Sequence: Synthetic oligonucleotide
  Antisense strand to SEQ ID NO: 643728
ucucacccaggauugguag

SEQ ID NO: 643730 - RNA, 19 nt, Artificial Sequence
  Description of Artificial Sequence: Synthetic oligonucleotide
  Sense strand starting at position 2161 of SEQ ID NO: 585486
uaccaauccugggugagaa

SEQ ID NO: 643731 - RNA, 19 nt, Artificial Sequence
  Description of Artificial Sequence: Synthetic oligonucleotide
  Antisense strand to SEQ ID NO: 643730
uucucacccaggauuggua

SEQ ID NO: 643732 - RNA, 19 nt, Artificial Sequence
  Description of Artificial Sequence: Synthetic oligonucleotide
  Sense strand starting at position 2332 of SEQ ID NO: 585486
cgaguugucauuuggguug

SEQ ID NO: 643733 - RNA, 19 nt, Artificial Sequence
  Description of Artificial Sequence: Synthetic oligonucleotide
  Antisense strand to SEQ ID NO: 643732
caacccaaaugacaacucg

SEQ ID NO: 643734 - RNA, 19 nt, Artificial Sequence
  Description of Artificial Sequence: Synthetic oligonucleotide
  Sense strand starting at position 2344 of SEQ ID NO: 585486
uggguugaccaaugaguuc

SEQ ID NO: 643735 - RNA, 19 nt, Artificial Sequence
  Description of Artificial Sequence: Synthetic oligonucleotide
  Antisense strand to SEQ ID NO: 643734
gaacucauuggucaaccca

SEQ ID NO: 643736 - RNA, 19 nt, Artificial Sequence
  Description of Artificial Sequence: Synthetic oligonucleotide
  Sense strand starting at position 2422 of SEQ ID NO: 585486
ggcggcguccggguauaaa

SEQ ID NO: 643737 - RNA, 19 nt, Artificial Sequence
  Description of Artificial Sequence: Synthetic oligonucleotide
  Antisense strand to SEQ ID NO: 643736
uuuauacccggacgccgcc

SEQ ID NO: 643738 - RNA, 19 nt, Artificial Sequence
  Description of Artificial Sequence: Synthetic oligonucleotide
  Sense strand starting at position 2556 of SEQ ID NO: 585486
agggauggauggguucauu

SEQ ID NO: 643739 - RNA, 19 nt, Artificial Sequence
  Description of Artificial Sequence: Synthetic oligonucleotide
  Antisense strand to SEQ ID NO: 643738
aaugaacccauccaucccu

SEQ ID NO: 643740 - RNA, 19 nt, Artificial Sequence
  Description of Artificial Sequence: Synthetic oligonucleotide
  Sense strand starting at position 2572 of SEQ ID NO: 585486
auuugagagccacggcuua

SEQ ID NO: 643741 - RNA, 19 nt, Artificial Sequence
  Description of Artificial Sequence: Synthetic oligonucleotide
  Antisense strand to SEQ ID NO: 643740
uaagccguggcucucaaau

SEQ ID NO: 643742 - RNA, 19 nt, Artificial Sequence
  Description of Artificial Sequence: Synthetic oligonucleotide
  Sense strand starting at position 2585 of SEQ ID NO: 585486
ggcuuaaagcgguugcgau

SEQ ID NO: 643743 - RNA, 19 nt, Artificial Sequence
  Description of Artificial Sequence: Synthetic oligonucleotide
  Antisense strand to SEQ ID NO: 643742
aucgcaaccgcuuuaagcc

SEQ ID NO: 643744 - RNA, 19 nt, Artificial Sequence
  Description of Artificial Sequence: Synthetic oligonucleotide
  Sense strand starting at position 2892 of SEQ ID NO: 585486
cugcuugggacuugaaauc

SEQ ID NO: 643745 - RNA, 19 nt, Artificial Sequence
  Description of Artificial Sequence: Synthetic oligonucleotide
  Antisense strand to SEQ ID NO: 643744
gauuucaagucccaagcag

SEQ ID NO: 643746 - RNA, 19 nt, Artificial Sequence
  Description of Artificial Sequence: Synthetic oligonucleotide
  Sense strand starting at position 2918 of SEQ ID NO: 585486
gaaggaccgucacuacaua

SEQ ID NO: 643747 - RNA, 19 nt, Artificial Sequence
  Description of Artificial Sequence: Synthetic oligonucleotide
  Antisense strand to SEQ ID NO: 643746
uauguagugacgguccuuc

SEQ ID NO: 643748 - RNA, 19 nt, Artificial Sequence
  Description of Artificial Sequence: Synthetic oligonucleotide
  Sense strand starting at position 3255 of SEQ ID NO: 585486
ccagccuugcaacaagaaa

SEQ ID NO: 643749 - RNA, 19 nt, Artificial Sequence
  Description of Artificial Sequence: Synthetic oligonucleotide
  Antisense strand to SEQ ID NO: 643748
uuucuuguugcaaggcugg

SEQ ID NO: 643750 - RNA, 19 nt, Artificial Sequence
  Description of Artificial Sequence: Synthetic oligonucleotide
  Sense strand starting at position 3350 of SEQ ID NO: 585486
ggaccaaucuggucacuua

SEQ ID NO: 643751 - RNA, 19 nt, Artificial Sequence
  Description of Artificial Sequence: Synthetic oligonucleotide
  Antisense strand to SEQ ID NO: 643750
uaagugaccagauuggucc

SEQ ID NO: 643752 - RNA, 19 nt, Artificial Sequence
  Description of Artificial Sequence: Synthetic oligonucleotide
  Sense strand starting at position 3596 of SEQ ID NO: 585486
aaggguuaaugagcucaca

SEQ ID NO: 643753 - RNA, 19 nt, Artificial Sequence
  Description of Artificial Sequence: Synthetic oligonucleotide
  Antisense strand to SEQ ID NO: 643752
ugugagcucauuaacccuu

SEQ ID NO: 643754 - RNA, 19 nt, Artificial Sequence
  Description of Artificial Sequence: Synthetic oligonucleotide
  Sense strand starting at position 3599 of SEQ ID NO: 585486
gguuaaugagcucacauac

SEQ ID NO: 643755 - RNA, 19 nt, Artificial Sequence
  Description of Artificial Sequence: Synthetic oligonucleotide
  Antisense strand to SEQ ID NO: 643754
guaugugagcucauuaacc

SEQ ID NO: 643756 - RNA, 19 nt, Artificial Sequence
  Description of Artificial Sequence: Synthetic oligonucleotide
  Sense strand starting at position 3816 of SEQ ID NO: 585486
ggguauauuugugugguua

SEQ ID NO: 643757 - RNA, 19 nt, Artificial Sequence
  Description of Artificial Sequence: Synthetic oligonucleotide
  Antisense strand to SEQ ID NO: 643756
uaaccacacaaauauaccc

SEQ ID NO: 643758 - RNA, 19 nt, Artificial Sequence
  Description of Artificial Sequence: Synthetic oligonucleotide
  Sense strand starting at position 3817 of SEQ ID NO: 585486
gguauauuugugugguuaa

SEQ ID NO: 643759 - RNA, 19 nt, Artificial Sequence
  Description of Artificial Sequence: Synthetic oligonucleotide
  Antisense strand to SEQ ID NO: 643758
uuaaccacacaaauauacc

SEQ ID NO: 643760 - RNA, 19 nt, Artificial Sequence
  Description of Artificial Sequence: Synthetic oligonucleotide
  Sense strand starting at position 3840 of SEQ ID NO: 585486
gguggcaaucuaggaauaa

SEQ ID NO: 643761 - RNA, 19 nt, Artificial Sequence
  Description of Artificial Sequence: Synthetic oligonucleotide
  Antisense strand to SEQ ID NO: 643760
uuauuccuagauugccacc

SEQ ID NO: 643762 - RNA, 19 nt, Artificial Sequence
  Description of Artificial Sequence: Synthetic oligonucleotide
  Sense strand starting at position 3922 of SEQ ID NO: 585486
ggagguaaagaaugucuua

SEQ ID NO: 643763 - RNA, 19 nt, Artificial Sequence
  Description of Artificial Sequence: Synthetic oligonucleotide
  Antisense strand to SEQ ID NO: 643762
uaagacauucuuuaccucc

SEQ ID NO: 643764 - RNA, 19 nt, Artificial Sequence
  Description of Artificial Sequence: Synthetic oligonucleotide
  Sense strand starting at position 3925 of SEQ ID NO: 585486
gguaaagaaugucuuauaa

SEQ ID NO: 643765 - RNA, 19 nt, Artificial Sequence
  Description of Artificial Sequence: Synthetic oligonucleotide
  Antisense strand to SEQ ID NO: 643764
uuauaagacauucuuuacc

SEQ ID NO: 643766 - RNA, 19 nt, Artificial Sequence
  Description of Artificial Sequence: Synthetic oligonucleotide
  Sense strand starting at position 3949 of SEQ ID NO: 585486
gcagauugcauagguauuu

SEQ ID NO: 643767 - RNA, 19 nt, Artificial Sequence
  Description of Artificial Sequence: Synthetic oligonucleotide
  Antisense strand to SEQ ID NO: 643766
aaauaccuaugcaaucugc

SEQ ID NO: 643768 - RNA, 19 nt, Artificial Sequence
  Description of Artificial Sequence: Synthetic oligonucleotide
  Sense strand starting at position 17 of SEQ ID NO: 585487
auaucucagaguuggauga

SEQ ID NO: 643769 - RNA, 19 nt, Artificial Sequence
  Description of Artificial Sequence: Synthetic oligonucleotide
  Antisense strand to SEQ ID NO: 643768
ucauccaacucugagauau

SEQ ID NO: 643770 - RNA, 19 nt, Artificial Sequence
  Description of Artificial Sequence: Synthetic oligonucleotide
  Sense strand starting at position 18 of SEQ ID NO: 585487
uaucucagaguuggaugaa

SEQ ID NO: 643771 - RNA, 19 nt, Artificial Sequence
  Description of Artificial Sequence: Synthetic oligonucleotide
  Antisense strand to SEQ ID NO: 643770
uucauccaacucugagaua

SEQ ID NO: 643772 - RNA, 19 nt, Artificial Sequence
  Description of Artificial Sequence: Synthetic oligonucleotide
  Sense strand starting at position 181 of SEQ ID NO: 585487
ccaguugacuggcucauaa

SEQ ID NO: 643773 - RNA, 19 nt, Artificial Sequence
  Description of Artificial Sequence: Synthetic oligonucleotide
  Antisense strand to SEQ ID NO: 643772
uuaugagccagucaacugg

SEQ ID NO: 643774 - RNA, 19 nt, Artificial Sequence
  Description of Artificial Sequence: Synthetic oligonucleotide
  Sense strand starting at position 183 of SEQ ID NO: 585487
aguugacuggcucauaaau

SEQ ID NO: 643775 - RNA, 19 nt, Artificial Sequence
  Description of Artificial Sequence: Synthetic oligonucleotide
  Antisense strand to SEQ ID NO: 643774
auuuaugagccagucaacu

SEQ ID NO: 643776 - RNA, 19 nt, Artificial Sequence
  Description of Artificial Sequence: Synthetic oligonucleotide
  Sense strand starting at position 317 of SEQ ID NO: 585487
cgugauuagacugagucga

SEQ ID NO: 643777 - RNA, 19 nt, Artificial Sequence
  Description of Artificial Sequence: Synthetic oligonucleotide
  Antisense strand to SEQ ID NO: 643776
ucgacucagucuaaucacg

SEQ ID NO: 643778 - RNA, 19 nt, Artificial Sequence
  Description of Artificial Sequence: Synthetic oligonucleotide
  Sense strand starting at position 319 of SEQ ID NO: 585487
ugauuagacugagucgaag

SEQ ID NO: 643779 - RNA, 19 nt, Artificial Sequence
  Description of Artificial Sequence: Synthetic oligonucleotide
  Antisense strand to SEQ ID NO: 643778
cuucgacucagucuaauca

SEQ ID NO: 643780 - RNA, 19 nt, Artificial Sequence
  Description of Artificial Sequence: Synthetic oligonucleotide
  Sense strand starting at position 340 of SEQ ID NO: 585487
agcggugaaguauaaucaa

SEQ ID NO: 643781 - RNA, 19 nt, Artificial Sequence
  Description of Artificial Sequence: Synthetic oligonucleotide
  Antisense strand to SEQ ID NO: 643780
uugauuauacuucaccgcu

SEQ ID NO: 643782 - RNA, 19 nt, Artificial Sequence
  Description of Artificial Sequence: Synthetic oligonucleotide
  Sense strand starting at position 343 of SEQ ID NO: 585487
ggugaaguauaaucaagua

SEQ ID NO: 643783 - RNA, 19 nt, Artificial Sequence
  Description of Artificial Sequence: Synthetic oligonucleotide
  Antisense strand to SEQ ID NO: 643782
uacuugauuauacuucacc

SEQ ID NO: 643784 - RNA, 19 nt, Artificial Sequence
  Description of Artificial Sequence: Synthetic oligonucleotide
  Sense strand starting at position 625 of SEQ ID NO: 585487
cgggauugagauugugaac

SEQ ID NO: 643785 - RNA, 19 nt, Artificial Sequence
  Description of Artificial Sequence: Synthetic oligonucleotide
  Antisense strand to SEQ ID NO: 643784
guucacaaucucaaucccg

SEQ ID NO: 643786 - RNA, 19 nt, Artificial Sequence
  Description of Artificial Sequence: Synthetic oligonucleotide
  Sense strand starting at position 631 of SEQ ID NO: 585487
ugagauugugaacgucaau

SEQ ID NO: 643787 - RNA, 19 nt, Artificial Sequence
  Description of Artificial Sequence: Synthetic oligonucleotide
  Antisense strand to SEQ ID NO: 643786
auugacguucacaaucuca

SEQ ID NO: 643788 - RNA, 19 nt, Artificial Sequence
  Description of Artificial Sequence: Synthetic oligonucleotide
  Sense strand starting at position 695 of SEQ ID NO: 585487
agcauuaucaauugagggu

SEQ ID NO: 643789 - RNA, 19 nt, Artificial Sequence
  Description of Artificial Sequence: Synthetic oligonucleotide
  Antisense strand to SEQ ID NO: 643788
acccucaauugauaaugcu

SEQ ID NO: 643790 - RNA, 19 nt, Artificial Sequence
  Description of Artificial Sequence: Synthetic oligonucleotide
  Sense strand starting at position 988 of SEQ ID NO: 585487
uuacuuauagaguacugua

SEQ ID NO: 643791 - RNA, 19 nt, Artificial Sequence
  Description of Artificial Sequence: Synthetic oligonucleotide
  Antisense strand to SEQ ID NO: 643790
uacaguacucuauaaguaa

SEQ ID NO: 643792 - RNA, 19 nt, Artificial Sequence
  Description of Artificial Sequence: Synthetic oligonucleotide
  Sense strand starting at position 993 of SEQ ID NO: 585487
uauagaguacuguaguuga

SEQ ID NO: 643793 - RNA, 19 nt, Artificial Sequence
  Description of Artificial Sequence: Synthetic oligonucleotide
  Antisense strand to SEQ ID NO: 643792
ucaacuacaguacucuaua

SEQ ID NO: 643794 - RNA, 19 nt, Artificial Sequence
  Description of Artificial Sequence: Synthetic oligonucleotide
  Sense strand starting at position 998 of SEQ ID NO: 585487
aguacuguaguugaaagua

SEQ ID NO: 643795 - RNA, 19 nt, Artificial Sequence
  Description of Artificial Sequence: Synthetic oligonucleotide
  Antisense strand to SEQ ID NO: 643794
uacuuucaacuacaguacu

SEQ ID NO: 643796 - RNA, 19 nt, Artificial Sequence
  Description of Artificial Sequence: Synthetic oligonucleotide
  Sense strand starting at position 1092 of SEQ ID NO: 585487
guauaaauguguccauaac

SEQ ID NO: 643797 - RNA, 19 nt, Artificial Sequence
  Description of Artificial Sequence: Synthetic oligonucleotide
  Antisense strand to SEQ ID NO: 643796
guuauggacacauuuauac

SEQ ID NO: 643798 - RNA, 19 nt, Artificial Sequence
  Description of Artificial Sequence: Synthetic oligonucleotide
  Sense strand starting at position 1161 of SEQ ID NO: 585487
agaugaaauccuuguuuaa

SEQ ID NO: 643799 - RNA, 19 nt, Artificial Sequence
  Description of Artificial Sequence: Synthetic oligonucleotide
  Antisense strand to SEQ ID NO: 643798
uuaaacaaggauuucaucu

SEQ ID NO: 643800 - RNA, 19 nt, Artificial Sequence
  Description of Artificial Sequence: Synthetic oligonucleotide
  Sense strand starting at position 1234 of SEQ ID NO: 585487
aggcuaaugcguuaggaug

SEQ ID NO: 643801 - RNA, 19 nt, Artificial Sequence
  Description of Artificial Sequence: Synthetic oligonucleotide
  Antisense strand to SEQ ID NO: 643800
cauccuaacgcauuagccu

SEQ ID NO: 643802 - RNA, 19 nt, Artificial Sequence
  Description of Artificial Sequence: Synthetic oligonucleotide
  Sense strand starting at position 1245 of SEQ ID NO: 585487
uuaggauggcucgaggcaa

SEQ ID NO: 643803 - RNA, 19 nt, Artificial Sequence
  Description of Artificial Sequence: Synthetic oligonucleotide
  Antisense strand to SEQ ID NO: 643802
uugccucgagccauccuaa

SEQ ID NO: 643804 - RNA, 19 nt, Artificial Sequence
  Description of Artificial Sequence: Synthetic oligonucleotide
  Sense strand starting at position 1392 of SEQ ID NO: 585487
uguuccuaugguuacauaa

SEQ ID NO: 643805 - RNA, 19 nt, Artificial Sequence
  Description of Artificial Sequence: Synthetic oligonucleotide
  Antisense strand to SEQ ID NO: 643804
uuauguaaccauaggaaca

SEQ ID NO: 643806 - RNA, 19 nt, Artificial Sequence
  Description of Artificial Sequence: Synthetic oligonucleotide
  Sense strand starting at position 1491 of SEQ ID NO: 585487
gcauucugagcgaguggga

SEQ ID NO: 643807 - RNA, 19 nt, Artificial Sequence
  Description of Artificial Sequence: Synthetic oligonucleotide
  Antisense strand to SEQ ID NO: 643806
ucccacucgcucagaaugc

SEQ ID NO: 643808 - RNA, 19 nt, Artificial Sequence
  Description of Artificial Sequence: Synthetic oligonucleotide
  Sense strand starting at position 2051 of SEQ ID NO: 585487
cuguuaaguccacagccaa

SEQ ID NO: 643809 - RNA, 19 nt, Artificial Sequence
  Description of Artificial Sequence: Synthetic oligonucleotide
  Antisense strand to SEQ ID NO: 643808
uuggcuguggacuuaacag

SEQ ID NO: 643810 - RNA, 19 nt, Artificial Sequence
  Description of Artificial Sequence: Synthetic oligonucleotide
  Sense strand starting at position 2161 of SEQ ID NO: 585487
aagugagcuguccaaccua

SEQ ID NO: 643811 - RNA, 19 nt, Artificial Sequence
  Description of Artificial Sequence: Synthetic oligonucleotide
  Antisense strand to SEQ ID NO: 643810
uagguuggacagcucacuu

SEQ ID NO: 643812 - RNA, 19 nt, Artificial Sequence
  Description of Artificial Sequence: Synthetic oligonucleotide
  Sense strand starting at position 2296 of SEQ ID NO: 585487
uuaaauuuaacguggugua

SEQ ID NO: 643813 - RNA, 19 nt, Artificial Sequence
  Description of Artificial Sequence: Synthetic oligonucleotide
  Antisense strand to SEQ ID NO: 643812
uacaccacguuaaauuuaa

SEQ ID NO: 643814 - RNA, 19 nt, Artificial Sequence
  Description of Artificial Sequence: Synthetic oligonucleotide
  Sense strand starting at position 2346 of SEQ ID NO: 585487
cucugaaaguugcuggaau

SEQ ID NO: 643815 - RNA, 19 nt, Artificial Sequence
  Description of Artificial Sequence: Synthetic oligonucleotide
  Antisense strand to SEQ ID NO: 643814
auuccagcaacuuucagag

SEQ ID NO: 643816 - RNA, 19 nt, Artificial Sequence
  Description of Artificial Sequence: Synthetic oligonucleotide
  Sense strand starting at position 2348 of SEQ ID NO: 585487
cugaaaguugcuggaauga

SEQ ID NO: 643817 - RNA, 19 nt, Artificial Sequence
  Description of Artificial Sequence: Synthetic oligonucleotide
  Antisense strand to SEQ ID NO: 643816
ucauuccagcaacuuucag

SEQ ID NO: 643818 - RNA, 19 nt, Artificial Sequence
  Description of Artificial Sequence: Synthetic oligonucleotide
  Sense strand starting at position 2460 of SEQ ID NO: 585487
aauuaagguccagaugcuu

SEQ ID NO: 643819 - RNA, 19 nt, Artificial Sequence
  Description of Artificial Sequence: Synthetic oligonucleotide
  Antisense strand to SEQ ID NO: 643818
aagcaucuggaccuuaauu

SEQ ID NO: 643820 - RNA, 19 nt, Artificial Sequence
  Description of Artificial Sequence: Synthetic oligonucleotide
  Sense strand starting at position 2484 of SEQ ID NO: 585487
cccuucuuuguugaguaga

SEQ ID NO: 643821 - RNA, 19 nt, Artificial Sequence
  Description of Artificial Sequence: Synthetic oligonucleotide
  Antisense strand to SEQ ID NO: 643820
ucuacucaacaaagaaggg

SEQ ID NO: 643822 - RNA, 19 nt, Artificial Sequence
  Description of Artificial Sequence: Synthetic oligonucleotide
  Sense strand starting at position 2492 of SEQ ID NO: 585487
uguugaguagagggagaua

SEQ ID NO: 643823 - RNA, 19 nt, Artificial Sequence
  Description of Artificial Sequence: Synthetic oligonucleotide
  Antisense strand to SEQ ID NO: 643822
uaucucccucuacucaaca

SEQ ID NO: 643824 - RNA, 19 nt, Artificial Sequence
  Description of Artificial Sequence: Synthetic oligonucleotide
  Sense strand starting at position 2545 of SEQ ID NO: 585487
gcaaaugauucuccuugga

SEQ ID NO: 643825 - RNA, 19 nt, Artificial Sequence
  Description of Artificial Sequence: Synthetic oligonucleotide
  Antisense strand to SEQ ID NO: 643824
uccaaggagaaucauuugc

SEQ ID NO: 643826 - RNA, 19 nt, Artificial Sequence
  Description of Artificial Sequence: Synthetic oligonucleotide
  Sense strand starting at position 2549 of SEQ ID NO: 585487
augauucuccuuggacauu

SEQ ID NO: 643827 - RNA, 19 nt, Artificial Sequence
  Description of Artificial Sequence: Synthetic oligonucleotide
  Antisense strand to SEQ ID NO: 643826
aauguccaaggagaaucau

SEQ ID NO: 643828 - RNA, 19 nt, Artificial Sequence
  Description of Artificial Sequence: Synthetic oligonucleotide
  Sense strand starting at position 2597 of SEQ ID NO: 585487
guggacaagcugugaaacu

SEQ ID NO: 643829 - RNA, 19 nt, Artificial Sequence
  Description of Artificial Sequence: Synthetic oligonucleotide
  Antisense strand to SEQ ID NO: 643828
aguuucacagcuuguccac

SEQ ID NO: 643830 - RNA, 19 nt, Artificial Sequence
  Description of Artificial Sequence: Synthetic oligonucleotide
  Sense strand starting at position 2646 of SEQ ID NO: 585487
agguaaaguuucccaggua

SEQ ID NO: 643831 - RNA, 19 nt, Artificial Sequence
  Description of Artificial Sequence: Synthetic oligonucleotide
  Antisense strand to SEQ ID NO: 643830
uaccugggaaacuuuaccu

SEQ ID NO: 643832 - RNA, 19 nt, Artificial Sequence
  Description of Artificial Sequence: Synthetic oligonucleotide
  Sense strand starting at position 2671 of SEQ ID NO: 585487
uggagcuacccucagaagu

SEQ ID NO: 643833 - RNA, 19 nt, Artificial Sequence
  Description of Artificial Sequence: Synthetic oligonucleotide
  Antisense strand to SEQ ID NO: 643832
acuucugaggguagcucca

SEQ ID NO: 643834 - RNA, 19 nt, Artificial Sequence
  Description of Artificial Sequence: Synthetic oligonucleotide
  Sense strand starting at position 2732 of SEQ ID NO: 585487
ucucuucucugggugauua

SEQ ID NO: 643835 - RNA, 19 nt, Artificial Sequence
  Description of Artificial Sequence: Synthetic oligonucleotide
  Antisense strand to SEQ ID NO: 643834
uaaucacccagagaagaga

SEQ ID NO: 643836 - RNA, 19 nt, Artificial Sequence
  Description of Artificial Sequence: Synthetic oligonucleotide
  Sense strand starting at position 2743 of SEQ ID NO: 585487
ggugauuaaucucuucuga

SEQ ID NO: 643837 - RNA, 19 nt, Artificial Sequence
  Description of Artificial Sequence: Synthetic oligonucleotide
  Antisense strand to SEQ ID NO: 643836
ucagaagagauuaaucacc

SEQ ID NO: 643838 - RNA, 19 nt, Artificial Sequence
  Description of Artificial Sequence: Synthetic oligonucleotide
  Sense strand starting at position 2839 of SEQ ID NO: 585487
ggaaauuccuuaucuggcu

SEQ ID NO: 643839 - RNA, 19 nt, Artificial Sequence
  Description of Artificial Sequence: Synthetic oligonucleotide
  Antisense strand to SEQ ID NO: 643838
agccagauaaggaauuucc

SEQ ID NO: 643840 - RNA, 19 nt, Artificial Sequence
  Description of Artificial Sequence: Synthetic oligonucleotide
  Sense strand starting at position 3208 of SEQ ID NO: 585487
gcauaagaauugcuggaau

SEQ ID NO: 643841 - RNA, 19 nt, Artificial Sequence
  Description of Artificial Sequence: Synthetic oligonucleotide
  Antisense strand to SEQ ID NO: 643840
auuccagcaauucuuaugc

SEQ ID NO: 643842 - RNA, 19 nt, Artificial Sequence
  Description of Artificial Sequence: Synthetic oligonucleotide
  Sense strand starting at position 3644 of SEQ ID NO: 585487
gguuaaauacaguauguau

SEQ ID NO: 643843 - RNA, 19 nt, Artificial Sequence
  Description of Artificial Sequence: Synthetic oligonucleotide
  Antisense strand to SEQ ID NO: 643842
auacauacuguauuuaacc

SEQ ID NO: 643844 - RNA, 19 nt, Artificial Sequence
  Description of Artificial Sequence: Synthetic oligonucleotide
  Sense strand starting at position 3870 of SEQ ID NO: 585487
gaggauguuugacuugaua

SEQ ID NO: 643845 - RNA, 19 nt, Artificial Sequence
  Description of Artificial Sequence: Synthetic oligonucleotide
  Antisense strand to SEQ ID NO: 643844
uaucaagucaaacauccuc

SEQ ID NO: 643846 - RNA, 19 nt, Artificial Sequence
  Description of Artificial Sequence: Synthetic oligonucleotide
  Sense strand starting at position 3872 of SEQ ID NO: 585487
ggauguuugacuugauaau

SEQ ID NO: 643847 - RNA, 19 nt, Artificial Sequence
  Description of Artificial Sequence: Synthetic oligonucleotide
  Antisense strand to SEQ ID NO: 643846
auuaucaagucaaacaucc

SEQ ID NO: 643848 - RNA, 19 nt, Artificial Sequence
  Description of Artificial Sequence: Synthetic oligonucleotide
  Sense strand starting at position 73 of SEQ ID NO: 585488
cccuucuuccaugaguuga

SEQ ID NO: 643849 - RNA, 19 nt, Artificial Sequence
  Description of Artificial Sequence: Synthetic oligonucleotide
  Antisense strand to SEQ ID NO: 643848
ucaacucauggaagaaggg

SEQ ID NO: 643850 - RNA, 19 nt, Artificial Sequence
  Description of Artificial Sequence: Synthetic oligonucleotide
  Sense strand starting at position 99 of SEQ ID NO: 585488
ugaggcucucaccagugaa

SEQ ID NO: 643851 - RNA, 19 nt, Artificial Sequence
  Description of Artificial Sequence: Synthetic oligonucleotide
  Antisense strand to SEQ ID NO: 643850
uucacuggugagagccuca

SEQ ID NO: 643852 - RNA, 19 nt, Artificial Sequence
  Description of Artificial Sequence: Synthetic oligonucleotide
  Sense strand starting at position 102 of SEQ ID NO: 585488
ggcucucaccagugaagau

SEQ ID NO: 643853 - RNA, 19 nt, Artificial Sequence
  Description of Artificial Sequence: Synthetic oligonucleotide
  Antisense strand to SEQ ID NO: 643852
aucuucacuggugagagcc

SEQ ID NO: 643854 - RNA, 19 nt, Artificial Sequence
  Description of Artificial Sequence: Synthetic oligonucleotide
  Sense strand starting at position 204 of SEQ ID NO: 585488
gguauuuccuuacagcaac

SEQ ID NO: 643855 - RNA, 19 nt, Artificial Sequence
  Description of Artificial Sequence: Synthetic oligonucleotide
  Antisense strand to SEQ ID NO: 643854
guugcuguaaggaaauacc

SEQ ID NO: 643856 - RNA, 19 nt, Artificial Sequence
  Description of Artificial Sequence: Synthetic oligonucleotide
  Sense strand starting at position 234 of SEQ ID NO: 585488
uagacagugaggugaguua

SEQ ID NO: 643857 - RNA, 19 nt, Artificial Sequence
  Description of Artificial Sequence: Synthetic oligonucleotide
  Antisense strand to SEQ ID NO: 643856
uaacucaccucacugucua

SEQ ID NO: 643858 - RNA, 19 nt, Artificial Sequence
  Description of Artificial Sequence: Synthetic oligonucleotide
  Sense strand starting at position 780 of SEQ ID NO: 585488
gauggaucuguccagcaag

SEQ ID NO: 643859 - RNA, 19 nt, Artificial Sequence
  Description of Artificial Sequence: Synthetic oligonucleotide
  Antisense strand to SEQ ID NO: 643858
cuugcuggacagauccauc

SEQ ID NO: 643860 - RNA, 19 nt, Artificial Sequence
  Description of Artificial Sequence: Synthetic oligonucleotide
  Sense strand starting at position 806 of SEQ ID NO: 585488
ggaaaucacuauuagaauc

SEQ ID NO: 643861 - RNA, 19 nt, Artificial Sequence
  Description of Artificial Sequence: Synthetic oligonucleotide
  Antisense strand to SEQ ID NO: 643860
gauucuaauagugauuucc

SEQ ID NO: 643862 - RNA, 19 nt, Artificial Sequence
  Description of Artificial Sequence: Synthetic oligonucleotide
  Sense strand starting at position 826 of SEQ ID NO: 585488
cucauaaguguaggguuua

SEQ ID NO: 643863 - RNA, 19 nt, Artificial Sequence
  Description of Artificial Sequence: Synthetic oligonucleotide
  Antisense strand to SEQ ID NO: 643862
uaaacccuacacuuaugag

SEQ ID NO: 643864 - RNA, 19 nt, Artificial Sequence
  Description of Artificial Sequence: Synthetic oligonucleotide
  Sense strand starting at position 836 of SEQ ID NO: 585488
uaggguuuaccaugucuua

SEQ ID NO: 643865 - RNA, 19 nt, Artificial Sequence
  Description of Artificial Sequence: Synthetic oligonucleotide
  Antisense strand to SEQ ID NO: 643864
uaagacaugguaaacccua

SEQ ID NO: 643866 - RNA, 19 nt, Artificial Sequence
  Description of Artificial Sequence: Synthetic oligonucleotide
  Sense strand starting at position 839 of SEQ ID NO: 585488
gguuuaccaugucuuauau

SEQ ID NO: 643867 - RNA, 19 nt, Artificial Sequence
  Description of Artificial Sequence: Synthetic oligonucleotide
  Antisense strand to SEQ ID NO: 643866
auauaagacaugguaaacc

SEQ ID NO: 643868 - RNA, 19 nt, Artificial Sequence
  Description of Artificial Sequence: Synthetic oligonucleotide
  Sense strand starting at position 1642 of SEQ ID NO: 585488
ggaggugaauucucgggua

SEQ ID NO: 643869 - RNA, 19 nt, Artificial Sequence
  Description of Artificial Sequence: Synthetic oligonucleotide
  Antisense strand to SEQ ID NO: 643868
uacccgagaauucaccucc

SEQ ID NO: 643870 - RNA, 19 nt, Artificial Sequence
  Description of Artificial Sequence: Synthetic oligonucleotide
  Sense strand starting at position 1644 of SEQ ID NO: 585488
aggugaauucucggguauu

SEQ ID NO: 643871 - RNA, 19 nt, Artificial Sequence
  Description of Artificial Sequence: Synthetic oligonucleotide
  Antisense strand to SEQ ID NO: 643870
aauacccgagaauucaccu

SEQ ID NO: 643872 - RNA, 19 nt, Artificial Sequence
  Description of Artificial Sequence: Synthetic oligonucleotide
  Sense strand starting at position 2017 of SEQ ID NO: 585488
ccggauccagccuagagau

SEQ ID NO: 643873 - RNA, 19 nt, Artificial Sequence
  Description of Artificial Sequence: Synthetic oligonucleotide
  Antisense strand to SEQ ID NO: 643872
aucucuaggcuggauccgg

SEQ ID NO: 643874 - RNA, 19 nt, Artificial Sequence
  Description of Artificial Sequence: Synthetic oligonucleotide
  Sense strand starting at position 2175 of SEQ ID NO: 585488
cacuguuucugggauuuga

SEQ ID NO: 643875 - RNA, 19 nt, Artificial Sequence
  Description of Artificial Sequence: Synthetic oligonucleotide
  Antisense strand to SEQ ID NO: 643874
ucaaaucccagaaacagug

SEQ ID NO: 643876 - RNA, 19 nt, Artificial Sequence
  Description of Artificial Sequence: Synthetic oligonucleotide
  Sense strand starting at position 2183 of SEQ ID NO: 585488
cugggauuugauuggcgca

SEQ ID NO: 643877 - RNA, 19 nt, Artificial Sequence
  Description of Artificial Sequence: Synthetic oligonucleotide
  Antisense strand to SEQ ID NO: 643876
ugcgccaaucaaaucccag

SEQ ID NO: 643878 - RNA, 19 nt, Artificial Sequence
  Description of Artificial Sequence: Synthetic oligonucleotide
  Sense strand starting at position 2185 of SEQ ID NO: 585488
gggauuugauuggcgcagu

SEQ ID NO: 643879 - RNA, 19 nt, Artificial Sequence
  Description of Artificial Sequence: Synthetic oligonucleotide
  Antisense strand to SEQ ID NO: 643878
acugcgccaaucaaauccc

SEQ ID NO: 643880 - RNA, 19 nt, Artificial Sequence
  Description of Artificial Sequence: Synthetic oligonucleotide
  Sense strand starting at position 2353 of SEQ ID NO: 585488
uguacccucugaguuaaua

SEQ ID NO: 643881 - RNA, 19 nt, Artificial Sequence
  Description of Artificial Sequence: Synthetic oligonucleotide
  Antisense strand to SEQ ID NO: 643880
uauuaacucagaggguaca

SEQ ID NO: 643882 - RNA, 19 nt, Artificial Sequence
  Description of Artificial Sequence: Synthetic oligonucleotide
  Sense strand starting at position 2412 of SEQ ID NO: 585488
gaccuaaaugagcgguguu

SEQ ID NO: 643883 - RNA, 19 nt, Artificial Sequence
  Description of Artificial Sequence: Synthetic oligonucleotide
  Antisense strand to SEQ ID NO: 643882
aacaccgcucauuuagguc

SEQ ID NO: 643884 - RNA, 19 nt, Artificial Sequence
  Description of Artificial Sequence: Synthetic oligonucleotide
  Sense strand starting at position 2562 of SEQ ID NO: 585488
gguggaagcauucgaauua

SEQ ID NO: 643885 - RNA, 19 nt, Artificial Sequence
  Description of Artificial Sequence: Synthetic oligonucleotide
  Antisense strand to SEQ ID NO: 643884
uaauucgaaugcuuccacc

SEQ ID NO: 643886 - RNA, 19 nt, Artificial Sequence
  Description of Artificial Sequence: Synthetic oligonucleotide
  Sense strand starting at position 2697 of SEQ ID NO: 585488
ucaugcauucggcaacuau

SEQ ID NO: 643887 - RNA, 19 nt, Artificial Sequence
  Description of Artificial Sequence: Synthetic oligonucleotide
  Antisense strand to SEQ ID NO: 643886
auaguugccgaaugcauga

SEQ ID NO: 643888 - RNA, 19 nt, Artificial Sequence
  Description of Artificial Sequence: Synthetic oligonucleotide
  Sense strand starting at position 2743 of SEQ ID NO: 585488
gacucaaagcggugaacau

SEQ ID NO: 643889 - RNA, 19 nt, Artificial Sequence
  Description of Artificial Sequence: Synthetic oligonucleotide
  Antisense strand to SEQ ID NO: 643888
auguucaccgcuuugaguc

SEQ ID NO: 643890 - RNA, 19 nt, Artificial Sequence
  Description of Artificial Sequence: Synthetic oligonucleotide
  Sense strand starting at position 2744 of SEQ ID NO: 585488
acucaaagcggugaacaua

SEQ ID NO: 643891 - RNA, 19 nt, Artificial Sequence
  Description of Artificial Sequence: Synthetic oligonucleotide
  Antisense strand to SEQ ID NO: 643890
uauguucaccgcuuugagu

SEQ ID NO: 643892 - RNA, 19 nt, Artificial Sequence
  Description of Artificial Sequence: Synthetic oligonucleotide
  Sense strand starting at position 2764 of SEQ ID NO: 585488
ugaagucacugcuccauaa

SEQ ID NO: 643893 - RNA, 19 nt, Artificial Sequence
  Description of Artificial Sequence: Synthetic oligonucleotide
  Antisense strand to SEQ ID NO: 643892
uuauggagcagugacuuca

SEQ ID NO: 643894 - RNA, 19 nt, Artificial Sequence
  Description of Artificial Sequence: Synthetic oligonucleotide
  Sense strand starting at position 2768 of SEQ ID NO: 585488
gucacugcuccauaaagcu

SEQ ID NO: 643895 - RNA, 19 nt, Artificial Sequence
  Description of Artificial Sequence: Synthetic oligonucleotide
  Antisense strand to SEQ ID NO: 643894
agcuuuauggagcagugac

SEQ ID NO: 643896 - RNA, 19 nt, Artificial Sequence
  Description of Artificial Sequence: Synthetic oligonucleotide
  Sense strand starting at position 2927 of SEQ ID NO: 585488
uuccuaguacccugagaug

SEQ ID NO: 643897 - RNA, 19 nt, Artificial Sequence
  Description of Artificial Sequence: Synthetic oligonucleotide
  Antisense strand to SEQ ID NO: 643896
caucucaggguacuaggaa

SEQ ID NO: 643898 - RNA, 19 nt, Artificial Sequence
  Description of Artificial Sequence: Synthetic oligonucleotide
  Sense strand starting at position 2972 of SEQ ID NO: 585488
ccaagaaguuaggaaagau

SEQ ID NO: 643899 - RNA, 19 nt, Artificial Sequence
  Description of Artificial Sequence: Synthetic oligonucleotide
  Antisense strand to SEQ ID NO: 643898
aucuuuccuaacuucuugg

SEQ ID NO: 643900 - RNA, 19 nt, Artificial Sequence
  Description of Artificial Sequence: Synthetic oligonucleotide
  Sense strand starting at position 3016 of SEQ ID NO: 585488
gcuaaccaguaauuggaaa

SEQ ID NO: 643901 - RNA, 19 nt, Artificial Sequence
  Description of Artificial Sequence: Synthetic oligonucleotide
  Antisense strand to SEQ ID NO: 643900
uuuccaauuacugguuagc

SEQ ID NO: 643902 - RNA, 19 nt, Artificial Sequence
  Description of Artificial Sequence: Synthetic oligonucleotide
  Sense strand starting at position 3064 of SEQ ID NO: 585488
agaguuaagggcuggguua

SEQ ID NO: 643903 - RNA, 19 nt, Artificial Sequence
  Description of Artificial Sequence: Synthetic oligonucleotide
  Antisense strand to SEQ ID NO: 643902
uaacccagcccuuaacucu

SEQ ID NO: 643904 - RNA, 19 nt, Artificial Sequence
  Description of Artificial Sequence: Synthetic oligonucleotide
  Sense strand starting at position 3065 of SEQ ID NO: 585488
gaguuaagggcuggguuaa

SEQ ID NO: 643905 - RNA, 19 nt, Artificial Sequence
  Description of Artificial Sequence: Synthetic oligonucleotide
  Antisense strand to SEQ ID NO: 643904
uuaacccagcccuuaacuc

SEQ ID NO: 643906 - RNA, 19 nt, Artificial Sequence
  Description of Artificial Sequence: Synthetic oligonucleotide
  Sense strand starting at position 3066 of SEQ ID NO: 585488
aguuaagggcuggguuaau

SEQ ID NO: 643907 - RNA, 19 nt, Artificial Sequence
  Description of Artificial Sequence: Synthetic oligonucleotide
  Antisense strand to SEQ ID NO: 643906
auuaacccagcccuuaacu

SEQ ID NO: 643908 - RNA, 19 nt, Artificial Sequence
  Description of Artificial Sequence: Synthetic oligonucleotide
  Sense strand starting at position 3095 of SEQ ID NO: 585488
ggcaaaucuguugagcaau

SEQ ID NO: 643909 - RNA, 19 nt, Artificial Sequence
  Description of Artificial Sequence: Synthetic oligonucleotide
  Antisense strand to SEQ ID NO: 643908
auugcucaacagauuugcc

SEQ ID NO: 643910 - RNA, 19 nt, Artificial Sequence
  Description of Artificial Sequence: Synthetic oligonucleotide
  Sense strand starting at position 3311 of SEQ ID NO: 585488
gagggaaaccucuguugca

SEQ ID NO: 643911 - RNA, 19 nt, Artificial Sequence
  Description of Artificial Sequence: Synthetic oligonucleotide
  Antisense strand to SEQ ID NO: 643910
ugcaacagagguuucccuc

SEQ ID NO: 643912 - RNA, 19 nt, Artificial Sequence
  Description of Artificial Sequence: Synthetic oligonucleotide
  Sense strand starting at position 3396 of SEQ ID NO: 585488
gguaaauuaaggcacgaua

SEQ ID NO: 643913 - RNA, 19 nt, Artificial Sequence
  Description of Artificial Sequence: Synthetic oligonucleotide
  Antisense strand to SEQ ID NO: 643912
uaucgugccuuaauuuacc

SEQ ID NO: 643914 - RNA, 19 nt, Artificial Sequence
  Description of Artificial Sequence: Synthetic oligonucleotide
  Sense strand starting at position 3438 of SEQ ID NO: 585488
agccaaagucaauauugau

SEQ ID NO: 643915 - RNA, 19 nt, Artificial Sequence
  Description of Artificial Sequence: Synthetic oligonucleotide
  Antisense strand to SEQ ID NO: 643914
aucaauauugacuuuggcu

SEQ ID NO: 643916 - RNA, 19 nt, Artificial Sequence
  Description of Artificial Sequence: Synthetic oligonucleotide
  Sense strand starting at position 3472 of SEQ ID NO: 585488
gcuauaaagcuguaggaga

SEQ ID NO: 643917 - RNA, 19 nt, Artificial Sequence
  Description of Artificial Sequence: Synthetic oligonucleotide
  Antisense strand to SEQ ID NO: 643916
ucuccuacagcuuuauagc

SEQ ID NO: 643918 - RNA, 19 nt, Artificial Sequence
  Description of Artificial Sequence: Synthetic oligonucleotide
  Sense strand starting at position 3513 of SEQ ID NO: 585488
ugccaaaccuguuugaucu

SEQ ID NO: 643919 - RNA, 19 nt, Artificial Sequence
  Description of Artificial Sequence: Synthetic oligonucleotide
  Antisense strand to SEQ ID NO: 643918
agaucaaacagguuuggca

SEQ ID NO: 643920 - RNA, 19 nt, Artificial Sequence
  Description of Artificial Sequence: Synthetic oligonucleotide
  Sense strand starting at position 3514 of SEQ ID NO: 585488
gccaaaccuguuugaucuu

SEQ ID NO: 643921 - RNA, 19 nt, Artificial Sequence
  Description of Artificial Sequence: Synthetic oligonucleotide
  Antisense strand to SEQ ID NO: 643920
aagaucaaacagguuuggc

SEQ ID NO: 643922 - RNA, 19 nt, Artificial Sequence
  Description of Artificial Sequence: Synthetic oligonucleotide
  Sense strand starting at position 3639 of SEQ ID NO: 585488
ggguccugugugcagauuu

SEQ ID NO: 643923 - RNA, 19 nt, Artificial Sequence
  Description of Artificial Sequence: Synthetic oligonucleotide
  Antisense strand to SEQ ID NO: 643922
aaaucugcacacaggaccc

SEQ ID NO: 643924 - RNA, 19 nt, Artificial Sequence
  Description of Artificial Sequence: Synthetic oligonucleotide
  Sense strand starting at position 3751 of SEQ ID NO: 585488
agccuuucugucgggagga

SEQ ID NO: 643925 - RNA, 19 nt, Artificial Sequence
  Description of Artificial Sequence: Synthetic oligonucleotide
  Antisense strand to SEQ ID NO: 643924
uccucccgacagaaaggcu

SEQ ID NO: 643926 - RNA, 19 nt, Artificial Sequence
  Description of Artificial Sequence: Synthetic oligonucleotide
  Sense strand starting at position 3753 of SEQ ID NO: 585488
ccuuucugucgggaggaga

SEQ ID NO: 643927 - RNA, 19 nt, Artificial Sequence
  Description of Artificial Sequence: Synthetic oligonucleotide
  Antisense strand to SEQ ID NO: 643926
ucuccucccgacagaaagg

SEQ ID NO: 643928 - RNA, 19 nt, Artificial Sequence
  Description of Artificial Sequence: Synthetic oligonucleotide
  Sense strand starting at position 10 of SEQ ID NO: 585489
acucaaaucuuggaugggu

SEQ ID NO: 643929 - RNA, 19 nt, Artificial Sequence
  Description of Artificial Sequence: Synthetic oligonucleotide
  Antisense strand to SEQ ID NO: 643928
acccauccaagauuugagu

SEQ ID NO: 643930 - RNA, 19 nt, Artificial Sequence
  Description of Artificial Sequence: Synthetic oligonucleotide
  Sense strand starting at position 238 of SEQ ID NO: 585489
cccucuguuccagagacau

SEQ ID NO: 643931 - RNA, 19 nt, Artificial Sequence
  Description of Artificial Sequence: Synthetic oligonucleotide
  Antisense strand to SEQ ID NO: 643930
augucucuggaacagaggg

SEQ ID NO: 643932 - RNA, 19 nt, Artificial Sequence
  Description of Artificial Sequence: Synthetic oligonucleotide
  Sense strand starting at position 266 of SEQ ID NO: 585489
ggucucaauuucugguagu

SEQ ID NO: 643933 - RNA, 19 nt, Artificial Sequence
  Description of Artificial Sequence: Synthetic oligonucleotide
  Antisense strand to SEQ ID NO: 643932
acuaccagaaauugagacc

SEQ ID NO: 643934 - RNA, 19 nt, Artificial Sequence
  Description of Artificial Sequence: Synthetic oligonucleotide
  Sense strand starting at position 267 of SEQ ID NO: 585489
gucucaauuucugguaguc

SEQ ID NO: 643935 - RNA, 19 nt, Artificial Sequence
  Description of Artificial Sequence: Synthetic oligonucleotide
  Antisense strand to SEQ ID NO: 643934
gacuaccagaaauugagac

SEQ ID NO: 643936 - RNA, 19 nt, Artificial Sequence
  Description of Artificial Sequence: Synthetic oligonucleotide
  Sense strand starting at position 276 of SEQ ID NO: 585489
ucugguagucccuaccuau

SEQ ID NO: 643937 - RNA, 19 nt, Artificial Sequence
  Description of Artificial Sequence: Synthetic oligonucleotide
  Antisense strand to SEQ ID NO: 643936
auagguagggacuaccaga

SEQ ID NO: 643938 - RNA, 19 nt, Artificial Sequence
  Description of Artificial Sequence: Synthetic oligonucleotide
  Sense strand starting at position 367 of SEQ ID NO: 585489
agauacaagcacugugauu

SEQ ID NO: 643939 - RNA, 19 nt, Artificial Sequence
  Description of Artificial Sequence: Synthetic oligonucleotide
  Antisense strand to SEQ ID NO: 643938
aaucacagugcuuguaucu

SEQ ID NO: 643940 - RNA, 19 nt, Artificial Sequence
  Description of Artificial Sequence: Synthetic oligonucleotide
  Sense strand starting at position 568 of SEQ ID NO: 585489
auccgucgucgccaucaaa

SEQ ID NO: 643941 - RNA, 19 nt, Artificial Sequence
  Description of Artificial Sequence: Synthetic oligonucleotide
  Antisense strand to SEQ ID NO: 643940
uuugauggcgacgacggau

SEQ ID NO: 643942 - RNA, 19 nt, Artificial Sequence
  Description of Artificial Sequence: Synthetic oligonucleotide
  Sense strand starting at position 603 of SEQ ID NO: 585489
ccgguaaaccgauagcauu

SEQ ID NO: 643943 - RNA, 19 nt, Artificial Sequence
  Description of Artificial Sequence: Synthetic oligonucleotide
  Antisense strand to SEQ ID NO: 643942
aaugcuaucgguuuaccgg

SEQ ID NO: 643944 - RNA, 19 nt, Artificial Sequence
  Description of Artificial Sequence: Synthetic oligonucleotide
  Sense strand starting at position 1058 of SEQ ID NO: 585489
ucucccguaucuguuauua

SEQ ID NO: 643945 - RNA, 19 nt, Artificial Sequence
  Description of Artificial Sequence: Synthetic oligonucleotide
  Antisense strand to SEQ ID NO: 643944
uaauaacagauacgggaga

SEQ ID NO: 643946 - RNA, 19 nt, Artificial Sequence
  Description of Artificial Sequence: Synthetic oligonucleotide
  Sense strand starting at position 1090 of SEQ ID NO: 585489
gucuccuuucuguauccua

SEQ ID NO: 643947 - RNA, 19 nt, Artificial Sequence
  Description of Artificial Sequence: Synthetic oligonucleotide
  Antisense strand to SEQ ID NO: 643946
uaggauacagaaaggagac

SEQ ID NO: 643948 - RNA, 19 nt, Artificial Sequence
  Description of Artificial Sequence: Synthetic oligonucleotide
  Sense strand starting at position 2129 of SEQ ID NO: 585489
cucuuuguccgaucgcauu

SEQ ID NO: 643949 - RNA, 19 nt, Artificial Sequence
  Description of Artificial Sequence: Synthetic oligonucleotide
  Antisense strand to SEQ ID NO: 643948
aaugcgaucggacaaagag

SEQ ID NO: 643950 - RNA, 19 nt, Artificial Sequence
  Description of Artificial Sequence: Synthetic oligonucleotide
  Sense strand starting at position 2252 of SEQ ID NO: 585489
cucagaguccgugguugua

SEQ ID NO: 643951 - RNA, 19 nt, Artificial Sequence
  Description of Artificial Sequence: Synthetic oligonucleotide
  Antisense strand to SEQ ID NO: 643950
uacaaccacggacucugag

SEQ ID NO: 643952 - RNA, 19 nt, Artificial Sequence
  Description of Artificial Sequence: Synthetic oligonucleotide
  Sense strand starting at position 2254 of SEQ ID NO: 585489
cagaguccgugguuguaaa

SEQ ID NO: 643953 - RNA, 19 nt, Artificial Sequence
  Description of Artificial Sequence: Synthetic oligonucleotide
  Antisense strand to SEQ ID NO: 643952
uuuacaaccacggacucug

SEQ ID NO: 643954 - RNA, 19 nt, Artificial Sequence
  Description of Artificial Sequence: Synthetic oligonucleotide
  Sense strand starting at position 2372 of SEQ ID NO: 585489
uguaguugauucuuaguua

SEQ ID NO: 643955 - RNA, 19 nt, Artificial Sequence
  Description of Artificial Sequence: Synthetic oligonucleotide
  Antisense strand to SEQ ID NO: 643954
uaacuaagaaucaacuaca

SEQ ID NO: 643956 - RNA, 19 nt, Artificial Sequence
  Description of Artificial Sequence: Synthetic oligonucleotide
  Sense strand starting at position 2376 of SEQ ID NO: 585489
guugauucuuaguuaauac

SEQ ID NO: 643957 - RNA, 19 nt, Artificial Sequence
  Description of Artificial Sequence: Synthetic oligonucleotide
  Antisense strand to SEQ ID NO: 643956
guauuaacuaagaaucaac

SEQ ID NO: 643958 - RNA, 19 nt, Artificial Sequence
  Description of Artificial Sequence: Synthetic oligonucleotide
  Sense strand starting at position 2396 of SEQ ID NO: 585489
agugaauaaucacaacuag

SEQ ID NO: 643959 - RNA, 19 nt, Artificial Sequence
  Description of Artificial Sequence: Synthetic oligonucleotide
  Antisense strand to SEQ ID NO: 643958
cuaguugugauuauucacu

SEQ ID NO: 643960 - RNA, 19 nt, Artificial Sequence
  Description of Artificial Sequence: Synthetic oligonucleotide
  Sense strand starting at position 2416 of SEQ ID NO: 585489
ccuuaaauugcagggacua

SEQ ID NO: 643961 - RNA, 19 nt, Artificial Sequence
  Description of Artificial Sequence: Synthetic oligonucleotide
  Antisense strand to SEQ ID NO: 643960
uagucccugcaauuuaagg

SEQ ID NO: 643962 - RNA, 19 nt, Artificial Sequence
  Description of Artificial Sequence: Synthetic oligonucleotide
  Sense strand starting at position 2417 of SEQ ID NO: 585489
cuuaaauugcagggacuau

SEQ ID NO: 643963 - RNA, 19 nt, Artificial Sequence
  Description of Artificial Sequence: Synthetic oligonucleotide
  Antisense strand to SEQ ID NO: 643962
auagucccugcaauuuaag

SEQ ID NO: 643964 - RNA, 19 nt, Artificial Sequence
  Description of Artificial Sequence: Synthetic oligonucleotide
  Sense strand starting at position 2455 of SEQ ID NO: 585489
augcuuuauacguguugau

SEQ ID NO: 643965 - RNA, 19 nt, Artificial Sequence
  Description of Artificial Sequence: Synthetic oligonucleotide
  Antisense strand to SEQ ID NO: 643964
aucaacacguauaaagcau

SEQ ID NO: 643966 - RNA, 19 nt, Artificial Sequence
  Description of Artificial Sequence: Synthetic oligonucleotide
  Sense strand starting at position 2458 of SEQ ID NO: 585489
cuuuauacguguugauuua

SEQ ID NO: 643967 - RNA, 19 nt, Artificial Sequence
  Description of Artificial Sequence: Synthetic oligonucleotide
  Antisense strand to SEQ ID NO: 643966
uaaaucaacacguauaaag

SEQ ID NO: 643968 - RNA, 19 nt, Artificial Sequence
  Description of Artificial Sequence: Synthetic oligonucleotide
  Sense strand starting at position 2476 of SEQ ID NO: 585489
aaguguaaucgucacaaga

SEQ ID NO: 643969 - RNA, 19 nt, Artificial Sequence
  Description of Artificial Sequence: Synthetic oligonucleotide
  Antisense strand to SEQ ID NO: 643968
ucuugugacgauuacacuu

SEQ ID NO: 643970 - RNA, 19 nt, Artificial Sequence
  Description of Artificial Sequence: Synthetic oligonucleotide
  Sense strand starting at position 2522 of SEQ ID NO: 585489
ugcccuguuccuguuugua

SEQ ID NO: 643971 - RNA, 19 nt, Artificial Sequence
  Description of Artificial Sequence: Synthetic oligonucleotide
  Antisense strand to SEQ ID NO: 643970
uacaaacaggaacagggca

SEQ ID NO: 643972 - RNA, 19 nt, Artificial Sequence
  Description of Artificial Sequence: Synthetic oligonucleotide
  Sense strand starting at position 2524 of SEQ ID NO: 585489
cccuguuccuguuuguaaa

SEQ ID NO: 643973 - RNA, 19 nt, Artificial Sequence
  Description of Artificial Sequence: Synthetic oligonucleotide
  Antisense strand to SEQ ID NO: 643972
uuuacaaacaggaacaggg

SEQ ID NO: 643974 - RNA, 19 nt, Artificial Sequence
  Description of Artificial Sequence: Synthetic oligonucleotide
  Sense strand starting at position 2525 of SEQ ID NO: 585489
ccuguuccuguuuguaaac

SEQ ID NO: 643975 - RNA, 19 nt, Artificial Sequence
  Description of Artificial Sequence: Synthetic oligonucleotide
  Antisense strand to SEQ ID NO: 643974
guuuacaaacaggaacagg

SEQ ID NO: 643976 - RNA, 19 nt, Artificial Sequence
  Description of Artificial Sequence: Synthetic oligonucleotide
  Sense strand starting at position 2612 of SEQ ID NO: 585489
ucuguuugaacggauccua

SEQ ID NO: 643977 - RNA, 19 nt, Artificial Sequence
  Description of Artificial Sequence: Synthetic oligonucleotide
  Antisense strand to SEQ ID NO: 643976
uaggauccguucaaacaga

SEQ ID NO: 643978 - RNA, 19 nt, Artificial Sequence
  Description of Artificial Sequence: Synthetic oligonucleotide
  Sense strand starting at position 2663 of SEQ ID NO: 585489
gucccuuugucuguacuua

SEQ ID NO: 643979 - RNA, 19 nt, Artificial Sequence
  Description of Artificial Sequence: Synthetic oligonucleotide
  Antisense strand to SEQ ID NO: 643978
uaaguacagacaaagggac

SEQ ID NO: 643980 - RNA, 19 nt, Artificial Sequence
  Description of Artificial Sequence: Synthetic oligonucleotide
  Sense strand starting at position 2671 of SEQ ID NO: 585489
gucuguacuuagucuauag

SEQ ID NO: 643981 - RNA, 19 nt, Artificial Sequence
  Description of Artificial Sequence: Synthetic oligonucleotide
  Antisense strand to SEQ ID NO: 643980
cuauagacuaaguacagac

SEQ ID NO: 643982 - RNA, 19 nt, Artificial Sequence
  Description of Artificial Sequence: Synthetic oligonucleotide
  Sense strand starting at position 2747 of SEQ ID NO: 585489
cccagucuguccuuucuaa

SEQ ID NO: 643983 - RNA, 19 nt, Artificial Sequence
  Description of Artificial Sequence: Synthetic oligonucleotide
  Antisense strand to SEQ ID NO: 643982
uuagaaaggacagacuggg

SEQ ID NO: 643984 - RNA, 19 nt, Artificial Sequence
  Description of Artificial Sequence: Synthetic oligonucleotide
  Sense strand starting at position 3012 of SEQ ID NO: 585489
uugccuagguucugauuua

SEQ ID NO: 643985 - RNA, 19 nt, Artificial Sequence
  Description of Artificial Sequence: Synthetic oligonucleotide
  Antisense strand to SEQ ID NO: 643984
uaaaucagaaccuaggcaa

SEQ ID NO: 643986 - RNA, 19 nt, Artificial Sequence
  Description of Artificial Sequence: Synthetic oligonucleotide
  Sense strand starting at position 3273 of SEQ ID NO: 585489
gccuuacauggucaccuaa

SEQ ID NO: 643987 - RNA, 19 nt, Artificial Sequence
  Description of Artificial Sequence: Synthetic oligonucleotide
  Antisense strand to SEQ ID NO: 643986
uuaggugaccauguaaggc

SEQ ID NO: 643988 - RNA, 19 nt, Artificial Sequence
  Description of Artificial Sequence: Synthetic oligonucleotide
  Sense strand starting at position 3347 of SEQ ID NO: 585489
aacuuuguguugucuugca

SEQ ID NO: 643989 - RNA, 19 nt, Artificial Sequence
  Description of Artificial Sequence: Synthetic oligonucleotide
  Antisense strand to SEQ ID NO: 643988
ugcaagacaacacaaaguu

SEQ ID NO: 643990 - RNA, 19 nt, Artificial Sequence
  Description of Artificial Sequence: Synthetic oligonucleotide
  Sense strand starting at position 3351 of SEQ ID NO: 585489
uuguguugucuugcauugu

SEQ ID NO: 643991 - RNA, 19 nt, Artificial Sequence
  Description of Artificial Sequence: Synthetic oligonucleotide
  Antisense strand to SEQ ID NO: 643990
acaaugcaagacaacacaa

SEQ ID NO: 643992 - RNA, 19 nt, Artificial Sequence
  Description of Artificial Sequence: Synthetic oligonucleotide
  Sense strand starting at position 3391 of SEQ ID NO: 585489
gauauaggacuaugcacau

SEQ ID NO: 643993 - RNA, 19 nt, Artificial Sequence
  Description of Artificial Sequence: Synthetic oligonucleotide
  Antisense strand to SEQ ID NO: 643992
augugcauaguccuauauc

SEQ ID NO: 643994 - RNA, 19 nt, Artificial Sequence
  Description of Artificial Sequence: Synthetic oligonucleotide
  Sense strand starting at position 3430 of SEQ ID NO: 585489
uuucuaaaugaucgaacaa

SEQ ID NO: 643995 - RNA, 19 nt, Artificial Sequence
  Description of Artificial Sequence: Synthetic oligonucleotide
  Antisense strand to SEQ ID NO: 643994
uuguucgaucauuuagaaa

SEQ ID NO: 643996 - RNA, 19 nt, Artificial Sequence
  Description of Artificial Sequence: Synthetic oligonucleotide
  Sense strand starting at position 3493 of SEQ ID NO: 585489
caguuagacccguagggua

SEQ ID NO: 643997 - RNA, 19 nt, Artificial Sequence
  Description of Artificial Sequence: Synthetic oligonucleotide
  Antisense strand to SEQ ID NO: 643996
uacccuacgggucuaacug

SEQ ID NO: 643998 - RNA, 19 nt, Artificial Sequence
  Description of Artificial Sequence: Synthetic oligonucleotide
  Sense strand starting at position 3616 of SEQ ID NO: 585489
guaugagccgcucaaagaa

SEQ ID NO: 643999 - RNA, 19 nt, Artificial Sequence
  Description of Artificial Sequence: Synthetic oligonucleotide
  Antisense strand to SEQ ID NO: 643998
uucuuugagcggcucauac

SEQ ID NO: 644000 - RNA, 19 nt, Artificial Sequence
  Description of Artificial Sequence: Synthetic oligonucleotide
  Sense strand starting at position 3629 of SEQ ID NO: 585489
aaagaaacgugccaucaug

SEQ ID NO: 644001 - RNA, 19 nt, Artificial Sequence
  Description of Artificial Sequence: Synthetic oligonucleotide
  Antisense strand to SEQ ID NO: 644000
caugauggcacguuucuuu

SEQ ID NO: 644002 - RNA, 19 nt, Artificial Sequence
  Description of Artificial Sequence: Synthetic oligonucleotide
  Sense strand starting at position 3667 of SEQ ID NO: 585489
ggaagaacuugagauaaua

SEQ ID NO: 644003 - RNA, 19 nt, Artificial Sequence
  Description of Artificial Sequence: Synthetic oligonucleotide
  Antisense strand to SEQ ID NO: 644002
uauuaucucaaguucuucc

SEQ ID NO: 644004 - RNA, 19 nt, Artificial Sequence
  Description of Artificial Sequence: Synthetic oligonucleotide
  Sense strand starting at position 3898 of SEQ ID NO: 585489
ugagcaaccuggcaauaaa

SEQ ID NO: 644005 - RNA, 19 nt, Artificial Sequence
  Description of Artificial Sequence: Synthetic oligonucleotide
  Antisense strand to SEQ ID NO: 644004
uuuauugccagguugcuca

SEQ ID NO: 644006 - RNA, 19 nt, Artificial Sequence
  Description of Artificial Sequence: Synthetic oligonucleotide
  Sense strand starting at position 3909 of SEQ ID NO: 585489
gcaauaaaccuuuagagcu

SEQ ID NO: 644007 - RNA, 19 nt, Artificial Sequence
  Description of Artificial Sequence: Synthetic oligonucleotide
  Antisense strand to SEQ ID NO: 644006
agcucuaaagguuuauugc

SEQ ID NO: 644008 - RNA, 19 nt, Artificial Sequence
  Description of Artificial Sequence: Synthetic oligonucleotide
  Sense strand starting at position 446 of SEQ ID NO: 585490
guaucugugcaauaaaugu

SEQ ID NO: 644009 - RNA, 19 nt, Artificial Sequence
  Description of Artificial Sequence: Synthetic oligonucleotide
  Antisense strand to SEQ ID NO: 644008
acauuuauugcacagauac

SEQ ID NO: 644010 - RNA, 19 nt, Artificial Sequence
  Description of Artificial Sequence: Synthetic oligonucleotide
  Sense strand starting at position 459 of SEQ ID NO: 585490
aaauguaauucugugaagc

SEQ ID NO: 644011 - RNA, 19 nt, Artificial Sequence
  Description of Artificial Sequence: Synthetic oligonucleotide
  Antisense strand to SEQ ID NO: 644010
gcuucacagaauuacauuu

SEQ ID NO: 644012 - RNA, 19 nt, Artificial Sequence
  Description of Artificial Sequence: Synthetic oligonucleotide
  Sense strand starting at position 460 of SEQ ID NO: 585490
aauguaauucugugaagcu

SEQ ID NO: 644013 - RNA, 19 nt, Artificial Sequence
  Description of Artificial Sequence: Synthetic oligonucleotide
  Antisense strand to SEQ ID NO: 644012
agcuucacagaauuacauu

SEQ ID NO: 644014 - RNA, 19 nt, Artificial Sequence
  Description of Artificial Sequence: Synthetic oligonucleotide
  Sense strand starting at position 472 of SEQ ID NO: 585490
ugaagcucaugucuauauu

SEQ ID NO: 644015 - RNA, 19 nt, Artificial Sequence
  Description of Artificial Sequence: Synthetic oligonucleotide
  Antisense strand to SEQ ID NO: 644014
aauauagacaugagcuuca

SEQ ID NO: 644016 - RNA, 19 nt, Artificial Sequence
  Description of Artificial Sequence: Synthetic oligonucleotide
  Sense strand starting at position 511 of SEQ ID NO: 585490
guuggcauuuguccuauca

SEQ ID NO: 644017 - RNA, 19 nt, Artificial Sequence
  Description of Artificial Sequence: Synthetic oligonucleotide
  Antisense strand to SEQ ID NO: 644016
ugauaggacaaaugccaac

SEQ ID NO: 644018 - RNA, 19 nt, Artificial Sequence
  Description of Artificial Sequence: Synthetic oligonucleotide
  Sense strand starting at position 527 of SEQ ID NO: 585490
ucagguaaauauguucuca

SEQ ID NO: 644019 - RNA, 19 nt, Artificial Sequence
  Description of Artificial Sequence: Synthetic oligonucleotide
  Antisense strand to SEQ ID NO: 644018
ugagaacauauuuaccuga

SEQ ID NO: 644020 - RNA, 19 nt, Artificial Sequence
  Description of Artificial Sequence: Synthetic oligonucleotide
  Sense strand starting at position 529 of SEQ ID NO: 585490
agguaaauauguucucaau

SEQ ID NO: 644021 - RNA, 19 nt, Artificial Sequence
  Description of Artificial Sequence: Synthetic oligonucleotide
  Antisense strand to SEQ ID NO: 644020
auugagaacauauuuaccu

SEQ ID NO: 644022 - RNA, 19 nt, Artificial Sequence
  Description of Artificial Sequence: Synthetic oligonucleotide
  Sense strand starting at position 819 of SEQ ID NO: 585490
ggaacauuaucaguuucuu

SEQ ID NO: 644023 - RNA, 19 nt, Artificial Sequence
  Description of Artificial Sequence: Synthetic oligonucleotide
  Antisense strand to SEQ ID NO: 644022
aagaaacugauaauguucc

SEQ ID NO: 644024 - RNA, 19 nt, Artificial Sequence
  Description of Artificial Sequence: Synthetic oligonucleotide
  Sense strand starting at position 1009 of SEQ ID NO: 585490
gaggguuguaaaggaaauu

SEQ ID NO: 644025 - RNA, 19 nt, Artificial Sequence
  Description of Artificial Sequence: Synthetic oligonucleotide
  Antisense strand to SEQ ID NO: 644024
aauuuccuuuacaacccuc

SEQ ID NO: 644026 - RNA, 19 nt, Artificial Sequence
  Description of Artificial Sequence: Synthetic oligonucleotide
  Sense strand starting at position 1064 of SEQ ID NO: 585490
gauguuugagccuaguuaa

SEQ ID NO: 644027 - RNA, 19 nt, Artificial Sequence
  Description of Artificial Sequence: Synthetic oligonucleotide
  Antisense strand to SEQ ID NO: 644026
uuaacuaggcucaaacauc

SEQ ID NO: 644028 - RNA, 19 nt, Artificial Sequence
  Description of Artificial Sequence: Synthetic oligonucleotide
  Sense strand starting at position 1067 of SEQ ID NO: 585490
guuugagccuaguuaauag

SEQ ID NO: 644029 - RNA, 19 nt, Artificial Sequence
  Description of Artificial Sequence: Synthetic oligonucleotide
  Antisense strand to SEQ ID NO: 644028
cuauuaacuaggcucaaac

SEQ ID NO: 644030 - RNA, 19 nt, Artificial Sequence
  Description of Artificial Sequence: Synthetic oligonucleotide
  Sense strand starting at position 1165 of SEQ ID NO: 585490
aaagcuuugggcugagacu

SEQ ID NO: 644031 - RNA, 19 nt, Artificial Sequence
  Description of Artificial Sequence: Synthetic oligonucleotide
  Antisense strand to SEQ ID NO: 644030
agucucagcccaaagcuuu

SEQ ID NO: 644032 - RNA, 19 nt, Artificial Sequence
  Description of Artificial Sequence: Synthetic oligonucleotide
  Sense strand starting at position 1176 of SEQ ID NO: 585490
cugagacucuuagcagaug

SEQ ID NO: 644033 - RNA, 19 nt, Artificial Sequence
  Description of Artificial Sequence: Synthetic oligonucleotide
  Antisense strand to SEQ ID NO: 644032
caucugcuaagagucucag

SEQ ID NO: 644034 - RNA, 19 nt, Artificial Sequence
  Description of Artificial Sequence: Synthetic oligonucleotide
  Sense strand starting at position 1181 of SEQ ID NO: 585490
acucuuagcagauggguga

SEQ ID NO: 644035 - RNA, 19 nt, Artificial Sequence
  Description of Artificial Sequence: Synthetic oligonucleotide
  Antisense strand to SEQ ID NO: 644034
ucacccaucugcuaagagu

SEQ ID NO: 644036 - RNA, 19 nt, Artificial Sequence
  Description of Artificial Sequence: Synthetic oligonucleotide
  Sense strand starting at position 1185 of SEQ ID NO: 585490
uuagcagaugggugaguuu

SEQ ID NO: 644037 - RNA, 19 nt, Artificial Sequence
  Description of Artificial Sequence: Synthetic oligonucleotide
  Antisense strand to SEQ ID NO: 644036
aaacucacccaucugcuaa

SEQ ID NO: 644038 - RNA, 19 nt, Artificial Sequence
  Description of Artificial Sequence: Synthetic oligonucleotide
  Sense strand starting at position 1531 of SEQ ID NO: 585490
gcaugaauuccagauacgg

SEQ ID NO: 644039 - RNA, 19 nt, Artificial Sequence
  Description of Artificial Sequence: Synthetic oligonucleotide
  Antisense strand to SEQ ID NO: 644038
ccguaucuggaauucaugc

SEQ ID NO: 644040 - RNA, 19 nt, Artificial Sequence
  Description of Artificial Sequence: Synthetic oligonucleotide
  Sense strand starting at position 1551 of SEQ ID NO: 585490
acgugacuuggucacccau

SEQ ID NO: 644041 - RNA, 19 nt, Artificial Sequence
  Description of Artificial Sequence: Synthetic oligonucleotide
  Antisense strand to SEQ ID NO: 644040
augggugaccaagucacgu

SEQ ID NO: 644042 - RNA, 19 nt, Artificial Sequence
  Description of Artificial Sequence: Synthetic oligonucleotide
  Sense strand starting at position 1706 of SEQ ID NO: 585490
agcggagggcguuaggaau

SEQ ID NO: 644043 - RNA, 19 nt, Artificial Sequence
  Description of Artificial Sequence: Synthetic oligonucleotide
  Antisense strand to SEQ ID NO: 644042
auuccuaacgcccuccgcu

SEQ ID NO: 644044 - RNA, 19 nt, Artificial Sequence
  Description of Artificial Sequence: Synthetic oligonucleotide
  Sense strand starting at position 2085 of SEQ ID NO: 585490
cugauuggucauugcauga

SEQ ID NO: 644045 - RNA, 19 nt, Artificial Sequence
  Description of Artificial Sequence: Synthetic oligonucleotide
  Antisense strand to SEQ ID NO: 644044
ucaugcaaugaccaaucag

SEQ ID NO: 644046 - RNA, 19 nt, Artificial Sequence
  Description of Artificial Sequence: Synthetic oligonucleotide
  Sense strand starting at position 2090 of SEQ ID NO: 585490
uggucauugcaugauguca

SEQ ID NO: 644047 - RNA, 19 nt, Artificial Sequence
  Description of Artificial Sequence: Synthetic oligonucleotide
  Antisense strand to SEQ ID NO: 644046
ugacaucaugcaaugacca

SEQ ID NO: 644048 - RNA, 19 nt, Artificial Sequence
  Description of Artificial Sequence: Synthetic oligonucleotide
  Sense strand starting at position 2146 of SEQ ID NO: 585490
gcgggucuuccgagaguca

SEQ ID NO: 644049 - RNA, 19 nt, Artificial Sequence
  Description of Artificial Sequence: Synthetic oligonucleotide
  Antisense strand to SEQ ID NO: 644048
ugacucucggaagacccgc

SEQ ID NO: 644050 - RNA, 19 nt, Artificial Sequence
  Description of Artificial Sequence: Synthetic oligonucleotide
  Sense strand starting at position 2153 of SEQ ID NO: 585490
uuccgagagucagccaaua

SEQ ID NO: 644051 - RNA, 19 nt, Artificial Sequence
  Description of Artificial Sequence: Synthetic oligonucleotide
  Antisense strand to SEQ ID NO: 644050
uauuggcugacucucggaa

SEQ ID NO: 644052 - RNA, 19 nt, Artificial Sequence
  Description of Artificial Sequence: Synthetic oligonucleotide
  Sense strand starting at position 2518 of SEQ ID NO: 585490
gaauauugggccggacacu

SEQ ID NO: 644053 - RNA, 19 nt, Artificial Sequence
  Description of Artificial Sequence: Synthetic oligonucleotide
  Antisense strand to SEQ ID NO: 644052
aguguccggcccaauauuc

SEQ ID NO: 644054 - RNA, 19 nt, Artificial Sequence
  Description of Artificial Sequence: Synthetic oligonucleotide
  Sense strand starting at position 2561 of SEQ ID NO: 585490
agugauaugacaggugaua

SEQ ID NO: 644055 - RNA, 19 nt, Artificial Sequence
  Description of Artificial Sequence: Synthetic oligonucleotide
  Antisense strand to SEQ ID NO: 644054
uaucaccugucauaucacu

SEQ ID NO: 644056 - RNA, 19 nt, Artificial Sequence
  Description of Artificial Sequence: Synthetic oligonucleotide
  Sense strand starting at position 2563 of SEQ ID NO: 585490
ugauaugacaggugauauc

SEQ ID NO: 644057 - RNA, 19 nt, Artificial Sequence
  Description of Artificial Sequence: Synthetic oligonucleotide
  Antisense strand to SEQ ID NO: 644056
gauaucaccugucauauca

SEQ ID NO: 644058 - RNA, 19 nt, Artificial Sequence
  Description of Artificial Sequence: Synthetic oligonucleotide
  Sense strand starting at position 2604 of SEQ ID NO: 585490
gguuauuggcuucauacga

SEQ ID NO: 644059 - RNA, 19 nt, Artificial Sequence
  Description of Artificial Sequence: Synthetic oligonucleotide
  Antisense strand to SEQ ID NO: 644058
ucguaugaagccaauaacc

SEQ ID NO: 644060 - RNA, 19 nt, Artificial Sequence
  Description of Artificial Sequence: Synthetic oligonucleotide
  Sense strand starting at position 2654 of SEQ ID NO: 585490
gugcacuggagugauauaa

SEQ ID NO: 644061 - RNA, 19 nt, Artificial Sequence
  Description of Artificial Sequence: Synthetic oligonucleotide
  Antisense strand to SEQ ID NO: 644060
uuauaucacuccagugcac

SEQ ID NO: 644062 - RNA, 19 nt, Artificial Sequence
  Description of Artificial Sequence: Synthetic oligonucleotide
  Sense strand starting at position 2771 of SEQ ID NO: 585490
agauaucuacuacguagca

SEQ ID NO: 644063 - RNA, 19 nt, Artificial Sequence
  Description of Artificial Sequence: Synthetic oligonucleotide
  Antisense strand to SEQ ID NO: 644062
ugcuacguaguagauaucu

SEQ ID NO: 644064 - RNA, 19 nt, Artificial Sequence
  Description of Artificial Sequence: Synthetic oligonucleotide
  Sense strand starting at position 3021 of SEQ ID NO: 585490
gagugucugguauauaaua

SEQ ID NO: 644065 - RNA, 19 nt, Artificial Sequence
  Description of Artificial Sequence: Synthetic oligonucleotide
  Antisense strand to SEQ ID NO: 644064
uauuauauaccagacacuc

SEQ ID NO: 644066 - RNA, 19 nt, Artificial Sequence
  Description of Artificial Sequence: Synthetic oligonucleotide
  Sense strand starting at position 3094 of SEQ ID NO: 585490
ugauaaugauuugggacua

SEQ ID NO: 644067 - RNA, 19 nt, Artificial Sequence
  Description of Artificial Sequence: Synthetic oligonucleotide
  Antisense strand to SEQ ID NO: 644066
uagucccaaaucauuauca

SEQ ID NO: 644068 - RNA, 19 nt, Artificial Sequence
  Description of Artificial Sequence: Synthetic oligonucleotide
  Sense strand starting at position 3095 of SEQ ID NO: 585490
gauaaugauuugggacuaa

SEQ ID NO: 644069 - RNA, 19 nt, Artificial Sequence
  Description of Artificial Sequence: Synthetic oligonucleotide
  Antisense strand to SEQ ID NO: 644068
uuagucccaaaucauuauc

SEQ ID NO: 644070 - RNA, 19 nt, Artificial Sequence
  Description of Artificial Sequence: Synthetic oligonucleotide
  Sense strand starting at position 3143 of SEQ ID NO: 585490
uagugauaugcccaguaga

SEQ ID NO: 644071 - RNA, 19 nt, Artificial Sequence
  Description of Artificial Sequence: Synthetic oligonucleotide
  Antisense strand to SEQ ID NO: 644070
ucuacugggcauaucacua

SEQ ID NO: 644072 - RNA, 19 nt, Artificial Sequence
  Description of Artificial Sequence: Synthetic oligonucleotide
  Sense strand starting at position 3146 of SEQ ID NO: 585490
ugauaugcccaguagagcu

SEQ ID NO: 644073 - RNA, 19 nt, Artificial Sequence
  Description of Artificial Sequence: Synthetic oligonucleotide
  Antisense strand to SEQ ID NO: 644072
agcucuacugggcauauca

SEQ ID NO: 644074 - RNA, 19 nt, Artificial Sequence
  Description of Artificial Sequence: Synthetic oligonucleotide
  Sense strand starting at position 3254 of SEQ ID NO: 585490
ugcccuugugaauaaauca

SEQ ID NO: 644075 - RNA, 19 nt, Artificial Sequence
  Description of Artificial Sequence: Synthetic oligonucleotide
  Antisense strand to SEQ ID NO: 644074
ugauuuauucacaagggca

SEQ ID NO: 644076 - RNA, 19 nt, Artificial Sequence
  Description of Artificial Sequence: Synthetic oligonucleotide
  Sense strand starting at position 3453 of SEQ ID NO: 585490
auaaaugcuuugcugacaa

SEQ ID NO: 644077 - RNA, 19 nt, Artificial Sequence
  Description of Artificial Sequence: Synthetic oligonucleotide
  Antisense strand to SEQ ID NO: 644076
uugucagcaaagcauuuau

SEQ ID NO: 644078 - RNA, 19 nt, Artificial Sequence
  Description of Artificial Sequence: Synthetic oligonucleotide
  Sense strand starting at position 3492 of SEQ ID NO: 585490
agauauuucuuccaguuua

SEQ ID NO: 644079 - RNA, 19 nt, Artificial Sequence
  Description of Artificial Sequence: Synthetic oligonucleotide
  Antisense strand to SEQ ID NO: 644078
uaaacuggaagaaauaucu

SEQ ID NO: 644080 - RNA, 19 nt, Artificial Sequence
  Description of Artificial Sequence: Synthetic oligonucleotide
  Sense strand starting at position 3734 of SEQ ID NO: 585490
caguuugauccagguagaa

SEQ ID NO: 644081 - RNA, 19 nt, Artificial Sequence
  Description of Artificial Sequence: Synthetic oligonucleotide
  Antisense strand to SEQ ID NO: 644080
uucuaccuggaucaaacug

SEQ ID NO: 644082 - RNA, 19 nt, Artificial Sequence
  Description of Artificial Sequence: Synthetic oligonucleotide
  Sense strand starting at position 3807 of SEQ ID NO: 585490
guauuagcucauuauauug

SEQ ID NO: 644083 - RNA, 19 nt, Artificial Sequence
  Description of Artificial Sequence: Synthetic oligonucleotide
  Antisense strand to SEQ ID NO: 644082
caauauaaugagcuaauac

SEQ ID NO: 644084 - RNA, 19 nt, Artificial Sequence
  Description of Artificial Sequence: Synthetic oligonucleotide
  Sense strand starting at position 3833 of SEQ ID NO: 585490
ucacuauauugagcuagua

SEQ ID NO: 644085 - RNA, 19 nt, Artificial Sequence
  Description of Artificial Sequence: Synthetic oligonucleotide
  Antisense strand to SEQ ID NO: 644084
uacuagcucaauauaguga

SEQ ID NO: 644086 - RNA, 19 nt, Artificial Sequence
  Description of Artificial Sequence: Synthetic oligonucleotide
  Sense strand starting at position 3852 of SEQ ID NO: 585490
agucuaugucccuaagauu

SEQ ID NO: 644087 - RNA, 19 nt, Artificial Sequence
  Description of Artificial Sequence: Synthetic oligonucleotide
  Antisense strand to SEQ ID NO: 644086
aaucuuagggacauagacu

SEQ ID NO: 644088 - RNA, 19 nt, Artificial Sequence
  Description of Artificial Sequence: Synthetic oligonucleotide
  Sense strand starting at position 26 of SEQ ID NO: 585491
gcucauauuccaggugggu

SEQ ID NO: 644089 - RNA, 19 nt, Artificial Sequence
  Description of Artificial Sequence: Synthetic oligonucleotide
  Antisense strand to SEQ ID NO: 644088
acccaccuggaauaugagc

SEQ ID NO: 644090 - RNA, 19 nt, Artificial Sequence
  Description of Artificial Sequence: Synthetic oligonucleotide
  Sense strand starting at position 28 of SEQ ID NO: 585491
ucauauuccagguggguga

SEQ ID NO: 644091 - RNA, 19 nt, Artificial Sequence
  Description of Artificial Sequence: Synthetic oligonucleotide
  Antisense strand to SEQ ID NO: 644090
ucacccaccuggaauauga

SEQ ID NO: 644092 - RNA, 19 nt, Artificial Sequence
  Description of Artificial Sequence: Synthetic oligonucleotide
  Sense strand starting at position 168 of SEQ ID NO: 585491
agaugagucucagcaacgu

SEQ ID NO: 644093 - RNA, 19 nt, Artificial Sequence
  Description of Artificial Sequence: Synthetic oligonucleotide
  Antisense strand to SEQ ID NO: 644092
acguugcugagacucaucu

SEQ ID NO: 644094 - RNA, 19 nt, Artificial Sequence
  Description of Artificial Sequence: Synthetic oligonucleotide
  Sense strand starting at position 203 of SEQ ID NO: 585491
ugaccugacguguaauuaa

SEQ ID NO: 644095 - RNA, 19 nt, Artificial Sequence
  Description of Artificial Sequence: Synthetic oligonucleotide
  Antisense strand to SEQ ID NO: 644094
uuaauuacacgucagguca

SEQ ID NO: 644096 - RNA, 19 nt, Artificial Sequence
  Description of Artificial Sequence: Synthetic oligonucleotide
  Sense strand starting at position 291 of SEQ ID NO: 585491
ggugcucugucucuaugaa

SEQ ID NO: 644097 - RNA, 19 nt, Artificial Sequence
  Description of Artificial Sequence: Synthetic oligonucleotide
  Antisense strand to SEQ ID NO: 644096
uucauagagacagagcacc

SEQ ID NO: 644098 - RNA, 19 nt, Artificial Sequence
  Description of Artificial Sequence: Synthetic oligonucleotide
  Sense strand starting at position 292 of SEQ ID NO: 585491
gugcucugucucuaugaaa

SEQ ID NO: 644099 - RNA, 19 nt, Artificial Sequence
  Description of Artificial Sequence: Synthetic oligonucleotide
  Antisense strand to SEQ ID NO: 644098
uuucauagagacagagcac

SEQ ID NO: 644100 - RNA, 19 nt, Artificial Sequence
  Description of Artificial Sequence: Synthetic oligonucleotide
  Sense strand starting at position 319 of SEQ ID NO: 585491
aaauaauccgggcauggua

SEQ ID NO: 644101 - RNA, 19 nt, Artificial Sequence
  Description of Artificial Sequence: Synthetic oligonucleotide
  Antisense strand to SEQ ID NO: 644100
uaccaugcccggauuauuu

SEQ ID NO: 644102 - RNA, 19 nt, Artificial Sequence
  Description of Artificial Sequence: Synthetic oligonucleotide
  Sense strand starting at position 642 of SEQ ID NO: 585491
ggcaaugacuaagaaagaa

SEQ ID NO: 644103 - RNA, 19 nt, Artificial Sequence
  Description of Artificial Sequence: Synthetic oligonucleotide
  Antisense strand to SEQ ID NO: 644102
uucuuucuuagucauugcc

SEQ ID NO: 644104 - RNA, 19 nt, Artificial Sequence
  Description of Artificial Sequence: Synthetic oligonucleotide
  Sense strand starting at position 2085 of SEQ ID NO: 585491
uuugguaagcuguaccaga

SEQ ID NO: 644105 - RNA, 19 nt, Artificial Sequence
  Description of Artificial Sequence: Synthetic oligonucleotide
  Antisense strand to SEQ ID NO: 644104
ucugguacagcuuaccaaa

SEQ ID NO: 644106 - RNA, 19 nt, Artificial Sequence
  Description of Artificial Sequence: Synthetic oligonucleotide
  Sense strand starting at position 2130 of SEQ ID NO: 585491
cagacucugcccugagacu

SEQ ID NO: 644107 - RNA, 19 nt, Artificial Sequence
  Description of Artificial Sequence: Synthetic oligonucleotide
  Antisense strand to SEQ ID NO: 644106
agucucagggcagagucug

SEQ ID NO: 644108 - RNA, 19 nt, Artificial Sequence
  Description of Artificial Sequence: Synthetic oligonucleotide
  Sense strand starting at position 2177 of SEQ ID NO: 585491
cgaggugacccuugguacu

SEQ ID NO: 644109 - RNA, 19 nt, Artificial Sequence
  Description of Artificial Sequence: Synthetic oligonucleotide
  Antisense strand to SEQ ID NO: 644108
aguaccaagggucaccucg

SEQ ID NO: 644110 - RNA, 19 nt, Artificial Sequence
  Description of Artificial Sequence: Synthetic oligonucleotide
  Sense strand starting at position 2283 of SEQ ID NO: 585491
cacuuaaucucggugagcu

SEQ ID NO: 644111 - RNA, 19 nt, Artificial Sequence
  Description of Artificial Sequence: Synthetic oligonucleotide
  Antisense strand to SEQ ID NO: 644110
agcucaccgagauuaagug

SEQ ID NO: 644112 - RNA, 19 nt, Artificial Sequence
  Description of Artificial Sequence: Synthetic oligonucleotide
  Sense strand starting at position 2284 of SEQ ID NO: 585491
acuuaaucucggugagcuu

SEQ ID NO: 644113 - RNA, 19 nt, Artificial Sequence
  Description of Artificial Sequence: Synthetic oligonucleotide
  Antisense strand to SEQ ID NO: 644112
aagcucaccgagauuaagu

SEQ ID NO: 644114 - RNA, 19 nt, Artificial Sequence
  Description of Artificial Sequence: Synthetic oligonucleotide
  Sense strand starting at position 2307 of SEQ ID NO: 585491
ggucuucgucaguaccaca

SEQ ID NO: 644115 - RNA, 19 nt, Artificial Sequence
  Description of Artificial Sequence: Synthetic oligonucleotide
  Antisense strand to SEQ ID NO: 644114
ugugguacugacgaagacc

SEQ ID NO: 644116 - RNA, 19 nt, Artificial Sequence
  Description of Artificial Sequence: Synthetic oligonucleotide
  Sense strand starting at position 2312 of SEQ ID NO: 585491
ucgucaguaccacagagau

SEQ ID NO: 644117 - RNA, 19 nt, Artificial Sequence
  Description of Artificial Sequence: Synthetic oligonucleotide
  Antisense strand to SEQ ID NO: 644116
aucucugugguacugacga

SEQ ID NO: 644118 - RNA, 19 nt, Artificial Sequence
  Description of Artificial Sequence: Synthetic oligonucleotide
  Sense strand starting at position 2413 of SEQ ID NO: 585491
augcucaaguccuugguaa

SEQ ID NO: 644119 - RNA, 19 nt, Artificial Sequence
  Description of Artificial Sequence: Synthetic oligonucleotide
  Antisense strand to SEQ ID NO: 644118
uuaccaaggacuugagcau

SEQ ID NO: 644120 - RNA, 19 nt, Artificial Sequence
  Description of Artificial Sequence: Synthetic oligonucleotide
  Sense strand starting at position 2414 of SEQ ID NO: 585491
ugcucaaguccuugguaaa

SEQ ID NO: 644121 - RNA, 19 nt, Artificial Sequence
  Description of Artificial Sequence: Synthetic oligonucleotide
  Antisense strand to SEQ ID NO: 644120
uuuaccaaggacuugagca

SEQ ID NO: 644122 - RNA, 19 nt, Artificial Sequence
  Description of Artificial Sequence: Synthetic oligonucleotide
  Sense strand starting at position 2594 of SEQ ID NO: 585491
caggcuaauugauaugagu

SEQ ID NO: 644123 - RNA, 19 nt, Artificial Sequence
  Description of Artificial Sequence: Synthetic oligonucleotide
  Antisense strand to SEQ ID NO: 644122
acucauaucaauuagccug

SEQ ID NO: 644124 - RNA, 19 nt, Artificial Sequence
  Description of Artificial Sequence: Synthetic oligonucleotide
  Sense strand starting at position 2596 of SEQ ID NO: 585491
ggcuaauugauaugaguga

SEQ ID NO: 644125 - RNA, 19 nt, Artificial Sequence
  Description of Artificial Sequence: Synthetic oligonucleotide
  Antisense strand to SEQ ID NO: 644124
ucacucauaucaauuagcc

SEQ ID NO: 644126 - RNA, 19 nt, Artificial Sequence
  Description of Artificial Sequence: Synthetic oligonucleotide
  Sense strand starting at position 2597 of SEQ ID NO: 585491
gcuaauugauaugagugaa

SEQ ID NO: 644127 - RNA, 19 nt, Artificial Sequence
  Description of Artificial Sequence: Synthetic oligonucleotide
  Antisense strand to SEQ ID NO: 644126
uucacucauaucaauuagc

SEQ ID NO: 644128 - RNA, 19 nt, Artificial Sequence
  Description of Artificial Sequence: Synthetic oligonucleotide
  Sense strand starting at position 2600 of SEQ ID NO: 585491
aauugauaugagugaaguu

SEQ ID NO: 644129 - RNA, 19 nt, Artificial Sequence
  Description of Artificial Sequence: Synthetic oligonucleotide
  Antisense strand to SEQ ID NO: 644128
aacuucacucauaucaauu

SEQ ID NO: 644130 - RNA, 19 nt, Artificial Sequence
  Description of Artificial Sequence: Synthetic oligonucleotide
  Sense strand starting at position 2609 of SEQ ID NO: 585491
gagugaaguuccuacaaca

SEQ ID NO: 644131 - RNA, 19 nt, Artificial Sequence
  Description of Artificial Sequence: Synthetic oligonucleotide
  Antisense strand to SEQ ID NO: 644130
uguuguaggaacuucacuc

SEQ ID NO: 644132 - RNA, 19 nt, Artificial Sequence
  Description of Artificial Sequence: Synthetic oligonucleotide
  Sense strand starting at position 2625 of SEQ ID NO: 585491
acauaucuguggucacaaa

SEQ ID NO: 644133 - RNA, 19 nt, Artificial Sequence
  Description of Artificial Sequence: Synthetic oligonucleotide
  Antisense strand to SEQ ID NO: 644132
uuugugaccacagauaugu

SEQ ID NO: 644134 - RNA, 19 nt, Artificial Sequence
  Description of Artificial Sequence: Synthetic oligonucleotide
  Sense strand starting at position 2695 of SEQ ID NO: 585491
ugaaauaagugugagccau

SEQ ID NO: 644135 - RNA, 19 nt, Artificial Sequence
  Description of Artificial Sequence: Synthetic oligonucleotide
  Antisense strand to SEQ ID NO: 644134
auggcucacacuuauuuca

SEQ ID NO: 644136 - RNA, 19 nt, Artificial Sequence
  Description of Artificial Sequence: Synthetic oligonucleotide
  Sense strand starting at position 2699 of SEQ ID NO: 585491
auaagugugagccaugcau

SEQ ID NO: 644137 - RNA, 19 nt, Artificial Sequence
  Description of Artificial Sequence: Synthetic oligonucleotide
  Antisense strand to SEQ ID NO: 644136
augcauggcucacacuuau

SEQ ID NO: 644138 - RNA, 19 nt, Artificial Sequence
  Description of Artificial Sequence: Synthetic oligonucleotide
  Sense strand starting at position 2701 of SEQ ID NO: 585491
aagugugagccaugcauau

SEQ ID NO: 644139 - RNA, 19 nt, Artificial Sequence
  Description of Artificial Sequence: Synthetic oligonucleotide
  Antisense strand to SEQ ID NO: 644138
auaugcauggcucacacuu

SEQ ID NO: 644140 - RNA, 19 nt, Artificial Sequence
  Description of Artificial Sequence: Synthetic oligonucleotide
  Sense strand starting at position 2703 of SEQ ID NO: 585491
gugugagccaugcauauau

SEQ ID NO: 644141 - RNA, 19 nt, Artificial Sequence
  Description of Artificial Sequence: Synthetic oligonucleotide
  Antisense strand to SEQ ID NO: 644140
auauaugcauggcucacac

SEQ ID NO: 644142 - RNA, 19 nt, Artificial Sequence
  Description of Artificial Sequence: Synthetic oligonucleotide
  Sense strand starting at position 2714 of SEQ ID NO: 585491
gcauauauuuaaggaagau

SEQ ID NO: 644143 - RNA, 19 nt, Artificial Sequence
  Description of Artificial Sequence: Synthetic oligonucleotide
  Antisense strand to SEQ ID NO: 644142
aucuuccuuaaauauaugc

SEQ ID NO: 644144 - RNA, 19 nt, Artificial Sequence
  Description of Artificial Sequence: Synthetic oligonucleotide
  Sense strand starting at position 2994 of SEQ ID NO: 585491
acagcucugucucaaagaa

SEQ ID NO: 644145 - RNA, 19 nt, Artificial Sequence
  Description of Artificial Sequence: Synthetic oligonucleotide
  Antisense strand to SEQ ID NO: 644144
uucuuugagacagagcugu

SEQ ID NO: 644146 - RNA, 19 nt, Artificial Sequence
  Description of Artificial Sequence: Synthetic oligonucleotide
  Sense strand starting at position 3036 of SEQ ID NO: 585491
aucccucucgcuuagagaa

SEQ ID NO: 644147 - RNA, 19 nt, Artificial Sequence
  Description of Artificial Sequence: Synthetic oligonucleotide
  Antisense strand to SEQ ID NO: 644146
uucucuaagcgagagggau

SEQ ID NO: 644148 - RNA, 19 nt, Artificial Sequence
  Description of Artificial Sequence: Synthetic oligonucleotide
  Sense strand starting at position 3189 of SEQ ID NO: 585491
acggcuuugggaugugaca

SEQ ID NO: 644149 - RNA, 19 nt, Artificial Sequence
  Description of Artificial Sequence: Synthetic oligonucleotide
  Antisense strand to SEQ ID NO: 644148
ugucacaucccaaagccgu

SEQ ID NO: 644150 - RNA, 19 nt, Artificial Sequence
  Description of Artificial Sequence: Synthetic oligonucleotide
  Sense strand starting at position 3319 of SEQ ID NO: 585491
augaaaugauguuauucca

SEQ ID NO: 644151 - RNA, 19 nt, Artificial Sequence
  Description of Artificial Sequence: Synthetic oligonucleotide
  Antisense strand to SEQ ID NO: 644150
uggaauaacaucauuucau

SEQ ID NO: 644152 - RNA, 19 nt, Artificial Sequence
  Description of Artificial Sequence: Synthetic oligonucleotide
  Sense strand starting at position 3467 of SEQ ID NO: 585491
cagguugauugaggauaca

SEQ ID NO: 644153 - RNA, 19 nt, Artificial Sequence
  Description of Artificial Sequence: Synthetic oligonucleotide
  Antisense strand to SEQ ID NO: 644152
uguauccucaaucaaccug

SEQ ID NO: 644154 - RNA, 19 nt, Artificial Sequence
  Description of Artificial Sequence: Synthetic oligonucleotide
  Sense strand starting at position 3514 of SEQ ID NO: 585491
uggauaucagauuguaauu

SEQ ID NO: 644155 - RNA, 19 nt, Artificial Sequence
  Description of Artificial Sequence: Synthetic oligonucleotide
  Antisense strand to SEQ ID NO: 644154
aauuacaaucugauaucca

SEQ ID NO: 644156 - RNA, 19 nt, Artificial Sequence
  Description of Artificial Sequence: Synthetic oligonucleotide
  Sense strand starting at position 3549 of SEQ ID NO: 585491
agggucagauuguuaacuu

SEQ ID NO: 644157 - RNA, 19 nt, Artificial Sequence
  Description of Artificial Sequence: Synthetic oligonucleotide
  Antisense strand to SEQ ID NO: 644156
aaguuaacaaucugacccu

SEQ ID NO: 644158 - RNA, 19 nt, Artificial Sequence
  Description of Artificial Sequence: Synthetic oligonucleotide
  Sense strand starting at position 3550 of SEQ ID NO: 585491
gggucagauuguuaacuuu

SEQ ID NO: 644159 - RNA, 19 nt, Artificial Sequence
  Description of Artificial Sequence: Synthetic oligonucleotide
  Antisense strand to SEQ ID NO: 644158
aaaguuaacaaucugaccc

SEQ ID NO: 644160 - RNA, 19 nt, Artificial Sequence
  Description of Artificial Sequence: Synthetic oligonucleotide
  Sense strand starting at position 3601 of SEQ ID NO: 585491
cagauaaggugggaauaaa

SEQ ID NO: 644161 - RNA, 19 nt, Artificial Sequence
  Description of Artificial Sequence: Synthetic oligonucleotide
  Antisense strand to SEQ ID NO: 644160
uuuauucccaccuuaucug

SEQ ID NO: 644162 - RNA, 19 nt, Artificial Sequence
  Description of Artificial Sequence: Synthetic oligonucleotide
  Sense strand starting at position 3714 of SEQ ID NO: 585491
ggaauugagagcuauuguc

SEQ ID NO: 644163 - RNA, 19 nt, Artificial Sequence
  Description of Artificial Sequence: Synthetic oligonucleotide
  Antisense strand to SEQ ID NO: 644162
gacaauagcucucaauucc

SEQ ID NO: 644164 - RNA, 19 nt, Artificial Sequence
  Description of Artificial Sequence: Synthetic oligonucleotide
  Sense strand starting at position 3722 of SEQ ID NO: 585491
gagcuauugucuugaccuu

SEQ ID NO: 644165 - RNA, 19 nt, Artificial Sequence
  Description of Artificial Sequence: Synthetic oligonucleotide
  Antisense strand to SEQ ID NO: 644164
aaggucaagacaauagcuc

SEQ ID NO: 644166 - RNA, 19 nt, Artificial Sequence
  Description of Artificial Sequence: Synthetic oligonucleotide
  Sense strand starting at position 3771 of SEQ ID NO: 585491
ccaucuguuuacuggcaga

SEQ ID NO: 644167 - RNA, 19 nt, Artificial Sequence
  Description of Artificial Sequence: Synthetic oligonucleotide
  Antisense strand to SEQ ID NO: 644166
ucugccaguaaacagaugg

SEQ ID NO: 644168 - RNA, 19 nt, Artificial Sequence
  Description of Artificial Sequence: Synthetic oligonucleotide
  Sense strand starting at position 1 of SEQ ID NO: 585492
gccaccauuuguugaggga

SEQ ID NO: 644169 - RNA, 19 nt, Artificial Sequence
  Description of Artificial Sequence: Synthetic oligonucleotide
  Antisense strand to SEQ ID NO: 644168
ucccucaacaaaugguggc

SEQ ID NO: 644170 - RNA, 19 nt, Artificial Sequence
  Description of Artificial Sequence: Synthetic oligonucleotide
  Sense strand starting at position 4 of SEQ ID NO: 585492
accauuuguugagggacuu

SEQ ID NO: 644171 - RNA, 19 nt, Artificial Sequence
  Description of Artificial Sequence: Synthetic oligonucleotide
  Antisense strand to SEQ ID NO: 644170
aagucccucaacaaauggu

SEQ ID NO: 644172 - RNA, 19 nt, Artificial Sequence
  Description of Artificial Sequence: Synthetic oligonucleotide
  Sense strand starting at position 19 of SEQ ID NO: 585492
acuugucuuguaugugaca

SEQ ID NO: 644173 - RNA, 19 nt, Artificial Sequence
  Description of Artificial Sequence: Synthetic oligonucleotide
  Antisense strand to SEQ ID NO: 644172
ugucacauacaagacaagu

SEQ ID NO: 644174 - RNA, 19 nt, Artificial Sequence
  Description of Artificial Sequence: Synthetic oligonucleotide
  Sense strand starting at position 21 of SEQ ID NO: 585492
uugucuuguaugugacagu

SEQ ID NO: 644175 - RNA, 19 nt, Artificial Sequence
  Description of Artificial Sequence: Synthetic oligonucleotide
  Antisense strand to SEQ ID NO: 644174
acugucacauacaagacaa

SEQ ID NO: 644176 - RNA, 19 nt, Artificial Sequence
  Description of Artificial Sequence: Synthetic oligonucleotide
  Sense strand starting at position 32 of SEQ ID NO: 585492
gugacaguccugggcuaug

SEQ ID NO: 644177 - RNA, 19 nt, Artificial Sequence
  Description of Artificial Sequence: Synthetic oligonucleotide
  Antisense strand to SEQ ID NO: 644176
cauagcccaggacugucac

SEQ ID NO: 644178 - RNA, 19 nt, Artificial Sequence
  Description of Artificial Sequence: Synthetic oligonucleotide
  Sense strand starting at position 55 of SEQ ID NO: 585492
uugcauguguccucucaca

SEQ ID NO: 644179 - RNA, 19 nt, Artificial Sequence
  Description of Artificial Sequence: Synthetic oligonucleotide
  Antisense strand to SEQ ID NO: 644178
ugugagaggacacaugcaa

SEQ ID NO: 644180 - RNA, 19 nt, Artificial Sequence
  Description of Artificial Sequence: Synthetic oligonucleotide
  Sense strand starting at position 123 of SEQ ID NO: 585492
uccugaaggaauugaguuu

SEQ ID NO: 644181 - RNA, 19 nt, Artificial Sequence
  Description of Artificial Sequence: Synthetic oligonucleotide
  Antisense strand to SEQ ID NO: 644180
aaacucaauuccuucagga

SEQ ID NO: 644182 - RNA, 19 nt, Artificial Sequence
  Description of Artificial Sequence: Synthetic oligonucleotide
  Sense strand starting at position 130 of SEQ ID NO: 585492
ggaauugaguuuggagaac

SEQ ID NO: 644183 - RNA, 19 nt, Artificial Sequence
  Description of Artificial Sequence: Synthetic oligonucleotide
  Antisense strand to SEQ ID NO: 644182
guucuccaaacucaauucc

SEQ ID NO: 644184 - RNA, 19 nt, Artificial Sequence
  Description of Artificial Sequence: Synthetic oligonucleotide
  Sense strand starting at position 194 of SEQ ID NO: 585492
uaaggcagucauggcuuua

SEQ ID NO: 644185 - RNA, 19 nt, Artificial Sequence
  Description of Artificial Sequence: Synthetic oligonucleotide
  Antisense strand to SEQ ID NO: 644184
uaaagccaugacugccuua

SEQ ID NO: 644186 - RNA, 19 nt, Artificial Sequence
  Description of Artificial Sequence: Synthetic oligonucleotide
  Sense strand starting at position 680 of SEQ ID NO: 585492
gcucauauuccaggugggu

SEQ ID NO: 644187 - RNA, 19 nt, Artificial Sequence
  Description of Artificial Sequence: Synthetic oligonucleotide
  Antisense strand to SEQ ID NO: 644186
acccaccuggaauaugagc

SEQ ID NO: 644188 - RNA, 19 nt, Artificial Sequence
  Description of Artificial Sequence: Synthetic oligonucleotide
  Sense strand starting at position 682 of SEQ ID NO: 585492
ucauauuccagguggguga

SEQ ID NO: 644189 - RNA, 19 nt, Artificial Sequence
  Description of Artificial Sequence: Synthetic oligonucleotide
  Antisense strand to SEQ ID NO: 644188
ucacccaccuggaauauga

SEQ ID NO: 644190 - RNA, 19 nt, Artificial Sequence
  Description of Artificial Sequence: Synthetic oligonucleotide
  Sense strand starting at position 822 of SEQ ID NO: 585492
agaugagucucagcaacgu

SEQ ID NO: 644191 - RNA, 19 nt, Artificial Sequence
  Description of Artificial Sequence: Synthetic oligonucleotide
  Antisense strand to SEQ ID NO: 644190
acguugcugagacucaucu

SEQ ID NO: 644192 - RNA, 19 nt, Artificial Sequence
  Description of Artificial Sequence: Synthetic oligonucleotide
  Sense strand starting at position 857 of SEQ ID NO: 585492
ugaccugacguguaauuaa

SEQ ID NO: 644193 - RNA, 19 nt, Artificial Sequence
  Description of Artificial Sequence: Synthetic oligonucleotide
  Antisense strand to SEQ ID NO: 644192
uuaauuacacgucagguca

SEQ ID NO: 644194 - RNA, 19 nt, Artificial Sequence
  Description of Artificial Sequence: Synthetic oligonucleotide
  Sense strand starting at position 945 of SEQ ID NO: 585492
ggugcucugucucuaugaa

SEQ ID NO: 644195 - RNA, 19 nt, Artificial Sequence
  Description of Artificial Sequence: Synthetic oligonucleotide
  Antisense strand to SEQ ID NO: 644194
uucauagagacagagcacc

SEQ ID NO: 644196 - RNA, 19 nt, Artificial Sequence
  Description of Artificial Sequence: Synthetic oligonucleotide
  Sense strand starting at position 946 of SEQ ID NO: 585492
gugcucugucucuaugaaa

SEQ ID NO: 644197 - RNA, 19 nt, Artificial Sequence
  Description of Artificial Sequence: Synthetic oligonucleotide
  Antisense strand to SEQ ID NO: 644196
uuucauagagacagagcac

SEQ ID NO: 644198 - RNA, 19 nt, Artificial Sequence
  Description of Artificial Sequence: Synthetic oligonucleotide
  Sense strand starting at position 973 of SEQ ID NO: 585492
aaauaauccgggcauggua

SEQ ID NO: 644199 - RNA, 19 nt, Artificial Sequence
  Description of Artificial Sequence: Synthetic oligonucleotide
  Antisense strand to SEQ ID NO: 644198
uaccaugcccggauuauuu

SEQ ID NO: 644200 - RNA, 19 nt, Artificial Sequence
  Description of Artificial Sequence: Synthetic oligonucleotide
  Sense strand starting at position 1296 of SEQ ID NO: 585492
ggcaaugacuaagaaagaa

SEQ ID NO: 644201 - RNA, 19 nt, Artificial Sequence
  Description of Artificial Sequence: Synthetic oligonucleotide
  Antisense strand to SEQ ID NO: 644200
uucuuucuuagucauugcc

SEQ ID NO: 644202 - RNA, 19 nt, Artificial Sequence
  Description of Artificial Sequence: Synthetic oligonucleotide
  Sense strand starting at position 2739 of SEQ ID NO: 585492
uuugguaagcuguaccaga

SEQ ID NO: 644203 - RNA, 19 nt, Artificial Sequence
  Description of Artificial Sequence: Synthetic oligonucleotide
  Antisense strand to SEQ ID NO: 644202
ucugguacagcuuaccaaa

SEQ ID NO: 644204 - RNA, 19 nt, Artificial Sequence
  Description of Artificial Sequence: Synthetic oligonucleotide
  Sense strand starting at position 2784 of SEQ ID NO: 585492
cagacucugcccugagacu

SEQ ID NO: 644205 - RNA, 19 nt, Artificial Sequence
  Description of Artificial Sequence: Synthetic oligonucleotide
  Antisense strand to SEQ ID NO: 644204
agucucagggcagagucug

SEQ ID NO: 644206 - RNA, 19 nt, Artificial Sequence
  Description of Artificial Sequence: Synthetic oligonucleotide
  Sense strand starting at position 2831 of SEQ ID NO: 585492
cgaggugacccuugguacu

SEQ ID NO: 644207 - RNA, 19 nt, Artificial Sequence
  Description of Artificial Sequence: Synthetic oligonucleotide
  Antisense strand to SEQ ID NO: 644206
aguaccaagggucaccucg

SEQ ID NO: 644208 - RNA, 19 nt, Artificial Sequence
  Description of Artificial Sequence: Synthetic oligonucleotide
  Sense strand starting at position 2937 of SEQ ID NO: 585492
cacuuaaucucggugagcu

SEQ ID NO: 644209 - RNA, 19 nt, Artificial Sequence
  Description of Artificial Sequence: Synthetic oligonucleotide
  Antisense strand to SEQ ID NO: 644208
agcucaccgagauuaagug

SEQ ID NO: 644210 - RNA, 19 nt, Artificial Sequence
  Description of Artificial Sequence: Synthetic oligonucleotide
  Sense strand starting at position 2938 of SEQ ID NO: 585492
acuuaaucucggugagcuu

SEQ ID NO: 644211 - RNA, 19 nt, Artificial Sequence
  Description of Artificial Sequence: Synthetic oligonucleotide
  Antisense strand to SEQ ID NO: 644210
aagcucaccgagauuaagu

SEQ ID NO: 644212 - RNA, 19 nt, Artificial Sequence
  Description of Artificial Sequence: Synthetic oligonucleotide
  Sense strand starting at position 2961 of SEQ ID NO: 585492
ggucuucgucaguaccaca

SEQ ID NO: 644213 - RNA, 19 nt, Artificial Sequence
  Description of Artificial Sequence: Synthetic oligonucleotide
  Antisense strand to SEQ ID NO: 644212
ugugguacugacgaagacc

SEQ ID NO: 644214 - RNA, 19 nt, Artificial Sequence
  Description of Artificial Sequence: Synthetic oligonucleotide
  Sense strand starting at position 2966 of SEQ ID NO: 585492
ucgucaguaccacagagau

SEQ ID NO: 644215 - RNA, 19 nt, Artificial Sequence
  Description of Artificial Sequence: Synthetic oligonucleotide
  Antisense strand to SEQ ID NO: 644214
aucucugugguacugacga

SEQ ID NO: 644216 - RNA, 19 nt, Artificial Sequence
  Description of Artificial Sequence: Synthetic oligonucleotide
  Sense strand starting at position 3067 of SEQ ID NO: 585492
augcucaaguccuugguaa

SEQ ID NO: 644217 - RNA, 19 nt, Artificial Sequence
  Description of Artificial Sequence: Synthetic oligonucleotide
  Antisense strand to SEQ ID NO: 644216
uuaccaaggacuugagcau

SEQ ID NO: 644218 - RNA, 19 nt, Artificial Sequence
  Description of Artificial Sequence: Synthetic oligonucleotide
  Sense strand starting at position 3068 of SEQ ID NO: 585492
ugcucaaguccuugguaaa

SEQ ID NO: 644219 - RNA, 19 nt, Artificial Sequence
  Description of Artificial Sequence: Synthetic oligonucleotide
  Antisense strand to SEQ ID NO: 644218
uuuaccaaggacuugagca

SEQ ID NO: 644220 - RNA, 19 nt, Artificial Sequence
  Description of Artificial Sequence: Synthetic oligonucleotide
  Sense strand starting at position 3248 of SEQ ID NO: 585492
caggcuaauugauaugagu

SEQ ID NO: 644221 - RNA, 19 nt, Artificial Sequence
  Description of Artificial Sequence: Synthetic oligonucleotide
  Antisense strand to SEQ ID NO: 644220
acucauaucaauuagccug

SEQ ID NO: 644222 - RNA, 19 nt, Artificial Sequence
  Description of Artificial Sequence: Synthetic oligonucleotide
  Sense strand starting at position 3250 of SEQ ID NO: 585492
ggcuaauugauaugaguga

SEQ ID NO: 644223 - RNA, 19 nt, Artificial Sequence
  Description of Artificial Sequence: Synthetic oligonucleotide
  Antisense strand to SEQ ID NO: 644222
ucacucauaucaauuagcc

SEQ ID NO: 644224 - RNA, 19 nt, Artificial Sequence
  Description of Artificial Sequence: Synthetic oligonucleotide
  Sense strand starting at position 3251 of SEQ ID NO: 585492
gcuaauugauaugagugaa

SEQ ID NO: 644225 - RNA, 19 nt, Artificial Sequence
  Description of Artificial Sequence: Synthetic oligonucleotide
  Antisense strand to SEQ ID NO: 644224
uucacucauaucaauuagc

SEQ ID NO: 644226 - RNA, 19 nt, Artificial Sequence
  Description of Artificial Sequence: Synthetic oligonucleotide
  Sense strand starting at position 3254 of SEQ ID NO: 585492
aauugauaugagugaaguu

SEQ ID NO: 644227 - RNA, 19 nt, Artificial Sequence
  Description of Artificial Sequence: Synthetic oligonucleotide
  Antisense strand to SEQ ID NO: 644226
aacuucacucauaucaauu

SEQ ID NO: 644228 - RNA, 19 nt, Artificial Sequence
  Description of Artificial Sequence: Synthetic oligonucleotide
  Sense strand starting at position 3263 of SEQ ID NO: 585492
gagugaaguuccuacaaca

SEQ ID NO: 644229 - RNA, 19 nt, Artificial Sequence
  Description of Artificial Sequence: Synthetic oligonucleotide
  Antisense strand to SEQ ID NO: 644228
uguuguaggaacuucacuc

SEQ ID NO: 644230 - RNA, 19 nt, Artificial Sequence
  Description of Artificial Sequence: Synthetic oligonucleotide
  Sense strand starting at position 3279 of SEQ ID NO: 585492
acauaucuguggucacaaa

SEQ ID NO: 644231 - RNA, 19 nt, Artificial Sequence
  Description of Artificial Sequence: Synthetic oligonucleotide
  Antisense strand to SEQ ID NO: 644230
uuugugaccacagauaugu

SEQ ID NO: 644232 - RNA, 19 nt, Artificial Sequence
  Description of Artificial Sequence: Synthetic oligonucleotide
  Sense strand starting at position 3353 of SEQ ID NO: 585492
auaagugugagccaugcau

SEQ ID NO: 644233 - RNA, 19 nt, Artificial Sequence
  Description of Artificial Sequence: Synthetic oligonucleotide
  Antisense strand to SEQ ID NO: 644232
augcauggcucacacuuau

SEQ ID NO: 644234 - RNA, 19 nt, Artificial Sequence
  Description of Artificial Sequence: Synthetic oligonucleotide
  Sense strand starting at position 3355 of SEQ ID NO: 585492
aagugugagccaugcauau

SEQ ID NO: 644235 - RNA, 19 nt, Artificial Sequence
  Description of Artificial Sequence: Synthetic oligonucleotide
  Antisense strand to SEQ ID NO: 644234
auaugcauggcucacacuu

SEQ ID NO: 644236 - RNA, 19 nt, Artificial Sequence
  Description of Artificial Sequence: Synthetic oligonucleotide
  Sense strand starting at position 3357 of SEQ ID NO: 585492
gugugagccaugcauauau

SEQ ID NO: 644237 - RNA, 19 nt, Artificial Sequence
  Description of Artificial Sequence: Synthetic oligonucleotide
  Antisense strand to SEQ ID NO: 644236
auauaugcauggcucacac

SEQ ID NO: 644238 - RNA, 19 nt, Artificial Sequence
  Description of Artificial Sequence: Synthetic oligonucleotide
  Sense strand starting at position 3368 of SEQ ID NO: 585492
gcauauauuuaaggaagau

SEQ ID NO: 644239 - RNA, 19 nt, Artificial Sequence
  Description of Artificial Sequence: Synthetic oligonucleotide
  Antisense strand to SEQ ID NO: 644238
aucuuccuuaaauauaugc

SEQ ID NO: 644240 - RNA, 19 nt, Artificial Sequence
  Description of Artificial Sequence: Synthetic oligonucleotide
  Sense strand starting at position 3648 of SEQ ID NO: 585492
acagcucugucucaaagaa

SEQ ID NO: 644241 - RNA, 19 nt, Artificial Sequence
  Description of Artificial Sequence: Synthetic oligonucleotide
  Antisense strand to SEQ ID NO: 644240
uucuuugagacagagcugu

SEQ ID NO: 644242 - RNA, 19 nt, Artificial Sequence
  Description of Artificial Sequence: Synthetic oligonucleotide
  Sense strand starting at position 3690 of SEQ ID NO: 585492
aucccucucgcuuagagaa

SEQ ID NO: 644243 - RNA, 19 nt, Artificial Sequence
  Description of Artificial Sequence: Synthetic oligonucleotide
  Antisense strand to SEQ ID NO: 644242
uucucuaagcgagagggau

SEQ ID NO: 644244 - RNA, 19 nt, Artificial Sequence
  Description of Artificial Sequence: Synthetic oligonucleotide
  Sense strand starting at position 3843 of SEQ ID NO: 585492
acggcuuugggaugugaca

SEQ ID NO: 644245 - RNA, 19 nt, Artificial Sequence
  Description of Artificial Sequence: Synthetic oligonucleotide
  Antisense strand to SEQ ID NO: 644244
ugucacaucccaaagccgu

SEQ ID NO: 644246 - RNA, 19 nt, Artificial Sequence
  Description of Artificial Sequence: Synthetic oligonucleotide
  Sense strand starting at position 3973 of SEQ ID NO: 585492
augaaaugauguuauucca

SEQ ID NO: 644247 - RNA, 19 nt, Artificial Sequence
  Description of Artificial Sequence: Synthetic oligonucleotide
  Antisense strand to SEQ ID NO: 644246
uggaauaacaucauuucau

SEQ ID NO: 644248 - RNA, 19 nt, Artificial Sequence
  Description of Artificial Sequence: Synthetic oligonucleotide
  Sense strand starting at position 5 of SEQ ID NO: 585493
accugaauguaugaugaga

SEQ ID NO: 644249 - RNA, 19 nt, Artificial Sequence
  Description of Artificial Sequence: Synthetic oligonucleotide
  Antisense strand to SEQ ID NO: 644248
ucucaucauacauucaggu

SEQ ID NO: 644250 - RNA, 19 nt, Artificial Sequence
  Description of Artificial Sequence: Synthetic oligonucleotide
  Sense strand starting at position 7 of SEQ ID NO: 585493
cugaauguaugaugagaaa

SEQ ID NO: 644251 - RNA, 19 nt, Artificial Sequence
  Description of Artificial Sequence: Synthetic oligonucleotide
  Antisense strand to SEQ ID NO: 644250
uuucucaucauacauucag

SEQ ID NO: 644252 - RNA, 19 nt, Artificial Sequence
  Description of Artificial Sequence: Synthetic oligonucleotide
  Sense strand starting at position 103 of SEQ ID NO: 585493
caguuaugagcugaauggu

SEQ ID NO: 644253 - RNA, 19 nt, Artificial Sequence
  Description of Artificial Sequence: Synthetic oligonucleotide
  Antisense strand to SEQ ID NO: 644252
accauucagcucauaacug

SEQ ID NO: 644254 - RNA, 19 nt, Artificial Sequence
  Description of Artificial Sequence: Synthetic oligonucleotide
  Sense strand starting at position 106 of SEQ ID NO: 585493
uuaugagcugaaugguuau

SEQ ID NO: 644255 - RNA, 19 nt, Artificial Sequence
  Description of Artificial Sequence: Synthetic oligonucleotide
  Antisense strand to SEQ ID NO: 644254
auaaccauucagcucauaa

SEQ ID NO: 644256 - RNA, 19 nt, Artificial Sequence
  Description of Artificial Sequence: Synthetic oligonucleotide
  Sense strand starting at position 274 of SEQ ID NO: 585493
cuaucaugaugcuacagaa

SEQ ID NO: 644257 - RNA, 19 nt, Artificial Sequence
  Description of Artificial Sequence: Synthetic oligonucleotide
  Antisense strand to SEQ ID NO: 644256
uucuguagcaucaugauag

SEQ ID NO: 644258 - RNA, 19 nt, Artificial Sequence
  Description of Artificial Sequence: Synthetic oligonucleotide
  Sense strand starting at position 327 of SEQ ID NO: 585493
aguacuguccaguacuaaa

SEQ ID NO: 644259 - RNA, 19 nt, Artificial Sequence
  Description of Artificial Sequence: Synthetic oligonucleotide
  Antisense strand to SEQ ID NO: 644258
uuuaguacuggacaguacu

SEQ ID NO: 644260 - RNA, 19 nt, Artificial Sequence
  Description of Artificial Sequence: Synthetic oligonucleotide
  Sense strand starting at position 371 of SEQ ID NO: 585493
gaaggaauauaggaugcaa

SEQ ID NO: 644261 - RNA, 19 nt, Artificial Sequence
  Description of Artificial Sequence: Synthetic oligonucleotide
  Antisense strand to SEQ ID NO: 644260
uugcauccuauauuccuuc

SEQ ID NO: 644262 - RNA, 19 nt, Artificial Sequence
  Description of Artificial Sequence: Synthetic oligonucleotide
  Sense strand starting at position 713 of SEQ ID NO: 585493
guagcaugguucuuccaaa

SEQ ID NO: 644263 - RNA, 19 nt, Artificial Sequence
  Description of Artificial Sequence: Synthetic oligonucleotide
  Antisense strand to SEQ ID NO: 644262
uuuggaagaaccaugcuac

SEQ ID NO: 644264 - RNA, 19 nt, Artificial Sequence
  Description of Artificial Sequence: Synthetic oligonucleotide
  Sense strand starting at position 850 of SEQ ID NO: 585493
gccuguaaugugcaacgau

SEQ ID NO: 644265 - RNA, 19 nt, Artificial Sequence
  Description of Artificial Sequence: Synthetic oligonucleotide
  Antisense strand to SEQ ID NO: 644264
aucguugcacauuacaggc

SEQ ID NO: 644266 - RNA, 19 nt, Artificial Sequence
  Description of Artificial Sequence: Synthetic oligonucleotide
  Sense strand starting at position 863 of SEQ ID NO: 585493
aacgaucgugccuaugagu

SEQ ID NO: 644267 - RNA, 19 nt, Artificial Sequence
  Description of Artificial Sequence: Synthetic oligonucleotide
  Antisense strand to SEQ ID NO: 644266
acucauaggcacgaucguu

SEQ ID NO: 644268 - RNA, 19 nt, Artificial Sequence
  Description of Artificial Sequence: Synthetic oligonucleotide
  Sense strand starting at position 954 of SEQ ID NO: 585493
agaaccguuuaauaaagga

SEQ ID NO: 644269 - RNA, 19 nt, Artificial Sequence
  Description of Artificial Sequence: Synthetic oligonucleotide
  Antisense strand to SEQ ID NO: 644268
uccuuuauuaaacgguucu

SEQ ID NO: 644270 - RNA, 19 nt, Artificial Sequence
  Description of Artificial Sequence: Synthetic oligonucleotide
  Sense strand starting at position 1313 of SEQ ID NO: 585493
acccuuuaucuggaguaac

SEQ ID NO: 644271 - RNA, 19 nt, Artificial Sequence
  Description of Artificial Sequence: Synthetic oligonucleotide
  Antisense strand to SEQ ID NO: 644270
guuacuccagauaaagggu

SEQ ID NO: 644272 - RNA, 19 nt, Artificial Sequence
  Description of Artificial Sequence: Synthetic oligonucleotide
  Sense strand starting at position 1454 of SEQ ID NO: 585493
uaaucuaugguucgcagaa

SEQ ID NO: 644273 - RNA, 19 nt, Artificial Sequence
  Description of Artificial Sequence: Synthetic oligonucleotide
  Antisense strand to SEQ ID NO: 644272
uucugcgaaccauagauua

SEQ ID NO: 644274 - RNA, 19 nt, Artificial Sequence
  Description of Artificial Sequence: Synthetic oligonucleotide
  Sense strand starting at position 1455 of SEQ ID NO: 585493
aaucuaugguucgcagaau

SEQ ID NO: 644275 - RNA, 19 nt, Artificial Sequence
  Description of Artificial Sequence: Synthetic oligonucleotide
  Antisense strand to SEQ ID NO: 644274
auucugcgaaccauagauu

SEQ ID NO: 644276 - RNA, 19 nt, Artificial Sequence
  Description of Artificial Sequence: Synthetic oligonucleotide
  Sense strand starting at position 1469 of SEQ ID NO: 585493
agaauagacuaauauagag

SEQ ID NO: 644277 - RNA, 19 nt, Artificial Sequence
  Description of Artificial Sequence: Synthetic oligonucleotide
  Antisense strand to SEQ ID NO: 644276
cucuauauuagucuauucu

SEQ ID NO: 644278 - RNA, 19 nt, Artificial Sequence
  Description of Artificial Sequence: Synthetic oligonucleotide
  Sense strand starting at position 1517 of SEQ ID NO: 585493
gacacugaucgaggcuaaa

SEQ ID NO: 644279 - RNA, 19 nt, Artificial Sequence
  Description of Artificial Sequence: Synthetic oligonucleotide
  Antisense strand to SEQ ID NO: 644278
uuuagccucgaucaguguc

SEQ ID NO: 644280 - RNA, 19 nt, Artificial Sequence
  Description of Artificial Sequence: Synthetic oligonucleotide
  Sense strand starting at position 1546 of SEQ ID NO: 585493
guaggauucucacuagcuu

SEQ ID NO: 644281 - RNA, 19 nt, Artificial Sequence
  Description of Artificial Sequence: Synthetic oligonucleotide
  Antisense strand to SEQ ID NO: 644280
aagcuagugagaauccuac

SEQ ID NO: 644282 - RNA, 19 nt, Artificial Sequence
  Description of Artificial Sequence: Synthetic oligonucleotide
  Sense strand starting at position 1553 of SEQ ID NO: 585493
ucucacuagcuuugaggaa

SEQ ID NO: 644283 - RNA, 19 nt, Artificial Sequence
  Description of Artificial Sequence: Synthetic oligonucleotide
  Antisense strand to SEQ ID NO: 644282
uuccucaaagcuagugaga

SEQ ID NO: 644284 - RNA, 19 nt, Artificial Sequence
  Description of Artificial Sequence: Synthetic oligonucleotide
  Sense strand starting at position 2030 of SEQ ID NO: 585493
ggagcuacuuuccugguga

SEQ ID NO: 644285 - RNA, 19 nt, Artificial Sequence
  Description of Artificial Sequence: Synthetic oligonucleotide
  Antisense strand to SEQ ID NO: 644284
ucaccaggaaaguagcucc

SEQ ID NO: 644286 - RNA, 19 nt, Artificial Sequence
  Description of Artificial Sequence: Synthetic oligonucleotide
  Sense strand starting at position 2526 of SEQ ID NO: 585493
gccaccuacgaucaaugaa

SEQ ID NO: 644287 - RNA, 19 nt, Artificial Sequence
  Description of Artificial Sequence: Synthetic oligonucleotide
  Antisense strand to SEQ ID NO: 644286
uucauugaucguagguggc

SEQ ID NO: 644288 - RNA, 19 nt, Artificial Sequence
  Description of Artificial Sequence: Synthetic oligonucleotide
  Sense strand starting at position 2559 of SEQ ID NO: 585493
cuuaucagaucuuugugau

SEQ ID NO: 644289 - RNA, 19 nt, Artificial Sequence
  Description of Artificial Sequence: Synthetic oligonucleotide
  Antisense strand to SEQ ID NO: 644288
aucacaaagaucugauaag

SEQ ID NO: 644290 - RNA, 19 nt, Artificial Sequence
  Description of Artificial Sequence: Synthetic oligonucleotide
  Sense strand starting at position 2560 of SEQ ID NO: 585493
uuaucagaucuuugugauc

SEQ ID NO: 644291 - RNA, 19 nt, Artificial Sequence
  Description of Artificial Sequence: Synthetic oligonucleotide
  Antisense strand to SEQ ID NO: 644290
gaucacaaagaucugauaa

SEQ ID NO: 644292 - RNA, 19 nt, Artificial Sequence
  Description of Artificial Sequence: Synthetic oligonucleotide
  Sense strand starting at position 2565 of SEQ ID NO: 585493
agaucuuugugaucugaca

SEQ ID NO: 644293 - RNA, 19 nt, Artificial Sequence
  Description of Artificial Sequence: Synthetic oligonucleotide
  Antisense strand to SEQ ID NO: 644292
ugucagaucacaaagaucu

SEQ ID NO: 644294 - RNA, 19 nt, Artificial Sequence
  Description of Artificial Sequence: Synthetic oligonucleotide
  Sense strand starting at position 2596 of SEQ ID NO: 585493
gucaccuucuguuugucua

SEQ ID NO: 644295 - RNA, 19 nt, Artificial Sequence
  Description of Artificial Sequence: Synthetic oligonucleotide
  Antisense strand to SEQ ID NO: 644294
uagacaaacagaaggugac

SEQ ID NO: 644296 - RNA, 19 nt, Artificial Sequence
  Description of Artificial Sequence: Synthetic oligonucleotide
  Sense strand starting at position 2599 of SEQ ID NO: 585493
accuucuguuugucuauaa

SEQ ID NO: 644297 - RNA, 19 nt, Artificial Sequence
  Description of Artificial Sequence: Synthetic oligonucleotide
  Antisense strand to SEQ ID NO: 644296
uuauagacaaacagaaggu

SEQ ID NO: 644298 - RNA, 19 nt, Artificial Sequence
  Description of Artificial Sequence: Synthetic oligonucleotide
  Sense strand starting at position 2600 of SEQ ID NO: 585493
ccuucuguuugucuauaaa

SEQ ID NO: 644299 - RNA, 19 nt, Artificial Sequence
  Description of Artificial Sequence: Synthetic oligonucleotide
  Antisense strand to SEQ ID NO: 644298
uuuauagacaaacagaagg

SEQ ID NO: 644300 - RNA, 19 nt, Artificial Sequence
  Description of Artificial Sequence: Synthetic oligonucleotide
  Sense strand starting at position 2976 of SEQ ID NO: 585493
aagaauagauucgaaagga

SEQ ID NO: 644301 - RNA, 19 nt, Artificial Sequence
  Description of Artificial Sequence: Synthetic oligonucleotide
  Antisense strand to SEQ ID NO: 644300
uccuuucgaaucuauucuu

SEQ ID NO: 644302 - RNA, 19 nt, Artificial Sequence
  Description of Artificial Sequence: Synthetic oligonucleotide
  Sense strand starting at position 2999 of SEQ ID NO: 585493
aaauauauuuguggacuga

SEQ ID NO: 644303 - RNA, 19 nt, Artificial Sequence
  Description of Artificial Sequence: Synthetic oligonucleotide
  Antisense strand to SEQ ID NO: 644302
ucaguccacaaauauauuu

SEQ ID NO: 644304 - RNA, 19 nt, Artificial Sequence
  Description of Artificial Sequence: Synthetic oligonucleotide
  Sense strand starting at position 3347 of SEQ ID NO: 585493
caugauggcuaauugguua

SEQ ID NO: 644305 - RNA, 19 nt, Artificial Sequence
  Description of Artificial Sequence: Synthetic oligonucleotide
  Antisense strand to SEQ ID NO: 644304
uaaccaauuagccaucaug

SEQ ID NO: 644306 - RNA, 19 nt, Artificial Sequence
  Description of Artificial Sequence: Synthetic oligonucleotide
  Sense strand starting at position 3350 of SEQ ID NO: 585493
gauggcuaauugguuaauu

SEQ ID NO: 644307 - RNA, 19 nt, Artificial Sequence
  Description of Artificial Sequence: Synthetic oligonucleotide
  Antisense strand to SEQ ID NO: 644306
aauuaaccaauuagccauc

SEQ ID NO: 644308 - RNA, 19 nt, Artificial Sequence
  Description of Artificial Sequence: Synthetic oligonucleotide
  Sense strand starting at position 3351 of SEQ ID NO: 585493
auggcuaauugguuaauua

SEQ ID NO: 644309 - RNA, 19 nt, Artificial Sequence
  Description of Artificial Sequence: Synthetic oligonucleotide
  Antisense strand to SEQ ID NO: 644308
uaauuaaccaauuagccau

SEQ ID NO: 644310 - RNA, 19 nt, Artificial Sequence
  Description of Artificial Sequence: Synthetic oligonucleotide
  Sense strand starting at position 3352 of SEQ ID NO: 585493
uggcuaauugguuaauuag

SEQ ID NO: 644311 - RNA, 19 nt, Artificial Sequence
  Description of Artificial Sequence: Synthetic oligonucleotide
  Antisense strand to SEQ ID NO: 644310
cuaauuaaccaauuagcca

SEQ ID NO: 644312 - RNA, 19 nt, Artificial Sequence
  Description of Artificial Sequence: Synthetic oligonucleotide
  Sense strand starting at position 3355 of SEQ ID NO: 585493
cuaauugguuaauuagaag

SEQ ID NO: 644313 - RNA, 19 nt, Artificial Sequence
  Description of Artificial Sequence: Synthetic oligonucleotide
  Antisense strand to SEQ ID NO: 644312
cuucuaauuaaccaauuag

SEQ ID NO: 644314 - RNA, 19 nt, Artificial Sequence
  Description of Artificial Sequence: Synthetic oligonucleotide
  Sense strand starting at position 3367 of SEQ ID NO: 585493
uuagaagaaucgguugguu

SEQ ID NO: 644315 - RNA, 19 nt, Artificial Sequence
  Description of Artificial Sequence: Synthetic oligonucleotide
  Antisense strand to SEQ ID NO: 644314
aaccaaccgauucuucuaa

SEQ ID NO: 644316 - RNA, 19 nt, Artificial Sequence
  Description of Artificial Sequence: Synthetic oligonucleotide
  Sense strand starting at position 3370 of SEQ ID NO: 585493
gaagaaucgguugguugga

SEQ ID NO: 644317 - RNA, 19 nt, Artificial Sequence
  Description of Artificial Sequence: Synthetic oligonucleotide
  Antisense strand to SEQ ID NO: 644316
uccaaccaaccgauucuuc

SEQ ID NO: 644318 - RNA, 19 nt, Artificial Sequence
  Description of Artificial Sequence: Synthetic oligonucleotide
  Sense strand starting at position 3377 of SEQ ID NO: 585493
cgguugguuggagguuaaa

SEQ ID NO: 644319 - RNA, 19 nt, Artificial Sequence
  Description of Artificial Sequence: Synthetic oligonucleotide
  Antisense strand to SEQ ID NO: 644318
uuuaaccuccaaccaaccg

SEQ ID NO: 644320 - RNA, 19 nt, Artificial Sequence
  Description of Artificial Sequence: Synthetic oligonucleotide
  Sense strand starting at position 3388 of SEQ ID NO: 585493
agguuaaauguccagccuu

SEQ ID NO: 644321 - RNA, 19 nt, Artificial Sequence
  Description of Artificial Sequence: Synthetic oligonucleotide
  Antisense strand to SEQ ID NO: 644320
aaggcuggacauuuaaccu

SEQ ID NO: 644322 - RNA, 19 nt, Artificial Sequence
  Description of Artificial Sequence: Synthetic oligonucleotide
  Sense strand starting at position 3628 of SEQ ID NO: 585493
cugcuaauacacuggauau

SEQ ID NO: 644323 - RNA, 19 nt, Artificial Sequence
  Description of Artificial Sequence: Synthetic oligonucleotide
  Antisense strand to SEQ ID NO: 644322
auauccaguguauuagcag

SEQ ID NO: 644324 - RNA, 19 nt, Artificial Sequence
  Description of Artificial Sequence: Synthetic oligonucleotide
  Sense strand starting at position 3804 of SEQ ID NO: 585493
auauauugugugcaucagu

SEQ ID NO: 644325 - RNA, 19 nt, Artificial Sequence
  Description of Artificial Sequence: Synthetic oligonucleotide
  Antisense strand to SEQ ID NO: 644324
acugaugcacacaauauau

SEQ ID NO: 644326 - RNA, 19 nt, Artificial Sequence
  Description of Artificial Sequence: Synthetic oligonucleotide
  Sense strand starting at position 3809 of SEQ ID NO: 585493
uugugugcaucaguaauuu

SEQ ID NO: 644327 - RNA, 19 nt, Artificial Sequence
  Description of Artificial Sequence: Synthetic oligonucleotide
  Antisense strand to SEQ ID NO: 644326
aaauuacugaugcacacaa

SEQ ID NO: 644328 - RNA, 19 nt, Artificial Sequence
  Description of Artificial Sequence: Synthetic oligonucleotide
  Sense strand starting at position 354 of SEQ ID NO: 585494
ggccaaggaucucuuacuu

SEQ ID NO: 644329 - RNA, 19 nt, Artificial Sequence
  Description of Artificial Sequence: Synthetic oligonucleotide
  Antisense strand to SEQ ID NO: 644328
aaguaagagauccuuggcc

SEQ ID NO: 644330 - RNA, 19 nt, Artificial Sequence
  Description of Artificial Sequence: Synthetic oligonucleotide
  Sense strand starting at position 493 of SEQ ID NO: 585494
guguauuucuggccuuguu

SEQ ID NO: 644331 - RNA, 19 nt, Artificial Sequence
  Description of Artificial Sequence: Synthetic oligonucleotide
  Antisense strand to SEQ ID NO: 644330
aacaaggccagaaauacac

SEQ ID NO: 644332 - RNA, 19 nt, Artificial Sequence
  Description of Artificial Sequence: Synthetic oligonucleotide
  Sense strand starting at position 496 of SEQ ID NO: 585494
uauuucuggccuuguuaga

SEQ ID NO: 644333 - RNA, 19 nt, Artificial Sequence
  Description of Artificial Sequence: Synthetic oligonucleotide
  Antisense strand to SEQ ID NO: 644332
ucuaacaaggccagaaaua

SEQ ID NO: 644334 - RNA, 19 nt, Artificial Sequence
  Description of Artificial Sequence: Synthetic oligonucleotide
  Sense strand starting at position 510 of SEQ ID NO: 585494
uuagacuuguuucuaucuu

SEQ ID NO: 644335 - RNA, 19 nt, Artificial Sequence
  Description of Artificial Sequence: Synthetic oligonucleotide
  Antisense strand to SEQ ID NO: 644334
aagauagaaacaagucuaa

SEQ ID NO: 644336 - RNA, 19 nt, Artificial Sequence
  Description of Artificial Sequence: Synthetic oligonucleotide
  Sense strand starting at position 539 of SEQ ID NO: 585494
cccugaguguucucaucua

SEQ ID NO: 644337 - RNA, 19 nt, Artificial Sequence
  Description of Artificial Sequence: Synthetic oligonucleotide
  Antisense strand to SEQ ID NO: 644336
uagaugagaacacucaggg

SEQ ID NO: 644338 - RNA, 19 nt, Artificial Sequence
  Description of Artificial Sequence: Synthetic oligonucleotide
  Sense strand starting at position 582 of SEQ ID NO: 585494
acuguauaucucgagagcu

SEQ ID NO: 644339 - RNA, 19 nt, Artificial Sequence
  Description of Artificial Sequence: Synthetic oligonucleotide
  Antisense strand to SEQ ID NO: 644338
agcucucgagauauacagu

SEQ ID NO: 644340 - RNA, 19 nt, Artificial Sequence
  Description of Artificial Sequence: Synthetic oligonucleotide
  Sense strand starting at position 584 of SEQ ID NO: 585494
uguauaucucgagagcucu

SEQ ID NO: 644341 - RNA, 19 nt, Artificial Sequence
  Description of Artificial Sequence: Synthetic oligonucleotide
  Antisense strand to SEQ ID NO: 644340
agagcucucgagauauaca

SEQ ID NO: 644342 - RNA, 19 nt, Artificial Sequence
  Description of Artificial Sequence: Synthetic oligonucleotide
  Sense strand starting at position 896 of SEQ ID NO: 585494
gagucagaacuaugccuau

SEQ ID NO: 644343 - RNA, 19 nt, Artificial Sequence
  Description of Artificial Sequence: Synthetic oligonucleotide
  Antisense strand to SEQ ID NO: 644342
auaggcauaguucugacuc

SEQ ID NO: 644344 - RNA, 19 nt, Artificial Sequence
  Description of Artificial Sequence: Synthetic oligonucleotide
  Sense strand starting at position 970 of SEQ ID NO: 585494
agcguuucuggagaauacu

SEQ ID NO: 644345 - RNA, 19 nt, Artificial Sequence
  Description of Artificial Sequence: Synthetic oligonucleotide
  Antisense strand to SEQ ID NO: 644344
aguauucuccagaaacgcu

SEQ ID NO: 644346 - RNA, 19 nt, Artificial Sequence
  Description of Artificial Sequence: Synthetic oligonucleotide
  Sense strand starting at position 989 of SEQ ID NO: 585494
ccaauuuauccucagcgca

SEQ ID NO: 644347 - RNA, 19 nt, Artificial Sequence
  Description of Artificial Sequence: Synthetic oligonucleotide
  Antisense strand to SEQ ID NO: 644346
ugcgcugaggauaaauugg

SEQ ID NO: 644348 - RNA, 19 nt, Artificial Sequence
  Description of Artificial Sequence: Synthetic oligonucleotide
  Sense strand starting at position 1027 of SEQ ID NO: 585494
uuacaaagacgugaauucu

SEQ ID NO: 644349 - RNA, 19 nt, Artificial Sequence
  Description of Artificial Sequence: Synthetic oligonucleotide
  Antisense strand to SEQ ID NO: 644348
agaauucacgucuuuguaa

SEQ ID NO: 644350 - RNA, 19 nt, Artificial Sequence
  Description of Artificial Sequence: Synthetic oligonucleotide
  Sense strand starting at position 1106 of SEQ ID NO: 585494
cuugcaagguucuuaacua

SEQ ID NO: 644351 - RNA, 19 nt, Artificial Sequence
  Description of Artificial Sequence: Synthetic oligonucleotide
  Antisense strand to SEQ ID NO: 644350
uaguuaagaaccuugcaag

SEQ ID NO: 644352 - RNA, 19 nt, Artificial Sequence
  Description of Artificial Sequence: Synthetic oligonucleotide
  Sense strand starting at position 1212 of SEQ ID NO: 585494
cacguauaggucugagauu

SEQ ID NO: 644353 - RNA, 19 nt, Artificial Sequence
  Description of Artificial Sequence: Synthetic oligonucleotide
  Antisense strand to SEQ ID NO: 644352
aaucucagaccuauacgug

SEQ ID NO: 644354 - RNA, 19 nt, Artificial Sequence
  Description of Artificial Sequence: Synthetic oligonucleotide
  Sense strand starting at position 1223 of SEQ ID NO: 585494
cugagauucugaguccuaa

SEQ ID NO: 644355 - RNA, 19 nt, Artificial Sequence
  Description of Artificial Sequence: Synthetic oligonucleotide
  Antisense strand to SEQ ID NO: 644354
uuaggacucagaaucucag

SEQ ID NO: 644356 - RNA, 19 nt, Artificial Sequence
  Description of Artificial Sequence: Synthetic oligonucleotide
  Sense strand starting at position 2143 of SEQ ID NO: 585494
gaaagccucuugguaggua

SEQ ID NO: 644357 - RNA, 19 nt, Artificial Sequence
  Description of Artificial Sequence: Synthetic oligonucleotide
  Antisense strand to SEQ ID NO: 644356
uaccuaccaagaggcuuuc

SEQ ID NO: 644358 - RNA, 19 nt, Artificial Sequence
  Description of Artificial Sequence: Synthetic oligonucleotide
  Sense strand starting at position 2462 of SEQ ID NO: 585494
aggacuugauaaguguauu

SEQ ID NO: 644359 - RNA, 19 nt, Artificial Sequence
  Description of Artificial Sequence: Synthetic oligonucleotide
  Antisense strand to SEQ ID NO: 644358
aauacacuuaucaaguccu

SEQ ID NO: 644360 - RNA, 19 nt, Artificial Sequence
  Description of Artificial Sequence: Synthetic oligonucleotide
  Sense strand starting at position 2463 of SEQ ID NO: 585494
ggacuugauaaguguauua

SEQ ID NO: 644361 - RNA, 19 nt, Artificial Sequence
  Description of Artificial Sequence: Synthetic oligonucleotide
  Antisense strand to SEQ ID NO: 644360
uaauacacuuaucaagucc

SEQ ID NO: 644362 - RNA, 19 nt, Artificial Sequence
  Description of Artificial Sequence: Synthetic oligonucleotide
  Sense strand starting at position 2465 of SEQ ID NO: 585494
acuugauaaguguauuaug

SEQ ID NO: 644363 - RNA, 19 nt, Artificial Sequence
  Description of Artificial Sequence: Synthetic oligonucleotide
  Antisense strand to SEQ ID NO: 644362
cauaauacacuuaucaagu

SEQ ID NO: 644364 - RNA, 19 nt, Artificial Sequence
  Description of Artificial Sequence: Synthetic oligonucleotide
  Sense strand starting at position 2672 of SEQ ID NO: 585494
gauaucugccuccaggagu

SEQ ID NO: 644365 - RNA, 19 nt, Artificial Sequence
  Description of Artificial Sequence: Synthetic oligonucleotide
  Antisense strand to SEQ ID NO: 644364
acuccuggaggcagauauc

SEQ ID NO: 644366 - RNA, 19 nt, Artificial Sequence
  Description of Artificial Sequence: Synthetic oligonucleotide
  Sense strand starting at position 2801 of SEQ ID NO: 585494
agaaauaaauaugagggaa

SEQ ID NO: 644367 - RNA, 19 nt, Artificial Sequence
  Description of Artificial Sequence: Synthetic oligonucleotide
  Antisense strand to SEQ ID NO: 644366
uucccucauauuuauuucu

SEQ ID NO: 644368 - RNA, 19 nt, Artificial Sequence
  Description of Artificial Sequence: Synthetic oligonucleotide
  Sense strand starting at position 2902 of SEQ ID NO: 585494
cgucuacuaagugguauuu

SEQ ID NO: 644369 - RNA, 19 nt, Artificial Sequence
  Description of Artificial Sequence: Synthetic oligonucleotide
  Antisense strand to SEQ ID NO: 644368
aaauaccacuuaguagacg

SEQ ID NO: 644370 - RNA, 19 nt, Artificial Sequence
  Description of Artificial Sequence: Synthetic oligonucleotide
  Sense strand starting at position 2912 of SEQ ID NO: 585494
gugguauuucacuguugag

SEQ ID NO: 644371 - RNA, 19 nt, Artificial Sequence
  Description of Artificial Sequence: Synthetic oligonucleotide
  Antisense strand to SEQ ID NO: 644370
cucaacagugaaauaccac

SEQ ID NO: 644372 - RNA, 19 nt, Artificial Sequence
  Description of Artificial Sequence: Synthetic oligonucleotide
  Sense strand starting at position 2922 of SEQ ID NO: 585494
acuguugagagaggugaua

SEQ ID NO: 644373 - RNA, 19 nt, Artificial Sequence
  Description of Artificial Sequence: Synthetic oligonucleotide
  Antisense strand to SEQ ID NO: 644372
uaucaccucucucaacagu

SEQ ID NO: 644374 - RNA, 19 nt, Artificial Sequence
  Description of Artificial Sequence: Synthetic oligonucleotide
  Sense strand starting at position 2924 of SEQ ID NO: 585494
uguugagagaggugauaua

SEQ ID NO: 644375 - RNA, 19 nt, Artificial Sequence
  Description of Artificial Sequence: Synthetic oligonucleotide
  Antisense strand to SEQ ID NO: 644374
uauaucaccucucucaaca

SEQ ID NO: 644376 - RNA, 19 nt, Artificial Sequence
  Description of Artificial Sequence: Synthetic oligonucleotide
  Sense strand starting at position 2940 of SEQ ID NO: 585494
auauuagaaguacgaaacu

SEQ ID NO: 644377 - RNA, 19 nt, Artificial Sequence
  Description of Artificial Sequence: Synthetic oligonucleotide
  Antisense strand to SEQ ID NO: 644376
aguuucguacuucuaauau

SEQ ID NO: 644378 - RNA, 19 nt, Artificial Sequence
  Description of Artificial Sequence: Synthetic oligonucleotide
  Sense strand starting at position 2949 of SEQ ID NO: 585494
guacgaaacuucuaauuua

SEQ ID NO: 644379 - RNA, 19 nt, Artificial Sequence
  Description of Artificial Sequence: Synthetic oligonucleotide
  Antisense strand to SEQ ID NO: 644378
uaaauuagaaguuucguac

SEQ ID NO: 644380 - RNA, 19 nt, Artificial Sequence
  Description of Artificial Sequence: Synthetic oligonucleotide
  Sense strand starting at position 3024 of SEQ ID NO: 585494
uaggucaucuaaucgaaac

SEQ ID NO: 644381 - RNA, 19 nt, Artificial Sequence
  Description of Artificial Sequence: Synthetic oligonucleotide
  Antisense strand to SEQ ID NO: 644380
guuucgauuagaugaccua

SEQ ID NO: 644382 - RNA, 19 nt, Artificial Sequence
  Description of Artificial Sequence: Synthetic oligonucleotide
  Sense strand starting at position 3037 of SEQ ID NO: 585494
cgaaacuguuaaguauaaa

SEQ ID NO: 644383 - RNA, 19 nt, Artificial Sequence
  Description of Artificial Sequence: Synthetic oligonucleotide
  Antisense strand to SEQ ID NO: 644382
uuuauacuuaacaguuucg

SEQ ID NO: 644384 - RNA, 19 nt, Artificial Sequence
  Description of Artificial Sequence: Synthetic oligonucleotide
  Sense strand starting at position 3096 of SEQ ID NO: 585494
aucucuuagcacgauaaca

SEQ ID NO: 644385 - RNA, 19 nt, Artificial Sequence
  Description of Artificial Sequence: Synthetic oligonucleotide
  Antisense strand to SEQ ID NO: 644384
uguuaucgugcuaagagau

SEQ ID NO: 644386 - RNA, 19 nt, Artificial Sequence
  Description of Artificial Sequence: Synthetic oligonucleotide
  Sense strand starting at position 3098 of SEQ ID NO: 585494
cucuuagcacgauaacaaa

SEQ ID NO: 644387 - RNA, 19 nt, Artificial Sequence
  Description of Artificial Sequence: Synthetic oligonucleotide
  Antisense strand to SEQ ID NO: 644386
uuuguuaucgugcuaagag

SEQ ID NO: 644388 - RNA, 19 nt, Artificial Sequence
  Description of Artificial Sequence: Synthetic oligonucleotide
  Sense strand starting at position 3351 of SEQ ID NO: 585494
gucugaacuuaacuuugaa

SEQ ID NO: 644389 - RNA, 19 nt, Artificial Sequence
  Description of Artificial Sequence: Synthetic oligonucleotide
  Antisense strand to SEQ ID NO: 644388
uucaaaguuaaguucagac

SEQ ID NO: 644390 - RNA, 19 nt, Artificial Sequence
  Description of Artificial Sequence: Synthetic oligonucleotide
  Sense strand starting at position 3389 of SEQ ID NO: 585494
uggugagaaucacuugaac

SEQ ID NO: 644391 - RNA, 19 nt, Artificial Sequence
  Description of Artificial Sequence: Synthetic oligonucleotide
  Antisense strand to SEQ ID NO: 644390
guucaagugauucucacca

SEQ ID NO: 644392 - RNA, 19 nt, Artificial Sequence
  Description of Artificial Sequence: Synthetic oligonucleotide
  Sense strand starting at position 3403 of SEQ ID NO: 585494
ugaacucaacaugguauau

SEQ ID NO: 644393 - RNA, 19 nt, Artificial Sequence
  Description of Artificial Sequence: Synthetic oligonucleotide
  Antisense strand to SEQ ID NO: 644392
auauaccauguugaguuca

SEQ ID NO: 644394 - RNA, 19 nt, Artificial Sequence
  Description of Artificial Sequence: Synthetic oligonucleotide
  Sense strand starting at position 3425 of SEQ ID NO: 585494
ucaguugaguucucagaac

SEQ ID NO: 644395 - RNA, 19 nt, Artificial Sequence
  Description of Artificial Sequence: Synthetic oligonucleotide
  Antisense strand to SEQ ID NO: 644394
guucugagaacucaacuga

SEQ ID NO: 644396 - RNA, 19 nt, Artificial Sequence
  Description of Artificial Sequence: Synthetic oligonucleotide
  Sense strand starting at position 3639 of SEQ ID NO: 585494
aaggauacauuguugaauu

SEQ ID NO: 644397 - RNA, 19 nt, Artificial Sequence
  Description of Artificial Sequence: Synthetic oligonucleotide
  Antisense strand to SEQ ID NO: 644396
aauucaacaauguauccuu

SEQ ID NO: 644398 - RNA, 19 nt, Artificial Sequence
  Description of Artificial Sequence: Synthetic oligonucleotide
  Sense strand starting at position 3678 of SEQ ID NO: 585494
uuaagaaagucaguguaau

SEQ ID NO: 644399 - RNA, 19 nt, Artificial Sequence
  Description of Artificial Sequence: Synthetic oligonucleotide
  Antisense strand to SEQ ID NO: 644398
auuacacugacuuucuuaa

SEQ ID NO: 644400 - RNA, 19 nt, Artificial Sequence
  Description of Artificial Sequence: Synthetic oligonucleotide
  Sense strand starting at position 3679 of SEQ ID NO: 585494
uaagaaagucaguguaaug

SEQ ID NO: 644401 - RNA, 19 nt, Artificial Sequence
  Description of Artificial Sequence: Synthetic oligonucleotide
  Antisense strand to SEQ ID NO: 644400
cauuacacugacuuucuua

SEQ ID NO: 644402 - RNA, 19 nt, Artificial Sequence
  Description of Artificial Sequence: Synthetic oligonucleotide
  Sense strand starting at position 3688 of SEQ ID NO: 585494
caguguaaugcauaugcau

SEQ ID NO: 644403 - RNA, 19 nt, Artificial Sequence
  Description of Artificial Sequence: Synthetic oligonucleotide
  Antisense strand to SEQ ID NO: 644402
augcauaugcauuacacug

SEQ ID NO: 644404 - RNA, 19 nt, Artificial Sequence
  Description of Artificial Sequence: Synthetic oligonucleotide
  Sense strand starting at position 3782 of SEQ ID NO: 585494
aaaccuauaguucgagacu

SEQ ID NO: 644405 - RNA, 19 nt, Artificial Sequence
  Description of Artificial Sequence: Synthetic oligonucleotide
  Antisense strand to SEQ ID NO: 644404
agucucgaacuauagguuu

SEQ ID NO: 644406 - RNA, 19 nt, Artificial Sequence
  Description of Artificial Sequence: Synthetic oligonucleotide
  Sense strand starting at position 3785 of SEQ ID NO: 585494
ccuauaguucgagacuucu

SEQ ID NO: 644407 - RNA, 19 nt, Artificial Sequence
  Description of Artificial Sequence: Synthetic oligonucleotide
  Antisense strand to SEQ ID NO: 644406
agaagucucgaacuauagg

SEQ ID NO: 644408 - RNA, 19 nt, Artificial Sequence
  Description of Artificial Sequence: Synthetic oligonucleotide
  Sense strand starting at position 41 of SEQ ID NO: 585495
ggauaaggccuuuaguggu

SEQ ID NO: 644409 - RNA, 19 nt, Artificial Sequence
  Description of Artificial Sequence: Synthetic oligonucleotide
  Antisense strand to SEQ ID NO: 644408
accacuaaaggccuuaucc

SEQ ID NO: 644410 - RNA, 19 nt, Artificial Sequence
  Description of Artificial Sequence: Synthetic oligonucleotide
  Sense strand starting at position 54 of SEQ ID NO: 585495
agugguaauuuccaauauu

SEQ ID NO: 644411 - RNA, 19 nt, Artificial Sequence
  Description of Artificial Sequence: Synthetic oligonucleotide
  Antisense strand to SEQ ID NO: 644410
aauauuggaaauuaccacu

SEQ ID NO: 644412 - RNA, 19 nt, Artificial Sequence
  Description of Artificial Sequence: Synthetic oligonucleotide
  Sense strand starting at position 104 of SEQ ID NO: 585495
gguaccuaauguguaguau

SEQ ID NO: 644413 - RNA, 19 nt, Artificial Sequence
  Description of Artificial Sequence: Synthetic oligonucleotide
  Antisense strand to SEQ ID NO: 644412
auacuacacauuagguacc

SEQ ID NO: 644414 - RNA, 19 nt, Artificial Sequence
  Description of Artificial Sequence: Synthetic oligonucleotide
  Sense strand starting at position 151 of SEQ ID NO: 585495
ccucuaauucgccaaaguu

SEQ ID NO: 644415 - RNA, 19 nt, Artificial Sequence
  Description of Artificial Sequence: Synthetic oligonucleotide
  Antisense strand to SEQ ID NO: 644414
aacuuuggcgaauuagagg

SEQ ID NO: 644416 - RNA, 19 nt, Artificial Sequence
  Description of Artificial Sequence: Synthetic oligonucleotide
  Sense strand starting at position 507 of SEQ ID NO: 585495
gagacuucuggaugaagug

SEQ ID NO: 644417 - RNA, 19 nt, Artificial Sequence
  Description of Artificial Sequence: Synthetic oligonucleotide
  Antisense strand to SEQ ID NO: 644416
cacuucauccagaagucuc

SEQ ID NO: 644418 - RNA, 19 nt, Artificial Sequence
  Description of Artificial Sequence: Synthetic oligonucleotide
  Sense strand starting at position 1037 of SEQ ID NO: 585495
ucaugaacucuuggcauaa

SEQ ID NO: 644419 - RNA, 19 nt, Artificial Sequence
  Description of Artificial Sequence: Synthetic oligonucleotide
  Antisense strand to SEQ ID NO: 644418
uuaugccaagaguucauga

SEQ ID NO: 644420 - RNA, 19 nt, Artificial Sequence
  Description of Artificial Sequence: Synthetic oligonucleotide
  Sense strand starting at position 1055 of SEQ ID NO: 585495
agccaaugucuagaggagu

SEQ ID NO: 644421 - RNA, 19 nt, Artificial Sequence
  Description of Artificial Sequence: Synthetic oligonucleotide
  Antisense strand to SEQ ID NO: 644420
acuccucuagacauuggcu

SEQ ID NO: 644422 - RNA, 19 nt, Artificial Sequence
  Description of Artificial Sequence: Synthetic oligonucleotide
  Sense strand starting at position 1142 of SEQ ID NO: 585495
acauuuguauagggugaga

SEQ ID NO: 644423 - RNA, 19 nt, Artificial Sequence
  Description of Artificial Sequence: Synthetic oligonucleotide
  Antisense strand to SEQ ID NO: 644422
ucucacccuauacaaaugu

SEQ ID NO: 644424 - RNA, 19 nt, Artificial Sequence
  Description of Artificial Sequence: Synthetic oligonucleotide
  Sense strand starting at position 1265 of SEQ ID NO: 585495
auuucugaguuccagcaau

SEQ ID NO: 644425 - RNA, 19 nt, Artificial Sequence
  Description of Artificial Sequence: Synthetic oligonucleotide
  Antisense strand to SEQ ID NO: 644424
auugcuggaacucagaaau

SEQ ID NO: 644426 - RNA, 19 nt, Artificial Sequence
  Description of Artificial Sequence: Synthetic oligonucleotide
  Sense strand starting at position 1436 of SEQ ID NO: 585495
cucucaaaccacugggauu

SEQ ID NO: 644427 - RNA, 19 nt, Artificial Sequence
  Description of Artificial Sequence: Synthetic oligonucleotide
  Antisense strand to SEQ ID NO: 644426
aaucccagugguuugagag

SEQ ID NO: 644428 - RNA, 19 nt, Artificial Sequence
  Description of Artificial Sequence: Synthetic oligonucleotide
  Sense strand starting at position 2015 of SEQ ID NO: 585495
uuacauauggcuugcuaau

SEQ ID NO: 644429 - RNA, 19 nt, Artificial Sequence
  Description of Artificial Sequence: Synthetic oligonucleotide
  Antisense strand to SEQ ID NO: 644428
auuagcaagccauauguaa

SEQ ID NO: 644430 - RNA, 19 nt, Artificial Sequence
  Description of Artificial Sequence: Synthetic oligonucleotide
  Sense strand starting at position 2109 of SEQ ID NO: 585495
ggcuguaaguauuuggcau

SEQ ID NO: 644431 - RNA, 19 nt, Artificial Sequence
  Description of Artificial Sequence: Synthetic oligonucleotide
  Antisense strand to SEQ ID NO: 644430
augccaaauacuuacagcc

SEQ ID NO: 644432 - RNA, 19 nt, Artificial Sequence
  Description of Artificial Sequence: Synthetic oligonucleotide
  Sense strand starting at position 2110 of SEQ ID NO: 585495
gcuguaaguauuuggcauc

SEQ ID NO: 644433 - RNA, 19 nt, Artificial Sequence
  Description of Artificial Sequence: Synthetic oligonucleotide
  Antisense strand to SEQ ID NO: 644432
gaugccaaauacuuacagc

SEQ ID NO: 644434 - RNA, 19 nt, Artificial Sequence
  Description of Artificial Sequence: Synthetic oligonucleotide
  Sense strand starting at position 2197 of SEQ ID NO: 585495
guaaacuaguuaguauagu

SEQ ID NO: 644435 - RNA, 19 nt, Artificial Sequence
  Description of Artificial Sequence: Synthetic oligonucleotide
  Antisense strand to SEQ ID NO: 644434
acuauacuaacuaguuuac

SEQ ID NO: 644436 - RNA, 19 nt, Artificial Sequence
  Description of Artificial Sequence: Synthetic oligonucleotide
  Sense strand starting at position 2203 of SEQ ID NO: 585495
uaguuaguauaguuagaag

SEQ ID NO: 644437 - RNA, 19 nt, Artificial Sequence
  Description of Artificial Sequence: Synthetic oligonucleotide
  Antisense strand to SEQ ID NO: 644436
cuucuaacuauacuaacua

SEQ ID NO: 644438 - RNA, 19 nt, Artificial Sequence
  Description of Artificial Sequence: Synthetic oligonucleotide
  Sense strand starting at position 2211 of SEQ ID NO: 585495
auaguuagaaguugaguaa

SEQ ID NO: 644439 - RNA, 19 nt, Artificial Sequence
  Description of Artificial Sequence: Synthetic oligonucleotide
  Antisense strand to SEQ ID NO: 644438
uuacucaacuucuaacuau

SEQ ID NO: 644440 - RNA, 19 nt, Artificial Sequence
  Description of Artificial Sequence: Synthetic oligonucleotide
  Sense strand starting at position 2212 of SEQ ID NO: 585495
uaguuagaaguugaguaau

SEQ ID NO: 644441 - RNA, 19 nt, Artificial Sequence
  Description of Artificial Sequence: Synthetic oligonucleotide
  Antisense strand to SEQ ID NO: 644440
auuacucaacuucuaacua

SEQ ID NO: 644442 - RNA, 19 nt, Artificial Sequence
  Description of Artificial Sequence: Synthetic oligonucleotide
  Sense strand starting at position 2214 of SEQ ID NO: 585495
guuagaaguugaguaaugu

SEQ ID NO: 644443 - RNA, 19 nt, Artificial Sequence
  Description of Artificial Sequence: Synthetic oligonucleotide
  Antisense strand to SEQ ID NO: 644442
acauuacucaacuucuaac

SEQ ID NO: 644444 - RNA, 19 nt, Artificial Sequence
  Description of Artificial Sequence: Synthetic oligonucleotide
  Sense strand starting at position 2215 of SEQ ID NO: 585495
uuagaaguugaguaaugug

SEQ ID NO: 644445 - RNA, 19 nt, Artificial Sequence
  Description of Artificial Sequence: Synthetic oligonucleotide
  Antisense strand to SEQ ID NO: 644444
cacauuacucaacuucuaa

SEQ ID NO: 644446 - RNA, 19 nt, Artificial Sequence
  Description of Artificial Sequence: Synthetic oligonucleotide
  Sense strand starting at position 2220 of SEQ ID NO: 585495
aguugaguaaugugauacu

SEQ ID NO: 644447 - RNA, 19 nt, Artificial Sequence
  Description of Artificial Sequence: Synthetic oligonucleotide
  Antisense strand to SEQ ID NO: 644446
aguaucacauuacucaacu

SEQ ID NO: 644448 - RNA, 19 nt, Artificial Sequence
  Description of Artificial Sequence: Synthetic oligonucleotide
  Sense strand starting at position 2231 of SEQ ID NO: 585495
gugauacuuccagguuugu

SEQ ID NO: 644449 - RNA, 19 nt, Artificial Sequence
  Description of Artificial Sequence: Synthetic oligonucleotide
  Antisense strand to SEQ ID NO: 644448
acaaaccuggaaguaucac

SEQ ID NO: 644450 - RNA, 19 nt, Artificial Sequence
  Description of Artificial Sequence: Synthetic oligonucleotide
  Sense strand starting at position 2657 of SEQ ID NO: 585495
gaaugaugaugggcauacu

SEQ ID NO: 644451 - RNA, 19 nt, Artificial Sequence
  Description of Artificial Sequence: Synthetic oligonucleotide
  Antisense strand to SEQ ID NO: 644450
aguaugcccaucaucauuc

SEQ ID NO: 644452 - RNA, 19 nt, Artificial Sequence
  Description of Artificial Sequence: Synthetic oligonucleotide
  Sense strand starting at position 2679 of SEQ ID NO: 585495
augguauugcagugaaucu

SEQ ID NO: 644453 - RNA, 19 nt, Artificial Sequence
  Description of Artificial Sequence: Synthetic oligonucleotide
  Antisense strand to SEQ ID NO: 644452
agauucacugcaauaccau

SEQ ID NO: 644454 - RNA, 19 nt, Artificial Sequence
  Description of Artificial Sequence: Synthetic oligonucleotide
  Sense strand starting at position 2689 of SEQ ID NO: 585495
agugaaucuguguauugcu

SEQ ID NO: 644455 - RNA, 19 nt, Artificial Sequence
  Description of Artificial Sequence: Synthetic oligonucleotide
  Antisense strand to SEQ ID NO: 644454
agcaauacacagauucacu

SEQ ID NO: 644456 - RNA, 19 nt, Artificial Sequence
  Description of Artificial Sequence: Synthetic oligonucleotide
  Sense strand starting at position 2834 of SEQ ID NO: 585495
uuuacuuccuuaguuaagu

SEQ ID NO: 644457 - RNA, 19 nt, Artificial Sequence
  Description of Artificial Sequence: Synthetic oligonucleotide
  Antisense strand to SEQ ID NO: 644456
acuuaacuaaggaaguaaa

SEQ ID NO: 644458 - RNA, 19 nt, Artificial Sequence
  Description of Artificial Sequence: Synthetic oligonucleotide
  Sense strand starting at position 2835 of SEQ ID NO: 585495
uuacuuccuuaguuaagua

SEQ ID NO: 644459 - RNA, 19 nt, Artificial Sequence
  Description of Artificial Sequence: Synthetic oligonucleotide
  Antisense strand to SEQ ID NO: 644458
uacuuaacuaaggaaguaa

SEQ ID NO: 644460 - RNA, 19 nt, Artificial Sequence
  Description of Artificial Sequence: Synthetic oligonucleotide
  Sense strand starting at position 2923 of SEQ ID NO: 585495
ucaucauuguugguguaca

SEQ ID NO: 644461 - RNA, 19 nt, Artificial Sequence
  Description of Artificial Sequence: Synthetic oligonucleotide
  Antisense strand to SEQ ID NO: 644460
uguacaccaacaaugauga

SEQ ID NO: 644462 - RNA, 19 nt, Artificial Sequence
  Description of Artificial Sequence: Synthetic oligonucleotide
  Sense strand starting at position 3621 of SEQ ID NO: 585495
gggugauacuggcucuaua

SEQ ID NO: 644463 - RNA, 19 nt, Artificial Sequence
  Description of Artificial Sequence: Synthetic oligonucleotide
  Antisense strand to SEQ ID NO: 644462
uauagagccaguaucaccc

SEQ ID NO: 644464 - RNA, 19 nt, Artificial Sequence
  Description of Artificial Sequence: Synthetic oligonucleotide
  Sense strand starting at position 3683 of SEQ ID NO: 585495
ucaguaagauugguacuga

SEQ ID NO: 644465 - RNA, 19 nt, Artificial Sequence
  Description of Artificial Sequence: Synthetic oligonucleotide
  Antisense strand to SEQ ID NO: 644464
ucaguaccaaucuuacuga

SEQ ID NO: 644466 - RNA, 19 nt, Artificial Sequence
  Description of Artificial Sequence: Synthetic oligonucleotide
  Sense strand starting at position 3709 of SEQ ID NO: 585495
uugaaugucucauugaauu

SEQ ID NO: 644467 - RNA, 19 nt, Artificial Sequence
  Description of Artificial Sequence: Synthetic oligonucleotide
  Antisense strand to SEQ ID NO: 644466
aauucaaugagacauucaa

SEQ ID NO: 644468 - RNA, 19 nt, Artificial Sequence
  Description of Artificial Sequence: Synthetic oligonucleotide
  Sense strand starting at position 3719 of SEQ ID NO: 585495
cauugaauuuagcugugca

SEQ ID NO: 644469 - RNA, 19 nt, Artificial Sequence
  Description of Artificial Sequence: Synthetic oligonucleotide
  Antisense strand to SEQ ID NO: 644468
ugcacagcuaaauucaaug

SEQ ID NO: 644470 - RNA, 19 nt, Artificial Sequence
  Description of Artificial Sequence: Synthetic oligonucleotide
  Sense strand starting at position 3735 of SEQ ID NO: 585495
gcauccaucugguccugaa

SEQ ID NO: 644471 - RNA, 19 nt, Artificial Sequence
  Description of Artificial Sequence: Synthetic oligonucleotide
  Antisense strand to SEQ ID NO: 644470
uucaggaccagauggaugc

SEQ ID NO: 644472 - RNA, 19 nt, Artificial Sequence
  Description of Artificial Sequence: Synthetic oligonucleotide
  Sense strand starting at position 3846 of SEQ ID NO: 585495
cuaggagaguuggauauuu

SEQ ID NO: 644473 - RNA, 19 nt, Artificial Sequence
  Description of Artificial Sequence: Synthetic oligonucleotide
  Antisense strand to SEQ ID NO: 644472
aaauauccaacucuccuag

SEQ ID NO: 644474 - RNA, 19 nt, Artificial Sequence
  Description of Artificial Sequence: Synthetic oligonucleotide
  Sense strand starting at position 3894 of SEQ ID NO: 585495
ucuaguuugugcucauaaa

SEQ ID NO: 644475 - RNA, 19 nt, Artificial Sequence
  Description of Artificial Sequence: Synthetic oligonucleotide
  Antisense strand to SEQ ID NO: 644474
uuuaugagcacaaacuaga

SEQ ID NO: 644476 - RNA, 19 nt, Artificial Sequence
  Description of Artificial Sequence: Synthetic oligonucleotide
  Sense strand starting at position 3895 of SEQ ID NO: 585495
cuaguuugugcucauaaag

SEQ ID NO: 644477 - RNA, 19 nt, Artificial Sequence
  Description of Artificial Sequence: Synthetic oligonucleotide
  Antisense strand to SEQ ID NO: 644476
cuuuaugagcacaaacuag

SEQ ID NO: 644478 - RNA, 19 nt, Artificial Sequence
  Description of Artificial Sequence: Synthetic oligonucleotide
  Sense strand starting at position 3906 of SEQ ID NO: 585495
ucauaaagguguuuguagu

SEQ ID NO: 644479 - RNA, 19 nt, Artificial Sequence
  Description of Artificial Sequence: Synthetic oligonucleotide
  Antisense strand to SEQ ID NO: 644478
acuacaaacaccuuuauga

SEQ ID NO: 644480 - RNA, 19 nt, Artificial Sequence
  Description of Artificial Sequence: Synthetic oligonucleotide
  Sense strand starting at position 3919 of SEQ ID NO: 585495
uguaguagccuuggacaau

SEQ ID NO: 644481 - RNA, 19 nt, Artificial Sequence
  Description of Artificial Sequence: Synthetic oligonucleotide
  Antisense strand to SEQ ID NO: 644480
auuguccaaggcuacuaca

SEQ ID NO: 644482 - RNA, 19 nt, Artificial Sequence
  Description of Artificial Sequence: Synthetic oligonucleotide
  Sense strand starting at position 3928 of SEQ ID NO: 585495
cuuggacaauccguuugua

SEQ ID NO: 644483 - RNA, 19 nt, Artificial Sequence
  Description of Artificial Sequence: Synthetic oligonucleotide
  Antisense strand to SEQ ID NO: 644482
uacaaacggauuguccaag

SEQ ID NO: 644484 - RNA, 19 nt, Artificial Sequence
  Description of Artificial Sequence: Synthetic oligonucleotide
  Sense strand starting at position 3931 of SEQ ID NO: 585495
ggacaauccguuuguauuu

SEQ ID NO: 644485 - RNA, 19 nt, Artificial Sequence
  Description of Artificial Sequence: Synthetic oligonucleotide
  Antisense strand to SEQ ID NO: 644484
aaauacaaacggauugucc

SEQ ID NO: 644486 - RNA, 19 nt, Artificial Sequence
  Description of Artificial Sequence: Synthetic oligonucleotide
  Sense strand starting at position 3938 of SEQ ID NO: 585495
ccguuuguauuucugugau

SEQ ID NO: 644487 - RNA, 19 nt, Artificial Sequence
  Description of Artificial Sequence: Synthetic oligonucleotide
  Antisense strand to SEQ ID NO: 644486
aucacagaaauacaaacgg

SEQ ID NO: 644488 - RNA, 19 nt, Artificial Sequence
  Description of Artificial Sequence: Synthetic oligonucleotide
  Sense strand starting at position 95 of SEQ ID NO: 585496
ucugcuaugcaagauacaa

SEQ ID NO: 644489 - RNA, 19 nt, Artificial Sequence
  Description of Artificial Sequence: Synthetic oligonucleotide
  Antisense strand to SEQ ID NO: 644488
uuguaucuugcauagcaga

SEQ ID NO: 644490 - RNA, 19 nt, Artificial Sequence
  Description of Artificial Sequence: Synthetic oligonucleotide
  Sense strand starting at position 332 of SEQ ID NO: 585496
ggagucugcauguacaaca

SEQ ID NO: 644491 - RNA, 19 nt, Artificial Sequence
  Description of Artificial Sequence: Synthetic oligonucleotide
  Antisense strand to SEQ ID NO: 644490
uguuguacaugcagacucc

SEQ ID NO: 644492 - RNA, 19 nt, Artificial Sequence
  Description of Artificial Sequence: Synthetic oligonucleotide
  Sense strand starting at position 389 of SEQ ID NO: 585496
ccuugaucacuauggccaa

SEQ ID NO: 644493 - RNA, 19 nt, Artificial Sequence
  Description of Artificial Sequence: Synthetic oligonucleotide
  Antisense strand to SEQ ID NO: 644492
uuggccauagugaucaagg

SEQ ID NO: 644494 - RNA, 19 nt, Artificial Sequence
  Description of Artificial Sequence: Synthetic oligonucleotide
  Sense strand starting at position 409 of SEQ ID NO: 585496
gcuagagaagaacgaguua

SEQ ID NO: 644495 - RNA, 19 nt, Artificial Sequence
  Description of Artificial Sequence: Synthetic oligonucleotide
  Antisense strand to SEQ ID NO: 644494
uaacucguucuucucuagc

SEQ ID NO: 644496 - RNA, 19 nt, Artificial Sequence
  Description of Artificial Sequence: Synthetic oligonucleotide
  Sense strand starting at position 456 of SEQ ID NO: 585496
aggaauaagggcuguaaac

SEQ ID NO: 644497 - RNA, 19 nt, Artificial Sequence
  Description of Artificial Sequence: Synthetic oligonucleotide
  Antisense strand to SEQ ID NO: 644496
guuuacagcccuuauuccu

SEQ ID NO: 644498 - RNA, 19 nt, Artificial Sequence
  Description of Artificial Sequence: Synthetic oligonucleotide
  Sense strand starting at position 513 of SEQ ID NO: 585496
gaggcuuggcuggaguuaa

SEQ ID NO: 644499 - RNA, 19 nt, Artificial Sequence
  Description of Artificial Sequence: Synthetic oligonucleotide
  Antisense strand to SEQ ID NO: 644498
uuaacuccagccaagccuc

SEQ ID NO: 644500 - RNA, 19 nt, Artificial Sequence
  Description of Artificial Sequence: Synthetic oligonucleotide
  Sense strand starting at position 523 of SEQ ID NO: 585496
uggaguuaagguuauguca

SEQ ID NO: 644501 - RNA, 19 nt, Artificial Sequence
  Description of Artificial Sequence: Synthetic oligonucleotide
  Antisense strand to SEQ ID NO: 644500
ugacauaaccuuaacucca

SEQ ID NO: 644502 - RNA, 19 nt, Artificial Sequence
  Description of Artificial Sequence: Synthetic oligonucleotide
  Sense strand starting at position 602 of SEQ ID NO: 585496
ggaagcugacgaggaauua

SEQ ID NO: 644503 - RNA, 19 nt, Artificial Sequence
  Description of Artificial Sequence: Synthetic oligonucleotide
  Antisense strand to SEQ ID NO: 644502
uaauuccucgucagcuucc

SEQ ID NO: 644504 - RNA, 19 nt, Artificial Sequence
  Description of Artificial Sequence: Synthetic oligonucleotide
  Sense strand starting at position 634 of SEQ ID NO: 585496
gagagaaauugaguuugua

SEQ ID NO: 644505 - RNA, 19 nt, Artificial Sequence
  Description of Artificial Sequence: Synthetic oligonucleotide
  Antisense strand to SEQ ID NO: 644504
uacaaacucaauuucucuc

SEQ ID NO: 644506 - RNA, 19 nt, Artificial Sequence
  Description of Artificial Sequence: Synthetic oligonucleotide
  Sense strand starting at position 637 of SEQ ID NO: 585496
agaaauugaguuuguagaa

SEQ ID NO: 644507 - RNA, 19 nt, Artificial Sequence
  Description of Artificial Sequence: Synthetic oligonucleotide
  Antisense strand to SEQ ID NO: 644506
uucuacaaacucaauuucu

SEQ ID NO: 644508 - RNA, 19 nt, Artificial Sequence
  Description of Artificial Sequence: Synthetic oligonucleotide
  Sense strand starting at position 638 of SEQ ID NO: 585496
gaaauugaguuuguagaau

SEQ ID NO: 644509 - RNA, 19 nt, Artificial Sequence
  Description of Artificial Sequence: Synthetic oligonucleotide
  Antisense strand to SEQ ID NO: 644508
auucuacaaacucaauuuc

SEQ ID NO: 644510 - RNA, 19 nt, Artificial Sequence
  Description of Artificial Sequence: Synthetic oligonucleotide
  Sense strand starting at position 654 of SEQ ID NO: 585496
aauauagaagagugguauu

SEQ ID NO: 644511 - RNA, 19 nt, Artificial Sequence
  Description of Artificial Sequence: Synthetic oligonucleotide
  Antisense strand to SEQ ID NO: 644510
aauaccacucuucuauauu

SEQ ID NO: 644512 - RNA, 19 nt, Artificial Sequence
  Description of Artificial Sequence: Synthetic oligonucleotide
  Sense strand starting at position 1479 of SEQ ID NO: 585496
aaauguaggcaaugugaga

SEQ ID NO: 644513 - RNA, 19 nt, Artificial Sequence
  Description of Artificial Sequence: Synthetic oligonucleotide
  Antisense strand to SEQ ID NO: 644512
ucucacauugccuacauuu

SEQ ID NO: 644514 - RNA, 19 nt, Artificial Sequence
  Description of Artificial Sequence: Synthetic oligonucleotide
  Sense strand starting at position 1577 of SEQ ID NO: 585496
ugaugauccucacucuaug

SEQ ID NO: 644515 - RNA, 19 nt, Artificial Sequence
  Description of Artificial Sequence: Synthetic oligonucleotide
  Antisense strand to SEQ ID NO: 644514
cauagagugaggaucauca

SEQ ID NO: 644516 - RNA, 19 nt, Artificial Sequence
  Description of Artificial Sequence: Synthetic oligonucleotide
  Sense strand starting at position 1582 of SEQ ID NO: 585496
auccucacucuauggaaga

SEQ ID NO: 644517 - RNA, 19 nt, Artificial Sequence
  Description of Artificial Sequence: Synthetic oligonucleotide
  Antisense strand to SEQ ID NO: 644516
ucuuccauagagugaggau

SEQ ID NO: 644518 - RNA, 19 nt, Artificial Sequence
  Description of Artificial Sequence: Synthetic oligonucleotide
  Sense strand starting at position 2022 of SEQ ID NO: 585496
cuucauauggucugaggag

SEQ ID NO: 644519 - RNA, 19 nt, Artificial Sequence
  Description of Artificial Sequence: Synthetic oligonucleotide
  Antisense strand to SEQ ID NO: 644518
cuccucagaccauaugaag

SEQ ID NO: 644520 - RNA, 19 nt, Artificial Sequence
  Description of Artificial Sequence: Synthetic oligonucleotide
  Sense strand starting at position 2210 of SEQ ID NO: 585496
ggagaucaugguugucaga

SEQ ID NO: 644521 - RNA, 19 nt, Artificial Sequence
  Description of Artificial Sequence: Synthetic oligonucleotide
  Antisense strand to SEQ ID NO: 644520
ucugacaaccaugaucucc

SEQ ID NO: 644522 - RNA, 19 nt, Artificial Sequence
  Description of Artificial Sequence: Synthetic oligonucleotide
  Sense strand starting at position 2319 of SEQ ID NO: 585496
cugcuuuagcaugaaagaa

SEQ ID NO: 644523 - RNA, 19 nt, Artificial Sequence
  Description of Artificial Sequence: Synthetic oligonucleotide
  Antisense strand to SEQ ID NO: 644522
uucuuucaugcuaaagcag

SEQ ID NO: 644524 - RNA, 19 nt, Artificial Sequence
  Description of Artificial Sequence: Synthetic oligonucleotide
  Sense strand starting at position 2387 of SEQ ID NO: 585496
acaguaauaggugacgcaa

SEQ ID NO: 644525 - RNA, 19 nt, Artificial Sequence
  Description of Artificial Sequence: Synthetic oligonucleotide
  Antisense strand to SEQ ID NO: 644524
uugcgucaccuauuacugu

SEQ ID NO: 644526 - RNA, 19 nt, Artificial Sequence
  Description of Artificial Sequence: Synthetic oligonucleotide
  Sense strand starting at position 2456 of SEQ ID NO: 585496
aauggaguauuacugagua

SEQ ID NO: 644527 - RNA, 19 nt, Artificial Sequence
  Description of Artificial Sequence: Synthetic oligonucleotide
  Antisense strand to SEQ ID NO: 644526
uacucaguaauacuccauu

SEQ ID NO: 644528 - RNA, 19 nt, Artificial Sequence
  Description of Artificial Sequence: Synthetic oligonucleotide
  Sense strand starting at position 2458 of SEQ ID NO: 585496
uggaguauuacugaguaug

SEQ ID NO: 644529 - RNA, 19 nt, Artificial Sequence
  Description of Artificial Sequence: Synthetic oligonucleotide
  Antisense strand to SEQ ID NO: 644528
cauacucaguaauacucca

SEQ ID NO: 644530 - RNA, 19 nt, Artificial Sequence
  Description of Artificial Sequence: Synthetic oligonucleotide
  Sense strand starting at position 2586 of SEQ ID NO: 585496
gagggugugggagaguauu

SEQ ID NO: 644531 - RNA, 19 nt, Artificial Sequence
  Description of Artificial Sequence: Synthetic oligonucleotide
  Antisense strand to SEQ ID NO: 644530
aauacucucccacacccuc

SEQ ID NO: 644532 - RNA, 19 nt, Artificial Sequence
  Description of Artificial Sequence: Synthetic oligonucleotide
  Sense strand starting at position 2589 of SEQ ID NO: 585496
ggugugggagaguauugaa

SEQ ID NO: 644533 - RNA, 19 nt, Artificial Sequence
  Description of Artificial Sequence: Synthetic oligonucleotide
  Antisense strand to SEQ ID NO: 644532
uucaauacucucccacacc

SEQ ID NO: 644534 - RNA, 19 nt, Artificial Sequence
  Description of Artificial Sequence: Synthetic oligonucleotide
  Sense strand starting at position 3066 of SEQ ID NO: 585496
ccugacugugggugacaua

SEQ ID NO: 644535 - RNA, 19 nt, Artificial Sequence
  Description of Artificial Sequence: Synthetic oligonucleotide
  Antisense strand to SEQ ID NO: 644534
uaugucacccacagucagg

SEQ ID NO: 644536 - RNA, 19 nt, Artificial Sequence
  Description of Artificial Sequence: Synthetic oligonucleotide
  Sense strand starting at position 3095 of SEQ ID NO: 585496
gcuuauuugccucacgguu

SEQ ID NO: 644537 - RNA, 19 nt, Artificial Sequence
  Description of Artificial Sequence: Synthetic oligonucleotide
  Antisense strand to SEQ ID NO: 644536
aaccgugaggcaaauaagc

SEQ ID NO: 644538 - RNA, 19 nt, Artificial Sequence
  Description of Artificial Sequence: Synthetic oligonucleotide
  Sense strand starting at position 3286 of SEQ ID NO: 585496
ucuugugggaacuaagagu

SEQ ID NO: 644539 - RNA, 19 nt, Artificial Sequence
  Description of Artificial Sequence: Synthetic oligonucleotide
  Antisense strand to SEQ ID NO: 644538
acucuuaguucccacaaga

SEQ ID NO: 644540 - RNA, 19 nt, Artificial Sequence
  Description of Artificial Sequence: Synthetic oligonucleotide
  Sense strand starting at position 3303 of SEQ ID NO: 585496
gugagaacucacugguuga

SEQ ID NO: 644541 - RNA, 19 nt, Artificial Sequence
  Description of Artificial Sequence: Synthetic oligonucleotide
  Antisense strand to SEQ ID NO: 644540
ucaaccagugaguucucac

SEQ ID NO: 644542 - RNA, 19 nt, Artificial Sequence
  Description of Artificial Sequence: Synthetic oligonucleotide
  Sense strand starting at position 3304 of SEQ ID NO: 585496
ugagaacucacugguugag

SEQ ID NO: 644543 - RNA, 19 nt, Artificial Sequence
  Description of Artificial Sequence: Synthetic oligonucleotide
  Antisense strand to SEQ ID NO: 644542
cucaaccagugaguucuca

SEQ ID NO: 644544 - RNA, 19 nt, Artificial Sequence
  Description of Artificial Sequence: Synthetic oligonucleotide
  Sense strand starting at position 3307 of SEQ ID NO: 585496
gaacucacugguugagaau

SEQ ID NO: 644545 - RNA, 19 nt, Artificial Sequence
  Description of Artificial Sequence: Synthetic oligonucleotide
  Antisense strand to SEQ ID NO: 644544
auucucaaccagugaguuc

SEQ ID NO: 644546 - RNA, 19 nt, Artificial Sequence
  Description of Artificial Sequence: Synthetic oligonucleotide
  Sense strand starting at position 3331 of SEQ ID NO: 585496
cgagcuguucaugagggau

SEQ ID NO: 644547 - RNA, 19 nt, Artificial Sequence
  Description of Artificial Sequence: Synthetic oligonucleotide
  Antisense strand to SEQ ID NO: 644546
aucccucaugaacagcucg

SEQ ID NO: 644548 - RNA, 19 nt, Artificial Sequence
  Description of Artificial Sequence: Synthetic oligonucleotide
  Sense strand starting at position 3417 of SEQ ID NO: 585496
gagacuuggcaggguuuaa

SEQ ID NO: 644549 - RNA, 19 nt, Artificial Sequence
  Description of Artificial Sequence: Synthetic oligonucleotide
  Antisense strand to SEQ ID NO: 644548
uuaaacccugccaagucuc

SEQ ID NO: 644550 - RNA, 19 nt, Artificial Sequence
  Description of Artificial Sequence: Synthetic oligonucleotide
  Sense strand starting at position 3465 of SEQ ID NO: 585496
aagugaguugucugcauuu

SEQ ID NO: 644551 - RNA, 19 nt, Artificial Sequence
  Description of Artificial Sequence: Synthetic oligonucleotide
  Antisense strand to SEQ ID NO: 644550
aaaugcagacaacucacuu

SEQ ID NO: 644552 - RNA, 19 nt, Artificial Sequence
  Description of Artificial Sequence: Synthetic oligonucleotide
  Sense strand starting at position 3496 of SEQ ID NO: 585496
acgagaagcuuccuggaag

SEQ ID NO: 644553 - RNA, 19 nt, Artificial Sequence
  Description of Artificial Sequence: Synthetic oligonucleotide
  Antisense strand to SEQ ID NO: 644552
cuuccaggaagcuucucgu

SEQ ID NO: 644554 - RNA, 19 nt, Artificial Sequence
  Description of Artificial Sequence: Synthetic oligonucleotide
  Sense strand starting at position 3531 of SEQ ID NO: 585496
aguuuauuuguaggcgaac

SEQ ID NO: 644555 - RNA, 19 nt, Artificial Sequence
  Description of Artificial Sequence: Synthetic oligonucleotide
  Antisense strand to SEQ ID NO: 644554
guucgccuacaaauaaacu

SEQ ID NO: 644556 - RNA, 19 nt, Artificial Sequence
  Description of Artificial Sequence: Synthetic oligonucleotide
  Sense strand starting at position 3533 of SEQ ID NO: 585496
uuuauuuguaggcgaacga

SEQ ID NO: 644557 - RNA, 19 nt, Artificial Sequence
  Description of Artificial Sequence: Synthetic oligonucleotide
  Antisense strand to SEQ ID NO: 644556
ucguucgccuacaaauaaa

SEQ ID NO: 644558 - RNA, 19 nt, Artificial Sequence
  Description of Artificial Sequence: Synthetic oligonucleotide
  Sense strand starting at position 3616 of SEQ ID NO: 585496
aggagcucugaaugaguga

SEQ ID NO: 644559 - RNA, 19 nt, Artificial Sequence
  Description of Artificial Sequence: Synthetic oligonucleotide
  Antisense strand to SEQ ID NO: 644558
ucacucauucagagcuccu

SEQ ID NO: 644560 - RNA, 19 nt, Artificial Sequence
  Description of Artificial Sequence: Synthetic oligonucleotide
  Sense strand starting at position 3625 of SEQ ID NO: 585496
gaaugagugagcuggagaa

SEQ ID NO: 644561 - RNA, 19 nt, Artificial Sequence
  Description of Artificial Sequence: Synthetic oligonucleotide
  Antisense strand to SEQ ID NO: 644560
uucuccagcucacucauuc

SEQ ID NO: 644562 - RNA, 19 nt, Artificial Sequence
  Description of Artificial Sequence: Synthetic oligonucleotide
  Sense strand starting at position 3730 of SEQ ID NO: 585496
gcgggaacgcucagugaca

SEQ ID NO: 644563 - RNA, 19 nt, Artificial Sequence
  Description of Artificial Sequence: Synthetic oligonucleotide
  Antisense strand to SEQ ID NO: 644562
ugucacugagcguucccgc

SEQ ID NO: 644564 - RNA, 19 nt, Artificial Sequence
  Description of Artificial Sequence: Synthetic oligonucleotide
  Sense strand starting at position 3886 of SEQ ID NO: 585496
uuuagaggguacucugaaa

SEQ ID NO: 644565 - RNA, 19 nt, Artificial Sequence
  Description of Artificial Sequence: Synthetic oligonucleotide
  Antisense strand to SEQ ID NO: 644564
uuucagaguacccucuaaa

SEQ ID NO: 644566 - RNA, 19 nt, Artificial Sequence
  Description of Artificial Sequence: Synthetic oligonucleotide
  Sense strand starting at position 3920 of SEQ ID NO: 585496
cuuaucagagccuaaugua

SEQ ID NO: 644567 - RNA, 19 nt, Artificial Sequence
  Description of Artificial Sequence: Synthetic oligonucleotide
  Antisense strand to SEQ ID NO: 644566
uacauuaggcucugauaag

SEQ ID NO: 644568 - RNA, 19 nt, Artificial Sequence
  Description of Artificial Sequence: Synthetic oligonucleotide
  Sense strand starting at position 89 of SEQ ID NO: 585497
uuaaaugccuccuuggaga

SEQ ID NO: 644569 - RNA, 19 nt, Artificial Sequence
  Description of Artificial Sequence: Synthetic oligonucleotide
  Antisense strand to SEQ ID NO: 644568
ucuccaaggaggcauuuaa

SEQ ID NO: 644570 - RNA, 19 nt, Artificial Sequence
  Description of Artificial Sequence: Synthetic oligonucleotide
  Sense strand starting at position 102 of SEQ ID NO: 585497
uggagagucugagucauga

SEQ ID NO: 644571 - RNA, 19 nt, Artificial Sequence
  Description of Artificial Sequence: Synthetic oligonucleotide
  Antisense strand to SEQ ID NO: 644570
ucaugacucagacucucca

SEQ ID NO: 644572 - RNA, 19 nt, Artificial Sequence
  Description of Artificial Sequence: Synthetic oligonucleotide
  Sense strand starting at position 234 of SEQ ID NO: 585497
ggcaauuacguagaguaca

SEQ ID NO: 644573 - RNA, 19 nt, Artificial Sequence
  Description of Artificial Sequence: Synthetic oligonucleotide
  Antisense strand to SEQ ID NO: 644572
uguacucuacguaauugcc

SEQ ID NO: 644574 - RNA, 19 nt, Artificial Sequence
  Description of Artificial Sequence: Synthetic oligonucleotide
  Sense strand starting at position 278 of SEQ ID NO: 585497
gaaauucgcccuugaauga

SEQ ID NO: 644575 - RNA, 19 nt, Artificial Sequence
  Description of Artificial Sequence: Synthetic oligonucleotide
  Antisense strand to SEQ ID NO: 644574
ucauucaagggcgaauuuc

SEQ ID NO: 644576 - RNA, 19 nt, Artificial Sequence
  Description of Artificial Sequence: Synthetic oligonucleotide
  Sense strand starting at position 293 of SEQ ID NO: 585497
augaccugugcugaaaguu

SEQ ID NO: 644577 - RNA, 19 nt, Artificial Sequence
  Description of Artificial Sequence: Synthetic oligonucleotide
  Antisense strand to SEQ ID NO: 644576
aacuuucagcacaggucau

SEQ ID NO: 644578 - RNA, 19 nt, Artificial Sequence
  Description of Artificial Sequence: Synthetic oligonucleotide
  Sense strand starting at position 487 of SEQ ID NO: 585497
uuccauauagcauauaguu

SEQ ID NO: 644579 - RNA, 19 nt, Artificial Sequence
  Description of Artificial Sequence: Synthetic oligonucleotide
  Antisense strand to SEQ ID NO: 644578
aacuauaugcuauauggaa

SEQ ID NO: 644580 - RNA, 19 nt, Artificial Sequence
  Description of Artificial Sequence: Synthetic oligonucleotide
  Sense strand starting at position 538 of SEQ ID NO: 585497
ugugaaauauagccugaua

SEQ ID NO: 644581 - RNA, 19 nt, Artificial Sequence
  Description of Artificial Sequence: Synthetic oligonucleotide
  Antisense strand to SEQ ID NO: 644580
uaucaggcuauauuucaca

SEQ ID NO: 644582 - RNA, 19 nt, Artificial Sequence
  Description of Artificial Sequence: Synthetic oligonucleotide
  Sense strand starting at position 540 of SEQ ID NO: 585497
ugaaauauagccugauaug

SEQ ID NO: 644583 - RNA, 19 nt, Artificial Sequence
  Description of Artificial Sequence: Synthetic oligonucleotide
  Antisense strand to SEQ ID NO: 644582
cauaucaggcuauauuuca

SEQ ID NO: 644584 - RNA, 19 nt, Artificial Sequence
  Description of Artificial Sequence: Synthetic oligonucleotide
  Sense strand starting at position 550 of SEQ ID NO: 585497
ccugauauggucuaugucu

SEQ ID NO: 644585 - RNA, 19 nt, Artificial Sequence
  Description of Artificial Sequence: Synthetic oligonucleotide
  Antisense strand to SEQ ID NO: 644584
agacauagaccauaucagg

SEQ ID NO: 644586 - RNA, 19 nt, Artificial Sequence
  Description of Artificial Sequence: Synthetic oligonucleotide
  Sense strand starting at position 561 of SEQ ID NO: 585497
cuaugucugugacccauuu

SEQ ID NO: 644587 - RNA, 19 nt, Artificial Sequence
  Description of Artificial Sequence: Synthetic oligonucleotide
  Antisense strand to SEQ ID NO: 644586
aaaugggucacagacauag

SEQ ID NO: 644588 - RNA, 19 nt, Artificial Sequence
  Description of Artificial Sequence: Synthetic oligonucleotide
  Sense strand starting at position 771 of SEQ ID NO: 585497
ucugucuauguuuaaucua

SEQ ID NO: 644589 - RNA, 19 nt, Artificial Sequence
  Description of Artificial Sequence: Synthetic oligonucleotide
  Antisense strand to SEQ ID NO: 644588
uagauuaaacauagacaga

SEQ ID NO: 644590 - RNA, 19 nt, Artificial Sequence
  Description of Artificial Sequence: Synthetic oligonucleotide
  Sense strand starting at position 1123 of SEQ ID NO: 585497
uccucaauagucuagguuu

SEQ ID NO: 644591 - RNA, 19 nt, Artificial Sequence
  Description of Artificial Sequence: Synthetic oligonucleotide
  Antisense strand to SEQ ID NO: 644590
aaaccuagacuauugagga

SEQ ID NO: 644592 - RNA, 19 nt, Artificial Sequence
  Description of Artificial Sequence: Synthetic oligonucleotide
  Sense strand starting at position 1163 of SEQ ID NO: 585497
acgaacuuauaguuccauu

SEQ ID NO: 644593 - RNA, 19 nt, Artificial Sequence
  Description of Artificial Sequence: Synthetic oligonucleotide
  Antisense strand to SEQ ID NO: 644592
aauggaacuauaaguucgu

SEQ ID NO: 644594 - RNA, 19 nt, Artificial Sequence
  Description of Artificial Sequence: Synthetic oligonucleotide
  Sense strand starting at position 1265 of SEQ ID NO: 585497
auaucacaguaugucuaau

SEQ ID NO: 644595 - RNA, 19 nt, Artificial Sequence
  Description of Artificial Sequence: Synthetic oligonucleotide
  Antisense strand to SEQ ID NO: 644594
auuagacauacugugauau

SEQ ID NO: 644596 - RNA, 19 nt, Artificial Sequence
  Description of Artificial Sequence: Synthetic oligonucleotide
  Sense strand starting at position 1267 of SEQ ID NO: 585497
aucacaguaugucuaauua

SEQ ID NO: 644597 - RNA, 19 nt, Artificial Sequence
  Description of Artificial Sequence: Synthetic oligonucleotide
  Antisense strand to SEQ ID NO: 644596
uaauuagacauacugugau

SEQ ID NO: 644598 - RNA, 19 nt, Artificial Sequence
  Description of Artificial Sequence: Synthetic oligonucleotide
  Sense strand starting at position 1593 of SEQ ID NO: 585497
ucauauggucuguaauaau

SEQ ID NO: 644599 - RNA, 19 nt, Artificial Sequence
  Description of Artificial Sequence: Synthetic oligonucleotide
  Antisense strand to SEQ ID NO: 644598
auuauuacagaccauauga

SEQ ID NO: 644600 - RNA, 19 nt, Artificial Sequence
  Description of Artificial Sequence: Synthetic oligonucleotide
  Sense strand starting at position 2170 of SEQ ID NO: 585497
uuacgaaaugcaggacuau

SEQ ID NO: 644601 - RNA, 19 nt, Artificial Sequence
  Description of Artificial Sequence: Synthetic oligonucleotide
  Antisense strand to SEQ ID NO: 644600
auaguccugcauuucguaa

SEQ ID NO: 644602 - RNA, 19 nt, Artificial Sequence
  Description of Artificial Sequence: Synthetic oligonucleotide
  Sense strand starting at position 2171 of SEQ ID NO: 585497
uacgaaaugcaggacuauu

SEQ ID NO: 644603 - RNA, 19 nt, Artificial Sequence
  Description of Artificial Sequence: Synthetic oligonucleotide
  Antisense strand to SEQ ID NO: 644602
aauaguccugcauuucgua

SEQ ID NO: 644604 - RNA, 19 nt, Artificial Sequence
  Description of Artificial Sequence: Synthetic oligonucleotide
  Sense strand starting at position 2354 of SEQ ID NO: 585497
ugccguauggccucucuaa

SEQ ID NO: 644605 - RNA, 19 nt, Artificial Sequence
  Description of Artificial Sequence: Synthetic oligonucleotide
  Antisense strand to SEQ ID NO: 644604
uuagagaggccauacggca

SEQ ID NO: 644606 - RNA, 19 nt, Artificial Sequence
  Description of Artificial Sequence: Synthetic oligonucleotide
  Sense strand starting at position 2511 of SEQ ID NO: 585497
uguacaauucagggaagug

SEQ ID NO: 644607 - RNA, 19 nt, Artificial Sequence
  Description of Artificial Sequence: Synthetic oligonucleotide
  Antisense strand to SEQ ID NO: 644606
cacuucccugaauuguaca

SEQ ID NO: 644608 - RNA, 19 nt, Artificial Sequence
  Description of Artificial Sequence: Synthetic oligonucleotide
  Sense strand starting at position 2545 of SEQ ID NO: 585497
ugcuuugucccagcaaguu

SEQ ID NO: 644609 - RNA, 19 nt, Artificial Sequence
  Description of Artificial Sequence: Synthetic oligonucleotide
  Antisense strand to SEQ ID NO: 644608
aacuugcugggacaaagca

SEQ ID NO: 644610 - RNA, 19 nt, Artificial Sequence
  Description of Artificial Sequence: Synthetic oligonucleotide
  Sense strand starting at position 2555 of SEQ ID NO: 585497
cagcaaguuguugacaaau

SEQ ID NO: 644611 - RNA, 19 nt, Artificial Sequence
  Description of Artificial Sequence: Synthetic oligonucleotide
  Antisense strand to SEQ ID NO: 644610
auuugucaacaacuugcug

SEQ ID NO: 644612 - RNA, 19 nt, Artificial Sequence
  Description of Artificial Sequence: Synthetic oligonucleotide
  Sense strand starting at position 2924 of SEQ ID NO: 585497
uccuacucuggguauauga

SEQ ID NO: 644613 - RNA, 19 nt, Artificial Sequence
  Description of Artificial Sequence: Synthetic oligonucleotide
  Antisense strand to SEQ ID NO: 644612
ucauauacccagaguagga

SEQ ID NO: 644614 - RNA, 19 nt, Artificial Sequence
  Description of Artificial Sequence: Synthetic oligonucleotide
  Sense strand starting at position 2931 of SEQ ID NO: 585497
cuggguauaugaucccuaa

SEQ ID NO: 644615 - RNA, 19 nt, Artificial Sequence
  Description of Artificial Sequence: Synthetic oligonucleotide
  Antisense strand to SEQ ID NO: 644614
uuagggaucauauacccag

SEQ ID NO: 644616 - RNA, 19 nt, Artificial Sequence
  Description of Artificial Sequence: Synthetic oligonucleotide
  Sense strand starting at position 2934 of SEQ ID NO: 585497
gguauaugaucccuaaauu

SEQ ID NO: 644617 - RNA, 19 nt, Artificial Sequence
  Description of Artificial Sequence: Synthetic oligonucleotide
  Antisense strand to SEQ ID NO: 644616
aauuuagggaucauauacc

SEQ ID NO: 644618 - RNA, 19 nt, Artificial Sequence
  Description of Artificial Sequence: Synthetic oligonucleotide
  Sense strand starting at position 2944 of SEQ ID NO: 585497
cccuaaauuagaggugguu

SEQ ID NO: 644619 - RNA, 19 nt, Artificial Sequence
  Description of Artificial Sequence: Synthetic oligonucleotide
  Antisense strand to SEQ ID NO: 644618
aaccaccucuaauuuaggg

SEQ ID NO: 644620 - RNA, 19 nt, Artificial Sequence
  Description of Artificial Sequence: Synthetic oligonucleotide
  Sense strand starting at position 3054 of SEQ ID NO: 585497
agaggaaauguuggauguu

SEQ ID NO: 644621 - RNA, 19 nt, Artificial Sequence
  Description of Artificial Sequence: Synthetic oligonucleotide
  Antisense strand to SEQ ID NO: 644620
aacauccaacauuuccucu

SEQ ID NO: 644622 - RNA, 19 nt, Artificial Sequence
  Description of Artificial Sequence: Synthetic oligonucleotide
  Sense strand starting at position 3057 of SEQ ID NO: 585497
ggaaauguuggauguucau

SEQ ID NO: 644623 - RNA, 19 nt, Artificial Sequence
  Description of Artificial Sequence: Synthetic oligonucleotide
  Antisense strand to SEQ ID NO: 644622
augaacauccaacauuucc

SEQ ID NO: 644624 - RNA, 19 nt, Artificial Sequence
  Description of Artificial Sequence: Synthetic oligonucleotide
  Sense strand starting at position 3126 of SEQ ID NO: 585497
agaucaguucuaggccaca

SEQ ID NO: 644625 - RNA, 19 nt, Artificial Sequence
  Description of Artificial Sequence: Synthetic oligonucleotide
  Antisense strand to SEQ ID NO: 644624
uguggccuagaacugaucu

SEQ ID NO: 644626 - RNA, 19 nt, Artificial Sequence
  Description of Artificial Sequence: Synthetic oligonucleotide
  Sense strand starting at position 3213 of SEQ ID NO: 585497
ucaggaagucuuuauguac

SEQ ID NO: 644627 - RNA, 19 nt, Artificial Sequence
  Description of Artificial Sequence: Synthetic oligonucleotide
  Antisense strand to SEQ ID NO: 644626
guacauaaagacuuccuga

SEQ ID NO: 644628 - RNA, 19 nt, Artificial Sequence
  Description of Artificial Sequence: Synthetic oligonucleotide
  Sense strand starting at position 3249 of SEQ ID NO: 585497
acagaugccacgugaagau

SEQ ID NO: 644629 - RNA, 19 nt, Artificial Sequence
  Description of Artificial Sequence: Synthetic oligonucleotide
  Antisense strand to SEQ ID NO: 644628
aucuucacguggcaucugu

SEQ ID NO: 644630 - RNA, 19 nt, Artificial Sequence
  Description of Artificial Sequence: Synthetic oligonucleotide
  Sense strand starting at position 3262 of SEQ ID NO: 585497
gaagaucauugugcuaaau

SEQ ID NO: 644631 - RNA, 19 nt, Artificial Sequence
  Description of Artificial Sequence: Synthetic oligonucleotide
  Antisense strand to SEQ ID NO: 644630
auuuagcacaaugaucuuc

SEQ ID NO: 644632 - RNA, 19 nt, Artificial Sequence
  Description of Artificial Sequence: Synthetic oligonucleotide
  Sense strand starting at position 3397 of SEQ ID NO: 585497
gguguauuccaugacgaaa

SEQ ID NO: 644633 - RNA, 19 nt, Artificial Sequence
  Description of Artificial Sequence: Synthetic oligonucleotide
  Antisense strand to SEQ ID NO: 644632
uuucgucauggaauacacc

SEQ ID NO: 644634 - RNA, 19 nt, Artificial Sequence
  Description of Artificial Sequence: Synthetic oligonucleotide
  Sense strand starting at position 3408 of SEQ ID NO: 585497
ugacgaaagcuggguaaug

SEQ ID NO: 644635 - RNA, 19 nt, Artificial Sequence
  Description of Artificial Sequence: Synthetic oligonucleotide
  Antisense strand to SEQ ID NO: 644634
cauuacccagcuuucguca

SEQ ID NO: 644636 - RNA, 19 nt, Artificial Sequence
  Description of Artificial Sequence: Synthetic oligonucleotide
  Sense strand starting at position 3409 of SEQ ID NO: 585497
gacgaaagcuggguaauga

SEQ ID NO: 644637 - RNA, 19 nt, Artificial Sequence
  Description of Artificial Sequence: Synthetic oligonucleotide
  Antisense strand to SEQ ID NO: 644636
ucauuacccagcuuucguc

SEQ ID NO: 644638 - RNA, 19 nt, Artificial Sequence
  Description of Artificial Sequence: Synthetic oligonucleotide
  Sense strand starting at position 3410 of SEQ ID NO: 585497
acgaaagcuggguaaugau

SEQ ID NO: 644639 - RNA, 19 nt, Artificial Sequence
  Description of Artificial Sequence: Synthetic oligonucleotide
  Antisense strand to SEQ ID NO: 644638
aucauuacccagcuuucgu

SEQ ID NO: 644640 - RNA, 19 nt, Artificial Sequence
  Description of Artificial Sequence: Synthetic oligonucleotide
  Sense strand starting at position 3419 of SEQ ID NO: 585497
ggguaaugaugcuuccaaa

SEQ ID NO: 644641 - RNA, 19 nt, Artificial Sequence
  Description of Artificial Sequence: Synthetic oligonucleotide
  Antisense strand to SEQ ID NO: 644640
uuuggaagcaucauuaccc

SEQ ID NO: 644642 - RNA, 19 nt, Artificial Sequence
  Description of Artificial Sequence: Synthetic oligonucleotide
  Sense strand starting at position 3480 of SEQ ID NO: 585497
acagcacaacuaugugaau

SEQ ID NO: 644643 - RNA, 19 nt, Artificial Sequence
  Description of Artificial Sequence: Synthetic oligonucleotide
  Antisense strand to SEQ ID NO: 644642
auucacauaguugugcugu

SEQ ID NO: 644644 - RNA, 19 nt, Artificial Sequence
  Description of Artificial Sequence: Synthetic oligonucleotide
  Sense strand starting at position 3509 of SEQ ID NO: 585497
guaaauugcucaccaggga

SEQ ID NO: 644645 - RNA, 19 nt, Artificial Sequence
  Description of Artificial Sequence: Synthetic oligonucleotide
  Antisense strand to SEQ ID NO: 644644
ucccuggugagcaauuuac

SEQ ID NO: 644646 - RNA, 19 nt, Artificial Sequence
  Description of Artificial Sequence: Synthetic oligonucleotide
  Sense strand starting at position 3571 of SEQ ID NO: 585497
uugagucauuuguuguuua

SEQ ID NO: 644647 - RNA, 19 nt, Artificial Sequence
  Description of Artificial Sequence: Synthetic oligonucleotide
  Antisense strand to SEQ ID NO: 644646
uaaacaacaaaugacucaa

SEQ ID NO: 644648 - RNA, 19 nt, Artificial Sequence
  Description of Artificial Sequence: Synthetic oligonucleotide
  Sense strand starting at position 506 of SEQ ID NO: 585498
ggguccuugucauccaucu

SEQ ID NO: 644649 - RNA, 19 nt, Artificial Sequence
  Description of Artificial Sequence: Synthetic oligonucleotide
  Antisense strand to SEQ ID NO: 644648
agauggaugacaaggaccc

SEQ ID NO: 644650 - RNA, 19 nt, Artificial Sequence
  Description of Artificial Sequence: Synthetic oligonucleotide
  Sense strand starting at position 742 of SEQ ID NO: 585498
ucacaugugaauuggugga

SEQ ID NO: 644651 - RNA, 19 nt, Artificial Sequence
  Description of Artificial Sequence: Synthetic oligonucleotide
  Antisense strand to SEQ ID NO: 644650
uccaccaauucacauguga

SEQ ID NO: 644652 - RNA, 19 nt, Artificial Sequence
  Description of Artificial Sequence: Synthetic oligonucleotide
  Sense strand starting at position 883 of SEQ ID NO: 585498
gcaaauauguuacugacaa

SEQ ID NO: 644653 - RNA, 19 nt, Artificial Sequence
  Description of Artificial Sequence: Synthetic oligonucleotide
  Antisense strand to SEQ ID NO: 644652
uugucaguaacauauuugc

SEQ ID NO: 644654 - RNA, 19 nt, Artificial Sequence
  Description of Artificial Sequence: Synthetic oligonucleotide
  Sense strand starting at position 911 of SEQ ID NO: 585498
guuaaagagcaaugauuaa

SEQ ID NO: 644655 - RNA, 19 nt, Artificial Sequence
  Description of Artificial Sequence: Synthetic oligonucleotide
  Antisense strand to SEQ ID NO: 644654
uuaaucauugcucuuuaac

SEQ ID NO: 644656 - RNA, 19 nt, Artificial Sequence
  Description of Artificial Sequence: Synthetic oligonucleotide
  Sense strand starting at position 1053 of SEQ ID NO: 585498
acuaguuggguuuggagau

SEQ ID NO: 644657 - RNA, 19 nt, Artificial Sequence
  Description of Artificial Sequence: Synthetic oligonucleotide
  Antisense strand to SEQ ID NO: 644656
aucuccaaacccaacuagu

SEQ ID NO: 644658 - RNA, 19 nt, Artificial Sequence
  Description of Artificial Sequence: Synthetic oligonucleotide
  Sense strand starting at position 1098 of SEQ ID NO: 585498
uugauauuagcauaaguac

SEQ ID NO: 644659 - RNA, 19 nt, Artificial Sequence
  Description of Artificial Sequence: Synthetic oligonucleotide
  Antisense strand to SEQ ID NO: 644658
guacuuaugcuaauaucaa

SEQ ID NO: 644660 - RNA, 19 nt, Artificial Sequence
  Description of Artificial Sequence: Synthetic oligonucleotide
  Sense strand starting at position 1231 of SEQ ID NO: 585498
cugagaacgaguuaguaau

SEQ ID NO: 644661 - RNA, 19 nt, Artificial Sequence
  Description of Artificial Sequence: Synthetic oligonucleotide
  Antisense strand to SEQ ID NO: 644660
auuacuaacucguucucag

SEQ ID NO: 644662 - RNA, 19 nt, Artificial Sequence
  Description of Artificial Sequence: Synthetic oligonucleotide
  Sense strand starting at position 1468 of SEQ ID NO: 585498
ggaacaguucagggugcuu

SEQ ID NO: 644663 - RNA, 19 nt, Artificial Sequence
  Description of Artificial Sequence: Synthetic oligonucleotide
  Antisense strand to SEQ ID NO: 644662
aagcacccugaacuguucc

SEQ ID NO: 644664 - RNA, 19 nt, Artificial Sequence
  Description of Artificial Sequence: Synthetic oligonucleotide
  Sense strand starting at position 1481 of SEQ ID NO: 585498
gugcuuaaguggccaaaga

SEQ ID NO: 644665 - RNA, 19 nt, Artificial Sequence
  Description of Artificial Sequence: Synthetic oligonucleotide
  Antisense strand to SEQ ID NO: 644664
ucuuuggccacuuaagcac

SEQ ID NO: 644666 - RNA, 19 nt, Artificial Sequence
  Description of Artificial Sequence: Synthetic oligonucleotide
  Sense strand starting at position 1482 of SEQ ID NO: 585498
ugcuuaaguggccaaagaa

SEQ ID NO: 644667 - RNA, 19 nt, Artificial Sequence
  Description of Artificial Sequence: Synthetic oligonucleotide
  Antisense strand to SEQ ID NO: 644666
uucuuuggccacuuaagca

SEQ ID NO: 644668 - RNA, 19 nt, Artificial Sequence
  Description of Artificial Sequence: Synthetic oligonucleotide
  Sense strand starting at position 1553 of SEQ ID NO: 585498
uccgaauugccagggacuu

SEQ ID NO: 644669 - RNA, 19 nt, Artificial Sequence
  Description of Artificial Sequence: Synthetic oligonucleotide
  Antisense strand to SEQ ID NO: 644668
aagucccuggcaauucgga

SEQ ID NO: 644670 - RNA, 19 nt, Artificial Sequence
  Description of Artificial Sequence: Synthetic oligonucleotide
  Sense strand starting at position 1578 of SEQ ID NO: 585498
aaacuagagguuggucgaa

SEQ ID NO: 644671 - RNA, 19 nt, Artificial Sequence
  Description of Artificial Sequence: Synthetic oligonucleotide
  Antisense strand to SEQ ID NO: 644670
uucgaccaaccucuaguuu

SEQ ID NO: 644672 - RNA, 19 nt, Artificial Sequence
  Description of Artificial Sequence: Synthetic oligonucleotide
  Sense strand starting at position 1580 of SEQ ID NO: 585498
acuagagguuggucgaagu

SEQ ID NO: 644673 - RNA, 19 nt, Artificial Sequence
  Description of Artificial Sequence: Synthetic oligonucleotide
  Antisense strand to SEQ ID NO: 644672
acuucgaccaaccucuagu

SEQ ID NO: 644674 - RNA, 19 nt, Artificial Sequence
  Description of Artificial Sequence: Synthetic oligonucleotide
  Sense strand starting at position 1583 of SEQ ID NO: 585498
agagguuggucgaagugaa

SEQ ID NO: 644675 - RNA, 19 nt, Artificial Sequence
  Description of Artificial Sequence: Synthetic oligonucleotide
  Antisense strand to SEQ ID NO: 644674
uucacuucgaccaaccucu

SEQ ID NO: 644676 - RNA, 19 nt, Artificial Sequence
  Description of Artificial Sequence: Synthetic oligonucleotide
  Sense strand starting at position 1629 of SEQ ID NO: 585498
gugggaucccgucacagua

SEQ ID NO: 644677 - RNA, 19 nt, Artificial Sequence
  Description of Artificial Sequence: Synthetic oligonucleotide
  Antisense strand to SEQ ID NO: 644676
uacugugacgggaucccac

SEQ ID NO: 644678 - RNA, 19 nt, Artificial Sequence
  Description of Artificial Sequence: Synthetic oligonucleotide
  Sense strand starting at position 2050 of SEQ ID NO: 585498
gucuccucuguuuacgaau

SEQ ID NO: 644679 - RNA, 19 nt, Artificial Sequence
  Description of Artificial Sequence: Synthetic oligonucleotide
  Antisense strand to SEQ ID NO: 644678
auucguaaacagaggagac

SEQ ID NO: 644680 - RNA, 19 nt, Artificial Sequence
  Description of Artificial Sequence: Synthetic oligonucleotide
  Sense strand starting at position 2209 of SEQ ID NO: 585498
gcaguuugcauuugaggau

SEQ ID NO: 644681 - RNA, 19 nt, Artificial Sequence
  Description of Artificial Sequence: Synthetic oligonucleotide
  Antisense strand to SEQ ID NO: 644680
auccucaaaugcaaacugc

SEQ ID NO: 644682 - RNA, 19 nt, Artificial Sequence
  Description of Artificial Sequence: Synthetic oligonucleotide
  Sense strand starting at position 2210 of SEQ ID NO: 585498
caguuugcauuugaggaua

SEQ ID NO: 644683 - RNA, 19 nt, Artificial Sequence
  Description of Artificial Sequence: Synthetic oligonucleotide
  Antisense strand to SEQ ID NO: 644682
uauccucaaaugcaaacug

SEQ ID NO: 644684 - RNA, 19 nt, Artificial Sequence
  Description of Artificial Sequence: Synthetic oligonucleotide
  Sense strand starting at position 2250 of SEQ ID NO: 585498
ggaaaugcccgauguccua

SEQ ID NO: 644685 - RNA, 19 nt, Artificial Sequence
  Description of Artificial Sequence: Synthetic oligonucleotide
  Antisense strand to SEQ ID NO: 644684
uaggacaucgggcauuucc

SEQ ID NO: 644686 - RNA, 19 nt, Artificial Sequence
  Description of Artificial Sequence: Synthetic oligonucleotide
  Sense strand starting at position 2293 of SEQ ID NO: 585498
gauugagauguuugauuag

SEQ ID NO: 644687 - RNA, 19 nt, Artificial Sequence
  Description of Artificial Sequence: Synthetic oligonucleotide
  Antisense strand to SEQ ID NO: 644686
cuaaucaaacaucucaauc

SEQ ID NO: 644688 - RNA, 19 nt, Artificial Sequence
  Description of Artificial Sequence: Synthetic oligonucleotide
  Sense strand starting at position 2319 of SEQ ID NO: 585498
ggagcaaagccaugaauac

SEQ ID NO: 644689 - RNA, 19 nt, Artificial Sequence
  Description of Artificial Sequence: Synthetic oligonucleotide
  Antisense strand to SEQ ID NO: 644688
guauucauggcuuugcucc

SEQ ID NO: 644690 - RNA, 19 nt, Artificial Sequence
  Description of Artificial Sequence: Synthetic oligonucleotide
  Sense strand starting at position 2458 of SEQ ID NO: 585498
ucacucuugugcccacaua

SEQ ID NO: 644691 - RNA, 19 nt, Artificial Sequence
  Description of Artificial Sequence: Synthetic oligonucleotide
  Antisense strand to SEQ ID NO: 644690
uaugugggcacaagaguga

SEQ ID NO: 644692 - RNA, 19 nt, Artificial Sequence
  Description of Artificial Sequence: Synthetic oligonucleotide
  Sense strand starting at position 2476 of SEQ ID NO: 585498
agaggucuaaauugaggua

SEQ ID NO: 644693 - RNA, 19 nt, Artificial Sequence
  Description of Artificial Sequence: Synthetic oligonucleotide
  Antisense strand to SEQ ID NO: 644692
uaccucaauuuagaccucu

SEQ ID NO: 644694 - RNA, 19 nt, Artificial Sequence
  Description of Artificial Sequence: Synthetic oligonucleotide
  Sense strand starting at position 2488 of SEQ ID NO: 585498
ugagguaauugagucccau

SEQ ID NO: 644695 - RNA, 19 nt, Artificial Sequence
  Description of Artificial Sequence: Synthetic oligonucleotide
  Antisense strand to SEQ ID NO: 644694
augggacucaauuaccuca

SEQ ID NO: 644696 - RNA, 19 nt, Artificial Sequence
  Description of Artificial Sequence: Synthetic oligonucleotide
  Sense strand starting at position 2494 of SEQ ID NO: 585498
aauugagucccaugaguau

SEQ ID NO: 644697 - RNA, 19 nt, Artificial Sequence
  Description of Artificial Sequence: Synthetic oligonucleotide
  Antisense strand to SEQ ID NO: 644696
auacucaugggacucaauu

SEQ ID NO: 644698 - RNA, 19 nt, Artificial Sequence
  Description of Artificial Sequence: Synthetic oligonucleotide
  Sense strand starting at position 2643 of SEQ ID NO: 585498
ggauuauccugucccugaa

SEQ ID NO: 644699 - RNA, 19 nt, Artificial Sequence
  Description of Artificial Sequence: Synthetic oligonucleotide
  Antisense strand to SEQ ID NO: 644698
uucagggacaggauaaucc

SEQ ID NO: 644700 - RNA, 19 nt, Artificial Sequence
  Description of Artificial Sequence: Synthetic oligonucleotide
  Sense strand starting at position 2829 of SEQ ID NO: 585498
ucgguuccagaccaauaaa

SEQ ID NO: 644701 - RNA, 19 nt, Artificial Sequence
  Description of Artificial Sequence: Synthetic oligonucleotide
  Antisense strand to SEQ ID NO: 644700
uuuauuggucuggaaccga

SEQ ID NO: 644702 - RNA, 19 nt, Artificial Sequence
  Description of Artificial Sequence: Synthetic oligonucleotide
  Sense strand starting at position 2900 of SEQ ID NO: 585498
acuguauuguaaccuauua

SEQ ID NO: 644703 - RNA, 19 nt, Artificial Sequence
  Description of Artificial Sequence: Synthetic oligonucleotide
  Antisense strand to SEQ ID NO: 644702
uaauagguuacaauacagu

SEQ ID NO: 644704 - RNA, 19 nt, Artificial Sequence
  Description of Artificial Sequence: Synthetic oligonucleotide
  Sense strand starting at position 3292 of SEQ ID NO: 585498
uucugaauucuuuguugau

SEQ ID NO: 644705 - RNA, 19 nt, Artificial Sequence
  Description of Artificial Sequence: Synthetic oligonucleotide
  Antisense strand to SEQ ID NO: 644704
aucaacaaagaauucagaa

SEQ ID NO: 644706 - RNA, 19 nt, Artificial Sequence
  Description of Artificial Sequence: Synthetic oligonucleotide
  Sense strand starting at position 3293 of SEQ ID NO: 585498
ucugaauucuuuguugaua

SEQ ID NO: 644707 - RNA, 19 nt, Artificial Sequence
  Description of Artificial Sequence: Synthetic oligonucleotide
  Antisense strand to SEQ ID NO: 644706
uaucaacaaagaauucaga

SEQ ID NO: 644708 - RNA, 19 nt, Artificial Sequence
  Description of Artificial Sequence: Synthetic oligonucleotide
  Sense strand starting at position 3294 of SEQ ID NO: 585498
cugaauucuuuguugauau

SEQ ID NO: 644709 - RNA, 19 nt, Artificial Sequence
  Description of Artificial Sequence: Synthetic oligonucleotide
  Antisense strand to SEQ ID NO: 644708
auaucaacaaagaauucag

SEQ ID NO: 644710 - RNA, 19 nt, Artificial Sequence
  Description of Artificial Sequence: Synthetic oligonucleotide
  Sense strand starting at position 3356 of SEQ ID NO: 585498
ucaagaacuucgcucauuc

SEQ ID NO: 644711 - RNA, 19 nt, Artificial Sequence
  Description of Artificial Sequence: Synthetic oligonucleotide
  Antisense strand to SEQ ID NO: 644710
gaaugagcgaaguucuuga

SEQ ID NO: 644712 - RNA, 19 nt, Artificial Sequence
  Description of Artificial Sequence: Synthetic oligonucleotide
  Sense strand starting at position 3456 of SEQ ID NO: 585498
ugcuauugccaccagaucu

SEQ ID NO: 644713 - RNA, 19 nt, Artificial Sequence
  Description of Artificial Sequence: Synthetic oligonucleotide
  Antisense strand to SEQ ID NO: 644712
agaucugguggcaauagca

SEQ ID NO: 644714 - RNA, 19 nt, Artificial Sequence
  Description of Artificial Sequence: Synthetic oligonucleotide
  Sense strand starting at position 3598 of SEQ ID NO: 585498
ucaugaauguucuuacuag

SEQ ID NO: 644715 - RNA, 19 nt, Artificial Sequence
  Description of Artificial Sequence: Synthetic oligonucleotide
  Antisense strand to SEQ ID NO: 644714
cuaguaagaacauucauga

SEQ ID NO: 644716 - RNA, 19 nt, Artificial Sequence
  Description of Artificial Sequence: Synthetic oligonucleotide
  Sense strand starting at position 3628 of SEQ ID NO: 585498
gugaaucauuuccagaagu

SEQ ID NO: 644717 - RNA, 19 nt, Artificial Sequence
  Description of Artificial Sequence: Synthetic oligonucleotide
  Antisense strand to SEQ ID NO: 644716
acuucuggaaaugauucac

SEQ ID NO: 644718 - RNA, 19 nt, Artificial Sequence
  Description of Artificial Sequence: Synthetic oligonucleotide
  Sense strand starting at position 3854 of SEQ ID NO: 585498
guggucauugagcaguauu

SEQ ID NO: 644719 - RNA, 19 nt, Artificial Sequence
  Description of Artificial Sequence: Synthetic oligonucleotide
  Antisense strand to SEQ ID NO: 644718
aauacugcucaaugaccac

SEQ ID NO: 644720 - RNA, 19 nt, Artificial Sequence
  Description of Artificial Sequence: Synthetic oligonucleotide
  Sense strand starting at position 3857 of SEQ ID NO: 585498
gucauugagcaguauuauu

SEQ ID NO: 644721 - RNA, 19 nt, Artificial Sequence
  Description of Artificial Sequence: Synthetic oligonucleotide
  Antisense strand to SEQ ID NO: 644720
aauaauacugcucaaugac

SEQ ID NO: 644722 - RNA, 19 nt, Artificial Sequence
  Description of Artificial Sequence: Synthetic oligonucleotide
  Sense strand starting at position 3904 of SEQ ID NO: 585498
gucucaaagaugggcuuaa

SEQ ID NO: 644723 - RNA, 19 nt, Artificial Sequence
  Description of Artificial Sequence: Synthetic oligonucleotide
  Antisense strand to SEQ ID NO: 644722
uuaagcccaucuuugagac

SEQ ID NO: 644724 - RNA, 19 nt, Artificial Sequence
  Description of Artificial Sequence: Synthetic oligonucleotide
  Sense strand starting at position 3905 of SEQ ID NO: 585498
ucucaaagaugggcuuaaa

SEQ ID NO: 644725 - RNA, 19 nt, Artificial Sequence
  Description of Artificial Sequence: Synthetic oligonucleotide
  Antisense strand to SEQ ID NO: 644724
uuuaagcccaucuuugaga

SEQ ID NO: 644726 - RNA, 19 nt, Artificial Sequence
  Description of Artificial Sequence: Synthetic oligonucleotide
  Sense strand starting at position 3965 of SEQ ID NO: 585498
augcuuuguucuuccauuu

SEQ ID NO: 644727 - RNA, 19 nt, Artificial Sequence
  Description of Artificial Sequence: Synthetic oligonucleotide
  Antisense strand to SEQ ID NO: 644726
aaauggaagaacaaagcau

SEQ ID NO: 644728 - RNA, 19 nt, Artificial Sequence
  Description of Artificial Sequence: Synthetic oligonucleotide
  Sense strand starting at position 13 of SEQ ID NO: 585499
uuucgcugaccugguuaau

SEQ ID NO: 644729 - RNA, 19 nt, Artificial Sequence
  Description of Artificial Sequence: Synthetic oligonucleotide
  Antisense strand to SEQ ID NO: 644728
auuaaccaggucagcgaaa

SEQ ID NO: 644730 - RNA, 19 nt, Artificial Sequence
  Description of Artificial Sequence: Synthetic oligonucleotide
  Sense strand starting at position 16 of SEQ ID NO: 585499
cgcugaccugguuaauaua

SEQ ID NO: 644731 - RNA, 19 nt, Artificial Sequence
  Description of Artificial Sequence: Synthetic oligonucleotide
  Antisense strand to SEQ ID NO: 644730
uauauuaaccaggucagcg

SEQ ID NO: 644732 - RNA, 19 nt, Artificial Sequence
  Description of Artificial Sequence: Synthetic oligonucleotide
  Sense strand starting at position 621 of SEQ ID NO: 585499
ggauuugcuuugccuccau

SEQ ID NO: 644733 - RNA, 19 nt, Artificial Sequence
  Description of Artificial Sequence: Synthetic oligonucleotide
  Antisense strand to SEQ ID NO: 644732
auggaggcaaagcaaaucc

SEQ ID NO: 644734 - RNA, 19 nt, Artificial Sequence
  Description of Artificial Sequence: Synthetic oligonucleotide
  Sense strand starting at position 639 of SEQ ID NO: 585499
uggacuucgccuuagaacu

SEQ ID NO: 644735 - RNA, 19 nt, Artificial Sequence
  Description of Artificial Sequence: Synthetic oligonucleotide
  Antisense strand to SEQ ID NO: 644734
aguucuaaggcgaagucca

SEQ ID NO: 644736 - RNA, 19 nt, Artificial Sequence
  Description of Artificial Sequence: Synthetic oligonucleotide
  Sense strand starting at position 981 of SEQ ID NO: 585499
gacaguucggacgaggauu

SEQ ID NO: 644737 - RNA, 19 nt, Artificial Sequence
  Description of Artificial Sequence: Synthetic oligonucleotide
  Antisense strand to SEQ ID NO: 644736
aauccucguccgaacuguc

SEQ ID NO: 644738 - RNA, 19 nt, Artificial Sequence
  Description of Artificial Sequence: Synthetic oligonucleotide
  Sense strand starting at position 1129 of SEQ ID NO: 585499
caauguuugcaguggaagu

SEQ ID NO: 644739 - RNA, 19 nt, Artificial Sequence
  Description of Artificial Sequence: Synthetic oligonucleotide
  Antisense strand to SEQ ID NO: 644738
acuuccacugcaaacauug

SEQ ID NO: 644740 - RNA, 19 nt, Artificial Sequence
  Description of Artificial Sequence: Synthetic oligonucleotide
  Sense strand starting at position 1130 of SEQ ID NO: 585499
aauguuugcaguggaagua

SEQ ID NO: 644741 - RNA, 19 nt, Artificial Sequence
  Description of Artificial Sequence: Synthetic oligonucleotide
  Antisense strand to SEQ ID NO: 644740
uacuuccacugcaaacauu

SEQ ID NO: 644742 - RNA, 19 nt, Artificial Sequence
  Description of Artificial Sequence: Synthetic oligonucleotide
  Sense strand starting at position 1131 of SEQ ID NO: 585499
auguuugcaguggaaguaa

SEQ ID NO: 644743 - RNA, 19 nt, Artificial Sequence
  Description of Artificial Sequence: Synthetic oligonucleotide
  Antisense strand to SEQ ID NO: 644742
uuacuuccacugcaaacau

SEQ ID NO: 644744 - RNA, 19 nt, Artificial Sequence
  Description of Artificial Sequence: Synthetic oligonucleotide
  Sense strand starting at position 1568 of SEQ ID NO: 585499
ucccaacguccggauacau

SEQ ID NO: 644745 - RNA, 19 nt, Artificial Sequence
  Description of Artificial Sequence: Synthetic oligonucleotide
  Antisense strand to SEQ ID NO: 644744
auguauccggacguuggga

SEQ ID NO: 644746 - RNA, 19 nt, Artificial Sequence
  Description of Artificial Sequence: Synthetic oligonucleotide
  Sense strand starting at position 1579 of SEQ ID NO: 585499
ggauacauuucccgcaaag

SEQ ID NO: 644747 - RNA, 19 nt, Artificial Sequence
  Description of Artificial Sequence: Synthetic oligonucleotide
  Antisense strand to SEQ ID NO: 644746
cuuugcgggaaauguaucc

SEQ ID NO: 644748 - RNA, 19 nt, Artificial Sequence
  Description of Artificial Sequence: Synthetic oligonucleotide
  Sense strand starting at position 1591 of SEQ ID NO: 585499
cgcaaagacucuuccauuc

SEQ ID NO: 644749 - RNA, 19 nt, Artificial Sequence
  Description of Artificial Sequence: Synthetic oligonucleotide
  Antisense strand to SEQ ID NO: 644748
gaauggaagagucuuugcg

SEQ ID NO: 644750 - RNA, 19 nt, Artificial Sequence
  Description of Artificial Sequence: Synthetic oligonucleotide
  Sense strand starting at position 1678 of SEQ ID NO: 585499
ucagaugaucccggaacga

SEQ ID NO: 644751 - RNA, 19 nt, Artificial Sequence
  Description of Artificial Sequence: Synthetic oligonucleotide
  Antisense strand to SEQ ID NO: 644750
ucguuccgggaucaucuga

SEQ ID NO: 644752 - RNA, 19 nt, Artificial Sequence
  Description of Artificial Sequence: Synthetic oligonucleotide
  Sense strand starting at position 1986 of SEQ ID NO: 585499
gaaacagguugauauuaaa

SEQ ID NO: 644753 - RNA, 19 nt, Artificial Sequence
  Description of Artificial Sequence: Synthetic oligonucleotide
  Antisense strand to SEQ ID NO: 644752
uuuaauaucaaccuguuuc

SEQ ID NO: 644754 - RNA, 19 nt, Artificial Sequence
  Description of Artificial Sequence: Synthetic oligonucleotide
  Sense strand starting at position 2004 of SEQ ID NO: 585499
aguguaaacucuguaaaca

SEQ ID NO: 644755 - RNA, 19 nt, Artificial Sequence
  Description of Artificial Sequence: Synthetic oligonucleotide
  Antisense strand to SEQ ID NO: 644754
uguuuacagaguuuacacu

SEQ ID NO: 644756 - RNA, 19 nt, Artificial Sequence
  Description of Artificial Sequence: Synthetic oligonucleotide
  Sense strand starting at position 2005 of SEQ ID NO: 585499
guguaaacucuguaaacag

SEQ ID NO: 644757 - RNA, 19 nt, Artificial Sequence
  Description of Artificial Sequence: Synthetic oligonucleotide
  Antisense strand to SEQ ID NO: 644756
cuguuuacagaguuuacac

SEQ ID NO: 644758 - RNA, 19 nt, Artificial Sequence
  Description of Artificial Sequence: Synthetic oligonucleotide
  Sense strand starting at position 2566 of SEQ ID NO: 585499
ggcuguuuggcuaggguuu

SEQ ID NO: 644759 - RNA, 19 nt, Artificial Sequence
  Description of Artificial Sequence: Synthetic oligonucleotide
  Antisense strand to SEQ ID NO: 644758
aaacccuagccaaacagcc

SEQ ID NO: 644760 - RNA, 19 nt, Artificial Sequence
  Description of Artificial Sequence: Synthetic oligonucleotide
  Sense strand starting at position 2619 of SEQ ID NO: 585499
uuuaacuuguuagugacaa

SEQ ID NO: 644761 - RNA, 19 nt, Artificial Sequence
  Description of Artificial Sequence: Synthetic oligonucleotide
  Antisense strand to SEQ ID NO: 644760
uugucacuaacaaguuaaa

SEQ ID NO: 644762 - RNA, 19 nt, Artificial Sequence
  Description of Artificial Sequence: Synthetic oligonucleotide
  Sense strand starting at position 3009 of SEQ ID NO: 585499
gucgguaucccugcuuagu

SEQ ID NO: 644763 - RNA, 19 nt, Artificial Sequence
  Description of Artificial Sequence: Synthetic oligonucleotide
  Antisense strand to SEQ ID NO: 644762
acuaagcagggauaccgac

SEQ ID NO: 644764 - RNA, 19 nt, Artificial Sequence
  Description of Artificial Sequence: Synthetic oligonucleotide
  Sense strand starting at position 3026 of SEQ ID NO: 585499
gugucauuugagggcucua

SEQ ID NO: 644765 - RNA, 19 nt, Artificial Sequence
  Description of Artificial Sequence: Synthetic oligonucleotide
  Antisense strand to SEQ ID NO: 644764
uagagcccucaaaugacac

SEQ ID NO: 644766 - RNA, 19 nt, Artificial Sequence
  Description of Artificial Sequence: Synthetic oligonucleotide
  Sense strand starting at position 3066 of SEQ ID NO: 585499
aaaggcuuucguguuguuu

SEQ ID NO: 644767 - RNA, 19 nt, Artificial Sequence
  Description of Artificial Sequence: Synthetic oligonucleotide
  Antisense strand to SEQ ID NO: 644766
aaacaacacgaaagccuuu

SEQ ID NO: 644768 - RNA, 19 nt, Artificial Sequence
  Description of Artificial Sequence: Synthetic oligonucleotide
  Sense strand starting at position 3067 of SEQ ID NO: 585499
aaggcuuucguguuguuua

SEQ ID NO: 644769 - RNA, 19 nt, Artificial Sequence
  Description of Artificial Sequence: Synthetic oligonucleotide
  Antisense strand to SEQ ID NO: 644768
uaaacaacacgaaagccuu

SEQ ID NO: 644770 - RNA, 19 nt, Artificial Sequence
  Description of Artificial Sequence: Synthetic oligonucleotide
  Sense strand starting at position 3069 of SEQ ID NO: 585499
ggcuuucguguuguuuaau

SEQ ID NO: 644771 - RNA, 19 nt, Artificial Sequence
  Description of Artificial Sequence: Synthetic oligonucleotide
  Antisense strand to SEQ ID NO: 644770
auuaaacaacacgaaagcc

SEQ ID NO: 644772 - RNA, 19 nt, Artificial Sequence
  Description of Artificial Sequence: Synthetic oligonucleotide
  Sense strand starting at position 3111 of SEQ ID NO: 585499
gaagauaagugcugaauuu

SEQ ID NO: 644773 - RNA, 19 nt, Artificial Sequence
  Description of Artificial Sequence: Synthetic oligonucleotide
  Antisense strand to SEQ ID NO: 644772
aaauucagcacuuaucuuc

SEQ ID NO: 644774 - RNA, 19 nt, Artificial Sequence
  Description of Artificial Sequence: Synthetic oligonucleotide
  Sense strand starting at position 3122 of SEQ ID NO: 585499
cugaauuuauaaggauuga

SEQ ID NO: 644775 - RNA, 19 nt, Artificial Sequence
  Description of Artificial Sequence: Synthetic oligonucleotide
  Antisense strand to SEQ ID NO: 644774
ucaauccuuauaaauucag

SEQ ID NO: 644776 - RNA, 19 nt, Artificial Sequence
  Description of Artificial Sequence: Synthetic oligonucleotide
  Sense strand starting at position 3171 of SEQ ID NO: 585499
uuuacuuccguuuauagau

SEQ ID NO: 644777 - RNA, 19 nt, Artificial Sequence
  Description of Artificial Sequence: Synthetic oligonucleotide
  Antisense strand to SEQ ID NO: 644776
aucuauaaacggaaguaaa

SEQ ID NO: 644778 - RNA, 19 nt, Artificial Sequence
  Description of Artificial Sequence: Synthetic oligonucleotide
  Sense strand starting at position 3180 of SEQ ID NO: 585499
guuuauagauuagaaccau

SEQ ID NO: 644779 - RNA, 19 nt, Artificial Sequence
  Description of Artificial Sequence: Synthetic oligonucleotide
  Antisense strand to SEQ ID NO: 644778
augguucuaaucuauaaac

SEQ ID NO: 644780 - RNA, 19 nt, Artificial Sequence
  Description of Artificial Sequence: Synthetic oligonucleotide
  Sense strand starting at position 3218 of SEQ ID NO: 585499
cucuguacacacuaaugua

SEQ ID NO: 644781 - RNA, 19 nt, Artificial Sequence
  Description of Artificial Sequence: Synthetic oligonucleotide
  Antisense strand to SEQ ID NO: 644780
uacauuaguguguacagag

SEQ ID NO: 644782 - RNA, 19 nt, Artificial Sequence
  Description of Artificial Sequence: Synthetic oligonucleotide
  Sense strand starting at position 3378 of SEQ ID NO: 585499
uuuauuaaacggugaagca

SEQ ID NO: 644783 - RNA, 19 nt, Artificial Sequence
  Description of Artificial Sequence: Synthetic oligonucleotide
  Antisense strand to SEQ ID NO: 644782
ugcuucaccguuuaauaaa

SEQ ID NO: 644784 - RNA, 19 nt, Artificial Sequence
  Description of Artificial Sequence: Synthetic oligonucleotide
  Sense strand starting at position 3379 of SEQ ID NO: 585499
uuauuaaacggugaagcau

SEQ ID NO: 644785 - RNA, 19 nt, Artificial Sequence
  Description of Artificial Sequence: Synthetic oligonucleotide
  Antisense strand to SEQ ID NO: 644784
augcuucaccguuuaauaa

SEQ ID NO: 644786 - RNA, 19 nt, Artificial Sequence
  Description of Artificial Sequence: Synthetic oligonucleotide
  Sense strand starting at position 3390 of SEQ ID NO: 585499
ugaagcaugcgagguuuca

SEQ ID NO: 644787 - RNA, 19 nt, Artificial Sequence
  Description of Artificial Sequence: Synthetic oligonucleotide
  Antisense strand to SEQ ID NO: 644786
ugaaaccucgcaugcuuca

SEQ ID NO: 644788 - RNA, 19 nt, Artificial Sequence
  Description of Artificial Sequence: Synthetic oligonucleotide
  Sense strand starting at position 3462 of SEQ ID NO: 585499
uaucaaguguuaguugcua

SEQ ID NO: 644789 - RNA, 19 nt, Artificial Sequence
  Description of Artificial Sequence: Synthetic oligonucleotide
  Antisense strand to SEQ ID NO: 644788
uagcaacuaacacuugaua

SEQ ID NO: 644790 - RNA, 19 nt, Artificial Sequence
  Description of Artificial Sequence: Synthetic oligonucleotide
  Sense strand starting at position 3466 of SEQ ID NO: 585499
aaguguuaguugcuaguaa

SEQ ID NO: 644791 - RNA, 19 nt, Artificial Sequence
  Description of Artificial Sequence: Synthetic oligonucleotide
  Antisense strand to SEQ ID NO: 644790
uuacuagcaacuaacacuu

SEQ ID NO: 644792 - RNA, 19 nt, Artificial Sequence
  Description of Artificial Sequence: Synthetic oligonucleotide
  Sense strand starting at position 3468 of SEQ ID NO: 585499
guguuaguugcuaguaagg

SEQ ID NO: 644793 - RNA, 19 nt, Artificial Sequence
  Description of Artificial Sequence: Synthetic oligonucleotide
  Antisense strand to SEQ ID NO: 644792
ccuuacuagcaacuaacac

SEQ ID NO: 644794 - RNA, 19 nt, Artificial Sequence
  Description of Artificial Sequence: Synthetic oligonucleotide
  Sense strand starting at position 3498 of SEQ ID NO: 585499
cuuuccuccugagaagaaa

SEQ ID NO: 644795 - RNA, 19 nt, Artificial Sequence
  Description of Artificial Sequence: Synthetic oligonucleotide
  Antisense strand to SEQ ID NO: 644794
uuucuucucaggaggaaag

SEQ ID NO: 644796 - RNA, 19 nt, Artificial Sequence
  Description of Artificial Sequence: Synthetic oligonucleotide
  Sense strand starting at position 3539 of SEQ ID NO: 585499
gugagauauuucggaucac

SEQ ID NO: 644797 - RNA, 19 nt, Artificial Sequence
  Description of Artificial Sequence: Synthetic oligonucleotide
  Antisense strand to SEQ ID NO: 644796
gugauccgaaauaucucac

SEQ ID NO: 644798 - RNA, 19 nt, Artificial Sequence
  Description of Artificial Sequence: Synthetic oligonucleotide
  Sense strand starting at position 3540 of SEQ ID NO: 585499
ugagauauuucggaucaca

SEQ ID NO: 644799 - RNA, 19 nt, Artificial Sequence
  Description of Artificial Sequence: Synthetic oligonucleotide
  Antisense strand to SEQ ID NO: 644798
ugugauccgaaauaucuca

SEQ ID NO: 644800 - RNA, 19 nt, Artificial Sequence
  Description of Artificial Sequence: Synthetic oligonucleotide
  Sense strand starting at position 3727 of SEQ ID NO: 585499
uuaugaaucuaacuggcaa

SEQ ID NO: 644801 - RNA, 19 nt, Artificial Sequence
  Description of Artificial Sequence: Synthetic oligonucleotide
  Antisense strand to SEQ ID NO: 644800
uugccaguuagauucauaa

SEQ ID NO: 644802 - RNA, 19 nt, Artificial Sequence
  Description of Artificial Sequence: Synthetic oligonucleotide
  Sense strand starting at position 3784 of SEQ ID NO: 585499
aucugaacccuuugugaag

SEQ ID NO: 644803 - RNA, 19 nt, Artificial Sequence
  Description of Artificial Sequence: Synthetic oligonucleotide
  Antisense strand to SEQ ID NO: 644802
cuucacaaaggguucagau

SEQ ID NO: 644804 - RNA, 19 nt, Artificial Sequence
  Description of Artificial Sequence: Synthetic oligonucleotide
  Sense strand starting at position 3785 of SEQ ID NO: 585499
ucugaacccuuugugaagu

SEQ ID NO: 644805 - RNA, 19 nt, Artificial Sequence
  Description of Artificial Sequence: Synthetic oligonucleotide
  Antisense strand to SEQ ID NO: 644804
acuucacaaaggguucaga

SEQ ID NO: 644806 - RNA, 19 nt, Artificial Sequence
  Description of Artificial Sequence: Synthetic oligonucleotide
  Sense strand starting at position 3837 of SEQ ID NO: 585499
guguguaacuacuccuaag

SEQ ID NO: 644807 - RNA, 19 nt, Artificial Sequence
  Description of Artificial Sequence: Synthetic oligonucleotide
  Antisense strand to SEQ ID NO: 644806
cuuaggaguaguuacacac

SEQ ID NO: 644808 - RNA, 19 nt, Artificial Sequence
  Description of Artificial Sequence: Synthetic oligonucleotide
  Sense strand starting at position 392 of SEQ ID NO: 585500
uucugucuagugcuagcua

SEQ ID NO: 644809 - RNA, 19 nt, Artificial Sequence
  Description of Artificial Sequence: Synthetic oligonucleotide
  Antisense strand to SEQ ID NO: 644808
uagcuagcacuagacagaa

SEQ ID NO: 644810 - RNA, 19 nt, Artificial Sequence
  Description of Artificial Sequence: Synthetic oligonucleotide
  Sense strand starting at position 494 of SEQ ID NO: 585500
uuauuaggagcucaccaau

SEQ ID NO: 644811 - RNA, 19 nt, Artificial Sequence
  Description of Artificial Sequence: Synthetic oligonucleotide
  Antisense strand to SEQ ID NO: 644810
auuggugagcuccuaauaa

SEQ ID NO: 644812 - RNA, 19 nt, Artificial Sequence
  Description of Artificial Sequence: Synthetic oligonucleotide
  Sense strand starting at position 497 of SEQ ID NO: 585500
uuaggagcucaccaauauc

SEQ ID NO: 644813 - RNA, 19 nt, Artificial Sequence
  Description of Artificial Sequence: Synthetic oligonucleotide
  Antisense strand to SEQ ID NO: 644812
gauauuggugagcuccuaa

SEQ ID NO: 644814 - RNA, 19 nt, Artificial Sequence
  Description of Artificial Sequence: Synthetic oligonucleotide
  Sense strand starting at position 500 of SEQ ID NO: 585500
ggagcucaccaauauccuu

SEQ ID NO: 644815 - RNA, 19 nt, Artificial Sequence
  Description of Artificial Sequence: Synthetic oligonucleotide
  Antisense strand to SEQ ID NO: 644814
aaggauauuggugagcucc

SEQ ID NO: 644816 - RNA, 19 nt, Artificial Sequence
  Description of Artificial Sequence: Synthetic oligonucleotide
  Sense strand starting at position 688 of SEQ ID NO: 585500
ugcaaauuucugugauggu

SEQ ID NO: 644817 - RNA, 19 nt, Artificial Sequence
  Description of Artificial Sequence: Synthetic oligonucleotide
  Antisense strand to SEQ ID NO: 644816
accaucacagaaauuugca

SEQ ID NO: 644818 - RNA, 19 nt, Artificial Sequence
  Description of Artificial Sequence: Synthetic oligonucleotide
  Sense strand starting at position 709 of SEQ ID NO: 585500
acauauagauugcugggaa

SEQ ID NO: 644819 - RNA, 19 nt, Artificial Sequence
  Description of Artificial Sequence: Synthetic oligonucleotide
  Antisense strand to SEQ ID NO: 644818
uucccagcaaucuauaugu

SEQ ID NO: 644820 - RNA, 19 nt, Artificial Sequence
  Description of Artificial Sequence: Synthetic oligonucleotide
  Sense strand starting at position 825 of SEQ ID NO: 585500
acuuguucuggccauauaa

SEQ ID NO: 644821 - RNA, 19 nt, Artificial Sequence
  Description of Artificial Sequence: Synthetic oligonucleotide
  Antisense strand to SEQ ID NO: 644820
uuauauggccagaacaagu

SEQ ID NO: 644822 - RNA, 19 nt, Artificial Sequence
  Description of Artificial Sequence: Synthetic oligonucleotide
  Sense strand starting at position 827 of SEQ ID NO: 585500
uuguucuggccauauaaac

SEQ ID NO: 644823 - RNA, 19 nt, Artificial Sequence
  Description of Artificial Sequence: Synthetic oligonucleotide
  Antisense strand to SEQ ID NO: 644822
guuuauauggccagaacaa

SEQ ID NO: 644824 - RNA, 19 nt, Artificial Sequence
  Description of Artificial Sequence: Synthetic oligonucleotide
  Sense strand starting at position 1127 of SEQ ID NO: 585500
auaggauuccauugaaugu

SEQ ID NO: 644825 - RNA, 19 nt, Artificial Sequence
  Description of Artificial Sequence: Synthetic oligonucleotide
  Antisense strand to SEQ ID NO: 644824
acauucaauggaauccuau

SEQ ID NO: 644826 - RNA, 19 nt, Artificial Sequence
  Description of Artificial Sequence: Synthetic oligonucleotide
  Sense strand starting at position 1138 of SEQ ID NO: 585500
uugaauguuacacgugaug

SEQ ID NO: 644827 - RNA, 19 nt, Artificial Sequence
  Description of Artificial Sequence: Synthetic oligonucleotide
  Antisense strand to SEQ ID NO: 644826
caucacguguaacauucaa

SEQ ID NO: 644828 - RNA, 19 nt, Artificial Sequence
  Description of Artificial Sequence: Synthetic oligonucleotide
  Sense strand starting at position 1141 of SEQ ID NO: 585500
aauguuacacgugauguua

SEQ ID NO: 644829 - RNA, 19 nt, Artificial Sequence
  Description of Artificial Sequence: Synthetic oligonucleotide
  Antisense strand to SEQ ID NO: 644828
uaacaucacguguaacauu

SEQ ID NO: 644830 - RNA, 19 nt, Artificial Sequence
  Description of Artificial Sequence: Synthetic oligonucleotide
  Sense strand starting at position 1149 of SEQ ID NO: 585500
acgugauguuauuuccacu

SEQ ID NO: 644831 - RNA, 19 nt, Artificial Sequence
  Description of Artificial Sequence: Synthetic oligonucleotide
  Antisense strand to SEQ ID NO: 644830
aguggaaauaacaucacgu

SEQ ID NO: 644832 - RNA, 19 nt, Artificial Sequence
  Description of Artificial Sequence: Synthetic oligonucleotide
  Sense strand starting at position 1218 of SEQ ID NO: 585500
uuuguuauacucuaaaguc

SEQ ID NO: 644833 - RNA, 19 nt, Artificial Sequence
  Description of Artificial Sequence: Synthetic oligonucleotide
  Antisense strand to SEQ ID NO: 644832
gacuuuagaguauaacaaa

SEQ ID NO: 644834 - RNA, 19 nt, Artificial Sequence
  Description of Artificial Sequence: Synthetic oligonucleotide
  Sense strand starting at position 1444 of SEQ ID NO: 585500
gccauauucuaagcaggaa

SEQ ID NO: 644835 - RNA, 19 nt, Artificial Sequence
  Description of Artificial Sequence: Synthetic oligonucleotide
  Antisense strand to SEQ ID NO: 644834
uuccugcuuagaauauggc

SEQ ID NO: 644836 - RNA, 19 nt, Artificial Sequence
  Description of Artificial Sequence: Synthetic oligonucleotide
  Sense strand starting at position 1447 of SEQ ID NO: 585500
auauucuaagcaggaauua

SEQ ID NO: 644837 - RNA, 19 nt, Artificial Sequence
  Description of Artificial Sequence: Synthetic oligonucleotide
  Antisense strand to SEQ ID NO: 644836
uaauuccugcuuagaauau

SEQ ID NO: 644838 - RNA, 19 nt, Artificial Sequence
  Description of Artificial Sequence: Synthetic oligonucleotide
  Sense strand starting at position 2057 of SEQ ID NO: 585500
cuuggaauuccacaugguu

SEQ ID NO: 644839 - RNA, 19 nt, Artificial Sequence
  Description of Artificial Sequence: Synthetic oligonucleotide
  Antisense strand to SEQ ID NO: 644838
aaccauguggaauuccaag

SEQ ID NO: 644840 - RNA, 19 nt, Artificial Sequence
  Description of Artificial Sequence: Synthetic oligonucleotide
  Sense strand starting at position 2718 of SEQ ID NO: 585500
cuguuucucuauuugguau

SEQ ID NO: 644841 - RNA, 19 nt, Artificial Sequence
  Description of Artificial Sequence: Synthetic oligonucleotide
  Antisense strand to SEQ ID NO: 644840
auaccaaauagagaaacag

SEQ ID NO: 644842 - RNA, 19 nt, Artificial Sequence
  Description of Artificial Sequence: Synthetic oligonucleotide
  Sense strand starting at position 2798 of SEQ ID NO: 585500
uguguuacucuuuacuuag

SEQ ID NO: 644843 - RNA, 19 nt, Artificial Sequence
  Description of Artificial Sequence: Synthetic oligonucleotide
  Antisense strand to SEQ ID NO: 644842
cuaaguaaagaguaacaca

SEQ ID NO: 644844 - RNA, 19 nt, Artificial Sequence
  Description of Artificial Sequence: Synthetic oligonucleotide
  Sense strand starting at position 2909 of SEQ ID NO: 585500
uguuaagugcuauaacaaa

SEQ ID NO: 644845 - RNA, 19 nt, Artificial Sequence
  Description of Artificial Sequence: Synthetic oligonucleotide
  Antisense strand to SEQ ID NO: 644844
uuuguuauagcacuuaaca

SEQ ID NO: 644846 - RNA, 19 nt, Artificial Sequence
  Description of Artificial Sequence: Synthetic oligonucleotide
  Sense strand starting at position 2982 of SEQ ID NO: 585500
aggaaagaguuacaugaaa

SEQ ID NO: 644847 - RNA, 19 nt, Artificial Sequence
  Description of Artificial Sequence: Synthetic oligonucleotide
  Antisense strand to SEQ ID NO: 644846
uuucauguaacucuuuccu

SEQ ID NO: 644848 - RNA, 19 nt, Artificial Sequence
  Description of Artificial Sequence: Synthetic oligonucleotide
  Sense strand starting at position 3031 of SEQ ID NO: 585500
ucaagagucuuuccucaag

SEQ ID NO: 644849 - RNA, 19 nt, Artificial Sequence
  Description of Artificial Sequence: Synthetic oligonucleotide
  Antisense strand to SEQ ID NO: 644848
cuugaggaaagacucuuga

SEQ ID NO: 644850 - RNA, 19 nt, Artificial Sequence
  Description of Artificial Sequence: Synthetic oligonucleotide
  Sense strand starting at position 3034 of SEQ ID NO: 585500
agagucuuuccucaagcuu

SEQ ID NO: 644851 - RNA, 19 nt, Artificial Sequence
  Description of Artificial Sequence: Synthetic oligonucleotide
  Antisense strand to SEQ ID NO: 644850
aagcuugaggaaagacucu

SEQ ID NO: 644852 - RNA, 19 nt, Artificial Sequence
  Description of Artificial Sequence: Synthetic oligonucleotide
  Sense strand starting at position 3082 of SEQ ID NO: 585500
uuuggaggcacuggaaauu

SEQ ID NO: 644853 - RNA, 19 nt, Artificial Sequence
  Description of Artificial Sequence: Synthetic oligonucleotide
  Antisense strand to SEQ ID NO: 644852
aauuuccagugccuccaaa

SEQ ID NO: 644854 - RNA, 19 nt, Artificial Sequence
  Description of Artificial Sequence: Synthetic oligonucleotide
  Sense strand starting at position 3088 of SEQ ID NO: 585500
ggcacuggaaauugugaau

SEQ ID NO: 644855 - RNA, 19 nt, Artificial Sequence
  Description of Artificial Sequence: Synthetic oligonucleotide
  Antisense strand to SEQ ID NO: 644854
auucacaauuuccagugcc

SEQ ID NO: 644856 - RNA, 19 nt, Artificial Sequence
  Description of Artificial Sequence: Synthetic oligonucleotide
  Sense strand starting at position 3094 of SEQ ID NO: 585500
ggaaauugugaauaacgug

SEQ ID NO: 644857 - RNA, 19 nt, Artificial Sequence
  Description of Artificial Sequence: Synthetic oligonucleotide
  Antisense strand to SEQ ID NO: 644856
cacguuauucacaauuucc

SEQ ID NO: 644858 - RNA, 19 nt, Artificial Sequence
  Description of Artificial Sequence: Synthetic oligonucleotide
  Sense strand starting at position 3173 of SEQ ID NO: 585500
gaguaacucuagccugaac

SEQ ID NO: 644859 - RNA, 19 nt, Artificial Sequence
  Description of Artificial Sequence: Synthetic oligonucleotide
  Antisense strand to SEQ ID NO: 644858
guucaggcuagaguuacuc

SEQ ID NO: 644860 - RNA, 19 nt, Artificial Sequence
  Description of Artificial Sequence: Synthetic oligonucleotide
  Sense strand starting at position 3239 of SEQ ID NO: 585500
gaauaugacuuagugcaaa

SEQ ID NO: 644861 - RNA, 19 nt, Artificial Sequence
  Description of Artificial Sequence: Synthetic oligonucleotide
  Antisense strand to SEQ ID NO: 644860
uuugcacuaagucauauuc

SEQ ID NO: 644862 - RNA, 19 nt, Artificial Sequence
  Description of Artificial Sequence: Synthetic oligonucleotide
  Sense strand starting at position 3242 of SEQ ID NO: 585500
uaugacuuagugcaaagua

SEQ ID NO: 644863 - RNA, 19 nt, Artificial Sequence
  Description of Artificial Sequence: Synthetic oligonucleotide
  Antisense strand to SEQ ID NO: 644862
uacuuugcacuaagucaua

SEQ ID NO: 644864 - RNA, 19 nt, Artificial Sequence
  Description of Artificial Sequence: Synthetic oligonucleotide
  Sense strand starting at position 3247 of SEQ ID NO: 585500
cuuagugcaaaguaguauu

SEQ ID NO: 644865 - RNA, 19 nt, Artificial Sequence
  Description of Artificial Sequence: Synthetic oligonucleotide
  Antisense strand to SEQ ID NO: 644864
aauacuacuuugcacuaag

SEQ ID NO: 644866 - RNA, 19 nt, Artificial Sequence
  Description of Artificial Sequence: Synthetic oligonucleotide
  Sense strand starting at position 3260 of SEQ ID NO: 585500
aguauuccucuuugugaag

SEQ ID NO: 644867 - RNA, 19 nt, Artificial Sequence
  Description of Artificial Sequence: Synthetic oligonucleotide
  Antisense strand to SEQ ID NO: 644866
cuucacaaagaggaauacu

SEQ ID NO: 644868 - RNA, 19 nt, Artificial Sequence
  Description of Artificial Sequence: Synthetic oligonucleotide
  Sense strand starting at position 3271 of SEQ ID NO: 585500
uugugaagucuguaauaua

SEQ ID NO: 644869 - RNA, 19 nt, Artificial Sequence
  Description of Artificial Sequence: Synthetic oligonucleotide
  Antisense strand to SEQ ID NO: 644868
uauauuacagacuucacaa

SEQ ID NO: 644870 - RNA, 19 nt, Artificial Sequence
  Description of Artificial Sequence: Synthetic oligonucleotide
  Sense strand starting at position 3281 of SEQ ID NO: 585500
uguaauauauuccugagua

SEQ ID NO: 644871 - RNA, 19 nt, Artificial Sequence
  Description of Artificial Sequence: Synthetic oligonucleotide
  Antisense strand to SEQ ID NO: 644870
uacucaggaauauauuaca

SEQ ID NO: 644872 - RNA, 19 nt, Artificial Sequence
  Description of Artificial Sequence: Synthetic oligonucleotide
  Sense strand starting at position 3285 of SEQ ID NO: 585500
auauauuccugaguaguuc

SEQ ID NO: 644873 - RNA, 19 nt, Artificial Sequence
  Description of Artificial Sequence: Synthetic oligonucleotide
  Antisense strand to SEQ ID NO: 644872
gaacuacucaggaauauau

SEQ ID NO: 644874 - RNA, 19 nt, Artificial Sequence
  Description of Artificial Sequence: Synthetic oligonucleotide
  Sense strand starting at position 3289 of SEQ ID NO: 585500
auuccugaguaguucuaag

SEQ ID NO: 644875 - RNA, 19 nt, Artificial Sequence
  Description of Artificial Sequence: Synthetic oligonucleotide
  Antisense strand to SEQ ID NO: 644874
cuuagaacuacucaggaau

SEQ ID NO: 644876 - RNA, 19 nt, Artificial Sequence
  Description of Artificial Sequence: Synthetic oligonucleotide
  Sense strand starting at position 3360 of SEQ ID NO: 585500
aaaugagguuguuucugau

SEQ ID NO: 644877 - RNA, 19 nt, Artificial Sequence
  Description of Artificial Sequence: Synthetic oligonucleotide
  Antisense strand to SEQ ID NO: 644876
aucagaaacaaccucauuu

SEQ ID NO: 644878 - RNA, 19 nt, Artificial Sequence
  Description of Artificial Sequence: Synthetic oligonucleotide
  Sense strand starting at position 3675 of SEQ ID NO: 585500
auguaaucuggaugaaagu

SEQ ID NO: 644879 - RNA, 19 nt, Artificial Sequence
  Description of Artificial Sequence: Synthetic oligonucleotide
  Antisense strand to SEQ ID NO: 644878
acuuucauccagauuacau

SEQ ID NO: 644880 - RNA, 19 nt, Artificial Sequence
  Description of Artificial Sequence: Synthetic oligonucleotide
  Sense strand starting at position 3787 of SEQ ID NO: 585500
aagguuaccugauugcaau

SEQ ID NO: 644881 - RNA, 19 nt, Artificial Sequence
  Description of Artificial Sequence: Synthetic oligonucleotide
  Antisense strand to SEQ ID NO: 644880
auugcaaucagguaaccuu

SEQ ID NO: 644882 - RNA, 19 nt, Artificial Sequence
  Description of Artificial Sequence: Synthetic oligonucleotide
  Sense strand starting at position 3788 of SEQ ID NO: 585500
agguuaccugauugcaaua

SEQ ID NO: 644883 - RNA, 19 nt, Artificial Sequence
  Description of Artificial Sequence: Synthetic oligonucleotide
  Antisense strand to SEQ ID NO: 644882
uauugcaaucagguaaccu

SEQ ID NO: 644884 - RNA, 19 nt, Artificial Sequence
  Description of Artificial Sequence: Synthetic oligonucleotide
  Sense strand starting at position 3891 of SEQ ID NO: 585500
gguaacugacauugucuca

SEQ ID NO: 644885 - RNA, 19 nt, Artificial Sequence
  Description of Artificial Sequence: Synthetic oligonucleotide
  Antisense strand to SEQ ID NO: 644884
ugagacaaugucaguuacc

SEQ ID NO: 644886 - RNA, 19 nt, Artificial Sequence
  Description of Artificial Sequence: Synthetic oligonucleotide
  Sense strand starting at position 3979 of SEQ ID NO: 585500
uuguucuauguugaacuau

SEQ ID NO: 644887 - RNA, 19 nt, Artificial Sequence
  Description of Artificial Sequence: Synthetic oligonucleotide
  Antisense strand to SEQ ID NO: 644886
auaguucaacauagaacaa

SEQ ID NO: 644888 - RNA, 19 nt, Artificial Sequence
  Description of Artificial Sequence: Synthetic oligonucleotide
  Sense strand starting at position 63 of SEQ ID NO: 585501
gguagcacuuaucucaagu

SEQ ID NO: 644889 - RNA, 19 nt, Artificial Sequence
  Description of Artificial Sequence: Synthetic oligonucleotide
  Antisense strand to SEQ ID NO: 644888
acuugagauaagugcuacc

SEQ ID NO: 644890 - RNA, 19 nt, Artificial Sequence
  Description of Artificial Sequence: Synthetic oligonucleotide
  Sense strand starting at position 73 of SEQ ID NO: 585501
aucucaaguguuuguaaga

SEQ ID NO: 644891 - RNA, 19 nt, Artificial Sequence
  Description of Artificial Sequence: Synthetic oligonucleotide
  Antisense strand to SEQ ID NO: 644890
ucuuacaaacacuugagau

SEQ ID NO: 644892 - RNA, 19 nt, Artificial Sequence
  Description of Artificial Sequence: Synthetic oligonucleotide
  Sense strand starting at position 74 of SEQ ID NO: 585501
ucucaaguguuuguaagaa

SEQ ID NO: 644893 - RNA, 19 nt, Artificial Sequence
  Description of Artificial Sequence: Synthetic oligonucleotide
  Antisense strand to SEQ ID NO: 644892
uucuuacaaacacuugaga

SEQ ID NO: 644894 - RNA, 19 nt, Artificial Sequence
  Description of Artificial Sequence: Synthetic oligonucleotide
  Sense strand starting at position 225 of SEQ ID NO: 585501
gauggaacuccgcaucaaa

SEQ ID NO: 644895 - RNA, 19 nt, Artificial Sequence
  Description of Artificial Sequence: Synthetic oligonucleotide
  Antisense strand to SEQ ID NO: 644894
uuugaugcggaguuccauc

SEQ ID NO: 644896 - RNA, 19 nt, Artificial Sequence
  Description of Artificial Sequence: Synthetic oligonucleotide
  Sense strand starting at position 243 of SEQ ID NO: 585501
aacaaacuugccugugagu

SEQ ID NO: 644897 - RNA, 19 nt, Artificial Sequence
  Description of Artificial Sequence: Synthetic oligonucleotide
  Antisense strand to SEQ ID NO: 644896
acucacaggcaaguuuguu

SEQ ID NO: 644898 - RNA, 19 nt, Artificial Sequence
  Description of Artificial Sequence: Synthetic oligonucleotide
  Sense strand starting at position 245 of SEQ ID NO: 585501
caaacuugccugugaguau

SEQ ID NO: 644899 - RNA, 19 nt, Artificial Sequence
  Description of Artificial Sequence: Synthetic oligonucleotide
  Antisense strand to SEQ ID NO: 644898
auacucacaggcaaguuug

SEQ ID NO: 644900 - RNA, 19 nt, Artificial Sequence
  Description of Artificial Sequence: Synthetic oligonucleotide
  Sense strand starting at position 254 of SEQ ID NO: 585501
cugugaguaucucugggaa

SEQ ID NO: 644901 - RNA, 19 nt, Artificial Sequence
  Description of Artificial Sequence: Synthetic oligonucleotide
  Antisense strand to SEQ ID NO: 644900
uucccagagauacucacag

SEQ ID NO: 644902 - RNA, 19 nt, Artificial Sequence
  Description of Artificial Sequence: Synthetic oligonucleotide
  Sense strand starting at position 257 of SEQ ID NO: 585501
ugaguaucucugggaaggu

SEQ ID NO: 644903 - RNA, 19 nt, Artificial Sequence
  Description of Artificial Sequence: Synthetic oligonucleotide
  Antisense strand to SEQ ID NO: 644902
accuucccagagauacuca

SEQ ID NO: 644904 - RNA, 19 nt, Artificial Sequence
  Description of Artificial Sequence: Synthetic oligonucleotide
  Sense strand starting at position 559 of SEQ ID NO: 585501
gagcaaaugguacguauca

SEQ ID NO: 644905 - RNA, 19 nt, Artificial Sequence
  Description of Artificial Sequence: Synthetic oligonucleotide
  Antisense strand to SEQ ID NO: 644904
ugauacguaccauuugcuc

SEQ ID NO: 644906 - RNA, 19 nt, Artificial Sequence
  Description of Artificial Sequence: Synthetic oligonucleotide
  Sense strand starting at position 560 of SEQ ID NO: 585501
agcaaaugguacguaucaa

SEQ ID NO: 644907 - RNA, 19 nt, Artificial Sequence
  Description of Artificial Sequence: Synthetic oligonucleotide
  Antisense strand to SEQ ID NO: 644906
uugauacguaccauuugcu

SEQ ID NO: 644908 - RNA, 19 nt, Artificial Sequence
  Description of Artificial Sequence: Synthetic oligonucleotide
  Sense strand starting at position 561 of SEQ ID NO: 585501
gcaaaugguacguaucaaa

SEQ ID NO: 644909 - RNA, 19 nt, Artificial Sequence
  Description of Artificial Sequence: Synthetic oligonucleotide
  Antisense strand to SEQ ID NO: 644908
uuugauacguaccauuugc

SEQ ID NO: 644910 - RNA, 19 nt, Artificial Sequence
  Description of Artificial Sequence: Synthetic oligonucleotide
  Sense strand starting at position 592 of SEQ ID NO: 585501
gcucccugaggcuaagauu

SEQ ID NO: 644911 - RNA, 19 nt, Artificial Sequence
  Description of Artificial Sequence: Synthetic oligonucleotide
  Antisense strand to SEQ ID NO: 644910
aaucuuagccucagggagc

SEQ ID NO: 644912 - RNA, 19 nt, Artificial Sequence
  Description of Artificial Sequence: Synthetic oligonucleotide
  Sense strand starting at position 637 of SEQ ID NO: 585501
guguuacaauuccugaucu

SEQ ID NO: 644913 - RNA, 19 nt, Artificial Sequence
  Description of Artificial Sequence: Synthetic oligonucleotide
  Antisense strand to SEQ ID NO: 644912
agaucaggaauuguaacac

SEQ ID NO: 644914 - RNA, 19 nt, Artificial Sequence
  Description of Artificial Sequence: Synthetic oligonucleotide
  Sense strand starting at position 886 of SEQ ID NO: 585501
gcgacuuauuaucugggca

SEQ ID NO: 644915 - RNA, 19 nt, Artificial Sequence
  Description of Artificial Sequence: Synthetic oligonucleotide
  Antisense strand to SEQ ID NO: 644914
ugcccagauaauaagucgc

SEQ ID NO: 644916 - RNA, 19 nt, Artificial Sequence
  Description of Artificial Sequence: Synthetic oligonucleotide
  Sense strand starting at position 887 of SEQ ID NO: 585501
cgacuuauuaucugggcaa

SEQ ID NO: 644917 - RNA, 19 nt, Artificial Sequence
  Description of Artificial Sequence: Synthetic oligonucleotide
  Antisense strand to SEQ ID NO: 644916
uugcccagauaauaagucg

SEQ ID NO: 644918 - RNA, 19 nt, Artificial Sequence
  Description of Artificial Sequence: Synthetic oligonucleotide
  Sense strand starting at position 889 of SEQ ID NO: 585501
acuuauuaucugggcaauu

SEQ ID NO: 644919 - RNA, 19 nt, Artificial Sequence
  Description of Artificial Sequence: Synthetic oligonucleotide
  Antisense strand to SEQ ID NO: 644918
aauugcccagauaauaagu

SEQ ID NO: 644920 - RNA, 19 nt, Artificial Sequence
  Description of Artificial Sequence: Synthetic oligonucleotide
  Sense strand starting at position 1078 of SEQ ID NO: 585501
cgaucucccucacuguuaa

SEQ ID NO: 644921 - RNA, 19 nt, Artificial Sequence
  Description of Artificial Sequence: Synthetic oligonucleotide
  Antisense strand to SEQ ID NO: 644920
uuaacagugagggagaucg

SEQ ID NO: 644922 - RNA, 19 nt, Artificial Sequence
  Description of Artificial Sequence: Synthetic oligonucleotide
  Sense strand starting at position 1173 of SEQ ID NO: 585501
gcaggugaacggugcauuu

SEQ ID NO: 644923 - RNA, 19 nt, Artificial Sequence
  Description of Artificial Sequence: Synthetic oligonucleotide
  Antisense strand to SEQ ID NO: 644922
aaaugcaccguucaccugc

SEQ ID NO: 644924 - RNA, 19 nt, Artificial Sequence
  Description of Artificial Sequence: Synthetic oligonucleotide
  Sense strand starting at position 1372 of SEQ ID NO: 585501
gccuucuuccgggaaagug

SEQ ID NO: 644925 - RNA, 19 nt, Artificial Sequence
  Description of Artificial Sequence: Synthetic oligonucleotide
  Antisense strand to SEQ ID NO: 644924
cacuuucccggaagaaggc

SEQ ID NO: 644926 - RNA, 19 nt, Artificial Sequence
  Description of Artificial Sequence: Synthetic oligonucleotide
  Sense strand starting at position 2301 of SEQ ID NO: 585501
gccuuucugccgucucgaa

SEQ ID NO: 644927 - RNA, 19 nt, Artificial Sequence
  Description of Artificial Sequence: Synthetic oligonucleotide
  Antisense strand to SEQ ID NO: 644926
uucgagacggcagaaaggc

SEQ ID NO: 644928 - RNA, 19 nt, Artificial Sequence
  Description of Artificial Sequence: Synthetic oligonucleotide
  Sense strand starting at position 2302 of SEQ ID NO: 585501
ccuuucugccgucucgaau

SEQ ID NO: 644929 - RNA, 19 nt, Artificial Sequence
  Description of Artificial Sequence: Synthetic oligonucleotide
  Antisense strand to SEQ ID NO: 644928
auucgagacggcagaaagg

SEQ ID NO: 644930 - RNA, 19 nt, Artificial Sequence
  Description of Artificial Sequence: Synthetic oligonucleotide
  Sense strand starting at position 2303 of SEQ ID NO: 585501
cuuucugccgucucgaauu

SEQ ID NO: 644931 - RNA, 19 nt, Artificial Sequence
  Description of Artificial Sequence: Synthetic oligonucleotide
  Antisense strand to SEQ ID NO: 644930
aauucgagacggcagaaag

SEQ ID NO: 644932 - RNA, 19 nt, Artificial Sequence
  Description of Artificial Sequence: Synthetic oligonucleotide
  Sense strand starting at position 2305 of SEQ ID NO: 585501
uucugccgucucgaauuua

SEQ ID NO: 644933 - RNA, 19 nt, Artificial Sequence
  Description of Artificial Sequence: Synthetic oligonucleotide
  Antisense strand to SEQ ID NO: 644932
uaaauucgagacggcagaa

SEQ ID NO: 644934 - RNA, 19 nt, Artificial Sequence
  Description of Artificial Sequence: Synthetic oligonucleotide
  Sense strand starting at position 2381 of SEQ ID NO: 585501
gcacgcauuucgguuguga

SEQ ID NO: 644935 - RNA, 19 nt, Artificial Sequence
  Description of Artificial Sequence: Synthetic oligonucleotide
  Antisense strand to SEQ ID NO: 644934
ucacaaccgaaaugcgugc

SEQ ID NO: 644936 - RNA, 19 nt, Artificial Sequence
  Description of Artificial Sequence: Synthetic oligonucleotide
  Sense strand starting at position 2383 of SEQ ID NO: 585501
acgcauuucgguugugaaa

SEQ ID NO: 644937 - RNA, 19 nt, Artificial Sequence
  Description of Artificial Sequence: Synthetic oligonucleotide
  Antisense strand to SEQ ID NO: 644936
uuucacaaccgaaaugcgu

SEQ ID NO: 644938 - RNA, 19 nt, Artificial Sequence
  Description of Artificial Sequence: Synthetic oligonucleotide
  Sense strand starting at position 2842 of SEQ ID NO: 585501
guugcuuggaggcagaauu

SEQ ID NO: 644939 - RNA, 19 nt, Artificial Sequence
  Description of Artificial Sequence: Synthetic oligonucleotide
  Antisense strand to SEQ ID NO: 644938
aauucugccuccaagcaac

SEQ ID NO: 644940 - RNA, 19 nt, Artificial Sequence
  Description of Artificial Sequence: Synthetic oligonucleotide
  Sense strand starting at position 2853 of SEQ ID NO: 585501
gcagaauuguuguuccuua

SEQ ID NO: 644941 - RNA, 19 nt, Artificial Sequence
  Description of Artificial Sequence: Synthetic oligonucleotide
  Antisense strand to SEQ ID NO: 644940
uaaggaacaacaauucugc

SEQ ID NO: 644942 - RNA, 19 nt, Artificial Sequence
  Description of Artificial Sequence: Synthetic oligonucleotide
  Sense strand starting at position 2858 of SEQ ID NO: 585501
auuguuguuccuuauuaag

SEQ ID NO: 644943 - RNA, 19 nt, Artificial Sequence
  Description of Artificial Sequence: Synthetic oligonucleotide
  Antisense strand to SEQ ID NO: 644942
cuuaauaaggaacaacaau

SEQ ID NO: 644944 - RNA, 19 nt, Artificial Sequence
  Description of Artificial Sequence: Synthetic oligonucleotide
  Sense strand starting at position 2860 of SEQ ID NO: 585501
uguuguuccuuauuaagac

SEQ ID NO: 644945 - RNA, 19 nt, Artificial Sequence
  Description of Artificial Sequence: Synthetic oligonucleotide
  Antisense strand to SEQ ID NO: 644944
gucuuaauaaggaacaaca

SEQ ID NO: 644946 - RNA, 19 nt, Artificial Sequence
  Description of Artificial Sequence: Synthetic oligonucleotide
  Sense strand starting at position 2947 of SEQ ID NO: 585501
ggucuagugcugguguguu

SEQ ID NO: 644947 - RNA, 19 nt, Artificial Sequence
  Description of Artificial Sequence: Synthetic oligonucleotide
  Antisense strand to SEQ ID NO: 644946
aacacaccagcacuagacc

SEQ ID NO: 644948 - RNA, 19 nt, Artificial Sequence
  Description of Artificial Sequence: Synthetic oligonucleotide
  Sense strand starting at position 2989 of SEQ ID NO: 585501
acucguucugcugaaucaa

SEQ ID NO: 644949 - RNA, 19 nt, Artificial Sequence
  Description of Artificial Sequence: Synthetic oligonucleotide
  Antisense strand to SEQ ID NO: 644948
uugauucagcagaacgagu

SEQ ID NO: 644950 - RNA, 19 nt, Artificial Sequence
  Description of Artificial Sequence: Synthetic oligonucleotide
  Sense strand starting at position 3180 of SEQ ID NO: 585501
guggcauuacugcaauauu

SEQ ID NO: 644951 - RNA, 19 nt, Artificial Sequence
  Description of Artificial Sequence: Synthetic oligonucleotide
  Antisense strand to SEQ ID NO: 644950
aauauugcaguaaugccac

SEQ ID NO: 644952 - RNA, 19 nt, Artificial Sequence
  Description of Artificial Sequence: Synthetic oligonucleotide
  Sense strand starting at position 3304 of SEQ ID NO: 585501
ggguuucagccguggaaac

SEQ ID NO: 644953 - RNA, 19 nt, Artificial Sequence
  Description of Artificial Sequence: Synthetic oligonucleotide
  Antisense strand to SEQ ID NO: 644952
guuuccacggcugaaaccc

SEQ ID NO: 644954 - RNA, 19 nt, Artificial Sequence
  Description of Artificial Sequence: Synthetic oligonucleotide
  Sense strand starting at position 3305 of SEQ ID NO: 585501
gguuucagccguggaaacu

SEQ ID NO: 644955 - RNA, 19 nt, Artificial Sequence
  Description of Artificial Sequence: Synthetic oligonucleotide
  Antisense strand to SEQ ID NO: 644954
aguuuccacggcugaaacc

SEQ ID NO: 644956 - RNA, 19 nt, Artificial Sequence
  Description of Artificial Sequence: Synthetic oligonucleotide
  Sense strand starting at position 3306 of SEQ ID NO: 585501
guuucagccguggaaacuu

SEQ ID NO: 644957 - RNA, 19 nt, Artificial Sequence
  Description of Artificial Sequence: Synthetic oligonucleotide
  Antisense strand to SEQ ID NO: 644956
aaguuuccacggcugaaac

SEQ ID NO: 644958 - RNA, 19 nt, Artificial Sequence
  Description of Artificial Sequence: Synthetic oligonucleotide
  Sense strand starting at position 3314 of SEQ ID NO: 585501
cguggaaacuuagcaaacu

SEQ ID NO: 644959 - RNA, 19 nt, Artificial Sequence
  Description of Artificial Sequence: Synthetic oligonucleotide
  Antisense strand to SEQ ID NO: 644958
aguuugcuaaguuuccacg

SEQ ID NO: 644960 - RNA, 19 nt, Artificial Sequence
  Description of Artificial Sequence: Synthetic oligonucleotide
  Sense strand starting at position 3702 of SEQ ID NO: 585501
ugguguugucaacaguaaa

SEQ ID NO: 644961 - RNA, 19 nt, Artificial Sequence
  Description of Artificial Sequence: Synthetic oligonucleotide
  Antisense strand to SEQ ID NO: 644960
uuuacuguugacaacacca

SEQ ID NO: 644962 - RNA, 19 nt, Artificial Sequence
  Description of Artificial Sequence: Synthetic oligonucleotide
  Sense strand starting at position 3891 of SEQ ID NO: 585501
gucccaaggaucuguuagu

SEQ ID NO: 644963 - RNA, 19 nt, Artificial Sequence
  Description of Artificial Sequence: Synthetic oligonucleotide
  Antisense strand to SEQ ID NO: 644962
acuaacagauccuugggac

SEQ ID NO: 644964 - RNA, 19 nt, Artificial Sequence
  Description of Artificial Sequence: Synthetic oligonucleotide
  Sense strand starting at position 3909 of SEQ ID NO: 585501
uggccuuuauuuccgaaca

SEQ ID NO: 644965 - RNA, 19 nt, Artificial Sequence
  Description of Artificial Sequence: Synthetic oligonucleotide
  Antisense strand to SEQ ID NO: 644964
uguucggaaauaaaggcca

SEQ ID NO: 644966 - RNA, 19 nt, Artificial Sequence
  Description of Artificial Sequence: Synthetic oligonucleotide
  Sense strand starting at position 3911 of SEQ ID NO: 585501
gccuuuauuuccgaacaac

SEQ ID NO: 644967 - RNA, 19 nt, Artificial Sequence
  Description of Artificial Sequence: Synthetic oligonucleotide
  Antisense strand to SEQ ID NO: 644966
guuguucggaaauaaaggc

SEQ ID NO: 644968 - RNA, 19 nt, Artificial Sequence
  Description of Artificial Sequence: Synthetic oligonucleotide
  Sense strand starting at position 208 of SEQ ID NO: 585502
augauuaccucauuauguc

SEQ ID NO: 644969 - RNA, 19 nt, Artificial Sequence
  Description of Artificial Sequence: Synthetic oligonucleotide
  Antisense strand to SEQ ID NO: 644968
gacauaaugagguaaucau

SEQ ID NO: 644970 - RNA, 19 nt, Artificial Sequence
  Description of Artificial Sequence: Synthetic oligonucleotide
  Sense strand starting at position 214 of SEQ ID NO: 585502
accucauuauguccagauc

SEQ ID NO: 644971 - RNA, 19 nt, Artificial Sequence
  Description of Artificial Sequence: Synthetic oligonucleotide
  Antisense strand to SEQ ID NO: 644970
gaucuggacauaaugaggu

SEQ ID NO: 644972 - RNA, 19 nt, Artificial Sequence
  Description of Artificial Sequence: Synthetic oligonucleotide
  Sense strand starting at position 215 of SEQ ID NO: 585502
ccucauuauguccagaucu

SEQ ID NO: 644973 - RNA, 19 nt, Artificial Sequence
  Description of Artificial Sequence: Synthetic oligonucleotide
  Antisense strand to SEQ ID NO: 644972
agaucuggacauaaugagg

SEQ ID NO: 644974 - RNA, 19 nt, Artificial Sequence
  Description of Artificial Sequence: Synthetic oligonucleotide
  Sense strand starting at position 217 of SEQ ID NO: 585502
ucauuauguccagaucuug

SEQ ID NO: 644975 - RNA, 19 nt, Artificial Sequence
  Description of Artificial Sequence: Synthetic oligonucleotide
  Antisense strand to SEQ ID NO: 644974
caagaucuggacauaauga

SEQ ID NO: 644976 - RNA, 19 nt, Artificial Sequence
  Description of Artificial Sequence: Synthetic oligonucleotide
  Sense strand starting at position 367 of SEQ ID NO: 585502
uuuaacaucuuaguaguga

SEQ ID NO: 644977 - RNA, 19 nt, Artificial Sequence
  Description of Artificial Sequence: Synthetic oligonucleotide
  Antisense strand to SEQ ID NO: 644976
ucacuacuaagauguuaaa

SEQ ID NO: 644978 - RNA, 19 nt, Artificial Sequence
  Description of Artificial Sequence: Synthetic oligonucleotide
  Sense strand starting at position 423 of SEQ ID NO: 585502
ucccucugucuccgauuua

SEQ ID NO: 644979 - RNA, 19 nt, Artificial Sequence
  Description of Artificial Sequence: Synthetic oligonucleotide
  Antisense strand to SEQ ID NO: 644978
uaaaucggagacagaggga

SEQ ID NO: 644980 - RNA, 19 nt, Artificial Sequence
  Description of Artificial Sequence: Synthetic oligonucleotide
  Sense strand starting at position 577 of SEQ ID NO: 585502
ucuguuuaaacuggagaga

SEQ ID NO: 644981 - RNA, 19 nt, Artificial Sequence
  Description of Artificial Sequence: Synthetic oligonucleotide
  Antisense strand to SEQ ID NO: 644980
ucucuccaguuuaaacaga

SEQ ID NO: 644982 - RNA, 19 nt, Artificial Sequence
  Description of Artificial Sequence: Synthetic oligonucleotide
  Sense strand starting at position 841 of SEQ ID NO: 585502
gugggaagggcuuaucaca

SEQ ID NO: 644983 - RNA, 19 nt, Artificial Sequence
  Description of Artificial Sequence: Synthetic oligonucleotide
  Antisense strand to SEQ ID NO: 644982
ugugauaagcccuucccac

SEQ ID NO: 644984 - RNA, 19 nt, Artificial Sequence
  Description of Artificial Sequence: Synthetic oligonucleotide
  Sense strand starting at position 957 of SEQ ID NO: 585502
ugugguguuuauuugugaa

SEQ ID NO: 644985 - RNA, 19 nt, Artificial Sequence
  Description of Artificial Sequence: Synthetic oligonucleotide
  Antisense strand to SEQ ID NO: 644984
uucacaaauaaacaccaca

SEQ ID NO: 644986 - RNA, 19 nt, Artificial Sequence
  Description of Artificial Sequence: Synthetic oligonucleotide
  Sense strand starting at position 1109 of SEQ ID NO: 585502
gaaguaaugcagcauacau

SEQ ID NO: 644987 - RNA, 19 nt, Artificial Sequence
  Description of Artificial Sequence: Synthetic oligonucleotide
  Antisense strand to SEQ ID NO: 644986
auguaugcugcauuacuuc

SEQ ID NO: 644988 - RNA, 19 nt, Artificial Sequence
  Description of Artificial Sequence: Synthetic oligonucleotide
  Sense strand starting at position 1111 of SEQ ID NO: 585502
aguaaugcagcauacauaa

SEQ ID NO: 644989 - RNA, 19 nt, Artificial Sequence
  Description of Artificial Sequence: Synthetic oligonucleotide
  Antisense strand to SEQ ID NO: 644988
uuauguaugcugcauuacu

SEQ ID NO: 644990 - RNA, 19 nt, Artificial Sequence
  Description of Artificial Sequence: Synthetic oligonucleotide
  Sense strand starting at position 1159 of SEQ ID NO: 585502
ugucuauauguacacauca

SEQ ID NO: 644991 - RNA, 19 nt, Artificial Sequence
  Description of Artificial Sequence: Synthetic oligonucleotide
  Antisense strand to SEQ ID NO: 644990
ugauguguacauauagaca

SEQ ID NO: 644992 - RNA, 19 nt, Artificial Sequence
  Description of Artificial Sequence: Synthetic oligonucleotide
  Sense strand starting at position 1166 of SEQ ID NO: 585502
auguacacaucacuugauu

SEQ ID NO: 644993 - RNA, 19 nt, Artificial Sequence
  Description of Artificial Sequence: Synthetic oligonucleotide
  Antisense strand to SEQ ID NO: 644992
aaucaagugauguguacau

SEQ ID NO: 644994 - RNA, 19 nt, Artificial Sequence
  Description of Artificial Sequence: Synthetic oligonucleotide
  Sense strand starting at position 1315 of SEQ ID NO: 585502
uugugauucucaucagaaa

SEQ ID NO: 644995 - RNA, 19 nt, Artificial Sequence
  Description of Artificial Sequence: Synthetic oligonucleotide
  Antisense strand to SEQ ID NO: 644994
uuucugaugagaaucacaa

SEQ ID NO: 644996 - RNA, 19 nt, Artificial Sequence
  Description of Artificial Sequence: Synthetic oligonucleotide
  Sense strand starting at position 1370 of SEQ ID NO: 585502
ugauacucuugaguuccaa

SEQ ID NO: 644997 - RNA, 19 nt, Artificial Sequence
  Description of Artificial Sequence: Synthetic oligonucleotide
  Antisense strand to SEQ ID NO: 644996
uuggaacucaagaguauca

SEQ ID NO: 644998 - RNA, 19 nt, Artificial Sequence
  Description of Artificial Sequence: Synthetic oligonucleotide
  Sense strand starting at position 1725 of SEQ ID NO: 585502
accugaaguuugguacaau

SEQ ID NO: 644999 - RNA, 19 nt, Artificial Sequence
  Description of Artificial Sequence: Synthetic oligonucleotide
  Antisense strand to SEQ ID NO: 644998
auuguaccaaacuucaggu

SEQ ID NO: 645000 - RNA, 19 nt, Artificial Sequence
  Description of Artificial Sequence: Synthetic oligonucleotide
  Sense strand starting at position 1848 of SEQ ID NO: 585502
acuccaagucuagagcaua

SEQ ID NO: 645001 - RNA, 19 nt, Artificial Sequence
  Description of Artificial Sequence: Synthetic oligonucleotide
  Antisense strand to SEQ ID NO: 645000
uaugcucuagacuuggagu

SEQ ID NO: 645002 - RNA, 19 nt, Artificial Sequence
  Description of Artificial Sequence: Synthetic oligonucleotide
  Sense strand starting at position 1851 of SEQ ID NO: 585502
ccaagucuagagcauacau

SEQ ID NO: 645003 - RNA, 19 nt, Artificial Sequence
  Description of Artificial Sequence: Synthetic oligonucleotide
  Antisense strand to SEQ ID NO: 645002
auguaugcucuagacuugg

SEQ ID NO: 645004 - RNA, 19 nt, Artificial Sequence
  Description of Artificial Sequence: Synthetic oligonucleotide
  Sense strand starting at position 1909 of SEQ ID NO: 585502
cuaugaaagucucugguaa

SEQ ID NO: 645005 - RNA, 19 nt, Artificial Sequence
  Description of Artificial Sequence: Synthetic oligonucleotide
  Antisense strand to SEQ ID NO: 645004
uuaccagagacuuucauag

SEQ ID NO: 645006 - RNA, 19 nt, Artificial Sequence
  Description of Artificial Sequence: Synthetic oligonucleotide
  Sense strand starting at position 1910 of SEQ ID NO: 585502
uaugaaagucucugguaaa

SEQ ID NO: 645007 - RNA, 19 nt, Artificial Sequence
  Description of Artificial Sequence: Synthetic oligonucleotide
  Antisense strand to SEQ ID NO: 645006
uuuaccagagacuuucaua

SEQ ID NO: 645008 - RNA, 19 nt, Artificial Sequence
  Description of Artificial Sequence: Synthetic oligonucleotide
  Sense strand starting at position 1944 of SEQ ID NO: 585502
ucguauaaaucuucugaaa

SEQ ID NO: 645009 - RNA, 19 nt, Artificial Sequence
  Description of Artificial Sequence: Synthetic oligonucleotide
  Antisense strand to SEQ ID NO: 645008
uuucagaagauuuauacga

SEQ ID NO: 645010 - RNA, 19 nt, Artificial Sequence
  Description of Artificial Sequence: Synthetic oligonucleotide
  Sense strand starting at position 1965 of SEQ ID NO: 585502
acaaguguccacuacgaga

SEQ ID NO: 645011 - RNA, 19 nt, Artificial Sequence
  Description of Artificial Sequence: Synthetic oligonucleotide
  Antisense strand to SEQ ID NO: 645010
ucucguaguggacacuugu

SEQ ID NO: 645012 - RNA, 19 nt, Artificial Sequence
  Description of Artificial Sequence: Synthetic oligonucleotide
  Sense strand starting at position 1982 of SEQ ID NO: 585502
gaggaaguaucuucucucu

SEQ ID NO: 645013 - RNA, 19 nt, Artificial Sequence
  Description of Artificial Sequence: Synthetic oligonucleotide
  Antisense strand to SEQ ID NO: 645012
agagagaagauacuuccuc

SEQ ID NO: 645014 - RNA, 19 nt, Artificial Sequence
  Description of Artificial Sequence: Synthetic oligonucleotide
  Sense strand starting at position 2235 of SEQ ID NO: 585502
cuagauuuguccucggcaa

SEQ ID NO: 645015 - RNA, 19 nt, Artificial Sequence
  Description of Artificial Sequence: Synthetic oligonucleotide
  Antisense strand to SEQ ID NO: 645014
uugccgaggacaaaucuag

SEQ ID NO: 645016 - RNA, 19 nt, Artificial Sequence
  Description of Artificial Sequence: Synthetic oligonucleotide
  Sense strand starting at position 2236 of SEQ ID NO: 585502
uagauuuguccucggcaau

SEQ ID NO: 645017 - RNA, 19 nt, Artificial Sequence
  Description of Artificial Sequence: Synthetic oligonucleotide
  Antisense strand to SEQ ID NO: 645016
auugccgaggacaaaucua

SEQ ID NO: 645018 - RNA, 19 nt, Artificial Sequence
  Description of Artificial Sequence: Synthetic oligonucleotide
  Sense strand starting at position 2237 of SEQ ID NO: 585502
agauuuguccucggcaauc

SEQ ID NO: 645019 - RNA, 19 nt, Artificial Sequence
  Description of Artificial Sequence: Synthetic oligonucleotide
  Antisense strand to SEQ ID NO: 645018
gauugccgaggacaaaucu

SEQ ID NO: 645020 - RNA, 19 nt, Artificial Sequence
  Description of Artificial Sequence: Synthetic oligonucleotide
  Sense strand starting at position 2419 of SEQ ID NO: 585502
gcaguuagcaaguuuguuu

SEQ ID NO: 645021 - RNA, 19 nt, Artificial Sequence
  Description of Artificial Sequence: Synthetic oligonucleotide
  Antisense strand to SEQ ID NO: 645020
aaacaaacuugcuaacugc

SEQ ID NO: 645022 - RNA, 19 nt, Artificial Sequence
  Description of Artificial Sequence: Synthetic oligonucleotide
  Sense strand starting at position 2451 of SEQ ID NO: 585502
ucuuaaagauguuugcaaa

SEQ ID NO: 645023 - RNA, 19 nt, Artificial Sequence
  Description of Artificial Sequence: Synthetic oligonucleotide
  Antisense strand to SEQ ID NO: 645022
uuugcaaacaucuuuaaga

SEQ ID NO: 645024 - RNA, 19 nt, Artificial Sequence
  Description of Artificial Sequence: Synthetic oligonucleotide
  Sense strand starting at position 2452 of SEQ ID NO: 585502
cuuaaagauguuugcaaag

SEQ ID NO: 645025 - RNA, 19 nt, Artificial Sequence
  Description of Artificial Sequence: Synthetic oligonucleotide
  Antisense strand to SEQ ID NO: 645024
cuuugcaaacaucuuuaag

SEQ ID NO: 645026 - RNA, 19 nt, Artificial Sequence
  Description of Artificial Sequence: Synthetic oligonucleotide
  Sense strand starting at position 2487 of SEQ ID NO: 585502
gcucuagggaaaggucaaa

SEQ ID NO: 645027 - RNA, 19 nt, Artificial Sequence
  Description of Artificial Sequence: Synthetic oligonucleotide
  Antisense strand to SEQ ID NO: 645026
uuugaccuuucccuagagc

SEQ ID NO: 645028 - RNA, 19 nt, Artificial Sequence
  Description of Artificial Sequence: Synthetic oligonucleotide
  Sense strand starting at position 2746 of SEQ ID NO: 585502
uuauuuggagccuguguua

SEQ ID NO: 645029 - RNA, 19 nt, Artificial Sequence
  Description of Artificial Sequence: Synthetic oligonucleotide
  Antisense strand to SEQ ID NO: 645028
uaacacaggcuccaaauaa

SEQ ID NO: 645030 - RNA, 19 nt, Artificial Sequence
  Description of Artificial Sequence: Synthetic oligonucleotide
  Sense strand starting at position 3047 of SEQ ID NO: 585502
cugguuugagguuaccaau

SEQ ID NO: 645031 - RNA, 19 nt, Artificial Sequence
  Description of Artificial Sequence: Synthetic oligonucleotide
  Antisense strand to SEQ ID NO: 645030
auugguaaccucaaaccag

SEQ ID NO: 645032 - RNA, 19 nt, Artificial Sequence
  Description of Artificial Sequence: Synthetic oligonucleotide
  Sense strand starting at position 3252 of SEQ ID NO: 585502
aggagaaucugcuccuuag

SEQ ID NO: 645033 - RNA, 19 nt, Artificial Sequence
  Description of Artificial Sequence: Synthetic oligonucleotide
  Antisense strand to SEQ ID NO: 645032
cuaaggagcagauucuccu

SEQ ID NO: 645034 - RNA, 19 nt, Artificial Sequence
  Description of Artificial Sequence: Synthetic oligonucleotide
  Sense strand starting at position 3397 of SEQ ID NO: 585502
augguauacuugucacaau

SEQ ID NO: 645035 - RNA, 19 nt, Artificial Sequence
  Description of Artificial Sequence: Synthetic oligonucleotide
  Antisense strand to SEQ ID NO: 645034
auugugacaaguauaccau

SEQ ID NO: 645036 - RNA, 19 nt, Artificial Sequence
  Description of Artificial Sequence: Synthetic oligonucleotide
  Sense strand starting at position 3424 of SEQ ID NO: 585502
cauggugaacguuauuauu

SEQ ID NO: 645037 - RNA, 19 nt, Artificial Sequence
  Description of Artificial Sequence: Synthetic oligonucleotide
  Antisense strand to SEQ ID NO: 645036
aauaauaacguucaccaug

SEQ ID NO: 645038 - RNA, 19 nt, Artificial Sequence
  Description of Artificial Sequence: Synthetic oligonucleotide
  Sense strand starting at position 3537 of SEQ ID NO: 585502
uagaaucaguaggauuuau

SEQ ID NO: 645039 - RNA, 19 nt, Artificial Sequence
  Description of Artificial Sequence: Synthetic oligonucleotide
  Antisense strand to SEQ ID NO: 645038
auaaauccuacugauucua

SEQ ID NO: 645040 - RNA, 19 nt, Artificial Sequence
  Description of Artificial Sequence: Synthetic oligonucleotide
  Sense strand starting at position 3546 of SEQ ID NO: 585502
uaggauuuaugauagauug

SEQ ID NO: 645041 - RNA, 19 nt, Artificial Sequence
  Description of Artificial Sequence: Synthetic oligonucleotide
  Antisense strand to SEQ ID NO: 645040
caaucuaucauaaauccua

SEQ ID NO: 645042 - RNA, 19 nt, Artificial Sequence
  Description of Artificial Sequence: Synthetic oligonucleotide
  Sense strand starting at position 3552 of SEQ ID NO: 585502
uuaugauagauuggguaug

SEQ ID NO: 645043 - RNA, 19 nt, Artificial Sequence
  Description of Artificial Sequence: Synthetic oligonucleotide
  Antisense strand to SEQ ID NO: 645042
cauacccaaucuaucauaa

SEQ ID NO: 645044 - RNA, 19 nt, Artificial Sequence
  Description of Artificial Sequence: Synthetic oligonucleotide
  Sense strand starting at position 3729 of SEQ ID NO: 585502
uugaauaggcuguggagau

SEQ ID NO: 645045 - RNA, 19 nt, Artificial Sequence
  Description of Artificial Sequence: Synthetic oligonucleotide
  Antisense strand to SEQ ID NO: 645044
aucuccacagccuauucaa

SEQ ID NO: 645046 - RNA, 19 nt, Artificial Sequence
  Description of Artificial Sequence: Synthetic oligonucleotide
  Sense strand starting at position 3769 of SEQ ID NO: 585502
ggguguaggcuggagauaa

SEQ ID NO: 645047 - RNA, 19 nt, Artificial Sequence
  Description of Artificial Sequence: Synthetic oligonucleotide
  Antisense strand to SEQ ID NO: 645046
uuaucuccagccuacaccc

SEQ ID NO: 645048 - RNA, 19 nt, Artificial Sequence
  Description of Artificial Sequence: Synthetic oligonucleotide
  Sense strand starting at position 148 of SEQ ID NO: 585503
ccaagacaucuaggaaguu

SEQ ID NO: 645049 - RNA, 19 nt, Artificial Sequence
  Description of Artificial Sequence: Synthetic oligonucleotide
  Antisense strand to SEQ ID NO: 645048
aacuuccuagaugucuugg

SEQ ID NO: 645050 - RNA, 19 nt, Artificial Sequence
  Description of Artificial Sequence: Synthetic oligonucleotide
  Sense strand starting at position 166 of SEQ ID NO: 585503
ucaguuaauuuguacagaa

SEQ ID NO: 645051 - RNA, 19 nt, Artificial Sequence
  Description of Artificial Sequence: Synthetic oligonucleotide
  Antisense strand to SEQ ID NO: 645050
uucuguacaaauuaacuga

SEQ ID NO: 645052 - RNA, 19 nt, Artificial Sequence
  Description of Artificial Sequence: Synthetic oligonucleotide
  Sense strand starting at position 485 of SEQ ID NO: 585503
ggaggucaaucguucgaac

SEQ ID NO: 645053 - RNA, 19 nt, Artificial Sequence
  Description of Artificial Sequence: Synthetic oligonucleotide
  Antisense strand to SEQ ID NO: 645052
guucgaacgauugaccucc

SEQ ID NO: 645054 - RNA, 19 nt, Artificial Sequence
  Description of Artificial Sequence: Synthetic oligonucleotide
  Sense strand starting at position 588 of SEQ ID NO: 585503
ugacuuuauuuagauagac

SEQ ID NO: 645055 - RNA, 19 nt, Artificial Sequence
  Description of Artificial Sequence: Synthetic oligonucleotide
  Antisense strand to SEQ ID NO: 645054
gucuaucuaaauaaaguca

SEQ ID NO: 645056 - RNA, 19 nt, Artificial Sequence
  Description of Artificial Sequence: Synthetic oligonucleotide
  Sense strand starting at position 647 of SEQ ID NO: 585503
gaggcuuauuuagcccgua

SEQ ID NO: 645057 - RNA, 19 nt, Artificial Sequence
  Description of Artificial Sequence: Synthetic oligonucleotide
  Antisense strand to SEQ ID NO: 645056
uacgggcuaaauaagccuc

SEQ ID NO: 645058 - RNA, 19 nt, Artificial Sequence
  Description of Artificial Sequence: Synthetic oligonucleotide
  Sense strand starting at position 652 of SEQ ID NO: 585503
uuauuuagcccguacaguu

SEQ ID NO: 645059 - RNA, 19 nt, Artificial Sequence
  Description of Artificial Sequence: Synthetic oligonucleotide
  Antisense strand to SEQ ID NO: 645058
aacuguacgggcuaaauaa

SEQ ID NO: 645060 - RNA, 19 nt, Artificial Sequence
  Description of Artificial Sequence: Synthetic oligonucleotide
  Sense strand starting at position 713 of SEQ ID NO: 585503
acuuguaaaucaggauuua

SEQ ID NO: 645061 - RNA, 19 nt, Artificial Sequence
  Description of Artificial Sequence: Synthetic oligonucleotide
  Antisense strand to SEQ ID NO: 645060
uaaauccugauuuacaagu

SEQ ID NO: 645062 - RNA, 19 nt, Artificial Sequence
  Description of Artificial Sequence: Synthetic oligonucleotide
  Sense strand starting at position 750 of SEQ ID NO: 585503
cacuuuaugccagguaaga

SEQ ID NO: 645063 - RNA, 19 nt, Artificial Sequence
  Description of Artificial Sequence: Synthetic oligonucleotide
  Antisense strand to SEQ ID NO: 645062
ucuuaccuggcauaaagug

SEQ ID NO: 645064 - RNA, 19 nt, Artificial Sequence
  Description of Artificial Sequence: Synthetic oligonucleotide
  Sense strand starting at position 752 of SEQ ID NO: 585503
cuuuaugccagguaagaug

SEQ ID NO: 645065 - RNA, 19 nt, Artificial Sequence
  Description of Artificial Sequence: Synthetic oligonucleotide
  Antisense strand to SEQ ID NO: 645064
caucuuaccuggcauaaag

SEQ ID NO: 645066 - RNA, 19 nt, Artificial Sequence
  Description of Artificial Sequence: Synthetic oligonucleotide
  Sense strand starting at position 1143 of SEQ ID NO: 585503
aucaaauuguguccuacuu

SEQ ID NO: 645067 - RNA, 19 nt, Artificial Sequence
  Description of Artificial Sequence: Synthetic oligonucleotide
  Antisense strand to SEQ ID NO: 645066
aaguaggacacaauuugau

SEQ ID NO: 645068 - RNA, 19 nt, Artificial Sequence
  Description of Artificial Sequence: Synthetic oligonucleotide
  Sense strand starting at position 1237 of SEQ ID NO: 585503
ucaguagcauauccguaaa

SEQ ID NO: 645069 - RNA, 19 nt, Artificial Sequence
  Description of Artificial Sequence: Synthetic oligonucleotide
  Antisense strand to SEQ ID NO: 645068
uuuacggauaugcuacuga

SEQ ID NO: 645070 - RNA, 19 nt, Artificial Sequence
  Description of Artificial Sequence: Synthetic oligonucleotide
  Sense strand starting at position 1240 of SEQ ID NO: 585503
guagcauauccguaaauua

SEQ ID NO: 645071 - RNA, 19 nt, Artificial Sequence
  Description of Artificial Sequence: Synthetic oligonucleotide
  Antisense strand to SEQ ID NO: 645070
uaauuuacggauaugcuac

SEQ ID NO: 645072 - RNA, 19 nt, Artificial Sequence
  Description of Artificial Sequence: Synthetic oligonucleotide
  Sense strand starting at position 1313 of SEQ ID NO: 585503
ucgaucuggucuccuacau

SEQ ID NO: 645073 - RNA, 19 nt, Artificial Sequence
  Description of Artificial Sequence: Synthetic oligonucleotide
  Antisense strand to SEQ ID NO: 645072
auguaggagaccagaucga

SEQ ID NO: 645074 - RNA, 19 nt, Artificial Sequence
  Description of Artificial Sequence: Synthetic oligonucleotide
  Sense strand starting at position 1317 of SEQ ID NO: 585503
ucuggucuccuacaugauu

SEQ ID NO: 645075 - RNA, 19 nt, Artificial Sequence
  Description of Artificial Sequence: Synthetic oligonucleotide
  Antisense strand to SEQ ID NO: 645074
aaucauguaggagaccaga

SEQ ID NO: 645076 - RNA, 19 nt, Artificial Sequence
  Description of Artificial Sequence: Synthetic oligonucleotide
  Sense strand starting at position 1534 of SEQ ID NO: 585503
aaaggagacugauugucuu

SEQ ID NO: 645077 - RNA, 19 nt, Artificial Sequence
  Description of Artificial Sequence: Synthetic oligonucleotide
  Antisense strand to SEQ ID NO: 645076
aagacaaucagucuccuuu

SEQ ID NO: 645078 - RNA, 19 nt, Artificial Sequence
  Description of Artificial Sequence: Synthetic oligonucleotide
  Sense strand starting at position 1544 of SEQ ID NO: 585503
gauugucuuucgguggaaa

SEQ ID NO: 645079 - RNA, 19 nt, Artificial Sequence
  Description of Artificial Sequence: Synthetic oligonucleotide
  Antisense strand to SEQ ID NO: 645078
uuuccaccgaaagacaauc

SEQ ID NO: 645080 - RNA, 19 nt, Artificial Sequence
  Description of Artificial Sequence: Synthetic oligonucleotide
  Sense strand starting at position 1545 of SEQ ID NO: 585503
auugucuuucgguggaaac

SEQ ID NO: 645081 - RNA, 19 nt, Artificial Sequence
  Description of Artificial Sequence: Synthetic oligonucleotide
  Antisense strand to SEQ ID NO: 645080
guuuccaccgaaagacaau

SEQ ID NO: 645082 - RNA, 19 nt, Artificial Sequence
  Description of Artificial Sequence: Synthetic oligonucleotide
  Sense strand starting at position 1547 of SEQ ID NO: 585503
ugucuuucgguggaaacga

SEQ ID NO: 645083 - RNA, 19 nt, Artificial Sequence
  Description of Artificial Sequence: Synthetic oligonucleotide
  Antisense strand to SEQ ID NO: 645082
ucguuuccaccgaaagaca

SEQ ID NO: 645084 - RNA, 19 nt, Artificial Sequence
  Description of Artificial Sequence: Synthetic oligonucleotide
  Sense strand starting at position 2314 of SEQ ID NO: 585503
ggagaaaguuguucggaga

SEQ ID NO: 645085 - RNA, 19 nt, Artificial Sequence
  Description of Artificial Sequence: Synthetic oligonucleotide
  Antisense strand to SEQ ID NO: 645084
ucuccgaacaacuuucucc

SEQ ID NO: 645086 - RNA, 19 nt, Artificial Sequence
  Description of Artificial Sequence: Synthetic oligonucleotide
  Sense strand starting at position 2315 of SEQ ID NO: 585503
gagaaaguuguucggagaa

SEQ ID NO: 645087 - RNA, 19 nt, Artificial Sequence
  Description of Artificial Sequence: Synthetic oligonucleotide
  Antisense strand to SEQ ID NO: 645086
uucuccgaacaacuuucuc

SEQ ID NO: 645088 - RNA, 19 nt, Artificial Sequence
  Description of Artificial Sequence: Synthetic oligonucleotide
  Sense strand starting at position 2616 of SEQ ID NO: 585503
uucucagucguuuaaaugu

SEQ ID NO: 645089 - RNA, 19 nt, Artificial Sequence
  Description of Artificial Sequence: Synthetic oligonucleotide
  Antisense strand to SEQ ID NO: 645088
acauuuaaacgacugagaa

SEQ ID NO: 645090 - RNA, 19 nt, Artificial Sequence
  Description of Artificial Sequence: Synthetic oligonucleotide
  Sense strand starting at position 2649 of SEQ ID NO: 585503
gugacauaccugugaguca

SEQ ID NO: 645091 - RNA, 19 nt, Artificial Sequence
  Description of Artificial Sequence: Synthetic oligonucleotide
  Antisense strand to SEQ ID NO: 645090
ugacucacagguaugucac

SEQ ID NO: 645092 - RNA, 19 nt, Artificial Sequence
  Description of Artificial Sequence: Synthetic oligonucleotide
  Sense strand starting at position 2680 of SEQ ID NO: 585503
ugaaguaccuaugcaaauu

SEQ ID NO: 645093 - RNA, 19 nt, Artificial Sequence
  Description of Artificial Sequence: Synthetic oligonucleotide
  Antisense strand to SEQ ID NO: 645092
aauuugcauagguacuuca

SEQ ID NO: 645094 - RNA, 19 nt, Artificial Sequence
  Description of Artificial Sequence: Synthetic oligonucleotide
  Sense strand starting at position 2780 of SEQ ID NO: 585503
cuaaauguauccgcugaaa

SEQ ID NO: 645095 - RNA, 19 nt, Artificial Sequence
  Description of Artificial Sequence: Synthetic oligonucleotide
  Antisense strand to SEQ ID NO: 645094
uuucagcggauacauuuag

SEQ ID NO: 645096 - RNA, 19 nt, Artificial Sequence
  Description of Artificial Sequence: Synthetic oligonucleotide
  Sense strand starting at position 2801 of SEQ ID NO: 585503
agccuacuugcacaugaga

SEQ ID NO: 645097 - RNA, 19 nt, Artificial Sequence
  Description of Artificial Sequence: Synthetic oligonucleotide
  Antisense strand to SEQ ID NO: 645096
ucucaugugcaaguaggcu

SEQ ID NO: 645098 - RNA, 19 nt, Artificial Sequence
  Description of Artificial Sequence: Synthetic oligonucleotide
  Sense strand starting at position 2804 of SEQ ID NO: 585503
cuacuugcacaugagaauu

SEQ ID NO: 645099 - RNA, 19 nt, Artificial Sequence
  Description of Artificial Sequence: Synthetic oligonucleotide
  Antisense strand to SEQ ID NO: 645098
aauucucaugugcaaguag

SEQ ID NO: 645100 - RNA, 19 nt, Artificial Sequence
  Description of Artificial Sequence: Synthetic oligonucleotide
  Sense strand starting at position 2922 of SEQ ID NO: 585503
ugguucuguggguggagaa

SEQ ID NO: 645101 - RNA, 19 nt, Artificial Sequence
  Description of Artificial Sequence: Synthetic oligonucleotide
  Antisense strand to SEQ ID NO: 645100
uucuccacccacagaacca

SEQ ID NO: 645102 - RNA, 19 nt, Artificial Sequence
  Description of Artificial Sequence: Synthetic oligonucleotide
  Sense strand starting at position 2923 of SEQ ID NO: 585503
gguucuguggguggagaaa

SEQ ID NO: 645103 - RNA, 19 nt, Artificial Sequence
  Description of Artificial Sequence: Synthetic oligonucleotide
  Antisense strand to SEQ ID NO: 645102
uuucuccacccacagaacc

SEQ ID NO: 645104 - RNA, 19 nt, Artificial Sequence
  Description of Artificial Sequence: Synthetic oligonucleotide
  Sense strand starting at position 3044 of SEQ ID NO: 585503
ggaaauaauuuacagcaau

SEQ ID NO: 645105 - RNA, 19 nt, Artificial Sequence
  Description of Artificial Sequence: Synthetic oligonucleotide
  Antisense strand to SEQ ID NO: 645104
auugcuguaaauuauuucc

SEQ ID NO: 645106 - RNA, 19 nt, Artificial Sequence
  Description of Artificial Sequence: Synthetic oligonucleotide
  Sense strand starting at position 3077 of SEQ ID NO: 585503
uccaaauugccagaaggua

SEQ ID NO: 645107 - RNA, 19 nt, Artificial Sequence
  Description of Artificial Sequence: Synthetic oligonucleotide
  Antisense strand to SEQ ID NO: 645106
uaccuucuggcaauuugga

SEQ ID NO: 645108 - RNA, 19 nt, Artificial Sequence
  Description of Artificial Sequence: Synthetic oligonucleotide
  Sense strand starting at position 3085 of SEQ ID NO: 585503
gccagaagguaagucuuaa

SEQ ID NO: 645109 - RNA, 19 nt, Artificial Sequence
  Description of Artificial Sequence: Synthetic oligonucleotide
  Antisense strand to SEQ ID NO: 645108
uuaagacuuaccuucuggc

SEQ ID NO: 645110 - RNA, 19 nt, Artificial Sequence
  Description of Artificial Sequence: Synthetic oligonucleotide
  Sense strand starting at position 3150 of SEQ ID NO: 585503
gaugaagauggcugucuca

SEQ ID NO: 645111 - RNA, 19 nt, Artificial Sequence
  Description of Artificial Sequence: Synthetic oligonucleotide
  Antisense strand to SEQ ID NO: 645110
ugagacagccaucuucauc

SEQ ID NO: 645112 - RNA, 19 nt, Artificial Sequence
  Description of Artificial Sequence: Synthetic oligonucleotide
  Sense strand starting at position 3153 of SEQ ID NO: 585503
gaagauggcugucucaguu

SEQ ID NO: 645113 - RNA, 19 nt, Artificial Sequence
  Description of Artificial Sequence: Synthetic oligonucleotide
  Antisense strand to SEQ ID NO: 645112
aacugagacagccaucuuc

SEQ ID NO: 645114 - RNA, 19 nt, Artificial Sequence
  Description of Artificial Sequence: Synthetic oligonucleotide
  Sense strand starting at position 3435 of SEQ ID NO: 585503
aaugacuuucgugauuguu

SEQ ID NO: 645115 - RNA, 19 nt, Artificial Sequence
  Description of Artificial Sequence: Synthetic oligonucleotide
  Antisense strand to SEQ ID NO: 645114
aacaaucacgaaagucauu

SEQ ID NO: 645116 - RNA, 19 nt, Artificial Sequence
  Description of Artificial Sequence: Synthetic oligonucleotide
  Sense strand starting at position 3479 of SEQ ID NO: 585503
auccauuacugagugcuuu

SEQ ID NO: 645117 - RNA, 19 nt, Artificial Sequence
  Description of Artificial Sequence: Synthetic oligonucleotide
  Antisense strand to SEQ ID NO: 645116
aaagcacucaguaauggau

SEQ ID NO: 645118 - RNA, 19 nt, Artificial Sequence
  Description of Artificial Sequence: Synthetic oligonucleotide
  Sense strand starting at position 3498 of SEQ ID NO: 585503
ugcuucuggcucuauaaua

SEQ ID NO: 645119 - RNA, 19 nt, Artificial Sequence
  Description of Artificial Sequence: Synthetic oligonucleotide
  Antisense strand to SEQ ID NO: 645118
uauuauagagccagaagca

SEQ ID NO: 645120 - RNA, 19 nt, Artificial Sequence
  Description of Artificial Sequence: Synthetic oligonucleotide
  Sense strand starting at position 3590 of SEQ ID NO: 585503
uugcauacugccuaaguca

SEQ ID NO: 645121 - RNA, 19 nt, Artificial Sequence
  Description of Artificial Sequence: Synthetic oligonucleotide
  Antisense strand to SEQ ID NO: 645120
ugacuuaggcaguaugcaa

SEQ ID NO: 645122 - RNA, 19 nt, Artificial Sequence
  Description of Artificial Sequence: Synthetic oligonucleotide
  Sense strand starting at position 3654 of SEQ ID NO: 585503
ucuuuacaacgucaucagu

SEQ ID NO: 645123 - RNA, 19 nt, Artificial Sequence
  Description of Artificial Sequence: Synthetic oligonucleotide
  Antisense strand to SEQ ID NO: 645122
acugaugacguuguaaaga

SEQ ID NO: 645124 - RNA, 19 nt, Artificial Sequence
  Description of Artificial Sequence: Synthetic oligonucleotide
  Sense strand starting at position 3656 of SEQ ID NO: 585503
uuuacaacgucaucaguuu

SEQ ID NO: 645125 - RNA, 19 nt, Artificial Sequence
  Description of Artificial Sequence: Synthetic oligonucleotide
  Antisense strand to SEQ ID NO: 645124
aaacugaugacguuguaaa

SEQ ID NO: 645126 - RNA, 19 nt, Artificial Sequence
  Description of Artificial Sequence: Synthetic oligonucleotide
  Sense strand starting at position 3756 of SEQ ID NO: 585503
cuuguaagauccuucuuga

SEQ ID NO: 645127 - RNA, 19 nt, Artificial Sequence
  Description of Artificial Sequence: Synthetic oligonucleotide
  Antisense strand to SEQ ID NO: 645126
ucaagaaggaucuuacaag

SEQ ID NO: 645128 - RNA, 19 nt, Artificial Sequence
  Description of Artificial Sequence: Synthetic oligonucleotide
  Sense strand starting at position 164 of SEQ ID NO: 585504
ccaagacaucuaggaaguu

SEQ ID NO: 645129 - RNA, 19 nt, Artificial Sequence
  Description of Artificial Sequence: Synthetic oligonucleotide
  Antisense strand to SEQ ID NO: 645128
aacuuccuagaugucuugg

SEQ ID NO: 645130 - RNA, 19 nt, Artificial Sequence
  Description of Artificial Sequence: Synthetic oligonucleotide
  Sense strand starting at position 182 of SEQ ID NO: 585504
ucaguuaauuuguacagaa

SEQ ID NO: 645131 - RNA, 19 nt, Artificial Sequence
  Description of Artificial Sequence: Synthetic oligonucleotide
  Antisense strand to SEQ ID NO: 645130
uucuguacaaauuaacuga

SEQ ID NO: 645132 - RNA, 19 nt, Artificial Sequence
  Description of Artificial Sequence: Synthetic oligonucleotide
  Sense strand starting at position 501 of SEQ ID NO: 585504
ggaggucaaucguucgaac

SEQ ID NO: 645133 - RNA, 19 nt, Artificial Sequence
  Description of Artificial Sequence: Synthetic oligonucleotide
  Antisense strand to SEQ ID NO: 645132
guucgaacgauugaccucc

SEQ ID NO: 645134 - RNA, 19 nt, Artificial Sequence
  Description of Artificial Sequence: Synthetic oligonucleotide
  Sense strand starting at position 604 of SEQ ID NO: 585504
ugacuuuauuuagauagac

SEQ ID NO: 645135 - RNA, 19 nt, Artificial Sequence
  Description of Artificial Sequence: Synthetic oligonucleotide
  Antisense strand to SEQ ID NO: 645134
gucuaucuaaauaaaguca

SEQ ID NO: 645136 - RNA, 19 nt, Artificial Sequence
  Description of Artificial Sequence: Synthetic oligonucleotide
  Sense strand starting at position 663 of SEQ ID NO: 585504
gaggcuuauuuagcccgua

SEQ ID NO: 645137 - RNA, 19 nt, Artificial Sequence
  Description of Artificial Sequence: Synthetic oligonucleotide
  Antisense strand to SEQ ID NO: 645136
uacgggcuaaauaagccuc

SEQ ID NO: 645138 - RNA, 19 nt, Artificial Sequence
  Description of Artificial Sequence: Synthetic oligonucleotide
  Sense strand starting at position 668 of SEQ ID NO: 585504
uuauuuagcccguacaguu

SEQ ID NO: 645139 - RNA, 19 nt, Artificial Sequence
  Description of Artificial Sequence: Synthetic oligonucleotide
  Antisense strand to SEQ ID NO: 645138
aacuguacgggcuaaauaa

SEQ ID NO: 645140 - RNA, 19 nt, Artificial Sequence
  Description of Artificial Sequence: Synthetic oligonucleotide
  Sense strand starting at position 729 of SEQ ID NO: 585504
acuuguaaaucaggauuua

SEQ ID NO: 645141 - RNA, 19 nt, Artificial Sequence
  Description of Artificial Sequence: Synthetic oligonucleotide
  Antisense strand to SEQ ID NO: 645140
uaaauccugauuuacaagu

SEQ ID NO: 645142 - RNA, 19 nt, Artificial Sequence
  Description of Artificial Sequence: Synthetic oligonucleotide
  Sense strand starting at position 766 of SEQ ID NO: 585504
cacuuuaugccagguaaga

SEQ ID NO: 645143 - RNA, 19 nt, Artificial Sequence
  Description of Artificial Sequence: Synthetic oligonucleotide
  Antisense strand to SEQ ID NO: 645142
ucuuaccuggcauaaagug

SEQ ID NO: 645144 - RNA, 19 nt, Artificial Sequence
  Description of Artificial Sequence: Synthetic oligonucleotide
  Sense strand starting at position 768 of SEQ ID NO: 585504
cuuuaugccagguaagaug

SEQ ID NO: 645145 - RNA, 19 nt, Artificial Sequence
  Description of Artificial Sequence: Synthetic oligonucleotide
  Antisense strand to SEQ ID NO: 645144
caucuuaccuggcauaaag

SEQ ID NO: 645146 - RNA, 19 nt, Artificial Sequence
  Description of Artificial Sequence: Synthetic oligonucleotide
  Sense strand starting at position 1159 of SEQ ID NO: 585504
aucaaauuguguccuacuu

SEQ ID NO: 645147 - RNA, 19 nt, Artificial Sequence
  Description of Artificial Sequence: Synthetic oligonucleotide
  Antisense strand to SEQ ID NO: 645146
aaguaggacacaauuugau

SEQ ID NO: 645148 - RNA, 19 nt, Artificial Sequence
  Description of Artificial Sequence: Synthetic oligonucleotide
  Sense strand starting at position 1253 of SEQ ID NO: 585504
ucaguagcauauccguaaa

SEQ ID NO: 645149 - RNA, 19 nt, Artificial Sequence
  Description of Artificial Sequence: Synthetic oligonucleotide
  Antisense strand to SEQ ID NO: 645148
uuuacggauaugcuacuga

SEQ ID NO: 645150 - RNA, 19 nt, Artificial Sequence
  Description of Artificial Sequence: Synthetic oligonucleotide
  Sense strand starting at position 1256 of SEQ ID NO: 585504
guagcauauccguaaauua

SEQ ID NO: 645151 - RNA, 19 nt, Artificial Sequence
  Description of Artificial Sequence: Synthetic oligonucleotide
  Antisense strand to SEQ ID NO: 645150
uaauuuacggauaugcuac

SEQ ID NO: 645152 - RNA, 19 nt, Artificial Sequence
  Description of Artificial Sequence: Synthetic oligonucleotide
  Sense strand starting at position 1329 of SEQ ID NO: 585504
ucgaucuggucuccuacau

SEQ ID NO: 645153 - RNA, 19 nt, Artificial Sequence
  Description of Artificial Sequence: Synthetic oligonucleotide
  Antisense strand to SEQ ID NO: 645152
auguaggagaccagaucga

SEQ ID NO: 645154 - RNA, 19 nt, Artificial Sequence
  Description of Artificial Sequence: Synthetic oligonucleotide
  Sense strand starting at position 1333 of SEQ ID NO: 585504
ucuggucuccuacaugauu

SEQ ID NO: 645155 - RNA, 19 nt, Artificial Sequence
  Description of Artificial Sequence: Synthetic oligonucleotide
  Antisense strand to SEQ ID NO: 645154
aaucauguaggagaccaga

SEQ ID NO: 645156 - RNA, 19 nt, Artificial Sequence
  Description of Artificial Sequence: Synthetic oligonucleotide
  Sense strand starting at position 1550 of SEQ ID NO: 585504
aaaggagacugauugucuu

SEQ ID NO: 645157 - RNA, 19 nt, Artificial Sequence
  Description of Artificial Sequence: Synthetic oligonucleotide
  Antisense strand to SEQ ID NO: 645156
aagacaaucagucuccuuu

SEQ ID NO: 645158 - RNA, 19 nt, Artificial Sequence
  Description of Artificial Sequence: Synthetic oligonucleotide
  Sense strand starting at position 1560 of SEQ ID NO: 585504
gauugucuuucgguggaaa

SEQ ID NO: 645159 - RNA, 19 nt, Artificial Sequence
  Description of Artificial Sequence: Synthetic oligonucleotide
  Antisense strand to SEQ ID NO: 645158
uuuccaccgaaagacaauc

SEQ ID NO: 645160 - RNA, 19 nt, Artificial Sequence
  Description of Artificial Sequence: Synthetic oligonucleotide
  Sense strand starting at position 1561 of SEQ ID NO: 585504
auugucuuucgguggaaac

SEQ ID NO: 645161 - RNA, 19 nt, Artificial Sequence
  Description of Artificial Sequence: Synthetic oligonucleotide
  Antisense strand to SEQ ID NO: 645160
guuuccaccgaaagacaau

SEQ ID NO: 645162 - RNA, 19 nt, Artificial Sequence
  Description of Artificial Sequence: Synthetic oligonucleotide
  Sense strand starting at position 1563 of SEQ ID NO: 585504
ugucuuucgguggaaacga

SEQ ID NO: 645163 - RNA, 19 nt, Artificial Sequence
  Description of Artificial Sequence: Synthetic oligonucleotide
  Antisense strand to SEQ ID NO: 645162
ucguuuccaccgaaagaca

SEQ ID NO: 645164 - RNA, 19 nt, Artificial Sequence
  Description of Artificial Sequence: Synthetic oligonucleotide
  Sense strand starting at position 2330 of SEQ ID NO: 585504
ggagaaaguuguucggaga

SEQ ID NO: 645165 - RNA, 19 nt, Artificial Sequence
  Description of Artificial Sequence: Synthetic oligonucleotide
  Antisense strand to SEQ ID NO: 645164
ucuccgaacaacuuucucc

SEQ ID NO: 645166 - RNA, 19 nt, Artificial Sequence
  Description of Artificial Sequence: Synthetic oligonucleotide
  Sense strand starting at position 2331 of SEQ ID NO: 585504
gagaaaguuguucggagaa

SEQ ID NO: 645167 - RNA, 19 nt, Artificial Sequence
  Description of Artificial Sequence: Synthetic oligonucleotide
  Antisense strand to SEQ ID NO: 645166
uucuccgaacaacuuucuc

SEQ ID NO: 645168 - RNA, 19 nt, Artificial Sequence
  Description of Artificial Sequence: Synthetic oligonucleotide
  Sense strand starting at position 2632 of SEQ ID NO: 585504
uucucagucguuuaaaugu

SEQ ID NO: 645169 - RNA, 19 nt, Artificial Sequence
  Description of Artificial Sequence: Synthetic oligonucleotide
  Antisense strand to SEQ ID NO: 645168
acauuuaaacgacugagaa

SEQ ID NO: 645170 - RNA, 19 nt, Artificial Sequence
  Description of Artificial Sequence: Synthetic oligonucleotide
  Sense strand starting at position 2665 of SEQ ID NO: 585504
gugacauaccugugaguca

SEQ ID NO: 645171 - RNA, 19 nt, Artificial Sequence
  Description of Artificial Sequence: Synthetic oligonucleotide
  Antisense strand to SEQ ID NO: 645170
ugacucacagguaugucac

SEQ ID NO: 645172 - RNA, 19 nt, Artificial Sequence
  Description of Artificial Sequence: Synthetic oligonucleotide
  Sense strand starting at position 2696 of SEQ ID NO: 585504
ugaaguaccuaugcaaauu

SEQ ID NO: 645173 - RNA, 19 nt, Artificial Sequence
  Description of Artificial Sequence: Synthetic oligonucleotide
  Antisense strand to SEQ ID NO: 645172
aauuugcauagguacuuca

SEQ ID NO: 645174 - RNA, 19 nt, Artificial Sequence
  Description of Artificial Sequence: Synthetic oligonucleotide
  Sense strand starting at position 2796 of SEQ ID NO: 585504
cuaaauguauccgcugaaa

SEQ ID NO: 645175 - RNA, 19 nt, Artificial Sequence
  Description of Artificial Sequence: Synthetic oligonucleotide
  Antisense strand to SEQ ID NO: 645174
uuucagcggauacauuuag

SEQ ID NO: 645176 - RNA, 19 nt, Artificial Sequence
  Description of Artificial Sequence: Synthetic oligonucleotide
  Sense strand starting at position 2817 of SEQ ID NO: 585504
agccuacuugcacaugaga

SEQ ID NO: 645177 - RNA, 19 nt, Artificial Sequence
  Description of Artificial Sequence: Synthetic oligonucleotide
  Antisense strand to SEQ ID NO: 645176
ucucaugugcaaguaggcu

SEQ ID NO: 645178 - RNA, 19 nt, Artificial Sequence
  Description of Artificial Sequence: Synthetic oligonucleotide
  Sense strand starting at position 2820 of SEQ ID NO: 585504
cuacuugcacaugagaauu

SEQ ID NO: 645179 - RNA, 19 nt, Artificial Sequence
  Description of Artificial Sequence: Synthetic oligonucleotide
  Antisense strand to SEQ ID NO: 645178
aauucucaugugcaaguag

SEQ ID NO: 645180 - RNA, 19 nt, Artificial Sequence
  Description of Artificial Sequence: Synthetic oligonucleotide
  Sense strand starting at position 2938 of SEQ ID NO: 585504
ugguucuguggguggagaa

SEQ ID NO: 645181 - RNA, 19 nt, Artificial Sequence
  Description of Artificial Sequence: Synthetic oligonucleotide
  Antisense strand to SEQ ID NO: 645180
uucuccacccacagaacca

SEQ ID NO: 645182 - RNA, 19 nt, Artificial Sequence
  Description of Artificial Sequence: Synthetic oligonucleotide
  Sense strand starting at position 2939 of SEQ ID NO: 585504
gguucuguggguggagaaa

SEQ ID NO: 645183 - RNA, 19 nt, Artificial Sequence
  Description of Artificial Sequence: Synthetic oligonucleotide
  Antisense strand to SEQ ID NO: 645182
uuucuccacccacagaacc

SEQ ID NO: 645184 - RNA, 19 nt, Artificial Sequence
  Description of Artificial Sequence: Synthetic oligonucleotide
  Sense strand starting at position 3060 of SEQ ID NO: 585504
ggaaauaauuuacagcaau

SEQ ID NO: 645185 - RNA, 19 nt, Artificial Sequence
  Description of Artificial Sequence: Synthetic oligonucleotide
  Antisense strand to SEQ ID NO: 645184
auugcuguaaauuauuucc

SEQ ID NO: 645186 - RNA, 19 nt, Artificial Sequence
  Description of Artificial Sequence: Synthetic oligonucleotide
  Sense strand starting at position 3093 of SEQ ID NO: 585504
uccaaauugccagaaggua

SEQ ID NO: 645187 - RNA, 19 nt, Artificial Sequence
  Description of Artificial Sequence: Synthetic oligonucleotide
  Antisense strand to SEQ ID NO: 645186
uaccuucuggcaauuugga

SEQ ID NO: 645188 - RNA, 19 nt, Artificial Sequence
  Description of Artificial Sequence: Synthetic oligonucleotide
  Sense strand starting at position 3101 of SEQ ID NO: 585504
gccagaagguaagucuuaa

SEQ ID NO: 645189 - RNA, 19 nt, Artificial Sequence
  Description of Artificial Sequence: Synthetic oligonucleotide
  Antisense strand to SEQ ID NO: 645188
uuaagacuuaccuucuggc

SEQ ID NO: 645190 - RNA, 19 nt, Artificial Sequence
  Description of Artificial Sequence: Synthetic oligonucleotide
  Sense strand starting at position 3166 of SEQ ID NO: 585504
gaugaagauggcugucuca

SEQ ID NO: 645191 - RNA, 19 nt, Artificial Sequence
  Description of Artificial Sequence: Synthetic oligonucleotide
  Antisense strand to SEQ ID NO: 645190
ugagacagccaucuucauc

SEQ ID NO: 645192 - RNA, 19 nt, Artificial Sequence
  Description of Artificial Sequence: Synthetic oligonucleotide
  Sense strand starting at position 3169 of SEQ ID NO: 585504
gaagauggcugucucaguu

SEQ ID NO: 645193 - RNA, 19 nt, Artificial Sequence
  Description of Artificial Sequence: Synthetic oligonucleotide
  Antisense strand to SEQ ID NO: 645192
aacugagacagccaucuuc

SEQ ID NO: 645194 - RNA, 19 nt, Artificial Sequence
  Description of Artificial Sequence: Synthetic oligonucleotide
  Sense strand starting at position 3451 of SEQ ID NO: 585504
aaugacuuucgugauuguu

SEQ ID NO: 645195 - RNA, 19 nt, Artificial Sequence
  Description of Artificial Sequence: Synthetic oligonucleotide
  Antisense strand to SEQ ID NO: 645194
aacaaucacgaaagucauu

SEQ ID NO: 645196 - RNA, 19 nt, Artificial Sequence
  Description of Artificial Sequence: Synthetic oligonucleotide
  Sense strand starting at position 3495 of SEQ ID NO: 585504
auccauuacugagugcuuu

SEQ ID NO: 645197 - RNA, 19 nt, Artificial Sequence
  Description of Artificial Sequence: Synthetic oligonucleotide
  Antisense strand to SEQ ID NO: 645196
aaagcacucaguaauggau

SEQ ID NO: 645198 - RNA, 19 nt, Artificial Sequence
  Description of Artificial Sequence: Synthetic oligonucleotide
  Sense strand starting at position 3514 of SEQ ID NO: 585504
ugcuucuggcucuauaaua

SEQ ID NO: 645199 - RNA, 19 nt, Artificial Sequence
  Description of Artificial Sequence: Synthetic oligonucleotide
  Antisense strand to SEQ ID NO: 645198
uauuauagagccagaagca

SEQ ID NO: 645200 - RNA, 19 nt, Artificial Sequence
  Description of Artificial Sequence: Synthetic oligonucleotide
  Sense strand starting at position 3606 of SEQ ID NO: 585504
uugcauacugccuaaguca

SEQ ID NO: 645201 - RNA, 19 nt, Artificial Sequence
  Description of Artificial Sequence: Synthetic oligonucleotide
  Antisense strand to SEQ ID NO: 645200
ugacuuaggcaguaugcaa

SEQ ID NO: 645202 - RNA, 19 nt, Artificial Sequence
  Description of Artificial Sequence: Synthetic oligonucleotide
  Sense strand starting at position 3670 of SEQ ID NO: 585504
ucuuuacaacgucaucagu

SEQ ID NO: 645203 - RNA, 19 nt, Artificial Sequence
  Description of Artificial Sequence: Synthetic oligonucleotide
  Antisense strand to SEQ ID NO: 645202
acugaugacguuguaaaga

SEQ ID NO: 645204 - RNA, 19 nt, Artificial Sequence
  Description of Artificial Sequence: Synthetic oligonucleotide
  Sense strand starting at position 3672 of SEQ ID NO: 585504
uuuacaacgucaucaguuu

SEQ ID NO: 645205 - RNA, 19 nt, Artificial Sequence
  Description of Artificial Sequence: Synthetic oligonucleotide
  Antisense strand to SEQ ID NO: 645204
aaacugaugacguuguaaa

SEQ ID NO: 645206 - RNA, 19 nt, Artificial Sequence
  Description of Artificial Sequence: Synthetic oligonucleotide
  Sense strand starting at position 3772 of SEQ ID NO: 585504
cuuguaagauccuucuuga

SEQ ID NO: 645207 - RNA, 19 nt, Artificial Sequence
  Description of Artificial Sequence: Synthetic oligonucleotide
  Antisense strand to SEQ ID NO: 645206
ucaagaaggaucuuacaag

SEQ ID NO: 645208 - RNA, 19 nt, Artificial Sequence
  Description of Artificial Sequence: Synthetic oligonucleotide
  Sense strand starting at position 66 of SEQ ID NO: 585505
ggaaacugauguguuucua

SEQ ID NO: 645209 - RNA, 19 nt, Artificial Sequence
  Description of Artificial Sequence: Synthetic oligonucleotide
  Antisense strand to SEQ ID NO: 645208
uagaaacacaucaguuucc

SEQ ID NO: 645210 - RNA, 19 nt, Artificial Sequence
  Description of Artificial Sequence: Synthetic oligonucleotide
  Sense strand starting at position 77 of SEQ ID NO: 585505
uguuucuauaccgaggaga

SEQ ID NO: 645211 - RNA, 19 nt, Artificial Sequence
  Description of Artificial Sequence: Synthetic oligonucleotide
  Antisense strand to SEQ ID NO: 645210
ucuccucgguauagaaaca

SEQ ID NO: 645212 - RNA, 19 nt, Artificial Sequence
  Description of Artificial Sequence: Synthetic oligonucleotide
  Sense strand starting at position 79 of SEQ ID NO: 585505
uuucuauaccgaggagaaa

SEQ ID NO: 645213 - RNA, 19 nt, Artificial Sequence
  Description of Artificial Sequence: Synthetic oligonucleotide
  Antisense strand to SEQ ID NO: 645212
uuucuccucgguauagaaa

SEQ ID NO: 645214 - RNA, 19 nt, Artificial Sequence
  Description of Artificial Sequence: Synthetic oligonucleotide
  Sense strand starting at position 318 of SEQ ID NO: 585505
uuuaaauuguguuugagag

SEQ ID NO: 645215 - RNA, 19 nt, Artificial Sequence
  Description of Artificial Sequence: Synthetic oligonucleotide
  Antisense strand to SEQ ID NO: 645214
cucucaaacacaauuuaaa

SEQ ID NO: 645216 - RNA, 19 nt, Artificial Sequence
  Description of Artificial Sequence: Synthetic oligonucleotide
  Sense strand starting at position 348 of SEQ ID NO: 585505
uuggcaugauuaccaguga

SEQ ID NO: 645217 - RNA, 19 nt, Artificial Sequence
  Description of Artificial Sequence: Synthetic oligonucleotide
  Antisense strand to SEQ ID NO: 645216
ucacugguaaucaugccaa

SEQ ID NO: 645218 - RNA, 19 nt, Artificial Sequence
  Description of Artificial Sequence: Synthetic oligonucleotide
  Sense strand starting at position 352 of SEQ ID NO: 585505
caugauuaccagugagacu

SEQ ID NO: 645219 - RNA, 19 nt, Artificial Sequence
  Description of Artificial Sequence: Synthetic oligonucleotide
  Antisense strand to SEQ ID NO: 645218
agucucacugguaaucaug

SEQ ID NO: 645220 - RNA, 19 nt, Artificial Sequence
  Description of Artificial Sequence: Synthetic oligonucleotide
  Sense strand starting at position 453 of SEQ ID NO: 585505
gauagcauaugguccuaaa

SEQ ID NO: 645221 - RNA, 19 nt, Artificial Sequence
  Description of Artificial Sequence: Synthetic oligonucleotide
  Antisense strand to SEQ ID NO: 645220
uuuaggaccauaugcuauc

SEQ ID NO: 645222 - RNA, 19 nt, Artificial Sequence
  Description of Artificial Sequence: Synthetic oligonucleotide
  Sense strand starting at position 462 of SEQ ID NO: 585505
ugguccuaaagaugucaga

SEQ ID NO: 645223 - RNA, 19 nt, Artificial Sequence
  Description of Artificial Sequence: Synthetic oligonucleotide
  Antisense strand to SEQ ID NO: 645222
ucugacaucuuuaggacca

SEQ ID NO: 645224 - RNA, 19 nt, Artificial Sequence
  Description of Artificial Sequence: Synthetic oligonucleotide
  Sense strand starting at position 567 of SEQ ID NO: 585505
agaacaauucugugauucu

SEQ ID NO: 645225 - RNA, 19 nt, Artificial Sequence
  Description of Artificial Sequence: Synthetic oligonucleotide
  Antisense strand to SEQ ID NO: 645224
agaaucacagaauuguucu

SEQ ID NO: 645226 - RNA, 19 nt, Artificial Sequence
  Description of Artificial Sequence: Synthetic oligonucleotide
  Sense strand starting at position 648 of SEQ ID NO: 585505
guacuuauucugcauaaga

SEQ ID NO: 645227 - RNA, 19 nt, Artificial Sequence
  Description of Artificial Sequence: Synthetic oligonucleotide
  Antisense strand to SEQ ID NO: 645226
ucuuaugcagaauaaguac

SEQ ID NO: 645228 - RNA, 19 nt, Artificial Sequence
  Description of Artificial Sequence: Synthetic oligonucleotide
  Sense strand starting at position 650 of SEQ ID NO: 585505
acuuauucugcauaagaug

SEQ ID NO: 645229 - RNA, 19 nt, Artificial Sequence
  Description of Artificial Sequence: Synthetic oligonucleotide
  Antisense strand to SEQ ID NO: 645228
caucuuaugcagaauaagu

SEQ ID NO: 645230 - RNA, 19 nt, Artificial Sequence
  Description of Artificial Sequence: Synthetic oligonucleotide
  Sense strand starting at position 710 of SEQ ID NO: 585505
uguccuauuugagcuuaua

SEQ ID NO: 645231 - RNA, 19 nt, Artificial Sequence
  Description of Artificial Sequence: Synthetic oligonucleotide
  Antisense strand to SEQ ID NO: 645230
uauaagcucaaauaggaca

SEQ ID NO: 645232 - RNA, 19 nt, Artificial Sequence
  Description of Artificial Sequence: Synthetic oligonucleotide
  Sense strand starting at position 774 of SEQ ID NO: 585505
ggagcuuacagugaugcau

SEQ ID NO: 645233 - RNA, 19 nt, Artificial Sequence
  Description of Artificial Sequence: Synthetic oligonucleotide
  Antisense strand to SEQ ID NO: 645232
augcaucacuguaagcucc

SEQ ID NO: 645234 - RNA, 19 nt, Artificial Sequence
  Description of Artificial Sequence: Synthetic oligonucleotide
  Sense strand starting at position 807 of SEQ ID NO: 585505
agccuuauugcugaauaua

SEQ ID NO: 645235 - RNA, 19 nt, Artificial Sequence
  Description of Artificial Sequence: Synthetic oligonucleotide
  Antisense strand to SEQ ID NO: 645234
uauauucagcaauaaggcu

SEQ ID NO: 645236 - RNA, 19 nt, Artificial Sequence
  Description of Artificial Sequence: Synthetic oligonucleotide
  Sense strand starting at position 867 of SEQ ID NO: 585505
agcucugauguauaaacuu

SEQ ID NO: 645237 - RNA, 19 nt, Artificial Sequence
  Description of Artificial Sequence: Synthetic oligonucleotide
  Antisense strand to SEQ ID NO: 645236
aaguuuauacaucagagcu

SEQ ID NO: 645238 - RNA, 19 nt, Artificial Sequence
  Description of Artificial Sequence: Synthetic oligonucleotide
  Sense strand starting at position 944 of SEQ ID NO: 585505
auaacaucgaguuggaagu

SEQ ID NO: 645239 - RNA, 19 nt, Artificial Sequence
  Description of Artificial Sequence: Synthetic oligonucleotide
  Antisense strand to SEQ ID NO: 645238
acuuccaacucgauguuau

SEQ ID NO: 645240 - RNA, 19 nt, Artificial Sequence
  Description of Artificial Sequence: Synthetic oligonucleotide
  Sense strand starting at position 1026 of SEQ ID NO: 585505
ucccgacaccuguaucaaa

SEQ ID NO: 645241 - RNA, 19 nt, Artificial Sequence
  Description of Artificial Sequence: Synthetic oligonucleotide
  Antisense strand to SEQ ID NO: 645240
uuugauacaggugucggga

SEQ ID NO: 645242 - RNA, 19 nt, Artificial Sequence
  Description of Artificial Sequence: Synthetic oligonucleotide
  Sense strand starting at position 1116 of SEQ ID NO: 585505
ccucaucgaucuccagaau

SEQ ID NO: 645243 - RNA, 19 nt, Artificial Sequence
  Description of Artificial Sequence: Synthetic oligonucleotide
  Antisense strand to SEQ ID NO: 645242
auucuggagaucgaugagg

SEQ ID NO: 645244 - RNA, 19 nt, Artificial Sequence
  Description of Artificial Sequence: Synthetic oligonucleotide
  Sense strand starting at position 2854 of SEQ ID NO: 585505
ucacucuuauacgcagaaa

SEQ ID NO: 645245 - RNA, 19 nt, Artificial Sequence
  Description of Artificial Sequence: Synthetic oligonucleotide
  Antisense strand to SEQ ID NO: 645244
uuucugcguauaagaguga

SEQ ID NO: 645246 - RNA, 19 nt, Artificial Sequence
  Description of Artificial Sequence: Synthetic oligonucleotide
  Sense strand starting at position 2982 of SEQ ID NO: 585505
guaauaaccucucuggaag

SEQ ID NO: 645247 - RNA, 19 nt, Artificial Sequence
  Description of Artificial Sequence: Synthetic oligonucleotide
  Antisense strand to SEQ ID NO: 645246
cuuccagagagguuauuac

SEQ ID NO: 645248 - RNA, 19 nt, Artificial Sequence
  Description of Artificial Sequence: Synthetic oligonucleotide
  Sense strand starting at position 3065 of SEQ ID NO: 585505
cuugcaaauguggaauaau

SEQ ID NO: 645249 - RNA, 19 nt, Artificial Sequence
  Description of Artificial Sequence: Synthetic oligonucleotide
  Antisense strand to SEQ ID NO: 645248
auuauuccacauuugcaag

SEQ ID NO: 645250 - RNA, 19 nt, Artificial Sequence
  Description of Artificial Sequence: Synthetic oligonucleotide
  Sense strand starting at position 3116 of SEQ ID NO: 585505
agacgucagguuuauaucu

SEQ ID NO: 645251 - RNA, 19 nt, Artificial Sequence
  Description of Artificial Sequence: Synthetic oligonucleotide
  Antisense strand to SEQ ID NO: 645250
agauauaaaccugacgucu

SEQ ID NO: 645252 - RNA, 19 nt, Artificial Sequence
  Description of Artificial Sequence: Synthetic oligonucleotide
  Sense strand starting at position 3123 of SEQ ID NO: 585505
agguuuauaucuuugggau

SEQ ID NO: 645253 - RNA, 19 nt, Artificial Sequence
  Description of Artificial Sequence: Synthetic oligonucleotide
  Antisense strand to SEQ ID NO: 645252
aucccaaagauauaaaccu

SEQ ID NO: 645254 - RNA, 19 nt, Artificial Sequence
  Description of Artificial Sequence: Synthetic oligonucleotide
  Sense strand starting at position 3124 of SEQ ID NO: 585505
gguuuauaucuuugggauu

SEQ ID NO: 645255 - RNA, 19 nt, Artificial Sequence
  Description of Artificial Sequence: Synthetic oligonucleotide
  Antisense strand to SEQ ID NO: 645254
aaucccaaagauauaaacc

SEQ ID NO: 645256 - RNA, 19 nt, Artificial Sequence
  Description of Artificial Sequence: Synthetic oligonucleotide
  Sense strand starting at position 3127 of SEQ ID NO: 585505
uuauaucuuugggauuuga

SEQ ID NO: 645257 - RNA, 19 nt, Artificial Sequence
  Description of Artificial Sequence: Synthetic oligonucleotide
  Antisense strand to SEQ ID NO: 645256
ucaaaucccaaagauauaa

SEQ ID NO: 645258 - RNA, 19 nt, Artificial Sequence
  Description of Artificial Sequence: Synthetic oligonucleotide
  Sense strand starting at position 3173 of SEQ ID NO: 585505
uguagccauuguguuauuu

SEQ ID NO: 645259 - RNA, 19 nt, Artificial Sequence
  Description of Artificial Sequence: Synthetic oligonucleotide
  Antisense strand to SEQ ID NO: 645258
aaauaacacaauggcuaca

SEQ ID NO: 645260 - RNA, 19 nt, Artificial Sequence
  Description of Artificial Sequence: Synthetic oligonucleotide
  Sense strand starting at position 3177 of SEQ ID NO: 585505
gccauuguguuauuuguaa

SEQ ID NO: 645261 - RNA, 19 nt, Artificial Sequence
  Description of Artificial Sequence: Synthetic oligonucleotide
  Antisense strand to SEQ ID NO: 645260
uuacaaauaacacaauggc

SEQ ID NO: 645262 - RNA, 19 nt, Artificial Sequence
  Description of Artificial Sequence: Synthetic oligonucleotide
  Sense strand starting at position 3235 of SEQ ID NO: 585505
guauaaagagcugauugca

SEQ ID NO: 645263 - RNA, 19 nt, Artificial Sequence
  Description of Artificial Sequence: Synthetic oligonucleotide
  Antisense strand to SEQ ID NO: 645262
ugcaaucagcucuuuauac

SEQ ID NO: 645264 - RNA, 19 nt, Artificial Sequence
  Description of Artificial Sequence: Synthetic oligonucleotide
  Sense strand starting at position 3274 of SEQ ID NO: 585505
uugagaucuccagggaagc

SEQ ID NO: 645265 - RNA, 19 nt, Artificial Sequence
  Description of Artificial Sequence: Synthetic oligonucleotide
  Antisense strand to SEQ ID NO: 645264
gcuucccuggagaucucaa

SEQ ID NO: 645266 - RNA, 19 nt, Artificial Sequence
  Description of Artificial Sequence: Synthetic oligonucleotide
  Sense strand starting at position 3275 of SEQ ID NO: 585505
ugagaucuccagggaagcu

SEQ ID NO: 645267 - RNA, 19 nt, Artificial Sequence
  Description of Artificial Sequence: Synthetic oligonucleotide
  Antisense strand to SEQ ID NO: 645266
agcuucccuggagaucuca

SEQ ID NO: 645268 - RNA, 19 nt, Artificial Sequence
  Description of Artificial Sequence: Synthetic oligonucleotide
  Sense strand starting at position 3301 of SEQ ID NO: 585505
ucucacaguucuuugauga

SEQ ID NO: 645269 - RNA, 19 nt, Artificial Sequence
  Description of Artificial Sequence: Synthetic oligonucleotide
  Antisense strand to SEQ ID NO: 645268
ucaucaaagaacugugaga

SEQ ID NO: 645270 - RNA, 19 nt, Artificial Sequence
  Description of Artificial Sequence: Synthetic oligonucleotide
  Sense strand starting at position 3302 of SEQ ID NO: 585505
cucacaguucuuugaugag

SEQ ID NO: 645271 - RNA, 19 nt, Artificial Sequence
  Description of Artificial Sequence: Synthetic oligonucleotide
  Antisense strand to SEQ ID NO: 645270
cucaucaaagaacugugag

SEQ ID NO: 645272 - RNA, 19 nt, Artificial Sequence
  Description of Artificial Sequence: Synthetic oligonucleotide
  Sense strand starting at position 3336 of SEQ ID NO: 585505
gcaaucuaagguuauugaa

SEQ ID NO: 645273 - RNA, 19 nt, Artificial Sequence
  Description of Artificial Sequence: Synthetic oligonucleotide
  Antisense strand to SEQ ID NO: 645272
uucaauaaccuuagauugc

SEQ ID NO: 645274 - RNA, 19 nt, Artificial Sequence
  Description of Artificial Sequence: Synthetic oligonucleotide
  Sense strand starting at position 3370 of SEQ ID NO: 585505
aaacauguucccuggcaag

SEQ ID NO: 645275 - RNA, 19 nt, Artificial Sequence
  Description of Artificial Sequence: Synthetic oligonucleotide
  Antisense strand to SEQ ID NO: 645274
cuugccagggaacauguuu

SEQ ID NO: 645276 - RNA, 19 nt, Artificial Sequence
  Description of Artificial Sequence: Synthetic oligonucleotide
  Sense strand starting at position 3397 of SEQ ID NO: 585505
gugacuaaauagcuaagau

SEQ ID NO: 645277 - RNA, 19 nt, Artificial Sequence
  Description of Artificial Sequence: Synthetic oligonucleotide
  Antisense strand to SEQ ID NO: 645276
aucuuagcuauuuagucac

SEQ ID NO: 645278 - RNA, 19 nt, Artificial Sequence
  Description of Artificial Sequence: Synthetic oligonucleotide
  Sense strand starting at position 3523 of SEQ ID NO: 585505
ccugacacugguugaucua

SEQ ID NO: 645279 - RNA, 19 nt, Artificial Sequence
  Description of Artificial Sequence: Synthetic oligonucleotide
  Antisense strand to SEQ ID NO: 645278
uagaucaaccagugucagg

SEQ ID NO: 645280 - RNA, 19 nt, Artificial Sequence
  Description of Artificial Sequence: Synthetic oligonucleotide
  Sense strand starting at position 3615 of SEQ ID NO: 585505
uaggaauauguauguacau

SEQ ID NO: 645281 - RNA, 19 nt, Artificial Sequence
  Description of Artificial Sequence: Synthetic oligonucleotide
  Antisense strand to SEQ ID NO: 645280
auguacauacauauuccua

SEQ ID NO: 645282 - RNA, 19 nt, Artificial Sequence
  Description of Artificial Sequence: Synthetic oligonucleotide
  Sense strand starting at position 3723 of SEQ ID NO: 585505
uucugaaggaaguguccau

SEQ ID NO: 645283 - RNA, 19 nt, Artificial Sequence
  Description of Artificial Sequence: Synthetic oligonucleotide
  Antisense strand to SEQ ID NO: 645282
auggacacuuccuucagaa

SEQ ID NO: 645284 - RNA, 19 nt, Artificial Sequence
  Description of Artificial Sequence: Synthetic oligonucleotide
  Sense strand starting at position 3730 of SEQ ID NO: 585505
ggaaguguccauugacuua

SEQ ID NO: 645285 - RNA, 19 nt, Artificial Sequence
  Description of Artificial Sequence: Synthetic oligonucleotide
  Antisense strand to SEQ ID NO: 645284
uaagucaauggacacuucc

SEQ ID NO: 645286 - RNA, 19 nt, Artificial Sequence
  Description of Artificial Sequence: Synthetic oligonucleotide
  Sense strand starting at position 3888 of SEQ ID NO: 585505
aguugugaccaucaauuau

SEQ ID NO: 645287 - RNA, 19 nt, Artificial Sequence
  Description of Artificial Sequence: Synthetic oligonucleotide
  Antisense strand to SEQ ID NO: 645286
auaauugauggucacaacu

SEQ ID NO: 645288 - RNA, 19 nt, Artificial Sequence
  Description of Artificial Sequence: Synthetic oligonucleotide
  Sense strand starting at position 145 of SEQ ID NO: 585506
cagcaauggccagaugagu

SEQ ID NO: 645289 - RNA, 19 nt, Artificial Sequence
  Description of Artificial Sequence: Synthetic oligonucleotide
  Antisense strand to SEQ ID NO: 645288
acucaucuggccauugcug

SEQ ID NO: 645290 - RNA, 19 nt, Artificial Sequence
  Description of Artificial Sequence: Synthetic oligonucleotide
  Sense strand starting at position 320 of SEQ ID NO: 585506
gugacaugucaacauguuc

SEQ ID NO: 645291 - RNA, 19 nt, Artificial Sequence
  Description of Artificial Sequence: Synthetic oligonucleotide
  Antisense strand to SEQ ID NO: 645290
gaacauguugacaugucac

SEQ ID NO: 645292 - RNA, 19 nt, Artificial Sequence
  Description of Artificial Sequence: Synthetic oligonucleotide
  Sense strand starting at position 475 of SEQ ID NO: 585506
guuguccugccagaagaaa

SEQ ID NO: 645293 - RNA, 19 nt, Artificial Sequence
  Description of Artificial Sequence: Synthetic oligonucleotide
  Antisense strand to SEQ ID NO: 645292
uuucuucuggcaggacaac

SEQ ID NO: 645294 - RNA, 19 nt, Artificial Sequence
  Description of Artificial Sequence: Synthetic oligonucleotide
  Sense strand starting at position 629 of SEQ ID NO: 585506
gguauaauccaagagugua

SEQ ID NO: 645295 - RNA, 19 nt, Artificial Sequence
  Description of Artificial Sequence: Synthetic oligonucleotide
  Antisense strand to SEQ ID NO: 645294
uacacucuuggauuauacc

SEQ ID NO: 645296 - RNA, 19 nt, Artificial Sequence
  Description of Artificial Sequence: Synthetic oligonucleotide
  Sense strand starting at position 637 of SEQ ID NO: 585506
ccaagaguguagccuagau

SEQ ID NO: 645297 - RNA, 19 nt, Artificial Sequence
  Description of Artificial Sequence: Synthetic oligonucleotide
  Antisense strand to SEQ ID NO: 645296
aucuaggcuacacucuugg

SEQ ID NO: 645298 - RNA, 19 nt, Artificial Sequence
  Description of Artificial Sequence: Synthetic oligonucleotide
  Sense strand starting at position 639 of SEQ ID NO: 585506
aagaguguagccuagauua

SEQ ID NO: 645299 - RNA, 19 nt, Artificial Sequence
  Description of Artificial Sequence: Synthetic oligonucleotide
  Antisense strand to SEQ ID NO: 645298
uaaucuaggcuacacucuu

SEQ ID NO: 645300 - RNA, 19 nt, Artificial Sequence
  Description of Artificial Sequence: Synthetic oligonucleotide
  Sense strand starting at position 641 of SEQ ID NO: 585506
gaguguagccuagauuaaa

SEQ ID NO: 645301 - RNA, 19 nt, Artificial Sequence
  Description of Artificial Sequence: Synthetic oligonucleotide
  Antisense strand to SEQ ID NO: 645300
uuuaaucuaggcuacacuc

SEQ ID NO: 645302 - RNA, 19 nt, Artificial Sequence
  Description of Artificial Sequence: Synthetic oligonucleotide
  Sense strand starting at position 791 of SEQ ID NO: 585506
guguuuaguauguaugaua

SEQ ID NO: 645303 - RNA, 19 nt, Artificial Sequence
  Description of Artificial Sequence: Synthetic oligonucleotide
  Antisense strand to SEQ ID NO: 645302
uaucauacauacuaaacac

SEQ ID NO: 645304 - RNA, 19 nt, Artificial Sequence
  Description of Artificial Sequence: Synthetic oligonucleotide
  Sense strand starting at position 1168 of SEQ ID NO: 585506
gccuaauagccacaaauug

SEQ ID NO: 645305 - RNA, 19 nt, Artificial Sequence
  Description of Artificial Sequence: Synthetic oligonucleotide
  Antisense strand to SEQ ID NO: 645304
caauuuguggcuauuaggc

SEQ ID NO: 645306 - RNA, 19 nt, Artificial Sequence
  Description of Artificial Sequence: Synthetic oligonucleotide
  Sense strand starting at position 1217 of SEQ ID NO: 585506
ggaugaaggguauaugugu

SEQ ID NO: 645307 - RNA, 19 nt, Artificial Sequence
  Description of Artificial Sequence: Synthetic oligonucleotide
  Antisense strand to SEQ ID NO: 645306
acacauauacccuucaucc

SEQ ID NO: 645308 - RNA, 19 nt, Artificial Sequence
  Description of Artificial Sequence: Synthetic oligonucleotide
  Sense strand starting at position 1330 of SEQ ID NO: 585506
auagauuauuucugggaga

SEQ ID NO: 645309 - RNA, 19 nt, Artificial Sequence
  Description of Artificial Sequence: Synthetic oligonucleotide
  Antisense strand to SEQ ID NO: 645308
ucucccagaaauaaucuau

SEQ ID NO: 645310 - RNA, 19 nt, Artificial Sequence
  Description of Artificial Sequence: Synthetic oligonucleotide
  Sense strand starting at position 1331 of SEQ ID NO: 585506
uagauuauuucugggagau

SEQ ID NO: 645311 - RNA, 19 nt, Artificial Sequence
  Description of Artificial Sequence: Synthetic oligonucleotide
  Antisense strand to SEQ ID NO: 645310
aucucccagaaauaaucua

SEQ ID NO: 645312 - RNA, 19 nt, Artificial Sequence
  Description of Artificial Sequence: Synthetic oligonucleotide
  Sense strand starting at position 1333 of SEQ ID NO: 585506
gauuauuucugggagauac

SEQ ID NO: 645313 - RNA, 19 nt, Artificial Sequence
  Description of Artificial Sequence: Synthetic oligonucleotide
  Antisense strand to SEQ ID NO: 645312
guaucucccagaaauaauc

SEQ ID NO: 645314 - RNA, 19 nt, Artificial Sequence
  Description of Artificial Sequence: Synthetic oligonucleotide
  Sense strand starting at position 1573 of SEQ ID NO: 585506
aucuaagauuccuugggau

SEQ ID NO: 645315 - RNA, 19 nt, Artificial Sequence
  Description of Artificial Sequence: Synthetic oligonucleotide
  Antisense strand to SEQ ID NO: 645314
aucccaaggaaucuuagau

SEQ ID NO: 645316 - RNA, 19 nt, Artificial Sequence
  Description of Artificial Sequence: Synthetic oligonucleotide
  Sense strand starting at position 1988 of SEQ ID NO: 585506
uuaugaggguuucugaauu

SEQ ID NO: 645317 - RNA, 19 nt, Artificial Sequence
  Description of Artificial Sequence: Synthetic oligonucleotide
  Antisense strand to SEQ ID NO: 645316
aauucagaaacccucauaa

SEQ ID NO: 645318 - RNA, 19 nt, Artificial Sequence
  Description of Artificial Sequence: Synthetic oligonucleotide
  Sense strand starting at position 1994 of SEQ ID NO: 585506
ggguuucugaauuaaggcu

SEQ ID NO: 645319 - RNA, 19 nt, Artificial Sequence
  Description of Artificial Sequence: Synthetic oligonucleotide
  Antisense strand to SEQ ID NO: 645318
agccuuaauucagaaaccc

SEQ ID NO: 645320 - RNA, 19 nt, Artificial Sequence
  Description of Artificial Sequence: Synthetic oligonucleotide
  Sense strand starting at position 2026 of SEQ ID NO: 585506
ucuugacuccuuugguaau

SEQ ID NO: 645321 - RNA, 19 nt, Artificial Sequence
  Description of Artificial Sequence: Synthetic oligonucleotide
  Antisense strand to SEQ ID NO: 645320
auuaccaaaggagucaaga

SEQ ID NO: 645322 - RNA, 19 nt, Artificial Sequence
  Description of Artificial Sequence: Synthetic oligonucleotide
  Sense strand starting at position 2069 of SEQ ID NO: 585506
guauauaacgcggagaagu

SEQ ID NO: 645323 - RNA, 19 nt, Artificial Sequence
  Description of Artificial Sequence: Synthetic oligonucleotide
  Antisense strand to SEQ ID NO: 645322
acuucuccgcguuauauac

SEQ ID NO: 645324 - RNA, 19 nt, Artificial Sequence
  Description of Artificial Sequence: Synthetic oligonucleotide
  Sense strand starting at position 2090 of SEQ ID NO: 585506
agcaauugcccagauaaua

SEQ ID NO: 645325 - RNA, 19 nt, Artificial Sequence
  Description of Artificial Sequence: Synthetic oligonucleotide
  Antisense strand to SEQ ID NO: 645324
uauuaucugggcaauugcu

SEQ ID NO: 645326 - RNA, 19 nt, Artificial Sequence
  Description of Artificial Sequence: Synthetic oligonucleotide
  Sense strand starting at position 2173 of SEQ ID NO: 585506
ggcagauguccugauccuu

SEQ ID NO: 645327 - RNA, 19 nt, Artificial Sequence
  Description of Artificial Sequence: Synthetic oligonucleotide
  Antisense strand to SEQ ID NO: 645326
aaggaucaggacaucugcc

SEQ ID NO: 645328 - RNA, 19 nt, Artificial Sequence
  Description of Artificial Sequence: Synthetic oligonucleotide
  Sense strand starting at position 2342 of SEQ ID NO: 585506
ggcucuucgccgagaaacg

SEQ ID NO: 645329 - RNA, 19 nt, Artificial Sequence
  Description of Artificial Sequence: Synthetic oligonucleotide
  Antisense strand to SEQ ID NO: 645328
cguuucucggcgaagagcc

SEQ ID NO: 645330 - RNA, 19 nt, Artificial Sequence
  Description of Artificial Sequence: Synthetic oligonucleotide
  Sense strand starting at position 2457 of SEQ ID NO: 585506
gaacuuagauuuggaaaga

SEQ ID NO: 645331 - RNA, 19 nt, Artificial Sequence
  Description of Artificial Sequence: Synthetic oligonucleotide
  Antisense strand to SEQ ID NO: 645330
ucuuuccaaaucuaaguuc

SEQ ID NO: 645332 - RNA, 19 nt, Artificial Sequence
  Description of Artificial Sequence: Synthetic oligonucleotide
  Sense strand starting at position 2538 of SEQ ID NO: 585506
gacaacacuugucuuggua

SEQ ID NO: 645333 - RNA, 19 nt, Artificial Sequence
  Description of Artificial Sequence: Synthetic oligonucleotide
  Antisense strand to SEQ ID NO: 645332
uaccaagacaaguguuguc

SEQ ID NO: 645334 - RNA, 19 nt, Artificial Sequence
  Description of Artificial Sequence: Synthetic oligonucleotide
  Sense strand starting at position 2541 of SEQ ID NO: 585506
aacacuugucuugguaaag

SEQ ID NO: 645335 - RNA, 19 nt, Artificial Sequence
  Description of Artificial Sequence: Synthetic oligonucleotide
  Antisense strand to SEQ ID NO: 645334
cuuuaccaagacaaguguu

SEQ ID NO: 645336 - RNA, 19 nt, Artificial Sequence
  Description of Artificial Sequence: Synthetic oligonucleotide
  Sense strand starting at position 2542 of SEQ ID NO: 585506
acacuugucuugguaaaga

SEQ ID NO: 645337 - RNA, 19 nt, Artificial Sequence
  Description of Artificial Sequence: Synthetic oligonucleotide
  Antisense strand to SEQ ID NO: 645336
ucuuuaccaagacaagugu

SEQ ID NO: 645338 - RNA, 19 nt, Artificial Sequence
  Description of Artificial Sequence: Synthetic oligonucleotide
  Sense strand starting at position 2563 of SEQ ID NO: 585506
uuuacauguuacguaaaga

SEQ ID NO: 645339 - RNA, 19 nt, Artificial Sequence
  Description of Artificial Sequence: Synthetic oligonucleotide
  Antisense strand to SEQ ID NO: 645338
ucuuuacguaacauguaaa

SEQ ID NO: 645340 - RNA, 19 nt, Artificial Sequence
  Description of Artificial Sequence: Synthetic oligonucleotide
  Sense strand starting at position 2571 of SEQ ID NO: 585506
uuacguaaagaaugagaau

SEQ ID NO: 645341 - RNA, 19 nt, Artificial Sequence
  Description of Artificial Sequence: Synthetic oligonucleotide
  Antisense strand to SEQ ID NO: 645340
auucucauucuuuacguaa

SEQ ID NO: 645342 - RNA, 19 nt, Artificial Sequence
  Description of Artificial Sequence: Synthetic oligonucleotide
  Sense strand starting at position 2626 of SEQ ID NO: 585506
ggauuagauuuggagggua

SEQ ID NO: 645343 - RNA, 19 nt, Artificial Sequence
  Description of Artificial Sequence: Synthetic oligonucleotide
  Antisense strand to SEQ ID NO: 645342
uacccuccaaaucuaaucc

SEQ ID NO: 645344 - RNA, 19 nt, Artificial Sequence
  Description of Artificial Sequence: Synthetic oligonucleotide
  Sense strand starting at position 2671 of SEQ ID NO: 585506
cggcgcuuccgagaauuug

SEQ ID NO: 645345 - RNA, 19 nt, Artificial Sequence
  Description of Artificial Sequence: Synthetic oligonucleotide
  Antisense strand to SEQ ID NO: 645344
caaauucucggaagcgccg

SEQ ID NO: 645346 - RNA, 19 nt, Artificial Sequence
  Description of Artificial Sequence: Synthetic oligonucleotide
  Sense strand starting at position 2782 of SEQ ID NO: 585506
agaggaauuaagugcagau

SEQ ID NO: 645347 - RNA, 19 nt, Artificial Sequence
  Description of Artificial Sequence: Synthetic oligonucleotide
  Antisense strand to SEQ ID NO: 645346
aucugcacuuaauuccucu

SEQ ID NO: 645348 - RNA, 19 nt, Artificial Sequence
  Description of Artificial Sequence: Synthetic oligonucleotide
  Sense strand starting at position 3189 of SEQ ID NO: 585506
acauaaaguucugugauuc

SEQ ID NO: 645349 - RNA, 19 nt, Artificial Sequence
  Description of Artificial Sequence: Synthetic oligonucleotide
  Antisense strand to SEQ ID NO: 645348
gaaucacagaacuuuaugu

SEQ ID NO: 645350 - RNA, 19 nt, Artificial Sequence
  Description of Artificial Sequence: Synthetic oligonucleotide
  Sense strand starting at position 3339 of SEQ ID NO: 585506
caguaucaugcuuagaguu

SEQ ID NO: 645351 - RNA, 19 nt, Artificial Sequence
  Description of Artificial Sequence: Synthetic oligonucleotide
  Antisense strand to SEQ ID NO: 645350
aacucuaagcaugauacug

SEQ ID NO: 645352 - RNA, 19 nt, Artificial Sequence
  Description of Artificial Sequence: Synthetic oligonucleotide
  Sense strand starting at position 3383 of SEQ ID NO: 585506
gauuauguacuuuggagau

SEQ ID NO: 645353 - RNA, 19 nt, Artificial Sequence
  Description of Artificial Sequence: Synthetic oligonucleotide
  Antisense strand to SEQ ID NO: 645352
aucuccaaaguacauaauc

SEQ ID NO: 645354 - RNA, 19 nt, Artificial Sequence
  Description of Artificial Sequence: Synthetic oligonucleotide
  Sense strand starting at position 3459 of SEQ ID NO: 585506
ugagauguaugguuggaca

SEQ ID NO: 645355 - RNA, 19 nt, Artificial Sequence
  Description of Artificial Sequence: Synthetic oligonucleotide
  Antisense strand to SEQ ID NO: 645354
uguccaaccauacaucuca

SEQ ID NO: 645356 - RNA, 19 nt, Artificial Sequence
  Description of Artificial Sequence: Synthetic oligonucleotide
  Sense strand starting at position 3470 of SEQ ID NO: 585506
guuggacauagcuaguuua

SEQ ID NO: 645357 - RNA, 19 nt, Artificial Sequence
  Description of Artificial Sequence: Synthetic oligonucleotide
  Antisense strand to SEQ ID NO: 645356
uaaacuagcuauguccaac

SEQ ID NO: 645358 - RNA, 19 nt, Artificial Sequence
  Description of Artificial Sequence: Synthetic oligonucleotide
  Sense strand starting at position 3473 of SEQ ID NO: 585506
ggacauagcuaguuuauug

SEQ ID NO: 645359 - RNA, 19 nt, Artificial Sequence
  Description of Artificial Sequence: Synthetic oligonucleotide
  Antisense strand to SEQ ID NO: 645358
caauaaacuagcuaugucc

SEQ ID NO: 645360 - RNA, 19 nt, Artificial Sequence
  Description of Artificial Sequence: Synthetic oligonucleotide
  Sense strand starting at position 3562 of SEQ ID NO: 585506
uaugguaaauguguuacau

SEQ ID NO: 645361 - RNA, 19 nt, Artificial Sequence
  Description of Artificial Sequence: Synthetic oligonucleotide
  Antisense strand to SEQ ID NO: 645360
auguaacacauuuaccaua

SEQ ID NO: 645362 - RNA, 19 nt, Artificial Sequence
  Description of Artificial Sequence: Synthetic oligonucleotide
  Sense strand starting at position 3570 of SEQ ID NO: 585506
auguguuacauccagagua

SEQ ID NO: 645363 - RNA, 19 nt, Artificial Sequence
  Description of Artificial Sequence: Synthetic oligonucleotide
  Antisense strand to SEQ ID NO: 645362
uacucuggauguaacacau

SEQ ID NO: 645364 - RNA, 19 nt, Artificial Sequence
  Description of Artificial Sequence: Synthetic oligonucleotide
  Sense strand starting at position 3572 of SEQ ID NO: 585506
guguuacauccagaguauc

SEQ ID NO: 645365 - RNA, 19 nt, Artificial Sequence
  Description of Artificial Sequence: Synthetic oligonucleotide
  Antisense strand to SEQ ID NO: 645364
gauacucuggauguaacac

SEQ ID NO: 645366 - RNA, 19 nt, Artificial Sequence
  Description of Artificial Sequence: Synthetic oligonucleotide
  Sense strand starting at position 3668 of SEQ ID NO: 585506
aguagaauucugggaguuc

SEQ ID NO: 645367 - RNA, 19 nt, Artificial Sequence
  Description of Artificial Sequence: Synthetic oligonucleotide
  Antisense strand to SEQ ID NO: 645366
gaacucccagaauucuacu

SEQ ID NO: 645368 - RNA, 19 nt, Artificial Sequence
  Description of Artificial Sequence: Synthetic oligonucleotide
  Sense strand starting at position 101 of SEQ ID NO: 585507
ggaaauauuucuuaaagcc

SEQ ID NO: 645369 - RNA, 19 nt, Artificial Sequence
  Description of Artificial Sequence: Synthetic oligonucleotide
  Antisense strand to SEQ ID NO: 645368
ggcuuuaagaaauauuucc

SEQ ID NO: 645370 - RNA, 19 nt, Artificial Sequence
  Description of Artificial Sequence: Synthetic oligonucleotide
  Sense strand starting at position 469 of SEQ ID NO: 585507
guacaaucgaggcaguuaa

SEQ ID NO: 645371 - RNA, 19 nt, Artificial Sequence
  Description of Artificial Sequence: Synthetic oligonucleotide
  Antisense strand to SEQ ID NO: 645370
uuaacugccucgauuguac

SEQ ID NO: 645372 - RNA, 19 nt, Artificial Sequence
  Description of Artificial Sequence: Synthetic oligonucleotide
  Sense strand starting at position 479 of SEQ ID NO: 585507
ggcaguuaauauguauaaa

SEQ ID NO: 645373 - RNA, 19 nt, Artificial Sequence
  Description of Artificial Sequence: Synthetic oligonucleotide
  Antisense strand to SEQ ID NO: 645372
uuuauacauauuaacugcc

SEQ ID NO: 645374 - RNA, 19 nt, Artificial Sequence
  Description of Artificial Sequence: Synthetic oligonucleotide
  Sense strand starting at position 784 of SEQ ID NO: 585507
gauuuaggaucugaauugu

SEQ ID NO: 645375 - RNA, 19 nt, Artificial Sequence
  Description of Artificial Sequence: Synthetic oligonucleotide
  Antisense strand to SEQ ID NO: 645374
acaauucagauccuaaauc

SEQ ID NO: 645376 - RNA, 19 nt, Artificial Sequence
  Description of Artificial Sequence: Synthetic oligonucleotide
  Sense strand starting at position 816 of SEQ ID NO: 585507
ggagaucauucaguaggua

SEQ ID NO: 645377 - RNA, 19 nt, Artificial Sequence
  Description of Artificial Sequence: Synthetic oligonucleotide
  Antisense strand to SEQ ID NO: 645376
uaccuacugaaugaucucc

SEQ ID NO: 645378 - RNA, 19 nt, Artificial Sequence
  Description of Artificial Sequence: Synthetic oligonucleotide
  Sense strand starting at position 828 of SEQ ID NO: 585507
guagguaagucuucuauaa

SEQ ID NO: 645379 - RNA, 19 nt, Artificial Sequence
  Description of Artificial Sequence: Synthetic oligonucleotide
  Antisense strand to SEQ ID NO: 645378
uuauagaagacuuaccuac

SEQ ID NO: 645380 - RNA, 19 nt, Artificial Sequence
  Description of Artificial Sequence: Synthetic oligonucleotide
  Sense strand starting at position 832 of SEQ ID NO: 585507
guaagucuucuauaaauag

SEQ ID NO: 645381 - RNA, 19 nt, Artificial Sequence
  Description of Artificial Sequence: Synthetic oligonucleotide
  Antisense strand to SEQ ID NO: 645380
cuauuuauagaagacuuac

SEQ ID NO: 645382 - RNA, 19 nt, Artificial Sequence
  Description of Artificial Sequence: Synthetic oligonucleotide
  Sense strand starting at position 903 of SEQ ID NO: 585507
uaagguugugcacauagaa

SEQ ID NO: 645383 - RNA, 19 nt, Artificial Sequence
  Description of Artificial Sequence: Synthetic oligonucleotide
  Antisense strand to SEQ ID NO: 645382
uucuaugugcacaaccuua

SEQ ID NO: 645384 - RNA, 19 nt, Artificial Sequence
  Description of Artificial Sequence: Synthetic oligonucleotide
  Sense strand starting at position 1105 of SEQ ID NO: 585507
ucuagcuaugcuuaugaau

SEQ ID NO: 645385 - RNA, 19 nt, Artificial Sequence
  Description of Artificial Sequence: Synthetic oligonucleotide
  Antisense strand to SEQ ID NO: 645384
auucauaagcauagcuaga

SEQ ID NO: 645386 - RNA, 19 nt, Artificial Sequence
  Description of Artificial Sequence: Synthetic oligonucleotide
  Sense strand starting at position 1114 of SEQ ID NO: 585507
gcuuaugaauuaccaaagu

SEQ ID NO: 645387 - RNA, 19 nt, Artificial Sequence
  Description of Artificial Sequence: Synthetic oligonucleotide
  Antisense strand to SEQ ID NO: 645386
acuuugguaauucauaagc

SEQ ID NO: 645388 - RNA, 19 nt, Artificial Sequence
  Description of Artificial Sequence: Synthetic oligonucleotide
  Sense strand starting at position 1197 of SEQ ID NO: 585507
cagauugaagaguguauau

SEQ ID NO: 645389 - RNA, 19 nt, Artificial Sequence
  Description of Artificial Sequence: Synthetic oligonucleotide
  Antisense strand to SEQ ID NO: 645388
auauacacucuucaaucug

SEQ ID NO: 645390 - RNA, 19 nt, Artificial Sequence
  Description of Artificial Sequence: Synthetic oligonucleotide
  Sense strand starting at position 1335 of SEQ ID NO: 585507
gugcaaguugucaggcagu

SEQ ID NO: 645391 - RNA, 19 nt, Artificial Sequence
  Description of Artificial Sequence: Synthetic oligonucleotide
  Antisense strand to SEQ ID NO: 645390
acugccugacaacuugcac

SEQ ID NO: 645392 - RNA, 19 nt, Artificial Sequence
  Description of Artificial Sequence: Synthetic oligonucleotide
  Sense strand starting at position 1405 of SEQ ID NO: 585507
uggcgucugagccagauuu

SEQ ID NO: 645393 - RNA, 19 nt, Artificial Sequence
  Description of Artificial Sequence: Synthetic oligonucleotide
  Antisense strand to SEQ ID NO: 645392
aaaucuggcucagacgcca

SEQ ID NO: 645394 - RNA, 19 nt, Artificial Sequence
  Description of Artificial Sequence: Synthetic oligonucleotide
  Sense strand starting at position 1407 of SEQ ID NO: 585507
gcgucugagccagauuuac

SEQ ID NO: 645395 - RNA, 19 nt, Artificial Sequence
  Description of Artificial Sequence: Synthetic oligonucleotide
  Antisense strand to SEQ ID NO: 645394
guaaaucuggcucagacgc

SEQ ID NO: 645396 - RNA, 19 nt, Artificial Sequence
  Description of Artificial Sequence: Synthetic oligonucleotide
  Sense strand starting at position 1413 of SEQ ID NO: 585507
gagccagauuuacaaguaa

SEQ ID NO: 645397 - RNA, 19 nt, Artificial Sequence
  Description of Artificial Sequence: Synthetic oligonucleotide
  Antisense strand to SEQ ID NO: 645396
uuacuuguaaaucuggcuc

SEQ ID NO: 645398 - RNA, 19 nt, Artificial Sequence
  Description of Artificial Sequence: Synthetic oligonucleotide
  Sense strand starting at position 1679 of SEQ ID NO: 585507
guagaaaugucagcacaau

SEQ ID NO: 645399 - RNA, 19 nt, Artificial Sequence
  Description of Artificial Sequence: Synthetic oligonucleotide
  Antisense strand to SEQ ID NO: 645398
auugugcugacauuucuac

SEQ ID NO: 645400 - RNA, 19 nt, Artificial Sequence
  Description of Artificial Sequence: Synthetic oligonucleotide
  Sense strand starting at position 1701 of SEQ ID NO: 585507
uucuaauuagaacgacuuu

SEQ ID NO: 645401 - RNA, 19 nt, Artificial Sequence
  Description of Artificial Sequence: Synthetic oligonucleotide
  Antisense strand to SEQ ID NO: 645400
aaagucguucuaauuagaa

SEQ ID NO: 645402 - RNA, 19 nt, Artificial Sequence
  Description of Artificial Sequence: Synthetic oligonucleotide
  Sense strand starting at position 1723 of SEQ ID NO: 585507
aagaaacucggagguacau

SEQ ID NO: 645403 - RNA, 19 nt, Artificial Sequence
  Description of Artificial Sequence: Synthetic oligonucleotide
  Antisense strand to SEQ ID NO: 645402
auguaccuccgaguuucuu

SEQ ID NO: 645404 - RNA, 19 nt, Artificial Sequence
  Description of Artificial Sequence: Synthetic oligonucleotide
  Sense strand starting at position 2006 of SEQ ID NO: 585507
uucuguuucccucaggaga

SEQ ID NO: 645405 - RNA, 19 nt, Artificial Sequence
  Description of Artificial Sequence: Synthetic oligonucleotide
  Antisense strand to SEQ ID NO: 645404
ucuccugagggaaacagaa

SEQ ID NO: 645406 - RNA, 19 nt, Artificial Sequence
  Description of Artificial Sequence: Synthetic oligonucleotide
  Sense strand starting at position 2009 of SEQ ID NO: 585507
uguuucccucaggagaagu

SEQ ID NO: 645407 - RNA, 19 nt, Artificial Sequence
  Description of Artificial Sequence: Synthetic oligonucleotide
  Antisense strand to SEQ ID NO: 645406
acuucuccugagggaaaca

SEQ ID NO: 645408 - RNA, 19 nt, Artificial Sequence
  Description of Artificial Sequence: Synthetic oligonucleotide
  Sense strand starting at position 2133 of SEQ ID NO: 585507
gugguuucccaacacuaug

SEQ ID NO: 645409 - RNA, 19 nt, Artificial Sequence
  Description of Artificial Sequence: Synthetic oligonucleotide
  Antisense strand to SEQ ID NO: 645408
cauaguguugggaaaccac

SEQ ID NO: 645410 - RNA, 19 nt, Artificial Sequence
  Description of Artificial Sequence: Synthetic oligonucleotide
  Sense strand starting at position 2381 of SEQ ID NO: 585507
ggagguaggcuucauuaca

SEQ ID NO: 645411 - RNA, 19 nt, Artificial Sequence
  Description of Artificial Sequence: Synthetic oligonucleotide
  Antisense strand to SEQ ID NO: 645410
uguaaugaagccuaccucc

SEQ ID NO: 645412 - RNA, 19 nt, Artificial Sequence
  Description of Artificial Sequence: Synthetic oligonucleotide
  Sense strand starting at position 2481 of SEQ ID NO: 585507
uuuacaugagguugugaaa

SEQ ID NO: 645413 - RNA, 19 nt, Artificial Sequence
  Description of Artificial Sequence: Synthetic oligonucleotide
  Antisense strand to SEQ ID NO: 645412
uuucacaaccucauguaaa

SEQ ID NO: 645414 - RNA, 19 nt, Artificial Sequence
  Description of Artificial Sequence: Synthetic oligonucleotide
  Sense strand starting at position 2488 of SEQ ID NO: 585507
gagguugugaaagauguca

SEQ ID NO: 645415 - RNA, 19 nt, Artificial Sequence
  Description of Artificial Sequence: Synthetic oligonucleotide
  Antisense strand to SEQ ID NO: 645414
ugacaucuuucacaaccuc

SEQ ID NO: 645416 - RNA, 19 nt, Artificial Sequence
  Description of Artificial Sequence: Synthetic oligonucleotide
  Sense strand starting at position 2490 of SEQ ID NO: 585507
gguugugaaagaugucauc

SEQ ID NO: 645417 - RNA, 19 nt, Artificial Sequence
  Description of Artificial Sequence: Synthetic oligonucleotide
  Antisense strand to SEQ ID NO: 645416
gaugacaucuuucacaacc

SEQ ID NO: 645418 - RNA, 19 nt, Artificial Sequence
  Description of Artificial Sequence: Synthetic oligonucleotide
  Sense strand starting at position 2589 of SEQ ID NO: 585507
caggaugaguccuccucua

SEQ ID NO: 645419 - RNA, 19 nt, Artificial Sequence
  Description of Artificial Sequence: Synthetic oligonucleotide
  Antisense strand to SEQ ID NO: 645418
uagaggaggacucauccug

SEQ ID NO: 645420 - RNA, 19 nt, Artificial Sequence
  Description of Artificial Sequence: Synthetic oligonucleotide
  Sense strand starting at position 2594 of SEQ ID NO: 585507
ugaguccuccucuacacuu

SEQ ID NO: 645421 - RNA, 19 nt, Artificial Sequence
  Description of Artificial Sequence: Synthetic oligonucleotide
  Antisense strand to SEQ ID NO: 645420
aaguguagaggaggacuca

SEQ ID NO: 645422 - RNA, 19 nt, Artificial Sequence
  Description of Artificial Sequence: Synthetic oligonucleotide
  Sense strand starting at position 2681 of SEQ ID NO: 585507
gugauucuuccagauccga

SEQ ID NO: 645423 - RNA, 19 nt, Artificial Sequence
  Description of Artificial Sequence: Synthetic oligonucleotide
  Antisense strand to SEQ ID NO: 645422
ucggaucuggaagaaucac

SEQ ID NO: 645424 - RNA, 19 nt, Artificial Sequence
  Description of Artificial Sequence: Synthetic oligonucleotide
  Sense strand starting at position 2730 of SEQ ID NO: 585507
gggaucagaguguauugua

SEQ ID NO: 645425 - RNA, 19 nt, Artificial Sequence
  Description of Artificial Sequence: Synthetic oligonucleotide
  Antisense strand to SEQ ID NO: 645424
uacaauacacucugauccc

SEQ ID NO: 645426 - RNA, 19 nt, Artificial Sequence
  Description of Artificial Sequence: Synthetic oligonucleotide
  Sense strand starting at position 2778 of SEQ ID NO: 585507
ucuagcagauacuuagaga

SEQ ID NO: 645427 - RNA, 19 nt, Artificial Sequence
  Description of Artificial Sequence: Synthetic oligonucleotide
  Antisense strand to SEQ ID NO: 645426
ucucuaaguaucugcuaga

SEQ ID NO: 645428 - RNA, 19 nt, Artificial Sequence
  Description of Artificial Sequence: Synthetic oligonucleotide
  Sense strand starting at position 3019 of SEQ ID NO: 585507
uaaauaaaugggugccauu

SEQ ID NO: 645429 - RNA, 19 nt, Artificial Sequence
  Description of Artificial Sequence: Synthetic oligonucleotide
  Antisense strand to SEQ ID NO: 645428
aauggcacccauuuauuua

SEQ ID NO: 645430 - RNA, 19 nt, Artificial Sequence
  Description of Artificial Sequence: Synthetic oligonucleotide
  Sense strand starting at position 3183 of SEQ ID NO: 585507
ucaccuggacaauguaaau

SEQ ID NO: 645431 - RNA, 19 nt, Artificial Sequence
  Description of Artificial Sequence: Synthetic oligonucleotide
  Antisense strand to SEQ ID NO: 645430
auuuacauuguccagguga

SEQ ID NO: 645432 - RNA, 19 nt, Artificial Sequence
  Description of Artificial Sequence: Synthetic oligonucleotide
  Sense strand starting at position 3324 of SEQ ID NO: 585507
gcagauuuacugcgcacaa

SEQ ID NO: 645433 - RNA, 19 nt, Artificial Sequence
  Description of Artificial Sequence: Synthetic oligonucleotide
  Antisense strand to SEQ ID NO: 645432
uugugcgcaguaaaucugc

SEQ ID NO: 645434 - RNA, 19 nt, Artificial Sequence
  Description of Artificial Sequence: Synthetic oligonucleotide
  Sense strand starting at position 3325 of SEQ ID NO: 585507
cagauuuacugcgcacaag

SEQ ID NO: 645435 - RNA, 19 nt, Artificial Sequence
  Description of Artificial Sequence: Synthetic oligonucleotide
  Antisense strand to SEQ ID NO: 645434
cuugugcgcaguaaaucug

SEQ ID NO: 645436 - RNA, 19 nt, Artificial Sequence
  Description of Artificial Sequence: Synthetic oligonucleotide
  Sense strand starting at position 3344 of SEQ ID NO: 585507
gcauacaugauugaggguu

SEQ ID NO: 645437 - RNA, 19 nt, Artificial Sequence
  Description of Artificial Sequence: Synthetic oligonucleotide
  Antisense strand to SEQ ID NO: 645436
aacccucaaucauguaugc

SEQ ID NO: 645438 - RNA, 19 nt, Artificial Sequence
  Description of Artificial Sequence: Synthetic oligonucleotide
  Sense strand starting at position 3401 of SEQ ID NO: 585507
agugcacacuaaucaaaga

SEQ ID NO: 645439 - RNA, 19 nt, Artificial Sequence
  Description of Artificial Sequence: Synthetic oligonucleotide
  Antisense strand to SEQ ID NO: 645438
ucuuugauuagugugcacu

SEQ ID NO: 645440 - RNA, 19 nt, Artificial Sequence
  Description of Artificial Sequence: Synthetic oligonucleotide
  Sense strand starting at position 3431 of SEQ ID NO: 585507
guaaccguuugucucauuu

SEQ ID NO: 645441 - RNA, 19 nt, Artificial Sequence
  Description of Artificial Sequence: Synthetic oligonucleotide
  Antisense strand to SEQ ID NO: 645440
aaaugagacaaacgguuac

SEQ ID NO: 645442 - RNA, 19 nt, Artificial Sequence
  Description of Artificial Sequence: Synthetic oligonucleotide
  Sense strand starting at position 3768 of SEQ ID NO: 585507
gcaaggauagggugugaga

SEQ ID NO: 645443 - RNA, 19 nt, Artificial Sequence
  Description of Artificial Sequence: Synthetic oligonucleotide
  Antisense strand to SEQ ID NO: 645442
ucucacacccuauccuugc

SEQ ID NO: 645444 - RNA, 19 nt, Artificial Sequence
  Description of Artificial Sequence: Synthetic oligonucleotide
  Sense strand starting at position 3835 of SEQ ID NO: 585507
guucacauuggcuggagaa

SEQ ID NO: 645445 - RNA, 19 nt, Artificial Sequence
  Description of Artificial Sequence: Synthetic oligonucleotide
  Antisense strand to SEQ ID NO: 645444
uucuccagccaaugugaac

SEQ ID NO: 645446 - RNA, 19 nt, Artificial Sequence
  Description of Artificial Sequence: Synthetic oligonucleotide
  Sense strand starting at position 3962 of SEQ ID NO: 585507
acaggucaguguuuccaaa

SEQ ID NO: 645447 - RNA, 19 nt, Artificial Sequence
  Description of Artificial Sequence: Synthetic oligonucleotide
  Antisense strand to SEQ ID NO: 645446
uuuggaaacacugaccugu

SEQ ID NO: 645448 - RNA, 19 nt, Artificial Sequence
  Description of Artificial Sequence: Synthetic oligonucleotide
  Sense strand starting at position 106 of SEQ ID NO: 585508
acauuauaccuccgugaga

SEQ ID NO: 645449 - RNA, 19 nt, Artificial Sequence
  Description of Artificial Sequence: Synthetic oligonucleotide
  Antisense strand to SEQ ID NO: 645448
ucucacggagguauaaugu

SEQ ID NO: 645450 - RNA, 19 nt, Artificial Sequence
  Description of Artificial Sequence: Synthetic oligonucleotide
  Sense strand starting at position 107 of SEQ ID NO: 585508
cauuauaccuccgugagac

SEQ ID NO: 645451 - RNA, 19 nt, Artificial Sequence
  Description of Artificial Sequence: Synthetic oligonucleotide
  Antisense strand to SEQ ID NO: 645450
gucucacggagguauaaug

SEQ ID NO: 645452 - RNA, 19 nt, Artificial Sequence
  Description of Artificial Sequence: Synthetic oligonucleotide
  Sense strand starting at position 138 of SEQ ID NO: 585508
cuucuacugugaguauuau

SEQ ID NO: 645453 - RNA, 19 nt, Artificial Sequence
  Description of Artificial Sequence: Synthetic oligonucleotide
  Antisense strand to SEQ ID NO: 645452
auaauacucacaguagaag

SEQ ID NO: 645454 - RNA, 19 nt, Artificial Sequence
  Description of Artificial Sequence: Synthetic oligonucleotide
  Sense strand starting at position 139 of SEQ ID NO: 585508
uucuacugugaguauuauu

SEQ ID NO: 645455 - RNA, 19 nt, Artificial Sequence
  Description of Artificial Sequence: Synthetic oligonucleotide
  Antisense strand to SEQ ID NO: 645454
aauaauacucacaguagaa

SEQ ID NO: 645456 - RNA, 19 nt, Artificial Sequence
  Description of Artificial Sequence: Synthetic oligonucleotide
  Sense strand starting at position 188 of SEQ ID NO: 585508
auuaucuccuaagugaugu

SEQ ID NO: 645457 - RNA, 19 nt, Artificial Sequence
  Description of Artificial Sequence: Synthetic oligonucleotide
  Antisense strand to SEQ ID NO: 645456
acaucacuuaggagauaau

SEQ ID NO: 645458 - RNA, 19 nt, Artificial Sequence
  Description of Artificial Sequence: Synthetic oligonucleotide
  Sense strand starting at position 229 of SEQ ID NO: 585508
uuaggaaaguuaccaagua

SEQ ID NO: 645459 - RNA, 19 nt, Artificial Sequence
  Description of Artificial Sequence: Synthetic oligonucleotide
  Antisense strand to SEQ ID NO: 645458
uacuugguaacuuuccuaa

SEQ ID NO: 645460 - RNA, 19 nt, Artificial Sequence
  Description of Artificial Sequence: Synthetic oligonucleotide
  Sense strand starting at position 253 of SEQ ID NO: 585508
agugcucauuugucacauu

SEQ ID NO: 645461 - RNA, 19 nt, Artificial Sequence
  Description of Artificial Sequence: Synthetic oligonucleotide
  Antisense strand to SEQ ID NO: 645460
aaugugacaaaugagcacu

SEQ ID NO: 645462 - RNA, 19 nt, Artificial Sequence
  Description of Artificial Sequence: Synthetic oligonucleotide
  Sense strand starting at position 311 of SEQ ID NO: 585508
gggugcauauuggcauuua

SEQ ID NO: 645463 - RNA, 19 nt, Artificial Sequence
  Description of Artificial Sequence: Synthetic oligonucleotide
  Antisense strand to SEQ ID NO: 645462
uaaaugccaauaugcaccc

SEQ ID NO: 645464 - RNA, 19 nt, Artificial Sequence
  Description of Artificial Sequence: Synthetic oligonucleotide
  Sense strand starting at position 322 of SEQ ID NO: 585508
ggcauuuaauauggagaac

SEQ ID NO: 645465 - RNA, 19 nt, Artificial Sequence
  Description of Artificial Sequence: Synthetic oligonucleotide
  Antisense strand to SEQ ID NO: 645464
guucuccauauuaaaugcc

SEQ ID NO: 645466 - RNA, 19 nt, Artificial Sequence
  Description of Artificial Sequence: Synthetic oligonucleotide
  Sense strand starting at position 397 of SEQ ID NO: 585508
uggguauaccguuaagcca

SEQ ID NO: 645467 - RNA, 19 nt, Artificial Sequence
  Description of Artificial Sequence: Synthetic oligonucleotide
  Antisense strand to SEQ ID NO: 645466
uggcuuaacgguauaccca

SEQ ID NO: 645468 - RNA, 19 nt, Artificial Sequence
  Description of Artificial Sequence: Synthetic oligonucleotide
  Sense strand starting at position 490 of SEQ ID NO: 585508
auuuguucugauuguauuc

SEQ ID NO: 645469 - RNA, 19 nt, Artificial Sequence
  Description of Artificial Sequence: Synthetic oligonucleotide
  Antisense strand to SEQ ID NO: 645468
gaauacaaucagaacaaau

SEQ ID NO: 645470 - RNA, 19 nt, Artificial Sequence
  Description of Artificial Sequence: Synthetic oligonucleotide
  Sense strand starting at position 540 of SEQ ID NO: 585508
aauaaauguugggcuugua

SEQ ID NO: 645471 - RNA, 19 nt, Artificial Sequence
  Description of Artificial Sequence: Synthetic oligonucleotide
  Antisense strand to SEQ ID NO: 645470
uacaagcccaacauuuauu

SEQ ID NO: 645472 - RNA, 19 nt, Artificial Sequence
  Description of Artificial Sequence: Synthetic oligonucleotide
  Sense strand starting at position 543 of SEQ ID NO: 585508
aaauguugggcuuguacuu

SEQ ID NO: 645473 - RNA, 19 nt, Artificial Sequence
  Description of Artificial Sequence: Synthetic oligonucleotide
  Antisense strand to SEQ ID NO: 645472
aaguacaagcccaacauuu

SEQ ID NO: 645474 - RNA, 19 nt, Artificial Sequence
  Description of Artificial Sequence: Synthetic oligonucleotide
  Sense strand starting at position 548 of SEQ ID NO: 585508
uugggcuuguacuuuauau

SEQ ID NO: 645475 - RNA, 19 nt, Artificial Sequence
  Description of Artificial Sequence: Synthetic oligonucleotide
  Antisense strand to SEQ ID NO: 645474
auauaaaguacaagcccaa

SEQ ID NO: 645476 - RNA, 19 nt, Artificial Sequence
  Description of Artificial Sequence: Synthetic oligonucleotide
  Sense strand starting at position 550 of SEQ ID NO: 585508
gggcuuguacuuuauauau

SEQ ID NO: 645477 - RNA, 19 nt, Artificial Sequence
  Description of Artificial Sequence: Synthetic oligonucleotide
  Antisense strand to SEQ ID NO: 645476
auauauaaaguacaagccc

SEQ ID NO: 645478 - RNA, 19 nt, Artificial Sequence
  Description of Artificial Sequence: Synthetic oligonucleotide
  Sense strand starting at position 624 of SEQ ID NO: 585508
ucaugugaauugcagauuu

SEQ ID NO: 645479 - RNA, 19 nt, Artificial Sequence
  Description of Artificial Sequence: Synthetic oligonucleotide
  Antisense strand to SEQ ID NO: 645478
aaaucugcaauucacauga

SEQ ID NO: 645480 - RNA, 19 nt, Artificial Sequence
  Description of Artificial Sequence: Synthetic oligonucleotide
  Sense strand starting at position 745 of SEQ ID NO: 585508
ugucacagcugcucaauuu

SEQ ID NO: 645481 - RNA, 19 nt, Artificial Sequence
  Description of Artificial Sequence: Synthetic oligonucleotide
  Antisense strand to SEQ ID NO: 645480
aaauugagcagcugugaca

SEQ ID NO: 645482 - RNA, 19 nt, Artificial Sequence
  Description of Artificial Sequence: Synthetic oligonucleotide
  Sense strand starting at position 796 of SEQ ID NO: 585508
uagguaauugagugggcau

SEQ ID NO: 645483 - RNA, 19 nt, Artificial Sequence
  Description of Artificial Sequence: Synthetic oligonucleotide
  Antisense strand to SEQ ID NO: 645482
augcccacucaauuaccua

SEQ ID NO: 645484 - RNA, 19 nt, Artificial Sequence
  Description of Artificial Sequence: Synthetic oligonucleotide
  Sense strand starting at position 839 of SEQ ID NO: 585508
acuuauaggcacugaaauu

SEQ ID NO: 645485 - RNA, 19 nt, Artificial Sequence
  Description of Artificial Sequence: Synthetic oligonucleotide
  Antisense strand to SEQ ID NO: 645484
aauuucagugccuauaagu

SEQ ID NO: 645486 - RNA, 19 nt, Artificial Sequence
  Description of Artificial Sequence: Synthetic oligonucleotide
  Sense strand starting at position 970 of SEQ ID NO: 585508
guaucuugguaucuagacu

SEQ ID NO: 645487 - RNA, 19 nt, Artificial Sequence
  Description of Artificial Sequence: Synthetic oligonucleotide
  Antisense strand to SEQ ID NO: 645486
agucuagauaccaagauac

SEQ ID NO: 645488 - RNA, 19 nt, Artificial Sequence
  Description of Artificial Sequence: Synthetic oligonucleotide
  Sense strand starting at position 1175 of SEQ ID NO: 585508
agucaugcagacugugaga

SEQ ID NO: 645489 - RNA, 19 nt, Artificial Sequence
  Description of Artificial Sequence: Synthetic oligonucleotide
  Antisense strand to SEQ ID NO: 645488
ucucacagucugcaugacu

SEQ ID NO: 645490 - RNA, 19 nt, Artificial Sequence
  Description of Artificial Sequence: Synthetic oligonucleotide
  Sense strand starting at position 1198 of SEQ ID NO: 585508
ugcucuugugcacauauga

SEQ ID NO: 645491 - RNA, 19 nt, Artificial Sequence
  Description of Artificial Sequence: Synthetic oligonucleotide
  Antisense strand to SEQ ID NO: 645490
ucauaugugcacaagagca

SEQ ID NO: 645492 - RNA, 19 nt, Artificial Sequence
  Description of Artificial Sequence: Synthetic oligonucleotide
  Sense strand starting at position 1275 of SEQ ID NO: 585508
ggcuuccacgauugggaaa

SEQ ID NO: 645493 - RNA, 19 nt, Artificial Sequence
  Description of Artificial Sequence: Synthetic oligonucleotide
  Antisense strand to SEQ ID NO: 645492
uuucccaaucguggaagcc

SEQ ID NO: 645494 - RNA, 19 nt, Artificial Sequence
  Description of Artificial Sequence: Synthetic oligonucleotide
  Sense strand starting at position 1353 of SEQ ID NO: 585508
aagagcucaccuggagaua

SEQ ID NO: 645495 - RNA, 19 nt, Artificial Sequence
  Description of Artificial Sequence: Synthetic oligonucleotide
  Antisense strand to SEQ ID NO: 645494
uaucuccaggugagcucuu

SEQ ID NO: 645496 - RNA, 19 nt, Artificial Sequence
  Description of Artificial Sequence: Synthetic oligonucleotide
  Sense strand starting at position 1695 of SEQ ID NO: 585508
gccugagagccuggagaau

SEQ ID NO: 645497 - RNA, 19 nt, Artificial Sequence
  Description of Artificial Sequence: Synthetic oligonucleotide
  Antisense strand to SEQ ID NO: 645496
auucuccaggcucucaggc

SEQ ID NO: 645498 - RNA, 19 nt, Artificial Sequence
  Description of Artificial Sequence: Synthetic oligonucleotide
  Sense strand starting at position 1716 of SEQ ID NO: 585508
ugaaguaacgcauagguca

SEQ ID NO: 645499 - RNA, 19 nt, Artificial Sequence
  Description of Artificial Sequence: Synthetic oligonucleotide
  Antisense strand to SEQ ID NO: 645498
ugaccuaugcguuacuuca

SEQ ID NO: 645500 - RNA, 19 nt, Artificial Sequence
  Description of Artificial Sequence: Synthetic oligonucleotide
  Sense strand starting at position 2158 of SEQ ID NO: 585508
uucccaggccucuguagaa

SEQ ID NO: 645501 - RNA, 19 nt, Artificial Sequence
  Description of Artificial Sequence: Synthetic oligonucleotide
  Antisense strand to SEQ ID NO: 645500
uucuacagaggccugggaa

SEQ ID NO: 645502 - RNA, 19 nt, Artificial Sequence
  Description of Artificial Sequence: Synthetic oligonucleotide
  Sense strand starting at position 2255 of SEQ ID NO: 585508
ggaaacugugggcgaguua

SEQ ID NO: 645503 - RNA, 19 nt, Artificial Sequence
  Description of Artificial Sequence: Synthetic oligonucleotide
  Antisense strand to SEQ ID NO: 645502
uaacucgcccacaguuucc

SEQ ID NO: 645504 - RNA, 19 nt, Artificial Sequence
  Description of Artificial Sequence: Synthetic oligonucleotide
  Sense strand starting at position 2256 of SEQ ID NO: 585508
gaaacugugggcgaguuau

SEQ ID NO: 645505 - RNA, 19 nt, Artificial Sequence
  Description of Artificial Sequence: Synthetic oligonucleotide
  Antisense strand to SEQ ID NO: 645504
auaacucgcccacaguuuc

SEQ ID NO: 645506 - RNA, 19 nt, Artificial Sequence
  Description of Artificial Sequence: Synthetic oligonucleotide
  Sense strand starting at position 2479 of SEQ ID NO: 585508
gcuuccacucugggaguuu

SEQ ID NO: 645507 - RNA, 19 nt, Artificial Sequence
  Description of Artificial Sequence: Synthetic oligonucleotide
  Antisense strand to SEQ ID NO: 645506
aaacucccagaguggaagc

SEQ ID NO: 645508 - RNA, 19 nt, Artificial Sequence
  Description of Artificial Sequence: Synthetic oligonucleotide
  Sense strand starting at position 2770 of SEQ ID NO: 585508
augucagcacuuugaagau

SEQ ID NO: 645509 - RNA, 19 nt, Artificial Sequence
  Description of Artificial Sequence: Synthetic oligonucleotide
  Antisense strand to SEQ ID NO: 645508
aucuucaaagugcugacau

SEQ ID NO: 645510 - RNA, 19 nt, Artificial Sequence
  Description of Artificial Sequence: Synthetic oligonucleotide
  Sense strand starting at position 2833 of SEQ ID NO: 585508
auaucuuaggacugguaga

SEQ ID NO: 645511 - RNA, 19 nt, Artificial Sequence
  Description of Artificial Sequence: Synthetic oligonucleotide
  Antisense strand to SEQ ID NO: 645510
ucuaccaguccuaagauau

SEQ ID NO: 645512 - RNA, 19 nt, Artificial Sequence
  Description of Artificial Sequence: Synthetic oligonucleotide
  Sense strand starting at position 2848 of SEQ ID NO: 585508
uagagacacuguguguaau

SEQ ID NO: 645513 - RNA, 19 nt, Artificial Sequence
  Description of Artificial Sequence: Synthetic oligonucleotide
  Antisense strand to SEQ ID NO: 645512
auuacacacagugucucua

SEQ ID NO: 645514 - RNA, 19 nt, Artificial Sequence
  Description of Artificial Sequence: Synthetic oligonucleotide
  Sense strand starting at position 2849 of SEQ ID NO: 585508
agagacacuguguguaauu

SEQ ID NO: 645515 - RNA, 19 nt, Artificial Sequence
  Description of Artificial Sequence: Synthetic oligonucleotide
  Antisense strand to SEQ ID NO: 645514
aauuacacacagugucucu

SEQ ID NO: 645516 - RNA, 19 nt, Artificial Sequence
  Description of Artificial Sequence: Synthetic oligonucleotide
  Sense strand starting at position 3035 of SEQ ID NO: 585508
ugcccuucuccuuacagua

SEQ ID NO: 645517 - RNA, 19 nt, Artificial Sequence
  Description of Artificial Sequence: Synthetic oligonucleotide
  Antisense strand to SEQ ID NO: 645516
uacuguaaggagaagggca

SEQ ID NO: 645518 - RNA, 19 nt, Artificial Sequence
  Description of Artificial Sequence: Synthetic oligonucleotide
  Sense strand starting at position 3042 of SEQ ID NO: 585508
cuccuuacaguaggaguau

SEQ ID NO: 645519 - RNA, 19 nt, Artificial Sequence
  Description of Artificial Sequence: Synthetic oligonucleotide
  Antisense strand to SEQ ID NO: 645518
auacuccuacuguaaggag

SEQ ID NO: 645520 - RNA, 19 nt, Artificial Sequence
  Description of Artificial Sequence: Synthetic oligonucleotide
  Sense strand starting at position 3057 of SEQ ID NO: 585508
guaugcagagacugagaau

SEQ ID NO: 645521 - RNA, 19 nt, Artificial Sequence
  Description of Artificial Sequence: Synthetic oligonucleotide
  Antisense strand to SEQ ID NO: 645520
auucucagucucugcauac

SEQ ID NO: 645522 - RNA, 19 nt, Artificial Sequence
  Description of Artificial Sequence: Synthetic oligonucleotide
  Sense strand starting at position 3277 of SEQ ID NO: 585508
gggagacauuacuucucuu

SEQ ID NO: 645523 - RNA, 19 nt, Artificial Sequence
  Description of Artificial Sequence: Synthetic oligonucleotide
  Antisense strand to SEQ ID NO: 645522
aagagaaguaaugucuccc

SEQ ID NO: 645524 - RNA, 19 nt, Artificial Sequence
  Description of Artificial Sequence: Synthetic oligonucleotide
  Sense strand starting at position 3705 of SEQ ID NO: 585508
cccugcugacucuaaguga

SEQ ID NO: 645525 - RNA, 19 nt, Artificial Sequence
  Description of Artificial Sequence: Synthetic oligonucleotide
  Antisense strand to SEQ ID NO: 645524
ucacuuagagucagcaggg

SEQ ID NO: 645526 - RNA, 19 nt, Artificial Sequence
  Description of Artificial Sequence: Synthetic oligonucleotide
  Sense strand starting at position 3730 of SEQ ID NO: 585508
cuucuuguagcuuacaaga

SEQ ID NO: 645527 - RNA, 19 nt, Artificial Sequence
  Description of Artificial Sequence: Synthetic oligonucleotide
  Antisense strand to SEQ ID NO: 645526
ucuuguaagcuacaagaag

SEQ ID NO: 645528 - RNA, 19 nt, Artificial Sequence
  Description of Artificial Sequence: Synthetic oligonucleotide
  Sense strand starting at position 198 of SEQ ID NO: 585509
auuaaaucuccaggugaag

SEQ ID NO: 645529 - RNA, 19 nt, Artificial Sequence
  Description of Artificial Sequence: Synthetic oligonucleotide
  Antisense strand to SEQ ID NO: 645528
cuucaccuggagauuuaau

SEQ ID NO: 645530 - RNA, 19 nt, Artificial Sequence
  Description of Artificial Sequence: Synthetic oligonucleotide
  Sense strand starting at position 220 of SEQ ID NO: 585509
uggccuuaauugguugaga

SEQ ID NO: 645531 - RNA, 19 nt, Artificial Sequence
  Description of Artificial Sequence: Synthetic oligonucleotide
  Antisense strand to SEQ ID NO: 645530
ucucaaccaauuaaggcca

SEQ ID NO: 645532 - RNA, 19 nt, Artificial Sequence
  Description of Artificial Sequence: Synthetic oligonucleotide
  Sense strand starting at position 221 of SEQ ID NO: 585509
ggccuuaauugguugagau

SEQ ID NO: 645533 - RNA, 19 nt, Artificial Sequence
  Description of Artificial Sequence: Synthetic oligonucleotide
  Antisense strand to SEQ ID NO: 645532
aucucaaccaauuaaggcc

SEQ ID NO: 645534 - RNA, 19 nt, Artificial Sequence
  Description of Artificial Sequence: Synthetic oligonucleotide
  Sense strand starting at position 222 of SEQ ID NO: 585509
gccuuaauugguugagauu

SEQ ID NO: 645535 - RNA, 19 nt, Artificial Sequence
  Description of Artificial Sequence: Synthetic oligonucleotide
  Antisense strand to SEQ ID NO: 645534
aaucucaaccaauuaaggc

SEQ ID NO: 645536 - RNA, 19 nt, Artificial Sequence
  Description of Artificial Sequence: Synthetic oligonucleotide
  Sense strand starting at position 223 of SEQ ID NO: 585509
ccuuaauugguugagauuc

SEQ ID NO: 645537 - RNA, 19 nt, Artificial Sequence
  Description of Artificial Sequence: Synthetic oligonucleotide
  Antisense strand to SEQ ID NO: 645536
gaaucucaaccaauuaagg

SEQ ID NO: 645538 - RNA, 19 nt, Artificial Sequence
  Description of Artificial Sequence: Synthetic oligonucleotide
  Sense strand starting at position 231 of SEQ ID NO: 585509
gguugagauuccuauuuaa

SEQ ID NO: 645539 - RNA, 19 nt, Artificial Sequence
  Description of Artificial Sequence: Synthetic oligonucleotide
  Antisense strand to SEQ ID NO: 645538
uuaaauaggaaucucaacc

SEQ ID NO: 645540 - RNA, 19 nt, Artificial Sequence
  Description of Artificial Sequence: Synthetic oligonucleotide
  Sense strand starting at position 307 of SEQ ID NO: 585509
uagggaaauuuacaaguca

SEQ ID NO: 645541 - RNA, 19 nt, Artificial Sequence
  Description of Artificial Sequence: Synthetic oligonucleotide
  Antisense strand to SEQ ID NO: 645540
ugacuuguaaauuucccua

SEQ ID NO: 645542 - RNA, 19 nt, Artificial Sequence
  Description of Artificial Sequence: Synthetic oligonucleotide
  Sense strand starting at position 359 of SEQ ID NO: 585509
auggaaauuaccuggagca

SEQ ID NO: 645543 - RNA, 19 nt, Artificial Sequence
  Description of Artificial Sequence: Synthetic oligonucleotide
  Antisense strand to SEQ ID NO: 645542
ugcuccagguaauuuccau

SEQ ID NO: 645544 - RNA, 19 nt, Artificial Sequence
  Description of Artificial Sequence: Synthetic oligonucleotide
  Sense strand starting at position 360 of SEQ ID NO: 585509
uggaaauuaccuggagcau

SEQ ID NO: 645545 - RNA, 19 nt, Artificial Sequence
  Description of Artificial Sequence: Synthetic oligonucleotide
  Antisense strand to SEQ ID NO: 645544
augcuccagguaauuucca

SEQ ID NO: 645546 - RNA, 19 nt, Artificial Sequence
  Description of Artificial Sequence: Synthetic oligonucleotide
  Sense strand starting at position 369 of SEQ ID NO: 585509
ccuggagcaucugcuagaa

SEQ ID NO: 645547 - RNA, 19 nt, Artificial Sequence
  Description of Artificial Sequence: Synthetic oligonucleotide
  Antisense strand to SEQ ID NO: 645546
uucuagcagaugcuccagg

SEQ ID NO: 645548 - RNA, 19 nt, Artificial Sequence
  Description of Artificial Sequence: Synthetic oligonucleotide
  Sense strand starting at position 373 of SEQ ID NO: 585509
gagcaucugcuagaacaga

SEQ ID NO: 645549 - RNA, 19 nt, Artificial Sequence
  Description of Artificial Sequence: Synthetic oligonucleotide
  Antisense strand to SEQ ID NO: 645548
ucuguucuagcagaugcuc

SEQ ID NO: 645550 - RNA, 19 nt, Artificial Sequence
  Description of Artificial Sequence: Synthetic oligonucleotide
  Sense strand starting at position 444 of SEQ ID NO: 585509
aagaauuuguucuagguuc

SEQ ID NO: 645551 - RNA, 19 nt, Artificial Sequence
  Description of Artificial Sequence: Synthetic oligonucleotide
  Antisense strand to SEQ ID NO: 645550
gaaccuagaacaaauucuu

SEQ ID NO: 645552 - RNA, 19 nt, Artificial Sequence
  Description of Artificial Sequence: Synthetic oligonucleotide
  Sense strand starting at position 451 of SEQ ID NO: 585509
uguucuagguucccagaaa

SEQ ID NO: 645553 - RNA, 19 nt, Artificial Sequence
  Description of Artificial Sequence: Synthetic oligonucleotide
  Antisense strand to SEQ ID NO: 645552
uuucugggaaccuagaaca

SEQ ID NO: 645554 - RNA, 19 nt, Artificial Sequence
  Description of Artificial Sequence: Synthetic oligonucleotide
  Sense strand starting at position 496 of SEQ ID NO: 585509
aguuaauaauaugccugau

SEQ ID NO: 645555 - RNA, 19 nt, Artificial Sequence
  Description of Artificial Sequence: Synthetic oligonucleotide
  Antisense strand to SEQ ID NO: 645554
aucaggcauauuauuaacu

SEQ ID NO: 645556 - RNA, 19 nt, Artificial Sequence
  Description of Artificial Sequence: Synthetic oligonucleotide
  Sense strand starting at position 498 of SEQ ID NO: 585509
uuaauaauaugccugauag

SEQ ID NO: 645557 - RNA, 19 nt, Artificial Sequence
  Description of Artificial Sequence: Synthetic oligonucleotide
  Antisense strand to SEQ ID NO: 645556
cuaucaggcauauuauuaa

SEQ ID NO: 645558 - RNA, 19 nt, Artificial Sequence
  Description of Artificial Sequence: Synthetic oligonucleotide
  Sense strand starting at position 514 of SEQ ID NO: 585509
uaguuaaggucucucaguu

SEQ ID NO: 645559 - RNA, 19 nt, Artificial Sequence
  Description of Artificial Sequence: Synthetic oligonucleotide
  Antisense strand to SEQ ID NO: 645558
aacugagagaccuuaacua

SEQ ID NO: 645560 - RNA, 19 nt, Artificial Sequence
  Description of Artificial Sequence: Synthetic oligonucleotide
  Sense strand starting at position 678 of SEQ ID NO: 585509
caaguuagccagcaguaau

SEQ ID NO: 645561 - RNA, 19 nt, Artificial Sequence
  Description of Artificial Sequence: Synthetic oligonucleotide
  Antisense strand to SEQ ID NO: 645560
auuacugcuggcuaacuug

SEQ ID NO: 645562 - RNA, 19 nt, Artificial Sequence
  Description of Artificial Sequence: Synthetic oligonucleotide
  Sense strand starting at position 778 of SEQ ID NO: 585509
cugagauaccgccacugua

SEQ ID NO: 645563 - RNA, 19 nt, Artificial Sequence
  Description of Artificial Sequence: Synthetic oligonucleotide
  Antisense strand to SEQ ID NO: 645562
uacaguggcgguaucucag

SEQ ID NO: 645564 - RNA, 19 nt, Artificial Sequence
  Description of Artificial Sequence: Synthetic oligonucleotide
  Sense strand starting at position 1544 of SEQ ID NO: 585509
gagugucaccuuuggagca

SEQ ID NO: 645565 - RNA, 19 nt, Artificial Sequence
  Description of Artificial Sequence: Synthetic oligonucleotide
  Antisense strand to SEQ ID NO: 645564
ugcuccaaaggugacacuc

SEQ ID NO: 645566 - RNA, 19 nt, Artificial Sequence
  Description of Artificial Sequence: Synthetic oligonucleotide
  Sense strand starting at position 1737 of SEQ ID NO: 585509
gucggaagaugucccaguu

SEQ ID NO: 645567 - RNA, 19 nt, Artificial Sequence
  Description of Artificial Sequence: Synthetic oligonucleotide
  Antisense strand to SEQ ID NO: 645566
aacugggacaucuuccgac

SEQ ID NO: 645568 - RNA, 19 nt, Artificial Sequence
  Description of Artificial Sequence: Synthetic oligonucleotide
  Sense strand starting at position 1818 of SEQ ID NO: 585509
ggccuuuggucaccagaug

SEQ ID NO: 645569 - RNA, 19 nt, Artificial Sequence
  Description of Artificial Sequence: Synthetic oligonucleotide
  Antisense strand to SEQ ID NO: 645568
caucuggugaccaaaggcc

SEQ ID NO: 645570 - RNA, 19 nt, Artificial Sequence
  Description of Artificial Sequence: Synthetic oligonucleotide
  Sense strand starting at position 1843 of SEQ ID NO: 585509
gggagcuuccuaugacaca

SEQ ID NO: 645571 - RNA, 19 nt, Artificial Sequence
  Description of Artificial Sequence: Synthetic oligonucleotide
  Antisense strand to SEQ ID NO: 645570
ugugucauaggaagcuccc

SEQ ID NO: 645572 - RNA, 19 nt, Artificial Sequence
  Description of Artificial Sequence: Synthetic oligonucleotide
  Sense strand starting at position 2032 of SEQ ID NO: 585509
gggcuuagauggcugcuaa

SEQ ID NO: 645573 - RNA, 19 nt, Artificial Sequence
  Description of Artificial Sequence: Synthetic oligonucleotide
  Antisense strand to SEQ ID NO: 645572
uuagcagccaucuaagccc

SEQ ID NO: 645574 - RNA, 19 nt, Artificial Sequence
  Description of Artificial Sequence: Synthetic oligonucleotide
  Sense strand starting at position 2269 of SEQ ID NO: 585509
caagauuucuaugagggau

SEQ ID NO: 645575 - RNA, 19 nt, Artificial Sequence
  Description of Artificial Sequence: Synthetic oligonucleotide
  Antisense strand to SEQ ID NO: 645574
aucccucauagaaaucuug

SEQ ID NO: 645576 - RNA, 19 nt, Artificial Sequence
  Description of Artificial Sequence: Synthetic oligonucleotide
  Sense strand starting at position 2271 of SEQ ID NO: 585509
agauuucuaugagggauua

SEQ ID NO: 645577 - RNA, 19 nt, Artificial Sequence
  Description of Artificial Sequence: Synthetic oligonucleotide
  Antisense strand to SEQ ID NO: 645576
uaaucccucauagaaaucu

SEQ ID NO: 645578 - RNA, 19 nt, Artificial Sequence
  Description of Artificial Sequence: Synthetic oligonucleotide
  Sense strand starting at position 2293 of SEQ ID NO: 585509
gaagcaagcugauugguga

SEQ ID NO: 645579 - RNA, 19 nt, Artificial Sequence
  Description of Artificial Sequence: Synthetic oligonucleotide
  Antisense strand to SEQ ID NO: 645578
ucaccaaucagcuugcuuc

SEQ ID NO: 645580 - RNA, 19 nt, Artificial Sequence
  Description of Artificial Sequence: Synthetic oligonucleotide
  Sense strand starting at position 3035 of SEQ ID NO: 585509
gauggauguuauguuagca

SEQ ID NO: 645581 - RNA, 19 nt, Artificial Sequence
  Description of Artificial Sequence: Synthetic oligonucleotide
  Antisense strand to SEQ ID NO: 645580
ugcuaacauaacauccauc

SEQ ID NO: 645582 - RNA, 19 nt, Artificial Sequence
  Description of Artificial Sequence: Synthetic oligonucleotide
  Sense strand starting at position 3150 of SEQ ID NO: 585509
ccgagaccagucugaucaa

SEQ ID NO: 645583 - RNA, 19 nt, Artificial Sequence
  Description of Artificial Sequence: Synthetic oligonucleotide
  Antisense strand to SEQ ID NO: 645582
uugaucagacuggucucgg

SEQ ID NO: 645584 - RNA, 19 nt, Artificial Sequence
  Description of Artificial Sequence: Synthetic oligonucleotide
  Sense strand starting at position 3380 of SEQ ID NO: 585509
caacauucgucucuuugga

SEQ ID NO: 645585 - RNA, 19 nt, Artificial Sequence
  Description of Artificial Sequence: Synthetic oligonucleotide
  Antisense strand to SEQ ID NO: 645584
uccaaagagacgaauguug

SEQ ID NO: 645586 - RNA, 19 nt, Artificial Sequence
  Description of Artificial Sequence: Synthetic oligonucleotide
  Sense strand starting at position 3382 of SEQ ID NO: 585509
acauucgucucuuuggaca

SEQ ID NO: 645587 - RNA, 19 nt, Artificial Sequence
  Description of Artificial Sequence: Synthetic oligonucleotide
  Antisense strand to SEQ ID NO: 645586
uguccaaagagacgaaugu

SEQ ID NO: 645588 - RNA, 19 nt, Artificial Sequence
  Description of Artificial Sequence: Synthetic oligonucleotide
  Sense strand starting at position 3412 of SEQ ID NO: 585509
gcucuuggauaacuaugua

SEQ ID NO: 645589 - RNA, 19 nt, Artificial Sequence
  Description of Artificial Sequence: Synthetic oligonucleotide
  Antisense strand to SEQ ID NO: 645588
uacauaguuauccaagagc

SEQ ID NO: 645590 - RNA, 19 nt, Artificial Sequence
  Description of Artificial Sequence: Synthetic oligonucleotide
  Sense strand starting at position 3415 of SEQ ID NO: 585509
cuuggauaacuauguacau

SEQ ID NO: 645591 - RNA, 19 nt, Artificial Sequence
  Description of Artificial Sequence: Synthetic oligonucleotide
  Antisense strand to SEQ ID NO: 645590
auguacauaguuauccaag

SEQ ID NO: 645592 - RNA, 19 nt, Artificial Sequence
  Description of Artificial Sequence: Synthetic oligonucleotide
  Sense strand starting at position 3416 of SEQ ID NO: 585509
uuggauaacuauguacauu

SEQ ID NO: 645593 - RNA, 19 nt, Artificial Sequence
  Description of Artificial Sequence: Synthetic oligonucleotide
  Antisense strand to SEQ ID NO: 645592
aauguacauaguuauccaa

SEQ ID NO: 645594 - RNA, 19 nt, Artificial Sequence
  Description of Artificial Sequence: Synthetic oligonucleotide
  Sense strand starting at position 3424 of SEQ ID NO: 585509
cuauguacauugucaauga

SEQ ID NO: 645595 - RNA, 19 nt, Artificial Sequence
  Description of Artificial Sequence: Synthetic oligonucleotide
  Antisense strand to SEQ ID NO: 645594
ucauugacaauguacauag

SEQ ID NO: 645596 - RNA, 19 nt, Artificial Sequence
  Description of Artificial Sequence: Synthetic oligonucleotide
  Sense strand starting at position 3435 of SEQ ID NO: 585509
gucaaugagcaguaaucau

SEQ ID NO: 645597 - RNA, 19 nt, Artificial Sequence
  Description of Artificial Sequence: Synthetic oligonucleotide
  Antisense strand to SEQ ID NO: 645596
augauuacugcucauugac

SEQ ID NO: 645598 - RNA, 19 nt, Artificial Sequence
  Description of Artificial Sequence: Synthetic oligonucleotide
  Sense strand starting at position 3477 of SEQ ID NO: 585509
agcaguagaccucaacagu

SEQ ID NO: 645599 - RNA, 19 nt, Artificial Sequence
  Description of Artificial Sequence: Synthetic oligonucleotide
  Antisense strand to SEQ ID NO: 645598
acuguugaggucuacugcu

SEQ ID NO: 645600 - RNA, 19 nt, Artificial Sequence
  Description of Artificial Sequence: Synthetic oligonucleotide
  Sense strand starting at position 3524 of SEQ ID NO: 585509
ggcauaguggcuuacacuu

SEQ ID NO: 645601 - RNA, 19 nt, Artificial Sequence
  Description of Artificial Sequence: Synthetic oligonucleotide
  Antisense strand to SEQ ID NO: 645600
aaguguaagccacuaugcc

SEQ ID NO: 645602 - RNA, 19 nt, Artificial Sequence
  Description of Artificial Sequence: Synthetic oligonucleotide
  Sense strand starting at position 3646 of SEQ ID NO: 585509
uuaaacuuagcuggacaua

SEQ ID NO: 645603 - RNA, 19 nt, Artificial Sequence
  Description of Artificial Sequence: Synthetic oligonucleotide
  Antisense strand to SEQ ID NO: 645602
uauguccagcuaaguuuaa

SEQ ID NO: 645604 - RNA, 19 nt, Artificial Sequence
  Description of Artificial Sequence: Synthetic oligonucleotide
  Sense strand starting at position 3828 of SEQ ID NO: 585509
auaguaguaaauggaguuu

SEQ ID NO: 645605 - RNA, 19 nt, Artificial Sequence
  Description of Artificial Sequence: Synthetic oligonucleotide
  Antisense strand to SEQ ID NO: 645604
aaacuccauuuacuacuau

SEQ ID NO: 645606 - RNA, 19 nt, Artificial Sequence
  Description of Artificial Sequence: Synthetic oligonucleotide
  Sense strand starting at position 3865 of SEQ ID NO: 585509
cuagguauggugggucaca

SEQ ID NO: 645607 - RNA, 19 nt, Artificial Sequence
  Description of Artificial Sequence: Synthetic oligonucleotide
  Antisense strand to SEQ ID NO: 645606
ugugacccaccauaccuag

SEQ ID NO: 645608 - RNA, 19 nt, Artificial Sequence
  Description of Artificial Sequence: Synthetic oligonucleotide
  Sense strand starting at position 74 of SEQ ID NO: 585510
ucugguuaacuccaacuga

SEQ ID NO: 645609 - RNA, 19 nt, Artificial Sequence
  Description of Artificial Sequence: Synthetic oligonucleotide
  Antisense strand to SEQ ID NO: 645608
ucaguuggaguuaaccaga

SEQ ID NO: 645610 - RNA, 19 nt, Artificial Sequence
  Description of Artificial Sequence: Synthetic oligonucleotide
  Sense strand starting at position 96 of SEQ ID NO: 585510
cuccucaggccugaacaua

SEQ ID NO: 645611 - RNA, 19 nt, Artificial Sequence
  Description of Artificial Sequence: Synthetic oligonucleotide
  Antisense strand to SEQ ID NO: 645610
uauguucaggccugaggag

SEQ ID NO: 645612 - RNA, 19 nt, Artificial Sequence
  Description of Artificial Sequence: Synthetic oligonucleotide
  Sense strand starting at position 209 of SEQ ID NO: 585510
gucacauuguugcucauuu

SEQ ID NO: 645613 - RNA, 19 nt, Artificial Sequence
  Description of Artificial Sequence: Synthetic oligonucleotide
  Antisense strand to SEQ ID NO: 645612
aaaugagcaacaaugugac

SEQ ID NO: 645614 - RNA, 19 nt, Artificial Sequence
  Description of Artificial Sequence: Synthetic oligonucleotide
  Sense strand starting at position 216 of SEQ ID NO: 585510
uguugcucauuuguuuaau

SEQ ID NO: 645615 - RNA, 19 nt, Artificial Sequence
  Description of Artificial Sequence: Synthetic oligonucleotide
  Antisense strand to SEQ ID NO: 645614
auuaaacaaaugagcaaca

SEQ ID NO: 645616 - RNA, 19 nt, Artificial Sequence
  Description of Artificial Sequence: Synthetic oligonucleotide
  Sense strand starting at position 217 of SEQ ID NO: 585510
guugcucauuuguuuaaug

SEQ ID NO: 645617 - RNA, 19 nt, Artificial Sequence
  Description of Artificial Sequence: Synthetic oligonucleotide
  Antisense strand to SEQ ID NO: 645616
cauuaaacaaaugagcaac

SEQ ID NO: 645618 - RNA, 19 nt, Artificial Sequence
  Description of Artificial Sequence: Synthetic oligonucleotide
  Sense strand starting at position 252 of SEQ ID NO: 585510
caucauaggcccugugaaa

SEQ ID NO: 645619 - RNA, 19 nt, Artificial Sequence
  Description of Artificial Sequence: Synthetic oligonucleotide
  Antisense strand to SEQ ID NO: 645618
uuucacagggccuaugaug

SEQ ID NO: 645620 - RNA, 19 nt, Artificial Sequence
  Description of Artificial Sequence: Synthetic oligonucleotide
  Sense strand starting at position 656 of SEQ ID NO: 585510
ucugguaaauauccaguga

SEQ ID NO: 645621 - RNA, 19 nt, Artificial Sequence
  Description of Artificial Sequence: Synthetic oligonucleotide
  Antisense strand to SEQ ID NO: 645620
ucacuggauauuuaccaga

SEQ ID NO: 645622 - RNA, 19 nt, Artificial Sequence
  Description of Artificial Sequence: Synthetic oligonucleotide
  Sense strand starting at position 660 of SEQ ID NO: 585510
guaaauauccagugaacca

SEQ ID NO: 645623 - RNA, 19 nt, Artificial Sequence
  Description of Artificial Sequence: Synthetic oligonucleotide
  Antisense strand to SEQ ID NO: 645622
ugguucacuggauauuuac

SEQ ID NO: 645624 - RNA, 19 nt, Artificial Sequence
  Description of Artificial Sequence: Synthetic oligonucleotide
  Sense strand starting at position 680 of SEQ ID NO: 585510
ggcauaagugucuugcugu

SEQ ID NO: 645625 - RNA, 19 nt, Artificial Sequence
  Description of Artificial Sequence: Synthetic oligonucleotide
  Antisense strand to SEQ ID NO: 645624
acagcaagacacuuaugcc

SEQ ID NO: 645626 - RNA, 19 nt, Artificial Sequence
  Description of Artificial Sequence: Synthetic oligonucleotide
  Sense strand starting at position 730 of SEQ ID NO: 585510
cguguagauugaucacaac

SEQ ID NO: 645627 - RNA, 19 nt, Artificial Sequence
  Description of Artificial Sequence: Synthetic oligonucleotide
  Antisense strand to SEQ ID NO: 645626
guugugaucaaucuacacg

SEQ ID NO: 645628 - RNA, 19 nt, Artificial Sequence
  Description of Artificial Sequence: Synthetic oligonucleotide
  Sense strand starting at position 1453 of SEQ ID NO: 585510
gagaaagcucugugacccu

SEQ ID NO: 645629 - RNA, 19 nt, Artificial Sequence
  Description of Artificial Sequence: Synthetic oligonucleotide
  Antisense strand to SEQ ID NO: 645628
agggucacagagcuuucuc

SEQ ID NO: 645630 - RNA, 19 nt, Artificial Sequence
  Description of Artificial Sequence: Synthetic oligonucleotide
  Sense strand starting at position 1479 of SEQ ID NO: 585510
uuugauucccuguaucaag

SEQ ID NO: 645631 - RNA, 19 nt, Artificial Sequence
  Description of Artificial Sequence: Synthetic oligonucleotide
  Antisense strand to SEQ ID NO: 645630
cuugauacagggaaucaaa

SEQ ID NO: 645632 - RNA, 19 nt, Artificial Sequence
  Description of Artificial Sequence: Synthetic oligonucleotide
  Sense strand starting at position 1862 of SEQ ID NO: 585510
gguucucuagguugaaauu

SEQ ID NO: 645633 - RNA, 19 nt, Artificial Sequence
  Description of Artificial Sequence: Synthetic oligonucleotide
  Antisense strand to SEQ ID NO: 645632
aauuucaaccuagagaacc

SEQ ID NO: 645634 - RNA, 19 nt, Artificial Sequence
  Description of Artificial Sequence: Synthetic oligonucleotide
  Sense strand starting at position 2218 of SEQ ID NO: 585510
cgggaagcucuguaaaguu

SEQ ID NO: 645635 - RNA, 19 nt, Artificial Sequence
  Description of Artificial Sequence: Synthetic oligonucleotide
  Antisense strand to SEQ ID NO: 645634
aacuuuacagagcuucccg

SEQ ID NO: 645636 - RNA, 19 nt, Artificial Sequence
  Description of Artificial Sequence: Synthetic oligonucleotide
  Sense strand starting at position 2278 of SEQ ID NO: 585510
uggagugaggcccagcauu

SEQ ID NO: 645637 - RNA, 19 nt, Artificial Sequence
  Description of Artificial Sequence: Synthetic oligonucleotide
  Antisense strand to SEQ ID NO: 645636
aaugcugggccucacucca

SEQ ID NO: 645638 - RNA, 19 nt, Artificial Sequence
  Description of Artificial Sequence: Synthetic oligonucleotide
  Sense strand starting at position 2303 of SEQ ID NO: 585510
gacuccacgugauuccaaa

SEQ ID NO: 645639 - RNA, 19 nt, Artificial Sequence
  Description of Artificial Sequence: Synthetic oligonucleotide
  Antisense strand to SEQ ID NO: 645638
uuuggaaucacguggaguc

SEQ ID NO: 645640 - RNA, 19 nt, Artificial Sequence
  Description of Artificial Sequence: Synthetic oligonucleotide
  Sense strand starting at position 2355 of SEQ ID NO: 585510
ggaaguugaccuugaaguu

SEQ ID NO: 645641 - RNA, 19 nt, Artificial Sequence
  Description of Artificial Sequence: Synthetic oligonucleotide
  Antisense strand to SEQ ID NO: 645640
aacuucaaggucaacuucc

SEQ ID NO: 645642 - RNA, 19 nt, Artificial Sequence
  Description of Artificial Sequence: Synthetic oligonucleotide
  Sense strand starting at position 2392 of SEQ ID NO: 585510
accaaagaguuagccgaua

SEQ ID NO: 645643 - RNA, 19 nt, Artificial Sequence
  Description of Artificial Sequence: Synthetic oligonucleotide
  Antisense strand to SEQ ID NO: 645642
uaucggcuaacucuuuggu

SEQ ID NO: 645644 - RNA, 19 nt, Artificial Sequence
  Description of Artificial Sequence: Synthetic oligonucleotide
  Sense strand starting at position 2488 of SEQ ID NO: 585510
aaaggauguucccuuucga

SEQ ID NO: 645645 - RNA, 19 nt, Artificial Sequence
  Description of Artificial Sequence: Synthetic oligonucleotide
  Antisense strand to SEQ ID NO: 645644
ucgaaagggaacauccuuu

SEQ ID NO: 645646 - RNA, 19 nt, Artificial Sequence
  Description of Artificial Sequence: Synthetic oligonucleotide
  Sense strand starting at position 2496 of SEQ ID NO: 585510
uucccuuucgaugaguauu

SEQ ID NO: 645647 - RNA, 19 nt, Artificial Sequence
  Description of Artificial Sequence: Synthetic oligonucleotide
  Antisense strand to SEQ ID NO: 645646
aauacucaucgaaagggaa

SEQ ID NO: 645648 - RNA, 19 nt, Artificial Sequence
  Description of Artificial Sequence: Synthetic oligonucleotide
  Sense strand starting at position 2504 of SEQ ID NO: 585510
cgaugaguauuuguucuca

SEQ ID NO: 645649 - RNA, 19 nt, Artificial Sequence
  Description of Artificial Sequence: Synthetic oligonucleotide
  Antisense strand to SEQ ID NO: 645648
ugagaacaaauacucaucg

SEQ ID NO: 645650 - RNA, 19 nt, Artificial Sequence
  Description of Artificial Sequence: Synthetic oligonucleotide
  Sense strand starting at position 2695 of SEQ ID NO: 585510
cuacuaaaugcugagucau

SEQ ID NO: 645651 - RNA, 19 nt, Artificial Sequence
  Description of Artificial Sequence: Synthetic oligonucleotide
  Antisense strand to SEQ ID NO: 645650
augacucagcauuuaguag

SEQ ID NO: 645652 - RNA, 19 nt, Artificial Sequence
  Description of Artificial Sequence: Synthetic oligonucleotide
  Sense strand starting at position 2756 of SEQ ID NO: 585510
uuaagccucuguguaauuu

SEQ ID NO: 645653 - RNA, 19 nt, Artificial Sequence
  Description of Artificial Sequence: Synthetic oligonucleotide
  Antisense strand to SEQ ID NO: 645652
aaauuacacagaggcuuaa

SEQ ID NO: 645654 - RNA, 19 nt, Artificial Sequence
  Description of Artificial Sequence: Synthetic oligonucleotide
  Sense strand starting at position 2760 of SEQ ID NO: 585510
gccucuguguaauuuaaug

SEQ ID NO: 645655 - RNA, 19 nt, Artificial Sequence
  Description of Artificial Sequence: Synthetic oligonucleotide
  Antisense strand to SEQ ID NO: 645654
cauuaaauuacacagaggc

SEQ ID NO: 645656 - RNA, 19 nt, Artificial Sequence
  Description of Artificial Sequence: Synthetic oligonucleotide
  Sense strand starting at position 2866 of SEQ ID NO: 585510
uccugaauggguuacugua

SEQ ID NO: 645657 - RNA, 19 nt, Artificial Sequence
  Description of Artificial Sequence: Synthetic oligonucleotide
  Antisense strand to SEQ ID NO: 645656
uacaguaacccauucagga

SEQ ID NO: 645658 - RNA, 19 nt, Artificial Sequence
  Description of Artificial Sequence: Synthetic oligonucleotide
  Sense strand starting at position 3015 of SEQ ID NO: 585510
cugaucucugcuuagcaaa

SEQ ID NO: 645659 - RNA, 19 nt, Artificial Sequence
  Description of Artificial Sequence: Synthetic oligonucleotide
  Antisense strand to SEQ ID NO: 645658
uuugcuaagcagagaucag

SEQ ID NO: 645660 - RNA, 19 nt, Artificial Sequence
  Description of Artificial Sequence: Synthetic oligonucleotide
  Sense strand starting at position 3083 of SEQ ID NO: 585510
uguaaagauaaucgaauag

SEQ ID NO: 645661 - RNA, 19 nt, Artificial Sequence
  Description of Artificial Sequence: Synthetic oligonucleotide
  Antisense strand to SEQ ID NO: 645660
cuauucgauuaucuuuaca

SEQ ID NO: 645662 - RNA, 19 nt, Artificial Sequence
  Description of Artificial Sequence: Synthetic oligonucleotide
  Sense strand starting at position 3307 of SEQ ID NO: 585510
agcugaaaucagugaucuc

SEQ ID NO: 645663 - RNA, 19 nt, Artificial Sequence
  Description of Artificial Sequence: Synthetic oligonucleotide
  Antisense strand to SEQ ID NO: 645662
gagaucacugauuucagcu

SEQ ID NO: 645664 - RNA, 19 nt, Artificial Sequence
  Description of Artificial Sequence: Synthetic oligonucleotide
  Sense strand starting at position 3310 of SEQ ID NO: 585510
ugaaaucagugaucucaga

SEQ ID NO: 645665 - RNA, 19 nt, Artificial Sequence
  Description of Artificial Sequence: Synthetic oligonucleotide
  Antisense strand to SEQ ID NO: 645664
ucugagaucacugauuuca

SEQ ID NO: 645666 - RNA, 19 nt, Artificial Sequence
  Description of Artificial Sequence: Synthetic oligonucleotide
  Sense strand starting at position 3328 of SEQ ID NO: 585510
auagcauuaacugggaagu

SEQ ID NO: 645667 - RNA, 19 nt, Artificial Sequence
  Description of Artificial Sequence: Synthetic oligonucleotide
  Antisense strand to SEQ ID NO: 645666
acuucccaguuaaugcuau

SEQ ID NO: 645668 - RNA, 19 nt, Artificial Sequence
  Description of Artificial Sequence: Synthetic oligonucleotide
  Sense strand starting at position 3329 of SEQ ID NO: 585510
uagcauuaacugggaaguu

SEQ ID NO: 645669 - RNA, 19 nt, Artificial Sequence
  Description of Artificial Sequence: Synthetic oligonucleotide
  Antisense strand to SEQ ID NO: 645668
aacuucccaguuaaugcua

SEQ ID NO: 645670 - RNA, 19 nt, Artificial Sequence
  Description of Artificial Sequence: Synthetic oligonucleotide
  Sense strand starting at position 3338 of SEQ ID NO: 585510
cugggaaguuauccugaag

SEQ ID NO: 645671 - RNA, 19 nt, Artificial Sequence
  Description of Artificial Sequence: Synthetic oligonucleotide
  Antisense strand to SEQ ID NO: 645670
cuucaggauaacuucccag

SEQ ID NO: 645672 - RNA, 19 nt, Artificial Sequence
  Description of Artificial Sequence: Synthetic oligonucleotide
  Sense strand starting at position 3569 of SEQ ID NO: 585510
aacuucgggcaguaugaaa

SEQ ID NO: 645673 - RNA, 19 nt, Artificial Sequence
  Description of Artificial Sequence: Synthetic oligonucleotide
  Antisense strand to SEQ ID NO: 645672
uuucauacugcccgaaguu

SEQ ID NO: 645674 - RNA, 19 nt, Artificial Sequence
  Description of Artificial Sequence: Synthetic oligonucleotide
  Sense strand starting at position 3764 of SEQ ID NO: 585510
gcagaugcacuccaucaga

SEQ ID NO: 645675 - RNA, 19 nt, Artificial Sequence
  Description of Artificial Sequence: Synthetic oligonucleotide
  Antisense strand to SEQ ID NO: 645674
ucugauggagugcaucugc

SEQ ID NO: 645676 - RNA, 19 nt, Artificial Sequence
  Description of Artificial Sequence: Synthetic oligonucleotide
  Sense strand starting at position 3911 of SEQ ID NO: 585510
gcuuauguuaaggauugaa

SEQ ID NO: 645677 - RNA, 19 nt, Artificial Sequence
  Description of Artificial Sequence: Synthetic oligonucleotide
  Antisense strand to SEQ ID NO: 645676
uucaauccuuaacauaagc

SEQ ID NO: 645678 - RNA, 19 nt, Artificial Sequence
  Description of Artificial Sequence: Synthetic oligonucleotide
  Sense strand starting at position 3955 of SEQ ID NO: 585510
uaggaugcugcuuagaaug

SEQ ID NO: 645679 - RNA, 19 nt, Artificial Sequence
  Description of Artificial Sequence: Synthetic oligonucleotide
  Antisense strand to SEQ ID NO: 645678
cauucuaagcagcauccua

SEQ ID NO: 645680 - RNA, 19 nt, Artificial Sequence
  Description of Artificial Sequence: Synthetic oligonucleotide
  Sense strand starting at position 3977 of SEQ ID NO: 585510
cuuccaucugaguggagua

SEQ ID NO: 645681 - RNA, 19 nt, Artificial Sequence
  Description of Artificial Sequence: Synthetic oligonucleotide
  Antisense strand to SEQ ID NO: 645680
uacuccacucagauggaag

SEQ ID NO: 645682 - RNA, 19 nt, Artificial Sequence
  Description of Artificial Sequence: Synthetic oligonucleotide
  Sense strand starting at position 3978 of SEQ ID NO: 585510
uuccaucugaguggaguau

SEQ ID NO: 645683 - RNA, 19 nt, Artificial Sequence
  Description of Artificial Sequence: Synthetic oligonucleotide
  Antisense strand to SEQ ID NO: 645682
auacuccacucagauggaa

SEQ ID NO: 645684 - RNA, 19 nt, Artificial Sequence
  Description of Artificial Sequence: Synthetic oligonucleotide
  Sense strand starting at position 3979 of SEQ ID NO: 585510
uccaucugaguggaguauu

SEQ ID NO: 645685 - RNA, 19 nt, Artificial Sequence
  Description of Artificial Sequence: Synthetic oligonucleotide
  Antisense strand to SEQ ID NO: 645684
aauacuccacucagaugga

SEQ ID NO: 645686 - RNA, 19 nt, Artificial Sequence
  Description of Artificial Sequence: Synthetic oligonucleotide
  Sense strand starting at position 3982 of SEQ ID NO: 585510
aucugaguggaguauuaug

SEQ ID NO: 645687 - RNA, 19 nt, Artificial Sequence
  Description of Artificial Sequence: Synthetic oligonucleotide
  Antisense strand to SEQ ID NO: 645686
cauaauacuccacucagau

SEQ ID NO: 645688 - RNA, 19 nt, Artificial Sequence
  Description of Artificial Sequence: Synthetic oligonucleotide
  Sense strand starting at position 175 of SEQ ID NO: 585511
aagcucucaggucaugaga

SEQ ID NO: 645689 - RNA, 19 nt, Artificial Sequence
  Description of Artificial Sequence: Synthetic oligonucleotide
  Antisense strand to SEQ ID NO: 645688
ucucaugaccugagagcuu

SEQ ID NO: 645690 - RNA, 19 nt, Artificial Sequence
  Description of Artificial Sequence: Synthetic oligonucleotide
  Sense strand starting at position 349 of SEQ ID NO: 585511
cccuuauuuacguguagag

SEQ ID NO: 645691 - RNA, 19 nt, Artificial Sequence
  Description of Artificial Sequence: Synthetic oligonucleotide
  Antisense strand to SEQ ID NO: 645690
cucuacacguaaauaaggg

SEQ ID NO: 645692 - RNA, 19 nt, Artificial Sequence
  Description of Artificial Sequence: Synthetic oligonucleotide
  Sense strand starting at position 572 of SEQ ID NO: 585511
cgccuuagccuccugcaua

SEQ ID NO: 645693 - RNA, 19 nt, Artificial Sequence
  Description of Artificial Sequence: Synthetic oligonucleotide
  Antisense strand to SEQ ID NO: 645692
uaugcaggaggcuaaggcg

SEQ ID NO: 645694 - RNA, 19 nt, Artificial Sequence
  Description of Artificial Sequence: Synthetic oligonucleotide
  Sense strand starting at position 774 of SEQ ID NO: 585511
ccaggaauguccucgaaag

SEQ ID NO: 645695 - RNA, 19 nt, Artificial Sequence
  Description of Artificial Sequence: Synthetic oligonucleotide
  Antisense strand to SEQ ID NO: 645694
cuuucgaggacauuccugg

SEQ ID NO: 645696 - RNA, 19 nt, Artificial Sequence
  Description of Artificial Sequence: Synthetic oligonucleotide
  Sense strand starting at position 776 of SEQ ID NO: 585511
aggaauguccucgaaagua

SEQ ID NO: 645697 - RNA, 19 nt, Artificial Sequence
  Description of Artificial Sequence: Synthetic oligonucleotide
  Antisense strand to SEQ ID NO: 645696
uacuuucgaggacauuccu

SEQ ID NO: 645698 - RNA, 19 nt, Artificial Sequence
  Description of Artificial Sequence: Synthetic oligonucleotide
  Sense strand starting at position 838 of SEQ ID NO: 585511
gcagauucccaguauucug

SEQ ID NO: 645699 - RNA, 19 nt, Artificial Sequence
  Description of Artificial Sequence: Synthetic oligonucleotide
  Antisense strand to SEQ ID NO: 645698
cagaauacugggaaucugc

SEQ ID NO: 645700 - RNA, 19 nt, Artificial Sequence
  Description of Artificial Sequence: Synthetic oligonucleotide
  Sense strand starting at position 849 of SEQ ID NO: 585511
guauucugucauggacaau

SEQ ID NO: 645701 - RNA, 19 nt, Artificial Sequence
  Description of Artificial Sequence: Synthetic oligonucleotide
  Antisense strand to SEQ ID NO: 645700
auuguccaugacagaauac

SEQ ID NO: 645702 - RNA, 19 nt, Artificial Sequence
  Description of Artificial Sequence: Synthetic oligonucleotide
  Sense strand starting at position 1006 of SEQ ID NO: 585511
cucugcauagcuuagaauu

SEQ ID NO: 645703 - RNA, 19 nt, Artificial Sequence
  Description of Artificial Sequence: Synthetic oligonucleotide
  Antisense strand to SEQ ID NO: 645702
aauucuaagcuaugcagag

SEQ ID NO: 645704 - RNA, 19 nt, Artificial Sequence
  Description of Artificial Sequence: Synthetic oligonucleotide
  Sense strand starting at position 1351 of SEQ ID NO: 585511
caggacucauguccaaaga

SEQ ID NO: 645705 - RNA, 19 nt, Artificial Sequence
  Description of Artificial Sequence: Synthetic oligonucleotide
  Antisense strand to SEQ ID NO: 645704
ucuuuggacaugaguccug

SEQ ID NO: 645706 - RNA, 19 nt, Artificial Sequence
  Description of Artificial Sequence: Synthetic oligonucleotide
  Sense strand starting at position 1379 of SEQ ID NO: 585511
ggacguaaaugauucuaau

SEQ ID NO: 645707 - RNA, 19 nt, Artificial Sequence
  Description of Artificial Sequence: Synthetic oligonucleotide
  Antisense strand to SEQ ID NO: 645706
auuagaaucauuuacgucc

SEQ ID NO: 645708 - RNA, 19 nt, Artificial Sequence
  Description of Artificial Sequence: Synthetic oligonucleotide
  Sense strand starting at position 1563 of SEQ ID NO: 585511
agaaaucaugcugguuuga

SEQ ID NO: 645709 - RNA, 19 nt, Artificial Sequence
  Description of Artificial Sequence: Synthetic oligonucleotide
  Antisense strand to SEQ ID NO: 645708
ucaaaccagcaugauuucu

SEQ ID NO: 645710 - RNA, 19 nt, Artificial Sequence
  Description of Artificial Sequence: Synthetic oligonucleotide
  Sense strand starting at position 1728 of SEQ ID NO: 585511
gaaguaggagccugaauga

SEQ ID NO: 645711 - RNA, 19 nt, Artificial Sequence
  Description of Artificial Sequence: Synthetic oligonucleotide
  Antisense strand to SEQ ID NO: 645710
ucauucaggcuccuacuuc

SEQ ID NO: 645712 - RNA, 19 nt, Artificial Sequence
  Description of Artificial Sequence: Synthetic oligonucleotide
  Sense strand starting at position 2086 of SEQ ID NO: 585511
uucugauucgcugaggaca

SEQ ID NO: 645713 - RNA, 19 nt, Artificial Sequence
  Description of Artificial Sequence: Synthetic oligonucleotide
  Antisense strand to SEQ ID NO: 645712
uguccucagcgaaucagaa

SEQ ID NO: 645714 - RNA, 19 nt, Artificial Sequence
  Description of Artificial Sequence: Synthetic oligonucleotide
  Sense strand starting at position 2097 of SEQ ID NO: 585511
ugaggacacuuuguaguuu

SEQ ID NO: 645715 - RNA, 19 nt, Artificial Sequence
  Description of Artificial Sequence: Synthetic oligonucleotide
  Antisense strand to SEQ ID NO: 645714
aaacuacaaaguguccuca

SEQ ID NO: 645716 - RNA, 19 nt, Artificial Sequence
  Description of Artificial Sequence: Synthetic oligonucleotide
  Sense strand starting at position 2109 of SEQ ID NO: 585511
guaguuuagggacagguaa

SEQ ID NO: 645717 - RNA, 19 nt, Artificial Sequence
  Description of Artificial Sequence: Synthetic oligonucleotide
  Antisense strand to SEQ ID NO: 645716
uuaccugucccuaaacuac

SEQ ID NO: 645718 - RNA, 19 nt, Artificial Sequence
  Description of Artificial Sequence: Synthetic oligonucleotide
  Sense strand starting at position 2163 of SEQ ID NO: 585511
uagaaagguaggugaucuu

SEQ ID NO: 645719 - RNA, 19 nt, Artificial Sequence
  Description of Artificial Sequence: Synthetic oligonucleotide
  Antisense strand to SEQ ID NO: 645718
aagaucaccuaccuuucua

SEQ ID NO: 645720 - RNA, 19 nt, Artificial Sequence
  Description of Artificial Sequence: Synthetic oligonucleotide
  Sense strand starting at position 2166 of SEQ ID NO: 585511
aaagguaggugaucuuuaa

SEQ ID NO: 645721 - RNA, 19 nt, Artificial Sequence
  Description of Artificial Sequence: Synthetic oligonucleotide
  Antisense strand to SEQ ID NO: 645720
uuaaagaucaccuaccuuu

SEQ ID NO: 645722 - RNA, 19 nt, Artificial Sequence
  Description of Artificial Sequence: Synthetic oligonucleotide
  Sense strand starting at position 2170 of SEQ ID NO: 585511
guaggugaucuuuaaauuc

SEQ ID NO: 645723 - RNA, 19 nt, Artificial Sequence
  Description of Artificial Sequence: Synthetic oligonucleotide
  Antisense strand to SEQ ID NO: 645722
gaauuuaaagaucaccuac

SEQ ID NO: 645724 - RNA, 19 nt, Artificial Sequence
  Description of Artificial Sequence: Synthetic oligonucleotide
  Sense strand starting at position 2382 of SEQ ID NO: 585511
gagcuuguacacuggaaua

SEQ ID NO: 645725 - RNA, 19 nt, Artificial Sequence
  Description of Artificial Sequence: Synthetic oligonucleotide
  Antisense strand to SEQ ID NO: 645724
uauuccaguguacaagcuc

SEQ ID NO: 645726 - RNA, 19 nt, Artificial Sequence
  Description of Artificial Sequence: Synthetic oligonucleotide
  Sense strand starting at position 2384 of SEQ ID NO: 585511
gcuuguacacuggaauaga

SEQ ID NO: 645727 - RNA, 19 nt, Artificial Sequence
  Description of Artificial Sequence: Synthetic oligonucleotide
  Antisense strand to SEQ ID NO: 645726
ucuauuccaguguacaagc

SEQ ID NO: 645728 - RNA, 19 nt, Artificial Sequence
  Description of Artificial Sequence: Synthetic oligonucleotide
  Sense strand starting at position 2424 of SEQ ID NO: 585511
cucagagaguuuccuacuu

SEQ ID NO: 645729 - RNA, 19 nt, Artificial Sequence
  Description of Artificial Sequence: Synthetic oligonucleotide
  Antisense strand to SEQ ID NO: 645728
aaguaggaaacucucugag

SEQ ID NO: 645730 - RNA, 19 nt, Artificial Sequence
  Description of Artificial Sequence: Synthetic oligonucleotide
  Sense strand starting at position 2460 of SEQ ID NO: 585511
ccuagaucuguguauguag

SEQ ID NO: 645731 - RNA, 19 nt, Artificial Sequence
  Description of Artificial Sequence: Synthetic oligonucleotide
  Antisense strand to SEQ ID NO: 645730
cuacauacacagaucuagg

SEQ ID NO: 645732 - RNA, 19 nt, Artificial Sequence
  Description of Artificial Sequence: Synthetic oligonucleotide
  Sense strand starting at position 2463 of SEQ ID NO: 585511
agaucuguguauguagaag

SEQ ID NO: 645733 - RNA, 19 nt, Artificial Sequence
  Description of Artificial Sequence: Synthetic oligonucleotide
  Antisense strand to SEQ ID NO: 645732
cuucuacauacacagaucu

SEQ ID NO: 645734 - RNA, 19 nt, Artificial Sequence
  Description of Artificial Sequence: Synthetic oligonucleotide
  Sense strand starting at position 2469 of SEQ ID NO: 585511
guguauguagaagggaauu

SEQ ID NO: 645735 - RNA, 19 nt, Artificial Sequence
  Description of Artificial Sequence: Synthetic oligonucleotide
  Antisense strand to SEQ ID NO: 645734
aauucccuucuacauacac

SEQ ID NO: 645736 - RNA, 19 nt, Artificial Sequence
  Description of Artificial Sequence: Synthetic oligonucleotide
  Sense strand starting at position 2636 of SEQ ID NO: 585511
ggaacagucacaggauugu

SEQ ID NO: 645737 - RNA, 19 nt, Artificial Sequence
  Description of Artificial Sequence: Synthetic oligonucleotide
  Antisense strand to SEQ ID NO: 645736
acaauccugugacuguucc

SEQ ID NO: 645738 - RNA, 19 nt, Artificial Sequence
  Description of Artificial Sequence: Synthetic oligonucleotide
  Sense strand starting at position 2666 of SEQ ID NO: 585511
agugaauuaguacauguaa

SEQ ID NO: 645739 - RNA, 19 nt, Artificial Sequence
  Description of Artificial Sequence: Synthetic oligonucleotide
  Antisense strand to SEQ ID NO: 645738
uuacauguacuaauucacu

SEQ ID NO: 645740 - RNA, 19 nt, Artificial Sequence
  Description of Artificial Sequence: Synthetic oligonucleotide
  Sense strand starting at position 2680 of SEQ ID NO: 585511
uguaaagcacuccaagaau

SEQ ID NO: 645741 - RNA, 19 nt, Artificial Sequence
  Description of Artificial Sequence: Synthetic oligonucleotide
  Antisense strand to SEQ ID NO: 645740
auucuuggagugcuuuaca

SEQ ID NO: 645742 - RNA, 19 nt, Artificial Sequence
  Description of Artificial Sequence: Synthetic oligonucleotide
  Sense strand starting at position 2691 of SEQ ID NO: 585511
ccaagaaugccuggcacaa

SEQ ID NO: 645743 - RNA, 19 nt, Artificial Sequence
  Description of Artificial Sequence: Synthetic oligonucleotide
  Antisense strand to SEQ ID NO: 645742
uugugccaggcauucuugg

SEQ ID NO: 645744 - RNA, 19 nt, Artificial Sequence
  Description of Artificial Sequence: Synthetic oligonucleotide
  Sense strand starting at position 2760 of SEQ ID NO: 585511
guauuauuaucagcugaga

SEQ ID NO: 645745 - RNA, 19 nt, Artificial Sequence
  Description of Artificial Sequence: Synthetic oligonucleotide
  Antisense strand to SEQ ID NO: 645744
ucucagcugauaauaauac

SEQ ID NO: 645746 - RNA, 19 nt, Artificial Sequence
  Description of Artificial Sequence: Synthetic oligonucleotide
  Sense strand starting at position 2763 of SEQ ID NO: 585511
uuauuaucagcugagaucu

SEQ ID NO: 645747 - RNA, 19 nt, Artificial Sequence
  Description of Artificial Sequence: Synthetic oligonucleotide
  Antisense strand to SEQ ID NO: 645746
agaucucagcugauaauaa

SEQ ID NO: 645748 - RNA, 19 nt, Artificial Sequence
  Description of Artificial Sequence: Synthetic oligonucleotide
  Sense strand starting at position 2876 of SEQ ID NO: 585511
ugguuugauaauggauguu

SEQ ID NO: 645749 - RNA, 19 nt, Artificial Sequence
  Description of Artificial Sequence: Synthetic oligonucleotide
  Antisense strand to SEQ ID NO: 645748
aacauccauuaucaaacca

SEQ ID NO: 645750 - RNA, 19 nt, Artificial Sequence
  Description of Artificial Sequence: Synthetic oligonucleotide
  Sense strand starting at position 2912 of SEQ ID NO: 585511
gugcuugauguuucugcuu

SEQ ID NO: 645751 - RNA, 19 nt, Artificial Sequence
  Description of Artificial Sequence: Synthetic oligonucleotide
  Antisense strand to SEQ ID NO: 645750
aagcagaaacaucaagcac

SEQ ID NO: 645752 - RNA, 19 nt, Artificial Sequence
  Description of Artificial Sequence: Synthetic oligonucleotide
  Sense strand starting at position 2988 of SEQ ID NO: 585511
ucagacucagcucauguau

SEQ ID NO: 645753 - RNA, 19 nt, Artificial Sequence
  Description of Artificial Sequence: Synthetic oligonucleotide
  Antisense strand to SEQ ID NO: 645752
auacaugagcugagucuga

SEQ ID NO: 645754 - RNA, 19 nt, Artificial Sequence
  Description of Artificial Sequence: Synthetic oligonucleotide
  Sense strand starting at position 3079 of SEQ ID NO: 585511
guaagacuucucugaaauu

SEQ ID NO: 645755 - RNA, 19 nt, Artificial Sequence
  Description of Artificial Sequence: Synthetic oligonucleotide
  Antisense strand to SEQ ID NO: 645754
aauuucagagaagucuuac

SEQ ID NO: 645756 - RNA, 19 nt, Artificial Sequence
  Description of Artificial Sequence: Synthetic oligonucleotide
  Sense strand starting at position 3285 of SEQ ID NO: 585511
accuguuaagugcaauuaa

SEQ ID NO: 645757 - RNA, 19 nt, Artificial Sequence
  Description of Artificial Sequence: Synthetic oligonucleotide
  Antisense strand to SEQ ID NO: 645756
uuaauugcacuuaacaggu

SEQ ID NO: 645758 - RNA, 19 nt, Artificial Sequence
  Description of Artificial Sequence: Synthetic oligonucleotide
  Sense strand starting at position 3384 of SEQ ID NO: 585511
guauccacaucauuccaga

SEQ ID NO: 645759 - RNA, 19 nt, Artificial Sequence
  Description of Artificial Sequence: Synthetic oligonucleotide
  Antisense strand to SEQ ID NO: 645758
ucuggaaugauguggauac

SEQ ID NO: 645760 - RNA, 19 nt, Artificial Sequence
  Description of Artificial Sequence: Synthetic oligonucleotide
  Sense strand starting at position 3473 of SEQ ID NO: 585511
gguagagaagucuggauag

SEQ ID NO: 645761 - RNA, 19 nt, Artificial Sequence
  Description of Artificial Sequence: Synthetic oligonucleotide
  Antisense strand to SEQ ID NO: 645760
cuauccagacuucucuacc

SEQ ID NO: 645762 - RNA, 19 nt, Artificial Sequence
  Description of Artificial Sequence: Synthetic oligonucleotide
  Sense strand starting at position 3623 of SEQ ID NO: 585511
uuuguaguaugacuugaau

SEQ ID NO: 645763 - RNA, 19 nt, Artificial Sequence
  Description of Artificial Sequence: Synthetic oligonucleotide
  Antisense strand to SEQ ID NO: 645762
auucaagucauacuacaaa

SEQ ID NO: 645764 - RNA, 19 nt, Artificial Sequence
  Description of Artificial Sequence: Synthetic oligonucleotide
  Sense strand starting at position 3626 of SEQ ID NO: 585511
guaguaugacuugaauauu

SEQ ID NO: 645765 - RNA, 19 nt, Artificial Sequence
  Description of Artificial Sequence: Synthetic oligonucleotide
  Antisense strand to SEQ ID NO: 645764
aauauucaagucauacuac

SEQ ID NO: 645766 - RNA, 19 nt, Artificial Sequence
  Description of Artificial Sequence: Synthetic oligonucleotide
  Sense strand starting at position 3652 of SEQ ID NO: 585511
ucaaauugucugcauaagu

SEQ ID NO: 645767 - RNA, 19 nt, Artificial Sequence
  Description of Artificial Sequence: Synthetic oligonucleotide
  Antisense strand to SEQ ID NO: 645766
acuuaugcagacaauuuga

SEQ ID NO: 645768 - RNA, 19 nt, Artificial Sequence
  Description of Artificial Sequence: Synthetic oligonucleotide
  Sense strand starting at position 99 of SEQ ID NO: 585512
gaagcagguuucuccauga

SEQ ID NO: 645769 - RNA, 19 nt, Artificial Sequence
  Description of Artificial Sequence: Synthetic oligonucleotide
  Antisense strand to SEQ ID NO: 645768
ucauggagaaaccugcuuc

SEQ ID NO: 645770 - RNA, 19 nt, Artificial Sequence
  Description of Artificial Sequence: Synthetic oligonucleotide
  Sense strand starting at position 128 of SEQ ID NO: 585512
caguuuacgcugucaguca

SEQ ID NO: 645771 - RNA, 19 nt, Artificial Sequence
  Description of Artificial Sequence: Synthetic oligonucleotide
  Antisense strand to SEQ ID NO: 645770
ugacugacagcguaaacug

SEQ ID NO: 645772 - RNA, 19 nt, Artificial Sequence
  Description of Artificial Sequence: Synthetic oligonucleotide
  Sense strand starting at position 182 of SEQ ID NO: 585512
gaguaaagcuaaccacgau

SEQ ID NO: 645773 - RNA, 19 nt, Artificial Sequence
  Description of Artificial Sequence: Synthetic oligonucleotide
  Antisense strand to SEQ ID NO: 645772
aucgugguuagcuuuacuc

SEQ ID NO: 645774 - RNA, 19 nt, Artificial Sequence
  Description of Artificial Sequence: Synthetic oligonucleotide
  Sense strand starting at position 227 of SEQ ID NO: 585512
gacuuugucgcuuucguca

SEQ ID NO: 645775 - RNA, 19 nt, Artificial Sequence
  Description of Artificial Sequence: Synthetic oligonucleotide
  Antisense strand to SEQ ID NO: 645774
ugacgaaagcgacaaaguc

SEQ ID NO: 645776 - RNA, 19 nt, Artificial Sequence
  Description of Artificial Sequence: Synthetic oligonucleotide
  Sense strand starting at position 241 of SEQ ID NO: 585512
cgucacuuucuagauuaua

SEQ ID NO: 645777 - RNA, 19 nt, Artificial Sequence
  Description of Artificial Sequence: Synthetic oligonucleotide
  Antisense strand to SEQ ID NO: 645776
uauaaucuagaaagugacg

SEQ ID NO: 645778 - RNA, 19 nt, Artificial Sequence
  Description of Artificial Sequence: Synthetic oligonucleotide
  Sense strand starting at position 377 of SEQ ID NO: 585512
ucacuccaggcugaguaau

SEQ ID NO: 645779 - RNA, 19 nt, Artificial Sequence
  Description of Artificial Sequence: Synthetic oligonucleotide
  Antisense strand to SEQ ID NO: 645778
auuacucagccuggaguga

SEQ ID NO: 645780 - RNA, 19 nt, Artificial Sequence
  Description of Artificial Sequence: Synthetic oligonucleotide
  Sense strand starting at position 379 of SEQ ID NO: 585512
acuccaggcugaguaauau

SEQ ID NO: 645781 - RNA, 19 nt, Artificial Sequence
  Description of Artificial Sequence: Synthetic oligonucleotide
  Antisense strand to SEQ ID NO: 645780
auauuacucagccuggagu

SEQ ID NO: 645782 - RNA, 19 nt, Artificial Sequence
  Description of Artificial Sequence: Synthetic oligonucleotide
  Sense strand starting at position 614 of SEQ ID NO: 585512
uaacguaggcauuacuaua

SEQ ID NO: 645783 - RNA, 19 nt, Artificial Sequence
  Description of Artificial Sequence: Synthetic oligonucleotide
  Antisense strand to SEQ ID NO: 645782
uauaguaaugccuacguua

SEQ ID NO: 645784 - RNA, 19 nt, Artificial Sequence
  Description of Artificial Sequence: Synthetic oligonucleotide
  Sense strand starting at position 714 of SEQ ID NO: 585512
guggcuaucaguuagacca

SEQ ID NO: 645785 - RNA, 19 nt, Artificial Sequence
  Description of Artificial Sequence: Synthetic oligonucleotide
  Antisense strand to SEQ ID NO: 645784
uggucuaacugauagccac

SEQ ID NO: 645786 - RNA, 19 nt, Artificial Sequence
  Description of Artificial Sequence: Synthetic oligonucleotide
  Sense strand starting at position 1004 of SEQ ID NO: 585512
cuuagaugggagugacuua

SEQ ID NO: 645787 - RNA, 19 nt, Artificial Sequence
  Description of Artificial Sequence: Synthetic oligonucleotide
  Antisense strand to SEQ ID NO: 645786
uaagucacucccaucuaag

SEQ ID NO: 645788 - RNA, 19 nt, Artificial Sequence
  Description of Artificial Sequence: Synthetic oligonucleotide
  Sense strand starting at position 1123 of SEQ ID NO: 585512
gcugaaguacuaugacuau

SEQ ID NO: 645789 - RNA, 19 nt, Artificial Sequence
  Description of Artificial Sequence: Synthetic oligonucleotide
  Antisense strand to SEQ ID NO: 645788
auagucauaguacuucagc

SEQ ID NO: 645790 - RNA, 19 nt, Artificial Sequence
  Description of Artificial Sequence: Synthetic oligonucleotide
  Sense strand starting at position 1129 of SEQ ID NO: 585512
guacuaugacuaugacacu

SEQ ID NO: 645791 - RNA, 19 nt, Artificial Sequence
  Description of Artificial Sequence: Synthetic oligonucleotide
  Antisense strand to SEQ ID NO: 645790
agugucauagucauaguac

SEQ ID NO: 645792 - RNA, 19 nt, Artificial Sequence
  Description of Artificial Sequence: Synthetic oligonucleotide
  Sense strand starting at position 1400 of SEQ ID NO: 585512
gccagucugagacagacua

SEQ ID NO: 645793 - RNA, 19 nt, Artificial Sequence
  Description of Artificial Sequence: Synthetic oligonucleotide
  Antisense strand to SEQ ID NO: 645792
uagucugucucagacuggc

SEQ ID NO: 645794 - RNA, 19 nt, Artificial Sequence
  Description of Artificial Sequence: Synthetic oligonucleotide
  Sense strand starting at position 1687 of SEQ ID NO: 585512
cucagugaccgagacucau

SEQ ID NO: 645795 - RNA, 19 nt, Artificial Sequence
  Description of Artificial Sequence: Synthetic oligonucleotide
  Antisense strand to SEQ ID NO: 645794
augagucucggucacugag

SEQ ID NO: 645796 - RNA, 19 nt, Artificial Sequence
  Description of Artificial Sequence: Synthetic oligonucleotide
  Sense strand starting at position 1691 of SEQ ID NO: 585512
gugaccgagacucaucuua

SEQ ID NO: 645797 - RNA, 19 nt, Artificial Sequence
  Description of Artificial Sequence: Synthetic oligonucleotide
  Antisense strand to SEQ ID NO: 645796
uaagaugagucucggucac

SEQ ID NO: 645798 - RNA, 19 nt, Artificial Sequence
  Description of Artificial Sequence: Synthetic oligonucleotide
  Sense strand starting at position 1693 of SEQ ID NO: 585512
gaccgagacucaucuuaga

SEQ ID NO: 645799 - RNA, 19 nt, Artificial Sequence
  Description of Artificial Sequence: Synthetic oligonucleotide
  Antisense strand to SEQ ID NO: 645798
ucuaagaugagucucgguc

SEQ ID NO: 645800 - RNA, 19 nt, Artificial Sequence
  Description of Artificial Sequence: Synthetic oligonucleotide
  Sense strand starting at position 1706 of SEQ ID NO: 585512
cuuagaacucuccgggaca

SEQ ID NO: 645801 - RNA, 19 nt, Artificial Sequence
  Description of Artificial Sequence: Synthetic oligonucleotide
  Antisense strand to SEQ ID NO: 645800
ugucccggagaguucuaag

SEQ ID NO: 645802 - RNA, 19 nt, Artificial Sequence
  Description of Artificial Sequence: Synthetic oligonucleotide
  Sense strand starting at position 1708 of SEQ ID NO: 585512
uagaacucuccgggacaca

SEQ ID NO: 645803 - RNA, 19 nt, Artificial Sequence
  Description of Artificial Sequence: Synthetic oligonucleotide
  Antisense strand to SEQ ID NO: 645802
ugugucccggagaguucua

SEQ ID NO: 645804 - RNA, 19 nt, Artificial Sequence
  Description of Artificial Sequence: Synthetic oligonucleotide
  Sense strand starting at position 2563 of SEQ ID NO: 585512
uugcgaugucagucugcaa

SEQ ID NO: 645805 - RNA, 19 nt, Artificial Sequence
  Description of Artificial Sequence: Synthetic oligonucleotide
  Antisense strand to SEQ ID NO: 645804
uugcagacugacaucgcaa

SEQ ID NO: 645806 - RNA, 19 nt, Artificial Sequence
  Description of Artificial Sequence: Synthetic oligonucleotide
  Sense strand starting at position 2591 of SEQ ID NO: 585512
agacaauucucccuuagug

SEQ ID NO: 645807 - RNA, 19 nt, Artificial Sequence
  Description of Artificial Sequence: Synthetic oligonucleotide
  Antisense strand to SEQ ID NO: 645806
cacuaagggagaauugucu

SEQ ID NO: 645808 - RNA, 19 nt, Artificial Sequence
  Description of Artificial Sequence: Synthetic oligonucleotide
  Sense strand starting at position 2703 of SEQ ID NO: 585512
aguggcuuugcugaggaua

SEQ ID NO: 645809 - RNA, 19 nt, Artificial Sequence
  Description of Artificial Sequence: Synthetic oligonucleotide
  Antisense strand to SEQ ID NO: 645808
uauccucagcaaagccacu

SEQ ID NO: 645810 - RNA, 19 nt, Artificial Sequence
  Description of Artificial Sequence: Synthetic oligonucleotide
  Sense strand starting at position 2706 of SEQ ID NO: 585512
ggcuuugcugaggauaaag

SEQ ID NO: 645811 - RNA, 19 nt, Artificial Sequence
  Description of Artificial Sequence: Synthetic oligonucleotide
  Antisense strand to SEQ ID NO: 645810
cuuuauccucagcaaagcc

SEQ ID NO: 645812 - RNA, 19 nt, Artificial Sequence
  Description of Artificial Sequence: Synthetic oligonucleotide
  Sense strand starting at position 2926 of SEQ ID NO: 585512
uuugaugagccugguuaaa

SEQ ID NO: 645813 - RNA, 19 nt, Artificial Sequence
  Description of Artificial Sequence: Synthetic oligonucleotide
  Antisense strand to SEQ ID NO: 645812
uuuaaccaggcucaucaaa

SEQ ID NO: 645814 - RNA, 19 nt, Artificial Sequence
  Description of Artificial Sequence: Synthetic oligonucleotide
  Sense strand starting at position 3108 of SEQ ID NO: 585512
aagacugagacucggugaa

SEQ ID NO: 645815 - RNA, 19 nt, Artificial Sequence
  Description of Artificial Sequence: Synthetic oligonucleotide
  Antisense strand to SEQ ID NO: 645814
uucaccgagucucagucuu

SEQ ID NO: 645816 - RNA, 19 nt, Artificial Sequence
  Description of Artificial Sequence: Synthetic oligonucleotide
  Sense strand starting at position 3110 of SEQ ID NO: 585512
gacugagacucggugaauc

SEQ ID NO: 645817 - RNA, 19 nt, Artificial Sequence
  Description of Artificial Sequence: Synthetic oligonucleotide
  Antisense strand to SEQ ID NO: 645816
gauucaccgagucucaguc

SEQ ID NO: 645818 - RNA, 19 nt, Artificial Sequence
  Description of Artificial Sequence: Synthetic oligonucleotide
  Sense strand starting at position 3312 of SEQ ID NO: 585512
gagaacagcuguccuacaa

SEQ ID NO: 645819 - RNA, 19 nt, Artificial Sequence
  Description of Artificial Sequence: Synthetic oligonucleotide
  Antisense strand to SEQ ID NO: 645818
uuguaggacagcuguucuc

SEQ ID NO: 645820 - RNA, 19 nt, Artificial Sequence
  Description of Artificial Sequence: Synthetic oligonucleotide
  Sense strand starting at position 3413 of SEQ ID NO: 585512
uccuaaugagguugacaua

SEQ ID NO: 645821 - RNA, 19 nt, Artificial Sequence
  Description of Artificial Sequence: Synthetic oligonucleotide
  Antisense strand to SEQ ID NO: 645820
uaugucaaccucauuagga

SEQ ID NO: 645822 - RNA, 19 nt, Artificial Sequence
  Description of Artificial Sequence: Synthetic oligonucleotide
  Sense strand starting at position 3463 of SEQ ID NO: 585512
ccucauuuguccuuagagc

SEQ ID NO: 645823 - RNA, 19 nt, Artificial Sequence
  Description of Artificial Sequence: Synthetic oligonucleotide
  Antisense strand to SEQ ID NO: 645822
gcucuaaggacaaaugagg

SEQ ID NO: 645824 - RNA, 19 nt, Artificial Sequence
  Description of Artificial Sequence: Synthetic oligonucleotide
  Sense strand starting at position 3484 of SEQ ID NO: 585512
aaauaagccugagugauug

SEQ ID NO: 645825 - RNA, 19 nt, Artificial Sequence
  Description of Artificial Sequence: Synthetic oligonucleotide
  Antisense strand to SEQ ID NO: 645824
caaucacucaggcuuauuu

SEQ ID NO: 645826 - RNA, 19 nt, Artificial Sequence
  Description of Artificial Sequence: Synthetic oligonucleotide
  Sense strand starting at position 3508 of SEQ ID NO: 585512
ggccuuucugaacacaaau

SEQ ID NO: 645827 - RNA, 19 nt, Artificial Sequence
  Description of Artificial Sequence: Synthetic oligonucleotide
  Antisense strand to SEQ ID NO: 645826
auuuguguucagaaaggcc

SEQ ID NO: 645828 - RNA, 19 nt, Artificial Sequence
  Description of Artificial Sequence: Synthetic oligonucleotide
  Sense strand starting at position 3591 of SEQ ID NO: 585512
guuaguuugcaggaaauug

SEQ ID NO: 645829 - RNA, 19 nt, Artificial Sequence
  Description of Artificial Sequence: Synthetic oligonucleotide
  Antisense strand to SEQ ID NO: 645828
caauuuccugcaaacuaac

SEQ ID NO: 645830 - RNA, 19 nt, Artificial Sequence
  Description of Artificial Sequence: Synthetic oligonucleotide
  Sense strand starting at position 3614 of SEQ ID NO: 585512
uggugucuaccuggauaaa

SEQ ID NO: 645831 - RNA, 19 nt, Artificial Sequence
  Description of Artificial Sequence: Synthetic oligonucleotide
  Antisense strand to SEQ ID NO: 645830
uuuauccagguagacacca

SEQ ID NO: 645832 - RNA, 19 nt, Artificial Sequence
  Description of Artificial Sequence: Synthetic oligonucleotide
  Sense strand starting at position 3615 of SEQ ID NO: 585512
ggugucuaccuggauaaag

SEQ ID NO: 645833 - RNA, 19 nt, Artificial Sequence
  Description of Artificial Sequence: Synthetic oligonucleotide
  Antisense strand to SEQ ID NO: 645832
cuuuauccagguagacacc

SEQ ID NO: 645834 - RNA, 19 nt, Artificial Sequence
  Description of Artificial Sequence: Synthetic oligonucleotide
  Sense strand starting at position 3753 of SEQ ID NO: 585512
ugaugaauaucauugagua

SEQ ID NO: 645835 - RNA, 19 nt, Artificial Sequence
  Description of Artificial Sequence: Synthetic oligonucleotide
  Antisense strand to SEQ ID NO: 645834
uacucaaugauauucauca

SEQ ID NO: 645836 - RNA, 19 nt, Artificial Sequence
  Description of Artificial Sequence: Synthetic oligonucleotide
  Sense strand starting at position 3757 of SEQ ID NO: 585512
gaauaucauugaguaagug

SEQ ID NO: 645837 - RNA, 19 nt, Artificial Sequence
  Description of Artificial Sequence: Synthetic oligonucleotide
  Antisense strand to SEQ ID NO: 645836
cacuuacucaaugauauuc

SEQ ID NO: 645838 - RNA, 19 nt, Artificial Sequence
  Description of Artificial Sequence: Synthetic oligonucleotide
  Sense strand starting at position 3804 of SEQ ID NO: 585512
ucaaacaguuuccuaaagu

SEQ ID NO: 645839 - RNA, 19 nt, Artificial Sequence
  Description of Artificial Sequence: Synthetic oligonucleotide
  Antisense strand to SEQ ID NO: 645838
acuuuaggaaacuguuuga

SEQ ID NO: 645840 - RNA, 19 nt, Artificial Sequence
  Description of Artificial Sequence: Synthetic oligonucleotide
  Sense strand starting at position 3885 of SEQ ID NO: 585512
uguccuguaagguaaguaa

SEQ ID NO: 645841 - RNA, 19 nt, Artificial Sequence
  Description of Artificial Sequence: Synthetic oligonucleotide
  Antisense strand to SEQ ID NO: 645840
uuacuuaccuuacaggaca

SEQ ID NO: 645842 - RNA, 19 nt, Artificial Sequence
  Description of Artificial Sequence: Synthetic oligonucleotide
  Sense strand starting at position 3936 of SEQ ID NO: 585512
gaaggcuugggucaguaua

SEQ ID NO: 645843 - RNA, 19 nt, Artificial Sequence
  Description of Artificial Sequence: Synthetic oligonucleotide
  Antisense strand to SEQ ID NO: 645842
uauacugacccaagccuuc

SEQ ID NO: 645844 - RNA, 19 nt, Artificial Sequence
  Description of Artificial Sequence: Synthetic oligonucleotide
  Sense strand starting at position 3955 of SEQ ID NO: 585512
uaguuagcugccuaaagga

SEQ ID NO: 645845 - RNA, 19 nt, Artificial Sequence
  Description of Artificial Sequence: Synthetic oligonucleotide
  Antisense strand to SEQ ID NO: 645844
uccuuuaggcagcuaacua

SEQ ID NO: 645846 - RNA, 19 nt, Artificial Sequence
  Description of Artificial Sequence: Synthetic oligonucleotide
  Sense strand starting at position 3982 of SEQ ID NO: 585512
ggguguuggaaucagguaa

SEQ ID NO: 645847 - RNA, 19 nt, Artificial Sequence
  Description of Artificial Sequence: Synthetic oligonucleotide
  Antisense strand to SEQ ID NO: 645846
uuaccugauuccaacaccc

SEQ ID NO: 645848 - RNA, 19 nt, Artificial Sequence
  Description of Artificial Sequence: Synthetic oligonucleotide
  Sense strand starting at position 31 of SEQ ID NO: 585513
cucagagugguacacugau

SEQ ID NO: 645849 - RNA, 19 nt, Artificial Sequence
  Description of Artificial Sequence: Synthetic oligonucleotide
  Antisense strand to SEQ ID NO: 645848
aucaguguaccacucugag

SEQ ID NO: 645850 - RNA, 19 nt, Artificial Sequence
  Description of Artificial Sequence: Synthetic oligonucleotide
  Sense strand starting at position 83 of SEQ ID NO: 585513
auguaugaugcuggaaauu

SEQ ID NO: 645851 - RNA, 19 nt, Artificial Sequence
  Description of Artificial Sequence: Synthetic oligonucleotide
  Antisense strand to SEQ ID NO: 645850
aauuuccagcaucauacau

SEQ ID NO: 645852 - RNA, 19 nt, Artificial Sequence
  Description of Artificial Sequence: Synthetic oligonucleotide
  Sense strand starting at position 196 of SEQ ID NO: 585513
ggauauaagcugcaaguaa

SEQ ID NO: 645853 - RNA, 19 nt, Artificial Sequence
  Description of Artificial Sequence: Synthetic oligonucleotide
  Antisense strand to SEQ ID NO: 645852
uuacuugcagcuuauaucc

SEQ ID NO: 645854 - RNA, 19 nt, Artificial Sequence
  Description of Artificial Sequence: Synthetic oligonucleotide
  Sense strand starting at position 296 of SEQ ID NO: 585513
cagggauauccaggaggcu

SEQ ID NO: 645855 - RNA, 19 nt, Artificial Sequence
  Description of Artificial Sequence: Synthetic oligonucleotide
  Antisense strand to SEQ ID NO: 645854
agccuccuggauaucccug

SEQ ID NO: 645856 - RNA, 19 nt, Artificial Sequence
  Description of Artificial Sequence: Synthetic oligonucleotide
  Sense strand starting at position 299 of SEQ ID NO: 585513
ggauauccaggaggcuaau

SEQ ID NO: 645857 - RNA, 19 nt, Artificial Sequence
  Description of Artificial Sequence: Synthetic oligonucleotide
  Antisense strand to SEQ ID NO: 645856
auuagccuccuggauaucc

SEQ ID NO: 645858 - RNA, 19 nt, Artificial Sequence
  Description of Artificial Sequence: Synthetic oligonucleotide
  Sense strand starting at position 338 of SEQ ID NO: 585513
aagcuuacagucugagaaa

SEQ ID NO: 645859 - RNA, 19 nt, Artificial Sequence
  Description of Artificial Sequence: Synthetic oligonucleotide
  Antisense strand to SEQ ID NO: 645858
uuucucagacuguaagcuu

SEQ ID NO: 645860 - RNA, 19 nt, Artificial Sequence
  Description of Artificial Sequence: Synthetic oligonucleotide
  Sense strand starting at position 366 of SEQ ID NO: 585513
uugaguuagcaauacaauu

SEQ ID NO: 645861 - RNA, 19 nt, Artificial Sequence
  Description of Artificial Sequence: Synthetic oligonucleotide
  Antisense strand to SEQ ID NO: 645860
aauuguauugcuaacucaa

SEQ ID NO: 645862 - RNA, 19 nt, Artificial Sequence
  Description of Artificial Sequence: Synthetic oligonucleotide
  Sense strand starting at position 431 of SEQ ID NO: 585513
gauguuuaauggcuauuaa

SEQ ID NO: 645863 - RNA, 19 nt, Artificial Sequence
  Description of Artificial Sequence: Synthetic oligonucleotide
  Antisense strand to SEQ ID NO: 645862
uuaauagccauuaaacauc

SEQ ID NO: 645864 - RNA, 19 nt, Artificial Sequence
  Description of Artificial Sequence: Synthetic oligonucleotide
  Sense strand starting at position 560 of SEQ ID NO: 585513
uuuggaaguagugaauagu

SEQ ID NO: 645865 - RNA, 19 nt, Artificial Sequence
  Description of Artificial Sequence: Synthetic oligonucleotide
  Antisense strand to SEQ ID NO: 645864
acuauucacuacuuccaaa

SEQ ID NO: 645866 - RNA, 19 nt, Artificial Sequence
  Description of Artificial Sequence: Synthetic oligonucleotide
  Sense strand starting at position 563 of SEQ ID NO: 585513
ggaaguagugaauaguucu

SEQ ID NO: 645867 - RNA, 19 nt, Artificial Sequence
  Description of Artificial Sequence: Synthetic oligonucleotide
  Antisense strand to SEQ ID NO: 645866
agaacuauucacuacuucc

SEQ ID NO: 645868 - RNA, 19 nt, Artificial Sequence
  Description of Artificial Sequence: Synthetic oligonucleotide
  Sense strand starting at position 576 of SEQ ID NO: 585513
aguucuacuuuacuagaca

SEQ ID NO: 645869 - RNA, 19 nt, Artificial Sequence
  Description of Artificial Sequence: Synthetic oligonucleotide
  Antisense strand to SEQ ID NO: 645868
ugucuaguaaaguagaacu

SEQ ID NO: 645870 - RNA, 19 nt, Artificial Sequence
  Description of Artificial Sequence: Synthetic oligonucleotide
  Sense strand starting at position 737 of SEQ ID NO: 585513
ugagaaauuuguugagaga

SEQ ID NO: 645871 - RNA, 19 nt, Artificial Sequence
  Description of Artificial Sequence: Synthetic oligonucleotide
  Antisense strand to SEQ ID NO: 645870
ucucucaacaaauuucuca

SEQ ID NO: 645872 - RNA, 19 nt, Artificial Sequence
  Description of Artificial Sequence: Synthetic oligonucleotide
  Sense strand starting at position 740 of SEQ ID NO: 585513
gaaauuuguugagagacca

SEQ ID NO: 645873 - RNA, 19 nt, Artificial Sequence
  Description of Artificial Sequence: Synthetic oligonucleotide
  Antisense strand to SEQ ID NO: 645872
uggucucucaacaaauuuc

SEQ ID NO: 645874 - RNA, 19 nt, Artificial Sequence
  Description of Artificial Sequence: Synthetic oligonucleotide
  Sense strand starting at position 766 of SEQ ID NO: 585513
ggcccacaugaaugucaau

SEQ ID NO: 645875 - RNA, 19 nt, Artificial Sequence
  Description of Artificial Sequence: Synthetic oligonucleotide
  Antisense strand to SEQ ID NO: 645874
auugacauucaugugggcc

SEQ ID NO: 645876 - RNA, 19 nt, Artificial Sequence
  Description of Artificial Sequence: Synthetic oligonucleotide
  Sense strand starting at position 858 of SEQ ID NO: 585513
uuggcaaagguuugacuau

SEQ ID NO: 645877 - RNA, 19 nt, Artificial Sequence
  Description of Artificial Sequence: Synthetic oligonucleotide
  Antisense strand to SEQ ID NO: 645876
auagucaaaccuuugccaa

SEQ ID NO: 645878 - RNA, 19 nt, Artificial Sequence
  Description of Artificial Sequence: Synthetic oligonucleotide
  Sense strand starting at position 864 of SEQ ID NO: 585513
aagguuugacuaugcaaau

SEQ ID NO: 645879 - RNA, 19 nt, Artificial Sequence
  Description of Artificial Sequence: Synthetic oligonucleotide
  Antisense strand to SEQ ID NO: 645878
auuugcauagucaaaccuu

SEQ ID NO: 645880 - RNA, 19 nt, Artificial Sequence
  Description of Artificial Sequence: Synthetic oligonucleotide
  Sense strand starting at position 865 of SEQ ID NO: 585513
agguuugacuaugcaaaua

SEQ ID NO: 645881 - RNA, 19 nt, Artificial Sequence
  Description of Artificial Sequence: Synthetic oligonucleotide
  Antisense strand to SEQ ID NO: 645880
uauuugcauagucaaaccu

SEQ ID NO: 645882 - RNA, 19 nt, Artificial Sequence
  Description of Artificial Sequence: Synthetic oligonucleotide
  Sense strand starting at position 918 of SEQ ID NO: 585513
gcagaauugguguagucaa

SEQ ID NO: 645883 - RNA, 19 nt, Artificial Sequence
  Description of Artificial Sequence: Synthetic oligonucleotide
  Antisense strand to SEQ ID NO: 645882
uugacuacaccaauucugc

SEQ ID NO: 645884 - RNA, 19 nt, Artificial Sequence
  Description of Artificial Sequence: Synthetic oligonucleotide
  Sense strand starting at position 998 of SEQ ID NO: 585513
ucaguauaacacuggauag

SEQ ID NO: 645885 - RNA, 19 nt, Artificial Sequence
  Description of Artificial Sequence: Synthetic oligonucleotide
  Antisense strand to SEQ ID NO: 645884
cuauccaguguuauacuga

SEQ ID NO: 645886 - RNA, 19 nt, Artificial Sequence
  Description of Artificial Sequence: Synthetic oligonucleotide
  Sense strand starting at position 1167 of SEQ ID NO: 585513
gugauaugucucuagguau

SEQ ID NO: 645887 - RNA, 19 nt, Artificial Sequence
  Description of Artificial Sequence: Synthetic oligonucleotide
  Antisense strand to SEQ ID NO: 645886
auaccuagagacauaucac

SEQ ID NO: 645888 - RNA, 19 nt, Artificial Sequence
  Description of Artificial Sequence: Synthetic oligonucleotide
  Sense strand starting at position 1299 of SEQ ID NO: 585513
uguugaauuucuucugcag

SEQ ID NO: 645889 - RNA, 19 nt, Artificial Sequence
  Description of Artificial Sequence: Synthetic oligonucleotide
  Antisense strand to SEQ ID NO: 645888
cugcagaagaaauucaaca

SEQ ID NO: 645890 - RNA, 19 nt, Artificial Sequence
  Description of Artificial Sequence: Synthetic oligonucleotide
  Sense strand starting at position 1684 of SEQ ID NO: 585513
ggguuugaacggcagagaa

SEQ ID NO: 645891 - RNA, 19 nt, Artificial Sequence
  Description of Artificial Sequence: Synthetic oligonucleotide
  Antisense strand to SEQ ID NO: 645890
uucucugccguucaaaccc

SEQ ID NO: 645892 - RNA, 19 nt, Artificial Sequence
  Description of Artificial Sequence: Synthetic oligonucleotide
  Sense strand starting at position 2154 of SEQ ID NO: 585513
cggaguagccgauauggaa

SEQ ID NO: 645893 - RNA, 19 nt, Artificial Sequence
  Description of Artificial Sequence: Synthetic oligonucleotide
  Antisense strand to SEQ ID NO: 645892
uuccauaucggcuacuccg

SEQ ID NO: 645894 - RNA, 19 nt, Artificial Sequence
  Description of Artificial Sequence: Synthetic oligonucleotide
  Sense strand starting at position 2161 of SEQ ID NO: 585513
gccgauauggaaugaacuu

SEQ ID NO: 645895 - RNA, 19 nt, Artificial Sequence
  Description of Artificial Sequence: Synthetic oligonucleotide
  Antisense strand to SEQ ID NO: 645894
aaguucauuccauaucggc

SEQ ID NO: 645896 - RNA, 19 nt, Artificial Sequence
  Description of Artificial Sequence: Synthetic oligonucleotide
  Sense strand starting at position 2305 of SEQ ID NO: 585513
gagaguagcgugagugacu

SEQ ID NO: 645897 - RNA, 19 nt, Artificial Sequence
  Description of Artificial Sequence: Synthetic oligonucleotide
  Antisense strand to SEQ ID NO: 645896
agucacucacgcuacucuc

SEQ ID NO: 645898 - RNA, 19 nt, Artificial Sequence
  Description of Artificial Sequence: Synthetic oligonucleotide
  Sense strand starting at position 2439 of SEQ ID NO: 585513
gggugcuggacagauuaca

SEQ ID NO: 645899 - RNA, 19 nt, Artificial Sequence
  Description of Artificial Sequence: Synthetic oligonucleotide
  Antisense strand to SEQ ID NO: 645898
uguaaucuguccagcaccc

SEQ ID NO: 645900 - RNA, 19 nt, Artificial Sequence
  Description of Artificial Sequence: Synthetic oligonucleotide
  Sense strand starting at position 2539 of SEQ ID NO: 585513
guggcauuucuccguggag

SEQ ID NO: 645901 - RNA, 19 nt, Artificial Sequence
  Description of Artificial Sequence: Synthetic oligonucleotide
  Antisense strand to SEQ ID NO: 645900
cuccacggagaaaugccac

SEQ ID NO: 645902 - RNA, 19 nt, Artificial Sequence
  Description of Artificial Sequence: Synthetic oligonucleotide
  Sense strand starting at position 2582 of SEQ ID NO: 585513
ggcacuuggugacugagau

SEQ ID NO: 645903 - RNA, 19 nt, Artificial Sequence
  Description of Artificial Sequence: Synthetic oligonucleotide
  Antisense strand to SEQ ID NO: 645902
aucucagucaccaagugcc

SEQ ID NO: 645904 - RNA, 19 nt, Artificial Sequence
  Description of Artificial Sequence: Synthetic oligonucleotide
  Sense strand starting at position 2583 of SEQ ID NO: 585513
gcacuuggugacugagaug

SEQ ID NO: 645905 - RNA, 19 nt, Artificial Sequence
  Description of Artificial Sequence: Synthetic oligonucleotide
  Antisense strand to SEQ ID NO: 645904
caucucagucaccaagugc

SEQ ID NO: 645906 - RNA, 19 nt, Artificial Sequence
  Description of Artificial Sequence: Synthetic oligonucleotide
  Sense strand starting at position 2594 of SEQ ID NO: 585513
cugagaugauaggcuuuga

SEQ ID NO: 645907 - RNA, 19 nt, Artificial Sequence
  Description of Artificial Sequence: Synthetic oligonucleotide
  Antisense strand to SEQ ID NO: 645906
ucaaagccuaucaucucag

SEQ ID NO: 645908 - RNA, 19 nt, Artificial Sequence
  Description of Artificial Sequence: Synthetic oligonucleotide
  Sense strand starting at position 2687 of SEQ ID NO: 585513
augauuagccagggagcuu

SEQ ID NO: 645909 - RNA, 19 nt, Artificial Sequence
  Description of Artificial Sequence: Synthetic oligonucleotide
  Antisense strand to SEQ ID NO: 645908
aagcucccuggcuaaucau

SEQ ID NO: 645910 - RNA, 19 nt, Artificial Sequence
  Description of Artificial Sequence: Synthetic oligonucleotide
  Sense strand starting at position 2688 of SEQ ID NO: 585513
ugauuagccagggagcuuu

SEQ ID NO: 645911 - RNA, 19 nt, Artificial Sequence
  Description of Artificial Sequence: Synthetic oligonucleotide
  Antisense strand to SEQ ID NO: 645910
aaagcucccuggcuaauca

SEQ ID NO: 645912 - RNA, 19 nt, Artificial Sequence
  Description of Artificial Sequence: Synthetic oligonucleotide
  Sense strand starting at position 3048 of SEQ ID NO: 585513
gggcuuagacuagggugau

SEQ ID NO: 645913 - RNA, 19 nt, Artificial Sequence
  Description of Artificial Sequence: Synthetic oligonucleotide
  Antisense strand to SEQ ID NO: 645912
aucacccuagucuaagccc

SEQ ID NO: 645914 - RNA, 19 nt, Artificial Sequence
  Description of Artificial Sequence: Synthetic oligonucleotide
  Sense strand starting at position 3482 of SEQ ID NO: 585513
gguagaagagggugucuuu

SEQ ID NO: 645915 - RNA, 19 nt, Artificial Sequence
  Description of Artificial Sequence: Synthetic oligonucleotide
  Antisense strand to SEQ ID NO: 645914
aaagacacccucuucuacc

SEQ ID NO: 645916 - RNA, 19 nt, Artificial Sequence
  Description of Artificial Sequence: Synthetic oligonucleotide
  Sense strand starting at position 3485 of SEQ ID NO: 585513
agaagagggugucuuuaau

SEQ ID NO: 645917 - RNA, 19 nt, Artificial Sequence
  Description of Artificial Sequence: Synthetic oligonucleotide
  Antisense strand to SEQ ID NO: 645916
auuaaagacacccucuucu

SEQ ID NO: 645918 - RNA, 19 nt, Artificial Sequence
  Description of Artificial Sequence: Synthetic oligonucleotide
  Sense strand starting at position 3494 of SEQ ID NO: 585513
ugucuuuaaucuccaggga

SEQ ID NO: 645919 - RNA, 19 nt, Artificial Sequence
  Description of Artificial Sequence: Synthetic oligonucleotide
  Antisense strand to SEQ ID NO: 645918
ucccuggagauuaaagaca

SEQ ID NO: 645920 - RNA, 19 nt, Artificial Sequence
  Description of Artificial Sequence: Synthetic oligonucleotide
  Sense strand starting at position 3787 of SEQ ID NO: 585513
cugggaaauuucuacaaca

SEQ ID NO: 645921 - RNA, 19 nt, Artificial Sequence
  Description of Artificial Sequence: Synthetic oligonucleotide
  Antisense strand to SEQ ID NO: 645920
uguuguagaaauuucccag

SEQ ID NO: 645922 - RNA, 19 nt, Artificial Sequence
  Description of Artificial Sequence: Synthetic oligonucleotide
  Sense strand starting at position 3813 of SEQ ID NO: 585513
cugucaucuguugggaaag

SEQ ID NO: 645923 - RNA, 19 nt, Artificial Sequence
  Description of Artificial Sequence: Synthetic oligonucleotide
  Antisense strand to SEQ ID NO: 645922
cuuucccaacagaugacag

SEQ ID NO: 645924 - RNA, 19 nt, Artificial Sequence
  Description of Artificial Sequence: Synthetic oligonucleotide
  Sense strand starting at position 3918 of SEQ ID NO: 585513
ugugcagugaccugauuuc

SEQ ID NO: 645925 - RNA, 19 nt, Artificial Sequence
  Description of Artificial Sequence: Synthetic oligonucleotide
  Antisense strand to SEQ ID NO: 645924
gaaaucaggucacugcaca

SEQ ID NO: 645926 - RNA, 19 nt, Artificial Sequence
  Description of Artificial Sequence: Synthetic oligonucleotide
  Sense strand starting at position 3939 of SEQ ID NO: 585513
gucccuauccuacagaucu

SEQ ID NO: 645927 - RNA, 19 nt, Artificial Sequence
  Description of Artificial Sequence: Synthetic oligonucleotide
  Antisense strand to SEQ ID NO: 645926
agaucuguaggauagggac

SEQ ID NO: 645928 - RNA, 19 nt, Artificial Sequence
  Description of Artificial Sequence: Synthetic oligonucleotide
  Sense strand starting at position 6 of SEQ ID NO: 585514
ucuacuuugcaugagggua

SEQ ID NO: 645929 - RNA, 19 nt, Artificial Sequence
  Description of Artificial Sequence: Synthetic oligonucleotide
  Antisense strand to SEQ ID NO: 645928
uacccucaugcaaaguaga

SEQ ID NO: 645930 - RNA, 19 nt, Artificial Sequence
  Description of Artificial Sequence: Synthetic oligonucleotide
  Sense strand starting at position 18 of SEQ ID NO: 585514
gaggguauugcauggacua

SEQ ID NO: 645931 - RNA, 19 nt, Artificial Sequence
  Description of Artificial Sequence: Synthetic oligonucleotide
  Antisense strand to SEQ ID NO: 645930
uaguccaugcaauacccuc

SEQ ID NO: 645932 - RNA, 19 nt, Artificial Sequence
  Description of Artificial Sequence: Synthetic oligonucleotide
  Sense strand starting at position 19 of SEQ ID NO: 585514
aggguauugcauggacuaa

SEQ ID NO: 645933 - RNA, 19 nt, Artificial Sequence
  Description of Artificial Sequence: Synthetic oligonucleotide
  Antisense strand to SEQ ID NO: 645932
uuaguccaugcaauacccu

SEQ ID NO: 645934 - RNA, 19 nt, Artificial Sequence
  Description of Artificial Sequence: Synthetic oligonucleotide
  Sense strand starting at position 20 of SEQ ID NO: 585514
ggguauugcauggacuaac

SEQ ID NO: 645935 - RNA, 19 nt, Artificial Sequence
  Description of Artificial Sequence: Synthetic oligonucleotide
  Antisense strand to SEQ ID NO: 645934
guuaguccaugcaauaccc

SEQ ID NO: 645936 - RNA, 19 nt, Artificial Sequence
  Description of Artificial Sequence: Synthetic oligonucleotide
  Sense strand starting at position 43 of SEQ ID NO: 585514
uccuguugacaaugccaaa

SEQ ID NO: 645937 - RNA, 19 nt, Artificial Sequence
  Description of Artificial Sequence: Synthetic oligonucleotide
  Antisense strand to SEQ ID NO: 645936
uuuggcauugucaacagga

SEQ ID NO: 645938 - RNA, 19 nt, Artificial Sequence
  Description of Artificial Sequence: Synthetic oligonucleotide
  Sense strand starting at position 91 of SEQ ID NO: 585514
uccugauaauguguuccua

SEQ ID NO: 645939 - RNA, 19 nt, Artificial Sequence
  Description of Artificial Sequence: Synthetic oligonucleotide
  Antisense strand to SEQ ID NO: 645938
uaggaacacauuaucagga

SEQ ID NO: 645940 - RNA, 19 nt, Artificial Sequence
  Description of Artificial Sequence: Synthetic oligonucleotide
  Sense strand starting at position 95 of SEQ ID NO: 585514
gauaauguguuccuaccag

SEQ ID NO: 645941 - RNA, 19 nt, Artificial Sequence
  Description of Artificial Sequence: Synthetic oligonucleotide
  Antisense strand to SEQ ID NO: 645940
cugguaggaacacauuauc

SEQ ID NO: 645942 - RNA, 19 nt, Artificial Sequence
  Description of Artificial Sequence: Synthetic oligonucleotide
  Sense strand starting at position 234 of SEQ ID NO: 585514
accuaucuccuaggacaga

SEQ ID NO: 645943 - RNA, 19 nt, Artificial Sequence
  Description of Artificial Sequence: Synthetic oligonucleotide
  Antisense strand to SEQ ID NO: 645942
ucuguccuaggagauaggu

SEQ ID NO: 645944 - RNA, 19 nt, Artificial Sequence
  Description of Artificial Sequence: Synthetic oligonucleotide
  Sense strand starting at position 319 of SEQ ID NO: 585514
gggugugcuccaggaaaca

SEQ ID NO: 645945 - RNA, 19 nt, Artificial Sequence
  Description of Artificial Sequence: Synthetic oligonucleotide
  Antisense strand to SEQ ID NO: 645944
uguuuccuggagcacaccc

SEQ ID NO: 645946 - RNA, 19 nt, Artificial Sequence
  Description of Artificial Sequence: Synthetic oligonucleotide
  Sense strand starting at position 487 of SEQ ID NO: 585514
gacaaugaacgcuguagga

SEQ ID NO: 645947 - RNA, 19 nt, Artificial Sequence
  Description of Artificial Sequence: Synthetic oligonucleotide
  Antisense strand to SEQ ID NO: 645946
uccuacagcguucauuguc

SEQ ID NO: 645948 - RNA, 19 nt, Artificial Sequence
  Description of Artificial Sequence: Synthetic oligonucleotide
  Sense strand starting at position 489 of SEQ ID NO: 585514
caaugaacgcuguaggaga

SEQ ID NO: 645949 - RNA, 19 nt, Artificial Sequence
  Description of Artificial Sequence: Synthetic oligonucleotide
  Antisense strand to SEQ ID NO: 645948
ucuccuacagcguucauug

SEQ ID NO: 645950 - RNA, 19 nt, Artificial Sequence
  Description of Artificial Sequence: Synthetic oligonucleotide
  Sense strand starting at position 746 of SEQ ID NO: 585514
gucuccuuccaguacaauu

SEQ ID NO: 645951 - RNA, 19 nt, Artificial Sequence
  Description of Artificial Sequence: Synthetic oligonucleotide
  Antisense strand to SEQ ID NO: 645950
aauuguacuggaaggagac

SEQ ID NO: 645952 - RNA, 19 nt, Artificial Sequence
  Description of Artificial Sequence: Synthetic oligonucleotide
  Sense strand starting at position 834 of SEQ ID NO: 585514
cugguauagguauauagua

SEQ ID NO: 645953 - RNA, 19 nt, Artificial Sequence
  Description of Artificial Sequence: Synthetic oligonucleotide
  Antisense strand to SEQ ID NO: 645952
uacuauauaccuauaccag

SEQ ID NO: 645954 - RNA, 19 nt, Artificial Sequence
  Description of Artificial Sequence: Synthetic oligonucleotide
  Sense strand starting at position 842 of SEQ ID NO: 585514
gguauauaguacccaauaa

SEQ ID NO: 645955 - RNA, 19 nt, Artificial Sequence
  Description of Artificial Sequence: Synthetic oligonucleotide
  Antisense strand to SEQ ID NO: 645954
uuauuggguacuauauacc

SEQ ID NO: 645956 - RNA, 19 nt, Artificial Sequence
  Description of Artificial Sequence: Synthetic oligonucleotide
  Sense strand starting at position 865 of SEQ ID NO: 585514
uugcuaagugaauguccaa

SEQ ID NO: 645957 - RNA, 19 nt, Artificial Sequence
  Description of Artificial Sequence: Synthetic oligonucleotide
  Antisense strand to SEQ ID NO: 645956
uuggacauucacuuagcaa

SEQ ID NO: 645958 - RNA, 19 nt, Artificial Sequence
  Description of Artificial Sequence: Synthetic oligonucleotide
  Sense strand starting at position 877 of SEQ ID NO: 585514
uguccaacuccuuggugau

SEQ ID NO: 645959 - RNA, 19 nt, Artificial Sequence
  Description of Artificial Sequence: Synthetic oligonucleotide
  Antisense strand to SEQ ID NO: 645958
aucaccaaggaguuggaca

SEQ ID NO: 645960 - RNA, 19 nt, Artificial Sequence
  Description of Artificial Sequence: Synthetic oligonucleotide
  Sense strand starting at position 883 of SEQ ID NO: 585514
acuccuuggugaucccaau

SEQ ID NO: 645961 - RNA, 19 nt, Artificial Sequence
  Description of Artificial Sequence: Synthetic oligonucleotide
  Antisense strand to SEQ ID NO: 645960
auugggaucaccaaggagu

SEQ ID NO: 645962 - RNA, 19 nt, Artificial Sequence
  Description of Artificial Sequence: Synthetic oligonucleotide
  Sense strand starting at position 908 of SEQ ID NO: 585514
aucacuguccuagacacuu

SEQ ID NO: 645963 - RNA, 19 nt, Artificial Sequence
  Description of Artificial Sequence: Synthetic oligonucleotide
  Antisense strand to SEQ ID NO: 645962
aagugucuaggacagugau

SEQ ID NO: 645964 - RNA, 19 nt, Artificial Sequence
  Description of Artificial Sequence: Synthetic oligonucleotide
  Sense strand starting at position 1058 of SEQ ID NO: 585514
ucuuuauacccugguccau

SEQ ID NO: 645965 - RNA, 19 nt, Artificial Sequence
  Description of Artificial Sequence: Synthetic oligonucleotide
  Antisense strand to SEQ ID NO: 645964
auggaccaggguauaaaga

SEQ ID NO: 645966 - RNA, 19 nt, Artificial Sequence
  Description of Artificial Sequence: Synthetic oligonucleotide
  Sense strand starting at position 1965 of SEQ ID NO: 585514
gcgcuucccggacucuaau

SEQ ID NO: 645967 - RNA, 19 nt, Artificial Sequence
  Description of Artificial Sequence: Synthetic oligonucleotide
  Antisense strand to SEQ ID NO: 645966
auuagaguccgggaagcgc

SEQ ID NO: 645968 - RNA, 19 nt, Artificial Sequence
  Description of Artificial Sequence: Synthetic oligonucleotide
  Sense strand starting at position 2244 of SEQ ID NO: 585514
gagaaugagucacagauuu

SEQ ID NO: 645969 - RNA, 19 nt, Artificial Sequence
  Description of Artificial Sequence: Synthetic oligonucleotide
  Antisense strand to SEQ ID NO: 645968
aaaucugugacucauucuc

SEQ ID NO: 645970 - RNA, 19 nt, Artificial Sequence
  Description of Artificial Sequence: Synthetic oligonucleotide
  Sense strand starting at position 2731 of SEQ ID NO: 585514
guucuucuugcccagaauc

SEQ ID NO: 645971 - RNA, 19 nt, Artificial Sequence
  Description of Artificial Sequence: Synthetic oligonucleotide
  Antisense strand to SEQ ID NO: 645970
gauucugggcaagaagaac

SEQ ID NO: 645972 - RNA, 19 nt, Artificial Sequence
  Description of Artificial Sequence: Synthetic oligonucleotide
  Sense strand starting at position 2739 of SEQ ID NO: 585514
ugcccagaaucuuuagaag

SEQ ID NO: 645973 - RNA, 19 nt, Artificial Sequence
  Description of Artificial Sequence: Synthetic oligonucleotide
  Antisense strand to SEQ ID NO: 645972
cuucuaaagauucugggca

SEQ ID NO: 645974 - RNA, 19 nt, Artificial Sequence
  Description of Artificial Sequence: Synthetic oligonucleotide
  Sense strand starting at position 2933 of SEQ ID NO: 585514
cagguuauguaaucucagu

SEQ ID NO: 645975 - RNA, 19 nt, Artificial Sequence
  Description of Artificial Sequence: Synthetic oligonucleotide
  Antisense strand to SEQ ID NO: 645974
acugagauuacauaaccug

SEQ ID NO: 645976 - RNA, 19 nt, Artificial Sequence
  Description of Artificial Sequence: Synthetic oligonucleotide
  Sense strand starting at position 2972 of SEQ ID NO: 585514
cgggaauauuauguugcau

SEQ ID NO: 645977 - RNA, 19 nt, Artificial Sequence
  Description of Artificial Sequence: Synthetic oligonucleotide
  Antisense strand to SEQ ID NO: 645976
augcaacauaauauucccg

SEQ ID NO: 645978 - RNA, 19 nt, Artificial Sequence
  Description of Artificial Sequence: Synthetic oligonucleotide
  Sense strand starting at position 2984 of SEQ ID NO: 585514
guugcauagagcgaugaua

SEQ ID NO: 645979 - RNA, 19 nt, Artificial Sequence
  Description of Artificial Sequence: Synthetic oligonucleotide
  Antisense strand to SEQ ID NO: 645978
uaucaucgcucuaugcaac

SEQ ID NO: 645980 - RNA, 19 nt, Artificial Sequence
  Description of Artificial Sequence: Synthetic oligonucleotide
  Sense strand starting at position 2986 of SEQ ID NO: 585514
ugcauagagcgaugauaag

SEQ ID NO: 645981 - RNA, 19 nt, Artificial Sequence
  Description of Artificial Sequence: Synthetic oligonucleotide
  Antisense strand to SEQ ID NO: 645980
cuuaucaucgcucuaugca

SEQ ID NO: 645982 - RNA, 19 nt, Artificial Sequence
  Description of Artificial Sequence: Synthetic oligonucleotide
  Sense strand starting at position 2998 of SEQ ID NO: 585514
ugauaagaauuagcggaaa

SEQ ID NO: 645983 - RNA, 19 nt, Artificial Sequence
  Description of Artificial Sequence: Synthetic oligonucleotide
  Antisense strand to SEQ ID NO: 645982
uuuccgcuaauucuuauca

SEQ ID NO: 645984 - RNA, 19 nt, Artificial Sequence
  Description of Artificial Sequence: Synthetic oligonucleotide
  Sense strand starting at position 3018 of SEQ ID NO: 585514
aaugcaugucagucgcuua

SEQ ID NO: 645985 - RNA, 19 nt, Artificial Sequence
  Description of Artificial Sequence: Synthetic oligonucleotide
  Antisense strand to SEQ ID NO: 645984
uaagcgacugacaugcauu

SEQ ID NO: 645986 - RNA, 19 nt, Artificial Sequence
  Description of Artificial Sequence: Synthetic oligonucleotide
  Sense strand starting at position 3061 of SEQ ID NO: 585514
ggaugcaugcuguagagua

SEQ ID NO: 645987 - RNA, 19 nt, Artificial Sequence
  Description of Artificial Sequence: Synthetic oligonucleotide
  Antisense strand to SEQ ID NO: 645986
uacucuacagcaugcaucc

SEQ ID NO: 645988 - RNA, 19 nt, Artificial Sequence
  Description of Artificial Sequence: Synthetic oligonucleotide
  Sense strand starting at position 3066 of SEQ ID NO: 585514
caugcuguagaguaagaaa

SEQ ID NO: 645989 - RNA, 19 nt, Artificial Sequence
  Description of Artificial Sequence: Synthetic oligonucleotide
  Antisense strand to SEQ ID NO: 645988
uuucuuacucuacagcaug

SEQ ID NO: 645990 - RNA, 19 nt, Artificial Sequence
  Description of Artificial Sequence: Synthetic oligonucleotide
  Sense strand starting at position 3451 of SEQ ID NO: 585514
gcuaacuucuacccgagau

SEQ ID NO: 645991 - RNA, 19 nt, Artificial Sequence
  Description of Artificial Sequence: Synthetic oligonucleotide
  Antisense strand to SEQ ID NO: 645990
aucucggguagaaguuagc

SEQ ID NO: 645992 - RNA, 19 nt, Artificial Sequence
  Description of Artificial Sequence: Synthetic oligonucleotide
  Sense strand starting at position 3464 of SEQ ID NO: 585514
cgagauuucuuagggaaga

SEQ ID NO: 645993 - RNA, 19 nt, Artificial Sequence
  Description of Artificial Sequence: Synthetic oligonucleotide
  Antisense strand to SEQ ID NO: 645992
ucuucccuaagaaaucucg

SEQ ID NO: 645994 - RNA, 19 nt, Artificial Sequence
  Description of Artificial Sequence: Synthetic oligonucleotide
  Sense strand starting at position 3465 of SEQ ID NO: 585514
gagauuucuuagggaagau

SEQ ID NO: 645995 - RNA, 19 nt, Artificial Sequence
  Description of Artificial Sequence: Synthetic oligonucleotide
  Antisense strand to SEQ ID NO: 645994
aucuucccuaagaaaucuc

SEQ ID NO: 645996 - RNA, 19 nt, Artificial Sequence
  Description of Artificial Sequence: Synthetic oligonucleotide
  Sense strand starting at position 3500 of SEQ ID NO: 585514
ucagaaugcuccuucuuug

SEQ ID NO: 645997 - RNA, 19 nt, Artificial Sequence
  Description of Artificial Sequence: Synthetic oligonucleotide
  Antisense strand to SEQ ID NO: 645996
caaagaaggagcauucuga

SEQ ID NO: 645998 - RNA, 19 nt, Artificial Sequence
  Description of Artificial Sequence: Synthetic oligonucleotide
  Sense strand starting at position 3601 of SEQ ID NO: 585514
guucguuuagcucacaaag

SEQ ID NO: 645999 - RNA, 19 nt, Artificial Sequence
  Description of Artificial Sequence: Synthetic oligonucleotide
  Antisense strand to SEQ ID NO: 645998
cuuugugagcuaaacgaac

SEQ ID NO: 646000 - RNA, 19 nt, Artificial Sequence
  Description of Artificial Sequence: Synthetic oligonucleotide
  Sense strand starting at position 3617 of SEQ ID NO: 585514
aaggcauuguuucuagaag

SEQ ID NO: 646001 - RNA, 19 nt, Artificial Sequence
  Description of Artificial Sequence: Synthetic oligonucleotide
  Antisense strand to SEQ ID NO: 646000
cuucuagaaacaaugccuu

SEQ ID NO: 646002 - RNA, 19 nt, Artificial Sequence
  Description of Artificial Sequence: Synthetic oligonucleotide
  Sense strand starting at position 3672 of SEQ ID NO: 585514
ggcucaguacuuuaagguu

SEQ ID NO: 646003 - RNA, 19 nt, Artificial Sequence
  Description of Artificial Sequence: Synthetic oligonucleotide
  Antisense strand to SEQ ID NO: 646002
aaccuuaaaguacugagcc

SEQ ID NO: 646004 - RNA, 19 nt, Artificial Sequence
  Description of Artificial Sequence: Synthetic oligonucleotide
  Sense strand starting at position 3871 of SEQ ID NO: 585514
gggagucacucaccaugau

SEQ ID NO: 646005 - RNA, 19 nt, Artificial Sequence
  Description of Artificial Sequence: Synthetic oligonucleotide
  Antisense strand to SEQ ID NO: 646004
aucauggugagugacuccc

SEQ ID NO: 646006 - RNA, 19 nt, Artificial Sequence
  Description of Artificial Sequence: Synthetic oligonucleotide
  Sense strand starting at position 3941 of SEQ ID NO: 585514
cgggaugcgaccggagaaa

SEQ ID NO: 646007 - RNA, 19 nt, Artificial Sequence
  Description of Artificial Sequence: Synthetic oligonucleotide
  Antisense strand to SEQ ID NO: 646006
uuucuccggucgcaucccg

SEQ ID NO: 646008 - RNA, 19 nt, Artificial Sequence
  Description of Artificial Sequence: Synthetic oligonucleotide
  Sense strand starting at position 24 of SEQ ID NO: 585515
accugcuucuaacuagaga

SEQ ID NO: 646009 - RNA, 19 nt, Artificial Sequence
  Description of Artificial Sequence: Synthetic oligonucleotide
  Antisense strand to SEQ ID NO: 646008
ucucuaguuagaagcaggu

SEQ ID NO: 646010 - RNA, 19 nt, Artificial Sequence
  Description of Artificial Sequence: Synthetic oligonucleotide
  Sense strand starting at position 112 of SEQ ID NO: 585515
ggucaucagagguaucuug

SEQ ID NO: 646011 - RNA, 19 nt, Artificial Sequence
  Description of Artificial Sequence: Synthetic oligonucleotide
  Antisense strand to SEQ ID NO: 646010
caagauaccucugaugacc

SEQ ID NO: 646012 - RNA, 19 nt, Artificial Sequence
  Description of Artificial Sequence: Synthetic oligonucleotide
  Sense strand starting at position 171 of SEQ ID NO: 585515
uggugauccaggcagagua

SEQ ID NO: 646013 - RNA, 19 nt, Artificial Sequence
  Description of Artificial Sequence: Synthetic oligonucleotide
  Antisense strand to SEQ ID NO: 646012
uacucugccuggaucacca

SEQ ID NO: 646014 - RNA, 19 nt, Artificial Sequence
  Description of Artificial Sequence: Synthetic oligonucleotide
  Sense strand starting at position 531 of SEQ ID NO: 585515
ggguuaagugagggaguga

SEQ ID NO: 646015 - RNA, 19 nt, Artificial Sequence
  Description of Artificial Sequence: Synthetic oligonucleotide
  Antisense strand to SEQ ID NO: 646014
ucacucccucacuuaaccc

SEQ ID NO: 646016 - RNA, 19 nt, Artificial Sequence
  Description of Artificial Sequence: Synthetic oligonucleotide
  Sense strand starting at position 799 of SEQ ID NO: 585515
accuguuguuccuugagac

SEQ ID NO: 646017 - RNA, 19 nt, Artificial Sequence
  Description of Artificial Sequence: Synthetic oligonucleotide
  Antisense strand to SEQ ID NO: 646016
gucucaaggaacaacaggu

SEQ ID NO: 646018 - RNA, 19 nt, Artificial Sequence
  Description of Artificial Sequence: Synthetic oligonucleotide
  Sense strand starting at position 800 of SEQ ID NO: 585515
ccuguuguuccuugagaca

SEQ ID NO: 646019 - RNA, 19 nt, Artificial Sequence
  Description of Artificial Sequence: Synthetic oligonucleotide
  Antisense strand to SEQ ID NO: 646018
ugucucaaggaacaacagg

SEQ ID NO: 646020 - RNA, 19 nt, Artificial Sequence
  Description of Artificial Sequence: Synthetic oligonucleotide
  Sense strand starting at position 847 of SEQ ID NO: 585515
cccagauauugagcaaaua

SEQ ID NO: 646021 - RNA, 19 nt, Artificial Sequence
  Description of Artificial Sequence: Synthetic oligonucleotide
  Antisense strand to SEQ ID NO: 646020
uauuugcucaauaucuggg

SEQ ID NO: 646022 - RNA, 19 nt, Artificial Sequence
  Description of Artificial Sequence: Synthetic oligonucleotide
  Sense strand starting at position 937 of SEQ ID NO: 585515
gguggauuauugguagauu

SEQ ID NO: 646023 - RNA, 19 nt, Artificial Sequence
  Description of Artificial Sequence: Synthetic oligonucleotide
  Antisense strand to SEQ ID NO: 646022
aaucuaccaauaauccacc

SEQ ID NO: 646024 - RNA, 19 nt, Artificial Sequence
  Description of Artificial Sequence: Synthetic oligonucleotide
  Sense strand starting at position 938 of SEQ ID NO: 585515
guggauuauugguagauuu

SEQ ID NO: 646025 - RNA, 19 nt, Artificial Sequence
  Description of Artificial Sequence: Synthetic oligonucleotide
  Antisense strand to SEQ ID NO: 646024
aaaucuaccaauaauccac

SEQ ID NO: 646026 - RNA, 19 nt, Artificial Sequence
  Description of Artificial Sequence: Synthetic oligonucleotide
  Sense strand starting at position 946 of SEQ ID NO: 585515
uugguagauuuccaagaug

SEQ ID NO: 646027 - RNA, 19 nt, Artificial Sequence
  Description of Artificial Sequence: Synthetic oligonucleotide
  Antisense strand to SEQ ID NO: 646026
caucuuggaaaucuaccaa

SEQ ID NO: 646028 - RNA, 19 nt, Artificial Sequence
  Description of Artificial Sequence: Synthetic oligonucleotide
  Sense strand starting at position 1018 of SEQ ID NO: 585515
agaugauuccauggccuag

SEQ ID NO: 646029 - RNA, 19 nt, Artificial Sequence
  Description of Artificial Sequence: Synthetic oligonucleotide
  Antisense strand to SEQ ID NO: 646028
cuaggccauggaaucaucu

SEQ ID NO: 646030 - RNA, 19 nt, Artificial Sequence
  Description of Artificial Sequence: Synthetic oligonucleotide
  Sense strand starting at position 1057 of SEQ ID NO: 585515
gagaguuaagucuggaguu

SEQ ID NO: 646031 - RNA, 19 nt, Artificial Sequence
  Description of Artificial Sequence: Synthetic oligonucleotide
  Antisense strand to SEQ ID NO: 646030
aacuccagacuuaacucuc

SEQ ID NO: 646032 - RNA, 19 nt, Artificial Sequence
  Description of Artificial Sequence: Synthetic oligonucleotide
  Sense strand starting at position 1059 of SEQ ID NO: 585515
gaguuaagucuggaguuug

SEQ ID NO: 646033 - RNA, 19 nt, Artificial Sequence
  Description of Artificial Sequence: Synthetic oligonucleotide
  Antisense strand to SEQ ID NO: 646032
caaacuccagacuuaacuc

SEQ ID NO: 646034 - RNA, 19 nt, Artificial Sequence
  Description of Artificial Sequence: Synthetic oligonucleotide
  Sense strand starting at position 1064 of SEQ ID NO: 585515
aagucuggaguuuggaaga

SEQ ID NO: 646035 - RNA, 19 nt, Artificial Sequence
  Description of Artificial Sequence: Synthetic oligonucleotide
  Antisense strand to SEQ ID NO: 646034
ucuuccaaacuccagacuu

SEQ ID NO: 646036 - RNA, 19 nt, Artificial Sequence
  Description of Artificial Sequence: Synthetic oligonucleotide
  Sense strand starting at position 1199 of SEQ ID NO: 585515
uccguccucggagauguaa

SEQ ID NO: 646037 - RNA, 19 nt, Artificial Sequence
  Description of Artificial Sequence: Synthetic oligonucleotide
  Antisense strand to SEQ ID NO: 646036
uuacaucuccgaggacgga

SEQ ID NO: 646038 - RNA, 19 nt, Artificial Sequence
  Description of Artificial Sequence: Synthetic oligonucleotide
  Sense strand starting at position 1494 of SEQ ID NO: 585515
gacucaaugccagagucgu

SEQ ID NO: 646039 - RNA, 19 nt, Artificial Sequence
  Description of Artificial Sequence: Synthetic oligonucleotide
  Antisense strand to SEQ ID NO: 646038
acgacucuggcauugaguc

SEQ ID NO: 646040 - RNA, 19 nt, Artificial Sequence
  Description of Artificial Sequence: Synthetic oligonucleotide
  Sense strand starting at position 1953 of SEQ ID NO: 585515
gacucacuccuucguugau

SEQ ID NO: 646041 - RNA, 19 nt, Artificial Sequence
  Description of Artificial Sequence: Synthetic oligonucleotide
  Antisense strand to SEQ ID NO: 646040
aucaacgaaggagugaguc

SEQ ID NO: 646042 - RNA, 19 nt, Artificial Sequence
  Description of Artificial Sequence: Synthetic oligonucleotide
  Sense strand starting at position 1954 of SEQ ID NO: 585515
acucacuccuucguugauu

SEQ ID NO: 646043 - RNA, 19 nt, Artificial Sequence
  Description of Artificial Sequence: Synthetic oligonucleotide
  Antisense strand to SEQ ID NO: 646042
aaucaacgaaggagugagu

SEQ ID NO: 646044 - RNA, 19 nt, Artificial Sequence
  Description of Artificial Sequence: Synthetic oligonucleotide
  Sense strand starting at position 2383 of SEQ ID NO: 585515
ucuauuaauuguccguaca

SEQ ID NO: 646045 - RNA, 19 nt, Artificial Sequence
  Description of Artificial Sequence: Synthetic oligonucleotide
  Antisense strand to SEQ ID NO: 646044
uguacggacaauuaauaga

SEQ ID NO: 646046 - RNA, 19 nt, Artificial Sequence
  Description of Artificial Sequence: Synthetic oligonucleotide
  Sense strand starting at position 2384 of SEQ ID NO: 585515
cuauuaauuguccguacaa

SEQ ID NO: 646047 - RNA, 19 nt, Artificial Sequence
  Description of Artificial Sequence: Synthetic oligonucleotide
  Antisense strand to SEQ ID NO: 646046
uuguacggacaauuaauag

SEQ ID NO: 646048 - RNA, 19 nt, Artificial Sequence
  Description of Artificial Sequence: Synthetic oligonucleotide
  Sense strand starting at position 2385 of SEQ ID NO: 585515
uauuaauuguccguacaag

SEQ ID NO: 646049 - RNA, 19 nt, Artificial Sequence
  Description of Artificial Sequence: Synthetic oligonucleotide
  Antisense strand to SEQ ID NO: 646048
cuuguacggacaauuaaua

SEQ ID NO: 646050 - RNA, 19 nt, Artificial Sequence
  Description of Artificial Sequence: Synthetic oligonucleotide
  Sense strand starting at position 2386 of SEQ ID NO: 585515
auuaauuguccguacaagc

SEQ ID NO: 646051 - RNA, 19 nt, Artificial Sequence
  Description of Artificial Sequence: Synthetic oligonucleotide
  Antisense strand to SEQ ID NO: 646050
gcuuguacggacaauuaau

SEQ ID NO: 646052 - RNA, 19 nt, Artificial Sequence
  Description of Artificial Sequence: Synthetic oligonucleotide
  Sense strand starting at position 2583 of SEQ ID NO: 585515
gacagucuccugugucaac

SEQ ID NO: 646053 - RNA, 19 nt, Artificial Sequence
  Description of Artificial Sequence: Synthetic oligonucleotide
  Antisense strand to SEQ ID NO: 646052
guugacacaggagacuguc

SEQ ID NO: 646054 - RNA, 19 nt, Artificial Sequence
  Description of Artificial Sequence: Synthetic oligonucleotide
  Sense strand starting at position 2649 of SEQ ID NO: 585515
gcgucuucucagggaaacu

SEQ ID NO: 646055 - RNA, 19 nt, Artificial Sequence
  Description of Artificial Sequence: Synthetic oligonucleotide
  Antisense strand to SEQ ID NO: 646054
aguuucccugagaagacgc

SEQ ID NO: 646056 - RNA, 19 nt, Artificial Sequence
  Description of Artificial Sequence: Synthetic oligonucleotide
  Sense strand starting at position 2650 of SEQ ID NO: 585515
cgucuucucagggaaacug

SEQ ID NO: 646057 - RNA, 19 nt, Artificial Sequence
  Description of Artificial Sequence: Synthetic oligonucleotide
  Antisense strand to SEQ ID NO: 646056
caguuucccugagaagacg

SEQ ID NO: 646058 - RNA, 19 nt, Artificial Sequence
  Description of Artificial Sequence: Synthetic oligonucleotide
  Sense strand starting at position 2677 of SEQ ID NO: 585515
aaaguaaagugguugugga

SEQ ID NO: 646059 - RNA, 19 nt, Artificial Sequence
  Description of Artificial Sequence: Synthetic oligonucleotide
  Antisense strand to SEQ ID NO: 646058
uccacaaccacuuuacuuu

SEQ ID NO: 646060 - RNA, 19 nt, Artificial Sequence
  Description of Artificial Sequence: Synthetic oligonucleotide
  Sense strand starting at position 2692 of SEQ ID NO: 585515
uggaguuucuucuuccuca

SEQ ID NO: 646061 - RNA, 19 nt, Artificial Sequence
  Description of Artificial Sequence: Synthetic oligonucleotide
  Antisense strand to SEQ ID NO: 646060
ugaggaagaagaaacucca

SEQ ID NO: 646062 - RNA, 19 nt, Artificial Sequence
  Description of Artificial Sequence: Synthetic oligonucleotide
  Sense strand starting at position 2693 of SEQ ID NO: 585515
ggaguuucuucuuccucaa

SEQ ID NO: 646063 - RNA, 19 nt, Artificial Sequence
  Description of Artificial Sequence: Synthetic oligonucleotide
  Antisense strand to SEQ ID NO: 646062
uugaggaagaagaaacucc

SEQ ID NO: 646064 - RNA, 19 nt, Artificial Sequence
  Description of Artificial Sequence: Synthetic oligonucleotide
  Sense strand starting at position 2925 of SEQ ID NO: 585515
gcccaugcuccaugauuua

SEQ ID NO: 646065 - RNA, 19 nt, Artificial Sequence
  Description of Artificial Sequence: Synthetic oligonucleotide
  Antisense strand to SEQ ID NO: 646064
uaaaucauggagcaugggc

SEQ ID NO: 646066 - RNA, 19 nt, Artificial Sequence
  Description of Artificial Sequence: Synthetic oligonucleotide
  Sense strand starting at position 2999 of SEQ ID NO: 585515
cuuagaggguuauccgcaa

SEQ ID NO: 646067 - RNA, 19 nt, Artificial Sequence
  Description of Artificial Sequence: Synthetic oligonucleotide
  Antisense strand to SEQ ID NO: 646066
uugcggauaacccucuaag

SEQ ID NO: 646068 - RNA, 19 nt, Artificial Sequence
  Description of Artificial Sequence: Synthetic oligonucleotide
  Sense strand starting at position 3003 of SEQ ID NO: 585515
gaggguuauccgcaaggga

SEQ ID NO: 646069 - RNA, 19 nt, Artificial Sequence
  Description of Artificial Sequence: Synthetic oligonucleotide
  Antisense strand to SEQ ID NO: 646068
ucccuugcggauaacccuc

SEQ ID NO: 646070 - RNA, 19 nt, Artificial Sequence
  Description of Artificial Sequence: Synthetic oligonucleotide
  Sense strand starting at position 3006 of SEQ ID NO: 585515
gguuauccgcaagggaaca

SEQ ID NO: 646071 - RNA, 19 nt, Artificial Sequence
  Description of Artificial Sequence: Synthetic oligonucleotide
  Antisense strand to SEQ ID NO: 646070
uguucccuugcggauaacc

SEQ ID NO: 646072 - RNA, 19 nt, Artificial Sequence
  Description of Artificial Sequence: Synthetic oligonucleotide
  Sense strand starting at position 3171 of SEQ ID NO: 585515
uauggaaggucuccuguaa

SEQ ID NO: 646073 - RNA, 19 nt, Artificial Sequence
  Description of Artificial Sequence: Synthetic oligonucleotide
  Antisense strand to SEQ ID NO: 646072
uuacaggagaccuuccaua

SEQ ID NO: 646074 - RNA, 19 nt, Artificial Sequence
  Description of Artificial Sequence: Synthetic oligonucleotide
  Sense strand starting at position 3175 of SEQ ID NO: 585515
gaaggucuccuguaauguc

SEQ ID NO: 646075 - RNA, 19 nt, Artificial Sequence
  Description of Artificial Sequence: Synthetic oligonucleotide
  Antisense strand to SEQ ID NO: 646074
gacauuacaggagaccuuc

SEQ ID NO: 646076 - RNA, 19 nt, Artificial Sequence
  Description of Artificial Sequence: Synthetic oligonucleotide
  Sense strand starting at position 3202 of SEQ ID NO: 585515
uucuuucuacuggaagcaa

SEQ ID NO: 646077 - RNA, 19 nt, Artificial Sequence
  Description of Artificial Sequence: Synthetic oligonucleotide
  Antisense strand to SEQ ID NO: 646076
uugcuuccaguagaaagaa

SEQ ID NO: 646078 - RNA, 19 nt, Artificial Sequence
  Description of Artificial Sequence: Synthetic oligonucleotide
  Sense strand starting at position 3308 of SEQ ID NO: 585515
agcucagagugguugggau

SEQ ID NO: 646079 - RNA, 19 nt, Artificial Sequence
  Description of Artificial Sequence: Synthetic oligonucleotide
  Antisense strand to SEQ ID NO: 646078
aucccaaccacucugagcu

SEQ ID NO: 646080 - RNA, 19 nt, Artificial Sequence
  Description of Artificial Sequence: Synthetic oligonucleotide
  Sense strand starting at position 3310 of SEQ ID NO: 585515
cucagagugguugggauaa

SEQ ID NO: 646081 - RNA, 19 nt, Artificial Sequence
  Description of Artificial Sequence: Synthetic oligonucleotide
  Antisense strand to SEQ ID NO: 646080
uuaucccaaccacucugag

SEQ ID NO: 646082 - RNA, 19 nt, Artificial Sequence
  Description of Artificial Sequence: Synthetic oligonucleotide
  Sense strand starting at position 3619 of SEQ ID NO: 585515
aucuccuucccuugaguca

SEQ ID NO: 646083 - RNA, 19 nt, Artificial Sequence
  Description of Artificial Sequence: Synthetic oligonucleotide
  Antisense strand to SEQ ID NO: 646082
ugacucaagggaaggagau

SEQ ID NO: 646084 - RNA, 19 nt, Artificial Sequence
  Description of Artificial Sequence: Synthetic oligonucleotide
  Sense strand starting at position 3626 of SEQ ID NO: 585515
ucccuugagucagcaugau

SEQ ID NO: 646085 - RNA, 19 nt, Artificial Sequence
  Description of Artificial Sequence: Synthetic oligonucleotide
  Antisense strand to SEQ ID NO: 646084
aucaugcugacucaaggga

SEQ ID NO: 646086 - RNA, 19 nt, Artificial Sequence
  Description of Artificial Sequence: Synthetic oligonucleotide
  Sense strand starting at position 3777 of SEQ ID NO: 585515
uguaaucacgccuauaaac

SEQ ID NO: 646087 - RNA, 19 nt, Artificial Sequence
  Description of Artificial Sequence: Synthetic oligonucleotide
  Antisense strand to SEQ ID NO: 646086
guuuauaggcgugauuaca

SEQ ID NO: 646088 - RNA, 19 nt, Artificial Sequence
  Description of Artificial Sequence: Synthetic oligonucleotide
  Sense strand starting at position 458 of SEQ ID NO: 585516
gggcacaaucaauguacaa

SEQ ID NO: 646089 - RNA, 19 nt, Artificial Sequence
  Description of Artificial Sequence: Synthetic oligonucleotide
  Antisense strand to SEQ ID NO: 646088
uuguacauugauugugccc

SEQ ID NO: 646090 - RNA, 19 nt, Artificial Sequence
  Description of Artificial Sequence: Synthetic oligonucleotide
  Sense strand starting at position 470 of SEQ ID NO: 585516
uguacaaugcuauaaugua

SEQ ID NO: 646091 - RNA, 19 nt, Artificial Sequence
  Description of Artificial Sequence: Synthetic oligonucleotide
  Antisense strand to SEQ ID NO: 646090
uacauuauagcauuguaca

SEQ ID NO: 646092 - RNA, 19 nt, Artificial Sequence
  Description of Artificial Sequence: Synthetic oligonucleotide
  Sense strand starting at position 495 of SEQ ID NO: 585516
aggacaauguagcuguuaa

SEQ ID NO: 646093 - RNA, 19 nt, Artificial Sequence
  Description of Artificial Sequence: Synthetic oligonucleotide
  Antisense strand to SEQ ID NO: 646092
uuaacagcuacauuguccu

SEQ ID NO: 646094 - RNA, 19 nt, Artificial Sequence
  Description of Artificial Sequence: Synthetic oligonucleotide
  Sense strand starting at position 496 of SEQ ID NO: 585516
ggacaauguagcuguuaaa

SEQ ID NO: 646095 - RNA, 19 nt, Artificial Sequence
  Description of Artificial Sequence: Synthetic oligonucleotide
  Antisense strand to SEQ ID NO: 646094
uuuaacagcuacauugucc

SEQ ID NO: 646096 - RNA, 19 nt, Artificial Sequence
  Description of Artificial Sequence: Synthetic oligonucleotide
  Sense strand starting at position 532 of SEQ ID NO: 585516
uaguccaucuggguuauaa

SEQ ID NO: 646097 - RNA, 19 nt, Artificial Sequence
  Description of Artificial Sequence: Synthetic oligonucleotide
  Antisense strand to SEQ ID NO: 646096
uuauaacccagauggacua

SEQ ID NO: 646098 - RNA, 19 nt, Artificial Sequence
  Description of Artificial Sequence: Synthetic oligonucleotide
  Sense strand starting at position 534 of SEQ ID NO: 585516
guccaucuggguuauaauc

SEQ ID NO: 646099 - RNA, 19 nt, Artificial Sequence
  Description of Artificial Sequence: Synthetic oligonucleotide
  Antisense strand to SEQ ID NO: 646098
gauuauaacccagauggac

SEQ ID NO: 646100 - RNA, 19 nt, Artificial Sequence
  Description of Artificial Sequence: Synthetic oligonucleotide
  Sense strand starting at position 564 of SEQ ID NO: 585516
agugaauaacuguaacucu

SEQ ID NO: 646101 - RNA, 19 nt, Artificial Sequence
  Description of Artificial Sequence: Synthetic oligonucleotide
  Antisense strand to SEQ ID NO: 646100
agaguuacaguuauucacu

SEQ ID NO: 646102 - RNA, 19 nt, Artificial Sequence
  Description of Artificial Sequence: Synthetic oligonucleotide
  Sense strand starting at position 627 of SEQ ID NO: 585516
gggauaauaucaguacuca

SEQ ID NO: 646103 - RNA, 19 nt, Artificial Sequence
  Description of Artificial Sequence: Synthetic oligonucleotide
  Antisense strand to SEQ ID NO: 646102
ugaguacugauauuauccc

SEQ ID NO: 646104 - RNA, 19 nt, Artificial Sequence
  Description of Artificial Sequence: Synthetic oligonucleotide
  Sense strand starting at position 664 of SEQ ID NO: 585516
aggauuaaauguguuacuu

SEQ ID NO: 646105 - RNA, 19 nt, Artificial Sequence
  Description of Artificial Sequence: Synthetic oligonucleotide
  Antisense strand to SEQ ID NO: 646104
aaguaacacauuuaauccu

SEQ ID NO: 646106 - RNA, 19 nt, Artificial Sequence
  Description of Artificial Sequence: Synthetic oligonucleotide
  Sense strand starting at position 684 of SEQ ID NO: 585516
auaagaaaugucuggcaca

SEQ ID NO: 646107 - RNA, 19 nt, Artificial Sequence
  Description of Artificial Sequence: Synthetic oligonucleotide
  Antisense strand to SEQ ID NO: 646106
ugugccagacauuucuuau

SEQ ID NO: 646108 - RNA, 19 nt, Artificial Sequence
  Description of Artificial Sequence: Synthetic oligonucleotide
  Sense strand starting at position 767 of SEQ ID NO: 585516
aagaauacguagcuaugaa

SEQ ID NO: 646109 - RNA, 19 nt, Artificial Sequence
  Description of Artificial Sequence: Synthetic oligonucleotide
  Antisense strand to SEQ ID NO: 646108
uucauagcuacguauucuu

SEQ ID NO: 646110 - RNA, 19 nt, Artificial Sequence
  Description of Artificial Sequence: Synthetic oligonucleotide
  Sense strand starting at position 768 of SEQ ID NO: 585516
agaauacguagcuaugaag

SEQ ID NO: 646111 - RNA, 19 nt, Artificial Sequence
  Description of Artificial Sequence: Synthetic oligonucleotide
  Antisense strand to SEQ ID NO: 646110
cuucauagcuacguauucu

SEQ ID NO: 646112 - RNA, 19 nt, Artificial Sequence
  Description of Artificial Sequence: Synthetic oligonucleotide
  Sense strand starting at position 870 of SEQ ID NO: 585516
agcaaacaaucugucaaga

SEQ ID NO: 646113 - RNA, 19 nt, Artificial Sequence
  Description of Artificial Sequence: Synthetic oligonucleotide
  Antisense strand to SEQ ID NO: 646112
ucuugacagauuguuugcu

SEQ ID NO: 646114 - RNA, 19 nt, Artificial Sequence
  Description of Artificial Sequence: Synthetic oligonucleotide
  Sense strand starting at position 907 of SEQ ID NO: 585516
cuaaacagaugugaaauuu

SEQ ID NO: 646115 - RNA, 19 nt, Artificial Sequence
  Description of Artificial Sequence: Synthetic oligonucleotide
  Antisense strand to SEQ ID NO: 646114
aaauuucacaucuguuuag

SEQ ID NO: 646116 - RNA, 19 nt, Artificial Sequence
  Description of Artificial Sequence: Synthetic oligonucleotide
  Sense strand starting at position 963 of SEQ ID NO: 585516
agacaaugguagcucagua

SEQ ID NO: 646117 - RNA, 19 nt, Artificial Sequence
  Description of Artificial Sequence: Synthetic oligonucleotide
  Antisense strand to SEQ ID NO: 646116
uacugagcuaccauugucu

SEQ ID NO: 646118 - RNA, 19 nt, Artificial Sequence
  Description of Artificial Sequence: Synthetic oligonucleotide
  Sense strand starting at position 968 of SEQ ID NO: 585516
augguagcucaguaaugua

SEQ ID NO: 646119 - RNA, 19 nt, Artificial Sequence
  Description of Artificial Sequence: Synthetic oligonucleotide
  Antisense strand to SEQ ID NO: 646118
uacauuacugagcuaccau

SEQ ID NO: 646120 - RNA, 19 nt, Artificial Sequence
  Description of Artificial Sequence: Synthetic oligonucleotide
  Sense strand starting at position 1033 of SEQ ID NO: 585516
agguccugaugaccaaaua

SEQ ID NO: 646121 - RNA, 19 nt, Artificial Sequence
  Description of Artificial Sequence: Synthetic oligonucleotide
  Antisense strand to SEQ ID NO: 646120
uauuuggucaucaggaccu

SEQ ID NO: 646122 - RNA, 19 nt, Artificial Sequence
  Description of Artificial Sequence: Synthetic oligonucleotide
  Sense strand starting at position 1555 of SEQ ID NO: 585516
ccugauccuuuaucagaug

SEQ ID NO: 646123 - RNA, 19 nt, Artificial Sequence
  Description of Artificial Sequence: Synthetic oligonucleotide
  Antisense strand to SEQ ID NO: 646122
caucugauaaaggaucagg

SEQ ID NO: 646124 - RNA, 19 nt, Artificial Sequence
  Description of Artificial Sequence: Synthetic oligonucleotide
  Sense strand starting at position 1652 of SEQ ID NO: 585516
aggguaaauaauugguuua

SEQ ID NO: 646125 - RNA, 19 nt, Artificial Sequence
  Description of Artificial Sequence: Synthetic oligonucleotide
  Antisense strand to SEQ ID NO: 646124
uaaaccaauuauuuacccu

SEQ ID NO: 646126 - RNA, 19 nt, Artificial Sequence
  Description of Artificial Sequence: Synthetic oligonucleotide
  Sense strand starting at position 1653 of SEQ ID NO: 585516
ggguaaauaauugguuuaa

SEQ ID NO: 646127 - RNA, 19 nt, Artificial Sequence
  Description of Artificial Sequence: Synthetic oligonucleotide
  Antisense strand to SEQ ID NO: 646126
uuaaaccaauuauuuaccc

SEQ ID NO: 646128 - RNA, 19 nt, Artificial Sequence
  Description of Artificial Sequence: Synthetic oligonucleotide
  Sense strand starting at position 1655 of SEQ ID NO: 585516
guaaauaauugguuuaagg

SEQ ID NO: 646129 - RNA, 19 nt, Artificial Sequence
  Description of Artificial Sequence: Synthetic oligonucleotide
  Antisense strand to SEQ ID NO: 646128
ccuuaaaccaauuauuuac

SEQ ID NO: 646130 - RNA, 19 nt, Artificial Sequence
  Description of Artificial Sequence: Synthetic oligonucleotide
  Sense strand starting at position 2247 of SEQ ID NO: 585516
ugguucagugauggacgaa

SEQ ID NO: 646131 - RNA, 19 nt, Artificial Sequence
  Description of Artificial Sequence: Synthetic oligonucleotide
  Antisense strand to SEQ ID NO: 646130
uucguccaucacugaacca

SEQ ID NO: 646132 - RNA, 19 nt, Artificial Sequence
  Description of Artificial Sequence: Synthetic oligonucleotide
  Sense strand starting at position 2248 of SEQ ID NO: 585516
gguucagugauggacgaaa

SEQ ID NO: 646133 - RNA, 19 nt, Artificial Sequence
  Description of Artificial Sequence: Synthetic oligonucleotide
  Antisense strand to SEQ ID NO: 646132
uuucguccaucacugaacc

SEQ ID NO: 646134 - RNA, 19 nt, Artificial Sequence
  Description of Artificial Sequence: Synthetic oligonucleotide
  Sense strand starting at position 2530 of SEQ ID NO: 585516
aagguagagaguuaguuua

SEQ ID NO: 646135 - RNA, 19 nt, Artificial Sequence
  Description of Artificial Sequence: Synthetic oligonucleotide
  Antisense strand to SEQ ID NO: 646134
uaaacuaacucucuaccuu

SEQ ID NO: 646136 - RNA, 19 nt, Artificial Sequence
  Description of Artificial Sequence: Synthetic oligonucleotide
  Sense strand starting at position 2532 of SEQ ID NO: 585516
gguagagaguuaguuuaga

SEQ ID NO: 646137 - RNA, 19 nt, Artificial Sequence
  Description of Artificial Sequence: Synthetic oligonucleotide
  Antisense strand to SEQ ID NO: 646136
ucuaaacuaacucucuacc

SEQ ID NO: 646138 - RNA, 19 nt, Artificial Sequence
  Description of Artificial Sequence: Synthetic oligonucleotide
  Sense strand starting at position 2709 of SEQ ID NO: 585516
gaccuuuccgacugggaug

SEQ ID NO: 646139 - RNA, 19 nt, Artificial Sequence
  Description of Artificial Sequence: Synthetic oligonucleotide
  Antisense strand to SEQ ID NO: 646138
caucccagucggaaagguc

SEQ ID NO: 646140 - RNA, 19 nt, Artificial Sequence
  Description of Artificial Sequence: Synthetic oligonucleotide
  Sense strand starting at position 3118 of SEQ ID NO: 585516
cccuuaggaguuuggaaag

SEQ ID NO: 646141 - RNA, 19 nt, Artificial Sequence
  Description of Artificial Sequence: Synthetic oligonucleotide
  Antisense strand to SEQ ID NO: 646140
cuuuccaaacuccuaaggg

SEQ ID NO: 646142 - RNA, 19 nt, Artificial Sequence
  Description of Artificial Sequence: Synthetic oligonucleotide
  Sense strand starting at position 3266 of SEQ ID NO: 585516
cugagagaaggcuguauaa

SEQ ID NO: 646143 - RNA, 19 nt, Artificial Sequence
  Description of Artificial Sequence: Synthetic oligonucleotide
  Antisense strand to SEQ ID NO: 646142
uuauacagccuucucucag

SEQ ID NO: 646144 - RNA, 19 nt, Artificial Sequence
  Description of Artificial Sequence: Synthetic oligonucleotide
  Sense strand starting at position 3277 of SEQ ID NO: 585516
cuguauaacuuucuggaag

SEQ ID NO: 646145 - RNA, 19 nt, Artificial Sequence
  Description of Artificial Sequence: Synthetic oligonucleotide
  Antisense strand to SEQ ID NO: 646144
cuuccagaaaguuauacag

SEQ ID NO: 646146 - RNA, 19 nt, Artificial Sequence
  Description of Artificial Sequence: Synthetic oligonucleotide
  Sense strand starting at position 3441 of SEQ ID NO: 585516
gcacgaauuccagagcaag

SEQ ID NO: 646147 - RNA, 19 nt, Artificial Sequence
  Description of Artificial Sequence: Synthetic oligonucleotide
  Antisense strand to SEQ ID NO: 646146
cuugcucuggaauucgugc

SEQ ID NO: 646148 - RNA, 19 nt, Artificial Sequence
  Description of Artificial Sequence: Synthetic oligonucleotide
  Sense strand starting at position 3529 of SEQ ID NO: 585516
guguguaagggugacucaa

SEQ ID NO: 646149 - RNA, 19 nt, Artificial Sequence
  Description of Artificial Sequence: Synthetic oligonucleotide
  Antisense strand to SEQ ID NO: 646148
uugagucacccuuacacac

SEQ ID NO: 646150 - RNA, 19 nt, Artificial Sequence
  Description of Artificial Sequence: Synthetic oligonucleotide
  Sense strand starting at position 3531 of SEQ ID NO: 585516
guguaagggugacucaaca

SEQ ID NO: 646151 - RNA, 19 nt, Artificial Sequence
  Description of Artificial Sequence: Synthetic oligonucleotide
  Antisense strand to SEQ ID NO: 646150
uguugagucacccuuacac

SEQ ID NO: 646152 - RNA, 19 nt, Artificial Sequence
  Description of Artificial Sequence: Synthetic oligonucleotide
  Sense strand starting at position 3607 of SEQ ID NO: 585516
uggugaaacuuugugauga

SEQ ID NO: 646153 - RNA, 19 nt, Artificial Sequence
  Description of Artificial Sequence: Synthetic oligonucleotide
  Antisense strand to SEQ ID NO: 646152
ucaucacaaaguuucacca

SEQ ID NO: 646154 - RNA, 19 nt, Artificial Sequence
  Description of Artificial Sequence: Synthetic oligonucleotide
  Sense strand starting at position 3612 of SEQ ID NO: 585516
aaacuuugugaugauaugu

SEQ ID NO: 646155 - RNA, 19 nt, Artificial Sequence
  Description of Artificial Sequence: Synthetic oligonucleotide
  Antisense strand to SEQ ID NO: 646154
acauaucaucacaaaguuu

SEQ ID NO: 646156 - RNA, 19 nt, Artificial Sequence
  Description of Artificial Sequence: Synthetic oligonucleotide
  Sense strand starting at position 3620 of SEQ ID NO: 585516
ugaugauauguaggagagu

SEQ ID NO: 646157 - RNA, 19 nt, Artificial Sequence
  Description of Artificial Sequence: Synthetic oligonucleotide
  Antisense strand to SEQ ID NO: 646156
acucuccuacauaucauca

SEQ ID NO: 646158 - RNA, 19 nt, Artificial Sequence
  Description of Artificial Sequence: Synthetic oligonucleotide
  Sense strand starting at position 3685 of SEQ ID NO: 585516
gucuguguaaaguauaaca

SEQ ID NO: 646159 - RNA, 19 nt, Artificial Sequence
  Description of Artificial Sequence: Synthetic oligonucleotide
  Antisense strand to SEQ ID NO: 646158
uguuauacuuuacacagac

SEQ ID NO: 646160 - RNA, 19 nt, Artificial Sequence
  Description of Artificial Sequence: Synthetic oligonucleotide
  Sense strand starting at position 3696 of SEQ ID NO: 585516
guauaacaucuauguggag

SEQ ID NO: 646161 - RNA, 19 nt, Artificial Sequence
  Description of Artificial Sequence: Synthetic oligonucleotide
  Antisense strand to SEQ ID NO: 646160
cuccacauagauguuauac

SEQ ID NO: 646162 - RNA, 19 nt, Artificial Sequence
  Description of Artificial Sequence: Synthetic oligonucleotide
  Sense strand starting at position 3703 of SEQ ID NO: 585516
aucuauguggaguaugauu

SEQ ID NO: 646163 - RNA, 19 nt, Artificial Sequence
  Description of Artificial Sequence: Synthetic oligonucleotide
  Antisense strand to SEQ ID NO: 646162
aaucauacuccacauagau

SEQ ID NO: 646164 - RNA, 19 nt, Artificial Sequence
  Description of Artificial Sequence: Synthetic oligonucleotide
  Sense strand starting at position 3705 of SEQ ID NO: 585516
cuauguggaguaugauuaa

SEQ ID NO: 646165 - RNA, 19 nt, Artificial Sequence
  Description of Artificial Sequence: Synthetic oligonucleotide
  Antisense strand to SEQ ID NO: 646164
uuaaucauacuccacauag

SEQ ID NO: 646166 - RNA, 19 nt, Artificial Sequence
  Description of Artificial Sequence: Synthetic oligonucleotide
  Sense strand starting at position 3708 of SEQ ID NO: 585516
uguggaguaugauuaacau

SEQ ID NO: 646167 - RNA, 19 nt, Artificial Sequence
  Description of Artificial Sequence: Synthetic oligonucleotide
  Antisense strand to SEQ ID NO: 646166
auguuaaucauacuccaca

SEQ ID NO: 646168 - RNA, 19 nt, Artificial Sequence
  Description of Artificial Sequence: Synthetic oligonucleotide
  Sense strand starting at position 42 of SEQ ID NO: 585517
aagaauacguagcuaugaa

SEQ ID NO: 646169 - RNA, 19 nt, Artificial Sequence
  Description of Artificial Sequence: Synthetic oligonucleotide
  Antisense strand to SEQ ID NO: 646168
uucauagcuacguauucuu

SEQ ID NO: 646170 - RNA, 19 nt, Artificial Sequence
  Description of Artificial Sequence: Synthetic oligonucleotide
  Sense strand starting at position 43 of SEQ ID NO: 585517
agaauacguagcuaugaag

SEQ ID NO: 646171 - RNA, 19 nt, Artificial Sequence
  Description of Artificial Sequence: Synthetic oligonucleotide
  Antisense strand to SEQ ID NO: 646170
cuucauagcuacguauucu

SEQ ID NO: 646172 - RNA, 19 nt, Artificial Sequence
  Description of Artificial Sequence: Synthetic oligonucleotide
  Sense strand starting at position 145 of SEQ ID NO: 585517
agcaaacaaucugucaaga

SEQ ID NO: 646173 - RNA, 19 nt, Artificial Sequence
  Description of Artificial Sequence: Synthetic oligonucleotide
  Antisense strand to SEQ ID NO: 646172
ucuugacagauuguuugcu

SEQ ID NO: 646174 - RNA, 19 nt, Artificial Sequence
  Description of Artificial Sequence: Synthetic oligonucleotide
  Sense strand starting at position 182 of SEQ ID NO: 585517
cuaaacagaugugaaauuu

SEQ ID NO: 646175 - RNA, 19 nt, Artificial Sequence
  Description of Artificial Sequence: Synthetic oligonucleotide
  Antisense strand to SEQ ID NO: 646174
aaauuucacaucuguuuag

SEQ ID NO: 646176 - RNA, 19 nt, Artificial Sequence
  Description of Artificial Sequence: Synthetic oligonucleotide
  Sense strand starting at position 238 of SEQ ID NO: 585517
agacaaugguagcucagua

SEQ ID NO: 646177 - RNA, 19 nt, Artificial Sequence
  Description of Artificial Sequence: Synthetic oligonucleotide
  Antisense strand to SEQ ID NO: 646176
uacugagcuaccauugucu

SEQ ID NO: 646178 - RNA, 19 nt, Artificial Sequence
  Description of Artificial Sequence: Synthetic oligonucleotide
  Sense strand starting at position 243 of SEQ ID NO: 585517
augguagcucaguaaugua

SEQ ID NO: 646179 - RNA, 19 nt, Artificial Sequence
  Description of Artificial Sequence: Synthetic oligonucleotide
  Antisense strand to SEQ ID NO: 646178
uacauuacugagcuaccau

SEQ ID NO: 646180 - RNA, 19 nt, Artificial Sequence
  Description of Artificial Sequence: Synthetic oligonucleotide
  Sense strand starting at position 308 of SEQ ID NO: 585517
agguccugaugaccaaaua

SEQ ID NO: 646181 - RNA, 19 nt, Artificial Sequence
  Description of Artificial Sequence: Synthetic oligonucleotide
  Antisense strand to SEQ ID NO: 646180
uauuuggucaucaggaccu

SEQ ID NO: 646182 - RNA, 19 nt, Artificial Sequence
  Description of Artificial Sequence: Synthetic oligonucleotide
  Sense strand starting at position 830 of SEQ ID NO: 585517
ccugauccuuuaucagaug

SEQ ID NO: 646183 - RNA, 19 nt, Artificial Sequence
  Description of Artificial Sequence: Synthetic oligonucleotide
  Antisense strand to SEQ ID NO: 646182
caucugauaaaggaucagg

SEQ ID NO: 646184 - RNA, 19 nt, Artificial Sequence
  Description of Artificial Sequence: Synthetic oligonucleotide
  Sense strand starting at position 927 of SEQ ID NO: 585517
aggguaaauaauugguuua

SEQ ID NO: 646185 - RNA, 19 nt, Artificial Sequence
  Description of Artificial Sequence: Synthetic oligonucleotide
  Antisense strand to SEQ ID NO: 646184
uaaaccaauuauuuacccu

SEQ ID NO: 646186 - RNA, 19 nt, Artificial Sequence
  Description of Artificial Sequence: Synthetic oligonucleotide
  Sense strand starting at position 928 of SEQ ID NO: 585517
ggguaaauaauugguuuaa

SEQ ID NO: 646187 - RNA, 19 nt, Artificial Sequence
  Description of Artificial Sequence: Synthetic oligonucleotide
  Antisense strand to SEQ ID NO: 646186
uuaaaccaauuauuuaccc

SEQ ID NO: 646188 - RNA, 19 nt, Artificial Sequence
  Description of Artificial Sequence: Synthetic oligonucleotide
  Sense strand starting at position 930 of SEQ ID NO: 585517
guaaauaauugguuuaagg

SEQ ID NO: 646189 - RNA, 19 nt, Artificial Sequence
  Description of Artificial Sequence: Synthetic oligonucleotide
  Antisense strand to SEQ ID NO: 646188
ccuuaaaccaauuauuuac

SEQ ID NO: 646190 - RNA, 19 nt, Artificial Sequence
  Description of Artificial Sequence: Synthetic oligonucleotide
  Sense strand starting at position 1468 of SEQ ID NO: 585517
gagaguuauuuggagguuu

SEQ ID NO: 646191 - RNA, 19 nt, Artificial Sequence
  Description of Artificial Sequence: Synthetic oligonucleotide
  Antisense strand to SEQ ID NO: 646190
aaaccuccaaauaacucuc

SEQ ID NO: 646192 - RNA, 19 nt, Artificial Sequence
  Description of Artificial Sequence: Synthetic oligonucleotide
  Sense strand starting at position 1522 of SEQ ID NO: 585517
ugguucagugauggacgaa

SEQ ID NO: 646193 - RNA, 19 nt, Artificial Sequence
  Description of Artificial Sequence: Synthetic oligonucleotide
  Antisense strand to SEQ ID NO: 646192
uucguccaucacugaacca

SEQ ID NO: 646194 - RNA, 19 nt, Artificial Sequence
  Description of Artificial Sequence: Synthetic oligonucleotide
  Sense strand starting at position 1523 of SEQ ID NO: 585517
gguucagugauggacgaaa

SEQ ID NO: 646195 - RNA, 19 nt, Artificial Sequence
  Description of Artificial Sequence: Synthetic oligonucleotide
  Antisense strand to SEQ ID NO: 646194
uuucguccaucacugaacc

SEQ ID NO: 646196 - RNA, 19 nt, Artificial Sequence
  Description of Artificial Sequence: Synthetic oligonucleotide
  Sense strand starting at position 1805 of SEQ ID NO: 585517
aagguagagaguuaguuua

SEQ ID NO: 646197 - RNA, 19 nt, Artificial Sequence
  Description of Artificial Sequence: Synthetic oligonucleotide
  Antisense strand to SEQ ID NO: 646196
uaaacuaacucucuaccuu

SEQ ID NO: 646198 - RNA, 19 nt, Artificial Sequence
  Description of Artificial Sequence: Synthetic oligonucleotide
  Sense strand starting at position 1807 of SEQ ID NO: 585517
gguagagaguuaguuuaga

SEQ ID NO: 646199 - RNA, 19 nt, Artificial Sequence
  Description of Artificial Sequence: Synthetic oligonucleotide
  Antisense strand to SEQ ID NO: 646198
ucuaaacuaacucucuacc

SEQ ID NO: 646200 - RNA, 19 nt, Artificial Sequence
  Description of Artificial Sequence: Synthetic oligonucleotide
  Sense strand starting at position 1984 of SEQ ID NO: 585517
gaccuuuccgacugggaug

SEQ ID NO: 646201 - RNA, 19 nt, Artificial Sequence
  Description of Artificial Sequence: Synthetic oligonucleotide
  Antisense strand to SEQ ID NO: 646200
caucccagucggaaagguc

SEQ ID NO: 646202 - RNA, 19 nt, Artificial Sequence
  Description of Artificial Sequence: Synthetic oligonucleotide
  Sense strand starting at position 2066 of SEQ ID NO: 585517
gguacugccugagcaagaa

SEQ ID NO: 646203 - RNA, 19 nt, Artificial Sequence
  Description of Artificial Sequence: Synthetic oligonucleotide
  Antisense strand to SEQ ID NO: 646202
uucuugcucaggcaguacc

SEQ ID NO: 646204 - RNA, 19 nt, Artificial Sequence
  Description of Artificial Sequence: Synthetic oligonucleotide
  Sense strand starting at position 2371 of SEQ ID NO: 585517
aagagugagucuccucuuu

SEQ ID NO: 646205 - RNA, 19 nt, Artificial Sequence
  Description of Artificial Sequence: Synthetic oligonucleotide
  Antisense strand to SEQ ID NO: 646204
aaagaggagacucacucuu

SEQ ID NO: 646206 - RNA, 19 nt, Artificial Sequence
  Description of Artificial Sequence: Synthetic oligonucleotide
  Sense strand starting at position 2393 of SEQ ID NO: 585517
cccuuaggaguuuggaaag

SEQ ID NO: 646207 - RNA, 19 nt, Artificial Sequence
  Description of Artificial Sequence: Synthetic oligonucleotide
  Antisense strand to SEQ ID NO: 646206
cuuuccaaacuccuaaggg

SEQ ID NO: 646208 - RNA, 19 nt, Artificial Sequence
  Description of Artificial Sequence: Synthetic oligonucleotide
  Sense strand starting at position 2541 of SEQ ID NO: 585517
cugagagaaggcuguauaa

SEQ ID NO: 646209 - RNA, 19 nt, Artificial Sequence
  Description of Artificial Sequence: Synthetic oligonucleotide
  Antisense strand to SEQ ID NO: 646208
uuauacagccuucucucag

SEQ ID NO: 646210 - RNA, 19 nt, Artificial Sequence
  Description of Artificial Sequence: Synthetic oligonucleotide
  Sense strand starting at position 2552 of SEQ ID NO: 585517
cuguauaacuuucuggaag

SEQ ID NO: 646211 - RNA, 19 nt, Artificial Sequence
  Description of Artificial Sequence: Synthetic oligonucleotide
  Antisense strand to SEQ ID NO: 646210
cuuccagaaaguuauacag

SEQ ID NO: 646212 - RNA, 19 nt, Artificial Sequence
  Description of Artificial Sequence: Synthetic oligonucleotide
  Sense strand starting at position 2716 of SEQ ID NO: 585517
gcacgaauuccagagcaag

SEQ ID NO: 646213 - RNA, 19 nt, Artificial Sequence
  Description of Artificial Sequence: Synthetic oligonucleotide
  Antisense strand to SEQ ID NO: 646212
cuugcucuggaauucgugc

SEQ ID NO: 646214 - RNA, 19 nt, Artificial Sequence
  Description of Artificial Sequence: Synthetic oligonucleotide
  Sense strand starting at position 2804 of SEQ ID NO: 585517
guguguaagggugacucaa

SEQ ID NO: 646215 - RNA, 19 nt, Artificial Sequence
  Description of Artificial Sequence: Synthetic oligonucleotide
  Antisense strand to SEQ ID NO: 646214
uugagucacccuuacacac

SEQ ID NO: 646216 - RNA, 19 nt, Artificial Sequence
  Description of Artificial Sequence: Synthetic oligonucleotide
  Sense strand starting at position 2806 of SEQ ID NO: 585517
guguaagggugacucaaca

SEQ ID NO: 646217 - RNA, 19 nt, Artificial Sequence
  Description of Artificial Sequence: Synthetic oligonucleotide
  Antisense strand to SEQ ID NO: 646216
uguugagucacccuuacac

SEQ ID NO: 646218 - RNA, 19 nt, Artificial Sequence
  Description of Artificial Sequence: Synthetic oligonucleotide
  Sense strand starting at position 2882 of SEQ ID NO: 585517
uggugaaacuuugugauga

SEQ ID NO: 646219 - RNA, 19 nt, Artificial Sequence
  Description of Artificial Sequence: Synthetic oligonucleotide
  Antisense strand to SEQ ID NO: 646218
ucaucacaaaguuucacca

SEQ ID NO: 646220 - RNA, 19 nt, Artificial Sequence
  Description of Artificial Sequence: Synthetic oligonucleotide
  Sense strand starting at position 2887 of SEQ ID NO: 585517
aaacuuugugaugauaugu

SEQ ID NO: 646221 - RNA, 19 nt, Artificial Sequence
  Description of Artificial Sequence: Synthetic oligonucleotide
  Antisense strand to SEQ ID NO: 646220
acauaucaucacaaaguuu

SEQ ID NO: 646222 - RNA, 19 nt, Artificial Sequence
  Description of Artificial Sequence: Synthetic oligonucleotide
  Sense strand starting at position 2895 of SEQ ID NO: 585517
ugaugauauguaggagagu

SEQ ID NO: 646223 - RNA, 19 nt, Artificial Sequence
  Description of Artificial Sequence: Synthetic oligonucleotide
  Antisense strand to SEQ ID NO: 646222
acucuccuacauaucauca

SEQ ID NO: 646224 - RNA, 19 nt, Artificial Sequence
  Description of Artificial Sequence: Synthetic oligonucleotide
  Sense strand starting at position 2960 of SEQ ID NO: 585517
gucuguguaaaguauaaca

SEQ ID NO: 646225 - RNA, 19 nt, Artificial Sequence
  Description of Artificial Sequence: Synthetic oligonucleotide
  Antisense strand to SEQ ID NO: 646224
uguuauacuuuacacagac

SEQ ID NO: 646226 - RNA, 19 nt, Artificial Sequence
  Description of Artificial Sequence: Synthetic oligonucleotide
  Sense strand starting at position 2971 of SEQ ID NO: 585517
guauaacaucuauguggag

SEQ ID NO: 646227 - RNA, 19 nt, Artificial Sequence
  Description of Artificial Sequence: Synthetic oligonucleotide
  Antisense strand to SEQ ID NO: 646226
cuccacauagauguuauac

SEQ ID NO: 646228 - RNA, 19 nt, Artificial Sequence
  Description of Artificial Sequence: Synthetic oligonucleotide
  Sense strand starting at position 2978 of SEQ ID NO: 585517
aucuauguggaguaugauu

SEQ ID NO: 646229 - RNA, 19 nt, Artificial Sequence
  Description of Artificial Sequence: Synthetic oligonucleotide
  Antisense strand to SEQ ID NO: 646228
aaucauacuccacauagau

SEQ ID NO: 646230 - RNA, 19 nt, Artificial Sequence
  Description of Artificial Sequence: Synthetic oligonucleotide
  Sense strand starting at position 2980 of SEQ ID NO: 585517
cuauguggaguaugauuaa

SEQ ID NO: 646231 - RNA, 19 nt, Artificial Sequence
  Description of Artificial Sequence: Synthetic oligonucleotide
  Antisense strand to SEQ ID NO: 646230
uuaaucauacuccacauag

SEQ ID NO: 646232 - RNA, 19 nt, Artificial Sequence
  Description of Artificial Sequence: Synthetic oligonucleotide
  Sense strand starting at position 2983 of SEQ ID NO: 585517
uguggaguaugauuaacau

SEQ ID NO: 646233 - RNA, 19 nt, Artificial Sequence
  Description of Artificial Sequence: Synthetic oligonucleotide
  Antisense strand to SEQ ID NO: 646232
auguuaaucauacuccaca

SEQ ID NO: 646234 - RNA, 19 nt, Artificial Sequence
  Description of Artificial Sequence: Synthetic oligonucleotide
  Sense strand starting at position 2987 of SEQ ID NO: 585517
gaguaugauuaacauuugu

SEQ ID NO: 646235 - RNA, 19 nt, Artificial Sequence
  Description of Artificial Sequence: Synthetic oligonucleotide
  Antisense strand to SEQ ID NO: 646234
acaaauguuaaucauacuc

SEQ ID NO: 646236 - RNA, 19 nt, Artificial Sequence
  Description of Artificial Sequence: Synthetic oligonucleotide
  Sense strand starting at position 3545 of SEQ ID NO: 585517
cuagaaauccugggaggca

SEQ ID NO: 646237 - RNA, 19 nt, Artificial Sequence
  Description of Artificial Sequence: Synthetic oligonucleotide
  Antisense strand to SEQ ID NO: 646236
ugccucccaggauuucuag

SEQ ID NO: 646238 - RNA, 19 nt, Artificial Sequence
  Description of Artificial Sequence: Synthetic oligonucleotide
  Sense strand starting at position 3682 of SEQ ID NO: 585517
cugugaaauuuguaauaug

SEQ ID NO: 646239 - RNA, 19 nt, Artificial Sequence
  Description of Artificial Sequence: Synthetic oligonucleotide
  Antisense strand to SEQ ID NO: 646238
cauauuacaaauuucacag

SEQ ID NO: 646240 - RNA, 19 nt, Artificial Sequence
  Description of Artificial Sequence: Synthetic oligonucleotide
  Sense strand starting at position 3791 of SEQ ID NO: 585517
aggacaagcuacuuaacuu

SEQ ID NO: 646241 - RNA, 19 nt, Artificial Sequence
  Description of Artificial Sequence: Synthetic oligonucleotide
  Antisense strand to SEQ ID NO: 646240
aaguuaaguagcuuguccu

SEQ ID NO: 646242 - RNA, 19 nt, Artificial Sequence
  Description of Artificial Sequence: Synthetic oligonucleotide
  Sense strand starting at position 3819 of SEQ ID NO: 585517
gauguccuccucugugaaa

SEQ ID NO: 646243 - RNA, 19 nt, Artificial Sequence
  Description of Artificial Sequence: Synthetic oligonucleotide
  Antisense strand to SEQ ID NO: 646242
uuucacagaggaggacauc

SEQ ID NO: 646244 - RNA, 19 nt, Artificial Sequence
  Description of Artificial Sequence: Synthetic oligonucleotide
  Sense strand starting at position 3884 of SEQ ID NO: 585517
aggaaucauucuguaaagu

SEQ ID NO: 646245 - RNA, 19 nt, Artificial Sequence
  Description of Artificial Sequence: Synthetic oligonucleotide
  Antisense strand to SEQ ID NO: 646244
acuuuacagaaugauuccu

SEQ ID NO: 646246 - RNA, 19 nt, Artificial Sequence
  Description of Artificial Sequence: Synthetic oligonucleotide
  Sense strand starting at position 3892 of SEQ ID NO: 585517
uucuguaaagucuagcaca

SEQ ID NO: 646247 - RNA, 19 nt, Artificial Sequence
  Description of Artificial Sequence: Synthetic oligonucleotide
  Antisense strand to SEQ ID NO: 646246
ugugcuagacuuuacagaa

SEQ ID NO: 646248 - RNA, 19 nt, Artificial Sequence
  Description of Artificial Sequence: Synthetic oligonucleotide
  Sense strand starting at position 39 of SEQ ID NO: 585518
cuuuaugugccagggaaug

SEQ ID NO: 646249 - RNA, 19 nt, Artificial Sequence
  Description of Artificial Sequence: Synthetic oligonucleotide
  Antisense strand to SEQ ID NO: 646248
cauucccuggcacauaaag

SEQ ID NO: 646250 - RNA, 19 nt, Artificial Sequence
  Description of Artificial Sequence: Synthetic oligonucleotide
  Sense strand starting at position 348 of SEQ ID NO: 585518
ugccuccaacaguguaauu

SEQ ID NO: 646251 - RNA, 19 nt, Artificial Sequence
  Description of Artificial Sequence: Synthetic oligonucleotide
  Antisense strand to SEQ ID NO: 646250
aauuacacuguuggaggca

SEQ ID NO: 646252 - RNA, 19 nt, Artificial Sequence
  Description of Artificial Sequence: Synthetic oligonucleotide
  Sense strand starting at position 361 of SEQ ID NO: 585518
guaauuugauuccucugca

SEQ ID NO: 646253 - RNA, 19 nt, Artificial Sequence
  Description of Artificial Sequence: Synthetic oligonucleotide
  Antisense strand to SEQ ID NO: 646252
ugcagaggaaucaaauuac

SEQ ID NO: 646254 - RNA, 19 nt, Artificial Sequence
  Description of Artificial Sequence: Synthetic oligonucleotide
  Sense strand starting at position 365 of SEQ ID NO: 585518
uuugauuccucugcacaug

SEQ ID NO: 646255 - RNA, 19 nt, Artificial Sequence
  Description of Artificial Sequence: Synthetic oligonucleotide
  Antisense strand to SEQ ID NO: 646254
caugugcagaggaaucaaa

SEQ ID NO: 646256 - RNA, 19 nt, Artificial Sequence
  Description of Artificial Sequence: Synthetic oligonucleotide
  Sense strand starting at position 421 of SEQ ID NO: 585518
guggaagaauuaccaucau

SEQ ID NO: 646257 - RNA, 19 nt, Artificial Sequence
  Description of Artificial Sequence: Synthetic oligonucleotide
  Antisense strand to SEQ ID NO: 646256
augaugguaauucuuccac

SEQ ID NO: 646258 - RNA, 19 nt, Artificial Sequence
  Description of Artificial Sequence: Synthetic oligonucleotide
  Sense strand starting at position 536 of SEQ ID NO: 585518
agcacuaaccguuagguau

SEQ ID NO: 646259 - RNA, 19 nt, Artificial Sequence
  Description of Artificial Sequence: Synthetic oligonucleotide
  Antisense strand to SEQ ID NO: 646258
auaccuaacgguuagugcu

SEQ ID NO: 646260 - RNA, 19 nt, Artificial Sequence
  Description of Artificial Sequence: Synthetic oligonucleotide
  Sense strand starting at position 631 of SEQ ID NO: 585518
cacggauuauaccuggcau

SEQ ID NO: 646261 - RNA, 19 nt, Artificial Sequence
  Description of Artificial Sequence: Synthetic oligonucleotide
  Antisense strand to SEQ ID NO: 646260
augccagguauaauccgug

SEQ ID NO: 646262 - RNA, 19 nt, Artificial Sequence
  Description of Artificial Sequence: Synthetic oligonucleotide
  Sense strand starting at position 632 of SEQ ID NO: 585518
acggauuauaccuggcaua

SEQ ID NO: 646263 - RNA, 19 nt, Artificial Sequence
  Description of Artificial Sequence: Synthetic oligonucleotide
  Antisense strand to SEQ ID NO: 646262
uaugccagguauaauccgu

SEQ ID NO: 646264 - RNA, 19 nt, Artificial Sequence
  Description of Artificial Sequence: Synthetic oligonucleotide
  Sense strand starting at position 633 of SEQ ID NO: 585518
cggauuauaccuggcauau

SEQ ID NO: 646265 - RNA, 19 nt, Artificial Sequence
  Description of Artificial Sequence: Synthetic oligonucleotide
  Antisense strand to SEQ ID NO: 646264
auaugccagguauaauccg

SEQ ID NO: 646266 - RNA, 19 nt, Artificial Sequence
  Description of Artificial Sequence: Synthetic oligonucleotide
  Sense strand starting at position 650 of SEQ ID NO: 585518
auacuaacugcuggauaau

SEQ ID NO: 646267 - RNA, 19 nt, Artificial Sequence
  Description of Artificial Sequence: Synthetic oligonucleotide
  Antisense strand to SEQ ID NO: 646266
auuauccagcaguuaguau

SEQ ID NO: 646268 - RNA, 19 nt, Artificial Sequence
  Description of Artificial Sequence: Synthetic oligonucleotide
  Sense strand starting at position 660 of SEQ ID NO: 585518
cuggauaauugguugccaa

SEQ ID NO: 646269 - RNA, 19 nt, Artificial Sequence
  Description of Artificial Sequence: Synthetic oligonucleotide
  Antisense strand to SEQ ID NO: 646268
uuggcaaccaauuauccag

SEQ ID NO: 646270 - RNA, 19 nt, Artificial Sequence
  Description of Artificial Sequence: Synthetic oligonucleotide
  Sense strand starting at position 661 of SEQ ID NO: 585518
uggauaauugguugccaac

SEQ ID NO: 646271 - RNA, 19 nt, Artificial Sequence
  Description of Artificial Sequence: Synthetic oligonucleotide
  Antisense strand to SEQ ID NO: 646270
guuggcaaccaauuaucca

SEQ ID NO: 646272 - RNA, 19 nt, Artificial Sequence
  Description of Artificial Sequence: Synthetic oligonucleotide
  Sense strand starting at position 722 of SEQ ID NO: 585518
uucuaaacaucugcugaga

SEQ ID NO: 646273 - RNA, 19 nt, Artificial Sequence
  Description of Artificial Sequence: Synthetic oligonucleotide
  Antisense strand to SEQ ID NO: 646272
ucucagcagauguuuagaa

SEQ ID NO: 646274 - RNA, 19 nt, Artificial Sequence
  Description of Artificial Sequence: Synthetic oligonucleotide
  Sense strand starting at position 753 of SEQ ID NO: 585518
aggacuugaaaguguauca

SEQ ID NO: 646275 - RNA, 19 nt, Artificial Sequence
  Description of Artificial Sequence: Synthetic oligonucleotide
  Antisense strand to SEQ ID NO: 646274
ugauacacuuucaaguccu

SEQ ID NO: 646276 - RNA, 19 nt, Artificial Sequence
  Description of Artificial Sequence: Synthetic oligonucleotide
  Sense strand starting at position 916 of SEQ ID NO: 585518
ggauaagauuaguaauaug

SEQ ID NO: 646277 - RNA, 19 nt, Artificial Sequence
  Description of Artificial Sequence: Synthetic oligonucleotide
  Antisense strand to SEQ ID NO: 646276
cauauuacuaaucuuaucc

SEQ ID NO: 646278 - RNA, 19 nt, Artificial Sequence
  Description of Artificial Sequence: Synthetic oligonucleotide
  Sense strand starting at position 972 of SEQ ID NO: 585518
ggguaucaaucuucuaaga

SEQ ID NO: 646279 - RNA, 19 nt, Artificial Sequence
  Description of Artificial Sequence: Synthetic oligonucleotide
  Antisense strand to SEQ ID NO: 646278
ucuuagaagauugauaccc

SEQ ID NO: 646280 - RNA, 19 nt, Artificial Sequence
  Description of Artificial Sequence: Synthetic oligonucleotide
  Sense strand starting at position 980 of SEQ ID NO: 585518
aucuucuaagagugagguu

SEQ ID NO: 646281 - RNA, 19 nt, Artificial Sequence
  Description of Artificial Sequence: Synthetic oligonucleotide
  Antisense strand to SEQ ID NO: 646280
aaccucacucuuagaagau

SEQ ID NO: 646282 - RNA, 19 nt, Artificial Sequence
  Description of Artificial Sequence: Synthetic oligonucleotide
  Sense strand starting at position 1005 of SEQ ID NO: 585518
accgaauggacuggucuua

SEQ ID NO: 646283 - RNA, 19 nt, Artificial Sequence
  Description of Artificial Sequence: Synthetic oligonucleotide
  Antisense strand to SEQ ID NO: 646282
uaagaccaguccauucggu

SEQ ID NO: 646284 - RNA, 19 nt, Artificial Sequence
  Description of Artificial Sequence: Synthetic oligonucleotide
  Sense strand starting at position 1017 of SEQ ID NO: 585518
ggucuuacagcccggacaa

SEQ ID NO: 646285 - RNA, 19 nt, Artificial Sequence
  Description of Artificial Sequence: Synthetic oligonucleotide
  Antisense strand to SEQ ID NO: 646284
uuguccgggcuguaagacc

SEQ ID NO: 646286 - RNA, 19 nt, Artificial Sequence
  Description of Artificial Sequence: Synthetic oligonucleotide
  Sense strand starting at position 1859 of SEQ ID NO: 585518
gcuggauauuggcuccuca

SEQ ID NO: 646287 - RNA, 19 nt, Artificial Sequence
  Description of Artificial Sequence: Synthetic oligonucleotide
  Antisense strand to SEQ ID NO: 646286
ugaggagccaauauccagc

SEQ ID NO: 646288 - RNA, 19 nt, Artificial Sequence
  Description of Artificial Sequence: Synthetic oligonucleotide
  Sense strand starting at position 2416 of SEQ ID NO: 585518
gcggccuucgccaaagagu

SEQ ID NO: 646289 - RNA, 19 nt, Artificial Sequence
  Description of Artificial Sequence: Synthetic oligonucleotide
  Antisense strand to SEQ ID NO: 646288
acucuuuggcgaaggccgc

SEQ ID NO: 646290 - RNA, 19 nt, Artificial Sequence
  Description of Artificial Sequence: Synthetic oligonucleotide
  Sense strand starting at position 2498 of SEQ ID NO: 585518
cuuagaugcgugcaauuaa

SEQ ID NO: 646291 - RNA, 19 nt, Artificial Sequence
  Description of Artificial Sequence: Synthetic oligonucleotide
  Antisense strand to SEQ ID NO: 646290
uuaauugcacgcaucuaag

SEQ ID NO: 646292 - RNA, 19 nt, Artificial Sequence
  Description of Artificial Sequence: Synthetic oligonucleotide
  Sense strand starting at position 2525 of SEQ ID NO: 585518
gcgggauuggcuccgcguu

SEQ ID NO: 646293 - RNA, 19 nt, Artificial Sequence
  Description of Artificial Sequence: Synthetic oligonucleotide
  Antisense strand to SEQ ID NO: 646292
aacgcggagccaaucccgc

SEQ ID NO: 646294 - RNA, 19 nt, Artificial Sequence
  Description of Artificial Sequence: Synthetic oligonucleotide
  Sense strand starting at position 2622 of SEQ ID NO: 585518
gacuccuuuccaggugaag

SEQ ID NO: 646295 - RNA, 19 nt, Artificial Sequence
  Description of Artificial Sequence: Synthetic oligonucleotide
  Antisense strand to SEQ ID NO: 646294
cuucaccuggaaaggaguc

SEQ ID NO: 646296 - RNA, 19 nt, Artificial Sequence
  Description of Artificial Sequence: Synthetic oligonucleotide
  Sense strand starting at position 2803 of SEQ ID NO: 585518
gggugaacguuccuugaga

SEQ ID NO: 646297 - RNA, 19 nt, Artificial Sequence
  Description of Artificial Sequence: Synthetic oligonucleotide
  Antisense strand to SEQ ID NO: 646296
ucucaaggaacguucaccc

SEQ ID NO: 646298 - RNA, 19 nt, Artificial Sequence
  Description of Artificial Sequence: Synthetic oligonucleotide
  Sense strand starting at position 2804 of SEQ ID NO: 585518
ggugaacguuccuugagag

SEQ ID NO: 646299 - RNA, 19 nt, Artificial Sequence
  Description of Artificial Sequence: Synthetic oligonucleotide
  Antisense strand to SEQ ID NO: 646298
cucucaaggaacguucacc

SEQ ID NO: 646300 - RNA, 19 nt, Artificial Sequence
  Description of Artificial Sequence: Synthetic oligonucleotide
  Sense strand starting at position 2805 of SEQ ID NO: 585518
gugaacguuccuugagagg

SEQ ID NO: 646301 - RNA, 19 nt, Artificial Sequence
  Description of Artificial Sequence: Synthetic oligonucleotide
  Antisense strand to SEQ ID NO: 646300
ccucucaaggaacguucac

SEQ ID NO: 646302 - RNA, 19 nt, Artificial Sequence
  Description of Artificial Sequence: Synthetic oligonucleotide
  Sense strand starting at position 2999 of SEQ ID NO: 585518
cggaguggcccuggagaaa

SEQ ID NO: 646303 - RNA, 19 nt, Artificial Sequence
  Description of Artificial Sequence: Synthetic oligonucleotide
  Antisense strand to SEQ ID NO: 646302
uuucuccagggccacuccg

SEQ ID NO: 646304 - RNA, 19 nt, Artificial Sequence
  Description of Artificial Sequence: Synthetic oligonucleotide
  Sense strand starting at position 3027 of SEQ ID NO: 585518
gugucuuagggaugggcuu

SEQ ID NO: 646305 - RNA, 19 nt, Artificial Sequence
  Description of Artificial Sequence: Synthetic oligonucleotide
  Antisense strand to SEQ ID NO: 646304
aagcccaucccuaagacac

SEQ ID NO: 646306 - RNA, 19 nt, Artificial Sequence
  Description of Artificial Sequence: Synthetic oligonucleotide
  Sense strand starting at position 3210 of SEQ ID NO: 585518
ccuauuaagugguuguaca

SEQ ID NO: 646307 - RNA, 19 nt, Artificial Sequence
  Description of Artificial Sequence: Synthetic oligonucleotide
  Antisense strand to SEQ ID NO: 646306
uguacaaccacuuaauagg

SEQ ID NO: 646308 - RNA, 19 nt, Artificial Sequence
  Description of Artificial Sequence: Synthetic oligonucleotide
  Sense strand starting at position 3217 of SEQ ID NO: 585518
agugguuguacagggcaau

SEQ ID NO: 646309 - RNA, 19 nt, Artificial Sequence
  Description of Artificial Sequence: Synthetic oligonucleotide
  Antisense strand to SEQ ID NO: 646308
auugcccuguacaaccacu

SEQ ID NO: 646310 - RNA, 19 nt, Artificial Sequence
  Description of Artificial Sequence: Synthetic oligonucleotide
  Sense strand starting at position 3282 of SEQ ID NO: 585518
cccuucucauagcugaaga

SEQ ID NO: 646311 - RNA, 19 nt, Artificial Sequence
  Description of Artificial Sequence: Synthetic oligonucleotide
  Antisense strand to SEQ ID NO: 646310
ucuucagcuaugagaaggg

SEQ ID NO: 646312 - RNA, 19 nt, Artificial Sequence
  Description of Artificial Sequence: Synthetic oligonucleotide
  Sense strand starting at position 3384 of SEQ ID NO: 585518
acuauugacuuauugguga

SEQ ID NO: 646313 - RNA, 19 nt, Artificial Sequence
  Description of Artificial Sequence: Synthetic oligonucleotide
  Antisense strand to SEQ ID NO: 646312
ucaccaauaagucaauagu

SEQ ID NO: 646314 - RNA, 19 nt, Artificial Sequence
  Description of Artificial Sequence: Synthetic oligonucleotide
  Sense strand starting at position 3412 of SEQ ID NO: 585518
cguaauaauggaggucaaa

SEQ ID NO: 646315 - RNA, 19 nt, Artificial Sequence
  Description of Artificial Sequence: Synthetic oligonucleotide
  Antisense strand to SEQ ID NO: 646314
uuugaccuccauuauuacg

SEQ ID NO: 646316 - RNA, 19 nt, Artificial Sequence
  Description of Artificial Sequence: Synthetic oligonucleotide
  Sense strand starting at position 3554 of SEQ ID NO: 585518
guaauugguuuggcuuuaa

SEQ ID NO: 646317 - RNA, 19 nt, Artificial Sequence
  Description of Artificial Sequence: Synthetic oligonucleotide
  Antisense strand to SEQ ID NO: 646316
uuaaagccaaaccaauuac

SEQ ID NO: 646318 - RNA, 19 nt, Artificial Sequence
  Description of Artificial Sequence: Synthetic oligonucleotide
  Sense strand starting at position 3558 of SEQ ID NO: 585518
uugguuuggcuuuaaauca

SEQ ID NO: 646319 - RNA, 19 nt, Artificial Sequence
  Description of Artificial Sequence: Synthetic oligonucleotide
  Antisense strand to SEQ ID NO: 646318
ugauuuaaagccaaaccaa

SEQ ID NO: 646320 - RNA, 19 nt, Artificial Sequence
  Description of Artificial Sequence: Synthetic oligonucleotide
  Sense strand starting at position 3779 of SEQ ID NO: 585518
ugggauagcuguccucuuu

SEQ ID NO: 646321 - RNA, 19 nt, Artificial Sequence
  Description of Artificial Sequence: Synthetic oligonucleotide
  Antisense strand to SEQ ID NO: 646320
aaagaggacagcuauccca

SEQ ID NO: 646322 - RNA, 19 nt, Artificial Sequence
  Description of Artificial Sequence: Synthetic oligonucleotide
  Sense strand starting at position 3785 of SEQ ID NO: 585518
agcuguccucuuuaagaag

SEQ ID NO: 646323 - RNA, 19 nt, Artificial Sequence
  Description of Artificial Sequence: Synthetic oligonucleotide
  Antisense strand to SEQ ID NO: 646322
cuucuuaaagaggacagcu

SEQ ID NO: 646324 - RNA, 19 nt, Artificial Sequence
  Description of Artificial Sequence: Synthetic oligonucleotide
  Sense strand starting at position 3966 of SEQ ID NO: 585518
aagaauggccucuaguuua

SEQ ID NO: 646325 - RNA, 19 nt, Artificial Sequence
  Description of Artificial Sequence: Synthetic oligonucleotide
  Antisense strand to SEQ ID NO: 646324
uaaacuagaggccauucuu

SEQ ID NO: 646326 - RNA, 19 nt, Artificial Sequence
  Description of Artificial Sequence: Synthetic oligonucleotide
  Sense strand starting at position 3979 of SEQ ID NO: 585518
aguuuagacguuuaccaua

SEQ ID NO: 646327 - RNA, 19 nt, Artificial Sequence
  Description of Artificial Sequence: Synthetic oligonucleotide
  Antisense strand to SEQ ID NO: 646326
uaugguaaacgucuaaacu

SEQ ID NO: 646328 - RNA, 19 nt, Artificial Sequence
  Description of Artificial Sequence: Synthetic oligonucleotide
  Sense strand starting at position 134 of SEQ ID NO: 585519
agcgcaacuuauuuggaau

SEQ ID NO: 646329 - RNA, 19 nt, Artificial Sequence
  Description of Artificial Sequence: Synthetic oligonucleotide
  Antisense strand to SEQ ID NO: 646328
auuccaaauaaguugcgcu

SEQ ID NO: 646330 - RNA, 19 nt, Artificial Sequence
  Description of Artificial Sequence: Synthetic oligonucleotide
  Sense strand starting at position 188 of SEQ ID NO: 585519
uaacuaugaccucgaggaa

SEQ ID NO: 646331 - RNA, 19 nt, Artificial Sequence
  Description of Artificial Sequence: Synthetic oligonucleotide
  Antisense strand to SEQ ID NO: 646330
uuccucgaggucauaguua

SEQ ID NO: 646332 - RNA, 19 nt, Artificial Sequence
  Description of Artificial Sequence: Synthetic oligonucleotide
  Sense strand starting at position 237 of SEQ ID NO: 585519
ucacuuguacaaugagauu

SEQ ID NO: 646333 - RNA, 19 nt, Artificial Sequence
  Description of Artificial Sequence: Synthetic oligonucleotide
  Antisense strand to SEQ ID NO: 646332
aaucucauuguacaaguga

SEQ ID NO: 646334 - RNA, 19 nt, Artificial Sequence
  Description of Artificial Sequence: Synthetic oligonucleotide
  Sense strand starting at position 527 of SEQ ID NO: 585519
gugacagagcuugacucua

SEQ ID NO: 646335 - RNA, 19 nt, Artificial Sequence
  Description of Artificial Sequence: Synthetic oligonucleotide
  Antisense strand to SEQ ID NO: 646334
uagagucaagcucugucac

SEQ ID NO: 646336 - RNA, 19 nt, Artificial Sequence
  Description of Artificial Sequence: Synthetic oligonucleotide
  Sense strand starting at position 529 of SEQ ID NO: 585519
gacagagcuugacucuauc

SEQ ID NO: 646337 - RNA, 19 nt, Artificial Sequence
  Description of Artificial Sequence: Synthetic oligonucleotide
  Antisense strand to SEQ ID NO: 646336
gauagagucaagcucuguc

SEQ ID NO: 646338 - RNA, 19 nt, Artificial Sequence
  Description of Artificial Sequence: Synthetic oligonucleotide
  Sense strand starting at position 602 of SEQ ID NO: 585519
ugcaaauuuccuugcacag

SEQ ID NO: 646339 - RNA, 19 nt, Artificial Sequence
  Description of Artificial Sequence: Synthetic oligonucleotide
  Antisense strand to SEQ ID NO: 646338
cugugcaaggaaauuugca

SEQ ID NO: 646340 - RNA, 19 nt, Artificial Sequence
  Description of Artificial Sequence: Synthetic oligonucleotide
  Sense strand starting at position 637 of SEQ ID NO: 585519
augguagauuaaucuccaa

SEQ ID NO: 646341 - RNA, 19 nt, Artificial Sequence
  Description of Artificial Sequence: Synthetic oligonucleotide
  Antisense strand to SEQ ID NO: 646340
uuggagauuaaucuaccau

SEQ ID NO: 646342 - RNA, 19 nt, Artificial Sequence
  Description of Artificial Sequence: Synthetic oligonucleotide
  Sense strand starting at position 697 of SEQ ID NO: 585519
uaucccugccuggauagau

SEQ ID NO: 646343 - RNA, 19 nt, Artificial Sequence
  Description of Artificial Sequence: Synthetic oligonucleotide
  Antisense strand to SEQ ID NO: 646342
aucuauccaggcagggaua

SEQ ID NO: 646344 - RNA, 19 nt, Artificial Sequence
  Description of Artificial Sequence: Synthetic oligonucleotide
  Sense strand starting at position 712 of SEQ ID NO: 585519
agaugaguuuaagugacuu

SEQ ID NO: 646345 - RNA, 19 nt, Artificial Sequence
  Description of Artificial Sequence: Synthetic oligonucleotide
  Antisense strand to SEQ ID NO: 646344
aagucacuuaaacucaucu

SEQ ID NO: 646346 - RNA, 19 nt, Artificial Sequence
  Description of Artificial Sequence: Synthetic oligonucleotide
  Sense strand starting at position 724 of SEQ ID NO: 585519
gugacuuauccaggguuaa

SEQ ID NO: 646347 - RNA, 19 nt, Artificial Sequence
  Description of Artificial Sequence: Synthetic oligonucleotide
  Antisense strand to SEQ ID NO: 646346
uuaacccuggauaagucac

SEQ ID NO: 646348 - RNA, 19 nt, Artificial Sequence
  Description of Artificial Sequence: Synthetic oligonucleotide
  Sense strand starting at position 725 of SEQ ID NO: 585519
ugacuuauccaggguuaaa

SEQ ID NO: 646349 - RNA, 19 nt, Artificial Sequence
  Description of Artificial Sequence: Synthetic oligonucleotide
  Antisense strand to SEQ ID NO: 646348
uuuaacccuggauaaguca

SEQ ID NO: 646350 - RNA, 19 nt, Artificial Sequence
  Description of Artificial Sequence: Synthetic oligonucleotide
  Sense strand starting at position 770 of SEQ ID NO: 585519
uucugauuccagggaccca

SEQ ID NO: 646351 - RNA, 19 nt, Artificial Sequence
  Description of Artificial Sequence: Synthetic oligonucleotide
  Antisense strand to SEQ ID NO: 646350
ugggucccuggaaucagaa

SEQ ID NO: 646352 - RNA, 19 nt, Artificial Sequence
  Description of Artificial Sequence: Synthetic oligonucleotide
  Sense strand starting at position 857 of SEQ ID NO: 585519
agagaauucuccuugguga

SEQ ID NO: 646353 - RNA, 19 nt, Artificial Sequence
  Description of Artificial Sequence: Synthetic oligonucleotide
  Antisense strand to SEQ ID NO: 646352
ucaccaaggagaauucucu

SEQ ID NO: 646354 - RNA, 19 nt, Artificial Sequence
  Description of Artificial Sequence: Synthetic oligonucleotide
  Sense strand starting at position 858 of SEQ ID NO: 585519
gagaauucuccuuggugaa

SEQ ID NO: 646355 - RNA, 19 nt, Artificial Sequence
  Description of Artificial Sequence: Synthetic oligonucleotide
  Antisense strand to SEQ ID NO: 646354
uucaccaaggagaauucuc

SEQ ID NO: 646356 - RNA, 19 nt, Artificial Sequence
  Description of Artificial Sequence: Synthetic oligonucleotide
  Sense strand starting at position 859 of SEQ ID NO: 585519
agaauucuccuuggugaag

SEQ ID NO: 646357 - RNA, 19 nt, Artificial Sequence
  Description of Artificial Sequence: Synthetic oligonucleotide
  Antisense strand to SEQ ID NO: 646356
cuucaccaaggagaauucu

SEQ ID NO: 646358 - RNA, 19 nt, Artificial Sequence
  Description of Artificial Sequence: Synthetic oligonucleotide
  Sense strand starting at position 893 of SEQ ID NO: 585519
ugcgaaagaccaugaguga

SEQ ID NO: 646359 - RNA, 19 nt, Artificial Sequence
  Description of Artificial Sequence: Synthetic oligonucleotide
  Antisense strand to SEQ ID NO: 646358
ucacucauggucuuucgca

SEQ ID NO: 646360 - RNA, 19 nt, Artificial Sequence
  Description of Artificial Sequence: Synthetic oligonucleotide
  Sense strand starting at position 926 of SEQ ID NO: 585519
acuggaaacuccucagguu

SEQ ID NO: 646361 - RNA, 19 nt, Artificial Sequence
  Description of Artificial Sequence: Synthetic oligonucleotide
  Antisense strand to SEQ ID NO: 646360
aaccugaggaguuuccagu

SEQ ID NO: 646362 - RNA, 19 nt, Artificial Sequence
  Description of Artificial Sequence: Synthetic oligonucleotide
  Sense strand starting at position 927 of SEQ ID NO: 585519
cuggaaacuccucagguuu

SEQ ID NO: 646363 - RNA, 19 nt, Artificial Sequence
  Description of Artificial Sequence: Synthetic oligonucleotide
  Antisense strand to SEQ ID NO: 646362
aaaccugaggaguuuccag

SEQ ID NO: 646364 - RNA, 19 nt, Artificial Sequence
  Description of Artificial Sequence: Synthetic oligonucleotide
  Sense strand starting at position 968 of SEQ ID NO: 585519
ccagauguaucugcaacaa

SEQ ID NO: 646365 - RNA, 19 nt, Artificial Sequence
  Description of Artificial Sequence: Synthetic oligonucleotide
  Antisense strand to SEQ ID NO: 646364
uuguugcagauacaucugg

SEQ ID NO: 646366 - RNA, 19 nt, Artificial Sequence
  Description of Artificial Sequence: Synthetic oligonucleotide
  Sense strand starting at position 1079 of SEQ ID NO: 585519
agcugcauacuugagcuaa

SEQ ID NO: 646367 - RNA, 19 nt, Artificial Sequence
  Description of Artificial Sequence: Synthetic oligonucleotide
  Antisense strand to SEQ ID NO: 646366
uuagcucaaguaugcagcu

SEQ ID NO: 646368 - RNA, 19 nt, Artificial Sequence
  Description of Artificial Sequence: Synthetic oligonucleotide
  Sense strand starting at position 1443 of SEQ ID NO: 585519
uggugacauccacagggua

SEQ ID NO: 646369 - RNA, 19 nt, Artificial Sequence
  Description of Artificial Sequence: Synthetic oligonucleotide
  Antisense strand to SEQ ID NO: 646368
uacccuguggaugucacca

SEQ ID NO: 646370 - RNA, 19 nt, Artificial Sequence
  Description of Artificial Sequence: Synthetic oligonucleotide
  Sense strand starting at position 1762 of SEQ ID NO: 585519
gcaagcucgccugcagaau

SEQ ID NO: 646371 - RNA, 19 nt, Artificial Sequence
  Description of Artificial Sequence: Synthetic oligonucleotide
  Antisense strand to SEQ ID NO: 646370
auucugcaggcgagcuugc

SEQ ID NO: 646372 - RNA, 19 nt, Artificial Sequence
  Description of Artificial Sequence: Synthetic oligonucleotide
  Sense strand starting at position 2170 of SEQ ID NO: 585519
ggacguuugcaagacaaau

SEQ ID NO: 646373 - RNA, 19 nt, Artificial Sequence
  Description of Artificial Sequence: Synthetic oligonucleotide
  Antisense strand to SEQ ID NO: 646372
auuugucuugcaaacgucc

SEQ ID NO: 646374 - RNA, 19 nt, Artificial Sequence
  Description of Artificial Sequence: Synthetic oligonucleotide
  Sense strand starting at position 2421 of SEQ ID NO: 585519
gcucaugaugcuuaugauc

SEQ ID NO: 646375 - RNA, 19 nt, Artificial Sequence
  Description of Artificial Sequence: Synthetic oligonucleotide
  Antisense strand to SEQ ID NO: 646374
gaucauaagcaucaugagc

SEQ ID NO: 646376 - RNA, 19 nt, Artificial Sequence
  Description of Artificial Sequence: Synthetic oligonucleotide
  Sense strand starting at position 2426 of SEQ ID NO: 585519
ugaugcuuaugaucugaac

SEQ ID NO: 646377 - RNA, 19 nt, Artificial Sequence
  Description of Artificial Sequence: Synthetic oligonucleotide
  Antisense strand to SEQ ID NO: 646376
guucagaucauaagcauca

SEQ ID NO: 646378 - RNA, 19 nt, Artificial Sequence
  Description of Artificial Sequence: Synthetic oligonucleotide
  Sense strand starting at position 2532 of SEQ ID NO: 585519
uaguuaagucaauguuaga

SEQ ID NO: 646379 - RNA, 19 nt, Artificial Sequence
  Description of Artificial Sequence: Synthetic oligonucleotide
  Antisense strand to SEQ ID NO: 646378
ucuaacauugacuuaacua

SEQ ID NO: 646380 - RNA, 19 nt, Artificial Sequence
  Description of Artificial Sequence: Synthetic oligonucleotide
  Sense strand starting at position 2663 of SEQ ID NO: 585519
aagugucuugcagaguaau

SEQ ID NO: 646381 - RNA, 19 nt, Artificial Sequence
  Description of Artificial Sequence: Synthetic oligonucleotide
  Antisense strand to SEQ ID NO: 646380
auuacucugcaagacacuu

SEQ ID NO: 646382 - RNA, 19 nt, Artificial Sequence
  Description of Artificial Sequence: Synthetic oligonucleotide
  Sense strand starting at position 2666 of SEQ ID NO: 585519
ugucuugcagaguaauuaa

SEQ ID NO: 646383 - RNA, 19 nt, Artificial Sequence
  Description of Artificial Sequence: Synthetic oligonucleotide
  Antisense strand to SEQ ID NO: 646382
uuaauuacucugcaagaca

SEQ ID NO: 646384 - RNA, 19 nt, Artificial Sequence
  Description of Artificial Sequence: Synthetic oligonucleotide
  Sense strand starting at position 2695 of SEQ ID NO: 585519
gaaagcuguuaguuaauaa

SEQ ID NO: 646385 - RNA, 19 nt, Artificial Sequence
  Description of Artificial Sequence: Synthetic oligonucleotide
  Antisense strand to SEQ ID NO: 646384
uuauuaacuaacagcuuuc

SEQ ID NO: 646386 - RNA, 19 nt, Artificial Sequence
  Description of Artificial Sequence: Synthetic oligonucleotide
  Sense strand starting at position 2934 of SEQ ID NO: 585519
uggucuugaacuugugaaa

SEQ ID NO: 646387 - RNA, 19 nt, Artificial Sequence
  Description of Artificial Sequence: Synthetic oligonucleotide
  Antisense strand to SEQ ID NO: 646386
uuucacaaguucaagacca

SEQ ID NO: 646388 - RNA, 19 nt, Artificial Sequence
  Description of Artificial Sequence: Synthetic oligonucleotide
  Sense strand starting at position 3225 of SEQ ID NO: 585519
caaauaucuugcccagggu

SEQ ID NO: 646389 - RNA, 19 nt, Artificial Sequence
  Description of Artificial Sequence: Synthetic oligonucleotide
  Antisense strand to SEQ ID NO: 646388
acccugggcaagauauuug

SEQ ID NO: 646390 - RNA, 19 nt, Artificial Sequence
  Description of Artificial Sequence: Synthetic oligonucleotide
  Sense strand starting at position 3388 of SEQ ID NO: 585519
cuggacagcugggauuuau

SEQ ID NO: 646391 - RNA, 19 nt, Artificial Sequence
  Description of Artificial Sequence: Synthetic oligonucleotide
  Antisense strand to SEQ ID NO: 646390
auaaaucccagcuguccag

SEQ ID NO: 646392 - RNA, 19 nt, Artificial Sequence
  Description of Artificial Sequence: Synthetic oligonucleotide
  Sense strand starting at position 3432 of SEQ ID NO: 585519
uacagccaaguuugagaaa

SEQ ID NO: 646393 - RNA, 19 nt, Artificial Sequence
  Description of Artificial Sequence: Synthetic oligonucleotide
  Antisense strand to SEQ ID NO: 646392
uuucucaaacuuggcugua

SEQ ID NO: 646394 - RNA, 19 nt, Artificial Sequence
  Description of Artificial Sequence: Synthetic oligonucleotide
  Sense strand starting at position 3562 of SEQ ID NO: 585519
auagcauaaucugugugaa

SEQ ID NO: 646395 - RNA, 19 nt, Artificial Sequence
  Description of Artificial Sequence: Synthetic oligonucleotide
  Antisense strand to SEQ ID NO: 646394
uucacacagauuaugcuau

SEQ ID NO: 646396 - RNA, 19 nt, Artificial Sequence
  Description of Artificial Sequence: Synthetic oligonucleotide
  Sense strand starting at position 3564 of SEQ ID NO: 585519
agcauaaucugugugaaga

SEQ ID NO: 646397 - RNA, 19 nt, Artificial Sequence
  Description of Artificial Sequence: Synthetic oligonucleotide
  Antisense strand to SEQ ID NO: 646396
ucuucacacagauuaugcu

SEQ ID NO: 646398 - RNA, 19 nt, Artificial Sequence
  Description of Artificial Sequence: Synthetic oligonucleotide
  Sense strand starting at position 3565 of SEQ ID NO: 585519
gcauaaucugugugaagaa

SEQ ID NO: 646399 - RNA, 19 nt, Artificial Sequence
  Description of Artificial Sequence: Synthetic oligonucleotide
  Antisense strand to SEQ ID NO: 646398
uucuucacacagauuaugc

SEQ ID NO: 646400 - RNA, 19 nt, Artificial Sequence
  Description of Artificial Sequence: Synthetic oligonucleotide
  Sense strand starting at position 3574 of SEQ ID NO: 585519
gugugaagaauccauugug

SEQ ID NO: 646401 - RNA, 19 nt, Artificial Sequence
  Description of Artificial Sequence: Synthetic oligonucleotide
  Antisense strand to SEQ ID NO: 646400
cacaauggauucuucacac

SEQ ID NO: 646402 - RNA, 19 nt, Artificial Sequence
  Description of Artificial Sequence: Synthetic oligonucleotide
  Sense strand starting at position 3577 of SEQ ID NO: 585519
ugaagaauccauuguggua

SEQ ID NO: 646403 - RNA, 19 nt, Artificial Sequence
  Description of Artificial Sequence: Synthetic oligonucleotide
  Antisense strand to SEQ ID NO: 646402
uaccacaauggauucuuca

SEQ ID NO: 646404 - RNA, 19 nt, Artificial Sequence
  Description of Artificial Sequence: Synthetic oligonucleotide
  Sense strand starting at position 3590 of SEQ ID NO: 585519
gugguauuauaaucucuca

SEQ ID NO: 646405 - RNA, 19 nt, Artificial Sequence
  Description of Artificial Sequence: Synthetic oligonucleotide
  Antisense strand to SEQ ID NO: 646404
ugagagauuauaauaccac

SEQ ID NO: 646406 - RNA, 19 nt, Artificial Sequence
  Description of Artificial Sequence: Synthetic oligonucleotide
  Sense strand starting at position 3958 of SEQ ID NO: 585519
ugaacauugugcuuaacaa

SEQ ID NO: 646407 - RNA, 19 nt, Artificial Sequence
  Description of Artificial Sequence: Synthetic oligonucleotide
  Antisense strand to SEQ ID NO: 646406
uuguuaagcacaauguuca

SEQ ID NO: 646408 - RNA, 19 nt, Artificial Sequence
  Description of Artificial Sequence: Synthetic oligonucleotide
  Sense strand starting at position 159 of SEQ ID NO: 585520
aguuauuagggcuacucua

SEQ ID NO: 646409 - RNA, 19 nt, Artificial Sequence
  Description of Artificial Sequence: Synthetic oligonucleotide
  Antisense strand to SEQ ID NO: 646408
uagaguagcccuaauaacu

SEQ ID NO: 646410 - RNA, 19 nt, Artificial Sequence
  Description of Artificial Sequence: Synthetic oligonucleotide
  Sense strand starting at position 490 of SEQ ID NO: 585520
uugugcuuucugcuuagua

SEQ ID NO: 646411 - RNA, 19 nt, Artificial Sequence
  Description of Artificial Sequence: Synthetic oligonucleotide
  Antisense strand to SEQ ID NO: 646410
uacuaagcagaaagcacaa

SEQ ID NO: 646412 - RNA, 19 nt, Artificial Sequence
  Description of Artificial Sequence: Synthetic oligonucleotide
  Sense strand starting at position 554 of SEQ ID NO: 585520
aacucuuguugagcaaaug

SEQ ID NO: 646413 - RNA, 19 nt, Artificial Sequence
  Description of Artificial Sequence: Synthetic oligonucleotide
  Antisense strand to SEQ ID NO: 646412
cauuugcucaacaagaguu

SEQ ID NO: 646414 - RNA, 19 nt, Artificial Sequence
  Description of Artificial Sequence: Synthetic oligonucleotide
  Sense strand starting at position 667 of SEQ ID NO: 585520
ggccaaacucaccauaugu

SEQ ID NO: 646415 - RNA, 19 nt, Artificial Sequence
  Description of Artificial Sequence: Synthetic oligonucleotide
  Antisense strand to SEQ ID NO: 646414
acauauggugaguuuggcc

SEQ ID NO: 646416 - RNA, 19 nt, Artificial Sequence
  Description of Artificial Sequence: Synthetic oligonucleotide
  Sense strand starting at position 721 of SEQ ID NO: 585520
uugugcugauguccauuua

SEQ ID NO: 646417 - RNA, 19 nt, Artificial Sequence
  Description of Artificial Sequence: Synthetic oligonucleotide
  Antisense strand to SEQ ID NO: 646416
uaaauggacaucagcacaa

SEQ ID NO: 646418 - RNA, 19 nt, Artificial Sequence
  Description of Artificial Sequence: Synthetic oligonucleotide
  Sense strand starting at position 1071 of SEQ ID NO: 585520
auaagucacugguccaaac

SEQ ID NO: 646419 - RNA, 19 nt, Artificial Sequence
  Description of Artificial Sequence: Synthetic oligonucleotide
  Antisense strand to SEQ ID NO: 646418
guuuggaccagugacuuau

SEQ ID NO: 646420 - RNA, 19 nt, Artificial Sequence
  Description of Artificial Sequence: Synthetic oligonucleotide
  Sense strand starting at position 1197 of SEQ ID NO: 585520
aauguaagucaaugguaag

SEQ ID NO: 646421 - RNA, 19 nt, Artificial Sequence
  Description of Artificial Sequence: Synthetic oligonucleotide
  Antisense strand to SEQ ID NO: 646420
cuuaccauugacuuacauu

SEQ ID NO: 646422 - RNA, 19 nt, Artificial Sequence
  Description of Artificial Sequence: Synthetic oligonucleotide
  Sense strand starting at position 1263 of SEQ ID NO: 585520
cugaucagucuagacaguu

SEQ ID NO: 646423 - RNA, 19 nt, Artificial Sequence
  Description of Artificial Sequence: Synthetic oligonucleotide
  Antisense strand to SEQ ID NO: 646422
aacugucuagacugaucag

SEQ ID NO: 646424 - RNA, 19 nt, Artificial Sequence
  Description of Artificial Sequence: Synthetic oligonucleotide
  Sense strand starting at position 1279 of SEQ ID NO: 585520
guuugugcucgagcucuua

SEQ ID NO: 646425 - RNA, 19 nt, Artificial Sequence
  Description of Artificial Sequence: Synthetic oligonucleotide
  Antisense strand to SEQ ID NO: 646424
uaagagcucgagcacaaac

SEQ ID NO: 646426 - RNA, 19 nt, Artificial Sequence
  Description of Artificial Sequence: Synthetic oligonucleotide
  Sense strand starting at position 1551 of SEQ ID NO: 585520
acauaauacuguccuagag

SEQ ID NO: 646427 - RNA, 19 nt, Artificial Sequence
  Description of Artificial Sequence: Synthetic oligonucleotide
  Antisense strand to SEQ ID NO: 646426
cucuaggacaguauuaugu

SEQ ID NO: 646428 - RNA, 19 nt, Artificial Sequence
  Description of Artificial Sequence: Synthetic oligonucleotide
  Sense strand starting at position 1597 of SEQ ID NO: 585520
ccugguauagaguagaguu

SEQ ID NO: 646429 - RNA, 19 nt, Artificial Sequence
  Description of Artificial Sequence: Synthetic oligonucleotide
  Antisense strand to SEQ ID NO: 646428
aacucuacucuauaccagg

SEQ ID NO: 646430 - RNA, 19 nt, Artificial Sequence
  Description of Artificial Sequence: Synthetic oligonucleotide
  Sense strand starting at position 1599 of SEQ ID NO: 585520
ugguauagaguagaguuua

SEQ ID NO: 646431 - RNA, 19 nt, Artificial Sequence
  Description of Artificial Sequence: Synthetic oligonucleotide
  Antisense strand to SEQ ID NO: 646430
uaaacucuacucuauacca

SEQ ID NO: 646432 - RNA, 19 nt, Artificial Sequence
  Description of Artificial Sequence: Synthetic oligonucleotide
  Sense strand starting at position 1918 of SEQ ID NO: 585520
aagcuucguccuucugcua

SEQ ID NO: 646433 - RNA, 19 nt, Artificial Sequence
  Description of Artificial Sequence: Synthetic oligonucleotide
  Antisense strand to SEQ ID NO: 646432
uagcagaaggacgaagcuu

SEQ ID NO: 646434 - RNA, 19 nt, Artificial Sequence
  Description of Artificial Sequence: Synthetic oligonucleotide
  Sense strand starting at position 1961 of SEQ ID NO: 585520
ggucucauauccuuagaca

SEQ ID NO: 646435 - RNA, 19 nt, Artificial Sequence
  Description of Artificial Sequence: Synthetic oligonucleotide
  Antisense strand to SEQ ID NO: 646434
ugucuaaggauaugagacc

SEQ ID NO: 646436 - RNA, 19 nt, Artificial Sequence
  Description of Artificial Sequence: Synthetic oligonucleotide
  Sense strand starting at position 1962 of SEQ ID NO: 585520
gucucauauccuuagacau

SEQ ID NO: 646437 - RNA, 19 nt, Artificial Sequence
  Description of Artificial Sequence: Synthetic oligonucleotide
  Antisense strand to SEQ ID NO: 646436
augucuaaggauaugagac

SEQ ID NO: 646438 - RNA, 19 nt, Artificial Sequence
  Description of Artificial Sequence: Synthetic oligonucleotide
  Sense strand starting at position 1995 of SEQ ID NO: 585520
guaacugagguugaguuua

SEQ ID NO: 646439 - RNA, 19 nt, Artificial Sequence
  Description of Artificial Sequence: Synthetic oligonucleotide
  Antisense strand to SEQ ID NO: 646438
uaaacucaaccucaguuac

SEQ ID NO: 646440 - RNA, 19 nt, Artificial Sequence
  Description of Artificial Sequence: Synthetic oligonucleotide
  Sense strand starting at position 1997 of SEQ ID NO: 585520
aacugagguugaguuuauu

SEQ ID NO: 646441 - RNA, 19 nt, Artificial Sequence
  Description of Artificial Sequence: Synthetic oligonucleotide
  Antisense strand to SEQ ID NO: 646440
aauaaacucaaccucaguu

SEQ ID NO: 646442 - RNA, 19 nt, Artificial Sequence
  Description of Artificial Sequence: Synthetic oligonucleotide
  Sense strand starting at position 2075 of SEQ ID NO: 585520
aucuuuaaggcugagagca

SEQ ID NO: 646443 - RNA, 19 nt, Artificial Sequence
  Description of Artificial Sequence: Synthetic oligonucleotide
  Antisense strand to SEQ ID NO: 646442
ugcucucagccuuaaagau

SEQ ID NO: 646444 - RNA, 19 nt, Artificial Sequence
  Description of Artificial Sequence: Synthetic oligonucleotide
  Sense strand starting at position 2134 of SEQ ID NO: 585520
acgguucuuauuugcauga

SEQ ID NO: 646445 - RNA, 19 nt, Artificial Sequence
  Description of Artificial Sequence: Synthetic oligonucleotide
  Antisense strand to SEQ ID NO: 646444
ucaugcaaauaagaaccgu

SEQ ID NO: 646446 - RNA, 19 nt, Artificial Sequence
  Description of Artificial Sequence: Synthetic oligonucleotide
  Sense strand starting at position 2365 of SEQ ID NO: 585520
caggguauaugggauuuga

SEQ ID NO: 646447 - RNA, 19 nt, Artificial Sequence
  Description of Artificial Sequence: Synthetic oligonucleotide
  Antisense strand to SEQ ID NO: 646446
ucaaaucccauauacccug

SEQ ID NO: 646448 - RNA, 19 nt, Artificial Sequence
  Description of Artificial Sequence: Synthetic oligonucleotide
  Sense strand starting at position 2506 of SEQ ID NO: 585520
aaaugaugacuugguugca

SEQ ID NO: 646449 - RNA, 19 nt, Artificial Sequence
  Description of Artificial Sequence: Synthetic oligonucleotide
  Antisense strand to SEQ ID NO: 646448
ugcaaccaagucaucauuu

SEQ ID NO: 646450 - RNA, 19 nt, Artificial Sequence
  Description of Artificial Sequence: Synthetic oligonucleotide
  Sense strand starting at position 2561 of SEQ ID NO: 585520
uucuuugccagugauugag

SEQ ID NO: 646451 - RNA, 19 nt, Artificial Sequence
  Description of Artificial Sequence: Synthetic oligonucleotide
  Antisense strand to SEQ ID NO: 646450
cucaaucacuggcaaagaa

SEQ ID NO: 646452 - RNA, 19 nt, Artificial Sequence
  Description of Artificial Sequence: Synthetic oligonucleotide
  Sense strand starting at position 2565 of SEQ ID NO: 585520
uugccagugauugagaauc

SEQ ID NO: 646453 - RNA, 19 nt, Artificial Sequence
  Description of Artificial Sequence: Synthetic oligonucleotide
  Antisense strand to SEQ ID NO: 646452
gauucucaaucacuggcaa

SEQ ID NO: 646454 - RNA, 19 nt, Artificial Sequence
  Description of Artificial Sequence: Synthetic oligonucleotide
  Sense strand starting at position 2571 of SEQ ID NO: 585520
gugauugagaaucagcauu

SEQ ID NO: 646455 - RNA, 19 nt, Artificial Sequence
  Description of Artificial Sequence: Synthetic oligonucleotide
  Antisense strand to SEQ ID NO: 646454
aaugcugauucucaaucac

SEQ ID NO: 646456 - RNA, 19 nt, Artificial Sequence
  Description of Artificial Sequence: Synthetic oligonucleotide
  Sense strand starting at position 2573 of SEQ ID NO: 585520
gauugagaaucagcauugu

SEQ ID NO: 646457 - RNA, 19 nt, Artificial Sequence
  Description of Artificial Sequence: Synthetic oligonucleotide
  Antisense strand to SEQ ID NO: 646456
acaaugcugauucucaauc

SEQ ID NO: 646458 - RNA, 19 nt, Artificial Sequence
  Description of Artificial Sequence: Synthetic oligonucleotide
  Sense strand starting at position 2594 of SEQ ID NO: 585520
guuccaaagcaugaucuua

SEQ ID NO: 646459 - RNA, 19 nt, Artificial Sequence
  Description of Artificial Sequence: Synthetic oligonucleotide
  Antisense strand to SEQ ID NO: 646458
uaagaucaugcuuuggaac

SEQ ID NO: 646460 - RNA, 19 nt, Artificial Sequence
  Description of Artificial Sequence: Synthetic oligonucleotide
  Sense strand starting at position 2602 of SEQ ID NO: 585520
gcaugaucuuauuugcauc

SEQ ID NO: 646461 - RNA, 19 nt, Artificial Sequence
  Description of Artificial Sequence: Synthetic oligonucleotide
  Antisense strand to SEQ ID NO: 646460
gaugcaaauaagaucaugc

SEQ ID NO: 646462 - RNA, 19 nt, Artificial Sequence
  Description of Artificial Sequence: Synthetic oligonucleotide
  Sense strand starting at position 2812 of SEQ ID NO: 585520
ugaguuacucuuuaacuug

SEQ ID NO: 646463 - RNA, 19 nt, Artificial Sequence
  Description of Artificial Sequence: Synthetic oligonucleotide
  Antisense strand to SEQ ID NO: 646462
caaguuaaagaguaacuca

SEQ ID NO: 646464 - RNA, 19 nt, Artificial Sequence
  Description of Artificial Sequence: Synthetic oligonucleotide
  Sense strand starting at position 3105 of SEQ ID NO: 585520
agcuuugggccagacuuau

SEQ ID NO: 646465 - RNA, 19 nt, Artificial Sequence
  Description of Artificial Sequence: Synthetic oligonucleotide
  Antisense strand to SEQ ID NO: 646464
auaagucuggcccaaagcu

SEQ ID NO: 646466 - RNA, 19 nt, Artificial Sequence
  Description of Artificial Sequence: Synthetic oligonucleotide
  Sense strand starting at position 3177 of SEQ ID NO: 585520
aaaggcucuuagucaaaga

SEQ ID NO: 646467 - RNA, 19 nt, Artificial Sequence
  Description of Artificial Sequence: Synthetic oligonucleotide
  Antisense strand to SEQ ID NO: 646466
ucuuugacuaagagccuuu

SEQ ID NO: 646468 - RNA, 19 nt, Artificial Sequence
  Description of Artificial Sequence: Synthetic oligonucleotide
  Sense strand starting at position 3234 of SEQ ID NO: 585520
ugaaaugauuccuucucag

SEQ ID NO: 646469 - RNA, 19 nt, Artificial Sequence
  Description of Artificial Sequence: Synthetic oligonucleotide
  Antisense strand to SEQ ID NO: 646468
cugagaaggaaucauuuca

SEQ ID NO: 646470 - RNA, 19 nt, Artificial Sequence
  Description of Artificial Sequence: Synthetic oligonucleotide
  Sense strand starting at position 3384 of SEQ ID NO: 585520
auagaaacguuaccaucuu

SEQ ID NO: 646471 - RNA, 19 nt, Artificial Sequence
  Description of Artificial Sequence: Synthetic oligonucleotide
  Antisense strand to SEQ ID NO: 646470
aagaugguaacguuucuau

SEQ ID NO: 646472 - RNA, 19 nt, Artificial Sequence
  Description of Artificial Sequence: Synthetic oligonucleotide
  Sense strand starting at position 3468 of SEQ ID NO: 585520
guaauuaaauugccagaug

SEQ ID NO: 646473 - RNA, 19 nt, Artificial Sequence
  Description of Artificial Sequence: Synthetic oligonucleotide
  Antisense strand to SEQ ID NO: 646472
caucuggcaauuuaauuac

SEQ ID NO: 646474 - RNA, 19 nt, Artificial Sequence
  Description of Artificial Sequence: Synthetic oligonucleotide
  Sense strand starting at position 3471 of SEQ ID NO: 585520
auuaaauugccagauggca

SEQ ID NO: 646475 - RNA, 19 nt, Artificial Sequence
  Description of Artificial Sequence: Synthetic oligonucleotide
  Antisense strand to SEQ ID NO: 646474
ugccaucuggcaauuuaau

SEQ ID NO: 646476 - RNA, 19 nt, Artificial Sequence
  Description of Artificial Sequence: Synthetic oligonucleotide
  Sense strand starting at position 3678 of SEQ ID NO: 585520
caugcaaauguccagugaa

SEQ ID NO: 646477 - RNA, 19 nt, Artificial Sequence
  Description of Artificial Sequence: Synthetic oligonucleotide
  Antisense strand to SEQ ID NO: 646476
uucacuggacauuugcaug

SEQ ID NO: 646478 - RNA, 19 nt, Artificial Sequence
  Description of Artificial Sequence: Synthetic oligonucleotide
  Sense strand starting at position 3750 of SEQ ID NO: 585520
guagcuuuccaugugcuca

SEQ ID NO: 646479 - RNA, 19 nt, Artificial Sequence
  Description of Artificial Sequence: Synthetic oligonucleotide
  Antisense strand to SEQ ID NO: 646478
ugagcacauggaaagcuac

SEQ ID NO: 646480 - RNA, 19 nt, Artificial Sequence
  Description of Artificial Sequence: Synthetic oligonucleotide
  Sense strand starting at position 3888 of SEQ ID NO: 585520
ccucauggagcuuaaauua

SEQ ID NO: 646481 - RNA, 19 nt, Artificial Sequence
  Description of Artificial Sequence: Synthetic oligonucleotide
  Antisense strand to SEQ ID NO: 646480
uaauuuaagcuccaugagg

SEQ ID NO: 646482 - RNA, 19 nt, Artificial Sequence
  Description of Artificial Sequence: Synthetic oligonucleotide
  Sense strand starting at position 3931 of SEQ ID NO: 585520
gguauauuagaaggaguug

SEQ ID NO: 646483 - RNA, 19 nt, Artificial Sequence
  Description of Artificial Sequence: Synthetic oligonucleotide
  Antisense strand to SEQ ID NO: 646482
caacuccuucuaauauacc

SEQ ID NO: 646484 - RNA, 19 nt, Artificial Sequence
  Description of Artificial Sequence: Synthetic oligonucleotide
  Sense strand starting at position 3940 of SEQ ID NO: 585520
gaaggaguugagugcaaca

SEQ ID NO: 646485 - RNA, 19 nt, Artificial Sequence
  Description of Artificial Sequence: Synthetic oligonucleotide
  Antisense strand to SEQ ID NO: 646484
uguugcacucaacuccuuc

SEQ ID NO: 646486 - RNA, 19 nt, Artificial Sequence
  Description of Artificial Sequence: Synthetic oligonucleotide
  Sense strand starting at position 3942 of SEQ ID NO: 585520
aggaguugagugcaacaga

SEQ ID NO: 646487 - RNA, 19 nt, Artificial Sequence
  Description of Artificial Sequence: Synthetic oligonucleotide
  Antisense strand to SEQ ID NO: 646486
ucuguugcacucaacuccu

SEQ ID NO: 646488 - RNA, 19 nt, Artificial Sequence
  Description of Artificial Sequence: Synthetic oligonucleotide
  Sense strand starting at position 51 of SEQ ID NO: 585521
ugugccauaguuuaacaga

SEQ ID NO: 646489 - RNA, 19 nt, Artificial Sequence
  Description of Artificial Sequence: Synthetic oligonucleotide
  Antisense strand to SEQ ID NO: 646488
ucuguuaaacuauggcaca

SEQ ID NO: 646490 - RNA, 19 nt, Artificial Sequence
  Description of Artificial Sequence: Synthetic oligonucleotide
  Sense strand starting at position 133 of SEQ ID NO: 585521
gcgacauaauuacuauacu

SEQ ID NO: 646491 - RNA, 19 nt, Artificial Sequence
  Description of Artificial Sequence: Synthetic oligonucleotide
  Antisense strand to SEQ ID NO: 646490
aguauaguaauuaugucgc

SEQ ID NO: 646492 - RNA, 19 nt, Artificial Sequence
  Description of Artificial Sequence: Synthetic oligonucleotide
  Sense strand starting at position 220 of SEQ ID NO: 585521
agcacaggucccugaaaga

SEQ ID NO: 646493 - RNA, 19 nt, Artificial Sequence
  Description of Artificial Sequence: Synthetic oligonucleotide
  Antisense strand to SEQ ID NO: 646492
ucuuucagggaccugugcu

SEQ ID NO: 646494 - RNA, 19 nt, Artificial Sequence
  Description of Artificial Sequence: Synthetic oligonucleotide
  Sense strand starting at position 265 of SEQ ID NO: 585521
ggaagaaugugauaaacau

SEQ ID NO: 646495 - RNA, 19 nt, Artificial Sequence
  Description of Artificial Sequence: Synthetic oligonucleotide
  Antisense strand to SEQ ID NO: 646494
auguuuaucacauucuucc

SEQ ID NO: 646496 - RNA, 19 nt, Artificial Sequence
  Description of Artificial Sequence: Synthetic oligonucleotide
  Sense strand starting at position 310 of SEQ ID NO: 585521
ggacuugauuccuuuguga

SEQ ID NO: 646497 - RNA, 19 nt, Artificial Sequence
  Description of Artificial Sequence: Synthetic oligonucleotide
  Antisense strand to SEQ ID NO: 646496
ucacaaaggaaucaagucc

SEQ ID NO: 646498 - RNA, 19 nt, Artificial Sequence
  Description of Artificial Sequence: Synthetic oligonucleotide
  Sense strand starting at position 312 of SEQ ID NO: 585521
acuugauuccuuugugaua

SEQ ID NO: 646499 - RNA, 19 nt, Artificial Sequence
  Description of Artificial Sequence: Synthetic oligonucleotide
  Antisense strand to SEQ ID NO: 646498
uaucacaaaggaaucaagu

SEQ ID NO: 646500 - RNA, 19 nt, Artificial Sequence
  Description of Artificial Sequence: Synthetic oligonucleotide
  Sense strand starting at position 313 of SEQ ID NO: 585521
cuugauuccuuugugauac

SEQ ID NO: 646501 - RNA, 19 nt, Artificial Sequence
  Description of Artificial Sequence: Synthetic oligonucleotide
  Antisense strand to SEQ ID NO: 646500
guaucacaaaggaaucaag

SEQ ID NO: 646502 - RNA, 19 nt, Artificial Sequence
  Description of Artificial Sequence: Synthetic oligonucleotide
  Sense strand starting at position 459 of SEQ ID NO: 585521
uguguuaagaaauaucgaa

SEQ ID NO: 646503 - RNA, 19 nt, Artificial Sequence
  Description of Artificial Sequence: Synthetic oligonucleotide
  Antisense strand to SEQ ID NO: 646502
uucgauauuucuuaacaca

SEQ ID NO: 646504 - RNA, 19 nt, Artificial Sequence
  Description of Artificial Sequence: Synthetic oligonucleotide
  Sense strand starting at position 551 of SEQ ID NO: 585521
gagccaaugucagucugaa

SEQ ID NO: 646505 - RNA, 19 nt, Artificial Sequence
  Description of Artificial Sequence: Synthetic oligonucleotide
  Antisense strand to SEQ ID NO: 646504
uucagacugacauuggcuc

SEQ ID NO: 646506 - RNA, 19 nt, Artificial Sequence
  Description of Artificial Sequence: Synthetic oligonucleotide
  Sense strand starting at position 650 of SEQ ID NO: 585521
accaacauaucaguguuaa

SEQ ID NO: 646507 - RNA, 19 nt, Artificial Sequence
  Description of Artificial Sequence: Synthetic oligonucleotide
  Antisense strand to SEQ ID NO: 646506
uuaacacugauauguuggu

SEQ ID NO: 646508 - RNA, 19 nt, Artificial Sequence
  Description of Artificial Sequence: Synthetic oligonucleotide
  Sense strand starting at position 651 of SEQ ID NO: 585521
ccaacauaucaguguuaag

SEQ ID NO: 646509 - RNA, 19 nt, Artificial Sequence
  Description of Artificial Sequence: Synthetic oligonucleotide
  Antisense strand to SEQ ID NO: 646508
cuuaacacugauauguugg

SEQ ID NO: 646510 - RNA, 19 nt, Artificial Sequence
  Description of Artificial Sequence: Synthetic oligonucleotide
  Sense strand starting at position 702 of SEQ ID NO: 585521
gcccaacacugguuuaauu

SEQ ID NO: 646511 - RNA, 19 nt, Artificial Sequence
  Description of Artificial Sequence: Synthetic oligonucleotide
  Antisense strand to SEQ ID NO: 646510
aauuaaaccaguguugggc

SEQ ID NO: 646512 - RNA, 19 nt, Artificial Sequence
  Description of Artificial Sequence: Synthetic oligonucleotide
  Sense strand starting at position 759 of SEQ ID NO: 585521
gcaagaagacuauguacga

SEQ ID NO: 646513 - RNA, 19 nt, Artificial Sequence
  Description of Artificial Sequence: Synthetic oligonucleotide
  Antisense strand to SEQ ID NO: 646512
ucguacauagucuucuugc

SEQ ID NO: 646514 - RNA, 19 nt, Artificial Sequence
  Description of Artificial Sequence: Synthetic oligonucleotide
  Sense strand starting at position 760 of SEQ ID NO: 585521
caagaagacuauguacgau

SEQ ID NO: 646515 - RNA, 19 nt, Artificial Sequence
  Description of Artificial Sequence: Synthetic oligonucleotide
  Antisense strand to SEQ ID NO: 646514
aucguacauagucuucuug

SEQ ID NO: 646516 - RNA, 19 nt, Artificial Sequence
  Description of Artificial Sequence: Synthetic oligonucleotide
  Sense strand starting at position 805 of SEQ ID NO: 585521
acaagaguuccacguucua

SEQ ID NO: 646517 - RNA, 19 nt, Artificial Sequence
  Description of Artificial Sequence: Synthetic oligonucleotide
  Antisense strand to SEQ ID NO: 646516
uagaacguggaacucuugu

SEQ ID NO: 646518 - RNA, 19 nt, Artificial Sequence
  Description of Artificial Sequence: Synthetic oligonucleotide
  Sense strand starting at position 842 of SEQ ID NO: 585521
ggcagaagauucucucuag

SEQ ID NO: 646519 - RNA, 19 nt, Artificial Sequence
  Description of Artificial Sequence: Synthetic oligonucleotide
  Antisense strand to SEQ ID NO: 646518
cuagagagaaucuucugcc

SEQ ID NO: 646520 - RNA, 19 nt, Artificial Sequence
  Description of Artificial Sequence: Synthetic oligonucleotide
  Sense strand starting at position 845 of SEQ ID NO: 585521
agaagauucucucuagcua

SEQ ID NO: 646521 - RNA, 19 nt, Artificial Sequence
  Description of Artificial Sequence: Synthetic oligonucleotide
  Antisense strand to SEQ ID NO: 646520
uagcuagagagaaucuucu

SEQ ID NO: 646522 - RNA, 19 nt, Artificial Sequence
  Description of Artificial Sequence: Synthetic oligonucleotide
  Sense strand starting at position 869 of SEQ ID NO: 585521
gugggugguuuaucauuga

SEQ ID NO: 646523 - RNA, 19 nt, Artificial Sequence
  Description of Artificial Sequence: Synthetic oligonucleotide
  Antisense strand to SEQ ID NO: 646522
ucaaugauaaaccacccac

SEQ ID NO: 646524 - RNA, 19 nt, Artificial Sequence
  Description of Artificial Sequence: Synthetic oligonucleotide
  Sense strand starting at position 872 of SEQ ID NO: 585521
ggugguuuaucauugaacu

SEQ ID NO: 646525 - RNA, 19 nt, Artificial Sequence
  Description of Artificial Sequence: Synthetic oligonucleotide
  Antisense strand to SEQ ID NO: 646524
aguucaaugauaaaccacc

SEQ ID NO: 646526 - RNA, 19 nt, Artificial Sequence
  Description of Artificial Sequence: Synthetic oligonucleotide
  Sense strand starting at position 873 of SEQ ID NO: 585521
gugguuuaucauugaacuu

SEQ ID NO: 646527 - RNA, 19 nt, Artificial Sequence
  Description of Artificial Sequence: Synthetic oligonucleotide
  Antisense strand to SEQ ID NO: 646526
aaguucaaugauaaaccac

SEQ ID NO: 646528 - RNA, 19 nt, Artificial Sequence
  Description of Artificial Sequence: Synthetic oligonucleotide
  Sense strand starting at position 1242 of SEQ ID NO: 585521
ccgagagcucuccaucacu

SEQ ID NO: 646529 - RNA, 19 nt, Artificial Sequence
  Description of Artificial Sequence: Synthetic oligonucleotide
  Antisense strand to SEQ ID NO: 646528
agugauggagagcucucgg

SEQ ID NO: 646530 - RNA, 19 nt, Artificial Sequence
  Description of Artificial Sequence: Synthetic oligonucleotide
  Sense strand starting at position 1250 of SEQ ID NO: 585521
ucuccaucacugcgaaaca

SEQ ID NO: 646531 - RNA, 19 nt, Artificial Sequence
  Description of Artificial Sequence: Synthetic oligonucleotide
  Antisense strand to SEQ ID NO: 646530
uguuucgcagugauggaga

SEQ ID NO: 646532 - RNA, 19 nt, Artificial Sequence
  Description of Artificial Sequence: Synthetic oligonucleotide
  Sense strand starting at position 1998 of SEQ ID NO: 585521
ugugaagcgcucguucaga

SEQ ID NO: 646533 - RNA, 19 nt, Artificial Sequence
  Description of Artificial Sequence: Synthetic oligonucleotide
  Antisense strand to SEQ ID NO: 646532
ucugaacgagcgcuucaca

SEQ ID NO: 646534 - RNA, 19 nt, Artificial Sequence
  Description of Artificial Sequence: Synthetic oligonucleotide
  Sense strand starting at position 2053 of SEQ ID NO: 585521
ggcuauugccuggauuaca

SEQ ID NO: 646535 - RNA, 19 nt, Artificial Sequence
  Description of Artificial Sequence: Synthetic oligonucleotide
  Antisense strand to SEQ ID NO: 646534
uguaauccaggcaauagcc

SEQ ID NO: 646536 - RNA, 19 nt, Artificial Sequence
  Description of Artificial Sequence: Synthetic oligonucleotide
  Sense strand starting at position 2098 of SEQ ID NO: 585521
aggcuuucccgacaccaaa

SEQ ID NO: 646537 - RNA, 19 nt, Artificial Sequence
  Description of Artificial Sequence: Synthetic oligonucleotide
  Antisense strand to SEQ ID NO: 646536
uuuggugucgggaaagccu

SEQ ID NO: 646538 - RNA, 19 nt, Artificial Sequence
  Description of Artificial Sequence: Synthetic oligonucleotide
  Sense strand starting at position 2226 of SEQ ID NO: 585521
acagacuucugggcauaaa

SEQ ID NO: 646539 - RNA, 19 nt, Artificial Sequence
  Description of Artificial Sequence: Synthetic oligonucleotide
  Antisense strand to SEQ ID NO: 646538
uuuaugcccagaagucugu

SEQ ID NO: 646540 - RNA, 19 nt, Artificial Sequence
  Description of Artificial Sequence: Synthetic oligonucleotide
  Sense strand starting at position 2403 of SEQ ID NO: 585521
gaaguauauuuccaaagag

SEQ ID NO: 646541 - RNA, 19 nt, Artificial Sequence
  Description of Artificial Sequence: Synthetic oligonucleotide
  Antisense strand to SEQ ID NO: 646540
cucuuuggaaauauacuuc

SEQ ID NO: 646542 - RNA, 19 nt, Artificial Sequence
  Description of Artificial Sequence: Synthetic oligonucleotide
  Sense strand starting at position 2464 of SEQ ID NO: 585521
gugaaacgcagccaucauu

SEQ ID NO: 646543 - RNA, 19 nt, Artificial Sequence
  Description of Artificial Sequence: Synthetic oligonucleotide
  Antisense strand to SEQ ID NO: 646542
aaugauggcugcguuucac

SEQ ID NO: 646544 - RNA, 19 nt, Artificial Sequence
  Description of Artificial Sequence: Synthetic oligonucleotide
  Sense strand starting at position 2614 of SEQ ID NO: 585521
ucaucagagagcuacgcua

SEQ ID NO: 646545 - RNA, 19 nt, Artificial Sequence
  Description of Artificial Sequence: Synthetic oligonucleotide
  Antisense strand to SEQ ID NO: 646544
uagcguagcucucugauga

SEQ ID NO: 646546 - RNA, 19 nt, Artificial Sequence
  Description of Artificial Sequence: Synthetic oligonucleotide
  Sense strand starting at position 2698 of SEQ ID NO: 585521
aaugcauuuggguguagca

SEQ ID NO: 646547 - RNA, 19 nt, Artificial Sequence
  Description of Artificial Sequence: Synthetic oligonucleotide
  Antisense strand to SEQ ID NO: 646546
ugcuacacccaaaugcauu

SEQ ID NO: 646548 - RNA, 19 nt, Artificial Sequence
  Description of Artificial Sequence: Synthetic oligonucleotide
  Sense strand starting at position 2700 of SEQ ID NO: 585521
ugcauuuggguguagcauu

SEQ ID NO: 646549 - RNA, 19 nt, Artificial Sequence
  Description of Artificial Sequence: Synthetic oligonucleotide
  Antisense strand to SEQ ID NO: 646548
aaugcuacacccaaaugca

SEQ ID NO: 646550 - RNA, 19 nt, Artificial Sequence
  Description of Artificial Sequence: Synthetic oligonucleotide
  Sense strand starting at position 2737 of SEQ ID NO: 585521
cuacaauuccacgguccua

SEQ ID NO: 646551 - RNA, 19 nt, Artificial Sequence
  Description of Artificial Sequence: Synthetic oligonucleotide
  Antisense strand to SEQ ID NO: 646550
uaggaccguggaauuguag

SEQ ID NO: 646552 - RNA, 19 nt, Artificial Sequence
  Description of Artificial Sequence: Synthetic oligonucleotide
  Sense strand starting at position 2774 of SEQ ID NO: 585521
gcaacuuuccaucauagag

SEQ ID NO: 646553 - RNA, 19 nt, Artificial Sequence
  Description of Artificial Sequence: Synthetic oligonucleotide
  Antisense strand to SEQ ID NO: 646552
cucuaugauggaaaguugc

SEQ ID NO: 646554 - RNA, 19 nt, Artificial Sequence
  Description of Artificial Sequence: Synthetic oligonucleotide
  Sense strand starting at position 2855 of SEQ ID NO: 585521
gagaacuaggucuguagca

SEQ ID NO: 646555 - RNA, 19 nt, Artificial Sequence
  Description of Artificial Sequence: Synthetic oligonucleotide
  Antisense strand to SEQ ID NO: 646554
ugcuacagaccuaguucuc

SEQ ID NO: 646556 - RNA, 19 nt, Artificial Sequence
  Description of Artificial Sequence: Synthetic oligonucleotide
  Sense strand starting at position 2857 of SEQ ID NO: 585521
gaacuaggucuguagcacu

SEQ ID NO: 646557 - RNA, 19 nt, Artificial Sequence
  Description of Artificial Sequence: Synthetic oligonucleotide
  Antisense strand to SEQ ID NO: 646556
agugcuacagaccuaguuc

SEQ ID NO: 646558 - RNA, 19 nt, Artificial Sequence
  Description of Artificial Sequence: Synthetic oligonucleotide
  Sense strand starting at position 2877 of SEQ ID NO: 585521
ugcuuuacucagcaucgau

SEQ ID NO: 646559 - RNA, 19 nt, Artificial Sequence
  Description of Artificial Sequence: Synthetic oligonucleotide
  Antisense strand to SEQ ID NO: 646558
aucgaugcugaguaaagca

SEQ ID NO: 646560 - RNA, 19 nt, Artificial Sequence
  Description of Artificial Sequence: Synthetic oligonucleotide
  Sense strand starting at position 3098 of SEQ ID NO: 585521
uguaaauaaugacagagaa

SEQ ID NO: 646561 - RNA, 19 nt, Artificial Sequence
  Description of Artificial Sequence: Synthetic oligonucleotide
  Antisense strand to SEQ ID NO: 646560
uucucugucauuauuuaca

SEQ ID NO: 646562 - RNA, 19 nt, Artificial Sequence
  Description of Artificial Sequence: Synthetic oligonucleotide
  Sense strand starting at position 3177 of SEQ ID NO: 585521
gagaucacguaguuuaaac

SEQ ID NO: 646563 - RNA, 19 nt, Artificial Sequence
  Description of Artificial Sequence: Synthetic oligonucleotide
  Antisense strand to SEQ ID NO: 646562
guuuaaacuacgugaucuc

SEQ ID NO: 646564 - RNA, 19 nt, Artificial Sequence
  Description of Artificial Sequence: Synthetic oligonucleotide
  Sense strand starting at position 3325 of SEQ ID NO: 585521
cagggaugcuugcuacauc

SEQ ID NO: 646565 - RNA, 19 nt, Artificial Sequence
  Description of Artificial Sequence: Synthetic oligonucleotide
  Antisense strand to SEQ ID NO: 646564
gauguagcaagcaucccug

SEQ ID NO: 646566 - RNA, 19 nt, Artificial Sequence
  Description of Artificial Sequence: Synthetic oligonucleotide
  Sense strand starting at position 3770 of SEQ ID NO: 585521
ucuucuuucugaguagaaa

SEQ ID NO: 646567 - RNA, 19 nt, Artificial Sequence
  Description of Artificial Sequence: Synthetic oligonucleotide
  Antisense strand to SEQ ID NO: 646566
uuucuacucagaaagaaga

SEQ ID NO: 646568 - RNA, 19 nt, Artificial Sequence
  Description of Artificial Sequence: Synthetic oligonucleotide
  Sense strand starting at position 103 of SEQ ID NO: 585522
cuuuauacaguuuggcaga

SEQ ID NO: 646569 - RNA, 19 nt, Artificial Sequence
  Description of Artificial Sequence: Synthetic oligonucleotide
  Antisense strand to SEQ ID NO: 646568
ucugccaaacuguauaaag

SEQ ID NO: 646570 - RNA, 19 nt, Artificial Sequence
  Description of Artificial Sequence: Synthetic oligonucleotide
  Sense strand starting at position 114 of SEQ ID NO: 585522
uuggcagacuuagccuaau

SEQ ID NO: 646571 - RNA, 19 nt, Artificial Sequence
  Description of Artificial Sequence: Synthetic oligonucleotide
  Antisense strand to SEQ ID NO: 646570
auuaggcuaagucugccaa

SEQ ID NO: 646572 - RNA, 19 nt, Artificial Sequence
  Description of Artificial Sequence: Synthetic oligonucleotide
  Sense strand starting at position 127 of SEQ ID NO: 585522
ccuaauggguuguuuaaca

SEQ ID NO: 646573 - RNA, 19 nt, Artificial Sequence
  Description of Artificial Sequence: Synthetic oligonucleotide
  Antisense strand to SEQ ID NO: 646572
uguuaaacaacccauuagg

SEQ ID NO: 646574 - RNA, 19 nt, Artificial Sequence
  Description of Artificial Sequence: Synthetic oligonucleotide
  Sense strand starting at position 147 of SEQ ID NO: 585522
aguaaacucccucauuguu

SEQ ID NO: 646575 - RNA, 19 nt, Artificial Sequence
  Description of Artificial Sequence: Synthetic oligonucleotide
  Antisense strand to SEQ ID NO: 646574
aacaaugagggaguuuacu

SEQ ID NO: 646576 - RNA, 19 nt, Artificial Sequence
  Description of Artificial Sequence: Synthetic oligonucleotide
  Sense strand starting at position 244 of SEQ ID NO: 585522
guuuacacaucauugagaa

SEQ ID NO: 646577 - RNA, 19 nt, Artificial Sequence
  Description of Artificial Sequence: Synthetic oligonucleotide
  Antisense strand to SEQ ID NO: 646576
uucucaaugauguguaaac

SEQ ID NO: 646578 - RNA, 19 nt, Artificial Sequence
  Description of Artificial Sequence: Synthetic oligonucleotide
  Sense strand starting at position 317 of SEQ ID NO: 585522
ugcauaagcgcauaaauca

SEQ ID NO: 646579 - RNA, 19 nt, Artificial Sequence
  Description of Artificial Sequence: Synthetic oligonucleotide
  Antisense strand to SEQ ID NO: 646578
ugauuuaugcgcuuaugca

SEQ ID NO: 646580 - RNA, 19 nt, Artificial Sequence
  Description of Artificial Sequence: Synthetic oligonucleotide
  Sense strand starting at position 490 of SEQ ID NO: 585522
aaggaauuccucugccagu

SEQ ID NO: 646581 - RNA, 19 nt, Artificial Sequence
  Description of Artificial Sequence: Synthetic oligonucleotide
  Antisense strand to SEQ ID NO: 646580
acuggcagaggaauuccuu

SEQ ID NO: 646582 - RNA, 19 nt, Artificial Sequence
  Description of Artificial Sequence: Synthetic oligonucleotide
  Sense strand starting at position 612 of SEQ ID NO: 585522
ggacaugacuauuccaguu

SEQ ID NO: 646583 - RNA, 19 nt, Artificial Sequence
  Description of Artificial Sequence: Synthetic oligonucleotide
  Antisense strand to SEQ ID NO: 646582
aacuggaauagucaugucc

SEQ ID NO: 646584 - RNA, 19 nt, Artificial Sequence
  Description of Artificial Sequence: Synthetic oligonucleotide
  Sense strand starting at position 658 of SEQ ID NO: 585522
uaaugacaagugugagcaa

SEQ ID NO: 646585 - RNA, 19 nt, Artificial Sequence
  Description of Artificial Sequence: Synthetic oligonucleotide
  Antisense strand to SEQ ID NO: 646584
uugcucacacuugucauua

SEQ ID NO: 646586 - RNA, 19 nt, Artificial Sequence
  Description of Artificial Sequence: Synthetic oligonucleotide
  Sense strand starting at position 661 of SEQ ID NO: 585522
ugacaagugugagcaagua

SEQ ID NO: 646587 - RNA, 19 nt, Artificial Sequence
  Description of Artificial Sequence: Synthetic oligonucleotide
  Antisense strand to SEQ ID NO: 646586
uacuugcucacacuuguca

SEQ ID NO: 646588 - RNA, 19 nt, Artificial Sequence
  Description of Artificial Sequence: Synthetic oligonucleotide
  Sense strand starting at position 697 of SEQ ID NO: 585522
accacuuagagugguguau

SEQ ID NO: 646589 - RNA, 19 nt, Artificial Sequence
  Description of Artificial Sequence: Synthetic oligonucleotide
  Antisense strand to SEQ ID NO: 646588
auacaccacucuaaguggu

SEQ ID NO: 646590 - RNA, 19 nt, Artificial Sequence
  Description of Artificial Sequence: Synthetic oligonucleotide
  Sense strand starting at position 749 of SEQ ID NO: 585522
uuccauugcccuuagggaa

SEQ ID NO: 646591 - RNA, 19 nt, Artificial Sequence
  Description of Artificial Sequence: Synthetic oligonucleotide
  Antisense strand to SEQ ID NO: 646590
uucccuaagggcaauggaa

SEQ ID NO: 646592 - RNA, 19 nt, Artificial Sequence
  Description of Artificial Sequence: Synthetic oligonucleotide
  Sense strand starting at position 966 of SEQ ID NO: 585522
acugguuccgucuaugaca

SEQ ID NO: 646593 - RNA, 19 nt, Artificial Sequence
  Description of Artificial Sequence: Synthetic oligonucleotide
  Antisense strand to SEQ ID NO: 646592
ugucauagacggaaccagu

SEQ ID NO: 646594 - RNA, 19 nt, Artificial Sequence
  Description of Artificial Sequence: Synthetic oligonucleotide
  Sense strand starting at position 1064 of SEQ ID NO: 585522
ucuaaauuagacuguugua

SEQ ID NO: 646595 - RNA, 19 nt, Artificial Sequence
  Description of Artificial Sequence: Synthetic oligonucleotide
  Antisense strand to SEQ ID NO: 646594
uacaacagucuaauuuaga

SEQ ID NO: 646596 - RNA, 19 nt, Artificial Sequence
  Description of Artificial Sequence: Synthetic oligonucleotide
  Sense strand starting at position 1226 of SEQ ID NO: 585522
guauuccucuguuuaacaa

SEQ ID NO: 646597 - RNA, 19 nt, Artificial Sequence
  Description of Artificial Sequence: Synthetic oligonucleotide
  Antisense strand to SEQ ID NO: 646596
uuguuaaacagaggaauac

SEQ ID NO: 646598 - RNA, 19 nt, Artificial Sequence
  Description of Artificial Sequence: Synthetic oligonucleotide
  Sense strand starting at position 1251 of SEQ ID NO: 585522
cgguaaauuguaggugaca

SEQ ID NO: 646599 - RNA, 19 nt, Artificial Sequence
  Description of Artificial Sequence: Synthetic oligonucleotide
  Antisense strand to SEQ ID NO: 646598
ugucaccuacaauuuaccg

SEQ ID NO: 646600 - RNA, 19 nt, Artificial Sequence
  Description of Artificial Sequence: Synthetic oligonucleotide
  Sense strand starting at position 1252 of SEQ ID NO: 585522
gguaaauuguaggugacaa

SEQ ID NO: 646601 - RNA, 19 nt, Artificial Sequence
  Description of Artificial Sequence: Synthetic oligonucleotide
  Antisense strand to SEQ ID NO: 646600
uugucaccuacaauuuacc

SEQ ID NO: 646602 - RNA, 19 nt, Artificial Sequence
  Description of Artificial Sequence: Synthetic oligonucleotide
  Sense strand starting at position 1253 of SEQ ID NO: 585522
guaaauuguaggugacaau

SEQ ID NO: 646603 - RNA, 19 nt, Artificial Sequence
  Description of Artificial Sequence: Synthetic oligonucleotide
  Antisense strand to SEQ ID NO: 646602
auugucaccuacaauuuac

SEQ ID NO: 646604 - RNA, 19 nt, Artificial Sequence
  Description of Artificial Sequence: Synthetic oligonucleotide
  Sense strand starting at position 1463 of SEQ ID NO: 585522
ggcaauauaucugucaccu

SEQ ID NO: 646605 - RNA, 19 nt, Artificial Sequence
  Description of Artificial Sequence: Synthetic oligonucleotide
  Antisense strand to SEQ ID NO: 646604
aggugacagauauauugcc

SEQ ID NO: 646606 - RNA, 19 nt, Artificial Sequence
  Description of Artificial Sequence: Synthetic oligonucleotide
  Sense strand starting at position 1502 of SEQ ID NO: 585522
cauucuagucaauggcaga

SEQ ID NO: 646607 - RNA, 19 nt, Artificial Sequence
  Description of Artificial Sequence: Synthetic oligonucleotide
  Antisense strand to SEQ ID NO: 646606
ucugccauugacuagaaug

SEQ ID NO: 646608 - RNA, 19 nt, Artificial Sequence
  Description of Artificial Sequence: Synthetic oligonucleotide
  Sense strand starting at position 2939 of SEQ ID NO: 585522
uaaagagucggagacuagu

SEQ ID NO: 646609 - RNA, 19 nt, Artificial Sequence
  Description of Artificial Sequence: Synthetic oligonucleotide
  Antisense strand to SEQ ID NO: 646608
acuagucuccgacucuuua

SEQ ID NO: 646610 - RNA, 19 nt, Artificial Sequence
  Description of Artificial Sequence: Synthetic oligonucleotide
  Sense strand starting at position 2945 of SEQ ID NO: 585522
gucggagacuaguuuaaua

SEQ ID NO: 646611 - RNA, 19 nt, Artificial Sequence
  Description of Artificial Sequence: Synthetic oligonucleotide
  Antisense strand to SEQ ID NO: 646610
uauuaaacuagucuccgac

SEQ ID NO: 646612 - RNA, 19 nt, Artificial Sequence
  Description of Artificial Sequence: Synthetic oligonucleotide
  Sense strand starting at position 2947 of SEQ ID NO: 585522
cggagacuaguuuaauacu

SEQ ID NO: 646613 - RNA, 19 nt, Artificial Sequence
  Description of Artificial Sequence: Synthetic oligonucleotide
  Antisense strand to SEQ ID NO: 646612
aguauuaaacuagucuccg

SEQ ID NO: 646614 - RNA, 19 nt, Artificial Sequence
  Description of Artificial Sequence: Synthetic oligonucleotide
  Sense strand starting at position 2953 of SEQ ID NO: 585522
cuaguuuaauacucaguua

SEQ ID NO: 646615 - RNA, 19 nt, Artificial Sequence
  Description of Artificial Sequence: Synthetic oligonucleotide
  Antisense strand to SEQ ID NO: 646614
uaacugaguauuaaacuag

SEQ ID NO: 646616 - RNA, 19 nt, Artificial Sequence
  Description of Artificial Sequence: Synthetic oligonucleotide
  Sense strand starting at position 2956 of SEQ ID NO: 585522
guuuaauacucaguuacuu

SEQ ID NO: 646617 - RNA, 19 nt, Artificial Sequence
  Description of Artificial Sequence: Synthetic oligonucleotide
  Antisense strand to SEQ ID NO: 646616
aaguaacugaguauuaaac

SEQ ID NO: 646618 - RNA, 19 nt, Artificial Sequence
  Description of Artificial Sequence: Synthetic oligonucleotide
  Sense strand starting at position 3002 of SEQ ID NO: 585522
uggauuccuaguggagaug

SEQ ID NO: 646619 - RNA, 19 nt, Artificial Sequence
  Description of Artificial Sequence: Synthetic oligonucleotide
  Antisense strand to SEQ ID NO: 646618
caucuccacuaggaaucca

SEQ ID NO: 646620 - RNA, 19 nt, Artificial Sequence
  Description of Artificial Sequence: Synthetic oligonucleotide
  Sense strand starting at position 3381 of SEQ ID NO: 585522
gagagcucucuguagcaac

SEQ ID NO: 646621 - RNA, 19 nt, Artificial Sequence
  Description of Artificial Sequence: Synthetic oligonucleotide
  Antisense strand to SEQ ID NO: 646620
guugcuacagagagcucuc

SEQ ID NO: 646622 - RNA, 19 nt, Artificial Sequence
  Description of Artificial Sequence: Synthetic oligonucleotide
  Sense strand starting at position 3439 of SEQ ID NO: 585522
ggauaaaguuaugcuggga

SEQ ID NO: 646623 - RNA, 19 nt, Artificial Sequence
  Description of Artificial Sequence: Synthetic oligonucleotide
  Antisense strand to SEQ ID NO: 646622
ucccagcauaacuuuaucc

SEQ ID NO: 646624 - RNA, 19 nt, Artificial Sequence
  Description of Artificial Sequence: Synthetic oligonucleotide
  Sense strand starting at position 3443 of SEQ ID NO: 585522
aaaguuaugcugggaacca

SEQ ID NO: 646625 - RNA, 19 nt, Artificial Sequence
  Description of Artificial Sequence: Synthetic oligonucleotide
  Antisense strand to SEQ ID NO: 646624
ugguucccagcauaacuuu

SEQ ID NO: 646626 - RNA, 19 nt, Artificial Sequence
  Description of Artificial Sequence: Synthetic oligonucleotide
  Sense strand starting at position 3478 of SEQ ID NO: 585522
augauugcuuccuuugaau

SEQ ID NO: 646627 - RNA, 19 nt, Artificial Sequence
  Description of Artificial Sequence: Synthetic oligonucleotide
  Antisense strand to SEQ ID NO: 646626
auucaaaggaagcaaucau

SEQ ID NO: 646628 - RNA, 19 nt, Artificial Sequence
  Description of Artificial Sequence: Synthetic oligonucleotide
  Sense strand starting at position 3506 of SEQ ID NO: 585522
gacguaucagaaugacuaa

SEQ ID NO: 646629 - RNA, 19 nt, Artificial Sequence
  Description of Artificial Sequence: Synthetic oligonucleotide
  Antisense strand to SEQ ID NO: 646628
uuagucauucugauacguc

SEQ ID NO: 646630 - RNA, 19 nt, Artificial Sequence
  Description of Artificial Sequence: Synthetic oligonucleotide
  Sense strand starting at position 3616 of SEQ ID NO: 585522
agggauuaacuuuguuaaa

SEQ ID NO: 646631 - RNA, 19 nt, Artificial Sequence
  Description of Artificial Sequence: Synthetic oligonucleotide
  Antisense strand to SEQ ID NO: 646630
uuuaacaaaguuaaucccu

SEQ ID NO: 646632 - RNA, 19 nt, Artificial Sequence
  Description of Artificial Sequence: Synthetic oligonucleotide
  Sense strand starting at position 3617 of SEQ ID NO: 585522
gggauuaacuuuguuaaau

SEQ ID NO: 646633 - RNA, 19 nt, Artificial Sequence
  Description of Artificial Sequence: Synthetic oligonucleotide
  Antisense strand to SEQ ID NO: 646632
auuuaacaaaguuaauccc

SEQ ID NO: 646634 - RNA, 19 nt, Artificial Sequence
  Description of Artificial Sequence: Synthetic oligonucleotide
  Sense strand starting at position 3663 of SEQ ID NO: 585522
uaaugagaaugucugguuu

SEQ ID NO: 646635 - RNA, 19 nt, Artificial Sequence
  Description of Artificial Sequence: Synthetic oligonucleotide
  Antisense strand to SEQ ID NO: 646634
aaaccagacauucucauua

SEQ ID NO: 646636 - RNA, 19 nt, Artificial Sequence
  Description of Artificial Sequence: Synthetic oligonucleotide
  Sense strand starting at position 3790 of SEQ ID NO: 585522
guaauaguuccacaaccuu

SEQ ID NO: 646637 - RNA, 19 nt, Artificial Sequence
  Description of Artificial Sequence: Synthetic oligonucleotide
  Antisense strand to SEQ ID NO: 646636
aagguuguggaacuauuac

SEQ ID NO: 646638 - RNA, 19 nt, Artificial Sequence
  Description of Artificial Sequence: Synthetic oligonucleotide
  Sense strand starting at position 3853 of SEQ ID NO: 585522
guugcucuucugucuuuau

SEQ ID NO: 646639 - RNA, 19 nt, Artificial Sequence
  Description of Artificial Sequence: Synthetic oligonucleotide
  Antisense strand to SEQ ID NO: 646638
auaaagacagaagagcaac

SEQ ID NO: 646640 - RNA, 19 nt, Artificial Sequence
  Description of Artificial Sequence: Synthetic oligonucleotide
  Sense strand starting at position 3872 of SEQ ID NO: 585522
acacguuagcuguccugua

SEQ ID NO: 646641 - RNA, 19 nt, Artificial Sequence
  Description of Artificial Sequence: Synthetic oligonucleotide
  Antisense strand to SEQ ID NO: 646640
uacaggacagcuaacgugu

SEQ ID NO: 646642 - RNA, 19 nt, Artificial Sequence
  Description of Artificial Sequence: Synthetic oligonucleotide
  Sense strand starting at position 3923 of SEQ ID NO: 585522
aacagaaagcuguaaguua

SEQ ID NO: 646643 - RNA, 19 nt, Artificial Sequence
  Description of Artificial Sequence: Synthetic oligonucleotide
  Antisense strand to SEQ ID NO: 646642
uaacuuacagcuuucuguu

SEQ ID NO: 646644 - RNA, 19 nt, Artificial Sequence
  Description of Artificial Sequence: Synthetic oligonucleotide
  Sense strand starting at position 3935 of SEQ ID NO: 585522
uaaguuaauugacuguuga

SEQ ID NO: 646645 - RNA, 19 nt, Artificial Sequence
  Description of Artificial Sequence: Synthetic oligonucleotide
  Antisense strand to SEQ ID NO: 646644
ucaacagucaauuaacuua

SEQ ID NO: 646646 - RNA, 19 nt, Artificial Sequence
  Description of Artificial Sequence: Synthetic oligonucleotide
  Sense strand starting at position 3936 of SEQ ID NO: 585522
aaguuaauugacuguugaa

SEQ ID NO: 646647 - RNA, 19 nt, Artificial Sequence
  Description of Artificial Sequence: Synthetic oligonucleotide
  Antisense strand to SEQ ID NO: 646646
uucaacagucaauuaacuu

SEQ ID NO: 646648 - RNA, 19 nt, Artificial Sequence
  Description of Artificial Sequence: Synthetic oligonucleotide
  Sense strand starting at position 2 of SEQ ID NO: 585523
agagaaaguagccaguagu

SEQ ID NO: 646649 - RNA, 19 nt, Artificial Sequence
  Description of Artificial Sequence: Synthetic oligonucleotide
  Antisense strand to SEQ ID NO: 646648
acuacuggcuacuuucucu

SEQ ID NO: 646650 - RNA, 19 nt, Artificial Sequence
  Description of Artificial Sequence: Synthetic oligonucleotide
  Sense strand starting at position 5 of SEQ ID NO: 585523
gaaaguagccaguagugaa

SEQ ID NO: 646651 - RNA, 19 nt, Artificial Sequence
  Description of Artificial Sequence: Synthetic oligonucleotide
  Antisense strand to SEQ ID NO: 646650
uucacuacuggcuacuuuc

SEQ ID NO: 646652 - RNA, 19 nt, Artificial Sequence
  Description of Artificial Sequence: Synthetic oligonucleotide
  Sense strand starting at position 9 of SEQ ID NO: 585523
guagccaguagugaaagau

SEQ ID NO: 646653 - RNA, 19 nt, Artificial Sequence
  Description of Artificial Sequence: Synthetic oligonucleotide
  Antisense strand to SEQ ID NO: 646652
aucuuucacuacuggcuac

SEQ ID NO: 646654 - RNA, 19 nt, Artificial Sequence
  Description of Artificial Sequence: Synthetic oligonucleotide
  Sense strand starting at position 614 of SEQ ID NO: 585523
ggugaaguuaucuaaaguc

SEQ ID NO: 646655 - RNA, 19 nt, Artificial Sequence
  Description of Artificial Sequence: Synthetic oligonucleotide
  Antisense strand to SEQ ID NO: 646654
gacuuuagauaacuucacc

SEQ ID NO: 646656 - RNA, 19 nt, Artificial Sequence
  Description of Artificial Sequence: Synthetic oligonucleotide
  Sense strand starting at position 958 of SEQ ID NO: 585523
cuggguucuagaugaugga

SEQ ID NO: 646657 - RNA, 19 nt, Artificial Sequence
  Description of Artificial Sequence: Synthetic oligonucleotide
  Antisense strand to SEQ ID NO: 646656
uccaucaucuagaacccag

SEQ ID NO: 646658 - RNA, 19 nt, Artificial Sequence
  Description of Artificial Sequence: Synthetic oligonucleotide
  Sense strand starting at position 1320 of SEQ ID NO: 585523
aguuuaacuugagugggaa

SEQ ID NO: 646659 - RNA, 19 nt, Artificial Sequence
  Description of Artificial Sequence: Synthetic oligonucleotide
  Antisense strand to SEQ ID NO: 646658
uucccacucaaguuaaacu

SEQ ID NO: 646660 - RNA, 19 nt, Artificial Sequence
  Description of Artificial Sequence: Synthetic oligonucleotide
  Sense strand starting at position 1321 of SEQ ID NO: 585523
guuuaacuugagugggaau

SEQ ID NO: 646661 - RNA, 19 nt, Artificial Sequence
  Description of Artificial Sequence: Synthetic oligonucleotide
  Antisense strand to SEQ ID NO: 646660
auucccacucaaguuaaac

SEQ ID NO: 646662 - RNA, 19 nt, Artificial Sequence
  Description of Artificial Sequence: Synthetic oligonucleotide
  Sense strand starting at position 1384 of SEQ ID NO: 585523
agaggcaacuguccagauu

SEQ ID NO: 646663 - RNA, 19 nt, Artificial Sequence
  Description of Artificial Sequence: Synthetic oligonucleotide
  Antisense strand to SEQ ID NO: 646662
aaucuggacaguugccucu

SEQ ID NO: 646664 - RNA, 19 nt, Artificial Sequence
  Description of Artificial Sequence: Synthetic oligonucleotide
  Sense strand starting at position 1385 of SEQ ID NO: 585523
gaggcaacuguccagauua

SEQ ID NO: 646665 - RNA, 19 nt, Artificial Sequence
  Description of Artificial Sequence: Synthetic oligonucleotide
  Antisense strand to SEQ ID NO: 646664
uaaucuggacaguugccuc

SEQ ID NO: 646666 - RNA, 19 nt, Artificial Sequence
  Description of Artificial Sequence: Synthetic oligonucleotide
  Sense strand starting at position 1387 of SEQ ID NO: 585523
ggcaacuguccagauuauu

SEQ ID NO: 646667 - RNA, 19 nt, Artificial Sequence
  Description of Artificial Sequence: Synthetic oligonucleotide
  Antisense strand to SEQ ID NO: 646666
aauaaucuggacaguugcc

SEQ ID NO: 646668 - RNA, 19 nt, Artificial Sequence
  Description of Artificial Sequence: Synthetic oligonucleotide
  Sense strand starting at position 1433 of SEQ ID NO: 585523
cccuaaugugguuaauauu

SEQ ID NO: 646669 - RNA, 19 nt, Artificial Sequence
  Description of Artificial Sequence: Synthetic oligonucleotide
  Antisense strand to SEQ ID NO: 646668
aauauuaaccacauuaggg

SEQ ID NO: 646670 - RNA, 19 nt, Artificial Sequence
  Description of Artificial Sequence: Synthetic oligonucleotide
  Sense strand starting at position 1602 of SEQ ID NO: 585523
uuggcuuguaauuaugaga

SEQ ID NO: 646671 - RNA, 19 nt, Artificial Sequence
  Description of Artificial Sequence: Synthetic oligonucleotide
  Antisense strand to SEQ ID NO: 646670
ucucauaauuacaagccaa

SEQ ID NO: 646672 - RNA, 19 nt, Artificial Sequence
  Description of Artificial Sequence: Synthetic oligonucleotide
  Sense strand starting at position 1615 of SEQ ID NO: 585523
augagacuauucgcugaaa

SEQ ID NO: 646673 - RNA, 19 nt, Artificial Sequence
  Description of Artificial Sequence: Synthetic oligonucleotide
  Antisense strand to SEQ ID NO: 646672
uuucagcgaauagucucau

SEQ ID NO: 646674 - RNA, 19 nt, Artificial Sequence
  Description of Artificial Sequence: Synthetic oligonucleotide
  Sense strand starting at position 1616 of SEQ ID NO: 585523
ugagacuauucgcugaaag

SEQ ID NO: 646675 - RNA, 19 nt, Artificial Sequence
  Description of Artificial Sequence: Synthetic oligonucleotide
  Antisense strand to SEQ ID NO: 646674
cuuucagcgaauagucuca

SEQ ID NO: 646676 - RNA, 19 nt, Artificial Sequence
  Description of Artificial Sequence: Synthetic oligonucleotide
  Sense strand starting at position 1618 of SEQ ID NO: 585523
agacuauucgcugaaagua

SEQ ID NO: 646677 - RNA, 19 nt, Artificial Sequence
  Description of Artificial Sequence: Synthetic oligonucleotide
  Antisense strand to SEQ ID NO: 646676
uacuuucagcgaauagucu

SEQ ID NO: 646678 - RNA, 19 nt, Artificial Sequence
  Description of Artificial Sequence: Synthetic oligonucleotide
  Sense strand starting at position 1705 of SEQ ID NO: 585523
guugauggaaucugaaacu

SEQ ID NO: 646679 - RNA, 19 nt, Artificial Sequence
  Description of Artificial Sequence: Synthetic oligonucleotide
  Antisense strand to SEQ ID NO: 646678
aguuucagauuccaucaac

SEQ ID NO: 646680 - RNA, 19 nt, Artificial Sequence
  Description of Artificial Sequence: Synthetic oligonucleotide
  Sense strand starting at position 1798 of SEQ ID NO: 585523
gcauuuggaguuugcacau

SEQ ID NO: 646681 - RNA, 19 nt, Artificial Sequence
  Description of Artificial Sequence: Synthetic oligonucleotide
  Antisense strand to SEQ ID NO: 646680
augugcaaacuccaaaugc

SEQ ID NO: 646682 - RNA, 19 nt, Artificial Sequence
  Description of Artificial Sequence: Synthetic oligonucleotide
  Sense strand starting at position 2023 of SEQ ID NO: 585523
gacagaucagcaugugaga

SEQ ID NO: 646683 - RNA, 19 nt, Artificial Sequence
  Description of Artificial Sequence: Synthetic oligonucleotide
  Antisense strand to SEQ ID NO: 646682
ucucacaugcugaucuguc

SEQ ID NO: 646684 - RNA, 19 nt, Artificial Sequence
  Description of Artificial Sequence: Synthetic oligonucleotide
  Sense strand starting at position 2119 of SEQ ID NO: 585523
uggcauuugucuuuaacua

SEQ ID NO: 646685 - RNA, 19 nt, Artificial Sequence
  Description of Artificial Sequence: Synthetic oligonucleotide
  Antisense strand to SEQ ID NO: 646684
uaguuaaagacaaaugcca

SEQ ID NO: 646686 - RNA, 19 nt, Artificial Sequence
  Description of Artificial Sequence: Synthetic oligonucleotide
  Sense strand starting at position 2130 of SEQ ID NO: 585523
uuuaacuaacagcgagaau

SEQ ID NO: 646687 - RNA, 19 nt, Artificial Sequence
  Description of Artificial Sequence: Synthetic oligonucleotide
  Antisense strand to SEQ ID NO: 646686
auucucgcuguuaguuaaa

SEQ ID NO: 646688 - RNA, 19 nt, Artificial Sequence
  Description of Artificial Sequence: Synthetic oligonucleotide
  Sense strand starting at position 2376 of SEQ ID NO: 585523
gucauuauauaaguugaga

SEQ ID NO: 646689 - RNA, 19 nt, Artificial Sequence
  Description of Artificial Sequence: Synthetic oligonucleotide
  Antisense strand to SEQ ID NO: 646688
ucucaacuuauauaaugac

SEQ ID NO: 646690 - RNA, 19 nt, Artificial Sequence
  Description of Artificial Sequence: Synthetic oligonucleotide
  Sense strand starting at position 2405 of SEQ ID NO: 585523
ggaaguuugauguggagga

SEQ ID NO: 646691 - RNA, 19 nt, Artificial Sequence
  Description of Artificial Sequence: Synthetic oligonucleotide
  Antisense strand to SEQ ID NO: 646690
uccuccacaucaaacuucc

SEQ ID NO: 646692 - RNA, 19 nt, Artificial Sequence
  Description of Artificial Sequence: Synthetic oligonucleotide
  Sense strand starting at position 2450 of SEQ ID NO: 585523
gcaagaacccuuuagcaag

SEQ ID NO: 646693 - RNA, 19 nt, Artificial Sequence
  Description of Artificial Sequence: Synthetic oligonucleotide
  Antisense strand to SEQ ID NO: 646692
cuugcuaaaggguucuugc

SEQ ID NO: 646694 - RNA, 19 nt, Artificial Sequence
  Description of Artificial Sequence: Synthetic oligonucleotide
  Sense strand starting at position 2474 of SEQ ID NO: 585523
gauuucugaacgugagucu

SEQ ID NO: 646695 - RNA, 19 nt, Artificial Sequence
  Description of Artificial Sequence: Synthetic oligonucleotide
  Antisense strand to SEQ ID NO: 646694
agacucacguucagaaauc

SEQ ID NO: 646696 - RNA, 19 nt, Artificial Sequence
  Description of Artificial Sequence: Synthetic oligonucleotide
  Sense strand starting at position 2555 of SEQ ID NO: 585523
cugugaaaugaaggacuuu

SEQ ID NO: 646697 - RNA, 19 nt, Artificial Sequence
  Description of Artificial Sequence: Synthetic oligonucleotide
  Antisense strand to SEQ ID NO: 646696
aaaguccuucauuucacag

SEQ ID NO: 646698 - RNA, 19 nt, Artificial Sequence
  Description of Artificial Sequence: Synthetic oligonucleotide
  Sense strand starting at position 2902 of SEQ ID NO: 585523
aagugagaucuaggaagcu

SEQ ID NO: 646699 - RNA, 19 nt, Artificial Sequence
  Description of Artificial Sequence: Synthetic oligonucleotide
  Antisense strand to SEQ ID NO: 646698
agcuuccuagaucucacuu

SEQ ID NO: 646700 - RNA, 19 nt, Artificial Sequence
  Description of Artificial Sequence: Synthetic oligonucleotide
  Sense strand starting at position 2914 of SEQ ID NO: 585523
ggaagcuagcaagaucuca

SEQ ID NO: 646701 - RNA, 19 nt, Artificial Sequence
  Description of Artificial Sequence: Synthetic oligonucleotide
  Antisense strand to SEQ ID NO: 646700
ugagaucuugcuagcuucc

SEQ ID NO: 646702 - RNA, 19 nt, Artificial Sequence
  Description of Artificial Sequence: Synthetic oligonucleotide
  Sense strand starting at position 2943 of SEQ ID NO: 585523
caaaguaaagcagaauguu

SEQ ID NO: 646703 - RNA, 19 nt, Artificial Sequence
  Description of Artificial Sequence: Synthetic oligonucleotide
  Antisense strand to SEQ ID NO: 646702
aacauucugcuuuacuuug

SEQ ID NO: 646704 - RNA, 19 nt, Artificial Sequence
  Description of Artificial Sequence: Synthetic oligonucleotide
  Sense strand starting at position 3275 of SEQ ID NO: 585523
cccaucaggcauugaaaga

SEQ ID NO: 646705 - RNA, 19 nt, Artificial Sequence
  Description of Artificial Sequence: Synthetic oligonucleotide
  Antisense strand to SEQ ID NO: 646704
ucuuucaaugccugauggg

SEQ ID NO: 646706 - RNA, 19 nt, Artificial Sequence
  Description of Artificial Sequence: Synthetic oligonucleotide
  Sense strand starting at position 3474 of SEQ ID NO: 585523
ucaauaguggaaugcaaua

SEQ ID NO: 646707 - RNA, 19 nt, Artificial Sequence
  Description of Artificial Sequence: Synthetic oligonucleotide
  Antisense strand to SEQ ID NO: 646706
uauugcauuccacuauuga

SEQ ID NO: 646708 - RNA, 19 nt, Artificial Sequence
  Description of Artificial Sequence: Synthetic oligonucleotide
  Sense strand starting at position 3479 of SEQ ID NO: 585523
aguggaaugcaauauucuu

SEQ ID NO: 646709 - RNA, 19 nt, Artificial Sequence
  Description of Artificial Sequence: Synthetic oligonucleotide
  Antisense strand to SEQ ID NO: 646708
aagaauauugcauuccacu

SEQ ID NO: 646710 - RNA, 19 nt, Artificial Sequence
  Description of Artificial Sequence: Synthetic oligonucleotide
  Sense strand starting at position 3517 of SEQ ID NO: 585523
cugucauaggacuggaaua

SEQ ID NO: 646711 - RNA, 19 nt, Artificial Sequence
  Description of Artificial Sequence: Synthetic oligonucleotide
  Antisense strand to SEQ ID NO: 646710
uauuccaguccuaugacag

SEQ ID NO: 646712 - RNA, 19 nt, Artificial Sequence
  Description of Artificial Sequence: Synthetic oligonucleotide
  Sense strand starting at position 3518 of SEQ ID NO: 585523
ugucauaggacuggaauau

SEQ ID NO: 646713 - RNA, 19 nt, Artificial Sequence
  Description of Artificial Sequence: Synthetic oligonucleotide
  Antisense strand to SEQ ID NO: 646712
auauuccaguccuaugaca

SEQ ID NO: 646714 - RNA, 19 nt, Artificial Sequence
  Description of Artificial Sequence: Synthetic oligonucleotide
  Sense strand starting at position 3631 of SEQ ID NO: 585523
gacauuaggcaguauuaca

SEQ ID NO: 646715 - RNA, 19 nt, Artificial Sequence
  Description of Artificial Sequence: Synthetic oligonucleotide
  Antisense strand to SEQ ID NO: 646714
uguaauacugccuaauguc

SEQ ID NO: 646716 - RNA, 19 nt, Artificial Sequence
  Description of Artificial Sequence: Synthetic oligonucleotide
  Sense strand starting at position 3656 of SEQ ID NO: 585523
aaguuagaaucugugaaug

SEQ ID NO: 646717 - RNA, 19 nt, Artificial Sequence
  Description of Artificial Sequence: Synthetic oligonucleotide
  Antisense strand to SEQ ID NO: 646716
cauucacagauucuaacuu

SEQ ID NO: 646718 - RNA, 19 nt, Artificial Sequence
  Description of Artificial Sequence: Synthetic oligonucleotide
  Sense strand starting at position 3661 of SEQ ID NO: 585523
agaaucugugaaugguauc

SEQ ID NO: 646719 - RNA, 19 nt, Artificial Sequence
  Description of Artificial Sequence: Synthetic oligonucleotide
  Antisense strand to SEQ ID NO: 646718
gauaccauucacagauucu

SEQ ID NO: 646720 - RNA, 19 nt, Artificial Sequence
  Description of Artificial Sequence: Synthetic oligonucleotide
  Sense strand starting at position 3698 of SEQ ID NO: 585523
cugagaacaugauugcuaa

SEQ ID NO: 646721 - RNA, 19 nt, Artificial Sequence
  Description of Artificial Sequence: Synthetic oligonucleotide
  Antisense strand to SEQ ID NO: 646720
uuagcaaucauguucucag

SEQ ID NO: 646722 - RNA, 19 nt, Artificial Sequence
  Description of Artificial Sequence: Synthetic oligonucleotide
  Sense strand starting at position 3699 of SEQ ID NO: 585523
ugagaacaugauugcuaau

SEQ ID NO: 646723 - RNA, 19 nt, Artificial Sequence
  Description of Artificial Sequence: Synthetic oligonucleotide
  Antisense strand to SEQ ID NO: 646722
auuagcaaucauguucuca

SEQ ID NO: 646724 - RNA, 19 nt, Artificial Sequence
  Description of Artificial Sequence: Synthetic oligonucleotide
  Sense strand starting at position 3884 of SEQ ID NO: 585523
ucagucuaacagugggaaa

SEQ ID NO: 646725 - RNA, 19 nt, Artificial Sequence
  Description of Artificial Sequence: Synthetic oligonucleotide
  Antisense strand to SEQ ID NO: 646724
uuucccacuguuagacuga

SEQ ID NO: 646726 - RNA, 19 nt, Artificial Sequence
  Description of Artificial Sequence: Synthetic oligonucleotide
  Sense strand starting at position 3886 of SEQ ID NO: 585523
agucuaacagugggaaaua

SEQ ID NO: 646727 - RNA, 19 nt, Artificial Sequence
  Description of Artificial Sequence: Synthetic oligonucleotide
  Antisense strand to SEQ ID NO: 646726
uauuucccacuguuagacu

SEQ ID NO: 646728 - RNA, 19 nt, Artificial Sequence
  Description of Artificial Sequence: Synthetic oligonucleotide
  Sense strand starting at position 265 of SEQ ID NO: 585524
guauacacuugauugaauc

SEQ ID NO: 646729 - RNA, 19 nt, Artificial Sequence
  Description of Artificial Sequence: Synthetic oligonucleotide
  Antisense strand to SEQ ID NO: 646728
gauucaaucaaguguauac

SEQ ID NO: 646730 - RNA, 19 nt, Artificial Sequence
  Description of Artificial Sequence: Synthetic oligonucleotide
  Sense strand starting at position 2025 of SEQ ID NO: 585524
uuccgcuuccugucaguua

SEQ ID NO: 646731 - RNA, 19 nt, Artificial Sequence
  Description of Artificial Sequence: Synthetic oligonucleotide
  Antisense strand to SEQ ID NO: 646730
uaacugacaggaagcggaa

SEQ ID NO: 646732 - RNA, 19 nt, Artificial Sequence
  Description of Artificial Sequence: Synthetic oligonucleotide
  Sense strand starting at position 2109 of SEQ ID NO: 585524
gugggaaguagguaggauu

SEQ ID NO: 646733 - RNA, 19 nt, Artificial Sequence
  Description of Artificial Sequence: Synthetic oligonucleotide
  Antisense strand to SEQ ID NO: 646732
aauccuaccuacuucccac

SEQ ID NO: 646734 - RNA, 19 nt, Artificial Sequence
  Description of Artificial Sequence: Synthetic oligonucleotide
  Sense strand starting at position 2187 of SEQ ID NO: 585524
ggacgaauuugcgucaaug

SEQ ID NO: 646735 - RNA, 19 nt, Artificial Sequence
  Description of Artificial Sequence: Synthetic oligonucleotide
  Antisense strand to SEQ ID NO: 646734
cauugacgcaaauucgucc

SEQ ID NO: 646736 - RNA, 19 nt, Artificial Sequence
  Description of Artificial Sequence: Synthetic oligonucleotide
  Sense strand starting at position 2378 of SEQ ID NO: 585524
acccucuucguggaggaaa

SEQ ID NO: 646737 - RNA, 19 nt, Artificial Sequence
  Description of Artificial Sequence: Synthetic oligonucleotide
  Antisense strand to SEQ ID NO: 646736
uuuccuccacgaagagggu

SEQ ID NO: 646738 - RNA, 19 nt, Artificial Sequence
  Description of Artificial Sequence: Synthetic oligonucleotide
  Sense strand starting at position 2380 of SEQ ID NO: 585524
ccucuucguggaggaaaua

SEQ ID NO: 646739 - RNA, 19 nt, Artificial Sequence
  Description of Artificial Sequence: Synthetic oligonucleotide
  Antisense strand to SEQ ID NO: 646738
uauuuccuccacgaagagg

SEQ ID NO: 646740 - RNA, 19 nt, Artificial Sequence
  Description of Artificial Sequence: Synthetic oligonucleotide
  Sense strand starting at position 2381 of SEQ ID NO: 585524
cucuucguggaggaaauau

SEQ ID NO: 646741 - RNA, 19 nt, Artificial Sequence
  Description of Artificial Sequence: Synthetic oligonucleotide
  Antisense strand to SEQ ID NO: 646740
auauuuccuccacgaagag

SEQ ID NO: 646742 - RNA, 19 nt, Artificial Sequence
  Description of Artificial Sequence: Synthetic oligonucleotide
  Sense strand starting at position 2707 of SEQ ID NO: 585524
uucugagucuggucucaaa

SEQ ID NO: 646743 - RNA, 19 nt, Artificial Sequence
  Description of Artificial Sequence: Synthetic oligonucleotide
  Antisense strand to SEQ ID NO: 646742
uuugagaccagacucagaa

SEQ ID NO: 646744 - RNA, 19 nt, Artificial Sequence
  Description of Artificial Sequence: Synthetic oligonucleotide
  Sense strand starting at position 2870 of SEQ ID NO: 585524
cucgaucuuguagacagau

SEQ ID NO: 646745 - RNA, 19 nt, Artificial Sequence
  Description of Artificial Sequence: Synthetic oligonucleotide
  Antisense strand to SEQ ID NO: 646744
aucugucuacaagaucgag

SEQ ID NO: 646746 - RNA, 19 nt, Artificial Sequence
  Description of Artificial Sequence: Synthetic oligonucleotide
  Sense strand starting at position 2872 of SEQ ID NO: 585524
cgaucuuguagacagaugu

SEQ ID NO: 646747 - RNA, 19 nt, Artificial Sequence
  Description of Artificial Sequence: Synthetic oligonucleotide
  Antisense strand to SEQ ID NO: 646746
acaucugucuacaagaucg

SEQ ID NO: 646748 - RNA, 19 nt, Artificial Sequence
  Description of Artificial Sequence: Synthetic oligonucleotide
  Sense strand starting at position 2879 of SEQ ID NO: 585524
guagacagaugucuuucua

SEQ ID NO: 646749 - RNA, 19 nt, Artificial Sequence
  Description of Artificial Sequence: Synthetic oligonucleotide
  Antisense strand to SEQ ID NO: 646748
uagaaagacaucugucuac

SEQ ID NO: 646750 - RNA, 19 nt, Artificial Sequence
  Description of Artificial Sequence: Synthetic oligonucleotide
  Sense strand starting at position 2883 of SEQ ID NO: 585524
acagaugucuuucuaucua

SEQ ID NO: 646751 - RNA, 19 nt, Artificial Sequence
  Description of Artificial Sequence: Synthetic oligonucleotide
  Antisense strand to SEQ ID NO: 646750
uagauagaaagacaucugu

SEQ ID NO: 646752 - RNA, 19 nt, Artificial Sequence
  Description of Artificial Sequence: Synthetic oligonucleotide
  Sense strand starting at position 2887 of SEQ ID NO: 585524
augucuuucuaucuaggga

SEQ ID NO: 646753 - RNA, 19 nt, Artificial Sequence
  Description of Artificial Sequence: Synthetic oligonucleotide
  Antisense strand to SEQ ID NO: 646752
ucccuagauagaaagacau

SEQ ID NO: 646754 - RNA, 19 nt, Artificial Sequence
  Description of Artificial Sequence: Synthetic oligonucleotide
  Sense strand starting at position 2916 of SEQ ID NO: 585524
gaaacuuuguaguuuggaa

SEQ ID NO: 646755 - RNA, 19 nt, Artificial Sequence
  Description of Artificial Sequence: Synthetic oligonucleotide
  Antisense strand to SEQ ID NO: 646754
uuccaaacuacaaaguuuc

SEQ ID NO: 646756 - RNA, 19 nt, Artificial Sequence
  Description of Artificial Sequence: Synthetic oligonucleotide
  Sense strand starting at position 2918 of SEQ ID NO: 585524
aacuuuguaguuuggaaac

SEQ ID NO: 646757 - RNA, 19 nt, Artificial Sequence
  Description of Artificial Sequence: Synthetic oligonucleotide
  Antisense strand to SEQ ID NO: 646756
guuuccaaacuacaaaguu

SEQ ID NO: 646758 - RNA, 19 nt, Artificial Sequence
  Description of Artificial Sequence: Synthetic oligonucleotide
  Sense strand starting at position 2931 of SEQ ID NO: 585524
ggaaaccacuuucucgaua

SEQ ID NO: 646759 - RNA, 19 nt, Artificial Sequence
  Description of Artificial Sequence: Synthetic oligonucleotide
  Antisense strand to SEQ ID NO: 646758
uaucgagaaagugguuucc

SEQ ID NO: 646760 - RNA, 19 nt, Artificial Sequence
  Description of Artificial Sequence: Synthetic oligonucleotide
  Sense strand starting at position 3018 of SEQ ID NO: 585524
guaaauaggcauuaacauc

SEQ ID NO: 646761 - RNA, 19 nt, Artificial Sequence
  Description of Artificial Sequence: Synthetic oligonucleotide
  Antisense strand to SEQ ID NO: 646760
gauguuaaugccuauuuac

SEQ ID NO: 646762 - RNA, 19 nt, Artificial Sequence
  Description of Artificial Sequence: Synthetic oligonucleotide
  Sense strand starting at position 3026 of SEQ ID NO: 585524
gcauuaacaucaucuuggu

SEQ ID NO: 646763 - RNA, 19 nt, Artificial Sequence
  Description of Artificial Sequence: Synthetic oligonucleotide
  Antisense strand to SEQ ID NO: 646762
accaagaugauguuaaugc

SEQ ID NO: 646764 - RNA, 19 nt, Artificial Sequence
  Description of Artificial Sequence: Synthetic oligonucleotide
  Sense strand starting at position 3042 of SEQ ID NO: 585524
gguucucucuaauuaaguu

SEQ ID NO: 646765 - RNA, 19 nt, Artificial Sequence
  Description of Artificial Sequence: Synthetic oligonucleotide
  Antisense strand to SEQ ID NO: 646764
aacuuaauuagagagaacc

SEQ ID NO: 646766 - RNA, 19 nt, Artificial Sequence
  Description of Artificial Sequence: Synthetic oligonucleotide
  Sense strand starting at position 3074 of SEQ ID NO: 585524
guuugacagccaggucaaa

SEQ ID NO: 646767 - RNA, 19 nt, Artificial Sequence
  Description of Artificial Sequence: Synthetic oligonucleotide
  Antisense strand to SEQ ID NO: 646766
uuugaccuggcugucaaac

SEQ ID NO: 646768 - RNA, 19 nt, Artificial Sequence
  Description of Artificial Sequence: Synthetic oligonucleotide
  Sense strand starting at position 3102 of SEQ ID NO: 585524
ugaugccuuccugaugcua

SEQ ID NO: 646769 - RNA, 19 nt, Artificial Sequence
  Description of Artificial Sequence: Synthetic oligonucleotide
  Antisense strand to SEQ ID NO: 646768
uagcaucaggaaggcauca

SEQ ID NO: 646770 - RNA, 19 nt, Artificial Sequence
  Description of Artificial Sequence: Synthetic oligonucleotide
  Sense strand starting at position 3213 of SEQ ID NO: 585524
ggauaagaauugguuccau

SEQ ID NO: 646771 - RNA, 19 nt, Artificial Sequence
  Description of Artificial Sequence: Synthetic oligonucleotide
  Antisense strand to SEQ ID NO: 646770
auggaaccaauucuuaucc

SEQ ID NO: 646772 - RNA, 19 nt, Artificial Sequence
  Description of Artificial Sequence: Synthetic oligonucleotide
  Sense strand starting at position 3269 of SEQ ID NO: 585524
gggaguauuauaugugaau

SEQ ID NO: 646773 - RNA, 19 nt, Artificial Sequence
  Description of Artificial Sequence: Synthetic oligonucleotide
  Antisense strand to SEQ ID NO: 646772
auucacauauaauacuccc

SEQ ID NO: 646774 - RNA, 19 nt, Artificial Sequence
  Description of Artificial Sequence: Synthetic oligonucleotide
  Sense strand starting at position 3270 of SEQ ID NO: 585524
ggaguauuauaugugaaug

SEQ ID NO: 646775 - RNA, 19 nt, Artificial Sequence
  Description of Artificial Sequence: Synthetic oligonucleotide
  Antisense strand to SEQ ID NO: 646774
cauucacauauaauacucc

SEQ ID NO: 646776 - RNA, 19 nt, Artificial Sequence
  Description of Artificial Sequence: Synthetic oligonucleotide
  Sense strand starting at position 3271 of SEQ ID NO: 585524
gaguauuauaugugaaugg

SEQ ID NO: 646777 - RNA, 19 nt, Artificial Sequence
  Description of Artificial Sequence: Synthetic oligonucleotide
  Antisense strand to SEQ ID NO: 646776
ccauucacauauaauacuc

SEQ ID NO: 646778 - RNA, 19 nt, Artificial Sequence
  Description of Artificial Sequence: Synthetic oligonucleotide
  Sense strand starting at position 3278 of SEQ ID NO: 585524
auaugugaauggucacaug

SEQ ID NO: 646779 - RNA, 19 nt, Artificial Sequence
  Description of Artificial Sequence: Synthetic oligonucleotide
  Antisense strand to SEQ ID NO: 646778
caugugaccauucacauau

SEQ ID NO: 646780 - RNA, 19 nt, Artificial Sequence
  Description of Artificial Sequence: Synthetic oligonucleotide
  Sense strand starting at position 3287 of SEQ ID NO: 585524
uggucacauguauagugaa

SEQ ID NO: 646781 - RNA, 19 nt, Artificial Sequence
  Description of Artificial Sequence: Synthetic oligonucleotide
  Antisense strand to SEQ ID NO: 646780
uucacuauacaugugacca

SEQ ID NO: 646782 - RNA, 19 nt, Artificial Sequence
  Description of Artificial Sequence: Synthetic oligonucleotide
  Sense strand starting at position 3315 of SEQ ID NO: 585524
uggauagggugaguacuau

SEQ ID NO: 646783 - RNA, 19 nt, Artificial Sequence
  Description of Artificial Sequence: Synthetic oligonucleotide
  Antisense strand to SEQ ID NO: 646782
auaguacucacccuaucca

SEQ ID NO: 646784 - RNA, 19 nt, Artificial Sequence
  Description of Artificial Sequence: Synthetic oligonucleotide
  Sense strand starting at position 3321 of SEQ ID NO: 585524
gggugaguacuauagaguu

SEQ ID NO: 646785 - RNA, 19 nt, Artificial Sequence
  Description of Artificial Sequence: Synthetic oligonucleotide
  Antisense strand to SEQ ID NO: 646784
aacucuauaguacucaccc

SEQ ID NO: 646786 - RNA, 19 nt, Artificial Sequence
  Description of Artificial Sequence: Synthetic oligonucleotide
  Sense strand starting at position 3328 of SEQ ID NO: 585524
uacuauagaguuuguguaa

SEQ ID NO: 646787 - RNA, 19 nt, Artificial Sequence
  Description of Artificial Sequence: Synthetic oligonucleotide
  Antisense strand to SEQ ID NO: 646786
uuacacaaacucuauagua

SEQ ID NO: 646788 - RNA, 19 nt, Artificial Sequence
  Description of Artificial Sequence: Synthetic oligonucleotide
  Sense strand starting at position 3329 of SEQ ID NO: 585524
acuauagaguuuguguaag

SEQ ID NO: 646789 - RNA, 19 nt, Artificial Sequence
  Description of Artificial Sequence: Synthetic oligonucleotide
  Antisense strand to SEQ ID NO: 646788
cuuacacaaacucuauagu

SEQ ID NO: 646790 - RNA, 19 nt, Artificial Sequence
  Description of Artificial Sequence: Synthetic oligonucleotide
  Sense strand starting at position 3335 of SEQ ID NO: 585524
gaguuuguguaaguaaaga

SEQ ID NO: 646791 - RNA, 19 nt, Artificial Sequence
  Description of Artificial Sequence: Synthetic oligonucleotide
  Antisense strand to SEQ ID NO: 646790
ucuuuacuuacacaaacuc

SEQ ID NO: 646792 - RNA, 19 nt, Artificial Sequence
  Description of Artificial Sequence: Synthetic oligonucleotide
  Sense strand starting at position 3369 of SEQ ID NO: 585524
guuauaaacuacuugauag

SEQ ID NO: 646793 - RNA, 19 nt, Artificial Sequence
  Description of Artificial Sequence: Synthetic oligonucleotide
  Antisense strand to SEQ ID NO: 646792
cuaucaaguaguuuauaac

SEQ ID NO: 646794 - RNA, 19 nt, Artificial Sequence
  Description of Artificial Sequence: Synthetic oligonucleotide
  Sense strand starting at position 3381 of SEQ ID NO: 585524
uugauaggccaaugaaaug

SEQ ID NO: 646795 - RNA, 19 nt, Artificial Sequence
  Description of Artificial Sequence: Synthetic oligonucleotide
  Antisense strand to SEQ ID NO: 646794
cauuucauuggccuaucaa

SEQ ID NO: 646796 - RNA, 19 nt, Artificial Sequence
  Description of Artificial Sequence: Synthetic oligonucleotide
  Sense strand starting at position 3399 of SEQ ID NO: 585524
ggauaugucuuacuuggau

SEQ ID NO: 646797 - RNA, 19 nt, Artificial Sequence
  Description of Artificial Sequence: Synthetic oligonucleotide
  Antisense strand to SEQ ID NO: 646796
auccaaguaagacauaucc

SEQ ID NO: 646798 - RNA, 19 nt, Artificial Sequence
  Description of Artificial Sequence: Synthetic oligonucleotide
  Sense strand starting at position 3405 of SEQ ID NO: 585524
gucuuacuuggauaauugu

SEQ ID NO: 646799 - RNA, 19 nt, Artificial Sequence
  Description of Artificial Sequence: Synthetic oligonucleotide
  Antisense strand to SEQ ID NO: 646798
acaauuauccaaguaagac

SEQ ID NO: 646800 - RNA, 19 nt, Artificial Sequence
  Description of Artificial Sequence: Synthetic oligonucleotide
  Sense strand starting at position 3432 of SEQ ID NO: 585524
gccauuuaguaucugaugu

SEQ ID NO: 646801 - RNA, 19 nt, Artificial Sequence
  Description of Artificial Sequence: Synthetic oligonucleotide
  Antisense strand to SEQ ID NO: 646800
acaucagauacuaaauggc

SEQ ID NO: 646802 - RNA, 19 nt, Artificial Sequence
  Description of Artificial Sequence: Synthetic oligonucleotide
  Sense strand starting at position 3440 of SEQ ID NO: 585524
guaucugauguagacuuga

SEQ ID NO: 646803 - RNA, 19 nt, Artificial Sequence
  Description of Artificial Sequence: Synthetic oligonucleotide
  Antisense strand to SEQ ID NO: 646802
ucaagucuacaucagauac

SEQ ID NO: 646804 - RNA, 19 nt, Artificial Sequence
  Description of Artificial Sequence: Synthetic oligonucleotide
  Sense strand starting at position 3460 of SEQ ID NO: 585524
uuacaaagcugguugauga

SEQ ID NO: 646805 - RNA, 19 nt, Artificial Sequence
  Description of Artificial Sequence: Synthetic oligonucleotide
  Antisense strand to SEQ ID NO: 646804
ucaucaaccagcuuuguaa

SEQ ID NO: 646806 - RNA, 19 nt, Artificial Sequence
  Description of Artificial Sequence: Synthetic oligonucleotide
  Sense strand starting at position 3461 of SEQ ID NO: 585524
uacaaagcugguugaugaa

SEQ ID NO: 646807 - RNA, 19 nt, Artificial Sequence
  Description of Artificial Sequence: Synthetic oligonucleotide
  Antisense strand to SEQ ID NO: 646806
uucaucaaccagcuuugua

SEQ ID NO: 646808 - RNA, 19 nt, Artificial Sequence
  Description of Artificial Sequence: Synthetic oligonucleotide
  Sense strand starting at position 35 of SEQ ID NO: 585525
augccaugucuuuagaaua

SEQ ID NO: 646809 - RNA, 19 nt, Artificial Sequence
  Description of Artificial Sequence: Synthetic oligonucleotide
  Antisense strand to SEQ ID NO: 646808
uauucuaaagacauggcau

SEQ ID NO: 646810 - RNA, 19 nt, Artificial Sequence
  Description of Artificial Sequence: Synthetic oligonucleotide
  Sense strand starting at position 83 of SEQ ID NO: 585525
gugguugcuaaucauuaag

SEQ ID NO: 646811 - RNA, 19 nt, Artificial Sequence
  Description of Artificial Sequence: Synthetic oligonucleotide
  Antisense strand to SEQ ID NO: 646810
cuuaaugauuagcaaccac

SEQ ID NO: 646812 - RNA, 19 nt, Artificial Sequence
  Description of Artificial Sequence: Synthetic oligonucleotide
  Sense strand starting at position 403 of SEQ ID NO: 585525
uugcaaauaccaggaaauu

SEQ ID NO: 646813 - RNA, 19 nt, Artificial Sequence
  Description of Artificial Sequence: Synthetic oligonucleotide
  Antisense strand to SEQ ID NO: 646812
aauuuccugguauuugcaa

SEQ ID NO: 646814 - RNA, 19 nt, Artificial Sequence
  Description of Artificial Sequence: Synthetic oligonucleotide
  Sense strand starting at position 625 of SEQ ID NO: 585525
uuaaauggacccugaguca

SEQ ID NO: 646815 - RNA, 19 nt, Artificial Sequence
  Description of Artificial Sequence: Synthetic oligonucleotide
  Antisense strand to SEQ ID NO: 646814
ugacucaggguccauuuaa

SEQ ID NO: 646816 - RNA, 19 nt, Artificial Sequence
  Description of Artificial Sequence: Synthetic oligonucleotide
  Sense strand starting at position 664 of SEQ ID NO: 585525
cuggucuuccauuagaaau

SEQ ID NO: 646817 - RNA, 19 nt, Artificial Sequence
  Description of Artificial Sequence: Synthetic oligonucleotide
  Antisense strand to SEQ ID NO: 646816
auuucuaauggaagaccag

SEQ ID NO: 646818 - RNA, 19 nt, Artificial Sequence
  Description of Artificial Sequence: Synthetic oligonucleotide
  Sense strand starting at position 815 of SEQ ID NO: 585525
uggguaccuaucuguggaa

SEQ ID NO: 646819 - RNA, 19 nt, Artificial Sequence
  Description of Artificial Sequence: Synthetic oligonucleotide
  Antisense strand to SEQ ID NO: 646818
uuccacagauagguaccca

SEQ ID NO: 646820 - RNA, 19 nt, Artificial Sequence
  Description of Artificial Sequence: Synthetic oligonucleotide
  Sense strand starting at position 816 of SEQ ID NO: 585525
ggguaccuaucuguggaaa

SEQ ID NO: 646821 - RNA, 19 nt, Artificial Sequence
  Description of Artificial Sequence: Synthetic oligonucleotide
  Antisense strand to SEQ ID NO: 646820
uuuccacagauagguaccc

SEQ ID NO: 646822 - RNA, 19 nt, Artificial Sequence
  Description of Artificial Sequence: Synthetic oligonucleotide
  Sense strand starting at position 1002 of SEQ ID NO: 585525
gccuaauauuaagcagaca

SEQ ID NO: 646823 - RNA, 19 nt, Artificial Sequence
  Description of Artificial Sequence: Synthetic oligonucleotide
  Antisense strand to SEQ ID NO: 646822
ugucugcuuaauauuaggc

SEQ ID NO: 646824 - RNA, 19 nt, Artificial Sequence
  Description of Artificial Sequence: Synthetic oligonucleotide
  Sense strand starting at position 1173 of SEQ ID NO: 585525
gggacuaggagaugcaauu

SEQ ID NO: 646825 - RNA, 19 nt, Artificial Sequence
  Description of Artificial Sequence: Synthetic oligonucleotide
  Antisense strand to SEQ ID NO: 646824
aauugcaucuccuaguccc

SEQ ID NO: 646826 - RNA, 19 nt, Artificial Sequence
  Description of Artificial Sequence: Synthetic oligonucleotide
  Sense strand starting at position 1829 of SEQ ID NO: 585525
ccgagagguuggaaagaga

SEQ ID NO: 646827 - RNA, 19 nt, Artificial Sequence
  Description of Artificial Sequence: Synthetic oligonucleotide
  Antisense strand to SEQ ID NO: 646826
ucucuuuccaaccucucgg

SEQ ID NO: 646828 - RNA, 19 nt, Artificial Sequence
  Description of Artificial Sequence: Synthetic oligonucleotide
  Sense strand starting at position 1915 of SEQ ID NO: 585525
acugaacgcccacgauuua

SEQ ID NO: 646829 - RNA, 19 nt, Artificial Sequence
  Description of Artificial Sequence: Synthetic oligonucleotide
  Antisense strand to SEQ ID NO: 646828
uaaaucgugggcguucagu

SEQ ID NO: 646830 - RNA, 19 nt, Artificial Sequence
  Description of Artificial Sequence: Synthetic oligonucleotide
  Sense strand starting at position 2080 of SEQ ID NO: 585525
uccggcuaacucugaauuu

SEQ ID NO: 646831 - RNA, 19 nt, Artificial Sequence
  Description of Artificial Sequence: Synthetic oligonucleotide
  Antisense strand to SEQ ID NO: 646830
aaauucagaguuagccgga

SEQ ID NO: 646832 - RNA, 19 nt, Artificial Sequence
  Description of Artificial Sequence: Synthetic oligonucleotide
  Sense strand starting at position 2141 of SEQ ID NO: 585525
ccguauucagugguuuguu

SEQ ID NO: 646833 - RNA, 19 nt, Artificial Sequence
  Description of Artificial Sequence: Synthetic oligonucleotide
  Antisense strand to SEQ ID NO: 646832
aacaaaccacugaauacgg

SEQ ID NO: 646834 - RNA, 19 nt, Artificial Sequence
  Description of Artificial Sequence: Synthetic oligonucleotide
  Sense strand starting at position 2151 of SEQ ID NO: 585525
ugguuuguucucgcgguua

SEQ ID NO: 646835 - RNA, 19 nt, Artificial Sequence
  Description of Artificial Sequence: Synthetic oligonucleotide
  Antisense strand to SEQ ID NO: 646834
uaaccgcgagaacaaacca

SEQ ID NO: 646836 - RNA, 19 nt, Artificial Sequence
  Description of Artificial Sequence: Synthetic oligonucleotide
  Sense strand starting at position 2155 of SEQ ID NO: 585525
uuguucucgcgguuaucua

SEQ ID NO: 646837 - RNA, 19 nt, Artificial Sequence
  Description of Artificial Sequence: Synthetic oligonucleotide
  Antisense strand to SEQ ID NO: 646836
uagauaaccgcgagaacaa

SEQ ID NO: 646838 - RNA, 19 nt, Artificial Sequence
  Description of Artificial Sequence: Synthetic oligonucleotide
  Sense strand starting at position 2162 of SEQ ID NO: 585525
cgcgguuaucuagcggaaa

SEQ ID NO: 646839 - RNA, 19 nt, Artificial Sequence
  Description of Artificial Sequence: Synthetic oligonucleotide
  Antisense strand to SEQ ID NO: 646838
uuuccgcuagauaaccgcg

SEQ ID NO: 646840 - RNA, 19 nt, Artificial Sequence
  Description of Artificial Sequence: Synthetic oligonucleotide
  Sense strand starting at position 2235 of SEQ ID NO: 585525
ggacucuucgcccagagaa

SEQ ID NO: 646841 - RNA, 19 nt, Artificial Sequence
  Description of Artificial Sequence: Synthetic oligonucleotide
  Antisense strand to SEQ ID NO: 646840
uucucugggcgaagagucc

SEQ ID NO: 646842 - RNA, 19 nt, Artificial Sequence
  Description of Artificial Sequence: Synthetic oligonucleotide
  Sense strand starting at position 2288 of SEQ ID NO: 585525
agcugaaaucccgggaacu

SEQ ID NO: 646843 - RNA, 19 nt, Artificial Sequence
  Description of Artificial Sequence: Synthetic oligonucleotide
  Antisense strand to SEQ ID NO: 646842
aguucccgggauuucagcu

SEQ ID NO: 646844 - RNA, 19 nt, Artificial Sequence
  Description of Artificial Sequence: Synthetic oligonucleotide
  Sense strand starting at position 2289 of SEQ ID NO: 585525
gcugaaaucccgggaacua

SEQ ID NO: 646845 - RNA, 19 nt, Artificial Sequence
  Description of Artificial Sequence: Synthetic oligonucleotide
  Antisense strand to SEQ ID NO: 646844
uaguucccgggauuucagc

SEQ ID NO: 646846 - RNA, 19 nt, Artificial Sequence
  Description of Artificial Sequence: Synthetic oligonucleotide
  Sense strand starting at position 2466 of SEQ ID NO: 585525
aggcaagaacuuuggaauc

SEQ ID NO: 646847 - RNA, 19 nt, Artificial Sequence
  Description of Artificial Sequence: Synthetic oligonucleotide
  Antisense strand to SEQ ID NO: 646846
gauuccaaaguucuugccu

SEQ ID NO: 646848 - RNA, 19 nt, Artificial Sequence
  Description of Artificial Sequence: Synthetic oligonucleotide
  Sense strand starting at position 2490 of SEQ ID NO: 585525
ggauuaaagggcugaguug

SEQ ID NO: 646849 - RNA, 19 nt, Artificial Sequence
  Description of Artificial Sequence: Synthetic oligonucleotide
  Antisense strand to SEQ ID NO: 646848
caacucagcccuuuaaucc

SEQ ID NO: 646850 - RNA, 19 nt, Artificial Sequence
  Description of Artificial Sequence: Synthetic oligonucleotide
  Sense strand starting at position 2613 of SEQ ID NO: 585525
cuguucuuaccuuaaaugu

SEQ ID NO: 646851 - RNA, 19 nt, Artificial Sequence
  Description of Artificial Sequence: Synthetic oligonucleotide
  Antisense strand to SEQ ID NO: 646850
acauuuaagguaagaacag

SEQ ID NO: 646852 - RNA, 19 nt, Artificial Sequence
  Description of Artificial Sequence: Synthetic oligonucleotide
  Sense strand starting at position 2781 of SEQ ID NO: 585525
ccauuuggcuuguuauuga

SEQ ID NO: 646853 - RNA, 19 nt, Artificial Sequence
  Description of Artificial Sequence: Synthetic oligonucleotide
  Antisense strand to SEQ ID NO: 646852
ucaauaacaagccaaaugg

SEQ ID NO: 646854 - RNA, 19 nt, Artificial Sequence
  Description of Artificial Sequence: Synthetic oligonucleotide
  Sense strand starting at position 2786 of SEQ ID NO: 585525
uggcuuguuauugaauaag

SEQ ID NO: 646855 - RNA, 19 nt, Artificial Sequence
  Description of Artificial Sequence: Synthetic oligonucleotide
  Antisense strand to SEQ ID NO: 646854
cuuauucaauaacaagcca

SEQ ID NO: 646856 - RNA, 19 nt, Artificial Sequence
  Description of Artificial Sequence: Synthetic oligonucleotide
  Sense strand starting at position 2789 of SEQ ID NO: 585525
cuuguuauugaauaagugu

SEQ ID NO: 646857 - RNA, 19 nt, Artificial Sequence
  Description of Artificial Sequence: Synthetic oligonucleotide
  Antisense strand to SEQ ID NO: 646856
acacuuauucaauaacaag

SEQ ID NO: 646858 - RNA, 19 nt, Artificial Sequence
  Description of Artificial Sequence: Synthetic oligonucleotide
  Sense strand starting at position 2875 of SEQ ID NO: 585525
cgacaccauaucugugaga

SEQ ID NO: 646859 - RNA, 19 nt, Artificial Sequence
  Description of Artificial Sequence: Synthetic oligonucleotide
  Antisense strand to SEQ ID NO: 646858
ucucacagauauggugucg

SEQ ID NO: 646860 - RNA, 19 nt, Artificial Sequence
  Description of Artificial Sequence: Synthetic oligonucleotide
  Sense strand starting at position 2876 of SEQ ID NO: 585525
gacaccauaucugugagau

SEQ ID NO: 646861 - RNA, 19 nt, Artificial Sequence
  Description of Artificial Sequence: Synthetic oligonucleotide
  Antisense strand to SEQ ID NO: 646860
aucucacagauaugguguc

SEQ ID NO: 646862 - RNA, 19 nt, Artificial Sequence
  Description of Artificial Sequence: Synthetic oligonucleotide
  Sense strand starting at position 2877 of SEQ ID NO: 585525
acaccauaucugugagauc

SEQ ID NO: 646863 - RNA, 19 nt, Artificial Sequence
  Description of Artificial Sequence: Synthetic oligonucleotide
  Antisense strand to SEQ ID NO: 646862
gaucucacagauauggugu

SEQ ID NO: 646864 - RNA, 19 nt, Artificial Sequence
  Description of Artificial Sequence: Synthetic oligonucleotide
  Sense strand starting at position 3074 of SEQ ID NO: 585525
auaaaucccagguguggau

SEQ ID NO: 646865 - RNA, 19 nt, Artificial Sequence
  Description of Artificial Sequence: Synthetic oligonucleotide
  Antisense strand to SEQ ID NO: 646864
auccacaccugggauuuau

SEQ ID NO: 646866 - RNA, 19 nt, Artificial Sequence
  Description of Artificial Sequence: Synthetic oligonucleotide
  Sense strand starting at position 3098 of SEQ ID NO: 585525
aggucauaguacuugagua

SEQ ID NO: 646867 - RNA, 19 nt, Artificial Sequence
  Description of Artificial Sequence: Synthetic oligonucleotide
  Antisense strand to SEQ ID NO: 646866
uacucaaguacuaugaccu

SEQ ID NO: 646868 - RNA, 19 nt, Artificial Sequence
  Description of Artificial Sequence: Synthetic oligonucleotide
  Sense strand starting at position 3100 of SEQ ID NO: 585525
gucauaguacuugaguaug

SEQ ID NO: 646869 - RNA, 19 nt, Artificial Sequence
  Description of Artificial Sequence: Synthetic oligonucleotide
  Antisense strand to SEQ ID NO: 646868
cauacucaaguacuaugac

SEQ ID NO: 646870 - RNA, 19 nt, Artificial Sequence
  Description of Artificial Sequence: Synthetic oligonucleotide
  Sense strand starting at position 3179 of SEQ ID NO: 585525
ggaaccuggcucgacaauu

SEQ ID NO: 646871 - RNA, 19 nt, Artificial Sequence
  Description of Artificial Sequence: Synthetic oligonucleotide
  Antisense strand to SEQ ID NO: 646870
aauugucgagccagguucc

SEQ ID NO: 646872 - RNA, 19 nt, Artificial Sequence
  Description of Artificial Sequence: Synthetic oligonucleotide
  Sense strand starting at position 3214 of SEQ ID NO: 585525
ucuauuaaggcagaguaua

SEQ ID NO: 646873 - RNA, 19 nt, Artificial Sequence
  Description of Artificial Sequence: Synthetic oligonucleotide
  Antisense strand to SEQ ID NO: 646872
uauacucugccuuaauaga

SEQ ID NO: 646874 - RNA, 19 nt, Artificial Sequence
  Description of Artificial Sequence: Synthetic oligonucleotide
  Sense strand starting at position 3235 of SEQ ID NO: 585525
uaugcuuaugauugaguaa

SEQ ID NO: 646875 - RNA, 19 nt, Artificial Sequence
  Description of Artificial Sequence: Synthetic oligonucleotide
  Antisense strand to SEQ ID NO: 646874
uuacucaaucauaagcaua

SEQ ID NO: 646876 - RNA, 19 nt, Artificial Sequence
  Description of Artificial Sequence: Synthetic oligonucleotide
  Sense strand starting at position 3253 of SEQ ID NO: 585525
augccacucguagauauau

SEQ ID NO: 646877 - RNA, 19 nt, Artificial Sequence
  Description of Artificial Sequence: Synthetic oligonucleotide
  Antisense strand to SEQ ID NO: 646876
auauaucuacgaguggcau

SEQ ID NO: 646878 - RNA, 19 nt, Artificial Sequence
  Description of Artificial Sequence: Synthetic oligonucleotide
  Sense strand starting at position 3298 of SEQ ID NO: 585525
uuaaauagguugucccuaa

SEQ ID NO: 646879 - RNA, 19 nt, Artificial Sequence
  Description of Artificial Sequence: Synthetic oligonucleotide
  Antisense strand to SEQ ID NO: 646878
uuagggacaaccuauuuaa

SEQ ID NO: 646880 - RNA, 19 nt, Artificial Sequence
  Description of Artificial Sequence: Synthetic oligonucleotide
  Sense strand starting at position 3342 of SEQ ID NO: 585525
accaucugagucuaaugua

SEQ ID NO: 646881 - RNA, 19 nt, Artificial Sequence
  Description of Artificial Sequence: Synthetic oligonucleotide
  Antisense strand to SEQ ID NO: 646880
uacauuagacucagauggu

SEQ ID NO: 646882 - RNA, 19 nt, Artificial Sequence
  Description of Artificial Sequence: Synthetic oligonucleotide
  Sense strand starting at position 3378 of SEQ ID NO: 585525
ggcucaguucuggaguuag

SEQ ID NO: 646883 - RNA, 19 nt, Artificial Sequence
  Description of Artificial Sequence: Synthetic oligonucleotide
  Antisense strand to SEQ ID NO: 646882
cuaacuccagaacugagcc

SEQ ID NO: 646884 - RNA, 19 nt, Artificial Sequence
  Description of Artificial Sequence: Synthetic oligonucleotide
  Sense strand starting at position 3521 of SEQ ID NO: 585525
cugauaagauguguauaua

SEQ ID NO: 646885 - RNA, 19 nt, Artificial Sequence
  Description of Artificial Sequence: Synthetic oligonucleotide
  Antisense strand to SEQ ID NO: 646884
uauauacacaucuuaucag

SEQ ID NO: 646886 - RNA, 19 nt, Artificial Sequence
  Description of Artificial Sequence: Synthetic oligonucleotide
  Sense strand starting at position 3864 of SEQ ID NO: 585525
uauuacauguaaguugaga

SEQ ID NO: 646887 - RNA, 19 nt, Artificial Sequence
  Description of Artificial Sequence: Synthetic oligonucleotide
  Antisense strand to SEQ ID NO: 646886
ucucaacuuacauguaaua

SEQ ID NO: 646888 - RNA, 19 nt, Artificial Sequence
  Description of Artificial Sequence: Synthetic oligonucleotide
  Sense strand starting at position 149 of SEQ ID NO: 585526
uagauuugcucuuacguuu

SEQ ID NO: 646889 - RNA, 19 nt, Artificial Sequence
  Description of Artificial Sequence: Synthetic oligonucleotide
  Antisense strand to SEQ ID NO: 646888
aaacguaagagcaaaucua

SEQ ID NO: 646890 - RNA, 19 nt, Artificial Sequence
  Description of Artificial Sequence: Synthetic oligonucleotide
  Sense strand starting at position 152 of SEQ ID NO: 585526
auuugcucuuacguuuaau

SEQ ID NO: 646891 - RNA, 19 nt, Artificial Sequence
  Description of Artificial Sequence: Synthetic oligonucleotide
  Antisense strand to SEQ ID NO: 646890
auuaaacguaagagcaaau

SEQ ID NO: 646892 - RNA, 19 nt, Artificial Sequence
  Description of Artificial Sequence: Synthetic oligonucleotide
  Sense strand starting at position 155 of SEQ ID NO: 585526
ugcucuuacguuuaaugua

SEQ ID NO: 646893 - RNA, 19 nt, Artificial Sequence
  Description of Artificial Sequence: Synthetic oligonucleotide
  Antisense strand to SEQ ID NO: 646892
uacauuaaacguaagagca

SEQ ID NO: 646894 - RNA, 19 nt, Artificial Sequence
  Description of Artificial Sequence: Synthetic oligonucleotide
  Sense strand starting at position 182 of SEQ ID NO: 585526
cugaguaacucuuugguaa

SEQ ID NO: 646895 - RNA, 19 nt, Artificial Sequence
  Description of Artificial Sequence: Synthetic oligonucleotide
  Antisense strand to SEQ ID NO: 646894
uuaccaaagaguuacucag

SEQ ID NO: 646896 - RNA, 19 nt, Artificial Sequence
  Description of Artificial Sequence: Synthetic oligonucleotide
  Sense strand starting at position 183 of SEQ ID NO: 585526
ugaguaacucuuugguaaa

SEQ ID NO: 646897 - RNA, 19 nt, Artificial Sequence
  Description of Artificial Sequence: Synthetic oligonucleotide
  Antisense strand to SEQ ID NO: 646896
uuuaccaaagaguuacuca

SEQ ID NO: 646898 - RNA, 19 nt, Artificial Sequence
  Description of Artificial Sequence: Synthetic oligonucleotide
  Sense strand starting at position 184 of SEQ ID NO: 585526
gaguaacucuuugguaaag

SEQ ID NO: 646899 - RNA, 19 nt, Artificial Sequence
  Description of Artificial Sequence: Synthetic oligonucleotide
  Antisense strand to SEQ ID NO: 646898
cuuuaccaaagaguuacuc

SEQ ID NO: 646900 - RNA, 19 nt, Artificial Sequence
  Description of Artificial Sequence: Synthetic oligonucleotide
  Sense strand starting at position 185 of SEQ ID NO: 585526
aguaacucuuugguaaagu

SEQ ID NO: 646901 - RNA, 19 nt, Artificial Sequence
  Description of Artificial Sequence: Synthetic oligonucleotide
  Antisense strand to SEQ ID NO: 646900
acuuuaccaaagaguuacu

SEQ ID NO: 646902 - RNA, 19 nt, Artificial Sequence
  Description of Artificial Sequence: Synthetic oligonucleotide
  Sense strand starting at position 186 of SEQ ID NO: 585526
guaacucuuugguaaaguu

SEQ ID NO: 646903 - RNA, 19 nt, Artificial Sequence
  Description of Artificial Sequence: Synthetic oligonucleotide
  Antisense strand to SEQ ID NO: 646902
aacuuuaccaaagaguuac

SEQ ID NO: 646904 - RNA, 19 nt, Artificial Sequence
  Description of Artificial Sequence: Synthetic oligonucleotide
  Sense strand starting at position 219 of SEQ ID NO: 585526
uugagagucacuggccuaa

SEQ ID NO: 646905 - RNA, 19 nt, Artificial Sequence
  Description of Artificial Sequence: Synthetic oligonucleotide
  Antisense strand to SEQ ID NO: 646904
uuaggccagugacucucaa

SEQ ID NO: 646906 - RNA, 19 nt, Artificial Sequence
  Description of Artificial Sequence: Synthetic oligonucleotide
  Sense strand starting at position 223 of SEQ ID NO: 585526
gagucacuggccuaagcaa

SEQ ID NO: 646907 - RNA, 19 nt, Artificial Sequence
  Description of Artificial Sequence: Synthetic oligonucleotide
  Antisense strand to SEQ ID NO: 646906
uugcuuaggccagugacuc

SEQ ID NO: 646908 - RNA, 19 nt, Artificial Sequence
  Description of Artificial Sequence: Synthetic oligonucleotide
  Sense strand starting at position 312 of SEQ ID NO: 585526
ggcuaaauuuaguaggguu

SEQ ID NO: 646909 - RNA, 19 nt, Artificial Sequence
  Description of Artificial Sequence: Synthetic oligonucleotide
  Antisense strand to SEQ ID NO: 646908
aacccuacuaaauuuagcc

SEQ ID NO: 646910 - RNA, 19 nt, Artificial Sequence
  Description of Artificial Sequence: Synthetic oligonucleotide
  Sense strand starting at position 315 of SEQ ID NO: 585526
uaaauuuaguaggguuuga

SEQ ID NO: 646911 - RNA, 19 nt, Artificial Sequence
  Description of Artificial Sequence: Synthetic oligonucleotide
  Antisense strand to SEQ ID NO: 646910
ucaaacccuacuaaauuua

SEQ ID NO: 646912 - RNA, 19 nt, Artificial Sequence
  Description of Artificial Sequence: Synthetic oligonucleotide
  Sense strand starting at position 319 of SEQ ID NO: 585526
uuuaguaggguuugaucaa

SEQ ID NO: 646913 - RNA, 19 nt, Artificial Sequence
  Description of Artificial Sequence: Synthetic oligonucleotide
  Antisense strand to SEQ ID NO: 646912
uugaucaaacccuacuaaa

SEQ ID NO: 646914 - RNA, 19 nt, Artificial Sequence
  Description of Artificial Sequence: Synthetic oligonucleotide
  Sense strand starting at position 320 of SEQ ID NO: 585526
uuaguaggguuugaucaau

SEQ ID NO: 646915 - RNA, 19 nt, Artificial Sequence
  Description of Artificial Sequence: Synthetic oligonucleotide
  Antisense strand to SEQ ID NO: 646914
auugaucaaacccuacuaa

SEQ ID NO: 646916 - RNA, 19 nt, Artificial Sequence
  Description of Artificial Sequence: Synthetic oligonucleotide
  Sense strand starting at position 433 of SEQ ID NO: 585526
aggcaaguaugggacaaau

SEQ ID NO: 646917 - RNA, 19 nt, Artificial Sequence
  Description of Artificial Sequence: Synthetic oligonucleotide
  Antisense strand to SEQ ID NO: 646916
auuugucccauacuugccu

SEQ ID NO: 646918 - RNA, 19 nt, Artificial Sequence
  Description of Artificial Sequence: Synthetic oligonucleotide
  Sense strand starting at position 646 of SEQ ID NO: 585526
gaacguuaccuccgucuuu

SEQ ID NO: 646919 - RNA, 19 nt, Artificial Sequence
  Description of Artificial Sequence: Synthetic oligonucleotide
  Antisense strand to SEQ ID NO: 646918
aaagacggagguaacguuc

SEQ ID NO: 646920 - RNA, 19 nt, Artificial Sequence
  Description of Artificial Sequence: Synthetic oligonucleotide
  Sense strand starting at position 696 of SEQ ID NO: 585526
gaauuuggguucuacaauu

SEQ ID NO: 646921 - RNA, 19 nt, Artificial Sequence
  Description of Artificial Sequence: Synthetic oligonucleotide
  Antisense strand to SEQ ID NO: 646920
aauuguagaacccaaauuc

SEQ ID NO: 646922 - RNA, 19 nt, Artificial Sequence
  Description of Artificial Sequence: Synthetic oligonucleotide
  Sense strand starting at position 765 of SEQ ID NO: 585526
ggguguauauaagcaagua

SEQ ID NO: 646923 - RNA, 19 nt, Artificial Sequence
  Description of Artificial Sequence: Synthetic oligonucleotide
  Antisense strand to SEQ ID NO: 646922
uacuugcuuauauacaccc

SEQ ID NO: 646924 - RNA, 19 nt, Artificial Sequence
  Description of Artificial Sequence: Synthetic oligonucleotide
  Sense strand starting at position 766 of SEQ ID NO: 585526
gguguauauaagcaaguaa

SEQ ID NO: 646925 - RNA, 19 nt, Artificial Sequence
  Description of Artificial Sequence: Synthetic oligonucleotide
  Antisense strand to SEQ ID NO: 646924
uuacuugcuuauauacacc

SEQ ID NO: 646926 - RNA, 19 nt, Artificial Sequence
  Description of Artificial Sequence: Synthetic oligonucleotide
  Sense strand starting at position 799 of SEQ ID NO: 585526
uuacuuacuuagucuguga

SEQ ID NO: 646927 - RNA, 19 nt, Artificial Sequence
  Description of Artificial Sequence: Synthetic oligonucleotide
  Antisense strand to SEQ ID NO: 646926
ucacagacuaaguaaguaa

SEQ ID NO: 646928 - RNA, 19 nt, Artificial Sequence
  Description of Artificial Sequence: Synthetic oligonucleotide
  Sense strand starting at position 801 of SEQ ID NO: 585526
acuuacuuagucugugaag

SEQ ID NO: 646929 - RNA, 19 nt, Artificial Sequence
  Description of Artificial Sequence: Synthetic oligonucleotide
  Antisense strand to SEQ ID NO: 646928
cuucacagacuaaguaagu

SEQ ID NO: 646930 - RNA, 19 nt, Artificial Sequence
  Description of Artificial Sequence: Synthetic oligonucleotide
  Sense strand starting at position 803 of SEQ ID NO: 585526
uuacuuagucugugaagcu

SEQ ID NO: 646931 - RNA, 19 nt, Artificial Sequence
  Description of Artificial Sequence: Synthetic oligonucleotide
  Antisense strand to SEQ ID NO: 646930
agcuucacagacuaaguaa

SEQ ID NO: 646932 - RNA, 19 nt, Artificial Sequence
  Description of Artificial Sequence: Synthetic oligonucleotide
  Sense strand starting at position 896 of SEQ ID NO: 585526
gaaagucauguacauagua

SEQ ID NO: 646933 - RNA, 19 nt, Artificial Sequence
  Description of Artificial Sequence: Synthetic oligonucleotide
  Antisense strand to SEQ ID NO: 646932
uacuauguacaugacuuuc

SEQ ID NO: 646934 - RNA, 19 nt, Artificial Sequence
  Description of Artificial Sequence: Synthetic oligonucleotide
  Sense strand starting at position 954 of SEQ ID NO: 585526
cccuacaucuaggcaaaga

SEQ ID NO: 646935 - RNA, 19 nt, Artificial Sequence
  Description of Artificial Sequence: Synthetic oligonucleotide
  Antisense strand to SEQ ID NO: 646934
ucuuugccuagauguaggg

SEQ ID NO: 646936 - RNA, 19 nt, Artificial Sequence
  Description of Artificial Sequence: Synthetic oligonucleotide
  Sense strand starting at position 974 of SEQ ID NO: 585526
augaauuaggcuggaaacu

SEQ ID NO: 646937 - RNA, 19 nt, Artificial Sequence
  Description of Artificial Sequence: Synthetic oligonucleotide
  Antisense strand to SEQ ID NO: 646936
aguuuccagccuaauucau

SEQ ID NO: 646938 - RNA, 19 nt, Artificial Sequence
  Description of Artificial Sequence: Synthetic oligonucleotide
  Sense strand starting at position 1002 of SEQ ID NO: 585526
ccucuaagcuaugggaaga

SEQ ID NO: 646939 - RNA, 19 nt, Artificial Sequence
  Description of Artificial Sequence: Synthetic oligonucleotide
  Antisense strand to SEQ ID NO: 646938
ucuucccauagcuuagagg

SEQ ID NO: 646940 - RNA, 19 nt, Artificial Sequence
  Description of Artificial Sequence: Synthetic oligonucleotide
  Sense strand starting at position 1092 of SEQ ID NO: 585526
cccucaggucacuguuaua

SEQ ID NO: 646941 - RNA, 19 nt, Artificial Sequence
  Description of Artificial Sequence: Synthetic oligonucleotide
  Antisense strand to SEQ ID NO: 646940
uauaacagugaccugaggg

SEQ ID NO: 646942 - RNA, 19 nt, Artificial Sequence
  Description of Artificial Sequence: Synthetic oligonucleotide
  Sense strand starting at position 1095 of SEQ ID NO: 585526
ucaggucacuguuauaaau

SEQ ID NO: 646943 - RNA, 19 nt, Artificial Sequence
  Description of Artificial Sequence: Synthetic oligonucleotide
  Antisense strand to SEQ ID NO: 646942
auuuauaacagugaccuga

SEQ ID NO: 646944 - RNA, 19 nt, Artificial Sequence
  Description of Artificial Sequence: Synthetic oligonucleotide
  Sense strand starting at position 1097 of SEQ ID NO: 585526
aggucacuguuauaaauug

SEQ ID NO: 646945 - RNA, 19 nt, Artificial Sequence
  Description of Artificial Sequence: Synthetic oligonucleotide
  Antisense strand to SEQ ID NO: 646944
caauuuauaacagugaccu

SEQ ID NO: 646946 - RNA, 19 nt, Artificial Sequence
  Description of Artificial Sequence: Synthetic oligonucleotide
  Sense strand starting at position 1124 of SEQ ID NO: 585526
uaaguaaugucugccugga

SEQ ID NO: 646947 - RNA, 19 nt, Artificial Sequence
  Description of Artificial Sequence: Synthetic oligonucleotide
  Antisense strand to SEQ ID NO: 646946
uccaggcagacauuacuua

SEQ ID NO: 646948 - RNA, 19 nt, Artificial Sequence
  Description of Artificial Sequence: Synthetic oligonucleotide
  Sense strand starting at position 1145 of SEQ ID NO: 585526
cagcucucugugucgagua

SEQ ID NO: 646949 - RNA, 19 nt, Artificial Sequence
  Description of Artificial Sequence: Synthetic oligonucleotide
  Antisense strand to SEQ ID NO: 646948
uacucgacacagagagcug

SEQ ID NO: 646950 - RNA, 19 nt, Artificial Sequence
  Description of Artificial Sequence: Synthetic oligonucleotide
  Sense strand starting at position 1150 of SEQ ID NO: 585526
cucugugucgaguaucaga

SEQ ID NO: 646951 - RNA, 19 nt, Artificial Sequence
  Description of Artificial Sequence: Synthetic oligonucleotide
  Antisense strand to SEQ ID NO: 646950
ucugauacucgacacagag

SEQ ID NO: 646952 - RNA, 19 nt, Artificial Sequence
  Description of Artificial Sequence: Synthetic oligonucleotide
  Sense strand starting at position 1157 of SEQ ID NO: 585526
ucgaguaucagacagcaaa

SEQ ID NO: 646953 - RNA, 19 nt, Artificial Sequence
  Description of Artificial Sequence: Synthetic oligonucleotide
  Antisense strand to SEQ ID NO: 646952
uuugcugucugauacucga

SEQ ID NO: 646954 - RNA, 19 nt, Artificial Sequence
  Description of Artificial Sequence: Synthetic oligonucleotide
  Sense strand starting at position 1435 of SEQ ID NO: 585526
agaggcaaucuuggugacu

SEQ ID NO: 646955 - RNA, 19 nt, Artificial Sequence
  Description of Artificial Sequence: Synthetic oligonucleotide
  Antisense strand to SEQ ID NO: 646954
agucaccaagauugccucu

SEQ ID NO: 646956 - RNA, 19 nt, Artificial Sequence
  Description of Artificial Sequence: Synthetic oligonucleotide
  Sense strand starting at position 1438 of SEQ ID NO: 585526
ggcaaucuuggugacuguu

SEQ ID NO: 646957 - RNA, 19 nt, Artificial Sequence
  Description of Artificial Sequence: Synthetic oligonucleotide
  Antisense strand to SEQ ID NO: 646956
aacagucaccaagauugcc

SEQ ID NO: 646958 - RNA, 19 nt, Artificial Sequence
  Description of Artificial Sequence: Synthetic oligonucleotide
  Sense strand starting at position 1500 of SEQ ID NO: 585526
ggaauucucccugagccga

SEQ ID NO: 646959 - RNA, 19 nt, Artificial Sequence
  Description of Artificial Sequence: Synthetic oligonucleotide
  Antisense strand to SEQ ID NO: 646958
ucggcucagggagaauucc

SEQ ID NO: 646960 - RNA, 19 nt, Artificial Sequence
  Description of Artificial Sequence: Synthetic oligonucleotide
  Sense strand starting at position 1549 of SEQ ID NO: 585526
cucuaaccuucuguucgau

SEQ ID NO: 646961 - RNA, 19 nt, Artificial Sequence
  Description of Artificial Sequence: Synthetic oligonucleotide
  Antisense strand to SEQ ID NO: 646960
aucgaacagaagguuagag

SEQ ID NO: 646962 - RNA, 19 nt, Artificial Sequence
  Description of Artificial Sequence: Synthetic oligonucleotide
  Sense strand starting at position 1551 of SEQ ID NO: 585526
cuaaccuucuguucgauga

SEQ ID NO: 646963 - RNA, 19 nt, Artificial Sequence
  Description of Artificial Sequence: Synthetic oligonucleotide
  Antisense strand to SEQ ID NO: 646962
ucaucgaacagaagguuag

SEQ ID NO: 646964 - RNA, 19 nt, Artificial Sequence
  Description of Artificial Sequence: Synthetic oligonucleotide
  Sense strand starting at position 1552 of SEQ ID NO: 585526
uaaccuucuguucgaugaa

SEQ ID NO: 646965 - RNA, 19 nt, Artificial Sequence
  Description of Artificial Sequence: Synthetic oligonucleotide
  Antisense strand to SEQ ID NO: 646964
uucaucgaacagaagguua

SEQ ID NO: 646966 - RNA, 19 nt, Artificial Sequence
  Description of Artificial Sequence: Synthetic oligonucleotide
  Sense strand starting at position 1621 of SEQ ID NO: 585526
gaggaagggugauaaguca

SEQ ID NO: 646967 - RNA, 19 nt, Artificial Sequence
  Description of Artificial Sequence: Synthetic oligonucleotide
  Antisense strand to SEQ ID NO: 646966
ugacuuaucacccuuccuc

SEQ ID NO: 646968 - RNA, 19 nt, Artificial Sequence
  Description of Artificial Sequence: Synthetic oligonucleotide
  Sense strand starting at position 40 of SEQ ID NO: 585527
gucuucccaggugauauaa

SEQ ID NO: 646969 - RNA, 19 nt, Artificial Sequence
  Description of Artificial Sequence: Synthetic oligonucleotide
  Antisense strand to SEQ ID NO: 646968
uuauaucaccugggaagac

SEQ ID NO: 646970 - RNA, 19 nt, Artificial Sequence
  Description of Artificial Sequence: Synthetic oligonucleotide
  Sense strand starting at position 291 of SEQ ID NO: 585527
guaaguggauugccaagaa

SEQ ID NO: 646971 - RNA, 19 nt, Artificial Sequence
  Description of Artificial Sequence: Synthetic oligonucleotide
  Antisense strand to SEQ ID NO: 646970
uucuuggcaauccacuuac

SEQ ID NO: 646972 - RNA, 19 nt, Artificial Sequence
  Description of Artificial Sequence: Synthetic oligonucleotide
  Sense strand starting at position 304 of SEQ ID NO: 585527
caagaauuggcauguugau

SEQ ID NO: 646973 - RNA, 19 nt, Artificial Sequence
  Description of Artificial Sequence: Synthetic oligonucleotide
  Antisense strand to SEQ ID NO: 646972
aucaacaugccaauucuug

SEQ ID NO: 646974 - RNA, 19 nt, Artificial Sequence
  Description of Artificial Sequence: Synthetic oligonucleotide
  Sense strand starting at position 310 of SEQ ID NO: 585527
uuggcauguugauucucau

SEQ ID NO: 646975 - RNA, 19 nt, Artificial Sequence
  Description of Artificial Sequence: Synthetic oligonucleotide
  Antisense strand to SEQ ID NO: 646974
augagaaucaacaugccaa

SEQ ID NO: 646976 - RNA, 19 nt, Artificial Sequence
  Description of Artificial Sequence: Synthetic oligonucleotide
  Sense strand starting at position 551 of SEQ ID NO: 585527
uggcaucucucaccaguga

SEQ ID NO: 646977 - RNA, 19 nt, Artificial Sequence
  Description of Artificial Sequence: Synthetic oligonucleotide
  Antisense strand to SEQ ID NO: 646976
ucacuggugagagaugcca

SEQ ID NO: 646978 - RNA, 19 nt, Artificial Sequence
  Description of Artificial Sequence: Synthetic oligonucleotide
  Sense strand starting at position 552 of SEQ ID NO: 585527
ggcaucucucaccagugaa

SEQ ID NO: 646979 - RNA, 19 nt, Artificial Sequence
  Description of Artificial Sequence: Synthetic oligonucleotide
  Antisense strand to SEQ ID NO: 646978
uucacuggugagagaugcc

SEQ ID NO: 646980 - RNA, 19 nt, Artificial Sequence
  Description of Artificial Sequence: Synthetic oligonucleotide
  Sense strand starting at position 589 of SEQ ID NO: 585527
caagaagcugggugucaau

SEQ ID NO: 646981 - RNA, 19 nt, Artificial Sequence
  Description of Artificial Sequence: Synthetic oligonucleotide
  Antisense strand to SEQ ID NO: 646980
auugacacccagcuucuug

SEQ ID NO: 646982 - RNA, 19 nt, Artificial Sequence
  Description of Artificial Sequence: Synthetic oligonucleotide
  Sense strand starting at position 1322 of SEQ ID NO: 585527
aggugaauggcugagacuu

SEQ ID NO: 646983 - RNA, 19 nt, Artificial Sequence
  Description of Artificial Sequence: Synthetic oligonucleotide
  Antisense strand to SEQ ID NO: 646982
aagucucagccauucaccu

SEQ ID NO: 646984 - RNA, 19 nt, Artificial Sequence
  Description of Artificial Sequence: Synthetic oligonucleotide
  Sense strand starting at position 1345 of SEQ ID NO: 585527
gagauuuccucccggaaag

SEQ ID NO: 646985 - RNA, 19 nt, Artificial Sequence
  Description of Artificial Sequence: Synthetic oligonucleotide
  Antisense strand to SEQ ID NO: 646984
cuuuccgggaggaaaucuc

SEQ ID NO: 646986 - RNA, 19 nt, Artificial Sequence
  Description of Artificial Sequence: Synthetic oligonucleotide
  Sense strand starting at position 1505 of SEQ ID NO: 585527
ucccuauggcugcaagagu

SEQ ID NO: 646987 - RNA, 19 nt, Artificial Sequence
  Description of Artificial Sequence: Synthetic oligonucleotide
  Antisense strand to SEQ ID NO: 646986
acucuugcagccauaggga

SEQ ID NO: 646988 - RNA, 19 nt, Artificial Sequence
  Description of Artificial Sequence: Synthetic oligonucleotide
  Sense strand starting at position 1653 of SEQ ID NO: 585527
gucucuauuugggcaguga

SEQ ID NO: 646989 - RNA, 19 nt, Artificial Sequence
  Description of Artificial Sequence: Synthetic oligonucleotide
  Antisense strand to SEQ ID NO: 646988
ucacugcccaaauagagac

SEQ ID NO: 646990 - RNA, 19 nt, Artificial Sequence
  Description of Artificial Sequence: Synthetic oligonucleotide
  Sense strand starting at position 1793 of SEQ ID NO: 585527
gggucugaccacugagaca

SEQ ID NO: 646991 - RNA, 19 nt, Artificial Sequence
  Description of Artificial Sequence: Synthetic oligonucleotide
  Antisense strand to SEQ ID NO: 646990
ugucucaguggucagaccc

SEQ ID NO: 646992 - RNA, 19 nt, Artificial Sequence
  Description of Artificial Sequence: Synthetic oligonucleotide
  Sense strand starting at position 2091 of SEQ ID NO: 585527
ggccuucugucccugacaa

SEQ ID NO: 646993 - RNA, 19 nt, Artificial Sequence
  Description of Artificial Sequence: Synthetic oligonucleotide
  Antisense strand to SEQ ID NO: 646992
uugucagggacagaaggcc

SEQ ID NO: 646994 - RNA, 19 nt, Artificial Sequence
  Description of Artificial Sequence: Synthetic oligonucleotide
  Sense strand starting at position 2225 of SEQ ID NO: 585527
cucuccuuucuagggauga

SEQ ID NO: 646995 - RNA, 19 nt, Artificial Sequence
  Description of Artificial Sequence: Synthetic oligonucleotide
  Antisense strand to SEQ ID NO: 646994
ucaucccuagaaaggagag

SEQ ID NO: 646996 - RNA, 19 nt, Artificial Sequence
  Description of Artificial Sequence: Synthetic oligonucleotide
  Sense strand starting at position 2293 of SEQ ID NO: 585527
cagguauugggugguuaca

SEQ ID NO: 646997 - RNA, 19 nt, Artificial Sequence
  Description of Artificial Sequence: Synthetic oligonucleotide
  Antisense strand to SEQ ID NO: 646996
uguaaccacccaauaccug

SEQ ID NO: 646998 - RNA, 19 nt, Artificial Sequence
  Description of Artificial Sequence: Synthetic oligonucleotide
  Sense strand starting at position 2295 of SEQ ID NO: 585527
gguauugggugguuacaga

SEQ ID NO: 646999 - RNA, 19 nt, Artificial Sequence
  Description of Artificial Sequence: Synthetic oligonucleotide
  Antisense strand to SEQ ID NO: 646998
ucuguaaccacccaauacc

SEQ ID NO: 647000 - RNA, 19 nt, Artificial Sequence
  Description of Artificial Sequence: Synthetic oligonucleotide
  Sense strand starting at position 2344 of SEQ ID NO: 585527
cuuaauuugccagguuauu

SEQ ID NO: 647001 - RNA, 19 nt, Artificial Sequence
  Description of Artificial Sequence: Synthetic oligonucleotide
  Antisense strand to SEQ ID NO: 647000
aauaaccuggcaaauuaag

SEQ ID NO: 647002 - RNA, 19 nt, Artificial Sequence
  Description of Artificial Sequence: Synthetic oligonucleotide
  Sense strand starting at position 2362 of SEQ ID NO: 585527
uacagaugcuucucagaga

SEQ ID NO: 647003 - RNA, 19 nt, Artificial Sequence
  Description of Artificial Sequence: Synthetic oligonucleotide
  Antisense strand to SEQ ID NO: 647002
ucucugagaagcaucugua

SEQ ID NO: 647004 - RNA, 19 nt, Artificial Sequence
  Description of Artificial Sequence: Synthetic oligonucleotide
  Sense strand starting at position 2453 of SEQ ID NO: 585527
ggcucuugccaggacuuau

SEQ ID NO: 647005 - RNA, 19 nt, Artificial Sequence
  Description of Artificial Sequence: Synthetic oligonucleotide
  Antisense strand to SEQ ID NO: 647004
auaaguccuggcaagagcc

SEQ ID NO: 647006 - RNA, 19 nt, Artificial Sequence
  Description of Artificial Sequence: Synthetic oligonucleotide
  Sense strand starting at position 2514 of SEQ ID NO: 585527
gggaaaucuuggucuuccu

SEQ ID NO: 647007 - RNA, 19 nt, Artificial Sequence
  Description of Artificial Sequence: Synthetic oligonucleotide
  Antisense strand to SEQ ID NO: 647006
aggaagaccaagauuuccc

SEQ ID NO: 647008 - RNA, 19 nt, Artificial Sequence
  Description of Artificial Sequence: Synthetic oligonucleotide
  Sense strand starting at position 2547 of SEQ ID NO: 585527
uuaagacugucauuaucag

SEQ ID NO: 647009 - RNA, 19 nt, Artificial Sequence
  Description of Artificial Sequence: Synthetic oligonucleotide
  Antisense strand to SEQ ID NO: 647008
cugauaaugacagucuuaa

SEQ ID NO: 647010 - RNA, 19 nt, Artificial Sequence
  Description of Artificial Sequence: Synthetic oligonucleotide
  Sense strand starting at position 2553 of SEQ ID NO: 585527
cugucauuaucagugauaa

SEQ ID NO: 647011 - RNA, 19 nt, Artificial Sequence
  Description of Artificial Sequence: Synthetic oligonucleotide
  Antisense strand to SEQ ID NO: 647010
uuaucacugauaaugacag

SEQ ID NO: 647012 - RNA, 19 nt, Artificial Sequence
  Description of Artificial Sequence: Synthetic oligonucleotide
  Sense strand starting at position 2554 of SEQ ID NO: 585527
ugucauuaucagugauaaa

SEQ ID NO: 647013 - RNA, 19 nt, Artificial Sequence
  Description of Artificial Sequence: Synthetic oligonucleotide
  Antisense strand to SEQ ID NO: 647012
uuuaucacugauaaugaca

SEQ ID NO: 647014 - RNA, 19 nt, Artificial Sequence
  Description of Artificial Sequence: Synthetic oligonucleotide
  Sense strand starting at position 2598 of SEQ ID NO: 585527
cagucugaauugucuguaa

SEQ ID NO: 647015 - RNA, 19 nt, Artificial Sequence
  Description of Artificial Sequence: Synthetic oligonucleotide
  Antisense strand to SEQ ID NO: 647014
uuacagacaauucagacug

SEQ ID NO: 647016 - RNA, 19 nt, Artificial Sequence
  Description of Artificial Sequence: Synthetic oligonucleotide
  Sense strand starting at position 2600 of SEQ ID NO: 585527
gucugaauugucuguaaca

SEQ ID NO: 647017 - RNA, 19 nt, Artificial Sequence
  Description of Artificial Sequence: Synthetic oligonucleotide
  Antisense strand to SEQ ID NO: 647016
uguuacagacaauucagac

SEQ ID NO: 647018 - RNA, 19 nt, Artificial Sequence
  Description of Artificial Sequence: Synthetic oligonucleotide
  Sense strand starting at position 2601 of SEQ ID NO: 585527
ucugaauugucuguaacaa

SEQ ID NO: 647019 - RNA, 19 nt, Artificial Sequence
  Description of Artificial Sequence: Synthetic oligonucleotide
  Antisense strand to SEQ ID NO: 647018
uuguuacagacaauucaga

SEQ ID NO: 647020 - RNA, 19 nt, Artificial Sequence
  Description of Artificial Sequence: Synthetic oligonucleotide
  Sense strand starting at position 2668 of SEQ ID NO: 585527
cugucaagguccuugggau

SEQ ID NO: 647021 - RNA, 19 nt, Artificial Sequence
  Description of Artificial Sequence: Synthetic oligonucleotide
  Antisense strand to SEQ ID NO: 647020
aucccaaggaccuugacag

SEQ ID NO: 647022 - RNA, 19 nt, Artificial Sequence
  Description of Artificial Sequence: Synthetic oligonucleotide
  Sense strand starting at position 2736 of SEQ ID NO: 585527
agagaauucuuugccucag

SEQ ID NO: 647023 - RNA, 19 nt, Artificial Sequence
  Description of Artificial Sequence: Synthetic oligonucleotide
  Antisense strand to SEQ ID NO: 647022
cugaggcaaagaauucucu

SEQ ID NO: 647024 - RNA, 19 nt, Artificial Sequence
  Description of Artificial Sequence: Synthetic oligonucleotide
  Sense strand starting at position 2738 of SEQ ID NO: 585527
agaauucuuugccucagaa

SEQ ID NO: 647025 - RNA, 19 nt, Artificial Sequence
  Description of Artificial Sequence: Synthetic oligonucleotide
  Antisense strand to SEQ ID NO: 647024
uucugaggcaaagaauucu

SEQ ID NO: 647026 - RNA, 19 nt, Artificial Sequence
  Description of Artificial Sequence: Synthetic oligonucleotide
  Sense strand starting at position 3148 of SEQ ID NO: 585527
gaguaaguugcauacaaga

SEQ ID NO: 647027 - RNA, 19 nt, Artificial Sequence
  Description of Artificial Sequence: Synthetic oligonucleotide
  Antisense strand to SEQ ID NO: 647026
ucuuguaugcaacuuacuc

SEQ ID NO: 647028 - RNA, 19 nt, Artificial Sequence
  Description of Artificial Sequence: Synthetic oligonucleotide
  Sense strand starting at position 3251 of SEQ ID NO: 585527
ggaaacuuagaccgaugua

SEQ ID NO: 647029 - RNA, 19 nt, Artificial Sequence
  Description of Artificial Sequence: Synthetic oligonucleotide
  Antisense strand to SEQ ID NO: 647028
uacaucggucuaaguuucc

SEQ ID NO: 647030 - RNA, 19 nt, Artificial Sequence
  Description of Artificial Sequence: Synthetic oligonucleotide
  Sense strand starting at position 3254 of SEQ ID NO: 585527
aacuuagaccgauguaaua

SEQ ID NO: 647031 - RNA, 19 nt, Artificial Sequence
  Description of Artificial Sequence: Synthetic oligonucleotide
  Antisense strand to SEQ ID NO: 647030
uauuacaucggucuaaguu

SEQ ID NO: 647032 - RNA, 19 nt, Artificial Sequence
  Description of Artificial Sequence: Synthetic oligonucleotide
  Sense strand starting at position 3380 of SEQ ID NO: 585527
cauuuagcugucgagucuu

SEQ ID NO: 647033 - RNA, 19 nt, Artificial Sequence
  Description of Artificial Sequence: Synthetic oligonucleotide
  Antisense strand to SEQ ID NO: 647032
aagacucgacagcuaaaug

SEQ ID NO: 647034 - RNA, 19 nt, Artificial Sequence
  Description of Artificial Sequence: Synthetic oligonucleotide
  Sense strand starting at position 3408 of SEQ ID NO: 585527
cuuuaauaugaguacagua

SEQ ID NO: 647035 - RNA, 19 nt, Artificial Sequence
  Description of Artificial Sequence: Synthetic oligonucleotide
  Antisense strand to SEQ ID NO: 647034
uacuguacucauauuaaag

SEQ ID NO: 647036 - RNA, 19 nt, Artificial Sequence
  Description of Artificial Sequence: Synthetic oligonucleotide
  Sense strand starting at position 3413 of SEQ ID NO: 585527
auaugaguacaguaccuua

SEQ ID NO: 647037 - RNA, 19 nt, Artificial Sequence
  Description of Artificial Sequence: Synthetic oligonucleotide
  Antisense strand to SEQ ID NO: 647036
uaagguacuguacucauau

SEQ ID NO: 647038 - RNA, 19 nt, Artificial Sequence
  Description of Artificial Sequence: Synthetic oligonucleotide
  Sense strand starting at position 3416 of SEQ ID NO: 585527
ugaguacaguaccuuaaau

SEQ ID NO: 647039 - RNA, 19 nt, Artificial Sequence
  Description of Artificial Sequence: Synthetic oligonucleotide
  Antisense strand to SEQ ID NO: 647038
auuuaagguacuguacuca

SEQ ID NO: 647040 - RNA, 19 nt, Artificial Sequence
  Description of Artificial Sequence: Synthetic oligonucleotide
  Sense strand starting at position 3418 of SEQ ID NO: 585527
aguacaguaccuuaaaugu

SEQ ID NO: 647041 - RNA, 19 nt, Artificial Sequence
  Description of Artificial Sequence: Synthetic oligonucleotide
  Antisense strand to SEQ ID NO: 647040
acauuuaagguacuguacu

SEQ ID NO: 647042 - RNA, 19 nt, Artificial Sequence
  Description of Artificial Sequence: Synthetic oligonucleotide
  Sense strand starting at position 3878 of SEQ ID NO: 585527
uuauaauggucacccagua

SEQ ID NO: 647043 - RNA, 19 nt, Artificial Sequence
  Description of Artificial Sequence: Synthetic oligonucleotide
  Antisense strand to SEQ ID NO: 647042
uacugggugaccauuauaa

SEQ ID NO: 647044 - RNA, 19 nt, Artificial Sequence
  Description of Artificial Sequence: Synthetic oligonucleotide
  Sense strand starting at position 3883 of SEQ ID NO: 585527
auggucacccaguauucua

SEQ ID NO: 647045 - RNA, 19 nt, Artificial Sequence
  Description of Artificial Sequence: Synthetic oligonucleotide
  Antisense strand to SEQ ID NO: 647044
uagaauacugggugaccau

SEQ ID NO: 647046 - RNA, 19 nt, Artificial Sequence
  Description of Artificial Sequence: Synthetic oligonucleotide
  Sense strand starting at position 3923 of SEQ ID NO: 585527
ccuauuauagcauguuuag

SEQ ID NO: 647047 - RNA, 19 nt, Artificial Sequence
  Description of Artificial Sequence: Synthetic oligonucleotide
  Antisense strand to SEQ ID NO: 647046
cuaaacaugcuauaauagg

SEQ ID NO: 647048 - RNA, 19 nt, Artificial Sequence
  Description of Artificial Sequence: Synthetic oligonucleotide
  Sense strand starting at position 342 of SEQ ID NO: 585528
gagggaugccugcauaaua

SEQ ID NO: 647049 - RNA, 19 nt, Artificial Sequence
  Description of Artificial Sequence: Synthetic oligonucleotide
  Antisense strand to SEQ ID NO: 647048
uauuaugcaggcaucccuc

SEQ ID NO: 647050 - RNA, 19 nt, Artificial Sequence
  Description of Artificial Sequence: Synthetic oligonucleotide
  Sense strand starting at position 476 of SEQ ID NO: 585528
ccauuauguuugguagagg

SEQ ID NO: 647051 - RNA, 19 nt, Artificial Sequence
  Description of Artificial Sequence: Synthetic oligonucleotide
  Antisense strand to SEQ ID NO: 647050
ccucuaccaaacauaaugg

SEQ ID NO: 647052 - RNA, 19 nt, Artificial Sequence
  Description of Artificial Sequence: Synthetic oligonucleotide
  Sense strand starting at position 479 of SEQ ID NO: 585528
uuauguuugguagagguua

SEQ ID NO: 647053 - RNA, 19 nt, Artificial Sequence
  Description of Artificial Sequence: Synthetic oligonucleotide
  Antisense strand to SEQ ID NO: 647052
uaaccucuaccaaacauaa

SEQ ID NO: 647054 - RNA, 19 nt, Artificial Sequence
  Description of Artificial Sequence: Synthetic oligonucleotide
  Sense strand starting at position 481 of SEQ ID NO: 585528
auguuugguagagguuaaa

SEQ ID NO: 647055 - RNA, 19 nt, Artificial Sequence
  Description of Artificial Sequence: Synthetic oligonucleotide
  Antisense strand to SEQ ID NO: 647054
uuuaaccucuaccaaacau

SEQ ID NO: 647056 - RNA, 19 nt, Artificial Sequence
  Description of Artificial Sequence: Synthetic oligonucleotide
  Sense strand starting at position 557 of SEQ ID NO: 585528
agauguuuccugguggcgu

SEQ ID NO: 647057 - RNA, 19 nt, Artificial Sequence
  Description of Artificial Sequence: Synthetic oligonucleotide
  Antisense strand to SEQ ID NO: 647056
acgccaccaggaaacaucu

SEQ ID NO: 647058 - RNA, 19 nt, Artificial Sequence
  Description of Artificial Sequence: Synthetic oligonucleotide
  Sense strand starting at position 665 of SEQ ID NO: 585528
ucaggaaacuguuuagcaa

SEQ ID NO: 647059 - RNA, 19 nt, Artificial Sequence
  Description of Artificial Sequence: Synthetic oligonucleotide
  Antisense strand to SEQ ID NO: 647058
uugcuaaacaguuuccuga

SEQ ID NO: 647060 - RNA, 19 nt, Artificial Sequence
  Description of Artificial Sequence: Synthetic oligonucleotide
  Sense strand starting at position 666 of SEQ ID NO: 585528
caggaaacuguuuagcaau

SEQ ID NO: 647061 - RNA, 19 nt, Artificial Sequence
  Description of Artificial Sequence: Synthetic oligonucleotide
  Antisense strand to SEQ ID NO: 647060
auugcuaaacaguuuccug

SEQ ID NO: 647062 - RNA, 19 nt, Artificial Sequence
  Description of Artificial Sequence: Synthetic oligonucleotide
  Sense strand starting at position 668 of SEQ ID NO: 585528
ggaaacuguuuagcaauga

SEQ ID NO: 647063 - RNA, 19 nt, Artificial Sequence
  Description of Artificial Sequence: Synthetic oligonucleotide
  Antisense strand to SEQ ID NO: 647062
ucauugcuaaacaguuucc

SEQ ID NO: 647064 - RNA, 19 nt, Artificial Sequence
  Description of Artificial Sequence: Synthetic oligonucleotide
  Sense strand starting at position 673 of SEQ ID NO: 585528
cuguuuagcaaugaguuga

SEQ ID NO: 647065 - RNA, 19 nt, Artificial Sequence
  Description of Artificial Sequence: Synthetic oligonucleotide
  Antisense strand to SEQ ID NO: 647064
ucaacucauugcuaaacag

SEQ ID NO: 647066 - RNA, 19 nt, Artificial Sequence
  Description of Artificial Sequence: Synthetic oligonucleotide
  Sense strand starting at position 688 of SEQ ID NO: 585528
uugagugucauguaggaaa

SEQ ID NO: 647067 - RNA, 19 nt, Artificial Sequence
  Description of Artificial Sequence: Synthetic oligonucleotide
  Antisense strand to SEQ ID NO: 647066
uuuccuacaugacacucaa

SEQ ID NO: 647068 - RNA, 19 nt, Artificial Sequence
  Description of Artificial Sequence: Synthetic oligonucleotide
  Sense strand starting at position 690 of SEQ ID NO: 585528
gagugucauguaggaaauc

SEQ ID NO: 647069 - RNA, 19 nt, Artificial Sequence
  Description of Artificial Sequence: Synthetic oligonucleotide
  Antisense strand to SEQ ID NO: 647068
gauuuccuacaugacacuc

SEQ ID NO: 647070 - RNA, 19 nt, Artificial Sequence
  Description of Artificial Sequence: Synthetic oligonucleotide
  Sense strand starting at position 699 of SEQ ID NO: 585528
guaggaaaucaauggcaac

SEQ ID NO: 647071 - RNA, 19 nt, Artificial Sequence
  Description of Artificial Sequence: Synthetic oligonucleotide
  Antisense strand to SEQ ID NO: 647070
guugccauugauuuccuac

SEQ ID NO: 647072 - RNA, 19 nt, Artificial Sequence
  Description of Artificial Sequence: Synthetic oligonucleotide
  Sense strand starting at position 848 of SEQ ID NO: 585528
auggcacuuauaugaggaa

SEQ ID NO: 647073 - RNA, 19 nt, Artificial Sequence
  Description of Artificial Sequence: Synthetic oligonucleotide
  Antisense strand to SEQ ID NO: 647072
uuccucauauaagugccau

SEQ ID NO: 647074 - RNA, 19 nt, Artificial Sequence
  Description of Artificial Sequence: Synthetic oligonucleotide
  Sense strand starting at position 857 of SEQ ID NO: 585528
auaugaggaagucguaaca

SEQ ID NO: 647075 - RNA, 19 nt, Artificial Sequence
  Description of Artificial Sequence: Synthetic oligonucleotide
  Antisense strand to SEQ ID NO: 647074
uguuacgacuuccucauau

SEQ ID NO: 647076 - RNA, 19 nt, Artificial Sequence
  Description of Artificial Sequence: Synthetic oligonucleotide
  Sense strand starting at position 867 of SEQ ID NO: 585528
gucguaacaguugagauua

SEQ ID NO: 647077 - RNA, 19 nt, Artificial Sequence
  Description of Artificial Sequence: Synthetic oligonucleotide
  Antisense strand to SEQ ID NO: 647076
uaaucucaacuguuacgac

SEQ ID NO: 647078 - RNA, 19 nt, Artificial Sequence
  Description of Artificial Sequence: Synthetic oligonucleotide
  Sense strand starting at position 935 of SEQ ID NO: 585528
aagguuucgacugacaggu

SEQ ID NO: 647079 - RNA, 19 nt, Artificial Sequence
  Description of Artificial Sequence: Synthetic oligonucleotide
  Antisense strand to SEQ ID NO: 647078
accugucagucgaaaccuu

SEQ ID NO: 647080 - RNA, 19 nt, Artificial Sequence
  Description of Artificial Sequence: Synthetic oligonucleotide
  Sense strand starting at position 1014 of SEQ ID NO: 585528
guugacuguccacauguaa

SEQ ID NO: 647081 - RNA, 19 nt, Artificial Sequence
  Description of Artificial Sequence: Synthetic oligonucleotide
  Antisense strand to SEQ ID NO: 647080
uuacauguggacagucaac

SEQ ID NO: 647082 - RNA, 19 nt, Artificial Sequence
  Description of Artificial Sequence: Synthetic oligonucleotide
  Sense strand starting at position 1138 of SEQ ID NO: 585528
auaacucguguguaaugga

SEQ ID NO: 647083 - RNA, 19 nt, Artificial Sequence
  Description of Artificial Sequence: Synthetic oligonucleotide
  Antisense strand to SEQ ID NO: 647082
uccauuacacacgaguuau

SEQ ID NO: 647084 - RNA, 19 nt, Artificial Sequence
  Description of Artificial Sequence: Synthetic oligonucleotide
  Sense strand starting at position 1153 of SEQ ID NO: 585528
uggaaagacuccuccucuu

SEQ ID NO: 647085 - RNA, 19 nt, Artificial Sequence
  Description of Artificial Sequence: Synthetic oligonucleotide
  Antisense strand to SEQ ID NO: 647084
aagaggaggagucuuucca

SEQ ID NO: 647086 - RNA, 19 nt, Artificial Sequence
  Description of Artificial Sequence: Synthetic oligonucleotide
  Sense strand starting at position 1216 of SEQ ID NO: 585528
agccaugagagcuagagua

SEQ ID NO: 647087 - RNA, 19 nt, Artificial Sequence
  Description of Artificial Sequence: Synthetic oligonucleotide
  Antisense strand to SEQ ID NO: 647086
uacucuagcucucauggcu

SEQ ID NO: 647088 - RNA, 19 nt, Artificial Sequence
  Description of Artificial Sequence: Synthetic oligonucleotide
  Sense strand starting at position 1532 of SEQ ID NO: 585528
cuccgagaguucucuagaa

SEQ ID NO: 647089 - RNA, 19 nt, Artificial Sequence
  Description of Artificial Sequence: Synthetic oligonucleotide
  Antisense strand to SEQ ID NO: 647088
uucuagagaacucucggag

SEQ ID NO: 647090 - RNA, 19 nt, Artificial Sequence
  Description of Artificial Sequence: Synthetic oligonucleotide
  Sense strand starting at position 2022 of SEQ ID NO: 585528
ggagcagcucucgaggaau

SEQ ID NO: 647091 - RNA, 19 nt, Artificial Sequence
  Description of Artificial Sequence: Synthetic oligonucleotide
  Antisense strand to SEQ ID NO: 647090
auuccucgagagcugcucc

SEQ ID NO: 647092 - RNA, 19 nt, Artificial Sequence
  Description of Artificial Sequence: Synthetic oligonucleotide
  Sense strand starting at position 2088 of SEQ ID NO: 585528
ccucaugaccuggguaaau

SEQ ID NO: 647093 - RNA, 19 nt, Artificial Sequence
  Description of Artificial Sequence: Synthetic oligonucleotide
  Antisense strand to SEQ ID NO: 647092
auuuacccaggucaugagg

SEQ ID NO: 647094 - RNA, 19 nt, Artificial Sequence
  Description of Artificial Sequence: Synthetic oligonucleotide
  Sense strand starting at position 2129 of SEQ ID NO: 585528
gauuccuuucgucagagau

SEQ ID NO: 647095 - RNA, 19 nt, Artificial Sequence
  Description of Artificial Sequence: Synthetic oligonucleotide
  Antisense strand to SEQ ID NO: 647094
aucucugacgaaaggaauc

SEQ ID NO: 647096 - RNA, 19 nt, Artificial Sequence
  Description of Artificial Sequence: Synthetic oligonucleotide
  Sense strand starting at position 2174 of SEQ ID NO: 585528
uuaaauuguccucauguac

SEQ ID NO: 647097 - RNA, 19 nt, Artificial Sequence
  Description of Artificial Sequence: Synthetic oligonucleotide
  Antisense strand to SEQ ID NO: 647096
guacaugaggacaauuuaa

SEQ ID NO: 647098 - RNA, 19 nt, Artificial Sequence
  Description of Artificial Sequence: Synthetic oligonucleotide
  Sense strand starting at position 2220 of SEQ ID NO: 585528
ugcagucaagaugauagua

SEQ ID NO: 647099 - RNA, 19 nt, Artificial Sequence
  Description of Artificial Sequence: Synthetic oligonucleotide
  Antisense strand to SEQ ID NO: 647098
uacuaucaucuugacugca

SEQ ID NO: 647100 - RNA, 19 nt, Artificial Sequence
  Description of Artificial Sequence: Synthetic oligonucleotide
  Sense strand starting at position 2228 of SEQ ID NO: 585528
agaugauaguaagucuuua

SEQ ID NO: 647101 - RNA, 19 nt, Artificial Sequence
  Description of Artificial Sequence: Synthetic oligonucleotide
  Antisense strand to SEQ ID NO: 647100
uaaagacuuacuaucaucu

SEQ ID NO: 647102 - RNA, 19 nt, Artificial Sequence
  Description of Artificial Sequence: Synthetic oligonucleotide
  Sense strand starting at position 2413 of SEQ ID NO: 585528
cuggguuuaacggauucuu

SEQ ID NO: 647103 - RNA, 19 nt, Artificial Sequence
  Description of Artificial Sequence: Synthetic oligonucleotide
  Antisense strand to SEQ ID NO: 647102
aagaauccguuaaacccag

SEQ ID NO: 647104 - RNA, 19 nt, Artificial Sequence
  Description of Artificial Sequence: Synthetic oligonucleotide
  Sense strand starting at position 2682 of SEQ ID NO: 585528
caaagagugugggcuaaau

SEQ ID NO: 647105 - RNA, 19 nt, Artificial Sequence
  Description of Artificial Sequence: Synthetic oligonucleotide
  Antisense strand to SEQ ID NO: 647104
auuuagcccacacucuuug

SEQ ID NO: 647106 - RNA, 19 nt, Artificial Sequence
  Description of Artificial Sequence: Synthetic oligonucleotide
  Sense strand starting at position 2684 of SEQ ID NO: 585528
aagagugugggcuaaauga

SEQ ID NO: 647107 - RNA, 19 nt, Artificial Sequence
  Description of Artificial Sequence: Synthetic oligonucleotide
  Antisense strand to SEQ ID NO: 647106
ucauuuagcccacacucuu

SEQ ID NO: 647108 - RNA, 19 nt, Artificial Sequence
  Description of Artificial Sequence: Synthetic oligonucleotide
  Sense strand starting at position 2919 of SEQ ID NO: 585528
ccucgucuaucucugauuu

SEQ ID NO: 647109 - RNA, 19 nt, Artificial Sequence
  Description of Artificial Sequence: Synthetic oligonucleotide
  Antisense strand to SEQ ID NO: 647108
aaaucagagauagacgagg

SEQ ID NO: 647110 - RNA, 19 nt, Artificial Sequence
  Description of Artificial Sequence: Synthetic oligonucleotide
  Sense strand starting at position 3218 of SEQ ID NO: 585528
cugucaggucgauauuaug

SEQ ID NO: 647111 - RNA, 19 nt, Artificial Sequence
  Description of Artificial Sequence: Synthetic oligonucleotide
  Antisense strand to SEQ ID NO: 647110
cauaauaucgaccugacag

SEQ ID NO: 647112 - RNA, 19 nt, Artificial Sequence
  Description of Artificial Sequence: Synthetic oligonucleotide
  Sense strand starting at position 3241 of SEQ ID NO: 585528
ccguuacagaaauguggaa

SEQ ID NO: 647113 - RNA, 19 nt, Artificial Sequence
  Description of Artificial Sequence: Synthetic oligonucleotide
  Antisense strand to SEQ ID NO: 647112
uuccacauuucuguaacgg

SEQ ID NO: 647114 - RNA, 19 nt, Artificial Sequence
  Description of Artificial Sequence: Synthetic oligonucleotide
  Sense strand starting at position 3285 of SEQ ID NO: 585528
guagauaggugguugggau

SEQ ID NO: 647115 - RNA, 19 nt, Artificial Sequence
  Description of Artificial Sequence: Synthetic oligonucleotide
  Antisense strand to SEQ ID NO: 647114
aucccaaccaccuaucuac

SEQ ID NO: 647116 - RNA, 19 nt, Artificial Sequence
  Description of Artificial Sequence: Synthetic oligonucleotide
  Sense strand starting at position 3286 of SEQ ID NO: 585528
uagauaggugguugggauu

SEQ ID NO: 647117 - RNA, 19 nt, Artificial Sequence
  Description of Artificial Sequence: Synthetic oligonucleotide
  Antisense strand to SEQ ID NO: 647116
aaucccaaccaccuaucua

SEQ ID NO: 647118 - RNA, 19 nt, Artificial Sequence
  Description of Artificial Sequence: Synthetic oligonucleotide
  Sense strand starting at position 3445 of SEQ ID NO: 585528
acauuuaacuuaugggaau

SEQ ID NO: 647119 - RNA, 19 nt, Artificial Sequence
  Description of Artificial Sequence: Synthetic oligonucleotide
  Antisense strand to SEQ ID NO: 647118
auucccauaaguuaaaugu

SEQ ID NO: 647120 - RNA, 19 nt, Artificial Sequence
  Description of Artificial Sequence: Synthetic oligonucleotide
  Sense strand starting at position 3489 of SEQ ID NO: 585528
ugugauuaaguacacuauu

SEQ ID NO: 647121 - RNA, 19 nt, Artificial Sequence
  Description of Artificial Sequence: Synthetic oligonucleotide
  Antisense strand to SEQ ID NO: 647120
aauaguguacuuaaucaca

SEQ ID NO: 647122 - RNA, 19 nt, Artificial Sequence
  Description of Artificial Sequence: Synthetic oligonucleotide
  Sense strand starting at position 3590 of SEQ ID NO: 585528
ugcauugacaucugaggau

SEQ ID NO: 647123 - RNA, 19 nt, Artificial Sequence
  Description of Artificial Sequence: Synthetic oligonucleotide
  Antisense strand to SEQ ID NO: 647122
auccucagaugucaaugca

SEQ ID NO: 647124 - RNA, 19 nt, Artificial Sequence
  Description of Artificial Sequence: Synthetic oligonucleotide
  Sense strand starting at position 3621 of SEQ ID NO: 585528
gggagaaacugcucaaguu

SEQ ID NO: 647125 - RNA, 19 nt, Artificial Sequence
  Description of Artificial Sequence: Synthetic oligonucleotide
  Antisense strand to SEQ ID NO: 647124
aacuugagcaguuucuccc

SEQ ID NO: 647126 - RNA, 19 nt, Artificial Sequence
  Description of Artificial Sequence: Synthetic oligonucleotide
  Sense strand starting at position 3904 of SEQ ID NO: 585528
ccgugaaagccacaaagaa

SEQ ID NO: 647127 - RNA, 19 nt, Artificial Sequence
  Description of Artificial Sequence: Synthetic oligonucleotide
  Antisense strand to SEQ ID NO: 647126
uucuuuguggcuuucacgg

SEQ ID NO: 647128 - RNA, 19 nt, Artificial Sequence
  Description of Artificial Sequence: Synthetic oligonucleotide
  Sense strand starting at position 13 of SEQ ID NO: 585529
agagccaugugguuauuaa

SEQ ID NO: 647129 - RNA, 19 nt, Artificial Sequence
  Description of Artificial Sequence: Synthetic oligonucleotide
  Antisense strand to SEQ ID NO: 647128
uuaauaaccacauggcucu

SEQ ID NO: 647130 - RNA, 19 nt, Artificial Sequence
  Description of Artificial Sequence: Synthetic oligonucleotide
  Sense strand starting at position 14 of SEQ ID NO: 585529
gagccaugugguuauuaaa

SEQ ID NO: 647131 - RNA, 19 nt, Artificial Sequence
  Description of Artificial Sequence: Synthetic oligonucleotide
  Antisense strand to SEQ ID NO: 647130
uuuaauaaccacauggcuc

SEQ ID NO: 647132 - RNA, 19 nt, Artificial Sequence
  Description of Artificial Sequence: Synthetic oligonucleotide
  Sense strand starting at position 47 of SEQ ID NO: 585529
ucaagugggcucugauauu

SEQ ID NO: 647133 - RNA, 19 nt, Artificial Sequence
  Description of Artificial Sequence: Synthetic oligonucleotide
  Antisense strand to SEQ ID NO: 647132
aauaucagagcccacuuga

SEQ ID NO: 647134 - RNA, 19 nt, Artificial Sequence
  Description of Artificial Sequence: Synthetic oligonucleotide
  Sense strand starting at position 158 of SEQ ID NO: 585529
ugggcauucuaacagacaa

SEQ ID NO: 647135 - RNA, 19 nt, Artificial Sequence
  Description of Artificial Sequence: Synthetic oligonucleotide
  Antisense strand to SEQ ID NO: 647134
uugucuguuagaaugccca

SEQ ID NO: 647136 - RNA, 19 nt, Artificial Sequence
  Description of Artificial Sequence: Synthetic oligonucleotide
  Sense strand starting at position 198 of SEQ ID NO: 585529
uguauucaugcggcagcua

SEQ ID NO: 647137 - RNA, 19 nt, Artificial Sequence
  Description of Artificial Sequence: Synthetic oligonucleotide
  Antisense strand to SEQ ID NO: 647136
uagcugccgcaugaauaca

SEQ ID NO: 647138 - RNA, 19 nt, Artificial Sequence
  Description of Artificial Sequence: Synthetic oligonucleotide
  Sense strand starting at position 199 of SEQ ID NO: 585529
guauucaugcggcagcuaa

SEQ ID NO: 647139 - RNA, 19 nt, Artificial Sequence
  Description of Artificial Sequence: Synthetic oligonucleotide
  Antisense strand to SEQ ID NO: 647138
uuagcugccgcaugaauac

SEQ ID NO: 647140 - RNA, 19 nt, Artificial Sequence
  Description of Artificial Sequence: Synthetic oligonucleotide
  Sense strand starting at position 250 of SEQ ID NO: 585529
uccuauuucugggaccuua

SEQ ID NO: 647141 - RNA, 19 nt, Artificial Sequence
  Description of Artificial Sequence: Synthetic oligonucleotide
  Antisense strand to SEQ ID NO: 647140
uaaggucccagaaauagga

SEQ ID NO: 647142 - RNA, 19 nt, Artificial Sequence
  Description of Artificial Sequence: Synthetic oligonucleotide
  Sense strand starting at position 346 of SEQ ID NO: 585529
uguauuucuuuggcuguga

SEQ ID NO: 647143 - RNA, 19 nt, Artificial Sequence
  Description of Artificial Sequence: Synthetic oligonucleotide
  Antisense strand to SEQ ID NO: 647142
ucacagccaaagaaauaca

SEQ ID NO: 647144 - RNA, 19 nt, Artificial Sequence
  Description of Artificial Sequence: Synthetic oligonucleotide
  Sense strand starting at position 347 of SEQ ID NO: 585529
guauuucuuuggcugugau

SEQ ID NO: 647145 - RNA, 19 nt, Artificial Sequence
  Description of Artificial Sequence: Synthetic oligonucleotide
  Antisense strand to SEQ ID NO: 647144
aucacagccaaagaaauac

SEQ ID NO: 647146 - RNA, 19 nt, Artificial Sequence
  Description of Artificial Sequence: Synthetic oligonucleotide
  Sense strand starting at position 350 of SEQ ID NO: 585529
uuucuuuggcugugaucuu

SEQ ID NO: 647147 - RNA, 19 nt, Artificial Sequence
  Description of Artificial Sequence: Synthetic oligonucleotide
  Antisense strand to SEQ ID NO: 647146
aagaucacagccaaagaaa

SEQ ID NO: 647148 - RNA, 19 nt, Artificial Sequence
  Description of Artificial Sequence: Synthetic oligonucleotide
  Sense strand starting at position 357 of SEQ ID NO: 585529
ggcugugaucuucggagau

SEQ ID NO: 647149 - RNA, 19 nt, Artificial Sequence
  Description of Artificial Sequence: Synthetic oligonucleotide
  Antisense strand to SEQ ID NO: 647148
aucuccgaagaucacagcc

SEQ ID NO: 647150 - RNA, 19 nt, Artificial Sequence
  Description of Artificial Sequence: Synthetic oligonucleotide
  Sense strand starting at position 437 of SEQ ID NO: 585529
ggcgcagugguucauuaau

SEQ ID NO: 647151 - RNA, 19 nt, Artificial Sequence
  Description of Artificial Sequence: Synthetic oligonucleotide
  Antisense strand to SEQ ID NO: 647150
auuaaugaaccacugcgcc

SEQ ID NO: 647152 - RNA, 19 nt, Artificial Sequence
  Description of Artificial Sequence: Synthetic oligonucleotide
  Sense strand starting at position 1340 of SEQ ID NO: 585529
gccacaauguccuugacaa

SEQ ID NO: 647153 - RNA, 19 nt, Artificial Sequence
  Description of Artificial Sequence: Synthetic oligonucleotide
  Antisense strand to SEQ ID NO: 647152
uugucaaggacauuguggc

SEQ ID NO: 647154 - RNA, 19 nt, Artificial Sequence
  Description of Artificial Sequence: Synthetic oligonucleotide
  Sense strand starting at position 1459 of SEQ ID NO: 585529
gcugauuccuacuuguaau

SEQ ID NO: 647155 - RNA, 19 nt, Artificial Sequence
  Description of Artificial Sequence: Synthetic oligonucleotide
  Antisense strand to SEQ ID NO: 647154
auuacaaguaggaaucagc

SEQ ID NO: 647156 - RNA, 19 nt, Artificial Sequence
  Description of Artificial Sequence: Synthetic oligonucleotide
  Sense strand starting at position 1470 of SEQ ID NO: 585529
cuuguaauaugacuaugau

SEQ ID NO: 647157 - RNA, 19 nt, Artificial Sequence
  Description of Artificial Sequence: Synthetic oligonucleotide
  Antisense strand to SEQ ID NO: 647156
aucauagucauauuacaag

SEQ ID NO: 647158 - RNA, 19 nt, Artificial Sequence
  Description of Artificial Sequence: Synthetic oligonucleotide
  Sense strand starting at position 1473 of SEQ ID NO: 585529
guaauaugacuaugauacc

SEQ ID NO: 647159 - RNA, 19 nt, Artificial Sequence
  Description of Artificial Sequence: Synthetic oligonucleotide
  Antisense strand to SEQ ID NO: 647158
gguaucauagucauauuac

SEQ ID NO: 647160 - RNA, 19 nt, Artificial Sequence
  Description of Artificial Sequence: Synthetic oligonucleotide
  Sense strand starting at position 1515 of SEQ ID NO: 585529
ggcagauuccaccagacga

SEQ ID NO: 647161 - RNA, 19 nt, Artificial Sequence
  Description of Artificial Sequence: Synthetic oligonucleotide
  Antisense strand to SEQ ID NO: 647160
ucgucugguggaaucugcc

SEQ ID NO: 647162 - RNA, 19 nt, Artificial Sequence
  Description of Artificial Sequence: Synthetic oligonucleotide
  Sense strand starting at position 1559 of SEQ ID NO: 585529
gcgcguuccgugagagcca

SEQ ID NO: 647163 - RNA, 19 nt, Artificial Sequence
  Description of Artificial Sequence: Synthetic oligonucleotide
  Antisense strand to SEQ ID NO: 647162
uggcucucacggaacgcgc

SEQ ID NO: 647164 - RNA, 19 nt, Artificial Sequence
  Description of Artificial Sequence: Synthetic oligonucleotide
  Sense strand starting at position 1579 of SEQ ID NO: 585529
gcacgauccuauguacaga

SEQ ID NO: 647165 - RNA, 19 nt, Artificial Sequence
  Description of Artificial Sequence: Synthetic oligonucleotide
  Antisense strand to SEQ ID NO: 647164
ucuguacauaggaucgugc

SEQ ID NO: 647166 - RNA, 19 nt, Artificial Sequence
  Description of Artificial Sequence: Synthetic oligonucleotide
  Sense strand starting at position 1646 of SEQ ID NO: 585529
agcugaaaucccugagagc

SEQ ID NO: 647167 - RNA, 19 nt, Artificial Sequence
  Description of Artificial Sequence: Synthetic oligonucleotide
  Antisense strand to SEQ ID NO: 647166
gcucucagggauuucagcu

SEQ ID NO: 647168 - RNA, 19 nt, Artificial Sequence
  Description of Artificial Sequence: Synthetic oligonucleotide
  Sense strand starting at position 1682 of SEQ ID NO: 585529
cgggaacuguccuucccaa

SEQ ID NO: 647169 - RNA, 19 nt, Artificial Sequence
  Description of Artificial Sequence: Synthetic oligonucleotide
  Antisense strand to SEQ ID NO: 647168
uugggaaggacaguucccg

SEQ ID NO: 647170 - RNA, 19 nt, Artificial Sequence
  Description of Artificial Sequence: Synthetic oligonucleotide
  Sense strand starting at position 2328 of SEQ ID NO: 585529
ugguaucccgguuacagaa

SEQ ID NO: 647171 - RNA, 19 nt, Artificial Sequence
  Description of Artificial Sequence: Synthetic oligonucleotide
  Antisense strand to SEQ ID NO: 647170
uucuguaaccgggauacca

SEQ ID NO: 647172 - RNA, 19 nt, Artificial Sequence
  Description of Artificial Sequence: Synthetic oligonucleotide
  Sense strand starting at position 2414 of SEQ ID NO: 585529
gggaguuacgcuggugaga

SEQ ID NO: 647173 - RNA, 19 nt, Artificial Sequence
  Description of Artificial Sequence: Synthetic oligonucleotide
  Antisense strand to SEQ ID NO: 647172
ucucaccagcguaacuccc

SEQ ID NO: 647174 - RNA, 19 nt, Artificial Sequence
  Description of Artificial Sequence: Synthetic oligonucleotide
  Sense strand starting at position 2476 of SEQ ID NO: 585529
acugguauuaugcaagaug

SEQ ID NO: 647175 - RNA, 19 nt, Artificial Sequence
  Description of Artificial Sequence: Synthetic oligonucleotide
  Antisense strand to SEQ ID NO: 647174
caucuugcauaauaccagu

SEQ ID NO: 647176 - RNA, 19 nt, Artificial Sequence
  Description of Artificial Sequence: Synthetic oligonucleotide
  Sense strand starting at position 2487 of SEQ ID NO: 585529
gcaagaugcccucgcaaag

SEQ ID NO: 647177 - RNA, 19 nt, Artificial Sequence
  Description of Artificial Sequence: Synthetic oligonucleotide
  Antisense strand to SEQ ID NO: 647176
cuuugcgagggcaucuugc

SEQ ID NO: 647178 - RNA, 19 nt, Artificial Sequence
  Description of Artificial Sequence: Synthetic oligonucleotide
  Sense strand starting at position 2589 of SEQ ID NO: 585529
ggguggguguggcuauaaa

SEQ ID NO: 647179 - RNA, 19 nt, Artificial Sequence
  Description of Artificial Sequence: Synthetic oligonucleotide
  Antisense strand to SEQ ID NO: 647178
uuuauagccacacccaccc

SEQ ID NO: 647180 - RNA, 19 nt, Artificial Sequence
  Description of Artificial Sequence: Synthetic oligonucleotide
  Sense strand starting at position 2621 of SEQ ID NO: 585529
gggugccugugaaggaaau

SEQ ID NO: 647181 - RNA, 19 nt, Artificial Sequence
  Description of Artificial Sequence: Synthetic oligonucleotide
  Antisense strand to SEQ ID NO: 647180
auuuccuucacaggcaccc

SEQ ID NO: 647182 - RNA, 19 nt, Artificial Sequence
  Description of Artificial Sequence: Synthetic oligonucleotide
  Sense strand starting at position 2669 of SEQ ID NO: 585529
gggauacuggauuguccuu

SEQ ID NO: 647183 - RNA, 19 nt, Artificial Sequence
  Description of Artificial Sequence: Synthetic oligonucleotide
  Antisense strand to SEQ ID NO: 647182
aaggacaauccaguauccc

SEQ ID NO: 647184 - RNA, 19 nt, Artificial Sequence
  Description of Artificial Sequence: Synthetic oligonucleotide
  Sense strand starting at position 2674 of SEQ ID NO: 585529
acuggauuguccuuuguga

SEQ ID NO: 647185 - RNA, 19 nt, Artificial Sequence
  Description of Artificial Sequence: Synthetic oligonucleotide
  Antisense strand to SEQ ID NO: 647184
ucacaaaggacaauccagu

SEQ ID NO: 647186 - RNA, 19 nt, Artificial Sequence
  Description of Artificial Sequence: Synthetic oligonucleotide
  Sense strand starting at position 2676 of SEQ ID NO: 585529
uggauuguccuuugugaga

SEQ ID NO: 647187 - RNA, 19 nt, Artificial Sequence
  Description of Artificial Sequence: Synthetic oligonucleotide
  Antisense strand to SEQ ID NO: 647186
ucucacaaaggacaaucca

SEQ ID NO: 647188 - RNA, 19 nt, Artificial Sequence
  Description of Artificial Sequence: Synthetic oligonucleotide
  Sense strand starting at position 3008 of SEQ ID NO: 585529
uuuagaacguuccuaacga

SEQ ID NO: 647189 - RNA, 19 nt, Artificial Sequence
  Description of Artificial Sequence: Synthetic oligonucleotide
  Antisense strand to SEQ ID NO: 647188
ucguuaggaacguucuaaa

SEQ ID NO: 647190 - RNA, 19 nt, Artificial Sequence
  Description of Artificial Sequence: Synthetic oligonucleotide
  Sense strand starting at position 3032 of SEQ ID NO: 585529
acugcaacucuugauugua

SEQ ID NO: 647191 - RNA, 19 nt, Artificial Sequence
  Description of Artificial Sequence: Synthetic oligonucleotide
  Antisense strand to SEQ ID NO: 647190
uacaaucaagaguugcagu

SEQ ID NO: 647192 - RNA, 19 nt, Artificial Sequence
  Description of Artificial Sequence: Synthetic oligonucleotide
  Sense strand starting at position 3040 of SEQ ID NO: 585529
ucuugauuguaccuccuga

SEQ ID NO: 647193 - RNA, 19 nt, Artificial Sequence
  Description of Artificial Sequence: Synthetic oligonucleotide
  Antisense strand to SEQ ID NO: 647192
ucaggagguacaaucaaga

SEQ ID NO: 647194 - RNA, 19 nt, Artificial Sequence
  Description of Artificial Sequence: Synthetic oligonucleotide
  Sense strand starting at position 3158 of SEQ ID NO: 585529
gggauuggucuaugugcug

SEQ ID NO: 647195 - RNA, 19 nt, Artificial Sequence
  Description of Artificial Sequence: Synthetic oligonucleotide
  Antisense strand to SEQ ID NO: 647194
cagcacauagaccaauccc

SEQ ID NO: 647196 - RNA, 19 nt, Artificial Sequence
  Description of Artificial Sequence: Synthetic oligonucleotide
  Sense strand starting at position 3164 of SEQ ID NO: 585529
ggucuaugugcugaugaug

SEQ ID NO: 647197 - RNA, 19 nt, Artificial Sequence
  Description of Artificial Sequence: Synthetic oligonucleotide
  Antisense strand to SEQ ID NO: 647196
caucaucagcacauagacc

SEQ ID NO: 647198 - RNA, 19 nt, Artificial Sequence
  Description of Artificial Sequence: Synthetic oligonucleotide
  Sense strand starting at position 3278 of SEQ ID NO: 585529
aguccagauccugggaaca

SEQ ID NO: 647199 - RNA, 19 nt, Artificial Sequence
  Description of Artificial Sequence: Synthetic oligonucleotide
  Antisense strand to SEQ ID NO: 647198
uguucccaggaucuggacu

SEQ ID NO: 647200 - RNA, 19 nt, Artificial Sequence
  Description of Artificial Sequence: Synthetic oligonucleotide
  Sense strand starting at position 3359 of SEQ ID NO: 585529
gcgugugugaugcaacauc

SEQ ID NO: 647201 - RNA, 19 nt, Artificial Sequence
  Description of Artificial Sequence: Synthetic oligonucleotide
  Antisense strand to SEQ ID NO: 647200
gauguugcaucacacacgc

SEQ ID NO: 647202 - RNA, 19 nt, Artificial Sequence
  Description of Artificial Sequence: Synthetic oligonucleotide
  Sense strand starting at position 3481 of SEQ ID NO: 585529
ccugaauggugguagauuc

SEQ ID NO: 647203 - RNA, 19 nt, Artificial Sequence
  Description of Artificial Sequence: Synthetic oligonucleotide
  Antisense strand to SEQ ID NO: 647202
gaaucuaccaccauucagg

SEQ ID NO: 647204 - RNA, 19 nt, Artificial Sequence
  Description of Artificial Sequence: Synthetic oligonucleotide
  Sense strand starting at position 3488 of SEQ ID NO: 585529
ggugguagauuccaggaca

SEQ ID NO: 647205 - RNA, 19 nt, Artificial Sequence
  Description of Artificial Sequence: Synthetic oligonucleotide
  Antisense strand to SEQ ID NO: 647204
uguccuggaaucuaccacc

SEQ ID NO: 647206 - RNA, 19 nt, Artificial Sequence
  Description of Artificial Sequence: Synthetic oligonucleotide
  Sense strand starting at position 3491 of SEQ ID NO: 585529
gguagauuccaggacaguu

SEQ ID NO: 647207 - RNA, 19 nt, Artificial Sequence
  Description of Artificial Sequence: Synthetic oligonucleotide
  Antisense strand to SEQ ID NO: 647206
aacuguccuggaaucuacc

SEQ ID NO: 647208 - RNA, 19 nt, Artificial Sequence
  Description of Artificial Sequence: Synthetic oligonucleotide
  Sense strand starting at position 91 of SEQ ID NO: 585530
caggcucggccggguaauu

SEQ ID NO: 647209 - RNA, 19 nt, Artificial Sequence
  Description of Artificial Sequence: Synthetic oligonucleotide
  Antisense strand to SEQ ID NO: 647208
aauuacccggccgagccug

SEQ ID NO: 647210 - RNA, 19 nt, Artificial Sequence
  Description of Artificial Sequence: Synthetic oligonucleotide
  Sense strand starting at position 257 of SEQ ID NO: 585530
gggagauugugcuguggga

SEQ ID NO: 647211 - RNA, 19 nt, Artificial Sequence
  Description of Artificial Sequence: Synthetic oligonucleotide
  Antisense strand to SEQ ID NO: 647210
ucccacagcacaaucuccc

SEQ ID NO: 647212 - RNA, 19 nt, Artificial Sequence
  Description of Artificial Sequence: Synthetic oligonucleotide
  Sense strand starting at position 353 of SEQ ID NO: 585530
gggaguuccuggucgcuca

SEQ ID NO: 647213 - RNA, 19 nt, Artificial Sequence
  Description of Artificial Sequence: Synthetic oligonucleotide
  Antisense strand to SEQ ID NO: 647212
ugagcgaccaggaacuccc

SEQ ID NO: 647214 - RNA, 19 nt, Artificial Sequence
  Description of Artificial Sequence: Synthetic oligonucleotide
  Sense strand starting at position 415 of SEQ ID NO: 585530
gcgguaaacuugguuucca

SEQ ID NO: 647215 - RNA, 19 nt, Artificial Sequence
  Description of Artificial Sequence: Synthetic oligonucleotide
  Antisense strand to SEQ ID NO: 647214
uggaaaccaaguuuaccgc

SEQ ID NO: 647216 - RNA, 19 nt, Artificial Sequence
  Description of Artificial Sequence: Synthetic oligonucleotide
  Sense strand starting at position 416 of SEQ ID NO: 585530
cgguaaacuugguuuccau

SEQ ID NO: 647217 - RNA, 19 nt, Artificial Sequence
  Description of Artificial Sequence: Synthetic oligonucleotide
  Antisense strand to SEQ ID NO: 647216
auggaaaccaaguuuaccg

SEQ ID NO: 647218 - RNA, 19 nt, Artificial Sequence
  Description of Artificial Sequence: Synthetic oligonucleotide
  Sense strand starting at position 739 of SEQ ID NO: 585530
gugcgaguccugccucuga

SEQ ID NO: 647219 - RNA, 19 nt, Artificial Sequence
  Description of Artificial Sequence: Synthetic oligonucleotide
  Antisense strand to SEQ ID NO: 647218
ucagaggcaggacucgcac

SEQ ID NO: 647220 - RNA, 19 nt, Artificial Sequence
  Description of Artificial Sequence: Synthetic oligonucleotide
  Sense strand starting at position 983 of SEQ ID NO: 585530
gccggaguuuccugaagcu

SEQ ID NO: 647221 - RNA, 19 nt, Artificial Sequence
  Description of Artificial Sequence: Synthetic oligonucleotide
  Antisense strand to SEQ ID NO: 647220
agcuucaggaaacuccggc

SEQ ID NO: 647222 - RNA, 19 nt, Artificial Sequence
  Description of Artificial Sequence: Synthetic oligonucleotide
  Sense strand starting at position 1054 of SEQ ID NO: 585530
gugucauaauugccuaaag

SEQ ID NO: 647223 - RNA, 19 nt, Artificial Sequence
  Description of Artificial Sequence: Synthetic oligonucleotide
  Antisense strand to SEQ ID NO: 647222
cuuuaggcaauuaugacac

SEQ ID NO: 647224 - RNA, 19 nt, Artificial Sequence
  Description of Artificial Sequence: Synthetic oligonucleotide
  Sense strand starting at position 1055 of SEQ ID NO: 585530
ugucauaauugccuaaaga

SEQ ID NO: 647225 - RNA, 19 nt, Artificial Sequence
  Description of Artificial Sequence: Synthetic oligonucleotide
  Antisense strand to SEQ ID NO: 647224
ucuuuaggcaauuaugaca

SEQ ID NO: 647226 - RNA, 19 nt, Artificial Sequence
  Description of Artificial Sequence: Synthetic oligonucleotide
  Sense strand starting at position 1056 of SEQ ID NO: 585530
gucauaauugccuaaagau

SEQ ID NO: 647227 - RNA, 19 nt, Artificial Sequence
  Description of Artificial Sequence: Synthetic oligonucleotide
  Antisense strand to SEQ ID NO: 647226
aucuuuaggcaauuaugac

SEQ ID NO: 647228 - RNA, 19 nt, Artificial Sequence
  Description of Artificial Sequence: Synthetic oligonucleotide
  Sense strand starting at position 1079 of SEQ ID NO: 585530
ggcagcuucgauuacugua

SEQ ID NO: 647229 - RNA, 19 nt, Artificial Sequence
  Description of Artificial Sequence: Synthetic oligonucleotide
  Antisense strand to SEQ ID NO: 647228
uacaguaaucgaagcugcc

SEQ ID NO: 647230 - RNA, 19 nt, Artificial Sequence
  Description of Artificial Sequence: Synthetic oligonucleotide
  Sense strand starting at position 1081 of SEQ ID NO: 585530
cagcuucgauuacuguaau

SEQ ID NO: 647231 - RNA, 19 nt, Artificial Sequence
  Description of Artificial Sequence: Synthetic oligonucleotide
  Antisense strand to SEQ ID NO: 647230
auuacaguaaucgaagcug

SEQ ID NO: 647232 - RNA, 19 nt, Artificial Sequence
  Description of Artificial Sequence: Synthetic oligonucleotide
  Sense strand starting at position 1082 of SEQ ID NO: 585530
agcuucgauuacuguaauu

SEQ ID NO: 647233 - RNA, 19 nt, Artificial Sequence
  Description of Artificial Sequence: Synthetic oligonucleotide
  Antisense strand to SEQ ID NO: 647232
aauuacaguaaucgaagcu

SEQ ID NO: 647234 - RNA, 19 nt, Artificial Sequence
  Description of Artificial Sequence: Synthetic oligonucleotide
  Sense strand starting at position 1084 of SEQ ID NO: 585530
cuucgauuacuguaauuac

SEQ ID NO: 647235 - RNA, 19 nt, Artificial Sequence
  Description of Artificial Sequence: Synthetic oligonucleotide
  Antisense strand to SEQ ID NO: 647234
guaauuacaguaaucgaag

SEQ ID NO: 647236 - RNA, 19 nt, Artificial Sequence
  Description of Artificial Sequence: Synthetic oligonucleotide
  Sense strand starting at position 1087 of SEQ ID NO: 585530
cgauuacuguaauuaccau

SEQ ID NO: 647237 - RNA, 19 nt, Artificial Sequence
  Description of Artificial Sequence: Synthetic oligonucleotide
  Antisense strand to SEQ ID NO: 647236
augguaauuacaguaaucg

SEQ ID NO: 647238 - RNA, 19 nt, Artificial Sequence
  Description of Artificial Sequence: Synthetic oligonucleotide
  Sense strand starting at position 1104 of SEQ ID NO: 585530
aucagaggcuguugaaaga

SEQ ID NO: 647239 - RNA, 19 nt, Artificial Sequence
  Description of Artificial Sequence: Synthetic oligonucleotide
  Antisense strand to SEQ ID NO: 647238
ucuuucaacagccucugau

SEQ ID NO: 647240 - RNA, 19 nt, Artificial Sequence
  Description of Artificial Sequence: Synthetic oligonucleotide
  Sense strand starting at position 1459 of SEQ ID NO: 585530
ucaggcucuuggcaaguua

SEQ ID NO: 647241 - RNA, 19 nt, Artificial Sequence
  Description of Artificial Sequence: Synthetic oligonucleotide
  Antisense strand to SEQ ID NO: 647240
uaacuugccaagagccuga

SEQ ID NO: 647242 - RNA, 19 nt, Artificial Sequence
  Description of Artificial Sequence: Synthetic oligonucleotide
  Sense strand starting at position 1470 of SEQ ID NO: 585530
gcaaguuagaacggccaaa

SEQ ID NO: 647243 - RNA, 19 nt, Artificial Sequence
  Description of Artificial Sequence: Synthetic oligonucleotide
  Antisense strand to SEQ ID NO: 647242
uuuggccguucuaacuugc

SEQ ID NO: 647244 - RNA, 19 nt, Artificial Sequence
  Description of Artificial Sequence: Synthetic oligonucleotide
  Sense strand starting at position 1483 of SEQ ID NO: 585530
gccaaaguuuccgcaagga

SEQ ID NO: 647245 - RNA, 19 nt, Artificial Sequence
  Description of Artificial Sequence: Synthetic oligonucleotide
  Antisense strand to SEQ ID NO: 647244
uccuugcggaaacuuuggc

SEQ ID NO: 647246 - RNA, 19 nt, Artificial Sequence
  Description of Artificial Sequence: Synthetic oligonucleotide
  Sense strand starting at position 1854 of SEQ ID NO: 585530
cgcuuuaccuccuggagau

SEQ ID NO: 647247 - RNA, 19 nt, Artificial Sequence
  Description of Artificial Sequence: Synthetic oligonucleotide
  Antisense strand to SEQ ID NO: 647246
aucuccaggagguaaagcg

SEQ ID NO: 647248 - RNA, 19 nt, Artificial Sequence
  Description of Artificial Sequence: Synthetic oligonucleotide
  Sense strand starting at position 1855 of SEQ ID NO: 585530
gcuuuaccuccuggagauu

SEQ ID NO: 647249 - RNA, 19 nt, Artificial Sequence
  Description of Artificial Sequence: Synthetic oligonucleotide
  Antisense strand to SEQ ID NO: 647248
aaucuccaggagguaaagc

SEQ ID NO: 647250 - RNA, 19 nt, Artificial Sequence
  Description of Artificial Sequence: Synthetic oligonucleotide
  Sense strand starting at position 2110 of SEQ ID NO: 585530
ggaauugcaucccacuuaa

SEQ ID NO: 647251 - RNA, 19 nt, Artificial Sequence
  Description of Artificial Sequence: Synthetic oligonucleotide
  Antisense strand to SEQ ID NO: 647250
uuaagugggaugcaauucc

SEQ ID NO: 647252 - RNA, 19 nt, Artificial Sequence
  Description of Artificial Sequence: Synthetic oligonucleotide
  Sense strand starting at position 2139 of SEQ ID NO: 585530
auuaccaguccucagaagu

SEQ ID NO: 647253 - RNA, 19 nt, Artificial Sequence
  Description of Artificial Sequence: Synthetic oligonucleotide
  Antisense strand to SEQ ID NO: 647252
acuucugaggacugguaau

SEQ ID NO: 647254 - RNA, 19 nt, Artificial Sequence
  Description of Artificial Sequence: Synthetic oligonucleotide
  Sense strand starting at position 2150 of SEQ ID NO: 585530
ucagaaguaucuccgauuc

SEQ ID NO: 647255 - RNA, 19 nt, Artificial Sequence
  Description of Artificial Sequence: Synthetic oligonucleotide
  Antisense strand to SEQ ID NO: 647254
gaaucggagauacuucuga

SEQ ID NO: 647256 - RNA, 19 nt, Artificial Sequence
  Description of Artificial Sequence: Synthetic oligonucleotide
  Sense strand starting at position 2152 of SEQ ID NO: 585530
agaaguaucuccgauucuc

SEQ ID NO: 647257 - RNA, 19 nt, Artificial Sequence
  Description of Artificial Sequence: Synthetic oligonucleotide
  Antisense strand to SEQ ID NO: 647256
gagaaucggagauacuucu

SEQ ID NO: 647258 - RNA, 19 nt, Artificial Sequence
  Description of Artificial Sequence: Synthetic oligonucleotide
  Sense strand starting at position 2658 of SEQ ID NO: 585530
ugguccucucuuugcuaga

SEQ ID NO: 647259 - RNA, 19 nt, Artificial Sequence
  Description of Artificial Sequence: Synthetic oligonucleotide
  Antisense strand to SEQ ID NO: 647258
ucuagcaaagagaggacca

SEQ ID NO: 647260 - RNA, 19 nt, Artificial Sequence
  Description of Artificial Sequence: Synthetic oligonucleotide
  Sense strand starting at position 2660 of SEQ ID NO: 585530
guccucucuuugcuagagu

SEQ ID NO: 647261 - RNA, 19 nt, Artificial Sequence
  Description of Artificial Sequence: Synthetic oligonucleotide
  Antisense strand to SEQ ID NO: 647260
acucuagcaaagagaggac

SEQ ID NO: 647262 - RNA, 19 nt, Artificial Sequence
  Description of Artificial Sequence: Synthetic oligonucleotide
  Sense strand starting at position 2671 of SEQ ID NO: 585530
gcuagagugguucgccaua

SEQ ID NO: 647263 - RNA, 19 nt, Artificial Sequence
  Description of Artificial Sequence: Synthetic oligonucleotide
  Antisense strand to SEQ ID NO: 647262
uauggcgaaccacucuagc

SEQ ID NO: 647264 - RNA, 19 nt, Artificial Sequence
  Description of Artificial Sequence: Synthetic oligonucleotide
  Sense strand starting at position 2673 of SEQ ID NO: 585530
uagagugguucgccauacu

SEQ ID NO: 647265 - RNA, 19 nt, Artificial Sequence
  Description of Artificial Sequence: Synthetic oligonucleotide
  Antisense strand to SEQ ID NO: 647264
aguauggcgaaccacucua

SEQ ID NO: 647266 - RNA, 19 nt, Artificial Sequence
  Description of Artificial Sequence: Synthetic oligonucleotide
  Sense strand starting at position 2676 of SEQ ID NO: 585530
agugguucgccauacuuua

SEQ ID NO: 647267 - RNA, 19 nt, Artificial Sequence
  Description of Artificial Sequence: Synthetic oligonucleotide
  Antisense strand to SEQ ID NO: 647266
uaaaguauggcgaaccacu

SEQ ID NO: 647268 - RNA, 19 nt, Artificial Sequence
  Description of Artificial Sequence: Synthetic oligonucleotide
  Sense strand starting at position 2763 of SEQ ID NO: 585530
cccaguuugcaggauuauu

SEQ ID NO: 647269 - RNA, 19 nt, Artificial Sequence
  Description of Artificial Sequence: Synthetic oligonucleotide
  Antisense strand to SEQ ID NO: 647268
aauaauccugcaaacuggg

SEQ ID NO: 647270 - RNA, 19 nt, Artificial Sequence
  Description of Artificial Sequence: Synthetic oligonucleotide
  Sense strand starting at position 2771 of SEQ ID NO: 585530
gcaggauuauuugaaauag

SEQ ID NO: 647271 - RNA, 19 nt, Artificial Sequence
  Description of Artificial Sequence: Synthetic oligonucleotide
  Antisense strand to SEQ ID NO: 647270
cuauuucaaauaauccugc

SEQ ID NO: 647272 - RNA, 19 nt, Artificial Sequence
  Description of Artificial Sequence: Synthetic oligonucleotide
  Sense strand starting at position 2869 of SEQ ID NO: 585530
gagcgaguguguuauugug

SEQ ID NO: 647273 - RNA, 19 nt, Artificial Sequence
  Description of Artificial Sequence: Synthetic oligonucleotide
  Antisense strand to SEQ ID NO: 647272
cacaauaacacacucgcuc

SEQ ID NO: 647274 - RNA, 19 nt, Artificial Sequence
  Description of Artificial Sequence: Synthetic oligonucleotide
  Sense strand starting at position 2871 of SEQ ID NO: 585530
gcgaguguguuauugugcu

SEQ ID NO: 647275 - RNA, 19 nt, Artificial Sequence
  Description of Artificial Sequence: Synthetic oligonucleotide
  Antisense strand to SEQ ID NO: 647274
agcacaauaacacacucgc

SEQ ID NO: 647276 - RNA, 19 nt, Artificial Sequence
  Description of Artificial Sequence: Synthetic oligonucleotide
  Sense strand starting at position 2956 of SEQ ID NO: 585530
ggagacaacucauccgacu

SEQ ID NO: 647277 - RNA, 19 nt, Artificial Sequence
  Description of Artificial Sequence: Synthetic oligonucleotide
  Antisense strand to SEQ ID NO: 647276
agucggaugaguugucucc

SEQ ID NO: 647278 - RNA, 19 nt, Artificial Sequence
  Description of Artificial Sequence: Synthetic oligonucleotide
  Sense strand starting at position 3953 of SEQ ID NO: 585530
ccuguaauaucuccagaag

SEQ ID NO: 647279 - RNA, 19 nt, Artificial Sequence
  Description of Artificial Sequence: Synthetic oligonucleotide
  Antisense strand to SEQ ID NO: 647278
cuucuggagauauuacagg

SEQ ID NO: 647280 - RNA, 19 nt, Artificial Sequence
  Description of Artificial Sequence: Synthetic oligonucleotide
  Sense strand starting at position 3954 of SEQ ID NO: 585530
cuguaauaucuccagaagc

SEQ ID NO: 647281 - RNA, 19 nt, Artificial Sequence
  Description of Artificial Sequence: Synthetic oligonucleotide
  Antisense strand to SEQ ID NO: 647280
gcuucuggagauauuacag

SEQ ID NO: 647282 - RNA, 19 nt, Artificial Sequence
  Description of Artificial Sequence: Synthetic oligonucleotide
  Sense strand starting at position 145 of SEQ ID NO: 585531
ggaauugcaucccacuuaa

SEQ ID NO: 647283 - RNA, 19 nt, Artificial Sequence
  Description of Artificial Sequence: Synthetic oligonucleotide
  Antisense strand to SEQ ID NO: 647282
uuaagugggaugcaauucc

SEQ ID NO: 647284 - RNA, 19 nt, Artificial Sequence
  Description of Artificial Sequence: Synthetic oligonucleotide
  Sense strand starting at position 174 of SEQ ID NO: 585531
auuaccaguccucagaagu

SEQ ID NO: 647285 - RNA, 19 nt, Artificial Sequence
  Description of Artificial Sequence: Synthetic oligonucleotide
  Antisense strand to SEQ ID NO: 647284
acuucugaggacugguaau

SEQ ID NO: 647286 - RNA, 19 nt, Artificial Sequence
  Description of Artificial Sequence: Synthetic oligonucleotide
  Sense strand starting at position 185 of SEQ ID NO: 585531
ucagaaguaucuccgauuc

SEQ ID NO: 647287 - RNA, 19 nt, Artificial Sequence
  Description of Artificial Sequence: Synthetic oligonucleotide
  Antisense strand to SEQ ID NO: 647286
gaaucggagauacuucuga

SEQ ID NO: 647288 - RNA, 19 nt, Artificial Sequence
  Description of Artificial Sequence: Synthetic oligonucleotide
  Sense strand starting at position 187 of SEQ ID NO: 585531
agaaguaucuccgauucuc

SEQ ID NO: 647289 - RNA, 19 nt, Artificial Sequence
  Description of Artificial Sequence: Synthetic oligonucleotide
  Antisense strand to SEQ ID NO: 647288
gagaaucggagauacuucu

SEQ ID NO: 647290 - RNA, 19 nt, Artificial Sequence
  Description of Artificial Sequence: Synthetic oligonucleotide
  Sense strand starting at position 693 of SEQ ID NO: 585531
ugguccucucuuugcuaga

SEQ ID NO: 647291 - RNA, 19 nt, Artificial Sequence
  Description of Artificial Sequence: Synthetic oligonucleotide
  Antisense strand to SEQ ID NO: 647290
ucuagcaaagagaggacca

SEQ ID NO: 647292 - RNA, 19 nt, Artificial Sequence
  Description of Artificial Sequence: Synthetic oligonucleotide
  Sense strand starting at position 695 of SEQ ID NO: 585531
guccucucuuugcuagagu

SEQ ID NO: 647293 - RNA, 19 nt, Artificial Sequence
  Description of Artificial Sequence: Synthetic oligonucleotide
  Antisense strand to SEQ ID NO: 647292
acucuagcaaagagaggac

SEQ ID NO: 647294 - RNA, 19 nt, Artificial Sequence
  Description of Artificial Sequence: Synthetic oligonucleotide
  Sense strand starting at position 706 of SEQ ID NO: 585531
gcuagagugguucgccaua

SEQ ID NO: 647295 - RNA, 19 nt, Artificial Sequence
  Description of Artificial Sequence: Synthetic oligonucleotide
  Antisense strand to SEQ ID NO: 647294
uauggcgaaccacucuagc

SEQ ID NO: 647296 - RNA, 19 nt, Artificial Sequence
  Description of Artificial Sequence: Synthetic oligonucleotide
  Sense strand starting at position 708 of SEQ ID NO: 585531
uagagugguucgccauacu

SEQ ID NO: 647297 - RNA, 19 nt, Artificial Sequence
  Description of Artificial Sequence: Synthetic oligonucleotide
  Antisense strand to SEQ ID NO: 647296
aguauggcgaaccacucua

SEQ ID NO: 647298 - RNA, 19 nt, Artificial Sequence
  Description of Artificial Sequence: Synthetic oligonucleotide
  Sense strand starting at position 711 of SEQ ID NO: 585531
agugguucgccauacuuua

SEQ ID NO: 647299 - RNA, 19 nt, Artificial Sequence
  Description of Artificial Sequence: Synthetic oligonucleotide
  Antisense strand to SEQ ID NO: 647298
uaaaguauggcgaaccacu

SEQ ID NO: 647300 - RNA, 19 nt, Artificial Sequence
  Description of Artificial Sequence: Synthetic oligonucleotide
  Sense strand starting at position 798 of SEQ ID NO: 585531
cccaguuugcaggauuauu

SEQ ID NO: 647301 - RNA, 19 nt, Artificial Sequence
  Description of Artificial Sequence: Synthetic oligonucleotide
  Antisense strand to SEQ ID NO: 647300
aauaauccugcaaacuggg

SEQ ID NO: 647302 - RNA, 19 nt, Artificial Sequence
  Description of Artificial Sequence: Synthetic oligonucleotide
  Sense strand starting at position 806 of SEQ ID NO: 585531
gcaggauuauuugaaauag

SEQ ID NO: 647303 - RNA, 19 nt, Artificial Sequence
  Description of Artificial Sequence: Synthetic oligonucleotide
  Antisense strand to SEQ ID NO: 647302
cuauuucaaauaauccugc

SEQ ID NO: 647304 - RNA, 19 nt, Artificial Sequence
  Description of Artificial Sequence: Synthetic oligonucleotide
  Sense strand starting at position 906 of SEQ ID NO: 585531
gcgaguguguuauugugcu

SEQ ID NO: 647305 - RNA, 19 nt, Artificial Sequence
  Description of Artificial Sequence: Synthetic oligonucleotide
  Antisense strand to SEQ ID NO: 647304
agcacaauaacacacucgc

SEQ ID NO: 647306 - RNA, 19 nt, Artificial Sequence
  Description of Artificial Sequence: Synthetic oligonucleotide
  Sense strand starting at position 991 of SEQ ID NO: 585531
ggagacaacucauccgacu

SEQ ID NO: 647307 - RNA, 19 nt, Artificial Sequence
  Description of Artificial Sequence: Synthetic oligonucleotide
  Antisense strand to SEQ ID NO: 647306
agucggaugaguugucucc

SEQ ID NO: 647308 - RNA, 19 nt, Artificial Sequence
  Description of Artificial Sequence: Synthetic oligonucleotide
  Sense strand starting at position 1988 of SEQ ID NO: 585531
ccuguaauaucuccagaag

SEQ ID NO: 647309 - RNA, 19 nt, Artificial Sequence
  Description of Artificial Sequence: Synthetic oligonucleotide
  Antisense strand to SEQ ID NO: 647308
cuucuggagauauuacagg

SEQ ID NO: 647310 - RNA, 19 nt, Artificial Sequence
  Description of Artificial Sequence: Synthetic oligonucleotide
  Sense strand starting at position 1989 of SEQ ID NO: 585531
cuguaauaucuccagaagc

SEQ ID NO: 647311 - RNA, 19 nt, Artificial Sequence
  Description of Artificial Sequence: Synthetic oligonucleotide
  Antisense strand to SEQ ID NO: 647310
gcuucuggagauauuacag

SEQ ID NO: 647312 - RNA, 19 nt, Artificial Sequence
  Description of Artificial Sequence: Synthetic oligonucleotide
  Sense strand starting at position 2192 of SEQ ID NO: 585531
gagcuuacgaguuagaaag

SEQ ID NO: 647313 - RNA, 19 nt, Artificial Sequence
  Description of Artificial Sequence: Synthetic oligonucleotide
  Antisense strand to SEQ ID NO: 647312
cuuucuaacucguaagcuc

SEQ ID NO: 647314 - RNA, 19 nt, Artificial Sequence
  Description of Artificial Sequence: Synthetic oligonucleotide
  Sense strand starting at position 2199 of SEQ ID NO: 585531
cgaguuagaaagugugaau

SEQ ID NO: 647315 - RNA, 19 nt, Artificial Sequence
  Description of Artificial Sequence: Synthetic oligonucleotide
  Antisense strand to SEQ ID NO: 647314
auucacacuuucuaacucg

SEQ ID NO: 647316 - RNA, 19 nt, Artificial Sequence
  Description of Artificial Sequence: Synthetic oligonucleotide
  Sense strand starting at position 2202 of SEQ ID NO: 585531
guuagaaagugugaauaug

SEQ ID NO: 647317 - RNA, 19 nt, Artificial Sequence
  Description of Artificial Sequence: Synthetic oligonucleotide
  Antisense strand to SEQ ID NO: 647316
cauauucacacuuucuaac

SEQ ID NO: 647318 - RNA, 19 nt, Artificial Sequence
  Description of Artificial Sequence: Synthetic oligonucleotide
  Sense strand starting at position 2252 of SEQ ID NO: 585531
ggacggugcggcucguaau

SEQ ID NO: 647319 - RNA, 19 nt, Artificial Sequence
  Description of Artificial Sequence: Synthetic oligonucleotide
  Antisense strand to SEQ ID NO: 647318
auuacgagccgcaccgucc

SEQ ID NO: 647320 - RNA, 19 nt, Artificial Sequence
  Description of Artificial Sequence: Synthetic oligonucleotide
  Sense strand starting at position 2253 of SEQ ID NO: 585531
gacggugcggcucguaaua

SEQ ID NO: 647321 - RNA, 19 nt, Artificial Sequence
  Description of Artificial Sequence: Synthetic oligonucleotide
  Antisense strand to SEQ ID NO: 647320
uauuacgagccgcaccguc

SEQ ID NO: 647322 - RNA, 19 nt, Artificial Sequence
  Description of Artificial Sequence: Synthetic oligonucleotide
  Sense strand starting at position 2281 of SEQ ID NO: 585531
ucguauauuucacggcaag

SEQ ID NO: 647323 - RNA, 19 nt, Artificial Sequence
  Description of Artificial Sequence: Synthetic oligonucleotide
  Antisense strand to SEQ ID NO: 647322
cuugccgugaaauauacga

SEQ ID NO: 647324 - RNA, 19 nt, Artificial Sequence
  Description of Artificial Sequence: Synthetic oligonucleotide
  Sense strand starting at position 2282 of SEQ ID NO: 585531
cguauauuucacggcaaga

SEQ ID NO: 647325 - RNA, 19 nt, Artificial Sequence
  Description of Artificial Sequence: Synthetic oligonucleotide
  Antisense strand to SEQ ID NO: 647324
ucuugccgugaaauauacg

SEQ ID NO: 647326 - RNA, 19 nt, Artificial Sequence
  Description of Artificial Sequence: Synthetic oligonucleotide
  Sense strand starting at position 2350 of SEQ ID NO: 585531
uccagagugccagauagau

SEQ ID NO: 647327 - RNA, 19 nt, Artificial Sequence
  Description of Artificial Sequence: Synthetic oligonucleotide
  Antisense strand to SEQ ID NO: 647326
aucuaucuggcacucugga

SEQ ID NO: 647328 - RNA, 19 nt, Artificial Sequence
  Description of Artificial Sequence: Synthetic oligonucleotide
  Sense strand starting at position 2358 of SEQ ID NO: 585531
gccagauagauucgcggaa

SEQ ID NO: 647329 - RNA, 19 nt, Artificial Sequence
  Description of Artificial Sequence: Synthetic oligonucleotide
  Antisense strand to SEQ ID NO: 647328
uuccgcgaaucuaucuggc

SEQ ID NO: 647330 - RNA, 19 nt, Artificial Sequence
  Description of Artificial Sequence: Synthetic oligonucleotide
  Sense strand starting at position 2360 of SEQ ID NO: 585531
cagauagauucgcggaaga

SEQ ID NO: 647331 - RNA, 19 nt, Artificial Sequence
  Description of Artificial Sequence: Synthetic oligonucleotide
  Antisense strand to SEQ ID NO: 647330
ucuuccgcgaaucuaucug

SEQ ID NO: 647332 - RNA, 19 nt, Artificial Sequence
  Description of Artificial Sequence: Synthetic oligonucleotide
  Sense strand starting at position 2374 of SEQ ID NO: 585531
gaagaaauuggguggcugu

SEQ ID NO: 647333 - RNA, 19 nt, Artificial Sequence
  Description of Artificial Sequence: Synthetic oligonucleotide
  Antisense strand to SEQ ID NO: 647332
acagccacccaauuucuuc

SEQ ID NO: 647334 - RNA, 19 nt, Artificial Sequence
  Description of Artificial Sequence: Synthetic oligonucleotide
  Sense strand starting at position 2417 of SEQ ID NO: 585531
cggacauggccaugugagu

SEQ ID NO: 647335 - RNA, 19 nt, Artificial Sequence
  Description of Artificial Sequence: Synthetic oligonucleotide
  Antisense strand to SEQ ID NO: 647334
acucacauggccauguccg

SEQ ID NO: 647336 - RNA, 19 nt, Artificial Sequence
  Description of Artificial Sequence: Synthetic oligonucleotide
  Sense strand starting at position 2512 of SEQ ID NO: 585531
ugcacauaucuacggaaag

SEQ ID NO: 647337 - RNA, 19 nt, Artificial Sequence
  Description of Artificial Sequence: Synthetic oligonucleotide
  Antisense strand to SEQ ID NO: 647336
cuuuccguagauaugugca

SEQ ID NO: 647338 - RNA, 19 nt, Artificial Sequence
  Description of Artificial Sequence: Synthetic oligonucleotide
  Sense strand starting at position 2898 of SEQ ID NO: 585531
cccgaucucuaagagauua

SEQ ID NO: 647339 - RNA, 19 nt, Artificial Sequence
  Description of Artificial Sequence: Synthetic oligonucleotide
  Antisense strand to SEQ ID NO: 647338
uaaucucuuagagaucggg

SEQ ID NO: 647340 - RNA, 19 nt, Artificial Sequence
  Description of Artificial Sequence: Synthetic oligonucleotide
  Sense strand starting at position 2937 of SEQ ID NO: 585531
gcagcuugaacuugucgaa

SEQ ID NO: 647341 - RNA, 19 nt, Artificial Sequence
  Description of Artificial Sequence: Synthetic oligonucleotide
  Antisense strand to SEQ ID NO: 647340
uucgacaaguucaagcugc

SEQ ID NO: 647342 - RNA, 19 nt, Artificial Sequence
  Description of Artificial Sequence: Synthetic oligonucleotide
  Sense strand starting at position 3099 of SEQ ID NO: 585531
ucuccagacucggugucau

SEQ ID NO: 647343 - RNA, 19 nt, Artificial Sequence
  Description of Artificial Sequence: Synthetic oligonucleotide
  Antisense strand to SEQ ID NO: 647342
augacaccgagucuggaga

SEQ ID NO: 647344 - RNA, 19 nt, Artificial Sequence
  Description of Artificial Sequence: Synthetic oligonucleotide
  Sense strand starting at position 3109 of SEQ ID NO: 585531
cggugucaucccgggcuuu

SEQ ID NO: 647345 - RNA, 19 nt, Artificial Sequence
  Description of Artificial Sequence: Synthetic oligonucleotide
  Antisense strand to SEQ ID NO: 647344
aaagcccgggaugacaccg

SEQ ID NO: 647346 - RNA, 19 nt, Artificial Sequence
  Description of Artificial Sequence: Synthetic oligonucleotide
  Sense strand starting at position 3392 of SEQ ID NO: 585531
ggaucuuuaucucucaguu

SEQ ID NO: 647347 - RNA, 19 nt, Artificial Sequence
  Description of Artificial Sequence: Synthetic oligonucleotide
  Antisense strand to SEQ ID NO: 647346
aacugagagauaaagaucc

SEQ ID NO: 647348 - RNA, 19 nt, Artificial Sequence
  Description of Artificial Sequence: Synthetic oligonucleotide
  Sense strand starting at position 3431 of SEQ ID NO: 585531
uucgaauugggacgagauu

SEQ ID NO: 647349 - RNA, 19 nt, Artificial Sequence
  Description of Artificial Sequence: Synthetic oligonucleotide
  Antisense strand to SEQ ID NO: 647348
aaucucgucccaauucgaa

SEQ ID NO: 647350 - RNA, 19 nt, Artificial Sequence
  Description of Artificial Sequence: Synthetic oligonucleotide
  Sense strand starting at position 3566 of SEQ ID NO: 585531
ggcguagcgcuuucucgaa

SEQ ID NO: 647351 - RNA, 19 nt, Artificial Sequence
  Description of Artificial Sequence: Synthetic oligonucleotide
  Antisense strand to SEQ ID NO: 647350
uucgagaaagcgcuacgcc

SEQ ID NO: 647352 - RNA, 19 nt, Artificial Sequence
  Description of Artificial Sequence: Synthetic oligonucleotide
  Sense strand starting at position 3602 of SEQ ID NO: 585531
ggaggaauuucgggcagga

SEQ ID NO: 647353 - RNA, 19 nt, Artificial Sequence
  Description of Artificial Sequence: Synthetic oligonucleotide
  Antisense strand to SEQ ID NO: 647352
uccugcccgaaauuccucc

SEQ ID NO: 647354 - RNA, 19 nt, Artificial Sequence
  Description of Artificial Sequence: Synthetic oligonucleotide
  Sense strand starting at position 3742 of SEQ ID NO: 585531
gguucuuugguucaggaca

SEQ ID NO: 647355 - RNA, 19 nt, Artificial Sequence
  Description of Artificial Sequence: Synthetic oligonucleotide
  Antisense strand to SEQ ID NO: 647354
uguccugaaccaaagaacc

SEQ ID NO: 647356 - RNA, 19 nt, Artificial Sequence
  Description of Artificial Sequence: Synthetic oligonucleotide
  Sense strand starting at position 3860 of SEQ ID NO: 585531
gggucuguuucgagaagga

SEQ ID NO: 647357 - RNA, 19 nt, Artificial Sequence
  Description of Artificial Sequence: Synthetic oligonucleotide
  Antisense strand to SEQ ID NO: 647356
uccuucucgaaacagaccc

SEQ ID NO: 647358 - RNA, 19 nt, Artificial Sequence
  Description of Artificial Sequence: Synthetic oligonucleotide
  Sense strand starting at position 3861 of SEQ ID NO: 585531
ggucuguuucgagaaggag

SEQ ID NO: 647359 - RNA, 19 nt, Artificial Sequence
  Description of Artificial Sequence: Synthetic oligonucleotide
  Antisense strand to SEQ ID NO: 647358
cuccuucucgaaacagacc

SEQ ID NO: 647360 - RNA, 19 nt, Artificial Sequence
  Description of Artificial Sequence: Synthetic oligonucleotide
  Sense strand starting at position 3976 of SEQ ID NO: 585531
gcucauuuguaggcaccaa

SEQ ID NO: 647361 - RNA, 19 nt, Artificial Sequence
  Description of Artificial Sequence: Synthetic oligonucleotide
  Antisense strand to SEQ ID NO: 647360
uuggugccuacaaaugagc

SEQ ID NO: 647362 - RNA, 19 nt, Artificial Sequence
  Description of Artificial Sequence: Synthetic oligonucleotide
  Sense strand starting at position 155 of SEQ ID NO: 585532
ggcccaugagcucagcaua

SEQ ID NO: 647363 - RNA, 19 nt, Artificial Sequence
  Description of Artificial Sequence: Synthetic oligonucleotide
  Antisense strand to SEQ ID NO: 647362
uaugcugagcucaugggcc

SEQ ID NO: 647364 - RNA, 19 nt, Artificial Sequence
  Description of Artificial Sequence: Synthetic oligonucleotide
  Sense strand starting at position 513 of SEQ ID NO: 585532
cugucucuacccugagaac

SEQ ID NO: 647365 - RNA, 19 nt, Artificial Sequence
  Description of Artificial Sequence: Synthetic oligonucleotide
  Antisense strand to SEQ ID NO: 647364
guucucaggguagagacag

SEQ ID NO: 647366 - RNA, 19 nt, Artificial Sequence
  Description of Artificial Sequence: Synthetic oligonucleotide
  Sense strand starting at position 514 of SEQ ID NO: 585532
ugucucuacccugagaacu

SEQ ID NO: 647367 - RNA, 19 nt, Artificial Sequence
  Description of Artificial Sequence: Synthetic oligonucleotide
  Antisense strand to SEQ ID NO: 647366
aguucucaggguagagaca

SEQ ID NO: 647368 - RNA, 19 nt, Artificial Sequence
  Description of Artificial Sequence: Synthetic oligonucleotide
  Sense strand starting at position 549 of SEQ ID NO: 585532
ugaccugauagcuacgcaa

SEQ ID NO: 647369 - RNA, 19 nt, Artificial Sequence
  Description of Artificial Sequence: Synthetic oligonucleotide
  Antisense strand to SEQ ID NO: 647368
uugcguagcuaucagguca

SEQ ID NO: 647370 - RNA, 19 nt, Artificial Sequence
  Description of Artificial Sequence: Synthetic oligonucleotide
  Sense strand starting at position 553 of SEQ ID NO: 585532
cugauagcuacgcaaagua

SEQ ID NO: 647371 - RNA, 19 nt, Artificial Sequence
  Description of Artificial Sequence: Synthetic oligonucleotide
  Antisense strand to SEQ ID NO: 647370
uacuuugcguagcuaucag

SEQ ID NO: 647372 - RNA, 19 nt, Artificial Sequence
  Description of Artificial Sequence: Synthetic oligonucleotide
  Sense strand starting at position 667 of SEQ ID NO: 585532
ggaucucaagcaggacaua

SEQ ID NO: 647373 - RNA, 19 nt, Artificial Sequence
  Description of Artificial Sequence: Synthetic oligonucleotide
  Antisense strand to SEQ ID NO: 647372
uauguccugcuugagaucc

SEQ ID NO: 647374 - RNA, 19 nt, Artificial Sequence
  Description of Artificial Sequence: Synthetic oligonucleotide
  Sense strand starting at position 688 of SEQ ID NO: 585532
caaaguugcagaggugaga

SEQ ID NO: 647375 - RNA, 19 nt, Artificial Sequence
  Description of Artificial Sequence: Synthetic oligonucleotide
  Antisense strand to SEQ ID NO: 647374
ucucaccucugcaacuuug

SEQ ID NO: 647376 - RNA, 19 nt, Artificial Sequence
  Description of Artificial Sequence: Synthetic oligonucleotide
  Sense strand starting at position 709 of SEQ ID NO: 585532
cauaucuugugcuuaggga

SEQ ID NO: 647377 - RNA, 19 nt, Artificial Sequence
  Description of Artificial Sequence: Synthetic oligonucleotide
  Antisense strand to SEQ ID NO: 647376
ucccuaagcacaagauaug

SEQ ID NO: 647378 - RNA, 19 nt, Artificial Sequence
  Description of Artificial Sequence: Synthetic oligonucleotide
  Sense strand starting at position 710 of SEQ ID NO: 585532
auaucuugugcuuagggaa

SEQ ID NO: 647379 - RNA, 19 nt, Artificial Sequence
  Description of Artificial Sequence: Synthetic oligonucleotide
  Antisense strand to SEQ ID NO: 647378
uucccuaagcacaagauau

SEQ ID NO: 647380 - RNA, 19 nt, Artificial Sequence
  Description of Artificial Sequence: Synthetic oligonucleotide
  Sense strand starting at position 759 of SEQ ID NO: 585532
ggauaugugcuguggagga

SEQ ID NO: 647381 - RNA, 19 nt, Artificial Sequence
  Description of Artificial Sequence: Synthetic oligonucleotide
  Antisense strand to SEQ ID NO: 647380
uccuccacagcacauaucc

SEQ ID NO: 647382 - RNA, 19 nt, Artificial Sequence
  Description of Artificial Sequence: Synthetic oligonucleotide
  Sense strand starting at position 761 of SEQ ID NO: 585532
auaugugcuguggaggaau

SEQ ID NO: 647383 - RNA, 19 nt, Artificial Sequence
  Description of Artificial Sequence: Synthetic oligonucleotide
  Antisense strand to SEQ ID NO: 647382
auuccuccacagcacauau

SEQ ID NO: 647384 - RNA, 19 nt, Artificial Sequence
  Description of Artificial Sequence: Synthetic oligonucleotide
  Sense strand starting at position 783 of SEQ ID NO: 585532
agcugagauuaguuccuca

SEQ ID NO: 647385 - RNA, 19 nt, Artificial Sequence
  Description of Artificial Sequence: Synthetic oligonucleotide
  Antisense strand to SEQ ID NO: 647384
ugaggaacuaaucucagcu

SEQ ID NO: 647386 - RNA, 19 nt, Artificial Sequence
  Description of Artificial Sequence: Synthetic oligonucleotide
  Sense strand starting at position 786 of SEQ ID NO: 585532
ugagauuaguuccucaauu

SEQ ID NO: 647387 - RNA, 19 nt, Artificial Sequence
  Description of Artificial Sequence: Synthetic oligonucleotide
  Antisense strand to SEQ ID NO: 647386
aauugaggaacuaaucuca

SEQ ID NO: 647388 - RNA, 19 nt, Artificial Sequence
  Description of Artificial Sequence: Synthetic oligonucleotide
  Sense strand starting at position 946 of SEQ ID NO: 585532
uacagugaccucugaagga

SEQ ID NO: 647389 - RNA, 19 nt, Artificial Sequence
  Description of Artificial Sequence: Synthetic oligonucleotide
  Antisense strand to SEQ ID NO: 647388
uccuucagaggucacugua

SEQ ID NO: 647390 - RNA, 19 nt, Artificial Sequence
  Description of Artificial Sequence: Synthetic oligonucleotide
  Sense strand starting at position 1150 of SEQ ID NO: 585532
gaaacaguggcagaauguu

SEQ ID NO: 647391 - RNA, 19 nt, Artificial Sequence
  Description of Artificial Sequence: Synthetic oligonucleotide
  Antisense strand to SEQ ID NO: 647390
aacauucugccacuguuuc

SEQ ID NO: 647392 - RNA, 19 nt, Artificial Sequence
  Description of Artificial Sequence: Synthetic oligonucleotide
  Sense strand starting at position 1587 of SEQ ID NO: 585532
cgcuuucaagguucgaguu

SEQ ID NO: 647393 - RNA, 19 nt, Artificial Sequence
  Description of Artificial Sequence: Synthetic oligonucleotide
  Antisense strand to SEQ ID NO: 647392
aacucgaaccuugaaagcg

SEQ ID NO: 647394 - RNA, 19 nt, Artificial Sequence
  Description of Artificial Sequence: Synthetic oligonucleotide
  Sense strand starting at position 1622 of SEQ ID NO: 585532
cccugucauuuguuuccaa

SEQ ID NO: 647395 - RNA, 19 nt, Artificial Sequence
  Description of Artificial Sequence: Synthetic oligonucleotide
  Antisense strand to SEQ ID NO: 647394
uuggaaacaaaugacaggg

SEQ ID NO: 647396 - RNA, 19 nt, Artificial Sequence
  Description of Artificial Sequence: Synthetic oligonucleotide
  Sense strand starting at position 2042 of SEQ ID NO: 585532
cugucucuccgucacagaa

SEQ ID NO: 647397 - RNA, 19 nt, Artificial Sequence
  Description of Artificial Sequence: Synthetic oligonucleotide
  Antisense strand to SEQ ID NO: 647396
uucugugacggagagacag

SEQ ID NO: 647398 - RNA, 19 nt, Artificial Sequence
  Description of Artificial Sequence: Synthetic oligonucleotide
  Sense strand starting at position 2273 of SEQ ID NO: 585532
guugcuaagaauggcaaau

SEQ ID NO: 647399 - RNA, 19 nt, Artificial Sequence
  Description of Artificial Sequence: Synthetic oligonucleotide
  Antisense strand to SEQ ID NO: 647398
auuugccauucuuagcaac

SEQ ID NO: 647400 - RNA, 19 nt, Artificial Sequence
  Description of Artificial Sequence: Synthetic oligonucleotide
  Sense strand starting at position 2306 of SEQ ID NO: 585532
uacugaaagguuuguugua

SEQ ID NO: 647401 - RNA, 19 nt, Artificial Sequence
  Description of Artificial Sequence: Synthetic oligonucleotide
  Antisense strand to SEQ ID NO: 647400
uacaacaaaccuuucagua

SEQ ID NO: 647402 - RNA, 19 nt, Artificial Sequence
  Description of Artificial Sequence: Synthetic oligonucleotide
  Sense strand starting at position 2307 of SEQ ID NO: 585532
acugaaagguuuguuguaa

SEQ ID NO: 647403 - RNA, 19 nt, Artificial Sequence
  Description of Artificial Sequence: Synthetic oligonucleotide
  Antisense strand to SEQ ID NO: 647402
uuacaacaaaccuuucagu

SEQ ID NO: 647404 - RNA, 19 nt, Artificial Sequence
  Description of Artificial Sequence: Synthetic oligonucleotide
  Sense strand starting at position 2308 of SEQ ID NO: 585532
cugaaagguuuguuguaau

SEQ ID NO: 647405 - RNA, 19 nt, Artificial Sequence
  Description of Artificial Sequence: Synthetic oligonucleotide
  Antisense strand to SEQ ID NO: 647404
auuacaacaaaccuuucag

SEQ ID NO: 647406 - RNA, 19 nt, Artificial Sequence
  Description of Artificial Sequence: Synthetic oligonucleotide
  Sense strand starting at position 2322 of SEQ ID NO: 585532
guaauagugccagagauug

SEQ ID NO: 647407 - RNA, 19 nt, Artificial Sequence
  Description of Artificial Sequence: Synthetic oligonucleotide
  Antisense strand to SEQ ID NO: 647406
caaucucuggcacuauuac

SEQ ID NO: 647408 - RNA, 19 nt, Artificial Sequence
  Description of Artificial Sequence: Synthetic oligonucleotide
  Sense strand starting at position 2333 of SEQ ID NO: 585532
agagauuguugauuaguaa

SEQ ID NO: 647409 - RNA, 19 nt, Artificial Sequence
  Description of Artificial Sequence: Synthetic oligonucleotide
  Antisense strand to SEQ ID NO: 647408
uuacuaaucaacaaucucu

SEQ ID NO: 647410 - RNA, 19 nt, Artificial Sequence
  Description of Artificial Sequence: Synthetic oligonucleotide
  Sense strand starting at position 2336 of SEQ ID NO: 585532
gauuguugauuaguaacca

SEQ ID NO: 647411 - RNA, 19 nt, Artificial Sequence
  Description of Artificial Sequence: Synthetic oligonucleotide
  Antisense strand to SEQ ID NO: 647410
ugguuacuaaucaacaauc

SEQ ID NO: 647412 - RNA, 19 nt, Artificial Sequence
  Description of Artificial Sequence: Synthetic oligonucleotide
  Sense strand starting at position 2382 of SEQ ID NO: 585532
gauaguaaccuuugucaga

SEQ ID NO: 647413 - RNA, 19 nt, Artificial Sequence
  Description of Artificial Sequence: Synthetic oligonucleotide
  Antisense strand to SEQ ID NO: 647412
ucugacaaagguuacuauc

SEQ ID NO: 647414 - RNA, 19 nt, Artificial Sequence
  Description of Artificial Sequence: Synthetic oligonucleotide
  Sense strand starting at position 2383 of SEQ ID NO: 585532
auaguaaccuuugucagaa

SEQ ID NO: 647415 - RNA, 19 nt, Artificial Sequence
  Description of Artificial Sequence: Synthetic oligonucleotide
  Antisense strand to SEQ ID NO: 647414
uucugacaaagguuacuau

SEQ ID NO: 647416 - RNA, 19 nt, Artificial Sequence
  Description of Artificial Sequence: Synthetic oligonucleotide
  Sense strand starting at position 2415 of SEQ ID NO: 585532
agcuaaggaccuugucaca

SEQ ID NO: 647417 - RNA, 19 nt, Artificial Sequence
  Description of Artificial Sequence: Synthetic oligonucleotide
  Antisense strand to SEQ ID NO: 647416
ugugacaagguccuuagcu

SEQ ID NO: 647418 - RNA, 19 nt, Artificial Sequence
  Description of Artificial Sequence: Synthetic oligonucleotide
  Sense strand starting at position 2511 of SEQ ID NO: 585532
gagagauaauugccugagu

SEQ ID NO: 647419 - RNA, 19 nt, Artificial Sequence
  Description of Artificial Sequence: Synthetic oligonucleotide
  Antisense strand to SEQ ID NO: 647418
acucaggcaauuaucucuc

SEQ ID NO: 647420 - RNA, 19 nt, Artificial Sequence
  Description of Artificial Sequence: Synthetic oligonucleotide
  Sense strand starting at position 2512 of SEQ ID NO: 585532
agagauaauugccugaguu

SEQ ID NO: 647421 - RNA, 19 nt, Artificial Sequence
  Description of Artificial Sequence: Synthetic oligonucleotide
  Antisense strand to SEQ ID NO: 647420
aacucaggcaauuaucucu

SEQ ID NO: 647422 - RNA, 19 nt, Artificial Sequence
  Description of Artificial Sequence: Synthetic oligonucleotide
  Sense strand starting at position 2513 of SEQ ID NO: 585532
gagauaauugccugaguua

SEQ ID NO: 647423 - RNA, 19 nt, Artificial Sequence
  Description of Artificial Sequence: Synthetic oligonucleotide
  Antisense strand to SEQ ID NO: 647422
uaacucaggcaauuaucuc

SEQ ID NO: 647424 - RNA, 19 nt, Artificial Sequence
  Description of Artificial Sequence: Synthetic oligonucleotide
  Sense strand starting at position 2514 of SEQ ID NO: 585532
agauaauugccugaguuag

SEQ ID NO: 647425 - RNA, 19 nt, Artificial Sequence
  Description of Artificial Sequence: Synthetic oligonucleotide
  Antisense strand to SEQ ID NO: 647424
cuaacucaggcaauuaucu

SEQ ID NO: 647426 - RNA, 19 nt, Artificial Sequence
  Description of Artificial Sequence: Synthetic oligonucleotide
  Sense strand starting at position 2516 of SEQ ID NO: 585532
auaauugccugaguuagga

SEQ ID NO: 647427 - RNA, 19 nt, Artificial Sequence
  Description of Artificial Sequence: Synthetic oligonucleotide
  Antisense strand to SEQ ID NO: 647426
uccuaacucaggcaauuau

SEQ ID NO: 647428 - RNA, 19 nt, Artificial Sequence
  Description of Artificial Sequence: Synthetic oligonucleotide
  Sense strand starting at position 2715 of SEQ ID NO: 585532
ucaguaaguugucccaaau

SEQ ID NO: 647429 - RNA, 19 nt, Artificial Sequence
  Description of Artificial Sequence: Synthetic oligonucleotide
  Antisense strand to SEQ ID NO: 647428
auuugggacaacuuacuga

SEQ ID NO: 647430 - RNA, 19 nt, Artificial Sequence
  Description of Artificial Sequence: Synthetic oligonucleotide
  Sense strand starting at position 3090 of SEQ ID NO: 585532
gaaaguccucucuacacga

SEQ ID NO: 647431 - RNA, 19 nt, Artificial Sequence
  Description of Artificial Sequence: Synthetic oligonucleotide
  Antisense strand to SEQ ID NO: 647430
ucguguagagaggacuuuc

SEQ ID NO: 647432 - RNA, 19 nt, Artificial Sequence
  Description of Artificial Sequence: Synthetic oligonucleotide
  Sense strand starting at position 3547 of SEQ ID NO: 585532
ggagaauccacugggugau

SEQ ID NO: 647433 - RNA, 19 nt, Artificial Sequence
  Description of Artificial Sequence: Synthetic oligonucleotide
  Antisense strand to SEQ ID NO: 647432
aucacccaguggauucucc

SEQ ID NO: 647434 - RNA, 19 nt, Artificial Sequence
  Description of Artificial Sequence: Synthetic oligonucleotide
  Sense strand starting at position 3642 of SEQ ID NO: 585532
agauguuuaaccugaggca

SEQ ID NO: 647435 - RNA, 19 nt, Artificial Sequence
  Description of Artificial Sequence: Synthetic oligonucleotide
  Antisense strand to SEQ ID NO: 647434
ugccucagguuaaacaucu

SEQ ID NO: 647436 - RNA, 19 nt, Artificial Sequence
  Description of Artificial Sequence: Synthetic oligonucleotide
  Sense strand starting at position 3643 of SEQ ID NO: 585532
gauguuuaaccugaggcau

SEQ ID NO: 647437 - RNA, 19 nt, Artificial Sequence
  Description of Artificial Sequence: Synthetic oligonucleotide
  Antisense strand to SEQ ID NO: 647436
augccucagguuaaacauc

SEQ ID NO: 647438 - RNA, 19 nt, Artificial Sequence
  Description of Artificial Sequence: Synthetic oligonucleotide
  Sense strand starting at position 3732 of SEQ ID NO: 585532
guaagaaaucaaggucucu

SEQ ID NO: 647439 - RNA, 19 nt, Artificial Sequence
  Description of Artificial Sequence: Synthetic oligonucleotide
  Antisense strand to SEQ ID NO: 647438
agagaccuugauuucuuac

SEQ ID NO: 647440 - RNA, 19 nt, Artificial Sequence
  Description of Artificial Sequence: Synthetic oligonucleotide
  Sense strand starting at position 3969 of SEQ ID NO: 585532
uugcgauaagcugagaucu

SEQ ID NO: 647441 - RNA, 19 nt, Artificial Sequence
  Description of Artificial Sequence: Synthetic oligonucleotide
  Antisense strand to SEQ ID NO: 647440
agaucucagcuuaucgcaa

SEQ ID NO: 647442 - RNA, 19 nt, Artificial Sequence
  Description of Artificial Sequence: Synthetic oligonucleotide
  Sense strand starting at position 222 of SEQ ID NO: 585533
cugucucuacccugagaac

SEQ ID NO: 647443 - RNA, 19 nt, Artificial Sequence
  Description of Artificial Sequence: Synthetic oligonucleotide
  Antisense strand to SEQ ID NO: 647442
guucucaggguagagacag

SEQ ID NO: 647444 - RNA, 19 nt, Artificial Sequence
  Description of Artificial Sequence: Synthetic oligonucleotide
  Sense strand starting at position 223 of SEQ ID NO: 585533
ugucucuacccugagaacu

SEQ ID NO: 647445 - RNA, 19 nt, Artificial Sequence
  Description of Artificial Sequence: Synthetic oligonucleotide
  Antisense strand to SEQ ID NO: 647444
aguucucaggguagagaca

SEQ ID NO: 647446 - RNA, 19 nt, Artificial Sequence
  Description of Artificial Sequence: Synthetic oligonucleotide
  Sense strand starting at position 258 of SEQ ID NO: 585533
ugaccugauagcuacgcaa

SEQ ID NO: 647447 - RNA, 19 nt, Artificial Sequence
  Description of Artificial Sequence: Synthetic oligonucleotide
  Antisense strand to SEQ ID NO: 647446
uugcguagcuaucagguca

SEQ ID NO: 647448 - RNA, 19 nt, Artificial Sequence
  Description of Artificial Sequence: Synthetic oligonucleotide
  Sense strand starting at position 262 of SEQ ID NO: 585533
cugauagcuacgcaaagua

SEQ ID NO: 647449 - RNA, 19 nt, Artificial Sequence
  Description of Artificial Sequence: Synthetic oligonucleotide
  Antisense strand to SEQ ID NO: 647448
uacuuugcguagcuaucag

SEQ ID NO: 647450 - RNA, 19 nt, Artificial Sequence
  Description of Artificial Sequence: Synthetic oligonucleotide
  Sense strand starting at position 376 of SEQ ID NO: 585533
ggaucucaagcaggacaua

SEQ ID NO: 647451 - RNA, 19 nt, Artificial Sequence
  Description of Artificial Sequence: Synthetic oligonucleotide
  Antisense strand to SEQ ID NO: 647450
uauguccugcuugagaucc

SEQ ID NO: 647452 - RNA, 19 nt, Artificial Sequence
  Description of Artificial Sequence: Synthetic oligonucleotide
  Sense strand starting at position 397 of SEQ ID NO: 585533
caaaguugcagaggugaga

SEQ ID NO: 647453 - RNA, 19 nt, Artificial Sequence
  Description of Artificial Sequence: Synthetic oligonucleotide
  Antisense strand to SEQ ID NO: 647452
ucucaccucugcaacuuug

SEQ ID NO: 647454 - RNA, 19 nt, Artificial Sequence
  Description of Artificial Sequence: Synthetic oligonucleotide
  Sense strand starting at position 418 of SEQ ID NO: 585533
cauaucuugugcuuaggga

SEQ ID NO: 647455 - RNA, 19 nt, Artificial Sequence
  Description of Artificial Sequence: Synthetic oligonucleotide
  Antisense strand to SEQ ID NO: 647454
ucccuaagcacaagauaug

SEQ ID NO: 647456 - RNA, 19 nt, Artificial Sequence
  Description of Artificial Sequence: Synthetic oligonucleotide
  Sense strand starting at position 419 of SEQ ID NO: 585533
auaucuugugcuuagggaa

SEQ ID NO: 647457 - RNA, 19 nt, Artificial Sequence
  Description of Artificial Sequence: Synthetic oligonucleotide
  Antisense strand to SEQ ID NO: 647456
uucccuaagcacaagauau

SEQ ID NO: 647458 - RNA, 19 nt, Artificial Sequence
  Description of Artificial Sequence: Synthetic oligonucleotide
  Sense strand starting at position 468 of SEQ ID NO: 585533
ggauaugugcuguggagga

SEQ ID NO: 647459 - RNA, 19 nt, Artificial Sequence
  Description of Artificial Sequence: Synthetic oligonucleotide
  Antisense strand to SEQ ID NO: 647458
uccuccacagcacauaucc

SEQ ID NO: 647460 - RNA, 19 nt, Artificial Sequence
  Description of Artificial Sequence: Synthetic oligonucleotide
  Sense strand starting at position 470 of SEQ ID NO: 585533
auaugugcuguggaggaau

SEQ ID NO: 647461 - RNA, 19 nt, Artificial Sequence
  Description of Artificial Sequence: Synthetic oligonucleotide
  Antisense strand to SEQ ID NO: 647460
auuccuccacagcacauau

SEQ ID NO: 647462 - RNA, 19 nt, Artificial Sequence
  Description of Artificial Sequence: Synthetic oligonucleotide
  Sense strand starting at position 492 of SEQ ID NO: 585533
agcugagauuaguuccuca

SEQ ID NO: 647463 - RNA, 19 nt, Artificial Sequence
  Description of Artificial Sequence: Synthetic oligonucleotide
  Antisense strand to SEQ ID NO: 647462
ugaggaacuaaucucagcu

SEQ ID NO: 647464 - RNA, 19 nt, Artificial Sequence
  Description of Artificial Sequence: Synthetic oligonucleotide
  Sense strand starting at position 495 of SEQ ID NO: 585533
ugagauuaguuccucaauu

SEQ ID NO: 647465 - RNA, 19 nt, Artificial Sequence
  Description of Artificial Sequence: Synthetic oligonucleotide
  Antisense strand to SEQ ID NO: 647464
aauugaggaacuaaucuca

SEQ ID NO: 647466 - RNA, 19 nt, Artificial Sequence
  Description of Artificial Sequence: Synthetic oligonucleotide
  Sense strand starting at position 655 of SEQ ID NO: 585533
uacagugaccucugaagga

SEQ ID NO: 647467 - RNA, 19 nt, Artificial Sequence
  Description of Artificial Sequence: Synthetic oligonucleotide
  Antisense strand to SEQ ID NO: 647466
uccuucagaggucacugua

SEQ ID NO: 647468 - RNA, 19 nt, Artificial Sequence
  Description of Artificial Sequence: Synthetic oligonucleotide
  Sense strand starting at position 859 of SEQ ID NO: 585533
gaaacaguggcagaauguu

SEQ ID NO: 647469 - RNA, 19 nt, Artificial Sequence
  Description of Artificial Sequence: Synthetic oligonucleotide
  Antisense strand to SEQ ID NO: 647468
aacauucugccacuguuuc

SEQ ID NO: 647470 - RNA, 19 nt, Artificial Sequence
  Description of Artificial Sequence: Synthetic oligonucleotide
  Sense strand starting at position 1296 of SEQ ID NO: 585533
cgcuuucaagguucgaguu

SEQ ID NO: 647471 - RNA, 19 nt, Artificial Sequence
  Description of Artificial Sequence: Synthetic oligonucleotide
  Antisense strand to SEQ ID NO: 647470
aacucgaaccuugaaagcg

SEQ ID NO: 647472 - RNA, 19 nt, Artificial Sequence
  Description of Artificial Sequence: Synthetic oligonucleotide
  Sense strand starting at position 1331 of SEQ ID NO: 585533
cccugucauuuguuuccaa

SEQ ID NO: 647473 - RNA, 19 nt, Artificial Sequence
  Description of Artificial Sequence: Synthetic oligonucleotide
  Antisense strand to SEQ ID NO: 647472
uuggaaacaaaugacaggg

SEQ ID NO: 647474 - RNA, 19 nt, Artificial Sequence
  Description of Artificial Sequence: Synthetic oligonucleotide
  Sense strand starting at position 1751 of SEQ ID NO: 585533
cugucucuccgucacagaa

SEQ ID NO: 647475 - RNA, 19 nt, Artificial Sequence
  Description of Artificial Sequence: Synthetic oligonucleotide
  Antisense strand to SEQ ID NO: 647474
uucugugacggagagacag

SEQ ID NO: 647476 - RNA, 19 nt, Artificial Sequence
  Description of Artificial Sequence: Synthetic oligonucleotide
  Sense strand starting at position 1982 of SEQ ID NO: 585533
guugcuaagaauggcaaau

SEQ ID NO: 647477 - RNA, 19 nt, Artificial Sequence
  Description of Artificial Sequence: Synthetic oligonucleotide
  Antisense strand to SEQ ID NO: 647476
auuugccauucuuagcaac

SEQ ID NO: 647478 - RNA, 19 nt, Artificial Sequence
  Description of Artificial Sequence: Synthetic oligonucleotide
  Sense strand starting at position 2015 of SEQ ID NO: 585533
uacugaaagguuuguugua

SEQ ID NO: 647479 - RNA, 19 nt, Artificial Sequence
  Description of Artificial Sequence: Synthetic oligonucleotide
  Antisense strand to SEQ ID NO: 647478
uacaacaaaccuuucagua

SEQ ID NO: 647480 - RNA, 19 nt, Artificial Sequence
  Description of Artificial Sequence: Synthetic oligonucleotide
  Sense strand starting at position 2016 of SEQ ID NO: 585533
acugaaagguuuguuguaa

SEQ ID NO: 647481 - RNA, 19 nt, Artificial Sequence
  Description of Artificial Sequence: Synthetic oligonucleotide
  Antisense strand to SEQ ID NO: 647480
uuacaacaaaccuuucagu

SEQ ID NO: 647482 - RNA, 19 nt, Artificial Sequence
  Description of Artificial Sequence: Synthetic oligonucleotide
  Sense strand starting at position 2017 of SEQ ID NO: 585533
cugaaagguuuguuguaau

SEQ ID NO: 647483 - RNA, 19 nt, Artificial Sequence
  Description of Artificial Sequence: Synthetic oligonucleotide
  Antisense strand to SEQ ID NO: 647482
auuacaacaaaccuuucag

SEQ ID NO: 647484 - RNA, 19 nt, Artificial Sequence
  Description of Artificial Sequence: Synthetic oligonucleotide
  Sense strand starting at position 2031 of SEQ ID NO: 585533
guaauagugccagagauug

SEQ ID NO: 647485 - RNA, 19 nt, Artificial Sequence
  Description of Artificial Sequence: Synthetic oligonucleotide
  Antisense strand to SEQ ID NO: 647484
caaucucuggcacuauuac

SEQ ID NO: 647486 - RNA, 19 nt, Artificial Sequence
  Description of Artificial Sequence: Synthetic oligonucleotide
  Sense strand starting at position 2036 of SEQ ID NO: 585533
agugccagagauuguugau

SEQ ID NO: 647487 - RNA, 19 nt, Artificial Sequence
  Description of Artificial Sequence: Synthetic oligonucleotide
  Antisense strand to SEQ ID NO: 647486
aucaacaaucucuggcacu

SEQ ID NO: 647488 - RNA, 19 nt, Artificial Sequence
  Description of Artificial Sequence: Synthetic oligonucleotide
  Sense strand starting at position 2042 of SEQ ID NO: 585533
agagauuguugauuaguaa

SEQ ID NO: 647489 - RNA, 19 nt, Artificial Sequence
  Description of Artificial Sequence: Synthetic oligonucleotide
  Antisense strand to SEQ ID NO: 647488
uuacuaaucaacaaucucu

SEQ ID NO: 647490 - RNA, 19 nt, Artificial Sequence
  Description of Artificial Sequence: Synthetic oligonucleotide
  Sense strand starting at position 2045 of SEQ ID NO: 585533
gauuguugauuaguaacca

SEQ ID NO: 647491 - RNA, 19 nt, Artificial Sequence
  Description of Artificial Sequence: Synthetic oligonucleotide
  Antisense strand to SEQ ID NO: 647490
ugguuacuaaucaacaauc

SEQ ID NO: 647492 - RNA, 19 nt, Artificial Sequence
  Description of Artificial Sequence: Synthetic oligonucleotide
  Sense strand starting at position 2091 of SEQ ID NO: 585533
gauaguaaccuuugucaga

SEQ ID NO: 647493 - RNA, 19 nt, Artificial Sequence
  Description of Artificial Sequence: Synthetic oligonucleotide
  Antisense strand to SEQ ID NO: 647492
ucugacaaagguuacuauc

SEQ ID NO: 647494 - RNA, 19 nt, Artificial Sequence
  Description of Artificial Sequence: Synthetic oligonucleotide
  Sense strand starting at position 2092 of SEQ ID NO: 585533
auaguaaccuuugucagaa

SEQ ID NO: 647495 - RNA, 19 nt, Artificial Sequence
  Description of Artificial Sequence: Synthetic oligonucleotide
  Antisense strand to SEQ ID NO: 647494
uucugacaaagguuacuau

SEQ ID NO: 647496 - RNA, 19 nt, Artificial Sequence
  Description of Artificial Sequence: Synthetic oligonucleotide
  Sense strand starting at position 2124 of SEQ ID NO: 585533
agcuaaggaccuugucaca

SEQ ID NO: 647497 - RNA, 19 nt, Artificial Sequence
  Description of Artificial Sequence: Synthetic oligonucleotide
  Antisense strand to SEQ ID NO: 647496
ugugacaagguccuuagcu

SEQ ID NO: 647498 - RNA, 19 nt, Artificial Sequence
  Description of Artificial Sequence: Synthetic oligonucleotide
  Sense strand starting at position 2220 of SEQ ID NO: 585533
gagagauaauugccugagu

SEQ ID NO: 647499 - RNA, 19 nt, Artificial Sequence
  Description of Artificial Sequence: Synthetic oligonucleotide
  Antisense strand to SEQ ID NO: 647498
acucaggcaauuaucucuc

SEQ ID NO: 647500 - RNA, 19 nt, Artificial Sequence
  Description of Artificial Sequence: Synthetic oligonucleotide
  Sense strand starting at position 2221 of SEQ ID NO: 585533
agagauaauugccugaguu

SEQ ID NO: 647501 - RNA, 19 nt, Artificial Sequence
  Description of Artificial Sequence: Synthetic oligonucleotide
  Antisense strand to SEQ ID NO: 647500
aacucaggcaauuaucucu

SEQ ID NO: 647502 - RNA, 19 nt, Artificial Sequence
  Description of Artificial Sequence: Synthetic oligonucleotide
  Sense strand starting at position 2222 of SEQ ID NO: 585533
gagauaauugccugaguua

SEQ ID NO: 647503 - RNA, 19 nt, Artificial Sequence
  Description of Artificial Sequence: Synthetic oligonucleotide
  Antisense strand to SEQ ID NO: 647502
uaacucaggcaauuaucuc

SEQ ID NO: 647504 - RNA, 19 nt, Artificial Sequence
  Description of Artificial Sequence: Synthetic oligonucleotide
  Sense strand starting at position 2223 of SEQ ID NO: 585533
agauaauugccugaguuag

SEQ ID NO: 647505 - RNA, 19 nt, Artificial Sequence
  Description of Artificial Sequence: Synthetic oligonucleotide
  Antisense strand to SEQ ID NO: 647504
cuaacucaggcaauuaucu

SEQ ID NO: 647506 - RNA, 19 nt, Artificial Sequence
  Description of Artificial Sequence: Synthetic oligonucleotide
  Sense strand starting at position 2225 of SEQ ID NO: 585533
auaauugccugaguuagga

SEQ ID NO: 647507 - RNA, 19 nt, Artificial Sequence
  Description of Artificial Sequence: Synthetic oligonucleotide
  Antisense strand to SEQ ID NO: 647506
uccuaacucaggcaauuau

SEQ ID NO: 647508 - RNA, 19 nt, Artificial Sequence
  Description of Artificial Sequence: Synthetic oligonucleotide
  Sense strand starting at position 2424 of SEQ ID NO: 585533
ucaguaaguugucccaaau

SEQ ID NO: 647509 - RNA, 19 nt, Artificial Sequence
  Description of Artificial Sequence: Synthetic oligonucleotide
  Antisense strand to SEQ ID NO: 647508
auuugggacaacuuacuga

SEQ ID NO: 647510 - RNA, 19 nt, Artificial Sequence
  Description of Artificial Sequence: Synthetic oligonucleotide
  Sense strand starting at position 2799 of SEQ ID NO: 585533
gaaaguccucucuacacga

SEQ ID NO: 647511 - RNA, 19 nt, Artificial Sequence
  Description of Artificial Sequence: Synthetic oligonucleotide
  Antisense strand to SEQ ID NO: 647510
ucguguagagaggacuuuc

SEQ ID NO: 647512 - RNA, 19 nt, Artificial Sequence
  Description of Artificial Sequence: Synthetic oligonucleotide
  Sense strand starting at position 3256 of SEQ ID NO: 585533
ggagaauccacugggugau

SEQ ID NO: 647513 - RNA, 19 nt, Artificial Sequence
  Description of Artificial Sequence: Synthetic oligonucleotide
  Antisense strand to SEQ ID NO: 647512
aucacccaguggauucucc

SEQ ID NO: 647514 - RNA, 19 nt, Artificial Sequence
  Description of Artificial Sequence: Synthetic oligonucleotide
  Sense strand starting at position 3351 of SEQ ID NO: 585533
agauguuuaaccugaggca

SEQ ID NO: 647515 - RNA, 19 nt, Artificial Sequence
  Description of Artificial Sequence: Synthetic oligonucleotide
  Antisense strand to SEQ ID NO: 647514
ugccucagguuaaacaucu

SEQ ID NO: 647516 - RNA, 19 nt, Artificial Sequence
  Description of Artificial Sequence: Synthetic oligonucleotide
  Sense strand starting at position 3352 of SEQ ID NO: 585533
gauguuuaaccugaggcau

SEQ ID NO: 647517 - RNA, 19 nt, Artificial Sequence
  Description of Artificial Sequence: Synthetic oligonucleotide
  Antisense strand to SEQ ID NO: 647516
augccucagguuaaacauc

SEQ ID NO: 647518 - RNA, 19 nt, Artificial Sequence
  Description of Artificial Sequence: Synthetic oligonucleotide
  Sense strand starting at position 3441 of SEQ ID NO: 585533
guaagaaaucaaggucucu

SEQ ID NO: 647519 - RNA, 19 nt, Artificial Sequence
  Description of Artificial Sequence: Synthetic oligonucleotide
  Antisense strand to SEQ ID NO: 647518
agagaccuugauuucuuac

SEQ ID NO: 647520 - RNA, 19 nt, Artificial Sequence
  Description of Artificial Sequence: Synthetic oligonucleotide
  Sense strand starting at position 3678 of SEQ ID NO: 585533
uugcgauaagcugagaucu

SEQ ID NO: 647521 - RNA, 19 nt, Artificial Sequence
  Description of Artificial Sequence: Synthetic oligonucleotide
  Antisense strand to SEQ ID NO: 647520
agaucucagcuuaucgcaa

SEQ ID NO: 647522 - RNA, 19 nt, Artificial Sequence
  Description of Artificial Sequence: Synthetic oligonucleotide
  Sense strand starting at position 104 of SEQ ID NO: 585534
ccguguuguccauucuauu

SEQ ID NO: 647523 - RNA, 19 nt, Artificial Sequence
  Description of Artificial Sequence: Synthetic oligonucleotide
  Antisense strand to SEQ ID NO: 647522
aauagaauggacaacacgg

SEQ ID NO: 647524 - RNA, 19 nt, Artificial Sequence
  Description of Artificial Sequence: Synthetic oligonucleotide
  Sense strand starting at position 407 of SEQ ID NO: 585534
ugcagacaccaauguguaa

SEQ ID NO: 647525 - RNA, 19 nt, Artificial Sequence
  Description of Artificial Sequence: Synthetic oligonucleotide
  Antisense strand to SEQ ID NO: 647524
uuacacauuggugucugca

SEQ ID NO: 647526 - RNA, 19 nt, Artificial Sequence
  Description of Artificial Sequence: Synthetic oligonucleotide
  Sense strand starting at position 411 of SEQ ID NO: 585534
gacaccaauguguaaagua

SEQ ID NO: 647527 - RNA, 19 nt, Artificial Sequence
  Description of Artificial Sequence: Synthetic oligonucleotide
  Antisense strand to SEQ ID NO: 647526
uacuuuacacauugguguc

SEQ ID NO: 647528 - RNA, 19 nt, Artificial Sequence
  Description of Artificial Sequence: Synthetic oligonucleotide
  Sense strand starting at position 421 of SEQ ID NO: 585534
uguaaaguagcaggcaaau

SEQ ID NO: 647529 - RNA, 19 nt, Artificial Sequence
  Description of Artificial Sequence: Synthetic oligonucleotide
  Antisense strand to SEQ ID NO: 647528
auuugccugcuacuuuaca

SEQ ID NO: 647530 - RNA, 19 nt, Artificial Sequence
  Description of Artificial Sequence: Synthetic oligonucleotide
  Sense strand starting at position 461 of SEQ ID NO: 585534
cguaaauuuggcugaauuc

SEQ ID NO: 647531 - RNA, 19 nt, Artificial Sequence
  Description of Artificial Sequence: Synthetic oligonucleotide
  Antisense strand to SEQ ID NO: 647530
gaauucagccaaauuuacg

SEQ ID NO: 647532 - RNA, 19 nt, Artificial Sequence
  Description of Artificial Sequence: Synthetic oligonucleotide
  Sense strand starting at position 505 of SEQ ID NO: 585534
aaauauguggucugaaguu

SEQ ID NO: 647533 - RNA, 19 nt, Artificial Sequence
  Description of Artificial Sequence: Synthetic oligonucleotide
  Antisense strand to SEQ ID NO: 647532
aacuucagaccacauauuu

SEQ ID NO: 647534 - RNA, 19 nt, Artificial Sequence
  Description of Artificial Sequence: Synthetic oligonucleotide
  Sense strand starting at position 637 of SEQ ID NO: 585534
gucugagcccuggaauauc

SEQ ID NO: 647535 - RNA, 19 nt, Artificial Sequence
  Description of Artificial Sequence: Synthetic oligonucleotide
  Antisense strand to SEQ ID NO: 647534
gauauuccagggcucagac

SEQ ID NO: 647536 - RNA, 19 nt, Artificial Sequence
  Description of Artificial Sequence: Synthetic oligonucleotide
  Sense strand starting at position 645 of SEQ ID NO: 585534
ccuggaauaucuuugcuuu

SEQ ID NO: 647537 - RNA, 19 nt, Artificial Sequence
  Description of Artificial Sequence: Synthetic oligonucleotide
  Antisense strand to SEQ ID NO: 647536
aaagcaaagauauuccagg

SEQ ID NO: 647538 - RNA, 19 nt, Artificial Sequence
  Description of Artificial Sequence: Synthetic oligonucleotide
  Sense strand starting at position 646 of SEQ ID NO: 585534
cuggaauaucuuugcuuuc

SEQ ID NO: 647539 - RNA, 19 nt, Artificial Sequence
  Description of Artificial Sequence: Synthetic oligonucleotide
  Antisense strand to SEQ ID NO: 647538
gaaagcaaagauauuccag

SEQ ID NO: 647540 - RNA, 19 nt, Artificial Sequence
  Description of Artificial Sequence: Synthetic oligonucleotide
  Sense strand starting at position 778 of SEQ ID NO: 585534
cgcaccaaaccugguauaa

SEQ ID NO: 647541 - RNA, 19 nt, Artificial Sequence
  Description of Artificial Sequence: Synthetic oligonucleotide
  Antisense strand to SEQ ID NO: 647540
uuauaccagguuuggugcg

SEQ ID NO: 647542 - RNA, 19 nt, Artificial Sequence
  Description of Artificial Sequence: Synthetic oligonucleotide
  Sense strand starting at position 817 of SEQ ID NO: 585534
auggaugugugcucaggaa

SEQ ID NO: 647543 - RNA, 19 nt, Artificial Sequence
  Description of Artificial Sequence: Synthetic oligonucleotide
  Antisense strand to SEQ ID NO: 647542
uuccugagcacacauccau

SEQ ID NO: 647544 - RNA, 19 nt, Artificial Sequence
  Description of Artificial Sequence: Synthetic oligonucleotide
  Sense strand starting at position 887 of SEQ ID NO: 585534
ggcgaacauuuggaaucua

SEQ ID NO: 647545 - RNA, 19 nt, Artificial Sequence
  Description of Artificial Sequence: Synthetic oligonucleotide
  Antisense strand to SEQ ID NO: 647544
uagauuccaaauguucgcc

SEQ ID NO: 647546 - RNA, 19 nt, Artificial Sequence
  Description of Artificial Sequence: Synthetic oligonucleotide
  Sense strand starting at position 1090 of SEQ ID NO: 585534
cuauuugcaccgcgaggau

SEQ ID NO: 647547 - RNA, 19 nt, Artificial Sequence
  Description of Artificial Sequence: Synthetic oligonucleotide
  Antisense strand to SEQ ID NO: 647546
auccucgcggugcaaauag

SEQ ID NO: 647548 - RNA, 19 nt, Artificial Sequence
  Description of Artificial Sequence: Synthetic oligonucleotide
  Sense strand starting at position 1099 of SEQ ID NO: 585534
ccgcgaggaucagugaaau

SEQ ID NO: 647549 - RNA, 19 nt, Artificial Sequence
  Description of Artificial Sequence: Synthetic oligonucleotide
  Antisense strand to SEQ ID NO: 647548
auuucacugauccucgcgg

SEQ ID NO: 647550 - RNA, 19 nt, Artificial Sequence
  Description of Artificial Sequence: Synthetic oligonucleotide
  Sense strand starting at position 1141 of SEQ ID NO: 585534
ccauccuacguuuagucaa

SEQ ID NO: 647551 - RNA, 19 nt, Artificial Sequence
  Description of Artificial Sequence: Synthetic oligonucleotide
  Antisense strand to SEQ ID NO: 647550
uugacuaaacguaggaugg

SEQ ID NO: 647552 - RNA, 19 nt, Artificial Sequence
  Description of Artificial Sequence: Synthetic oligonucleotide
  Sense strand starting at position 1255 of SEQ ID NO: 585534
gacuuuaugcacugggaag

SEQ ID NO: 647553 - RNA, 19 nt, Artificial Sequence
  Description of Artificial Sequence: Synthetic oligonucleotide
  Antisense strand to SEQ ID NO: 647552
cuucccagugcauaaaguc

SEQ ID NO: 647554 - RNA, 19 nt, Artificial Sequence
  Description of Artificial Sequence: Synthetic oligonucleotide
  Sense strand starting at position 1476 of SEQ ID NO: 585534
uagacaccuugguagagaa

SEQ ID NO: 647555 - RNA, 19 nt, Artificial Sequence
  Description of Artificial Sequence: Synthetic oligonucleotide
  Antisense strand to SEQ ID NO: 647554
uucucuaccaaggugucua

SEQ ID NO: 647556 - RNA, 19 nt, Artificial Sequence
  Description of Artificial Sequence: Synthetic oligonucleotide
  Sense strand starting at position 1484 of SEQ ID NO: 585534
uugguagagaaucgccauu

SEQ ID NO: 647557 - RNA, 19 nt, Artificial Sequence
  Description of Artificial Sequence: Synthetic oligonucleotide
  Antisense strand to SEQ ID NO: 647556
aauggcgauucucuaccaa

SEQ ID NO: 647558 - RNA, 19 nt, Artificial Sequence
  Description of Artificial Sequence: Synthetic oligonucleotide
  Sense strand starting at position 1507 of SEQ ID NO: 585534
gucaucagaagcuggaauu

SEQ ID NO: 647559 - RNA, 19 nt, Artificial Sequence
  Description of Artificial Sequence: Synthetic oligonucleotide
  Antisense strand to SEQ ID NO: 647558
aauuccagcuucugaugac

SEQ ID NO: 647560 - RNA, 19 nt, Artificial Sequence
  Description of Artificial Sequence: Synthetic oligonucleotide
  Sense strand starting at position 1508 of SEQ ID NO: 585534
ucaucagaagcuggaauua

SEQ ID NO: 647561 - RNA, 19 nt, Artificial Sequence
  Description of Artificial Sequence: Synthetic oligonucleotide
  Antisense strand to SEQ ID NO: 647560
uaauuccagcuucugauga

SEQ ID NO: 647562 - RNA, 19 nt, Artificial Sequence
  Description of Artificial Sequence: Synthetic oligonucleotide
  Sense strand starting at position 1519 of SEQ ID NO: 585534
uggaauuaaucagauaucu

SEQ ID NO: 647563 - RNA, 19 nt, Artificial Sequence
  Description of Artificial Sequence: Synthetic oligonucleotide
  Antisense strand to SEQ ID NO: 647562
agauaucugauuaauucca

SEQ ID NO: 647564 - RNA, 19 nt, Artificial Sequence
  Description of Artificial Sequence: Synthetic oligonucleotide
  Sense strand starting at position 1543 of SEQ ID NO: 585534
uaaugugcgaucugaacga

SEQ ID NO: 647565 - RNA, 19 nt, Artificial Sequence
  Description of Artificial Sequence: Synthetic oligonucleotide
  Antisense strand to SEQ ID NO: 647564
ucguucagaucgcacauua

SEQ ID NO: 647566 - RNA, 19 nt, Artificial Sequence
  Description of Artificial Sequence: Synthetic oligonucleotide
  Sense strand starting at position 1547 of SEQ ID NO: 585534
gugcgaucugaacgaaauu

SEQ ID NO: 647567 - RNA, 19 nt, Artificial Sequence
  Description of Artificial Sequence: Synthetic oligonucleotide
  Antisense strand to SEQ ID NO: 647566
aauuucguucagaucgcac

SEQ ID NO: 647568 - RNA, 19 nt, Artificial Sequence
  Description of Artificial Sequence: Synthetic oligonucleotide
  Sense strand starting at position 1821 of SEQ ID NO: 585534
cuaagcuagcucgauuaau

SEQ ID NO: 647569 - RNA, 19 nt, Artificial Sequence
  Description of Artificial Sequence: Synthetic oligonucleotide
  Antisense strand to SEQ ID NO: 647568
auuaaucgagcuagcuuag

SEQ ID NO: 647570 - RNA, 19 nt, Artificial Sequence
  Description of Artificial Sequence: Synthetic oligonucleotide
  Sense strand starting at position 1827 of SEQ ID NO: 585534
uagcucgauuaauucgaaa

SEQ ID NO: 647571 - RNA, 19 nt, Artificial Sequence
  Description of Artificial Sequence: Synthetic oligonucleotide
  Antisense strand to SEQ ID NO: 647570
uuucgaauuaaucgagcua

SEQ ID NO: 647572 - RNA, 19 nt, Artificial Sequence
  Description of Artificial Sequence: Synthetic oligonucleotide
  Sense strand starting at position 2123 of SEQ ID NO: 585534
caccgaauguccucugaau

SEQ ID NO: 647573 - RNA, 19 nt, Artificial Sequence
  Description of Artificial Sequence: Synthetic oligonucleotide
  Antisense strand to SEQ ID NO: 647572
auucagaggacauucggug

SEQ ID NO: 647574 - RNA, 19 nt, Artificial Sequence
  Description of Artificial Sequence: Synthetic oligonucleotide
  Sense strand starting at position 2280 of SEQ ID NO: 585534
cucucagcgcuuuaggaaa

SEQ ID NO: 647575 - RNA, 19 nt, Artificial Sequence
  Description of Artificial Sequence: Synthetic oligonucleotide
  Antisense strand to SEQ ID NO: 647574
uuuccuaaagcgcugagag

SEQ ID NO: 647576 - RNA, 19 nt, Artificial Sequence
  Description of Artificial Sequence: Synthetic oligonucleotide
  Sense strand starting at position 2291 of SEQ ID NO: 585534
uuaggaaauuuccaaggca

SEQ ID NO: 647577 - RNA, 19 nt, Artificial Sequence
  Description of Artificial Sequence: Synthetic oligonucleotide
  Antisense strand to SEQ ID NO: 647576
ugccuuggaaauuuccuaa

SEQ ID NO: 647578 - RNA, 19 nt, Artificial Sequence
  Description of Artificial Sequence: Synthetic oligonucleotide
  Sense strand starting at position 2321 of SEQ ID NO: 585534
gcggacuucuuucuaaucu

SEQ ID NO: 647579 - RNA, 19 nt, Artificial Sequence
  Description of Artificial Sequence: Synthetic oligonucleotide
  Antisense strand to SEQ ID NO: 647578
agauuagaaagaaguccgc

SEQ ID NO: 647580 - RNA, 19 nt, Artificial Sequence
  Description of Artificial Sequence: Synthetic oligonucleotide
  Sense strand starting at position 2543 of SEQ ID NO: 585534
cgacgacagcuugagucaa

SEQ ID NO: 647581 - RNA, 19 nt, Artificial Sequence
  Description of Artificial Sequence: Synthetic oligonucleotide
  Antisense strand to SEQ ID NO: 647580
uugacucaagcugucgucg

SEQ ID NO: 647582 - RNA, 19 nt, Artificial Sequence
  Description of Artificial Sequence: Synthetic oligonucleotide
  Sense strand starting at position 2780 of SEQ ID NO: 585534
gcugucaaacuguagaaau

SEQ ID NO: 647583 - RNA, 19 nt, Artificial Sequence
  Description of Artificial Sequence: Synthetic oligonucleotide
  Antisense strand to SEQ ID NO: 647582
auuucuacaguuugacagc

SEQ ID NO: 647584 - RNA, 19 nt, Artificial Sequence
  Description of Artificial Sequence: Synthetic oligonucleotide
  Sense strand starting at position 2790 of SEQ ID NO: 585534
uguagaaaugcacacggau

SEQ ID NO: 647585 - RNA, 19 nt, Artificial Sequence
  Description of Artificial Sequence: Synthetic oligonucleotide
  Antisense strand to SEQ ID NO: 647584
auccgugugcauuucuaca

SEQ ID NO: 647586 - RNA, 19 nt, Artificial Sequence
  Description of Artificial Sequence: Synthetic oligonucleotide
  Sense strand starting at position 2793 of SEQ ID NO: 585534
agaaaugcacacggauuaa

SEQ ID NO: 647587 - RNA, 19 nt, Artificial Sequence
  Description of Artificial Sequence: Synthetic oligonucleotide
  Antisense strand to SEQ ID NO: 647586
uuaauccgugugcauuucu

SEQ ID NO: 647588 - RNA, 19 nt, Artificial Sequence
  Description of Artificial Sequence: Synthetic oligonucleotide
  Sense strand starting at position 2819 of SEQ ID NO: 585534
cguugaauuugcuucuaca

SEQ ID NO: 647589 - RNA, 19 nt, Artificial Sequence
  Description of Artificial Sequence: Synthetic oligonucleotide
  Antisense strand to SEQ ID NO: 647588
uguagaagcaaauucaacg

SEQ ID NO: 647590 - RNA, 19 nt, Artificial Sequence
  Description of Artificial Sequence: Synthetic oligonucleotide
  Sense strand starting at position 3476 of SEQ ID NO: 585534
uugggaguggcuuaagguu

SEQ ID NO: 647591 - RNA, 19 nt, Artificial Sequence
  Description of Artificial Sequence: Synthetic oligonucleotide
  Antisense strand to SEQ ID NO: 647590
aaccuuaagccacucccaa

SEQ ID NO: 647592 - RNA, 19 nt, Artificial Sequence
  Description of Artificial Sequence: Synthetic oligonucleotide
  Sense strand starting at position 3626 of SEQ ID NO: 585534
ggcugagggccucaaugaa

SEQ ID NO: 647593 - RNA, 19 nt, Artificial Sequence
  Description of Artificial Sequence: Synthetic oligonucleotide
  Antisense strand to SEQ ID NO: 647592
uucauugaggcccucagcc

SEQ ID NO: 647594 - RNA, 19 nt, Artificial Sequence
  Description of Artificial Sequence: Synthetic oligonucleotide
  Sense strand starting at position 3806 of SEQ ID NO: 585534
ccucauaggccugagucuu

SEQ ID NO: 647595 - RNA, 19 nt, Artificial Sequence
  Description of Artificial Sequence: Synthetic oligonucleotide
  Antisense strand to SEQ ID NO: 647594
aagacucaggccuaugagg

SEQ ID NO: 647596 - RNA, 19 nt, Artificial Sequence
  Description of Artificial Sequence: Synthetic oligonucleotide
  Sense strand starting at position 3852 of SEQ ID NO: 585534
cagaguugguacucuacau

SEQ ID NO: 647597 - RNA, 19 nt, Artificial Sequence
  Description of Artificial Sequence: Synthetic oligonucleotide
  Antisense strand to SEQ ID NO: 647596
auguagaguaccaacucug

SEQ ID NO: 647598 - RNA, 19 nt, Artificial Sequence
  Description of Artificial Sequence: Synthetic oligonucleotide
  Sense strand starting at position 3856 of SEQ ID NO: 585534
guugguacucuacauaaau

SEQ ID NO: 647599 - RNA, 19 nt, Artificial Sequence
  Description of Artificial Sequence: Synthetic oligonucleotide
  Antisense strand to SEQ ID NO: 647598
auuuauguagaguaccaac

SEQ ID NO: 647600 - RNA, 19 nt, Artificial Sequence
  Description of Artificial Sequence: Synthetic oligonucleotide
  Sense strand starting at position 3979 of SEQ ID NO: 585534
cuucguaguucuuuaauua

SEQ ID NO: 647601 - RNA, 19 nt, Artificial Sequence
  Description of Artificial Sequence: Synthetic oligonucleotide
  Antisense strand to SEQ ID NO: 647600
uaauuaaagaacuacgaag

SEQ ID NO: 647602 - RNA, 19 nt, Artificial Sequence
  Description of Artificial Sequence: Synthetic oligonucleotide
  Sense strand starting at position 589 of SEQ ID NO: 585535
gccaguguuaaaggugaau

SEQ ID NO: 647603 - RNA, 19 nt, Artificial Sequence
  Description of Artificial Sequence: Synthetic oligonucleotide
  Antisense strand to SEQ ID NO: 647602
auucaccuuuaacacuggc

SEQ ID NO: 647604 - RNA, 19 nt, Artificial Sequence
  Description of Artificial Sequence: Synthetic oligonucleotide
  Sense strand starting at position 591 of SEQ ID NO: 585535
caguguuaaaggugaauga

SEQ ID NO: 647605 - RNA, 19 nt, Artificial Sequence
  Description of Artificial Sequence: Synthetic oligonucleotide
  Antisense strand to SEQ ID NO: 647604
ucauucaccuuuaacacug

SEQ ID NO: 647606 - RNA, 19 nt, Artificial Sequence
  Description of Artificial Sequence: Synthetic oligonucleotide
  Sense strand starting at position 658 of SEQ ID NO: 585535
gcaaauugucgguguguga

SEQ ID NO: 647607 - RNA, 19 nt, Artificial Sequence
  Description of Artificial Sequence: Synthetic oligonucleotide
  Antisense strand to SEQ ID NO: 647606
ucacacaccgacaauuugc

SEQ ID NO: 647608 - RNA, 19 nt, Artificial Sequence
  Description of Artificial Sequence: Synthetic oligonucleotide
  Sense strand starting at position 975 of SEQ ID NO: 585535
acgccacaucacgagaaua

SEQ ID NO: 647609 - RNA, 19 nt, Artificial Sequence
  Description of Artificial Sequence: Synthetic oligonucleotide
  Antisense strand to SEQ ID NO: 647608
uauucucgugauguggcgu

SEQ ID NO: 647610 - RNA, 19 nt, Artificial Sequence
  Description of Artificial Sequence: Synthetic oligonucleotide
  Sense strand starting at position 987 of SEQ ID NO: 585535
gagaauaagccucaggcuu

SEQ ID NO: 647611 - RNA, 19 nt, Artificial Sequence
  Description of Artificial Sequence: Synthetic oligonucleotide
  Antisense strand to SEQ ID NO: 647610
aagccugaggcuuauucuc

SEQ ID NO: 647612 - RNA, 19 nt, Artificial Sequence
  Description of Artificial Sequence: Synthetic oligonucleotide
  Sense strand starting at position 1032 of SEQ ID NO: 585535
gcaaacacugcugaaugaa

SEQ ID NO: 647613 - RNA, 19 nt, Artificial Sequence
  Description of Artificial Sequence: Synthetic oligonucleotide
  Antisense strand to SEQ ID NO: 647612
uucauucagcaguguuugc

SEQ ID NO: 647614 - RNA, 19 nt, Artificial Sequence
  Description of Artificial Sequence: Synthetic oligonucleotide
  Sense strand starting at position 1055 of SEQ ID NO: 585535
cgaauauagucccuggaag

SEQ ID NO: 647615 - RNA, 19 nt, Artificial Sequence
  Description of Artificial Sequence: Synthetic oligonucleotide
  Antisense strand to SEQ ID NO: 647614
cuuccagggacuauauucg

SEQ ID NO: 647616 - RNA, 19 nt, Artificial Sequence
  Description of Artificial Sequence: Synthetic oligonucleotide
  Sense strand starting at position 1056 of SEQ ID NO: 585535
gaauauagucccuggaagc

SEQ ID NO: 647617 - RNA, 19 nt, Artificial Sequence
  Description of Artificial Sequence: Synthetic oligonucleotide
  Antisense strand to SEQ ID NO: 647616
gcuuccagggacuauauuc

SEQ ID NO: 647618 - RNA, 19 nt, Artificial Sequence
  Description of Artificial Sequence: Synthetic oligonucleotide
  Sense strand starting at position 1133 of SEQ ID NO: 585535
cuguauuccgagugagacc

SEQ ID NO: 647619 - RNA, 19 nt, Artificial Sequence
  Description of Artificial Sequence: Synthetic oligonucleotide
  Antisense strand to SEQ ID NO: 647618
ggucucacucggaauacag

SEQ ID NO: 647620 - RNA, 19 nt, Artificial Sequence
  Description of Artificial Sequence: Synthetic oligonucleotide
  Sense strand starting at position 1217 of SEQ ID NO: 585535
gaugaugaguggucuggag

SEQ ID NO: 647621 - RNA, 19 nt, Artificial Sequence
  Description of Artificial Sequence: Synthetic oligonucleotide
  Antisense strand to SEQ ID NO: 647620
cuccagaccacucaucauc

SEQ ID NO: 647622 - RNA, 19 nt, Artificial Sequence
  Description of Artificial Sequence: Synthetic oligonucleotide
  Sense strand starting at position 1219 of SEQ ID NO: 585535
ugaugaguggucuggagag

SEQ ID NO: 647623 - RNA, 19 nt, Artificial Sequence
  Description of Artificial Sequence: Synthetic oligonucleotide
  Antisense strand to SEQ ID NO: 647622
cucuccagaccacucauca

SEQ ID NO: 647624 - RNA, 19 nt, Artificial Sequence
  Description of Artificial Sequence: Synthetic oligonucleotide
  Sense strand starting at position 1799 of SEQ ID NO: 585535
aagggugaaucucagaauc

SEQ ID NO: 647625 - RNA, 19 nt, Artificial Sequence
  Description of Artificial Sequence: Synthetic oligonucleotide
  Antisense strand to SEQ ID NO: 647624
gauucugagauucacccuu

SEQ ID NO: 647626 - RNA, 19 nt, Artificial Sequence
  Description of Artificial Sequence: Synthetic oligonucleotide
  Sense strand starting at position 1801 of SEQ ID NO: 585535
gggugaaucucagaaucga

SEQ ID NO: 647627 - RNA, 19 nt, Artificial Sequence
  Description of Artificial Sequence: Synthetic oligonucleotide
  Antisense strand to SEQ ID NO: 647626
ucgauucugagauucaccc

SEQ ID NO: 647628 - RNA, 19 nt, Artificial Sequence
  Description of Artificial Sequence: Synthetic oligonucleotide
  Sense strand starting at position 1890 of SEQ ID NO: 585535
gugugaaugugucccggga

SEQ ID NO: 647629 - RNA, 19 nt, Artificial Sequence
  Description of Artificial Sequence: Synthetic oligonucleotide
  Antisense strand to SEQ ID NO: 647628
ucccgggacacauucacac

SEQ ID NO: 647630 - RNA, 19 nt, Artificial Sequence
  Description of Artificial Sequence: Synthetic oligonucleotide
  Sense strand starting at position 1893 of SEQ ID NO: 585535
ugaaugugucccgggagga

SEQ ID NO: 647631 - RNA, 19 nt, Artificial Sequence
  Description of Artificial Sequence: Synthetic oligonucleotide
  Antisense strand to SEQ ID NO: 647630
uccucccgggacacauuca

SEQ ID NO: 647632 - RNA, 19 nt, Artificial Sequence
  Description of Artificial Sequence: Synthetic oligonucleotide
  Sense strand starting at position 1894 of SEQ ID NO: 585535
gaaugugucccgggaggac

SEQ ID NO: 647633 - RNA, 19 nt, Artificial Sequence
  Description of Artificial Sequence: Synthetic oligonucleotide
  Antisense strand to SEQ ID NO: 647632
guccucccgggacacauuc

SEQ ID NO: 647634 - RNA, 19 nt, Artificial Sequence
  Description of Artificial Sequence: Synthetic oligonucleotide
  Sense strand starting at position 2012 of SEQ ID NO: 585535
gagcguacccguuugcaaa

SEQ ID NO: 647635 - RNA, 19 nt, Artificial Sequence
  Description of Artificial Sequence: Synthetic oligonucleotide
  Antisense strand to SEQ ID NO: 647634
uuugcaaacggguacgcuc

SEQ ID NO: 647636 - RNA, 19 nt, Artificial Sequence
  Description of Artificial Sequence: Synthetic oligonucleotide
  Sense strand starting at position 2160 of SEQ ID NO: 585535
ccuuacagcgaacauuaaa

SEQ ID NO: 647637 - RNA, 19 nt, Artificial Sequence
  Description of Artificial Sequence: Synthetic oligonucleotide
  Antisense strand to SEQ ID NO: 647636
uuuaauguucgcuguaagg

SEQ ID NO: 647638 - RNA, 19 nt, Artificial Sequence
  Description of Artificial Sequence: Synthetic oligonucleotide
  Sense strand starting at position 2173 of SEQ ID NO: 585535
auuaaauacccuugcgacu

SEQ ID NO: 647639 - RNA, 19 nt, Artificial Sequence
  Description of Artificial Sequence: Synthetic oligonucleotide
  Antisense strand to SEQ ID NO: 647638
agucgcaaggguauuuaau

SEQ ID NO: 647640 - RNA, 19 nt, Artificial Sequence
  Description of Artificial Sequence: Synthetic oligonucleotide
  Sense strand starting at position 2234 of SEQ ID NO: 585535
aaacgaaucuuuguucuga

SEQ ID NO: 647641 - RNA, 19 nt, Artificial Sequence
  Description of Artificial Sequence: Synthetic oligonucleotide
  Antisense strand to SEQ ID NO: 647640
ucagaacaaagauucguuu

SEQ ID NO: 647642 - RNA, 19 nt, Artificial Sequence
  Description of Artificial Sequence: Synthetic oligonucleotide
  Sense strand starting at position 2235 of SEQ ID NO: 585535
aacgaaucuuuguucugau

SEQ ID NO: 647643 - RNA, 19 nt, Artificial Sequence
  Description of Artificial Sequence: Synthetic oligonucleotide
  Antisense strand to SEQ ID NO: 647642
aucagaacaaagauucguu

SEQ ID NO: 647644 - RNA, 19 nt, Artificial Sequence
  Description of Artificial Sequence: Synthetic oligonucleotide
  Sense strand starting at position 2236 of SEQ ID NO: 585535
acgaaucuuuguucugaua

SEQ ID NO: 647645 - RNA, 19 nt, Artificial Sequence
  Description of Artificial Sequence: Synthetic oligonucleotide
  Antisense strand to SEQ ID NO: 647644
uaucagaacaaagauucgu

SEQ ID NO: 647646 - RNA, 19 nt, Artificial Sequence
  Description of Artificial Sequence: Synthetic oligonucleotide
  Sense strand starting at position 2239 of SEQ ID NO: 585535
aaucuuuguucugauagag

SEQ ID NO: 647647 - RNA, 19 nt, Artificial Sequence
  Description of Artificial Sequence: Synthetic oligonucleotide
  Antisense strand to SEQ ID NO: 647646
cucuaucagaacaaagauu

SEQ ID NO: 647648 - RNA, 19 nt, Artificial Sequence
  Description of Artificial Sequence: Synthetic oligonucleotide
  Sense strand starting at position 2293 of SEQ ID NO: 585535
cucuauaacgcaugucaca

SEQ ID NO: 647649 - RNA, 19 nt, Artificial Sequence
  Description of Artificial Sequence: Synthetic oligonucleotide
  Antisense strand to SEQ ID NO: 647648
ugugacaugcguuauagag

SEQ ID NO: 647650 - RNA, 19 nt, Artificial Sequence
  Description of Artificial Sequence: Synthetic oligonucleotide
  Sense strand starting at position 2314 of SEQ ID NO: 585535
uacagcuuugcagagaaga

SEQ ID NO: 647651 - RNA, 19 nt, Artificial Sequence
  Description of Artificial Sequence: Synthetic oligonucleotide
  Antisense strand to SEQ ID NO: 647650
ucuucucugcaaagcugua

SEQ ID NO: 647652 - RNA, 19 nt, Artificial Sequence
  Description of Artificial Sequence: Synthetic oligonucleotide
  Sense strand starting at position 2559 of SEQ ID NO: 585535
ucgugaacauuucugucuu

SEQ ID NO: 647653 - RNA, 19 nt, Artificial Sequence
  Description of Artificial Sequence: Synthetic oligonucleotide
  Antisense strand to SEQ ID NO: 647652
aagacagaaauguucacga

SEQ ID NO: 647654 - RNA, 19 nt, Artificial Sequence
  Description of Artificial Sequence: Synthetic oligonucleotide
  Sense strand starting at position 2582 of SEQ ID NO: 585535
aacugugacuccuuggacu

SEQ ID NO: 647655 - RNA, 19 nt, Artificial Sequence
  Description of Artificial Sequence: Synthetic oligonucleotide
  Antisense strand to SEQ ID NO: 647654
aguccaaggagucacaguu

SEQ ID NO: 647656 - RNA, 19 nt, Artificial Sequence
  Description of Artificial Sequence: Synthetic oligonucleotide
  Sense strand starting at position 2923 of SEQ ID NO: 585535
agcucccagccgugaauua

SEQ ID NO: 647657 - RNA, 19 nt, Artificial Sequence
  Description of Artificial Sequence: Synthetic oligonucleotide
  Antisense strand to SEQ ID NO: 647656
uaauucacggcugggagcu

SEQ ID NO: 647658 - RNA, 19 nt, Artificial Sequence
  Description of Artificial Sequence: Synthetic oligonucleotide
  Sense strand starting at position 2924 of SEQ ID NO: 585535
gcucccagccgugaauuaa

SEQ ID NO: 647659 - RNA, 19 nt, Artificial Sequence
  Description of Artificial Sequence: Synthetic oligonucleotide
  Antisense strand to SEQ ID NO: 647658
uuaauucacggcugggagc

SEQ ID NO: 647660 - RNA, 19 nt, Artificial Sequence
  Description of Artificial Sequence: Synthetic oligonucleotide
  Sense strand starting at position 2971 of SEQ ID NO: 585535
ggcagacauuagggaacaa

SEQ ID NO: 647661 - RNA, 19 nt, Artificial Sequence
  Description of Artificial Sequence: Synthetic oligonucleotide
  Antisense strand to SEQ ID NO: 647660
uuguucccuaaugucugcc

SEQ ID NO: 647662 - RNA, 19 nt, Artificial Sequence
  Description of Artificial Sequence: Synthetic oligonucleotide
  Sense strand starting at position 3037 of SEQ ID NO: 585535
cgagguuaauguguucaaa

SEQ ID NO: 647663 - RNA, 19 nt, Artificial Sequence
  Description of Artificial Sequence: Synthetic oligonucleotide
  Antisense strand to SEQ ID NO: 647662
uuugaacacauuaaccucg

SEQ ID NO: 647664 - RNA, 19 nt, Artificial Sequence
  Description of Artificial Sequence: Synthetic oligonucleotide
  Sense strand starting at position 3114 of SEQ ID NO: 585535
guuauuuccuaccgggaaa

SEQ ID NO: 647665 - RNA, 19 nt, Artificial Sequence
  Description of Artificial Sequence: Synthetic oligonucleotide
  Antisense strand to SEQ ID NO: 647664
uuucccgguaggaaauaac

SEQ ID NO: 647666 - RNA, 19 nt, Artificial Sequence
  Description of Artificial Sequence: Synthetic oligonucleotide
  Sense strand starting at position 3139 of SEQ ID NO: 585535
ucccaaaucuuguccgauu

SEQ ID NO: 647667 - RNA, 19 nt, Artificial Sequence
  Description of Artificial Sequence: Synthetic oligonucleotide
  Antisense strand to SEQ ID NO: 647666
aaucggacaagauuuggga

SEQ ID NO: 647668 - RNA, 19 nt, Artificial Sequence
  Description of Artificial Sequence: Synthetic oligonucleotide
  Sense strand starting at position 3140 of SEQ ID NO: 585535
cccaaaucuuguccgauua

SEQ ID NO: 647669 - RNA, 19 nt, Artificial Sequence
  Description of Artificial Sequence: Synthetic oligonucleotide
  Antisense strand to SEQ ID NO: 647668
uaaucggacaagauuuggg

SEQ ID NO: 647670 - RNA, 19 nt, Artificial Sequence
  Description of Artificial Sequence: Synthetic oligonucleotide
  Sense strand starting at position 3141 of SEQ ID NO: 585535
ccaaaucuuguccgauuaa

SEQ ID NO: 647671 - RNA, 19 nt, Artificial Sequence
  Description of Artificial Sequence: Synthetic oligonucleotide
  Antisense strand to SEQ ID NO: 647670
uuaaucggacaagauuugg

SEQ ID NO: 647672 - RNA, 19 nt, Artificial Sequence
  Description of Artificial Sequence: Synthetic oligonucleotide
  Sense strand starting at position 3252 of SEQ ID NO: 585535
ggaauuugcugccauuaga

SEQ ID NO: 647673 - RNA, 19 nt, Artificial Sequence
  Description of Artificial Sequence: Synthetic oligonucleotide
  Antisense strand to SEQ ID NO: 647672
ucuaauggcagcaaauucc

SEQ ID NO: 647674 - RNA, 19 nt, Artificial Sequence
  Description of Artificial Sequence: Synthetic oligonucleotide
  Sense strand starting at position 3665 of SEQ ID NO: 585535
ccguguuguccauucuauu

SEQ ID NO: 647675 - RNA, 19 nt, Artificial Sequence
  Description of Artificial Sequence: Synthetic oligonucleotide
  Antisense strand to SEQ ID NO: 647674
aauagaauggacaacacgg

SEQ ID NO: 647676 - RNA, 19 nt, Artificial Sequence
  Description of Artificial Sequence: Synthetic oligonucleotide
  Sense strand starting at position 3968 of SEQ ID NO: 585535
ugcagacaccaauguguaa

SEQ ID NO: 647677 - RNA, 19 nt, Artificial Sequence
  Description of Artificial Sequence: Synthetic oligonucleotide
  Antisense strand to SEQ ID NO: 647676
uuacacauuggugucugca

SEQ ID NO: 647678 - RNA, 19 nt, Artificial Sequence
  Description of Artificial Sequence: Synthetic oligonucleotide
  Sense strand starting at position 3972 of SEQ ID NO: 585535
gacaccaauguguaaagua

SEQ ID NO: 647679 - RNA, 19 nt, Artificial Sequence
  Description of Artificial Sequence: Synthetic oligonucleotide
  Antisense strand to SEQ ID NO: 647678
uacuuuacacauugguguc

SEQ ID NO: 647680 - RNA, 19 nt, Artificial Sequence
  Description of Artificial Sequence: Synthetic oligonucleotide
  Sense strand starting at position 3982 of SEQ ID NO: 585535
uguaaaguagcaggcaaau

SEQ ID NO: 647681 - RNA, 19 nt, Artificial Sequence
  Description of Artificial Sequence: Synthetic oligonucleotide
  Antisense strand to SEQ ID NO: 647680
auuugccugcuacuuuaca

SEQ ID NO: 647682 - RNA, 19 nt, Artificial Sequence
  Description of Artificial Sequence: Synthetic oligonucleotide
  Sense strand starting at position 309 of SEQ ID NO: 585536
ccguguuguccauucuauu

SEQ ID NO: 647683 - RNA, 19 nt, Artificial Sequence
  Description of Artificial Sequence: Synthetic oligonucleotide
  Antisense strand to SEQ ID NO: 647682
aauagaauggacaacacgg

SEQ ID NO: 647684 - RNA, 19 nt, Artificial Sequence
  Description of Artificial Sequence: Synthetic oligonucleotide
  Sense strand starting at position 612 of SEQ ID NO: 585536
ugcagacaccaauguguaa

SEQ ID NO: 647685 - RNA, 19 nt, Artificial Sequence
  Description of Artificial Sequence: Synthetic oligonucleotide
  Antisense strand to SEQ ID NO: 647684
uuacacauuggugucugca

SEQ ID NO: 647686 - RNA, 19 nt, Artificial Sequence
  Description of Artificial Sequence: Synthetic oligonucleotide
  Sense strand starting at position 616 of SEQ ID NO: 585536
gacaccaauguguaaagua

SEQ ID NO: 647687 - RNA, 19 nt, Artificial Sequence
  Description of Artificial Sequence: Synthetic oligonucleotide
  Antisense strand to SEQ ID NO: 647686
uacuuuacacauugguguc

SEQ ID NO: 647688 - RNA, 19 nt, Artificial Sequence
  Description of Artificial Sequence: Synthetic oligonucleotide
  Sense strand starting at position 626 of SEQ ID NO: 585536
uguaaaguagcaggcaaau

SEQ ID NO: 647689 - RNA, 19 nt, Artificial Sequence
  Description of Artificial Sequence: Synthetic oligonucleotide
  Antisense strand to SEQ ID NO: 647688
auuugccugcuacuuuaca

SEQ ID NO: 647690 - RNA, 19 nt, Artificial Sequence
  Description of Artificial Sequence: Synthetic oligonucleotide
  Sense strand starting at position 666 of SEQ ID NO: 585536
cguaaauuuggcugaauuc

SEQ ID NO: 647691 - RNA, 19 nt, Artificial Sequence
  Description of Artificial Sequence: Synthetic oligonucleotide
  Antisense strand to SEQ ID NO: 647690
gaauucagccaaauuuacg

SEQ ID NO: 647692 - RNA, 19 nt, Artificial Sequence
  Description of Artificial Sequence: Synthetic oligonucleotide
  Sense strand starting at position 710 of SEQ ID NO: 585536
aaauauguggucugaaguu

SEQ ID NO: 647693 - RNA, 19 nt, Artificial Sequence
  Description of Artificial Sequence: Synthetic oligonucleotide
  Antisense strand to SEQ ID NO: 647692
aacuucagaccacauauuu

SEQ ID NO: 647694 - RNA, 19 nt, Artificial Sequence
  Description of Artificial Sequence: Synthetic oligonucleotide
  Sense strand starting at position 842 of SEQ ID NO: 585536
gucugagcccuggaauauc

SEQ ID NO: 647695 - RNA, 19 nt, Artificial Sequence
  Description of Artificial Sequence: Synthetic oligonucleotide
  Antisense strand to SEQ ID NO: 647694
gauauuccagggcucagac

SEQ ID NO: 647696 - RNA, 19 nt, Artificial Sequence
  Description of Artificial Sequence: Synthetic oligonucleotide
  Sense strand starting at position 850 of SEQ ID NO: 585536
ccuggaauaucuuugcuuu

SEQ ID NO: 647697 - RNA, 19 nt, Artificial Sequence
  Description of Artificial Sequence: Synthetic oligonucleotide
  Antisense strand to SEQ ID NO: 647696
aaagcaaagauauuccagg

SEQ ID NO: 647698 - RNA, 19 nt, Artificial Sequence
  Description of Artificial Sequence: Synthetic oligonucleotide
  Sense strand starting at position 851 of SEQ ID NO: 585536
cuggaauaucuuugcuuuc

SEQ ID NO: 647699 - RNA, 19 nt, Artificial Sequence
  Description of Artificial Sequence: Synthetic oligonucleotide
  Antisense strand to SEQ ID NO: 647698
gaaagcaaagauauuccag

SEQ ID NO: 647700 - RNA, 19 nt, Artificial Sequence
  Description of Artificial Sequence: Synthetic oligonucleotide
  Sense strand starting at position 983 of SEQ ID NO: 585536
cgcaccaaaccugguauaa

SEQ ID NO: 647701 - RNA, 19 nt, Artificial Sequence
  Description of Artificial Sequence: Synthetic oligonucleotide
  Antisense strand to SEQ ID NO: 647700
uuauaccagguuuggugcg

SEQ ID NO: 647702 - RNA, 19 nt, Artificial Sequence
  Description of Artificial Sequence: Synthetic oligonucleotide
  Sense strand starting at position 1022 of SEQ ID NO: 585536
auggaugugugcucaggaa

SEQ ID NO: 647703 - RNA, 19 nt, Artificial Sequence
  Description of Artificial Sequence: Synthetic oligonucleotide
  Antisense strand to SEQ ID NO: 647702
uuccugagcacacauccau

SEQ ID NO: 647704 - RNA, 19 nt, Artificial Sequence
  Description of Artificial Sequence: Synthetic oligonucleotide
  Sense strand starting at position 1092 of SEQ ID NO: 585536
ggcgaacauuuggaaucua

SEQ ID NO: 647705 - RNA, 19 nt, Artificial Sequence
  Description of Artificial Sequence: Synthetic oligonucleotide
  Antisense strand to SEQ ID NO: 647704
uagauuccaaauguucgcc

SEQ ID NO: 647706 - RNA, 19 nt, Artificial Sequence
  Description of Artificial Sequence: Synthetic oligonucleotide
  Sense strand starting at position 1295 of SEQ ID NO: 585536
cuauuugcaccgcgaggau

SEQ ID NO: 647707 - RNA, 19 nt, Artificial Sequence
  Description of Artificial Sequence: Synthetic oligonucleotide
  Antisense strand to SEQ ID NO: 647706
auccucgcggugcaaauag

SEQ ID NO: 647708 - RNA, 19 nt, Artificial Sequence
  Description of Artificial Sequence: Synthetic oligonucleotide
  Sense strand starting at position 1304 of SEQ ID NO: 585536
ccgcgaggaucagugaaau

SEQ ID NO: 647709 - RNA, 19 nt, Artificial Sequence
  Description of Artificial Sequence: Synthetic oligonucleotide
  Antisense strand to SEQ ID NO: 647708
auuucacugauccucgcgg

SEQ ID NO: 647710 - RNA, 19 nt, Artificial Sequence
  Description of Artificial Sequence: Synthetic oligonucleotide
  Sense strand starting at position 1316 of SEQ ID NO: 585536
gugaaauauaucugccguu

SEQ ID NO: 647711 - RNA, 19 nt, Artificial Sequence
  Description of Artificial Sequence: Synthetic oligonucleotide
  Antisense strand to SEQ ID NO: 647710
aacggcagauauauuucac

SEQ ID NO: 647712 - RNA, 19 nt, Artificial Sequence
  Description of Artificial Sequence: Synthetic oligonucleotide
  Sense strand starting at position 1346 of SEQ ID NO: 585536
ccauccuacguuuagucaa

SEQ ID NO: 647713 - RNA, 19 nt, Artificial Sequence
  Description of Artificial Sequence: Synthetic oligonucleotide
  Antisense strand to SEQ ID NO: 647712
uugacuaaacguaggaugg

SEQ ID NO: 647714 - RNA, 19 nt, Artificial Sequence
  Description of Artificial Sequence: Synthetic oligonucleotide
  Sense strand starting at position 1460 of SEQ ID NO: 585536
gacuuuaugcacugggaag

SEQ ID NO: 647715 - RNA, 19 nt, Artificial Sequence
  Description of Artificial Sequence: Synthetic oligonucleotide
  Antisense strand to SEQ ID NO: 647714
cuucccagugcauaaaguc

SEQ ID NO: 647716 - RNA, 19 nt, Artificial Sequence
  Description of Artificial Sequence: Synthetic oligonucleotide
  Sense strand starting at position 1681 of SEQ ID NO: 585536
uagacaccuugguagagaa

SEQ ID NO: 647717 - RNA, 19 nt, Artificial Sequence
  Description of Artificial Sequence: Synthetic oligonucleotide
  Antisense strand to SEQ ID NO: 647716
uucucuaccaaggugucua

SEQ ID NO: 647718 - RNA, 19 nt, Artificial Sequence
  Description of Artificial Sequence: Synthetic oligonucleotide
  Sense strand starting at position 1689 of SEQ ID NO: 585536
uugguagagaaucgccauu

SEQ ID NO: 647719 - RNA, 19 nt, Artificial Sequence
  Description of Artificial Sequence: Synthetic oligonucleotide
  Antisense strand to SEQ ID NO: 647718
aauggcgauucucuaccaa

SEQ ID NO: 647720 - RNA, 19 nt, Artificial Sequence
  Description of Artificial Sequence: Synthetic oligonucleotide
  Sense strand starting at position 1712 of SEQ ID NO: 585536
gucaucagaagcuggaauu

SEQ ID NO: 647721 - RNA, 19 nt, Artificial Sequence
  Description of Artificial Sequence: Synthetic oligonucleotide
  Antisense strand to SEQ ID NO: 647720
aauuccagcuucugaugac

SEQ ID NO: 647722 - RNA, 19 nt, Artificial Sequence
  Description of Artificial Sequence: Synthetic oligonucleotide
  Sense strand starting at position 1713 of SEQ ID NO: 585536
ucaucagaagcuggaauua

SEQ ID NO: 647723 - RNA, 19 nt, Artificial Sequence
  Description of Artificial Sequence: Synthetic oligonucleotide
  Antisense strand to SEQ ID NO: 647722
uaauuccagcuucugauga

SEQ ID NO: 647724 - RNA, 19 nt, Artificial Sequence
  Description of Artificial Sequence: Synthetic oligonucleotide
  Sense strand starting at position 1724 of SEQ ID NO: 585536
uggaauuaaucagauaucu

SEQ ID NO: 647725 - RNA, 19 nt, Artificial Sequence
  Description of Artificial Sequence: Synthetic oligonucleotide
  Antisense strand to SEQ ID NO: 647724
agauaucugauuaauucca

SEQ ID NO: 647726 - RNA, 19 nt, Artificial Sequence
  Description of Artificial Sequence: Synthetic oligonucleotide
  Sense strand starting at position 1748 of SEQ ID NO: 585536
uaaugugcgaucugaacga

SEQ ID NO: 647727 - RNA, 19 nt, Artificial Sequence
  Description of Artificial Sequence: Synthetic oligonucleotide
  Antisense strand to SEQ ID NO: 647726
ucguucagaucgcacauua

SEQ ID NO: 647728 - RNA, 19 nt, Artificial Sequence
  Description of Artificial Sequence: Synthetic oligonucleotide
  Sense strand starting at position 1752 of SEQ ID NO: 585536
gugcgaucugaacgaaauu

SEQ ID NO: 647729 - RNA, 19 nt, Artificial Sequence
  Description of Artificial Sequence: Synthetic oligonucleotide
  Antisense strand to SEQ ID NO: 647728
aauuucguucagaucgcac

SEQ ID NO: 647730 - RNA, 19 nt, Artificial Sequence
  Description of Artificial Sequence: Synthetic oligonucleotide
  Sense strand starting at position 2026 of SEQ ID NO: 585536
cuaagcuagcucgauuaau

SEQ ID NO: 647731 - RNA, 19 nt, Artificial Sequence
  Description of Artificial Sequence: Synthetic oligonucleotide
  Antisense strand to SEQ ID NO: 647730
auuaaucgagcuagcuuag

SEQ ID NO: 647732 - RNA, 19 nt, Artificial Sequence
  Description of Artificial Sequence: Synthetic oligonucleotide
  Sense strand starting at position 2032 of SEQ ID NO: 585536
uagcucgauuaauucgaaa

SEQ ID NO: 647733 - RNA, 19 nt, Artificial Sequence
  Description of Artificial Sequence: Synthetic oligonucleotide
  Antisense strand to SEQ ID NO: 647732
uuucgaauuaaucgagcua

SEQ ID NO: 647734 - RNA, 19 nt, Artificial Sequence
  Description of Artificial Sequence: Synthetic oligonucleotide
  Sense strand starting at position 2034 of SEQ ID NO: 585536
gcucgauuaauucgaaagc

SEQ ID NO: 647735 - RNA, 19 nt, Artificial Sequence
  Description of Artificial Sequence: Synthetic oligonucleotide
  Antisense strand to SEQ ID NO: 647734
gcuuucgaauuaaucgagc

SEQ ID NO: 647736 - RNA, 19 nt, Artificial Sequence
  Description of Artificial Sequence: Synthetic oligonucleotide
  Sense strand starting at position 2328 of SEQ ID NO: 585536
caccgaauguccucugaau

SEQ ID NO: 647737 - RNA, 19 nt, Artificial Sequence
  Description of Artificial Sequence: Synthetic oligonucleotide
  Antisense strand to SEQ ID NO: 647736
auucagaggacauucggug

SEQ ID NO: 647738 - RNA, 19 nt, Artificial Sequence
  Description of Artificial Sequence: Synthetic oligonucleotide
  Sense strand starting at position 2434 of SEQ ID NO: 585536
gaaggagccucugauaaga

SEQ ID NO: 647739 - RNA, 19 nt, Artificial Sequence
  Description of Artificial Sequence: Synthetic oligonucleotide
  Antisense strand to SEQ ID NO: 647738
ucuuaucagaggcuccuuc

SEQ ID NO: 647740 - RNA, 19 nt, Artificial Sequence
  Description of Artificial Sequence: Synthetic oligonucleotide
  Sense strand starting at position 2485 of SEQ ID NO: 585536
cucucagcgcuuuaggaaa

SEQ ID NO: 647741 - RNA, 19 nt, Artificial Sequence
  Description of Artificial Sequence: Synthetic oligonucleotide
  Antisense strand to SEQ ID NO: 647740
uuuccuaaagcgcugagag

SEQ ID NO: 647742 - RNA, 19 nt, Artificial Sequence
  Description of Artificial Sequence: Synthetic oligonucleotide
  Sense strand starting at position 2496 of SEQ ID NO: 585536
uuaggaaauuuccaaggca

SEQ ID NO: 647743 - RNA, 19 nt, Artificial Sequence
  Description of Artificial Sequence: Synthetic oligonucleotide
  Antisense strand to SEQ ID NO: 647742
ugccuuggaaauuuccuaa

SEQ ID NO: 647744 - RNA, 19 nt, Artificial Sequence
  Description of Artificial Sequence: Synthetic oligonucleotide
  Sense strand starting at position 2526 of SEQ ID NO: 585536
gcggacuucuuucuaaucu

SEQ ID NO: 647745 - RNA, 19 nt, Artificial Sequence
  Description of Artificial Sequence: Synthetic oligonucleotide
  Antisense strand to SEQ ID NO: 647744
agauuagaaagaaguccgc

SEQ ID NO: 647746 - RNA, 19 nt, Artificial Sequence
  Description of Artificial Sequence: Synthetic oligonucleotide
  Sense strand starting at position 2748 of SEQ ID NO: 585536
cgacgacagcuugagucaa

SEQ ID NO: 647747 - RNA, 19 nt, Artificial Sequence
  Description of Artificial Sequence: Synthetic oligonucleotide
  Antisense strand to SEQ ID NO: 647746
uugacucaagcugucgucg

SEQ ID NO: 647748 - RNA, 19 nt, Artificial Sequence
  Description of Artificial Sequence: Synthetic oligonucleotide
  Sense strand starting at position 2863 of SEQ ID NO: 585536
auuguagcgucuuuaauaa

SEQ ID NO: 647749 - RNA, 19 nt, Artificial Sequence
  Description of Artificial Sequence: Synthetic oligonucleotide
  Antisense strand to SEQ ID NO: 647748
uuauuaaagacgcuacaau

SEQ ID NO: 647750 - RNA, 19 nt, Artificial Sequence
  Description of Artificial Sequence: Synthetic oligonucleotide
  Sense strand starting at position 2985 of SEQ ID NO: 585536
gcugucaaacuguagaaau

SEQ ID NO: 647751 - RNA, 19 nt, Artificial Sequence
  Description of Artificial Sequence: Synthetic oligonucleotide
  Antisense strand to SEQ ID NO: 647750
auuucuacaguuugacagc

SEQ ID NO: 647752 - RNA, 19 nt, Artificial Sequence
  Description of Artificial Sequence: Synthetic oligonucleotide
  Sense strand starting at position 2995 of SEQ ID NO: 585536
uguagaaaugcacacggau

SEQ ID NO: 647753 - RNA, 19 nt, Artificial Sequence
  Description of Artificial Sequence: Synthetic oligonucleotide
  Antisense strand to SEQ ID NO: 647752
auccgugugcauuucuaca

SEQ ID NO: 647754 - RNA, 19 nt, Artificial Sequence
  Description of Artificial Sequence: Synthetic oligonucleotide
  Sense strand starting at position 2998 of SEQ ID NO: 585536
agaaaugcacacggauuaa

SEQ ID NO: 647755 - RNA, 19 nt, Artificial Sequence
  Description of Artificial Sequence: Synthetic oligonucleotide
  Antisense strand to SEQ ID NO: 647754
uuaauccgugugcauuucu

SEQ ID NO: 647756 - RNA, 19 nt, Artificial Sequence
  Description of Artificial Sequence: Synthetic oligonucleotide
  Sense strand starting at position 3024 of SEQ ID NO: 585536
cguugaauuugcuucuaca

SEQ ID NO: 647757 - RNA, 19 nt, Artificial Sequence
  Description of Artificial Sequence: Synthetic oligonucleotide
  Antisense strand to SEQ ID NO: 647756
uguagaagcaaauucaacg

SEQ ID NO: 647758 - RNA, 19 nt, Artificial Sequence
  Description of Artificial Sequence: Synthetic oligonucleotide
  Sense strand starting at position 3681 of SEQ ID NO: 585536
uugggaguggcuuaagguu

SEQ ID NO: 647759 - RNA, 19 nt, Artificial Sequence
  Description of Artificial Sequence: Synthetic oligonucleotide
  Antisense strand to SEQ ID NO: 647758
aaccuuaagccacucccaa

SEQ ID NO: 647760 - RNA, 19 nt, Artificial Sequence
  Description of Artificial Sequence: Synthetic oligonucleotide
  Sense strand starting at position 3831 of SEQ ID NO: 585536
ggcugagggccucaaugaa

SEQ ID NO: 647761 - RNA, 19 nt, Artificial Sequence
  Description of Artificial Sequence: Synthetic oligonucleotide
  Antisense strand to SEQ ID NO: 647760
uucauugaggcccucagcc

SEQ ID NO: 647762 - RNA, 19 nt, Artificial Sequence
  Description of Artificial Sequence: Synthetic oligonucleotide
  Sense strand starting at position 72 of SEQ ID NO: 585537
aaagucucugcagaaugua

SEQ ID NO: 647763 - RNA, 19 nt, Artificial Sequence
  Description of Artificial Sequence: Synthetic oligonucleotide
  Antisense strand to SEQ ID NO: 647762
uacauucugcagagacuuu

SEQ ID NO: 647764 - RNA, 19 nt, Artificial Sequence
  Description of Artificial Sequence: Synthetic oligonucleotide
  Sense strand starting at position 80 of SEQ ID NO: 585537
ugcagaauguaauccagau

SEQ ID NO: 647765 - RNA, 19 nt, Artificial Sequence
  Description of Artificial Sequence: Synthetic oligonucleotide
  Antisense strand to SEQ ID NO: 647764
aucuggauuacauucugca

SEQ ID NO: 647766 - RNA, 19 nt, Artificial Sequence
  Description of Artificial Sequence: Synthetic oligonucleotide
  Sense strand starting at position 172 of SEQ ID NO: 585537
agaaauucguguuuaagaa

SEQ ID NO: 647767 - RNA, 19 nt, Artificial Sequence
  Description of Artificial Sequence: Synthetic oligonucleotide
  Antisense strand to SEQ ID NO: 647766
uucuuaaacacgaauuucu

SEQ ID NO: 647768 - RNA, 19 nt, Artificial Sequence
  Description of Artificial Sequence: Synthetic oligonucleotide
  Sense strand starting at position 173 of SEQ ID NO: 585537
gaaauucguguuuaagaau

SEQ ID NO: 647769 - RNA, 19 nt, Artificial Sequence
  Description of Artificial Sequence: Synthetic oligonucleotide
  Antisense strand to SEQ ID NO: 647768
auucuuaaacacgaauuuc

SEQ ID NO: 647770 - RNA, 19 nt, Artificial Sequence
  Description of Artificial Sequence: Synthetic oligonucleotide
  Sense strand starting at position 180 of SEQ ID NO: 585537
guguuuaagaauugagaua

SEQ ID NO: 647771 - RNA, 19 nt, Artificial Sequence
  Description of Artificial Sequence: Synthetic oligonucleotide
  Antisense strand to SEQ ID NO: 647770
uaucucaauucuuaaacac

SEQ ID NO: 647772 - RNA, 19 nt, Artificial Sequence
  Description of Artificial Sequence: Synthetic oligonucleotide
  Sense strand starting at position 246 of SEQ ID NO: 585537
ggguucucauaauaauuua

SEQ ID NO: 647773 - RNA, 19 nt, Artificial Sequence
  Description of Artificial Sequence: Synthetic oligonucleotide
  Antisense strand to SEQ ID NO: 647772
uaaauuauuaugagaaccc

SEQ ID NO: 647774 - RNA, 19 nt, Artificial Sequence
  Description of Artificial Sequence: Synthetic oligonucleotide
  Sense strand starting at position 352 of SEQ ID NO: 585537
uguuguuaguaauuccaaa

SEQ ID NO: 647775 - RNA, 19 nt, Artificial Sequence
  Description of Artificial Sequence: Synthetic oligonucleotide
  Antisense strand to SEQ ID NO: 647774
uuuggaauuacuaacaaca

SEQ ID NO: 647776 - RNA, 19 nt, Artificial Sequence
  Description of Artificial Sequence: Synthetic oligonucleotide
  Sense strand starting at position 503 of SEQ ID NO: 585537
uucugauauguuuacauac

SEQ ID NO: 647777 - RNA, 19 nt, Artificial Sequence
  Description of Artificial Sequence: Synthetic oligonucleotide
  Antisense strand to SEQ ID NO: 647776
guauguaaacauaucagaa

SEQ ID NO: 647778 - RNA, 19 nt, Artificial Sequence
  Description of Artificial Sequence: Synthetic oligonucleotide
  Sense strand starting at position 684 of SEQ ID NO: 585537
guugguuuccuacauuacu

SEQ ID NO: 647779 - RNA, 19 nt, Artificial Sequence
  Description of Artificial Sequence: Synthetic oligonucleotide
  Antisense strand to SEQ ID NO: 647778
aguaauguaggaaaccaac

SEQ ID NO: 647780 - RNA, 19 nt, Artificial Sequence
  Description of Artificial Sequence: Synthetic oligonucleotide
  Sense strand starting at position 687 of SEQ ID NO: 585537
gguuuccuacauuacucua

SEQ ID NO: 647781 - RNA, 19 nt, Artificial Sequence
  Description of Artificial Sequence: Synthetic oligonucleotide
  Antisense strand to SEQ ID NO: 647780
uagaguaauguaggaaacc

SEQ ID NO: 647782 - RNA, 19 nt, Artificial Sequence
  Description of Artificial Sequence: Synthetic oligonucleotide
  Sense strand starting at position 695 of SEQ ID NO: 585537
acauuacucuaguuaugug

SEQ ID NO: 647783 - RNA, 19 nt, Artificial Sequence
  Description of Artificial Sequence: Synthetic oligonucleotide
  Antisense strand to SEQ ID NO: 647782
cacauaacuagaguaaugu

SEQ ID NO: 647784 - RNA, 19 nt, Artificial Sequence
  Description of Artificial Sequence: Synthetic oligonucleotide
  Sense strand starting at position 804 of SEQ ID NO: 585537
gaagacuugaggugaguaa

SEQ ID NO: 647785 - RNA, 19 nt, Artificial Sequence
  Description of Artificial Sequence: Synthetic oligonucleotide
  Antisense strand to SEQ ID NO: 647784
uuacucaccucaagucuuc

SEQ ID NO: 647786 - RNA, 19 nt, Artificial Sequence
  Description of Artificial Sequence: Synthetic oligonucleotide
  Sense strand starting at position 825 of SEQ ID NO: 585537
cuagcugaggccugauaaa

SEQ ID NO: 647787 - RNA, 19 nt, Artificial Sequence
  Description of Artificial Sequence: Synthetic oligonucleotide
  Antisense strand to SEQ ID NO: 647786
uuuaucaggccucagcuag

SEQ ID NO: 647788 - RNA, 19 nt, Artificial Sequence
  Description of Artificial Sequence: Synthetic oligonucleotide
  Sense strand starting at position 927 of SEQ ID NO: 585537
guggugugugggcagauuu

SEQ ID NO: 647789 - RNA, 19 nt, Artificial Sequence
  Description of Artificial Sequence: Synthetic oligonucleotide
  Antisense strand to SEQ ID NO: 647788
aaaucugcccacacaccac

SEQ ID NO: 647790 - RNA, 19 nt, Artificial Sequence
  Description of Artificial Sequence: Synthetic oligonucleotide
  Sense strand starting at position 970 of SEQ ID NO: 585537
gccuccuggaucuggauaa

SEQ ID NO: 647791 - RNA, 19 nt, Artificial Sequence
  Description of Artificial Sequence: Synthetic oligonucleotide
  Antisense strand to SEQ ID NO: 647790
uuauccagauccaggaggc

SEQ ID NO: 647792 - RNA, 19 nt, Artificial Sequence
  Description of Artificial Sequence: Synthetic oligonucleotide
  Sense strand starting at position 1207 of SEQ ID NO: 585537
caaggagcucuccaagguu

SEQ ID NO: 647793 - RNA, 19 nt, Artificial Sequence
  Description of Artificial Sequence: Synthetic oligonucleotide
  Antisense strand to SEQ ID NO: 647792
aaccuuggagagcuccuug

SEQ ID NO: 647794 - RNA, 19 nt, Artificial Sequence
  Description of Artificial Sequence: Synthetic oligonucleotide
  Sense strand starting at position 1672 of SEQ ID NO: 585537
uggagauuggugcacauau

SEQ ID NO: 647795 - RNA, 19 nt, Artificial Sequence
  Description of Artificial Sequence: Synthetic oligonucleotide
  Antisense strand to SEQ ID NO: 647794
auaugugcaccaaucucca

SEQ ID NO: 647796 - RNA, 19 nt, Artificial Sequence
  Description of Artificial Sequence: Synthetic oligonucleotide
  Sense strand starting at position 2271 of SEQ ID NO: 585537
guagaaggcugguucaaua

SEQ ID NO: 647797 - RNA, 19 nt, Artificial Sequence
  Description of Artificial Sequence: Synthetic oligonucleotide
  Antisense strand to SEQ ID NO: 647796
uauugaaccagccuucuac

SEQ ID NO: 647798 - RNA, 19 nt, Artificial Sequence
  Description of Artificial Sequence: Synthetic oligonucleotide
  Sense strand starting at position 2290 of SEQ ID NO: 585537
uacaguuaggcgucgcauu

SEQ ID NO: 647799 - RNA, 19 nt, Artificial Sequence
  Description of Artificial Sequence: Synthetic oligonucleotide
  Antisense strand to SEQ ID NO: 647798
aaugcgacgccuaacugua

SEQ ID NO: 647800 - RNA, 19 nt, Artificial Sequence
  Description of Artificial Sequence: Synthetic oligonucleotide
  Sense strand starting at position 2292 of SEQ ID NO: 585537
caguuaggcgucgcauuau

SEQ ID NO: 647801 - RNA, 19 nt, Artificial Sequence
  Description of Artificial Sequence: Synthetic oligonucleotide
  Antisense strand to SEQ ID NO: 647800
auaaugcgacgccuaacug

SEQ ID NO: 647802 - RNA, 19 nt, Artificial Sequence
  Description of Artificial Sequence: Synthetic oligonucleotide
  Sense strand starting at position 2295 of SEQ ID NO: 585537
uuaggcgucgcauuaugau

SEQ ID NO: 647803 - RNA, 19 nt, Artificial Sequence
  Description of Artificial Sequence: Synthetic oligonucleotide
  Antisense strand to SEQ ID NO: 647802
aucauaaugcgacgccuaa

SEQ ID NO: 647804 - RNA, 19 nt, Artificial Sequence
  Description of Artificial Sequence: Synthetic oligonucleotide
  Sense strand starting at position 2326 of SEQ ID NO: 585537
cucugagaaauaugugguu

SEQ ID NO: 647805 - RNA, 19 nt, Artificial Sequence
  Description of Artificial Sequence: Synthetic oligonucleotide
  Antisense strand to SEQ ID NO: 647804
aaccacauauuucucagag

SEQ ID NO: 647806 - RNA, 19 nt, Artificial Sequence
  Description of Artificial Sequence: Synthetic oligonucleotide
  Sense strand starting at position 2332 of SEQ ID NO: 585537
gaaauaugugguuaggcga

SEQ ID NO: 647807 - RNA, 19 nt, Artificial Sequence
  Description of Artificial Sequence: Synthetic oligonucleotide
  Antisense strand to SEQ ID NO: 647806
ucgccuaaccacauauuuc

SEQ ID NO: 647808 - RNA, 19 nt, Artificial Sequence
  Description of Artificial Sequence: Synthetic oligonucleotide
  Sense strand starting at position 2644 of SEQ ID NO: 585537
gcagauggucaugaugugu

SEQ ID NO: 647809 - RNA, 19 nt, Artificial Sequence
  Description of Artificial Sequence: Synthetic oligonucleotide
  Antisense strand to SEQ ID NO: 647808
acacaucaugaccaucugc

SEQ ID NO: 647810 - RNA, 19 nt, Artificial Sequence
  Description of Artificial Sequence: Synthetic oligonucleotide
  Sense strand starting at position 2831 of SEQ ID NO: 585537
uccaaauggguuugaugaa

SEQ ID NO: 647811 - RNA, 19 nt, Artificial Sequence
  Description of Artificial Sequence: Synthetic oligonucleotide
  Antisense strand to SEQ ID NO: 647810
uucaucaaacccauuugga

SEQ ID NO: 647812 - RNA, 19 nt, Artificial Sequence
  Description of Artificial Sequence: Synthetic oligonucleotide
  Sense strand starting at position 2957 of SEQ ID NO: 585537
cacaguugugggcaaguua

SEQ ID NO: 647813 - RNA, 19 nt, Artificial Sequence
  Description of Artificial Sequence: Synthetic oligonucleotide
  Antisense strand to SEQ ID NO: 647812
uaacuugcccacaacugug

SEQ ID NO: 647814 - RNA, 19 nt, Artificial Sequence
  Description of Artificial Sequence: Synthetic oligonucleotide
  Sense strand starting at position 3004 of SEQ ID NO: 585537
ggagacuuucugcagaccu

SEQ ID NO: 647815 - RNA, 19 nt, Artificial Sequence
  Description of Artificial Sequence: Synthetic oligonucleotide
  Antisense strand to SEQ ID NO: 647814
aggucugcagaaagucucc

SEQ ID NO: 647816 - RNA, 19 nt, Artificial Sequence
  Description of Artificial Sequence: Synthetic oligonucleotide
  Sense strand starting at position 3032 of SEQ ID NO: 585537
ggcauuuaaugagaauaau

SEQ ID NO: 647817 - RNA, 19 nt, Artificial Sequence
  Description of Artificial Sequence: Synthetic oligonucleotide
  Antisense strand to SEQ ID NO: 647816
auuauucucauuaaaugcc

SEQ ID NO: 647818 - RNA, 19 nt, Artificial Sequence
  Description of Artificial Sequence: Synthetic oligonucleotide
  Sense strand starting at position 3111 of SEQ ID NO: 585537
uuacauagugcugacuaua

SEQ ID NO: 647819 - RNA, 19 nt, Artificial Sequence
  Description of Artificial Sequence: Synthetic oligonucleotide
  Antisense strand to SEQ ID NO: 647818
uauagucagcacuauguaa

SEQ ID NO: 647820 - RNA, 19 nt, Artificial Sequence
  Description of Artificial Sequence: Synthetic oligonucleotide
  Sense strand starting at position 3139 of SEQ ID NO: 585537
uuguguuaaguacauuaca

SEQ ID NO: 647821 - RNA, 19 nt, Artificial Sequence
  Description of Artificial Sequence: Synthetic oligonucleotide
  Antisense strand to SEQ ID NO: 647820
uguaauguacuuaacacaa

SEQ ID NO: 647822 - RNA, 19 nt, Artificial Sequence
  Description of Artificial Sequence: Synthetic oligonucleotide
  Sense strand starting at position 3216 of SEQ ID NO: 585537
ggcauucucugauccagau

SEQ ID NO: 647823 - RNA, 19 nt, Artificial Sequence
  Description of Artificial Sequence: Synthetic oligonucleotide
  Antisense strand to SEQ ID NO: 647822
aucuggaucagagaaugcc

SEQ ID NO: 647824 - RNA, 19 nt, Artificial Sequence
  Description of Artificial Sequence: Synthetic oligonucleotide
  Sense strand starting at position 3329 of SEQ ID NO: 585537
ugcaaucugcaagaugauc

SEQ ID NO: 647825 - RNA, 19 nt, Artificial Sequence
  Description of Artificial Sequence: Synthetic oligonucleotide
  Antisense strand to SEQ ID NO: 647824
gaucaucuugcagauugca

SEQ ID NO: 647826 - RNA, 19 nt, Artificial Sequence
  Description of Artificial Sequence: Synthetic oligonucleotide
  Sense strand starting at position 3337 of SEQ ID NO: 585537
gcaagaugaucuccuggaa

SEQ ID NO: 647827 - RNA, 19 nt, Artificial Sequence
  Description of Artificial Sequence: Synthetic oligonucleotide
  Antisense strand to SEQ ID NO: 647826
uuccaggagaucaucuugc

SEQ ID NO: 647828 - RNA, 19 nt, Artificial Sequence
  Description of Artificial Sequence: Synthetic oligonucleotide
  Sense strand starting at position 3443 of SEQ ID NO: 585537
accucugucuuguuaaaca

SEQ ID NO: 647829 - RNA, 19 nt, Artificial Sequence
  Description of Artificial Sequence: Synthetic oligonucleotide
  Antisense strand to SEQ ID NO: 647828
uguuuaacaagacagaggu

SEQ ID NO: 647830 - RNA, 19 nt, Artificial Sequence
  Description of Artificial Sequence: Synthetic oligonucleotide
  Sense strand starting at position 3660 of SEQ ID NO: 585537
gcuuguuagcuugcagugu

SEQ ID NO: 647831 - RNA, 19 nt, Artificial Sequence
  Description of Artificial Sequence: Synthetic oligonucleotide
  Antisense strand to SEQ ID NO: 647830
acacugcaagcuaacaagc

SEQ ID NO: 647832 - RNA, 19 nt, Artificial Sequence
  Description of Artificial Sequence: Synthetic oligonucleotide
  Sense strand starting at position 3698 of SEQ ID NO: 585537
aaauguggccguguauguu

SEQ ID NO: 647833 - RNA, 19 nt, Artificial Sequence
  Description of Artificial Sequence: Synthetic oligonucleotide
  Antisense strand to SEQ ID NO: 647832
aacauacacggccacauuu

SEQ ID NO: 647834 - RNA, 19 nt, Artificial Sequence
  Description of Artificial Sequence: Synthetic oligonucleotide
  Sense strand starting at position 3724 of SEQ ID NO: 585537
ccuugaaagucuguaagaa

SEQ ID NO: 647835 - RNA, 19 nt, Artificial Sequence
  Description of Artificial Sequence: Synthetic oligonucleotide
  Antisense strand to SEQ ID NO: 647834
uucuuacagacuuucaagg

SEQ ID NO: 647836 - RNA, 19 nt, Artificial Sequence
  Description of Artificial Sequence: Synthetic oligonucleotide
  Sense strand starting at position 3734 of SEQ ID NO: 585537
cuguaagaaucagcacaua

SEQ ID NO: 647837 - RNA, 19 nt, Artificial Sequence
  Description of Artificial Sequence: Synthetic oligonucleotide
  Antisense strand to SEQ ID NO: 647836
uaugugcugauucuuacag

SEQ ID NO: 647838 - RNA, 19 nt, Artificial Sequence
  Description of Artificial Sequence: Synthetic oligonucleotide
  Sense strand starting at position 3840 of SEQ ID NO: 585537
uguccugaucucuauuggu

SEQ ID NO: 647839 - RNA, 19 nt, Artificial Sequence
  Description of Artificial Sequence: Synthetic oligonucleotide
  Antisense strand to SEQ ID NO: 647838
accaauagagaucaggaca

SEQ ID NO: 647840 - RNA, 19 nt, Artificial Sequence
  Description of Artificial Sequence: Synthetic oligonucleotide
  Sense strand starting at position 3973 of SEQ ID NO: 585537
auaggcuaguuauuagaau

SEQ ID NO: 647841 - RNA, 19 nt, Artificial Sequence
  Description of Artificial Sequence: Synthetic oligonucleotide
  Antisense strand to SEQ ID NO: 647840
auucuaauaacuagccuau

SEQ ID NO: 647842 - RNA, 19 nt, Artificial Sequence
  Description of Artificial Sequence: Synthetic oligonucleotide
  Sense strand starting at position 43 of SEQ ID NO: 585538
cugcguguugaucucugua

SEQ ID NO: 647843 - RNA, 19 nt, Artificial Sequence
  Description of Artificial Sequence: Synthetic oligonucleotide
  Antisense strand to SEQ ID NO: 647842
uacagagaucaacacgcag

SEQ ID NO: 647844 - RNA, 19 nt, Artificial Sequence
  Description of Artificial Sequence: Synthetic oligonucleotide
  Sense strand starting at position 171 of SEQ ID NO: 585538
aucacuuauucuccagguu

SEQ ID NO: 647845 - RNA, 19 nt, Artificial Sequence
  Description of Artificial Sequence: Synthetic oligonucleotide
  Antisense strand to SEQ ID NO: 647844
aaccuggagaauaagugau

SEQ ID NO: 647846 - RNA, 19 nt, Artificial Sequence
  Description of Artificial Sequence: Synthetic oligonucleotide
  Sense strand starting at position 172 of SEQ ID NO: 585538
ucacuuauucuccagguuu

SEQ ID NO: 647847 - RNA, 19 nt, Artificial Sequence
  Description of Artificial Sequence: Synthetic oligonucleotide
  Antisense strand to SEQ ID NO: 647846
aaaccuggagaauaaguga

SEQ ID NO: 647848 - RNA, 19 nt, Artificial Sequence
  Description of Artificial Sequence: Synthetic oligonucleotide
  Sense strand starting at position 265 of SEQ ID NO: 585538
cuaacaugacagugguuua

SEQ ID NO: 647849 - RNA, 19 nt, Artificial Sequence
  Description of Artificial Sequence: Synthetic oligonucleotide
  Antisense strand to SEQ ID NO: 647848
uaaaccacugucauguuag

SEQ ID NO: 647850 - RNA, 19 nt, Artificial Sequence
  Description of Artificial Sequence: Synthetic oligonucleotide
  Sense strand starting at position 268 of SEQ ID NO: 585538
acaugacagugguuuaaca

SEQ ID NO: 647851 - RNA, 19 nt, Artificial Sequence
  Description of Artificial Sequence: Synthetic oligonucleotide
  Antisense strand to SEQ ID NO: 647850
uguuaaaccacugucaugu

SEQ ID NO: 647852 - RNA, 19 nt, Artificial Sequence
  Description of Artificial Sequence: Synthetic oligonucleotide
  Sense strand starting at position 437 of SEQ ID NO: 585538
uucucaaugugacuaagga

SEQ ID NO: 647853 - RNA, 19 nt, Artificial Sequence
  Description of Artificial Sequence: Synthetic oligonucleotide
  Antisense strand to SEQ ID NO: 647852
uccuuagucacauugagaa

SEQ ID NO: 647854 - RNA, 19 nt, Artificial Sequence
  Description of Artificial Sequence: Synthetic oligonucleotide
  Sense strand starting at position 522 of SEQ ID NO: 585538
uuagcaucugggcauagaa

SEQ ID NO: 647855 - RNA, 19 nt, Artificial Sequence
  Description of Artificial Sequence: Synthetic oligonucleotide
  Antisense strand to SEQ ID NO: 647854
uucuaugcccagaugcuaa

SEQ ID NO: 647856 - RNA, 19 nt, Artificial Sequence
  Description of Artificial Sequence: Synthetic oligonucleotide
  Sense strand starting at position 576 of SEQ ID NO: 585538
accuuuaacguguaccuga

SEQ ID NO: 647857 - RNA, 19 nt, Artificial Sequence
  Description of Artificial Sequence: Synthetic oligonucleotide
  Antisense strand to SEQ ID NO: 647856
ucagguacacguuaaaggu

SEQ ID NO: 647858 - RNA, 19 nt, Artificial Sequence
  Description of Artificial Sequence: Synthetic oligonucleotide
  Sense strand starting at position 654 of SEQ ID NO: 585538
gcaccagugaucuagaguu

SEQ ID NO: 647859 - RNA, 19 nt, Artificial Sequence
  Description of Artificial Sequence: Synthetic oligonucleotide
  Antisense strand to SEQ ID NO: 647858
aacucuagaucacuggugc

SEQ ID NO: 647860 - RNA, 19 nt, Artificial Sequence
  Description of Artificial Sequence: Synthetic oligonucleotide
  Sense strand starting at position 656 of SEQ ID NO: 585538
accagugaucuagaguucu

SEQ ID NO: 647861 - RNA, 19 nt, Artificial Sequence
  Description of Artificial Sequence: Synthetic oligonucleotide
  Antisense strand to SEQ ID NO: 647860
agaacucuagaucacuggu

SEQ ID NO: 647862 - RNA, 19 nt, Artificial Sequence
  Description of Artificial Sequence: Synthetic oligonucleotide
  Sense strand starting at position 675 of SEQ ID NO: 585538
acccauaaacugugagguu

SEQ ID NO: 647863 - RNA, 19 nt, Artificial Sequence
  Description of Artificial Sequence: Synthetic oligonucleotide
  Antisense strand to SEQ ID NO: 647862
aaccucacaguuuaugggu

SEQ ID NO: 647864 - RNA, 19 nt, Artificial Sequence
  Description of Artificial Sequence: Synthetic oligonucleotide
  Sense strand starting at position 696 of SEQ ID NO: 585538
caaauaguuugggugguaa

SEQ ID NO: 647865 - RNA, 19 nt, Artificial Sequence
  Description of Artificial Sequence: Synthetic oligonucleotide
  Antisense strand to SEQ ID NO: 647864
uuaccacccaaacuauuug

SEQ ID NO: 647866 - RNA, 19 nt, Artificial Sequence
  Description of Artificial Sequence: Synthetic oligonucleotide
  Sense strand starting at position 863 of SEQ ID NO: 585538
aguaacuuccucgaaguca

SEQ ID NO: 647867 - RNA, 19 nt, Artificial Sequence
  Description of Artificial Sequence: Synthetic oligonucleotide
  Antisense strand to SEQ ID NO: 647866
ugacuucgaggaaguuacu

SEQ ID NO: 647868 - RNA, 19 nt, Artificial Sequence
  Description of Artificial Sequence: Synthetic oligonucleotide
  Sense strand starting at position 984 of SEQ ID NO: 585538
ugcuuagaucuuggacuaa

SEQ ID NO: 647869 - RNA, 19 nt, Artificial Sequence
  Description of Artificial Sequence: Synthetic oligonucleotide
  Antisense strand to SEQ ID NO: 647868
uuaguccaagaucuaagca

SEQ ID NO: 647870 - RNA, 19 nt, Artificial Sequence
  Description of Artificial Sequence: Synthetic oligonucleotide
  Sense strand starting at position 1023 of SEQ ID NO: 585538
aaauuaguuuccuugggaa

SEQ ID NO: 647871 - RNA, 19 nt, Artificial Sequence
  Description of Artificial Sequence: Synthetic oligonucleotide
  Antisense strand to SEQ ID NO: 647870
uucccaaggaaacuaauuu

SEQ ID NO: 647872 - RNA, 19 nt, Artificial Sequence
  Description of Artificial Sequence: Synthetic oligonucleotide
  Sense strand starting at position 1025 of SEQ ID NO: 585538
auuaguuuccuugggaauu

SEQ ID NO: 647873 - RNA, 19 nt, Artificial Sequence
  Description of Artificial Sequence: Synthetic oligonucleotide
  Antisense strand to SEQ ID NO: 647872
aauucccaaggaaacuaau

SEQ ID NO: 647874 - RNA, 19 nt, Artificial Sequence
  Description of Artificial Sequence: Synthetic oligonucleotide
  Sense strand starting at position 1086 of SEQ ID NO: 585538
uguacaggucuggaagcau

SEQ ID NO: 647875 - RNA, 19 nt, Artificial Sequence
  Description of Artificial Sequence: Synthetic oligonucleotide
  Antisense strand to SEQ ID NO: 647874
augcuuccagaccuguaca

SEQ ID NO: 647876 - RNA, 19 nt, Artificial Sequence
  Description of Artificial Sequence: Synthetic oligonucleotide
  Sense strand starting at position 1507 of SEQ ID NO: 585538
ccuccucggcccuagaaau

SEQ ID NO: 647877 - RNA, 19 nt, Artificial Sequence
  Description of Artificial Sequence: Synthetic oligonucleotide
  Antisense strand to SEQ ID NO: 647876
auuucuagggccgaggagg

SEQ ID NO: 647878 - RNA, 19 nt, Artificial Sequence
  Description of Artificial Sequence: Synthetic oligonucleotide
  Sense strand starting at position 1593 of SEQ ID NO: 585538
uagcuaauggcugagguaa

SEQ ID NO: 647879 - RNA, 19 nt, Artificial Sequence
  Description of Artificial Sequence: Synthetic oligonucleotide
  Antisense strand to SEQ ID NO: 647878
uuaccucagccauuagcua

SEQ ID NO: 647880 - RNA, 19 nt, Artificial Sequence
  Description of Artificial Sequence: Synthetic oligonucleotide
  Sense strand starting at position 2342 of SEQ ID NO: 585538
ugagguuagaccugaccuu

SEQ ID NO: 647881 - RNA, 19 nt, Artificial Sequence
  Description of Artificial Sequence: Synthetic oligonucleotide
  Antisense strand to SEQ ID NO: 647880
aaggucaggucuaaccuca

SEQ ID NO: 647882 - RNA, 19 nt, Artificial Sequence
  Description of Artificial Sequence: Synthetic oligonucleotide
  Sense strand starting at position 2367 of SEQ ID NO: 585538
cugugugaggaauaguaag

SEQ ID NO: 647883 - RNA, 19 nt, Artificial Sequence
  Description of Artificial Sequence: Synthetic oligonucleotide
  Antisense strand to SEQ ID NO: 647882
cuuacuauuccucacacag

SEQ ID NO: 647884 - RNA, 19 nt, Artificial Sequence
  Description of Artificial Sequence: Synthetic oligonucleotide
  Sense strand starting at position 2465 of SEQ ID NO: 585538
cuuugauagugguuuaaac

SEQ ID NO: 647885 - RNA, 19 nt, Artificial Sequence
  Description of Artificial Sequence: Synthetic oligonucleotide
  Antisense strand to SEQ ID NO: 647884
guuuaaaccacuaucaaag

SEQ ID NO: 647886 - RNA, 19 nt, Artificial Sequence
  Description of Artificial Sequence: Synthetic oligonucleotide
  Sense strand starting at position 2467 of SEQ ID NO: 585538
uugauagugguuuaaacca

SEQ ID NO: 647887 - RNA, 19 nt, Artificial Sequence
  Description of Artificial Sequence: Synthetic oligonucleotide
  Antisense strand to SEQ ID NO: 647886
ugguuuaaaccacuaucaa

SEQ ID NO: 647888 - RNA, 19 nt, Artificial Sequence
  Description of Artificial Sequence: Synthetic oligonucleotide
  Sense strand starting at position 2602 of SEQ ID NO: 585538
gcaagaugauacuuguuau

SEQ ID NO: 647889 - RNA, 19 nt, Artificial Sequence
  Description of Artificial Sequence: Synthetic oligonucleotide
  Antisense strand to SEQ ID NO: 647888
auaacaaguaucaucuugc

SEQ ID NO: 647890 - RNA, 19 nt, Artificial Sequence
  Description of Artificial Sequence: Synthetic oligonucleotide
  Sense strand starting at position 2605 of SEQ ID NO: 585538
agaugauacuuguuaugga

SEQ ID NO: 647891 - RNA, 19 nt, Artificial Sequence
  Description of Artificial Sequence: Synthetic oligonucleotide
  Antisense strand to SEQ ID NO: 647890
uccauaacaaguaucaucu

SEQ ID NO: 647892 - RNA, 19 nt, Artificial Sequence
  Description of Artificial Sequence: Synthetic oligonucleotide
  Sense strand starting at position 2633 of SEQ ID NO: 585538
ugguuauuacuugauaauc

SEQ ID NO: 647893 - RNA, 19 nt, Artificial Sequence
  Description of Artificial Sequence: Synthetic oligonucleotide
  Antisense strand to SEQ ID NO: 647892
gauuaucaaguaauaacca

SEQ ID NO: 647894 - RNA, 19 nt, Artificial Sequence
  Description of Artificial Sequence: Synthetic oligonucleotide
  Sense strand starting at position 2854 of SEQ ID NO: 585538
caauguaugccuuagggca

SEQ ID NO: 647895 - RNA, 19 nt, Artificial Sequence
  Description of Artificial Sequence: Synthetic oligonucleotide
  Antisense strand to SEQ ID NO: 647894
ugcccuaaggcauacauug

SEQ ID NO: 647896 - RNA, 19 nt, Artificial Sequence
  Description of Artificial Sequence: Synthetic oligonucleotide
  Sense strand starting at position 2904 of SEQ ID NO: 585538
ggacuagcacuuugagauc

SEQ ID NO: 647897 - RNA, 19 nt, Artificial Sequence
  Description of Artificial Sequence: Synthetic oligonucleotide
  Antisense strand to SEQ ID NO: 647896
gaucucaaagugcuagucc

SEQ ID NO: 647898 - RNA, 19 nt, Artificial Sequence
  Description of Artificial Sequence: Synthetic oligonucleotide
  Sense strand starting at position 2997 of SEQ ID NO: 585538
aaggaacaaugugucuaau

SEQ ID NO: 647899 - RNA, 19 nt, Artificial Sequence
  Description of Artificial Sequence: Synthetic oligonucleotide
  Antisense strand to SEQ ID NO: 647898
auuagacacauuguuccuu

SEQ ID NO: 647900 - RNA, 19 nt, Artificial Sequence
  Description of Artificial Sequence: Synthetic oligonucleotide
  Sense strand starting at position 3005 of SEQ ID NO: 585538
augugucuaaugggacaaa

SEQ ID NO: 647901 - RNA, 19 nt, Artificial Sequence
  Description of Artificial Sequence: Synthetic oligonucleotide
  Antisense strand to SEQ ID NO: 647900
uuugucccauuagacacau

SEQ ID NO: 647902 - RNA, 19 nt, Artificial Sequence
  Description of Artificial Sequence: Synthetic oligonucleotide
  Sense strand starting at position 3016 of SEQ ID NO: 585538
gggacaaaucaauagucgu

SEQ ID NO: 647903 - RNA, 19 nt, Artificial Sequence
  Description of Artificial Sequence: Synthetic oligonucleotide
  Antisense strand to SEQ ID NO: 647902
acgacuauugauuuguccc

SEQ ID NO: 647904 - RNA, 19 nt, Artificial Sequence
  Description of Artificial Sequence: Synthetic oligonucleotide
  Sense strand starting at position 3023 of SEQ ID NO: 585538
aucaauagucgugacauaa

SEQ ID NO: 647905 - RNA, 19 nt, Artificial Sequence
  Description of Artificial Sequence: Synthetic oligonucleotide
  Antisense strand to SEQ ID NO: 647904
uuaugucacgacuauugau

SEQ ID NO: 647906 - RNA, 19 nt, Artificial Sequence
  Description of Artificial Sequence: Synthetic oligonucleotide
  Sense strand starting at position 3027 of SEQ ID NO: 585538
auagucgugacauaaugaa

SEQ ID NO: 647907 - RNA, 19 nt, Artificial Sequence
  Description of Artificial Sequence: Synthetic oligonucleotide
  Antisense strand to SEQ ID NO: 647906
uucauuaugucacgacuau

SEQ ID NO: 647908 - RNA, 19 nt, Artificial Sequence
  Description of Artificial Sequence: Synthetic oligonucleotide
  Sense strand starting at position 3090 of SEQ ID NO: 585538
uccuucugaggcuaauaga

SEQ ID NO: 647909 - RNA, 19 nt, Artificial Sequence
  Description of Artificial Sequence: Synthetic oligonucleotide
  Antisense strand to SEQ ID NO: 647908
ucuauuagccucagaagga

SEQ ID NO: 647910 - RNA, 19 nt, Artificial Sequence
  Description of Artificial Sequence: Synthetic oligonucleotide
  Sense strand starting at position 3172 of SEQ ID NO: 585538
guagacccauuugaauaaa

SEQ ID NO: 647911 - RNA, 19 nt, Artificial Sequence
  Description of Artificial Sequence: Synthetic oligonucleotide
  Antisense strand to SEQ ID NO: 647910
uuuauucaaaugggucuac

SEQ ID NO: 647912 - RNA, 19 nt, Artificial Sequence
  Description of Artificial Sequence: Synthetic oligonucleotide
  Sense strand starting at position 3442 of SEQ ID NO: 585538
aggugcaugccacauugaa

SEQ ID NO: 647913 - RNA, 19 nt, Artificial Sequence
  Description of Artificial Sequence: Synthetic oligonucleotide
  Antisense strand to SEQ ID NO: 647912
uucaauguggcaugcaccu

SEQ ID NO: 647914 - RNA, 19 nt, Artificial Sequence
  Description of Artificial Sequence: Synthetic oligonucleotide
  Sense strand starting at position 3524 of SEQ ID NO: 585538
ggacuucccuuaguaauac

SEQ ID NO: 647915 - RNA, 19 nt, Artificial Sequence
  Description of Artificial Sequence: Synthetic oligonucleotide
  Antisense strand to SEQ ID NO: 647914
guauuacuaagggaagucc

SEQ ID NO: 647916 - RNA, 19 nt, Artificial Sequence
  Description of Artificial Sequence: Synthetic oligonucleotide
  Sense strand starting at position 3744 of SEQ ID NO: 585538
acuggaucuggcuauuaca

SEQ ID NO: 647917 - RNA, 19 nt, Artificial Sequence
  Description of Artificial Sequence: Synthetic oligonucleotide
  Antisense strand to SEQ ID NO: 647916
uguaauagccagauccagu

SEQ ID NO: 647918 - RNA, 19 nt, Artificial Sequence
  Description of Artificial Sequence: Synthetic oligonucleotide
  Sense strand starting at position 3782 of SEQ ID NO: 585538
guacuugcugauuaacaaa

SEQ ID NO: 647919 - RNA, 19 nt, Artificial Sequence
  Description of Artificial Sequence: Synthetic oligonucleotide
  Antisense strand to SEQ ID NO: 647918
uuuguuaaucagcaaguac

SEQ ID NO: 647920 - RNA, 19 nt, Artificial Sequence
  Description of Artificial Sequence: Synthetic oligonucleotide
  Sense strand starting at position 3858 of SEQ ID NO: 585538
uuaaacuuugugggagaau

SEQ ID NO: 647921 - RNA, 19 nt, Artificial Sequence
  Description of Artificial Sequence: Synthetic oligonucleotide
  Antisense strand to SEQ ID NO: 647920
auucucccacaaaguuuaa

SEQ ID NO: 647922 - RNA, 19 nt, Artificial Sequence
  Description of Artificial Sequence: Synthetic oligonucleotide
  Sense strand starting at position 45 of SEQ ID NO: 585539
guuaaauuugggugguggu

SEQ ID NO: 647923 - RNA, 19 nt, Artificial Sequence
  Description of Artificial Sequence: Synthetic oligonucleotide
  Antisense strand to SEQ ID NO: 647922
accaccacccaaauuuaac

SEQ ID NO: 647924 - RNA, 19 nt, Artificial Sequence
  Description of Artificial Sequence: Synthetic oligonucleotide
  Sense strand starting at position 240 of SEQ ID NO: 585539
guuggacucuuccuaaauc

SEQ ID NO: 647925 - RNA, 19 nt, Artificial Sequence
  Description of Artificial Sequence: Synthetic oligonucleotide
  Antisense strand to SEQ ID NO: 647924
gauuuaggaagaguccaac

SEQ ID NO: 647926 - RNA, 19 nt, Artificial Sequence
  Description of Artificial Sequence: Synthetic oligonucleotide
  Sense strand starting at position 378 of SEQ ID NO: 585539
auauuauagugucugguaa

SEQ ID NO: 647927 - RNA, 19 nt, Artificial Sequence
  Description of Artificial Sequence: Synthetic oligonucleotide
  Antisense strand to SEQ ID NO: 647926
uuaccagacacuauaauau

SEQ ID NO: 647928 - RNA, 19 nt, Artificial Sequence
  Description of Artificial Sequence: Synthetic oligonucleotide
  Sense strand starting at position 379 of SEQ ID NO: 585539
uauuauagugucugguaau

SEQ ID NO: 647929 - RNA, 19 nt, Artificial Sequence
  Description of Artificial Sequence: Synthetic oligonucleotide
  Antisense strand to SEQ ID NO: 647928
auuaccagacacuauaaua

SEQ ID NO: 647930 - RNA, 19 nt, Artificial Sequence
  Description of Artificial Sequence: Synthetic oligonucleotide
  Sense strand starting at position 416 of SEQ ID NO: 585539
cacacuaugugucugguaa

SEQ ID NO: 647931 - RNA, 19 nt, Artificial Sequence
  Description of Artificial Sequence: Synthetic oligonucleotide
  Antisense strand to SEQ ID NO: 647930
uuaccagacacauagugug

SEQ ID NO: 647932 - RNA, 19 nt, Artificial Sequence
  Description of Artificial Sequence: Synthetic oligonucleotide
  Sense strand starting at position 417 of SEQ ID NO: 585539
acacuaugugucugguaau

SEQ ID NO: 647933 - RNA, 19 nt, Artificial Sequence
  Description of Artificial Sequence: Synthetic oligonucleotide
  Antisense strand to SEQ ID NO: 647932
auuaccagacacauagugu

SEQ ID NO: 647934 - RNA, 19 nt, Artificial Sequence
  Description of Artificial Sequence: Synthetic oligonucleotide
  Sense strand starting at position 455 of SEQ ID NO: 585539
gugcacuauguacaauuau

SEQ ID NO: 647935 - RNA, 19 nt, Artificial Sequence
  Description of Artificial Sequence: Synthetic oligonucleotide
  Antisense strand to SEQ ID NO: 647934
auaauuguacauagugcac

SEQ ID NO: 647936 - RNA, 19 nt, Artificial Sequence
  Description of Artificial Sequence: Synthetic oligonucleotide
  Sense strand starting at position 532 of SEQ ID NO: 585539
ggucacauagaagguaauu

SEQ ID NO: 647937 - RNA, 19 nt, Artificial Sequence
  Description of Artificial Sequence: Synthetic oligonucleotide
  Antisense strand to SEQ ID NO: 647936
aauuaccuucuaugugacc

SEQ ID NO: 647938 - RNA, 19 nt, Artificial Sequence
  Description of Artificial Sequence: Synthetic oligonucleotide
  Sense strand starting at position 573 of SEQ ID NO: 585539
cugugagcuuaauuacucu

SEQ ID NO: 647939 - RNA, 19 nt, Artificial Sequence
  Description of Artificial Sequence: Synthetic oligonucleotide
  Antisense strand to SEQ ID NO: 647938
agaguaauuaagcucacag

SEQ ID NO: 647940 - RNA, 19 nt, Artificial Sequence
  Description of Artificial Sequence: Synthetic oligonucleotide
  Sense strand starting at position 729 of SEQ ID NO: 585539
gaucuagauugagauaaag

SEQ ID NO: 647941 - RNA, 19 nt, Artificial Sequence
  Description of Artificial Sequence: Synthetic oligonucleotide
  Antisense strand to SEQ ID NO: 647940
cuuuaucucaaucuagauc

SEQ ID NO: 647942 - RNA, 19 nt, Artificial Sequence
  Description of Artificial Sequence: Synthetic oligonucleotide
  Sense strand starting at position 800 of SEQ ID NO: 585539
agucccuagcucuggauaa

SEQ ID NO: 647943 - RNA, 19 nt, Artificial Sequence
  Description of Artificial Sequence: Synthetic oligonucleotide
  Antisense strand to SEQ ID NO: 647942
uuauccagagcuagggacu

SEQ ID NO: 647944 - RNA, 19 nt, Artificial Sequence
  Description of Artificial Sequence: Synthetic oligonucleotide
  Sense strand starting at position 802 of SEQ ID NO: 585539
ucccuagcucuggauaacu

SEQ ID NO: 647945 - RNA, 19 nt, Artificial Sequence
  Description of Artificial Sequence: Synthetic oligonucleotide
  Antisense strand to SEQ ID NO: 647944
aguuauccagagcuaggga

SEQ ID NO: 647946 - RNA, 19 nt, Artificial Sequence
  Description of Artificial Sequence: Synthetic oligonucleotide
  Sense strand starting at position 813 of SEQ ID NO: 585539
ggauaacugucagugcuuc

SEQ ID NO: 647947 - RNA, 19 nt, Artificial Sequence
  Description of Artificial Sequence: Synthetic oligonucleotide
  Antisense strand to SEQ ID NO: 647946
gaagcacugacaguuaucc

SEQ ID NO: 647948 - RNA, 19 nt, Artificial Sequence
  Description of Artificial Sequence: Synthetic oligonucleotide
  Sense strand starting at position 868 of SEQ ID NO: 585539
ggguccugcuccucuaaau

SEQ ID NO: 647949 - RNA, 19 nt, Artificial Sequence
  Description of Artificial Sequence: Synthetic oligonucleotide
  Antisense strand to SEQ ID NO: 647948
auuuagaggagcaggaccc

SEQ ID NO: 647950 - RNA, 19 nt, Artificial Sequence
  Description of Artificial Sequence: Synthetic oligonucleotide
  Sense strand starting at position 906 of SEQ ID NO: 585539
ggcgcaauaacguccguuu

SEQ ID NO: 647951 - RNA, 19 nt, Artificial Sequence
  Description of Artificial Sequence: Synthetic oligonucleotide
  Antisense strand to SEQ ID NO: 647950
aaacggacguuauugcgcc

SEQ ID NO: 647952 - RNA, 19 nt, Artificial Sequence
  Description of Artificial Sequence: Synthetic oligonucleotide
  Sense strand starting at position 907 of SEQ ID NO: 585539
gcgcaauaacguccguuua

SEQ ID NO: 647953 - RNA, 19 nt, Artificial Sequence
  Description of Artificial Sequence: Synthetic oligonucleotide
  Antisense strand to SEQ ID NO: 647952
uaaacggacguuauugcgc

SEQ ID NO: 647954 - RNA, 19 nt, Artificial Sequence
  Description of Artificial Sequence: Synthetic oligonucleotide
  Sense strand starting at position 926 of SEQ ID NO: 585539
agacgaaucguccaaggga

SEQ ID NO: 647955 - RNA, 19 nt, Artificial Sequence
  Description of Artificial Sequence: Synthetic oligonucleotide
  Antisense strand to SEQ ID NO: 647954
ucccuuggacgauucgucu

SEQ ID NO: 647956 - RNA, 19 nt, Artificial Sequence
  Description of Artificial Sequence: Synthetic oligonucleotide
  Sense strand starting at position 929 of SEQ ID NO: 585539
cgaaucguccaagggacuu

SEQ ID NO: 647957 - RNA, 19 nt, Artificial Sequence
  Description of Artificial Sequence: Synthetic oligonucleotide
  Antisense strand to SEQ ID NO: 647956
aagucccuuggacgauucg

SEQ ID NO: 647958 - RNA, 19 nt, Artificial Sequence
  Description of Artificial Sequence: Synthetic oligonucleotide
  Sense strand starting at position 2017 of SEQ ID NO: 585539
agaggagcuccuugcaguu

SEQ ID NO: 647959 - RNA, 19 nt, Artificial Sequence
  Description of Artificial Sequence: Synthetic oligonucleotide
  Antisense strand to SEQ ID NO: 647958
aacugcaaggagcuccucu

SEQ ID NO: 647960 - RNA, 19 nt, Artificial Sequence
  Description of Artificial Sequence: Synthetic oligonucleotide
  Sense strand starting at position 2048 of SEQ ID NO: 585539
agccgaagcucacugagau

SEQ ID NO: 647961 - RNA, 19 nt, Artificial Sequence
  Description of Artificial Sequence: Synthetic oligonucleotide
  Antisense strand to SEQ ID NO: 647960
aucucagugagcuucggcu

SEQ ID NO: 647962 - RNA, 19 nt, Artificial Sequence
  Description of Artificial Sequence: Synthetic oligonucleotide
  Sense strand starting at position 2049 of SEQ ID NO: 585539
gccgaagcucacugagaug

SEQ ID NO: 647963 - RNA, 19 nt, Artificial Sequence
  Description of Artificial Sequence: Synthetic oligonucleotide
  Antisense strand to SEQ ID NO: 647962
caucucagugagcuucggc

SEQ ID NO: 647964 - RNA, 19 nt, Artificial Sequence
  Description of Artificial Sequence: Synthetic oligonucleotide
  Sense strand starting at position 2072 of SEQ ID NO: 585539
gcuuccuguuggguugaga

SEQ ID NO: 647965 - RNA, 19 nt, Artificial Sequence
  Description of Artificial Sequence: Synthetic oligonucleotide
  Antisense strand to SEQ ID NO: 647964
ucucaacccaacaggaagc

SEQ ID NO: 647966 - RNA, 19 nt, Artificial Sequence
  Description of Artificial Sequence: Synthetic oligonucleotide
  Sense strand starting at position 2099 of SEQ ID NO: 585539
agucuacgaugcuuagaca

SEQ ID NO: 647967 - RNA, 19 nt, Artificial Sequence
  Description of Artificial Sequence: Synthetic oligonucleotide
  Antisense strand to SEQ ID NO: 647966
ugucuaagcaucguagacu

SEQ ID NO: 647968 - RNA, 19 nt, Artificial Sequence
  Description of Artificial Sequence: Synthetic oligonucleotide
  Sense strand starting at position 2100 of SEQ ID NO: 585539
gucuacgaugcuuagacaa

SEQ ID NO: 647969 - RNA, 19 nt, Artificial Sequence
  Description of Artificial Sequence: Synthetic oligonucleotide
  Antisense strand to SEQ ID NO: 647968
uugucuaagcaucguagac

SEQ ID NO: 647970 - RNA, 19 nt, Artificial Sequence
  Description of Artificial Sequence: Synthetic oligonucleotide
  Sense strand starting at position 2338 of SEQ ID NO: 585539
uucggugucgcagugaagu

SEQ ID NO: 647971 - RNA, 19 nt, Artificial Sequence
  Description of Artificial Sequence: Synthetic oligonucleotide
  Antisense strand to SEQ ID NO: 647970
acuucacugcgacaccgaa

SEQ ID NO: 647972 - RNA, 19 nt, Artificial Sequence
  Description of Artificial Sequence: Synthetic oligonucleotide
  Sense strand starting at position 2564 of SEQ ID NO: 585539
agguucggagauuguaaau

SEQ ID NO: 647973 - RNA, 19 nt, Artificial Sequence
  Description of Artificial Sequence: Synthetic oligonucleotide
  Antisense strand to SEQ ID NO: 647972
auuuacaaucuccgaaccu

SEQ ID NO: 647974 - RNA, 19 nt, Artificial Sequence
  Description of Artificial Sequence: Synthetic oligonucleotide
  Sense strand starting at position 2823 of SEQ ID NO: 585539
cccauauugccuuauguua

SEQ ID NO: 647975 - RNA, 19 nt, Artificial Sequence
  Description of Artificial Sequence: Synthetic oligonucleotide
  Antisense strand to SEQ ID NO: 647974
uaacauaaggcaauauggg

SEQ ID NO: 647976 - RNA, 19 nt, Artificial Sequence
  Description of Artificial Sequence: Synthetic oligonucleotide
  Sense strand starting at position 3022 of SEQ ID NO: 585539
gacaguuucucagucaguu

SEQ ID NO: 647977 - RNA, 19 nt, Artificial Sequence
  Description of Artificial Sequence: Synthetic oligonucleotide
  Antisense strand to SEQ ID NO: 647976
aacugacugagaaacuguc

SEQ ID NO: 647978 - RNA, 19 nt, Artificial Sequence
  Description of Artificial Sequence: Synthetic oligonucleotide
  Sense strand starting at position 3068 of SEQ ID NO: 585539
caguacugguuucuguaua

SEQ ID NO: 647979 - RNA, 19 nt, Artificial Sequence
  Description of Artificial Sequence: Synthetic oligonucleotide
  Antisense strand to SEQ ID NO: 647978
uauacagaaaccaguacug

SEQ ID NO: 647980 - RNA, 19 nt, Artificial Sequence
  Description of Artificial Sequence: Synthetic oligonucleotide
  Sense strand starting at position 3081 of SEQ ID NO: 585539
uguauacuaucccucaguu

SEQ ID NO: 647981 - RNA, 19 nt, Artificial Sequence
  Description of Artificial Sequence: Synthetic oligonucleotide
  Antisense strand to SEQ ID NO: 647980
aacugagggauaguauaca

SEQ ID NO: 647982 - RNA, 19 nt, Artificial Sequence
  Description of Artificial Sequence: Synthetic oligonucleotide
  Sense strand starting at position 3120 of SEQ ID NO: 585539
ucaugauuggacugaagcu

SEQ ID NO: 647983 - RNA, 19 nt, Artificial Sequence
  Description of Artificial Sequence: Synthetic oligonucleotide
  Antisense strand to SEQ ID NO: 647982
agcuucaguccaaucauga

SEQ ID NO: 647984 - RNA, 19 nt, Artificial Sequence
  Description of Artificial Sequence: Synthetic oligonucleotide
  Sense strand starting at position 3135 of SEQ ID NO: 585539
agcuguggauguuuaggaa

SEQ ID NO: 647985 - RNA, 19 nt, Artificial Sequence
  Description of Artificial Sequence: Synthetic oligonucleotide
  Antisense strand to SEQ ID NO: 647984
uuccuaaacauccacagcu

SEQ ID NO: 647986 - RNA, 19 nt, Artificial Sequence
  Description of Artificial Sequence: Synthetic oligonucleotide
  Sense strand starting at position 3281 of SEQ ID NO: 585539
cugcaauaguuucugaaau

SEQ ID NO: 647987 - RNA, 19 nt, Artificial Sequence
  Description of Artificial Sequence: Synthetic oligonucleotide
  Antisense strand to SEQ ID NO: 647986
auuucagaaacuauugcag

SEQ ID NO: 647988 - RNA, 19 nt, Artificial Sequence
  Description of Artificial Sequence: Synthetic oligonucleotide
  Sense strand starting at position 3374 of SEQ ID NO: 585539
auggccuuugauuguuuau

SEQ ID NO: 647989 - RNA, 19 nt, Artificial Sequence
  Description of Artificial Sequence: Synthetic oligonucleotide
  Antisense strand to SEQ ID NO: 647988
auaaacaaucaaaggccau

SEQ ID NO: 647990 - RNA, 19 nt, Artificial Sequence
  Description of Artificial Sequence: Synthetic oligonucleotide
  Sense strand starting at position 3569 of SEQ ID NO: 585539
acaugaaguuccuuugacu

SEQ ID NO: 647991 - RNA, 19 nt, Artificial Sequence
  Description of Artificial Sequence: Synthetic oligonucleotide
  Antisense strand to SEQ ID NO: 647990
agucaaaggaacuucaugu

SEQ ID NO: 647992 - RNA, 19 nt, Artificial Sequence
  Description of Artificial Sequence: Synthetic oligonucleotide
  Sense strand starting at position 3625 of SEQ ID NO: 585539
ucuggucaguuccuacaau

SEQ ID NO: 647993 - RNA, 19 nt, Artificial Sequence
  Description of Artificial Sequence: Synthetic oligonucleotide
  Antisense strand to SEQ ID NO: 647992
auuguaggaacugaccaga

SEQ ID NO: 647994 - RNA, 19 nt, Artificial Sequence
  Description of Artificial Sequence: Synthetic oligonucleotide
  Sense strand starting at position 3830 of SEQ ID NO: 585539
cuguccuggagcugauaau

SEQ ID NO: 647995 - RNA, 19 nt, Artificial Sequence
  Description of Artificial Sequence: Synthetic oligonucleotide
  Antisense strand to SEQ ID NO: 647994
auuaucagcuccaggacag

SEQ ID NO: 647996 - RNA, 19 nt, Artificial Sequence
  Description of Artificial Sequence: Synthetic oligonucleotide
  Sense strand starting at position 3841 of SEQ ID NO: 585539
cugauaaugcugcaaacaa

SEQ ID NO: 647997 - RNA, 19 nt, Artificial Sequence
  Description of Artificial Sequence: Synthetic oligonucleotide
  Antisense strand to SEQ ID NO: 647996
uuguuugcagcauuaucag

SEQ ID NO: 647998 - RNA, 19 nt, Artificial Sequence
  Description of Artificial Sequence: Synthetic oligonucleotide
  Sense strand starting at position 3883 of SEQ ID NO: 585539
gcugcaaagccaugaggau

SEQ ID NO: 647999 - RNA, 19 nt, Artificial Sequence
  Description of Artificial Sequence: Synthetic oligonucleotide
  Antisense strand to SEQ ID NO: 647998
auccucauggcuuugcagc

SEQ ID NO: 648000 - RNA, 19 nt, Artificial Sequence
  Description of Artificial Sequence: Synthetic oligonucleotide
  Sense strand starting at position 3912 of SEQ ID NO: 585539
uucccaaguccaugaggaa

SEQ ID NO: 648001 - RNA, 19 nt, Artificial Sequence
  Description of Artificial Sequence: Synthetic oligonucleotide
  Antisense strand to SEQ ID NO: 648000
uuccucauggacuugggaa

SEQ ID NO: 648002 - RNA, 19 nt, Artificial Sequence
  Description of Artificial Sequence: Synthetic oligonucleotide
  Sense strand starting at position 8 of SEQ ID NO: 585540
gcaucauucguacaacuaa

SEQ ID NO: 648003 - RNA, 19 nt, Artificial Sequence
  Description of Artificial Sequence: Synthetic oligonucleotide
  Antisense strand to SEQ ID NO: 648002
uuaguuguacgaaugaugc

SEQ ID NO: 648004 - RNA, 19 nt, Artificial Sequence
  Description of Artificial Sequence: Synthetic oligonucleotide
  Sense strand starting at position 68 of SEQ ID NO: 585540
aguguaguaagacaugcua

SEQ ID NO: 648005 - RNA, 19 nt, Artificial Sequence
  Description of Artificial Sequence: Synthetic oligonucleotide
  Antisense strand to SEQ ID NO: 648004
uagcaugucuuacuacacu

SEQ ID NO: 648006 - RNA, 19 nt, Artificial Sequence
  Description of Artificial Sequence: Synthetic oligonucleotide
  Sense strand starting at position 109 of SEQ ID NO: 585540
caguuaagagccugugauc

SEQ ID NO: 648007 - RNA, 19 nt, Artificial Sequence
  Description of Artificial Sequence: Synthetic oligonucleotide
  Antisense strand to SEQ ID NO: 648006
gaucacaggcucuuaacug

SEQ ID NO: 648008 - RNA, 19 nt, Artificial Sequence
  Description of Artificial Sequence: Synthetic oligonucleotide
  Sense strand starting at position 150 of SEQ ID NO: 585540
auaugauaaugaggagaau

SEQ ID NO: 648009 - RNA, 19 nt, Artificial Sequence
  Description of Artificial Sequence: Synthetic oligonucleotide
  Antisense strand to SEQ ID NO: 648008
auucuccucauuaucauau

SEQ ID NO: 648010 - RNA, 19 nt, Artificial Sequence
  Description of Artificial Sequence: Synthetic oligonucleotide
  Sense strand starting at position 165 of SEQ ID NO: 585540
gaauaaaggcucuggagca

SEQ ID NO: 648011 - RNA, 19 nt, Artificial Sequence
  Description of Artificial Sequence: Synthetic oligonucleotide
  Antisense strand to SEQ ID NO: 648010
ugcuccagagccuuuauuc

SEQ ID NO: 648012 - RNA, 19 nt, Artificial Sequence
  Description of Artificial Sequence: Synthetic oligonucleotide
  Sense strand starting at position 293 of SEQ ID NO: 585540
uacaauauaugguaggaua

SEQ ID NO: 648013 - RNA, 19 nt, Artificial Sequence
  Description of Artificial Sequence: Synthetic oligonucleotide
  Antisense strand to SEQ ID NO: 648012
uauccuaccauauauugua

SEQ ID NO: 648014 - RNA, 19 nt, Artificial Sequence
  Description of Artificial Sequence: Synthetic oligonucleotide
  Sense strand starting at position 296 of SEQ ID NO: 585540
aauauaugguaggauacaa

SEQ ID NO: 648015 - RNA, 19 nt, Artificial Sequence
  Description of Artificial Sequence: Synthetic oligonucleotide
  Antisense strand to SEQ ID NO: 648014
uuguauccuaccauauauu

SEQ ID NO: 648016 - RNA, 19 nt, Artificial Sequence
  Description of Artificial Sequence: Synthetic oligonucleotide
  Sense strand starting at position 667 of SEQ ID NO: 585540
acaggcaucuuaugaauuu

SEQ ID NO: 648017 - RNA, 19 nt, Artificial Sequence
  Description of Artificial Sequence: Synthetic oligonucleotide
  Antisense strand to SEQ ID NO: 648016
aaauucauaagaugccugu

SEQ ID NO: 648018 - RNA, 19 nt, Artificial Sequence
  Description of Artificial Sequence: Synthetic oligonucleotide
  Sense strand starting at position 718 of SEQ ID NO: 585540
acaugugcuucucugaauu

SEQ ID NO: 648019 - RNA, 19 nt, Artificial Sequence
  Description of Artificial Sequence: Synthetic oligonucleotide
  Antisense strand to SEQ ID NO: 648018
aauucagagaagcacaugu

SEQ ID NO: 648020 - RNA, 19 nt, Artificial Sequence
  Description of Artificial Sequence: Synthetic oligonucleotide
  Sense strand starting at position 849 of SEQ ID NO: 585540
cuaagagucuucccacaag

SEQ ID NO: 648021 - RNA, 19 nt, Artificial Sequence
  Description of Artificial Sequence: Synthetic oligonucleotide
  Antisense strand to SEQ ID NO: 648020
cuugugggaagacucuuag

SEQ ID NO: 648022 - RNA, 19 nt, Artificial Sequence
  Description of Artificial Sequence: Synthetic oligonucleotide
  Sense strand starting at position 852 of SEQ ID NO: 585540
agagucuucccacaaggca

SEQ ID NO: 648023 - RNA, 19 nt, Artificial Sequence
  Description of Artificial Sequence: Synthetic oligonucleotide
  Antisense strand to SEQ ID NO: 648022
ugccuugugggaagacucu

SEQ ID NO: 648024 - RNA, 19 nt, Artificial Sequence
  Description of Artificial Sequence: Synthetic oligonucleotide
  Sense strand starting at position 1101 of SEQ ID NO: 585540
auauaaucccucggcaaac

SEQ ID NO: 648025 - RNA, 19 nt, Artificial Sequence
  Description of Artificial Sequence: Synthetic oligonucleotide
  Antisense strand to SEQ ID NO: 648024
guuugccgagggauuauau

SEQ ID NO: 648026 - RNA, 19 nt, Artificial Sequence
  Description of Artificial Sequence: Synthetic oligonucleotide
  Sense strand starting at position 1129 of SEQ ID NO: 585540
gccaaugaagugcacuauu

SEQ ID NO: 648027 - RNA, 19 nt, Artificial Sequence
  Description of Artificial Sequence: Synthetic oligonucleotide
  Antisense strand to SEQ ID NO: 648026
aauagugcacuucauuggc

SEQ ID NO: 648028 - RNA, 19 nt, Artificial Sequence
  Description of Artificial Sequence: Synthetic oligonucleotide
  Sense strand starting at position 1224 of SEQ ID NO: 585540
cggcccuuccaggaucaaa

SEQ ID NO: 648029 - RNA, 19 nt, Artificial Sequence
  Description of Artificial Sequence: Synthetic oligonucleotide
  Antisense strand to SEQ ID NO: 648028
uuugauccuggaagggccg

SEQ ID NO: 648030 - RNA, 19 nt, Artificial Sequence
  Description of Artificial Sequence: Synthetic oligonucleotide
  Sense strand starting at position 1446 of SEQ ID NO: 585540
aggaaauuccaucggaacu

SEQ ID NO: 648031 - RNA, 19 nt, Artificial Sequence
  Description of Artificial Sequence: Synthetic oligonucleotide
  Antisense strand to SEQ ID NO: 648030
aguuccgauggaauuuccu

SEQ ID NO: 648032 - RNA, 19 nt, Artificial Sequence
  Description of Artificial Sequence: Synthetic oligonucleotide
  Sense strand starting at position 2058 of SEQ ID NO: 585540
ccaguucgcgcgguggaaa

SEQ ID NO: 648033 - RNA, 19 nt, Artificial Sequence
  Description of Artificial Sequence: Synthetic oligonucleotide
  Antisense strand to SEQ ID NO: 648032
uuuccaccgcgcgaacugg

SEQ ID NO: 648034 - RNA, 19 nt, Artificial Sequence
  Description of Artificial Sequence: Synthetic oligonucleotide
  Sense strand starting at position 2410 of SEQ ID NO: 585540
gccugagacaucugggauu

SEQ ID NO: 648035 - RNA, 19 nt, Artificial Sequence
  Description of Artificial Sequence: Synthetic oligonucleotide
  Antisense strand to SEQ ID NO: 648034
aaucccagaugucucaggc

SEQ ID NO: 648036 - RNA, 19 nt, Artificial Sequence
  Description of Artificial Sequence: Synthetic oligonucleotide
  Sense strand starting at position 2569 of SEQ ID NO: 585540
gguaauugcuuccucuuau

SEQ ID NO: 648037 - RNA, 19 nt, Artificial Sequence
  Description of Artificial Sequence: Synthetic oligonucleotide
  Antisense strand to SEQ ID NO: 648036
auaagaggaagcaauuacc

SEQ ID NO: 648038 - RNA, 19 nt, Artificial Sequence
  Description of Artificial Sequence: Synthetic oligonucleotide
  Sense strand starting at position 2570 of SEQ ID NO: 585540
guaauugcuuccucuuaug

SEQ ID NO: 648039 - RNA, 19 nt, Artificial Sequence
  Description of Artificial Sequence: Synthetic oligonucleotide
  Antisense strand to SEQ ID NO: 648038
cauaagaggaagcaauuac

SEQ ID NO: 648040 - RNA, 19 nt, Artificial Sequence
  Description of Artificial Sequence: Synthetic oligonucleotide
  Sense strand starting at position 2659 of SEQ ID NO: 585540
acaucaucguuucuggcaa

SEQ ID NO: 648041 - RNA, 19 nt, Artificial Sequence
  Description of Artificial Sequence: Synthetic oligonucleotide
  Antisense strand to SEQ ID NO: 648040
uugccagaaacgaugaugu

SEQ ID NO: 648042 - RNA, 19 nt, Artificial Sequence
  Description of Artificial Sequence: Synthetic oligonucleotide
  Sense strand starting at position 2666 of SEQ ID NO: 585540
cguuucuggcaauaaauga

SEQ ID NO: 648043 - RNA, 19 nt, Artificial Sequence
  Description of Artificial Sequence: Synthetic oligonucleotide
  Antisense strand to SEQ ID NO: 648042
ucauuuauugccagaaacg

SEQ ID NO: 648044 - RNA, 19 nt, Artificial Sequence
  Description of Artificial Sequence: Synthetic oligonucleotide
  Sense strand starting at position 2760 of SEQ ID NO: 585540
ugguguaugaccugugaau

SEQ ID NO: 648045 - RNA, 19 nt, Artificial Sequence
  Description of Artificial Sequence: Synthetic oligonucleotide
  Antisense strand to SEQ ID NO: 648044
auucacaggucauacacca

SEQ ID NO: 648046 - RNA, 19 nt, Artificial Sequence
  Description of Artificial Sequence: Synthetic oligonucleotide
  Sense strand starting at position 2762 of SEQ ID NO: 585540
guguaugaccugugaaugu

SEQ ID NO: 648047 - RNA, 19 nt, Artificial Sequence
  Description of Artificial Sequence: Synthetic oligonucleotide
  Antisense strand to SEQ ID NO: 648046
acauucacaggucauacac

SEQ ID NO: 648048 - RNA, 19 nt, Artificial Sequence
  Description of Artificial Sequence: Synthetic oligonucleotide
  Sense strand starting at position 2771 of SEQ ID NO: 585540
cugugaauguucucagcaa

SEQ ID NO: 648049 - RNA, 19 nt, Artificial Sequence
  Description of Artificial Sequence: Synthetic oligonucleotide
  Antisense strand to SEQ ID NO: 648048
uugcugagaacauucacag

SEQ ID NO: 648050 - RNA, 19 nt, Artificial Sequence
  Description of Artificial Sequence: Synthetic oligonucleotide
  Sense strand starting at position 2845 of SEQ ID NO: 585540
aguaucugucugugaguug

SEQ ID NO: 648051 - RNA, 19 nt, Artificial Sequence
  Description of Artificial Sequence: Synthetic oligonucleotide
  Antisense strand to SEQ ID NO: 648050
caacucacagacagauacu

SEQ ID NO: 648052 - RNA, 19 nt, Artificial Sequence
  Description of Artificial Sequence: Synthetic oligonucleotide
  Sense strand starting at position 2852 of SEQ ID NO: 585540
gucugugaguuguuuaaua

SEQ ID NO: 648053 - RNA, 19 nt, Artificial Sequence
  Description of Artificial Sequence: Synthetic oligonucleotide
  Antisense strand to SEQ ID NO: 648052
uauuaaacaacucacagac

SEQ ID NO: 648054 - RNA, 19 nt, Artificial Sequence
  Description of Artificial Sequence: Synthetic oligonucleotide
  Sense strand starting at position 2854 of SEQ ID NO: 585540
cugugaguuguuuaauacc

SEQ ID NO: 648055 - RNA, 19 nt, Artificial Sequence
  Description of Artificial Sequence: Synthetic oligonucleotide
  Antisense strand to SEQ ID NO: 648054
gguauuaaacaacucacag

SEQ ID NO: 648056 - RNA, 19 nt, Artificial Sequence
  Description of Artificial Sequence: Synthetic oligonucleotide
  Sense strand starting at position 2948 of SEQ ID NO: 585540
cggaauuccuggccucgaa

SEQ ID NO: 648057 - RNA, 19 nt, Artificial Sequence
  Description of Artificial Sequence: Synthetic oligonucleotide
  Antisense strand to SEQ ID NO: 648056
uucgaggccaggaauuccg

SEQ ID NO: 648058 - RNA, 19 nt, Artificial Sequence
  Description of Artificial Sequence: Synthetic oligonucleotide
  Sense strand starting at position 3040 of SEQ ID NO: 585540
ugaauuugcuuguauuuag

SEQ ID NO: 648059 - RNA, 19 nt, Artificial Sequence
  Description of Artificial Sequence: Synthetic oligonucleotide
  Antisense strand to SEQ ID NO: 648058
cuaaauacaagcaaauuca

SEQ ID NO: 648060 - RNA, 19 nt, Artificial Sequence
  Description of Artificial Sequence: Synthetic oligonucleotide
  Sense strand starting at position 3226 of SEQ ID NO: 585540
uuaauaguuuguuugccua

SEQ ID NO: 648061 - RNA, 19 nt, Artificial Sequence
  Description of Artificial Sequence: Synthetic oligonucleotide
  Antisense strand to SEQ ID NO: 648060
uaggcaaacaaacuauuaa

SEQ ID NO: 648062 - RNA, 19 nt, Artificial Sequence
  Description of Artificial Sequence: Synthetic oligonucleotide
  Sense strand starting at position 3229 of SEQ ID NO: 585540
auaguuuguuugccuauua

SEQ ID NO: 648063 - RNA, 19 nt, Artificial Sequence
  Description of Artificial Sequence: Synthetic oligonucleotide
  Antisense strand to SEQ ID NO: 648062
uaauaggcaaacaaacuau

SEQ ID NO: 648064 - RNA, 19 nt, Artificial Sequence
  Description of Artificial Sequence: Synthetic oligonucleotide
  Sense strand starting at position 3285 of SEQ ID NO: 585540
guaaauguugaaugaauag

SEQ ID NO: 648065 - RNA, 19 nt, Artificial Sequence
  Description of Artificial Sequence: Synthetic oligonucleotide
  Antisense strand to SEQ ID NO: 648064
cuauucauucaacauuuac

SEQ ID NO: 648066 - RNA, 19 nt, Artificial Sequence
  Description of Artificial Sequence: Synthetic oligonucleotide
  Sense strand starting at position 3444 of SEQ ID NO: 585540
ggcauaaucucagccagcu

SEQ ID NO: 648067 - RNA, 19 nt, Artificial Sequence
  Description of Artificial Sequence: Synthetic oligonucleotide
  Antisense strand to SEQ ID NO: 648066
agcuggcugagauuaugcc

SEQ ID NO: 648068 - RNA, 19 nt, Artificial Sequence
  Description of Artificial Sequence: Synthetic oligonucleotide
  Sense strand starting at position 3712 of SEQ ID NO: 585540
gggcauguuuaguuucaag

SEQ ID NO: 648069 - RNA, 19 nt, Artificial Sequence
  Description of Artificial Sequence: Synthetic oligonucleotide
  Antisense strand to SEQ ID NO: 648068
cuugaaacuaaacaugccc

SEQ ID NO: 648070 - RNA, 19 nt, Artificial Sequence
  Description of Artificial Sequence: Synthetic oligonucleotide
  Sense strand starting at position 3750 of SEQ ID NO: 585540
agaucccuugacugaguaa

SEQ ID NO: 648071 - RNA, 19 nt, Artificial Sequence
  Description of Artificial Sequence: Synthetic oligonucleotide
  Antisense strand to SEQ ID NO: 648070
uuacucagucaagggaucu

SEQ ID NO: 648072 - RNA, 19 nt, Artificial Sequence
  Description of Artificial Sequence: Synthetic oligonucleotide
  Sense strand starting at position 3753 of SEQ ID NO: 585540
ucccuugacugaguaauaa

SEQ ID NO: 648073 - RNA, 19 nt, Artificial Sequence
  Description of Artificial Sequence: Synthetic oligonucleotide
  Antisense strand to SEQ ID NO: 648072
uuauuacucagucaaggga

SEQ ID NO: 648074 - RNA, 19 nt, Artificial Sequence
  Description of Artificial Sequence: Synthetic oligonucleotide
  Sense strand starting at position 3779 of SEQ ID NO: 585540
gucuuuguucagggagcau

SEQ ID NO: 648075 - RNA, 19 nt, Artificial Sequence
  Description of Artificial Sequence: Synthetic oligonucleotide
  Antisense strand to SEQ ID NO: 648074
augcucccugaacaaagac

SEQ ID NO: 648076 - RNA, 19 nt, Artificial Sequence
  Description of Artificial Sequence: Synthetic oligonucleotide
  Sense strand starting at position 3805 of SEQ ID NO: 585540
gggauucuguccuuuccuu

SEQ ID NO: 648077 - RNA, 19 nt, Artificial Sequence
  Description of Artificial Sequence: Synthetic oligonucleotide
  Antisense strand to SEQ ID NO: 648076
aaggaaaggacagaauccc

SEQ ID NO: 648078 - RNA, 19 nt, Artificial Sequence
  Description of Artificial Sequence: Synthetic oligonucleotide
  Sense strand starting at position 3812 of SEQ ID NO: 585540
uguccuuuccuugaagaua

SEQ ID NO: 648079 - RNA, 19 nt, Artificial Sequence
  Description of Artificial Sequence: Synthetic oligonucleotide
  Antisense strand to SEQ ID NO: 648078
uaucuucaaggaaaggaca

SEQ ID NO: 648080 - RNA, 19 nt, Artificial Sequence
  Description of Artificial Sequence: Synthetic oligonucleotide
  Sense strand starting at position 3831 of SEQ ID NO: 585540
auggguaaguaguacauuu

SEQ ID NO: 648081 - RNA, 19 nt, Artificial Sequence
  Description of Artificial Sequence: Synthetic oligonucleotide
  Antisense strand to SEQ ID NO: 648080
aaauguacuacuuacccau

SEQ ID NO: 648082 - RNA, 19 nt, Artificial Sequence
  Description of Artificial Sequence: Synthetic oligonucleotide
  Sense strand starting at position 278 of SEQ ID NO: 585541
augugaaaguguguaaucu

SEQ ID NO: 648083 - RNA, 19 nt, Artificial Sequence
  Description of Artificial Sequence: Synthetic oligonucleotide
  Antisense strand to SEQ ID NO: 648082
agauuacacacuuucacau

SEQ ID NO: 648084 - RNA, 19 nt, Artificial Sequence
  Description of Artificial Sequence: Synthetic oligonucleotide
  Sense strand starting at position 282 of SEQ ID NO: 585541
gaaaguguguaaucuuuau

SEQ ID NO: 648085 - RNA, 19 nt, Artificial Sequence
  Description of Artificial Sequence: Synthetic oligonucleotide
  Antisense strand to SEQ ID NO: 648084
auaaagauuacacacuuuc

SEQ ID NO: 648086 - RNA, 19 nt, Artificial Sequence
  Description of Artificial Sequence: Synthetic oligonucleotide
  Sense strand starting at position 286 of SEQ ID NO: 585541
guguguaaucuuuauuagc

SEQ ID NO: 648087 - RNA, 19 nt, Artificial Sequence
  Description of Artificial Sequence: Synthetic oligonucleotide
  Antisense strand to SEQ ID NO: 648086
gcuaauaaagauuacacac

SEQ ID NO: 648088 - RNA, 19 nt, Artificial Sequence
  Description of Artificial Sequence: Synthetic oligonucleotide
  Sense strand starting at position 313 of SEQ ID NO: 585541
uaaaguaaucuaggaaguc

SEQ ID NO: 648089 - RNA, 19 nt, Artificial Sequence
  Description of Artificial Sequence: Synthetic oligonucleotide
  Antisense strand to SEQ ID NO: 648088
gacuuccuagauuacuuua

SEQ ID NO: 648090 - RNA, 19 nt, Artificial Sequence
  Description of Artificial Sequence: Synthetic oligonucleotide
  Sense strand starting at position 424 of SEQ ID NO: 585541
acugauaaguggcuuuauu

SEQ ID NO: 648091 - RNA, 19 nt, Artificial Sequence
  Description of Artificial Sequence: Synthetic oligonucleotide
  Antisense strand to SEQ ID NO: 648090
aauaaagccacuuaucagu

SEQ ID NO: 648092 - RNA, 19 nt, Artificial Sequence
  Description of Artificial Sequence: Synthetic oligonucleotide
  Sense strand starting at position 555 of SEQ ID NO: 585541
uuuaaacauccaggaguuc

SEQ ID NO: 648093 - RNA, 19 nt, Artificial Sequence
  Description of Artificial Sequence: Synthetic oligonucleotide
  Antisense strand to SEQ ID NO: 648092
gaacuccuggauguuuaaa

SEQ ID NO: 648094 - RNA, 19 nt, Artificial Sequence
  Description of Artificial Sequence: Synthetic oligonucleotide
  Sense strand starting at position 602 of SEQ ID NO: 585541
acauuccuggagugucaaa

SEQ ID NO: 648095 - RNA, 19 nt, Artificial Sequence
  Description of Artificial Sequence: Synthetic oligonucleotide
  Antisense strand to SEQ ID NO: 648094
uuugacacuccaggaaugu

SEQ ID NO: 648096 - RNA, 19 nt, Artificial Sequence
  Description of Artificial Sequence: Synthetic oligonucleotide
  Sense strand starting at position 665 of SEQ ID NO: 585541
uguguaugagaucagagcu

SEQ ID NO: 648097 - RNA, 19 nt, Artificial Sequence
  Description of Artificial Sequence: Synthetic oligonucleotide
  Antisense strand to SEQ ID NO: 648096
agcucugaucucauacaca

SEQ ID NO: 648098 - RNA, 19 nt, Artificial Sequence
  Description of Artificial Sequence: Synthetic oligonucleotide
  Sense strand starting at position 689 of SEQ ID NO: 585541
cccggucaacuguggagaa

SEQ ID NO: 648099 - RNA, 19 nt, Artificial Sequence
  Description of Artificial Sequence: Synthetic oligonucleotide
  Antisense strand to SEQ ID NO: 648098
uucuccacaguugaccggg

SEQ ID NO: 648100 - RNA, 19 nt, Artificial Sequence
  Description of Artificial Sequence: Synthetic oligonucleotide
  Sense strand starting at position 918 of SEQ ID NO: 585541
ggcugagacuaaguuauuc

SEQ ID NO: 648101 - RNA, 19 nt, Artificial Sequence
  Description of Artificial Sequence: Synthetic oligonucleotide
  Antisense strand to SEQ ID NO: 648100
gaauaacuuagucucagcc

SEQ ID NO: 648102 - RNA, 19 nt, Artificial Sequence
  Description of Artificial Sequence: Synthetic oligonucleotide
  Sense strand starting at position 1075 of SEQ ID NO: 585541
uuuccuuucucccucgaga

SEQ ID NO: 648103 - RNA, 19 nt, Artificial Sequence
  Description of Artificial Sequence: Synthetic oligonucleotide
  Antisense strand to SEQ ID NO: 648102
ucucgagggagaaaggaaa

SEQ ID NO: 648104 - RNA, 19 nt, Artificial Sequence
  Description of Artificial Sequence: Synthetic oligonucleotide
  Sense strand starting at position 1077 of SEQ ID NO: 585541
uccuuucucccucgagaga

SEQ ID NO: 648105 - RNA, 19 nt, Artificial Sequence
  Description of Artificial Sequence: Synthetic oligonucleotide
  Antisense strand to SEQ ID NO: 648104
ucucucgagggagaaagga

SEQ ID NO: 648106 - RNA, 19 nt, Artificial Sequence
  Description of Artificial Sequence: Synthetic oligonucleotide
  Sense strand starting at position 1078 of SEQ ID NO: 585541
ccuuucucccucgagagaa

SEQ ID NO: 648107 - RNA, 19 nt, Artificial Sequence
  Description of Artificial Sequence: Synthetic oligonucleotide
  Antisense strand to SEQ ID NO: 648106
uucucucgagggagaaagg

SEQ ID NO: 648108 - RNA, 19 nt, Artificial Sequence
  Description of Artificial Sequence: Synthetic oligonucleotide
  Sense strand starting at position 1150 of SEQ ID NO: 585541
gcaucaugggccuacaauu

SEQ ID NO: 648109 - RNA, 19 nt, Artificial Sequence
  Description of Artificial Sequence: Synthetic oligonucleotide
  Antisense strand to SEQ ID NO: 648108
aauuguaggcccaugaugc

SEQ ID NO: 648110 - RNA, 19 nt, Artificial Sequence
  Description of Artificial Sequence: Synthetic oligonucleotide
  Sense strand starting at position 1838 of SEQ ID NO: 585541
ggagaucucccgcagagga

SEQ ID NO: 648111 - RNA, 19 nt, Artificial Sequence
  Description of Artificial Sequence: Synthetic oligonucleotide
  Antisense strand to SEQ ID NO: 648110
uccucugcgggagaucucc

SEQ ID NO: 648112 - RNA, 19 nt, Artificial Sequence
  Description of Artificial Sequence: Synthetic oligonucleotide
  Sense strand starting at position 2085 of SEQ ID NO: 585541
ccagaaugucgucacucau

SEQ ID NO: 648113 - RNA, 19 nt, Artificial Sequence
  Description of Artificial Sequence: Synthetic oligonucleotide
  Antisense strand to SEQ ID NO: 648112
augagugacgacauucugg

SEQ ID NO: 648114 - RNA, 19 nt, Artificial Sequence
  Description of Artificial Sequence: Synthetic oligonucleotide
  Sense strand starting at position 2305 of SEQ ID NO: 585541
uguucuuggcuguaaauua

SEQ ID NO: 648115 - RNA, 19 nt, Artificial Sequence
  Description of Artificial Sequence: Synthetic oligonucleotide
  Antisense strand to SEQ ID NO: 648114
uaauuuacagccaagaaca

SEQ ID NO: 648116 - RNA, 19 nt, Artificial Sequence
  Description of Artificial Sequence: Synthetic oligonucleotide
  Sense strand starting at position 2483 of SEQ ID NO: 585541
aguccaugauccuuagaau

SEQ ID NO: 648117 - RNA, 19 nt, Artificial Sequence
  Description of Artificial Sequence: Synthetic oligonucleotide
  Antisense strand to SEQ ID NO: 648116
auucuaaggaucauggacu

SEQ ID NO: 648118 - RNA, 19 nt, Artificial Sequence
  Description of Artificial Sequence: Synthetic oligonucleotide
  Sense strand starting at position 2484 of SEQ ID NO: 585541
guccaugauccuuagaauu

SEQ ID NO: 648119 - RNA, 19 nt, Artificial Sequence
  Description of Artificial Sequence: Synthetic oligonucleotide
  Antisense strand to SEQ ID NO: 648118
aauucuaaggaucauggac

SEQ ID NO: 648120 - RNA, 19 nt, Artificial Sequence
  Description of Artificial Sequence: Synthetic oligonucleotide
  Sense strand starting at position 2679 of SEQ ID NO: 585541
agcuguugugaggagcaga

SEQ ID NO: 648121 - RNA, 19 nt, Artificial Sequence
  Description of Artificial Sequence: Synthetic oligonucleotide
  Antisense strand to SEQ ID NO: 648120
ucugcuccucacaacagcu

SEQ ID NO: 648122 - RNA, 19 nt, Artificial Sequence
  Description of Artificial Sequence: Synthetic oligonucleotide
  Sense strand starting at position 2692 of SEQ ID NO: 585541
agcagacgugaucaucuau

SEQ ID NO: 648123 - RNA, 19 nt, Artificial Sequence
  Description of Artificial Sequence: Synthetic oligonucleotide
  Antisense strand to SEQ ID NO: 648122
auagaugaucacgucugcu

SEQ ID NO: 648124 - RNA, 19 nt, Artificial Sequence
  Description of Artificial Sequence: Synthetic oligonucleotide
  Sense strand starting at position 2698 of SEQ ID NO: 585541
cgugaucaucuauggagag

SEQ ID NO: 648125 - RNA, 19 nt, Artificial Sequence
  Description of Artificial Sequence: Synthetic oligonucleotide
  Antisense strand to SEQ ID NO: 648124
cucuccauagaugaucacg

SEQ ID NO: 648126 - RNA, 19 nt, Artificial Sequence
  Description of Artificial Sequence: Synthetic oligonucleotide
  Sense strand starting at position 2714 of SEQ ID NO: 585541
gagcauguauauuugcuaa

SEQ ID NO: 648127 - RNA, 19 nt, Artificial Sequence
  Description of Artificial Sequence: Synthetic oligonucleotide
  Antisense strand to SEQ ID NO: 648126
uuagcaaauauacaugcuc

SEQ ID NO: 648128 - RNA, 19 nt, Artificial Sequence
  Description of Artificial Sequence: Synthetic oligonucleotide
  Sense strand starting at position 2716 of SEQ ID NO: 585541
gcauguauauuugcuaaua

SEQ ID NO: 648129 - RNA, 19 nt, Artificial Sequence
  Description of Artificial Sequence: Synthetic oligonucleotide
  Antisense strand to SEQ ID NO: 648128
uauuagcaaauauacaugc

SEQ ID NO: 648130 - RNA, 19 nt, Artificial Sequence
  Description of Artificial Sequence: Synthetic oligonucleotide
  Sense strand starting at position 2744 of SEQ ID NO: 585541
ugcgaugaaugauuacaau

SEQ ID NO: 648131 - RNA, 19 nt, Artificial Sequence
  Description of Artificial Sequence: Synthetic oligonucleotide
  Antisense strand to SEQ ID NO: 648130
auuguaaucauucaucgca

SEQ ID NO: 648132 - RNA, 19 nt, Artificial Sequence
  Description of Artificial Sequence: Synthetic oligonucleotide
  Sense strand starting at position 2791 of SEQ ID NO: 585541
ggguaagugauauauccuu

SEQ ID NO: 648133 - RNA, 19 nt, Artificial Sequence
  Description of Artificial Sequence: Synthetic oligonucleotide
  Antisense strand to SEQ ID NO: 648132
aaggauauaucacuuaccc

SEQ ID NO: 648134 - RNA, 19 nt, Artificial Sequence
  Description of Artificial Sequence: Synthetic oligonucleotide
  Sense strand starting at position 2854 of SEQ ID NO: 585541
gaguaagugagcuagacuc

SEQ ID NO: 648135 - RNA, 19 nt, Artificial Sequence
  Description of Artificial Sequence: Synthetic oligonucleotide
  Antisense strand to SEQ ID NO: 648134
gagucuagcucacuuacuc

SEQ ID NO: 648136 - RNA, 19 nt, Artificial Sequence
  Description of Artificial Sequence: Synthetic oligonucleotide
  Sense strand starting at position 2856 of SEQ ID NO: 585541
guaagugagcuagacucaa

SEQ ID NO: 648137 - RNA, 19 nt, Artificial Sequence
  Description of Artificial Sequence: Synthetic oligonucleotide
  Antisense strand to SEQ ID NO: 648136
uugagucuagcucacuuac

SEQ ID NO: 648138 - RNA, 19 nt, Artificial Sequence
  Description of Artificial Sequence: Synthetic oligonucleotide
  Sense strand starting at position 2891 of SEQ ID NO: 585541
auguauauucuaggaguug

SEQ ID NO: 648139 - RNA, 19 nt, Artificial Sequence
  Description of Artificial Sequence: Synthetic oligonucleotide
  Antisense strand to SEQ ID NO: 648138
caacuccuagaauauacau

SEQ ID NO: 648140 - RNA, 19 nt, Artificial Sequence
  Description of Artificial Sequence: Synthetic oligonucleotide
  Sense strand starting at position 2897 of SEQ ID NO: 585541
auucuaggaguugacgauu

SEQ ID NO: 648141 - RNA, 19 nt, Artificial Sequence
  Description of Artificial Sequence: Synthetic oligonucleotide
  Antisense strand to SEQ ID NO: 648140
aaucgucaacuccuagaau

SEQ ID NO: 648142 - RNA, 19 nt, Artificial Sequence
  Description of Artificial Sequence: Synthetic oligonucleotide
  Sense strand starting at position 2915 of SEQ ID NO: 585541
uagaaagguccuggugauc

SEQ ID NO: 648143 - RNA, 19 nt, Artificial Sequence
  Description of Artificial Sequence: Synthetic oligonucleotide
  Antisense strand to SEQ ID NO: 648142
gaucaccaggaccuuucua

SEQ ID NO: 648144 - RNA, 19 nt, Artificial Sequence
  Description of Artificial Sequence: Synthetic oligonucleotide
  Sense strand starting at position 2920 of SEQ ID NO: 585541
agguccuggugaucacaua

SEQ ID NO: 648145 - RNA, 19 nt, Artificial Sequence
  Description of Artificial Sequence: Synthetic oligonucleotide
  Antisense strand to SEQ ID NO: 648144
uaugugaucaccaggaccu

SEQ ID NO: 648146 - RNA, 19 nt, Artificial Sequence
  Description of Artificial Sequence: Synthetic oligonucleotide
  Sense strand starting at position 2976 of SEQ ID NO: 585541
cagagaaauuuagguggca

SEQ ID NO: 648147 - RNA, 19 nt, Artificial Sequence
  Description of Artificial Sequence: Synthetic oligonucleotide
  Antisense strand to SEQ ID NO: 648146
ugccaccuaaauuucucug

SEQ ID NO: 648148 - RNA, 19 nt, Artificial Sequence
  Description of Artificial Sequence: Synthetic oligonucleotide
  Sense strand starting at position 3071 of SEQ ID NO: 585541
ccaaaugauuagggaggaa

SEQ ID NO: 648149 - RNA, 19 nt, Artificial Sequence
  Description of Artificial Sequence: Synthetic oligonucleotide
  Antisense strand to SEQ ID NO: 648148
uuccucccuaaucauuugg

SEQ ID NO: 648150 - RNA, 19 nt, Artificial Sequence
  Description of Artificial Sequence: Synthetic oligonucleotide
  Sense strand starting at position 3488 of SEQ ID NO: 585541
ggaaguuacugauccuguu

SEQ ID NO: 648151 - RNA, 19 nt, Artificial Sequence
  Description of Artificial Sequence: Synthetic oligonucleotide
  Antisense strand to SEQ ID NO: 648150
aacaggaucaguaacuucc

SEQ ID NO: 648152 - RNA, 19 nt, Artificial Sequence
  Description of Artificial Sequence: Synthetic oligonucleotide
  Sense strand starting at position 3839 of SEQ ID NO: 585541
cagcaaauagagcgaauau

SEQ ID NO: 648153 - RNA, 19 nt, Artificial Sequence
  Description of Artificial Sequence: Synthetic oligonucleotide
  Antisense strand to SEQ ID NO: 648152
auauucgcucuauuugcug

SEQ ID NO: 648154 - RNA, 19 nt, Artificial Sequence
  Description of Artificial Sequence: Synthetic oligonucleotide
  Sense strand starting at position 3849 of SEQ ID NO: 585541
agcgaauauugaccucaca

SEQ ID NO: 648155 - RNA, 19 nt, Artificial Sequence
  Description of Artificial Sequence: Synthetic oligonucleotide
  Antisense strand to SEQ ID NO: 648154
ugugaggucaauauucgcu

SEQ ID NO: 648156 - RNA, 19 nt, Artificial Sequence
  Description of Artificial Sequence: Synthetic oligonucleotide
  Sense strand starting at position 3867 of SEQ ID NO: 585541
aggguaguggucuggugaa

SEQ ID NO: 648157 - RNA, 19 nt, Artificial Sequence
  Description of Artificial Sequence: Synthetic oligonucleotide
  Antisense strand to SEQ ID NO: 648156
uucaccagaccacuacccu

SEQ ID NO: 648158 - RNA, 19 nt, Artificial Sequence
  Description of Artificial Sequence: Synthetic oligonucleotide
  Sense strand starting at position 3873 of SEQ ID NO: 585541
guggucuggugaaaggauu

SEQ ID NO: 648159 - RNA, 19 nt, Artificial Sequence
  Description of Artificial Sequence: Synthetic oligonucleotide
  Antisense strand to SEQ ID NO: 648158
aauccuuucaccagaccac

SEQ ID NO: 648160 - RNA, 19 nt, Artificial Sequence
  Description of Artificial Sequence: Synthetic oligonucleotide
  Sense strand starting at position 3908 of SEQ ID NO: 585541
auaguaacugcuuagauag

SEQ ID NO: 648161 - RNA, 19 nt, Artificial Sequence
  Description of Artificial Sequence: Synthetic oligonucleotide
  Antisense strand to SEQ ID NO: 648160
cuaucuaagcaguuacuau

SEQ ID NO: 648162 - RNA, 19 nt, Artificial Sequence
  Description of Artificial Sequence: Synthetic oligonucleotide
  Sense strand starting at position 247 of SEQ ID NO: 585542
guauaagacuucgucucca

SEQ ID NO: 648163 - RNA, 19 nt, Artificial Sequence
  Description of Artificial Sequence: Synthetic oligonucleotide
  Antisense strand to SEQ ID NO: 648162
uggagacgaagucuuauac

SEQ ID NO: 648164 - RNA, 19 nt, Artificial Sequence
  Description of Artificial Sequence: Synthetic oligonucleotide
  Sense strand starting at position 278 of SEQ ID NO: 585542
guaucuuuccuagagcuag

SEQ ID NO: 648165 - RNA, 19 nt, Artificial Sequence
  Description of Artificial Sequence: Synthetic oligonucleotide
  Antisense strand to SEQ ID NO: 648164
cuagcucuaggaaagauac

SEQ ID NO: 648166 - RNA, 19 nt, Artificial Sequence
  Description of Artificial Sequence: Synthetic oligonucleotide
  Sense strand starting at position 289 of SEQ ID NO: 585542
agagcuagauagcuuucuu

SEQ ID NO: 648167 - RNA, 19 nt, Artificial Sequence
  Description of Artificial Sequence: Synthetic oligonucleotide
  Antisense strand to SEQ ID NO: 648166
aagaaagcuaucuagcucu

SEQ ID NO: 648168 - RNA, 19 nt, Artificial Sequence
  Description of Artificial Sequence: Synthetic oligonucleotide
  Sense strand starting at position 485 of SEQ ID NO: 585542
cuagguagcuuucuaugga

SEQ ID NO: 648169 - RNA, 19 nt, Artificial Sequence
  Description of Artificial Sequence: Synthetic oligonucleotide
  Antisense strand to SEQ ID NO: 648168
uccauagaaagcuaccuag

SEQ ID NO: 648170 - RNA, 19 nt, Artificial Sequence
  Description of Artificial Sequence: Synthetic oligonucleotide
  Sense strand starting at position 883 of SEQ ID NO: 585542
uugagacuuuggccaaguu

SEQ ID NO: 648171 - RNA, 19 nt, Artificial Sequence
  Description of Artificial Sequence: Synthetic oligonucleotide
  Antisense strand to SEQ ID NO: 648170
aacuuggccaaagucucaa

SEQ ID NO: 648172 - RNA, 19 nt, Artificial Sequence
  Description of Artificial Sequence: Synthetic oligonucleotide
  Sense strand starting at position 906 of SEQ ID NO: 585542
ucacuaaaucgugguaaau

SEQ ID NO: 648173 - RNA, 19 nt, Artificial Sequence
  Description of Artificial Sequence: Synthetic oligonucleotide
  Antisense strand to SEQ ID NO: 648172
auuuaccacgauuuaguga

SEQ ID NO: 648174 - RNA, 19 nt, Artificial Sequence
  Description of Artificial Sequence: Synthetic oligonucleotide
  Sense strand starting at position 949 of SEQ ID NO: 585542
uacuuagggaguuguuaug

SEQ ID NO: 648175 - RNA, 19 nt, Artificial Sequence
  Description of Artificial Sequence: Synthetic oligonucleotide
  Antisense strand to SEQ ID NO: 648174
cauaacaacucccuaagua

SEQ ID NO: 648176 - RNA, 19 nt, Artificial Sequence
  Description of Artificial Sequence: Synthetic oligonucleotide
  Sense strand starting at position 1000 of SEQ ID NO: 585542
ugcacaguaucugucacau

SEQ ID NO: 648177 - RNA, 19 nt, Artificial Sequence
  Description of Artificial Sequence: Synthetic oligonucleotide
  Antisense strand to SEQ ID NO: 648176
augugacagauacugugca

SEQ ID NO: 648178 - RNA, 19 nt, Artificial Sequence
  Description of Artificial Sequence: Synthetic oligonucleotide
  Sense strand starting at position 1017 of SEQ ID NO: 585542
auaguacaugcucaagaua

SEQ ID NO: 648179 - RNA, 19 nt, Artificial Sequence
  Description of Artificial Sequence: Synthetic oligonucleotide
  Antisense strand to SEQ ID NO: 648178
uaucuugagcauguacuau

SEQ ID NO: 648180 - RNA, 19 nt, Artificial Sequence
  Description of Artificial Sequence: Synthetic oligonucleotide
  Sense strand starting at position 1020 of SEQ ID NO: 585542
guacaugcucaagauauau

SEQ ID NO: 648181 - RNA, 19 nt, Artificial Sequence
  Description of Artificial Sequence: Synthetic oligonucleotide
  Antisense strand to SEQ ID NO: 648180
auauaucuugagcauguac

SEQ ID NO: 648182 - RNA, 19 nt, Artificial Sequence
  Description of Artificial Sequence: Synthetic oligonucleotide
  Sense strand starting at position 1137 of SEQ ID NO: 585542
gcacauagucgacagucaa

SEQ ID NO: 648183 - RNA, 19 nt, Artificial Sequence
  Description of Artificial Sequence: Synthetic oligonucleotide
  Antisense strand to SEQ ID NO: 648182
uugacugucgacuaugugc

SEQ ID NO: 648184 - RNA, 19 nt, Artificial Sequence
  Description of Artificial Sequence: Synthetic oligonucleotide
  Sense strand starting at position 1219 of SEQ ID NO: 585542
cuaaaugauguugggcaaa

SEQ ID NO: 648185 - RNA, 19 nt, Artificial Sequence
  Description of Artificial Sequence: Synthetic oligonucleotide
  Antisense strand to SEQ ID NO: 648184
uuugcccaacaucauuuag

SEQ ID NO: 648186 - RNA, 19 nt, Artificial Sequence
  Description of Artificial Sequence: Synthetic oligonucleotide
  Sense strand starting at position 1221 of SEQ ID NO: 585542
aaaugauguugggcaaauc

SEQ ID NO: 648187 - RNA, 19 nt, Artificial Sequence
  Description of Artificial Sequence: Synthetic oligonucleotide
  Antisense strand to SEQ ID NO: 648186
gauuugcccaacaucauuu

SEQ ID NO: 648188 - RNA, 19 nt, Artificial Sequence
  Description of Artificial Sequence: Synthetic oligonucleotide
  Sense strand starting at position 1384 of SEQ ID NO: 585542
ucaccauggugucugauau

SEQ ID NO: 648189 - RNA, 19 nt, Artificial Sequence
  Description of Artificial Sequence: Synthetic oligonucleotide
  Antisense strand to SEQ ID NO: 648188
auaucagacaccaugguga

SEQ ID NO: 648190 - RNA, 19 nt, Artificial Sequence
  Description of Artificial Sequence: Synthetic oligonucleotide
  Sense strand starting at position 1385 of SEQ ID NO: 585542
caccauggugucugauauc

SEQ ID NO: 648191 - RNA, 19 nt, Artificial Sequence
  Description of Artificial Sequence: Synthetic oligonucleotide
  Antisense strand to SEQ ID NO: 648190
gauaucagacaccauggug

SEQ ID NO: 648192 - RNA, 19 nt, Artificial Sequence
  Description of Artificial Sequence: Synthetic oligonucleotide
  Sense strand starting at position 1551 of SEQ ID NO: 585542
uugugcucccguccggaaa

SEQ ID NO: 648193 - RNA, 19 nt, Artificial Sequence
  Description of Artificial Sequence: Synthetic oligonucleotide
  Antisense strand to SEQ ID NO: 648192
uuuccggacgggagcacaa

SEQ ID NO: 648194 - RNA, 19 nt, Artificial Sequence
  Description of Artificial Sequence: Synthetic oligonucleotide
  Sense strand starting at position 1563 of SEQ ID NO: 585542
ccggaaauguugcuccaaa

SEQ ID NO: 648195 - RNA, 19 nt, Artificial Sequence
  Description of Artificial Sequence: Synthetic oligonucleotide
  Antisense strand to SEQ ID NO: 648194
uuuggagcaacauuuccgg

SEQ ID NO: 648196 - RNA, 19 nt, Artificial Sequence
  Description of Artificial Sequence: Synthetic oligonucleotide
  Sense strand starting at position 1591 of SEQ ID NO: 585542
augguauggugaguuuaaa

SEQ ID NO: 648197 - RNA, 19 nt, Artificial Sequence
  Description of Artificial Sequence: Synthetic oligonucleotide
  Antisense strand to SEQ ID NO: 648196
uuuaaacucaccauaccau

SEQ ID NO: 648198 - RNA, 19 nt, Artificial Sequence
  Description of Artificial Sequence: Synthetic oligonucleotide
  Sense strand starting at position 1894 of SEQ ID NO: 585542
ggacacaaacuucgcauaa

SEQ ID NO: 648199 - RNA, 19 nt, Artificial Sequence
  Description of Artificial Sequence: Synthetic oligonucleotide
  Antisense strand to SEQ ID NO: 648198
uuaugcgaaguuugugucc

SEQ ID NO: 648200 - RNA, 19 nt, Artificial Sequence
  Description of Artificial Sequence: Synthetic oligonucleotide
  Sense strand starting at position 2041 of SEQ ID NO: 585542
gagagucaauucucgucga

SEQ ID NO: 648201 - RNA, 19 nt, Artificial Sequence
  Description of Artificial Sequence: Synthetic oligonucleotide
  Antisense strand to SEQ ID NO: 648200
ucgacgagaauugacucuc

SEQ ID NO: 648202 - RNA, 19 nt, Artificial Sequence
  Description of Artificial Sequence: Synthetic oligonucleotide
  Sense strand starting at position 2137 of SEQ ID NO: 585542
gcgcuuuggccuuugagca

SEQ ID NO: 648203 - RNA, 19 nt, Artificial Sequence
  Description of Artificial Sequence: Synthetic oligonucleotide
  Antisense strand to SEQ ID NO: 648202
ugcucaaaggccaaagcgc

SEQ ID NO: 648204 - RNA, 19 nt, Artificial Sequence
  Description of Artificial Sequence: Synthetic oligonucleotide
  Sense strand starting at position 2145 of SEQ ID NO: 585542
gccuuugagcaguaggacu

SEQ ID NO: 648205 - RNA, 19 nt, Artificial Sequence
  Description of Artificial Sequence: Synthetic oligonucleotide
  Antisense strand to SEQ ID NO: 648204
aguccuacugcucaaaggc

SEQ ID NO: 648206 - RNA, 19 nt, Artificial Sequence
  Description of Artificial Sequence: Synthetic oligonucleotide
  Sense strand starting at position 2168 of SEQ ID NO: 585542
ccuaaucugcaaugucagu

SEQ ID NO: 648207 - RNA, 19 nt, Artificial Sequence
  Description of Artificial Sequence: Synthetic oligonucleotide
  Antisense strand to SEQ ID NO: 648206
acugacauugcagauuagg

SEQ ID NO: 648208 - RNA, 19 nt, Artificial Sequence
  Description of Artificial Sequence: Synthetic oligonucleotide
  Sense strand starting at position 2199 of SEQ ID NO: 585542
ucaauaauugugcagugua

SEQ ID NO: 648209 - RNA, 19 nt, Artificial Sequence
  Description of Artificial Sequence: Synthetic oligonucleotide
  Antisense strand to SEQ ID NO: 648208
uacacugcacaauuauuga

SEQ ID NO: 648210 - RNA, 19 nt, Artificial Sequence
  Description of Artificial Sequence: Synthetic oligonucleotide
  Sense strand starting at position 2323 of SEQ ID NO: 585542
uuaaauacucguggaagua

SEQ ID NO: 648211 - RNA, 19 nt, Artificial Sequence
  Description of Artificial Sequence: Synthetic oligonucleotide
  Antisense strand to SEQ ID NO: 648210
uacuuccacgaguauuuaa

SEQ ID NO: 648212 - RNA, 19 nt, Artificial Sequence
  Description of Artificial Sequence: Synthetic oligonucleotide
  Sense strand starting at position 2333 of SEQ ID NO: 585542
guggaaguaccucgaauaa

SEQ ID NO: 648213 - RNA, 19 nt, Artificial Sequence
  Description of Artificial Sequence: Synthetic oligonucleotide
  Antisense strand to SEQ ID NO: 648212
uuauucgagguacuuccac

SEQ ID NO: 648214 - RNA, 19 nt, Artificial Sequence
  Description of Artificial Sequence: Synthetic oligonucleotide
  Sense strand starting at position 2477 of SEQ ID NO: 585542
ccaauugccuagcuuugau

SEQ ID NO: 648215 - RNA, 19 nt, Artificial Sequence
  Description of Artificial Sequence: Synthetic oligonucleotide
  Antisense strand to SEQ ID NO: 648214
aucaaagcuaggcaauugg

SEQ ID NO: 648216 - RNA, 19 nt, Artificial Sequence
  Description of Artificial Sequence: Synthetic oligonucleotide
  Sense strand starting at position 2480 of SEQ ID NO: 585542
auugccuagcuuugaucaa

SEQ ID NO: 648217 - RNA, 19 nt, Artificial Sequence
  Description of Artificial Sequence: Synthetic oligonucleotide
  Antisense strand to SEQ ID NO: 648216
uugaucaaagcuaggcaau

SEQ ID NO: 648218 - RNA, 19 nt, Artificial Sequence
  Description of Artificial Sequence: Synthetic oligonucleotide
  Sense strand starting at position 2501 of SEQ ID NO: 585542
caauuacgugcaugauuaa

SEQ ID NO: 648219 - RNA, 19 nt, Artificial Sequence
  Description of Artificial Sequence: Synthetic oligonucleotide
  Antisense strand to SEQ ID NO: 648218
uuaaucaugcacguaauug

SEQ ID NO: 648220 - RNA, 19 nt, Artificial Sequence
  Description of Artificial Sequence: Synthetic oligonucleotide
  Sense strand starting at position 2504 of SEQ ID NO: 585542
uuacgugcaugauuaagaa

SEQ ID NO: 648221 - RNA, 19 nt, Artificial Sequence
  Description of Artificial Sequence: Synthetic oligonucleotide
  Antisense strand to SEQ ID NO: 648220
uucuuaaucaugcacguaa

SEQ ID NO: 648222 - RNA, 19 nt, Artificial Sequence
  Description of Artificial Sequence: Synthetic oligonucleotide
  Sense strand starting at position 2518 of SEQ ID NO: 585542
aagaaugaaguuugugaua

SEQ ID NO: 648223 - RNA, 19 nt, Artificial Sequence
  Description of Artificial Sequence: Synthetic oligonucleotide
  Antisense strand to SEQ ID NO: 648222
uaucacaaacuucauucuu

SEQ ID NO: 648224 - RNA, 19 nt, Artificial Sequence
  Description of Artificial Sequence: Synthetic oligonucleotide
  Sense strand starting at position 2527 of SEQ ID NO: 585542
guuugugauaccuauuguc

SEQ ID NO: 648225 - RNA, 19 nt, Artificial Sequence
  Description of Artificial Sequence: Synthetic oligonucleotide
  Antisense strand to SEQ ID NO: 648224
gacaauagguaucacaaac

SEQ ID NO: 648226 - RNA, 19 nt, Artificial Sequence
  Description of Artificial Sequence: Synthetic oligonucleotide
  Sense strand starting at position 2686 of SEQ ID NO: 585542
agccaauguugaucuaaau

SEQ ID NO: 648227 - RNA, 19 nt, Artificial Sequence
  Description of Artificial Sequence: Synthetic oligonucleotide
  Antisense strand to SEQ ID NO: 648226
auuuagaucaacauuggcu

SEQ ID NO: 648228 - RNA, 19 nt, Artificial Sequence
  Description of Artificial Sequence: Synthetic oligonucleotide
  Sense strand starting at position 3172 of SEQ ID NO: 585542
guauguugguuauuucuuu

SEQ ID NO: 648229 - RNA, 19 nt, Artificial Sequence
  Description of Artificial Sequence: Synthetic oligonucleotide
  Antisense strand to SEQ ID NO: 648228
aaagaaauaaccaacauac

SEQ ID NO: 648230 - RNA, 19 nt, Artificial Sequence
  Description of Artificial Sequence: Synthetic oligonucleotide
  Sense strand starting at position 3224 of SEQ ID NO: 585542
ugauauugguaguccuacu

SEQ ID NO: 648231 - RNA, 19 nt, Artificial Sequence
  Description of Artificial Sequence: Synthetic oligonucleotide
  Antisense strand to SEQ ID NO: 648230
aguaggacuaccaauauca

SEQ ID NO: 648232 - RNA, 19 nt, Artificial Sequence
  Description of Artificial Sequence: Synthetic oligonucleotide
  Sense strand starting at position 3260 of SEQ ID NO: 585542
ggaagcacugcauguaaau

SEQ ID NO: 648233 - RNA, 19 nt, Artificial Sequence
  Description of Artificial Sequence: Synthetic oligonucleotide
  Antisense strand to SEQ ID NO: 648232
auuuacaugcagugcuucc

SEQ ID NO: 648234 - RNA, 19 nt, Artificial Sequence
  Description of Artificial Sequence: Synthetic oligonucleotide
  Sense strand starting at position 3288 of SEQ ID NO: 585542
cugggucagcuuuagaguu

SEQ ID NO: 648235 - RNA, 19 nt, Artificial Sequence
  Description of Artificial Sequence: Synthetic oligonucleotide
  Antisense strand to SEQ ID NO: 648234
aacucuaaagcugacccag

SEQ ID NO: 648236 - RNA, 19 nt, Artificial Sequence
  Description of Artificial Sequence: Synthetic oligonucleotide
  Sense strand starting at position 3304 of SEQ ID NO: 585542
guuaccaguuuccuaucaa

SEQ ID NO: 648237 - RNA, 19 nt, Artificial Sequence
  Description of Artificial Sequence: Synthetic oligonucleotide
  Antisense strand to SEQ ID NO: 648236
uugauaggaaacugguaac

SEQ ID NO: 648238 - RNA, 19 nt, Artificial Sequence
  Description of Artificial Sequence: Synthetic oligonucleotide
  Sense strand starting at position 3388 of SEQ ID NO: 585542
aaauauuaaguggguuaca

SEQ ID NO: 648239 - RNA, 19 nt, Artificial Sequence
  Description of Artificial Sequence: Synthetic oligonucleotide
  Antisense strand to SEQ ID NO: 648238
uguaacccacuuaauauuu

SEQ ID NO: 648240 - RNA, 19 nt, Artificial Sequence
  Description of Artificial Sequence: Synthetic oligonucleotide
  Sense strand starting at position 3904 of SEQ ID NO: 585542
gauauaguggcacagaugu

SEQ ID NO: 648241 - RNA, 19 nt, Artificial Sequence
  Description of Artificial Sequence: Synthetic oligonucleotide
  Antisense strand to SEQ ID NO: 648240
acaucugugccacuauauc

SEQ ID NO: 648242 - RNA, 19 nt, Artificial Sequence
  Description of Artificial Sequence: Synthetic oligonucleotide
  Sense strand starting at position 203 of SEQ ID NO: 585543
uguuauuaaccaugucaaa

SEQ ID NO: 648243 - RNA, 19 nt, Artificial Sequence
  Description of Artificial Sequence: Synthetic oligonucleotide
  Antisense strand to SEQ ID NO: 648242
uuugacaugguuaauaaca

SEQ ID NO: 648244 - RNA, 19 nt, Artificial Sequence
  Description of Artificial Sequence: Synthetic oligonucleotide
  Sense strand starting at position 212 of SEQ ID NO: 585543
ccaugucaaauaugugagu

SEQ ID NO: 648245 - RNA, 19 nt, Artificial Sequence
  Description of Artificial Sequence: Synthetic oligonucleotide
  Antisense strand to SEQ ID NO: 648244
acucacauauuugacaugg

SEQ ID NO: 648246 - RNA, 19 nt, Artificial Sequence
  Description of Artificial Sequence: Synthetic oligonucleotide
  Sense strand starting at position 242 of SEQ ID NO: 585543
uccuaacaagccugagagu

SEQ ID NO: 648247 - RNA, 19 nt, Artificial Sequence
  Description of Artificial Sequence: Synthetic oligonucleotide
  Antisense strand to SEQ ID NO: 648246
acucucaggcuuguuagga

SEQ ID NO: 648248 - RNA, 19 nt, Artificial Sequence
  Description of Artificial Sequence: Synthetic oligonucleotide
  Sense strand starting at position 253 of SEQ ID NO: 585543
cugagaguccauggaauua

SEQ ID NO: 648249 - RNA, 19 nt, Artificial Sequence
  Description of Artificial Sequence: Synthetic oligonucleotide
  Antisense strand to SEQ ID NO: 648248
uaauuccauggacucucag

SEQ ID NO: 648250 - RNA, 19 nt, Artificial Sequence
  Description of Artificial Sequence: Synthetic oligonucleotide
  Sense strand starting at position 275 of SEQ ID NO: 585543
gcaagauuccaaggaauau

SEQ ID NO: 648251 - RNA, 19 nt, Artificial Sequence
  Description of Artificial Sequence: Synthetic oligonucleotide
  Antisense strand to SEQ ID NO: 648250
auauuccuuggaaucuugc

SEQ ID NO: 648252 - RNA, 19 nt, Artificial Sequence
  Description of Artificial Sequence: Synthetic oligonucleotide
  Sense strand starting at position 313 of SEQ ID NO: 585543
guuuguagcuacccaauaa

SEQ ID NO: 648253 - RNA, 19 nt, Artificial Sequence
  Description of Artificial Sequence: Synthetic oligonucleotide
  Antisense strand to SEQ ID NO: 648252
uuauuggguagcuacaaac

SEQ ID NO: 648254 - RNA, 19 nt, Artificial Sequence
  Description of Artificial Sequence: Synthetic oligonucleotide
  Sense strand starting at position 398 of SEQ ID NO: 585543
agaggacaauucuaucaag

SEQ ID NO: 648255 - RNA, 19 nt, Artificial Sequence
  Description of Artificial Sequence: Synthetic oligonucleotide
  Antisense strand to SEQ ID NO: 648254
cuugauagaauuguccucu

SEQ ID NO: 648256 - RNA, 19 nt, Artificial Sequence
  Description of Artificial Sequence: Synthetic oligonucleotide
  Sense strand starting at position 420 of SEQ ID NO: 585543
uguguugggcacugaugau

SEQ ID NO: 648257 - RNA, 19 nt, Artificial Sequence
  Description of Artificial Sequence: Synthetic oligonucleotide
  Antisense strand to SEQ ID NO: 648256
aucaucagugcccaacaca

SEQ ID NO: 648258 - RNA, 19 nt, Artificial Sequence
  Description of Artificial Sequence: Synthetic oligonucleotide
  Sense strand starting at position 587 of SEQ ID NO: 585543
augccuaaguccucuauag

SEQ ID NO: 648259 - RNA, 19 nt, Artificial Sequence
  Description of Artificial Sequence: Synthetic oligonucleotide
  Antisense strand to SEQ ID NO: 648258
cuauagaggacuuaggcau

SEQ ID NO: 648260 - RNA, 19 nt, Artificial Sequence
  Description of Artificial Sequence: Synthetic oligonucleotide
  Sense strand starting at position 630 of SEQ ID NO: 585543
ccuggaagcucucuuaaag

SEQ ID NO: 648261 - RNA, 19 nt, Artificial Sequence
  Description of Artificial Sequence: Synthetic oligonucleotide
  Antisense strand to SEQ ID NO: 648260
cuuuaagagagcuuccagg

SEQ ID NO: 648262 - RNA, 19 nt, Artificial Sequence
  Description of Artificial Sequence: Synthetic oligonucleotide
  Sense strand starting at position 650 of SEQ ID NO: 585543
aacagugugguguaaccaa

SEQ ID NO: 648263 - RNA, 19 nt, Artificial Sequence
  Description of Artificial Sequence: Synthetic oligonucleotide
  Antisense strand to SEQ ID NO: 648262
uugguuacaccacacuguu

SEQ ID NO: 648264 - RNA, 19 nt, Artificial Sequence
  Description of Artificial Sequence: Synthetic oligonucleotide
  Sense strand starting at position 757 of SEQ ID NO: 585543
gggcaaaucaguuaauguu

SEQ ID NO: 648265 - RNA, 19 nt, Artificial Sequence
  Description of Artificial Sequence: Synthetic oligonucleotide
  Antisense strand to SEQ ID NO: 648264
aacauuaacugauuugccc

SEQ ID NO: 648266 - RNA, 19 nt, Artificial Sequence
  Description of Artificial Sequence: Synthetic oligonucleotide
  Sense strand starting at position 779 of SEQ ID NO: 585543
aaaccuuggcaaggguaua

SEQ ID NO: 648267 - RNA, 19 nt, Artificial Sequence
  Description of Artificial Sequence: Synthetic oligonucleotide
  Antisense strand to SEQ ID NO: 648266
uauacccuugccaagguuu

SEQ ID NO: 648268 - RNA, 19 nt, Artificial Sequence
  Description of Artificial Sequence: Synthetic oligonucleotide
  Sense strand starting at position 807 of SEQ ID NO: 585543
ucuacauuacugcaguauu

SEQ ID NO: 648269 - RNA, 19 nt, Artificial Sequence
  Description of Artificial Sequence: Synthetic oligonucleotide
  Antisense strand to SEQ ID NO: 648268
aauacugcaguaauguaga

SEQ ID NO: 648270 - RNA, 19 nt, Artificial Sequence
  Description of Artificial Sequence: Synthetic oligonucleotide
  Sense strand starting at position 810 of SEQ ID NO: 585543
acauuacugcaguauuaua

SEQ ID NO: 648271 - RNA, 19 nt, Artificial Sequence
  Description of Artificial Sequence: Synthetic oligonucleotide
  Antisense strand to SEQ ID NO: 648270
uauaauacugcaguaaugu

SEQ ID NO: 648272 - RNA, 19 nt, Artificial Sequence
  Description of Artificial Sequence: Synthetic oligonucleotide
  Sense strand starting at position 1229 of SEQ ID NO: 585543
ugaucucccuuccucgaaa

SEQ ID NO: 648273 - RNA, 19 nt, Artificial Sequence
  Description of Artificial Sequence: Synthetic oligonucleotide
  Antisense strand to SEQ ID NO: 648272
uuucgaggaagggagauca

SEQ ID NO: 648274 - RNA, 19 nt, Artificial Sequence
  Description of Artificial Sequence: Synthetic oligonucleotide
  Sense strand starting at position 1314 of SEQ ID NO: 585543
gcggucuagcgguccaaga

SEQ ID NO: 648275 - RNA, 19 nt, Artificial Sequence
  Description of Artificial Sequence: Synthetic oligonucleotide
  Antisense strand to SEQ ID NO: 648274
ucuuggaccgcuagaccgc

SEQ ID NO: 648276 - RNA, 19 nt, Artificial Sequence
  Description of Artificial Sequence: Synthetic oligonucleotide
  Sense strand starting at position 2023 of SEQ ID NO: 585543
gcggcuucuggguccgaga

SEQ ID NO: 648277 - RNA, 19 nt, Artificial Sequence
  Description of Artificial Sequence: Synthetic oligonucleotide
  Antisense strand to SEQ ID NO: 648276
ucucggacccagaagccgc

SEQ ID NO: 648278 - RNA, 19 nt, Artificial Sequence
  Description of Artificial Sequence: Synthetic oligonucleotide
  Sense strand starting at position 2275 of SEQ ID NO: 585543
acgguuucugaggaguaga

SEQ ID NO: 648279 - RNA, 19 nt, Artificial Sequence
  Description of Artificial Sequence: Synthetic oligonucleotide
  Antisense strand to SEQ ID NO: 648278
ucuacuccucagaaaccgu

SEQ ID NO: 648280 - RNA, 19 nt, Artificial Sequence
  Description of Artificial Sequence: Synthetic oligonucleotide
  Sense strand starting at position 2278 of SEQ ID NO: 585543
guuucugaggaguagaagu

SEQ ID NO: 648281 - RNA, 19 nt, Artificial Sequence
  Description of Artificial Sequence: Synthetic oligonucleotide
  Antisense strand to SEQ ID NO: 648280
acuucuacuccucagaaac

SEQ ID NO: 648282 - RNA, 19 nt, Artificial Sequence
  Description of Artificial Sequence: Synthetic oligonucleotide
  Sense strand starting at position 2298 of SEQ ID NO: 585543
uccuaaguggauuggaaau

SEQ ID NO: 648283 - RNA, 19 nt, Artificial Sequence
  Description of Artificial Sequence: Synthetic oligonucleotide
  Antisense strand to SEQ ID NO: 648282
auuuccaauccacuuagga

SEQ ID NO: 648284 - RNA, 19 nt, Artificial Sequence
  Description of Artificial Sequence: Synthetic oligonucleotide
  Sense strand starting at position 2315 of SEQ ID NO: 585543
auuacaaaugccggaaaga

SEQ ID NO: 648285 - RNA, 19 nt, Artificial Sequence
  Description of Artificial Sequence: Synthetic oligonucleotide
  Antisense strand to SEQ ID NO: 648284
ucuuuccggcauuuguaau

SEQ ID NO: 648286 - RNA, 19 nt, Artificial Sequence
  Description of Artificial Sequence: Synthetic oligonucleotide
  Sense strand starting at position 2475 of SEQ ID NO: 585543
agccauguuccugaaacac

SEQ ID NO: 648287 - RNA, 19 nt, Artificial Sequence
  Description of Artificial Sequence: Synthetic oligonucleotide
  Antisense strand to SEQ ID NO: 648286
guguuucaggaacauggcu

SEQ ID NO: 648288 - RNA, 19 nt, Artificial Sequence
  Description of Artificial Sequence: Synthetic oligonucleotide
  Sense strand starting at position 2504 of SEQ ID NO: 585543
augucauucucaucuaagg

SEQ ID NO: 648289 - RNA, 19 nt, Artificial Sequence
  Description of Artificial Sequence: Synthetic oligonucleotide
  Antisense strand to SEQ ID NO: 648288
ccuuagaugagaaugacau

SEQ ID NO: 648290 - RNA, 19 nt, Artificial Sequence
  Description of Artificial Sequence: Synthetic oligonucleotide
  Sense strand starting at position 2536 of SEQ ID NO: 585543
cuguacauugcuuaauaga

SEQ ID NO: 648291 - RNA, 19 nt, Artificial Sequence
  Description of Artificial Sequence: Synthetic oligonucleotide
  Antisense strand to SEQ ID NO: 648290
ucuauuaagcaauguacag

SEQ ID NO: 648292 - RNA, 19 nt, Artificial Sequence
  Description of Artificial Sequence: Synthetic oligonucleotide
  Sense strand starting at position 2612 of SEQ ID NO: 585543
ucggcaagacuuugaccaa

SEQ ID NO: 648293 - RNA, 19 nt, Artificial Sequence
  Description of Artificial Sequence: Synthetic oligonucleotide
  Antisense strand to SEQ ID NO: 648292
uuggucaaagucuugccga

SEQ ID NO: 648294 - RNA, 19 nt, Artificial Sequence
  Description of Artificial Sequence: Synthetic oligonucleotide
  Sense strand starting at position 2666 of SEQ ID NO: 585543
uagaaauugugccugacuu

SEQ ID NO: 648295 - RNA, 19 nt, Artificial Sequence
  Description of Artificial Sequence: Synthetic oligonucleotide
  Antisense strand to SEQ ID NO: 648294
aagucaggcacaauuucua

SEQ ID NO: 648296 - RNA, 19 nt, Artificial Sequence
  Description of Artificial Sequence: Synthetic oligonucleotide
  Sense strand starting at position 2667 of SEQ ID NO: 585543
agaaauugugccugacuuc

SEQ ID NO: 648297 - RNA, 19 nt, Artificial Sequence
  Description of Artificial Sequence: Synthetic oligonucleotide
  Antisense strand to SEQ ID NO: 648296
gaagucaggcacaauuucu

SEQ ID NO: 648298 - RNA, 19 nt, Artificial Sequence
  Description of Artificial Sequence: Synthetic oligonucleotide
  Sense strand starting at position 2852 of SEQ ID NO: 585543
cugaauuccugauucccga

SEQ ID NO: 648299 - RNA, 19 nt, Artificial Sequence
  Description of Artificial Sequence: Synthetic oligonucleotide
  Antisense strand to SEQ ID NO: 648298
ucgggaaucaggaauucag

SEQ ID NO: 648300 - RNA, 19 nt, Artificial Sequence
  Description of Artificial Sequence: Synthetic oligonucleotide
  Sense strand starting at position 2861 of SEQ ID NO: 585543
ugauucccgacuugguauu

SEQ ID NO: 648301 - RNA, 19 nt, Artificial Sequence
  Description of Artificial Sequence: Synthetic oligonucleotide
  Antisense strand to SEQ ID NO: 648300
aauaccaagucgggaauca

SEQ ID NO: 648302 - RNA, 19 nt, Artificial Sequence
  Description of Artificial Sequence: Synthetic oligonucleotide
  Sense strand starting at position 2873 of SEQ ID NO: 585543
ugguauugccgacauucca

SEQ ID NO: 648303 - RNA, 19 nt, Artificial Sequence
  Description of Artificial Sequence: Synthetic oligonucleotide
  Antisense strand to SEQ ID NO: 648302
uggaaugucggcaauacca

SEQ ID NO: 648304 - RNA, 19 nt, Artificial Sequence
  Description of Artificial Sequence: Synthetic oligonucleotide
  Sense strand starting at position 2904 of SEQ ID NO: 585543
agguuuauccuacaugcua

SEQ ID NO: 648305 - RNA, 19 nt, Artificial Sequence
  Description of Artificial Sequence: Synthetic oligonucleotide
  Antisense strand to SEQ ID NO: 648304
uagcauguaggauaaaccu

SEQ ID NO: 648306 - RNA, 19 nt, Artificial Sequence
  Description of Artificial Sequence: Synthetic oligonucleotide
  Sense strand starting at position 3167 of SEQ ID NO: 585543
uuggcuaugugacuuaauu

SEQ ID NO: 648307 - RNA, 19 nt, Artificial Sequence
  Description of Artificial Sequence: Synthetic oligonucleotide
  Antisense strand to SEQ ID NO: 648306
aauuaagucacauagccaa

SEQ ID NO: 648308 - RNA, 19 nt, Artificial Sequence
  Description of Artificial Sequence: Synthetic oligonucleotide
  Sense strand starting at position 3274 of SEQ ID NO: 585543
cucccuuucgcagugcaau

SEQ ID NO: 648309 - RNA, 19 nt, Artificial Sequence
  Description of Artificial Sequence: Synthetic oligonucleotide
  Antisense strand to SEQ ID NO: 648308
auugcacugcgaaagggag

SEQ ID NO: 648310 - RNA, 19 nt, Artificial Sequence
  Description of Artificial Sequence: Synthetic oligonucleotide
  Sense strand starting at position 3485 of SEQ ID NO: 585543
cuacaugaugcuuguuaag

SEQ ID NO: 648311 - RNA, 19 nt, Artificial Sequence
  Description of Artificial Sequence: Synthetic oligonucleotide
  Antisense strand to SEQ ID NO: 648310
cuuaacaagcaucauguag

SEQ ID NO: 648312 - RNA, 19 nt, Artificial Sequence
  Description of Artificial Sequence: Synthetic oligonucleotide
  Sense strand starting at position 3487 of SEQ ID NO: 585543
acaugaugcuuguuaagga

SEQ ID NO: 648313 - RNA, 19 nt, Artificial Sequence
  Description of Artificial Sequence: Synthetic oligonucleotide
  Antisense strand to SEQ ID NO: 648312
uccuuaacaagcaucaugu

SEQ ID NO: 648314 - RNA, 19 nt, Artificial Sequence
  Description of Artificial Sequence: Synthetic oligonucleotide
  Sense strand starting at position 3532 of SEQ ID NO: 585543
gagauuuggccacguauuc

SEQ ID NO: 648315 - RNA, 19 nt, Artificial Sequence
  Description of Artificial Sequence: Synthetic oligonucleotide
  Antisense strand to SEQ ID NO: 648314
gaauacguggccaaaucuc

SEQ ID NO: 648316 - RNA, 19 nt, Artificial Sequence
  Description of Artificial Sequence: Synthetic oligonucleotide
  Sense strand starting at position 3587 of SEQ ID NO: 585543
gccacauuucucuaccgua

SEQ ID NO: 648317 - RNA, 19 nt, Artificial Sequence
  Description of Artificial Sequence: Synthetic oligonucleotide
  Antisense strand to SEQ ID NO: 648316
uacgguagagaaauguggc

SEQ ID NO: 648318 - RNA, 19 nt, Artificial Sequence
  Description of Artificial Sequence: Synthetic oligonucleotide
  Sense strand starting at position 3631 of SEQ ID NO: 585543
ccguucugacaagauuaaa

SEQ ID NO: 648319 - RNA, 19 nt, Artificial Sequence
  Description of Artificial Sequence: Synthetic oligonucleotide
  Antisense strand to SEQ ID NO: 648318
uuuaaucuugucagaacgg

SEQ ID NO: 648320 - RNA, 19 nt, Artificial Sequence
  Description of Artificial Sequence: Synthetic oligonucleotide
  Sense strand starting at position 3703 of SEQ ID NO: 585543
gcucuaucuucuguauuuc

SEQ ID NO: 648321 - RNA, 19 nt, Artificial Sequence
  Description of Artificial Sequence: Synthetic oligonucleotide
  Antisense strand to SEQ ID NO: 648320
gaaauacagaagauagagc

SEQ ID NO: 648322 - RNA, 19 nt, Artificial Sequence
  Description of Artificial Sequence: Synthetic oligonucleotide
  Sense strand starting at position 13 of SEQ ID NO: 585544
cuugccaaauguguauuua

SEQ ID NO: 648323 - RNA, 19 nt, Artificial Sequence
  Description of Artificial Sequence: Synthetic oligonucleotide
  Antisense strand to SEQ ID NO: 648322
uaaauacacauuuggcaag

SEQ ID NO: 648324 - RNA, 19 nt, Artificial Sequence
  Description of Artificial Sequence: Synthetic oligonucleotide
  Sense strand starting at position 101 of SEQ ID NO: 585544
ggaauuaauuauuacagag

SEQ ID NO: 648325 - RNA, 19 nt, Artificial Sequence
  Description of Artificial Sequence: Synthetic oligonucleotide
  Antisense strand to SEQ ID NO: 648324
cucuguaauaauuaauucc

SEQ ID NO: 648326 - RNA, 19 nt, Artificial Sequence
  Description of Artificial Sequence: Synthetic oligonucleotide
  Sense strand starting at position 183 of SEQ ID NO: 585544
uuugucuaaggcuaagaau

SEQ ID NO: 648327 - RNA, 19 nt, Artificial Sequence
  Description of Artificial Sequence: Synthetic oligonucleotide
  Antisense strand to SEQ ID NO: 648326
auucuuagccuuagacaaa

SEQ ID NO: 648328 - RNA, 19 nt, Artificial Sequence
  Description of Artificial Sequence: Synthetic oligonucleotide
  Sense strand starting at position 227 of SEQ ID NO: 585544
ccuggaauguggucggaga

SEQ ID NO: 648329 - RNA, 19 nt, Artificial Sequence
  Description of Artificial Sequence: Synthetic oligonucleotide
  Antisense strand to SEQ ID NO: 648328
ucuccgaccacauuccagg

SEQ ID NO: 648330 - RNA, 19 nt, Artificial Sequence
  Description of Artificial Sequence: Synthetic oligonucleotide
  Sense strand starting at position 228 of SEQ ID NO: 585544
cuggaauguggucggagaa

SEQ ID NO: 648331 - RNA, 19 nt, Artificial Sequence
  Description of Artificial Sequence: Synthetic oligonucleotide
  Antisense strand to SEQ ID NO: 648330
uucuccgaccacauuccag

SEQ ID NO: 648332 - RNA, 19 nt, Artificial Sequence
  Description of Artificial Sequence: Synthetic oligonucleotide
  Sense strand starting at position 229 of SEQ ID NO: 585544
uggaauguggucggagaaa

SEQ ID NO: 648333 - RNA, 19 nt, Artificial Sequence
  Description of Artificial Sequence: Synthetic oligonucleotide
  Antisense strand to SEQ ID NO: 648332
uuucuccgaccacauucca

SEQ ID NO: 648334 - RNA, 19 nt, Artificial Sequence
  Description of Artificial Sequence: Synthetic oligonucleotide
  Sense strand starting at position 367 of SEQ ID NO: 585544
agcagaauauugguaagua

SEQ ID NO: 648335 - RNA, 19 nt, Artificial Sequence
  Description of Artificial Sequence: Synthetic oligonucleotide
  Antisense strand to SEQ ID NO: 648334
uacuuaccaauauucugcu

SEQ ID NO: 648336 - RNA, 19 nt, Artificial Sequence
  Description of Artificial Sequence: Synthetic oligonucleotide
  Sense strand starting at position 449 of SEQ ID NO: 585544
acaguaauaucgucaagaa

SEQ ID NO: 648337 - RNA, 19 nt, Artificial Sequence
  Description of Artificial Sequence: Synthetic oligonucleotide
  Antisense strand to SEQ ID NO: 648336
uucuugacgauauuacugu

SEQ ID NO: 648338 - RNA, 19 nt, Artificial Sequence
  Description of Artificial Sequence: Synthetic oligonucleotide
  Sense strand starting at position 450 of SEQ ID NO: 585544
caguaauaucgucaagaaa

SEQ ID NO: 648339 - RNA, 19 nt, Artificial Sequence
  Description of Artificial Sequence: Synthetic oligonucleotide
  Antisense strand to SEQ ID NO: 648338
uuucuugacgauauuacug

SEQ ID NO: 648340 - RNA, 19 nt, Artificial Sequence
  Description of Artificial Sequence: Synthetic oligonucleotide
  Sense strand starting at position 520 of SEQ ID NO: 585544
ugauaugguaaacgucuaa

SEQ ID NO: 648341 - RNA, 19 nt, Artificial Sequence
  Description of Artificial Sequence: Synthetic oligonucleotide
  Antisense strand to SEQ ID NO: 648340
uuagacguuuaccauauca

SEQ ID NO: 648342 - RNA, 19 nt, Artificial Sequence
  Description of Artificial Sequence: Synthetic oligonucleotide
  Sense strand starting at position 524 of SEQ ID NO: 585544
augguaaacgucuaaacua

SEQ ID NO: 648343 - RNA, 19 nt, Artificial Sequence
  Description of Artificial Sequence: Synthetic oligonucleotide
  Antisense strand to SEQ ID NO: 648342
uaguuuagacguuuaccau

SEQ ID NO: 648344 - RNA, 19 nt, Artificial Sequence
  Description of Artificial Sequence: Synthetic oligonucleotide
  Sense strand starting at position 574 of SEQ ID NO: 585544
acauuugguucuuaggaau

SEQ ID NO: 648345 - RNA, 19 nt, Artificial Sequence
  Description of Artificial Sequence: Synthetic oligonucleotide
  Antisense strand to SEQ ID NO: 648344
auuccuaagaaccaaaugu

SEQ ID NO: 648346 - RNA, 19 nt, Artificial Sequence
  Description of Artificial Sequence: Synthetic oligonucleotide
  Sense strand starting at position 657 of SEQ ID NO: 585544
ccagguaagugguuuccaa

SEQ ID NO: 648347 - RNA, 19 nt, Artificial Sequence
  Description of Artificial Sequence: Synthetic oligonucleotide
  Antisense strand to SEQ ID NO: 648346
uuggaaaccacuuaccugg

SEQ ID NO: 648348 - RNA, 19 nt, Artificial Sequence
  Description of Artificial Sequence: Synthetic oligonucleotide
  Sense strand starting at position 748 of SEQ ID NO: 585544
augcgacaauccucacuga

SEQ ID NO: 648349 - RNA, 19 nt, Artificial Sequence
  Description of Artificial Sequence: Synthetic oligonucleotide
  Antisense strand to SEQ ID NO: 648348
ucagugaggauugucgcau

SEQ ID NO: 648350 - RNA, 19 nt, Artificial Sequence
  Description of Artificial Sequence: Synthetic oligonucleotide
  Sense strand starting at position 749 of SEQ ID NO: 585544
ugcgacaauccucacugau

SEQ ID NO: 648351 - RNA, 19 nt, Artificial Sequence
  Description of Artificial Sequence: Synthetic oligonucleotide
  Antisense strand to SEQ ID NO: 648350
aucagugaggauugucgca

SEQ ID NO: 648352 - RNA, 19 nt, Artificial Sequence
  Description of Artificial Sequence: Synthetic oligonucleotide
  Sense strand starting at position 751 of SEQ ID NO: 585544
cgacaauccucacugauac

SEQ ID NO: 648353 - RNA, 19 nt, Artificial Sequence
  Description of Artificial Sequence: Synthetic oligonucleotide
  Antisense strand to SEQ ID NO: 648352
guaucagugaggauugucg

SEQ ID NO: 648354 - RNA, 19 nt, Artificial Sequence
  Description of Artificial Sequence: Synthetic oligonucleotide
  Sense strand starting at position 959 of SEQ ID NO: 585544
ccaauuacagcauguguaa

SEQ ID NO: 648355 - RNA, 19 nt, Artificial Sequence
  Description of Artificial Sequence: Synthetic oligonucleotide
  Antisense strand to SEQ ID NO: 648354
uuacacaugcuguaauugg

SEQ ID NO: 648356 - RNA, 19 nt, Artificial Sequence
  Description of Artificial Sequence: Synthetic oligonucleotide
  Sense strand starting at position 992 of SEQ ID NO: 585544
augaucccugccuagaauu

SEQ ID NO: 648357 - RNA, 19 nt, Artificial Sequence
  Description of Artificial Sequence: Synthetic oligonucleotide
  Antisense strand to SEQ ID NO: 648356
aauucuaggcagggaucau

SEQ ID NO: 648358 - RNA, 19 nt, Artificial Sequence
  Description of Artificial Sequence: Synthetic oligonucleotide
  Sense strand starting at position 1121 of SEQ ID NO: 585544
ccaauaagucaauaguugu

SEQ ID NO: 648359 - RNA, 19 nt, Artificial Sequence
  Description of Artificial Sequence: Synthetic oligonucleotide
  Antisense strand to SEQ ID NO: 648358
acaacuauugacuuauugg

SEQ ID NO: 648360 - RNA, 19 nt, Artificial Sequence
  Description of Artificial Sequence: Synthetic oligonucleotide
  Sense strand starting at position 1182 of SEQ ID NO: 585544
ccaugauacugagucgcua

SEQ ID NO: 648361 - RNA, 19 nt, Artificial Sequence
  Description of Artificial Sequence: Synthetic oligonucleotide
  Antisense strand to SEQ ID NO: 648360
uagcgacucaguaucaugg

SEQ ID NO: 648362 - RNA, 19 nt, Artificial Sequence
  Description of Artificial Sequence: Synthetic oligonucleotide
  Sense strand starting at position 1190 of SEQ ID NO: 585544
cugagucgcuauuuccaga

SEQ ID NO: 648363 - RNA, 19 nt, Artificial Sequence
  Description of Artificial Sequence: Synthetic oligonucleotide
  Antisense strand to SEQ ID NO: 648362
ucuggaaauagcgacucag

SEQ ID NO: 648364 - RNA, 19 nt, Artificial Sequence
  Description of Artificial Sequence: Synthetic oligonucleotide
  Sense strand starting at position 1258 of SEQ ID NO: 585544
uaggcagccuuaguauaua

SEQ ID NO: 648365 - RNA, 19 nt, Artificial Sequence
  Description of Artificial Sequence: Synthetic oligonucleotide
  Antisense strand to SEQ ID NO: 648364
uauauacuaaggcugccua

SEQ ID NO: 648366 - RNA, 19 nt, Artificial Sequence
  Description of Artificial Sequence: Synthetic oligonucleotide
  Sense strand starting at position 1261 of SEQ ID NO: 585544
gcagccuuaguauauaaua

SEQ ID NO: 648367 - RNA, 19 nt, Artificial Sequence
  Description of Artificial Sequence: Synthetic oligonucleotide
  Antisense strand to SEQ ID NO: 648366
uauuauauacuaaggcugc

SEQ ID NO: 648368 - RNA, 19 nt, Artificial Sequence
  Description of Artificial Sequence: Synthetic oligonucleotide
  Sense strand starting at position 1280 of SEQ ID NO: 585544
uucugauugcccuguacaa

SEQ ID NO: 648369 - RNA, 19 nt, Artificial Sequence
  Description of Artificial Sequence: Synthetic oligonucleotide
  Antisense strand to SEQ ID NO: 648368
uuguacagggcaaucagaa

SEQ ID NO: 648370 - RNA, 19 nt, Artificial Sequence
  Description of Artificial Sequence: Synthetic oligonucleotide
  Sense strand starting at position 1323 of SEQ ID NO: 585544
acguuuaucgaugaaugug

SEQ ID NO: 648371 - RNA, 19 nt, Artificial Sequence
  Description of Artificial Sequence: Synthetic oligonucleotide
  Antisense strand to SEQ ID NO: 648370
cacauucaucgauaaacgu

SEQ ID NO: 648372 - RNA, 19 nt, Artificial Sequence
  Description of Artificial Sequence: Synthetic oligonucleotide
  Sense strand starting at position 1328 of SEQ ID NO: 585544
uaucgaugaaugugaguuu

SEQ ID NO: 648373 - RNA, 19 nt, Artificial Sequence
  Description of Artificial Sequence: Synthetic oligonucleotide
  Antisense strand to SEQ ID NO: 648372
aaacucacauucaucgaua

SEQ ID NO: 648374 - RNA, 19 nt, Artificial Sequence
  Description of Artificial Sequence: Synthetic oligonucleotide
  Sense strand starting at position 1581 of SEQ ID NO: 585544
gugggucuggcuuagaaga

SEQ ID NO: 648375 - RNA, 19 nt, Artificial Sequence
  Description of Artificial Sequence: Synthetic oligonucleotide
  Antisense strand to SEQ ID NO: 648374
ucuucuaagccagacccac

SEQ ID NO: 648376 - RNA, 19 nt, Artificial Sequence
  Description of Artificial Sequence: Synthetic oligonucleotide
  Sense strand starting at position 1888 of SEQ ID NO: 585544
ggaaaggagucgguuguuu

SEQ ID NO: 648377 - RNA, 19 nt, Artificial Sequence
  Description of Artificial Sequence: Synthetic oligonucleotide
  Antisense strand to SEQ ID NO: 648376
aaacaaccgacuccuuucc

SEQ ID NO: 648378 - RNA, 19 nt, Artificial Sequence
  Description of Artificial Sequence: Synthetic oligonucleotide
  Sense strand starting at position 2104 of SEQ ID NO: 585544
ccgaacuuccggcaguaaa

SEQ ID NO: 648379 - RNA, 19 nt, Artificial Sequence
  Description of Artificial Sequence: Synthetic oligonucleotide
  Antisense strand to SEQ ID NO: 648378
uuuacugccggaaguucgg

SEQ ID NO: 648380 - RNA, 19 nt, Artificial Sequence
  Description of Artificial Sequence: Synthetic oligonucleotide
  Sense strand starting at position 2323 of SEQ ID NO: 585544
uggaaagcgccugcguauu

SEQ ID NO: 648381 - RNA, 19 nt, Artificial Sequence
  Description of Artificial Sequence: Synthetic oligonucleotide
  Antisense strand to SEQ ID NO: 648380
aauacgcaggcgcuuucca

SEQ ID NO: 648382 - RNA, 19 nt, Artificial Sequence
  Description of Artificial Sequence: Synthetic oligonucleotide
  Sense strand starting at position 3781 of SEQ ID NO: 585544
cucagcagauguuuagaaa

SEQ ID NO: 648383 - RNA, 19 nt, Artificial Sequence
  Description of Artificial Sequence: Synthetic oligonucleotide
  Antisense strand to SEQ ID NO: 648382
uuucuaaacaucugcugag

SEQ ID NO: 648384 - RNA, 19 nt, Artificial Sequence
  Description of Artificial Sequence: Synthetic oligonucleotide
  Sense strand starting at position 3782 of SEQ ID NO: 585544
ucagcagauguuuagaaac

SEQ ID NO: 648385 - RNA, 19 nt, Artificial Sequence
  Description of Artificial Sequence: Synthetic oligonucleotide
  Antisense strand to SEQ ID NO: 648384
guuucuaaacaucugcuga

SEQ ID NO: 648386 - RNA, 19 nt, Artificial Sequence
  Description of Artificial Sequence: Synthetic oligonucleotide
  Sense strand starting at position 3849 of SEQ ID NO: 585544
ccaauuauccagcaguuag

SEQ ID NO: 648387 - RNA, 19 nt, Artificial Sequence
  Description of Artificial Sequence: Synthetic oligonucleotide
  Antisense strand to SEQ ID NO: 648386
cuaacugcuggauaauugg

SEQ ID NO: 648388 - RNA, 19 nt, Artificial Sequence
  Description of Artificial Sequence: Synthetic oligonucleotide
  Sense strand starting at position 3865 of SEQ ID NO: 585544
uaguauaugccagguauaa

SEQ ID NO: 648389 - RNA, 19 nt, Artificial Sequence
  Description of Artificial Sequence: Synthetic oligonucleotide
  Antisense strand to SEQ ID NO: 648388
uuauaccuggcauauacua

SEQ ID NO: 648390 - RNA, 19 nt, Artificial Sequence
  Description of Artificial Sequence: Synthetic oligonucleotide
  Sense strand starting at position 3887 of SEQ ID NO: 585544
guguguuagggagggagua

SEQ ID NO: 648391 - RNA, 19 nt, Artificial Sequence
  Description of Artificial Sequence: Synthetic oligonucleotide
  Antisense strand to SEQ ID NO: 648390
uacucccucccuaacacac

SEQ ID NO: 648392 - RNA, 19 nt, Artificial Sequence
  Description of Artificial Sequence: Synthetic oligonucleotide
  Sense strand starting at position 3900 of SEQ ID NO: 585544
ggaguacguagaggucaau

SEQ ID NO: 648393 - RNA, 19 nt, Artificial Sequence
  Description of Artificial Sequence: Synthetic oligonucleotide
  Antisense strand to SEQ ID NO: 648392
auugaccucuacguacucc

SEQ ID NO: 648394 - RNA, 19 nt, Artificial Sequence
  Description of Artificial Sequence: Synthetic oligonucleotide
  Sense strand starting at position 3903 of SEQ ID NO: 585544
guacguagaggucaauaag

SEQ ID NO: 648395 - RNA, 19 nt, Artificial Sequence
  Description of Artificial Sequence: Synthetic oligonucleotide
  Antisense strand to SEQ ID NO: 648394
cuuauugaccucuacguac

SEQ ID NO: 648396 - RNA, 19 nt, Artificial Sequence
  Description of Artificial Sequence: Synthetic oligonucleotide
  Sense strand starting at position 3927 of SEQ ID NO: 585544
ugccuaccugauggaaauu

SEQ ID NO: 648397 - RNA, 19 nt, Artificial Sequence
  Description of Artificial Sequence: Synthetic oligonucleotide
  Antisense strand to SEQ ID NO: 648396
aauuuccaucagguaggca

SEQ ID NO: 648398 - RNA, 19 nt, Artificial Sequence
  Description of Artificial Sequence: Synthetic oligonucleotide
  Sense strand starting at position 3936 of SEQ ID NO: 585544
gauggaaauugacagguga

SEQ ID NO: 648399 - RNA, 19 nt, Artificial Sequence
  Description of Artificial Sequence: Synthetic oligonucleotide
  Antisense strand to SEQ ID NO: 648398
ucaccugucaauuuccauc

SEQ ID NO: 648400 - RNA, 19 nt, Artificial Sequence
  Description of Artificial Sequence: Synthetic oligonucleotide
  Sense strand starting at position 3959 of SEQ ID NO: 585544
guaguuaauaccuaacggu

SEQ ID NO: 648401 - RNA, 19 nt, Artificial Sequence
  Description of Artificial Sequence: Synthetic oligonucleotide
  Antisense strand to SEQ ID NO: 648400
accguuagguauuaacuac

SEQ ID NO: 648402 - RNA, 19 nt, Artificial Sequence
  Description of Artificial Sequence: Synthetic oligonucleotide
  Sense strand starting at position 73 of SEQ ID NO: 585545
guggauugacucugaggaa

SEQ ID NO: 648403 - RNA, 19 nt, Artificial Sequence
  Description of Artificial Sequence: Synthetic oligonucleotide
  Antisense strand to SEQ ID NO: 648402
uuccucagagucaauccac

SEQ ID NO: 648404 - RNA, 19 nt, Artificial Sequence
  Description of Artificial Sequence: Synthetic oligonucleotide
  Sense strand starting at position 234 of SEQ ID NO: 585545
gcaguuaacugacugaaca

SEQ ID NO: 648405 - RNA, 19 nt, Artificial Sequence
  Description of Artificial Sequence: Synthetic oligonucleotide
  Antisense strand to SEQ ID NO: 648404
uguucagucaguuaacugc

SEQ ID NO: 648406 - RNA, 19 nt, Artificial Sequence
  Description of Artificial Sequence: Synthetic oligonucleotide
  Sense strand starting at position 276 of SEQ ID NO: 585545
ggaccugguuaguuggauu

SEQ ID NO: 648407 - RNA, 19 nt, Artificial Sequence
  Description of Artificial Sequence: Synthetic oligonucleotide
  Antisense strand to SEQ ID NO: 648406
aauccaacuaaccaggucc

SEQ ID NO: 648408 - RNA, 19 nt, Artificial Sequence
  Description of Artificial Sequence: Synthetic oligonucleotide
  Sense strand starting at position 283 of SEQ ID NO: 585545
guuaguuggauugaaucuu

SEQ ID NO: 648409 - RNA, 19 nt, Artificial Sequence
  Description of Artificial Sequence: Synthetic oligonucleotide
  Antisense strand to SEQ ID NO: 648408
aagauucaauccaacuaac

SEQ ID NO: 648410 - RNA, 19 nt, Artificial Sequence
  Description of Artificial Sequence: Synthetic oligonucleotide
  Sense strand starting at position 291 of SEQ ID NO: 585545
gauugaaucuuagcuggug

SEQ ID NO: 648411 - RNA, 19 nt, Artificial Sequence
  Description of Artificial Sequence: Synthetic oligonucleotide
  Antisense strand to SEQ ID NO: 648410
caccagcuaagauucaauc

SEQ ID NO: 648412 - RNA, 19 nt, Artificial Sequence
  Description of Artificial Sequence: Synthetic oligonucleotide
  Sense strand starting at position 324 of SEQ ID NO: 585545
aaauuucuguaggagguua

SEQ ID NO: 648413 - RNA, 19 nt, Artificial Sequence
  Description of Artificial Sequence: Synthetic oligonucleotide
  Antisense strand to SEQ ID NO: 648412
uaaccuccuacagaaauuu

SEQ ID NO: 648414 - RNA, 19 nt, Artificial Sequence
  Description of Artificial Sequence: Synthetic oligonucleotide
  Sense strand starting at position 329 of SEQ ID NO: 585545
ucuguaggagguuacuuaa

SEQ ID NO: 648415 - RNA, 19 nt, Artificial Sequence
  Description of Artificial Sequence: Synthetic oligonucleotide
  Antisense strand to SEQ ID NO: 648414
uuaaguaaccuccuacaga

SEQ ID NO: 648416 - RNA, 19 nt, Artificial Sequence
  Description of Artificial Sequence: Synthetic oligonucleotide
  Sense strand starting at position 332 of SEQ ID NO: 585545
guaggagguuacuuaauug

SEQ ID NO: 648417 - RNA, 19 nt, Artificial Sequence
  Description of Artificial Sequence: Synthetic oligonucleotide
  Antisense strand to SEQ ID NO: 648416
caauuaaguaaccuccuac

SEQ ID NO: 648418 - RNA, 19 nt, Artificial Sequence
  Description of Artificial Sequence: Synthetic oligonucleotide
  Sense strand starting at position 374 of SEQ ID NO: 585545
augagaaugcagcaucuaa

SEQ ID NO: 648419 - RNA, 19 nt, Artificial Sequence
  Description of Artificial Sequence: Synthetic oligonucleotide
  Antisense strand to SEQ ID NO: 648418
uuagaugcugcauucucau

SEQ ID NO: 648420 - RNA, 19 nt, Artificial Sequence
  Description of Artificial Sequence: Synthetic oligonucleotide
  Sense strand starting at position 485 of SEQ ID NO: 585545
gcugauaucagugauagau

SEQ ID NO: 648421 - RNA, 19 nt, Artificial Sequence
  Description of Artificial Sequence: Synthetic oligonucleotide
  Antisense strand to SEQ ID NO: 648420
aucuaucacugauaucagc

SEQ ID NO: 648422 - RNA, 19 nt, Artificial Sequence
  Description of Artificial Sequence: Synthetic oligonucleotide
  Sense strand starting at position 655 of SEQ ID NO: 585545
gcacuaagacuuuaugauu

SEQ ID NO: 648423 - RNA, 19 nt, Artificial Sequence
  Description of Artificial Sequence: Synthetic oligonucleotide
  Antisense strand to SEQ ID NO: 648422
aaucauaaagucuuagugc

SEQ ID NO: 648424 - RNA, 19 nt, Artificial Sequence
  Description of Artificial Sequence: Synthetic oligonucleotide
  Sense strand starting at position 945 of SEQ ID NO: 585545
ggcuuaucucuugacuaac

SEQ ID NO: 648425 - RNA, 19 nt, Artificial Sequence
  Description of Artificial Sequence: Synthetic oligonucleotide
  Antisense strand to SEQ ID NO: 648424
guuagucaagagauaagcc

SEQ ID NO: 648426 - RNA, 19 nt, Artificial Sequence
  Description of Artificial Sequence: Synthetic oligonucleotide
  Sense strand starting at position 1025 of SEQ ID NO: 585545
ugaaauaagauucgugaag

SEQ ID NO: 648427 - RNA, 19 nt, Artificial Sequence
  Description of Artificial Sequence: Synthetic oligonucleotide
  Antisense strand to SEQ ID NO: 648426
cuucacgaaucuuauuuca

SEQ ID NO: 648428 - RNA, 19 nt, Artificial Sequence
  Description of Artificial Sequence: Synthetic oligonucleotide
  Sense strand starting at position 1039 of SEQ ID NO: 585545
ugaagaaugcccugaaucc

SEQ ID NO: 648429 - RNA, 19 nt, Artificial Sequence
  Description of Artificial Sequence: Synthetic oligonucleotide
  Antisense strand to SEQ ID NO: 648428
ggauucagggcauucuuca

SEQ ID NO: 648430 - RNA, 19 nt, Artificial Sequence
  Description of Artificial Sequence: Synthetic oligonucleotide
  Sense strand starting at position 1048 of SEQ ID NO: 585545
cccugaauccuagguugaa

SEQ ID NO: 648431 - RNA, 19 nt, Artificial Sequence
  Description of Artificial Sequence: Synthetic oligonucleotide
  Antisense strand to SEQ ID NO: 648430
uucaaccuaggauucaggg

SEQ ID NO: 648432 - RNA, 19 nt, Artificial Sequence
  Description of Artificial Sequence: Synthetic oligonucleotide
  Sense strand starting at position 1049 of SEQ ID NO: 585545
ccugaauccuagguugaaa

SEQ ID NO: 648433 - RNA, 19 nt, Artificial Sequence
  Description of Artificial Sequence: Synthetic oligonucleotide
  Antisense strand to SEQ ID NO: 648432
uuucaaccuaggauucagg

SEQ ID NO: 648434 - RNA, 19 nt, Artificial Sequence
  Description of Artificial Sequence: Synthetic oligonucleotide
  Sense strand starting at position 1069 of SEQ ID NO: 585545
gccugaguugggcagaaca

SEQ ID NO: 648435 - RNA, 19 nt, Artificial Sequence
  Description of Artificial Sequence: Synthetic oligonucleotide
  Antisense strand to SEQ ID NO: 648434
uguucugcccaacucaggc

SEQ ID NO: 648436 - RNA, 19 nt, Artificial Sequence
  Description of Artificial Sequence: Synthetic oligonucleotide
  Sense strand starting at position 1071 of SEQ ID NO: 585545
cugaguugggcagaacagu

SEQ ID NO: 648437 - RNA, 19 nt, Artificial Sequence
  Description of Artificial Sequence: Synthetic oligonucleotide
  Antisense strand to SEQ ID NO: 648436
acuguucugcccaacucag

SEQ ID NO: 648438 - RNA, 19 nt, Artificial Sequence
  Description of Artificial Sequence: Synthetic oligonucleotide
  Sense strand starting at position 1084 of SEQ ID NO: 585545
aacagugacguaugaacuu

SEQ ID NO: 648439 - RNA, 19 nt, Artificial Sequence
  Description of Artificial Sequence: Synthetic oligonucleotide
  Antisense strand to SEQ ID NO: 648438
aaguucauacgucacuguu

SEQ ID NO: 648440 - RNA, 19 nt, Artificial Sequence
  Description of Artificial Sequence: Synthetic oligonucleotide
  Sense strand starting at position 2693 of SEQ ID NO: 585545
gcuguuucuaauggaagaa

SEQ ID NO: 648441 - RNA, 19 nt, Artificial Sequence
  Description of Artificial Sequence: Synthetic oligonucleotide
  Antisense strand to SEQ ID NO: 648440
uucuuccauuagaaacagc

SEQ ID NO: 648442 - RNA, 19 nt, Artificial Sequence
  Description of Artificial Sequence: Synthetic oligonucleotide
  Sense strand starting at position 2724 of SEQ ID NO: 585545
uggucuguucugcaaauga

SEQ ID NO: 648443 - RNA, 19 nt, Artificial Sequence
  Description of Artificial Sequence: Synthetic oligonucleotide
  Antisense strand to SEQ ID NO: 648442
ucauuugcagaacagacca

SEQ ID NO: 648444 - RNA, 19 nt, Artificial Sequence
  Description of Artificial Sequence: Synthetic oligonucleotide
  Sense strand starting at position 2995 of SEQ ID NO: 585545
ggcauaagccuauagaagu

SEQ ID NO: 648445 - RNA, 19 nt, Artificial Sequence
  Description of Artificial Sequence: Synthetic oligonucleotide
  Antisense strand to SEQ ID NO: 648444
acuucuauaggcuuaugcc

SEQ ID NO: 648446 - RNA, 19 nt, Artificial Sequence
  Description of Artificial Sequence: Synthetic oligonucleotide
  Sense strand starting at position 3001 of SEQ ID NO: 585545
agccuauagaaguacguaa

SEQ ID NO: 648447 - RNA, 19 nt, Artificial Sequence
  Description of Artificial Sequence: Synthetic oligonucleotide
  Antisense strand to SEQ ID NO: 648446
uuacguacuucuauaggcu

SEQ ID NO: 648448 - RNA, 19 nt, Artificial Sequence
  Description of Artificial Sequence: Synthetic oligonucleotide
  Sense strand starting at position 3082 of SEQ ID NO: 585545
cuggcuuucuaacuagaag

SEQ ID NO: 648449 - RNA, 19 nt, Artificial Sequence
  Description of Artificial Sequence: Synthetic oligonucleotide
  Antisense strand to SEQ ID NO: 648448
cuucuaguuagaaagccag

SEQ ID NO: 648450 - RNA, 19 nt, Artificial Sequence
  Description of Artificial Sequence: Synthetic oligonucleotide
  Sense strand starting at position 3130 of SEQ ID NO: 585545
gaaagugugucuguauuua

SEQ ID NO: 648451 - RNA, 19 nt, Artificial Sequence
  Description of Artificial Sequence: Synthetic oligonucleotide
  Antisense strand to SEQ ID NO: 648450
uaaauacagacacacuuuc

SEQ ID NO: 648452 - RNA, 19 nt, Artificial Sequence
  Description of Artificial Sequence: Synthetic oligonucleotide
  Sense strand starting at position 3134 of SEQ ID NO: 585545
gugugucuguauuuacagu

SEQ ID NO: 648453 - RNA, 19 nt, Artificial Sequence
  Description of Artificial Sequence: Synthetic oligonucleotide
  Antisense strand to SEQ ID NO: 648452
acuguaaauacagacacac

SEQ ID NO: 648454 - RNA, 19 nt, Artificial Sequence
  Description of Artificial Sequence: Synthetic oligonucleotide
  Sense strand starting at position 3164 of SEQ ID NO: 585545
gguggaugcucaguaaaca

SEQ ID NO: 648455 - RNA, 19 nt, Artificial Sequence
  Description of Artificial Sequence: Synthetic oligonucleotide
  Antisense strand to SEQ ID NO: 648454
uguuuacugagcauccacc

SEQ ID NO: 648456 - RNA, 19 nt, Artificial Sequence
  Description of Artificial Sequence: Synthetic oligonucleotide
  Sense strand starting at position 3165 of SEQ ID NO: 585545
guggaugcucaguaaacau

SEQ ID NO: 648457 - RNA, 19 nt, Artificial Sequence
  Description of Artificial Sequence: Synthetic oligonucleotide
  Antisense strand to SEQ ID NO: 648456
auguuuacugagcauccac

SEQ ID NO: 648458 - RNA, 19 nt, Artificial Sequence
  Description of Artificial Sequence: Synthetic oligonucleotide
  Sense strand starting at position 3231 of SEQ ID NO: 585545
acuguugaacuuggaauga

SEQ ID NO: 648459 - RNA, 19 nt, Artificial Sequence
  Description of Artificial Sequence: Synthetic oligonucleotide
  Antisense strand to SEQ ID NO: 648458
ucauuccaaguucaacagu

SEQ ID NO: 648460 - RNA, 19 nt, Artificial Sequence
  Description of Artificial Sequence: Synthetic oligonucleotide
  Sense strand starting at position 3242 of SEQ ID NO: 585545
uggaaugaauaguuucuuu

SEQ ID NO: 648461 - RNA, 19 nt, Artificial Sequence
  Description of Artificial Sequence: Synthetic oligonucleotide
  Antisense strand to SEQ ID NO: 648460
aaagaaacuauucauucca

SEQ ID NO: 648462 - RNA, 19 nt, Artificial Sequence
  Description of Artificial Sequence: Synthetic oligonucleotide
  Sense strand starting at position 3293 of SEQ ID NO: 585545
ucauguuagauggacuguu

SEQ ID NO: 648463 - RNA, 19 nt, Artificial Sequence
  Description of Artificial Sequence: Synthetic oligonucleotide
  Antisense strand to SEQ ID NO: 648462
aacaguccaucuaacauga

SEQ ID NO: 648464 - RNA, 19 nt, Artificial Sequence
  Description of Artificial Sequence: Synthetic oligonucleotide
  Sense strand starting at position 3338 of SEQ ID NO: 585545
cugccuauuccauggauaa

SEQ ID NO: 648465 - RNA, 19 nt, Artificial Sequence
  Description of Artificial Sequence: Synthetic oligonucleotide
  Antisense strand to SEQ ID NO: 648464
uuauccauggaauaggcag

SEQ ID NO: 648466 - RNA, 19 nt, Artificial Sequence
  Description of Artificial Sequence: Synthetic oligonucleotide
  Sense strand starting at position 3339 of SEQ ID NO: 585545
ugccuauuccauggauaaa

SEQ ID NO: 648467 - RNA, 19 nt, Artificial Sequence
  Description of Artificial Sequence: Synthetic oligonucleotide
  Antisense strand to SEQ ID NO: 648466
uuuauccauggaauaggca

SEQ ID NO: 648468 - RNA, 19 nt, Artificial Sequence
  Description of Artificial Sequence: Synthetic oligonucleotide
  Sense strand starting at position 3389 of SEQ ID NO: 585545
acaagacaucuaggcugua

SEQ ID NO: 648469 - RNA, 19 nt, Artificial Sequence
  Description of Artificial Sequence: Synthetic oligonucleotide
  Antisense strand to SEQ ID NO: 648468
uacagccuagaugucuugu

SEQ ID NO: 648470 - RNA, 19 nt, Artificial Sequence
  Description of Artificial Sequence: Synthetic oligonucleotide
  Sense strand starting at position 3420 of SEQ ID NO: 585545
aucaguuucugacuuuaag

SEQ ID NO: 648471 - RNA, 19 nt, Artificial Sequence
  Description of Artificial Sequence: Synthetic oligonucleotide
  Antisense strand to SEQ ID NO: 648470
cuuaaagucagaaacugau

SEQ ID NO: 648472 - RNA, 19 nt, Artificial Sequence
  Description of Artificial Sequence: Synthetic oligonucleotide
  Sense strand starting at position 3429 of SEQ ID NO: 585545
ugacuuuaaguaggucaca

SEQ ID NO: 648473 - RNA, 19 nt, Artificial Sequence
  Description of Artificial Sequence: Synthetic oligonucleotide
  Antisense strand to SEQ ID NO: 648472
ugugaccuacuuaaaguca

SEQ ID NO: 648474 - RNA, 19 nt, Artificial Sequence
  Description of Artificial Sequence: Synthetic oligonucleotide
  Sense strand starting at position 3430 of SEQ ID NO: 585545
gacuuuaaguaggucacau

SEQ ID NO: 648475 - RNA, 19 nt, Artificial Sequence
  Description of Artificial Sequence: Synthetic oligonucleotide
  Antisense strand to SEQ ID NO: 648474
augugaccuacuuaaaguc

SEQ ID NO: 648476 - RNA, 19 nt, Artificial Sequence
  Description of Artificial Sequence: Synthetic oligonucleotide
  Sense strand starting at position 3508 of SEQ ID NO: 585545
gaccuucugugauccuaug

SEQ ID NO: 648477 - RNA, 19 nt, Artificial Sequence
  Description of Artificial Sequence: Synthetic oligonucleotide
  Antisense strand to SEQ ID NO: 648476
cauaggaucacagaagguc

SEQ ID NO: 648478 - RNA, 19 nt, Artificial Sequence
  Description of Artificial Sequence: Synthetic oligonucleotide
  Sense strand starting at position 3899 of SEQ ID NO: 585545
ugauuauaauggcuuagca

SEQ ID NO: 648479 - RNA, 19 nt, Artificial Sequence
  Description of Artificial Sequence: Synthetic oligonucleotide
  Antisense strand to SEQ ID NO: 648478
ugcuaagccauuauaauca

SEQ ID NO: 648480 - RNA, 19 nt, Artificial Sequence
  Description of Artificial Sequence: Synthetic oligonucleotide
  Sense strand starting at position 3901 of SEQ ID NO: 585545
auuauaauggcuuagcaga

SEQ ID NO: 648481 - RNA, 19 nt, Artificial Sequence
  Description of Artificial Sequence: Synthetic oligonucleotide
  Antisense strand to SEQ ID NO: 648480
ucugcuaagccauuauaau

SEQ ID NO: 648482 - RNA, 19 nt, Artificial Sequence
  Description of Artificial Sequence: Synthetic oligonucleotide
  Sense strand starting at position 105 of SEQ ID NO: 585546
aaaggaagguuccgaauaa

SEQ ID NO: 648483 - RNA, 19 nt, Artificial Sequence
  Description of Artificial Sequence: Synthetic oligonucleotide
  Antisense strand to SEQ ID NO: 648482
uuauucggaaccuuccuuu

SEQ ID NO: 648484 - RNA, 19 nt, Artificial Sequence
  Description of Artificial Sequence: Synthetic oligonucleotide
  Sense strand starting at position 106 of SEQ ID NO: 585546
aaggaagguuccgaauaaa

SEQ ID NO: 648485 - RNA, 19 nt, Artificial Sequence
  Description of Artificial Sequence: Synthetic oligonucleotide
  Antisense strand to SEQ ID NO: 648484
uuuauucggaaccuuccuu

SEQ ID NO: 648486 - RNA, 19 nt, Artificial Sequence
  Description of Artificial Sequence: Synthetic oligonucleotide
  Sense strand starting at position 109 of SEQ ID NO: 585546
gaagguuccgaauaaaguu

SEQ ID NO: 648487 - RNA, 19 nt, Artificial Sequence
  Description of Artificial Sequence: Synthetic oligonucleotide
  Antisense strand to SEQ ID NO: 648486
aacuuuauucggaaccuuc

SEQ ID NO: 648488 - RNA, 19 nt, Artificial Sequence
  Description of Artificial Sequence: Synthetic oligonucleotide
  Sense strand starting at position 225 of SEQ ID NO: 585546
uggaguacuugggauaauu

SEQ ID NO: 648489 - RNA, 19 nt, Artificial Sequence
  Description of Artificial Sequence: Synthetic oligonucleotide
  Antisense strand to SEQ ID NO: 648488
aauuaucccaaguacucca

SEQ ID NO: 648490 - RNA, 19 nt, Artificial Sequence
  Description of Artificial Sequence: Synthetic oligonucleotide
  Sense strand starting at position 383 of SEQ ID NO: 585546
cuggaccucgguugagauu

SEQ ID NO: 648491 - RNA, 19 nt, Artificial Sequence
  Description of Artificial Sequence: Synthetic oligonucleotide
  Antisense strand to SEQ ID NO: 648490
aaucucaaccgagguccag

SEQ ID NO: 648492 - RNA, 19 nt, Artificial Sequence
  Description of Artificial Sequence: Synthetic oligonucleotide
  Sense strand starting at position 720 of SEQ ID NO: 585546
cacgacaucugguucgagu

SEQ ID NO: 648493 - RNA, 19 nt, Artificial Sequence
  Description of Artificial Sequence: Synthetic oligonucleotide
  Antisense strand to SEQ ID NO: 648492
acucgaaccagaugucgug

SEQ ID NO: 648494 - RNA, 19 nt, Artificial Sequence
  Description of Artificial Sequence: Synthetic oligonucleotide
  Sense strand starting at position 1547 of SEQ ID NO: 585546
gacagcugcuucuugauuu

SEQ ID NO: 648495 - RNA, 19 nt, Artificial Sequence
  Description of Artificial Sequence: Synthetic oligonucleotide
  Antisense strand to SEQ ID NO: 648494
aaaucaagaagcagcuguc

SEQ ID NO: 648496 - RNA, 19 nt, Artificial Sequence
  Description of Artificial Sequence: Synthetic oligonucleotide
  Sense strand starting at position 1620 of SEQ ID NO: 585546
cgggcaucuucugcaucau

SEQ ID NO: 648497 - RNA, 19 nt, Artificial Sequence
  Description of Artificial Sequence: Synthetic oligonucleotide
  Antisense strand to SEQ ID NO: 648496
augaugcagaagaugcccg

SEQ ID NO: 648498 - RNA, 19 nt, Artificial Sequence
  Description of Artificial Sequence: Synthetic oligonucleotide
  Sense strand starting at position 1621 of SEQ ID NO: 585546
gggcaucuucugcaucaua

SEQ ID NO: 648499 - RNA, 19 nt, Artificial Sequence
  Description of Artificial Sequence: Synthetic oligonucleotide
  Antisense strand to SEQ ID NO: 648498
uaugaugcagaagaugccc

SEQ ID NO: 648500 - RNA, 19 nt, Artificial Sequence
  Description of Artificial Sequence: Synthetic oligonucleotide
  Sense strand starting at position 1722 of SEQ ID NO: 585546
cauccauguccggagauga

SEQ ID NO: 648501 - RNA, 19 nt, Artificial Sequence
  Description of Artificial Sequence: Synthetic oligonucleotide
  Antisense strand to SEQ ID NO: 648500
ucaucuccggacauggaug

SEQ ID NO: 648502 - RNA, 19 nt, Artificial Sequence
  Description of Artificial Sequence: Synthetic oligonucleotide
  Sense strand starting at position 1750 of SEQ ID NO: 585546
ggagacagagcucgaauca

SEQ ID NO: 648503 - RNA, 19 nt, Artificial Sequence
  Description of Artificial Sequence: Synthetic oligonucleotide
  Antisense strand to SEQ ID NO: 648502
ugauucgagcucugucucc

SEQ ID NO: 648504 - RNA, 19 nt, Artificial Sequence
  Description of Artificial Sequence: Synthetic oligonucleotide
  Sense strand starting at position 1807 of SEQ ID NO: 585546
ggaggcuuuaggcgggaaa

SEQ ID NO: 648505 - RNA, 19 nt, Artificial Sequence
  Description of Artificial Sequence: Synthetic oligonucleotide
  Antisense strand to SEQ ID NO: 648504
uuucccgccuaaagccucc

SEQ ID NO: 648506 - RNA, 19 nt, Artificial Sequence
  Description of Artificial Sequence: Synthetic oligonucleotide
  Sense strand starting at position 1808 of SEQ ID NO: 585546
gaggcuuuaggcgggaaau

SEQ ID NO: 648507 - RNA, 19 nt, Artificial Sequence
  Description of Artificial Sequence: Synthetic oligonucleotide
  Antisense strand to SEQ ID NO: 648506
auuucccgccuaaagccuc

SEQ ID NO: 648508 - RNA, 19 nt, Artificial Sequence
  Description of Artificial Sequence: Synthetic oligonucleotide
  Sense strand starting at position 1809 of SEQ ID NO: 585546
aggcuuuaggcgggaaauu

SEQ ID NO: 648509 - RNA, 19 nt, Artificial Sequence
  Description of Artificial Sequence: Synthetic oligonucleotide
  Antisense strand to SEQ ID NO: 648508
aauuucccgccuaaagccu

SEQ ID NO: 648510 - RNA, 19 nt, Artificial Sequence
  Description of Artificial Sequence: Synthetic oligonucleotide
  Sense strand starting at position 1810 of SEQ ID NO: 585546
ggcuuuaggcgggaaauua

SEQ ID NO: 648511 - RNA, 19 nt, Artificial Sequence
  Description of Artificial Sequence: Synthetic oligonucleotide
  Antisense strand to SEQ ID NO: 648510
uaauuucccgccuaaagcc

SEQ ID NO: 648512 - RNA, 19 nt, Artificial Sequence
  Description of Artificial Sequence: Synthetic oligonucleotide
  Sense strand starting at position 1875 of SEQ ID NO: 585546
ccacuucuccgcggcaaga

SEQ ID NO: 648513 - RNA, 19 nt, Artificial Sequence
  Description of Artificial Sequence: Synthetic oligonucleotide
  Antisense strand to SEQ ID NO: 648512
ucuugccgcggagaagugg

SEQ ID NO: 648514 - RNA, 19 nt, Artificial Sequence
  Description of Artificial Sequence: Synthetic oligonucleotide
  Sense strand starting at position 1982 of SEQ ID NO: 585546
guuggugugugcuugaacu

SEQ ID NO: 648515 - RNA, 19 nt, Artificial Sequence
  Description of Artificial Sequence: Synthetic oligonucleotide
  Antisense strand to SEQ ID NO: 648514
aguucaagcacacaccaac

SEQ ID NO: 648516 - RNA, 19 nt, Artificial Sequence
  Description of Artificial Sequence: Synthetic oligonucleotide
  Sense strand starting at position 1984 of SEQ ID NO: 585546
uggugugugcuugaacuaa

SEQ ID NO: 648517 - RNA, 19 nt, Artificial Sequence
  Description of Artificial Sequence: Synthetic oligonucleotide
  Antisense strand to SEQ ID NO: 648516
uuaguucaagcacacacca

SEQ ID NO: 648518 - RNA, 19 nt, Artificial Sequence
  Description of Artificial Sequence: Synthetic oligonucleotide
  Sense strand starting at position 2125 of SEQ ID NO: 585546
ugucccauuuagcaaggau

SEQ ID NO: 648519 - RNA, 19 nt, Artificial Sequence
  Description of Artificial Sequence: Synthetic oligonucleotide
  Antisense strand to SEQ ID NO: 648518
auccuugcuaaaugggaca

SEQ ID NO: 648520 - RNA, 19 nt, Artificial Sequence
  Description of Artificial Sequence: Synthetic oligonucleotide
  Sense strand starting at position 2364 of SEQ ID NO: 585546
gguggagguuccucugagu

SEQ ID NO: 648521 - RNA, 19 nt, Artificial Sequence
  Description of Artificial Sequence: Synthetic oligonucleotide
  Antisense strand to SEQ ID NO: 648520
acucagaggaaccuccacc

SEQ ID NO: 648522 - RNA, 19 nt, Artificial Sequence
  Description of Artificial Sequence: Synthetic oligonucleotide
  Sense strand starting at position 2429 of SEQ ID NO: 585546
cucccaaguuuagagaaau

SEQ ID NO: 648523 - RNA, 19 nt, Artificial Sequence
  Description of Artificial Sequence: Synthetic oligonucleotide
  Antisense strand to SEQ ID NO: 648522
auuucucuaaacuugggag

SEQ ID NO: 648524 - RNA, 19 nt, Artificial Sequence
  Description of Artificial Sequence: Synthetic oligonucleotide
  Sense strand starting at position 2548 of SEQ ID NO: 585546
gccgacuuucucugucuca

SEQ ID NO: 648525 - RNA, 19 nt, Artificial Sequence
  Description of Artificial Sequence: Synthetic oligonucleotide
  Antisense strand to SEQ ID NO: 648524
ugagacagagaaagucggc

SEQ ID NO: 648526 - RNA, 19 nt, Artificial Sequence
  Description of Artificial Sequence: Synthetic oligonucleotide
  Sense strand starting at position 2549 of SEQ ID NO: 585546
ccgacuuucucugucucaa

SEQ ID NO: 648527 - RNA, 19 nt, Artificial Sequence
  Description of Artificial Sequence: Synthetic oligonucleotide
  Antisense strand to SEQ ID NO: 648526
uugagacagagaaagucgg

SEQ ID NO: 648528 - RNA, 19 nt, Artificial Sequence
  Description of Artificial Sequence: Synthetic oligonucleotide
  Sense strand starting at position 2640 of SEQ ID NO: 585546
ugugguuucaacgggaugu

SEQ ID NO: 648529 - RNA, 19 nt, Artificial Sequence
  Description of Artificial Sequence: Synthetic oligonucleotide
  Antisense strand to SEQ ID NO: 648528
acaucccguugaaaccaca

SEQ ID NO: 648530 - RNA, 19 nt, Artificial Sequence
  Description of Artificial Sequence: Synthetic oligonucleotide
  Sense strand starting at position 2644 of SEQ ID NO: 585546
guuucaacgggauguccau

SEQ ID NO: 648531 - RNA, 19 nt, Artificial Sequence
  Description of Artificial Sequence: Synthetic oligonucleotide
  Antisense strand to SEQ ID NO: 648530
auggacaucccguugaaac

SEQ ID NO: 648532 - RNA, 19 nt, Artificial Sequence
  Description of Artificial Sequence: Synthetic oligonucleotide
  Sense strand starting at position 2813 of SEQ ID NO: 585546
auguuaaugucacaagaaa

SEQ ID NO: 648533 - RNA, 19 nt, Artificial Sequence
  Description of Artificial Sequence: Synthetic oligonucleotide
  Antisense strand to SEQ ID NO: 648532
uuucuugugacauuaacau

SEQ ID NO: 648534 - RNA, 19 nt, Artificial Sequence
  Description of Artificial Sequence: Synthetic oligonucleotide
  Sense strand starting at position 2905 of SEQ ID NO: 585546
cagagagauuguucccacu

SEQ ID NO: 648535 - RNA, 19 nt, Artificial Sequence
  Description of Artificial Sequence: Synthetic oligonucleotide
  Antisense strand to SEQ ID NO: 648534
agugggaacaaucucucug

SEQ ID NO: 648536 - RNA, 19 nt, Artificial Sequence
  Description of Artificial Sequence: Synthetic oligonucleotide
  Sense strand starting at position 2908 of SEQ ID NO: 585546
agagauuguucccacucca

SEQ ID NO: 648537 - RNA, 19 nt, Artificial Sequence
  Description of Artificial Sequence: Synthetic oligonucleotide
  Antisense strand to SEQ ID NO: 648536
uggagugggaacaaucucu

SEQ ID NO: 648538 - RNA, 19 nt, Artificial Sequence
  Description of Artificial Sequence: Synthetic oligonucleotide
  Sense strand starting at position 3345 of SEQ ID NO: 585546
ugaucaagacuuuagcuca

SEQ ID NO: 648539 - RNA, 19 nt, Artificial Sequence
  Description of Artificial Sequence: Synthetic oligonucleotide
  Antisense strand to SEQ ID NO: 648538
ugagcuaaagucuugauca

SEQ ID NO: 648540 - RNA, 19 nt, Artificial Sequence
  Description of Artificial Sequence: Synthetic oligonucleotide
  Sense strand starting at position 3490 of SEQ ID NO: 585546
cugagagucucgguggaag

SEQ ID NO: 648541 - RNA, 19 nt, Artificial Sequence
  Description of Artificial Sequence: Synthetic oligonucleotide
  Antisense strand to SEQ ID NO: 648540
cuuccaccgagacucucag

SEQ ID NO: 648542 - RNA, 19 nt, Artificial Sequence
  Description of Artificial Sequence: Synthetic oligonucleotide
  Sense strand starting at position 3491 of SEQ ID NO: 585546
ugagagucucgguggaagu

SEQ ID NO: 648543 - RNA, 19 nt, Artificial Sequence
  Description of Artificial Sequence: Synthetic oligonucleotide
  Antisense strand to SEQ ID NO: 648542
acuuccaccgagacucuca

SEQ ID NO: 648544 - RNA, 19 nt, Artificial Sequence
  Description of Artificial Sequence: Synthetic oligonucleotide
  Sense strand starting at position 3502 of SEQ ID NO: 585546
guggaagugugaaaucgaa

SEQ ID NO: 648545 - RNA, 19 nt, Artificial Sequence
  Description of Artificial Sequence: Synthetic oligonucleotide
  Antisense strand to SEQ ID NO: 648544
uucgauuucacacuuccac

SEQ ID NO: 648546 - RNA, 19 nt, Artificial Sequence
  Description of Artificial Sequence: Synthetic oligonucleotide
  Sense strand starting at position 3514 of SEQ ID NO: 585546
aaucgaaucaaucgcggaa

SEQ ID NO: 648547 - RNA, 19 nt, Artificial Sequence
  Description of Artificial Sequence: Synthetic oligonucleotide
  Antisense strand to SEQ ID NO: 648546
uuccgcgauugauucgauu

SEQ ID NO: 648548 - RNA, 19 nt, Artificial Sequence
  Description of Artificial Sequence: Synthetic oligonucleotide
  Sense strand starting at position 3645 of SEQ ID NO: 585546
cggaguuugcacgcucuga

SEQ ID NO: 648549 - RNA, 19 nt, Artificial Sequence
  Description of Artificial Sequence: Synthetic oligonucleotide
  Antisense strand to SEQ ID NO: 648548
ucagagcgugcaaacuccg

SEQ ID NO: 648550 - RNA, 19 nt, Artificial Sequence
  Description of Artificial Sequence: Synthetic oligonucleotide
  Sense strand starting at position 3817 of SEQ ID NO: 585546
ggaaguuagugcucuugca

SEQ ID NO: 648551 - RNA, 19 nt, Artificial Sequence
  Description of Artificial Sequence: Synthetic oligonucleotide
  Antisense strand to SEQ ID NO: 648550
ugcaagagcacuaacuucc

SEQ ID NO: 648552 - RNA, 19 nt, Artificial Sequence
  Description of Artificial Sequence: Synthetic oligonucleotide
  Sense strand starting at position 3824 of SEQ ID NO: 585546
agugcucuugcagauugga

SEQ ID NO: 648553 - RNA, 19 nt, Artificial Sequence
  Description of Artificial Sequence: Synthetic oligonucleotide
  Antisense strand to SEQ ID NO: 648552
uccaaucugcaagagcacu

SEQ ID NO: 648554 - RNA, 19 nt, Artificial Sequence
  Description of Artificial Sequence: Synthetic oligonucleotide
  Sense strand starting at position 3902 of SEQ ID NO: 585546
uagauuggauguggaaaga

SEQ ID NO: 648555 - RNA, 19 nt, Artificial Sequence
  Description of Artificial Sequence: Synthetic oligonucleotide
  Antisense strand to SEQ ID NO: 648554
ucuuuccacauccaaucua

SEQ ID NO: 648556 - RNA, 19 nt, Artificial Sequence
  Description of Artificial Sequence: Synthetic oligonucleotide
  Sense strand starting at position 3913 of SEQ ID NO: 585546
uggaaagacuaauguccaa

SEQ ID NO: 648557 - RNA, 19 nt, Artificial Sequence
  Description of Artificial Sequence: Synthetic oligonucleotide
  Antisense strand to SEQ ID NO: 648556
uuggacauuagucuuucca

SEQ ID NO: 648558 - RNA, 19 nt, Artificial Sequence
  Description of Artificial Sequence: Synthetic oligonucleotide
  Sense strand starting at position 3971 of SEQ ID NO: 585546
ucaccagacucgccaauaa

SEQ ID NO: 648559 - RNA, 19 nt, Artificial Sequence
  Description of Artificial Sequence: Synthetic oligonucleotide
  Antisense strand to SEQ ID NO: 648558
uuauuggcgagucugguga

SEQ ID NO: 648560 - RNA, 19 nt, Artificial Sequence
  Description of Artificial Sequence: Synthetic oligonucleotide
  Sense strand starting at position 3983 of SEQ ID NO: 585546
ccaauaagauagugacaua

SEQ ID NO: 648561 - RNA, 19 nt, Artificial Sequence
  Description of Artificial Sequence: Synthetic oligonucleotide
  Antisense strand to SEQ ID NO: 648560
uaugucacuaucuuauugg

SEQ ID NO: 648562 - RNA, 19 nt, Artificial Sequence
  Description of Artificial Sequence: Synthetic oligonucleotide
  Sense strand starting at position 82 of SEQ ID NO: 585547
uuugcagagauugguaauu

SEQ ID NO: 648563 - RNA, 19 nt, Artificial Sequence
  Description of Artificial Sequence: Synthetic oligonucleotide
  Antisense strand to SEQ ID NO: 648562
aauuaccaaucucugcaaa

SEQ ID NO: 648564 - RNA, 19 nt, Artificial Sequence
  Description of Artificial Sequence: Synthetic oligonucleotide
  Sense strand starting at position 413 of SEQ ID NO: 585547
gugugagcucaucagaaau

SEQ ID NO: 648565 - RNA, 19 nt, Artificial Sequence
  Description of Artificial Sequence: Synthetic oligonucleotide
  Antisense strand to SEQ ID NO: 648564
auuucugaugagcucacac

SEQ ID NO: 648566 - RNA, 19 nt, Artificial Sequence
  Description of Artificial Sequence: Synthetic oligonucleotide
  Sense strand starting at position 484 of SEQ ID NO: 585547
agccaaggaaauuguguuu

SEQ ID NO: 648567 - RNA, 19 nt, Artificial Sequence
  Description of Artificial Sequence: Synthetic oligonucleotide
  Antisense strand to SEQ ID NO: 648566
aaacacaauuuccuuggcu

SEQ ID NO: 648568 - RNA, 19 nt, Artificial Sequence
  Description of Artificial Sequence: Synthetic oligonucleotide
  Sense strand starting at position 746 of SEQ ID NO: 585547
augagugggagucaaucuu

SEQ ID NO: 648569 - RNA, 19 nt, Artificial Sequence
  Description of Artificial Sequence: Synthetic oligonucleotide
  Antisense strand to SEQ ID NO: 648568
aagauugacucccacucau

SEQ ID NO: 648570 - RNA, 19 nt, Artificial Sequence
  Description of Artificial Sequence: Synthetic oligonucleotide
  Sense strand starting at position 778 of SEQ ID NO: 585547
uuauuauaagugugugaag

SEQ ID NO: 648571 - RNA, 19 nt, Artificial Sequence
  Description of Artificial Sequence: Synthetic oligonucleotide
  Antisense strand to SEQ ID NO: 648570
cuucacacacuuauaauaa

SEQ ID NO: 648572 - RNA, 19 nt, Artificial Sequence
  Description of Artificial Sequence: Synthetic oligonucleotide
  Sense strand starting at position 779 of SEQ ID NO: 585547
uauuauaagugugugaaga

SEQ ID NO: 648573 - RNA, 19 nt, Artificial Sequence
  Description of Artificial Sequence: Synthetic oligonucleotide
  Antisense strand to SEQ ID NO: 648572
ucuucacacacuuauaaua

SEQ ID NO: 648574 - RNA, 19 nt, Artificial Sequence
  Description of Artificial Sequence: Synthetic oligonucleotide
  Sense strand starting at position 780 of SEQ ID NO: 585547
auuauaagugugugaagau

SEQ ID NO: 648575 - RNA, 19 nt, Artificial Sequence
  Description of Artificial Sequence: Synthetic oligonucleotide
  Antisense strand to SEQ ID NO: 648574
aucuucacacacuuauaau

SEQ ID NO: 648576 - RNA, 19 nt, Artificial Sequence
  Description of Artificial Sequence: Synthetic oligonucleotide
  Sense strand starting at position 964 of SEQ ID NO: 585547
agauguucccaacaguaac

SEQ ID NO: 648577 - RNA, 19 nt, Artificial Sequence
  Description of Artificial Sequence: Synthetic oligonucleotide
  Antisense strand to SEQ ID NO: 648576
guuacuguugggaacaucu

SEQ ID NO: 648578 - RNA, 19 nt, Artificial Sequence
  Description of Artificial Sequence: Synthetic oligonucleotide
  Sense strand starting at position 1113 of SEQ ID NO: 585547
guguuugcuguuucgaacu

SEQ ID NO: 648579 - RNA, 19 nt, Artificial Sequence
  Description of Artificial Sequence: Synthetic oligonucleotide
  Antisense strand to SEQ ID NO: 648578
aguucgaaacagcaaacac

SEQ ID NO: 648580 - RNA, 19 nt, Artificial Sequence
  Description of Artificial Sequence: Synthetic oligonucleotide
  Sense strand starting at position 1156 of SEQ ID NO: 585547
gagagaaagaucugcgaua

SEQ ID NO: 648581 - RNA, 19 nt, Artificial Sequence
  Description of Artificial Sequence: Synthetic oligonucleotide
  Antisense strand to SEQ ID NO: 648580
uaucgcagaucuuucucuc

SEQ ID NO: 648582 - RNA, 19 nt, Artificial Sequence
  Description of Artificial Sequence: Synthetic oligonucleotide
  Sense strand starting at position 1157 of SEQ ID NO: 585547
agagaaagaucugcgauag

SEQ ID NO: 648583 - RNA, 19 nt, Artificial Sequence
  Description of Artificial Sequence: Synthetic oligonucleotide
  Antisense strand to SEQ ID NO: 648582
cuaucgcagaucuuucucu

SEQ ID NO: 648584 - RNA, 19 nt, Artificial Sequence
  Description of Artificial Sequence: Synthetic oligonucleotide
  Sense strand starting at position 1158 of SEQ ID NO: 585547
gagaaagaucugcgauagu

SEQ ID NO: 648585 - RNA, 19 nt, Artificial Sequence
  Description of Artificial Sequence: Synthetic oligonucleotide
  Antisense strand to SEQ ID NO: 648584
acuaucgcagaucuuucuc

SEQ ID NO: 648586 - RNA, 19 nt, Artificial Sequence
  Description of Artificial Sequence: Synthetic oligonucleotide
  Sense strand starting at position 1193 of SEQ ID NO: 585547
ggcugacuugggcagugau

SEQ ID NO: 648587 - RNA, 19 nt, Artificial Sequence
  Description of Artificial Sequence: Synthetic oligonucleotide
  Antisense strand to SEQ ID NO: 648586
aucacugcccaagucagcc

SEQ ID NO: 648588 - RNA, 19 nt, Artificial Sequence
  Description of Artificial Sequence: Synthetic oligonucleotide
  Sense strand starting at position 1202 of SEQ ID NO: 585547
gggcagugaugggucugaa

SEQ ID NO: 648589 - RNA, 19 nt, Artificial Sequence
  Description of Artificial Sequence: Synthetic oligonucleotide
  Antisense strand to SEQ ID NO: 648588
uucagacccaucacugccc

SEQ ID NO: 648590 - RNA, 19 nt, Artificial Sequence
  Description of Artificial Sequence: Synthetic oligonucleotide
  Sense strand starting at position 1205 of SEQ ID NO: 585547
cagugaugggucugaaucu

SEQ ID NO: 648591 - RNA, 19 nt, Artificial Sequence
  Description of Artificial Sequence: Synthetic oligonucleotide
  Antisense strand to SEQ ID NO: 648590
agauucagacccaucacug

SEQ ID NO: 648592 - RNA, 19 nt, Artificial Sequence
  Description of Artificial Sequence: Synthetic oligonucleotide
  Sense strand starting at position 1388 of SEQ ID NO: 585547
acaugcagguucucaaaga

SEQ ID NO: 648593 - RNA, 19 nt, Artificial Sequence
  Description of Artificial Sequence: Synthetic oligonucleotide
  Antisense strand to SEQ ID NO: 648592
ucuuugagaaccugcaugu

SEQ ID NO: 648594 - RNA, 19 nt, Artificial Sequence
  Description of Artificial Sequence: Synthetic oligonucleotide
  Sense strand starting at position 1423 of SEQ ID NO: 585547
gauguucucggugaaacca

SEQ ID NO: 648595 - RNA, 19 nt, Artificial Sequence
  Description of Artificial Sequence: Synthetic oligonucleotide
  Antisense strand to SEQ ID NO: 648594
ugguuucaccgagaacauc

SEQ ID NO: 648596 - RNA, 19 nt, Artificial Sequence
  Description of Artificial Sequence: Synthetic oligonucleotide
  Sense strand starting at position 1583 of SEQ ID NO: 585547
ucggucugggccuaaacaa

SEQ ID NO: 648597 - RNA, 19 nt, Artificial Sequence
  Description of Artificial Sequence: Synthetic oligonucleotide
  Antisense strand to SEQ ID NO: 648596
uuguuuaggcccagaccga

SEQ ID NO: 648598 - RNA, 19 nt, Artificial Sequence
  Description of Artificial Sequence: Synthetic oligonucleotide
  Sense strand starting at position 2208 of SEQ ID NO: 585547
gggauugccucuuugaccu

SEQ ID NO: 648599 - RNA, 19 nt, Artificial Sequence
  Description of Artificial Sequence: Synthetic oligonucleotide
  Antisense strand to SEQ ID NO: 648598
aggucaaagaggcaauccc

SEQ ID NO: 648600 - RNA, 19 nt, Artificial Sequence
  Description of Artificial Sequence: Synthetic oligonucleotide
  Sense strand starting at position 2274 of SEQ ID NO: 585547
ucgucaucucugcucguaa

SEQ ID NO: 648601 - RNA, 19 nt, Artificial Sequence
  Description of Artificial Sequence: Synthetic oligonucleotide
  Antisense strand to SEQ ID NO: 648600
uuacgagcagagaugacga

SEQ ID NO: 648602 - RNA, 19 nt, Artificial Sequence
  Description of Artificial Sequence: Synthetic oligonucleotide
  Sense strand starting at position 2291 of SEQ ID NO: 585547
aagguaugcuuagccugaa

SEQ ID NO: 648603 - RNA, 19 nt, Artificial Sequence
  Description of Artificial Sequence: Synthetic oligonucleotide
  Antisense strand to SEQ ID NO: 648602
uucaggcuaagcauaccuu

SEQ ID NO: 648604 - RNA, 19 nt, Artificial Sequence
  Description of Artificial Sequence: Synthetic oligonucleotide
  Sense strand starting at position 2295 of SEQ ID NO: 585547
uaugcuuagccugaaaguc

SEQ ID NO: 648605 - RNA, 19 nt, Artificial Sequence
  Description of Artificial Sequence: Synthetic oligonucleotide
  Antisense strand to SEQ ID NO: 648604
gacuuucaggcuaagcaua

SEQ ID NO: 648606 - RNA, 19 nt, Artificial Sequence
  Description of Artificial Sequence: Synthetic oligonucleotide
  Sense strand starting at position 2323 of SEQ ID NO: 585547
ccuuauagcugauuaacag

SEQ ID NO: 648607 - RNA, 19 nt, Artificial Sequence
  Description of Artificial Sequence: Synthetic oligonucleotide
  Antisense strand to SEQ ID NO: 648606
cuguuaaucagcuauaagg

SEQ ID NO: 648608 - RNA, 19 nt, Artificial Sequence
  Description of Artificial Sequence: Synthetic oligonucleotide
  Sense strand starting at position 2324 of SEQ ID NO: 585547
cuuauagcugauuaacagu

SEQ ID NO: 648609 - RNA, 19 nt, Artificial Sequence
  Description of Artificial Sequence: Synthetic oligonucleotide
  Antisense strand to SEQ ID NO: 648608
acuguuaaucagcuauaag

SEQ ID NO: 648610 - RNA, 19 nt, Artificial Sequence
  Description of Artificial Sequence: Synthetic oligonucleotide
  Sense strand starting at position 2332 of SEQ ID NO: 585547
ugauuaacagugugaguuu

SEQ ID NO: 648611 - RNA, 19 nt, Artificial Sequence
  Description of Artificial Sequence: Synthetic oligonucleotide
  Antisense strand to SEQ ID NO: 648610
aaacucacacuguuaauca

SEQ ID NO: 648612 - RNA, 19 nt, Artificial Sequence
  Description of Artificial Sequence: Synthetic oligonucleotide
  Sense strand starting at position 2335 of SEQ ID NO: 585547
uuaacagugugaguuugaa

SEQ ID NO: 648613 - RNA, 19 nt, Artificial Sequence
  Description of Artificial Sequence: Synthetic oligonucleotide
  Antisense strand to SEQ ID NO: 648612
uucaaacucacacuguuaa

SEQ ID NO: 648614 - RNA, 19 nt, Artificial Sequence
  Description of Artificial Sequence: Synthetic oligonucleotide
  Sense strand starting at position 2343 of SEQ ID NO: 585547
gugaguuugaauugacgac

SEQ ID NO: 648615 - RNA, 19 nt, Artificial Sequence
  Description of Artificial Sequence: Synthetic oligonucleotide
  Antisense strand to SEQ ID NO: 648614
gucgucaauucaaacucac

SEQ ID NO: 648616 - RNA, 19 nt, Artificial Sequence
  Description of Artificial Sequence: Synthetic oligonucleotide
  Sense strand starting at position 2344 of SEQ ID NO: 585547
ugaguuugaauugacgacu

SEQ ID NO: 648617 - RNA, 19 nt, Artificial Sequence
  Description of Artificial Sequence: Synthetic oligonucleotide
  Antisense strand to SEQ ID NO: 648616
agucgucaauucaaacuca

SEQ ID NO: 648618 - RNA, 19 nt, Artificial Sequence
  Description of Artificial Sequence: Synthetic oligonucleotide
  Sense strand starting at position 2347 of SEQ ID NO: 585547
guuugaauugacgacucua

SEQ ID NO: 648619 - RNA, 19 nt, Artificial Sequence
  Description of Artificial Sequence: Synthetic oligonucleotide
  Antisense strand to SEQ ID NO: 648618
uagagucgucaauucaaac

SEQ ID NO: 648620 - RNA, 19 nt, Artificial Sequence
  Description of Artificial Sequence: Synthetic oligonucleotide
  Sense strand starting at position 2570 of SEQ ID NO: 585547
gguggucuuauagaacaug

SEQ ID NO: 648621 - RNA, 19 nt, Artificial Sequence
  Description of Artificial Sequence: Synthetic oligonucleotide
  Antisense strand to SEQ ID NO: 648620
cauguucuauaagaccacc

SEQ ID NO: 648622 - RNA, 19 nt, Artificial Sequence
  Description of Artificial Sequence: Synthetic oligonucleotide
  Sense strand starting at position 2633 of SEQ ID NO: 585547
accauuaucgauggacauu

SEQ ID NO: 648623 - RNA, 19 nt, Artificial Sequence
  Description of Artificial Sequence: Synthetic oligonucleotide
  Antisense strand to SEQ ID NO: 648622
aauguccaucgauaauggu

SEQ ID NO: 648624 - RNA, 19 nt, Artificial Sequence
  Description of Artificial Sequence: Synthetic oligonucleotide
  Sense strand starting at position 2744 of SEQ ID NO: 585547
ccgaguuuaacagauguug

SEQ ID NO: 648625 - RNA, 19 nt, Artificial Sequence
  Description of Artificial Sequence: Synthetic oligonucleotide
  Antisense strand to SEQ ID NO: 648624
caacaucuguuaaacucgg

SEQ ID NO: 648626 - RNA, 19 nt, Artificial Sequence
  Description of Artificial Sequence: Synthetic oligonucleotide
  Sense strand starting at position 2852 of SEQ ID NO: 585547
gaagcuaguguguauauau

SEQ ID NO: 648627 - RNA, 19 nt, Artificial Sequence
  Description of Artificial Sequence: Synthetic oligonucleotide
  Antisense strand to SEQ ID NO: 648626
auauauacacacuagcuuc

SEQ ID NO: 648628 - RNA, 19 nt, Artificial Sequence
  Description of Artificial Sequence: Synthetic oligonucleotide
  Sense strand starting at position 2910 of SEQ ID NO: 585547
guagaaauauuguuugguu

SEQ ID NO: 648629 - RNA, 19 nt, Artificial Sequence
  Description of Artificial Sequence: Synthetic oligonucleotide
  Antisense strand to SEQ ID NO: 648628
aaccaaacaauauuucuac

SEQ ID NO: 648630 - RNA, 19 nt, Artificial Sequence
  Description of Artificial Sequence: Synthetic oligonucleotide
  Sense strand starting at position 2911 of SEQ ID NO: 585547
uagaaauauuguuugguug

SEQ ID NO: 648631 - RNA, 19 nt, Artificial Sequence
  Description of Artificial Sequence: Synthetic oligonucleotide
  Antisense strand to SEQ ID NO: 648630
caaccaaacaauauuucua

SEQ ID NO: 648632 - RNA, 19 nt, Artificial Sequence
  Description of Artificial Sequence: Synthetic oligonucleotide
  Sense strand starting at position 2912 of SEQ ID NO: 585547
agaaauauuguuugguugu

SEQ ID NO: 648633 - RNA, 19 nt, Artificial Sequence
  Description of Artificial Sequence: Synthetic oligonucleotide
  Antisense strand to SEQ ID NO: 648632
acaaccaaacaauauuucu

SEQ ID NO: 648634 - RNA, 19 nt, Artificial Sequence
  Description of Artificial Sequence: Synthetic oligonucleotide
  Sense strand starting at position 2934 of SEQ ID NO: 585547
agaauaguaucugcugaau

SEQ ID NO: 648635 - RNA, 19 nt, Artificial Sequence
  Description of Artificial Sequence: Synthetic oligonucleotide
  Antisense strand to SEQ ID NO: 648634
auucagcagauacuauucu

SEQ ID NO: 648636 - RNA, 19 nt, Artificial Sequence
  Description of Artificial Sequence: Synthetic oligonucleotide
  Sense strand starting at position 2937 of SEQ ID NO: 585547
auaguaucugcugaauaua

SEQ ID NO: 648637 - RNA, 19 nt, Artificial Sequence
  Description of Artificial Sequence: Synthetic oligonucleotide
  Antisense strand to SEQ ID NO: 648636
uauauucagcagauacuau

SEQ ID NO: 648638 - RNA, 19 nt, Artificial Sequence
  Description of Artificial Sequence: Synthetic oligonucleotide
  Sense strand starting at position 2940 of SEQ ID NO: 585547
guaucugcugaauauacua

SEQ ID NO: 648639 - RNA, 19 nt, Artificial Sequence
  Description of Artificial Sequence: Synthetic oligonucleotide
  Antisense strand to SEQ ID NO: 648638
uaguauauucagcagauac

SEQ ID NO: 648640 - RNA, 19 nt, Artificial Sequence
  Description of Artificial Sequence: Synthetic oligonucleotide
  Sense strand starting at position 3421 of SEQ ID NO: 585547
ccucaaugguuucugagaa

SEQ ID NO: 648641 - RNA, 19 nt, Artificial Sequence
  Description of Artificial Sequence: Synthetic oligonucleotide
  Antisense strand to SEQ ID NO: 648640
uucucagaaaccauugagg

SEQ ID NO: 648642 - RNA, 19 nt, Artificial Sequence
  Description of Artificial Sequence: Synthetic oligonucleotide
  Sense strand starting at position 12 of SEQ ID NO: 585548
auguguaucaggugggaaa

SEQ ID NO: 648643 - RNA, 19 nt, Artificial Sequence
  Description of Artificial Sequence: Synthetic oligonucleotide
  Antisense strand to SEQ ID NO: 648642
uuucccaccugauacacau

SEQ ID NO: 648644 - RNA, 19 nt, Artificial Sequence
  Description of Artificial Sequence: Synthetic oligonucleotide
  Sense strand starting at position 23 of SEQ ID NO: 585548
gugggaaauucuccugauu

SEQ ID NO: 648645 - RNA, 19 nt, Artificial Sequence
  Description of Artificial Sequence: Synthetic oligonucleotide
  Antisense strand to SEQ ID NO: 648644
aaucaggagaauuucccac

SEQ ID NO: 648646 - RNA, 19 nt, Artificial Sequence
  Description of Artificial Sequence: Synthetic oligonucleotide
  Sense strand starting at position 76 of SEQ ID NO: 585548
ccugcuuaagauugggaau

SEQ ID NO: 648647 - RNA, 19 nt, Artificial Sequence
  Description of Artificial Sequence: Synthetic oligonucleotide
  Antisense strand to SEQ ID NO: 648646
auucccaaucuuaagcagg

SEQ ID NO: 648648 - RNA, 19 nt, Artificial Sequence
  Description of Artificial Sequence: Synthetic oligonucleotide
  Sense strand starting at position 167 of SEQ ID NO: 585548
auuccuugaaagugaugga

SEQ ID NO: 648649 - RNA, 19 nt, Artificial Sequence
  Description of Artificial Sequence: Synthetic oligonucleotide
  Antisense strand to SEQ ID NO: 648648
uccaucacuuucaaggaau

SEQ ID NO: 648650 - RNA, 19 nt, Artificial Sequence
  Description of Artificial Sequence: Synthetic oligonucleotide
  Sense strand starting at position 171 of SEQ ID NO: 585548
cuugaaagugauggagcua

SEQ ID NO: 648651 - RNA, 19 nt, Artificial Sequence
  Description of Artificial Sequence: Synthetic oligonucleotide
  Antisense strand to SEQ ID NO: 648650
uagcuccaucacuuucaag

SEQ ID NO: 648652 - RNA, 19 nt, Artificial Sequence
  Description of Artificial Sequence: Synthetic oligonucleotide
  Sense strand starting at position 699 of SEQ ID NO: 585548
gagcaaguuugacccaaca

SEQ ID NO: 648653 - RNA, 19 nt, Artificial Sequence
  Description of Artificial Sequence: Synthetic oligonucleotide
  Antisense strand to SEQ ID NO: 648652
uguugggucaaacuugcuc

SEQ ID NO: 648654 - RNA, 19 nt, Artificial Sequence
  Description of Artificial Sequence: Synthetic oligonucleotide
  Sense strand starting at position 855 of SEQ ID NO: 585548
ccuaacugucuagauuagu

SEQ ID NO: 648655 - RNA, 19 nt, Artificial Sequence
  Description of Artificial Sequence: Synthetic oligonucleotide
  Antisense strand to SEQ ID NO: 648654
acuaaucuagacaguuagg

SEQ ID NO: 648656 - RNA, 19 nt, Artificial Sequence
  Description of Artificial Sequence: Synthetic oligonucleotide
  Sense strand starting at position 871 of SEQ ID NO: 585548
agugcuauccaguauaaau

SEQ ID NO: 648657 - RNA, 19 nt, Artificial Sequence
  Description of Artificial Sequence: Synthetic oligonucleotide
  Antisense strand to SEQ ID NO: 648656
auuuauacuggauagcacu

SEQ ID NO: 648658 - RNA, 19 nt, Artificial Sequence
  Description of Artificial Sequence: Synthetic oligonucleotide
  Sense strand starting at position 887 of SEQ ID NO: 585548
aauguaauguaagccagaa

SEQ ID NO: 648659 - RNA, 19 nt, Artificial Sequence
  Description of Artificial Sequence: Synthetic oligonucleotide
  Antisense strand to SEQ ID NO: 648658
uucuggcuuacauuacauu

SEQ ID NO: 648660 - RNA, 19 nt, Artificial Sequence
  Description of Artificial Sequence: Synthetic oligonucleotide
  Sense strand starting at position 902 of SEQ ID NO: 585548
agaaaugcgagccacauau

SEQ ID NO: 648661 - RNA, 19 nt, Artificial Sequence
  Description of Artificial Sequence: Synthetic oligonucleotide
  Antisense strand to SEQ ID NO: 648660
auauguggcucgcauuucu

SEQ ID NO: 648662 - RNA, 19 nt, Artificial Sequence
  Description of Artificial Sequence: Synthetic oligonucleotide
  Sense strand starting at position 906 of SEQ ID NO: 585548
augcgagccacauauggau

SEQ ID NO: 648663 - RNA, 19 nt, Artificial Sequence
  Description of Artificial Sequence: Synthetic oligonucleotide
  Antisense strand to SEQ ID NO: 648662
auccauauguggcucgcau

SEQ ID NO: 648664 - RNA, 19 nt, Artificial Sequence
  Description of Artificial Sequence: Synthetic oligonucleotide
  Sense strand starting at position 1187 of SEQ ID NO: 585548
guggcuacugaaugaauga

SEQ ID NO: 648665 - RNA, 19 nt, Artificial Sequence
  Description of Artificial Sequence: Synthetic oligonucleotide
  Antisense strand to SEQ ID NO: 648664
ucauucauucaguagccac

SEQ ID NO: 648666 - RNA, 19 nt, Artificial Sequence
  Description of Artificial Sequence: Synthetic oligonucleotide
  Sense strand starting at position 1663 of SEQ ID NO: 585548
aagagucauuucuaggaaa

SEQ ID NO: 648667 - RNA, 19 nt, Artificial Sequence
  Description of Artificial Sequence: Synthetic oligonucleotide
  Antisense strand to SEQ ID NO: 648666
uuuccuagaaaugacucuu

SEQ ID NO: 648668 - RNA, 19 nt, Artificial Sequence
  Description of Artificial Sequence: Synthetic oligonucleotide
  Sense strand starting at position 1666 of SEQ ID NO: 585548
agucauuucuaggaaacau

SEQ ID NO: 648669 - RNA, 19 nt, Artificial Sequence
  Description of Artificial Sequence: Synthetic oligonucleotide
  Antisense strand to SEQ ID NO: 648668
auguuuccuagaaaugacu

SEQ ID NO: 648670 - RNA, 19 nt, Artificial Sequence
  Description of Artificial Sequence: Synthetic oligonucleotide
  Sense strand starting at position 2278 of SEQ ID NO: 585548
aggccaaacugugcaauuu

SEQ ID NO: 648671 - RNA, 19 nt, Artificial Sequence
  Description of Artificial Sequence: Synthetic oligonucleotide
  Antisense strand to SEQ ID NO: 648670
aaauugcacaguuuggccu

SEQ ID NO: 648672 - RNA, 19 nt, Artificial Sequence
  Description of Artificial Sequence: Synthetic oligonucleotide
  Sense strand starting at position 2290 of SEQ ID NO: 585548
gcaauuuacuguuucuuag

SEQ ID NO: 648673 - RNA, 19 nt, Artificial Sequence
  Description of Artificial Sequence: Synthetic oligonucleotide
  Antisense strand to SEQ ID NO: 648672
cuaagaaacaguaaauugc

SEQ ID NO: 648674 - RNA, 19 nt, Artificial Sequence
  Description of Artificial Sequence: Synthetic oligonucleotide
  Sense strand starting at position 2325 of SEQ ID NO: 585548
cugagcaggaaaugauauu

SEQ ID NO: 648675 - RNA, 19 nt, Artificial Sequence
  Description of Artificial Sequence: Synthetic oligonucleotide
  Antisense strand to SEQ ID NO: 648674
aauaucauuuccugcucag

SEQ ID NO: 648676 - RNA, 19 nt, Artificial Sequence
  Description of Artificial Sequence: Synthetic oligonucleotide
  Sense strand starting at position 2602 of SEQ ID NO: 585548
uugucaaagugaucuugaa

SEQ ID NO: 648677 - RNA, 19 nt, Artificial Sequence
  Description of Artificial Sequence: Synthetic oligonucleotide
  Antisense strand to SEQ ID NO: 648676
uucaagaucacuuugacaa

SEQ ID NO: 648678 - RNA, 19 nt, Artificial Sequence
  Description of Artificial Sequence: Synthetic oligonucleotide
  Sense strand starting at position 2624 of SEQ ID NO: 585548
uggagcuauuuagaaagga

SEQ ID NO: 648679 - RNA, 19 nt, Artificial Sequence
  Description of Artificial Sequence: Synthetic oligonucleotide
  Antisense strand to SEQ ID NO: 648678
uccuuucuaaauagcucca

SEQ ID NO: 648680 - RNA, 19 nt, Artificial Sequence
  Description of Artificial Sequence: Synthetic oligonucleotide
  Sense strand starting at position 2692 of SEQ ID NO: 585548
ucaaguuuccuagagcaga

SEQ ID NO: 648681 - RNA, 19 nt, Artificial Sequence
  Description of Artificial Sequence: Synthetic oligonucleotide
  Antisense strand to SEQ ID NO: 648680
ucugcucuaggaaacuuga

SEQ ID NO: 648682 - RNA, 19 nt, Artificial Sequence
  Description of Artificial Sequence: Synthetic oligonucleotide
  Sense strand starting at position 2761 of SEQ ID NO: 585548
gcucauuuaugcuucugga

SEQ ID NO: 648683 - RNA, 19 nt, Artificial Sequence
  Description of Artificial Sequence: Synthetic oligonucleotide
  Antisense strand to SEQ ID NO: 648682
uccagaagcauaaaugagc

SEQ ID NO: 648684 - RNA, 19 nt, Artificial Sequence
  Description of Artificial Sequence: Synthetic oligonucleotide
  Sense strand starting at position 2769 of SEQ ID NO: 585548
augcuucuggaugaaaucu

SEQ ID NO: 648685 - RNA, 19 nt, Artificial Sequence
  Description of Artificial Sequence: Synthetic oligonucleotide
  Antisense strand to SEQ ID NO: 648684
agauuucauccagaagcau

SEQ ID NO: 648686 - RNA, 19 nt, Artificial Sequence
  Description of Artificial Sequence: Synthetic oligonucleotide
  Sense strand starting at position 2779 of SEQ ID NO: 585548
augaaaucuugagcauuga

SEQ ID NO: 648687 - RNA, 19 nt, Artificial Sequence
  Description of Artificial Sequence: Synthetic oligonucleotide
  Antisense strand to SEQ ID NO: 648686
ucaaugcucaagauuucau

SEQ ID NO: 648688 - RNA, 19 nt, Artificial Sequence
  Description of Artificial Sequence: Synthetic oligonucleotide
  Sense strand starting at position 2783 of SEQ ID NO: 585548
aaucuugagcauugaggaa

SEQ ID NO: 648689 - RNA, 19 nt, Artificial Sequence
  Description of Artificial Sequence: Synthetic oligonucleotide
  Antisense strand to SEQ ID NO: 648688
uuccucaaugcucaagauu

SEQ ID NO: 648690 - RNA, 19 nt, Artificial Sequence
  Description of Artificial Sequence: Synthetic oligonucleotide
  Sense strand starting at position 2795 of SEQ ID NO: 585548
ugaggaauuucucagauac

SEQ ID NO: 648691 - RNA, 19 nt, Artificial Sequence
  Description of Artificial Sequence: Synthetic oligonucleotide
  Antisense strand to SEQ ID NO: 648690
guaucugagaaauuccuca

SEQ ID NO: 648692 - RNA, 19 nt, Artificial Sequence
  Description of Artificial Sequence: Synthetic oligonucleotide
  Sense strand starting at position 2797 of SEQ ID NO: 585548
aggaauuucucagauacac

SEQ ID NO: 648693 - RNA, 19 nt, Artificial Sequence
  Description of Artificial Sequence: Synthetic oligonucleotide
  Antisense strand to SEQ ID NO: 648692
guguaucugagaaauuccu

SEQ ID NO: 648694 - RNA, 19 nt, Artificial Sequence
  Description of Artificial Sequence: Synthetic oligonucleotide
  Sense strand starting at position 2897 of SEQ ID NO: 585548
gucacaugauaucccucau

SEQ ID NO: 648695 - RNA, 19 nt, Artificial Sequence
  Description of Artificial Sequence: Synthetic oligonucleotide
  Antisense strand to SEQ ID NO: 648694
augagggauaucaugugac

SEQ ID NO: 648696 - RNA, 19 nt, Artificial Sequence
  Description of Artificial Sequence: Synthetic oligonucleotide
  Sense strand starting at position 2930 of SEQ ID NO: 585548
ucguguguuguucuucaga

SEQ ID NO: 648697 - RNA, 19 nt, Artificial Sequence
  Description of Artificial Sequence: Synthetic oligonucleotide
  Antisense strand to SEQ ID NO: 648696
ucugaagaacaacacacga

SEQ ID NO: 648698 - RNA, 19 nt, Artificial Sequence
  Description of Artificial Sequence: Synthetic oligonucleotide
  Sense strand starting at position 2979 of SEQ ID NO: 585548
uuggaagggucauuccuuu

SEQ ID NO: 648699 - RNA, 19 nt, Artificial Sequence
  Description of Artificial Sequence: Synthetic oligonucleotide
  Antisense strand to SEQ ID NO: 648698
aaaggaaugacccuuccaa

SEQ ID NO: 648700 - RNA, 19 nt, Artificial Sequence
  Description of Artificial Sequence: Synthetic oligonucleotide
  Sense strand starting at position 3121 of SEQ ID NO: 585548
ucgggcauuauaugagaca

SEQ ID NO: 648701 - RNA, 19 nt, Artificial Sequence
  Description of Artificial Sequence: Synthetic oligonucleotide
  Antisense strand to SEQ ID NO: 648700
ugucucauauaaugcccga

SEQ ID NO: 648702 - RNA, 19 nt, Artificial Sequence
  Description of Artificial Sequence: Synthetic oligonucleotide
  Sense strand starting at position 3179 of SEQ ID NO: 585548
cagggugaucggcacauau

SEQ ID NO: 648703 - RNA, 19 nt, Artificial Sequence
  Description of Artificial Sequence: Synthetic oligonucleotide
  Antisense strand to SEQ ID NO: 648702
auaugugccgaucacccug

SEQ ID NO: 648704 - RNA, 19 nt, Artificial Sequence
  Description of Artificial Sequence: Synthetic oligonucleotide
  Sense strand starting at position 3183 of SEQ ID NO: 585548
gugaucggcacauaucuaa

SEQ ID NO: 648705 - RNA, 19 nt, Artificial Sequence
  Description of Artificial Sequence: Synthetic oligonucleotide
  Antisense strand to SEQ ID NO: 648704
uuagauaugugccgaucac

SEQ ID NO: 648706 - RNA, 19 nt, Artificial Sequence
  Description of Artificial Sequence: Synthetic oligonucleotide
  Sense strand starting at position 3382 of SEQ ID NO: 585548
guuagaaagcuguaggaga

SEQ ID NO: 648707 - RNA, 19 nt, Artificial Sequence
  Description of Artificial Sequence: Synthetic oligonucleotide
  Antisense strand to SEQ ID NO: 648706
ucuccuacagcuuucuaac

SEQ ID NO: 648708 - RNA, 19 nt, Artificial Sequence
  Description of Artificial Sequence: Synthetic oligonucleotide
  Sense strand starting at position 3616 of SEQ ID NO: 585548
cccucugaucuugagcaaa

SEQ ID NO: 648709 - RNA, 19 nt, Artificial Sequence
  Description of Artificial Sequence: Synthetic oligonucleotide
  Antisense strand to SEQ ID NO: 648708
uuugcucaagaucagaggg

SEQ ID NO: 648710 - RNA, 19 nt, Artificial Sequence
  Description of Artificial Sequence: Synthetic oligonucleotide
  Sense strand starting at position 3619 of SEQ ID NO: 585548
ucugaucuugagcaaauca

SEQ ID NO: 648711 - RNA, 19 nt, Artificial Sequence
  Description of Artificial Sequence: Synthetic oligonucleotide
  Antisense strand to SEQ ID NO: 648710
ugauuugcucaagaucaga

SEQ ID NO: 648712 - RNA, 19 nt, Artificial Sequence
  Description of Artificial Sequence: Synthetic oligonucleotide
  Sense strand starting at position 3731 of SEQ ID NO: 585548
cggacucgaaagcauauua

SEQ ID NO: 648713 - RNA, 19 nt, Artificial Sequence
  Description of Artificial Sequence: Synthetic oligonucleotide
  Antisense strand to SEQ ID NO: 648712
uaauaugcuuucgaguccg

SEQ ID NO: 648714 - RNA, 19 nt, Artificial Sequence
  Description of Artificial Sequence: Synthetic oligonucleotide
  Sense strand starting at position 3938 of SEQ ID NO: 585548
aacagagguuuaccauguu

SEQ ID NO: 648715 - RNA, 19 nt, Artificial Sequence
  Description of Artificial Sequence: Synthetic oligonucleotide
  Antisense strand to SEQ ID NO: 648714
aacaugguaaaccucuguu

SEQ ID NO: 648716 - RNA, 19 nt, Artificial Sequence
  Description of Artificial Sequence: Synthetic oligonucleotide
  Sense strand starting at position 3947 of SEQ ID NO: 585548
uuaccauguuaucuagacu

SEQ ID NO: 648717 - RNA, 19 nt, Artificial Sequence
  Description of Artificial Sequence: Synthetic oligonucleotide
  Antisense strand to SEQ ID NO: 648716
agucuagauaacaugguaa

SEQ ID NO: 648718 - RNA, 19 nt, Artificial Sequence
  Description of Artificial Sequence: Synthetic oligonucleotide
  Sense strand starting at position 3950 of SEQ ID NO: 585548
ccauguuaucuagacuuag

SEQ ID NO: 648719 - RNA, 19 nt, Artificial Sequence
  Description of Artificial Sequence: Synthetic oligonucleotide
  Antisense strand to SEQ ID NO: 648718
cuaagucuagauaacaugg

SEQ ID NO: 648720 - RNA, 19 nt, Artificial Sequence
  Description of Artificial Sequence: Synthetic oligonucleotide
  Sense strand starting at position 3966 of SEQ ID NO: 585548
uagggaggguaucuaucau

SEQ ID NO: 648721 - RNA, 19 nt, Artificial Sequence
  Description of Artificial Sequence: Synthetic oligonucleotide
  Antisense strand to SEQ ID NO: 648720
augauagauacccucccua

SEQ ID NO: 648722 - RNA, 19 nt, Artificial Sequence
  Description of Artificial Sequence: Synthetic oligonucleotide
  Sense strand starting at position 17 of SEQ ID NO: 585549
auuuaagagcuccgcugaa

SEQ ID NO: 648723 - RNA, 19 nt, Artificial Sequence
  Description of Artificial Sequence: Synthetic oligonucleotide
  Antisense strand to SEQ ID NO: 648722
uucagcggagcucuuaaau

SEQ ID NO: 648724 - RNA, 19 nt, Artificial Sequence
  Description of Artificial Sequence: Synthetic oligonucleotide
  Sense strand starting at position 45 of SEQ ID NO: 585549
acuugcugaauaggugaaa

SEQ ID NO: 648725 - RNA, 19 nt, Artificial Sequence
  Description of Artificial Sequence: Synthetic oligonucleotide
  Antisense strand to SEQ ID NO: 648724
uuucaccuauucagcaagu

SEQ ID NO: 648726 - RNA, 19 nt, Artificial Sequence
  Description of Artificial Sequence: Synthetic oligonucleotide
  Sense strand starting at position 89 of SEQ ID NO: 585549
ugccauguucccuauauac

SEQ ID NO: 648727 - RNA, 19 nt, Artificial Sequence
  Description of Artificial Sequence: Synthetic oligonucleotide
  Antisense strand to SEQ ID NO: 648726
guauauagggaacauggca

SEQ ID NO: 648728 - RNA, 19 nt, Artificial Sequence
  Description of Artificial Sequence: Synthetic oligonucleotide
  Sense strand starting at position 303 of SEQ ID NO: 585549
cgggaacaucuggguaaac

SEQ ID NO: 648729 - RNA, 19 nt, Artificial Sequence
  Description of Artificial Sequence: Synthetic oligonucleotide
  Antisense strand to SEQ ID NO: 648728
guuuacccagauguucccg

SEQ ID NO: 648730 - RNA, 19 nt, Artificial Sequence
  Description of Artificial Sequence: Synthetic oligonucleotide
  Sense strand starting at position 361 of SEQ ID NO: 585549
auaagaacacuuugucuag

SEQ ID NO: 648731 - RNA, 19 nt, Artificial Sequence
  Description of Artificial Sequence: Synthetic oligonucleotide
  Antisense strand to SEQ ID NO: 648730
cuagacaaaguguucuuau

SEQ ID NO: 648732 - RNA, 19 nt, Artificial Sequence
  Description of Artificial Sequence: Synthetic oligonucleotide
  Sense strand starting at position 365 of SEQ ID NO: 585549
gaacacuuugucuagagca

SEQ ID NO: 648733 - RNA, 19 nt, Artificial Sequence
  Description of Artificial Sequence: Synthetic oligonucleotide
  Antisense strand to SEQ ID NO: 648732
ugcucuagacaaaguguuc

SEQ ID NO: 648734 - RNA, 19 nt, Artificial Sequence
  Description of Artificial Sequence: Synthetic oligonucleotide
  Sense strand starting at position 417 of SEQ ID NO: 585549
guuucuaauguggaauuau

SEQ ID NO: 648735 - RNA, 19 nt, Artificial Sequence
  Description of Artificial Sequence: Synthetic oligonucleotide
  Antisense strand to SEQ ID NO: 648734
auaauuccacauuagaaac

SEQ ID NO: 648736 - RNA, 19 nt, Artificial Sequence
  Description of Artificial Sequence: Synthetic oligonucleotide
  Sense strand starting at position 568 of SEQ ID NO: 585549
ggcaaacuggucuaggcaa

SEQ ID NO: 648737 - RNA, 19 nt, Artificial Sequence
  Description of Artificial Sequence: Synthetic oligonucleotide
  Antisense strand to SEQ ID NO: 648736
uugccuagaccaguuugcc

SEQ ID NO: 648738 - RNA, 19 nt, Artificial Sequence
  Description of Artificial Sequence: Synthetic oligonucleotide
  Sense strand starting at position 583 of SEQ ID NO: 585549
gcaacacauuugucauguu

SEQ ID NO: 648739 - RNA, 19 nt, Artificial Sequence
  Description of Artificial Sequence: Synthetic oligonucleotide
  Antisense strand to SEQ ID NO: 648738
aacaugacaaauguguugc

SEQ ID NO: 648740 - RNA, 19 nt, Artificial Sequence
  Description of Artificial Sequence: Synthetic oligonucleotide
  Sense strand starting at position 620 of SEQ ID NO: 585549
cugucauggagagaugcua

SEQ ID NO: 648741 - RNA, 19 nt, Artificial Sequence
  Description of Artificial Sequence: Synthetic oligonucleotide
  Antisense strand to SEQ ID NO: 648740
uagcaucucuccaugacag

SEQ ID NO: 648742 - RNA, 19 nt, Artificial Sequence
  Description of Artificial Sequence: Synthetic oligonucleotide
  Sense strand starting at position 948 of SEQ ID NO: 585549
cuuugcucaguauaaggaa

SEQ ID NO: 648743 - RNA, 19 nt, Artificial Sequence
  Description of Artificial Sequence: Synthetic oligonucleotide
  Antisense strand to SEQ ID NO: 648742
uuccuuauacugagcaaag

SEQ ID NO: 648744 - RNA, 19 nt, Artificial Sequence
  Description of Artificial Sequence: Synthetic oligonucleotide
  Sense strand starting at position 1064 of SEQ ID NO: 585549
cuuucuuuaucaguugaag

SEQ ID NO: 648745 - RNA, 19 nt, Artificial Sequence
  Description of Artificial Sequence: Synthetic oligonucleotide
  Antisense strand to SEQ ID NO: 648744
cuucaacugauaaagaaag

SEQ ID NO: 648746 - RNA, 19 nt, Artificial Sequence
  Description of Artificial Sequence: Synthetic oligonucleotide
  Sense strand starting at position 1184 of SEQ ID NO: 585549
aacauugagccuugggagu

SEQ ID NO: 648747 - RNA, 19 nt, Artificial Sequence
  Description of Artificial Sequence: Synthetic oligonucleotide
  Antisense strand to SEQ ID NO: 648746
acucccaaggcucaauguu

SEQ ID NO: 648748 - RNA, 19 nt, Artificial Sequence
  Description of Artificial Sequence: Synthetic oligonucleotide
  Sense strand starting at position 2020 of SEQ ID NO: 585549
gggcuaacaucacucaauu

SEQ ID NO: 648749 - RNA, 19 nt, Artificial Sequence
  Description of Artificial Sequence: Synthetic oligonucleotide
  Antisense strand to SEQ ID NO: 648748
aauugagugauguuagccc

SEQ ID NO: 648750 - RNA, 19 nt, Artificial Sequence
  Description of Artificial Sequence: Synthetic oligonucleotide
  Sense strand starting at position 2070 of SEQ ID NO: 585549
agggaauacauuggcuuga

SEQ ID NO: 648751 - RNA, 19 nt, Artificial Sequence
  Description of Artificial Sequence: Synthetic oligonucleotide
  Antisense strand to SEQ ID NO: 648750
ucaagccaauguauucccu

SEQ ID NO: 648752 - RNA, 19 nt, Artificial Sequence
  Description of Artificial Sequence: Synthetic oligonucleotide
  Sense strand starting at position 2071 of SEQ ID NO: 585549
gggaauacauuggcuugau

SEQ ID NO: 648753 - RNA, 19 nt, Artificial Sequence
  Description of Artificial Sequence: Synthetic oligonucleotide
  Antisense strand to SEQ ID NO: 648752
aucaagccaauguauuccc

SEQ ID NO: 648754 - RNA, 19 nt, Artificial Sequence
  Description of Artificial Sequence: Synthetic oligonucleotide
  Sense strand starting at position 2072 of SEQ ID NO: 585549
ggaauacauuggcuugaug

SEQ ID NO: 648755 - RNA, 19 nt, Artificial Sequence
  Description of Artificial Sequence: Synthetic oligonucleotide
  Antisense strand to SEQ ID NO: 648754
caucaagccaauguauucc

SEQ ID NO: 648756 - RNA, 19 nt, Artificial Sequence
  Description of Artificial Sequence: Synthetic oligonucleotide
  Sense strand starting at position 2217 of SEQ ID NO: 585549
agguaauaauguuucucca

SEQ ID NO: 648757 - RNA, 19 nt, Artificial Sequence
  Description of Artificial Sequence: Synthetic oligonucleotide
  Antisense strand to SEQ ID NO: 648756
uggagaaacauuauuaccu

SEQ ID NO: 648758 - RNA, 19 nt, Artificial Sequence
  Description of Artificial Sequence: Synthetic oligonucleotide
  Sense strand starting at position 2397 of SEQ ID NO: 585549
ggcauaagaagugguuaca

SEQ ID NO: 648759 - RNA, 19 nt, Artificial Sequence
  Description of Artificial Sequence: Synthetic oligonucleotide
  Antisense strand to SEQ ID NO: 648758
uguaaccacuucuuaugcc

SEQ ID NO: 648760 - RNA, 19 nt, Artificial Sequence
  Description of Artificial Sequence: Synthetic oligonucleotide
  Sense strand starting at position 2485 of SEQ ID NO: 585549
cauagaccuguuuggaauu

SEQ ID NO: 648761 - RNA, 19 nt, Artificial Sequence
  Description of Artificial Sequence: Synthetic oligonucleotide
  Antisense strand to SEQ ID NO: 648760
aauuccaaacaggucuaug

SEQ ID NO: 648762 - RNA, 19 nt, Artificial Sequence
  Description of Artificial Sequence: Synthetic oligonucleotide
  Sense strand starting at position 2518 of SEQ ID NO: 585549
ucugaagacuuccucgaua

SEQ ID NO: 648763 - RNA, 19 nt, Artificial Sequence
  Description of Artificial Sequence: Synthetic oligonucleotide
  Antisense strand to SEQ ID NO: 648762
uaucgaggaagucuucaga

SEQ ID NO: 648764 - RNA, 19 nt, Artificial Sequence
  Description of Artificial Sequence: Synthetic oligonucleotide
  Sense strand starting at position 2520 of SEQ ID NO: 585549
ugaagacuuccucgauaga

SEQ ID NO: 648765 - RNA, 19 nt, Artificial Sequence
  Description of Artificial Sequence: Synthetic oligonucleotide
  Antisense strand to SEQ ID NO: 648764
ucuaucgaggaagucuuca

SEQ ID NO: 648766 - RNA, 19 nt, Artificial Sequence
  Description of Artificial Sequence: Synthetic oligonucleotide
  Sense strand starting at position 2633 of SEQ ID NO: 585549
auggaauuagaguggccua

SEQ ID NO: 648767 - RNA, 19 nt, Artificial Sequence
  Description of Artificial Sequence: Synthetic oligonucleotide
  Antisense strand to SEQ ID NO: 648766
uaggccacucuaauuccau

SEQ ID NO: 648768 - RNA, 19 nt, Artificial Sequence
  Description of Artificial Sequence: Synthetic oligonucleotide
  Sense strand starting at position 2636 of SEQ ID NO: 585549
gaauuagaguggccuacaa

SEQ ID NO: 648769 - RNA, 19 nt, Artificial Sequence
  Description of Artificial Sequence: Synthetic oligonucleotide
  Antisense strand to SEQ ID NO: 648768
uuguaggccacucuaauuc

SEQ ID NO: 648770 - RNA, 19 nt, Artificial Sequence
  Description of Artificial Sequence: Synthetic oligonucleotide
  Sense strand starting at position 2638 of SEQ ID NO: 585549
auuagaguggccuacaaca

SEQ ID NO: 648771 - RNA, 19 nt, Artificial Sequence
  Description of Artificial Sequence: Synthetic oligonucleotide
  Antisense strand to SEQ ID NO: 648770
uguuguaggccacucuaau

SEQ ID NO: 648772 - RNA, 19 nt, Artificial Sequence
  Description of Artificial Sequence: Synthetic oligonucleotide
  Sense strand starting at position 2737 of SEQ ID NO: 585549
auuuguaaauaccaagagu

SEQ ID NO: 648773 - RNA, 19 nt, Artificial Sequence
  Description of Artificial Sequence: Synthetic oligonucleotide
  Antisense strand to SEQ ID NO: 648772
acucuugguauuuacaaau

SEQ ID NO: 648774 - RNA, 19 nt, Artificial Sequence
  Description of Artificial Sequence: Synthetic oligonucleotide
  Sense strand starting at position 2965 of SEQ ID NO: 585549
gcauuuaucuuagaaacag

SEQ ID NO: 648775 - RNA, 19 nt, Artificial Sequence
  Description of Artificial Sequence: Synthetic oligonucleotide
  Antisense strand to SEQ ID NO: 648774
cuguuucuaagauaaaugc

SEQ ID NO: 648776 - RNA, 19 nt, Artificial Sequence
  Description of Artificial Sequence: Synthetic oligonucleotide
  Sense strand starting at position 3155 of SEQ ID NO: 585549
cucuuauauugagcugaaa

SEQ ID NO: 648777 - RNA, 19 nt, Artificial Sequence
  Description of Artificial Sequence: Synthetic oligonucleotide
  Antisense strand to SEQ ID NO: 648776
uuucagcucaauauaagag

SEQ ID NO: 648778 - RNA, 19 nt, Artificial Sequence
  Description of Artificial Sequence: Synthetic oligonucleotide
  Sense strand starting at position 3295 of SEQ ID NO: 585549
ugaguuuggacauguuacu

SEQ ID NO: 648779 - RNA, 19 nt, Artificial Sequence
  Description of Artificial Sequence: Synthetic oligonucleotide
  Antisense strand to SEQ ID NO: 648778
aguaacauguccaaacuca

SEQ ID NO: 648780 - RNA, 19 nt, Artificial Sequence
  Description of Artificial Sequence: Synthetic oligonucleotide
  Sense strand starting at position 3308 of SEQ ID NO: 585549
guuacuuuacccuacagga

SEQ ID NO: 648781 - RNA, 19 nt, Artificial Sequence
  Description of Artificial Sequence: Synthetic oligonucleotide
  Antisense strand to SEQ ID NO: 648780
uccuguaggguaaaguaac

SEQ ID NO: 648782 - RNA, 19 nt, Artificial Sequence
  Description of Artificial Sequence: Synthetic oligonucleotide
  Sense strand starting at position 3324 of SEQ ID NO: 585549
ggaugacagucuucucauu

SEQ ID NO: 648783 - RNA, 19 nt, Artificial Sequence
  Description of Artificial Sequence: Synthetic oligonucleotide
  Antisense strand to SEQ ID NO: 648782
aaugagaagacugucaucc

SEQ ID NO: 648784 - RNA, 19 nt, Artificial Sequence
  Description of Artificial Sequence: Synthetic oligonucleotide
  Sense strand starting at position 3326 of SEQ ID NO: 585549
augacagucuucucauuac

SEQ ID NO: 648785 - RNA, 19 nt, Artificial Sequence
  Description of Artificial Sequence: Synthetic oligonucleotide
  Antisense strand to SEQ ID NO: 648784
guaaugagaagacugucau

SEQ ID NO: 648786 - RNA, 19 nt, Artificial Sequence
  Description of Artificial Sequence: Synthetic oligonucleotide
  Sense strand starting at position 3386 of SEQ ID NO: 585549
gucuguuagcaggauuaaa

SEQ ID NO: 648787 - RNA, 19 nt, Artificial Sequence
  Description of Artificial Sequence: Synthetic oligonucleotide
  Antisense strand to SEQ ID NO: 648786
uuuaauccugcuaacagac

SEQ ID NO: 648788 - RNA, 19 nt, Artificial Sequence
  Description of Artificial Sequence: Synthetic oligonucleotide
  Sense strand starting at position 3404 of SEQ ID NO: 585549
augaguauacauugcaaua

SEQ ID NO: 648789 - RNA, 19 nt, Artificial Sequence
  Description of Artificial Sequence: Synthetic oligonucleotide
  Antisense strand to SEQ ID NO: 648788
uauugcaauguauacucau

SEQ ID NO: 648790 - RNA, 19 nt, Artificial Sequence
  Description of Artificial Sequence: Synthetic oligonucleotide
  Sense strand starting at position 3709 of SEQ ID NO: 585549
cuaccaguacaaugaaagu

SEQ ID NO: 648791 - RNA, 19 nt, Artificial Sequence
  Description of Artificial Sequence: Synthetic oligonucleotide
  Antisense strand to SEQ ID NO: 648790
acuuucauuguacugguag

SEQ ID NO: 648792 - RNA, 19 nt, Artificial Sequence
  Description of Artificial Sequence: Synthetic oligonucleotide
  Sense strand starting at position 3772 of SEQ ID NO: 585549
cuugacucuccuuagguuu

SEQ ID NO: 648793 - RNA, 19 nt, Artificial Sequence
  Description of Artificial Sequence: Synthetic oligonucleotide
  Antisense strand to SEQ ID NO: 648792
aaaccuaaggagagucaag

SEQ ID NO: 648794 - RNA, 19 nt, Artificial Sequence
  Description of Artificial Sequence: Synthetic oligonucleotide
  Sense strand starting at position 3780 of SEQ ID NO: 585549
uccuuagguuuaccaauga

SEQ ID NO: 648795 - RNA, 19 nt, Artificial Sequence
  Description of Artificial Sequence: Synthetic oligonucleotide
  Antisense strand to SEQ ID NO: 648794
ucauugguaaaccuaagga

SEQ ID NO: 648796 - RNA, 19 nt, Artificial Sequence
  Description of Artificial Sequence: Synthetic oligonucleotide
  Sense strand starting at position 3899 of SEQ ID NO: 585549
aauaguguuugauuacgga

SEQ ID NO: 648797 - RNA, 19 nt, Artificial Sequence
  Description of Artificial Sequence: Synthetic oligonucleotide
  Antisense strand to SEQ ID NO: 648796
uccguaaucaaacacuauu

SEQ ID NO: 648798 - RNA, 19 nt, Artificial Sequence
  Description of Artificial Sequence: Synthetic oligonucleotide
  Sense strand starting at position 3913 of SEQ ID NO: 585549
acggaaacuuucuucuuau

SEQ ID NO: 648799 - RNA, 19 nt, Artificial Sequence
  Description of Artificial Sequence: Synthetic oligonucleotide
  Antisense strand to SEQ ID NO: 648798
auaagaagaaaguuuccgu

SEQ ID NO: 648800 - RNA, 19 nt, Artificial Sequence
  Description of Artificial Sequence: Synthetic oligonucleotide
  Sense strand starting at position 3914 of SEQ ID NO: 585549
cggaaacuuucuucuuaug

SEQ ID NO: 648801 - RNA, 19 nt, Artificial Sequence
  Description of Artificial Sequence: Synthetic oligonucleotide
  Antisense strand to SEQ ID NO: 648800
cauaagaagaaaguuuccg

SEQ ID NO: 648802 - RNA, 19 nt, Artificial Sequence
  Description of Artificial Sequence: Synthetic oligonucleotide
  Sense strand starting at position 198 of SEQ ID NO: 585550
ggaaauuagcuuuacucuu

SEQ ID NO: 648803 - RNA, 19 nt, Artificial Sequence
  Description of Artificial Sequence: Synthetic oligonucleotide
  Antisense strand to SEQ ID NO: 648802
aagaguaaagcuaauuucc

SEQ ID NO: 648804 - RNA, 19 nt, Artificial Sequence
  Description of Artificial Sequence: Synthetic oligonucleotide
  Sense strand starting at position 326 of SEQ ID NO: 585550
auuuaagagcuccgcugaa

SEQ ID NO: 648805 - RNA, 19 nt, Artificial Sequence
  Description of Artificial Sequence: Synthetic oligonucleotide
  Antisense strand to SEQ ID NO: 648804
uucagcggagcucuuaaau

SEQ ID NO: 648806 - RNA, 19 nt, Artificial Sequence
  Description of Artificial Sequence: Synthetic oligonucleotide
  Sense strand starting at position 338 of SEQ ID NO: 585550
cgcugaaaccugcaauacu

SEQ ID NO: 648807 - RNA, 19 nt, Artificial Sequence
  Description of Artificial Sequence: Synthetic oligonucleotide
  Antisense strand to SEQ ID NO: 648806
aguauugcagguuucagcg

SEQ ID NO: 648808 - RNA, 19 nt, Artificial Sequence
  Description of Artificial Sequence: Synthetic oligonucleotide
  Sense strand starting at position 347 of SEQ ID NO: 585550
cugcaauacuugcugaaua

SEQ ID NO: 648809 - RNA, 19 nt, Artificial Sequence
  Description of Artificial Sequence: Synthetic oligonucleotide
  Antisense strand to SEQ ID NO: 648808
uauucagcaaguauugcag

SEQ ID NO: 648810 - RNA, 19 nt, Artificial Sequence
  Description of Artificial Sequence: Synthetic oligonucleotide
  Sense strand starting at position 354 of SEQ ID NO: 585550
acuugcugaauaggugaaa

SEQ ID NO: 648811 - RNA, 19 nt, Artificial Sequence
  Description of Artificial Sequence: Synthetic oligonucleotide
  Antisense strand to SEQ ID NO: 648810
uuucaccuauucagcaagu

SEQ ID NO: 648812 - RNA, 19 nt, Artificial Sequence
  Description of Artificial Sequence: Synthetic oligonucleotide
  Sense strand starting at position 398 of SEQ ID NO: 585550
ugccauguucccuauauac

SEQ ID NO: 648813 - RNA, 19 nt, Artificial Sequence
  Description of Artificial Sequence: Synthetic oligonucleotide
  Antisense strand to SEQ ID NO: 648812
guauauagggaacauggca

SEQ ID NO: 648814 - RNA, 19 nt, Artificial Sequence
  Description of Artificial Sequence: Synthetic oligonucleotide
  Sense strand starting at position 612 of SEQ ID NO: 585550
cgggaacaucuggguaaac

SEQ ID NO: 648815 - RNA, 19 nt, Artificial Sequence
  Description of Artificial Sequence: Synthetic oligonucleotide
  Antisense strand to SEQ ID NO: 648814
guuuacccagauguucccg

SEQ ID NO: 648816 - RNA, 19 nt, Artificial Sequence
  Description of Artificial Sequence: Synthetic oligonucleotide
  Sense strand starting at position 670 of SEQ ID NO: 585550
auaagaacacuuugucuag

SEQ ID NO: 648817 - RNA, 19 nt, Artificial Sequence
  Description of Artificial Sequence: Synthetic oligonucleotide
  Antisense strand to SEQ ID NO: 648816
cuagacaaaguguucuuau

SEQ ID NO: 648818 - RNA, 19 nt, Artificial Sequence
  Description of Artificial Sequence: Synthetic oligonucleotide
  Sense strand starting at position 674 of SEQ ID NO: 585550
gaacacuuugucuagagca

SEQ ID NO: 648819 - RNA, 19 nt, Artificial Sequence
  Description of Artificial Sequence: Synthetic oligonucleotide
  Antisense strand to SEQ ID NO: 648818
ugcucuagacaaaguguuc

SEQ ID NO: 648820 - RNA, 19 nt, Artificial Sequence
  Description of Artificial Sequence: Synthetic oligonucleotide
  Sense strand starting at position 726 of SEQ ID NO: 585550
guuucuaauguggaauuau

SEQ ID NO: 648821 - RNA, 19 nt, Artificial Sequence
  Description of Artificial Sequence: Synthetic oligonucleotide
  Antisense strand to SEQ ID NO: 648820
auaauuccacauuagaaac

SEQ ID NO: 648822 - RNA, 19 nt, Artificial Sequence
  Description of Artificial Sequence: Synthetic oligonucleotide
  Sense strand starting at position 877 of SEQ ID NO: 585550
ggcaaacuggucuaggcaa

SEQ ID NO: 648823 - RNA, 19 nt, Artificial Sequence
  Description of Artificial Sequence: Synthetic oligonucleotide
  Antisense strand to SEQ ID NO: 648822
uugccuagaccaguuugcc

SEQ ID NO: 648824 - RNA, 19 nt, Artificial Sequence
  Description of Artificial Sequence: Synthetic oligonucleotide
  Sense strand starting at position 892 of SEQ ID NO: 585550
gcaacacauuugucauguu

SEQ ID NO: 648825 - RNA, 19 nt, Artificial Sequence
  Description of Artificial Sequence: Synthetic oligonucleotide
  Antisense strand to SEQ ID NO: 648824
aacaugacaaauguguugc

SEQ ID NO: 648826 - RNA, 19 nt, Artificial Sequence
  Description of Artificial Sequence: Synthetic oligonucleotide
  Sense strand starting at position 929 of SEQ ID NO: 585550
cugucauggagagaugcua

SEQ ID NO: 648827 - RNA, 19 nt, Artificial Sequence
  Description of Artificial Sequence: Synthetic oligonucleotide
  Antisense strand to SEQ ID NO: 648826
uagcaucucuccaugacag

SEQ ID NO: 648828 - RNA, 19 nt, Artificial Sequence
  Description of Artificial Sequence: Synthetic oligonucleotide
  Sense strand starting at position 1257 of SEQ ID NO: 585550
cuuugcucaguauaaggaa

SEQ ID NO: 648829 - RNA, 19 nt, Artificial Sequence
  Description of Artificial Sequence: Synthetic oligonucleotide
  Antisense strand to SEQ ID NO: 648828
uuccuuauacugagcaaag

SEQ ID NO: 648830 - RNA, 19 nt, Artificial Sequence
  Description of Artificial Sequence: Synthetic oligonucleotide
  Sense strand starting at position 1373 of SEQ ID NO: 585550
cuuucuuuaucaguugaag

SEQ ID NO: 648831 - RNA, 19 nt, Artificial Sequence
  Description of Artificial Sequence: Synthetic oligonucleotide
  Antisense strand to SEQ ID NO: 648830
cuucaacugauaaagaaag

SEQ ID NO: 648832 - RNA, 19 nt, Artificial Sequence
  Description of Artificial Sequence: Synthetic oligonucleotide
  Sense strand starting at position 1493 of SEQ ID NO: 585550
aacauugagccuugggagu

SEQ ID NO: 648833 - RNA, 19 nt, Artificial Sequence
  Description of Artificial Sequence: Synthetic oligonucleotide
  Antisense strand to SEQ ID NO: 648832
acucccaaggcucaauguu

SEQ ID NO: 648834 - RNA, 19 nt, Artificial Sequence
  Description of Artificial Sequence: Synthetic oligonucleotide
  Sense strand starting at position 2329 of SEQ ID NO: 585550
gggcuaacaucacucaauu

SEQ ID NO: 648835 - RNA, 19 nt, Artificial Sequence
  Description of Artificial Sequence: Synthetic oligonucleotide
  Antisense strand to SEQ ID NO: 648834
aauugagugauguuagccc

SEQ ID NO: 648836 - RNA, 19 nt, Artificial Sequence
  Description of Artificial Sequence: Synthetic oligonucleotide
  Sense strand starting at position 2379 of SEQ ID NO: 585550
agggaauacauuggcuuga

SEQ ID NO: 648837 - RNA, 19 nt, Artificial Sequence
  Description of Artificial Sequence: Synthetic oligonucleotide
  Antisense strand to SEQ ID NO: 648836
ucaagccaauguauucccu

SEQ ID NO: 648838 - RNA, 19 nt, Artificial Sequence
  Description of Artificial Sequence: Synthetic oligonucleotide
  Sense strand starting at position 2380 of SEQ ID NO: 585550
gggaauacauuggcuugau

SEQ ID NO: 648839 - RNA, 19 nt, Artificial Sequence
  Description of Artificial Sequence: Synthetic oligonucleotide
  Antisense strand to SEQ ID NO: 648838
aucaagccaauguauuccc

SEQ ID NO: 648840 - RNA, 19 nt, Artificial Sequence
  Description of Artificial Sequence: Synthetic oligonucleotide
  Sense strand starting at position 2381 of SEQ ID NO: 585550
ggaauacauuggcuugaug

SEQ ID NO: 648841 - RNA, 19 nt, Artificial Sequence
  Description of Artificial Sequence: Synthetic oligonucleotide
  Antisense strand to SEQ ID NO: 648840
caucaagccaauguauucc

SEQ ID NO: 648842 - RNA, 19 nt, Artificial Sequence
  Description of Artificial Sequence: Synthetic oligonucleotide
  Sense strand starting at position 2526 of SEQ ID NO: 585550
agguaauaauguuucucca

SEQ ID NO: 648843 - RNA, 19 nt, Artificial Sequence
  Description of Artificial Sequence: Synthetic oligonucleotide
  Antisense strand to SEQ ID NO: 648842
uggagaaacauuauuaccu

SEQ ID NO: 648844 - RNA, 19 nt, Artificial Sequence
  Description of Artificial Sequence: Synthetic oligonucleotide
  Sense strand starting at position 2706 of SEQ ID NO: 585550
ggcauaagaagugguuaca

SEQ ID NO: 648845 - RNA, 19 nt, Artificial Sequence
  Description of Artificial Sequence: Synthetic oligonucleotide
  Antisense strand to SEQ ID NO: 648844
uguaaccacuucuuaugcc

SEQ ID NO: 648846 - RNA, 19 nt, Artificial Sequence
  Description of Artificial Sequence: Synthetic oligonucleotide
  Sense strand starting at position 2735 of SEQ ID NO: 585550
gguuguggcauccaguaaa

SEQ ID NO: 648847 - RNA, 19 nt, Artificial Sequence
  Description of Artificial Sequence: Synthetic oligonucleotide
  Antisense strand to SEQ ID NO: 648846
uuuacuggaugccacaacc

SEQ ID NO: 648848 - RNA, 19 nt, Artificial Sequence
  Description of Artificial Sequence: Synthetic oligonucleotide
  Sense strand starting at position 2794 of SEQ ID NO: 585550
cauagaccuguuuggaauu

SEQ ID NO: 648849 - RNA, 19 nt, Artificial Sequence
  Description of Artificial Sequence: Synthetic oligonucleotide
  Antisense strand to SEQ ID NO: 648848
aauuccaaacaggucuaug

SEQ ID NO: 648850 - RNA, 19 nt, Artificial Sequence
  Description of Artificial Sequence: Synthetic oligonucleotide
  Sense strand starting at position 2827 of SEQ ID NO: 585550
ucugaagacuuccucgaua

SEQ ID NO: 648851 - RNA, 19 nt, Artificial Sequence
  Description of Artificial Sequence: Synthetic oligonucleotide
  Antisense strand to SEQ ID NO: 648850
uaucgaggaagucuucaga

SEQ ID NO: 648852 - RNA, 19 nt, Artificial Sequence
  Description of Artificial Sequence: Synthetic oligonucleotide
  Sense strand starting at position 2829 of SEQ ID NO: 585550
ugaagacuuccucgauaga

SEQ ID NO: 648853 - RNA, 19 nt, Artificial Sequence
  Description of Artificial Sequence: Synthetic oligonucleotide
  Antisense strand to SEQ ID NO: 648852
ucuaucgaggaagucuuca

SEQ ID NO: 648854 - RNA, 19 nt, Artificial Sequence
  Description of Artificial Sequence: Synthetic oligonucleotide
  Sense strand starting at position 2942 of SEQ ID NO: 585550
auggaauuagaguggccua

SEQ ID NO: 648855 - RNA, 19 nt, Artificial Sequence
  Description of Artificial Sequence: Synthetic oligonucleotide
  Antisense strand to SEQ ID NO: 648854
uaggccacucuaauuccau

SEQ ID NO: 648856 - RNA, 19 nt, Artificial Sequence
  Description of Artificial Sequence: Synthetic oligonucleotide
  Sense strand starting at position 2945 of SEQ ID NO: 585550
gaauuagaguggccuacaa

SEQ ID NO: 648857 - RNA, 19 nt, Artificial Sequence
  Description of Artificial Sequence: Synthetic oligonucleotide
  Antisense strand to SEQ ID NO: 648856
uuguaggccacucuaauuc

SEQ ID NO: 648858 - RNA, 19 nt, Artificial Sequence
  Description of Artificial Sequence: Synthetic oligonucleotide
  Sense strand starting at position 2947 of SEQ ID NO: 585550
auuagaguggccuacaaca

SEQ ID NO: 648859 - RNA, 19 nt, Artificial Sequence
  Description of Artificial Sequence: Synthetic oligonucleotide
  Antisense strand to SEQ ID NO: 648858
uguuguaggccacucuaau

SEQ ID NO: 648860 - RNA, 19 nt, Artificial Sequence
  Description of Artificial Sequence: Synthetic oligonucleotide
  Sense strand starting at position 3046 of SEQ ID NO: 585550
auuuguaaauaccaagagu

SEQ ID NO: 648861 - RNA, 19 nt, Artificial Sequence
  Description of Artificial Sequence: Synthetic oligonucleotide
  Antisense strand to SEQ ID NO: 648860
acucuugguauuuacaaau

SEQ ID NO: 648862 - RNA, 19 nt, Artificial Sequence
  Description of Artificial Sequence: Synthetic oligonucleotide
  Sense strand starting at position 3059 of SEQ ID NO: 585550
aagaguaaguucuuggucu

SEQ ID NO: 648863 - RNA, 19 nt, Artificial Sequence
  Description of Artificial Sequence: Synthetic oligonucleotide
  Antisense strand to SEQ ID NO: 648862
agaccaagaacuuacucuu

SEQ ID NO: 648864 - RNA, 19 nt, Artificial Sequence
  Description of Artificial Sequence: Synthetic oligonucleotide
  Sense strand starting at position 3272 of SEQ ID NO: 585550
uggcauuuaucuuagaaac

SEQ ID NO: 648865 - RNA, 19 nt, Artificial Sequence
  Description of Artificial Sequence: Synthetic oligonucleotide
  Antisense strand to SEQ ID NO: 648864
guuucuaagauaaaugcca

SEQ ID NO: 648866 - RNA, 19 nt, Artificial Sequence
  Description of Artificial Sequence: Synthetic oligonucleotide
  Sense strand starting at position 3274 of SEQ ID NO: 585550
gcauuuaucuuagaaacag

SEQ ID NO: 648867 - RNA, 19 nt, Artificial Sequence
  Description of Artificial Sequence: Synthetic oligonucleotide
  Antisense strand to SEQ ID NO: 648866
cuguuucuaagauaaaugc

SEQ ID NO: 648868 - RNA, 19 nt, Artificial Sequence
  Description of Artificial Sequence: Synthetic oligonucleotide
  Sense strand starting at position 3464 of SEQ ID NO: 585550
cucuuauauugagcugaaa

SEQ ID NO: 648869 - RNA, 19 nt, Artificial Sequence
  Description of Artificial Sequence: Synthetic oligonucleotide
  Antisense strand to SEQ ID NO: 648868
uuucagcucaauauaagag

SEQ ID NO: 648870 - RNA, 19 nt, Artificial Sequence
  Description of Artificial Sequence: Synthetic oligonucleotide
  Sense strand starting at position 3604 of SEQ ID NO: 585550
ugaguuuggacauguuacu

SEQ ID NO: 648871 - RNA, 19 nt, Artificial Sequence
  Description of Artificial Sequence: Synthetic oligonucleotide
  Antisense strand to SEQ ID NO: 648870
aguaacauguccaaacuca

SEQ ID NO: 648872 - RNA, 19 nt, Artificial Sequence
  Description of Artificial Sequence: Synthetic oligonucleotide
  Sense strand starting at position 3617 of SEQ ID NO: 585550
guuacuuuacccuacagga

SEQ ID NO: 648873 - RNA, 19 nt, Artificial Sequence
  Description of Artificial Sequence: Synthetic oligonucleotide
  Antisense strand to SEQ ID NO: 648872
uccuguaggguaaaguaac

SEQ ID NO: 648874 - RNA, 19 nt, Artificial Sequence
  Description of Artificial Sequence: Synthetic oligonucleotide
  Sense strand starting at position 3633 of SEQ ID NO: 585550
ggaugacagucuucucauu

SEQ ID NO: 648875 - RNA, 19 nt, Artificial Sequence
  Description of Artificial Sequence: Synthetic oligonucleotide
  Antisense strand to SEQ ID NO: 648874
aaugagaagacugucaucc

SEQ ID NO: 648876 - RNA, 19 nt, Artificial Sequence
  Description of Artificial Sequence: Synthetic oligonucleotide
  Sense strand starting at position 3635 of SEQ ID NO: 585550
augacagucuucucauuac

SEQ ID NO: 648877 - RNA, 19 nt, Artificial Sequence
  Description of Artificial Sequence: Synthetic oligonucleotide
  Antisense strand to SEQ ID NO: 648876
guaaugagaagacugucau

SEQ ID NO: 648878 - RNA, 19 nt, Artificial Sequence
  Description of Artificial Sequence: Synthetic oligonucleotide
  Sense strand starting at position 3695 of SEQ ID NO: 585550
gucuguuagcaggauuaaa

SEQ ID NO: 648879 - RNA, 19 nt, Artificial Sequence
  Description of Artificial Sequence: Synthetic oligonucleotide
  Antisense strand to SEQ ID NO: 648878
uuuaauccugcuaacagac

SEQ ID NO: 648880 - RNA, 19 nt, Artificial Sequence
  Description of Artificial Sequence: Synthetic oligonucleotide
  Sense strand starting at position 3713 of SEQ ID NO: 585550
augaguauacauugcaaua

SEQ ID NO: 648881 - RNA, 19 nt, Artificial Sequence
  Description of Artificial Sequence: Synthetic oligonucleotide
  Antisense strand to SEQ ID NO: 648880
uauugcaauguauacucau

SEQ ID NO: 648882 - RNA, 19 nt, Artificial Sequence
  Description of Artificial Sequence: Synthetic oligonucleotide
  Sense strand starting at position 89 of SEQ ID NO: 585551
aagugugcccaauagaucu

SEQ ID NO: 648883 - RNA, 19 nt, Artificial Sequence
  Description of Artificial Sequence: Synthetic oligonucleotide
  Antisense strand to SEQ ID NO: 648882
agaucuauugggcacacuu

SEQ ID NO: 648884 - RNA, 19 nt, Artificial Sequence
  Description of Artificial Sequence: Synthetic oligonucleotide
  Sense strand starting at position 201 of SEQ ID NO: 585551
auuuaaacauuguggaaag

SEQ ID NO: 648885 - RNA, 19 nt, Artificial Sequence
  Description of Artificial Sequence: Synthetic oligonucleotide
  Antisense strand to SEQ ID NO: 648884
cuuuccacaauguuuaaau

SEQ ID NO: 648886 - RNA, 19 nt, Artificial Sequence
  Description of Artificial Sequence: Synthetic oligonucleotide
  Sense strand starting at position 211 of SEQ ID NO: 585551
uguggaaaguuucuauuau

SEQ ID NO: 648887 - RNA, 19 nt, Artificial Sequence
  Description of Artificial Sequence: Synthetic oligonucleotide
  Antisense strand to SEQ ID NO: 648886
auaauagaaacuuuccaca

SEQ ID NO: 648888 - RNA, 19 nt, Artificial Sequence
  Description of Artificial Sequence: Synthetic oligonucleotide
  Sense strand starting at position 223 of SEQ ID NO: 585551
cuauuauaacagugauuag

SEQ ID NO: 648889 - RNA, 19 nt, Artificial Sequence
  Description of Artificial Sequence: Synthetic oligonucleotide
  Antisense strand to SEQ ID NO: 648888
cuaaucacuguuauaauag

SEQ ID NO: 648890 - RNA, 19 nt, Artificial Sequence
  Description of Artificial Sequence: Synthetic oligonucleotide
  Sense strand starting at position 267 of SEQ ID NO: 585551
cuuuacuugcuugagauua

SEQ ID NO: 648891 - RNA, 19 nt, Artificial Sequence
  Description of Artificial Sequence: Synthetic oligonucleotide
  Antisense strand to SEQ ID NO: 648890
uaaucucaagcaaguaaag

SEQ ID NO: 648892 - RNA, 19 nt, Artificial Sequence
  Description of Artificial Sequence: Synthetic oligonucleotide
  Sense strand starting at position 403 of SEQ ID NO: 585551
agcaacaaugauuguaaau

SEQ ID NO: 648893 - RNA, 19 nt, Artificial Sequence
  Description of Artificial Sequence: Synthetic oligonucleotide
  Antisense strand to SEQ ID NO: 648892
auuuacaaucauuguugcu

SEQ ID NO: 648894 - RNA, 19 nt, Artificial Sequence
  Description of Artificial Sequence: Synthetic oligonucleotide
  Sense strand starting at position 434 of SEQ ID NO: 585551
ugguguuauugauuuaguc

SEQ ID NO: 648895 - RNA, 19 nt, Artificial Sequence
  Description of Artificial Sequence: Synthetic oligonucleotide
  Antisense strand to SEQ ID NO: 648894
gacuaaaucaauaacacca

SEQ ID NO: 648896 - RNA, 19 nt, Artificial Sequence
  Description of Artificial Sequence: Synthetic oligonucleotide
  Sense strand starting at position 537 of SEQ ID NO: 585551
uuaguugacaguugaagua

SEQ ID NO: 648897 - RNA, 19 nt, Artificial Sequence
  Description of Artificial Sequence: Synthetic oligonucleotide
  Antisense strand to SEQ ID NO: 648896
uacuucaacugucaacuaa

SEQ ID NO: 648898 - RNA, 19 nt, Artificial Sequence
  Description of Artificial Sequence: Synthetic oligonucleotide
  Sense strand starting at position 685 of SEQ ID NO: 585551
uaguaccaucuguauuagu

SEQ ID NO: 648899 - RNA, 19 nt, Artificial Sequence
  Description of Artificial Sequence: Synthetic oligonucleotide
  Antisense strand to SEQ ID NO: 648898
acuaauacagaugguacua

SEQ ID NO: 648900 - RNA, 19 nt, Artificial Sequence
  Description of Artificial Sequence: Synthetic oligonucleotide
  Sense strand starting at position 760 of SEQ ID NO: 585551
ugucaaagaugacuucuuu

SEQ ID NO: 648901 - RNA, 19 nt, Artificial Sequence
  Description of Artificial Sequence: Synthetic oligonucleotide
  Antisense strand to SEQ ID NO: 648900
aaagaagucaucuuugaca

SEQ ID NO: 648902 - RNA, 19 nt, Artificial Sequence
  Description of Artificial Sequence: Synthetic oligonucleotide
  Sense strand starting at position 935 of SEQ ID NO: 585551
cuuaaauucuuuguaugag

SEQ ID NO: 648903 - RNA, 19 nt, Artificial Sequence
  Description of Artificial Sequence: Synthetic oligonucleotide
  Antisense strand to SEQ ID NO: 648902
cucauacaaagaauuuaag

SEQ ID NO: 648904 - RNA, 19 nt, Artificial Sequence
  Description of Artificial Sequence: Synthetic oligonucleotide
  Sense strand starting at position 951 of SEQ ID NO: 585551
gagcauuguguugaauaca

SEQ ID NO: 648905 - RNA, 19 nt, Artificial Sequence
  Description of Artificial Sequence: Synthetic oligonucleotide
  Antisense strand to SEQ ID NO: 648904
uguauucaacacaaugcuc

SEQ ID NO: 648906 - RNA, 19 nt, Artificial Sequence
  Description of Artificial Sequence: Synthetic oligonucleotide
  Sense strand starting at position 983 of SEQ ID NO: 585551
guacaaagauaauuaugca

SEQ ID NO: 648907 - RNA, 19 nt, Artificial Sequence
  Description of Artificial Sequence: Synthetic oligonucleotide
  Antisense strand to SEQ ID NO: 648906
ugcauaauuaucuuuguac

SEQ ID NO: 648908 - RNA, 19 nt, Artificial Sequence
  Description of Artificial Sequence: Synthetic oligonucleotide
  Sense strand starting at position 1136 of SEQ ID NO: 585551
cucuauaaguuguccaaac

SEQ ID NO: 648909 - RNA, 19 nt, Artificial Sequence
  Description of Artificial Sequence: Synthetic oligonucleotide
  Antisense strand to SEQ ID NO: 648908
guuuggacaacuuauagag

SEQ ID NO: 648910 - RNA, 19 nt, Artificial Sequence
  Description of Artificial Sequence: Synthetic oligonucleotide
  Sense strand starting at position 1137 of SEQ ID NO: 585551
ucuauaaguuguccaaacu

SEQ ID NO: 648911 - RNA, 19 nt, Artificial Sequence
  Description of Artificial Sequence: Synthetic oligonucleotide
  Antisense strand to SEQ ID NO: 648910
aguuuggacaacuuauaga

SEQ ID NO: 648912 - RNA, 19 nt, Artificial Sequence
  Description of Artificial Sequence: Synthetic oligonucleotide
  Sense strand starting at position 1138 of SEQ ID NO: 585551
cuauaaguuguccaaacug

SEQ ID NO: 648913 - RNA, 19 nt, Artificial Sequence
  Description of Artificial Sequence: Synthetic oligonucleotide
  Antisense strand to SEQ ID NO: 648912
caguuuggacaacuuauag

SEQ ID NO: 648914 - RNA, 19 nt, Artificial Sequence
  Description of Artificial Sequence: Synthetic oligonucleotide
  Sense strand starting at position 1153 of SEQ ID NO: 585551
acugccaacugucugauaa

SEQ ID NO: 648915 - RNA, 19 nt, Artificial Sequence
  Description of Artificial Sequence: Synthetic oligonucleotide
  Antisense strand to SEQ ID NO: 648914
uuaucagacaguuggcagu

SEQ ID NO: 648916 - RNA, 19 nt, Artificial Sequence
  Description of Artificial Sequence: Synthetic oligonucleotide
  Sense strand starting at position 1154 of SEQ ID NO: 585551
cugccaacugucugauaaa

SEQ ID NO: 648917 - RNA, 19 nt, Artificial Sequence
  Description of Artificial Sequence: Synthetic oligonucleotide
  Antisense strand to SEQ ID NO: 648916
uuuaucagacaguuggcag

SEQ ID NO: 648918 - RNA, 19 nt, Artificial Sequence
  Description of Artificial Sequence: Synthetic oligonucleotide
  Sense strand starting at position 1385 of SEQ ID NO: 585551
uuaagagaugagugucaag

SEQ ID NO: 648919 - RNA, 19 nt, Artificial Sequence
  Description of Artificial Sequence: Synthetic oligonucleotide
  Antisense strand to SEQ ID NO: 648918
cuugacacucaucucuuaa

SEQ ID NO: 648920 - RNA, 19 nt, Artificial Sequence
  Description of Artificial Sequence: Synthetic oligonucleotide
  Sense strand starting at position 1459 of SEQ ID NO: 585551
auaaaugagcuguacccua

SEQ ID NO: 648921 - RNA, 19 nt, Artificial Sequence
  Description of Artificial Sequence: Synthetic oligonucleotide
  Antisense strand to SEQ ID NO: 648920
uaggguacagcucauuuau

SEQ ID NO: 648922 - RNA, 19 nt, Artificial Sequence
  Description of Artificial Sequence: Synthetic oligonucleotide
  Sense strand starting at position 2005 of SEQ ID NO: 585551
caaagaguuauugguggga

SEQ ID NO: 648923 - RNA, 19 nt, Artificial Sequence
  Description of Artificial Sequence: Synthetic oligonucleotide
  Antisense strand to SEQ ID NO: 648922
ucccaccaauaacucuuug

SEQ ID NO: 648924 - RNA, 19 nt, Artificial Sequence
  Description of Artificial Sequence: Synthetic oligonucleotide
  Sense strand starting at position 2156 of SEQ ID NO: 585551
ugauuugacugagaaacau

SEQ ID NO: 648925 - RNA, 19 nt, Artificial Sequence
  Description of Artificial Sequence: Synthetic oligonucleotide
  Antisense strand to SEQ ID NO: 648924
auguuucucagucaaauca

SEQ ID NO: 648926 - RNA, 19 nt, Artificial Sequence
  Description of Artificial Sequence: Synthetic oligonucleotide
  Sense strand starting at position 2165 of SEQ ID NO: 585551
ugagaaacaucucugcuga

SEQ ID NO: 648927 - RNA, 19 nt, Artificial Sequence
  Description of Artificial Sequence: Synthetic oligonucleotide
  Antisense strand to SEQ ID NO: 648926
ucagcagagauguuucuca

SEQ ID NO: 648928 - RNA, 19 nt, Artificial Sequence
  Description of Artificial Sequence: Synthetic oligonucleotide
  Sense strand starting at position 2167 of SEQ ID NO: 585551
agaaacaucucugcugacu

SEQ ID NO: 648929 - RNA, 19 nt, Artificial Sequence
  Description of Artificial Sequence: Synthetic oligonucleotide
  Antisense strand to SEQ ID NO: 648928
agucagcagagauguuucu

SEQ ID NO: 648930 - RNA, 19 nt, Artificial Sequence
  Description of Artificial Sequence: Synthetic oligonucleotide
  Sense strand starting at position 2173 of SEQ ID NO: 585551
aucucugcugacuaaagua

SEQ ID NO: 648931 - RNA, 19 nt, Artificial Sequence
  Description of Artificial Sequence: Synthetic oligonucleotide
  Antisense strand to SEQ ID NO: 648930
uacuuuagucagcagagau

SEQ ID NO: 648932 - RNA, 19 nt, Artificial Sequence
  Description of Artificial Sequence: Synthetic oligonucleotide
  Sense strand starting at position 2413 of SEQ ID NO: 585551
uuuacagaguuaguaggaa

SEQ ID NO: 648933 - RNA, 19 nt, Artificial Sequence
  Description of Artificial Sequence: Synthetic oligonucleotide
  Antisense strand to SEQ ID NO: 648932
uuccuacuaacucuguaaa

SEQ ID NO: 648934 - RNA, 19 nt, Artificial Sequence
  Description of Artificial Sequence: Synthetic oligonucleotide
  Sense strand starting at position 2449 of SEQ ID NO: 585551
uugcguagucugcuuccua

SEQ ID NO: 648935 - RNA, 19 nt, Artificial Sequence
  Description of Artificial Sequence: Synthetic oligonucleotide
  Antisense strand to SEQ ID NO: 648934
uaggaagcagacuacgcaa

SEQ ID NO: 648936 - RNA, 19 nt, Artificial Sequence
  Description of Artificial Sequence: Synthetic oligonucleotide
  Sense strand starting at position 2491 of SEQ ID NO: 585551
ucuacuguugcucauuaca

SEQ ID NO: 648937 - RNA, 19 nt, Artificial Sequence
  Description of Artificial Sequence: Synthetic oligonucleotide
  Antisense strand to SEQ ID NO: 648936
uguaaugagcaacaguaga

SEQ ID NO: 648938 - RNA, 19 nt, Artificial Sequence
  Description of Artificial Sequence: Synthetic oligonucleotide
  Sense strand starting at position 2629 of SEQ ID NO: 585551
accucacuguguuuagaaa

SEQ ID NO: 648939 - RNA, 19 nt, Artificial Sequence
  Description of Artificial Sequence: Synthetic oligonucleotide
  Antisense strand to SEQ ID NO: 648938
uuucuaaacacagugaggu

SEQ ID NO: 648940 - RNA, 19 nt, Artificial Sequence
  Description of Artificial Sequence: Synthetic oligonucleotide
  Sense strand starting at position 2654 of SEQ ID NO: 585551
auagaauaugcucgggaca

SEQ ID NO: 648941 - RNA, 19 nt, Artificial Sequence
  Description of Artificial Sequence: Synthetic oligonucleotide
  Antisense strand to SEQ ID NO: 648940
ugucccgagcauauucuau

SEQ ID NO: 648942 - RNA, 19 nt, Artificial Sequence
  Description of Artificial Sequence: Synthetic oligonucleotide
  Sense strand starting at position 2657 of SEQ ID NO: 585551
gaauaugcucgggacacuu

SEQ ID NO: 648943 - RNA, 19 nt, Artificial Sequence
  Description of Artificial Sequence: Synthetic oligonucleotide
  Antisense strand to SEQ ID NO: 648942
aagugucccgagcauauuc

SEQ ID NO: 648944 - RNA, 19 nt, Artificial Sequence
  Description of Artificial Sequence: Synthetic oligonucleotide
  Sense strand starting at position 2670 of SEQ ID NO: 585551
acacuuacuuggguggaaa

SEQ ID NO: 648945 - RNA, 19 nt, Artificial Sequence
  Description of Artificial Sequence: Synthetic oligonucleotide
  Antisense strand to SEQ ID NO: 648944
uuuccacccaaguaagugu

SEQ ID NO: 648946 - RNA, 19 nt, Artificial Sequence
  Description of Artificial Sequence: Synthetic oligonucleotide
  Sense strand starting at position 2807 of SEQ ID NO: 585551
gcuuauuuaucuguccuuu

SEQ ID NO: 648947 - RNA, 19 nt, Artificial Sequence
  Description of Artificial Sequence: Synthetic oligonucleotide
  Antisense strand to SEQ ID NO: 648946
aaaggacagauaaauaagc

SEQ ID NO: 648948 - RNA, 19 nt, Artificial Sequence
  Description of Artificial Sequence: Synthetic oligonucleotide
  Sense strand starting at position 2817 of SEQ ID NO: 585551
cuguccuuugauuaucuau

SEQ ID NO: 648949 - RNA, 19 nt, Artificial Sequence
  Description of Artificial Sequence: Synthetic oligonucleotide
  Antisense strand to SEQ ID NO: 648948
auagauaaucaaaggacag

SEQ ID NO: 648950 - RNA, 19 nt, Artificial Sequence
  Description of Artificial Sequence: Synthetic oligonucleotide
  Sense strand starting at position 2819 of SEQ ID NO: 585551
guccuuugauuaucuauau

SEQ ID NO: 648951 - RNA, 19 nt, Artificial Sequence
  Description of Artificial Sequence: Synthetic oligonucleotide
  Antisense strand to SEQ ID NO: 648950
auauagauaaucaaaggac

SEQ ID NO: 648952 - RNA, 19 nt, Artificial Sequence
  Description of Artificial Sequence: Synthetic oligonucleotide
  Sense strand starting at position 2838 of SEQ ID NO: 585551
gucucucacaugugggaga

SEQ ID NO: 648953 - RNA, 19 nt, Artificial Sequence
  Description of Artificial Sequence: Synthetic oligonucleotide
  Antisense strand to SEQ ID NO: 648952
ucucccacaugugagagac

SEQ ID NO: 648954 - RNA, 19 nt, Artificial Sequence
  Description of Artificial Sequence: Synthetic oligonucleotide
  Sense strand starting at position 3130 of SEQ ID NO: 585551
uggugagaaacgugagaaa

SEQ ID NO: 648955 - RNA, 19 nt, Artificial Sequence
  Description of Artificial Sequence: Synthetic oligonucleotide
  Antisense strand to SEQ ID NO: 648954
uuucucacguuucucacca

SEQ ID NO: 648956 - RNA, 19 nt, Artificial Sequence
  Description of Artificial Sequence: Synthetic oligonucleotide
  Sense strand starting at position 3348 of SEQ ID NO: 585551
ggcucuugacaagaucacu

SEQ ID NO: 648957 - RNA, 19 nt, Artificial Sequence
  Description of Artificial Sequence: Synthetic oligonucleotide
  Antisense strand to SEQ ID NO: 648956
agugaucuugucaagagcc

SEQ ID NO: 648958 - RNA, 19 nt, Artificial Sequence
  Description of Artificial Sequence: Synthetic oligonucleotide
  Sense strand starting at position 3803 of SEQ ID NO: 585551
augcaagaaucugugaagu

SEQ ID NO: 648959 - RNA, 19 nt, Artificial Sequence
  Description of Artificial Sequence: Synthetic oligonucleotide
  Antisense strand to SEQ ID NO: 648958
acuucacagauucuugcau

SEQ ID NO: 648960 - RNA, 19 nt, Artificial Sequence
  Description of Artificial Sequence: Synthetic oligonucleotide
  Sense strand starting at position 3936 of SEQ ID NO: 585551
gugcauauaccacauuauc

SEQ ID NO: 648961 - RNA, 19 nt, Artificial Sequence
  Description of Artificial Sequence: Synthetic oligonucleotide
  Antisense strand to SEQ ID NO: 648960
gauaaugugguauaugcac

SEQ ID NO: 648962 - RNA, 19 nt, Artificial Sequence
  Description of Artificial Sequence: Synthetic oligonucleotide
  Sense strand starting at position 38 of SEQ ID NO: 585552
acaugcaaagccuaaguua

SEQ ID NO: 648963 - RNA, 19 nt, Artificial Sequence
  Description of Artificial Sequence: Synthetic oligonucleotide
  Antisense strand to SEQ ID NO: 648962
uaacuuaggcuuugcaugu

SEQ ID NO: 648964 - RNA, 19 nt, Artificial Sequence
  Description of Artificial Sequence: Synthetic oligonucleotide
  Sense strand starting at position 41 of SEQ ID NO: 585552
ugcaaagccuaaguuauuu

SEQ ID NO: 648965 - RNA, 19 nt, Artificial Sequence
  Description of Artificial Sequence: Synthetic oligonucleotide
  Antisense strand to SEQ ID NO: 648964
aaauaacuuaggcuuugca

SEQ ID NO: 648966 - RNA, 19 nt, Artificial Sequence
  Description of Artificial Sequence: Synthetic oligonucleotide
  Sense strand starting at position 99 of SEQ ID NO: 585552
ugaagauaaugacaucaau

SEQ ID NO: 648967 - RNA, 19 nt, Artificial Sequence
  Description of Artificial Sequence: Synthetic oligonucleotide
  Antisense strand to SEQ ID NO: 648966
auugaugucauuaucuuca

SEQ ID NO: 648968 - RNA, 19 nt, Artificial Sequence
  Description of Artificial Sequence: Synthetic oligonucleotide
  Sense strand starting at position 234 of SEQ ID NO: 585552
cuuauagauuaguuugcau

SEQ ID NO: 648969 - RNA, 19 nt, Artificial Sequence
  Description of Artificial Sequence: Synthetic oligonucleotide
  Antisense strand to SEQ ID NO: 648968
augcaaacuaaucuauaag

SEQ ID NO: 648970 - RNA, 19 nt, Artificial Sequence
  Description of Artificial Sequence: Synthetic oligonucleotide
  Sense strand starting at position 374 of SEQ ID NO: 585552
guuauugacaaguaguauu

SEQ ID NO: 648971 - RNA, 19 nt, Artificial Sequence
  Description of Artificial Sequence: Synthetic oligonucleotide
  Antisense strand to SEQ ID NO: 648970
aauacuacuugucaauaac

SEQ ID NO: 648972 - RNA, 19 nt, Artificial Sequence
  Description of Artificial Sequence: Synthetic oligonucleotide
  Sense strand starting at position 496 of SEQ ID NO: 585552
augugcaagucuuuauaua

SEQ ID NO: 648973 - RNA, 19 nt, Artificial Sequence
  Description of Artificial Sequence: Synthetic oligonucleotide
  Antisense strand to SEQ ID NO: 648972
uauauaaagacuugcacau

SEQ ID NO: 648974 - RNA, 19 nt, Artificial Sequence
  Description of Artificial Sequence: Synthetic oligonucleotide
  Sense strand starting at position 497 of SEQ ID NO: 585552
ugugcaagucuuuauauaa

SEQ ID NO: 648975 - RNA, 19 nt, Artificial Sequence
  Description of Artificial Sequence: Synthetic oligonucleotide
  Antisense strand to SEQ ID NO: 648974
uuauauaaagacuugcaca

SEQ ID NO: 648976 - RNA, 19 nt, Artificial Sequence
  Description of Artificial Sequence: Synthetic oligonucleotide
  Sense strand starting at position 528 of SEQ ID NO: 585552
cuuccuccuggguaaguau

SEQ ID NO: 648977 - RNA, 19 nt, Artificial Sequence
  Description of Artificial Sequence: Synthetic oligonucleotide
  Antisense strand to SEQ ID NO: 648976
auacuuacccaggaggaag

SEQ ID NO: 648978 - RNA, 19 nt, Artificial Sequence
  Description of Artificial Sequence: Synthetic oligonucleotide
  Sense strand starting at position 542 of SEQ ID NO: 585552
aguaucuaggaguguuaua

SEQ ID NO: 648979 - RNA, 19 nt, Artificial Sequence
  Description of Artificial Sequence: Synthetic oligonucleotide
  Antisense strand to SEQ ID NO: 648978
uauaacacuccuagauacu

SEQ ID NO: 648980 - RNA, 19 nt, Artificial Sequence
  Description of Artificial Sequence: Synthetic oligonucleotide
  Sense strand starting at position 642 of SEQ ID NO: 585552
gcagaaguauaccuuguaa

SEQ ID NO: 648981 - RNA, 19 nt, Artificial Sequence
  Description of Artificial Sequence: Synthetic oligonucleotide
  Antisense strand to SEQ ID NO: 648980
uuacaagguauacuucugc

SEQ ID NO: 648982 - RNA, 19 nt, Artificial Sequence
  Description of Artificial Sequence: Synthetic oligonucleotide
  Sense strand starting at position 644 of SEQ ID NO: 585552
agaaguauaccuuguaaac

SEQ ID NO: 648983 - RNA, 19 nt, Artificial Sequence
  Description of Artificial Sequence: Synthetic oligonucleotide
  Antisense strand to SEQ ID NO: 648982
guuuacaagguauacuucu

SEQ ID NO: 648984 - RNA, 19 nt, Artificial Sequence
  Description of Artificial Sequence: Synthetic oligonucleotide
  Sense strand starting at position 653 of SEQ ID NO: 585552
ccuuguaaacauuggacau

SEQ ID NO: 648985 - RNA, 19 nt, Artificial Sequence
  Description of Artificial Sequence: Synthetic oligonucleotide
  Antisense strand to SEQ ID NO: 648984
auguccaauguuuacaagg

SEQ ID NO: 648986 - RNA, 19 nt, Artificial Sequence
  Description of Artificial Sequence: Synthetic oligonucleotide
  Sense strand starting at position 2201 of SEQ ID NO: 585552
aguuacucaugcuuuggau

SEQ ID NO: 648987 - RNA, 19 nt, Artificial Sequence
  Description of Artificial Sequence: Synthetic oligonucleotide
  Antisense strand to SEQ ID NO: 648986
auccaaagcaugaguaacu

SEQ ID NO: 648988 - RNA, 19 nt, Artificial Sequence
  Description of Artificial Sequence: Synthetic oligonucleotide
  Sense strand starting at position 2203 of SEQ ID NO: 585552
uuacucaugcuuuggauca

SEQ ID NO: 648989 - RNA, 19 nt, Artificial Sequence
  Description of Artificial Sequence: Synthetic oligonucleotide
  Antisense strand to SEQ ID NO: 648988
ugauccaaagcaugaguaa

SEQ ID NO: 648990 - RNA, 19 nt, Artificial Sequence
  Description of Artificial Sequence: Synthetic oligonucleotide
  Sense strand starting at position 2241 of SEQ ID NO: 585552
gcucaacgaucuucuaaau

SEQ ID NO: 648991 - RNA, 19 nt, Artificial Sequence
  Description of Artificial Sequence: Synthetic oligonucleotide
  Antisense strand to SEQ ID NO: 648990
auuuagaagaucguugagc

SEQ ID NO: 648992 - RNA, 19 nt, Artificial Sequence
  Description of Artificial Sequence: Synthetic oligonucleotide
  Sense strand starting at position 2652 of SEQ ID NO: 585552
caugaauguugucccagca

SEQ ID NO: 648993 - RNA, 19 nt, Artificial Sequence
  Description of Artificial Sequence: Synthetic oligonucleotide
  Antisense strand to SEQ ID NO: 648992
ugcugggacaacauucaug

SEQ ID NO: 648994 - RNA, 19 nt, Artificial Sequence
  Description of Artificial Sequence: Synthetic oligonucleotide
  Sense strand starting at position 2722 of SEQ ID NO: 585552
gacucagaguuagcaaacu

SEQ ID NO: 648995 - RNA, 19 nt, Artificial Sequence
  Description of Artificial Sequence: Synthetic oligonucleotide
  Antisense strand to SEQ ID NO: 648994
aguuugcuaacucugaguc

SEQ ID NO: 648996 - RNA, 19 nt, Artificial Sequence
  Description of Artificial Sequence: Synthetic oligonucleotide
  Sense strand starting at position 2803 of SEQ ID NO: 585552
aguagaacuccuggcuauu

SEQ ID NO: 648997 - RNA, 19 nt, Artificial Sequence
  Description of Artificial Sequence: Synthetic oligonucleotide
  Antisense strand to SEQ ID NO: 648996
aauagccaggaguucuacu

SEQ ID NO: 648998 - RNA, 19 nt, Artificial Sequence
  Description of Artificial Sequence: Synthetic oligonucleotide
  Sense strand starting at position 3027 of SEQ ID NO: 585552
uguaguagguauuucuuua

SEQ ID NO: 648999 - RNA, 19 nt, Artificial Sequence
  Description of Artificial Sequence: Synthetic oligonucleotide
  Antisense strand to SEQ ID NO: 648998
uaaagaaauaccuacuaca

SEQ ID NO: 649000 - RNA, 19 nt, Artificial Sequence
  Description of Artificial Sequence: Synthetic oligonucleotide
  Sense strand starting at position 3040 of SEQ ID NO: 585552
ucuuuaacuuuggucuaga

SEQ ID NO: 649001 - RNA, 19 nt, Artificial Sequence
  Description of Artificial Sequence: Synthetic oligonucleotide
  Antisense strand to SEQ ID NO: 649000
ucuagaccaaaguuaaaga

SEQ ID NO: 649002 - RNA, 19 nt, Artificial Sequence
  Description of Artificial Sequence: Synthetic oligonucleotide
  Sense strand starting at position 3041 of SEQ ID NO: 585552
cuuuaacuuuggucuagau

SEQ ID NO: 649003 - RNA, 19 nt, Artificial Sequence
  Description of Artificial Sequence: Synthetic oligonucleotide
  Antisense strand to SEQ ID NO: 649002
aucuagaccaaaguuaaag

SEQ ID NO: 649004 - RNA, 19 nt, Artificial Sequence
  Description of Artificial Sequence: Synthetic oligonucleotide
  Sense strand starting at position 3050 of SEQ ID NO: 585552
uggucuagaugauuaaaua

SEQ ID NO: 649005 - RNA, 19 nt, Artificial Sequence
  Description of Artificial Sequence: Synthetic oligonucleotide
  Antisense strand to SEQ ID NO: 649004
uauuuaaucaucuagacca

SEQ ID NO: 649006 - RNA, 19 nt, Artificial Sequence
  Description of Artificial Sequence: Synthetic oligonucleotide
  Sense strand starting at position 3136 of SEQ ID NO: 585552
cugagaaccaucgauguuu

SEQ ID NO: 649007 - RNA, 19 nt, Artificial Sequence
  Description of Artificial Sequence: Synthetic oligonucleotide
  Antisense strand to SEQ ID NO: 649006
aaacaucgaugguucucag

SEQ ID NO: 649008 - RNA, 19 nt, Artificial Sequence
  Description of Artificial Sequence: Synthetic oligonucleotide
  Sense strand starting at position 3138 of SEQ ID NO: 585552
gagaaccaucgauguuuga

SEQ ID NO: 649009 - RNA, 19 nt, Artificial Sequence
  Description of Artificial Sequence: Synthetic oligonucleotide
  Antisense strand to SEQ ID NO: 649008
ucaaacaucgaugguucuc

SEQ ID NO: 649010 - RNA, 19 nt, Artificial Sequence
  Description of Artificial Sequence: Synthetic oligonucleotide
  Sense strand starting at position 3145 of SEQ ID NO: 585552
aucgauguuugacccauua

SEQ ID NO: 649011 - RNA, 19 nt, Artificial Sequence
  Description of Artificial Sequence: Synthetic oligonucleotide
  Antisense strand to SEQ ID NO: 649010
uaaugggucaaacaucgau

SEQ ID NO: 649012 - RNA, 19 nt, Artificial Sequence
  Description of Artificial Sequence: Synthetic oligonucleotide
  Sense strand starting at position 3147 of SEQ ID NO: 585552
cgauguuugacccauuaga

SEQ ID NO: 649013 - RNA, 19 nt, Artificial Sequence
  Description of Artificial Sequence: Synthetic oligonucleotide
  Antisense strand to SEQ ID NO: 649012
ucuaaugggucaaacaucg

SEQ ID NO: 649014 - RNA, 19 nt, Artificial Sequence
  Description of Artificial Sequence: Synthetic oligonucleotide
  Sense strand starting at position 3271 of SEQ ID NO: 585552
agauguucuuccuuucuua

SEQ ID NO: 649015 - RNA, 19 nt, Artificial Sequence
  Description of Artificial Sequence: Synthetic oligonucleotide
  Antisense strand to SEQ ID NO: 649014
uaagaaaggaagaacaucu

SEQ ID NO: 649016 - RNA, 19 nt, Artificial Sequence
  Description of Artificial Sequence: Synthetic oligonucleotide
  Sense strand starting at position 3376 of SEQ ID NO: 585552
ugaccuauuuguguuaagu

SEQ ID NO: 649017 - RNA, 19 nt, Artificial Sequence
  Description of Artificial Sequence: Synthetic oligonucleotide
  Antisense strand to SEQ ID NO: 649016
acuuaacacaaauagguca

SEQ ID NO: 649018 - RNA, 19 nt, Artificial Sequence
  Description of Artificial Sequence: Synthetic oligonucleotide
  Sense strand starting at position 3478 of SEQ ID NO: 585552
guggugaucgugucucagu

SEQ ID NO: 649019 - RNA, 19 nt, Artificial Sequence
  Description of Artificial Sequence: Synthetic oligonucleotide
  Antisense strand to SEQ ID NO: 649018
acugagacacgaucaccac

SEQ ID NO: 649020 - RNA, 19 nt, Artificial Sequence
  Description of Artificial Sequence: Synthetic oligonucleotide
  Sense strand starting at position 3542 of SEQ ID NO: 585552
uuuagaauccagcaugugu

SEQ ID NO: 649021 - RNA, 19 nt, Artificial Sequence
  Description of Artificial Sequence: Synthetic oligonucleotide
  Antisense strand to SEQ ID NO: 649020
acacaugcuggauucuaaa

SEQ ID NO: 649022 - RNA, 19 nt, Artificial Sequence
  Description of Artificial Sequence: Synthetic oligonucleotide
  Sense strand starting at position 3656 of SEQ ID NO: 585552
uggugauggacggaagagu

SEQ ID NO: 649023 - RNA, 19 nt, Artificial Sequence
  Description of Artificial Sequence: Synthetic oligonucleotide
  Antisense strand to SEQ ID NO: 649022
acucuuccguccaucacca

SEQ ID NO: 649024 - RNA, 19 nt, Artificial Sequence
  Description of Artificial Sequence: Synthetic oligonucleotide
  Sense strand starting at position 3718 of SEQ ID NO: 585552
uaccaaguagugugaagaa

SEQ ID NO: 649025 - RNA, 19 nt, Artificial Sequence
  Description of Artificial Sequence: Synthetic oligonucleotide
  Antisense strand to SEQ ID NO: 649024
uucuucacacuacuuggua

SEQ ID NO: 649026 - RNA, 19 nt, Artificial Sequence
  Description of Artificial Sequence: Synthetic oligonucleotide
  Sense strand starting at position 3781 of SEQ ID NO: 585552
ucagcaaugugcuuggaaa

SEQ ID NO: 649027 - RNA, 19 nt, Artificial Sequence
  Description of Artificial Sequence: Synthetic oligonucleotide
  Antisense strand to SEQ ID NO: 649026
uuuccaagcacauugcuga

SEQ ID NO: 649028 - RNA, 19 nt, Artificial Sequence
  Description of Artificial Sequence: Synthetic oligonucleotide
  Sense strand starting at position 3782 of SEQ ID NO: 585552
cagcaaugugcuuggaaag

SEQ ID NO: 649029 - RNA, 19 nt, Artificial Sequence
  Description of Artificial Sequence: Synthetic oligonucleotide
  Antisense strand to SEQ ID NO: 649028
cuuuccaagcacauugcug

SEQ ID NO: 649030 - RNA, 19 nt, Artificial Sequence
  Description of Artificial Sequence: Synthetic oligonucleotide
  Sense strand starting at position 3783 of SEQ ID NO: 585552
agcaaugugcuuggaaaga

SEQ ID NO: 649031 - RNA, 19 nt, Artificial Sequence
  Description of Artificial Sequence: Synthetic oligonucleotide
  Antisense strand to SEQ ID NO: 649030
ucuuuccaagcacauugcu

SEQ ID NO: 649032 - RNA, 19 nt, Artificial Sequence
  Description of Artificial Sequence: Synthetic oligonucleotide
  Sense strand starting at position 3788 of SEQ ID NO: 585552
ugugcuuggaaagauauau

SEQ ID NO: 649033 - RNA, 19 nt, Artificial Sequence
  Description of Artificial Sequence: Synthetic oligonucleotide
  Antisense strand to SEQ ID NO: 649032
auauaucuuuccaagcaca

SEQ ID NO: 649034 - RNA, 19 nt, Artificial Sequence
  Description of Artificial Sequence: Synthetic oligonucleotide
  Sense strand starting at position 3810 of SEQ ID NO: 585552
uugcauuugccaugacuuu

SEQ ID NO: 649035 - RNA, 19 nt, Artificial Sequence
  Description of Artificial Sequence: Synthetic oligonucleotide
  Antisense strand to SEQ ID NO: 649034
aaagucauggcaaaugcaa

SEQ ID NO: 649036 - RNA, 19 nt, Artificial Sequence
  Description of Artificial Sequence: Synthetic oligonucleotide
  Sense strand starting at position 3890 of SEQ ID NO: 585552
agugucauacuuuaauacu

SEQ ID NO: 649037 - RNA, 19 nt, Artificial Sequence
  Description of Artificial Sequence: Synthetic oligonucleotide
  Antisense strand to SEQ ID NO: 649036
aguauuaaaguaugacacu

SEQ ID NO: 649038 - RNA, 19 nt, Artificial Sequence
  Description of Artificial Sequence: Synthetic oligonucleotide
  Sense strand starting at position 3960 of SEQ ID NO: 585552
aguaauuauuuaggcaaag

SEQ ID NO: 649039 - RNA, 19 nt, Artificial Sequence
  Description of Artificial Sequence: Synthetic oligonucleotide
  Antisense strand to SEQ ID NO: 649038
cuuugccuaaauaauuacu

SEQ ID NO: 649040 - RNA, 19 nt, Artificial Sequence
  Description of Artificial Sequence: Synthetic oligonucleotide
  Sense strand starting at position 3982 of SEQ ID NO: 585552
auggucaaaugaguaucua

SEQ ID NO: 649041 - RNA, 19 nt, Artificial Sequence
  Description of Artificial Sequence: Synthetic oligonucleotide
  Antisense strand to SEQ ID NO: 649040
uagauacucauuugaccau

SEQ ID NO: 649042 - RNA, 19 nt, Artificial Sequence
  Description of Artificial Sequence: Synthetic oligonucleotide
  Sense strand starting at position 941 of SEQ ID NO: 585553
ggaagaaacucaguuguuu

SEQ ID NO: 649043 - RNA, 19 nt, Artificial Sequence
  Description of Artificial Sequence: Synthetic oligonucleotide
  Antisense strand to SEQ ID NO: 649042
aaacaacugaguuucuucc

SEQ ID NO: 649044 - RNA, 19 nt, Artificial Sequence
  Description of Artificial Sequence: Synthetic oligonucleotide
  Sense strand starting at position 1025 of SEQ ID NO: 585553
guccacuucgaucacauua

SEQ ID NO: 649045 - RNA, 19 nt, Artificial Sequence
  Description of Artificial Sequence: Synthetic oligonucleotide
  Antisense strand to SEQ ID NO: 649044
uaaugugaucgaaguggac

SEQ ID NO: 649046 - RNA, 19 nt, Artificial Sequence
  Description of Artificial Sequence: Synthetic oligonucleotide
  Sense strand starting at position 1030 of SEQ ID NO: 585553
cuucgaucacauuaagcuu

SEQ ID NO: 649047 - RNA, 19 nt, Artificial Sequence
  Description of Artificial Sequence: Synthetic oligonucleotide
  Antisense strand to SEQ ID NO: 649046
aagcuuaaugugaucgaag

SEQ ID NO: 649048 - RNA, 19 nt, Artificial Sequence
  Description of Artificial Sequence: Synthetic oligonucleotide
  Sense strand starting at position 1081 of SEQ ID NO: 585553
ugagcuagauccuccauga

SEQ ID NO: 649049 - RNA, 19 nt, Artificial Sequence
  Description of Artificial Sequence: Synthetic oligonucleotide
  Antisense strand to SEQ ID NO: 649048
ucauggaggaucuagcuca

SEQ ID NO: 649050 - RNA, 19 nt, Artificial Sequence
  Description of Artificial Sequence: Synthetic oligonucleotide
  Sense strand starting at position 1092 of SEQ ID NO: 585553
cuccaugaggucuauauug

SEQ ID NO: 649051 - RNA, 19 nt, Artificial Sequence
  Description of Artificial Sequence: Synthetic oligonucleotide
  Antisense strand to SEQ ID NO: 649050
caauauagaccucauggag

SEQ ID NO: 649052 - RNA, 19 nt, Artificial Sequence
  Description of Artificial Sequence: Synthetic oligonucleotide
  Sense strand starting at position 1120 of SEQ ID NO: 585553
auguaauaauuguccaaag

SEQ ID NO: 649053 - RNA, 19 nt, Artificial Sequence
  Description of Artificial Sequence: Synthetic oligonucleotide
  Antisense strand to SEQ ID NO: 649052
cuuuggacaauuauuacau

SEQ ID NO: 649054 - RNA, 19 nt, Artificial Sequence
  Description of Artificial Sequence: Synthetic oligonucleotide
  Sense strand starting at position 1121 of SEQ ID NO: 585553
uguaauaauuguccaaagu

SEQ ID NO: 649055 - RNA, 19 nt, Artificial Sequence
  Description of Artificial Sequence: Synthetic oligonucleotide
  Antisense strand to SEQ ID NO: 649054
acuuuggacaauuauuaca

SEQ ID NO: 649056 - RNA, 19 nt, Artificial Sequence
  Description of Artificial Sequence: Synthetic oligonucleotide
  Sense strand starting at position 1122 of SEQ ID NO: 585553
guaauaauuguccaaaguc

SEQ ID NO: 649057 - RNA, 19 nt, Artificial Sequence
  Description of Artificial Sequence: Synthetic oligonucleotide
  Antisense strand to SEQ ID NO: 649056
gacuuuggacaauuauuac

SEQ ID NO: 649058 - RNA, 19 nt, Artificial Sequence
  Description of Artificial Sequence: Synthetic oligonucleotide
  Sense strand starting at position 1199 of SEQ ID NO: 585553
uucugauauuagguguaga

SEQ ID NO: 649059 - RNA, 19 nt, Artificial Sequence
  Description of Artificial Sequence: Synthetic oligonucleotide
  Antisense strand to SEQ ID NO: 649058
ucuacaccuaauaucagaa

SEQ ID NO: 649060 - RNA, 19 nt, Artificial Sequence
  Description of Artificial Sequence: Synthetic oligonucleotide
  Sense strand starting at position 1200 of SEQ ID NO: 585553
ucugauauuagguguagaa

SEQ ID NO: 649061 - RNA, 19 nt, Artificial Sequence
  Description of Artificial Sequence: Synthetic oligonucleotide
  Antisense strand to SEQ ID NO: 649060
uucuacaccuaauaucaga

SEQ ID NO: 649062 - RNA, 19 nt, Artificial Sequence
  Description of Artificial Sequence: Synthetic oligonucleotide
  Sense strand starting at position 1221 of SEQ ID NO: 585553
auacauuugccauguaguc

SEQ ID NO: 649063 - RNA, 19 nt, Artificial Sequence
  Description of Artificial Sequence: Synthetic oligonucleotide
  Antisense strand to SEQ ID NO: 649062
gacuacauggcaaauguau

SEQ ID NO: 649064 - RNA, 19 nt, Artificial Sequence
  Description of Artificial Sequence: Synthetic oligonucleotide
  Sense strand starting at position 1283 of SEQ ID NO: 585553
ggguuuaagcuccaauuac

SEQ ID NO: 649065 - RNA, 19 nt, Artificial Sequence
  Description of Artificial Sequence: Synthetic oligonucleotide
  Antisense strand to SEQ ID NO: 649064
guaauuggagcuuaaaccc

SEQ ID NO: 649066 - RNA, 19 nt, Artificial Sequence
  Description of Artificial Sequence: Synthetic oligonucleotide
  Sense strand starting at position 1298 of SEQ ID NO: 585553
uuacucuugggagagcuau

SEQ ID NO: 649067 - RNA, 19 nt, Artificial Sequence
  Description of Artificial Sequence: Synthetic oligonucleotide
  Antisense strand to SEQ ID NO: 649066
auagcucucccaagaguaa

SEQ ID NO: 649068 - RNA, 19 nt, Artificial Sequence
  Description of Artificial Sequence: Synthetic oligonucleotide
  Sense strand starting at position 1304 of SEQ ID NO: 585553
uugggagagcuauguacua

SEQ ID NO: 649069 - RNA, 19 nt, Artificial Sequence
  Description of Artificial Sequence: Synthetic oligonucleotide
  Antisense strand to SEQ ID NO: 649068
uaguacauagcucucccaa

SEQ ID NO: 649070 - RNA, 19 nt, Artificial Sequence
  Description of Artificial Sequence: Synthetic oligonucleotide
  Sense strand starting at position 1534 of SEQ ID NO: 585553
aacauaucaggcugugaac

SEQ ID NO: 649071 - RNA, 19 nt, Artificial Sequence
  Description of Artificial Sequence: Synthetic oligonucleotide
  Antisense strand to SEQ ID NO: 649070
guucacagccugauauguu

SEQ ID NO: 649072 - RNA, 19 nt, Artificial Sequence
  Description of Artificial Sequence: Synthetic oligonucleotide
  Sense strand starting at position 2015 of SEQ ID NO: 585553
uugcaugaauuaguagaaa

SEQ ID NO: 649073 - RNA, 19 nt, Artificial Sequence
  Description of Artificial Sequence: Synthetic oligonucleotide
  Antisense strand to SEQ ID NO: 649072
uuucuacuaauucaugcaa

SEQ ID NO: 649074 - RNA, 19 nt, Artificial Sequence
  Description of Artificial Sequence: Synthetic oligonucleotide
  Sense strand starting at position 2068 of SEQ ID NO: 585553
guaucagcuuggcuauuua

SEQ ID NO: 649075 - RNA, 19 nt, Artificial Sequence
  Description of Artificial Sequence: Synthetic oligonucleotide
  Antisense strand to SEQ ID NO: 649074
uaaauagccaagcugauac

SEQ ID NO: 649076 - RNA, 19 nt, Artificial Sequence
  Description of Artificial Sequence: Synthetic oligonucleotide
  Sense strand starting at position 2087 of SEQ ID NO: 585553
caaugaugucaaugaugua

SEQ ID NO: 649077 - RNA, 19 nt, Artificial Sequence
  Description of Artificial Sequence: Synthetic oligonucleotide
  Antisense strand to SEQ ID NO: 649076
uacaucauugacaucauug

SEQ ID NO: 649078 - RNA, 19 nt, Artificial Sequence
  Description of Artificial Sequence: Synthetic oligonucleotide
  Sense strand starting at position 2102 of SEQ ID NO: 585553
uguaccuauuggcuaaaua

SEQ ID NO: 649079 - RNA, 19 nt, Artificial Sequence
  Description of Artificial Sequence: Synthetic oligonucleotide
  Antisense strand to SEQ ID NO: 649078
uauuuagccaauagguaca

SEQ ID NO: 649080 - RNA, 19 nt, Artificial Sequence
  Description of Artificial Sequence: Synthetic oligonucleotide
  Sense strand starting at position 2103 of SEQ ID NO: 585553
guaccuauuggcuaaauag

SEQ ID NO: 649081 - RNA, 19 nt, Artificial Sequence
  Description of Artificial Sequence: Synthetic oligonucleotide
  Antisense strand to SEQ ID NO: 649080
cuauuuagccaauagguac

SEQ ID NO: 649082 - RNA, 19 nt, Artificial Sequence
  Description of Artificial Sequence: Synthetic oligonucleotide
  Sense strand starting at position 2113 of SEQ ID NO: 585553
gcuaaauagcugcaauaau

SEQ ID NO: 649083 - RNA, 19 nt, Artificial Sequence
  Description of Artificial Sequence: Synthetic oligonucleotide
  Antisense strand to SEQ ID NO: 649082
auuauugcagcuauuuagc

SEQ ID NO: 649084 - RNA, 19 nt, Artificial Sequence
  Description of Artificial Sequence: Synthetic oligonucleotide
  Sense strand starting at position 2209 of SEQ ID NO: 585553
aguguaaugguaugaacag

SEQ ID NO: 649085 - RNA, 19 nt, Artificial Sequence
  Description of Artificial Sequence: Synthetic oligonucleotide
  Antisense strand to SEQ ID NO: 649084
cuguucauaccauuacacu

SEQ ID NO: 649086 - RNA, 19 nt, Artificial Sequence
  Description of Artificial Sequence: Synthetic oligonucleotide
  Sense strand starting at position 2426 of SEQ ID NO: 585553
uuguguuacaggcaugaga

SEQ ID NO: 649087 - RNA, 19 nt, Artificial Sequence
  Description of Artificial Sequence: Synthetic oligonucleotide
  Antisense strand to SEQ ID NO: 649086
ucucaugccuguaacacaa

SEQ ID NO: 649088 - RNA, 19 nt, Artificial Sequence
  Description of Artificial Sequence: Synthetic oligonucleotide
  Sense strand starting at position 2733 of SEQ ID NO: 585553
guaggaguaagauguggaa

SEQ ID NO: 649089 - RNA, 19 nt, Artificial Sequence
  Description of Artificial Sequence: Synthetic oligonucleotide
  Antisense strand to SEQ ID NO: 649088
uuccacaucuuacuccuac

SEQ ID NO: 649090 - RNA, 19 nt, Artificial Sequence
  Description of Artificial Sequence: Synthetic oligonucleotide
  Sense strand starting at position 2764 of SEQ ID NO: 585553
gugcaaguuuaaucucaaa

SEQ ID NO: 649091 - RNA, 19 nt, Artificial Sequence
  Description of Artificial Sequence: Synthetic oligonucleotide
  Antisense strand to SEQ ID NO: 649090
uuugagauuaaacuugcac

SEQ ID NO: 649092 - RNA, 19 nt, Artificial Sequence
  Description of Artificial Sequence: Synthetic oligonucleotide
  Sense strand starting at position 2814 of SEQ ID NO: 585553
guaggagcaggucauucua

SEQ ID NO: 649093 - RNA, 19 nt, Artificial Sequence
  Description of Artificial Sequence: Synthetic oligonucleotide
  Antisense strand to SEQ ID NO: 649092
uagaaugaccugcuccuac

SEQ ID NO: 649094 - RNA, 19 nt, Artificial Sequence
  Description of Artificial Sequence: Synthetic oligonucleotide
  Sense strand starting at position 2816 of SEQ ID NO: 585553
aggagcaggucauucuaga

SEQ ID NO: 649095 - RNA, 19 nt, Artificial Sequence
  Description of Artificial Sequence: Synthetic oligonucleotide
  Antisense strand to SEQ ID NO: 649094
ucuagaaugaccugcuccu

SEQ ID NO: 649096 - RNA, 19 nt, Artificial Sequence
  Description of Artificial Sequence: Synthetic oligonucleotide
  Sense strand starting at position 2874 of SEQ ID NO: 585553
uuggaauggccugaugugu

SEQ ID NO: 649097 - RNA, 19 nt, Artificial Sequence
  Description of Artificial Sequence: Synthetic oligonucleotide
  Antisense strand to SEQ ID NO: 649096
acacaucaggccauuccaa

SEQ ID NO: 649098 - RNA, 19 nt, Artificial Sequence
  Description of Artificial Sequence: Synthetic oligonucleotide
  Sense strand starting at position 2959 of SEQ ID NO: 585553
gaagaacuuguaugccaug

SEQ ID NO: 649099 - RNA, 19 nt, Artificial Sequence
  Description of Artificial Sequence: Synthetic oligonucleotide
  Antisense strand to SEQ ID NO: 649098
cauggcauacaaguucuuc

SEQ ID NO: 649100 - RNA, 19 nt, Artificial Sequence
  Description of Artificial Sequence: Synthetic oligonucleotide
  Sense strand starting at position 3007 of SEQ ID NO: 585553
gaggaacccaaguguguuu

SEQ ID NO: 649101 - RNA, 19 nt, Artificial Sequence
  Description of Artificial Sequence: Synthetic oligonucleotide
  Antisense strand to SEQ ID NO: 649100
aaacacacuuggguuccuc

SEQ ID NO: 649102 - RNA, 19 nt, Artificial Sequence
  Description of Artificial Sequence: Synthetic oligonucleotide
  Sense strand starting at position 3293 of SEQ ID NO: 585553
acaugcaaagccuaaguua

SEQ ID NO: 649103 - RNA, 19 nt, Artificial Sequence
  Description of Artificial Sequence: Synthetic oligonucleotide
  Antisense strand to SEQ ID NO: 649102
uaacuuaggcuuugcaugu

SEQ ID NO: 649104 - RNA, 19 nt, Artificial Sequence
  Description of Artificial Sequence: Synthetic oligonucleotide
  Sense strand starting at position 3296 of SEQ ID NO: 585553
ugcaaagccuaaguuauuu

SEQ ID NO: 649105 - RNA, 19 nt, Artificial Sequence
  Description of Artificial Sequence: Synthetic oligonucleotide
  Antisense strand to SEQ ID NO: 649104
aaauaacuuaggcuuugca

SEQ ID NO: 649106 - RNA, 19 nt, Artificial Sequence
  Description of Artificial Sequence: Synthetic oligonucleotide
  Sense strand starting at position 3489 of SEQ ID NO: 585553
cuuauagauuaguuugcau

SEQ ID NO: 649107 - RNA, 19 nt, Artificial Sequence
  Description of Artificial Sequence: Synthetic oligonucleotide
  Antisense strand to SEQ ID NO: 649106
augcaaacuaaucuauaag

SEQ ID NO: 649108 - RNA, 19 nt, Artificial Sequence
  Description of Artificial Sequence: Synthetic oligonucleotide
  Sense strand starting at position 3629 of SEQ ID NO: 585553
guuauugacaaguaguauu

SEQ ID NO: 649109 - RNA, 19 nt, Artificial Sequence
  Description of Artificial Sequence: Synthetic oligonucleotide
  Antisense strand to SEQ ID NO: 649108
aauacuacuugucaauaac

SEQ ID NO: 649110 - RNA, 19 nt, Artificial Sequence
  Description of Artificial Sequence: Synthetic oligonucleotide
  Sense strand starting at position 3752 of SEQ ID NO: 585553
ugugcaagucuuuauauaa

SEQ ID NO: 649111 - RNA, 19 nt, Artificial Sequence
  Description of Artificial Sequence: Synthetic oligonucleotide
  Antisense strand to SEQ ID NO: 649110
uuauauaaagacuugcaca

SEQ ID NO: 649112 - RNA, 19 nt, Artificial Sequence
  Description of Artificial Sequence: Synthetic oligonucleotide
  Sense strand starting at position 3783 of SEQ ID NO: 585553
cuuccuccuggguaaguau

SEQ ID NO: 649113 - RNA, 19 nt, Artificial Sequence
  Description of Artificial Sequence: Synthetic oligonucleotide
  Antisense strand to SEQ ID NO: 649112
auacuuacccaggaggaag

SEQ ID NO: 649114 - RNA, 19 nt, Artificial Sequence
  Description of Artificial Sequence: Synthetic oligonucleotide
  Sense strand starting at position 3797 of SEQ ID NO: 585553
aguaucuaggaguguuaua

SEQ ID NO: 649115 - RNA, 19 nt, Artificial Sequence
  Description of Artificial Sequence: Synthetic oligonucleotide
  Antisense strand to SEQ ID NO: 649114
uauaacacuccuagauacu

SEQ ID NO: 649116 - RNA, 19 nt, Artificial Sequence
  Description of Artificial Sequence: Synthetic oligonucleotide
  Sense strand starting at position 3897 of SEQ ID NO: 585553
gcagaaguauaccuuguaa

SEQ ID NO: 649117 - RNA, 19 nt, Artificial Sequence
  Description of Artificial Sequence: Synthetic oligonucleotide
  Antisense strand to SEQ ID NO: 649116
uuacaagguauacuucugc

SEQ ID NO: 649118 - RNA, 19 nt, Artificial Sequence
  Description of Artificial Sequence: Synthetic oligonucleotide
  Sense strand starting at position 3899 of SEQ ID NO: 585553
agaaguauaccuuguaaac

SEQ ID NO: 649119 - RNA, 19 nt, Artificial Sequence
  Description of Artificial Sequence: Synthetic oligonucleotide
  Antisense strand to SEQ ID NO: 649118
guuuacaagguauacuucu

SEQ ID NO: 649120 - RNA, 19 nt, Artificial Sequence
  Description of Artificial Sequence: Synthetic oligonucleotide
  Sense strand starting at position 3908 of SEQ ID NO: 585553
ccuuguaaacauuggacau

SEQ ID NO: 649121 - RNA, 19 nt, Artificial Sequence
  Description of Artificial Sequence: Synthetic oligonucleotide
  Antisense strand to SEQ ID NO: 649120
auguccaauguuuacaagg

SEQ ID NO: 649122 - RNA, 19 nt, Artificial Sequence
  Description of Artificial Sequence: Synthetic oligonucleotide
  Sense strand starting at position 265 of SEQ ID NO: 585554
aaauaaucacugugaggug

SEQ ID NO: 649123 - RNA, 19 nt, Artificial Sequence
  Description of Artificial Sequence: Synthetic oligonucleotide
  Antisense strand to SEQ ID NO: 649122
caccucacagugauuauuu

SEQ ID NO: 649124 - RNA, 19 nt, Artificial Sequence
  Description of Artificial Sequence: Synthetic oligonucleotide
  Sense strand starting at position 270 of SEQ ID NO: 585554
aucacugugaggugaaauu

SEQ ID NO: 649125 - RNA, 19 nt, Artificial Sequence
  Description of Artificial Sequence: Synthetic oligonucleotide
  Antisense strand to SEQ ID NO: 649124
aauuucaccucacagugau

SEQ ID NO: 649126 - RNA, 19 nt, Artificial Sequence
  Description of Artificial Sequence: Synthetic oligonucleotide
  Sense strand starting at position 377 of SEQ ID NO: 585554
gugaucacuuagcuaacua

SEQ ID NO: 649127 - RNA, 19 nt, Artificial Sequence
  Description of Artificial Sequence: Synthetic oligonucleotide
  Antisense strand to SEQ ID NO: 649126
uaguuagcuaagugaucac

SEQ ID NO: 649128 - RNA, 19 nt, Artificial Sequence
  Description of Artificial Sequence: Synthetic oligonucleotide
  Sense strand starting at position 510 of SEQ ID NO: 585554
acuccuuacuucuugagga

SEQ ID NO: 649129 - RNA, 19 nt, Artificial Sequence
  Description of Artificial Sequence: Synthetic oligonucleotide
  Antisense strand to SEQ ID NO: 649128
uccucaagaaguaaggagu

SEQ ID NO: 649130 - RNA, 19 nt, Artificial Sequence
  Description of Artificial Sequence: Synthetic oligonucleotide
  Sense strand starting at position 774 of SEQ ID NO: 585554
uguuucuugcaacagaaag

SEQ ID NO: 649131 - RNA, 19 nt, Artificial Sequence
  Description of Artificial Sequence: Synthetic oligonucleotide
  Antisense strand to SEQ ID NO: 649130
cuuucuguugcaagaaaca

SEQ ID NO: 649132 - RNA, 19 nt, Artificial Sequence
  Description of Artificial Sequence: Synthetic oligonucleotide
  Sense strand starting at position 791 of SEQ ID NO: 585554
agcggaauagaauauguau

SEQ ID NO: 649133 - RNA, 19 nt, Artificial Sequence
  Description of Artificial Sequence: Synthetic oligonucleotide
  Antisense strand to SEQ ID NO: 649132
auacauauucuauuccgcu

SEQ ID NO: 649134 - RNA, 19 nt, Artificial Sequence
  Description of Artificial Sequence: Synthetic oligonucleotide
  Sense strand starting at position 793 of SEQ ID NO: 585554
cggaauagaauauguaugu

SEQ ID NO: 649135 - RNA, 19 nt, Artificial Sequence
  Description of Artificial Sequence: Synthetic oligonucleotide
  Antisense strand to SEQ ID NO: 649134
acauacauauucuauuccg

SEQ ID NO: 649136 - RNA, 19 nt, Artificial Sequence
  Description of Artificial Sequence: Synthetic oligonucleotide
  Sense strand starting at position 806 of SEQ ID NO: 585554
guauguguugugagggucu

SEQ ID NO: 649137 - RNA, 19 nt, Artificial Sequence
  Description of Artificial Sequence: Synthetic oligonucleotide
  Antisense strand to SEQ ID NO: 649136
agacccucacaacacauac

SEQ ID NO: 649138 - RNA, 19 nt, Artificial Sequence
  Description of Artificial Sequence: Synthetic oligonucleotide
  Sense strand starting at position 829 of SEQ ID NO: 585554
agcgcauuugacuacggua

SEQ ID NO: 649139 - RNA, 19 nt, Artificial Sequence
  Description of Artificial Sequence: Synthetic oligonucleotide
  Antisense strand to SEQ ID NO: 649138
uaccguagucaaaugcgcu

SEQ ID NO: 649140 - RNA, 19 nt, Artificial Sequence
  Description of Artificial Sequence: Synthetic oligonucleotide
  Sense strand starting at position 857 of SEQ ID NO: 585554
agauaaguuugucuuucug

SEQ ID NO: 649141 - RNA, 19 nt, Artificial Sequence
  Description of Artificial Sequence: Synthetic oligonucleotide
  Antisense strand to SEQ ID NO: 649140
cagaaagacaaacuuaucu

SEQ ID NO: 649142 - RNA, 19 nt, Artificial Sequence
  Description of Artificial Sequence: Synthetic oligonucleotide
  Sense strand starting at position 919 of SEQ ID NO: 585554
acucuuugauccuuaggua

SEQ ID NO: 649143 - RNA, 19 nt, Artificial Sequence
  Description of Artificial Sequence: Synthetic oligonucleotide
  Antisense strand to SEQ ID NO: 649142
uaccuaaggaucaaagagu

SEQ ID NO: 649144 - RNA, 19 nt, Artificial Sequence
  Description of Artificial Sequence: Synthetic oligonucleotide
  Sense strand starting at position 920 of SEQ ID NO: 585554
cucuuugauccuuagguau

SEQ ID NO: 649145 - RNA, 19 nt, Artificial Sequence
  Description of Artificial Sequence: Synthetic oligonucleotide
  Antisense strand to SEQ ID NO: 649144
auaccuaaggaucaaagag

SEQ ID NO: 649146 - RNA, 19 nt, Artificial Sequence
  Description of Artificial Sequence: Synthetic oligonucleotide
  Sense strand starting at position 1984 of SEQ ID NO: 585554
ggaaucgugaaaugggcaa

SEQ ID NO: 649147 - RNA, 19 nt, Artificial Sequence
  Description of Artificial Sequence: Synthetic oligonucleotide
  Antisense strand to SEQ ID NO: 649146
uugcccauuucacgauucc

SEQ ID NO: 649148 - RNA, 19 nt, Artificial Sequence
  Description of Artificial Sequence: Synthetic oligonucleotide
  Sense strand starting at position 1988 of SEQ ID NO: 585554
ucgugaaaugggcaaagau

SEQ ID NO: 649149 - RNA, 19 nt, Artificial Sequence
  Description of Artificial Sequence: Synthetic oligonucleotide
  Antisense strand to SEQ ID NO: 649148
aucuuugcccauuucacga

SEQ ID NO: 649150 - RNA, 19 nt, Artificial Sequence
  Description of Artificial Sequence: Synthetic oligonucleotide
  Sense strand starting at position 2020 of SEQ ID NO: 585554
aucugaucgcagcacuaga

SEQ ID NO: 649151 - RNA, 19 nt, Artificial Sequence
  Description of Artificial Sequence: Synthetic oligonucleotide
  Antisense strand to SEQ ID NO: 649150
ucuagugcugcgaucagau

SEQ ID NO: 649152 - RNA, 19 nt, Artificial Sequence
  Description of Artificial Sequence: Synthetic oligonucleotide
  Sense strand starting at position 2051 of SEQ ID NO: 585554
uuagaauaucauggacuuu

SEQ ID NO: 649153 - RNA, 19 nt, Artificial Sequence
  Description of Artificial Sequence: Synthetic oligonucleotide
  Antisense strand to SEQ ID NO: 649152
aaaguccaugauauucuaa

SEQ ID NO: 649154 - RNA, 19 nt, Artificial Sequence
  Description of Artificial Sequence: Synthetic oligonucleotide
  Sense strand starting at position 2119 of SEQ ID NO: 585554
ugggauccuggaugaguau

SEQ ID NO: 649155 - RNA, 19 nt, Artificial Sequence
  Description of Artificial Sequence: Synthetic oligonucleotide
  Antisense strand to SEQ ID NO: 649154
auacucauccaggauccca

SEQ ID NO: 649156 - RNA, 19 nt, Artificial Sequence
  Description of Artificial Sequence: Synthetic oligonucleotide
  Sense strand starting at position 2166 of SEQ ID NO: 585554
ucaucucuuccugauagug

SEQ ID NO: 649157 - RNA, 19 nt, Artificial Sequence
  Description of Artificial Sequence: Synthetic oligonucleotide
  Antisense strand to SEQ ID NO: 649156
cacuaucaggaagagauga

SEQ ID NO: 649158 - RNA, 19 nt, Artificial Sequence
  Description of Artificial Sequence: Synthetic oligonucleotide
  Sense strand starting at position 2175 of SEQ ID NO: 585554
ccugauagugccuaucauu

SEQ ID NO: 649159 - RNA, 19 nt, Artificial Sequence
  Description of Artificial Sequence: Synthetic oligonucleotide
  Antisense strand to SEQ ID NO: 649158
aaugauaggcacuaucagg

SEQ ID NO: 649160 - RNA, 19 nt, Artificial Sequence
  Description of Artificial Sequence: Synthetic oligonucleotide
  Sense strand starting at position 2224 of SEQ ID NO: 585554
uuuaccugggcugaagauu

SEQ ID NO: 649161 - RNA, 19 nt, Artificial Sequence
  Description of Artificial Sequence: Synthetic oligonucleotide
  Antisense strand to SEQ ID NO: 649160
aaucuucagcccagguaaa

SEQ ID NO: 649162 - RNA, 19 nt, Artificial Sequence
  Description of Artificial Sequence: Synthetic oligonucleotide
  Sense strand starting at position 2415 of SEQ ID NO: 585554
uuucuuuaguuaccagauu

SEQ ID NO: 649163 - RNA, 19 nt, Artificial Sequence
  Description of Artificial Sequence: Synthetic oligonucleotide
  Antisense strand to SEQ ID NO: 649162
aaucugguaacuaaagaaa

SEQ ID NO: 649164 - RNA, 19 nt, Artificial Sequence
  Description of Artificial Sequence: Synthetic oligonucleotide
  Sense strand starting at position 2503 of SEQ ID NO: 585554
ugagaaagauccucucuuu

SEQ ID NO: 649165 - RNA, 19 nt, Artificial Sequence
  Description of Artificial Sequence: Synthetic oligonucleotide
  Antisense strand to SEQ ID NO: 649164
aaagagaggaucuuucuca

SEQ ID NO: 649166 - RNA, 19 nt, Artificial Sequence
  Description of Artificial Sequence: Synthetic oligonucleotide
  Sense strand starting at position 2561 of SEQ ID NO: 585554
gggugagcauuucucuagu

SEQ ID NO: 649167 - RNA, 19 nt, Artificial Sequence
  Description of Artificial Sequence: Synthetic oligonucleotide
  Antisense strand to SEQ ID NO: 649166
acuagagaaaugcucaccc

SEQ ID NO: 649168 - RNA, 19 nt, Artificial Sequence
  Description of Artificial Sequence: Synthetic oligonucleotide
  Sense strand starting at position 2563 of SEQ ID NO: 585554
gugagcauuucucuaguuu

SEQ ID NO: 649169 - RNA, 19 nt, Artificial Sequence
  Description of Artificial Sequence: Synthetic oligonucleotide
  Antisense strand to SEQ ID NO: 649168
aaacuagagaaaugcucac

SEQ ID NO: 649170 - RNA, 19 nt, Artificial Sequence
  Description of Artificial Sequence: Synthetic oligonucleotide
  Sense strand starting at position 2760 of SEQ ID NO: 585554
agccuaauauucccagaug

SEQ ID NO: 649171 - RNA, 19 nt, Artificial Sequence
  Description of Artificial Sequence: Synthetic oligonucleotide
  Antisense strand to SEQ ID NO: 649170
caucugggaauauuaggcu

SEQ ID NO: 649172 - RNA, 19 nt, Artificial Sequence
  Description of Artificial Sequence: Synthetic oligonucleotide
  Sense strand starting at position 3082 of SEQ ID NO: 585554
gcagauggcauuugugacu

SEQ ID NO: 649173 - RNA, 19 nt, Artificial Sequence
  Description of Artificial Sequence: Synthetic oligonucleotide
  Antisense strand to SEQ ID NO: 649172
agucacaaaugccaucugc

SEQ ID NO: 649174 - RNA, 19 nt, Artificial Sequence
  Description of Artificial Sequence: Synthetic oligonucleotide
  Sense strand starting at position 3087 of SEQ ID NO: 585554
uggcauuugugacuugcuu

SEQ ID NO: 649175 - RNA, 19 nt, Artificial Sequence
  Description of Artificial Sequence: Synthetic oligonucleotide
  Antisense strand to SEQ ID NO: 649174
aagcaagucacaaaugcca

SEQ ID NO: 649176 - RNA, 19 nt, Artificial Sequence
  Description of Artificial Sequence: Synthetic oligonucleotide
  Sense strand starting at position 3140 of SEQ ID NO: 585554
gaggaagccucucuuaggu

SEQ ID NO: 649177 - RNA, 19 nt, Artificial Sequence
  Description of Artificial Sequence: Synthetic oligonucleotide
  Antisense strand to SEQ ID NO: 649176
accuaagagaggcuuccuc

SEQ ID NO: 649178 - RNA, 19 nt, Artificial Sequence
  Description of Artificial Sequence: Synthetic oligonucleotide
  Sense strand starting at position 3169 of SEQ ID NO: 585554
ucuuuaagcucucugagga

SEQ ID NO: 649179 - RNA, 19 nt, Artificial Sequence
  Description of Artificial Sequence: Synthetic oligonucleotide
  Antisense strand to SEQ ID NO: 649178
uccucagagagcuuaaaga

SEQ ID NO: 649180 - RNA, 19 nt, Artificial Sequence
  Description of Artificial Sequence: Synthetic oligonucleotide
  Sense strand starting at position 3170 of SEQ ID NO: 585554
cuuuaagcucucugaggau

SEQ ID NO: 649181 - RNA, 19 nt, Artificial Sequence
  Description of Artificial Sequence: Synthetic oligonucleotide
  Antisense strand to SEQ ID NO: 649180
auccucagagagcuuaaag

SEQ ID NO: 649182 - RNA, 19 nt, Artificial Sequence
  Description of Artificial Sequence: Synthetic oligonucleotide
  Sense strand starting at position 3185 of SEQ ID NO: 585554
ggaucugagucuccaagca

SEQ ID NO: 649183 - RNA, 19 nt, Artificial Sequence
  Description of Artificial Sequence: Synthetic oligonucleotide
  Antisense strand to SEQ ID NO: 649182
ugcuuggagacucagaucc

SEQ ID NO: 649184 - RNA, 19 nt, Artificial Sequence
  Description of Artificial Sequence: Synthetic oligonucleotide
  Sense strand starting at position 3257 of SEQ ID NO: 585554
uugaaucuguuucuuagau

SEQ ID NO: 649185 - RNA, 19 nt, Artificial Sequence
  Description of Artificial Sequence: Synthetic oligonucleotide
  Antisense strand to SEQ ID NO: 649184
aucuaagaaacagauucaa

SEQ ID NO: 649186 - RNA, 19 nt, Artificial Sequence
  Description of Artificial Sequence: Synthetic oligonucleotide
  Sense strand starting at position 3258 of SEQ ID NO: 585554
ugaaucuguuucuuagauu

SEQ ID NO: 649187 - RNA, 19 nt, Artificial Sequence
  Description of Artificial Sequence: Synthetic oligonucleotide
  Antisense strand to SEQ ID NO: 649186
aaucuaagaaacagauuca

SEQ ID NO: 649188 - RNA, 19 nt, Artificial Sequence
  Description of Artificial Sequence: Synthetic oligonucleotide
  Sense strand starting at position 3264 of SEQ ID NO: 585554
uguuucuuagauugcaaga

SEQ ID NO: 649189 - RNA, 19 nt, Artificial Sequence
  Description of Artificial Sequence: Synthetic oligonucleotide
  Antisense strand to SEQ ID NO: 649188
ucuugcaaucuaagaaaca

SEQ ID NO: 649190 - RNA, 19 nt, Artificial Sequence
  Description of Artificial Sequence: Synthetic oligonucleotide
  Sense strand starting at position 3458 of SEQ ID NO: 585554
ccuucuuauguauauugau

SEQ ID NO: 649191 - RNA, 19 nt, Artificial Sequence
  Description of Artificial Sequence: Synthetic oligonucleotide
  Antisense strand to SEQ ID NO: 649190
aucaauauacauaagaagg

SEQ ID NO: 649192 - RNA, 19 nt, Artificial Sequence
  Description of Artificial Sequence: Synthetic oligonucleotide
  Sense strand starting at position 3704 of SEQ ID NO: 585554
ugauuuguuucuucugugu

SEQ ID NO: 649193 - RNA, 19 nt, Artificial Sequence
  Description of Artificial Sequence: Synthetic oligonucleotide
  Antisense strand to SEQ ID NO: 649192
acacagaagaaacaaauca

SEQ ID NO: 649194 - RNA, 19 nt, Artificial Sequence
  Description of Artificial Sequence: Synthetic oligonucleotide
  Sense strand starting at position 3753 of SEQ ID NO: 585554
cugugugucaaauagaaug

SEQ ID NO: 649195 - RNA, 19 nt, Artificial Sequence
  Description of Artificial Sequence: Synthetic oligonucleotide
  Antisense strand to SEQ ID NO: 649194
cauucuauuugacacacag

SEQ ID NO: 649196 - RNA, 19 nt, Artificial Sequence
  Description of Artificial Sequence: Synthetic oligonucleotide
  Sense strand starting at position 3755 of SEQ ID NO: 585554
gugugucaaauagaauguu

SEQ ID NO: 649197 - RNA, 19 nt, Artificial Sequence
  Description of Artificial Sequence: Synthetic oligonucleotide
  Antisense strand to SEQ ID NO: 649196
aacauucuauuugacacac

SEQ ID NO: 649198 - RNA, 19 nt, Artificial Sequence
  Description of Artificial Sequence: Synthetic oligonucleotide
  Sense strand starting at position 3877 of SEQ ID NO: 585554
uggauuucguacuuaguuu

SEQ ID NO: 649199 - RNA, 19 nt, Artificial Sequence
  Description of Artificial Sequence: Synthetic oligonucleotide
  Antisense strand to SEQ ID NO: 649198
aaacuaaguacgaaaucca

SEQ ID NO: 649200 - RNA, 19 nt, Artificial Sequence
  Description of Artificial Sequence: Synthetic oligonucleotide
  Sense strand starting at position 3944 of SEQ ID NO: 585554
gcugaaaguaauggaaaug

SEQ ID NO: 649201 - RNA, 19 nt, Artificial Sequence
  Description of Artificial Sequence: Synthetic oligonucleotide
  Antisense strand to SEQ ID NO: 649200
cauuuccauuacuuucagc

SEQ ID NO: 649202 - RNA, 19 nt, Artificial Sequence
  Description of Artificial Sequence: Synthetic oligonucleotide
  Sense strand starting at position 247 of SEQ ID NO: 585555
agaaauagaugcuuguuaa

SEQ ID NO: 649203 - RNA, 19 nt, Artificial Sequence
  Description of Artificial Sequence: Synthetic oligonucleotide
  Antisense strand to SEQ ID NO: 649202
uuaacaagcaucuauuucu

SEQ ID NO: 649204 - RNA, 19 nt, Artificial Sequence
  Description of Artificial Sequence: Synthetic oligonucleotide
  Sense strand starting at position 248 of SEQ ID NO: 585555
gaaauagaugcuuguuaau

SEQ ID NO: 649205 - RNA, 19 nt, Artificial Sequence
  Description of Artificial Sequence: Synthetic oligonucleotide
  Antisense strand to SEQ ID NO: 649204
auuaacaagcaucuauuuc

SEQ ID NO: 649206 - RNA, 19 nt, Artificial Sequence
  Description of Artificial Sequence: Synthetic oligonucleotide
  Sense strand starting at position 250 of SEQ ID NO: 585555
aauagaugcuuguuaauag

SEQ ID NO: 649207 - RNA, 19 nt, Artificial Sequence
  Description of Artificial Sequence: Synthetic oligonucleotide
  Antisense strand to SEQ ID NO: 649206
cuauuaacaagcaucuauu

SEQ ID NO: 649208 - RNA, 19 nt, Artificial Sequence
  Description of Artificial Sequence: Synthetic oligonucleotide
  Sense strand starting at position 271 of SEQ ID NO: 585555
aaaguuguucgugacacag

SEQ ID NO: 649209 - RNA, 19 nt, Artificial Sequence
  Description of Artificial Sequence: Synthetic oligonucleotide
  Antisense strand to SEQ ID NO: 649208
cugugucacgaacaacuuu

SEQ ID NO: 649210 - RNA, 19 nt, Artificial Sequence
  Description of Artificial Sequence: Synthetic oligonucleotide
  Sense strand starting at position 323 of SEQ ID NO: 585555
auccaacuuguauguauaa

SEQ ID NO: 649211 - RNA, 19 nt, Artificial Sequence
  Description of Artificial Sequence: Synthetic oligonucleotide
  Antisense strand to SEQ ID NO: 649210
uuauacauacaaguuggau

SEQ ID NO: 649212 - RNA, 19 nt, Artificial Sequence
  Description of Artificial Sequence: Synthetic oligonucleotide
  Sense strand starting at position 324 of SEQ ID NO: 585555
uccaacuuguauguauaaa

SEQ ID NO: 649213 - RNA, 19 nt, Artificial Sequence
  Description of Artificial Sequence: Synthetic oligonucleotide
  Antisense strand to SEQ ID NO: 649212
uuuauacauacaaguugga

SEQ ID NO: 649214 - RNA, 19 nt, Artificial Sequence
  Description of Artificial Sequence: Synthetic oligonucleotide
  Sense strand starting at position 488 of SEQ ID NO: 585555
uugauuauuugacauggau

SEQ ID NO: 649215 - RNA, 19 nt, Artificial Sequence
  Description of Artificial Sequence: Synthetic oligonucleotide
  Antisense strand to SEQ ID NO: 649214
auccaugucaaauaaucaa

SEQ ID NO: 649216 - RNA, 19 nt, Artificial Sequence
  Description of Artificial Sequence: Synthetic oligonucleotide
  Sense strand starting at position 836 of SEQ ID NO: 585555
aguauaacugcagaagagu

SEQ ID NO: 649217 - RNA, 19 nt, Artificial Sequence
  Description of Artificial Sequence: Synthetic oligonucleotide
  Antisense strand to SEQ ID NO: 649216
acucuucugcaguuauacu

SEQ ID NO: 649218 - RNA, 19 nt, Artificial Sequence
  Description of Artificial Sequence: Synthetic oligonucleotide
  Sense strand starting at position 988 of SEQ ID NO: 585555
uacagagaaucuuccgaag

SEQ ID NO: 649219 - RNA, 19 nt, Artificial Sequence
  Description of Artificial Sequence: Synthetic oligonucleotide
  Antisense strand to SEQ ID NO: 649218
cuucggaagauucucugua

SEQ ID NO: 649220 - RNA, 19 nt, Artificial Sequence
  Description of Artificial Sequence: Synthetic oligonucleotide
  Sense strand starting at position 1140 of SEQ ID NO: 585555
augagcguuccauagaaug

SEQ ID NO: 649221 - RNA, 19 nt, Artificial Sequence
  Description of Artificial Sequence: Synthetic oligonucleotide
  Antisense strand to SEQ ID NO: 649220
cauucuauggaacgcucau

SEQ ID NO: 649222 - RNA, 19 nt, Artificial Sequence
  Description of Artificial Sequence: Synthetic oligonucleotide
  Sense strand starting at position 1150 of SEQ ID NO: 585555
cauagaauguggucacuac

SEQ ID NO: 649223 - RNA, 19 nt, Artificial Sequence
  Description of Artificial Sequence: Synthetic oligonucleotide
  Antisense strand to SEQ ID NO: 649222
guagugaccacauucuaug

SEQ ID NO: 649224 - RNA, 19 nt, Artificial Sequence
  Description of Artificial Sequence: Synthetic oligonucleotide
  Sense strand starting at position 1154 of SEQ ID NO: 585555
gaauguggucacuacagcu

SEQ ID NO: 649225 - RNA, 19 nt, Artificial Sequence
  Description of Artificial Sequence: Synthetic oligonucleotide
  Antisense strand to SEQ ID NO: 649224
agcuguagugaccacauuc

SEQ ID NO: 649226 - RNA, 19 nt, Artificial Sequence
  Description of Artificial Sequence: Synthetic oligonucleotide
  Sense strand starting at position 1247 of SEQ ID NO: 585555
ucuggcauaagaugucaga

SEQ ID NO: 649227 - RNA, 19 nt, Artificial Sequence
  Description of Artificial Sequence: Synthetic oligonucleotide
  Antisense strand to SEQ ID NO: 649226
ucugacaucuuaugccaga

SEQ ID NO: 649228 - RNA, 19 nt, Artificial Sequence
  Description of Artificial Sequence: Synthetic oligonucleotide
  Sense strand starting at position 1258 of SEQ ID NO: 585555
augucagaaucaguccaaa

SEQ ID NO: 649229 - RNA, 19 nt, Artificial Sequence
  Description of Artificial Sequence: Synthetic oligonucleotide
  Antisense strand to SEQ ID NO: 649228
uuuggacugauucugacau

SEQ ID NO: 649230 - RNA, 19 nt, Artificial Sequence
  Description of Artificial Sequence: Synthetic oligonucleotide
  Sense strand starting at position 1303 of SEQ ID NO: 585555
gaaugagaguugucaccug

SEQ ID NO: 649231 - RNA, 19 nt, Artificial Sequence
  Description of Artificial Sequence: Synthetic oligonucleotide
  Antisense strand to SEQ ID NO: 649230
caggugacaacucucauuc

SEQ ID NO: 649232 - RNA, 19 nt, Artificial Sequence
  Description of Artificial Sequence: Synthetic oligonucleotide
  Sense strand starting at position 1669 of SEQ ID NO: 585555
gcaucacugcggaggugua

SEQ ID NO: 649233 - RNA, 19 nt, Artificial Sequence
  Description of Artificial Sequence: Synthetic oligonucleotide
  Antisense strand to SEQ ID NO: 649232
uacaccuccgcagugaugc

SEQ ID NO: 649234 - RNA, 19 nt, Artificial Sequence
  Description of Artificial Sequence: Synthetic oligonucleotide
  Sense strand starting at position 1676 of SEQ ID NO: 585555
ugcggagguguagagaaua

SEQ ID NO: 649235 - RNA, 19 nt, Artificial Sequence
  Description of Artificial Sequence: Synthetic oligonucleotide
  Antisense strand to SEQ ID NO: 649234
uauucucuacaccuccgca

SEQ ID NO: 649236 - RNA, 19 nt, Artificial Sequence
  Description of Artificial Sequence: Synthetic oligonucleotide
  Sense strand starting at position 1702 of SEQ ID NO: 585555
aggacagauucgccaagaa

SEQ ID NO: 649237 - RNA, 19 nt, Artificial Sequence
  Description of Artificial Sequence: Synthetic oligonucleotide
  Antisense strand to SEQ ID NO: 649236
uucuuggcgaaucuguccu

SEQ ID NO: 649238 - RNA, 19 nt, Artificial Sequence
  Description of Artificial Sequence: Synthetic oligonucleotide
  Sense strand starting at position 1774 of SEQ ID NO: 585555
gcauauucccuaugaugau

SEQ ID NO: 649239 - RNA, 19 nt, Artificial Sequence
  Description of Artificial Sequence: Synthetic oligonucleotide
  Antisense strand to SEQ ID NO: 649238
aucaucauagggaauaugc

SEQ ID NO: 649240 - RNA, 19 nt, Artificial Sequence
  Description of Artificial Sequence: Synthetic oligonucleotide
  Sense strand starting at position 1884 of SEQ ID NO: 585555
ucguuuccuguggagacaa

SEQ ID NO: 649241 - RNA, 19 nt, Artificial Sequence
  Description of Artificial Sequence: Synthetic oligonucleotide
  Antisense strand to SEQ ID NO: 649240
uugucuccacaggaaacga

SEQ ID NO: 649242 - RNA, 19 nt, Artificial Sequence
  Description of Artificial Sequence: Synthetic oligonucleotide
  Sense strand starting at position 1886 of SEQ ID NO: 585555
guuuccuguggagacaauu

SEQ ID NO: 649243 - RNA, 19 nt, Artificial Sequence
  Description of Artificial Sequence: Synthetic oligonucleotide
  Antisense strand to SEQ ID NO: 649242
aauugucuccacaggaaac

SEQ ID NO: 649244 - RNA, 19 nt, Artificial Sequence
  Description of Artificial Sequence: Synthetic oligonucleotide
  Sense strand starting at position 1981 of SEQ ID NO: 585555
caagccuaacguuauuaga

SEQ ID NO: 649245 - RNA, 19 nt, Artificial Sequence
  Description of Artificial Sequence: Synthetic oligonucleotide
  Antisense strand to SEQ ID NO: 649244
ucuaauaacguuaggcuug

SEQ ID NO: 649246 - RNA, 19 nt, Artificial Sequence
  Description of Artificial Sequence: Synthetic oligonucleotide
  Sense strand starting at position 2140 of SEQ ID NO: 585555
uucuuuaacgcucagaaga

SEQ ID NO: 649247 - RNA, 19 nt, Artificial Sequence
  Description of Artificial Sequence: Synthetic oligonucleotide
  Antisense strand to SEQ ID NO: 649246
ucuucugagcguuaaagaa

SEQ ID NO: 649248 - RNA, 19 nt, Artificial Sequence
  Description of Artificial Sequence: Synthetic oligonucleotide
  Sense strand starting at position 2145 of SEQ ID NO: 585555
uaacgcucagaagaguuua

SEQ ID NO: 649249 - RNA, 19 nt, Artificial Sequence
  Description of Artificial Sequence: Synthetic oligonucleotide
  Antisense strand to SEQ ID NO: 649248
uaaacucuucugagcguua

SEQ ID NO: 649250 - RNA, 19 nt, Artificial Sequence
  Description of Artificial Sequence: Synthetic oligonucleotide
  Sense strand starting at position 2304 of SEQ ID NO: 585555
aaaugugugcuauauagac

SEQ ID NO: 649251 - RNA, 19 nt, Artificial Sequence
  Description of Artificial Sequence: Synthetic oligonucleotide
  Antisense strand to SEQ ID NO: 649250
gucuauauagcacacauuu

SEQ ID NO: 649252 - RNA, 19 nt, Artificial Sequence
  Description of Artificial Sequence: Synthetic oligonucleotide
  Sense strand starting at position 2372 of SEQ ID NO: 585555
cucuaugagugguuugaga

SEQ ID NO: 649253 - RNA, 19 nt, Artificial Sequence
  Description of Artificial Sequence: Synthetic oligonucleotide
  Antisense strand to SEQ ID NO: 649252
ucucaaaccacucauagag

SEQ ID NO: 649254 - RNA, 19 nt, Artificial Sequence
  Description of Artificial Sequence: Synthetic oligonucleotide
  Sense strand starting at position 2374 of SEQ ID NO: 585555
cuaugagugguuugagaau

SEQ ID NO: 649255 - RNA, 19 nt, Artificial Sequence
  Description of Artificial Sequence: Synthetic oligonucleotide
  Antisense strand to SEQ ID NO: 649254
auucucaaaccacucauag

SEQ ID NO: 649256 - RNA, 19 nt, Artificial Sequence
  Description of Artificial Sequence: Synthetic oligonucleotide
  Sense strand starting at position 2386 of SEQ ID NO: 585555
ugagaauucugucuaaucc

SEQ ID NO: 649257 - RNA, 19 nt, Artificial Sequence
  Description of Artificial Sequence: Synthetic oligonucleotide
  Antisense strand to SEQ ID NO: 649256
ggauuagacagaauucuca

SEQ ID NO: 649258 - RNA, 19 nt, Artificial Sequence
  Description of Artificial Sequence: Synthetic oligonucleotide
  Sense strand starting at position 2491 of SEQ ID NO: 585555
cucggauaauucuuauaua

SEQ ID NO: 649259 - RNA, 19 nt, Artificial Sequence
  Description of Artificial Sequence: Synthetic oligonucleotide
  Antisense strand to SEQ ID NO: 649258
uauauaagaauuauccgag

SEQ ID NO: 649260 - RNA, 19 nt, Artificial Sequence
  Description of Artificial Sequence: Synthetic oligonucleotide
  Sense strand starting at position 2651 of SEQ ID NO: 585555
gcagaaggugugggaucaa

SEQ ID NO: 649261 - RNA, 19 nt, Artificial Sequence
  Description of Artificial Sequence: Synthetic oligonucleotide
  Antisense strand to SEQ ID NO: 649260
uugaucccacaccuucugc

SEQ ID NO: 649262 - RNA, 19 nt, Artificial Sequence
  Description of Artificial Sequence: Synthetic oligonucleotide
  Sense strand starting at position 3130 of SEQ ID NO: 585555
guuguaauugagcaugaca

SEQ ID NO: 649263 - RNA, 19 nt, Artificial Sequence
  Description of Artificial Sequence: Synthetic oligonucleotide
  Antisense strand to SEQ ID NO: 649262
ugucaugcucaauuacaac

SEQ ID NO: 649264 - RNA, 19 nt, Artificial Sequence
  Description of Artificial Sequence: Synthetic oligonucleotide
  Sense strand starting at position 3133 of SEQ ID NO: 585555
guaauugagcaugacacuu

SEQ ID NO: 649265 - RNA, 19 nt, Artificial Sequence
  Description of Artificial Sequence: Synthetic oligonucleotide
  Antisense strand to SEQ ID NO: 649264
aagugucaugcucaauuac

SEQ ID NO: 649266 - RNA, 19 nt, Artificial Sequence
  Description of Artificial Sequence: Synthetic oligonucleotide
  Sense strand starting at position 3217 of SEQ ID NO: 585555
uguguuuauuaacugaaga

SEQ ID NO: 649267 - RNA, 19 nt, Artificial Sequence
  Description of Artificial Sequence: Synthetic oligonucleotide
  Antisense strand to SEQ ID NO: 649266
ucuucaguuaauaaacaca

SEQ ID NO: 649268 - RNA, 19 nt, Artificial Sequence
  Description of Artificial Sequence: Synthetic oligonucleotide
  Sense strand starting at position 3335 of SEQ ID NO: 585555
uguuacuuucuagaauaug

SEQ ID NO: 649269 - RNA, 19 nt, Artificial Sequence
  Description of Artificial Sequence: Synthetic oligonucleotide
  Antisense strand to SEQ ID NO: 649268
cauauucuagaaaguaaca

SEQ ID NO: 649270 - RNA, 19 nt, Artificial Sequence
  Description of Artificial Sequence: Synthetic oligonucleotide
  Sense strand starting at position 3429 of SEQ ID NO: 585555
aguuuccuaagaggugaaa

SEQ ID NO: 649271 - RNA, 19 nt, Artificial Sequence
  Description of Artificial Sequence: Synthetic oligonucleotide
  Antisense strand to SEQ ID NO: 649270
uuucaccucuuaggaaacu

SEQ ID NO: 649272 - RNA, 19 nt, Artificial Sequence
  Description of Artificial Sequence: Synthetic oligonucleotide
  Sense strand starting at position 3569 of SEQ ID NO: 585555
aacguuaaauccucgaaga

SEQ ID NO: 649273 - RNA, 19 nt, Artificial Sequence
  Description of Artificial Sequence: Synthetic oligonucleotide
  Antisense strand to SEQ ID NO: 649272
ucuucgaggauuuaacguu

SEQ ID NO: 649274 - RNA, 19 nt, Artificial Sequence
  Description of Artificial Sequence: Synthetic oligonucleotide
  Sense strand starting at position 3571 of SEQ ID NO: 585555
cguuaaauccucgaagacc

SEQ ID NO: 649275 - RNA, 19 nt, Artificial Sequence
  Description of Artificial Sequence: Synthetic oligonucleotide
  Antisense strand to SEQ ID NO: 649274
ggucuucgaggauuuaacg

SEQ ID NO: 649276 - RNA, 19 nt, Artificial Sequence
  Description of Artificial Sequence: Synthetic oligonucleotide
  Sense strand starting at position 3660 of SEQ ID NO: 585555
guacuaaggaucuagugua

SEQ ID NO: 649277 - RNA, 19 nt, Artificial Sequence
  Description of Artificial Sequence: Synthetic oligonucleotide
  Antisense strand to SEQ ID NO: 649276
uacacuagauccuuaguac

SEQ ID NO: 649278 - RNA, 19 nt, Artificial Sequence
  Description of Artificial Sequence: Synthetic oligonucleotide
  Sense strand starting at position 3754 of SEQ ID NO: 585555
uugugugacagauggacau

SEQ ID NO: 649279 - RNA, 19 nt, Artificial Sequence
  Description of Artificial Sequence: Synthetic oligonucleotide
  Antisense strand to SEQ ID NO: 649278
auguccaucugucacacaa

SEQ ID NO: 649280 - RNA, 19 nt, Artificial Sequence
  Description of Artificial Sequence: Synthetic oligonucleotide
  Sense strand starting at position 3849 of SEQ ID NO: 585555
ugcugaacugaugagugau

SEQ ID NO: 649281 - RNA, 19 nt, Artificial Sequence
  Description of Artificial Sequence: Synthetic oligonucleotide
  Antisense strand to SEQ ID NO: 649280
aucacucaucaguucagca

SEQ ID NO: 649282 - RNA, 19 nt, Artificial Sequence
  Description of Artificial Sequence: Synthetic oligonucleotide
  Sense strand starting at position 28 of SEQ ID NO: 585556
uuuccaugucuggaaguuu

SEQ ID NO: 649283 - RNA, 19 nt, Artificial Sequence
  Description of Artificial Sequence: Synthetic oligonucleotide
  Antisense strand to SEQ ID NO: 649282
aaacuuccagacauggaaa

SEQ ID NO: 649284 - RNA, 19 nt, Artificial Sequence
  Description of Artificial Sequence: Synthetic oligonucleotide
  Sense strand starting at position 37 of SEQ ID NO: 585556
cuggaaguuuguccuacaa

SEQ ID NO: 649285 - RNA, 19 nt, Artificial Sequence
  Description of Artificial Sequence: Synthetic oligonucleotide
  Antisense strand to SEQ ID NO: 649284
uuguaggacaaacuuccag

SEQ ID NO: 649286 - RNA, 19 nt, Artificial Sequence
  Description of Artificial Sequence: Synthetic oligonucleotide
  Sense strand starting at position 73 of SEQ ID NO: 585556
uagaaugacguguacacaa

SEQ ID NO: 649287 - RNA, 19 nt, Artificial Sequence
  Description of Artificial Sequence: Synthetic oligonucleotide
  Antisense strand to SEQ ID NO: 649286
uuguguacacgucauucua

SEQ ID NO: 649288 - RNA, 19 nt, Artificial Sequence
  Description of Artificial Sequence: Synthetic oligonucleotide
  Sense strand starting at position 80 of SEQ ID NO: 585556
acguguacacaagauuaua

SEQ ID NO: 649289 - RNA, 19 nt, Artificial Sequence
  Description of Artificial Sequence: Synthetic oligonucleotide
  Antisense strand to SEQ ID NO: 649288
uauaaucuuguguacacgu

SEQ ID NO: 649290 - RNA, 19 nt, Artificial Sequence
  Description of Artificial Sequence: Synthetic oligonucleotide
  Sense strand starting at position 103 of SEQ ID NO: 585556
gcaacauaugauuggaaau

SEQ ID NO: 649291 - RNA, 19 nt, Artificial Sequence
  Description of Artificial Sequence: Synthetic oligonucleotide
  Antisense strand to SEQ ID NO: 649290
auuuccaaucauauguugc

SEQ ID NO: 649292 - RNA, 19 nt, Artificial Sequence
  Description of Artificial Sequence: Synthetic oligonucleotide
  Sense strand starting at position 130 of SEQ ID NO: 585556
uguccaaugauaggagacu

SEQ ID NO: 649293 - RNA, 19 nt, Artificial Sequence
  Description of Artificial Sequence: Synthetic oligonucleotide
  Antisense strand to SEQ ID NO: 649292
agucuccuaucauuggaca

SEQ ID NO: 649294 - RNA, 19 nt, Artificial Sequence
  Description of Artificial Sequence: Synthetic oligonucleotide
  Sense strand starting at position 318 of SEQ ID NO: 585556
uuuguauuugacuguguag

SEQ ID NO: 649295 - RNA, 19 nt, Artificial Sequence
  Description of Artificial Sequence: Synthetic oligonucleotide
  Antisense strand to SEQ ID NO: 649294
cuacacagucaaauacaaa

SEQ ID NO: 649296 - RNA, 19 nt, Artificial Sequence
  Description of Artificial Sequence: Synthetic oligonucleotide
  Sense strand starting at position 320 of SEQ ID NO: 585556
uguauuugacuguguagca

SEQ ID NO: 649297 - RNA, 19 nt, Artificial Sequence
  Description of Artificial Sequence: Synthetic oligonucleotide
  Antisense strand to SEQ ID NO: 649296
ugcuacacagucaaauaca

SEQ ID NO: 649298 - RNA, 19 nt, Artificial Sequence
  Description of Artificial Sequence: Synthetic oligonucleotide
  Sense strand starting at position 321 of SEQ ID NO: 585556
guauuugacuguguagcau

SEQ ID NO: 649299 - RNA, 19 nt, Artificial Sequence
  Description of Artificial Sequence: Synthetic oligonucleotide
  Antisense strand to SEQ ID NO: 649298
augcuacacagucaaauac

SEQ ID NO: 649300 - RNA, 19 nt, Artificial Sequence
  Description of Artificial Sequence: Synthetic oligonucleotide
  Sense strand starting at position 327 of SEQ ID NO: 585556
gacuguguagcauaaagga

SEQ ID NO: 649301 - RNA, 19 nt, Artificial Sequence
  Description of Artificial Sequence: Synthetic oligonucleotide
  Antisense strand to SEQ ID NO: 649300
uccuuuaugcuacacaguc

SEQ ID NO: 649302 - RNA, 19 nt, Artificial Sequence
  Description of Artificial Sequence: Synthetic oligonucleotide
  Sense strand starting at position 376 of SEQ ID NO: 585556
auugauugcauaugaagag

SEQ ID NO: 649303 - RNA, 19 nt, Artificial Sequence
  Description of Artificial Sequence: Synthetic oligonucleotide
  Antisense strand to SEQ ID NO: 649302
cucuucauaugcaaucaau

SEQ ID NO: 649304 - RNA, 19 nt, Artificial Sequence
  Description of Artificial Sequence: Synthetic oligonucleotide
  Sense strand starting at position 383 of SEQ ID NO: 585556
gcauaugaagaguaaguca

SEQ ID NO: 649305 - RNA, 19 nt, Artificial Sequence
  Description of Artificial Sequence: Synthetic oligonucleotide
  Antisense strand to SEQ ID NO: 649304
ugacuuacucuucauaugc

SEQ ID NO: 649306 - RNA, 19 nt, Artificial Sequence
  Description of Artificial Sequence: Synthetic oligonucleotide
  Sense strand starting at position 391 of SEQ ID NO: 585556
agaguaagucagugacgga

SEQ ID NO: 649307 - RNA, 19 nt, Artificial Sequence
  Description of Artificial Sequence: Synthetic oligonucleotide
  Antisense strand to SEQ ID NO: 649306
uccgucacugacuuacucu

SEQ ID NO: 649308 - RNA, 19 nt, Artificial Sequence
  Description of Artificial Sequence: Synthetic oligonucleotide
  Sense strand starting at position 422 of SEQ ID NO: 585556
ggagaaacauuugacaucu

SEQ ID NO: 649309 - RNA, 19 nt, Artificial Sequence
  Description of Artificial Sequence: Synthetic oligonucleotide
  Antisense strand to SEQ ID NO: 649308
agaugucaaauguuucucc

SEQ ID NO: 649310 - RNA, 19 nt, Artificial Sequence
  Description of Artificial Sequence: Synthetic oligonucleotide
  Sense strand starting at position 1991 of SEQ ID NO: 585556
auccuuccggcucagaauu

SEQ ID NO: 649311 - RNA, 19 nt, Artificial Sequence
  Description of Artificial Sequence: Synthetic oligonucleotide
  Antisense strand to SEQ ID NO: 649310
aauucugagccggaaggau

SEQ ID NO: 649312 - RNA, 19 nt, Artificial Sequence
  Description of Artificial Sequence: Synthetic oligonucleotide
  Sense strand starting at position 2068 of SEQ ID NO: 585556
agaaguuguauagaagcuu

SEQ ID NO: 649313 - RNA, 19 nt, Artificial Sequence
  Description of Artificial Sequence: Synthetic oligonucleotide
  Antisense strand to SEQ ID NO: 649312
aagcuucuauacaacuucu

SEQ ID NO: 649314 - RNA, 19 nt, Artificial Sequence
  Description of Artificial Sequence: Synthetic oligonucleotide
  Sense strand starting at position 2214 of SEQ ID NO: 585556
caucuucucugguugagaa

SEQ ID NO: 649315 - RNA, 19 nt, Artificial Sequence
  Description of Artificial Sequence: Synthetic oligonucleotide
  Antisense strand to SEQ ID NO: 649314
uucucaaccagagaagaug

SEQ ID NO: 649316 - RNA, 19 nt, Artificial Sequence
  Description of Artificial Sequence: Synthetic oligonucleotide
  Sense strand starting at position 2215 of SEQ ID NO: 585556
aucuucucugguugagaag

SEQ ID NO: 649317 - RNA, 19 nt, Artificial Sequence
  Description of Artificial Sequence: Synthetic oligonucleotide
  Antisense strand to SEQ ID NO: 649316
cuucucaaccagagaagau

SEQ ID NO: 649318 - RNA, 19 nt, Artificial Sequence
  Description of Artificial Sequence: Synthetic oligonucleotide
  Sense strand starting at position 2232 of SEQ ID NO: 585556
agaauacauccguauucug

SEQ ID NO: 649319 - RNA, 19 nt, Artificial Sequence
  Description of Artificial Sequence: Synthetic oligonucleotide
  Antisense strand to SEQ ID NO: 649318
cagaauacggauguauucu

SEQ ID NO: 649320 - RNA, 19 nt, Artificial Sequence
  Description of Artificial Sequence: Synthetic oligonucleotide
  Sense strand starting at position 2319 of SEQ ID NO: 585556
gauaucucuugacccagga

SEQ ID NO: 649321 - RNA, 19 nt, Artificial Sequence
  Description of Artificial Sequence: Synthetic oligonucleotide
  Antisense strand to SEQ ID NO: 649320
uccugggucaagagauauc

SEQ ID NO: 649322 - RNA, 19 nt, Artificial Sequence
  Description of Artificial Sequence: Synthetic oligonucleotide
  Sense strand starting at position 2597 of SEQ ID NO: 585556
cucaucuuagaacguagau

SEQ ID NO: 649323 - RNA, 19 nt, Artificial Sequence
  Description of Artificial Sequence: Synthetic oligonucleotide
  Antisense strand to SEQ ID NO: 649322
aucuacguucuaagaugag

SEQ ID NO: 649324 - RNA, 19 nt, Artificial Sequence
  Description of Artificial Sequence: Synthetic oligonucleotide
  Sense strand starting at position 2621 of SEQ ID NO: 585556
uggagauguucucuuacug

SEQ ID NO: 649325 - RNA, 19 nt, Artificial Sequence
  Description of Artificial Sequence: Synthetic oligonucleotide
  Antisense strand to SEQ ID NO: 649324
caguaagagaacaucucca

SEQ ID NO: 649326 - RNA, 19 nt, Artificial Sequence
  Description of Artificial Sequence: Synthetic oligonucleotide
  Sense strand starting at position 2711 of SEQ ID NO: 585556
caaauauuagccugaggua

SEQ ID NO: 649327 - RNA, 19 nt, Artificial Sequence
  Description of Artificial Sequence: Synthetic oligonucleotide
  Antisense strand to SEQ ID NO: 649326
uaccucaggcuaauauuug

SEQ ID NO: 649328 - RNA, 19 nt, Artificial Sequence
  Description of Artificial Sequence: Synthetic oligonucleotide
  Sense strand starting at position 2712 of SEQ ID NO: 585556
aaauauuagccugagguau

SEQ ID NO: 649329 - RNA, 19 nt, Artificial Sequence
  Description of Artificial Sequence: Synthetic oligonucleotide
  Antisense strand to SEQ ID NO: 649328
auaccucaggcuaauauuu

SEQ ID NO: 649330 - RNA, 19 nt, Artificial Sequence
  Description of Artificial Sequence: Synthetic oligonucleotide
  Sense strand starting at position 3077 of SEQ ID NO: 585556
gaaacauuguauccaagug

SEQ ID NO: 649331 - RNA, 19 nt, Artificial Sequence
  Description of Artificial Sequence: Synthetic oligonucleotide
  Antisense strand to SEQ ID NO: 649330
cacuuggauacaauguuuc

SEQ ID NO: 649332 - RNA, 19 nt, Artificial Sequence
  Description of Artificial Sequence: Synthetic oligonucleotide
  Sense strand starting at position 3180 of SEQ ID NO: 585556
accaguucucuccaaaguu

SEQ ID NO: 649333 - RNA, 19 nt, Artificial Sequence
  Description of Artificial Sequence: Synthetic oligonucleotide
  Antisense strand to SEQ ID NO: 649332
aacuuuggagagaacuggu

SEQ ID NO: 649334 - RNA, 19 nt, Artificial Sequence
  Description of Artificial Sequence: Synthetic oligonucleotide
  Sense strand starting at position 3466 of SEQ ID NO: 585556
uuugcaaaguacuugggau

SEQ ID NO: 649335 - RNA, 19 nt, Artificial Sequence
  Description of Artificial Sequence: Synthetic oligonucleotide
  Antisense strand to SEQ ID NO: 649334
aucccaaguacuuugcaaa

SEQ ID NO: 649336 - RNA, 19 nt, Artificial Sequence
  Description of Artificial Sequence: Synthetic oligonucleotide
  Sense strand starting at position 3467 of SEQ ID NO: 585556
uugcaaaguacuugggauu

SEQ ID NO: 649337 - RNA, 19 nt, Artificial Sequence
  Description of Artificial Sequence: Synthetic oligonucleotide
  Antisense strand to SEQ ID NO: 649336
aaucccaaguacuuugcaa

SEQ ID NO: 649338 - RNA, 19 nt, Artificial Sequence
  Description of Artificial Sequence: Synthetic oligonucleotide
  Sense strand starting at position 3468 of SEQ ID NO: 585556
ugcaaaguacuugggauua

SEQ ID NO: 649339 - RNA, 19 nt, Artificial Sequence
  Description of Artificial Sequence: Synthetic oligonucleotide
  Antisense strand to SEQ ID NO: 649338
uaaucccaaguacuuugca

SEQ ID NO: 649340 - RNA, 19 nt, Artificial Sequence
  Description of Artificial Sequence: Synthetic oligonucleotide
  Sense strand starting at position 3478 of SEQ ID NO: 585556
uugggauuaucuucuauag

SEQ ID NO: 649341 - RNA, 19 nt, Artificial Sequence
  Description of Artificial Sequence: Synthetic oligonucleotide
  Antisense strand to SEQ ID NO: 649340
cuauagaagauaaucccaa

SEQ ID NO: 649342 - RNA, 19 nt, Artificial Sequence
  Description of Artificial Sequence: Synthetic oligonucleotide
  Sense strand starting at position 3546 of SEQ ID NO: 585556
uccuuucuuguacaaaugu

SEQ ID NO: 649343 - RNA, 19 nt, Artificial Sequence
  Description of Artificial Sequence: Synthetic oligonucleotide
  Antisense strand to SEQ ID NO: 649342
acauuuguacaagaaagga

SEQ ID NO: 649344 - RNA, 19 nt, Artificial Sequence
  Description of Artificial Sequence: Synthetic oligonucleotide
  Sense strand starting at position 3600 of SEQ ID NO: 585556
caagaaugugugggaaauc

SEQ ID NO: 649345 - RNA, 19 nt, Artificial Sequence
  Description of Artificial Sequence: Synthetic oligonucleotide
  Antisense strand to SEQ ID NO: 649344
gauuucccacacauucuug

SEQ ID NO: 649346 - RNA, 19 nt, Artificial Sequence
  Description of Artificial Sequence: Synthetic oligonucleotide
  Sense strand starting at position 3682 of SEQ ID NO: 585556
acauuagaguguuuccuau

SEQ ID NO: 649347 - RNA, 19 nt, Artificial Sequence
  Description of Artificial Sequence: Synthetic oligonucleotide
  Antisense strand to SEQ ID NO: 649346
auaggaaacacucuaaugu

SEQ ID NO: 649348 - RNA, 19 nt, Artificial Sequence
  Description of Artificial Sequence: Synthetic oligonucleotide
  Sense strand starting at position 3684 of SEQ ID NO: 585556
auuagaguguuuccuauaa

SEQ ID NO: 649349 - RNA, 19 nt, Artificial Sequence
  Description of Artificial Sequence: Synthetic oligonucleotide
  Antisense strand to SEQ ID NO: 649348
uuauaggaaacacucuaau

SEQ ID NO: 649350 - RNA, 19 nt, Artificial Sequence
  Description of Artificial Sequence: Synthetic oligonucleotide
  Sense strand starting at position 3688 of SEQ ID NO: 585556
gaguguuuccuauaaaugg

SEQ ID NO: 649351 - RNA, 19 nt, Artificial Sequence
  Description of Artificial Sequence: Synthetic oligonucleotide
  Antisense strand to SEQ ID NO: 649350
ccauuuauaggaaacacuc

SEQ ID NO: 649352 - RNA, 19 nt, Artificial Sequence
  Description of Artificial Sequence: Synthetic oligonucleotide
  Sense strand starting at position 3707 of SEQ ID NO: 585556
ggaauaauucgagguugaa

SEQ ID NO: 649353 - RNA, 19 nt, Artificial Sequence
  Description of Artificial Sequence: Synthetic oligonucleotide
  Antisense strand to SEQ ID NO: 649352
uucaaccucgaauuauucc

SEQ ID NO: 649354 - RNA, 19 nt, Artificial Sequence
  Description of Artificial Sequence: Synthetic oligonucleotide
  Sense strand starting at position 3748 of SEQ ID NO: 585556
aggauuuggugugacuaaa

SEQ ID NO: 649355 - RNA, 19 nt, Artificial Sequence
  Description of Artificial Sequence: Synthetic oligonucleotide
  Antisense strand to SEQ ID NO: 649354
uuuagucacaccaaauccu

SEQ ID NO: 649356 - RNA, 19 nt, Artificial Sequence
  Description of Artificial Sequence: Synthetic oligonucleotide
  Sense strand starting at position 3819 of SEQ ID NO: 585556
uggcuuuacagcuagagga

SEQ ID NO: 649357 - RNA, 19 nt, Artificial Sequence
  Description of Artificial Sequence: Synthetic oligonucleotide
  Antisense strand to SEQ ID NO: 649356
uccucuagcuguaaagcca

SEQ ID NO: 649358 - RNA, 19 nt, Artificial Sequence
  Description of Artificial Sequence: Synthetic oligonucleotide
  Sense strand starting at position 3821 of SEQ ID NO: 585556
gcuuuacagcuagaggaaa

SEQ ID NO: 649359 - RNA, 19 nt, Artificial Sequence
  Description of Artificial Sequence: Synthetic oligonucleotide
  Antisense strand to SEQ ID NO: 649358
uuuccucuagcuguaaagc

SEQ ID NO: 649360 - RNA, 19 nt, Artificial Sequence
  Description of Artificial Sequence: Synthetic oligonucleotide
  Sense strand starting at position 3910 of SEQ ID NO: 585556
auuugauagccauguaugu

SEQ ID NO: 649361 - RNA, 19 nt, Artificial Sequence
  Description of Artificial Sequence: Synthetic oligonucleotide
  Antisense strand to SEQ ID NO: 649360
acauacauggcuaucaaau

SEQ ID NO: 649362 - RNA, 19 nt, Artificial Sequence
  Description of Artificial Sequence: Synthetic oligonucleotide
  Sense strand starting at position 260 of SEQ ID NO: 585557
uuggcuuaauggguaugaa

SEQ ID NO: 649363 - RNA, 19 nt, Artificial Sequence
  Description of Artificial Sequence: Synthetic oligonucleotide
  Antisense strand to SEQ ID NO: 649362
uucauacccauuaagccaa

SEQ ID NO: 649364 - RNA, 19 nt, Artificial Sequence
  Description of Artificial Sequence: Synthetic oligonucleotide
  Sense strand starting at position 332 of SEQ ID NO: 585557
gggacaguaauguagguuu

SEQ ID NO: 649365 - RNA, 19 nt, Artificial Sequence
  Description of Artificial Sequence: Synthetic oligonucleotide
  Antisense strand to SEQ ID NO: 649364
aaaccuacauuacuguccc

SEQ ID NO: 649366 - RNA, 19 nt, Artificial Sequence
  Description of Artificial Sequence: Synthetic oligonucleotide
  Sense strand starting at position 816 of SEQ ID NO: 585557
uguacuuacgcguuugguu

SEQ ID NO: 649367 - RNA, 19 nt, Artificial Sequence
  Description of Artificial Sequence: Synthetic oligonucleotide
  Antisense strand to SEQ ID NO: 649366
aaccaaacgcguaaguaca

SEQ ID NO: 649368 - RNA, 19 nt, Artificial Sequence
  Description of Artificial Sequence: Synthetic oligonucleotide
  Sense strand starting at position 817 of SEQ ID NO: 585557
guacuuacgcguuugguua

SEQ ID NO: 649369 - RNA, 19 nt, Artificial Sequence
  Description of Artificial Sequence: Synthetic oligonucleotide
  Antisense strand to SEQ ID NO: 649368
uaaccaaacgcguaaguac

SEQ ID NO: 649370 - RNA, 19 nt, Artificial Sequence
  Description of Artificial Sequence: Synthetic oligonucleotide
  Sense strand starting at position 868 of SEQ ID NO: 585557
ugaugacauuauggaauuu

SEQ ID NO: 649371 - RNA, 19 nt, Artificial Sequence
  Description of Artificial Sequence: Synthetic oligonucleotide
  Antisense strand to SEQ ID NO: 649370
aaauuccauaaugucauca

SEQ ID NO: 649372 - RNA, 19 nt, Artificial Sequence
  Description of Artificial Sequence: Synthetic oligonucleotide
  Sense strand starting at position 993 of SEQ ID NO: 585557
cagugaagugauggaaauc

SEQ ID NO: 649373 - RNA, 19 nt, Artificial Sequence
  Description of Artificial Sequence: Synthetic oligonucleotide
  Antisense strand to SEQ ID NO: 649372
gauuuccaucacuucacug

SEQ ID NO: 649374 - RNA, 19 nt, Artificial Sequence
  Description of Artificial Sequence: Synthetic oligonucleotide
  Sense strand starting at position 1026 of SEQ ID NO: 585557
ucagauaucccucauuagu

SEQ ID NO: 649375 - RNA, 19 nt, Artificial Sequence
  Description of Artificial Sequence: Synthetic oligonucleotide
  Antisense strand to SEQ ID NO: 649374
acuaaugagggauaucuga

SEQ ID NO: 649376 - RNA, 19 nt, Artificial Sequence
  Description of Artificial Sequence: Synthetic oligonucleotide
  Sense strand starting at position 1053 of SEQ ID NO: 585557
uguugcugccagucuuuaa

SEQ ID NO: 649377 - RNA, 19 nt, Artificial Sequence
  Description of Artificial Sequence: Synthetic oligonucleotide
  Antisense strand to SEQ ID NO: 649376
uuaaagacuggcagcaaca

SEQ ID NO: 649378 - RNA, 19 nt, Artificial Sequence
  Description of Artificial Sequence: Synthetic oligonucleotide
  Sense strand starting at position 1057 of SEQ ID NO: 585557
gcugccagucuuuaaacaa

SEQ ID NO: 649379 - RNA, 19 nt, Artificial Sequence
  Description of Artificial Sequence: Synthetic oligonucleotide
  Antisense strand to SEQ ID NO: 649378
uuguuuaaagacuggcagc

SEQ ID NO: 649380 - RNA, 19 nt, Artificial Sequence
  Description of Artificial Sequence: Synthetic oligonucleotide
  Sense strand starting at position 1119 of SEQ ID NO: 585557
uuccuaaggguguagauua

SEQ ID NO: 649381 - RNA, 19 nt, Artificial Sequence
  Description of Artificial Sequence: Synthetic oligonucleotide
  Antisense strand to SEQ ID NO: 649380
uaaucuacacccuuaggaa

SEQ ID NO: 649382 - RNA, 19 nt, Artificial Sequence
  Description of Artificial Sequence: Synthetic oligonucleotide
  Sense strand starting at position 1126 of SEQ ID NO: 585557
ggguguagauuaguggauu

SEQ ID NO: 649383 - RNA, 19 nt, Artificial Sequence
  Description of Artificial Sequence: Synthetic oligonucleotide
  Antisense strand to SEQ ID NO: 649382
aauccacuaaucuacaccc

SEQ ID NO: 649384 - RNA, 19 nt, Artificial Sequence
  Description of Artificial Sequence: Synthetic oligonucleotide
  Sense strand starting at position 1180 of SEQ ID NO: 585557
uuauccgguccugaaucau

SEQ ID NO: 649385 - RNA, 19 nt, Artificial Sequence
  Description of Artificial Sequence: Synthetic oligonucleotide
  Antisense strand to SEQ ID NO: 649384
augauucaggaccggauaa

SEQ ID NO: 649386 - RNA, 19 nt, Artificial Sequence
  Description of Artificial Sequence: Synthetic oligonucleotide
  Sense strand starting at position 1391 of SEQ ID NO: 585557
gccugugacaauggaaaga

SEQ ID NO: 649387 - RNA, 19 nt, Artificial Sequence
  Description of Artificial Sequence: Synthetic oligonucleotide
  Antisense strand to SEQ ID NO: 649386
ucuuuccauugucacaggc

SEQ ID NO: 649388 - RNA, 19 nt, Artificial Sequence
  Description of Artificial Sequence: Synthetic oligonucleotide
  Sense strand starting at position 1407 of SEQ ID NO: 585557
agaagccauugauugagua

SEQ ID NO: 649389 - RNA, 19 nt, Artificial Sequence
  Description of Artificial Sequence: Synthetic oligonucleotide
  Antisense strand to SEQ ID NO: 649388
uacucaaucaauggcuucu

SEQ ID NO: 649390 - RNA, 19 nt, Artificial Sequence
  Description of Artificial Sequence: Synthetic oligonucleotide
  Sense strand starting at position 1408 of SEQ ID NO: 585557
gaagccauugauugaguaa

SEQ ID NO: 649391 - RNA, 19 nt, Artificial Sequence
  Description of Artificial Sequence: Synthetic oligonucleotide
  Antisense strand to SEQ ID NO: 649390
uuacucaaucaauggcuuc

SEQ ID NO: 649392 - RNA, 19 nt, Artificial Sequence
  Description of Artificial Sequence: Synthetic oligonucleotide
  Sense strand starting at position 1468 of SEQ ID NO: 585557
agaagaagugauugaguuu

SEQ ID NO: 649393 - RNA, 19 nt, Artificial Sequence
  Description of Artificial Sequence: Synthetic oligonucleotide
  Antisense strand to SEQ ID NO: 649392
aaacucaaucacuucuucu

SEQ ID NO: 649394 - RNA, 19 nt, Artificial Sequence
  Description of Artificial Sequence: Synthetic oligonucleotide
  Sense strand starting at position 1475 of SEQ ID NO: 585557
gugauugaguuucugagag

SEQ ID NO: 649395 - RNA, 19 nt, Artificial Sequence
  Description of Artificial Sequence: Synthetic oligonucleotide
  Antisense strand to SEQ ID NO: 649394
cucucagaaacucaaucac

SEQ ID NO: 649396 - RNA, 19 nt, Artificial Sequence
  Description of Artificial Sequence: Synthetic oligonucleotide
  Sense strand starting at position 1508 of SEQ ID NO: 585557
gugugcagucaugacagaa

SEQ ID NO: 649397 - RNA, 19 nt, Artificial Sequence
  Description of Artificial Sequence: Synthetic oligonucleotide
  Antisense strand to SEQ ID NO: 649396
uucugucaugacugcacac

SEQ ID NO: 649398 - RNA, 19 nt, Artificial Sequence
  Description of Artificial Sequence: Synthetic oligonucleotide
  Sense strand starting at position 1512 of SEQ ID NO: 585557
gcagucaugacagaaugca

SEQ ID NO: 649399 - RNA, 19 nt, Artificial Sequence
  Description of Artificial Sequence: Synthetic oligonucleotide
  Antisense strand to SEQ ID NO: 649398
ugcauucugucaugacugc

SEQ ID NO: 649400 - RNA, 19 nt, Artificial Sequence
  Description of Artificial Sequence: Synthetic oligonucleotide
  Sense strand starting at position 1603 of SEQ ID NO: 585557
caguguagcgaagaggauu

SEQ ID NO: 649401 - RNA, 19 nt, Artificial Sequence
  Description of Artificial Sequence: Synthetic oligonucleotide
  Antisense strand to SEQ ID NO: 649400
aauccucuucgcuacacug

SEQ ID NO: 649402 - RNA, 19 nt, Artificial Sequence
  Description of Artificial Sequence: Synthetic oligonucleotide
  Sense strand starting at position 1609 of SEQ ID NO: 585557
agcgaagaggauugcagau

SEQ ID NO: 649403 - RNA, 19 nt, Artificial Sequence
  Description of Artificial Sequence: Synthetic oligonucleotide
  Antisense strand to SEQ ID NO: 649402
aucugcaauccucuucgcu

SEQ ID NO: 649404 - RNA, 19 nt, Artificial Sequence
  Description of Artificial Sequence: Synthetic oligonucleotide
  Sense strand starting at position 1646 of SEQ ID NO: 585557
ggccaugauagccaguaaa

SEQ ID NO: 649405 - RNA, 19 nt, Artificial Sequence
  Description of Artificial Sequence: Synthetic oligonucleotide
  Antisense strand to SEQ ID NO: 649404
uuuacuggcuaucauggcc

SEQ ID NO: 649406 - RNA, 19 nt, Artificial Sequence
  Description of Artificial Sequence: Synthetic oligonucleotide
  Sense strand starting at position 1765 of SEQ ID NO: 585557
ugggcagugucacugaaga

SEQ ID NO: 649407 - RNA, 19 nt, Artificial Sequence
  Description of Artificial Sequence: Synthetic oligonucleotide
  Antisense strand to SEQ ID NO: 649406
ucuucagugacacugccca

SEQ ID NO: 649408 - RNA, 19 nt, Artificial Sequence
  Description of Artificial Sequence: Synthetic oligonucleotide
  Sense strand starting at position 1990 of SEQ ID NO: 585557
ucuccauugcucugggaag

SEQ ID NO: 649409 - RNA, 19 nt, Artificial Sequence
  Description of Artificial Sequence: Synthetic oligonucleotide
  Antisense strand to SEQ ID NO: 649408
cuucccagagcaauggaga

SEQ ID NO: 649410 - RNA, 19 nt, Artificial Sequence
  Description of Artificial Sequence: Synthetic oligonucleotide
  Sense strand starting at position 2105 of SEQ ID NO: 585557
ugagcaacagugugaagaa

SEQ ID NO: 649411 - RNA, 19 nt, Artificial Sequence
  Description of Artificial Sequence: Synthetic oligonucleotide
  Antisense strand to SEQ ID NO: 649410
uucuucacacuguugcuca

SEQ ID NO: 649412 - RNA, 19 nt, Artificial Sequence
  Description of Artificial Sequence: Synthetic oligonucleotide
  Sense strand starting at position 2115 of SEQ ID NO: 585557
ugugaagaauaguuacgaa

SEQ ID NO: 649413 - RNA, 19 nt, Artificial Sequence
  Description of Artificial Sequence: Synthetic oligonucleotide
  Antisense strand to SEQ ID NO: 649412
uucguaacuauucuucaca

SEQ ID NO: 649414 - RNA, 19 nt, Artificial Sequence
  Description of Artificial Sequence: Synthetic oligonucleotide
  Sense strand starting at position 2184 of SEQ ID NO: 585557
gauaaauucugagcuguua

SEQ ID NO: 649415 - RNA, 19 nt, Artificial Sequence
  Description of Artificial Sequence: Synthetic oligonucleotide
  Antisense strand to SEQ ID NO: 649414
uaacagcucagaauuuauc

SEQ ID NO: 649416 - RNA, 19 nt, Artificial Sequence
  Description of Artificial Sequence: Synthetic oligonucleotide
  Sense strand starting at position 2315 of SEQ ID NO: 585557
cauguauggcauuagaauu

SEQ ID NO: 649417 - RNA, 19 nt, Artificial Sequence
  Description of Artificial Sequence: Synthetic oligonucleotide
  Antisense strand to SEQ ID NO: 649416
aauucuaaugccauacaug

SEQ ID NO: 649418 - RNA, 19 nt, Artificial Sequence
  Description of Artificial Sequence: Synthetic oligonucleotide
  Sense strand starting at position 2532 of SEQ ID NO: 585557
ccaaauguuguaugaguag

SEQ ID NO: 649419 - RNA, 19 nt, Artificial Sequence
  Description of Artificial Sequence: Synthetic oligonucleotide
  Antisense strand to SEQ ID NO: 649418
cuacucauacaacauuugg

SEQ ID NO: 649420 - RNA, 19 nt, Artificial Sequence
  Description of Artificial Sequence: Synthetic oligonucleotide
  Sense strand starting at position 2583 of SEQ ID NO: 585557
gucacaagacugugucaua

SEQ ID NO: 649421 - RNA, 19 nt, Artificial Sequence
  Description of Artificial Sequence: Synthetic oligonucleotide
  Antisense strand to SEQ ID NO: 649420
uaugacacagucuugugac

SEQ ID NO: 649422 - RNA, 19 nt, Artificial Sequence
  Description of Artificial Sequence: Synthetic oligonucleotide
  Sense strand starting at position 2612 of SEQ ID NO: 585557
aguggauguaguugggaaa

SEQ ID NO: 649423 - RNA, 19 nt, Artificial Sequence
  Description of Artificial Sequence: Synthetic oligonucleotide
  Antisense strand to SEQ ID NO: 649422
uuucccaacuacauccacu

SEQ ID NO: 649424 - RNA, 19 nt, Artificial Sequence
  Description of Artificial Sequence: Synthetic oligonucleotide
  Sense strand starting at position 2895 of SEQ ID NO: 585557
gagcccuugcacugaggaa

SEQ ID NO: 649425 - RNA, 19 nt, Artificial Sequence
  Description of Artificial Sequence: Synthetic oligonucleotide
  Antisense strand to SEQ ID NO: 649424
uuccucagugcaagggcuc

SEQ ID NO: 649426 - RNA, 19 nt, Artificial Sequence
  Description of Artificial Sequence: Synthetic oligonucleotide
  Sense strand starting at position 2896 of SEQ ID NO: 585557
agcccuugcacugaggaau

SEQ ID NO: 649427 - RNA, 19 nt, Artificial Sequence
  Description of Artificial Sequence: Synthetic oligonucleotide
  Antisense strand to SEQ ID NO: 649426
auuccucagugcaagggcu

SEQ ID NO: 649428 - RNA, 19 nt, Artificial Sequence
  Description of Artificial Sequence: Synthetic oligonucleotide
  Sense strand starting at position 2966 of SEQ ID NO: 585557
ugcuaauaauugguccaca

SEQ ID NO: 649429 - RNA, 19 nt, Artificial Sequence
  Description of Artificial Sequence: Synthetic oligonucleotide
  Antisense strand to SEQ ID NO: 649428
uguggaccaauuauuagca

SEQ ID NO: 649430 - RNA, 19 nt, Artificial Sequence
  Description of Artificial Sequence: Synthetic oligonucleotide
  Sense strand starting at position 2967 of SEQ ID NO: 585557
gcuaauaauugguccacaa

SEQ ID NO: 649431 - RNA, 19 nt, Artificial Sequence
  Description of Artificial Sequence: Synthetic oligonucleotide
  Antisense strand to SEQ ID NO: 649430
uuguggaccaauuauuagc

SEQ ID NO: 649432 - RNA, 19 nt, Artificial Sequence
  Description of Artificial Sequence: Synthetic oligonucleotide
  Sense strand starting at position 2988 of SEQ ID NO: 585557
ucauaaguucuccagugua

SEQ ID NO: 649433 - RNA, 19 nt, Artificial Sequence
  Description of Artificial Sequence: Synthetic oligonucleotide
  Antisense strand to SEQ ID NO: 649432
uacacuggagaacuuauga

SEQ ID NO: 649434 - RNA, 19 nt, Artificial Sequence
  Description of Artificial Sequence: Synthetic oligonucleotide
  Sense strand starting at position 3001 of SEQ ID NO: 585557
aguguaaguucuccauaaa

SEQ ID NO: 649435 - RNA, 19 nt, Artificial Sequence
  Description of Artificial Sequence: Synthetic oligonucleotide
  Antisense strand to SEQ ID NO: 649434
uuuauggagaacuuacacu

SEQ ID NO: 649436 - RNA, 19 nt, Artificial Sequence
  Description of Artificial Sequence: Synthetic oligonucleotide
  Sense strand starting at position 3251 of SEQ ID NO: 585557
caagcaugaguugaguauu

SEQ ID NO: 649437 - RNA, 19 nt, Artificial Sequence
  Description of Artificial Sequence: Synthetic oligonucleotide
  Antisense strand to SEQ ID NO: 649436
aauacucaacucaugcuug

SEQ ID NO: 649438 - RNA, 19 nt, Artificial Sequence
  Description of Artificial Sequence: Synthetic oligonucleotide
  Sense strand starting at position 3513 of SEQ ID NO: 585557
gggaaauugucagccuuaa

SEQ ID NO: 649439 - RNA, 19 nt, Artificial Sequence
  Description of Artificial Sequence: Synthetic oligonucleotide
  Antisense strand to SEQ ID NO: 649438
uuaaggcugacaauuuccc

SEQ ID NO: 649440 - RNA, 19 nt, Artificial Sequence
  Description of Artificial Sequence: Synthetic oligonucleotide
  Sense strand starting at position 3831 of SEQ ID NO: 585557
agauacuaucaacgucaaa

SEQ ID NO: 649441 - RNA, 19 nt, Artificial Sequence
  Description of Artificial Sequence: Synthetic oligonucleotide
  Antisense strand to SEQ ID NO: 649440
uuugacguugauaguaucu

SEQ ID NO: 649442 - RNA, 19 nt, Artificial Sequence
  Description of Artificial Sequence: Synthetic oligonucleotide
  Sense strand starting at position 13 of SEQ ID NO: 585558
uuaugagucuuucuugaag

SEQ ID NO: 649443 - RNA, 19 nt, Artificial Sequence
  Description of Artificial Sequence: Synthetic oligonucleotide
  Antisense strand to SEQ ID NO: 649442
cuucaagaaagacucauaa

SEQ ID NO: 649444 - RNA, 19 nt, Artificial Sequence
  Description of Artificial Sequence: Synthetic oligonucleotide
  Sense strand starting at position 27 of SEQ ID NO: 585558
ugaagaaaucugcagcauu

SEQ ID NO: 649445 - RNA, 19 nt, Artificial Sequence
  Description of Artificial Sequence: Synthetic oligonucleotide
  Antisense strand to SEQ ID NO: 649444
aaugcugcagauuucuuca

SEQ ID NO: 649446 - RNA, 19 nt, Artificial Sequence
  Description of Artificial Sequence: Synthetic oligonucleotide
  Sense strand starting at position 30 of SEQ ID NO: 585558
agaaaucugcagcauuaca

SEQ ID NO: 649447 - RNA, 19 nt, Artificial Sequence
  Description of Artificial Sequence: Synthetic oligonucleotide
  Antisense strand to SEQ ID NO: 649446
uguaaugcugcagauuucu

SEQ ID NO: 649448 - RNA, 19 nt, Artificial Sequence
  Description of Artificial Sequence: Synthetic oligonucleotide
  Sense strand starting at position 128 of SEQ ID NO: 585558
gcaguuuaucuauauucug

SEQ ID NO: 649449 - RNA, 19 nt, Artificial Sequence
  Description of Artificial Sequence: Synthetic oligonucleotide
  Antisense strand to SEQ ID NO: 649448
cagaauauagauaaacugc

SEQ ID NO: 649450 - RNA, 19 nt, Artificial Sequence
  Description of Artificial Sequence: Synthetic oligonucleotide
  Sense strand starting at position 247 of SEQ ID NO: 585558
caguaauagggaugcacaa

SEQ ID NO: 649451 - RNA, 19 nt, Artificial Sequence
  Description of Artificial Sequence: Synthetic oligonucleotide
  Antisense strand to SEQ ID NO: 649450
uugugcaucccuauuacug

SEQ ID NO: 649452 - RNA, 19 nt, Artificial Sequence
  Description of Artificial Sequence: Synthetic oligonucleotide
  Sense strand starting at position 357 of SEQ ID NO: 585558
acauuuggguaauaaugca

SEQ ID NO: 649453 - RNA, 19 nt, Artificial Sequence
  Description of Artificial Sequence: Synthetic oligonucleotide
  Antisense strand to SEQ ID NO: 649452
ugcauuauuacccaaaugu

SEQ ID NO: 649454 - RNA, 19 nt, Artificial Sequence
  Description of Artificial Sequence: Synthetic oligonucleotide
  Sense strand starting at position 401 of SEQ ID NO: 585558
gaccuuauuguuugaguca

SEQ ID NO: 649455 - RNA, 19 nt, Artificial Sequence
  Description of Artificial Sequence: Synthetic oligonucleotide
  Antisense strand to SEQ ID NO: 649454
ugacucaaacaauaagguc

SEQ ID NO: 649456 - RNA, 19 nt, Artificial Sequence
  Description of Artificial Sequence: Synthetic oligonucleotide
  Sense strand starting at position 404 of SEQ ID NO: 585558
cuuauuguuugagucagac

SEQ ID NO: 649457 - RNA, 19 nt, Artificial Sequence
  Description of Artificial Sequence: Synthetic oligonucleotide
  Antisense strand to SEQ ID NO: 649456
gucugacucaaacaauaag

SEQ ID NO: 649458 - RNA, 19 nt, Artificial Sequence
  Description of Artificial Sequence: Synthetic oligonucleotide
  Sense strand starting at position 530 of SEQ ID NO: 585558
auguuauagcuagaagagu

SEQ ID NO: 649459 - RNA, 19 nt, Artificial Sequence
  Description of Artificial Sequence: Synthetic oligonucleotide
  Antisense strand to SEQ ID NO: 649458
acucuucuagcuauaacau

SEQ ID NO: 649460 - RNA, 19 nt, Artificial Sequence
  Description of Artificial Sequence: Synthetic oligonucleotide
  Sense strand starting at position 603 of SEQ ID NO: 585558
ggcugaauaaauuguugaa

SEQ ID NO: 649461 - RNA, 19 nt, Artificial Sequence
  Description of Artificial Sequence: Synthetic oligonucleotide
  Antisense strand to SEQ ID NO: 649460
uucaacaauuuauucagcc

SEQ ID NO: 649462 - RNA, 19 nt, Artificial Sequence
  Description of Artificial Sequence: Synthetic oligonucleotide
  Sense strand starting at position 615 of SEQ ID NO: 585558
uguugaaaucaccacugua

SEQ ID NO: 649463 - RNA, 19 nt, Artificial Sequence
  Description of Artificial Sequence: Synthetic oligonucleotide
  Antisense strand to SEQ ID NO: 649462
uacaguggugauuucaaca

SEQ ID NO: 649464 - RNA, 19 nt, Artificial Sequence
  Description of Artificial Sequence: Synthetic oligonucleotide
  Sense strand starting at position 955 of SEQ ID NO: 585558
aagagcauucuggguagaa

SEQ ID NO: 649465 - RNA, 19 nt, Artificial Sequence
  Description of Artificial Sequence: Synthetic oligonucleotide
  Antisense strand to SEQ ID NO: 649464
uucuacccagaaugcucuu

SEQ ID NO: 649466 - RNA, 19 nt, Artificial Sequence
  Description of Artificial Sequence: Synthetic oligonucleotide
  Sense strand starting at position 956 of SEQ ID NO: 585558
agagcauucuggguagaaa

SEQ ID NO: 649467 - RNA, 19 nt, Artificial Sequence
  Description of Artificial Sequence: Synthetic oligonucleotide
  Antisense strand to SEQ ID NO: 649466
uuucuacccagaaugcucu

SEQ ID NO: 649468 - RNA, 19 nt, Artificial Sequence
  Description of Artificial Sequence: Synthetic oligonucleotide
  Sense strand starting at position 1995 of SEQ ID NO: 585558
ugaccauagucucucugaa

SEQ ID NO: 649469 - RNA, 19 nt, Artificial Sequence
  Description of Artificial Sequence: Synthetic oligonucleotide
  Antisense strand to SEQ ID NO: 649468
uucagagagacuaugguca

SEQ ID NO: 649470 - RNA, 19 nt, Artificial Sequence
  Description of Artificial Sequence: Synthetic oligonucleotide
  Sense strand starting at position 1997 of SEQ ID NO: 585558
accauagucucucugaaga

SEQ ID NO: 649471 - RNA, 19 nt, Artificial Sequence
  Description of Artificial Sequence: Synthetic oligonucleotide
  Antisense strand to SEQ ID NO: 649470
ucuucagagagacuauggu

SEQ ID NO: 649472 - RNA, 19 nt, Artificial Sequence
  Description of Artificial Sequence: Synthetic oligonucleotide
  Sense strand starting at position 2076 of SEQ ID NO: 585558
auauauuugugugucaagu

SEQ ID NO: 649473 - RNA, 19 nt, Artificial Sequence
  Description of Artificial Sequence: Synthetic oligonucleotide
  Antisense strand to SEQ ID NO: 649472
acuugacacacaaauauau

SEQ ID NO: 649474 - RNA, 19 nt, Artificial Sequence
  Description of Artificial Sequence: Synthetic oligonucleotide
  Sense strand starting at position 2082 of SEQ ID NO: 585558
uugugugucaaguaacuca

SEQ ID NO: 649475 - RNA, 19 nt, Artificial Sequence
  Description of Artificial Sequence: Synthetic oligonucleotide
  Antisense strand to SEQ ID NO: 649474
ugaguuacuugacacacaa

SEQ ID NO: 649476 - RNA, 19 nt, Artificial Sequence
  Description of Artificial Sequence: Synthetic oligonucleotide
  Sense strand starting at position 2097 of SEQ ID NO: 585558
cucaauuccucagcaagga

SEQ ID NO: 649477 - RNA, 19 nt, Artificial Sequence
  Description of Artificial Sequence: Synthetic oligonucleotide
  Antisense strand to SEQ ID NO: 649476
uccuugcugaggaauugag

SEQ ID NO: 649478 - RNA, 19 nt, Artificial Sequence
  Description of Artificial Sequence: Synthetic oligonucleotide
  Sense strand starting at position 2202 of SEQ ID NO: 585558
cccugaaugugaucaacaa

SEQ ID NO: 649479 - RNA, 19 nt, Artificial Sequence
  Description of Artificial Sequence: Synthetic oligonucleotide
  Antisense strand to SEQ ID NO: 649478
uuguugaucacauucaggg

SEQ ID NO: 649480 - RNA, 19 nt, Artificial Sequence
  Description of Artificial Sequence: Synthetic oligonucleotide
  Sense strand starting at position 2243 of SEQ ID NO: 585558
gaguuugcauugucaaaga

SEQ ID NO: 649481 - RNA, 19 nt, Artificial Sequence
  Description of Artificial Sequence: Synthetic oligonucleotide
  Antisense strand to SEQ ID NO: 649480
ucuuugacaaugcaaacuc

SEQ ID NO: 649482 - RNA, 19 nt, Artificial Sequence
  Description of Artificial Sequence: Synthetic oligonucleotide
  Sense strand starting at position 2473 of SEQ ID NO: 585558
cucagaagcuaaucuagaa

SEQ ID NO: 649483 - RNA, 19 nt, Artificial Sequence
  Description of Artificial Sequence: Synthetic oligonucleotide
  Antisense strand to SEQ ID NO: 649482
uucuagauuagcuucugag

SEQ ID NO: 649484 - RNA, 19 nt, Artificial Sequence
  Description of Artificial Sequence: Synthetic oligonucleotide
  Sense strand starting at position 2649 of SEQ ID NO: 585558
aauccugagcuuuggagau

SEQ ID NO: 649485 - RNA, 19 nt, Artificial Sequence
  Description of Artificial Sequence: Synthetic oligonucleotide
  Antisense strand to SEQ ID NO: 649484
aucuccaaagcucaggauu

SEQ ID NO: 649486 - RNA, 19 nt, Artificial Sequence
  Description of Artificial Sequence: Synthetic oligonucleotide
  Sense strand starting at position 2789 of SEQ ID NO: 585558
aucuaugugauaggcagaa

SEQ ID NO: 649487 - RNA, 19 nt, Artificial Sequence
  Description of Artificial Sequence: Synthetic oligonucleotide
  Antisense strand to SEQ ID NO: 649486
uucugccuaucacauagau

SEQ ID NO: 649488 - RNA, 19 nt, Artificial Sequence
  Description of Artificial Sequence: Synthetic oligonucleotide
  Sense strand starting at position 2793 of SEQ ID NO: 585558
augugauaggcagaaugcu

SEQ ID NO: 649489 - RNA, 19 nt, Artificial Sequence
  Description of Artificial Sequence: Synthetic oligonucleotide
  Antisense strand to SEQ ID NO: 649488
agcauucugccuaucacau

SEQ ID NO: 649490 - RNA, 19 nt, Artificial Sequence
  Description of Artificial Sequence: Synthetic oligonucleotide
  Sense strand starting at position 2803 of SEQ ID NO: 585558
cagaaugcuagguaguaga

SEQ ID NO: 649491 - RNA, 19 nt, Artificial Sequence
  Description of Artificial Sequence: Synthetic oligonucleotide
  Antisense strand to SEQ ID NO: 649490
ucuacuaccuagcauucug

SEQ ID NO: 649492 - RNA, 19 nt, Artificial Sequence
  Description of Artificial Sequence: Synthetic oligonucleotide
  Sense strand starting at position 2811 of SEQ ID NO: 585558
uagguaguagaguauauau

SEQ ID NO: 649493 - RNA, 19 nt, Artificial Sequence
  Description of Artificial Sequence: Synthetic oligonucleotide
  Antisense strand to SEQ ID NO: 649492
auauauacucuacuaccua

SEQ ID NO: 649494 - RNA, 19 nt, Artificial Sequence
  Description of Artificial Sequence: Synthetic oligonucleotide
  Sense strand starting at position 2813 of SEQ ID NO: 585558
gguaguagaguauauaucu

SEQ ID NO: 649495 - RNA, 19 nt, Artificial Sequence
  Description of Artificial Sequence: Synthetic oligonucleotide
  Antisense strand to SEQ ID NO: 649494
agauauauacucuacuacc

SEQ ID NO: 649496 - RNA, 19 nt, Artificial Sequence
  Description of Artificial Sequence: Synthetic oligonucleotide
  Sense strand starting at position 2833 of SEQ ID NO: 585558
ucuagugcugugucucauu

SEQ ID NO: 649497 - RNA, 19 nt, Artificial Sequence
  Description of Artificial Sequence: Synthetic oligonucleotide
  Antisense strand to SEQ ID NO: 649496
aaugagacacagcacuaga

SEQ ID NO: 649498 - RNA, 19 nt, Artificial Sequence
  Description of Artificial Sequence: Synthetic oligonucleotide
  Sense strand starting at position 2848 of SEQ ID NO: 585558
cauugugaguuccugaaug

SEQ ID NO: 649499 - RNA, 19 nt, Artificial Sequence
  Description of Artificial Sequence: Synthetic oligonucleotide
  Antisense strand to SEQ ID NO: 649498
cauucaggaacucacaaug

SEQ ID NO: 649500 - RNA, 19 nt, Artificial Sequence
  Description of Artificial Sequence: Synthetic oligonucleotide
  Sense strand starting at position 2850 of SEQ ID NO: 585558
uugugaguuccugaaugaa

SEQ ID NO: 649501 - RNA, 19 nt, Artificial Sequence
  Description of Artificial Sequence: Synthetic oligonucleotide
  Antisense strand to SEQ ID NO: 649500
uucauucaggaacucacaa

SEQ ID NO: 649502 - RNA, 19 nt, Artificial Sequence
  Description of Artificial Sequence: Synthetic oligonucleotide
  Sense strand starting at position 3120 of SEQ ID NO: 585558
aucugugcauuuguugaaa

SEQ ID NO: 649503 - RNA, 19 nt, Artificial Sequence
  Description of Artificial Sequence: Synthetic oligonucleotide
  Antisense strand to SEQ ID NO: 649502
uuucaacaaaugcacagau

SEQ ID NO: 649504 - RNA, 19 nt, Artificial Sequence
  Description of Artificial Sequence: Synthetic oligonucleotide
  Sense strand starting at position 3161 of SEQ ID NO: 585558
ugaguuucuucugcacaaa

SEQ ID NO: 649505 - RNA, 19 nt, Artificial Sequence
  Description of Artificial Sequence: Synthetic oligonucleotide
  Antisense strand to SEQ ID NO: 649504
uuugugcagaagaaacuca

SEQ ID NO: 649506 - RNA, 19 nt, Artificial Sequence
  Description of Artificial Sequence: Synthetic oligonucleotide
  Sense strand starting at position 3164 of SEQ ID NO: 585558
guuucuucugcacaaagac

SEQ ID NO: 649507 - RNA, 19 nt, Artificial Sequence
  Description of Artificial Sequence: Synthetic oligonucleotide
  Antisense strand to SEQ ID NO: 649506
gucuuugugcagaagaaac

SEQ ID NO: 649508 - RNA, 19 nt, Artificial Sequence
  Description of Artificial Sequence: Synthetic oligonucleotide
  Sense strand starting at position 3314 of SEQ ID NO: 585558
ggcuaaguuacaugaguua

SEQ ID NO: 649509 - RNA, 19 nt, Artificial Sequence
  Description of Artificial Sequence: Synthetic oligonucleotide
  Antisense strand to SEQ ID NO: 649508
uaacucauguaacuuagcc

SEQ ID NO: 649510 - RNA, 19 nt, Artificial Sequence
  Description of Artificial Sequence: Synthetic oligonucleotide
  Sense strand starting at position 3317 of SEQ ID NO: 585558
uaaguuacaugaguuaaug

SEQ ID NO: 649511 - RNA, 19 nt, Artificial Sequence
  Description of Artificial Sequence: Synthetic oligonucleotide
  Antisense strand to SEQ ID NO: 649510
cauuaacucauguaacuua

SEQ ID NO: 649512 - RNA, 19 nt, Artificial Sequence
  Description of Artificial Sequence: Synthetic oligonucleotide
  Sense strand starting at position 3388 of SEQ ID NO: 585558
aucccuaagcuguaggaaa

SEQ ID NO: 649513 - RNA, 19 nt, Artificial Sequence
  Description of Artificial Sequence: Synthetic oligonucleotide
  Antisense strand to SEQ ID NO: 649512
uuuccuacagcuuagggau

SEQ ID NO: 649514 - RNA, 19 nt, Artificial Sequence
  Description of Artificial Sequence: Synthetic oligonucleotide
  Sense strand starting at position 3562 of SEQ ID NO: 585558
gcuucauggcaguaggaau

SEQ ID NO: 649515 - RNA, 19 nt, Artificial Sequence
  Description of Artificial Sequence: Synthetic oligonucleotide
  Antisense strand to SEQ ID NO: 649514
auuccuacugccaugaagc

SEQ ID NO: 649516 - RNA, 19 nt, Artificial Sequence
  Description of Artificial Sequence: Synthetic oligonucleotide
  Sense strand starting at position 3642 of SEQ ID NO: 585558
ccugguccuccauaagaua

SEQ ID NO: 649517 - RNA, 19 nt, Artificial Sequence
  Description of Artificial Sequence: Synthetic oligonucleotide
  Antisense strand to SEQ ID NO: 649516
uaucuuauggaggaccagg

SEQ ID NO: 649518 - RNA, 19 nt, Artificial Sequence
  Description of Artificial Sequence: Synthetic oligonucleotide
  Sense strand starting at position 3709 of SEQ ID NO: 585558
ccaaauauuggaugguagu

SEQ ID NO: 649519 - RNA, 19 nt, Artificial Sequence
  Description of Artificial Sequence: Synthetic oligonucleotide
  Antisense strand to SEQ ID NO: 649518
acuaccauccaauauuugg

SEQ ID NO: 649520 - RNA, 19 nt, Artificial Sequence
  Description of Artificial Sequence: Synthetic oligonucleotide
  Sense strand starting at position 3710 of SEQ ID NO: 585558
caaauauuggaugguaguu

SEQ ID NO: 649521 - RNA, 19 nt, Artificial Sequence
  Description of Artificial Sequence: Synthetic oligonucleotide
  Antisense strand to SEQ ID NO: 649520
aacuaccauccaauauuug

SEQ ID NO: 649522 - RNA, 19 nt, Artificial Sequence
  Description of Artificial Sequence: Synthetic oligonucleotide
  Sense strand starting at position 187 of SEQ ID NO: 585559
gaagauguauacugaauca

SEQ ID NO: 649523 - RNA, 19 nt, Artificial Sequence
  Description of Artificial Sequence: Synthetic oligonucleotide
  Antisense strand to SEQ ID NO: 649522
ugauucaguauacaucuuc

SEQ ID NO: 649524 - RNA, 19 nt, Artificial Sequence
  Description of Artificial Sequence: Synthetic oligonucleotide
  Sense strand starting at position 1237 of SEQ ID NO: 585559
auggcugugccauaaacga

SEQ ID NO: 649525 - RNA, 19 nt, Artificial Sequence
  Description of Artificial Sequence: Synthetic oligonucleotide
  Antisense strand to SEQ ID NO: 649524
ucguuuauggcacagccau

SEQ ID NO: 649526 - RNA, 19 nt, Artificial Sequence
  Description of Artificial Sequence: Synthetic oligonucleotide
  Sense strand starting at position 1287 of SEQ ID NO: 585559
gcggaaggcuuuccucuga

SEQ ID NO: 649527 - RNA, 19 nt, Artificial Sequence
  Description of Artificial Sequence: Synthetic oligonucleotide
  Antisense strand to SEQ ID NO: 649526
ucagaggaaagccuuccgc

SEQ ID NO: 649528 - RNA, 19 nt, Artificial Sequence
  Description of Artificial Sequence: Synthetic oligonucleotide
  Sense strand starting at position 1965 of SEQ ID NO: 585559
gaggaacucucugauggau

SEQ ID NO: 649529 - RNA, 19 nt, Artificial Sequence
  Description of Artificial Sequence: Synthetic oligonucleotide
  Antisense strand to SEQ ID NO: 649528
auccaucagagaguuccuc

SEQ ID NO: 649530 - RNA, 19 nt, Artificial Sequence
  Description of Artificial Sequence: Synthetic oligonucleotide
  Sense strand starting at position 1967 of SEQ ID NO: 585559
ggaacucucugauggaugu

SEQ ID NO: 649531 - RNA, 19 nt, Artificial Sequence
  Description of Artificial Sequence: Synthetic oligonucleotide
  Antisense strand to SEQ ID NO: 649530
acauccaucagagaguucc

SEQ ID NO: 649532 - RNA, 19 nt, Artificial Sequence
  Description of Artificial Sequence: Synthetic oligonucleotide
  Sense strand starting at position 1968 of SEQ ID NO: 585559
gaacucucugauggauguu

SEQ ID NO: 649533 - RNA, 19 nt, Artificial Sequence
  Description of Artificial Sequence: Synthetic oligonucleotide
  Antisense strand to SEQ ID NO: 649532
aacauccaucagagaguuc

SEQ ID NO: 649534 - RNA, 19 nt, Artificial Sequence
  Description of Artificial Sequence: Synthetic oligonucleotide
  Sense strand starting at position 1971 of SEQ ID NO: 585559
cucucugauggauguuaua

SEQ ID NO: 649535 - RNA, 19 nt, Artificial Sequence
  Description of Artificial Sequence: Synthetic oligonucleotide
  Antisense strand to SEQ ID NO: 649534
uauaacauccaucagagag

SEQ ID NO: 649536 - RNA, 19 nt, Artificial Sequence
  Description of Artificial Sequence: Synthetic oligonucleotide
  Sense strand starting at position 1982 of SEQ ID NO: 585559
auguuauauugucucccau

SEQ ID NO: 649537 - RNA, 19 nt, Artificial Sequence
  Description of Artificial Sequence: Synthetic oligonucleotide
  Antisense strand to SEQ ID NO: 649536
augggagacaauauaacau

SEQ ID NO: 649538 - RNA, 19 nt, Artificial Sequence
  Description of Artificial Sequence: Synthetic oligonucleotide
  Sense strand starting at position 1984 of SEQ ID NO: 585559
guuauauugucucccauau

SEQ ID NO: 649539 - RNA, 19 nt, Artificial Sequence
  Description of Artificial Sequence: Synthetic oligonucleotide
  Antisense strand to SEQ ID NO: 649538
auaugggagacaauauaac

SEQ ID NO: 649540 - RNA, 19 nt, Artificial Sequence
  Description of Artificial Sequence: Synthetic oligonucleotide
  Sense strand starting at position 3080 of SEQ ID NO: 585559
auagauuugcacuguguca

SEQ ID NO: 649541 - RNA, 19 nt, Artificial Sequence
  Description of Artificial Sequence: Synthetic oligonucleotide
  Antisense strand to SEQ ID NO: 649540
ugacacagugcaaaucuau

SEQ ID NO: 649542 - RNA, 19 nt, Artificial Sequence
  Description of Artificial Sequence: Synthetic oligonucleotide
  Sense strand starting at position 3082 of SEQ ID NO: 585559
agauuugcacugugucauu

SEQ ID NO: 649543 - RNA, 19 nt, Artificial Sequence
  Description of Artificial Sequence: Synthetic oligonucleotide
  Antisense strand to SEQ ID NO: 649542
aaugacacagugcaaaucu

SEQ ID NO: 649544 - RNA, 19 nt, Artificial Sequence
  Description of Artificial Sequence: Synthetic oligonucleotide
  Sense strand starting at position 3087 of SEQ ID NO: 585559
ugcacugugucauuaucua

SEQ ID NO: 649545 - RNA, 19 nt, Artificial Sequence
  Description of Artificial Sequence: Synthetic oligonucleotide
  Antisense strand to SEQ ID NO: 649544
uagauaaugacacagugca

SEQ ID NO: 649546 - RNA, 19 nt, Artificial Sequence
  Description of Artificial Sequence: Synthetic oligonucleotide
  Sense strand starting at position 3091 of SEQ ID NO: 585559
cugugucauuaucuaaaca

SEQ ID NO: 649547 - RNA, 19 nt, Artificial Sequence
  Description of Artificial Sequence: Synthetic oligonucleotide
  Antisense strand to SEQ ID NO: 649546
uguuuagauaaugacacag

SEQ ID NO: 649548 - RNA, 19 nt, Artificial Sequence
  Description of Artificial Sequence: Synthetic oligonucleotide
  Sense strand starting at position 3597 of SEQ ID NO: 585559
cuaaucauugcucagauug

SEQ ID NO: 649549 - RNA, 19 nt, Artificial Sequence
  Description of Artificial Sequence: Synthetic oligonucleotide
  Antisense strand to SEQ ID NO: 649548
caaucugagcaaugauuag

SEQ ID NO: 649550 - RNA, 19 nt, Artificial Sequence
  Description of Artificial Sequence: Synthetic oligonucleotide
  Sense strand starting at position 3599 of SEQ ID NO: 585559
aaucauugcucagauugug

SEQ ID NO: 649551 - RNA, 19 nt, Artificial Sequence
  Description of Artificial Sequence: Synthetic oligonucleotide
  Antisense strand to SEQ ID NO: 649550
cacaaucugagcaaugauu

SEQ ID NO: 649552 - RNA, 19 nt, Artificial Sequence
  Description of Artificial Sequence: Synthetic oligonucleotide
  Sense strand starting at position 85 of SEQ ID NO: 585560
ggcuguuaaacuuauagag

SEQ ID NO: 649553 - RNA, 19 nt, Artificial Sequence
  Description of Artificial Sequence: Synthetic oligonucleotide
  Antisense strand to SEQ ID NO: 649552
cucuauaaguuuaacagcc

SEQ ID NO: 649554 - RNA, 19 nt, Artificial Sequence
  Description of Artificial Sequence: Synthetic oligonucleotide
  Sense strand starting at position 121 of SEQ ID NO: 585560
uuggauacuucuguuagau

SEQ ID NO: 649555 - RNA, 19 nt, Artificial Sequence
  Description of Artificial Sequence: Synthetic oligonucleotide
  Antisense strand to SEQ ID NO: 649554
aucuaacagaaguauccaa

SEQ ID NO: 649556 - RNA, 19 nt, Artificial Sequence
  Description of Artificial Sequence: Synthetic oligonucleotide
  Sense strand starting at position 131 of SEQ ID NO: 585560
cuguuagaucuacaauugu

SEQ ID NO: 649557 - RNA, 19 nt, Artificial Sequence
  Description of Artificial Sequence: Synthetic oligonucleotide
  Antisense strand to SEQ ID NO: 649556
acaauuguagaucuaacag

SEQ ID NO: 649558 - RNA, 19 nt, Artificial Sequence
  Description of Artificial Sequence: Synthetic oligonucleotide
  Sense strand starting at position 158 of SEQ ID NO: 585560
uaauuugugccauggaguu

SEQ ID NO: 649559 - RNA, 19 nt, Artificial Sequence
  Description of Artificial Sequence: Synthetic oligonucleotide
  Antisense strand to SEQ ID NO: 649558
aacuccauggcacaaauua

SEQ ID NO: 649560 - RNA, 19 nt, Artificial Sequence
  Description of Artificial Sequence: Synthetic oligonucleotide
  Sense strand starting at position 215 of SEQ ID NO: 585560
ugaggacauguguauaugu

SEQ ID NO: 649561 - RNA, 19 nt, Artificial Sequence
  Description of Artificial Sequence: Synthetic oligonucleotide
  Antisense strand to SEQ ID NO: 649560
acauauacacauguccuca

SEQ ID NO: 649562 - RNA, 19 nt, Artificial Sequence
  Description of Artificial Sequence: Synthetic oligonucleotide
  Sense strand starting at position 271 of SEQ ID NO: 585560
agagaagucuaagucucuu

SEQ ID NO: 649563 - RNA, 19 nt, Artificial Sequence
  Description of Artificial Sequence: Synthetic oligonucleotide
  Antisense strand to SEQ ID NO: 649562
aagagacuuagacuucucu

SEQ ID NO: 649564 - RNA, 19 nt, Artificial Sequence
  Description of Artificial Sequence: Synthetic oligonucleotide
  Sense strand starting at position 378 of SEQ ID NO: 585560
uuaagacuugugcaaugaa

SEQ ID NO: 649565 - RNA, 19 nt, Artificial Sequence
  Description of Artificial Sequence: Synthetic oligonucleotide
  Antisense strand to SEQ ID NO: 649564
uucauugcacaagucuuaa

SEQ ID NO: 649566 - RNA, 19 nt, Artificial Sequence
  Description of Artificial Sequence: Synthetic oligonucleotide
  Sense strand starting at position 381 of SEQ ID NO: 585560
agacuugugcaaugaauau

SEQ ID NO: 649567 - RNA, 19 nt, Artificial Sequence
  Description of Artificial Sequence: Synthetic oligonucleotide
  Antisense strand to SEQ ID NO: 649566
auauucauugcacaagucu

SEQ ID NO: 649568 - RNA, 19 nt, Artificial Sequence
  Description of Artificial Sequence: Synthetic oligonucleotide
  Sense strand starting at position 661 of SEQ ID NO: 585560
guguguauuacugaagaga

SEQ ID NO: 649569 - RNA, 19 nt, Artificial Sequence
  Description of Artificial Sequence: Synthetic oligonucleotide
  Antisense strand to SEQ ID NO: 649568
ucucuucaguaauacacac

SEQ ID NO: 649570 - RNA, 19 nt, Artificial Sequence
  Description of Artificial Sequence: Synthetic oligonucleotide
  Sense strand starting at position 726 of SEQ ID NO: 585560
auugauguaaagugugaca

SEQ ID NO: 649571 - RNA, 19 nt, Artificial Sequence
  Description of Artificial Sequence: Synthetic oligonucleotide
  Antisense strand to SEQ ID NO: 649570
ugucacacuuuacaucaau

SEQ ID NO: 649572 - RNA, 19 nt, Artificial Sequence
  Description of Artificial Sequence: Synthetic oligonucleotide
  Sense strand starting at position 728 of SEQ ID NO: 585560
ugauguaaagugugacaac

SEQ ID NO: 649573 - RNA, 19 nt, Artificial Sequence
  Description of Artificial Sequence: Synthetic oligonucleotide
  Antisense strand to SEQ ID NO: 649572
guugucacacuuuacauca

SEQ ID NO: 649574 - RNA, 19 nt, Artificial Sequence
  Description of Artificial Sequence: Synthetic oligonucleotide
  Sense strand starting at position 910 of SEQ ID NO: 585560
acaacuugcggagaaguua

SEQ ID NO: 649575 - RNA, 19 nt, Artificial Sequence
  Description of Artificial Sequence: Synthetic oligonucleotide
  Antisense strand to SEQ ID NO: 649574
uaacuucuccgcaaguugu

SEQ ID NO: 649576 - RNA, 19 nt, Artificial Sequence
  Description of Artificial Sequence: Synthetic oligonucleotide
  Sense strand starting at position 995 of SEQ ID NO: 585560
agaagacucuuugcaacca

SEQ ID NO: 649577 - RNA, 19 nt, Artificial Sequence
  Description of Artificial Sequence: Synthetic oligonucleotide
  Antisense strand to SEQ ID NO: 649576
ugguugcaaagagucuucu

SEQ ID NO: 649578 - RNA, 19 nt, Artificial Sequence
  Description of Artificial Sequence: Synthetic oligonucleotide
  Sense strand starting at position 1152 of SEQ ID NO: 585560
uggagauagcuguaccaua

SEQ ID NO: 649579 - RNA, 19 nt, Artificial Sequence
  Description of Artificial Sequence: Synthetic oligonucleotide
  Antisense strand to SEQ ID NO: 649578
uaugguacagcuaucucca

SEQ ID NO: 649580 - RNA, 19 nt, Artificial Sequence
  Description of Artificial Sequence: Synthetic oligonucleotide
  Sense strand starting at position 1245 of SEQ ID NO: 585560
ucaacacugcuuggacaau

SEQ ID NO: 649581 - RNA, 19 nt, Artificial Sequence
  Description of Artificial Sequence: Synthetic oligonucleotide
  Antisense strand to SEQ ID NO: 649580
auuguccaagcaguguuga

SEQ ID NO: 649582 - RNA, 19 nt, Artificial Sequence
  Description of Artificial Sequence: Synthetic oligonucleotide
  Sense strand starting at position 1272 of SEQ ID NO: 585560
acgauauaaggaugagugu

SEQ ID NO: 649583 - RNA, 19 nt, Artificial Sequence
  Description of Artificial Sequence: Synthetic oligonucleotide
  Antisense strand to SEQ ID NO: 649582
acacucauccuuauaucgu

SEQ ID NO: 649584 - RNA, 19 nt, Artificial Sequence
  Description of Artificial Sequence: Synthetic oligonucleotide
  Sense strand starting at position 1285 of SEQ ID NO: 585560
gagugucacggguauuaga

SEQ ID NO: 649585 - RNA, 19 nt, Artificial Sequence
  Description of Artificial Sequence: Synthetic oligonucleotide
  Antisense strand to SEQ ID NO: 649584
ucuaauacccgugacacuc

SEQ ID NO: 649586 - RNA, 19 nt, Artificial Sequence
  Description of Artificial Sequence: Synthetic oligonucleotide
  Sense strand starting at position 1293 of SEQ ID NO: 585560
cggguauuagaaggaauag

SEQ ID NO: 649587 - RNA, 19 nt, Artificial Sequence
  Description of Artificial Sequence: Synthetic oligonucleotide
  Antisense strand to SEQ ID NO: 649586
cuauuccuucuaauacccg

SEQ ID NO: 649588 - RNA, 19 nt, Artificial Sequence
  Description of Artificial Sequence: Synthetic oligonucleotide
  Sense strand starting at position 1403 of SEQ ID NO: 585560
acuucuuugugaccacaca

SEQ ID NO: 649589 - RNA, 19 nt, Artificial Sequence
  Description of Artificial Sequence: Synthetic oligonucleotide
  Antisense strand to SEQ ID NO: 649588
uguguggucacaaagaagu

SEQ ID NO: 649590 - RNA, 19 nt, Artificial Sequence
  Description of Artificial Sequence: Synthetic oligonucleotide
  Sense strand starting at position 1438 of SEQ ID NO: 585560
ccagguggacuguaauacu

SEQ ID NO: 649591 - RNA, 19 nt, Artificial Sequence
  Description of Artificial Sequence: Synthetic oligonucleotide
  Antisense strand to SEQ ID NO: 649590
aguauuacaguccaccugg

SEQ ID NO: 649592 - RNA, 19 nt, Artificial Sequence
  Description of Artificial Sequence: Synthetic oligonucleotide
  Sense strand starting at position 1761 of SEQ ID NO: 585560
guuugaaauccacauguga

SEQ ID NO: 649593 - RNA, 19 nt, Artificial Sequence
  Description of Artificial Sequence: Synthetic oligonucleotide
  Antisense strand to SEQ ID NO: 649592
ucacauguggauuucaaac

SEQ ID NO: 649594 - RNA, 19 nt, Artificial Sequence
  Description of Artificial Sequence: Synthetic oligonucleotide
  Sense strand starting at position 1790 of SEQ ID NO: 585560
auugucagauugccaaaga

SEQ ID NO: 649595 - RNA, 19 nt, Artificial Sequence
  Description of Artificial Sequence: Synthetic oligonucleotide
  Antisense strand to SEQ ID NO: 649594
ucuuuggcaaucugacaau

SEQ ID NO: 649596 - RNA, 19 nt, Artificial Sequence
  Description of Artificial Sequence: Synthetic oligonucleotide
  Sense strand starting at position 1800 of SEQ ID NO: 585560
ugccaaagauugucaagau

SEQ ID NO: 649597 - RNA, 19 nt, Artificial Sequence
  Description of Artificial Sequence: Synthetic oligonucleotide
  Antisense strand to SEQ ID NO: 649596
aucuugacaaucuuuggca

SEQ ID NO: 649598 - RNA, 19 nt, Artificial Sequence
  Description of Artificial Sequence: Synthetic oligonucleotide
  Sense strand starting at position 1847 of SEQ ID NO: 585560
ggaaucucuagccaugguu

SEQ ID NO: 649599 - RNA, 19 nt, Artificial Sequence
  Description of Artificial Sequence: Synthetic oligonucleotide
  Antisense strand to SEQ ID NO: 649598
aaccauggcuagagauucc

SEQ ID NO: 649600 - RNA, 19 nt, Artificial Sequence
  Description of Artificial Sequence: Synthetic oligonucleotide
  Sense strand starting at position 1856 of SEQ ID NO: 585560
agccaugguugaucugaga

SEQ ID NO: 649601 - RNA, 19 nt, Artificial Sequence
  Description of Artificial Sequence: Synthetic oligonucleotide
  Antisense strand to SEQ ID NO: 649600
ucucagaucaaccauggcu

SEQ ID NO: 649602 - RNA, 19 nt, Artificial Sequence
  Description of Artificial Sequence: Synthetic oligonucleotide
  Sense strand starting at position 1885 of SEQ ID NO: 585560
aaugaacuccugugggaca

SEQ ID NO: 649603 - RNA, 19 nt, Artificial Sequence
  Description of Artificial Sequence: Synthetic oligonucleotide
  Antisense strand to SEQ ID NO: 649602
ugucccacaggaguucauu

SEQ ID NO: 649604 - RNA, 19 nt, Artificial Sequence
  Description of Artificial Sequence: Synthetic oligonucleotide
  Sense strand starting at position 2112 of SEQ ID NO: 585560
guuuauauaucuguaacag

SEQ ID NO: 649605 - RNA, 19 nt, Artificial Sequence
  Description of Artificial Sequence: Synthetic oligonucleotide
  Antisense strand to SEQ ID NO: 649604
cuguuacagauauauaaac

SEQ ID NO: 649606 - RNA, 19 nt, Artificial Sequence
  Description of Artificial Sequence: Synthetic oligonucleotide
  Sense strand starting at position 2573 of SEQ ID NO: 585560
agauaucuacugugaggua

SEQ ID NO: 649607 - RNA, 19 nt, Artificial Sequence
  Description of Artificial Sequence: Synthetic oligonucleotide
  Antisense strand to SEQ ID NO: 649606
uaccucacaguagauaucu

SEQ ID NO: 649608 - RNA, 19 nt, Artificial Sequence
  Description of Artificial Sequence: Synthetic oligonucleotide
  Sense strand starting at position 2588 of SEQ ID NO: 585560
gguagauguagauacaguu

SEQ ID NO: 649609 - RNA, 19 nt, Artificial Sequence
  Description of Artificial Sequence: Synthetic oligonucleotide
  Antisense strand to SEQ ID NO: 649608
aacuguaucuacaucuacc

SEQ ID NO: 649610 - RNA, 19 nt, Artificial Sequence
  Description of Artificial Sequence: Synthetic oligonucleotide
  Sense strand starting at position 2649 of SEQ ID NO: 585560
gagauucccugauuguaga

SEQ ID NO: 649611 - RNA, 19 nt, Artificial Sequence
  Description of Artificial Sequence: Synthetic oligonucleotide
  Antisense strand to SEQ ID NO: 649610
ucuacaaucagggaaucuc

SEQ ID NO: 649612 - RNA, 19 nt, Artificial Sequence
  Description of Artificial Sequence: Synthetic oligonucleotide
  Sense strand starting at position 2650 of SEQ ID NO: 585560
agauucccugauuguagaa

SEQ ID NO: 649613 - RNA, 19 nt, Artificial Sequence
  Description of Artificial Sequence: Synthetic oligonucleotide
  Antisense strand to SEQ ID NO: 649612
uucuacaaucagggaaucu

SEQ ID NO: 649614 - RNA, 19 nt, Artificial Sequence
  Description of Artificial Sequence: Synthetic oligonucleotide
  Sense strand starting at position 2737 of SEQ ID NO: 585560
ucuaguaaguuaucagaca

SEQ ID NO: 649615 - RNA, 19 nt, Artificial Sequence
  Description of Artificial Sequence: Synthetic oligonucleotide
  Antisense strand to SEQ ID NO: 649614
ugucugauaacuuacuaga

SEQ ID NO: 649616 - RNA, 19 nt, Artificial Sequence
  Description of Artificial Sequence: Synthetic oligonucleotide
  Sense strand starting at position 2781 of SEQ ID NO: 585560
guucuagaagcucauagaa

SEQ ID NO: 649617 - RNA, 19 nt, Artificial Sequence
  Description of Artificial Sequence: Synthetic oligonucleotide
  Antisense strand to SEQ ID NO: 649616
uucuaugagcuucuagaac

SEQ ID NO: 649618 - RNA, 19 nt, Artificial Sequence
  Description of Artificial Sequence: Synthetic oligonucleotide
  Sense strand starting at position 2802 of SEQ ID NO: 585560
uguauagauuccuuaguaa

SEQ ID NO: 649619 - RNA, 19 nt, Artificial Sequence
  Description of Artificial Sequence: Synthetic oligonucleotide
  Antisense strand to SEQ ID NO: 649618
uuacuaaggaaucuauaca

SEQ ID NO: 649620 - RNA, 19 nt, Artificial Sequence
  Description of Artificial Sequence: Synthetic oligonucleotide
  Sense strand starting at position 3160 of SEQ ID NO: 585560
aauacauguuaugugaaug

SEQ ID NO: 649621 - RNA, 19 nt, Artificial Sequence
  Description of Artificial Sequence: Synthetic oligonucleotide
  Antisense strand to SEQ ID NO: 649620
cauucacauaacauguauu

SEQ ID NO: 649622 - RNA, 19 nt, Artificial Sequence
  Description of Artificial Sequence: Synthetic oligonucleotide
  Sense strand starting at position 3630 of SEQ ID NO: 585560
acuuaugaauuguugacuu

SEQ ID NO: 649623 - RNA, 19 nt, Artificial Sequence
  Description of Artificial Sequence: Synthetic oligonucleotide
  Antisense strand to SEQ ID NO: 649622
aagucaacaauucauaagu

SEQ ID NO: 649624 - RNA, 19 nt, Artificial Sequence
  Description of Artificial Sequence: Synthetic oligonucleotide
  Sense strand starting at position 3632 of SEQ ID NO: 585560
uuaugaauuguugacuucu

SEQ ID NO: 649625 - RNA, 19 nt, Artificial Sequence
  Description of Artificial Sequence: Synthetic oligonucleotide
  Antisense strand to SEQ ID NO: 649624
agaagucaacaauucauaa

SEQ ID NO: 649626 - RNA, 19 nt, Artificial Sequence
  Description of Artificial Sequence: Synthetic oligonucleotide
  Sense strand starting at position 3696 of SEQ ID NO: 585560
acugaaauugugcaaagca

SEQ ID NO: 649627 - RNA, 19 nt, Artificial Sequence
  Description of Artificial Sequence: Synthetic oligonucleotide
  Antisense strand to SEQ ID NO: 649626
ugcuuugcacaauuucagu

SEQ ID NO: 649628 - RNA, 19 nt, Artificial Sequence
  Description of Artificial Sequence: Synthetic oligonucleotide
  Sense strand starting at position 3867 of SEQ ID NO: 585560
gucugaggugcucagaaag

SEQ ID NO: 649629 - RNA, 19 nt, Artificial Sequence
  Description of Artificial Sequence: Synthetic oligonucleotide
  Antisense strand to SEQ ID NO: 649628
cuuucugagcaccucagac

SEQ ID NO: 649630 - RNA, 19 nt, Artificial Sequence
  Description of Artificial Sequence: Synthetic oligonucleotide
  Sense strand starting at position 3873 of SEQ ID NO: 585560
ggugcucagaaaggaauua

SEQ ID NO: 649631 - RNA, 19 nt, Artificial Sequence
  Description of Artificial Sequence: Synthetic oligonucleotide
  Antisense strand to SEQ ID NO: 649630
uaauuccuuucugagcacc

SEQ ID NO: 649632 - RNA, 19 nt, Artificial Sequence
  Description of Artificial Sequence: Synthetic oligonucleotide
  Sense strand starting at position 221 of SEQ ID NO: 585561
gguucaaaguguuugaaga

SEQ ID NO: 649633 - RNA, 19 nt, Artificial Sequence
  Description of Artificial Sequence: Synthetic oligonucleotide
  Antisense strand to SEQ ID NO: 649632
ucuucaaacacuuugaacc

SEQ ID NO: 649634 - RNA, 19 nt, Artificial Sequence
  Description of Artificial Sequence: Synthetic oligonucleotide
  Sense strand starting at position 231 of SEQ ID NO: 585561
guuugaagacuuugauucu

SEQ ID NO: 649635 - RNA, 19 nt, Artificial Sequence
  Description of Artificial Sequence: Synthetic oligonucleotide
  Antisense strand to SEQ ID NO: 649634
agaaucaaagucuucaaac

SEQ ID NO: 649636 - RNA, 19 nt, Artificial Sequence
  Description of Artificial Sequence: Synthetic oligonucleotide
  Sense strand starting at position 269 of SEQ ID NO: 585561
uggaauaacugguaauuua

SEQ ID NO: 649637 - RNA, 19 nt, Artificial Sequence
  Description of Artificial Sequence: Synthetic oligonucleotide
  Antisense strand to SEQ ID NO: 649636
uaaauuaccaguuauucca

SEQ ID NO: 649638 - RNA, 19 nt, Artificial Sequence
  Description of Artificial Sequence: Synthetic oligonucleotide
  Sense strand starting at position 407 of SEQ ID NO: 585561
ugacaugacuugucucaag

SEQ ID NO: 649639 - RNA, 19 nt, Artificial Sequence
  Description of Artificial Sequence: Synthetic oligonucleotide
  Antisense strand to SEQ ID NO: 649638
cuugagacaagucauguca

SEQ ID NO: 649640 - RNA, 19 nt, Artificial Sequence
  Description of Artificial Sequence: Synthetic oligonucleotide
  Sense strand starting at position 460 of SEQ ID NO: 585561
aggaguuucuaacuuugaa

SEQ ID NO: 649641 - RNA, 19 nt, Artificial Sequence
  Description of Artificial Sequence: Synthetic oligonucleotide
  Antisense strand to SEQ ID NO: 649640
uucaaaguuagaaacuccu

SEQ ID NO: 649642 - RNA, 19 nt, Artificial Sequence
  Description of Artificial Sequence: Synthetic oligonucleotide
  Sense strand starting at position 571 of SEQ ID NO: 585561
acagauuccuacucuguca

SEQ ID NO: 649643 - RNA, 19 nt, Artificial Sequence
  Description of Artificial Sequence: Synthetic oligonucleotide
  Antisense strand to SEQ ID NO: 649642
ugacagaguaggaaucugu

SEQ ID NO: 649644 - RNA, 19 nt, Artificial Sequence
  Description of Artificial Sequence: Synthetic oligonucleotide
  Sense strand starting at position 954 of SEQ ID NO: 585561
aggaaagacuaagaagauu

SEQ ID NO: 649645 - RNA, 19 nt, Artificial Sequence
  Description of Artificial Sequence: Synthetic oligonucleotide
  Antisense strand to SEQ ID NO: 649644
aaucuucuuagucuuuccu

SEQ ID NO: 649646 - RNA, 19 nt, Artificial Sequence
  Description of Artificial Sequence: Synthetic oligonucleotide
  Sense strand starting at position 971 of SEQ ID NO: 585561
uucucaucacaauggagua

SEQ ID NO: 649647 - RNA, 19 nt, Artificial Sequence
  Description of Artificial Sequence: Synthetic oligonucleotide
  Antisense strand to SEQ ID NO: 649646
uacuccauugugaugagaa

SEQ ID NO: 649648 - RNA, 19 nt, Artificial Sequence
  Description of Artificial Sequence: Synthetic oligonucleotide
  Sense strand starting at position 1078 of SEQ ID NO: 585561
guucaacauggaugugaug

SEQ ID NO: 649649 - RNA, 19 nt, Artificial Sequence
  Description of Artificial Sequence: Synthetic oligonucleotide
  Antisense strand to SEQ ID NO: 649648
caucacauccauguugaac

SEQ ID NO: 649650 - RNA, 19 nt, Artificial Sequence
  Description of Artificial Sequence: Synthetic oligonucleotide
  Sense strand starting at position 1080 of SEQ ID NO: 585561
ucaacauggaugugaugau

SEQ ID NO: 649651 - RNA, 19 nt, Artificial Sequence
  Description of Artificial Sequence: Synthetic oligonucleotide
  Antisense strand to SEQ ID NO: 649650
aucaucacauccauguuga

SEQ ID NO: 649652 - RNA, 19 nt, Artificial Sequence
  Description of Artificial Sequence: Synthetic oligonucleotide
  Sense strand starting at position 1128 of SEQ ID NO: 585561
aguccuuagagguggauga

SEQ ID NO: 649653 - RNA, 19 nt, Artificial Sequence
  Description of Artificial Sequence: Synthetic oligonucleotide
  Antisense strand to SEQ ID NO: 649652
ucauccaccucuaaggacu

SEQ ID NO: 649654 - RNA, 19 nt, Artificial Sequence
  Description of Artificial Sequence: Synthetic oligonucleotide
  Sense strand starting at position 1142 of SEQ ID NO: 585561
gaugaaggugguugaagau

SEQ ID NO: 649655 - RNA, 19 nt, Artificial Sequence
  Description of Artificial Sequence: Synthetic oligonucleotide
  Antisense strand to SEQ ID NO: 649654
aucuucaaccaccuucauc

SEQ ID NO: 649656 - RNA, 19 nt, Artificial Sequence
  Description of Artificial Sequence: Synthetic oligonucleotide
  Sense strand starting at position 1165 of SEQ ID NO: 585561
auaaauggcuguuccauaa

SEQ ID NO: 649657 - RNA, 19 nt, Artificial Sequence
  Description of Artificial Sequence: Synthetic oligonucleotide
  Antisense strand to SEQ ID NO: 649656
uuauggaacagccauuuau

SEQ ID NO: 649658 - RNA, 19 nt, Artificial Sequence
  Description of Artificial Sequence: Synthetic oligonucleotide
  Sense strand starting at position 1293 of SEQ ID NO: 585561
ggaucaaugucacuggaau

SEQ ID NO: 649659 - RNA, 19 nt, Artificial Sequence
  Description of Artificial Sequence: Synthetic oligonucleotide
  Antisense strand to SEQ ID NO: 649658
auuccagugacauugaucc

SEQ ID NO: 649660 - RNA, 19 nt, Artificial Sequence
  Description of Artificial Sequence: Synthetic oligonucleotide
  Sense strand starting at position 1294 of SEQ ID NO: 585561
gaucaaugucacuggaauu

SEQ ID NO: 649661 - RNA, 19 nt, Artificial Sequence
  Description of Artificial Sequence: Synthetic oligonucleotide
  Antisense strand to SEQ ID NO: 649660
aauuccagugacauugauc

SEQ ID NO: 649662 - RNA, 19 nt, Artificial Sequence
  Description of Artificial Sequence: Synthetic oligonucleotide
  Sense strand starting at position 1465 of SEQ ID NO: 585561
cacugaguugccgaaacca

SEQ ID NO: 649663 - RNA, 19 nt, Artificial Sequence
  Description of Artificial Sequence: Synthetic oligonucleotide
  Antisense strand to SEQ ID NO: 649662
ugguuucggcaacucagug

SEQ ID NO: 649664 - RNA, 19 nt, Artificial Sequence
  Description of Artificial Sequence: Synthetic oligonucleotide
  Sense strand starting at position 1711 of SEQ ID NO: 585561
ugugguauagcagagaucu

SEQ ID NO: 649665 - RNA, 19 nt, Artificial Sequence
  Description of Artificial Sequence: Synthetic oligonucleotide
  Antisense strand to SEQ ID NO: 649664
agaucucugcuauaccaca

SEQ ID NO: 649666 - RNA, 19 nt, Artificial Sequence
  Description of Artificial Sequence: Synthetic oligonucleotide
  Sense strand starting at position 1764 of SEQ ID NO: 585561
gaguaugaaguuugggauc

SEQ ID NO: 649667 - RNA, 19 nt, Artificial Sequence
  Description of Artificial Sequence: Synthetic oligonucleotide
  Antisense strand to SEQ ID NO: 649666
gaucccaaacuucauacuc

SEQ ID NO: 649668 - RNA, 19 nt, Artificial Sequence
  Description of Artificial Sequence: Synthetic oligonucleotide
  Sense strand starting at position 1802 of SEQ ID NO: 585561
auggacacauugccaaaua

SEQ ID NO: 649669 - RNA, 19 nt, Artificial Sequence
  Description of Artificial Sequence: Synthetic oligonucleotide
  Antisense strand to SEQ ID NO: 649668
uauuuggcaauguguccau

SEQ ID NO: 649670 - RNA, 19 nt, Artificial Sequence
  Description of Artificial Sequence: Synthetic oligonucleotide
  Sense strand starting at position 1882 of SEQ ID NO: 585561
ugagaagccaaguaguaua

SEQ ID NO: 649671 - RNA, 19 nt, Artificial Sequence
  Description of Artificial Sequence: Synthetic oligonucleotide
  Antisense strand to SEQ ID NO: 649670
uauacuacuuggcuucuca

SEQ ID NO: 649672 - RNA, 19 nt, Artificial Sequence
  Description of Artificial Sequence: Synthetic oligonucleotide
  Sense strand starting at position 2033 of SEQ ID NO: 585561
augaauagcucagcaucaa

SEQ ID NO: 649673 - RNA, 19 nt, Artificial Sequence
  Description of Artificial Sequence: Synthetic oligonucleotide
  Antisense strand to SEQ ID NO: 649672
uugaugcugagcuauucau

SEQ ID NO: 649674 - RNA, 19 nt, Artificial Sequence
  Description of Artificial Sequence: Synthetic oligonucleotide
  Sense strand starting at position 2034 of SEQ ID NO: 585561
ugaauagcucagcaucaaa

SEQ ID NO: 649675 - RNA, 19 nt, Artificial Sequence
  Description of Artificial Sequence: Synthetic oligonucleotide
  Antisense strand to SEQ ID NO: 649674
uuugaugcugagcuauuca

SEQ ID NO: 649676 - RNA, 19 nt, Artificial Sequence
  Description of Artificial Sequence: Synthetic oligonucleotide
  Sense strand starting at position 2071 of SEQ ID NO: 585561
ggauaaagcccuuguaaag

SEQ ID NO: 649677 - RNA, 19 nt, Artificial Sequence
  Description of Artificial Sequence: Synthetic oligonucleotide
  Antisense strand to SEQ ID NO: 649676
cuuuacaagggcuuuaucc

SEQ ID NO: 649678 - RNA, 19 nt, Artificial Sequence
  Description of Artificial Sequence: Synthetic oligonucleotide
  Sense strand starting at position 2177 of SEQ ID NO: 585561
ugacauaaaguauguaaca

SEQ ID NO: 649679 - RNA, 19 nt, Artificial Sequence
  Description of Artificial Sequence: Synthetic oligonucleotide
  Antisense strand to SEQ ID NO: 649678
uguuacauacuuuauguca

SEQ ID NO: 649680 - RNA, 19 nt, Artificial Sequence
  Description of Artificial Sequence: Synthetic oligonucleotide
  Sense strand starting at position 2218 of SEQ ID NO: 585561
gugaguucucaaugcauuu

SEQ ID NO: 649681 - RNA, 19 nt, Artificial Sequence
  Description of Artificial Sequence: Synthetic oligonucleotide
  Antisense strand to SEQ ID NO: 649680
aaaugcauugagaacucac

SEQ ID NO: 649682 - RNA, 19 nt, Artificial Sequence
  Description of Artificial Sequence: Synthetic oligonucleotide
  Sense strand starting at position 2350 of SEQ ID NO: 585561
ggguauaagaguugaaucu

SEQ ID NO: 649683 - RNA, 19 nt, Artificial Sequence
  Description of Artificial Sequence: Synthetic oligonucleotide
  Antisense strand to SEQ ID NO: 649682
agauucaacucuuauaccc

SEQ ID NO: 649684 - RNA, 19 nt, Artificial Sequence
  Description of Artificial Sequence: Synthetic oligonucleotide
  Sense strand starting at position 2371 of SEQ ID NO: 585561
aucugcaauugaucuaaag

SEQ ID NO: 649685 - RNA, 19 nt, Artificial Sequence
  Description of Artificial Sequence: Synthetic oligonucleotide
  Antisense strand to SEQ ID NO: 649684
cuuuagaucaauugcagau

SEQ ID NO: 649686 - RNA, 19 nt, Artificial Sequence
  Description of Artificial Sequence: Synthetic oligonucleotide
  Sense strand starting at position 2477 of SEQ ID NO: 585561
aaagaacuaccguggguau

SEQ ID NO: 649687 - RNA, 19 nt, Artificial Sequence
  Description of Artificial Sequence: Synthetic oligonucleotide
  Antisense strand to SEQ ID NO: 649686
auacccacgguaguucuuu

SEQ ID NO: 649688 - RNA, 19 nt, Artificial Sequence
  Description of Artificial Sequence: Synthetic oligonucleotide
  Sense strand starting at position 2634 of SEQ ID NO: 585561
gugugugaaauacauucuu

SEQ ID NO: 649689 - RNA, 19 nt, Artificial Sequence
  Description of Artificial Sequence: Synthetic oligonucleotide
  Antisense strand to SEQ ID NO: 649688
aagaauguauuucacacac

SEQ ID NO: 649690 - RNA, 19 nt, Artificial Sequence
  Description of Artificial Sequence: Synthetic oligonucleotide
  Sense strand starting at position 2675 of SEQ ID NO: 585561
acagucaugguuugcauuu

SEQ ID NO: 649691 - RNA, 19 nt, Artificial Sequence
  Description of Artificial Sequence: Synthetic oligonucleotide
  Antisense strand to SEQ ID NO: 649690
aaaugcaaaccaugacugu

SEQ ID NO: 649692 - RNA, 19 nt, Artificial Sequence
  Description of Artificial Sequence: Synthetic oligonucleotide
  Sense strand starting at position 2734 of SEQ ID NO: 585561
cucauuauuggugagguca

SEQ ID NO: 649693 - RNA, 19 nt, Artificial Sequence
  Description of Artificial Sequence: Synthetic oligonucleotide
  Antisense strand to SEQ ID NO: 649692
ugaccucaccaauaaugag

SEQ ID NO: 649694 - RNA, 19 nt, Artificial Sequence
  Description of Artificial Sequence: Synthetic oligonucleotide
  Sense strand starting at position 2922 of SEQ ID NO: 585561
agucaucaguuauuuaguu

SEQ ID NO: 649695 - RNA, 19 nt, Artificial Sequence
  Description of Artificial Sequence: Synthetic oligonucleotide
  Antisense strand to SEQ ID NO: 649694
aacuaaauaacugaugacu

SEQ ID NO: 649696 - RNA, 19 nt, Artificial Sequence
  Description of Artificial Sequence: Synthetic oligonucleotide
  Sense strand starting at position 2923 of SEQ ID NO: 585561
gucaucaguuauuuaguua

SEQ ID NO: 649697 - RNA, 19 nt, Artificial Sequence
  Description of Artificial Sequence: Synthetic oligonucleotide
  Antisense strand to SEQ ID NO: 649696
uaacuaaauaacugaugac

SEQ ID NO: 649698 - RNA, 19 nt, Artificial Sequence
  Description of Artificial Sequence: Synthetic oligonucleotide
  Sense strand starting at position 2989 of SEQ ID NO: 585561
aaugaaaugucaucgaggu

SEQ ID NO: 649699 - RNA, 19 nt, Artificial Sequence
  Description of Artificial Sequence: Synthetic oligonucleotide
  Antisense strand to SEQ ID NO: 649698
accucgaugacauuucauu

SEQ ID NO: 649700 - RNA, 19 nt, Artificial Sequence
  Description of Artificial Sequence: Synthetic oligonucleotide
  Sense strand starting at position 2990 of SEQ ID NO: 585561
augaaaugucaucgaggug

SEQ ID NO: 649701 - RNA, 19 nt, Artificial Sequence
  Description of Artificial Sequence: Synthetic oligonucleotide
  Antisense strand to SEQ ID NO: 649700
caccucgaugacauuucau

SEQ ID NO: 649702 - RNA, 19 nt, Artificial Sequence
  Description of Artificial Sequence: Synthetic oligonucleotide
  Sense strand starting at position 3285 of SEQ ID NO: 585561
agaagagaauaugagauua

SEQ ID NO: 649703 - RNA, 19 nt, Artificial Sequence
  Description of Artificial Sequence: Synthetic oligonucleotide
  Antisense strand to SEQ ID NO: 649702
uaaucucauauucucuucu

SEQ ID NO: 649704 - RNA, 19 nt, Artificial Sequence
  Description of Artificial Sequence: Synthetic oligonucleotide
  Sense strand starting at position 3844 of SEQ ID NO: 585561
ugugauccugggcaaugaa

SEQ ID NO: 649705 - RNA, 19 nt, Artificial Sequence
  Description of Artificial Sequence: Synthetic oligonucleotide
  Antisense strand to SEQ ID NO: 649704
uucauugcccaggaucaca

SEQ ID NO: 649706 - RNA, 19 nt, Artificial Sequence
  Description of Artificial Sequence: Synthetic oligonucleotide
  Sense strand starting at position 3847 of SEQ ID NO: 585561
gauccugggcaaugaauga

SEQ ID NO: 649707 - RNA, 19 nt, Artificial Sequence
  Description of Artificial Sequence: Synthetic oligonucleotide
  Antisense strand to SEQ ID NO: 649706
ucauucauugcccaggauc

SEQ ID NO: 649708 - RNA, 19 nt, Artificial Sequence
  Description of Artificial Sequence: Synthetic oligonucleotide
  Sense strand starting at position 3916 of SEQ ID NO: 585561
uauugugaagcucaaguga

SEQ ID NO: 649709 - RNA, 19 nt, Artificial Sequence
  Description of Artificial Sequence: Synthetic oligonucleotide
  Antisense strand to SEQ ID NO: 649708
ucacuugagcuucacaaua

SEQ ID NO: 649710 - RNA, 19 nt, Artificial Sequence
  Description of Artificial Sequence: Synthetic oligonucleotide
  Sense strand starting at position 3925 of SEQ ID NO: 585561
gcucaagugagacaaugua

SEQ ID NO: 649711 - RNA, 19 nt, Artificial Sequence
  Description of Artificial Sequence: Synthetic oligonucleotide
  Antisense strand to SEQ ID NO: 649710
uacauugucucacuugagc

SEQ ID NO: 649712 - RNA, 19 nt, Artificial Sequence
  Description of Artificial Sequence: Synthetic oligonucleotide
  Sense strand starting at position 82 of SEQ ID NO: 585562
uguauaaugcauuaguaga

SEQ ID NO: 649713 - RNA, 19 nt, Artificial Sequence
  Description of Artificial Sequence: Synthetic oligonucleotide
  Antisense strand to SEQ ID NO: 649712
ucuacuaaugcauuauaca

SEQ ID NO: 649714 - RNA, 19 nt, Artificial Sequence
  Description of Artificial Sequence: Synthetic oligonucleotide
  Sense strand starting at position 213 of SEQ ID NO: 585562
gcacuaugaugacuucuaa

SEQ ID NO: 649715 - RNA, 19 nt, Artificial Sequence
  Description of Artificial Sequence: Synthetic oligonucleotide
  Antisense strand to SEQ ID NO: 649714
uuagaagucaucauagugc

SEQ ID NO: 649716 - RNA, 19 nt, Artificial Sequence
  Description of Artificial Sequence: Synthetic oligonucleotide
  Sense strand starting at position 360 of SEQ ID NO: 585562
uggaaucuaagcuguuaag

SEQ ID NO: 649717 - RNA, 19 nt, Artificial Sequence
  Description of Artificial Sequence: Synthetic oligonucleotide
  Antisense strand to SEQ ID NO: 649716
cuuaacagcuuagauucca

SEQ ID NO: 649718 - RNA, 19 nt, Artificial Sequence
  Description of Artificial Sequence: Synthetic oligonucleotide
  Sense strand starting at position 379 of SEQ ID NO: 585562
ugcuuuaggguuuaagaga

SEQ ID NO: 649719 - RNA, 19 nt, Artificial Sequence
  Description of Artificial Sequence: Synthetic oligonucleotide
  Antisense strand to SEQ ID NO: 649718
ucucuuaaacccuaaagca

SEQ ID NO: 649720 - RNA, 19 nt, Artificial Sequence
  Description of Artificial Sequence: Synthetic oligonucleotide
  Sense strand starting at position 387 of SEQ ID NO: 585562
gguuuaagagaacgguaga

SEQ ID NO: 649721 - RNA, 19 nt, Artificial Sequence
  Description of Artificial Sequence: Synthetic oligonucleotide
  Antisense strand to SEQ ID NO: 649720
ucuaccguucucuuaaacc

SEQ ID NO: 649722 - RNA, 19 nt, Artificial Sequence
  Description of Artificial Sequence: Synthetic oligonucleotide
  Sense strand starting at position 388 of SEQ ID NO: 585562
guuuaagagaacgguagau

SEQ ID NO: 649723 - RNA, 19 nt, Artificial Sequence
  Description of Artificial Sequence: Synthetic oligonucleotide
  Antisense strand to SEQ ID NO: 649722
aucuaccguucucuuaaac

SEQ ID NO: 649724 - RNA, 19 nt, Artificial Sequence
  Description of Artificial Sequence: Synthetic oligonucleotide
  Sense strand starting at position 739 of SEQ ID NO: 585562
gugugugauauuggagaaa

SEQ ID NO: 649725 - RNA, 19 nt, Artificial Sequence
  Description of Artificial Sequence: Synthetic oligonucleotide
  Antisense strand to SEQ ID NO: 649724
uuucuccaauaucacacac

SEQ ID NO: 649726 - RNA, 19 nt, Artificial Sequence
  Description of Artificial Sequence: Synthetic oligonucleotide
  Sense strand starting at position 777 of SEQ ID NO: 585562
ggaucuaauuuacauugaa

SEQ ID NO: 649727 - RNA, 19 nt, Artificial Sequence
  Description of Artificial Sequence: Synthetic oligonucleotide
  Antisense strand to SEQ ID NO: 649726
uucaauguaaauuagaucc

SEQ ID NO: 649728 - RNA, 19 nt, Artificial Sequence
  Description of Artificial Sequence: Synthetic oligonucleotide
  Sense strand starting at position 833 of SEQ ID NO: 585562
agauguugugauuacaauu

SEQ ID NO: 649729 - RNA, 19 nt, Artificial Sequence
  Description of Artificial Sequence: Synthetic oligonucleotide
  Antisense strand to SEQ ID NO: 649728
aauuguaaucacaacaucu

SEQ ID NO: 649730 - RNA, 19 nt, Artificial Sequence
  Description of Artificial Sequence: Synthetic oligonucleotide
  Sense strand starting at position 855 of SEQ ID NO: 585562
ggugaauuggaaggucaau

SEQ ID NO: 649731 - RNA, 19 nt, Artificial Sequence
  Description of Artificial Sequence: Synthetic oligonucleotide
  Antisense strand to SEQ ID NO: 649730
auugaccuuccaauucacc

SEQ ID NO: 649732 - RNA, 19 nt, Artificial Sequence
  Description of Artificial Sequence: Synthetic oligonucleotide
  Sense strand starting at position 1005 of SEQ ID NO: 585562
uuaguaagcuaaguaaaca

SEQ ID NO: 649733 - RNA, 19 nt, Artificial Sequence
  Description of Artificial Sequence: Synthetic oligonucleotide
  Antisense strand to SEQ ID NO: 649732
uguuuacuuagcuuacuaa

SEQ ID NO: 649734 - RNA, 19 nt, Artificial Sequence
  Description of Artificial Sequence: Synthetic oligonucleotide
  Sense strand starting at position 2015 of SEQ ID NO: 585562
acucuugguuuccugaaac

SEQ ID NO: 649735 - RNA, 19 nt, Artificial Sequence
  Description of Artificial Sequence: Synthetic oligonucleotide
  Antisense strand to SEQ ID NO: 649734
guuucaggaaaccaagagu

SEQ ID NO: 649736 - RNA, 19 nt, Artificial Sequence
  Description of Artificial Sequence: Synthetic oligonucleotide
  Sense strand starting at position 2095 of SEQ ID NO: 585562
uuuacuaccuguuugaaga

SEQ ID NO: 649737 - RNA, 19 nt, Artificial Sequence
  Description of Artificial Sequence: Synthetic oligonucleotide
  Antisense strand to SEQ ID NO: 649736
ucuucaaacagguaguaaa

SEQ ID NO: 649738 - RNA, 19 nt, Artificial Sequence
  Description of Artificial Sequence: Synthetic oligonucleotide
  Sense strand starting at position 2096 of SEQ ID NO: 585562
uuacuaccuguuugaagau

SEQ ID NO: 649739 - RNA, 19 nt, Artificial Sequence
  Description of Artificial Sequence: Synthetic oligonucleotide
  Antisense strand to SEQ ID NO: 649738
aucuucaaacagguaguaa

SEQ ID NO: 649740 - RNA, 19 nt, Artificial Sequence
  Description of Artificial Sequence: Synthetic oligonucleotide
  Sense strand starting at position 2321 of SEQ ID NO: 585562
uuguaauacuguccacaua

SEQ ID NO: 649741 - RNA, 19 nt, Artificial Sequence
  Description of Artificial Sequence: Synthetic oligonucleotide
  Antisense strand to SEQ ID NO: 649740
uauguggacaguauuacaa

SEQ ID NO: 649742 - RNA, 19 nt, Artificial Sequence
  Description of Artificial Sequence: Synthetic oligonucleotide
  Sense strand starting at position 2322 of SEQ ID NO: 585562
uguaauacuguccacauag

SEQ ID NO: 649743 - RNA, 19 nt, Artificial Sequence
  Description of Artificial Sequence: Synthetic oligonucleotide
  Antisense strand to SEQ ID NO: 649742
cuauguggacaguauuaca

SEQ ID NO: 649744 - RNA, 19 nt, Artificial Sequence
  Description of Artificial Sequence: Synthetic oligonucleotide
  Sense strand starting at position 2348 of SEQ ID NO: 585562
uuauuagauucggucauaa

SEQ ID NO: 649745 - RNA, 19 nt, Artificial Sequence
  Description of Artificial Sequence: Synthetic oligonucleotide
  Antisense strand to SEQ ID NO: 649744
uuaugaccgaaucuaauaa

SEQ ID NO: 649746 - RNA, 19 nt, Artificial Sequence
  Description of Artificial Sequence: Synthetic oligonucleotide
  Sense strand starting at position 2350 of SEQ ID NO: 585562
auuagauucggucauaauc

SEQ ID NO: 649747 - RNA, 19 nt, Artificial Sequence
  Description of Artificial Sequence: Synthetic oligonucleotide
  Antisense strand to SEQ ID NO: 649746
gauuaugaccgaaucuaau

SEQ ID NO: 649748 - RNA, 19 nt, Artificial Sequence
  Description of Artificial Sequence: Synthetic oligonucleotide
  Sense strand starting at position 2358 of SEQ ID NO: 585562
cggucauaaucucuaacac

SEQ ID NO: 649749 - RNA, 19 nt, Artificial Sequence
  Description of Artificial Sequence: Synthetic oligonucleotide
  Antisense strand to SEQ ID NO: 649748
guguuagagauuaugaccg

SEQ ID NO: 649750 - RNA, 19 nt, Artificial Sequence
  Description of Artificial Sequence: Synthetic oligonucleotide
  Sense strand starting at position 2392 of SEQ ID NO: 585562
auuucucaauguuaaggaa

SEQ ID NO: 649751 - RNA, 19 nt, Artificial Sequence
  Description of Artificial Sequence: Synthetic oligonucleotide
  Antisense strand to SEQ ID NO: 649750
uuccuuaacauugagaaau

SEQ ID NO: 649752 - RNA, 19 nt, Artificial Sequence
  Description of Artificial Sequence: Synthetic oligonucleotide
  Sense strand starting at position 2811 of SEQ ID NO: 585562
auauuaguagcauggaauu

SEQ ID NO: 649753 - RNA, 19 nt, Artificial Sequence
  Description of Artificial Sequence: Synthetic oligonucleotide
  Antisense strand to SEQ ID NO: 649752
aauuccaugcuacuaauau

SEQ ID NO: 649754 - RNA, 19 nt, Artificial Sequence
  Description of Artificial Sequence: Synthetic oligonucleotide
  Sense strand starting at position 2836 of SEQ ID NO: 585562
cagacaagucuggguccau

SEQ ID NO: 649755 - RNA, 19 nt, Artificial Sequence
  Description of Artificial Sequence: Synthetic oligonucleotide
  Antisense strand to SEQ ID NO: 649754
auggacccagacuugucug

SEQ ID NO: 649756 - RNA, 19 nt, Artificial Sequence
  Description of Artificial Sequence: Synthetic oligonucleotide
  Sense strand starting at position 2848 of SEQ ID NO: 585562
gguccaugucccuacuaca

SEQ ID NO: 649757 - RNA, 19 nt, Artificial Sequence
  Description of Artificial Sequence: Synthetic oligonucleotide
  Antisense strand to SEQ ID NO: 649756
uguaguagggacauggacc

SEQ ID NO: 649758 - RNA, 19 nt, Artificial Sequence
  Description of Artificial Sequence: Synthetic oligonucleotide
  Sense strand starting at position 2862 of SEQ ID NO: 585562
cuacauaagucauuaguua

SEQ ID NO: 649759 - RNA, 19 nt, Artificial Sequence
  Description of Artificial Sequence: Synthetic oligonucleotide
  Antisense strand to SEQ ID NO: 649758
uaacuaaugacuuauguag

SEQ ID NO: 649760 - RNA, 19 nt, Artificial Sequence
  Description of Artificial Sequence: Synthetic oligonucleotide
  Sense strand starting at position 2866 of SEQ ID NO: 585562
auaagucauuaguuacauc

SEQ ID NO: 649761 - RNA, 19 nt, Artificial Sequence
  Description of Artificial Sequence: Synthetic oligonucleotide
  Antisense strand to SEQ ID NO: 649760
gauguaacuaaugacuuau

SEQ ID NO: 649762 - RNA, 19 nt, Artificial Sequence
  Description of Artificial Sequence: Synthetic oligonucleotide
  Sense strand starting at position 2888 of SEQ ID NO: 585562
cugggaauguuucuuacuc

SEQ ID NO: 649763 - RNA, 19 nt, Artificial Sequence
  Description of Artificial Sequence: Synthetic oligonucleotide
  Antisense strand to SEQ ID NO: 649762
gaguaagaaacauucccag

SEQ ID NO: 649764 - RNA, 19 nt, Artificial Sequence
  Description of Artificial Sequence: Synthetic oligonucleotide
  Sense strand starting at position 2889 of SEQ ID NO: 585562
ugggaauguuucuuacucu

SEQ ID NO: 649765 - RNA, 19 nt, Artificial Sequence
  Description of Artificial Sequence: Synthetic oligonucleotide
  Antisense strand to SEQ ID NO: 649764
agaguaagaaacauuccca

SEQ ID NO: 649766 - RNA, 19 nt, Artificial Sequence
  Description of Artificial Sequence: Synthetic oligonucleotide
  Sense strand starting at position 2985 of SEQ ID NO: 585562
aaggaacuguagucaucuu

SEQ ID NO: 649767 - RNA, 19 nt, Artificial Sequence
  Description of Artificial Sequence: Synthetic oligonucleotide
  Antisense strand to SEQ ID NO: 649766
aagaugacuacaguuccuu

SEQ ID NO: 649768 - RNA, 19 nt, Artificial Sequence
  Description of Artificial Sequence: Synthetic oligonucleotide
  Sense strand starting at position 2999 of SEQ ID NO: 585562
aucuucugaugcucagaga

SEQ ID NO: 649769 - RNA, 19 nt, Artificial Sequence
  Description of Artificial Sequence: Synthetic oligonucleotide
  Antisense strand to SEQ ID NO: 649768
ucucugagcaucagaagau

SEQ ID NO: 649770 - RNA, 19 nt, Artificial Sequence
  Description of Artificial Sequence: Synthetic oligonucleotide
  Sense strand starting at position 3155 of SEQ ID NO: 585562
ugaugugaaguauaaaugu

SEQ ID NO: 649771 - RNA, 19 nt, Artificial Sequence
  Description of Artificial Sequence: Synthetic oligonucleotide
  Antisense strand to SEQ ID NO: 649770
acauuuauacuucacauca

SEQ ID NO: 649772 - RNA, 19 nt, Artificial Sequence
  Description of Artificial Sequence: Synthetic oligonucleotide
  Sense strand starting at position 3183 of SEQ ID NO: 585562
uguaaauuaccugguauaa

SEQ ID NO: 649773 - RNA, 19 nt, Artificial Sequence
  Description of Artificial Sequence: Synthetic oligonucleotide
  Antisense strand to SEQ ID NO: 649772
uuauaccagguaauuuaca

SEQ ID NO: 649774 - RNA, 19 nt, Artificial Sequence
  Description of Artificial Sequence: Synthetic oligonucleotide
  Sense strand starting at position 3209 of SEQ ID NO: 585562
cagcaaugugaaugaaagu

SEQ ID NO: 649775 - RNA, 19 nt, Artificial Sequence
  Description of Artificial Sequence: Synthetic oligonucleotide
  Antisense strand to SEQ ID NO: 649774
acuuucauucacauugcug

SEQ ID NO: 649776 - RNA, 19 nt, Artificial Sequence
  Description of Artificial Sequence: Synthetic oligonucleotide
  Sense strand starting at position 3277 of SEQ ID NO: 585562
gcccuaaauuugcuaagua

SEQ ID NO: 649777 - RNA, 19 nt, Artificial Sequence
  Description of Artificial Sequence: Synthetic oligonucleotide
  Antisense strand to SEQ ID NO: 649776
uacuuagcaaauuuagggc

SEQ ID NO: 649778 - RNA, 19 nt, Artificial Sequence
  Description of Artificial Sequence: Synthetic oligonucleotide
  Sense strand starting at position 3293 of SEQ ID NO: 585562
guacuaauauaagucaaug

SEQ ID NO: 649779 - RNA, 19 nt, Artificial Sequence
  Description of Artificial Sequence: Synthetic oligonucleotide
  Antisense strand to SEQ ID NO: 649778
cauugacuuauauuaguac

SEQ ID NO: 649780 - RNA, 19 nt, Artificial Sequence
  Description of Artificial Sequence: Synthetic oligonucleotide
  Sense strand starting at position 3514 of SEQ ID NO: 585562
ugagucccugcauauuauu

SEQ ID NO: 649781 - RNA, 19 nt, Artificial Sequence
  Description of Artificial Sequence: Synthetic oligonucleotide
  Antisense strand to SEQ ID NO: 649780
aauaauaugcagggacuca

SEQ ID NO: 649782 - RNA, 19 nt, Artificial Sequence
  Description of Artificial Sequence: Synthetic oligonucleotide
  Sense strand starting at position 3531 of SEQ ID NO: 585562
uugacagcugcauauuauu

SEQ ID NO: 649783 - RNA, 19 nt, Artificial Sequence
  Description of Artificial Sequence: Synthetic oligonucleotide
  Antisense strand to SEQ ID NO: 649782
aauaauaugcagcugucaa

SEQ ID NO: 649784 - RNA, 19 nt, Artificial Sequence
  Description of Artificial Sequence: Synthetic oligonucleotide
  Sense strand starting at position 3674 of SEQ ID NO: 585562
gcaugcuuccauguguuua

SEQ ID NO: 649785 - RNA, 19 nt, Artificial Sequence
  Description of Artificial Sequence: Synthetic oligonucleotide
  Antisense strand to SEQ ID NO: 649784
uaaacacauggaagcaugc

SEQ ID NO: 649786 - RNA, 19 nt, Artificial Sequence
  Description of Artificial Sequence: Synthetic oligonucleotide
  Sense strand starting at position 3679 of SEQ ID NO: 585562
cuuccauguguuuacauaa

SEQ ID NO: 649787 - RNA, 19 nt, Artificial Sequence
  Description of Artificial Sequence: Synthetic oligonucleotide
  Antisense strand to SEQ ID NO: 649786
uuauguaaacacauggaag

SEQ ID NO: 649788 - RNA, 19 nt, Artificial Sequence
  Description of Artificial Sequence: Synthetic oligonucleotide
  Sense strand starting at position 3704 of SEQ ID NO: 585562
auaaucauauuggucagua

SEQ ID NO: 649789 - RNA, 19 nt, Artificial Sequence
  Description of Artificial Sequence: Synthetic oligonucleotide
  Antisense strand to SEQ ID NO: 649788
uacugaccaauaugauuau

SEQ ID NO: 649790 - RNA, 19 nt, Artificial Sequence
  Description of Artificial Sequence: Synthetic oligonucleotide
  Sense strand starting at position 3950 of SEQ ID NO: 585562
agacaagcauugcuuuaga

SEQ ID NO: 649791 - RNA, 19 nt, Artificial Sequence
  Description of Artificial Sequence: Synthetic oligonucleotide
  Antisense strand to SEQ ID NO: 649790
ucuaaagcaaugcuugucu

SEQ ID NO: 649792 - RNA, 19 nt, Artificial Sequence
  Description of Artificial Sequence: Synthetic oligonucleotide
  Sense strand starting at position 262 of SEQ ID NO: 585563
uuacuuacucuguagacca

SEQ ID NO: 649793 - RNA, 19 nt, Artificial Sequence
  Description of Artificial Sequence: Synthetic oligonucleotide
  Antisense strand to SEQ ID NO: 649792
uggucuacagaguaaguaa

SEQ ID NO: 649794 - RNA, 19 nt, Artificial Sequence
  Description of Artificial Sequence: Synthetic oligonucleotide
  Sense strand starting at position 269 of SEQ ID NO: 585563
cucuguagaccauacuuau

SEQ ID NO: 649795 - RNA, 19 nt, Artificial Sequence
  Description of Artificial Sequence: Synthetic oligonucleotide
  Antisense strand to SEQ ID NO: 649794
auaaguauggucuacagag

SEQ ID NO: 649796 - RNA, 19 nt, Artificial Sequence
  Description of Artificial Sequence: Synthetic oligonucleotide
  Sense strand starting at position 272 of SEQ ID NO: 585563
uguagaccauacuuauagu

SEQ ID NO: 649797 - RNA, 19 nt, Artificial Sequence
  Description of Artificial Sequence: Synthetic oligonucleotide
  Antisense strand to SEQ ID NO: 649796
acuauaaguauggucuaca

SEQ ID NO: 649798 - RNA, 19 nt, Artificial Sequence
  Description of Artificial Sequence: Synthetic oligonucleotide
  Sense strand starting at position 460 of SEQ ID NO: 585563
agaguauggccucauguau

SEQ ID NO: 649799 - RNA, 19 nt, Artificial Sequence
  Description of Artificial Sequence: Synthetic oligonucleotide
  Antisense strand to SEQ ID NO: 649798
auacaugaggccauacucu

SEQ ID NO: 649800 - RNA, 19 nt, Artificial Sequence
  Description of Artificial Sequence: Synthetic oligonucleotide
  Sense strand starting at position 533 of SEQ ID NO: 585563
cccagaauugaaggcaaau

SEQ ID NO: 649801 - RNA, 19 nt, Artificial Sequence
  Description of Artificial Sequence: Synthetic oligonucleotide
  Antisense strand to SEQ ID NO: 649800
auuugccuucaauucuggg

SEQ ID NO: 649802 - RNA, 19 nt, Artificial Sequence
  Description of Artificial Sequence: Synthetic oligonucleotide
  Sense strand starting at position 556 of SEQ ID NO: 585563
uaagaugagguguggguua

SEQ ID NO: 649803 - RNA, 19 nt, Artificial Sequence
  Description of Artificial Sequence: Synthetic oligonucleotide
  Antisense strand to SEQ ID NO: 649802
uaacccacaccucaucuua

SEQ ID NO: 649804 - RNA, 19 nt, Artificial Sequence
  Description of Artificial Sequence: Synthetic oligonucleotide
  Sense strand starting at position 561 of SEQ ID NO: 585563
ugagguguggguuaggaaa

SEQ ID NO: 649805 - RNA, 19 nt, Artificial Sequence
  Description of Artificial Sequence: Synthetic oligonucleotide
  Antisense strand to SEQ ID NO: 649804
uuuccuaacccacaccuca

SEQ ID NO: 649806 - RNA, 19 nt, Artificial Sequence
  Description of Artificial Sequence: Synthetic oligonucleotide
  Sense strand starting at position 573 of SEQ ID NO: 585563
uaggaaagagucugcacaa

SEQ ID NO: 649807 - RNA, 19 nt, Artificial Sequence
  Description of Artificial Sequence: Synthetic oligonucleotide
  Antisense strand to SEQ ID NO: 649806
uugugcagacucuuuccua

SEQ ID NO: 649808 - RNA, 19 nt, Artificial Sequence
  Description of Artificial Sequence: Synthetic oligonucleotide
  Sense strand starting at position 574 of SEQ ID NO: 585563
aggaaagagucugcacaau

SEQ ID NO: 649809 - RNA, 19 nt, Artificial Sequence
  Description of Artificial Sequence: Synthetic oligonucleotide
  Antisense strand to SEQ ID NO: 649808
auugugcagacucuuuccu

SEQ ID NO: 649810 - RNA, 19 nt, Artificial Sequence
  Description of Artificial Sequence: Synthetic oligonucleotide
  Sense strand starting at position 844 of SEQ ID NO: 585563
gacuuuaugggauggcaca

SEQ ID NO: 649811 - RNA, 19 nt, Artificial Sequence
  Description of Artificial Sequence: Synthetic oligonucleotide
  Antisense strand to SEQ ID NO: 649810
ugugccaucccauaaaguc

SEQ ID NO: 649812 - RNA, 19 nt, Artificial Sequence
  Description of Artificial Sequence: Synthetic oligonucleotide
  Sense strand starting at position 973 of SEQ ID NO: 585563
acgucucuccuugaggaua

SEQ ID NO: 649813 - RNA, 19 nt, Artificial Sequence
  Description of Artificial Sequence: Synthetic oligonucleotide
  Antisense strand to SEQ ID NO: 649812
uauccucaaggagagacgu

SEQ ID NO: 649814 - RNA, 19 nt, Artificial Sequence
  Description of Artificial Sequence: Synthetic oligonucleotide
  Sense strand starting at position 1640 of SEQ ID NO: 585563
guugauguccuauauacua

SEQ ID NO: 649815 - RNA, 19 nt, Artificial Sequence
  Description of Artificial Sequence: Synthetic oligonucleotide
  Antisense strand to SEQ ID NO: 649814
uaguauauaggacaucaac

SEQ ID NO: 649816 - RNA, 19 nt, Artificial Sequence
  Description of Artificial Sequence: Synthetic oligonucleotide
  Sense strand starting at position 1680 of SEQ ID NO: 585563
uggaauaucugcuucuuaa

SEQ ID NO: 649817 - RNA, 19 nt, Artificial Sequence
  Description of Artificial Sequence: Synthetic oligonucleotide
  Antisense strand to SEQ ID NO: 649816
uuaagaagcagauauucca

SEQ ID NO: 649818 - RNA, 19 nt, Artificial Sequence
  Description of Artificial Sequence: Synthetic oligonucleotide
  Sense strand starting at position 1715 of SEQ ID NO: 585563
aguuaauaucucugcagaa

SEQ ID NO: 649819 - RNA, 19 nt, Artificial Sequence
  Description of Artificial Sequence: Synthetic oligonucleotide
  Antisense strand to SEQ ID NO: 649818
uucugcagagauauuaacu

SEQ ID NO: 649820 - RNA, 19 nt, Artificial Sequence
  Description of Artificial Sequence: Synthetic oligonucleotide
  Sense strand starting at position 1844 of SEQ ID NO: 585563
uggaaauugaugggcugua

SEQ ID NO: 649821 - RNA, 19 nt, Artificial Sequence
  Description of Artificial Sequence: Synthetic oligonucleotide
  Antisense strand to SEQ ID NO: 649820
uacagcccaucaauuucca

SEQ ID NO: 649822 - RNA, 19 nt, Artificial Sequence
  Description of Artificial Sequence: Synthetic oligonucleotide
  Sense strand starting at position 2012 of SEQ ID NO: 585563
uguuauacucuugaugauu

SEQ ID NO: 649823 - RNA, 19 nt, Artificial Sequence
  Description of Artificial Sequence: Synthetic oligonucleotide
  Antisense strand to SEQ ID NO: 649822
aaucaucaagaguauaaca

SEQ ID NO: 649824 - RNA, 19 nt, Artificial Sequence
  Description of Artificial Sequence: Synthetic oligonucleotide
  Sense strand starting at position 2020 of SEQ ID NO: 585563
ucuugaugauuauuggaac

SEQ ID NO: 649825 - RNA, 19 nt, Artificial Sequence
  Description of Artificial Sequence: Synthetic oligonucleotide
  Antisense strand to SEQ ID NO: 649824
guuccaauaaucaucaaga

SEQ ID NO: 649826 - RNA, 19 nt, Artificial Sequence
  Description of Artificial Sequence: Synthetic oligonucleotide
  Sense strand starting at position 2176 of SEQ ID NO: 585563
acauguagagguugaauau

SEQ ID NO: 649827 - RNA, 19 nt, Artificial Sequence
  Description of Artificial Sequence: Synthetic oligonucleotide
  Antisense strand to SEQ ID NO: 649826
auauucaaccucuacaugu

SEQ ID NO: 649828 - RNA, 19 nt, Artificial Sequence
  Description of Artificial Sequence: Synthetic oligonucleotide
  Sense strand starting at position 2187 of SEQ ID NO: 585563
uugaauaucuuguucugga

SEQ ID NO: 649829 - RNA, 19 nt, Artificial Sequence
  Description of Artificial Sequence: Synthetic oligonucleotide
  Antisense strand to SEQ ID NO: 649828
uccagaacaagauauucaa

SEQ ID NO: 649830 - RNA, 19 nt, Artificial Sequence
  Description of Artificial Sequence: Synthetic oligonucleotide
  Sense strand starting at position 2188 of SEQ ID NO: 585563
ugaauaucuuguucuggaa

SEQ ID NO: 649831 - RNA, 19 nt, Artificial Sequence
  Description of Artificial Sequence: Synthetic oligonucleotide
  Antisense strand to SEQ ID NO: 649830
uuccagaacaagauauuca

SEQ ID NO: 649832 - RNA, 19 nt, Artificial Sequence
  Description of Artificial Sequence: Synthetic oligonucleotide
  Sense strand starting at position 2192 of SEQ ID NO: 585563
uaucuuguucuggaaagua

SEQ ID NO: 649833 - RNA, 19 nt, Artificial Sequence
  Description of Artificial Sequence: Synthetic oligonucleotide
  Antisense strand to SEQ ID NO: 649832
uacuuuccagaacaagaua

SEQ ID NO: 649834 - RNA, 19 nt, Artificial Sequence
  Description of Artificial Sequence: Synthetic oligonucleotide
  Sense strand starting at position 2202 of SEQ ID NO: 585563
uggaaaguauagcuaguaa

SEQ ID NO: 649835 - RNA, 19 nt, Artificial Sequence
  Description of Artificial Sequence: Synthetic oligonucleotide
  Antisense strand to SEQ ID NO: 649834
uuacuagcuauacuuucca

SEQ ID NO: 649836 - RNA, 19 nt, Artificial Sequence
  Description of Artificial Sequence: Synthetic oligonucleotide
  Sense strand starting at position 2309 of SEQ ID NO: 585563
gcuagaguuagcgcuuuac

SEQ ID NO: 649837 - RNA, 19 nt, Artificial Sequence
  Description of Artificial Sequence: Synthetic oligonucleotide
  Antisense strand to SEQ ID NO: 649836
guaaagcgcuaacucuagc

SEQ ID NO: 649838 - RNA, 19 nt, Artificial Sequence
  Description of Artificial Sequence: Synthetic oligonucleotide
  Sense strand starting at position 2355 of SEQ ID NO: 585563
uccucaauccaguaaguua

SEQ ID NO: 649839 - RNA, 19 nt, Artificial Sequence
  Description of Artificial Sequence: Synthetic oligonucleotide
  Antisense strand to SEQ ID NO: 649838
uaacuuacuggauugagga

SEQ ID NO: 649840 - RNA, 19 nt, Artificial Sequence
  Description of Artificial Sequence: Synthetic oligonucleotide
  Sense strand starting at position 2460 of SEQ ID NO: 585563
agaaguagcucauuaauuc

SEQ ID NO: 649841 - RNA, 19 nt, Artificial Sequence
  Description of Artificial Sequence: Synthetic oligonucleotide
  Antisense strand to SEQ ID NO: 649840
gaauuaaugagcuacuucu

SEQ ID NO: 649842 - RNA, 19 nt, Artificial Sequence
  Description of Artificial Sequence: Synthetic oligonucleotide
  Sense strand starting at position 2525 of SEQ ID NO: 585563
agcuacuaaugguuaagaa

SEQ ID NO: 649843 - RNA, 19 nt, Artificial Sequence
  Description of Artificial Sequence: Synthetic oligonucleotide
  Antisense strand to SEQ ID NO: 649842
uucuuaaccauuaguagcu

SEQ ID NO: 649844 - RNA, 19 nt, Artificial Sequence
  Description of Artificial Sequence: Synthetic oligonucleotide
  Sense strand starting at position 3018 of SEQ ID NO: 585563
ugguguguuaugcucugua

SEQ ID NO: 649845 - RNA, 19 nt, Artificial Sequence
  Description of Artificial Sequence: Synthetic oligonucleotide
  Antisense strand to SEQ ID NO: 649844
uacagagcauaacacacca

SEQ ID NO: 649846 - RNA, 19 nt, Artificial Sequence
  Description of Artificial Sequence: Synthetic oligonucleotide
  Sense strand starting at position 3070 of SEQ ID NO: 585563
guaucaauaguccaauucu

SEQ ID NO: 649847 - RNA, 19 nt, Artificial Sequence
  Description of Artificial Sequence: Synthetic oligonucleotide
  Antisense strand to SEQ ID NO: 649846
agaauuggacuauugauac

SEQ ID NO: 649848 - RNA, 19 nt, Artificial Sequence
  Description of Artificial Sequence: Synthetic oligonucleotide
  Sense strand starting at position 3096 of SEQ ID NO: 585563
aaauaucagugaguaguau

SEQ ID NO: 649849 - RNA, 19 nt, Artificial Sequence
  Description of Artificial Sequence: Synthetic oligonucleotide
  Antisense strand to SEQ ID NO: 649848
auacuacucacugauauuu

SEQ ID NO: 649850 - RNA, 19 nt, Artificial Sequence
  Description of Artificial Sequence: Synthetic oligonucleotide
  Sense strand starting at position 3097 of SEQ ID NO: 585563
aauaucagugaguaguauu

SEQ ID NO: 649851 - RNA, 19 nt, Artificial Sequence
  Description of Artificial Sequence: Synthetic oligonucleotide
  Antisense strand to SEQ ID NO: 649850
aauacuacucacugauauu

SEQ ID NO: 649852 - RNA, 19 nt, Artificial Sequence
  Description of Artificial Sequence: Synthetic oligonucleotide
  Sense strand starting at position 3296 of SEQ ID NO: 585563
gguagaaacgaugggaugu

SEQ ID NO: 649853 - RNA, 19 nt, Artificial Sequence
  Description of Artificial Sequence: Synthetic oligonucleotide
  Antisense strand to SEQ ID NO: 649852
acaucccaucguuucuacc

SEQ ID NO: 649854 - RNA, 19 nt, Artificial Sequence
  Description of Artificial Sequence: Synthetic oligonucleotide
  Sense strand starting at position 3361 of SEQ ID NO: 585563
gauuguuuacuuuggagga

SEQ ID NO: 649855 - RNA, 19 nt, Artificial Sequence
  Description of Artificial Sequence: Synthetic oligonucleotide
  Antisense strand to SEQ ID NO: 649854
uccuccaaaguaaacaauc

SEQ ID NO: 649856 - RNA, 19 nt, Artificial Sequence
  Description of Artificial Sequence: Synthetic oligonucleotide
  Sense strand starting at position 3445 of SEQ ID NO: 585563
gcaacaugugacugggaca

SEQ ID NO: 649857 - RNA, 19 nt, Artificial Sequence
  Description of Artificial Sequence: Synthetic oligonucleotide
  Antisense strand to SEQ ID NO: 649856
ugucccagucacauguugc

SEQ ID NO: 649858 - RNA, 19 nt, Artificial Sequence
  Description of Artificial Sequence: Synthetic oligonucleotide
  Sense strand starting at position 3460 of SEQ ID NO: 585563
gacaucuuguaagugaauc

SEQ ID NO: 649859 - RNA, 19 nt, Artificial Sequence
  Description of Artificial Sequence: Synthetic oligonucleotide
  Antisense strand to SEQ ID NO: 649858
gauucacuuacaagauguc

SEQ ID NO: 649860 - RNA, 19 nt, Artificial Sequence
  Description of Artificial Sequence: Synthetic oligonucleotide
  Sense strand starting at position 3512 of SEQ ID NO: 585563
agcugacuucuugacuaca

SEQ ID NO: 649861 - RNA, 19 nt, Artificial Sequence
  Description of Artificial Sequence: Synthetic oligonucleotide
  Antisense strand to SEQ ID NO: 649860
uguagucaagaagucagcu

SEQ ID NO: 649862 - RNA, 19 nt, Artificial Sequence
  Description of Artificial Sequence: Synthetic oligonucleotide
  Sense strand starting at position 3628 of SEQ ID NO: 585563
cuauuuagcugcuucugaa

SEQ ID NO: 649863 - RNA, 19 nt, Artificial Sequence
  Description of Artificial Sequence: Synthetic oligonucleotide
  Antisense strand to SEQ ID NO: 649862
uucagaagcagcuaaauag

SEQ ID NO: 649864 - RNA, 19 nt, Artificial Sequence
  Description of Artificial Sequence: Synthetic oligonucleotide
  Sense strand starting at position 3653 of SEQ ID NO: 585563
gcccauagaaacugugaga

SEQ ID NO: 649865 - RNA, 19 nt, Artificial Sequence
  Description of Artificial Sequence: Synthetic oligonucleotide
  Antisense strand to SEQ ID NO: 649864
ucucacaguuucuaugggc

SEQ ID NO: 649866 - RNA, 19 nt, Artificial Sequence
  Description of Artificial Sequence: Synthetic oligonucleotide
  Sense strand starting at position 3768 of SEQ ID NO: 585563
gugaaucaaucugcuauaa

SEQ ID NO: 649867 - RNA, 19 nt, Artificial Sequence
  Description of Artificial Sequence: Synthetic oligonucleotide
  Antisense strand to SEQ ID NO: 649866
uuauagcagauugauucac

SEQ ID NO: 649868 - RNA, 19 nt, Artificial Sequence
  Description of Artificial Sequence: Synthetic oligonucleotide
  Sense strand starting at position 3861 of SEQ ID NO: 585563
ggucaugugauagacauuc

SEQ ID NO: 649869 - RNA, 19 nt, Artificial Sequence
  Description of Artificial Sequence: Synthetic oligonucleotide
  Antisense strand to SEQ ID NO: 649868
gaaugucuaucacaugacc

SEQ ID NO: 649870 - RNA, 19 nt, Artificial Sequence
  Description of Artificial Sequence: Synthetic oligonucleotide
  Sense strand starting at position 3882 of SEQ ID NO: 585563
guggauaucaggugauauc

SEQ ID NO: 649871 - RNA, 19 nt, Artificial Sequence
  Description of Artificial Sequence: Synthetic oligonucleotide
  Antisense strand to SEQ ID NO: 649870
gauaucaccugauauccac

SEQ ID NO: 649872 - RNA, 19 nt, Artificial Sequence
  Description of Artificial Sequence: Synthetic oligonucleotide
  Sense strand starting at position 135 of SEQ ID NO: 585564
uuaaguguuacuuggguua

SEQ ID NO: 649873 - RNA, 19 nt, Artificial Sequence
  Description of Artificial Sequence: Synthetic oligonucleotide
  Antisense strand to SEQ ID NO: 649872
uaacccaaguaacacuuaa

SEQ ID NO: 649874 - RNA, 19 nt, Artificial Sequence
  Description of Artificial Sequence: Synthetic oligonucleotide
  Sense strand starting at position 138 of SEQ ID NO: 585564
aguguuacuuggguuaaca

SEQ ID NO: 649875 - RNA, 19 nt, Artificial Sequence
  Description of Artificial Sequence: Synthetic oligonucleotide
  Antisense strand to SEQ ID NO: 649874
uguuaacccaaguaacacu

SEQ ID NO: 649876 - RNA, 19 nt, Artificial Sequence
  Description of Artificial Sequence: Synthetic oligonucleotide
  Sense strand starting at position 140 of SEQ ID NO: 585564
uguuacuuggguuaacaua

SEQ ID NO: 649877 - RNA, 19 nt, Artificial Sequence
  Description of Artificial Sequence: Synthetic oligonucleotide
  Antisense strand to SEQ ID NO: 649876
uauguuaacccaaguaaca

SEQ ID NO: 649878 - RNA, 19 nt, Artificial Sequence
  Description of Artificial Sequence: Synthetic oligonucleotide
  Sense strand starting at position 191 of SEQ ID NO: 585564
auaucuaugucuuugagca

SEQ ID NO: 649879 - RNA, 19 nt, Artificial Sequence
  Description of Artificial Sequence: Synthetic oligonucleotide
  Antisense strand to SEQ ID NO: 649878
ugcucaaagacauagauau

SEQ ID NO: 649880 - RNA, 19 nt, Artificial Sequence
  Description of Artificial Sequence: Synthetic oligonucleotide
  Sense strand starting at position 196 of SEQ ID NO: 585564
uaugucuuugagcaaagua

SEQ ID NO: 649881 - RNA, 19 nt, Artificial Sequence
  Description of Artificial Sequence: Synthetic oligonucleotide
  Antisense strand to SEQ ID NO: 649880
uacuuugcucaaagacaua

SEQ ID NO: 649882 - RNA, 19 nt, Artificial Sequence
  Description of Artificial Sequence: Synthetic oligonucleotide
  Sense strand starting at position 236 of SEQ ID NO: 585564
agaagucugggaugucaca

SEQ ID NO: 649883 - RNA, 19 nt, Artificial Sequence
  Description of Artificial Sequence: Synthetic oligonucleotide
  Antisense strand to SEQ ID NO: 649882
ugugacaucccagacuucu

SEQ ID NO: 649884 - RNA, 19 nt, Artificial Sequence
  Description of Artificial Sequence: Synthetic oligonucleotide
  Sense strand starting at position 243 of SEQ ID NO: 585564
ugggaugucacaugcaaua

SEQ ID NO: 649885 - RNA, 19 nt, Artificial Sequence
  Description of Artificial Sequence: Synthetic oligonucleotide
  Antisense strand to SEQ ID NO: 649884
uauugcaugugacauccca

SEQ ID NO: 649886 - RNA, 19 nt, Artificial Sequence
  Description of Artificial Sequence: Synthetic oligonucleotide
  Sense strand starting at position 262 of SEQ ID NO: 585564
ccauauuuggccgguagau

SEQ ID NO: 649887 - RNA, 19 nt, Artificial Sequence
  Description of Artificial Sequence: Synthetic oligonucleotide
  Antisense strand to SEQ ID NO: 649886
aucuaccggccaaauaugg

SEQ ID NO: 649888 - RNA, 19 nt, Artificial Sequence
  Description of Artificial Sequence: Synthetic oligonucleotide
  Sense strand starting at position 352 of SEQ ID NO: 585564
ugcgauuugugggcauugu

SEQ ID NO: 649889 - RNA, 19 nt, Artificial Sequence
  Description of Artificial Sequence: Synthetic oligonucleotide
  Antisense strand to SEQ ID NO: 649888
acaaugcccacaaaucgca

SEQ ID NO: 649890 - RNA, 19 nt, Artificial Sequence
  Description of Artificial Sequence: Synthetic oligonucleotide
  Sense strand starting at position 353 of SEQ ID NO: 585564
gcgauuugugggcauugua

SEQ ID NO: 649891 - RNA, 19 nt, Artificial Sequence
  Description of Artificial Sequence: Synthetic oligonucleotide
  Antisense strand to SEQ ID NO: 649890
uacaaugcccacaaaucgc

SEQ ID NO: 649892 - RNA, 19 nt, Artificial Sequence
  Description of Artificial Sequence: Synthetic oligonucleotide
  Sense strand starting at position 396 of SEQ ID NO: 585564
cuaaguuuccuuuguaagg

SEQ ID NO: 649893 - RNA, 19 nt, Artificial Sequence
  Description of Artificial Sequence: Synthetic oligonucleotide
  Antisense strand to SEQ ID NO: 649892
ccuuacaaaggaaacuuag

SEQ ID NO: 649894 - RNA, 19 nt, Artificial Sequence
  Description of Artificial Sequence: Synthetic oligonucleotide
  Sense strand starting at position 420 of SEQ ID NO: 585564
gccugaaauacugggauau

SEQ ID NO: 649895 - RNA, 19 nt, Artificial Sequence
  Description of Artificial Sequence: Synthetic oligonucleotide
  Antisense strand to SEQ ID NO: 649894
auaucccaguauuucaggc

SEQ ID NO: 649896 - RNA, 19 nt, Artificial Sequence
  Description of Artificial Sequence: Synthetic oligonucleotide
  Sense strand starting at position 422 of SEQ ID NO: 585564
cugaaauacugggauauuu

SEQ ID NO: 649897 - RNA, 19 nt, Artificial Sequence
  Description of Artificial Sequence: Synthetic oligonucleotide
  Antisense strand to SEQ ID NO: 649896
aaauaucccaguauuucag

SEQ ID NO: 649898 - RNA, 19 nt, Artificial Sequence
  Description of Artificial Sequence: Synthetic oligonucleotide
  Sense strand starting at position 466 of SEQ ID NO: 585564
guauuugagaguugccuga

SEQ ID NO: 649899 - RNA, 19 nt, Artificial Sequence
  Description of Artificial Sequence: Synthetic oligonucleotide
  Antisense strand to SEQ ID NO: 649898
ucaggcaacucucaaauac

SEQ ID NO: 649900 - RNA, 19 nt, Artificial Sequence
  Description of Artificial Sequence: Synthetic oligonucleotide
  Sense strand starting at position 470 of SEQ ID NO: 585564
uugagaguugccugacuga

SEQ ID NO: 649901 - RNA, 19 nt, Artificial Sequence
  Description of Artificial Sequence: Synthetic oligonucleotide
  Antisense strand to SEQ ID NO: 649900
ucagucaggcaacucucaa

SEQ ID NO: 649902 - RNA, 19 nt, Artificial Sequence
  Description of Artificial Sequence: Synthetic oligonucleotide
  Sense strand starting at position 921 of SEQ ID NO: 585564
caauguaaugggugugaag

SEQ ID NO: 649903 - RNA, 19 nt, Artificial Sequence
  Description of Artificial Sequence: Synthetic oligonucleotide
  Antisense strand to SEQ ID NO: 649902
cuucacacccauuacauug

SEQ ID NO: 649904 - RNA, 19 nt, Artificial Sequence
  Description of Artificial Sequence: Synthetic oligonucleotide
  Sense strand starting at position 923 of SEQ ID NO: 585564
auguaaugggugugaagaa

SEQ ID NO: 649905 - RNA, 19 nt, Artificial Sequence
  Description of Artificial Sequence: Synthetic oligonucleotide
  Antisense strand to SEQ ID NO: 649904
uucuucacacccauuacau

SEQ ID NO: 649906 - RNA, 19 nt, Artificial Sequence
  Description of Artificial Sequence: Synthetic oligonucleotide
  Sense strand starting at position 2145 of SEQ ID NO: 585564
uguucuuccuggucaaaca

SEQ ID NO: 649907 - RNA, 19 nt, Artificial Sequence
  Description of Artificial Sequence: Synthetic oligonucleotide
  Antisense strand to SEQ ID NO: 649906
uguuugaccaggaagaaca

SEQ ID NO: 649908 - RNA, 19 nt, Artificial Sequence
  Description of Artificial Sequence: Synthetic oligonucleotide
  Sense strand starting at position 2146 of SEQ ID NO: 585564
guucuuccuggucaaacau

SEQ ID NO: 649909 - RNA, 19 nt, Artificial Sequence
  Description of Artificial Sequence: Synthetic oligonucleotide
  Antisense strand to SEQ ID NO: 649908
auguuugaccaggaagaac

SEQ ID NO: 649910 - RNA, 19 nt, Artificial Sequence
  Description of Artificial Sequence: Synthetic oligonucleotide
  Sense strand starting at position 2155 of SEQ ID NO: 585564
ggucaaacauugucuagug

SEQ ID NO: 649911 - RNA, 19 nt, Artificial Sequence
  Description of Artificial Sequence: Synthetic oligonucleotide
  Antisense strand to SEQ ID NO: 649910
cacuagacaauguuugacc

SEQ ID NO: 649912 - RNA, 19 nt, Artificial Sequence
  Description of Artificial Sequence: Synthetic oligonucleotide
  Sense strand starting at position 2156 of SEQ ID NO: 585564
gucaaacauugucuaguga

SEQ ID NO: 649913 - RNA, 19 nt, Artificial Sequence
  Description of Artificial Sequence: Synthetic oligonucleotide
  Antisense strand to SEQ ID NO: 649912
ucacuagacaauguuugac

SEQ ID NO: 649914 - RNA, 19 nt, Artificial Sequence
  Description of Artificial Sequence: Synthetic oligonucleotide
  Sense strand starting at position 2204 of SEQ ID NO: 585564
gcagauggauacucacacu

SEQ ID NO: 649915 - RNA, 19 nt, Artificial Sequence
  Description of Artificial Sequence: Synthetic oligonucleotide
  Antisense strand to SEQ ID NO: 649914
agugugaguauccaucugc

SEQ ID NO: 649916 - RNA, 19 nt, Artificial Sequence
  Description of Artificial Sequence: Synthetic oligonucleotide
  Sense strand starting at position 2247 of SEQ ID NO: 585564
ggcaaaggaggcugauuaa

SEQ ID NO: 649917 - RNA, 19 nt, Artificial Sequence
  Description of Artificial Sequence: Synthetic oligonucleotide
  Antisense strand to SEQ ID NO: 649916
uuaaucagccuccuuugcc

SEQ ID NO: 649918 - RNA, 19 nt, Artificial Sequence
  Description of Artificial Sequence: Synthetic oligonucleotide
  Sense strand starting at position 2325 of SEQ ID NO: 585564
ucugaaugcuguucuagag

SEQ ID NO: 649919 - RNA, 19 nt, Artificial Sequence
  Description of Artificial Sequence: Synthetic oligonucleotide
  Antisense strand to SEQ ID NO: 649918
cucuagaacagcauucaga

SEQ ID NO: 649920 - RNA, 19 nt, Artificial Sequence
  Description of Artificial Sequence: Synthetic oligonucleotide
  Sense strand starting at position 2354 of SEQ ID NO: 585564
ucuauuggaugaucucgua

SEQ ID NO: 649921 - RNA, 19 nt, Artificial Sequence
  Description of Artificial Sequence: Synthetic oligonucleotide
  Antisense strand to SEQ ID NO: 649920
uacgagaucauccaauaga

SEQ ID NO: 649922 - RNA, 19 nt, Artificial Sequence
  Description of Artificial Sequence: Synthetic oligonucleotide
  Sense strand starting at position 2366 of SEQ ID NO: 585564
ucucguaagguauauugaa

SEQ ID NO: 649923 - RNA, 19 nt, Artificial Sequence
  Description of Artificial Sequence: Synthetic oligonucleotide
  Antisense strand to SEQ ID NO: 649922
uucaauauaccuuacgaga

SEQ ID NO: 649924 - RNA, 19 nt, Artificial Sequence
  Description of Artificial Sequence: Synthetic oligonucleotide
  Sense strand starting at position 2421 of SEQ ID NO: 585564
auugcucuauugguugaau

SEQ ID NO: 649925 - RNA, 19 nt, Artificial Sequence
  Description of Artificial Sequence: Synthetic oligonucleotide
  Antisense strand to SEQ ID NO: 649924
auucaaccaauagagcaau

SEQ ID NO: 649926 - RNA, 19 nt, Artificial Sequence
  Description of Artificial Sequence: Synthetic oligonucleotide
  Sense strand starting at position 2497 of SEQ ID NO: 585564
gcuuaucagagacaguguu

SEQ ID NO: 649927 - RNA, 19 nt, Artificial Sequence
  Description of Artificial Sequence: Synthetic oligonucleotide
  Antisense strand to SEQ ID NO: 649926
aacacugucucugauaagc

SEQ ID NO: 649928 - RNA, 19 nt, Artificial Sequence
  Description of Artificial Sequence: Synthetic oligonucleotide
  Sense strand starting at position 2634 of SEQ ID NO: 585564
gguggaaauugguccacau

SEQ ID NO: 649929 - RNA, 19 nt, Artificial Sequence
  Description of Artificial Sequence: Synthetic oligonucleotide
  Antisense strand to SEQ ID NO: 649928
auguggaccaauuuccacc

SEQ ID NO: 649930 - RNA, 19 nt, Artificial Sequence
  Description of Artificial Sequence: Synthetic oligonucleotide
  Sense strand starting at position 2638 of SEQ ID NO: 585564
gaaauugguccacaugcuu

SEQ ID NO: 649931 - RNA, 19 nt, Artificial Sequence
  Description of Artificial Sequence: Synthetic oligonucleotide
  Antisense strand to SEQ ID NO: 649930
aagcauguggaccaauuuc

SEQ ID NO: 649932 - RNA, 19 nt, Artificial Sequence
  Description of Artificial Sequence: Synthetic oligonucleotide
  Sense strand starting at position 2663 of SEQ ID NO: 585564
ugccaugaguagcuuacaa

SEQ ID NO: 649933 - RNA, 19 nt, Artificial Sequence
  Description of Artificial Sequence: Synthetic oligonucleotide
  Antisense strand to SEQ ID NO: 649932
uuguaagcuacucauggca

SEQ ID NO: 649934 - RNA, 19 nt, Artificial Sequence
  Description of Artificial Sequence: Synthetic oligonucleotide
  Sense strand starting at position 2665 of SEQ ID NO: 585564
ccaugaguagcuuacaagu

SEQ ID NO: 649935 - RNA, 19 nt, Artificial Sequence
  Description of Artificial Sequence: Synthetic oligonucleotide
  Antisense strand to SEQ ID NO: 649934
acuuguaagcuacucaugg

SEQ ID NO: 649936 - RNA, 19 nt, Artificial Sequence
  Description of Artificial Sequence: Synthetic oligonucleotide
  Sense strand starting at position 2696 of SEQ ID NO: 585564
uggccacaagcauguuaaa

SEQ ID NO: 649937 - RNA, 19 nt, Artificial Sequence
  Description of Artificial Sequence: Synthetic oligonucleotide
  Antisense strand to SEQ ID NO: 649936
uuuaacaugcuuguggcca

SEQ ID NO: 649938 - RNA, 19 nt, Artificial Sequence
  Description of Artificial Sequence: Synthetic oligonucleotide
  Sense strand starting at position 2828 of SEQ ID NO: 585564
accaauguacugggugaau

SEQ ID NO: 649939 - RNA, 19 nt, Artificial Sequence
  Description of Artificial Sequence: Synthetic oligonucleotide
  Antisense strand to SEQ ID NO: 649938
auucacccaguacauuggu

SEQ ID NO: 649940 - RNA, 19 nt, Artificial Sequence
  Description of Artificial Sequence: Synthetic oligonucleotide
  Sense strand starting at position 2830 of SEQ ID NO: 585564
caauguacugggugaauga

SEQ ID NO: 649941 - RNA, 19 nt, Artificial Sequence
  Description of Artificial Sequence: Synthetic oligonucleotide
  Antisense strand to SEQ ID NO: 649940
ucauucacccaguacauug

SEQ ID NO: 649942 - RNA, 19 nt, Artificial Sequence
  Description of Artificial Sequence: Synthetic oligonucleotide
  Sense strand starting at position 2850 of SEQ ID NO: 585564
aguaaagguucuguaggau

SEQ ID NO: 649943 - RNA, 19 nt, Artificial Sequence
  Description of Artificial Sequence: Synthetic oligonucleotide
  Antisense strand to SEQ ID NO: 649942
auccuacagaaccuuuacu

SEQ ID NO: 649944 - RNA, 19 nt, Artificial Sequence
  Description of Artificial Sequence: Synthetic oligonucleotide
  Sense strand starting at position 2856 of SEQ ID NO: 585564
gguucuguaggaugacuga

SEQ ID NO: 649945 - RNA, 19 nt, Artificial Sequence
  Description of Artificial Sequence: Synthetic oligonucleotide
  Antisense strand to SEQ ID NO: 649944
ucagucauccuacagaacc

SEQ ID NO: 649946 - RNA, 19 nt, Artificial Sequence
  Description of Artificial Sequence: Synthetic oligonucleotide
  Sense strand starting at position 3770 of SEQ ID NO: 585564
ugaaguguguaauuuagug

SEQ ID NO: 649947 - RNA, 19 nt, Artificial Sequence
  Description of Artificial Sequence: Synthetic oligonucleotide
  Antisense strand to SEQ ID NO: 649946
cacuaaauuacacacuuca

SEQ ID NO: 649948 - RNA, 19 nt, Artificial Sequence
  Description of Artificial Sequence: Synthetic oligonucleotide
  Sense strand starting at position 3776 of SEQ ID NO: 585564
guguaauuuagugguuuaa

SEQ ID NO: 649949 - RNA, 19 nt, Artificial Sequence
  Description of Artificial Sequence: Synthetic oligonucleotide
  Antisense strand to SEQ ID NO: 649948
uuaaaccacuaaauuacac

SEQ ID NO: 649950 - RNA, 19 nt, Artificial Sequence
  Description of Artificial Sequence: Synthetic oligonucleotide
  Sense strand starting at position 3802 of SEQ ID NO: 585564
ucacaaguugugcaaccaa

SEQ ID NO: 649951 - RNA, 19 nt, Artificial Sequence
  Description of Artificial Sequence: Synthetic oligonucleotide
  Antisense strand to SEQ ID NO: 649950
uugguugcacaacuuguga

SEQ ID NO: 649952 - RNA, 19 nt, Artificial Sequence
  Description of Artificial Sequence: Synthetic oligonucleotide
  Sense strand starting at position 87 of SEQ ID NO: 585565
guaaucagaguuuauuguu

SEQ ID NO: 649953 - RNA, 19 nt, Artificial Sequence
  Description of Artificial Sequence: Synthetic oligonucleotide
  Antisense strand to SEQ ID NO: 649952
aacaauaaacucugauuac

SEQ ID NO: 649954 - RNA, 19 nt, Artificial Sequence
  Description of Artificial Sequence: Synthetic oligonucleotide
  Sense strand starting at position 92 of SEQ ID NO: 585565
cagaguuuauuguuucuga

SEQ ID NO: 649955 - RNA, 19 nt, Artificial Sequence
  Description of Artificial Sequence: Synthetic oligonucleotide
  Antisense strand to SEQ ID NO: 649954
ucagaaacaauaaacucug

SEQ ID NO: 649956 - RNA, 19 nt, Artificial Sequence
  Description of Artificial Sequence: Synthetic oligonucleotide
  Sense strand starting at position 93 of SEQ ID NO: 585565
agaguuuauuguuucugac

SEQ ID NO: 649957 - RNA, 19 nt, Artificial Sequence
  Description of Artificial Sequence: Synthetic oligonucleotide
  Antisense strand to SEQ ID NO: 649956
gucagaaacaauaaacucu

SEQ ID NO: 649958 - RNA, 19 nt, Artificial Sequence
  Description of Artificial Sequence: Synthetic oligonucleotide
  Sense strand starting at position 95 of SEQ ID NO: 585565
aguuuauuguuucugacuu

SEQ ID NO: 649959 - RNA, 19 nt, Artificial Sequence
  Description of Artificial Sequence: Synthetic oligonucleotide
  Antisense strand to SEQ ID NO: 649958
aagucagaaacaauaaacu

SEQ ID NO: 649960 - RNA, 19 nt, Artificial Sequence
  Description of Artificial Sequence: Synthetic oligonucleotide
  Sense strand starting at position 222 of SEQ ID NO: 585565
ucagacagaguauguuaua

SEQ ID NO: 649961 - RNA, 19 nt, Artificial Sequence
  Description of Artificial Sequence: Synthetic oligonucleotide
  Antisense strand to SEQ ID NO: 649960
uauaacauacucugucuga

SEQ ID NO: 649962 - RNA, 19 nt, Artificial Sequence
  Description of Artificial Sequence: Synthetic oligonucleotide
  Sense strand starting at position 223 of SEQ ID NO: 585565
cagacagaguauguuauau

SEQ ID NO: 649963 - RNA, 19 nt, Artificial Sequence
  Description of Artificial Sequence: Synthetic oligonucleotide
  Antisense strand to SEQ ID NO: 649962
auauaacauacucugucug

SEQ ID NO: 649964 - RNA, 19 nt, Artificial Sequence
  Description of Artificial Sequence: Synthetic oligonucleotide
  Sense strand starting at position 225 of SEQ ID NO: 585565
gacagaguauguuauauuu

SEQ ID NO: 649965 - RNA, 19 nt, Artificial Sequence
  Description of Artificial Sequence: Synthetic oligonucleotide
  Antisense strand to SEQ ID NO: 649964
aaauauaacauacucuguc

SEQ ID NO: 649966 - RNA, 19 nt, Artificial Sequence
  Description of Artificial Sequence: Synthetic oligonucleotide
  Sense strand starting at position 605 of SEQ ID NO: 585565
cuguauauaucaucaguuc

SEQ ID NO: 649967 - RNA, 19 nt, Artificial Sequence
  Description of Artificial Sequence: Synthetic oligonucleotide
  Antisense strand to SEQ ID NO: 649966
gaacugaugauauauacag

SEQ ID NO: 649968 - RNA, 19 nt, Artificial Sequence
  Description of Artificial Sequence: Synthetic oligonucleotide
  Sense strand starting at position 2009 of SEQ ID NO: 585565
gagagugugcaccauaaug

SEQ ID NO: 649969 - RNA, 19 nt, Artificial Sequence
  Description of Artificial Sequence: Synthetic oligonucleotide
  Antisense strand to SEQ ID NO: 649968
cauuauggugcacacucuc

SEQ ID NO: 649970 - RNA, 19 nt, Artificial Sequence
  Description of Artificial Sequence: Synthetic oligonucleotide
  Sense strand starting at position 2011 of SEQ ID NO: 585565
gagugugcaccauaauggu

SEQ ID NO: 649971 - RNA, 19 nt, Artificial Sequence
  Description of Artificial Sequence: Synthetic oligonucleotide
  Antisense strand to SEQ ID NO: 649970
accauuauggugcacacuc

SEQ ID NO: 649972 - RNA, 19 nt, Artificial Sequence
  Description of Artificial Sequence: Synthetic oligonucleotide
  Sense strand starting at position 2110 of SEQ ID NO: 585565
guuacugaguucuuuauau

SEQ ID NO: 649973 - RNA, 19 nt, Artificial Sequence
  Description of Artificial Sequence: Synthetic oligonucleotide
  Antisense strand to SEQ ID NO: 649972
auauaaagaacucaguaac

SEQ ID NO: 649974 - RNA, 19 nt, Artificial Sequence
  Description of Artificial Sequence: Synthetic oligonucleotide
  Sense strand starting at position 2333 of SEQ ID NO: 585565
gcaauuagauagucacuuu

SEQ ID NO: 649975 - RNA, 19 nt, Artificial Sequence
  Description of Artificial Sequence: Synthetic oligonucleotide
  Antisense strand to SEQ ID NO: 649974
aaagugacuaucuaauugc

SEQ ID NO: 649976 - RNA, 19 nt, Artificial Sequence
  Description of Artificial Sequence: Synthetic oligonucleotide
  Sense strand starting at position 2417 of SEQ ID NO: 585565
gcaguuuauuucuagacaa

SEQ ID NO: 649977 - RNA, 19 nt, Artificial Sequence
  Description of Artificial Sequence: Synthetic oligonucleotide
  Antisense strand to SEQ ID NO: 649976
uugucuagaaauaaacugc

SEQ ID NO: 649978 - RNA, 19 nt, Artificial Sequence
  Description of Artificial Sequence: Synthetic oligonucleotide
  Sense strand starting at position 2532 of SEQ ID NO: 585565
aauagagugaucggugaua

SEQ ID NO: 649979 - RNA, 19 nt, Artificial Sequence
  Description of Artificial Sequence: Synthetic oligonucleotide
  Antisense strand to SEQ ID NO: 649978
uaucaccgaucacucuauu

SEQ ID NO: 649980 - RNA, 19 nt, Artificial Sequence
  Description of Artificial Sequence: Synthetic oligonucleotide
  Sense strand starting at position 2534 of SEQ ID NO: 585565
uagagugaucggugauaga

SEQ ID NO: 649981 - RNA, 19 nt, Artificial Sequence
  Description of Artificial Sequence: Synthetic oligonucleotide
  Antisense strand to SEQ ID NO: 649980
ucuaucaccgaucacucua

SEQ ID NO: 649982 - RNA, 19 nt, Artificial Sequence
  Description of Artificial Sequence: Synthetic oligonucleotide
  Sense strand starting at position 2545 of SEQ ID NO: 585565
gugauagaaugcuuccaaa

SEQ ID NO: 649983 - RNA, 19 nt, Artificial Sequence
  Description of Artificial Sequence: Synthetic oligonucleotide
  Antisense strand to SEQ ID NO: 649982
uuuggaagcauucuaucac

SEQ ID NO: 649984 - RNA, 19 nt, Artificial Sequence
  Description of Artificial Sequence: Synthetic oligonucleotide
  Sense strand starting at position 2561 of SEQ ID NO: 585565
aaagguaaaugagacuaua

SEQ ID NO: 649985 - RNA, 19 nt, Artificial Sequence
  Description of Artificial Sequence: Synthetic oligonucleotide
  Antisense strand to SEQ ID NO: 649984
uauagucucauuuaccuuu

SEQ ID NO: 649986 - RNA, 19 nt, Artificial Sequence
  Description of Artificial Sequence: Synthetic oligonucleotide
  Sense strand starting at position 2644 of SEQ ID NO: 585565
aguguuuggaugcacaaca

SEQ ID NO: 649987 - RNA, 19 nt, Artificial Sequence
  Description of Artificial Sequence: Synthetic oligonucleotide
  Antisense strand to SEQ ID NO: 649986
uguugugcauccaaacacu

SEQ ID NO: 649988 - RNA, 19 nt, Artificial Sequence
  Description of Artificial Sequence: Synthetic oligonucleotide
  Sense strand starting at position 2664 of SEQ ID NO: 585565
ugaagagaggucugaaugu

SEQ ID NO: 649989 - RNA, 19 nt, Artificial Sequence
  Description of Artificial Sequence: Synthetic oligonucleotide
  Antisense strand to SEQ ID NO: 649988
acauucagaccucucuuca

SEQ ID NO: 649990 - RNA, 19 nt, Artificial Sequence
  Description of Artificial Sequence: Synthetic oligonucleotide
  Sense strand starting at position 2680 of SEQ ID NO: 585565
ugugguaugcgaaguugaa

SEQ ID NO: 649991 - RNA, 19 nt, Artificial Sequence
  Description of Artificial Sequence: Synthetic oligonucleotide
  Antisense strand to SEQ ID NO: 649990
uucaacuucgcauaccaca

SEQ ID NO: 649992 - RNA, 19 nt, Artificial Sequence
  Description of Artificial Sequence: Synthetic oligonucleotide
  Sense strand starting at position 2704 of SEQ ID NO: 585565
guauaacaaguuuguuaga

SEQ ID NO: 649993 - RNA, 19 nt, Artificial Sequence
  Description of Artificial Sequence: Synthetic oligonucleotide
  Antisense strand to SEQ ID NO: 649992
ucuaacaaacuuguuauac

SEQ ID NO: 649994 - RNA, 19 nt, Artificial Sequence
  Description of Artificial Sequence: Synthetic oligonucleotide
  Sense strand starting at position 2706 of SEQ ID NO: 585565
auaacaaguuuguuagaca

SEQ ID NO: 649995 - RNA, 19 nt, Artificial Sequence
  Description of Artificial Sequence: Synthetic oligonucleotide
  Antisense strand to SEQ ID NO: 649994
ugucuaacaaacuuguuau

SEQ ID NO: 649996 - RNA, 19 nt, Artificial Sequence
  Description of Artificial Sequence: Synthetic oligonucleotide
  Sense strand starting at position 2883 of SEQ ID NO: 585565
guagaaagauacgugaaca

SEQ ID NO: 649997 - RNA, 19 nt, Artificial Sequence
  Description of Artificial Sequence: Synthetic oligonucleotide
  Antisense strand to SEQ ID NO: 649996
uguucacguaucuuucuac

SEQ ID NO: 649998 - RNA, 19 nt, Artificial Sequence
  Description of Artificial Sequence: Synthetic oligonucleotide
  Sense strand starting at position 2888 of SEQ ID NO: 585565
aagauacgugaacauugua

SEQ ID NO: 649999 - RNA, 19 nt, Artificial Sequence
  Description of Artificial Sequence: Synthetic oligonucleotide
  Antisense strand to SEQ ID NO: 649998
uacaauguucacguaucuu

SEQ ID NO: 650000 - RNA, 19 nt, Artificial Sequence
  Description of Artificial Sequence: Synthetic oligonucleotide
  Sense strand starting at position 2891 of SEQ ID NO: 585565
auacgugaacauuguauaa

SEQ ID NO: 650001 - RNA, 19 nt, Artificial Sequence
  Description of Artificial Sequence: Synthetic oligonucleotide
  Antisense strand to SEQ ID NO: 650000
uuauacaauguucacguau

SEQ ID NO: 650002 - RNA, 19 nt, Artificial Sequence
  Description of Artificial Sequence: Synthetic oligonucleotide
  Sense strand starting at position 2956 of SEQ ID NO: 585565
ucaaauaugcuuugauagc

SEQ ID NO: 650003 - RNA, 19 nt, Artificial Sequence
  Description of Artificial Sequence: Synthetic oligonucleotide
  Antisense strand to SEQ ID NO: 650002
gcuaucaaagcauauuuga

SEQ ID NO: 650004 - RNA, 19 nt, Artificial Sequence
  Description of Artificial Sequence: Synthetic oligonucleotide
  Sense strand starting at position 2962 of SEQ ID NO: 585565
augcuuugauagcuugauu

SEQ ID NO: 650005 - RNA, 19 nt, Artificial Sequence
  Description of Artificial Sequence: Synthetic oligonucleotide
  Antisense strand to SEQ ID NO: 650004
aaucaagcuaucaaagcau

SEQ ID NO: 650006 - RNA, 19 nt, Artificial Sequence
  Description of Artificial Sequence: Synthetic oligonucleotide
  Sense strand starting at position 3009 of SEQ ID NO: 585565
accaaucuugcaugagaaa

SEQ ID NO: 650007 - RNA, 19 nt, Artificial Sequence
  Description of Artificial Sequence: Synthetic oligonucleotide
  Antisense strand to SEQ ID NO: 650006
uuucucaugcaagauuggu

SEQ ID NO: 650008 - RNA, 19 nt, Artificial Sequence
  Description of Artificial Sequence: Synthetic oligonucleotide
  Sense strand starting at position 3529 of SEQ ID NO: 585565
uuguaaucuugacucuuga

SEQ ID NO: 650009 - RNA, 19 nt, Artificial Sequence
  Description of Artificial Sequence: Synthetic oligonucleotide
  Antisense strand to SEQ ID NO: 650008
ucaagagucaagauuacaa

SEQ ID NO: 650010 - RNA, 19 nt, Artificial Sequence
  Description of Artificial Sequence: Synthetic oligonucleotide
  Sense strand starting at position 3564 of SEQ ID NO: 585565
ugccuaacugguugaguua

SEQ ID NO: 650011 - RNA, 19 nt, Artificial Sequence
  Description of Artificial Sequence: Synthetic oligonucleotide
  Antisense strand to SEQ ID NO: 650010
uaacucaaccaguuaggca

SEQ ID NO: 650012 - RNA, 19 nt, Artificial Sequence
  Description of Artificial Sequence: Synthetic oligonucleotide
  Sense strand starting at position 3611 of SEQ ID NO: 585565
gggccaaaucugugcaaau

SEQ ID NO: 650013 - RNA, 19 nt, Artificial Sequence
  Description of Artificial Sequence: Synthetic oligonucleotide
  Antisense strand to SEQ ID NO: 650012
auuugcacagauuuggccc

SEQ ID NO: 650014 - RNA, 19 nt, Artificial Sequence
  Description of Artificial Sequence: Synthetic oligonucleotide
  Sense strand starting at position 3612 of SEQ ID NO: 585565
ggccaaaucugugcaaaug

SEQ ID NO: 650015 - RNA, 19 nt, Artificial Sequence
  Description of Artificial Sequence: Synthetic oligonucleotide
  Antisense strand to SEQ ID NO: 650014
cauuugcacagauuuggcc

SEQ ID NO: 650016 - RNA, 19 nt, Artificial Sequence
  Description of Artificial Sequence: Synthetic oligonucleotide
  Sense strand starting at position 3662 of SEQ ID NO: 585565
uuccauauuguugguaaug

SEQ ID NO: 650017 - RNA, 19 nt, Artificial Sequence
  Description of Artificial Sequence: Synthetic oligonucleotide
  Antisense strand to SEQ ID NO: 650016
cauuaccaacaauauggaa

SEQ ID NO: 650018 - RNA, 19 nt, Artificial Sequence
  Description of Artificial Sequence: Synthetic oligonucleotide
  Sense strand starting at position 3672 of SEQ ID NO: 585565
uugguaauggaaugagcau

SEQ ID NO: 650019 - RNA, 19 nt, Artificial Sequence
  Description of Artificial Sequence: Synthetic oligonucleotide
  Antisense strand to SEQ ID NO: 650018
augcucauuccauuaccaa

SEQ ID NO: 650020 - RNA, 19 nt, Artificial Sequence
  Description of Artificial Sequence: Synthetic oligonucleotide
  Sense strand starting at position 3760 of SEQ ID NO: 585565
gccauaagauacuugaacu

SEQ ID NO: 650021 - RNA, 19 nt, Artificial Sequence
  Description of Artificial Sequence: Synthetic oligonucleotide
  Antisense strand to SEQ ID NO: 650020
aguucaaguaucuuauggc

SEQ ID NO: 650022 - RNA, 19 nt, Artificial Sequence
  Description of Artificial Sequence: Synthetic oligonucleotide
  Sense strand starting at position 3833 of SEQ ID NO: 585565
cugccugaguuccuuauua

SEQ ID NO: 650023 - RNA, 19 nt, Artificial Sequence
  Description of Artificial Sequence: Synthetic oligonucleotide
  Antisense strand to SEQ ID NO: 650022
uaauaaggaacucaggcag

SEQ ID NO: 650024 - RNA, 19 nt, Artificial Sequence
  Description of Artificial Sequence: Synthetic oligonucleotide
  Sense strand starting at position 3835 of SEQ ID NO: 585565
gccugaguuccuuauuaca

SEQ ID NO: 650025 - RNA, 19 nt, Artificial Sequence
  Description of Artificial Sequence: Synthetic oligonucleotide
  Antisense strand to SEQ ID NO: 650024
uguaauaaggaacucaggc

SEQ ID NO: 650026 - RNA, 19 nt, Artificial Sequence
  Description of Artificial Sequence: Synthetic oligonucleotide
  Sense strand starting at position 3837 of SEQ ID NO: 585565
cugaguuccuuauuacagu

SEQ ID NO: 650027 - RNA, 19 nt, Artificial Sequence
  Description of Artificial Sequence: Synthetic oligonucleotide
  Antisense strand to SEQ ID NO: 650026
acuguaauaaggaacucag

SEQ ID NO: 650028 - RNA, 19 nt, Artificial Sequence
  Description of Artificial Sequence: Synthetic oligonucleotide
  Sense strand starting at position 3904 of SEQ ID NO: 585565
agcauuccuccggaguuga

SEQ ID NO: 650029 - RNA, 19 nt, Artificial Sequence
  Description of Artificial Sequence: Synthetic oligonucleotide
  Antisense strand to SEQ ID NO: 650028
ucaacuccggaggaaugcu

SEQ ID NO: 650030 - RNA, 19 nt, Artificial Sequence
  Description of Artificial Sequence: Synthetic oligonucleotide
  Sense strand starting at position 3908 of SEQ ID NO: 585565
uuccuccggaguugauaaa

SEQ ID NO: 650031 - RNA, 19 nt, Artificial Sequence
  Description of Artificial Sequence: Synthetic oligonucleotide
  Antisense strand to SEQ ID NO: 650030
uuuaucaacuccggaggaa

SEQ ID NO: 650032 - RNA, 19 nt, Artificial Sequence
  Description of Artificial Sequence: Synthetic oligonucleotide
  Sense strand starting at position 92 of SEQ ID NO: 585566
auaugacaguuucuaucau

SEQ ID NO: 650033 - RNA, 19 nt, Artificial Sequence
  Description of Artificial Sequence: Synthetic oligonucleotide
  Antisense strand to SEQ ID NO: 650032
augauagaaacugucauau

SEQ ID NO: 650034 - RNA, 19 nt, Artificial Sequence
  Description of Artificial Sequence: Synthetic oligonucleotide
  Sense strand starting at position 202 of SEQ ID NO: 585566
uccuuaguuccuuagguaa

SEQ ID NO: 650035 - RNA, 19 nt, Artificial Sequence
  Description of Artificial Sequence: Synthetic oligonucleotide
  Antisense strand to SEQ ID NO: 650034
uuaccuaaggaacuaagga

SEQ ID NO: 650036 - RNA, 19 nt, Artificial Sequence
  Description of Artificial Sequence: Synthetic oligonucleotide
  Sense strand starting at position 490 of SEQ ID NO: 585566
aagaauaagcauuguugga

SEQ ID NO: 650037 - RNA, 19 nt, Artificial Sequence
  Description of Artificial Sequence: Synthetic oligonucleotide
  Antisense strand to SEQ ID NO: 650036
uccaacaaugcuuauucuu

SEQ ID NO: 650038 - RNA, 19 nt, Artificial Sequence
  Description of Artificial Sequence: Synthetic oligonucleotide
  Sense strand starting at position 492 of SEQ ID NO: 585566
gaauaagcauuguuggaga

SEQ ID NO: 650039 - RNA, 19 nt, Artificial Sequence
  Description of Artificial Sequence: Synthetic oligonucleotide
  Antisense strand to SEQ ID NO: 650038
ucuccaacaaugcuuauuc

SEQ ID NO: 650040 - RNA, 19 nt, Artificial Sequence
  Description of Artificial Sequence: Synthetic oligonucleotide
  Sense strand starting at position 494 of SEQ ID NO: 585566
auaagcauuguuggagaaa

SEQ ID NO: 650041 - RNA, 19 nt, Artificial Sequence
  Description of Artificial Sequence: Synthetic oligonucleotide
  Antisense strand to SEQ ID NO: 650040
uuucuccaacaaugcuuau

SEQ ID NO: 650042 - RNA, 19 nt, Artificial Sequence
  Description of Artificial Sequence: Synthetic oligonucleotide
  Sense strand starting at position 527 of SEQ ID NO: 585566
uuugcuguguauuuaacua

SEQ ID NO: 650043 - RNA, 19 nt, Artificial Sequence
  Description of Artificial Sequence: Synthetic oligonucleotide
  Antisense strand to SEQ ID NO: 650042
uaguuaaauacacagcaaa

SEQ ID NO: 650044 - RNA, 19 nt, Artificial Sequence
  Description of Artificial Sequence: Synthetic oligonucleotide
  Sense strand starting at position 705 of SEQ ID NO: 585566
aaugucugucuuggauaca

SEQ ID NO: 650045 - RNA, 19 nt, Artificial Sequence
  Description of Artificial Sequence: Synthetic oligonucleotide
  Antisense strand to SEQ ID NO: 650044
uguauccaagacagacauu

SEQ ID NO: 650046 - RNA, 19 nt, Artificial Sequence
  Description of Artificial Sequence: Synthetic oligonucleotide
  Sense strand starting at position 708 of SEQ ID NO: 585566
gucugucuuggauacauua

SEQ ID NO: 650047 - RNA, 19 nt, Artificial Sequence
  Description of Artificial Sequence: Synthetic oligonucleotide
  Antisense strand to SEQ ID NO: 650046
uaauguauccaagacagac

SEQ ID NO: 650048 - RNA, 19 nt, Artificial Sequence
  Description of Artificial Sequence: Synthetic oligonucleotide
  Sense strand starting at position 716 of SEQ ID NO: 585566
uggauacauuagguuugua

SEQ ID NO: 650049 - RNA, 19 nt, Artificial Sequence
  Description of Artificial Sequence: Synthetic oligonucleotide
  Antisense strand to SEQ ID NO: 650048
uacaaaccuaauguaucca

SEQ ID NO: 650050 - RNA, 19 nt, Artificial Sequence
  Description of Artificial Sequence: Synthetic oligonucleotide
  Sense strand starting at position 719 of SEQ ID NO: 585566
auacauuagguuuguacca

SEQ ID NO: 650051 - RNA, 19 nt, Artificial Sequence
  Description of Artificial Sequence: Synthetic oligonucleotide
  Antisense strand to SEQ ID NO: 650050
ugguacaaaccuaauguau

SEQ ID NO: 650052 - RNA, 19 nt, Artificial Sequence
  Description of Artificial Sequence: Synthetic oligonucleotide
  Sense strand starting at position 789 of SEQ ID NO: 585566
uccacaagugaaugguauu

SEQ ID NO: 650053 - RNA, 19 nt, Artificial Sequence
  Description of Artificial Sequence: Synthetic oligonucleotide
  Antisense strand to SEQ ID NO: 650052
aauaccauucacuugugga

SEQ ID NO: 650054 - RNA, 19 nt, Artificial Sequence
  Description of Artificial Sequence: Synthetic oligonucleotide
  Sense strand starting at position 2550 of SEQ ID NO: 585566
agagaaauagcuugccuau

SEQ ID NO: 650055 - RNA, 19 nt, Artificial Sequence
  Description of Artificial Sequence: Synthetic oligonucleotide
  Antisense strand to SEQ ID NO: 650054
auaggcaagcuauuucucu

SEQ ID NO: 650056 - RNA, 19 nt, Artificial Sequence
  Description of Artificial Sequence: Synthetic oligonucleotide
  Sense strand starting at position 2552 of SEQ ID NO: 585566
agaaauagcuugccuauac

SEQ ID NO: 650057 - RNA, 19 nt, Artificial Sequence
  Description of Artificial Sequence: Synthetic oligonucleotide
  Antisense strand to SEQ ID NO: 650056
guauaggcaagcuauuucu

SEQ ID NO: 650058 - RNA, 19 nt, Artificial Sequence
  Description of Artificial Sequence: Synthetic oligonucleotide
  Sense strand starting at position 2647 of SEQ ID NO: 585566
ugugauuucucaguguaca

SEQ ID NO: 650059 - RNA, 19 nt, Artificial Sequence
  Description of Artificial Sequence: Synthetic oligonucleotide
  Antisense strand to SEQ ID NO: 650058
uguacacugagaaaucaca

SEQ ID NO: 650060 - RNA, 19 nt, Artificial Sequence
  Description of Artificial Sequence: Synthetic oligonucleotide
  Sense strand starting at position 2716 of SEQ ID NO: 585566
uaagaaaucucagugugga

SEQ ID NO: 650061 - RNA, 19 nt, Artificial Sequence
  Description of Artificial Sequence: Synthetic oligonucleotide
  Antisense strand to SEQ ID NO: 650060
uccacacugagauuucuua

SEQ ID NO: 650062 - RNA, 19 nt, Artificial Sequence
  Description of Artificial Sequence: Synthetic oligonucleotide
  Sense strand starting at position 2717 of SEQ ID NO: 585566
aagaaaucucaguguggac

SEQ ID NO: 650063 - RNA, 19 nt, Artificial Sequence
  Description of Artificial Sequence: Synthetic oligonucleotide
  Antisense strand to SEQ ID NO: 650062
guccacacugagauuucuu

SEQ ID NO: 650064 - RNA, 19 nt, Artificial Sequence
  Description of Artificial Sequence: Synthetic oligonucleotide
  Sense strand starting at position 2719 of SEQ ID NO: 585566
gaaaucucaguguggacua

SEQ ID NO: 650065 - RNA, 19 nt, Artificial Sequence
  Description of Artificial Sequence: Synthetic oligonucleotide
  Antisense strand to SEQ ID NO: 650064
uaguccacacugagauuuc

SEQ ID NO: 650066 - RNA, 19 nt, Artificial Sequence
  Description of Artificial Sequence: Synthetic oligonucleotide
  Sense strand starting at position 2724 of SEQ ID NO: 585566
cucaguguggacuauggau

SEQ ID NO: 650067 - RNA, 19 nt, Artificial Sequence
  Description of Artificial Sequence: Synthetic oligonucleotide
  Antisense strand to SEQ ID NO: 650066
auccauaguccacacugag

SEQ ID NO: 650068 - RNA, 19 nt, Artificial Sequence
  Description of Artificial Sequence: Synthetic oligonucleotide
  Sense strand starting at position 2726 of SEQ ID NO: 585566
caguguggacuauggauua

SEQ ID NO: 650069 - RNA, 19 nt, Artificial Sequence
  Description of Artificial Sequence: Synthetic oligonucleotide
  Antisense strand to SEQ ID NO: 650068
uaauccauaguccacacug

SEQ ID NO: 650070 - RNA, 19 nt, Artificial Sequence
  Description of Artificial Sequence: Synthetic oligonucleotide
  Sense strand starting at position 2791 of SEQ ID NO: 585566
gcuggacuuauguaaagua

SEQ ID NO: 650071 - RNA, 19 nt, Artificial Sequence
  Description of Artificial Sequence: Synthetic oligonucleotide
  Antisense strand to SEQ ID NO: 650070
uacuuuacauaaguccagc

SEQ ID NO: 650072 - RNA, 19 nt, Artificial Sequence
  Description of Artificial Sequence: Synthetic oligonucleotide
  Sense strand starting at position 2841 of SEQ ID NO: 585566
uaaaguauuuggcauaaag

SEQ ID NO: 650073 - RNA, 19 nt, Artificial Sequence
  Description of Artificial Sequence: Synthetic oligonucleotide
  Antisense strand to SEQ ID NO: 650072
cuuuaugccaaauacuuua

SEQ ID NO: 650074 - RNA, 19 nt, Artificial Sequence
  Description of Artificial Sequence: Synthetic oligonucleotide
  Sense strand starting at position 3145 of SEQ ID NO: 585566
agauguuugccuuauuaua

SEQ ID NO: 650075 - RNA, 19 nt, Artificial Sequence
  Description of Artificial Sequence: Synthetic oligonucleotide
  Antisense strand to SEQ ID NO: 650074
uauaauaaggcaaacaucu

SEQ ID NO: 650076 - RNA, 19 nt, Artificial Sequence
  Description of Artificial Sequence: Synthetic oligonucleotide
  Sense strand starting at position 3196 of SEQ ID NO: 585566
gggugacaucuagguaaau

SEQ ID NO: 650077 - RNA, 19 nt, Artificial Sequence
  Description of Artificial Sequence: Synthetic oligonucleotide
  Antisense strand to SEQ ID NO: 650076
auuuaccuagaugucaccc

SEQ ID NO: 650078 - RNA, 19 nt, Artificial Sequence
  Description of Artificial Sequence: Synthetic oligonucleotide
  Sense strand starting at position 3197 of SEQ ID NO: 585566
ggugacaucuagguaaaug

SEQ ID NO: 650079 - RNA, 19 nt, Artificial Sequence
  Description of Artificial Sequence: Synthetic oligonucleotide
  Antisense strand to SEQ ID NO: 650078
cauuuaccuagaugucacc

SEQ ID NO: 650080 - RNA, 19 nt, Artificial Sequence
  Description of Artificial Sequence: Synthetic oligonucleotide
  Sense strand starting at position 3225 of SEQ ID NO: 585566
ggaaauuccuaaccuagcu

SEQ ID NO: 650081 - RNA, 19 nt, Artificial Sequence
  Description of Artificial Sequence: Synthetic oligonucleotide
  Antisense strand to SEQ ID NO: 650080
agcuagguuaggaauuucc

SEQ ID NO: 650082 - RNA, 19 nt, Artificial Sequence
  Description of Artificial Sequence: Synthetic oligonucleotide
  Sense strand starting at position 3332 of SEQ ID NO: 585566
ucuuaaaugugauugugga

SEQ ID NO: 650083 - RNA, 19 nt, Artificial Sequence
  Description of Artificial Sequence: Synthetic oligonucleotide
  Antisense strand to SEQ ID NO: 650082
uccacaaucacauuuaaga

SEQ ID NO: 650084 - RNA, 19 nt, Artificial Sequence
  Description of Artificial Sequence: Synthetic oligonucleotide
  Sense strand starting at position 3333 of SEQ ID NO: 585566
cuuaaaugugauuguggaa

SEQ ID NO: 650085 - RNA, 19 nt, Artificial Sequence
  Description of Artificial Sequence: Synthetic oligonucleotide
  Antisense strand to SEQ ID NO: 650084
uuccacaaucacauuuaag

SEQ ID NO: 650086 - RNA, 19 nt, Artificial Sequence
  Description of Artificial Sequence: Synthetic oligonucleotide
  Sense strand starting at position 3468 of SEQ ID NO: 585566
auaagaaucuuaucuugug

SEQ ID NO: 650087 - RNA, 19 nt, Artificial Sequence
  Description of Artificial Sequence: Synthetic oligonucleotide
  Antisense strand to SEQ ID NO: 650086
cacaagauaagauucuuau

SEQ ID NO: 650088 - RNA, 19 nt, Artificial Sequence
  Description of Artificial Sequence: Synthetic oligonucleotide
  Sense strand starting at position 3476 of SEQ ID NO: 585566
cuuaucuugugauuuguuu

SEQ ID NO: 650089 - RNA, 19 nt, Artificial Sequence
  Description of Artificial Sequence: Synthetic oligonucleotide
  Antisense strand to SEQ ID NO: 650088
aaacaaaucacaagauaag

SEQ ID NO: 650090 - RNA, 19 nt, Artificial Sequence
  Description of Artificial Sequence: Synthetic oligonucleotide
  Sense strand starting at position 3480 of SEQ ID NO: 585566
ucuugugauuuguuuacuu

SEQ ID NO: 650091 - RNA, 19 nt, Artificial Sequence
  Description of Artificial Sequence: Synthetic oligonucleotide
  Antisense strand to SEQ ID NO: 650090
aaguaaacaaaucacaaga

SEQ ID NO: 650092 - RNA, 19 nt, Artificial Sequence
  Description of Artificial Sequence: Synthetic oligonucleotide
  Sense strand starting at position 3617 of SEQ ID NO: 585566
gugauagaaugcuuucuaa

SEQ ID NO: 650093 - RNA, 19 nt, Artificial Sequence
  Description of Artificial Sequence: Synthetic oligonucleotide
  Antisense strand to SEQ ID NO: 650092
uuagaaagcauucuaucac

SEQ ID NO: 650094 - RNA, 19 nt, Artificial Sequence
  Description of Artificial Sequence: Synthetic oligonucleotide
  Sense strand starting at position 3628 of SEQ ID NO: 585566
cuuucuaaaggauguguga

SEQ ID NO: 650095 - RNA, 19 nt, Artificial Sequence
  Description of Artificial Sequence: Synthetic oligonucleotide
  Antisense strand to SEQ ID NO: 650094
ucacacauccuuuagaaag

SEQ ID NO: 650096 - RNA, 19 nt, Artificial Sequence
  Description of Artificial Sequence: Synthetic oligonucleotide
  Sense strand starting at position 3630 of SEQ ID NO: 585566
uucuaaaggaugugugacu

SEQ ID NO: 650097 - RNA, 19 nt, Artificial Sequence
  Description of Artificial Sequence: Synthetic oligonucleotide
  Antisense strand to SEQ ID NO: 650096
agucacacauccuuuagaa

SEQ ID NO: 650098 - RNA, 19 nt, Artificial Sequence
  Description of Artificial Sequence: Synthetic oligonucleotide
  Sense strand starting at position 3631 of SEQ ID NO: 585566
ucuaaaggaugugugacua

SEQ ID NO: 650099 - RNA, 19 nt, Artificial Sequence
  Description of Artificial Sequence: Synthetic oligonucleotide
  Antisense strand to SEQ ID NO: 650098
uagucacacauccuuuaga

SEQ ID NO: 650100 - RNA, 19 nt, Artificial Sequence
  Description of Artificial Sequence: Synthetic oligonucleotide
  Sense strand starting at position 3753 of SEQ ID NO: 585566
aggagaaccugaguguagu

SEQ ID NO: 650101 - RNA, 19 nt, Artificial Sequence
  Description of Artificial Sequence: Synthetic oligonucleotide
  Antisense strand to SEQ ID NO: 650100
acuacacucagguucuccu

SEQ ID NO: 650102 - RNA, 19 nt, Artificial Sequence
  Description of Artificial Sequence: Synthetic oligonucleotide
  Sense strand starting at position 3754 of SEQ ID NO: 585566
ggagaaccugaguguaguu

SEQ ID NO: 650103 - RNA, 19 nt, Artificial Sequence
  Description of Artificial Sequence: Synthetic oligonucleotide
  Antisense strand to SEQ ID NO: 650102
aacuacacucagguucucc

SEQ ID NO: 650104 - RNA, 19 nt, Artificial Sequence
  Description of Artificial Sequence: Synthetic oligonucleotide
  Sense strand starting at position 3827 of SEQ ID NO: 585566
ugaagaagguuucuacaug

SEQ ID NO: 650105 - RNA, 19 nt, Artificial Sequence
  Description of Artificial Sequence: Synthetic oligonucleotide
  Antisense strand to SEQ ID NO: 650104
cauguagaaaccuucuuca

SEQ ID NO: 650106 - RNA, 19 nt, Artificial Sequence
  Description of Artificial Sequence: Synthetic oligonucleotide
  Sense strand starting at position 3833 of SEQ ID NO: 585566
agguuucuacaugauguau

SEQ ID NO: 650107 - RNA, 19 nt, Artificial Sequence
  Description of Artificial Sequence: Synthetic oligonucleotide
  Antisense strand to SEQ ID NO: 650106
auacaucauguagaaaccu

SEQ ID NO: 650108 - RNA, 19 nt, Artificial Sequence
  Description of Artificial Sequence: Synthetic oligonucleotide
  Sense strand starting at position 3891 of SEQ ID NO: 585566
gagcaugagcuauaauuag

SEQ ID NO: 650109 - RNA, 19 nt, Artificial Sequence
  Description of Artificial Sequence: Synthetic oligonucleotide
  Antisense strand to SEQ ID NO: 650108
cuaauuauagcucaugcuc

SEQ ID NO: 650110 - RNA, 19 nt, Artificial Sequence
  Description of Artificial Sequence: Synthetic oligonucleotide
  Sense strand starting at position 3980 of SEQ ID NO: 585566
auacauugugcccagugaa

SEQ ID NO: 650111 - RNA, 19 nt, Artificial Sequence
  Description of Artificial Sequence: Synthetic oligonucleotide
  Antisense strand to SEQ ID NO: 650110
uucacugggcacaauguau

SEQ ID NO: 650112 - RNA, 19 nt, Artificial Sequence
  Description of Artificial Sequence: Synthetic oligonucleotide
  Sense strand starting at position 98 of SEQ ID NO: 585567
guaaucacauugucccaua

SEQ ID NO: 650113 - RNA, 19 nt, Artificial Sequence
  Description of Artificial Sequence: Synthetic oligonucleotide
  Antisense strand to SEQ ID NO: 650112
uaugggacaaugugauuac

SEQ ID NO: 650114 - RNA, 19 nt, Artificial Sequence
  Description of Artificial Sequence: Synthetic oligonucleotide
  Sense strand starting at position 332 of SEQ ID NO: 585567
aauugauaagacuguguca

SEQ ID NO: 650115 - RNA, 19 nt, Artificial Sequence
  Description of Artificial Sequence: Synthetic oligonucleotide
  Antisense strand to SEQ ID NO: 650114
ugacacagucuuaucaauu

SEQ ID NO: 650116 - RNA, 19 nt, Artificial Sequence
  Description of Artificial Sequence: Synthetic oligonucleotide
  Sense strand starting at position 334 of SEQ ID NO: 585567
uugauaagacugugucauu

SEQ ID NO: 650117 - RNA, 19 nt, Artificial Sequence
  Description of Artificial Sequence: Synthetic oligonucleotide
  Antisense strand to SEQ ID NO: 650116
aaugacacagucuuaucaa

SEQ ID NO: 650118 - RNA, 19 nt, Artificial Sequence
  Description of Artificial Sequence: Synthetic oligonucleotide
  Sense strand starting at position 335 of SEQ ID NO: 585567
ugauaagacugugucauua

SEQ ID NO: 650119 - RNA, 19 nt, Artificial Sequence
  Description of Artificial Sequence: Synthetic oligonucleotide
  Antisense strand to SEQ ID NO: 650118
uaaugacacagucuuauca

SEQ ID NO: 650120 - RNA, 19 nt, Artificial Sequence
  Description of Artificial Sequence: Synthetic oligonucleotide
  Sense strand starting at position 607 of SEQ ID NO: 585567
gcuccaauagaaugaacau

SEQ ID NO: 650121 - RNA, 19 nt, Artificial Sequence
  Description of Artificial Sequence: Synthetic oligonucleotide
  Antisense strand to SEQ ID NO: 650120
auguucauucuauuggagc

SEQ ID NO: 650122 - RNA, 19 nt, Artificial Sequence
  Description of Artificial Sequence: Synthetic oligonucleotide
  Sense strand starting at position 619 of SEQ ID NO: 585567
ugaacauuauggguauauu

SEQ ID NO: 650123 - RNA, 19 nt, Artificial Sequence
  Description of Artificial Sequence: Synthetic oligonucleotide
  Antisense strand to SEQ ID NO: 650122
aauauacccauaauguuca

SEQ ID NO: 650124 - RNA, 19 nt, Artificial Sequence
  Description of Artificial Sequence: Synthetic oligonucleotide
  Sense strand starting at position 677 of SEQ ID NO: 585567
ucaggucuauacuuuggaa

SEQ ID NO: 650125 - RNA, 19 nt, Artificial Sequence
  Description of Artificial Sequence: Synthetic oligonucleotide
  Antisense strand to SEQ ID NO: 650124
uuccaaaguauagaccuga

SEQ ID NO: 650126 - RNA, 19 nt, Artificial Sequence
  Description of Artificial Sequence: Synthetic oligonucleotide
  Sense strand starting at position 679 of SEQ ID NO: 585567
aggucuauacuuuggaaga

SEQ ID NO: 650127 - RNA, 19 nt, Artificial Sequence
  Description of Artificial Sequence: Synthetic oligonucleotide
  Antisense strand to SEQ ID NO: 650126
ucuuccaaaguauagaccu

SEQ ID NO: 650128 - RNA, 19 nt, Artificial Sequence
  Description of Artificial Sequence: Synthetic oligonucleotide
  Sense strand starting at position 883 of SEQ ID NO: 585567
uaaguagaaugguuguaau

SEQ ID NO: 650129 - RNA, 19 nt, Artificial Sequence
  Description of Artificial Sequence: Synthetic oligonucleotide
  Antisense strand to SEQ ID NO: 650128
auuacaaccauucuacuua

SEQ ID NO: 650130 - RNA, 19 nt, Artificial Sequence
  Description of Artificial Sequence: Synthetic oligonucleotide
  Sense strand starting at position 951 of SEQ ID NO: 585567
cuccaugaccuaggaauua

SEQ ID NO: 650131 - RNA, 19 nt, Artificial Sequence
  Description of Artificial Sequence: Synthetic oligonucleotide
  Antisense strand to SEQ ID NO: 650130
uaauuccuaggucauggag

SEQ ID NO: 650132 - RNA, 19 nt, Artificial Sequence
  Description of Artificial Sequence: Synthetic oligonucleotide
  Sense strand starting at position 1029 of SEQ ID NO: 585567
agucuuuaucuaugacuug

SEQ ID NO: 650133 - RNA, 19 nt, Artificial Sequence
  Description of Artificial Sequence: Synthetic oligonucleotide
  Antisense strand to SEQ ID NO: 650132
caagucauagauaaagacu

SEQ ID NO: 650134 - RNA, 19 nt, Artificial Sequence
  Description of Artificial Sequence: Synthetic oligonucleotide
  Sense strand starting at position 1223 of SEQ ID NO: 585567
gguacauguagauaauagu

SEQ ID NO: 650135 - RNA, 19 nt, Artificial Sequence
  Description of Artificial Sequence: Synthetic oligonucleotide
  Antisense strand to SEQ ID NO: 650134
acuauuaucuacauguacc

SEQ ID NO: 650136 - RNA, 19 nt, Artificial Sequence
  Description of Artificial Sequence: Synthetic oligonucleotide
  Sense strand starting at position 1229 of SEQ ID NO: 585567
uguagauaauaguuccaua

SEQ ID NO: 650137 - RNA, 19 nt, Artificial Sequence
  Description of Artificial Sequence: Synthetic oligonucleotide
  Antisense strand to SEQ ID NO: 650136
uauggaacuauuaucuaca

SEQ ID NO: 650138 - RNA, 19 nt, Artificial Sequence
  Description of Artificial Sequence: Synthetic oligonucleotide
  Sense strand starting at position 1334 of SEQ ID NO: 585567
uggcaauguagccauagga

SEQ ID NO: 650139 - RNA, 19 nt, Artificial Sequence
  Description of Artificial Sequence: Synthetic oligonucleotide
  Antisense strand to SEQ ID NO: 650138
uccuauggcuacauugcca

SEQ ID NO: 650140 - RNA, 19 nt, Artificial Sequence
  Description of Artificial Sequence: Synthetic oligonucleotide
  Sense strand starting at position 1478 of SEQ ID NO: 585567
ccagaauguuguuuccaca

SEQ ID NO: 650141 - RNA, 19 nt, Artificial Sequence
  Description of Artificial Sequence: Synthetic oligonucleotide
  Antisense strand to SEQ ID NO: 650140
uguggaaacaacauucugg

SEQ ID NO: 650142 - RNA, 19 nt, Artificial Sequence
  Description of Artificial Sequence: Synthetic oligonucleotide
  Sense strand starting at position 1754 of SEQ ID NO: 585567
ccagcaucugagggaugau

SEQ ID NO: 650143 - RNA, 19 nt, Artificial Sequence
  Description of Artificial Sequence: Synthetic oligonucleotide
  Antisense strand to SEQ ID NO: 650142
aucaucccucagaugcugg

SEQ ID NO: 650144 - RNA, 19 nt, Artificial Sequence
  Description of Artificial Sequence: Synthetic oligonucleotide
  Sense strand starting at position 1766 of SEQ ID NO: 585567
ggaugaugcugguugugaa

SEQ ID NO: 650145 - RNA, 19 nt, Artificial Sequence
  Description of Artificial Sequence: Synthetic oligonucleotide
  Antisense strand to SEQ ID NO: 650144
uucacaaccagcaucaucc

SEQ ID NO: 650146 - RNA, 19 nt, Artificial Sequence
  Description of Artificial Sequence: Synthetic oligonucleotide
  Sense strand starting at position 1767 of SEQ ID NO: 585567
gaugaugcugguugugaaa

SEQ ID NO: 650147 - RNA, 19 nt, Artificial Sequence
  Description of Artificial Sequence: Synthetic oligonucleotide
  Antisense strand to SEQ ID NO: 650146
uuucacaaccagcaucauc

SEQ ID NO: 650148 - RNA, 19 nt, Artificial Sequence
  Description of Artificial Sequence: Synthetic oligonucleotide
  Sense strand starting at position 1820 of SEQ ID NO: 585567
aguacauugguguaugaag

SEQ ID NO: 650149 - RNA, 19 nt, Artificial Sequence
  Description of Artificial Sequence: Synthetic oligonucleotide
  Antisense strand to SEQ ID NO: 650148
cuucauacaccaauguacu

SEQ ID NO: 650150 - RNA, 19 nt, Artificial Sequence
  Description of Artificial Sequence: Synthetic oligonucleotide
  Sense strand starting at position 1828 of SEQ ID NO: 585567
gguguaugaagcugggaau

SEQ ID NO: 650151 - RNA, 19 nt, Artificial Sequence
  Description of Artificial Sequence: Synthetic oligonucleotide
  Antisense strand to SEQ ID NO: 650150
auucccagcuucauacacc

SEQ ID NO: 650152 - RNA, 19 nt, Artificial Sequence
  Description of Artificial Sequence: Synthetic oligonucleotide
  Sense strand starting at position 1872 of SEQ ID NO: 585567
uguguuacccaccaaugua

SEQ ID NO: 650153 - RNA, 19 nt, Artificial Sequence
  Description of Artificial Sequence: Synthetic oligonucleotide
  Antisense strand to SEQ ID NO: 650152
uacauugguggguaacaca

SEQ ID NO: 650154 - RNA, 19 nt, Artificial Sequence
  Description of Artificial Sequence: Synthetic oligonucleotide
  Sense strand starting at position 1875 of SEQ ID NO: 585567
guuacccaccaauguaauu

SEQ ID NO: 650155 - RNA, 19 nt, Artificial Sequence
  Description of Artificial Sequence: Synthetic oligonucleotide
  Antisense strand to SEQ ID NO: 650154
aauuacauugguggguaac

SEQ ID NO: 650156 - RNA, 19 nt, Artificial Sequence
  Description of Artificial Sequence: Synthetic oligonucleotide
  Sense strand starting at position 1906 of SEQ ID NO: 585567
gcgacaacuccugacagga

SEQ ID NO: 650157 - RNA, 19 nt, Artificial Sequence
  Description of Artificial Sequence: Synthetic oligonucleotide
  Antisense strand to SEQ ID NO: 650156
uccugucaggaguugucgc

SEQ ID NO: 650158 - RNA, 19 nt, Artificial Sequence
  Description of Artificial Sequence: Synthetic oligonucleotide
  Sense strand starting at position 2296 of SEQ ID NO: 585567
uggcaaugaguuuaauauu

SEQ ID NO: 650159 - RNA, 19 nt, Artificial Sequence
  Description of Artificial Sequence: Synthetic oligonucleotide
  Antisense strand to SEQ ID NO: 650158
aauauuaaacucauugcca

SEQ ID NO: 650160 - RNA, 19 nt, Artificial Sequence
  Description of Artificial Sequence: Synthetic oligonucleotide
  Sense strand starting at position 2360 of SEQ ID NO: 585567
aaacuugaggucugaauua

SEQ ID NO: 650161 - RNA, 19 nt, Artificial Sequence
  Description of Artificial Sequence: Synthetic oligonucleotide
  Antisense strand to SEQ ID NO: 650160
uaauucagaccucaaguuu

SEQ ID NO: 650162 - RNA, 19 nt, Artificial Sequence
  Description of Artificial Sequence: Synthetic oligonucleotide
  Sense strand starting at position 2369 of SEQ ID NO: 585567
gucugaauuaucuaacgug

SEQ ID NO: 650163 - RNA, 19 nt, Artificial Sequence
  Description of Artificial Sequence: Synthetic oligonucleotide
  Antisense strand to SEQ ID NO: 650162
cacguuagauaauucagac

SEQ ID NO: 650164 - RNA, 19 nt, Artificial Sequence
  Description of Artificial Sequence: Synthetic oligonucleotide
  Sense strand starting at position 2403 of SEQ ID NO: 585567
gaaauagaugcugguucua

SEQ ID NO: 650165 - RNA, 19 nt, Artificial Sequence
  Description of Artificial Sequence: Synthetic oligonucleotide
  Antisense strand to SEQ ID NO: 650164
uagaaccagcaucuauuuc

SEQ ID NO: 650166 - RNA, 19 nt, Artificial Sequence
  Description of Artificial Sequence: Synthetic oligonucleotide
  Sense strand starting at position 2405 of SEQ ID NO: 585567
aauagaugcugguucuaaa

SEQ ID NO: 650167 - RNA, 19 nt, Artificial Sequence
  Description of Artificial Sequence: Synthetic oligonucleotide
  Antisense strand to SEQ ID NO: 650166
uuuagaaccagcaucuauu

SEQ ID NO: 650168 - RNA, 19 nt, Artificial Sequence
  Description of Artificial Sequence: Synthetic oligonucleotide
  Sense strand starting at position 2571 of SEQ ID NO: 585567
acaucaugcuaacugaagu

SEQ ID NO: 650169 - RNA, 19 nt, Artificial Sequence
  Description of Artificial Sequence: Synthetic oligonucleotide
  Antisense strand to SEQ ID NO: 650168
acuucaguuagcaugaugu

SEQ ID NO: 650170 - RNA, 19 nt, Artificial Sequence
  Description of Artificial Sequence: Synthetic oligonucleotide
  Sense strand starting at position 2582 of SEQ ID NO: 585567
acugaaguaagcugaaaga

SEQ ID NO: 650171 - RNA, 19 nt, Artificial Sequence
  Description of Artificial Sequence: Synthetic oligonucleotide
  Antisense strand to SEQ ID NO: 650170
ucuuucagcuuacuucagu

SEQ ID NO: 650172 - RNA, 19 nt, Artificial Sequence
  Description of Artificial Sequence: Synthetic oligonucleotide
  Sense strand starting at position 2695 of SEQ ID NO: 585567
gauguugaucaaggguacu

SEQ ID NO: 650173 - RNA, 19 nt, Artificial Sequence
  Description of Artificial Sequence: Synthetic oligonucleotide
  Antisense strand to SEQ ID NO: 650172
aguacccuugaucaacauc

SEQ ID NO: 650174 - RNA, 19 nt, Artificial Sequence
  Description of Artificial Sequence: Synthetic oligonucleotide
  Sense strand starting at position 2977 of SEQ ID NO: 585567
gaggaaagauuguucuucu

SEQ ID NO: 650175 - RNA, 19 nt, Artificial Sequence
  Description of Artificial Sequence: Synthetic oligonucleotide
  Antisense strand to SEQ ID NO: 650174
agaagaacaaucuuuccuc

SEQ ID NO: 650176 - RNA, 19 nt, Artificial Sequence
  Description of Artificial Sequence: Synthetic oligonucleotide
  Sense strand starting at position 2978 of SEQ ID NO: 585567
aggaaagauuguucuucuu

SEQ ID NO: 650177 - RNA, 19 nt, Artificial Sequence
  Description of Artificial Sequence: Synthetic oligonucleotide
  Antisense strand to SEQ ID NO: 650176
aagaagaacaaucuuuccu

SEQ ID NO: 650178 - RNA, 19 nt, Artificial Sequence
  Description of Artificial Sequence: Synthetic oligonucleotide
  Sense strand starting at position 3002 of SEQ ID NO: 585567
auaucuuagugacuaagca

SEQ ID NO: 650179 - RNA, 19 nt, Artificial Sequence
  Description of Artificial Sequence: Synthetic oligonucleotide
  Antisense strand to SEQ ID NO: 650178
ugcuuagucacuaagauau

SEQ ID NO: 650180 - RNA, 19 nt, Artificial Sequence
  Description of Artificial Sequence: Synthetic oligonucleotide
  Sense strand starting at position 3209 of SEQ ID NO: 585567
ggauucuggcaauagucuu

SEQ ID NO: 650181 - RNA, 19 nt, Artificial Sequence
  Description of Artificial Sequence: Synthetic oligonucleotide
  Antisense strand to SEQ ID NO: 650180
aagacuauugccagaaucc

SEQ ID NO: 650182 - RNA, 19 nt, Artificial Sequence
  Description of Artificial Sequence: Synthetic oligonucleotide
  Sense strand starting at position 3266 of SEQ ID NO: 585567
guuacaacauuugaugaaa

SEQ ID NO: 650183 - RNA, 19 nt, Artificial Sequence
  Description of Artificial Sequence: Synthetic oligonucleotide
  Antisense strand to SEQ ID NO: 650182
uuucaucaaauguuguaac

SEQ ID NO: 650184 - RNA, 19 nt, Artificial Sequence
  Description of Artificial Sequence: Synthetic oligonucleotide
  Sense strand starting at position 3471 of SEQ ID NO: 585567
gggauagauuguguugaug

SEQ ID NO: 650185 - RNA, 19 nt, Artificial Sequence
  Description of Artificial Sequence: Synthetic oligonucleotide
  Antisense strand to SEQ ID NO: 650184
caucaacacaaucuauccc

SEQ ID NO: 650186 - RNA, 19 nt, Artificial Sequence
  Description of Artificial Sequence: Synthetic oligonucleotide
  Sense strand starting at position 3940 of SEQ ID NO: 585567
ggauacauuugugagacua

SEQ ID NO: 650187 - RNA, 19 nt, Artificial Sequence
  Description of Artificial Sequence: Synthetic oligonucleotide
  Antisense strand to SEQ ID NO: 650186
uagucucacaaauguaucc

SEQ ID NO: 650188 - RNA, 19 nt, Artificial Sequence
  Description of Artificial Sequence: Synthetic oligonucleotide
  Sense strand starting at position 3961 of SEQ ID NO: 585567
cggagauggugguugaaau

SEQ ID NO: 650189 - RNA, 19 nt, Artificial Sequence
  Description of Artificial Sequence: Synthetic oligonucleotide
  Antisense strand to SEQ ID NO: 650188
auuucaaccaccaucuccg

SEQ ID NO: 650190 - RNA, 19 nt, Artificial Sequence
  Description of Artificial Sequence: Synthetic oligonucleotide
  Sense strand starting at position 3962 of SEQ ID NO: 585567
ggagauggugguugaaaua

SEQ ID NO: 650191 - RNA, 19 nt, Artificial Sequence
  Description of Artificial Sequence: Synthetic oligonucleotide
  Antisense strand to SEQ ID NO: 650190
uauuucaaccaccaucucc

SEQ ID NO: 650192 - RNA, 19 nt, Artificial Sequence
  Description of Artificial Sequence: Synthetic oligonucleotide
  Sense strand starting at position 58 of SEQ ID NO: 585568
uguacuuuacaugguaaua

SEQ ID NO: 650193 - RNA, 19 nt, Artificial Sequence
  Description of Artificial Sequence: Synthetic oligonucleotide
  Antisense strand to SEQ ID NO: 650192
uauuaccauguaaaguaca

SEQ ID NO: 650194 - RNA, 19 nt, Artificial Sequence
  Description of Artificial Sequence: Synthetic oligonucleotide
  Sense strand starting at position 347 of SEQ ID NO: 585568
augcaugucaaaugggauu

SEQ ID NO: 650195 - RNA, 19 nt, Artificial Sequence
  Description of Artificial Sequence: Synthetic oligonucleotide
  Antisense strand to SEQ ID NO: 650194
aaucccauuugacaugcau

SEQ ID NO: 650196 - RNA, 19 nt, Artificial Sequence
  Description of Artificial Sequence: Synthetic oligonucleotide
  Sense strand starting at position 349 of SEQ ID NO: 585568
gcaugucaaaugggauuga

SEQ ID NO: 650197 - RNA, 19 nt, Artificial Sequence
  Description of Artificial Sequence: Synthetic oligonucleotide
  Antisense strand to SEQ ID NO: 650196
ucaaucccauuugacaugc

SEQ ID NO: 650198 - RNA, 19 nt, Artificial Sequence
  Description of Artificial Sequence: Synthetic oligonucleotide
  Sense strand starting at position 493 of SEQ ID NO: 585568
cuuaaucuauuggugauga

SEQ ID NO: 650199 - RNA, 19 nt, Artificial Sequence
  Description of Artificial Sequence: Synthetic oligonucleotide
  Antisense strand to SEQ ID NO: 650198
ucaucaccaauagauuaag

SEQ ID NO: 650200 - RNA, 19 nt, Artificial Sequence
  Description of Artificial Sequence: Synthetic oligonucleotide
  Sense strand starting at position 961 of SEQ ID NO: 585568
ugaguuuacuauccaaaga

SEQ ID NO: 650201 - RNA, 19 nt, Artificial Sequence
  Description of Artificial Sequence: Synthetic oligonucleotide
  Antisense strand to SEQ ID NO: 650200
ucuuuggauaguaaacuca

SEQ ID NO: 650202 - RNA, 19 nt, Artificial Sequence
  Description of Artificial Sequence: Synthetic oligonucleotide
  Sense strand starting at position 1024 of SEQ ID NO: 585568
cuuugauguccuuauuccu

SEQ ID NO: 650203 - RNA, 19 nt, Artificial Sequence
  Description of Artificial Sequence: Synthetic oligonucleotide
  Antisense strand to SEQ ID NO: 650202
aggaauaaggacaucaaag

SEQ ID NO: 650204 - RNA, 19 nt, Artificial Sequence
  Description of Artificial Sequence: Synthetic oligonucleotide
  Sense strand starting at position 1038 of SEQ ID NO: 585568
uuccucaauguguaaauua

SEQ ID NO: 650205 - RNA, 19 nt, Artificial Sequence
  Description of Artificial Sequence: Synthetic oligonucleotide
  Antisense strand to SEQ ID NO: 650204
uaauuuacacauugaggaa

SEQ ID NO: 650206 - RNA, 19 nt, Artificial Sequence
  Description of Artificial Sequence: Synthetic oligonucleotide
  Sense strand starting at position 1072 of SEQ ID NO: 585568
ggguaacaacacuguacaa

SEQ ID NO: 650207 - RNA, 19 nt, Artificial Sequence
  Description of Artificial Sequence: Synthetic oligonucleotide
  Antisense strand to SEQ ID NO: 650206
uuguacaguguuguuaccc

SEQ ID NO: 650208 - RNA, 19 nt, Artificial Sequence
  Description of Artificial Sequence: Synthetic oligonucleotide
  Sense strand starting at position 1110 of SEQ ID NO: 585568
uucuuuaaugaguaaguug

SEQ ID NO: 650209 - RNA, 19 nt, Artificial Sequence
  Description of Artificial Sequence: Synthetic oligonucleotide
  Antisense strand to SEQ ID NO: 650208
caacuuacucauuaaagaa

SEQ ID NO: 650210 - RNA, 19 nt, Artificial Sequence
  Description of Artificial Sequence: Synthetic oligonucleotide
  Sense strand starting at position 1127 of SEQ ID NO: 585568
ugagaugggccguacauau

SEQ ID NO: 650211 - RNA, 19 nt, Artificial Sequence
  Description of Artificial Sequence: Synthetic oligonucleotide
  Antisense strand to SEQ ID NO: 650210
auauguacggcccaucuca

SEQ ID NO: 650212 - RNA, 19 nt, Artificial Sequence
  Description of Artificial Sequence: Synthetic oligonucleotide
  Sense strand starting at position 1238 of SEQ ID NO: 585568
ccucaagaugguggagauu

SEQ ID NO: 650213 - RNA, 19 nt, Artificial Sequence
  Description of Artificial Sequence: Synthetic oligonucleotide
  Antisense strand to SEQ ID NO: 650212
aaucuccaccaucuugagg

SEQ ID NO: 650214 - RNA, 19 nt, Artificial Sequence
  Description of Artificial Sequence: Synthetic oligonucleotide
  Sense strand starting at position 1247 of SEQ ID NO: 585568
gguggagauuaugcaaaug

SEQ ID NO: 650215 - RNA, 19 nt, Artificial Sequence
  Description of Artificial Sequence: Synthetic oligonucleotide
  Antisense strand to SEQ ID NO: 650214
cauuugcauaaucuccacc

SEQ ID NO: 650216 - RNA, 19 nt, Artificial Sequence
  Description of Artificial Sequence: Synthetic oligonucleotide
  Sense strand starting at position 1252 of SEQ ID NO: 585568
agauuaugcaaauguagga

SEQ ID NO: 650217 - RNA, 19 nt, Artificial Sequence
  Description of Artificial Sequence: Synthetic oligonucleotide
  Antisense strand to SEQ ID NO: 650216
uccuacauuugcauaaucu

SEQ ID NO: 650218 - RNA, 19 nt, Artificial Sequence
  Description of Artificial Sequence: Synthetic oligonucleotide
  Sense strand starting at position 1324 of SEQ ID NO: 585568
gugccaacucauugacaga

SEQ ID NO: 650219 - RNA, 19 nt, Artificial Sequence
  Description of Artificial Sequence: Synthetic oligonucleotide
  Antisense strand to SEQ ID NO: 650218
ucugucaaugaguuggcac

SEQ ID NO: 650220 - RNA, 19 nt, Artificial Sequence
  Description of Artificial Sequence: Synthetic oligonucleotide
  Sense strand starting at position 1338 of SEQ ID NO: 585568
acagaaguguuuccacaag

SEQ ID NO: 650221 - RNA, 19 nt, Artificial Sequence
  Description of Artificial Sequence: Synthetic oligonucleotide
  Antisense strand to SEQ ID NO: 650220
cuuguggaaacacuucugu

SEQ ID NO: 650222 - RNA, 19 nt, Artificial Sequence
  Description of Artificial Sequence: Synthetic oligonucleotide
  Sense strand starting at position 1424 of SEQ ID NO: 585568
gcagaaugucaacacugua

SEQ ID NO: 650223 - RNA, 19 nt, Artificial Sequence
  Description of Artificial Sequence: Synthetic oligonucleotide
  Antisense strand to SEQ ID NO: 650222
uacaguguugacauucugc

SEQ ID NO: 650224 - RNA, 19 nt, Artificial Sequence
  Description of Artificial Sequence: Synthetic oligonucleotide
  Sense strand starting at position 1498 of SEQ ID NO: 585568
auagaaccuugcucagaau

SEQ ID NO: 650225 - RNA, 19 nt, Artificial Sequence
  Description of Artificial Sequence: Synthetic oligonucleotide
  Antisense strand to SEQ ID NO: 650224
auucugagcaagguucuau

SEQ ID NO: 650226 - RNA, 19 nt, Artificial Sequence
  Description of Artificial Sequence: Synthetic oligonucleotide
  Sense strand starting at position 1504 of SEQ ID NO: 585568
ccuugcucagaauaacuga

SEQ ID NO: 650227 - RNA, 19 nt, Artificial Sequence
  Description of Artificial Sequence: Synthetic oligonucleotide
  Antisense strand to SEQ ID NO: 650226
ucaguuauucugagcaagg

SEQ ID NO: 650228 - RNA, 19 nt, Artificial Sequence
  Description of Artificial Sequence: Synthetic oligonucleotide
  Sense strand starting at position 1507 of SEQ ID NO: 585568
ugcucagaauaacugaaua

SEQ ID NO: 650229 - RNA, 19 nt, Artificial Sequence
  Description of Artificial Sequence: Synthetic oligonucleotide
  Antisense strand to SEQ ID NO: 650228
uauucaguuauucugagca

SEQ ID NO: 650230 - RNA, 19 nt, Artificial Sequence
  Description of Artificial Sequence: Synthetic oligonucleotide
  Sense strand starting at position 1525 of SEQ ID NO: 585568
accuuaaaggauugcagau

SEQ ID NO: 650231 - RNA, 19 nt, Artificial Sequence
  Description of Artificial Sequence: Synthetic oligonucleotide
  Antisense strand to SEQ ID NO: 650230
aucugcaauccuuuaaggu

SEQ ID NO: 650232 - RNA, 19 nt, Artificial Sequence
  Description of Artificial Sequence: Synthetic oligonucleotide
  Sense strand starting at position 1565 of SEQ ID NO: 585568
cauugcugccaguaggaga

SEQ ID NO: 650233 - RNA, 19 nt, Artificial Sequence
  Description of Artificial Sequence: Synthetic oligonucleotide
  Antisense strand to SEQ ID NO: 650232
ucuccuacuggcagcaaug

SEQ ID NO: 650234 - RNA, 19 nt, Artificial Sequence
  Description of Artificial Sequence: Synthetic oligonucleotide
  Sense strand starting at position 1717 of SEQ ID NO: 585568
aggccaaguucccuagaaa

SEQ ID NO: 650235 - RNA, 19 nt, Artificial Sequence
  Description of Artificial Sequence: Synthetic oligonucleotide
  Antisense strand to SEQ ID NO: 650234
uuucuagggaacuuggccu

SEQ ID NO: 650236 - RNA, 19 nt, Artificial Sequence
  Description of Artificial Sequence: Synthetic oligonucleotide
  Sense strand starting at position 1766 of SEQ ID NO: 585568
agucacagucgucaagaua

SEQ ID NO: 650237 - RNA, 19 nt, Artificial Sequence
  Description of Artificial Sequence: Synthetic oligonucleotide
  Antisense strand to SEQ ID NO: 650236
uaucuugacgacugugacu

SEQ ID NO: 650238 - RNA, 19 nt, Artificial Sequence
  Description of Artificial Sequence: Synthetic oligonucleotide
  Sense strand starting at position 1769 of SEQ ID NO: 585568
cacagucgucaagauaauu

SEQ ID NO: 650239 - RNA, 19 nt, Artificial Sequence
  Description of Artificial Sequence: Synthetic oligonucleotide
  Antisense strand to SEQ ID NO: 650238
aauuaucuugacgacugug

SEQ ID NO: 650240 - RNA, 19 nt, Artificial Sequence
  Description of Artificial Sequence: Synthetic oligonucleotide
  Sense strand starting at position 1810 of SEQ ID NO: 585568
agaaauaagucagaaagaa

SEQ ID NO: 650241 - RNA, 19 nt, Artificial Sequence
  Description of Artificial Sequence: Synthetic oligonucleotide
  Antisense strand to SEQ ID NO: 650240
uucuuucugacuuauuucu

SEQ ID NO: 650242 - RNA, 19 nt, Artificial Sequence
  Description of Artificial Sequence: Synthetic oligonucleotide
  Sense strand starting at position 1854 of SEQ ID NO: 585568
ucauuuagguuggagaauc

SEQ ID NO: 650243 - RNA, 19 nt, Artificial Sequence
  Description of Artificial Sequence: Synthetic oligonucleotide
  Antisense strand to SEQ ID NO: 650242
gauucuccaaccuaaauga

SEQ ID NO: 650244 - RNA, 19 nt, Artificial Sequence
  Description of Artificial Sequence: Synthetic oligonucleotide
  Sense strand starting at position 1988 of SEQ ID NO: 585568
gcaauagcaugaccugaaa

SEQ ID NO: 650245 - RNA, 19 nt, Artificial Sequence
  Description of Artificial Sequence: Synthetic oligonucleotide
  Antisense strand to SEQ ID NO: 650244
uuucaggucaugcuauugc

SEQ ID NO: 650246 - RNA, 19 nt, Artificial Sequence
  Description of Artificial Sequence: Synthetic oligonucleotide
  Sense strand starting at position 2199 of SEQ ID NO: 585568
ccauauguccuagaguucu

SEQ ID NO: 650247 - RNA, 19 nt, Artificial Sequence
  Description of Artificial Sequence: Synthetic oligonucleotide
  Antisense strand to SEQ ID NO: 650246
agaacucuaggacauaugg

SEQ ID NO: 650248 - RNA, 19 nt, Artificial Sequence
  Description of Artificial Sequence: Synthetic oligonucleotide
  Sense strand starting at position 2222 of SEQ ID NO: 585568
uaauaauggcugggucaug

SEQ ID NO: 650249 - RNA, 19 nt, Artificial Sequence
  Description of Artificial Sequence: Synthetic oligonucleotide
  Antisense strand to SEQ ID NO: 650248
caugacccagccauuauua

SEQ ID NO: 650250 - RNA, 19 nt, Artificial Sequence
  Description of Artificial Sequence: Synthetic oligonucleotide
  Sense strand starting at position 2268 of SEQ ID NO: 585568
gaacuugugcuguagaaug

SEQ ID NO: 650251 - RNA, 19 nt, Artificial Sequence
  Description of Artificial Sequence: Synthetic oligonucleotide
  Antisense strand to SEQ ID NO: 650250
cauucuacagcacaaguuc

SEQ ID NO: 650252 - RNA, 19 nt, Artificial Sequence
  Description of Artificial Sequence: Synthetic oligonucleotide
  Sense strand starting at position 2293 of SEQ ID NO: 585568
cuagaagaaucucugguau

SEQ ID NO: 650253 - RNA, 19 nt, Artificial Sequence
  Description of Artificial Sequence: Synthetic oligonucleotide
  Antisense strand to SEQ ID NO: 650252
auaccagagauucuucuag

SEQ ID NO: 650254 - RNA, 19 nt, Artificial Sequence
  Description of Artificial Sequence: Synthetic oligonucleotide
  Sense strand starting at position 2615 of SEQ ID NO: 585568
aaacaugaucuuugaguug

SEQ ID NO: 650255 - RNA, 19 nt, Artificial Sequence
  Description of Artificial Sequence: Synthetic oligonucleotide
  Antisense strand to SEQ ID NO: 650254
caacucaaagaucauguuu

SEQ ID NO: 650256 - RNA, 19 nt, Artificial Sequence
  Description of Artificial Sequence: Synthetic oligonucleotide
  Sense strand starting at position 2773 of SEQ ID NO: 585568
ggguuagguuaucugaauu

SEQ ID NO: 650257 - RNA, 19 nt, Artificial Sequence
  Description of Artificial Sequence: Synthetic oligonucleotide
  Antisense strand to SEQ ID NO: 650256
aauucagauaaccuaaccc

SEQ ID NO: 650258 - RNA, 19 nt, Artificial Sequence
  Description of Artificial Sequence: Synthetic oligonucleotide
  Sense strand starting at position 2828 of SEQ ID NO: 585568
agaaaccuauugcuauaga

SEQ ID NO: 650259 - RNA, 19 nt, Artificial Sequence
  Description of Artificial Sequence: Synthetic oligonucleotide
  Antisense strand to SEQ ID NO: 650258
ucuauagcaauagguuucu

SEQ ID NO: 650260 - RNA, 19 nt, Artificial Sequence
  Description of Artificial Sequence: Synthetic oligonucleotide
  Sense strand starting at position 2839 of SEQ ID NO: 585568
gcuauagaucaucaaucug

SEQ ID NO: 650261 - RNA, 19 nt, Artificial Sequence
  Description of Artificial Sequence: Synthetic oligonucleotide
  Antisense strand to SEQ ID NO: 650260
cagauugaugaucuauagc

SEQ ID NO: 650262 - RNA, 19 nt, Artificial Sequence
  Description of Artificial Sequence: Synthetic oligonucleotide
  Sense strand starting at position 2868 of SEQ ID NO: 585568
gagcuauuuggcuggugca

SEQ ID NO: 650263 - RNA, 19 nt, Artificial Sequence
  Description of Artificial Sequence: Synthetic oligonucleotide
  Antisense strand to SEQ ID NO: 650262
ugcaccagccaaauagcuc

SEQ ID NO: 650264 - RNA, 19 nt, Artificial Sequence
  Description of Artificial Sequence: Synthetic oligonucleotide
  Sense strand starting at position 2936 of SEQ ID NO: 585568
ggaugcugauaaucucuga

SEQ ID NO: 650265 - RNA, 19 nt, Artificial Sequence
  Description of Artificial Sequence: Synthetic oligonucleotide
  Antisense strand to SEQ ID NO: 650264
ucagagauuaucagcaucc

SEQ ID NO: 650266 - RNA, 19 nt, Artificial Sequence
  Description of Artificial Sequence: Synthetic oligonucleotide
  Sense strand starting at position 2969 of SEQ ID NO: 585568
gcaucucauuuagucuuua

SEQ ID NO: 650267 - RNA, 19 nt, Artificial Sequence
  Description of Artificial Sequence: Synthetic oligonucleotide
  Antisense strand to SEQ ID NO: 650266
uaaagacuaaaugagaugc

SEQ ID NO: 650268 - RNA, 19 nt, Artificial Sequence
  Description of Artificial Sequence: Synthetic oligonucleotide
  Sense strand starting at position 3459 of SEQ ID NO: 585568
ucuucuagagcuuaguuua

SEQ ID NO: 650269 - RNA, 19 nt, Artificial Sequence
  Description of Artificial Sequence: Synthetic oligonucleotide
  Antisense strand to SEQ ID NO: 650268
uaaacuaagcucuagaaga

SEQ ID NO: 650270 - RNA, 19 nt, Artificial Sequence
  Description of Artificial Sequence: Synthetic oligonucleotide
  Sense strand starting at position 3755 of SEQ ID NO: 585568
guuguaauugcugucuucu

SEQ ID NO: 650271 - RNA, 19 nt, Artificial Sequence
  Description of Artificial Sequence: Synthetic oligonucleotide
  Antisense strand to SEQ ID NO: 650270
agaagacagcaauuacaac

SEQ ID NO: 650272 - RNA, 19 nt, Artificial Sequence
  Description of Artificial Sequence: Synthetic oligonucleotide
  Sense strand starting at position 483 of SEQ ID NO: 585569
auaagaggugcuuaugcaa

SEQ ID NO: 650273 - RNA, 19 nt, Artificial Sequence
  Description of Artificial Sequence: Synthetic oligonucleotide
  Antisense strand to SEQ ID NO: 650272
uugcauaagcaccucuuau

SEQ ID NO: 650274 - RNA, 19 nt, Artificial Sequence
  Description of Artificial Sequence: Synthetic oligonucleotide
  Sense strand starting at position 903 of SEQ ID NO: 585569
guccuauaucugcacuauc

SEQ ID NO: 650275 - RNA, 19 nt, Artificial Sequence
  Description of Artificial Sequence: Synthetic oligonucleotide
  Antisense strand to SEQ ID NO: 650274
gauagugcagauauaggac

SEQ ID NO: 650276 - RNA, 19 nt, Artificial Sequence
  Description of Artificial Sequence: Synthetic oligonucleotide
  Sense strand starting at position 1037 of SEQ ID NO: 585569
acauguggugagugacuaa

SEQ ID NO: 650277 - RNA, 19 nt, Artificial Sequence
  Description of Artificial Sequence: Synthetic oligonucleotide
  Antisense strand to SEQ ID NO: 650276
uuagucacucaccacaugu

SEQ ID NO: 650278 - RNA, 19 nt, Artificial Sequence
  Description of Artificial Sequence: Synthetic oligonucleotide
  Sense strand starting at position 1078 of SEQ ID NO: 585569
gggcuuaucuucuuaccaa

SEQ ID NO: 650279 - RNA, 19 nt, Artificial Sequence
  Description of Artificial Sequence: Synthetic oligonucleotide
  Antisense strand to SEQ ID NO: 650278
uugguaagaagauaagccc

SEQ ID NO: 650280 - RNA, 19 nt, Artificial Sequence
  Description of Artificial Sequence: Synthetic oligonucleotide
  Sense strand starting at position 1223 of SEQ ID NO: 585569
uuugucuacuuucugauua

SEQ ID NO: 650281 - RNA, 19 nt, Artificial Sequence
  Description of Artificial Sequence: Synthetic oligonucleotide
  Antisense strand to SEQ ID NO: 650280
uaaucagaaaguagacaaa

SEQ ID NO: 650282 - RNA, 19 nt, Artificial Sequence
  Description of Artificial Sequence: Synthetic oligonucleotide
  Sense strand starting at position 1278 of SEQ ID NO: 585569
uaucuucugggccgaagaa

SEQ ID NO: 650283 - RNA, 19 nt, Artificial Sequence
  Description of Artificial Sequence: Synthetic oligonucleotide
  Antisense strand to SEQ ID NO: 650282
uucuucggcccagaagaua

SEQ ID NO: 650284 - RNA, 19 nt, Artificial Sequence
  Description of Artificial Sequence: Synthetic oligonucleotide
  Sense strand starting at position 1279 of SEQ ID NO: 585569
aucuucugggccgaagaaa

SEQ ID NO: 650285 - RNA, 19 nt, Artificial Sequence
  Description of Artificial Sequence: Synthetic oligonucleotide
  Antisense strand to SEQ ID NO: 650284
uuucuucggcccagaagau

SEQ ID NO: 650286 - RNA, 19 nt, Artificial Sequence
  Description of Artificial Sequence: Synthetic oligonucleotide
  Sense strand starting at position 1578 of SEQ ID NO: 585569
gcgcacaguauuugugaga

SEQ ID NO: 650287 - RNA, 19 nt, Artificial Sequence
  Description of Artificial Sequence: Synthetic oligonucleotide
  Antisense strand to SEQ ID NO: 650286
ucucacaaauacugugcgc

SEQ ID NO: 650288 - RNA, 19 nt, Artificial Sequence
  Description of Artificial Sequence: Synthetic oligonucleotide
  Sense strand starting at position 1579 of SEQ ID NO: 585569
cgcacaguauuugugagau

SEQ ID NO: 650289 - RNA, 19 nt, Artificial Sequence
  Description of Artificial Sequence: Synthetic oligonucleotide
  Antisense strand to SEQ ID NO: 650288
aucucacaaauacugugcg

SEQ ID NO: 650290 - RNA, 19 nt, Artificial Sequence
  Description of Artificial Sequence: Synthetic oligonucleotide
  Sense strand starting at position 1583 of SEQ ID NO: 585569
caguauuugugagauggaa

SEQ ID NO: 650291 - RNA, 19 nt, Artificial Sequence
  Description of Artificial Sequence: Synthetic oligonucleotide
  Antisense strand to SEQ ID NO: 650290
uuccaucucacaaauacug

SEQ ID NO: 650292 - RNA, 19 nt, Artificial Sequence
  Description of Artificial Sequence: Synthetic oligonucleotide
  Sense strand starting at position 1709 of SEQ ID NO: 585569
caaaguuggccucaacuga

SEQ ID NO: 650293 - RNA, 19 nt, Artificial Sequence
  Description of Artificial Sequence: Synthetic oligonucleotide
  Antisense strand to SEQ ID NO: 650292
ucaguugaggccaacuuug

SEQ ID NO: 650294 - RNA, 19 nt, Artificial Sequence
  Description of Artificial Sequence: Synthetic oligonucleotide
  Sense strand starting at position 2136 of SEQ ID NO: 585569
uugcuugccagguauggau

SEQ ID NO: 650295 - RNA, 19 nt, Artificial Sequence
  Description of Artificial Sequence: Synthetic oligonucleotide
  Antisense strand to SEQ ID NO: 650294
auccauaccuggcaagcaa

SEQ ID NO: 650296 - RNA, 19 nt, Artificial Sequence
  Description of Artificial Sequence: Synthetic oligonucleotide
  Sense strand starting at position 2251 of SEQ ID NO: 585569
ggaauccuguuaguuucua

SEQ ID NO: 650297 - RNA, 19 nt, Artificial Sequence
  Description of Artificial Sequence: Synthetic oligonucleotide
  Antisense strand to SEQ ID NO: 650296
uagaaacuaacaggauucc

SEQ ID NO: 650298 - RNA, 19 nt, Artificial Sequence
  Description of Artificial Sequence: Synthetic oligonucleotide
  Sense strand starting at position 2427 of SEQ ID NO: 585569
gcggcaagucauuagacca

SEQ ID NO: 650299 - RNA, 19 nt, Artificial Sequence
  Description of Artificial Sequence: Synthetic oligonucleotide
  Antisense strand to SEQ ID NO: 650298
uggucuaaugacuugccgc

SEQ ID NO: 650300 - RNA, 19 nt, Artificial Sequence
  Description of Artificial Sequence: Synthetic oligonucleotide
  Sense strand starting at position 2434 of SEQ ID NO: 585569
gucauuagaccaugauuag

SEQ ID NO: 650301 - RNA, 19 nt, Artificial Sequence
  Description of Artificial Sequence: Synthetic oligonucleotide
  Antisense strand to SEQ ID NO: 650300
cuaaucauggucuaaugac

SEQ ID NO: 650302 - RNA, 19 nt, Artificial Sequence
  Description of Artificial Sequence: Synthetic oligonucleotide
  Sense strand starting at position 2536 of SEQ ID NO: 585569
gcugcuuauuucucuugca

SEQ ID NO: 650303 - RNA, 19 nt, Artificial Sequence
  Description of Artificial Sequence: Synthetic oligonucleotide
  Antisense strand to SEQ ID NO: 650302
ugcaagagaaauaagcagc

SEQ ID NO: 650304 - RNA, 19 nt, Artificial Sequence
  Description of Artificial Sequence: Synthetic oligonucleotide
  Sense strand starting at position 2563 of SEQ ID NO: 585569
ggcagccuacccuagaauu

SEQ ID NO: 650305 - RNA, 19 nt, Artificial Sequence
  Description of Artificial Sequence: Synthetic oligonucleotide
  Antisense strand to SEQ ID NO: 650304
aauucuaggguaggcugcc

SEQ ID NO: 650306 - RNA, 19 nt, Artificial Sequence
  Description of Artificial Sequence: Synthetic oligonucleotide
  Sense strand starting at position 2585 of SEQ ID NO: 585569
uuugguaacgcccaaagau

SEQ ID NO: 650307 - RNA, 19 nt, Artificial Sequence
  Description of Artificial Sequence: Synthetic oligonucleotide
  Antisense strand to SEQ ID NO: 650306
aucuuugggcguuaccaaa

SEQ ID NO: 650308 - RNA, 19 nt, Artificial Sequence
  Description of Artificial Sequence: Synthetic oligonucleotide
  Sense strand starting at position 2796 of SEQ ID NO: 585569
ucccuaagagccgggauua

SEQ ID NO: 650309 - RNA, 19 nt, Artificial Sequence
  Description of Artificial Sequence: Synthetic oligonucleotide
  Antisense strand to SEQ ID NO: 650308
uaaucccggcucuuaggga

SEQ ID NO: 650310 - RNA, 19 nt, Artificial Sequence
  Description of Artificial Sequence: Synthetic oligonucleotide
  Sense strand starting at position 2845 of SEQ ID NO: 585569
gcaguauaaauguggaauu

SEQ ID NO: 650311 - RNA, 19 nt, Artificial Sequence
  Description of Artificial Sequence: Synthetic oligonucleotide
  Antisense strand to SEQ ID NO: 650310
aauuccacauuuauacugc

SEQ ID NO: 650312 - RNA, 19 nt, Artificial Sequence
  Description of Artificial Sequence: Synthetic oligonucleotide
  Sense strand starting at position 2944 of SEQ ID NO: 585569
cugauuaauggauguacua

SEQ ID NO: 650313 - RNA, 19 nt, Artificial Sequence
  Description of Artificial Sequence: Synthetic oligonucleotide
  Antisense strand to SEQ ID NO: 650312
uaguacauccauuaaucag

SEQ ID NO: 650314 - RNA, 19 nt, Artificial Sequence
  Description of Artificial Sequence: Synthetic oligonucleotide
  Sense strand starting at position 2972 of SEQ ID NO: 585569
auuagccugguguauaauu

SEQ ID NO: 650315 - RNA, 19 nt, Artificial Sequence
  Description of Artificial Sequence: Synthetic oligonucleotide
  Antisense strand to SEQ ID NO: 650314
aauuauacaccaggcuaau

SEQ ID NO: 650316 - RNA, 19 nt, Artificial Sequence
  Description of Artificial Sequence: Synthetic oligonucleotide
  Sense strand starting at position 2982 of SEQ ID NO: 585569
uguauaauuuaucuuggcu

SEQ ID NO: 650317 - RNA, 19 nt, Artificial Sequence
  Description of Artificial Sequence: Synthetic oligonucleotide
  Antisense strand to SEQ ID NO: 650316
agccaagauaaauuauaca

SEQ ID NO: 650318 - RNA, 19 nt, Artificial Sequence
  Description of Artificial Sequence: Synthetic oligonucleotide
  Sense strand starting at position 3030 of SEQ ID NO: 585569
gggaaaucccucugccuug

SEQ ID NO: 650319 - RNA, 19 nt, Artificial Sequence
  Description of Artificial Sequence: Synthetic oligonucleotide
  Antisense strand to SEQ ID NO: 650318
caaggcagagggauuuccc

SEQ ID NO: 650320 - RNA, 19 nt, Artificial Sequence
  Description of Artificial Sequence: Synthetic oligonucleotide
  Sense strand starting at position 3080 of SEQ ID NO: 585569
ggugauaauucgccaaaua

SEQ ID NO: 650321 - RNA, 19 nt, Artificial Sequence
  Description of Artificial Sequence: Synthetic oligonucleotide
  Antisense strand to SEQ ID NO: 650320
uauuuggcgaauuaucacc

SEQ ID NO: 650322 - RNA, 19 nt, Artificial Sequence
  Description of Artificial Sequence: Synthetic oligonucleotide
  Sense strand starting at position 3081 of SEQ ID NO: 585569
gugauaauucgccaaauau

SEQ ID NO: 650323 - RNA, 19 nt, Artificial Sequence
  Description of Artificial Sequence: Synthetic oligonucleotide
  Antisense strand to SEQ ID NO: 650322
auauuuggcgaauuaucac

SEQ ID NO: 650324 - RNA, 19 nt, Artificial Sequence
  Description of Artificial Sequence: Synthetic oligonucleotide
  Sense strand starting at position 3178 of SEQ ID NO: 585569
aguguauuaaacugggaaa

SEQ ID NO: 650325 - RNA, 19 nt, Artificial Sequence
  Description of Artificial Sequence: Synthetic oligonucleotide
  Antisense strand to SEQ ID NO: 650324
uuucccaguuuaauacacu

SEQ ID NO: 650326 - RNA, 19 nt, Artificial Sequence
  Description of Artificial Sequence: Synthetic oligonucleotide
  Sense strand starting at position 3179 of SEQ ID NO: 585569
guguauuaaacugggaaag

SEQ ID NO: 650327 - RNA, 19 nt, Artificial Sequence
  Description of Artificial Sequence: Synthetic oligonucleotide
  Antisense strand to SEQ ID NO: 650326
cuuucccaguuuaauacac

SEQ ID NO: 650328 - RNA, 19 nt, Artificial Sequence
  Description of Artificial Sequence: Synthetic oligonucleotide
  Sense strand starting at position 3211 of SEQ ID NO: 585569
uacugauggguauggcuua

SEQ ID NO: 650329 - RNA, 19 nt, Artificial Sequence
  Description of Artificial Sequence: Synthetic oligonucleotide
  Antisense strand to SEQ ID NO: 650328
uaagccauacccaucagua

SEQ ID NO: 650330 - RNA, 19 nt, Artificial Sequence
  Description of Artificial Sequence: Synthetic oligonucleotide
  Sense strand starting at position 3258 of SEQ ID NO: 585569
gaggguguuggaggaagau

SEQ ID NO: 650331 - RNA, 19 nt, Artificial Sequence
  Description of Artificial Sequence: Synthetic oligonucleotide
  Antisense strand to SEQ ID NO: 650330
aucuuccuccaacacccuc

SEQ ID NO: 650332 - RNA, 19 nt, Artificial Sequence
  Description of Artificial Sequence: Synthetic oligonucleotide
  Sense strand starting at position 3267 of SEQ ID NO: 585569
ggaggaagauggcuugauu

SEQ ID NO: 650333 - RNA, 19 nt, Artificial Sequence
  Description of Artificial Sequence: Synthetic oligonucleotide
  Antisense strand to SEQ ID NO: 650332
aaucaagccaucuuccucc

SEQ ID NO: 650334 - RNA, 19 nt, Artificial Sequence
  Description of Artificial Sequence: Synthetic oligonucleotide
  Sense strand starting at position 3289 of SEQ ID NO: 585569
guuggacucugaucugaua

SEQ ID NO: 650335 - RNA, 19 nt, Artificial Sequence
  Description of Artificial Sequence: Synthetic oligonucleotide
  Antisense strand to SEQ ID NO: 650334
uaucagaucagaguccaac

SEQ ID NO: 650336 - RNA, 19 nt, Artificial Sequence
  Description of Artificial Sequence: Synthetic oligonucleotide
  Sense strand starting at position 3304 of SEQ ID NO: 585569
gauacagcgguuuaagauu

SEQ ID NO: 650337 - RNA, 19 nt, Artificial Sequence
  Description of Artificial Sequence: Synthetic oligonucleotide
  Antisense strand to SEQ ID NO: 650336
aaucuuaaaccgcuguauc

SEQ ID NO: 650338 - RNA, 19 nt, Artificial Sequence
  Description of Artificial Sequence: Synthetic oligonucleotide
  Sense strand starting at position 3348 of SEQ ID NO: 585569
agccuuaaggcauaaacua

SEQ ID NO: 650339 - RNA, 19 nt, Artificial Sequence
  Description of Artificial Sequence: Synthetic oligonucleotide
  Antisense strand to SEQ ID NO: 650338
uaguuuaugccuuaaggcu

SEQ ID NO: 650340 - RNA, 19 nt, Artificial Sequence
  Description of Artificial Sequence: Synthetic oligonucleotide
  Sense strand starting at position 3769 of SEQ ID NO: 585569
cuucuagaacaguaaaguu

SEQ ID NO: 650341 - RNA, 19 nt, Artificial Sequence
  Description of Artificial Sequence: Synthetic oligonucleotide
  Antisense strand to SEQ ID NO: 650340
aacuuuacuguucuagaag

SEQ ID NO: 650342 - RNA, 19 nt, Artificial Sequence
  Description of Artificial Sequence: Synthetic oligonucleotide
  Sense strand starting at position 3778 of SEQ ID NO: 585569
caguaaaguuaugcuaaug

SEQ ID NO: 650343 - RNA, 19 nt, Artificial Sequence
  Description of Artificial Sequence: Synthetic oligonucleotide
  Antisense strand to SEQ ID NO: 650342
cauuagcauaacuuuacug

SEQ ID NO: 650344 - RNA, 19 nt, Artificial Sequence
  Description of Artificial Sequence: Synthetic oligonucleotide
  Sense strand starting at position 3920 of SEQ ID NO: 585569
aagauagugccaugaugag

SEQ ID NO: 650345 - RNA, 19 nt, Artificial Sequence
  Description of Artificial Sequence: Synthetic oligonucleotide
  Antisense strand to SEQ ID NO: 650344
cucaucauggcacuaucuu

SEQ ID NO: 650346 - RNA, 19 nt, Artificial Sequence
  Description of Artificial Sequence: Synthetic oligonucleotide
  Sense strand starting at position 3938 of SEQ ID NO: 585569
gaaacaaauuguguuuagu

SEQ ID NO: 650347 - RNA, 19 nt, Artificial Sequence
  Description of Artificial Sequence: Synthetic oligonucleotide
  Antisense strand to SEQ ID NO: 650346
acuaaacacaauuuguuuc

SEQ ID NO: 650348 - RNA, 19 nt, Artificial Sequence
  Description of Artificial Sequence: Synthetic oligonucleotide
  Sense strand starting at position 3971 of SEQ ID NO: 585569
guucuuuguaaagacugua

SEQ ID NO: 650349 - RNA, 19 nt, Artificial Sequence
  Description of Artificial Sequence: Synthetic oligonucleotide
  Antisense strand to SEQ ID NO: 650348
uacagucuuuacaaagaac

SEQ ID NO: 650350 - RNA, 19 nt, Artificial Sequence
  Description of Artificial Sequence: Synthetic oligonucleotide
  Sense strand starting at position 3974 of SEQ ID NO: 585569
cuuuguaaagacuguaaau

SEQ ID NO: 650351 - RNA, 19 nt, Artificial Sequence
  Description of Artificial Sequence: Synthetic oligonucleotide
  Antisense strand to SEQ ID NO: 650350
auuuacagucuuuacaaag

SEQ ID NO: 650352 - RNA, 19 nt, Artificial Sequence
  Description of Artificial Sequence: Synthetic oligonucleotide
  Sense strand starting at position 531 of SEQ ID NO: 585570
agaggaacuuucucauucu

SEQ ID NO: 650353 - RNA, 19 nt, Artificial Sequence
  Description of Artificial Sequence: Synthetic oligonucleotide
  Antisense strand to SEQ ID NO: 650352
agaaugagaaaguuccucu

SEQ ID NO: 650354 - RNA, 19 nt, Artificial Sequence
  Description of Artificial Sequence: Synthetic oligonucleotide
  Sense strand starting at position 760 of SEQ ID NO: 585570
agagcagucuuacaauuuc

SEQ ID NO: 650355 - RNA, 19 nt, Artificial Sequence
  Description of Artificial Sequence: Synthetic oligonucleotide
  Antisense strand to SEQ ID NO: 650354
gaaauuguaagacugcucu

SEQ ID NO: 650356 - RNA, 19 nt, Artificial Sequence
  Description of Artificial Sequence: Synthetic oligonucleotide
  Sense strand starting at position 793 of SEQ ID NO: 585570
cccauuuacuuagagguau

SEQ ID NO: 650357 - RNA, 19 nt, Artificial Sequence
  Description of Artificial Sequence: Synthetic oligonucleotide
  Antisense strand to SEQ ID NO: 650356
auaccucuaaguaaauggg

SEQ ID NO: 650358 - RNA, 19 nt, Artificial Sequence
  Description of Artificial Sequence: Synthetic oligonucleotide
  Sense strand starting at position 805 of SEQ ID NO: 585570
gagguauuacuauguguug

SEQ ID NO: 650359 - RNA, 19 nt, Artificial Sequence
  Description of Artificial Sequence: Synthetic oligonucleotide
  Antisense strand to SEQ ID NO: 650358
caacacauaguaauaccuc

SEQ ID NO: 650360 - RNA, 19 nt, Artificial Sequence
  Description of Artificial Sequence: Synthetic oligonucleotide
  Sense strand starting at position 885 of SEQ ID NO: 585570
guaacuugcccauaguaua

SEQ ID NO: 650361 - RNA, 19 nt, Artificial Sequence
  Description of Artificial Sequence: Synthetic oligonucleotide
  Antisense strand to SEQ ID NO: 650360
uauacuaugggcaaguuac

SEQ ID NO: 650362 - RNA, 19 nt, Artificial Sequence
  Description of Artificial Sequence: Synthetic oligonucleotide
  Sense strand starting at position 896 of SEQ ID NO: 585570
auaguauaccgcuaauaag

SEQ ID NO: 650363 - RNA, 19 nt, Artificial Sequence
  Description of Artificial Sequence: Synthetic oligonucleotide
  Antisense strand to SEQ ID NO: 650362
cuuauuagcgguauacuau

SEQ ID NO: 650364 - RNA, 19 nt, Artificial Sequence
  Description of Artificial Sequence: Synthetic oligonucleotide
  Sense strand starting at position 941 of SEQ ID NO: 585570
uagcuagcuccagacuguu

SEQ ID NO: 650365 - RNA, 19 nt, Artificial Sequence
  Description of Artificial Sequence: Synthetic oligonucleotide
  Antisense strand to SEQ ID NO: 650364
aacagucuggagcuagcua

SEQ ID NO: 650366 - RNA, 19 nt, Artificial Sequence
  Description of Artificial Sequence: Synthetic oligonucleotide
  Sense strand starting at position 1014 of SEQ ID NO: 585570
gcauuaggcagauguucuu

SEQ ID NO: 650367 - RNA, 19 nt, Artificial Sequence
  Description of Artificial Sequence: Synthetic oligonucleotide
  Antisense strand to SEQ ID NO: 650366
aagaacaucugccuaaugc

SEQ ID NO: 650368 - RNA, 19 nt, Artificial Sequence
  Description of Artificial Sequence: Synthetic oligonucleotide
  Sense strand starting at position 1020 of SEQ ID NO: 585570
ggcagauguucuuuccacu

SEQ ID NO: 650369 - RNA, 19 nt, Artificial Sequence
  Description of Artificial Sequence: Synthetic oligonucleotide
  Antisense strand to SEQ ID NO: 650368
aguggaaagaacaucugcc

SEQ ID NO: 650370 - RNA, 19 nt, Artificial Sequence
  Description of Artificial Sequence: Synthetic oligonucleotide
  Sense strand starting at position 1052 of SEQ ID NO: 585570
aacuaagguucugagaaga

SEQ ID NO: 650371 - RNA, 19 nt, Artificial Sequence
  Description of Artificial Sequence: Synthetic oligonucleotide
  Antisense strand to SEQ ID NO: 650370
ucuucucagaaccuuaguu

SEQ ID NO: 650372 - RNA, 19 nt, Artificial Sequence
  Description of Artificial Sequence: Synthetic oligonucleotide
  Sense strand starting at position 1081 of SEQ ID NO: 585570
aagguuacauaguuagaag

SEQ ID NO: 650373 - RNA, 19 nt, Artificial Sequence
  Description of Artificial Sequence: Synthetic oligonucleotide
  Antisense strand to SEQ ID NO: 650372
cuucuaacuauguaaccuu

SEQ ID NO: 650374 - RNA, 19 nt, Artificial Sequence
  Description of Artificial Sequence: Synthetic oligonucleotide
  Sense strand starting at position 1082 of SEQ ID NO: 585570
agguuacauaguuagaagu

SEQ ID NO: 650375 - RNA, 19 nt, Artificial Sequence
  Description of Artificial Sequence: Synthetic oligonucleotide
  Antisense strand to SEQ ID NO: 650374
acuucuaacuauguaaccu

SEQ ID NO: 650376 - RNA, 19 nt, Artificial Sequence
  Description of Artificial Sequence: Synthetic oligonucleotide
  Sense strand starting at position 1099 of SEQ ID NO: 585570
guugguggacaugaacauu

SEQ ID NO: 650377 - RNA, 19 nt, Artificial Sequence
  Description of Artificial Sequence: Synthetic oligonucleotide
  Antisense strand to SEQ ID NO: 650376
aauguucauguccaccaac

SEQ ID NO: 650378 - RNA, 19 nt, Artificial Sequence
  Description of Artificial Sequence: Synthetic oligonucleotide
  Sense strand starting at position 1109 of SEQ ID NO: 585570
augaacauuucuggcuaca

SEQ ID NO: 650379 - RNA, 19 nt, Artificial Sequence
  Description of Artificial Sequence: Synthetic oligonucleotide
  Antisense strand to SEQ ID NO: 650378
uguagccagaaauguucau

SEQ ID NO: 650380 - RNA, 19 nt, Artificial Sequence
  Description of Artificial Sequence: Synthetic oligonucleotide
  Sense strand starting at position 1192 of SEQ ID NO: 585570
ggcaacuccaggugaagau

SEQ ID NO: 650381 - RNA, 19 nt, Artificial Sequence
  Description of Artificial Sequence: Synthetic oligonucleotide
  Antisense strand to SEQ ID NO: 650380
aucuucaccuggaguugcc

SEQ ID NO: 650382 - RNA, 19 nt, Artificial Sequence
  Description of Artificial Sequence: Synthetic oligonucleotide
  Sense strand starting at position 2364 of SEQ ID NO: 585570
ggcugcguucgcagagaaa

SEQ ID NO: 650383 - RNA, 19 nt, Artificial Sequence
  Description of Artificial Sequence: Synthetic oligonucleotide
  Antisense strand to SEQ ID NO: 650382
uuucucugcgaacgcagcc

SEQ ID NO: 650384 - RNA, 19 nt, Artificial Sequence
  Description of Artificial Sequence: Synthetic oligonucleotide
  Sense strand starting at position 2467 of SEQ ID NO: 585570
augcccguugguuauuaua

SEQ ID NO: 650385 - RNA, 19 nt, Artificial Sequence
  Description of Artificial Sequence: Synthetic oligonucleotide
  Antisense strand to SEQ ID NO: 650384
uauaauaaccaacgggcau

SEQ ID NO: 650386 - RNA, 19 nt, Artificial Sequence
  Description of Artificial Sequence: Synthetic oligonucleotide
  Sense strand starting at position 2476 of SEQ ID NO: 585570
gguuauuauagguggugga

SEQ ID NO: 650387 - RNA, 19 nt, Artificial Sequence
  Description of Artificial Sequence: Synthetic oligonucleotide
  Antisense strand to SEQ ID NO: 650386
uccaccaccuauaauaacc

SEQ ID NO: 650388 - RNA, 19 nt, Artificial Sequence
  Description of Artificial Sequence: Synthetic oligonucleotide
  Sense strand starting at position 2549 of SEQ ID NO: 585570
ugccucagcguugucagaa

SEQ ID NO: 650389 - RNA, 19 nt, Artificial Sequence
  Description of Artificial Sequence: Synthetic oligonucleotide
  Antisense strand to SEQ ID NO: 650388
uucugacaacgcugaggca

SEQ ID NO: 650390 - RNA, 19 nt, Artificial Sequence
  Description of Artificial Sequence: Synthetic oligonucleotide
  Sense strand starting at position 2559 of SEQ ID NO: 585570
uugucagaacucugugaga

SEQ ID NO: 650391 - RNA, 19 nt, Artificial Sequence
  Description of Artificial Sequence: Synthetic oligonucleotide
  Antisense strand to SEQ ID NO: 650390
ucucacagaguucugacaa

SEQ ID NO: 650392 - RNA, 19 nt, Artificial Sequence
  Description of Artificial Sequence: Synthetic oligonucleotide
  Sense strand starting at position 2561 of SEQ ID NO: 585570
gucagaacucugugagaug

SEQ ID NO: 650393 - RNA, 19 nt, Artificial Sequence
  Description of Artificial Sequence: Synthetic oligonucleotide
  Antisense strand to SEQ ID NO: 650392
caucucacagaguucugac

SEQ ID NO: 650394 - RNA, 19 nt, Artificial Sequence
  Description of Artificial Sequence: Synthetic oligonucleotide
  Sense strand starting at position 2591 of SEQ ID NO: 585570
cuacaucugcguuauuaag

SEQ ID NO: 650395 - RNA, 19 nt, Artificial Sequence
  Description of Artificial Sequence: Synthetic oligonucleotide
  Antisense strand to SEQ ID NO: 650394
cuuaauaacgcagauguag

SEQ ID NO: 650396 - RNA, 19 nt, Artificial Sequence
  Description of Artificial Sequence: Synthetic oligonucleotide
  Sense strand starting at position 2995 of SEQ ID NO: 585570
ggcaacuguacuugacgua

SEQ ID NO: 650397 - RNA, 19 nt, Artificial Sequence
  Description of Artificial Sequence: Synthetic oligonucleotide
  Antisense strand to SEQ ID NO: 650396
uacgucaaguacaguugcc

SEQ ID NO: 650398 - RNA, 19 nt, Artificial Sequence
  Description of Artificial Sequence: Synthetic oligonucleotide
  Sense strand starting at position 2996 of SEQ ID NO: 585570
gcaacuguacuugacguaa

SEQ ID NO: 650399 - RNA, 19 nt, Artificial Sequence
  Description of Artificial Sequence: Synthetic oligonucleotide
  Antisense strand to SEQ ID NO: 650398
uuacgucaaguacaguugc

SEQ ID NO: 650400 - RNA, 19 nt, Artificial Sequence
  Description of Artificial Sequence: Synthetic oligonucleotide
  Sense strand starting at position 3009 of SEQ ID NO: 585570
acguaagucugguccuaca

SEQ ID NO: 650401 - RNA, 19 nt, Artificial Sequence
  Description of Artificial Sequence: Synthetic oligonucleotide
  Antisense strand to SEQ ID NO: 650400
uguaggaccagacuuacgu

SEQ ID NO: 650402 - RNA, 19 nt, Artificial Sequence
  Description of Artificial Sequence: Synthetic oligonucleotide
  Sense strand starting at position 3085 of SEQ ID NO: 585570
agugcuaaagcccaggaaa

SEQ ID NO: 650403 - RNA, 19 nt, Artificial Sequence
  Description of Artificial Sequence: Synthetic oligonucleotide
  Antisense strand to SEQ ID NO: 650402
uuuccugggcuuuagcacu

SEQ ID NO: 650404 - RNA, 19 nt, Artificial Sequence
  Description of Artificial Sequence: Synthetic oligonucleotide
  Sense strand starting at position 3107 of SEQ ID NO: 585570
uggacaaacugcucaacuu

SEQ ID NO: 650405 - RNA, 19 nt, Artificial Sequence
  Description of Artificial Sequence: Synthetic oligonucleotide
  Antisense strand to SEQ ID NO: 650404
aaguugagcaguuugucca

SEQ ID NO: 650406 - RNA, 19 nt, Artificial Sequence
  Description of Artificial Sequence: Synthetic oligonucleotide
  Sense strand starting at position 3145 of SEQ ID NO: 585570
ugacaugcccgaggcaaua

SEQ ID NO: 650407 - RNA, 19 nt, Artificial Sequence
  Description of Artificial Sequence: Synthetic oligonucleotide
  Antisense strand to SEQ ID NO: 650406
uauugccucgggcauguca

SEQ ID NO: 650408 - RNA, 19 nt, Artificial Sequence
  Description of Artificial Sequence: Synthetic oligonucleotide
  Sense strand starting at position 3192 of SEQ ID NO: 585570
uaccguugccagucuguaa

SEQ ID NO: 650409 - RNA, 19 nt, Artificial Sequence
  Description of Artificial Sequence: Synthetic oligonucleotide
  Antisense strand to SEQ ID NO: 650408
uuacagacuggcaacggua

SEQ ID NO: 650410 - RNA, 19 nt, Artificial Sequence
  Description of Artificial Sequence: Synthetic oligonucleotide
  Sense strand starting at position 3331 of SEQ ID NO: 585570
uuguaaauugcagagcugu

SEQ ID NO: 650411 - RNA, 19 nt, Artificial Sequence
  Description of Artificial Sequence: Synthetic oligonucleotide
  Antisense strand to SEQ ID NO: 650410
acagcucugcaauuuacaa

SEQ ID NO: 650412 - RNA, 19 nt, Artificial Sequence
  Description of Artificial Sequence: Synthetic oligonucleotide
  Sense strand starting at position 3367 of SEQ ID NO: 585570
agcuuaggguccuaauuua

SEQ ID NO: 650413 - RNA, 19 nt, Artificial Sequence
  Description of Artificial Sequence: Synthetic oligonucleotide
  Antisense strand to SEQ ID NO: 650412
uaaauuaggacccuaagcu

SEQ ID NO: 650414 - RNA, 19 nt, Artificial Sequence
  Description of Artificial Sequence: Synthetic oligonucleotide
  Sense strand starting at position 3451 of SEQ ID NO: 585570
gacauagucucgcuagacu

SEQ ID NO: 650415 - RNA, 19 nt, Artificial Sequence
  Description of Artificial Sequence: Synthetic oligonucleotide
  Antisense strand to SEQ ID NO: 650414
agucuagcgagacuauguc

SEQ ID NO: 650416 - RNA, 19 nt, Artificial Sequence
  Description of Artificial Sequence: Synthetic oligonucleotide
  Sense strand starting at position 3567 of SEQ ID NO: 585570
ggguucuuauaguuacuuu

SEQ ID NO: 650417 - RNA, 19 nt, Artificial Sequence
  Description of Artificial Sequence: Synthetic oligonucleotide
  Antisense strand to SEQ ID NO: 650416
aaaguaacuauaagaaccc

SEQ ID NO: 650418 - RNA, 19 nt, Artificial Sequence
  Description of Artificial Sequence: Synthetic oligonucleotide
  Sense strand starting at position 3621 of SEQ ID NO: 585570
aaauuugcuugggauagcu

SEQ ID NO: 650419 - RNA, 19 nt, Artificial Sequence
  Description of Artificial Sequence: Synthetic oligonucleotide
  Antisense strand to SEQ ID NO: 650418
agcuaucccaagcaaauuu

SEQ ID NO: 650420 - RNA, 19 nt, Artificial Sequence
  Description of Artificial Sequence: Synthetic oligonucleotide
  Sense strand starting at position 3666 of SEQ ID NO: 585570
gaaacugaauaguaggaaa

SEQ ID NO: 650421 - RNA, 19 nt, Artificial Sequence
  Description of Artificial Sequence: Synthetic oligonucleotide
  Antisense strand to SEQ ID NO: 650420
uuuccuacuauucaguuuc

SEQ ID NO: 650422 - RNA, 19 nt, Artificial Sequence
  Description of Artificial Sequence: Synthetic oligonucleotide
  Sense strand starting at position 3669 of SEQ ID NO: 585570
acugaauaguaggaaauuu

SEQ ID NO: 650423 - RNA, 19 nt, Artificial Sequence
  Description of Artificial Sequence: Synthetic oligonucleotide
  Antisense strand to SEQ ID NO: 650422
aaauuuccuacuauucagu

SEQ ID NO: 650424 - RNA, 19 nt, Artificial Sequence
  Description of Artificial Sequence: Synthetic oligonucleotide
  Sense strand starting at position 3767 of SEQ ID NO: 585570
aggucuuucuauguauuag

SEQ ID NO: 650425 - RNA, 19 nt, Artificial Sequence
  Description of Artificial Sequence: Synthetic oligonucleotide
  Antisense strand to SEQ ID NO: 650424
cuaauacauagaaagaccu

SEQ ID NO: 650426 - RNA, 19 nt, Artificial Sequence
  Description of Artificial Sequence: Synthetic oligonucleotide
  Sense strand starting at position 3828 of SEQ ID NO: 585570
gcagguggauguguaaauu

SEQ ID NO: 650427 - RNA, 19 nt, Artificial Sequence
  Description of Artificial Sequence: Synthetic oligonucleotide
  Antisense strand to SEQ ID NO: 650426
aauuuacacauccaccugc

SEQ ID NO: 650428 - RNA, 19 nt, Artificial Sequence
  Description of Artificial Sequence: Synthetic oligonucleotide
  Sense strand starting at position 3834 of SEQ ID NO: 585570
ggauguguaaauuguuaac

SEQ ID NO: 650429 - RNA, 19 nt, Artificial Sequence
  Description of Artificial Sequence: Synthetic oligonucleotide
  Antisense strand to SEQ ID NO: 650428
guuaacaauuuacacaucc

SEQ ID NO: 650430 - RNA, 19 nt, Artificial Sequence
  Description of Artificial Sequence: Synthetic oligonucleotide
  Sense strand starting at position 3846 of SEQ ID NO: 585570
uguuaacuucuauggaaau

SEQ ID NO: 650431 - RNA, 19 nt, Artificial Sequence
  Description of Artificial Sequence: Synthetic oligonucleotide
  Antisense strand to SEQ ID NO: 650430
auuuccauagaaguuaaca

SEQ ID NO: 650432 - RNA, 19 nt, Artificial Sequence
  Description of Artificial Sequence: Synthetic oligonucleotide
  Sense strand starting at position 105 of SEQ ID NO: 585571
guauuaguagcagagauau

SEQ ID NO: 650433 - RNA, 19 nt, Artificial Sequence
  Description of Artificial Sequence: Synthetic oligonucleotide
  Antisense strand to SEQ ID NO: 650432
auaucucugcuacuaauac

SEQ ID NO: 650434 - RNA, 19 nt, Artificial Sequence
  Description of Artificial Sequence: Synthetic oligonucleotide
  Sense strand starting at position 113 of SEQ ID NO: 585571
agcagagauauaugagcua

SEQ ID NO: 650435 - RNA, 19 nt, Artificial Sequence
  Description of Artificial Sequence: Synthetic oligonucleotide
  Antisense strand to SEQ ID NO: 650434
uagcucauauaucucugcu

SEQ ID NO: 650436 - RNA, 19 nt, Artificial Sequence
  Description of Artificial Sequence: Synthetic oligonucleotide
  Sense strand starting at position 252 of SEQ ID NO: 585571
gagcaaaugcuaggauauu

SEQ ID NO: 650437 - RNA, 19 nt, Artificial Sequence
  Description of Artificial Sequence: Synthetic oligonucleotide
  Antisense strand to SEQ ID NO: 650436
aauauccuagcauuugcuc

SEQ ID NO: 650438 - RNA, 19 nt, Artificial Sequence
  Description of Artificial Sequence: Synthetic oligonucleotide
  Sense strand starting at position 362 of SEQ ID NO: 585571
uuugcaagaguuuaugauu

SEQ ID NO: 650439 - RNA, 19 nt, Artificial Sequence
  Description of Artificial Sequence: Synthetic oligonucleotide
  Antisense strand to SEQ ID NO: 650438
aaucauaaacucuugcaaa

SEQ ID NO: 650440 - RNA, 19 nt, Artificial Sequence
  Description of Artificial Sequence: Synthetic oligonucleotide
  Sense strand starting at position 511 of SEQ ID NO: 585571
ucaggaaggugcuuauaaa

SEQ ID NO: 650441 - RNA, 19 nt, Artificial Sequence
  Description of Artificial Sequence: Synthetic oligonucleotide
  Antisense strand to SEQ ID NO: 650440
uuuauaagcaccuuccuga

SEQ ID NO: 650442 - RNA, 19 nt, Artificial Sequence
  Description of Artificial Sequence: Synthetic oligonucleotide
  Sense strand starting at position 673 of SEQ ID NO: 585571
ggccaaccucuguaaaucu

SEQ ID NO: 650443 - RNA, 19 nt, Artificial Sequence
  Description of Artificial Sequence: Synthetic oligonucleotide
  Antisense strand to SEQ ID NO: 650442
agauuuacagagguuggcc

SEQ ID NO: 650444 - RNA, 19 nt, Artificial Sequence
  Description of Artificial Sequence: Synthetic oligonucleotide
  Sense strand starting at position 725 of SEQ ID NO: 585571
ucaggaagaucacuuacga

SEQ ID NO: 650445 - RNA, 19 nt, Artificial Sequence
  Description of Artificial Sequence: Synthetic oligonucleotide
  Antisense strand to SEQ ID NO: 650444
ucguaagugaucuuccuga

SEQ ID NO: 650446 - RNA, 19 nt, Artificial Sequence
  Description of Artificial Sequence: Synthetic oligonucleotide
  Sense strand starting at position 1689 of SEQ ID NO: 585571
cugcucugagcguucucau

SEQ ID NO: 650447 - RNA, 19 nt, Artificial Sequence
  Description of Artificial Sequence: Synthetic oligonucleotide
  Antisense strand to SEQ ID NO: 650446
augagaacgcucagagcag

SEQ ID NO: 650448 - RNA, 19 nt, Artificial Sequence
  Description of Artificial Sequence: Synthetic oligonucleotide
  Sense strand starting at position 1696 of SEQ ID NO: 585571
gagcguucucaugaagacc

SEQ ID NO: 650449 - RNA, 19 nt, Artificial Sequence
  Description of Artificial Sequence: Synthetic oligonucleotide
  Antisense strand to SEQ ID NO: 650448
ggucuucaugagaacgcuc

SEQ ID NO: 650450 - RNA, 19 nt, Artificial Sequence
  Description of Artificial Sequence: Synthetic oligonucleotide
  Sense strand starting at position 2070 of SEQ ID NO: 585571
aguaaauaguagccaagau

SEQ ID NO: 650451 - RNA, 19 nt, Artificial Sequence
  Description of Artificial Sequence: Synthetic oligonucleotide
  Antisense strand to SEQ ID NO: 650450
aucuuggcuacuauuuacu

SEQ ID NO: 650452 - RNA, 19 nt, Artificial Sequence
  Description of Artificial Sequence: Synthetic oligonucleotide
  Sense strand starting at position 2162 of SEQ ID NO: 585571
gaacgaaacuuaguggcau

SEQ ID NO: 650453 - RNA, 19 nt, Artificial Sequence
  Description of Artificial Sequence: Synthetic oligonucleotide
  Antisense strand to SEQ ID NO: 650452
augccacuaaguuucguuc

SEQ ID NO: 650454 - RNA, 19 nt, Artificial Sequence
  Description of Artificial Sequence: Synthetic oligonucleotide
  Sense strand starting at position 2195 of SEQ ID NO: 585571
aacacuugauguguaagau

SEQ ID NO: 650455 - RNA, 19 nt, Artificial Sequence
  Description of Artificial Sequence: Synthetic oligonucleotide
  Antisense strand to SEQ ID NO: 650454
aucuuacacaucaaguguu

SEQ ID NO: 650456 - RNA, 19 nt, Artificial Sequence
  Description of Artificial Sequence: Synthetic oligonucleotide
  Sense strand starting at position 2201 of SEQ ID NO: 585571
ugauguguaagaugagcaa

SEQ ID NO: 650457 - RNA, 19 nt, Artificial Sequence
  Description of Artificial Sequence: Synthetic oligonucleotide
  Antisense strand to SEQ ID NO: 650456
uugcucaucuuacacauca

SEQ ID NO: 650458 - RNA, 19 nt, Artificial Sequence
  Description of Artificial Sequence: Synthetic oligonucleotide
  Sense strand starting at position 2281 of SEQ ID NO: 585571
auggaaaugcaccauaugu

SEQ ID NO: 650459 - RNA, 19 nt, Artificial Sequence
  Description of Artificial Sequence: Synthetic oligonucleotide
  Antisense strand to SEQ ID NO: 650458
acauauggugcauuuccau

SEQ ID NO: 650460 - RNA, 19 nt, Artificial Sequence
  Description of Artificial Sequence: Synthetic oligonucleotide
  Sense strand starting at position 2283 of SEQ ID NO: 585571
ggaaaugcaccauauguuu

SEQ ID NO: 650461 - RNA, 19 nt, Artificial Sequence
  Description of Artificial Sequence: Synthetic oligonucleotide
  Antisense strand to SEQ ID NO: 650460
aaacauauggugcauuucc

SEQ ID NO: 650462 - RNA, 19 nt, Artificial Sequence
  Description of Artificial Sequence: Synthetic oligonucleotide
  Sense strand starting at position 2347 of SEQ ID NO: 585571
agguuauguauggaggguu

SEQ ID NO: 650463 - RNA, 19 nt, Artificial Sequence
  Description of Artificial Sequence: Synthetic oligonucleotide
  Antisense strand to SEQ ID NO: 650462
aacccuccauacauaaccu

SEQ ID NO: 650464 - RNA, 19 nt, Artificial Sequence
  Description of Artificial Sequence: Synthetic oligonucleotide
  Sense strand starting at position 2374 of SEQ ID NO: 585571
uuguuuauuccugaggagg

SEQ ID NO: 650465 - RNA, 19 nt, Artificial Sequence
  Description of Artificial Sequence: Synthetic oligonucleotide
  Antisense strand to SEQ ID NO: 650464
ccuccucaggaauaaacaa

SEQ ID NO: 650466 - RNA, 19 nt, Artificial Sequence
  Description of Artificial Sequence: Synthetic oligonucleotide
  Sense strand starting at position 2385 of SEQ ID NO: 585571
ugaggaggguccuuuacaa

SEQ ID NO: 650467 - RNA, 19 nt, Artificial Sequence
  Description of Artificial Sequence: Synthetic oligonucleotide
  Antisense strand to SEQ ID NO: 650466
uuguaaaggacccuccuca

SEQ ID NO: 650468 - RNA, 19 nt, Artificial Sequence
  Description of Artificial Sequence: Synthetic oligonucleotide
  Sense strand starting at position 2482 of SEQ ID NO: 585571
guauaugaucuuuaugcac

SEQ ID NO: 650469 - RNA, 19 nt, Artificial Sequence
  Description of Artificial Sequence: Synthetic oligonucleotide
  Antisense strand to SEQ ID NO: 650468
gugcauaaagaucauauac

SEQ ID NO: 650470 - RNA, 19 nt, Artificial Sequence
  Description of Artificial Sequence: Synthetic oligonucleotide
  Sense strand starting at position 2517 of SEQ ID NO: 585571
aucuguuuauuugugaagu

SEQ ID NO: 650471 - RNA, 19 nt, Artificial Sequence
  Description of Artificial Sequence: Synthetic oligonucleotide
  Antisense strand to SEQ ID NO: 650470
acuucacaaauaaacagau

SEQ ID NO: 650472 - RNA, 19 nt, Artificial Sequence
  Description of Artificial Sequence: Synthetic oligonucleotide
  Sense strand starting at position 2611 of SEQ ID NO: 585571
acaagaauguuguccaacu

SEQ ID NO: 650473 - RNA, 19 nt, Artificial Sequence
  Description of Artificial Sequence: Synthetic oligonucleotide
  Antisense strand to SEQ ID NO: 650472
aguuggacaacauucuugu

SEQ ID NO: 650474 - RNA, 19 nt, Artificial Sequence
  Description of Artificial Sequence: Synthetic oligonucleotide
  Sense strand starting at position 2658 of SEQ ID NO: 585571
uuuggugaaugacuugaaa

SEQ ID NO: 650475 - RNA, 19 nt, Artificial Sequence
  Description of Artificial Sequence: Synthetic oligonucleotide
  Antisense strand to SEQ ID NO: 650474
uuucaagucauucaccaaa

SEQ ID NO: 650476 - RNA, 19 nt, Artificial Sequence
  Description of Artificial Sequence: Synthetic oligonucleotide
  Sense strand starting at position 2660 of SEQ ID NO: 585571
uggugaaugacuugaaagu

SEQ ID NO: 650477 - RNA, 19 nt, Artificial Sequence
  Description of Artificial Sequence: Synthetic oligonucleotide
  Antisense strand to SEQ ID NO: 650476
acuuucaagucauucacca

SEQ ID NO: 650478 - RNA, 19 nt, Artificial Sequence
  Description of Artificial Sequence: Synthetic oligonucleotide
  Sense strand starting at position 2889 of SEQ ID NO: 585571
cuuaaucuagugcacagau

SEQ ID NO: 650479 - RNA, 19 nt, Artificial Sequence
  Description of Artificial Sequence: Synthetic oligonucleotide
  Antisense strand to SEQ ID NO: 650478
aucugugcacuagauuaag

SEQ ID NO: 650480 - RNA, 19 nt, Artificial Sequence
  Description of Artificial Sequence: Synthetic oligonucleotide
  Sense strand starting at position 3027 of SEQ ID NO: 585571
gaugaaauguguuuggaca

SEQ ID NO: 650481 - RNA, 19 nt, Artificial Sequence
  Description of Artificial Sequence: Synthetic oligonucleotide
  Antisense strand to SEQ ID NO: 650480
uguccaaacacauuucauc

SEQ ID NO: 650482 - RNA, 19 nt, Artificial Sequence
  Description of Artificial Sequence: Synthetic oligonucleotide
  Sense strand starting at position 3028 of SEQ ID NO: 585571
augaaauguguuuggacag

SEQ ID NO: 650483 - RNA, 19 nt, Artificial Sequence
  Description of Artificial Sequence: Synthetic oligonucleotide
  Antisense strand to SEQ ID NO: 650482
cuguccaaacacauuucau

SEQ ID NO: 650484 - RNA, 19 nt, Artificial Sequence
  Description of Artificial Sequence: Synthetic oligonucleotide
  Sense strand starting at position 3083 of SEQ ID NO: 585571
aagaaauaucuuuggaguu

SEQ ID NO: 650485 - RNA, 19 nt, Artificial Sequence
  Description of Artificial Sequence: Synthetic oligonucleotide
  Antisense strand to SEQ ID NO: 650484
aacuccaaagauauuucuu

SEQ ID NO: 650486 - RNA, 19 nt, Artificial Sequence
  Description of Artificial Sequence: Synthetic oligonucleotide
  Sense strand starting at position 3113 of SEQ ID NO: 585571
aguuaucaauuacugguaa

SEQ ID NO: 650487 - RNA, 19 nt, Artificial Sequence
  Description of Artificial Sequence: Synthetic oligonucleotide
  Antisense strand to SEQ ID NO: 650486
uuaccaguaauugauaacu

SEQ ID NO: 650488 - RNA, 19 nt, Artificial Sequence
  Description of Artificial Sequence: Synthetic oligonucleotide
  Sense strand starting at position 3163 of SEQ ID NO: 585571
aguguuauuucucucacuc

SEQ ID NO: 650489 - RNA, 19 nt, Artificial Sequence
  Description of Artificial Sequence: Synthetic oligonucleotide
  Antisense strand to SEQ ID NO: 650488
gagugagagaaauaacacu

SEQ ID NO: 650490 - RNA, 19 nt, Artificial Sequence
  Description of Artificial Sequence: Synthetic oligonucleotide
  Sense strand starting at position 3203 of SEQ ID NO: 585571
caaauaagugugcaguaca

SEQ ID NO: 650491 - RNA, 19 nt, Artificial Sequence
  Description of Artificial Sequence: Synthetic oligonucleotide
  Antisense strand to SEQ ID NO: 650490
uguacugcacacuuauuug

SEQ ID NO: 650492 - RNA, 19 nt, Artificial Sequence
  Description of Artificial Sequence: Synthetic oligonucleotide
  Sense strand starting at position 3206 of SEQ ID NO: 585571
auaagugugcaguacaaca

SEQ ID NO: 650493 - RNA, 19 nt, Artificial Sequence
  Description of Artificial Sequence: Synthetic oligonucleotide
  Antisense strand to SEQ ID NO: 650492
uguuguacugcacacuuau

SEQ ID NO: 650494 - RNA, 19 nt, Artificial Sequence
  Description of Artificial Sequence: Synthetic oligonucleotide
  Sense strand starting at position 3242 of SEQ ID NO: 585571
gccugcuuucccuaggaaa

SEQ ID NO: 650495 - RNA, 19 nt, Artificial Sequence
  Description of Artificial Sequence: Synthetic oligonucleotide
  Antisense strand to SEQ ID NO: 650494
uuuccuagggaaagcaggc

SEQ ID NO: 650496 - RNA, 19 nt, Artificial Sequence
  Description of Artificial Sequence: Synthetic oligonucleotide
  Sense strand starting at position 3244 of SEQ ID NO: 585571
cugcuuucccuaggaaaug

SEQ ID NO: 650497 - RNA, 19 nt, Artificial Sequence
  Description of Artificial Sequence: Synthetic oligonucleotide
  Antisense strand to SEQ ID NO: 650496
cauuuccuagggaaagcag

SEQ ID NO: 650498 - RNA, 19 nt, Artificial Sequence
  Description of Artificial Sequence: Synthetic oligonucleotide
  Sense strand starting at position 3254 of SEQ ID NO: 585571
uaggaaaugugccuuacau

SEQ ID NO: 650499 - RNA, 19 nt, Artificial Sequence
  Description of Artificial Sequence: Synthetic oligonucleotide
  Antisense strand to SEQ ID NO: 650498
auguaaggcacauuuccua

SEQ ID NO: 650500 - RNA, 19 nt, Artificial Sequence
  Description of Artificial Sequence: Synthetic oligonucleotide
  Sense strand starting at position 3256 of SEQ ID NO: 585571
ggaaaugugccuuacauau

SEQ ID NO: 650501 - RNA, 19 nt, Artificial Sequence
  Description of Artificial Sequence: Synthetic oligonucleotide
  Antisense strand to SEQ ID NO: 650500
auauguaaggcacauuucc

SEQ ID NO: 650502 - RNA, 19 nt, Artificial Sequence
  Description of Artificial Sequence: Synthetic oligonucleotide
  Sense strand starting at position 3677 of SEQ ID NO: 585571
acaucugaauggucaguuu

SEQ ID NO: 650503 - RNA, 19 nt, Artificial Sequence
  Description of Artificial Sequence: Synthetic oligonucleotide
  Antisense strand to SEQ ID NO: 650502
aaacugaccauucagaugu

SEQ ID NO: 650504 - RNA, 19 nt, Artificial Sequence
  Description of Artificial Sequence: Synthetic oligonucleotide
  Sense strand starting at position 3749 of SEQ ID NO: 585571
aaaggaagccuuggaguga

SEQ ID NO: 650505 - RNA, 19 nt, Artificial Sequence
  Description of Artificial Sequence: Synthetic oligonucleotide
  Antisense strand to SEQ ID NO: 650504
ucacuccaaggcuuccuuu

SEQ ID NO: 650506 - RNA, 19 nt, Artificial Sequence
  Description of Artificial Sequence: Synthetic oligonucleotide
  Sense strand starting at position 3846 of SEQ ID NO: 585571
aauaguauguaucugggau

SEQ ID NO: 650507 - RNA, 19 nt, Artificial Sequence
  Description of Artificial Sequence: Synthetic oligonucleotide
  Antisense strand to SEQ ID NO: 650506
aucccagauacauacuauu

SEQ ID NO: 650508 - RNA, 19 nt, Artificial Sequence
  Description of Artificial Sequence: Synthetic oligonucleotide
  Sense strand starting at position 3847 of SEQ ID NO: 585571
auaguauguaucugggauu

SEQ ID NO: 650509 - RNA, 19 nt, Artificial Sequence
  Description of Artificial Sequence: Synthetic oligonucleotide
  Antisense strand to SEQ ID NO: 650508
aaucccagauacauacuau

SEQ ID NO: 650510 - RNA, 19 nt, Artificial Sequence
  Description of Artificial Sequence: Synthetic oligonucleotide
  Sense strand starting at position 3866 of SEQ ID NO: 585571
uucuguuaaagguaagagu

SEQ ID NO: 650511 - RNA, 19 nt, Artificial Sequence
  Description of Artificial Sequence: Synthetic oligonucleotide
  Antisense strand to SEQ ID NO: 650510
acucuuaccuuuaacagaa

SEQ ID NO: 650512 - RNA, 19 nt, Artificial Sequence
  Description of Artificial Sequence: Synthetic oligonucleotide
  Sense strand starting at position 150 of SEQ ID NO: 585572
agaacuaucucuuuaggug

SEQ ID NO: 650513 - RNA, 19 nt, Artificial Sequence
  Description of Artificial Sequence: Synthetic oligonucleotide
  Antisense strand to SEQ ID NO: 650512
caccuaaagagauaguucu

SEQ ID NO: 650514 - RNA, 19 nt, Artificial Sequence
  Description of Artificial Sequence: Synthetic oligonucleotide
  Sense strand starting at position 151 of SEQ ID NO: 585572
gaacuaucucuuuaggugu

SEQ ID NO: 650515 - RNA, 19 nt, Artificial Sequence
  Description of Artificial Sequence: Synthetic oligonucleotide
  Antisense strand to SEQ ID NO: 650514
acaccuaaagagauaguuc

SEQ ID NO: 650516 - RNA, 19 nt, Artificial Sequence
  Description of Artificial Sequence: Synthetic oligonucleotide
  Sense strand starting at position 157 of SEQ ID NO: 585572
ucucuuuagguguaagauu

SEQ ID NO: 650517 - RNA, 19 nt, Artificial Sequence
  Description of Artificial Sequence: Synthetic oligonucleotide
  Antisense strand to SEQ ID NO: 650516
aaucuuacaccuaaagaga

SEQ ID NO: 650518 - RNA, 19 nt, Artificial Sequence
  Description of Artificial Sequence: Synthetic oligonucleotide
  Sense strand starting at position 290 of SEQ ID NO: 585572
uguaaauauuguguagaag

SEQ ID NO: 650519 - RNA, 19 nt, Artificial Sequence
  Description of Artificial Sequence: Synthetic oligonucleotide
  Antisense strand to SEQ ID NO: 650518
cuucuacacaauauuuaca

SEQ ID NO: 650520 - RNA, 19 nt, Artificial Sequence
  Description of Artificial Sequence: Synthetic oligonucleotide
  Sense strand starting at position 320 of SEQ ID NO: 585572
gauuaaccugaaugguuau

SEQ ID NO: 650521 - RNA, 19 nt, Artificial Sequence
  Description of Artificial Sequence: Synthetic oligonucleotide
  Antisense strand to SEQ ID NO: 650520
auaaccauucagguuaauc

SEQ ID NO: 650522 - RNA, 19 nt, Artificial Sequence
  Description of Artificial Sequence: Synthetic oligonucleotide
  Sense strand starting at position 336 of SEQ ID NO: 585572
uaugguauugcugauaaau

SEQ ID NO: 650523 - RNA, 19 nt, Artificial Sequence
  Description of Artificial Sequence: Synthetic oligonucleotide
  Antisense strand to SEQ ID NO: 650522
auuuaucagcaauaccaua

SEQ ID NO: 650524 - RNA, 19 nt, Artificial Sequence
  Description of Artificial Sequence: Synthetic oligonucleotide
  Sense strand starting at position 347 of SEQ ID NO: 585572
ugauaaaugcaucaucuug

SEQ ID NO: 650525 - RNA, 19 nt, Artificial Sequence
  Description of Artificial Sequence: Synthetic oligonucleotide
  Antisense strand to SEQ ID NO: 650524
caagaugaugcauuuauca

SEQ ID NO: 650526 - RNA, 19 nt, Artificial Sequence
  Description of Artificial Sequence: Synthetic oligonucleotide
  Sense strand starting at position 361 of SEQ ID NO: 585572
ucuugacuccuaggagaac

SEQ ID NO: 650527 - RNA, 19 nt, Artificial Sequence
  Description of Artificial Sequence: Synthetic oligonucleotide
  Antisense strand to SEQ ID NO: 650526
guucuccuaggagucaaga

SEQ ID NO: 650528 - RNA, 19 nt, Artificial Sequence
  Description of Artificial Sequence: Synthetic oligonucleotide
  Sense strand starting at position 481 of SEQ ID NO: 585572
caauaauuaggauaucguu

SEQ ID NO: 650529 - RNA, 19 nt, Artificial Sequence
  Description of Artificial Sequence: Synthetic oligonucleotide
  Antisense strand to SEQ ID NO: 650528
aacgauauccuaauuauug

SEQ ID NO: 650530 - RNA, 19 nt, Artificial Sequence
  Description of Artificial Sequence: Synthetic oligonucleotide
  Sense strand starting at position 522 of SEQ ID NO: 585572
ggccuagaggucuauaggu

SEQ ID NO: 650531 - RNA, 19 nt, Artificial Sequence
  Description of Artificial Sequence: Synthetic oligonucleotide
  Antisense strand to SEQ ID NO: 650530
accuauagaccucuaggcc

SEQ ID NO: 650532 - RNA, 19 nt, Artificial Sequence
  Description of Artificial Sequence: Synthetic oligonucleotide
  Sense strand starting at position 577 of SEQ ID NO: 585572
aggaauaaguuaucagguu

SEQ ID NO: 650533 - RNA, 19 nt, Artificial Sequence
  Description of Artificial Sequence: Synthetic oligonucleotide
  Antisense strand to SEQ ID NO: 650532
aaccugauaacuuauuccu

SEQ ID NO: 650534 - RNA, 19 nt, Artificial Sequence
  Description of Artificial Sequence: Synthetic oligonucleotide
  Sense strand starting at position 679 of SEQ ID NO: 585572
agaucuucccaggguguaa

SEQ ID NO: 650535 - RNA, 19 nt, Artificial Sequence
  Description of Artificial Sequence: Synthetic oligonucleotide
  Antisense strand to SEQ ID NO: 650534
uuacacccugggaagaucu

SEQ ID NO: 650536 - RNA, 19 nt, Artificial Sequence
  Description of Artificial Sequence: Synthetic oligonucleotide
  Sense strand starting at position 683 of SEQ ID NO: 585572
cuucccaggguguaaauua

SEQ ID NO: 650537 - RNA, 19 nt, Artificial Sequence
  Description of Artificial Sequence: Synthetic oligonucleotide
  Antisense strand to SEQ ID NO: 650536
uaauuuacacccugggaag

SEQ ID NO: 650538 - RNA, 19 nt, Artificial Sequence
  Description of Artificial Sequence: Synthetic oligonucleotide
  Sense strand starting at position 943 of SEQ ID NO: 585572
guauuaguagcagagauau

SEQ ID NO: 650539 - RNA, 19 nt, Artificial Sequence
  Description of Artificial Sequence: Synthetic oligonucleotide
  Antisense strand to SEQ ID NO: 650538
auaucucugcuacuaauac

SEQ ID NO: 650540 - RNA, 19 nt, Artificial Sequence
  Description of Artificial Sequence: Synthetic oligonucleotide
  Sense strand starting at position 951 of SEQ ID NO: 585572
agcagagauauaugagcua

SEQ ID NO: 650541 - RNA, 19 nt, Artificial Sequence
  Description of Artificial Sequence: Synthetic oligonucleotide
  Antisense strand to SEQ ID NO: 650540
uagcucauauaucucugcu

SEQ ID NO: 650542 - RNA, 19 nt, Artificial Sequence
  Description of Artificial Sequence: Synthetic oligonucleotide
  Sense strand starting at position 1090 of SEQ ID NO: 585572
gagcaaaugcuaggauauu

SEQ ID NO: 650543 - RNA, 19 nt, Artificial Sequence
  Description of Artificial Sequence: Synthetic oligonucleotide
  Antisense strand to SEQ ID NO: 650542
aauauccuagcauuugcuc

SEQ ID NO: 650544 - RNA, 19 nt, Artificial Sequence
  Description of Artificial Sequence: Synthetic oligonucleotide
  Sense strand starting at position 1200 of SEQ ID NO: 585572
uuugcaagaguuuaugauu

SEQ ID NO: 650545 - RNA, 19 nt, Artificial Sequence
  Description of Artificial Sequence: Synthetic oligonucleotide
  Antisense strand to SEQ ID NO: 650544
aaucauaaacucuugcaaa

SEQ ID NO: 650546 - RNA, 19 nt, Artificial Sequence
  Description of Artificial Sequence: Synthetic oligonucleotide
  Sense strand starting at position 1349 of SEQ ID NO: 585572
ucaggaaggugcuuauaaa

SEQ ID NO: 650547 - RNA, 19 nt, Artificial Sequence
  Description of Artificial Sequence: Synthetic oligonucleotide
  Antisense strand to SEQ ID NO: 650546
uuuauaagcaccuuccuga

SEQ ID NO: 650548 - RNA, 19 nt, Artificial Sequence
  Description of Artificial Sequence: Synthetic oligonucleotide
  Sense strand starting at position 1511 of SEQ ID NO: 585572
ggccaaccucuguaaaucu

SEQ ID NO: 650549 - RNA, 19 nt, Artificial Sequence
  Description of Artificial Sequence: Synthetic oligonucleotide
  Antisense strand to SEQ ID NO: 650548
agauuuacagagguuggcc

SEQ ID NO: 650550 - RNA, 19 nt, Artificial Sequence
  Description of Artificial Sequence: Synthetic oligonucleotide
  Sense strand starting at position 1563 of SEQ ID NO: 585572
ucaggaagaucacuuacga

SEQ ID NO: 650551 - RNA, 19 nt, Artificial Sequence
  Description of Artificial Sequence: Synthetic oligonucleotide
  Antisense strand to SEQ ID NO: 650550
ucguaagugaucuuccuga

SEQ ID NO: 650552 - RNA, 19 nt, Artificial Sequence
  Description of Artificial Sequence: Synthetic oligonucleotide
  Sense strand starting at position 2527 of SEQ ID NO: 585572
cugcucugagcguucucau

SEQ ID NO: 650553 - RNA, 19 nt, Artificial Sequence
  Description of Artificial Sequence: Synthetic oligonucleotide
  Antisense strand to SEQ ID NO: 650552
augagaacgcucagagcag

SEQ ID NO: 650554 - RNA, 19 nt, Artificial Sequence
  Description of Artificial Sequence: Synthetic oligonucleotide
  Sense strand starting at position 2534 of SEQ ID NO: 585572
gagcguucucaugaagacc

SEQ ID NO: 650555 - RNA, 19 nt, Artificial Sequence
  Description of Artificial Sequence: Synthetic oligonucleotide
  Antisense strand to SEQ ID NO: 650554
ggucuucaugagaacgcuc

SEQ ID NO: 650556 - RNA, 19 nt, Artificial Sequence
  Description of Artificial Sequence: Synthetic oligonucleotide
  Sense strand starting at position 2908 of SEQ ID NO: 585572
aguaaauaguagccaagau

SEQ ID NO: 650557 - RNA, 19 nt, Artificial Sequence
  Description of Artificial Sequence: Synthetic oligonucleotide
  Antisense strand to SEQ ID NO: 650556
aucuuggcuacuauuuacu

SEQ ID NO: 650558 - RNA, 19 nt, Artificial Sequence
  Description of Artificial Sequence: Synthetic oligonucleotide
  Sense strand starting at position 3033 of SEQ ID NO: 585572
aacacuugauguguaagau

SEQ ID NO: 650559 - RNA, 19 nt, Artificial Sequence
  Description of Artificial Sequence: Synthetic oligonucleotide
  Antisense strand to SEQ ID NO: 650558
aucuuacacaucaaguguu

SEQ ID NO: 650560 - RNA, 19 nt, Artificial Sequence
  Description of Artificial Sequence: Synthetic oligonucleotide
  Sense strand starting at position 3039 of SEQ ID NO: 585572
ugauguguaagaugagcaa

SEQ ID NO: 650561 - RNA, 19 nt, Artificial Sequence
  Description of Artificial Sequence: Synthetic oligonucleotide
  Antisense strand to SEQ ID NO: 650560
uugcucaucuuacacauca

SEQ ID NO: 650562 - RNA, 19 nt, Artificial Sequence
  Description of Artificial Sequence: Synthetic oligonucleotide
  Sense strand starting at position 3119 of SEQ ID NO: 585572
auggaaaugcaccauaugu

SEQ ID NO: 650563 - RNA, 19 nt, Artificial Sequence
  Description of Artificial Sequence: Synthetic oligonucleotide
  Antisense strand to SEQ ID NO: 650562
acauauggugcauuuccau

SEQ ID NO: 650564 - RNA, 19 nt, Artificial Sequence
  Description of Artificial Sequence: Synthetic oligonucleotide
  Sense strand starting at position 3121 of SEQ ID NO: 585572
ggaaaugcaccauauguuu

SEQ ID NO: 650565 - RNA, 19 nt, Artificial Sequence
  Description of Artificial Sequence: Synthetic oligonucleotide
  Antisense strand to SEQ ID NO: 650564
aaacauauggugcauuucc

SEQ ID NO: 650566 - RNA, 19 nt, Artificial Sequence
  Description of Artificial Sequence: Synthetic oligonucleotide
  Sense strand starting at position 3185 of SEQ ID NO: 585572
agguuauguauggaggguu

SEQ ID NO: 650567 - RNA, 19 nt, Artificial Sequence
  Description of Artificial Sequence: Synthetic oligonucleotide
  Antisense strand to SEQ ID NO: 650566
aacccuccauacauaaccu

SEQ ID NO: 650568 - RNA, 19 nt, Artificial Sequence
  Description of Artificial Sequence: Synthetic oligonucleotide
  Sense strand starting at position 3212 of SEQ ID NO: 585572
uuguuuauuccugaggagg

SEQ ID NO: 650569 - RNA, 19 nt, Artificial Sequence
  Description of Artificial Sequence: Synthetic oligonucleotide
  Antisense strand to SEQ ID NO: 650568
ccuccucaggaauaaacaa

SEQ ID NO: 650570 - RNA, 19 nt, Artificial Sequence
  Description of Artificial Sequence: Synthetic oligonucleotide
  Sense strand starting at position 3223 of SEQ ID NO: 585572
ugaggaggguccuuuacaa

SEQ ID NO: 650571 - RNA, 19 nt, Artificial Sequence
  Description of Artificial Sequence: Synthetic oligonucleotide
  Antisense strand to SEQ ID NO: 650570
uuguaaaggacccuccuca

SEQ ID NO: 650572 - RNA, 19 nt, Artificial Sequence
  Description of Artificial Sequence: Synthetic oligonucleotide
  Sense strand starting at position 3320 of SEQ ID NO: 585572
guauaugaucuuuaugcac

SEQ ID NO: 650573 - RNA, 19 nt, Artificial Sequence
  Description of Artificial Sequence: Synthetic oligonucleotide
  Antisense strand to SEQ ID NO: 650572
gugcauaaagaucauauac

SEQ ID NO: 650574 - RNA, 19 nt, Artificial Sequence
  Description of Artificial Sequence: Synthetic oligonucleotide
  Sense strand starting at position 3355 of SEQ ID NO: 585572
aucuguuuauuugugaagu

SEQ ID NO: 650575 - RNA, 19 nt, Artificial Sequence
  Description of Artificial Sequence: Synthetic oligonucleotide
  Antisense strand to SEQ ID NO: 650574
acuucacaaauaaacagau

SEQ ID NO: 650576 - RNA, 19 nt, Artificial Sequence
  Description of Artificial Sequence: Synthetic oligonucleotide
  Sense strand starting at position 3449 of SEQ ID NO: 585572
acaagaauguuguccaacu

SEQ ID NO: 650577 - RNA, 19 nt, Artificial Sequence
  Description of Artificial Sequence: Synthetic oligonucleotide
  Antisense strand to SEQ ID NO: 650576
aguuggacaacauucuugu

SEQ ID NO: 650578 - RNA, 19 nt, Artificial Sequence
  Description of Artificial Sequence: Synthetic oligonucleotide
  Sense strand starting at position 3496 of SEQ ID NO: 585572
uuuggugaaugacuugaaa

SEQ ID NO: 650579 - RNA, 19 nt, Artificial Sequence
  Description of Artificial Sequence: Synthetic oligonucleotide
  Antisense strand to SEQ ID NO: 650578
uuucaagucauucaccaaa

SEQ ID NO: 650580 - RNA, 19 nt, Artificial Sequence
  Description of Artificial Sequence: Synthetic oligonucleotide
  Sense strand starting at position 3498 of SEQ ID NO: 585572
uggugaaugacuugaaagu

SEQ ID NO: 650581 - RNA, 19 nt, Artificial Sequence
  Description of Artificial Sequence: Synthetic oligonucleotide
  Antisense strand to SEQ ID NO: 650580
acuuucaagucauucacca

SEQ ID NO: 650582 - RNA, 19 nt, Artificial Sequence
  Description of Artificial Sequence: Synthetic oligonucleotide
  Sense strand starting at position 3727 of SEQ ID NO: 585572
cuuaaucuagugcacagau

SEQ ID NO: 650583 - RNA, 19 nt, Artificial Sequence
  Description of Artificial Sequence: Synthetic oligonucleotide
  Antisense strand to SEQ ID NO: 650582
aucugugcacuagauuaag

SEQ ID NO: 650584 - RNA, 19 nt, Artificial Sequence
  Description of Artificial Sequence: Synthetic oligonucleotide
  Sense strand starting at position 3865 of SEQ ID NO: 585572
gaugaaauguguuuggaca

SEQ ID NO: 650585 - RNA, 19 nt, Artificial Sequence
  Description of Artificial Sequence: Synthetic oligonucleotide
  Antisense strand to SEQ ID NO: 650584
uguccaaacacauuucauc

SEQ ID NO: 650586 - RNA, 19 nt, Artificial Sequence
  Description of Artificial Sequence: Synthetic oligonucleotide
  Sense strand starting at position 3866 of SEQ ID NO: 585572
augaaauguguuuggacag

SEQ ID NO: 650587 - RNA, 19 nt, Artificial Sequence
  Description of Artificial Sequence: Synthetic oligonucleotide
  Antisense strand to SEQ ID NO: 650586
cuguccaaacacauuucau

SEQ ID NO: 650588 - RNA, 19 nt, Artificial Sequence
  Description of Artificial Sequence: Synthetic oligonucleotide
  Sense strand starting at position 3921 of SEQ ID NO: 585572
aagaaauaucuuuggaguu

SEQ ID NO: 650589 - RNA, 19 nt, Artificial Sequence
  Description of Artificial Sequence: Synthetic oligonucleotide
  Antisense strand to SEQ ID NO: 650588
aacuccaaagauauuucuu

SEQ ID NO: 650590 - RNA, 19 nt, Artificial Sequence
  Description of Artificial Sequence: Synthetic oligonucleotide
  Sense strand starting at position 3951 of SEQ ID NO: 585572
aguuaucaauuacugguaa

SEQ ID NO: 650591 - RNA, 19 nt, Artificial Sequence
  Description of Artificial Sequence: Synthetic oligonucleotide
  Antisense strand to SEQ ID NO: 650590
uuaccaguaauugauaacu

SEQ ID NO: 650592 - RNA, 19 nt, Artificial Sequence
  Description of Artificial Sequence: Synthetic oligonucleotide
  Sense strand starting at position 73 of SEQ ID NO: 585573
gcacguugugugcaaugaa

SEQ ID NO: 650593 - RNA, 19 nt, Artificial Sequence
  Description of Artificial Sequence: Synthetic oligonucleotide
  Antisense strand to SEQ ID NO: 650592
uucauugcacacaacgugc

SEQ ID NO: 650594 - RNA, 19 nt, Artificial Sequence
  Description of Artificial Sequence: Synthetic oligonucleotide
  Sense strand starting at position 76 of SEQ ID NO: 585573
cguugugugcaaugaauug

SEQ ID NO: 650595 - RNA, 19 nt, Artificial Sequence
  Description of Artificial Sequence: Synthetic oligonucleotide
  Antisense strand to SEQ ID NO: 650594
caauucauugcacacaacg

SEQ ID NO: 650596 - RNA, 19 nt, Artificial Sequence
  Description of Artificial Sequence: Synthetic oligonucleotide
  Sense strand starting at position 99 of SEQ ID NO: 585573
agggaaaugugucccagaa

SEQ ID NO: 650597 - RNA, 19 nt, Artificial Sequence
  Description of Artificial Sequence: Synthetic oligonucleotide
  Antisense strand to SEQ ID NO: 650596
uucugggacacauuucccu

SEQ ID NO: 650598 - RNA, 19 nt, Artificial Sequence
  Description of Artificial Sequence: Synthetic oligonucleotide
  Sense strand starting at position 538 of SEQ ID NO: 585573
aguccagcacucugugaau

SEQ ID NO: 650599 - RNA, 19 nt, Artificial Sequence
  Description of Artificial Sequence: Synthetic oligonucleotide
  Antisense strand to SEQ ID NO: 650598
auucacagagugcuggacu

SEQ ID NO: 650600 - RNA, 19 nt, Artificial Sequence
  Description of Artificial Sequence: Synthetic oligonucleotide
  Sense strand starting at position 540 of SEQ ID NO: 585573
uccagcacucugugaaugu

SEQ ID NO: 650601 - RNA, 19 nt, Artificial Sequence
  Description of Artificial Sequence: Synthetic oligonucleotide
  Antisense strand to SEQ ID NO: 650600
acauucacagagugcugga

SEQ ID NO: 650602 - RNA, 19 nt, Artificial Sequence
  Description of Artificial Sequence: Synthetic oligonucleotide
  Sense strand starting at position 549 of SEQ ID NO: 585573
cugugaaugugcgucuaac

SEQ ID NO: 650603 - RNA, 19 nt, Artificial Sequence
  Description of Artificial Sequence: Synthetic oligonucleotide
  Antisense strand to SEQ ID NO: 650602
guuagacgcacauucacag

SEQ ID NO: 650604 - RNA, 19 nt, Artificial Sequence
  Description of Artificial Sequence: Synthetic oligonucleotide
  Sense strand starting at position 551 of SEQ ID NO: 585573
gugaaugugcgucuaacgu

SEQ ID NO: 650605 - RNA, 19 nt, Artificial Sequence
  Description of Artificial Sequence: Synthetic oligonucleotide
  Antisense strand to SEQ ID NO: 650604
acguuagacgcacauucac

SEQ ID NO: 650606 - RNA, 19 nt, Artificial Sequence
  Description of Artificial Sequence: Synthetic oligonucleotide
  Sense strand starting at position 558 of SEQ ID NO: 585573
ugcgucuaacguuugcaga

SEQ ID NO: 650607 - RNA, 19 nt, Artificial Sequence
  Description of Artificial Sequence: Synthetic oligonucleotide
  Antisense strand to SEQ ID NO: 650606
ucugcaaacguuagacgca

SEQ ID NO: 650608 - RNA, 19 nt, Artificial Sequence
  Description of Artificial Sequence: Synthetic oligonucleotide
  Sense strand starting at position 560 of SEQ ID NO: 585573
cgucuaacguuugcagaaa

SEQ ID NO: 650609 - RNA, 19 nt, Artificial Sequence
  Description of Artificial Sequence: Synthetic oligonucleotide
  Antisense strand to SEQ ID NO: 650608
uuucugcaaacguuagacg

SEQ ID NO: 650610 - RNA, 19 nt, Artificial Sequence
  Description of Artificial Sequence: Synthetic oligonucleotide
  Sense strand starting at position 1215 of SEQ ID NO: 585573
cuaagucuccagggagaac

SEQ ID NO: 650611 - RNA, 19 nt, Artificial Sequence
  Description of Artificial Sequence: Synthetic oligonucleotide
  Antisense strand to SEQ ID NO: 650610
guucucccuggagacuuag

SEQ ID NO: 650612 - RNA, 19 nt, Artificial Sequence
  Description of Artificial Sequence: Synthetic oligonucleotide
  Sense strand starting at position 1267 of SEQ ID NO: 585573
gguagaugccucugaccug

SEQ ID NO: 650613 - RNA, 19 nt, Artificial Sequence
  Description of Artificial Sequence: Synthetic oligonucleotide
  Antisense strand to SEQ ID NO: 650612
caggucagaggcaucuacc

SEQ ID NO: 650614 - RNA, 19 nt, Artificial Sequence
  Description of Artificial Sequence: Synthetic oligonucleotide
  Sense strand starting at position 1358 of SEQ ID NO: 585573
ggaggagagucugcuuauc

SEQ ID NO: 650615 - RNA, 19 nt, Artificial Sequence
  Description of Artificial Sequence: Synthetic oligonucleotide
  Antisense strand to SEQ ID NO: 650614
gauaagcagacucuccucc

SEQ ID NO: 650616 - RNA, 19 nt, Artificial Sequence
  Description of Artificial Sequence: Synthetic oligonucleotide
  Sense strand starting at position 1363 of SEQ ID NO: 585573
agagucugcuuaucccaaa

SEQ ID NO: 650617 - RNA, 19 nt, Artificial Sequence
  Description of Artificial Sequence: Synthetic oligonucleotide
  Antisense strand to SEQ ID NO: 650616
uuugggauaagcagacucu

SEQ ID NO: 650618 - RNA, 19 nt, Artificial Sequence
  Description of Artificial Sequence: Synthetic oligonucleotide
  Sense strand starting at position 2105 of SEQ ID NO: 585573
gggcaaugcucugcacaga

SEQ ID NO: 650619 - RNA, 19 nt, Artificial Sequence
  Description of Artificial Sequence: Synthetic oligonucleotide
  Antisense strand to SEQ ID NO: 650618
ucugugcagagcauugccc

SEQ ID NO: 650620 - RNA, 19 nt, Artificial Sequence
  Description of Artificial Sequence: Synthetic oligonucleotide
  Sense strand starting at position 2306 of SEQ ID NO: 585573
ucccaaucguccuuccaga

SEQ ID NO: 650621 - RNA, 19 nt, Artificial Sequence
  Description of Artificial Sequence: Synthetic oligonucleotide
  Antisense strand to SEQ ID NO: 650620
ucuggaaggacgauuggga

SEQ ID NO: 650622 - RNA, 19 nt, Artificial Sequence
  Description of Artificial Sequence: Synthetic oligonucleotide
  Sense strand starting at position 2465 of SEQ ID NO: 585573
gagugugagagaugcucau

SEQ ID NO: 650623 - RNA, 19 nt, Artificial Sequence
  Description of Artificial Sequence: Synthetic oligonucleotide
  Antisense strand to SEQ ID NO: 650622
augagcaucucucacacuc

SEQ ID NO: 650624 - RNA, 19 nt, Artificial Sequence
  Description of Artificial Sequence: Synthetic oligonucleotide
  Sense strand starting at position 2469 of SEQ ID NO: 585573
gugagagaugcucaugcac

SEQ ID NO: 650625 - RNA, 19 nt, Artificial Sequence
  Description of Artificial Sequence: Synthetic oligonucleotide
  Antisense strand to SEQ ID NO: 650624
gugcaugagcaucucucac

SEQ ID NO: 650626 - RNA, 19 nt, Artificial Sequence
  Description of Artificial Sequence: Synthetic oligonucleotide
  Sense strand starting at position 2683 of SEQ ID NO: 585573
ucguguguccaggacaugu

SEQ ID NO: 650627 - RNA, 19 nt, Artificial Sequence
  Description of Artificial Sequence: Synthetic oligonucleotide
  Antisense strand to SEQ ID NO: 650626
acauguccuggacacacga

SEQ ID NO: 650628 - RNA, 19 nt, Artificial Sequence
  Description of Artificial Sequence: Synthetic oligonucleotide
  Sense strand starting at position 2761 of SEQ ID NO: 585573
uuuccacaagucuguguau

SEQ ID NO: 650629 - RNA, 19 nt, Artificial Sequence
  Description of Artificial Sequence: Synthetic oligonucleotide
  Antisense strand to SEQ ID NO: 650628
auacacagacuuguggaaa

SEQ ID NO: 650630 - RNA, 19 nt, Artificial Sequence
  Description of Artificial Sequence: Synthetic oligonucleotide
  Sense strand starting at position 2763 of SEQ ID NO: 585573
uccacaagucuguguaucu

SEQ ID NO: 650631 - RNA, 19 nt, Artificial Sequence
  Description of Artificial Sequence: Synthetic oligonucleotide
  Antisense strand to SEQ ID NO: 650630
agauacacagacuugugga

SEQ ID NO: 650632 - RNA, 19 nt, Artificial Sequence
  Description of Artificial Sequence: Synthetic oligonucleotide
  Sense strand starting at position 2764 of SEQ ID NO: 585573
ccacaagucuguguaucuu

SEQ ID NO: 650633 - RNA, 19 nt, Artificial Sequence
  Description of Artificial Sequence: Synthetic oligonucleotide
  Antisense strand to SEQ ID NO: 650632
aagauacacagacuugugg

SEQ ID NO: 650634 - RNA, 19 nt, Artificial Sequence
  Description of Artificial Sequence: Synthetic oligonucleotide
  Sense strand starting at position 2770 of SEQ ID NO: 585573
gucuguguaucuuccuaca

SEQ ID NO: 650635 - RNA, 19 nt, Artificial Sequence
  Description of Artificial Sequence: Synthetic oligonucleotide
  Antisense strand to SEQ ID NO: 650634
uguaggaagauacacagac

SEQ ID NO: 650636 - RNA, 19 nt, Artificial Sequence
  Description of Artificial Sequence: Synthetic oligonucleotide
  Sense strand starting at position 2772 of SEQ ID NO: 585573
cuguguaucuuccuacagu

SEQ ID NO: 650637 - RNA, 19 nt, Artificial Sequence
  Description of Artificial Sequence: Synthetic oligonucleotide
  Antisense strand to SEQ ID NO: 650636
acuguaggaagauacacag

SEQ ID NO: 650638 - RNA, 19 nt, Artificial Sequence
  Description of Artificial Sequence: Synthetic oligonucleotide
  Sense strand starting at position 3020 of SEQ ID NO: 585573
ggaggauuugccugucugc

SEQ ID NO: 650639 - RNA, 19 nt, Artificial Sequence
  Description of Artificial Sequence: Synthetic oligonucleotide
  Antisense strand to SEQ ID NO: 650638
gcagacaggcaaauccucc

SEQ ID NO: 650640 - RNA, 19 nt, Artificial Sequence
  Description of Artificial Sequence: Synthetic oligonucleotide
  Sense strand starting at position 3233 of SEQ ID NO: 585573
gguacuuggaguuaugaca

SEQ ID NO: 650641 - RNA, 19 nt, Artificial Sequence
  Description of Artificial Sequence: Synthetic oligonucleotide
  Antisense strand to SEQ ID NO: 650640
ugucauaacuccaaguacc

SEQ ID NO: 650642 - RNA, 19 nt, Artificial Sequence
  Description of Artificial Sequence: Synthetic oligonucleotide
  Sense strand starting at position 3240 of SEQ ID NO: 585573
ggaguuaugacagggcaca

SEQ ID NO: 650643 - RNA, 19 nt, Artificial Sequence
  Description of Artificial Sequence: Synthetic oligonucleotide
  Antisense strand to SEQ ID NO: 650642
ugugcccugucauaacucc

SEQ ID NO: 650644 - RNA, 19 nt, Artificial Sequence
  Description of Artificial Sequence: Synthetic oligonucleotide
  Sense strand starting at position 3570 of SEQ ID NO: 585573
aaugauagcucuuccguau

SEQ ID NO: 650645 - RNA, 19 nt, Artificial Sequence
  Description of Artificial Sequence: Synthetic oligonucleotide
  Antisense strand to SEQ ID NO: 650644
auacggaagagcuaucauu

SEQ ID NO: 650646 - RNA, 19 nt, Artificial Sequence
  Description of Artificial Sequence: Synthetic oligonucleotide
  Sense strand starting at position 3620 of SEQ ID NO: 585573
ggcugcugccagugaaacu

SEQ ID NO: 650647 - RNA, 19 nt, Artificial Sequence
  Description of Artificial Sequence: Synthetic oligonucleotide
  Antisense strand to SEQ ID NO: 650646
aguuucacuggcagcagcc

SEQ ID NO: 650648 - RNA, 19 nt, Artificial Sequence
  Description of Artificial Sequence: Synthetic oligonucleotide
  Sense strand starting at position 3654 of SEQ ID NO: 585573
gaagcauuccaguauuaga

SEQ ID NO: 650649 - RNA, 19 nt, Artificial Sequence
  Description of Artificial Sequence: Synthetic oligonucleotide
  Antisense strand to SEQ ID NO: 650648
ucuaauacuggaaugcuuc

SEQ ID NO: 650650 - RNA, 19 nt, Artificial Sequence
  Description of Artificial Sequence: Synthetic oligonucleotide
  Sense strand starting at position 3657 of SEQ ID NO: 585573
gcauuccaguauuagagau

SEQ ID NO: 650651 - RNA, 19 nt, Artificial Sequence
  Description of Artificial Sequence: Synthetic oligonucleotide
  Antisense strand to SEQ ID NO: 650650
aucucuaauacuggaaugc

SEQ ID NO: 650652 - RNA, 19 nt, Artificial Sequence
  Description of Artificial Sequence: Synthetic oligonucleotide
  Sense strand starting at position 3760 of SEQ ID NO: 585573
ugggucagagaugguucua

SEQ ID NO: 650653 - RNA, 19 nt, Artificial Sequence
  Description of Artificial Sequence: Synthetic oligonucleotide
  Antisense strand to SEQ ID NO: 650652
uagaaccaucucugaccca

SEQ ID NO: 650654 - RNA, 19 nt, Artificial Sequence
  Description of Artificial Sequence: Synthetic oligonucleotide
  Sense strand starting at position 3765 of SEQ ID NO: 585573
cagagaugguucuagacac

SEQ ID NO: 650655 - RNA, 19 nt, Artificial Sequence
  Description of Artificial Sequence: Synthetic oligonucleotide
  Antisense strand to SEQ ID NO: 650654
gugucuagaaccaucucug

SEQ ID NO: 650656 - RNA, 19 nt, Artificial Sequence
  Description of Artificial Sequence: Synthetic oligonucleotide
  Sense strand starting at position 3772 of SEQ ID NO: 585573
gguucuagacacugagaua

SEQ ID NO: 650657 - RNA, 19 nt, Artificial Sequence
  Description of Artificial Sequence: Synthetic oligonucleotide
  Antisense strand to SEQ ID NO: 650656
uaucucagugucuagaacc

SEQ ID NO: 650658 - RNA, 19 nt, Artificial Sequence
  Description of Artificial Sequence: Synthetic oligonucleotide
  Sense strand starting at position 3835 of SEQ ID NO: 585573
gcuaguggguucucggaaa

SEQ ID NO: 650659 - RNA, 19 nt, Artificial Sequence
  Description of Artificial Sequence: Synthetic oligonucleotide
  Antisense strand to SEQ ID NO: 650658
uuuccgagaacccacuagc

SEQ ID NO: 650660 - RNA, 19 nt, Artificial Sequence
  Description of Artificial Sequence: Synthetic oligonucleotide
  Sense strand starting at position 3881 of SEQ ID NO: 585573
gcagucuuuggcugucaca

SEQ ID NO: 650661 - RNA, 19 nt, Artificial Sequence
  Description of Artificial Sequence: Synthetic oligonucleotide
  Antisense strand to SEQ ID NO: 650660
ugugacagccaaagacugc

SEQ ID NO: 650662 - RNA, 19 nt, Artificial Sequence
  Description of Artificial Sequence: Synthetic oligonucleotide
  Sense strand starting at position 3921 of SEQ ID NO: 585573
cuggacugauuaggaaaua

SEQ ID NO: 650663 - RNA, 19 nt, Artificial Sequence
  Description of Artificial Sequence: Synthetic oligonucleotide
  Antisense strand to SEQ ID NO: 650662
uauuuccuaaucaguccag

SEQ ID NO: 650664 - RNA, 19 nt, Artificial Sequence
  Description of Artificial Sequence: Synthetic oligonucleotide
  Sense strand starting at position 3934 of SEQ ID NO: 585573
gaaauaggcucugagagau

SEQ ID NO: 650665 - RNA, 19 nt, Artificial Sequence
  Description of Artificial Sequence: Synthetic oligonucleotide
  Antisense strand to SEQ ID NO: 650664
aucucucagagccuauuuc

SEQ ID NO: 650666 - RNA, 19 nt, Artificial Sequence
  Description of Artificial Sequence: Synthetic oligonucleotide
  Sense strand starting at position 3952 of SEQ ID NO: 585573
uggagcaguuuguccacaa

SEQ ID NO: 650667 - RNA, 19 nt, Artificial Sequence
  Description of Artificial Sequence: Synthetic oligonucleotide
  Antisense strand to SEQ ID NO: 650666
uuguggacaaacugcucca

SEQ ID NO: 650668 - RNA, 19 nt, Artificial Sequence
  Description of Artificial Sequence: Synthetic oligonucleotide
  Sense strand starting at position 3953 of SEQ ID NO: 585573
ggagcaguuuguccacaau

SEQ ID NO: 650669 - RNA, 19 nt, Artificial Sequence
  Description of Artificial Sequence: Synthetic oligonucleotide
  Antisense strand to SEQ ID NO: 650668
auuguggacaaacugcucc

SEQ ID NO: 650670 - RNA, 19 nt, Artificial Sequence
  Description of Artificial Sequence: Synthetic oligonucleotide
  Sense strand starting at position 3959 of SEQ ID NO: 585573
guuuguccacaaugacaaa

SEQ ID NO: 650671 - RNA, 19 nt, Artificial Sequence
  Description of Artificial Sequence: Synthetic oligonucleotide
  Antisense strand to SEQ ID NO: 650670
uuugucauuguggacaaac

SEQ ID NO: 650672 - RNA, 19 nt, Artificial Sequence
  Description of Artificial Sequence: Synthetic oligonucleotide
  Sense strand starting at position 614 of SEQ ID NO: 585574
gccagcuauuucccagagu

SEQ ID NO: 650673 - RNA, 19 nt, Artificial Sequence
  Description of Artificial Sequence: Synthetic oligonucleotide
  Antisense strand to SEQ ID NO: 650672
acucugggaaauagcuggc

SEQ ID NO: 650674 - RNA, 19 nt, Artificial Sequence
  Description of Artificial Sequence: Synthetic oligonucleotide
  Sense strand starting at position 615 of SEQ ID NO: 585574
ccagcuauuucccagaguu

SEQ ID NO: 650675 - RNA, 19 nt, Artificial Sequence
  Description of Artificial Sequence: Synthetic oligonucleotide
  Antisense strand to SEQ ID NO: 650674
aacucugggaaauagcugg

SEQ ID NO: 650676 - RNA, 19 nt, Artificial Sequence
  Description of Artificial Sequence: Synthetic oligonucleotide
  Sense strand starting at position 857 of SEQ ID NO: 585574
gggugaugauuuggacuug

SEQ ID NO: 650677 - RNA, 19 nt, Artificial Sequence
  Description of Artificial Sequence: Synthetic oligonucleotide
  Antisense strand to SEQ ID NO: 650676
caaguccaaaucaucaccc

SEQ ID NO: 650678 - RNA, 19 nt, Artificial Sequence
  Description of Artificial Sequence: Synthetic oligonucleotide
  Sense strand starting at position 858 of SEQ ID NO: 585574
ggugaugauuuggacuugu

SEQ ID NO: 650679 - RNA, 19 nt, Artificial Sequence
  Description of Artificial Sequence: Synthetic oligonucleotide
  Antisense strand to SEQ ID NO: 650678
acaaguccaaaucaucacc

SEQ ID NO: 650680 - RNA, 19 nt, Artificial Sequence
  Description of Artificial Sequence: Synthetic oligonucleotide
  Sense strand starting at position 867 of SEQ ID NO: 585574
uuggacuugugauagaaag

SEQ ID NO: 650681 - RNA, 19 nt, Artificial Sequence
  Description of Artificial Sequence: Synthetic oligonucleotide
  Antisense strand to SEQ ID NO: 650680
cuuucuaucacaaguccaa

SEQ ID NO: 650682 - RNA, 19 nt, Artificial Sequence
  Description of Artificial Sequence: Synthetic oligonucleotide
  Sense strand starting at position 964 of SEQ ID NO: 585574
guggguuauuuaugguugu

SEQ ID NO: 650683 - RNA, 19 nt, Artificial Sequence
  Description of Artificial Sequence: Synthetic oligonucleotide
  Antisense strand to SEQ ID NO: 650682
acaaccauaaauaacccac

SEQ ID NO: 650684 - RNA, 19 nt, Artificial Sequence
  Description of Artificial Sequence: Synthetic oligonucleotide
  Sense strand starting at position 971 of SEQ ID NO: 585574
auuuaugguugugccuaga

SEQ ID NO: 650685 - RNA, 19 nt, Artificial Sequence
  Description of Artificial Sequence: Synthetic oligonucleotide
  Antisense strand to SEQ ID NO: 650684
ucuaggcacaaccauaaau

SEQ ID NO: 650686 - RNA, 19 nt, Artificial Sequence
  Description of Artificial Sequence: Synthetic oligonucleotide
  Sense strand starting at position 974 of SEQ ID NO: 585574
uaugguugugccuagaaau

SEQ ID NO: 650687 - RNA, 19 nt, Artificial Sequence
  Description of Artificial Sequence: Synthetic oligonucleotide
  Antisense strand to SEQ ID NO: 650686
auuucuaggcacaaccaua

SEQ ID NO: 650688 - RNA, 19 nt, Artificial Sequence
  Description of Artificial Sequence: Synthetic oligonucleotide
  Sense strand starting at position 988 of SEQ ID NO: 585574
gaaauaagcggccauaugu

SEQ ID NO: 650689 - RNA, 19 nt, Artificial Sequence
  Description of Artificial Sequence: Synthetic oligonucleotide
  Antisense strand to SEQ ID NO: 650688
acauauggccgcuuauuuc

SEQ ID NO: 650690 - RNA, 19 nt, Artificial Sequence
  Description of Artificial Sequence: Synthetic oligonucleotide
  Sense strand starting at position 999 of SEQ ID NO: 585574
ccauaugugucacugccua

SEQ ID NO: 650691 - RNA, 19 nt, Artificial Sequence
  Description of Artificial Sequence: Synthetic oligonucleotide
  Antisense strand to SEQ ID NO: 650690
uaggcagugacacauaugg

SEQ ID NO: 650692 - RNA, 19 nt, Artificial Sequence
  Description of Artificial Sequence: Synthetic oligonucleotide
  Sense strand starting at position 1137 of SEQ ID NO: 585574
agccucuuguaaggugaaa

SEQ ID NO: 650693 - RNA, 19 nt, Artificial Sequence
  Description of Artificial Sequence: Synthetic oligonucleotide
  Antisense strand to SEQ ID NO: 650692
uuucaccuuacaagaggcu

SEQ ID NO: 650694 - RNA, 19 nt, Artificial Sequence
  Description of Artificial Sequence: Synthetic oligonucleotide
  Sense strand starting at position 1258 of SEQ ID NO: 585574
gcauuaucgccuccuucuu

SEQ ID NO: 650695 - RNA, 19 nt, Artificial Sequence
  Description of Artificial Sequence: Synthetic oligonucleotide
  Antisense strand to SEQ ID NO: 650694
aagaaggaggcgauaaugc

SEQ ID NO: 650696 - RNA, 19 nt, Artificial Sequence
  Description of Artificial Sequence: Synthetic oligonucleotide
  Sense strand starting at position 2401 of SEQ ID NO: 585574
gugugguggguguguugaa

SEQ ID NO: 650697 - RNA, 19 nt, Artificial Sequence
  Description of Artificial Sequence: Synthetic oligonucleotide
  Antisense strand to SEQ ID NO: 650696
uucaacacacccaccacac

SEQ ID NO: 650698 - RNA, 19 nt, Artificial Sequence
  Description of Artificial Sequence: Synthetic oligonucleotide
  Sense strand starting at position 2716 of SEQ ID NO: 585574
gaaggccuguucuguauca

SEQ ID NO: 650699 - RNA, 19 nt, Artificial Sequence
  Description of Artificial Sequence: Synthetic oligonucleotide
  Antisense strand to SEQ ID NO: 650698
ugauacagaacaggccuuc

SEQ ID NO: 650700 - RNA, 19 nt, Artificial Sequence
  Description of Artificial Sequence: Synthetic oligonucleotide
  Sense strand starting at position 2798 of SEQ ID NO: 585574
guucacaugugugagggaa

SEQ ID NO: 650701 - RNA, 19 nt, Artificial Sequence
  Description of Artificial Sequence: Synthetic oligonucleotide
  Antisense strand to SEQ ID NO: 650700
uucccucacacaugugaac

SEQ ID NO: 650702 - RNA, 19 nt, Artificial Sequence
  Description of Artificial Sequence: Synthetic oligonucleotide
  Sense strand starting at position 2800 of SEQ ID NO: 585574
ucacaugugugagggaaga

SEQ ID NO: 650703 - RNA, 19 nt, Artificial Sequence
  Description of Artificial Sequence: Synthetic oligonucleotide
  Antisense strand to SEQ ID NO: 650702
ucuucccucacacauguga

SEQ ID NO: 650704 - RNA, 19 nt, Artificial Sequence
  Description of Artificial Sequence: Synthetic oligonucleotide
  Sense strand starting at position 3185 of SEQ ID NO: 585574
gugguaugcacagaguaga

SEQ ID NO: 650705 - RNA, 19 nt, Artificial Sequence
  Description of Artificial Sequence: Synthetic oligonucleotide
  Antisense strand to SEQ ID NO: 650704
ucuacucugugcauaccac

SEQ ID NO: 650706 - RNA, 19 nt, Artificial Sequence
  Description of Artificial Sequence: Synthetic oligonucleotide
  Sense strand starting at position 3566 of SEQ ID NO: 585574
aagugagauugcucaggac

SEQ ID NO: 650707 - RNA, 19 nt, Artificial Sequence
  Description of Artificial Sequence: Synthetic oligonucleotide
  Antisense strand to SEQ ID NO: 650706
guccugagcaaucucacuu

SEQ ID NO: 650708 - RNA, 19 nt, Artificial Sequence
  Description of Artificial Sequence: Synthetic oligonucleotide
  Sense strand starting at position 3675 of SEQ ID NO: 585574
gacucuaguuugccacaga

SEQ ID NO: 650709 - RNA, 19 nt, Artificial Sequence
  Description of Artificial Sequence: Synthetic oligonucleotide
  Antisense strand to SEQ ID NO: 650708
ucuguggcaaacuagaguc

SEQ ID NO: 650710 - RNA, 19 nt, Artificial Sequence
  Description of Artificial Sequence: Synthetic oligonucleotide
  Sense strand starting at position 3678 of SEQ ID NO: 585574
ucuaguuugccacagagcu

SEQ ID NO: 650711 - RNA, 19 nt, Artificial Sequence
  Description of Artificial Sequence: Synthetic oligonucleotide
  Antisense strand to SEQ ID NO: 650710
agcucuguggcaaacuaga

SEQ ID NO: 650712 - RNA, 19 nt, Artificial Sequence
  Description of Artificial Sequence: Synthetic oligonucleotide
  Sense strand starting at position 3691 of SEQ ID NO: 585574
agagcucccuauuguuuga

SEQ ID NO: 650713 - RNA, 19 nt, Artificial Sequence
  Description of Artificial Sequence: Synthetic oligonucleotide
  Antisense strand to SEQ ID NO: 650712
ucaaacaauagggagcucu

SEQ ID NO: 650714 - RNA, 19 nt, Artificial Sequence
  Description of Artificial Sequence: Synthetic oligonucleotide
  Sense strand starting at position 3701 of SEQ ID NO: 585574
auuguuugagccugggaua

SEQ ID NO: 650715 - RNA, 19 nt, Artificial Sequence
  Description of Artificial Sequence: Synthetic oligonucleotide
  Antisense strand to SEQ ID NO: 650714
uaucccaggcucaaacaau

SEQ ID NO: 650716 - RNA, 19 nt, Artificial Sequence
  Description of Artificial Sequence: Synthetic oligonucleotide
  Sense strand starting at position 3702 of SEQ ID NO: 585574
uuguuugagccugggauaa

SEQ ID NO: 650717 - RNA, 19 nt, Artificial Sequence
  Description of Artificial Sequence: Synthetic oligonucleotide
  Antisense strand to SEQ ID NO: 650716
uuaucccaggcucaaacaa

SEQ ID NO: 650718 - RNA, 19 nt, Artificial Sequence
  Description of Artificial Sequence: Synthetic oligonucleotide
  Sense strand starting at position 3704 of SEQ ID NO: 585574
guuugagccugggauaauc

SEQ ID NO: 650719 - RNA, 19 nt, Artificial Sequence
  Description of Artificial Sequence: Synthetic oligonucleotide
  Antisense strand to SEQ ID NO: 650718
gauuaucccaggcucaaac

SEQ ID NO: 650720 - RNA, 19 nt, Artificial Sequence
  Description of Artificial Sequence: Synthetic oligonucleotide
  Sense strand starting at position 3712 of SEQ ID NO: 585574
cugggauaaucacauguuu

SEQ ID NO: 650721 - RNA, 19 nt, Artificial Sequence
  Description of Artificial Sequence: Synthetic oligonucleotide
  Antisense strand to SEQ ID NO: 650720
aaacaugugauuaucccag

SEQ ID NO: 650722 - RNA, 19 nt, Artificial Sequence
  Description of Artificial Sequence: Synthetic oligonucleotide
  Sense strand starting at position 3811 of SEQ ID NO: 585574
ugcaguauuuauucgugca

SEQ ID NO: 650723 - RNA, 19 nt, Artificial Sequence
  Description of Artificial Sequence: Synthetic oligonucleotide
  Antisense strand to SEQ ID NO: 650722
ugcacgaauaaauacugca

SEQ ID NO: 650724 - RNA, 19 nt, Artificial Sequence
  Description of Artificial Sequence: Synthetic oligonucleotide
  Sense strand starting at position 3812 of SEQ ID NO: 585574
gcaguauuuauucgugcaa

SEQ ID NO: 650725 - RNA, 19 nt, Artificial Sequence
  Description of Artificial Sequence: Synthetic oligonucleotide
  Antisense strand to SEQ ID NO: 650724
uugcacgaauaaauacugc

SEQ ID NO: 650726 - RNA, 19 nt, Artificial Sequence
  Description of Artificial Sequence: Synthetic oligonucleotide
  Sense strand starting at position 3813 of SEQ ID NO: 585574
caguauuuauucgugcaau

SEQ ID NO: 650727 - RNA, 19 nt, Artificial Sequence
  Description of Artificial Sequence: Synthetic oligonucleotide
  Antisense strand to SEQ ID NO: 650726
auugcacgaauaaauacug

SEQ ID NO: 650728 - RNA, 19 nt, Artificial Sequence
  Description of Artificial Sequence: Synthetic oligonucleotide
  Sense strand starting at position 3814 of SEQ ID NO: 585574
aguauuuauucgugcaaua

SEQ ID NO: 650729 - RNA, 19 nt, Artificial Sequence
  Description of Artificial Sequence: Synthetic oligonucleotide
  Antisense strand to SEQ ID NO: 650728
uauugcacgaauaaauacu

SEQ ID NO: 650730 - RNA, 19 nt, Artificial Sequence
  Description of Artificial Sequence: Synthetic oligonucleotide
  Sense strand starting at position 3819 of SEQ ID NO: 585574
uuauucgugcaauaagaau

SEQ ID NO: 650731 - RNA, 19 nt, Artificial Sequence
  Description of Artificial Sequence: Synthetic oligonucleotide
  Antisense strand to SEQ ID NO: 650730
auucuuauugcacgaauaa

SEQ ID NO: 650732 - RNA, 19 nt, Artificial Sequence
  Description of Artificial Sequence: Synthetic oligonucleotide
  Sense strand starting at position 3830 of SEQ ID NO: 585574
auaagaauucucugagcac

SEQ ID NO: 650733 - RNA, 19 nt, Artificial Sequence
  Description of Artificial Sequence: Synthetic oligonucleotide
  Antisense strand to SEQ ID NO: 650732
gugcucagagaauucuuau

SEQ ID NO: 650734 - RNA, 19 nt, Artificial Sequence
  Description of Artificial Sequence: Synthetic oligonucleotide
  Sense strand starting at position 3833 of SEQ ID NO: 585574
agaauucucugagcacuga

SEQ ID NO: 650735 - RNA, 19 nt, Artificial Sequence
  Description of Artificial Sequence: Synthetic oligonucleotide
  Antisense strand to SEQ ID NO: 650734
ucagugcucagagaauucu

SEQ ID NO: 650736 - RNA, 19 nt, Artificial Sequence
  Description of Artificial Sequence: Synthetic oligonucleotide
  Sense strand starting at position 3843 of SEQ ID NO: 585574
gagcacugacugcauguua

SEQ ID NO: 650737 - RNA, 19 nt, Artificial Sequence
  Description of Artificial Sequence: Synthetic oligonucleotide
  Antisense strand to SEQ ID NO: 650736
uaacaugcagucagugcuc

SEQ ID NO: 650738 - RNA, 19 nt, Artificial Sequence
  Description of Artificial Sequence: Synthetic oligonucleotide
  Sense strand starting at position 3938 of SEQ ID NO: 585574
cggcuaagugaguggacaa

SEQ ID NO: 650739 - RNA, 19 nt, Artificial Sequence
  Description of Artificial Sequence: Synthetic oligonucleotide
  Antisense strand to SEQ ID NO: 650738
uuguccacucacuuagccg

SEQ ID NO: 650740 - RNA, 19 nt, Artificial Sequence
  Description of Artificial Sequence: Synthetic oligonucleotide
  Sense strand starting at position 3939 of SEQ ID NO: 585574
ggcuaagugaguggacaau

SEQ ID NO: 650741 - RNA, 19 nt, Artificial Sequence
  Description of Artificial Sequence: Synthetic oligonucleotide
  Antisense strand to SEQ ID NO: 650740
auuguccacucacuuagcc

SEQ ID NO: 650742 - RNA, 19 nt, Artificial Sequence
  Description of Artificial Sequence: Synthetic oligonucleotide
  Sense strand starting at position 3950 of SEQ ID NO: 585574
uggacaauguucuggagaa

SEQ ID NO: 650743 - RNA, 19 nt, Artificial Sequence
  Description of Artificial Sequence: Synthetic oligonucleotide
  Antisense strand to SEQ ID NO: 650742
uucuccagaacauugucca

SEQ ID NO: 650744 - RNA, 19 nt, Artificial Sequence
  Description of Artificial Sequence: Synthetic oligonucleotide
  Sense strand starting at position 3951 of SEQ ID NO: 585574
ggacaauguucuggagaag

SEQ ID NO: 650745 - RNA, 19 nt, Artificial Sequence
  Description of Artificial Sequence: Synthetic oligonucleotide
  Antisense strand to SEQ ID NO: 650744
cuucuccagaacauugucc

SEQ ID NO: 650746 - RNA, 19 nt, Artificial Sequence
  Description of Artificial Sequence: Synthetic oligonucleotide
  Sense strand starting at position 3973 of SEQ ID NO: 585574
aguauaaggcucugguuua

SEQ ID NO: 650747 - RNA, 19 nt, Artificial Sequence
  Description of Artificial Sequence: Synthetic oligonucleotide
  Antisense strand to SEQ ID NO: 650746
uaaaccagagccuuauacu

SEQ ID NO: 650748 - RNA, 19 nt, Artificial Sequence
  Description of Artificial Sequence: Synthetic oligonucleotide
  Sense strand starting at position 3974 of SEQ ID NO: 585574
guauaaggcucugguuuag

SEQ ID NO: 650749 - RNA, 19 nt, Artificial Sequence
  Description of Artificial Sequence: Synthetic oligonucleotide
  Antisense strand to SEQ ID NO: 650748
cuaaaccagagccuuauac

SEQ ID NO: 650750 - RNA, 19 nt, Artificial Sequence
  Description of Artificial Sequence: Synthetic oligonucleotide
  Sense strand starting at position 327 of SEQ ID NO: 585575
aaagguauguuuccaugag

SEQ ID NO: 650751 - RNA, 19 nt, Artificial Sequence
  Description of Artificial Sequence: Synthetic oligonucleotide
  Antisense strand to SEQ ID NO: 650750
cucauggaaacauaccuuu

SEQ ID NO: 650752 - RNA, 19 nt, Artificial Sequence
  Description of Artificial Sequence: Synthetic oligonucleotide
  Sense strand starting at position 331 of SEQ ID NO: 585575
guauguuuccaugaguacc

SEQ ID NO: 650753 - RNA, 19 nt, Artificial Sequence
  Description of Artificial Sequence: Synthetic oligonucleotide
  Antisense strand to SEQ ID NO: 650752
gguacucauggaaacauac

SEQ ID NO: 650754 - RNA, 19 nt, Artificial Sequence
  Description of Artificial Sequence: Synthetic oligonucleotide
  Sense strand starting at position 333 of SEQ ID NO: 585575
auguuuccaugaguaccaa

SEQ ID NO: 650755 - RNA, 19 nt, Artificial Sequence
  Description of Artificial Sequence: Synthetic oligonucleotide
  Antisense strand to SEQ ID NO: 650754
uugguacucauggaaacau

SEQ ID NO: 650756 - RNA, 19 nt, Artificial Sequence
  Description of Artificial Sequence: Synthetic oligonucleotide
  Sense strand starting at position 349 of SEQ ID NO: 585575
caacguaagcucuagagaa

SEQ ID NO: 650757 - RNA, 19 nt, Artificial Sequence
  Description of Artificial Sequence: Synthetic oligonucleotide
  Antisense strand to SEQ ID NO: 650756
uucucuagagcuuacguug

SEQ ID NO: 650758 - RNA, 19 nt, Artificial Sequence
  Description of Artificial Sequence: Synthetic oligonucleotide
  Sense strand starting at position 351 of SEQ ID NO: 585575
acguaagcucuagagaauc

SEQ ID NO: 650759 - RNA, 19 nt, Artificial Sequence
  Description of Artificial Sequence: Synthetic oligonucleotide
  Antisense strand to SEQ ID NO: 650758
gauucucuagagcuuacgu

SEQ ID NO: 650760 - RNA, 19 nt, Artificial Sequence
  Description of Artificial Sequence: Synthetic oligonucleotide
  Sense strand starting at position 385 of SEQ ID NO: 585575
ucaggaacucugugcuuau

SEQ ID NO: 650761 - RNA, 19 nt, Artificial Sequence
  Description of Artificial Sequence: Synthetic oligonucleotide
  Antisense strand to SEQ ID NO: 650760
auaagcacagaguuccuga

SEQ ID NO: 650762 - RNA, 19 nt, Artificial Sequence
  Description of Artificial Sequence: Synthetic oligonucleotide
  Sense strand starting at position 386 of SEQ ID NO: 585575
caggaacucugugcuuauu

SEQ ID NO: 650763 - RNA, 19 nt, Artificial Sequence
  Description of Artificial Sequence: Synthetic oligonucleotide
  Antisense strand to SEQ ID NO: 650762
aauaagcacagaguuccug

SEQ ID NO: 650764 - RNA, 19 nt, Artificial Sequence
  Description of Artificial Sequence: Synthetic oligonucleotide
  Sense strand starting at position 570 of SEQ ID NO: 585575
gaacauguguuacugcaaa

SEQ ID NO: 650765 - RNA, 19 nt, Artificial Sequence
  Description of Artificial Sequence: Synthetic oligonucleotide
  Antisense strand to SEQ ID NO: 650764
uuugcaguaacacauguuc

SEQ ID NO: 650766 - RNA, 19 nt, Artificial Sequence
  Description of Artificial Sequence: Synthetic oligonucleotide
  Sense strand starting at position 589 of SEQ ID NO: 585575
ucagguccuuaguuacaga

SEQ ID NO: 650767 - RNA, 19 nt, Artificial Sequence
  Description of Artificial Sequence: Synthetic oligonucleotide
  Antisense strand to SEQ ID NO: 650766
ucuguaacuaaggaccuga

SEQ ID NO: 650768 - RNA, 19 nt, Artificial Sequence
  Description of Artificial Sequence: Synthetic oligonucleotide
  Sense strand starting at position 670 of SEQ ID NO: 585575
cugcuauggccuuaaauca

SEQ ID NO: 650769 - RNA, 19 nt, Artificial Sequence
  Description of Artificial Sequence: Synthetic oligonucleotide
  Antisense strand to SEQ ID NO: 650768
ugauuuaaggccauagcag

SEQ ID NO: 650770 - RNA, 19 nt, Artificial Sequence
  Description of Artificial Sequence: Synthetic oligonucleotide
  Sense strand starting at position 744 of SEQ ID NO: 585575
uuaguagaaguauagggua

SEQ ID NO: 650771 - RNA, 19 nt, Artificial Sequence
  Description of Artificial Sequence: Synthetic oligonucleotide
  Antisense strand to SEQ ID NO: 650770
uacccuauacuucuacuaa

SEQ ID NO: 650772 - RNA, 19 nt, Artificial Sequence
  Description of Artificial Sequence: Synthetic oligonucleotide
  Sense strand starting at position 746 of SEQ ID NO: 585575
aguagaaguauaggguaau

SEQ ID NO: 650773 - RNA, 19 nt, Artificial Sequence
  Description of Artificial Sequence: Synthetic oligonucleotide
  Antisense strand to SEQ ID NO: 650772
auuacccuauacuucuacu

SEQ ID NO: 650774 - RNA, 19 nt, Artificial Sequence
  Description of Artificial Sequence: Synthetic oligonucleotide
  Sense strand starting at position 756 of SEQ ID NO: 585575
uaggguaaugguuaagagu

SEQ ID NO: 650775 - RNA, 19 nt, Artificial Sequence
  Description of Artificial Sequence: Synthetic oligonucleotide
  Antisense strand to SEQ ID NO: 650774
acucuuaaccauuacccua

SEQ ID NO: 650776 - RNA, 19 nt, Artificial Sequence
  Description of Artificial Sequence: Synthetic oligonucleotide
  Sense strand starting at position 1048 of SEQ ID NO: 585575
agagcaaauaacuggagua

SEQ ID NO: 650777 - RNA, 19 nt, Artificial Sequence
  Description of Artificial Sequence: Synthetic oligonucleotide
  Antisense strand to SEQ ID NO: 650776
uacuccaguuauuugcucu

SEQ ID NO: 650778 - RNA, 19 nt, Artificial Sequence
  Description of Artificial Sequence: Synthetic oligonucleotide
  Sense strand starting at position 1232 of SEQ ID NO: 585575
auuccuagucgugaguaua

SEQ ID NO: 650779 - RNA, 19 nt, Artificial Sequence
  Description of Artificial Sequence: Synthetic oligonucleotide
  Antisense strand to SEQ ID NO: 650778
uauacucacgacuaggaau

SEQ ID NO: 650780 - RNA, 19 nt, Artificial Sequence
  Description of Artificial Sequence: Synthetic oligonucleotide
  Sense strand starting at position 1440 of SEQ ID NO: 585575
cgccauaaguucccaacaa

SEQ ID NO: 650781 - RNA, 19 nt, Artificial Sequence
  Description of Artificial Sequence: Synthetic oligonucleotide
  Antisense strand to SEQ ID NO: 650780
uuguugggaacuuauggcg

SEQ ID NO: 650782 - RNA, 19 nt, Artificial Sequence
  Description of Artificial Sequence: Synthetic oligonucleotide
  Sense strand starting at position 1473 of SEQ ID NO: 585575
ucgcuuuaccuauaaggga

SEQ ID NO: 650783 - RNA, 19 nt, Artificial Sequence
  Description of Artificial Sequence: Synthetic oligonucleotide
  Antisense strand to SEQ ID NO: 650782
ucccuuauagguaaagcga

SEQ ID NO: 650784 - RNA, 19 nt, Artificial Sequence
  Description of Artificial Sequence: Synthetic oligonucleotide
  Sense strand starting at position 1487 of SEQ ID NO: 585575
agggauuuauccuaaucua

SEQ ID NO: 650785 - RNA, 19 nt, Artificial Sequence
  Description of Artificial Sequence: Synthetic oligonucleotide
  Antisense strand to SEQ ID NO: 650784
uagauuaggauaaaucccu

SEQ ID NO: 650786 - RNA, 19 nt, Artificial Sequence
  Description of Artificial Sequence: Synthetic oligonucleotide
  Sense strand starting at position 1495 of SEQ ID NO: 585575
auccuaaucuaguucuagu

SEQ ID NO: 650787 - RNA, 19 nt, Artificial Sequence
  Description of Artificial Sequence: Synthetic oligonucleotide
  Antisense strand to SEQ ID NO: 650786
acuagaacuagauuaggau

SEQ ID NO: 650788 - RNA, 19 nt, Artificial Sequence
  Description of Artificial Sequence: Synthetic oligonucleotide
  Sense strand starting at position 1592 of SEQ ID NO: 585575
ugggaucgauccuuaaauc

SEQ ID NO: 650789 - RNA, 19 nt, Artificial Sequence
  Description of Artificial Sequence: Synthetic oligonucleotide
  Antisense strand to SEQ ID NO: 650788
gauuuaaggaucgauccca

SEQ ID NO: 650790 - RNA, 19 nt, Artificial Sequence
  Description of Artificial Sequence: Synthetic oligonucleotide
  Sense strand starting at position 1619 of SEQ ID NO: 585575
acgacucauuuguccguau

SEQ ID NO: 650791 - RNA, 19 nt, Artificial Sequence
  Description of Artificial Sequence: Synthetic oligonucleotide
  Antisense strand to SEQ ID NO: 650790
auacggacaaaugagucgu

SEQ ID NO: 650792 - RNA, 19 nt, Artificial Sequence
  Description of Artificial Sequence: Synthetic oligonucleotide
  Sense strand starting at position 1622 of SEQ ID NO: 585575
acucauuuguccguaugca

SEQ ID NO: 650793 - RNA, 19 nt, Artificial Sequence
  Description of Artificial Sequence: Synthetic oligonucleotide
  Antisense strand to SEQ ID NO: 650792
ugcauacggacaaaugagu

SEQ ID NO: 650794 - RNA, 19 nt, Artificial Sequence
  Description of Artificial Sequence: Synthetic oligonucleotide
  Sense strand starting at position 1623 of SEQ ID NO: 585575
cucauuuguccguaugcag

SEQ ID NO: 650795 - RNA, 19 nt, Artificial Sequence
  Description of Artificial Sequence: Synthetic oligonucleotide
  Antisense strand to SEQ ID NO: 650794
cugcauacggacaaaugag

SEQ ID NO: 650796 - RNA, 19 nt, Artificial Sequence
  Description of Artificial Sequence: Synthetic oligonucleotide
  Sense strand starting at position 1626 of SEQ ID NO: 585575
auuuguccguaugcagaaa

SEQ ID NO: 650797 - RNA, 19 nt, Artificial Sequence
  Description of Artificial Sequence: Synthetic oligonucleotide
  Antisense strand to SEQ ID NO: 650796
uuucugcauacggacaaau

SEQ ID NO: 650798 - RNA, 19 nt, Artificial Sequence
  Description of Artificial Sequence: Synthetic oligonucleotide
  Sense strand starting at position 1690 of SEQ ID NO: 585575
ggcagauauugccucauuu

SEQ ID NO: 650799 - RNA, 19 nt, Artificial Sequence
  Description of Artificial Sequence: Synthetic oligonucleotide
  Antisense strand to SEQ ID NO: 650798
aaaugaggcaauaucugcc

SEQ ID NO: 650800 - RNA, 19 nt, Artificial Sequence
  Description of Artificial Sequence: Synthetic oligonucleotide
  Sense strand starting at position 1753 of SEQ ID NO: 585575
uaagucucuuagguuugau

SEQ ID NO: 650801 - RNA, 19 nt, Artificial Sequence
  Description of Artificial Sequence: Synthetic oligonucleotide
  Antisense strand to SEQ ID NO: 650800
aucaaaccuaagagacuua

SEQ ID NO: 650802 - RNA, 19 nt, Artificial Sequence
  Description of Artificial Sequence: Synthetic oligonucleotide
  Sense strand starting at position 2066 of SEQ ID NO: 585575
ucugcaucggcgcucgaau

SEQ ID NO: 650803 - RNA, 19 nt, Artificial Sequence
  Description of Artificial Sequence: Synthetic oligonucleotide
  Antisense strand to SEQ ID NO: 650802
auucgagcgccgaugcaga

SEQ ID NO: 650804 - RNA, 19 nt, Artificial Sequence
  Description of Artificial Sequence: Synthetic oligonucleotide
  Sense strand starting at position 2067 of SEQ ID NO: 585575
cugcaucggcgcucgaauu

SEQ ID NO: 650805 - RNA, 19 nt, Artificial Sequence
  Description of Artificial Sequence: Synthetic oligonucleotide
  Antisense strand to SEQ ID NO: 650804
aauucgagcgccgaugcag

SEQ ID NO: 650806 - RNA, 19 nt, Artificial Sequence
  Description of Artificial Sequence: Synthetic oligonucleotide
  Sense strand starting at position 2238 of SEQ ID NO: 585575
ggcauaucucaggaaggug

SEQ ID NO: 650807 - RNA, 19 nt, Artificial Sequence
  Description of Artificial Sequence: Synthetic oligonucleotide
  Antisense strand to SEQ ID NO: 650806
caccuuccugagauaugcc

SEQ ID NO: 650808 - RNA, 19 nt, Artificial Sequence
  Description of Artificial Sequence: Synthetic oligonucleotide
  Sense strand starting at position 2383 of SEQ ID NO: 585575
cauuguugugggcugugua

SEQ ID NO: 650809 - RNA, 19 nt, Artificial Sequence
  Description of Artificial Sequence: Synthetic oligonucleotide
  Antisense strand to SEQ ID NO: 650808
uacacagcccacaacaaug

SEQ ID NO: 650810 - RNA, 19 nt, Artificial Sequence
  Description of Artificial Sequence: Synthetic oligonucleotide
  Sense strand starting at position 2440 of SEQ ID NO: 585575
cgaggcuuucugucguuaa

SEQ ID NO: 650811 - RNA, 19 nt, Artificial Sequence
  Description of Artificial Sequence: Synthetic oligonucleotide
  Antisense strand to SEQ ID NO: 650810
uuaacgacagaaagccucg

SEQ ID NO: 650812 - RNA, 19 nt, Artificial Sequence
  Description of Artificial Sequence: Synthetic oligonucleotide
  Sense strand starting at position 3254 of SEQ ID NO: 585575
ugucuuagacauuacagcu

SEQ ID NO: 650813 - RNA, 19 nt, Artificial Sequence
  Description of Artificial Sequence: Synthetic oligonucleotide
  Antisense strand to SEQ ID NO: 650812
agcuguaaugucuaagaca

SEQ ID NO: 650814 - RNA, 19 nt, Artificial Sequence
  Description of Artificial Sequence: Synthetic oligonucleotide
  Sense strand starting at position 3327 of SEQ ID NO: 585575
cguaguaggucauuuggua

SEQ ID NO: 650815 - RNA, 19 nt, Artificial Sequence
  Description of Artificial Sequence: Synthetic oligonucleotide
  Antisense strand to SEQ ID NO: 650814
uaccaaaugaccuacuacg

SEQ ID NO: 650816 - RNA, 19 nt, Artificial Sequence
  Description of Artificial Sequence: Synthetic oligonucleotide
  Sense strand starting at position 3332 of SEQ ID NO: 585575
uaggucauuugguaaacaa

SEQ ID NO: 650817 - RNA, 19 nt, Artificial Sequence
  Description of Artificial Sequence: Synthetic oligonucleotide
  Antisense strand to SEQ ID NO: 650816
uuguuuaccaaaugaccua

SEQ ID NO: 650818 - RNA, 19 nt, Artificial Sequence
  Description of Artificial Sequence: Synthetic oligonucleotide
  Sense strand starting at position 3490 of SEQ ID NO: 585575
uugggucuugcagaaauga

SEQ ID NO: 650819 - RNA, 19 nt, Artificial Sequence
  Description of Artificial Sequence: Synthetic oligonucleotide
  Antisense strand to SEQ ID NO: 650818
ucauuucugcaagacccaa

SEQ ID NO: 650820 - RNA, 19 nt, Artificial Sequence
  Description of Artificial Sequence: Synthetic oligonucleotide
  Sense strand starting at position 3843 of SEQ ID NO: 585575
ugagcaugucccgcaguua

SEQ ID NO: 650821 - RNA, 19 nt, Artificial Sequence
  Description of Artificial Sequence: Synthetic oligonucleotide
  Antisense strand to SEQ ID NO: 650820
uaacugcgggacaugcuca

SEQ ID NO: 650822 - RNA, 19 nt, Artificial Sequence
  Description of Artificial Sequence: Synthetic oligonucleotide
  Sense strand starting at position 3846 of SEQ ID NO: 585575
gcaugucccgcaguuacau

SEQ ID NO: 650823 - RNA, 19 nt, Artificial Sequence
  Description of Artificial Sequence: Synthetic oligonucleotide
  Antisense strand to SEQ ID NO: 650822
auguaacugcgggacaugc

SEQ ID NO: 650824 - RNA, 19 nt, Artificial Sequence
  Description of Artificial Sequence: Synthetic oligonucleotide
  Sense strand starting at position 3901 of SEQ ID NO: 585575
ggaggcuugaaguaaguua

SEQ ID NO: 650825 - RNA, 19 nt, Artificial Sequence
  Description of Artificial Sequence: Synthetic oligonucleotide
  Antisense strand to SEQ ID NO: 650824
uaacuuacuucaagccucc

SEQ ID NO: 650826 - RNA, 19 nt, Artificial Sequence
  Description of Artificial Sequence: Synthetic oligonucleotide
  Sense strand starting at position 3908 of SEQ ID NO: 585575
ugaaguaaguuagucuuua

SEQ ID NO: 650827 - RNA, 19 nt, Artificial Sequence
  Description of Artificial Sequence: Synthetic oligonucleotide
  Antisense strand to SEQ ID NO: 650826
uaaagacuaacuuacuuca

SEQ ID NO: 650828 - RNA, 19 nt, Artificial Sequence
  Description of Artificial Sequence: Synthetic oligonucleotide
  Sense strand starting at position 3909 of SEQ ID NO: 585575
gaaguaaguuagucuuuaa

SEQ ID NO: 650829 - RNA, 19 nt, Artificial Sequence
  Description of Artificial Sequence: Synthetic oligonucleotide
  Antisense strand to SEQ ID NO: 650828
uuaaagacuaacuuacuuc

SEQ ID NO: 650830 - RNA, 19 nt, Artificial Sequence
  Description of Artificial Sequence: Synthetic oligonucleotide
  Sense strand starting at position 86 of SEQ ID NO: 585576
uacucugggucuuccagaa

SEQ ID NO: 650831 - RNA, 19 nt, Artificial Sequence
  Description of Artificial Sequence: Synthetic oligonucleotide
  Antisense strand to SEQ ID NO: 650830
uucuggaagacccagagua

SEQ ID NO: 650832 - RNA, 19 nt, Artificial Sequence
  Description of Artificial Sequence: Synthetic oligonucleotide
  Sense strand starting at position 96 of SEQ ID NO: 585576
cuuccagaauugguuguua

SEQ ID NO: 650833 - RNA, 19 nt, Artificial Sequence
  Description of Artificial Sequence: Synthetic oligonucleotide
  Antisense strand to SEQ ID NO: 650832
uaacaaccaauucuggaag

SEQ ID NO: 650834 - RNA, 19 nt, Artificial Sequence
  Description of Artificial Sequence: Synthetic oligonucleotide
  Sense strand starting at position 499 of SEQ ID NO: 585576
cauguuuaacucgacugga

SEQ ID NO: 650835 - RNA, 19 nt, Artificial Sequence
  Description of Artificial Sequence: Synthetic oligonucleotide
  Antisense strand to SEQ ID NO: 650834
uccagucgaguuaaacaug

SEQ ID NO: 650836 - RNA, 19 nt, Artificial Sequence
  Description of Artificial Sequence: Synthetic oligonucleotide
  Sense strand starting at position 502 of SEQ ID NO: 585576
guuuaacucgacuggaaug

SEQ ID NO: 650837 - RNA, 19 nt, Artificial Sequence
  Description of Artificial Sequence: Synthetic oligonucleotide
  Antisense strand to SEQ ID NO: 650836
cauuccagucgaguuaaac

SEQ ID NO: 650838 - RNA, 19 nt, Artificial Sequence
  Description of Artificial Sequence: Synthetic oligonucleotide
  Sense strand starting at position 523 of SEQ ID NO: 585576
gugcguuuguggacauugu

SEQ ID NO: 650839 - RNA, 19 nt, Artificial Sequence
  Description of Artificial Sequence: Synthetic oligonucleotide
  Antisense strand to SEQ ID NO: 650838
acaauguccacaaacgcac

SEQ ID NO: 650840 - RNA, 19 nt, Artificial Sequence
  Description of Artificial Sequence: Synthetic oligonucleotide
  Sense strand starting at position 583 of SEQ ID NO: 585576
agaaacagcuucucagagu

SEQ ID NO: 650841 - RNA, 19 nt, Artificial Sequence
  Description of Artificial Sequence: Synthetic oligonucleotide
  Antisense strand to SEQ ID NO: 650840
acucugagaagcuguuucu

SEQ ID NO: 650842 - RNA, 19 nt, Artificial Sequence
  Description of Artificial Sequence: Synthetic oligonucleotide
  Sense strand starting at position 652 of SEQ ID NO: 585576
uuguaugaguuaucccuaa

SEQ ID NO: 650843 - RNA, 19 nt, Artificial Sequence
  Description of Artificial Sequence: Synthetic oligonucleotide
  Antisense strand to SEQ ID NO: 650842
uuagggauaacucauacaa

SEQ ID NO: 650844 - RNA, 19 nt, Artificial Sequence
  Description of Artificial Sequence: Synthetic oligonucleotide
  Sense strand starting at position 656 of SEQ ID NO: 585576
augaguuaucccuaaggcg

SEQ ID NO: 650845 - RNA, 19 nt, Artificial Sequence
  Description of Artificial Sequence: Synthetic oligonucleotide
  Antisense strand to SEQ ID NO: 650844
cgccuuagggauaacucau

SEQ ID NO: 650846 - RNA, 19 nt, Artificial Sequence
  Description of Artificial Sequence: Synthetic oligonucleotide
  Sense strand starting at position 688 of SEQ ID NO: 585576
guagguauuaccuguacau

SEQ ID NO: 650847 - RNA, 19 nt, Artificial Sequence
  Description of Artificial Sequence: Synthetic oligonucleotide
  Antisense strand to SEQ ID NO: 650846
auguacagguaauaccuac

SEQ ID NO: 650848 - RNA, 19 nt, Artificial Sequence
  Description of Artificial Sequence: Synthetic oligonucleotide
  Sense strand starting at position 1024 of SEQ ID NO: 585576
ggucuugcucccuagacua

SEQ ID NO: 650849 - RNA, 19 nt, Artificial Sequence
  Description of Artificial Sequence: Synthetic oligonucleotide
  Antisense strand to SEQ ID NO: 650848
uagucuagggagcaagacc

SEQ ID NO: 650850 - RNA, 19 nt, Artificial Sequence
  Description of Artificial Sequence: Synthetic oligonucleotide
  Sense strand starting at position 1037 of SEQ ID NO: 585576
agacuagauucccucucga

SEQ ID NO: 650851 - RNA, 19 nt, Artificial Sequence
  Description of Artificial Sequence: Synthetic oligonucleotide
  Antisense strand to SEQ ID NO: 650850
ucgagagggaaucuagucu

SEQ ID NO: 650852 - RNA, 19 nt, Artificial Sequence
  Description of Artificial Sequence: Synthetic oligonucleotide
  Sense strand starting at position 1042 of SEQ ID NO: 585576
agauucccucucgaguuau

SEQ ID NO: 650853 - RNA, 19 nt, Artificial Sequence
  Description of Artificial Sequence: Synthetic oligonucleotide
  Antisense strand to SEQ ID NO: 650852
auaacucgagagggaaucu

SEQ ID NO: 650854 - RNA, 19 nt, Artificial Sequence
  Description of Artificial Sequence: Synthetic oligonucleotide
  Sense strand starting at position 1206 of SEQ ID NO: 585576
ggcgguucccaucacaacu

SEQ ID NO: 650855 - RNA, 19 nt, Artificial Sequence
  Description of Artificial Sequence: Synthetic oligonucleotide
  Antisense strand to SEQ ID NO: 650854
aguugugaugggaaccgcc

SEQ ID NO: 650856 - RNA, 19 nt, Artificial Sequence
  Description of Artificial Sequence: Synthetic oligonucleotide
  Sense strand starting at position 2319 of SEQ ID NO: 585576
cgcugucaagacugauuua

SEQ ID NO: 650857 - RNA, 19 nt, Artificial Sequence
  Description of Artificial Sequence: Synthetic oligonucleotide
  Antisense strand to SEQ ID NO: 650856
uaaaucagucuugacagcg

SEQ ID NO: 650858 - RNA, 19 nt, Artificial Sequence
  Description of Artificial Sequence: Synthetic oligonucleotide
  Sense strand starting at position 2376 of SEQ ID NO: 585576
cagggucaugcccaugaua

SEQ ID NO: 650859 - RNA, 19 nt, Artificial Sequence
  Description of Artificial Sequence: Synthetic oligonucleotide
  Antisense strand to SEQ ID NO: 650858
uaucaugggcaugacccug

SEQ ID NO: 650860 - RNA, 19 nt, Artificial Sequence
  Description of Artificial Sequence: Synthetic oligonucleotide
  Sense strand starting at position 2378 of SEQ ID NO: 585576
gggucaugcccaugauaua

SEQ ID NO: 650861 - RNA, 19 nt, Artificial Sequence
  Description of Artificial Sequence: Synthetic oligonucleotide
  Antisense strand to SEQ ID NO: 650860
uauaucaugggcaugaccc

SEQ ID NO: 650862 - RNA, 19 nt, Artificial Sequence
  Description of Artificial Sequence: Synthetic oligonucleotide
  Sense strand starting at position 2379 of SEQ ID NO: 585576
ggucaugcccaugauauaa

SEQ ID NO: 650863 - RNA, 19 nt, Artificial Sequence
  Description of Artificial Sequence: Synthetic oligonucleotide
  Antisense strand to SEQ ID NO: 650862
uuauaucaugggcaugacc

SEQ ID NO: 650864 - RNA, 19 nt, Artificial Sequence
  Description of Artificial Sequence: Synthetic oligonucleotide
  Sense strand starting at position 2649 of SEQ ID NO: 585576
cacaauguucucgguauuu

SEQ ID NO: 650865 - RNA, 19 nt, Artificial Sequence
  Description of Artificial Sequence: Synthetic oligonucleotide
  Antisense strand to SEQ ID NO: 650864
aaauaccgagaacauugug

SEQ ID NO: 650866 - RNA, 19 nt, Artificial Sequence
  Description of Artificial Sequence: Synthetic oligonucleotide
  Sense strand starting at position 2685 of SEQ ID NO: 585576
aguuaagaaguuggaugau

SEQ ID NO: 650867 - RNA, 19 nt, Artificial Sequence
  Description of Artificial Sequence: Synthetic oligonucleotide
  Antisense strand to SEQ ID NO: 650866
aucauccaacuucuuaacu

SEQ ID NO: 650868 - RNA, 19 nt, Artificial Sequence
  Description of Artificial Sequence: Synthetic oligonucleotide
  Sense strand starting at position 2782 of SEQ ID NO: 585576
gccugcuuacuguaagauu

SEQ ID NO: 650869 - RNA, 19 nt, Artificial Sequence
  Description of Artificial Sequence: Synthetic oligonucleotide
  Antisense strand to SEQ ID NO: 650868
aaucuuacaguaagcaggc

SEQ ID NO: 650870 - RNA, 19 nt, Artificial Sequence
  Description of Artificial Sequence: Synthetic oligonucleotide
  Sense strand starting at position 2803 of SEQ ID NO: 585576
gucagacaggccuaauucu

SEQ ID NO: 650871 - RNA, 19 nt, Artificial Sequence
  Description of Artificial Sequence: Synthetic oligonucleotide
  Antisense strand to SEQ ID NO: 650870
agaauuaggccugucugac

SEQ ID NO: 650872 - RNA, 19 nt, Artificial Sequence
  Description of Artificial Sequence: Synthetic oligonucleotide
  Sense strand starting at position 2823 of SEQ ID NO: 585576
gucugcuuacuguaagauu

SEQ ID NO: 650873 - RNA, 19 nt, Artificial Sequence
  Description of Artificial Sequence: Synthetic oligonucleotide
  Antisense strand to SEQ ID NO: 650872
aaucuuacaguaagcagac

SEQ ID NO: 650874 - RNA, 19 nt, Artificial Sequence
  Description of Artificial Sequence: Synthetic oligonucleotide
  Sense strand starting at position 2943 of SEQ ID NO: 585576
ugacauguugcacaacauc

SEQ ID NO: 650875 - RNA, 19 nt, Artificial Sequence
  Description of Artificial Sequence: Synthetic oligonucleotide
  Antisense strand to SEQ ID NO: 650874
gauguugugcaacauguca

SEQ ID NO: 650876 - RNA, 19 nt, Artificial Sequence
  Description of Artificial Sequence: Synthetic oligonucleotide
  Sense strand starting at position 3203 of SEQ ID NO: 585576
aaaguaaucuuagcaggau

SEQ ID NO: 650877 - RNA, 19 nt, Artificial Sequence
  Description of Artificial Sequence: Synthetic oligonucleotide
  Antisense strand to SEQ ID NO: 650876
auccugcuaagauuacuuu

SEQ ID NO: 650878 - RNA, 19 nt, Artificial Sequence
  Description of Artificial Sequence: Synthetic oligonucleotide
  Sense strand starting at position 3206 of SEQ ID NO: 585576
guaaucuuagcaggauuau

SEQ ID NO: 650879 - RNA, 19 nt, Artificial Sequence
  Description of Artificial Sequence: Synthetic oligonucleotide
  Antisense strand to SEQ ID NO: 650878
auaauccugcuaagauuac

SEQ ID NO: 650880 - RNA, 19 nt, Artificial Sequence
  Description of Artificial Sequence: Synthetic oligonucleotide
  Sense strand starting at position 3271 of SEQ ID NO: 585576
cagguuugaagcugaguca

SEQ ID NO: 650881 - RNA, 19 nt, Artificial Sequence
  Description of Artificial Sequence: Synthetic oligonucleotide
  Antisense strand to SEQ ID NO: 650880
ugacucagcuucaaaccug

SEQ ID NO: 650882 - RNA, 19 nt, Artificial Sequence
  Description of Artificial Sequence: Synthetic oligonucleotide
  Sense strand starting at position 3357 of SEQ ID NO: 585576
acuuacuuauagguggaua

SEQ ID NO: 650883 - RNA, 19 nt, Artificial Sequence
  Description of Artificial Sequence: Synthetic oligonucleotide
  Antisense strand to SEQ ID NO: 650882
uauccaccuauaaguaagu

SEQ ID NO: 650884 - RNA, 19 nt, Artificial Sequence
  Description of Artificial Sequence: Synthetic oligonucleotide
  Sense strand starting at position 3359 of SEQ ID NO: 585576
uuacuuauagguggauacu

SEQ ID NO: 650885 - RNA, 19 nt, Artificial Sequence
  Description of Artificial Sequence: Synthetic oligonucleotide
  Antisense strand to SEQ ID NO: 650884
aguauccaccuauaaguaa

SEQ ID NO: 650886 - RNA, 19 nt, Artificial Sequence
  Description of Artificial Sequence: Synthetic oligonucleotide
  Sense strand starting at position 3369 of SEQ ID NO: 585576
guggauacuaguggaaaug

SEQ ID NO: 650887 - RNA, 19 nt, Artificial Sequence
  Description of Artificial Sequence: Synthetic oligonucleotide
  Antisense strand to SEQ ID NO: 650886
cauuuccacuaguauccac

SEQ ID NO: 650888 - RNA, 19 nt, Artificial Sequence
  Description of Artificial Sequence: Synthetic oligonucleotide
  Sense strand starting at position 3381 of SEQ ID NO: 585576
ggaaaugucacaggagguc

SEQ ID NO: 650889 - RNA, 19 nt, Artificial Sequence
  Description of Artificial Sequence: Synthetic oligonucleotide
  Antisense strand to SEQ ID NO: 650888
gaccuccugugacauuucc

SEQ ID NO: 650890 - RNA, 19 nt, Artificial Sequence
  Description of Artificial Sequence: Synthetic oligonucleotide
  Sense strand starting at position 3534 of SEQ ID NO: 585576
gcuuauugagagggaguga

SEQ ID NO: 650891 - RNA, 19 nt, Artificial Sequence
  Description of Artificial Sequence: Synthetic oligonucleotide
  Antisense strand to SEQ ID NO: 650890
ucacucccucucaauaagc

SEQ ID NO: 650892 - RNA, 19 nt, Artificial Sequence
  Description of Artificial Sequence: Synthetic oligonucleotide
  Sense strand starting at position 3670 of SEQ ID NO: 585576
cgaaaugcauugcugauua

SEQ ID NO: 650893 - RNA, 19 nt, Artificial Sequence
  Description of Artificial Sequence: Synthetic oligonucleotide
  Antisense strand to SEQ ID NO: 650892
uaaucagcaaugcauuucg

SEQ ID NO: 650894 - RNA, 19 nt, Artificial Sequence
  Description of Artificial Sequence: Synthetic oligonucleotide
  Sense strand starting at position 3712 of SEQ ID NO: 585576
acaguuaauccauguggaa

SEQ ID NO: 650895 - RNA, 19 nt, Artificial Sequence
  Description of Artificial Sequence: Synthetic oligonucleotide
  Antisense strand to SEQ ID NO: 650894
uuccacauggauuaacugu

SEQ ID NO: 650896 - RNA, 19 nt, Artificial Sequence
  Description of Artificial Sequence: Synthetic oligonucleotide
  Sense strand starting at position 3714 of SEQ ID NO: 585576
aguuaauccauguggaaug

SEQ ID NO: 650897 - RNA, 19 nt, Artificial Sequence
  Description of Artificial Sequence: Synthetic oligonucleotide
  Antisense strand to SEQ ID NO: 650896
cauuccacauggauuaacu

SEQ ID NO: 650898 - RNA, 19 nt, Artificial Sequence
  Description of Artificial Sequence: Synthetic oligonucleotide
  Sense strand starting at position 3721 of SEQ ID NO: 585576
ccauguggaaugugaagaa

SEQ ID NO: 650899 - RNA, 19 nt, Artificial Sequence
  Description of Artificial Sequence: Synthetic oligonucleotide
  Antisense strand to SEQ ID NO: 650898
uucuucacauuccacaugg

SEQ ID NO: 650900 - RNA, 19 nt, Artificial Sequence
  Description of Artificial Sequence: Synthetic oligonucleotide
  Sense strand starting at position 3725 of SEQ ID NO: 585576
guggaaugugaagaagucu

SEQ ID NO: 650901 - RNA, 19 nt, Artificial Sequence
  Description of Artificial Sequence: Synthetic oligonucleotide
  Antisense strand to SEQ ID NO: 650900
agacuucuucacauuccac

SEQ ID NO: 650902 - RNA, 19 nt, Artificial Sequence
  Description of Artificial Sequence: Synthetic oligonucleotide
  Sense strand starting at position 3781 of SEQ ID NO: 585576
ugguaaauguuccuuucuu

SEQ ID NO: 650903 - RNA, 19 nt, Artificial Sequence
  Description of Artificial Sequence: Synthetic oligonucleotide
  Antisense strand to SEQ ID NO: 650902
aagaaaggaacauuuacca

SEQ ID NO: 650904 - RNA, 19 nt, Artificial Sequence
  Description of Artificial Sequence: Synthetic oligonucleotide
  Sense strand starting at position 3782 of SEQ ID NO: 585576
gguaaauguuccuuucuuc

SEQ ID NO: 650905 - RNA, 19 nt, Artificial Sequence
  Description of Artificial Sequence: Synthetic oligonucleotide
  Antisense strand to SEQ ID NO: 650904
gaagaaaggaacauuuacc

SEQ ID NO: 650906 - RNA, 19 nt, Artificial Sequence
  Description of Artificial Sequence: Synthetic oligonucleotide
  Sense strand starting at position 3847 of SEQ ID NO: 585576
augggugucaggcauuguu

SEQ ID NO: 650907 - RNA, 19 nt, Artificial Sequence
  Description of Artificial Sequence: Synthetic oligonucleotide
  Antisense strand to SEQ ID NO: 650906
aacaaugccugacacccau

SEQ ID NO: 650908 - RNA, 19 nt, Artificial Sequence
  Description of Artificial Sequence: Synthetic oligonucleotide
  Sense strand starting at position 3919 of SEQ ID NO: 585576
uaagaauggugguucucau

SEQ ID NO: 650909 - RNA, 19 nt, Artificial Sequence
  Description of Artificial Sequence: Synthetic oligonucleotide
  Antisense strand to SEQ ID NO: 650908
augagaaccaccauucuua

SEQ ID NO: 650910 - RNA, 19 nt, Artificial Sequence
  Description of Artificial Sequence: Synthetic oligonucleotide
  Sense strand starting at position 3 of SEQ ID NO: 585577
agaauuaggcaaugcaacu

SEQ ID NO: 650911 - RNA, 19 nt, Artificial Sequence
  Description of Artificial Sequence: Synthetic oligonucleotide
  Antisense strand to SEQ ID NO: 650910
aguugcauugccuaauucu

SEQ ID NO: 650912 - RNA, 19 nt, Artificial Sequence
  Description of Artificial Sequence: Synthetic oligonucleotide
  Sense strand starting at position 14 of SEQ ID NO: 585577
augcaacuaguugaauauu

SEQ ID NO: 650913 - RNA, 19 nt, Artificial Sequence
  Description of Artificial Sequence: Synthetic oligonucleotide
  Antisense strand to SEQ ID NO: 650912
aauauucaacuaguugcau

SEQ ID NO: 650914 - RNA, 19 nt, Artificial Sequence
  Description of Artificial Sequence: Synthetic oligonucleotide
  Sense strand starting at position 64 of SEQ ID NO: 585577
aggcacauuuccuagggaa

SEQ ID NO: 650915 - RNA, 19 nt, Artificial Sequence
  Description of Artificial Sequence: Synthetic oligonucleotide
  Antisense strand to SEQ ID NO: 650914
uucccuaggaaaugugccu

SEQ ID NO: 650916 - RNA, 19 nt, Artificial Sequence
  Description of Artificial Sequence: Synthetic oligonucleotide
  Sense strand starting at position 189 of SEQ ID NO: 585577
ucuccaugucauuaccagu

SEQ ID NO: 650917 - RNA, 19 nt, Artificial Sequence
  Description of Artificial Sequence: Synthetic oligonucleotide
  Antisense strand to SEQ ID NO: 650916
acugguaaugacauggaga

SEQ ID NO: 650918 - RNA, 19 nt, Artificial Sequence
  Description of Artificial Sequence: Synthetic oligonucleotide
  Sense strand starting at position 195 of SEQ ID NO: 585577
ugucauuaccaguaauuga

SEQ ID NO: 650919 - RNA, 19 nt, Artificial Sequence
  Description of Artificial Sequence: Synthetic oligonucleotide
  Antisense strand to SEQ ID NO: 650918
ucaauuacugguaaugaca

SEQ ID NO: 650920 - RNA, 19 nt, Artificial Sequence
  Description of Artificial Sequence: Synthetic oligonucleotide
  Sense strand starting at position 343 of SEQ ID NO: 585577
acuuauaacugaguaaugu

SEQ ID NO: 650921 - RNA, 19 nt, Artificial Sequence
  Description of Artificial Sequence: Synthetic oligonucleotide
  Antisense strand to SEQ ID NO: 650920
acauuacucaguuauaagu

SEQ ID NO: 650922 - RNA, 19 nt, Artificial Sequence
  Description of Artificial Sequence: Synthetic oligonucleotide
  Sense strand starting at position 352 of SEQ ID NO: 585577
ugaguaauguucuuuagau

SEQ ID NO: 650923 - RNA, 19 nt, Artificial Sequence
  Description of Artificial Sequence: Synthetic oligonucleotide
  Antisense strand to SEQ ID NO: 650922
aucuaaagaacauuacuca

SEQ ID NO: 650924 - RNA, 19 nt, Artificial Sequence
  Description of Artificial Sequence: Synthetic oligonucleotide
  Sense strand starting at position 353 of SEQ ID NO: 585577
gaguaauguucuuuagauc

SEQ ID NO: 650925 - RNA, 19 nt, Artificial Sequence
  Description of Artificial Sequence: Synthetic oligonucleotide
  Antisense strand to SEQ ID NO: 650924
gaucuaaagaacauuacuc

SEQ ID NO: 650926 - RNA, 19 nt, Artificial Sequence
  Description of Artificial Sequence: Synthetic oligonucleotide
  Sense strand starting at position 354 of SEQ ID NO: 585577
aguaauguucuuuagaucu

SEQ ID NO: 650927 - RNA, 19 nt, Artificial Sequence
  Description of Artificial Sequence: Synthetic oligonucleotide
  Antisense strand to SEQ ID NO: 650926
agaucuaaagaacauuacu

SEQ ID NO: 650928 - RNA, 19 nt, Artificial Sequence
  Description of Artificial Sequence: Synthetic oligonucleotide
  Sense strand starting at position 375 of SEQ ID NO: 585577
agugcuugucuuuauauag

SEQ ID NO: 650929 - RNA, 19 nt, Artificial Sequence
  Description of Artificial Sequence: Synthetic oligonucleotide
  Antisense strand to SEQ ID NO: 650928
cuauauaaagacaagcacu

SEQ ID NO: 650930 - RNA, 19 nt, Artificial Sequence
  Description of Artificial Sequence: Synthetic oligonucleotide
  Sense strand starting at position 422 of SEQ ID NO: 585577
uuaucugugcacuagauua

SEQ ID NO: 650931 - RNA, 19 nt, Artificial Sequence
  Description of Artificial Sequence: Synthetic oligonucleotide
  Antisense strand to SEQ ID NO: 650930
uaaucuagugcacagauaa

SEQ ID NO: 650932 - RNA, 19 nt, Artificial Sequence
  Description of Artificial Sequence: Synthetic oligonucleotide
  Sense strand starting at position 427 of SEQ ID NO: 585577
ugugcacuagauuaaguua

SEQ ID NO: 650933 - RNA, 19 nt, Artificial Sequence
  Description of Artificial Sequence: Synthetic oligonucleotide
  Antisense strand to SEQ ID NO: 650932
uaacuuaaucuagugcaca

SEQ ID NO: 650934 - RNA, 19 nt, Artificial Sequence
  Description of Artificial Sequence: Synthetic oligonucleotide
  Sense strand starting at position 430 of SEQ ID NO: 585577
gcacuagauuaaguuaaau

SEQ ID NO: 650935 - RNA, 19 nt, Artificial Sequence
  Description of Artificial Sequence: Synthetic oligonucleotide
  Antisense strand to SEQ ID NO: 650934
auuuaacuuaaucuagugc

SEQ ID NO: 650936 - RNA, 19 nt, Artificial Sequence
  Description of Artificial Sequence: Synthetic oligonucleotide
  Sense strand starting at position 577 of SEQ ID NO: 585577
agugaaucuuacguaaaug

SEQ ID NO: 650937 - RNA, 19 nt, Artificial Sequence
  Description of Artificial Sequence: Synthetic oligonucleotide
  Antisense strand to SEQ ID NO: 650936
cauuuacguaagauucacu

SEQ ID NO: 650938 - RNA, 19 nt, Artificial Sequence
  Description of Artificial Sequence: Synthetic oligonucleotide
  Sense strand starting at position 578 of SEQ ID NO: 585577
gugaaucuuacguaaaugu

SEQ ID NO: 650939 - RNA, 19 nt, Artificial Sequence
  Description of Artificial Sequence: Synthetic oligonucleotide
  Antisense strand to SEQ ID NO: 650938
acauuuacguaagauucac

SEQ ID NO: 650940 - RNA, 19 nt, Artificial Sequence
  Description of Artificial Sequence: Synthetic oligonucleotide
  Sense strand starting at position 902 of SEQ ID NO: 585577
acguacuuacugcaaucaa

SEQ ID NO: 650941 - RNA, 19 nt, Artificial Sequence
  Description of Artificial Sequence: Synthetic oligonucleotide
  Antisense strand to SEQ ID NO: 650940
uugauugcaguaaguacgu

SEQ ID NO: 650942 - RNA, 19 nt, Artificial Sequence
  Description of Artificial Sequence: Synthetic oligonucleotide
  Sense strand starting at position 1105 of SEQ ID NO: 585577
aggaccuuugcucaucuua

SEQ ID NO: 650943 - RNA, 19 nt, Artificial Sequence
  Description of Artificial Sequence: Synthetic oligonucleotide
  Antisense strand to SEQ ID NO: 650942
uaagaugagcaaagguccu

SEQ ID NO: 650944 - RNA, 19 nt, Artificial Sequence
  Description of Artificial Sequence: Synthetic oligonucleotide
  Sense strand starting at position 1146 of SEQ ID NO: 585577
cucugaugccacuaaguuu

SEQ ID NO: 650945 - RNA, 19 nt, Artificial Sequence
  Description of Artificial Sequence: Synthetic oligonucleotide
  Antisense strand to SEQ ID NO: 650944
aaacuuaguggcaucagag

SEQ ID NO: 650946 - RNA, 19 nt, Artificial Sequence
  Description of Artificial Sequence: Synthetic oligonucleotide
  Sense strand starting at position 1307 of SEQ ID NO: 585577
gaaacauccgagggagcaa

SEQ ID NO: 650947 - RNA, 19 nt, Artificial Sequence
  Description of Artificial Sequence: Synthetic oligonucleotide
  Antisense strand to SEQ ID NO: 650946
uugcucccucggauguuuc

SEQ ID NO: 650948 - RNA, 19 nt, Artificial Sequence
  Description of Artificial Sequence: Synthetic oligonucleotide
  Sense strand starting at position 1611 of SEQ ID NO: 585577
cgaggcggucuucaugaga

SEQ ID NO: 650949 - RNA, 19 nt, Artificial Sequence
  Description of Artificial Sequence: Synthetic oligonucleotide
  Antisense strand to SEQ ID NO: 650948
ucucaugaagaccgccucg

SEQ ID NO: 650950 - RNA, 19 nt, Artificial Sequence
  Description of Artificial Sequence: Synthetic oligonucleotide
  Sense strand starting at position 1860 of SEQ ID NO: 585577
cuaucauggucacugggua

SEQ ID NO: 650951 - RNA, 19 nt, Artificial Sequence
  Description of Artificial Sequence: Synthetic oligonucleotide
  Antisense strand to SEQ ID NO: 650950
uacccagugaccaugauag

SEQ ID NO: 650952 - RNA, 19 nt, Artificial Sequence
  Description of Artificial Sequence: Synthetic oligonucleotide
  Sense strand starting at position 1954 of SEQ ID NO: 585577
gguuaaauccuccaggccu

SEQ ID NO: 650953 - RNA, 19 nt, Artificial Sequence
  Description of Artificial Sequence: Synthetic oligonucleotide
  Antisense strand to SEQ ID NO: 650952
aggccuggaggauuuaacc

SEQ ID NO: 650954 - RNA, 19 nt, Artificial Sequence
  Description of Artificial Sequence: Synthetic oligonucleotide
  Sense strand starting at position 2043 of SEQ ID NO: 585577
uaguucuaacgcguaguuu

SEQ ID NO: 650955 - RNA, 19 nt, Artificial Sequence
  Description of Artificial Sequence: Synthetic oligonucleotide
  Antisense strand to SEQ ID NO: 650954
aaacuacgcguuagaacua

SEQ ID NO: 650956 - RNA, 19 nt, Artificial Sequence
  Description of Artificial Sequence: Synthetic oligonucleotide
  Sense strand starting at position 2158 of SEQ ID NO: 585577
cguguugaccagucgcuua

SEQ ID NO: 650957 - RNA, 19 nt, Artificial Sequence
  Description of Artificial Sequence: Synthetic oligonucleotide
  Antisense strand to SEQ ID NO: 650956
uaagcgacuggucaacacg

SEQ ID NO: 650958 - RNA, 19 nt, Artificial Sequence
  Description of Artificial Sequence: Synthetic oligonucleotide
  Sense strand starting at position 2930 of SEQ ID NO: 585577
uauagaaggugaguucuua

SEQ ID NO: 650959 - RNA, 19 nt, Artificial Sequence
  Description of Artificial Sequence: Synthetic oligonucleotide
  Antisense strand to SEQ ID NO: 650958
uaagaacucaccuucuaua

SEQ ID NO: 650960 - RNA, 19 nt, Artificial Sequence
  Description of Artificial Sequence: Synthetic oligonucleotide
  Sense strand starting at position 2934 of SEQ ID NO: 585577
gaaggugaguucuuagaaa

SEQ ID NO: 650961 - RNA, 19 nt, Artificial Sequence
  Description of Artificial Sequence: Synthetic oligonucleotide
  Antisense strand to SEQ ID NO: 650960
uuucuaagaacucaccuuc

SEQ ID NO: 650962 - RNA, 19 nt, Artificial Sequence
  Description of Artificial Sequence: Synthetic oligonucleotide
  Sense strand starting at position 3105 of SEQ ID NO: 585577
gaugucaucuucuuagagu

SEQ ID NO: 650963 - RNA, 19 nt, Artificial Sequence
  Description of Artificial Sequence: Synthetic oligonucleotide
  Antisense strand to SEQ ID NO: 650962
acucuaagaagaugacauc

SEQ ID NO: 650964 - RNA, 19 nt, Artificial Sequence
  Description of Artificial Sequence: Synthetic oligonucleotide
  Sense strand starting at position 3143 of SEQ ID NO: 585577
ugaacacuguuuccugaca

SEQ ID NO: 650965 - RNA, 19 nt, Artificial Sequence
  Description of Artificial Sequence: Synthetic oligonucleotide
  Antisense strand to SEQ ID NO: 650964
ugucaggaaacaguguuca

SEQ ID NO: 650966 - RNA, 19 nt, Artificial Sequence
  Description of Artificial Sequence: Synthetic oligonucleotide
  Sense strand starting at position 3168 of SEQ ID NO: 585577
uuaagaugaugugcuuuaa

SEQ ID NO: 650967 - RNA, 19 nt, Artificial Sequence
  Description of Artificial Sequence: Synthetic oligonucleotide
  Antisense strand to SEQ ID NO: 650966
uuaaagcacaucaucuuaa

SEQ ID NO: 650968 - RNA, 19 nt, Artificial Sequence
  Description of Artificial Sequence: Synthetic oligonucleotide
  Sense strand starting at position 3172 of SEQ ID NO: 585577
gaugaugugcuuuaaacaa

SEQ ID NO: 650969 - RNA, 19 nt, Artificial Sequence
  Description of Artificial Sequence: Synthetic oligonucleotide
  Antisense strand to SEQ ID NO: 650968
uuguuuaaagcacaucauc

SEQ ID NO: 650970 - RNA, 19 nt, Artificial Sequence
  Description of Artificial Sequence: Synthetic oligonucleotide
  Sense strand starting at position 3272 of SEQ ID NO: 585577
uucuaaguaucauuagaga

SEQ ID NO: 650971 - RNA, 19 nt, Artificial Sequence
  Description of Artificial Sequence: Synthetic oligonucleotide
  Antisense strand to SEQ ID NO: 650970
ucucuaaugauacuuagaa

SEQ ID NO: 650972 - RNA, 19 nt, Artificial Sequence
  Description of Artificial Sequence: Synthetic oligonucleotide
  Sense strand starting at position 3376 of SEQ ID NO: 585577
uacacuugguaugcuaaga

SEQ ID NO: 650973 - RNA, 19 nt, Artificial Sequence
  Description of Artificial Sequence: Synthetic oligonucleotide
  Antisense strand to SEQ ID NO: 650972
ucuuagcauaccaagugua

SEQ ID NO: 650974 - RNA, 19 nt, Artificial Sequence
  Description of Artificial Sequence: Synthetic oligonucleotide
  Sense strand starting at position 3400 of SEQ ID NO: 585577
uuugcuacugaguaagcaa

SEQ ID NO: 650975 - RNA, 19 nt, Artificial Sequence
  Description of Artificial Sequence: Synthetic oligonucleotide
  Antisense strand to SEQ ID NO: 650974
uugcuuacucaguagcaaa

SEQ ID NO: 650976 - RNA, 19 nt, Artificial Sequence
  Description of Artificial Sequence: Synthetic oligonucleotide
  Sense strand starting at position 3411 of SEQ ID NO: 585577
guaagcaacugucugggaa

SEQ ID NO: 650977 - RNA, 19 nt, Artificial Sequence
  Description of Artificial Sequence: Synthetic oligonucleotide
  Antisense strand to SEQ ID NO: 650976
uucccagacaguugcuuac

SEQ ID NO: 650978 - RNA, 19 nt, Artificial Sequence
  Description of Artificial Sequence: Synthetic oligonucleotide
  Sense strand starting at position 3412 of SEQ ID NO: 585577
uaagcaacugucugggaau

SEQ ID NO: 650979 - RNA, 19 nt, Artificial Sequence
  Description of Artificial Sequence: Synthetic oligonucleotide
  Antisense strand to SEQ ID NO: 650978
auucccagacaguugcuua

SEQ ID NO: 650980 - RNA, 19 nt, Artificial Sequence
  Description of Artificial Sequence: Synthetic oligonucleotide
  Sense strand starting at position 3485 of SEQ ID NO: 585577
agaucugaguuauuacaug

SEQ ID NO: 650981 - RNA, 19 nt, Artificial Sequence
  Description of Artificial Sequence: Synthetic oligonucleotide
  Antisense strand to SEQ ID NO: 650980
cauguaauaacucagaucu

SEQ ID NO: 650982 - RNA, 19 nt, Artificial Sequence
  Description of Artificial Sequence: Synthetic oligonucleotide
  Sense strand starting at position 3491 of SEQ ID NO: 585577
gaguuauuacauggcaauu

SEQ ID NO: 650983 - RNA, 19 nt, Artificial Sequence
  Description of Artificial Sequence: Synthetic oligonucleotide
  Antisense strand to SEQ ID NO: 650982
aauugccauguaauaacuc

SEQ ID NO: 650984 - RNA, 19 nt, Artificial Sequence
  Description of Artificial Sequence: Synthetic oligonucleotide
  Sense strand starting at position 3567 of SEQ ID NO: 585577
gguugcaaaccugauaacu

SEQ ID NO: 650985 - RNA, 19 nt, Artificial Sequence
  Description of Artificial Sequence: Synthetic oligonucleotide
  Antisense strand to SEQ ID NO: 650984
aguuaucagguuugcaacc

SEQ ID NO: 650986 - RNA, 19 nt, Artificial Sequence
  Description of Artificial Sequence: Synthetic oligonucleotide
  Sense strand starting at position 3691 of SEQ ID NO: 585577
aagugugucaggugauuua

SEQ ID NO: 650987 - RNA, 19 nt, Artificial Sequence
  Description of Artificial Sequence: Synthetic oligonucleotide
  Antisense strand to SEQ ID NO: 650986
uaaaucaccugacacacuu

SEQ ID NO: 650988 - RNA, 19 nt, Artificial Sequence
  Description of Artificial Sequence: Synthetic oligonucleotide
  Sense strand starting at position 3783 of SEQ ID NO: 585577
uaaauugguucuccuagga

SEQ ID NO: 650989 - RNA, 19 nt, Artificial Sequence
  Description of Artificial Sequence: Synthetic oligonucleotide
  Antisense strand to SEQ ID NO: 650988
uccuaggagaaccaauuua

SEQ ID NO: 650990 - RNA, 19 nt, Artificial Sequence
  Description of Artificial Sequence: Synthetic oligonucleotide
  Sense strand starting at position 3 of SEQ ID NO: 585578
aagaaagacuguuugaguc

SEQ ID NO: 650991 - RNA, 19 nt, Artificial Sequence
  Description of Artificial Sequence: Synthetic oligonucleotide
  Antisense strand to SEQ ID NO: 650990
gacucaaacagucuuucuu

SEQ ID NO: 650992 - RNA, 19 nt, Artificial Sequence
  Description of Artificial Sequence: Synthetic oligonucleotide
  Sense strand starting at position 59 of SEQ ID NO: 585578
ugggaaguuucuucagaug

SEQ ID NO: 650993 - RNA, 19 nt, Artificial Sequence
  Description of Artificial Sequence: Synthetic oligonucleotide
  Antisense strand to SEQ ID NO: 650992
caucugaagaaacuuccca

SEQ ID NO: 650994 - RNA, 19 nt, Artificial Sequence
  Description of Artificial Sequence: Synthetic oligonucleotide
  Sense strand starting at position 151 of SEQ ID NO: 585578
gaaguuugagagugaaaug

SEQ ID NO: 650995 - RNA, 19 nt, Artificial Sequence
  Description of Artificial Sequence: Synthetic oligonucleotide
  Antisense strand to SEQ ID NO: 650994
cauuucacucucaaacuuc

SEQ ID NO: 650996 - RNA, 19 nt, Artificial Sequence
  Description of Artificial Sequence: Synthetic oligonucleotide
  Sense strand starting at position 156 of SEQ ID NO: 585578
uugagagugaaauggcuaa

SEQ ID NO: 650997 - RNA, 19 nt, Artificial Sequence
  Description of Artificial Sequence: Synthetic oligonucleotide
  Antisense strand to SEQ ID NO: 650996
uuagccauuucacucucaa

SEQ ID NO: 650998 - RNA, 19 nt, Artificial Sequence
  Description of Artificial Sequence: Synthetic oligonucleotide
  Sense strand starting at position 251 of SEQ ID NO: 585578
aaucucuagcguuaaggaa

SEQ ID NO: 650999 - RNA, 19 nt, Artificial Sequence
  Description of Artificial Sequence: Synthetic oligonucleotide
  Antisense strand to SEQ ID NO: 650998
uuccuuaacgcuagagauu

SEQ ID NO: 651000 - RNA, 19 nt, Artificial Sequence
  Description of Artificial Sequence: Synthetic oligonucleotide
  Sense strand starting at position 316 of SEQ ID NO: 585578
guuggagguugaucuaaca

SEQ ID NO: 651001 - RNA, 19 nt, Artificial Sequence
  Description of Artificial Sequence: Synthetic oligonucleotide
  Antisense strand to SEQ ID NO: 651000
uguuagaucaaccuccaac

SEQ ID NO: 651002 - RNA, 19 nt, Artificial Sequence
  Description of Artificial Sequence: Synthetic oligonucleotide
  Sense strand starting at position 396 of SEQ ID NO: 585578
cuaaguaaaugguucucaa

SEQ ID NO: 651003 - RNA, 19 nt, Artificial Sequence
  Description of Artificial Sequence: Synthetic oligonucleotide
  Antisense strand to SEQ ID NO: 651002
uugagaaccauuuacuuag

SEQ ID NO: 651004 - RNA, 19 nt, Artificial Sequence
  Description of Artificial Sequence: Synthetic oligonucleotide
  Sense strand starting at position 399 of SEQ ID NO: 585578
aguaaaugguucucaaaca

SEQ ID NO: 651005 - RNA, 19 nt, Artificial Sequence
  Description of Artificial Sequence: Synthetic oligonucleotide
  Antisense strand to SEQ ID NO: 651004
uguuugagaaccauuuacu

SEQ ID NO: 651006 - RNA, 19 nt, Artificial Sequence
  Description of Artificial Sequence: Synthetic oligonucleotide
  Sense strand starting at position 435 of SEQ ID NO: 585578
ucauaagguugagugauga

SEQ ID NO: 651007 - RNA, 19 nt, Artificial Sequence
  Description of Artificial Sequence: Synthetic oligonucleotide
  Antisense strand to SEQ ID NO: 651006
ucaucacucaaccuuauga

SEQ ID NO: 651008 - RNA, 19 nt, Artificial Sequence
  Description of Artificial Sequence: Synthetic oligonucleotide
  Sense strand starting at position 580 of SEQ ID NO: 585578
cauugaaagccuggagaug

SEQ ID NO: 651009 - RNA, 19 nt, Artificial Sequence
  Description of Artificial Sequence: Synthetic oligonucleotide
  Antisense strand to SEQ ID NO: 651008
caucuccaggcuuucaaug

SEQ ID NO: 651010 - RNA, 19 nt, Artificial Sequence
  Description of Artificial Sequence: Synthetic oligonucleotide
  Sense strand starting at position 746 of SEQ ID NO: 585578
aucuuaauuuaagcgcaua

SEQ ID NO: 651011 - RNA, 19 nt, Artificial Sequence
  Description of Artificial Sequence: Synthetic oligonucleotide
  Antisense strand to SEQ ID NO: 651010
uaugcgcuuaaauuaagau

SEQ ID NO: 651012 - RNA, 19 nt, Artificial Sequence
  Description of Artificial Sequence: Synthetic oligonucleotide
  Sense strand starting at position 818 of SEQ ID NO: 585578
augggaaaguucucugauu

SEQ ID NO: 651013 - RNA, 19 nt, Artificial Sequence
  Description of Artificial Sequence: Synthetic oligonucleotide
  Antisense strand to SEQ ID NO: 651012
aaucagagaacuuucccau

SEQ ID NO: 651014 - RNA, 19 nt, Artificial Sequence
  Description of Artificial Sequence: Synthetic oligonucleotide
  Sense strand starting at position 950 of SEQ ID NO: 585578
uuuggaggccaaugauaga

SEQ ID NO: 651015 - RNA, 19 nt, Artificial Sequence
  Description of Artificial Sequence: Synthetic oligonucleotide
  Antisense strand to SEQ ID NO: 651014
ucuaucauuggccuccaaa

SEQ ID NO: 651016 - RNA, 19 nt, Artificial Sequence
  Description of Artificial Sequence: Synthetic oligonucleotide
  Sense strand starting at position 1029 of SEQ ID NO: 585578
cuugguuuccauuacacau

SEQ ID NO: 651017 - RNA, 19 nt, Artificial Sequence
  Description of Artificial Sequence: Synthetic oligonucleotide
  Antisense strand to SEQ ID NO: 651016
auguguaauggaaaccaag

SEQ ID NO: 651018 - RNA, 19 nt, Artificial Sequence
  Description of Artificial Sequence: Synthetic oligonucleotide
  Sense strand starting at position 1115 of SEQ ID NO: 585578
agugguauacuauaaguau

SEQ ID NO: 651019 - RNA, 19 nt, Artificial Sequence
  Description of Artificial Sequence: Synthetic oligonucleotide
  Antisense strand to SEQ ID NO: 651018
auacuuauaguauaccacu

SEQ ID NO: 651020 - RNA, 19 nt, Artificial Sequence
  Description of Artificial Sequence: Synthetic oligonucleotide
  Sense strand starting at position 1185 of SEQ ID NO: 585578
uugcucguuaguuuaguua

SEQ ID NO: 651021 - RNA, 19 nt, Artificial Sequence
  Description of Artificial Sequence: Synthetic oligonucleotide
  Antisense strand to SEQ ID NO: 651020
uaacuaaacuaacgagcaa

SEQ ID NO: 651022 - RNA, 19 nt, Artificial Sequence
  Description of Artificial Sequence: Synthetic oligonucleotide
  Sense strand starting at position 1315 of SEQ ID NO: 585578
agaucaacauggguuugua

SEQ ID NO: 651023 - RNA, 19 nt, Artificial Sequence
  Description of Artificial Sequence: Synthetic oligonucleotide
  Antisense strand to SEQ ID NO: 651022
uacaaacccauguugaucu

SEQ ID NO: 651024 - RNA, 19 nt, Artificial Sequence
  Description of Artificial Sequence: Synthetic oligonucleotide
  Sense strand starting at position 1481 of SEQ ID NO: 585578
gcagcagggcugagaguuu

SEQ ID NO: 651025 - RNA, 19 nt, Artificial Sequence
  Description of Artificial Sequence: Synthetic oligonucleotide
  Antisense strand to SEQ ID NO: 651024
aaacucucagcccugcugc

SEQ ID NO: 651026 - RNA, 19 nt, Artificial Sequence
  Description of Artificial Sequence: Synthetic oligonucleotide
  Sense strand starting at position 1497 of SEQ ID NO: 585578
uuuauaugaucuguggaug

SEQ ID NO: 651027 - RNA, 19 nt, Artificial Sequence
  Description of Artificial Sequence: Synthetic oligonucleotide
  Antisense strand to SEQ ID NO: 651026
cauccacagaucauauaaa

SEQ ID NO: 651028 - RNA, 19 nt, Artificial Sequence
  Description of Artificial Sequence: Synthetic oligonucleotide
  Sense strand starting at position 1500 of SEQ ID NO: 585578
auaugaucuguggauguau

SEQ ID NO: 651029 - RNA, 19 nt, Artificial Sequence
  Description of Artificial Sequence: Synthetic oligonucleotide
  Antisense strand to SEQ ID NO: 651028
auacauccacagaucauau

SEQ ID NO: 651030 - RNA, 19 nt, Artificial Sequence
  Description of Artificial Sequence: Synthetic oligonucleotide
  Sense strand starting at position 1584 of SEQ ID NO: 585578
ugaauaauauggcuucuga

SEQ ID NO: 651031 - RNA, 19 nt, Artificial Sequence
  Description of Artificial Sequence: Synthetic oligonucleotide
  Antisense strand to SEQ ID NO: 651030
ucagaagccauauuauuca

SEQ ID NO: 651032 - RNA, 19 nt, Artificial Sequence
  Description of Artificial Sequence: Synthetic oligonucleotide
  Sense strand starting at position 1930 of SEQ ID NO: 585578
agcucuguagcauagaaga

SEQ ID NO: 651033 - RNA, 19 nt, Artificial Sequence
  Description of Artificial Sequence: Synthetic oligonucleotide
  Antisense strand to SEQ ID NO: 651032
ucuucuaugcuacagagcu

SEQ ID NO: 651034 - RNA, 19 nt, Artificial Sequence
  Description of Artificial Sequence: Synthetic oligonucleotide
  Sense strand starting at position 1975 of SEQ ID NO: 585578
auuagccaccucgauauau

SEQ ID NO: 651035 - RNA, 19 nt, Artificial Sequence
  Description of Artificial Sequence: Synthetic oligonucleotide
  Antisense strand to SEQ ID NO: 651034
auauaucgagguggcuaau

SEQ ID NO: 651036 - RNA, 19 nt, Artificial Sequence
  Description of Artificial Sequence: Synthetic oligonucleotide
  Sense strand starting at position 2096 of SEQ ID NO: 585578
auuugauuauuccagaaga

SEQ ID NO: 651037 - RNA, 19 nt, Artificial Sequence
  Description of Artificial Sequence: Synthetic oligonucleotide
  Antisense strand to SEQ ID NO: 651036
ucuucuggaauaaucaaau

SEQ ID NO: 651038 - RNA, 19 nt, Artificial Sequence
  Description of Artificial Sequence: Synthetic oligonucleotide
  Sense strand starting at position 2193 of SEQ ID NO: 585578
uggucaggucuauaaguau

SEQ ID NO: 651039 - RNA, 19 nt, Artificial Sequence
  Description of Artificial Sequence: Synthetic oligonucleotide
  Antisense strand to SEQ ID NO: 651038
auacuuauagaccugacca

SEQ ID NO: 651040 - RNA, 19 nt, Artificial Sequence
  Description of Artificial Sequence: Synthetic oligonucleotide
  Sense strand starting at position 2196 of SEQ ID NO: 585578
ucaggucuauaaguauaaa

SEQ ID NO: 651041 - RNA, 19 nt, Artificial Sequence
  Description of Artificial Sequence: Synthetic oligonucleotide
  Antisense strand to SEQ ID NO: 651040
uuuauacuuauagaccuga

SEQ ID NO: 651042 - RNA, 19 nt, Artificial Sequence
  Description of Artificial Sequence: Synthetic oligonucleotide
  Sense strand starting at position 2309 of SEQ ID NO: 585578
ggaaggagugaggguguua

SEQ ID NO: 651043 - RNA, 19 nt, Artificial Sequence
  Description of Artificial Sequence: Synthetic oligonucleotide
  Antisense strand to SEQ ID NO: 651042
uaacacccucacuccuucc

SEQ ID NO: 651044 - RNA, 19 nt, Artificial Sequence
  Description of Artificial Sequence: Synthetic oligonucleotide
  Sense strand starting at position 2415 of SEQ ID NO: 585578
aaauaagucguggaacuuu

SEQ ID NO: 651045 - RNA, 19 nt, Artificial Sequence
  Description of Artificial Sequence: Synthetic oligonucleotide
  Antisense strand to SEQ ID NO: 651044
aaaguuccacgacuuauuu

SEQ ID NO: 651046 - RNA, 19 nt, Artificial Sequence
  Description of Artificial Sequence: Synthetic oligonucleotide
  Sense strand starting at position 2650 of SEQ ID NO: 585578
gaggaagaagcauguuuag

SEQ ID NO: 651047 - RNA, 19 nt, Artificial Sequence
  Description of Artificial Sequence: Synthetic oligonucleotide
  Antisense strand to SEQ ID NO: 651046
cuaaacaugcuucuuccuc

SEQ ID NO: 651048 - RNA, 19 nt, Artificial Sequence
  Description of Artificial Sequence: Synthetic oligonucleotide
  Sense strand starting at position 2716 of SEQ ID NO: 585578
uugaaagguaggugggauu

SEQ ID NO: 651049 - RNA, 19 nt, Artificial Sequence
  Description of Artificial Sequence: Synthetic oligonucleotide
  Antisense strand to SEQ ID NO: 651048
aaucccaccuaccuuucaa

SEQ ID NO: 651050 - RNA, 19 nt, Artificial Sequence
  Description of Artificial Sequence: Synthetic oligonucleotide
  Sense strand starting at position 2734 of SEQ ID NO: 585578
ucagauaauuauguuggga

SEQ ID NO: 651051 - RNA, 19 nt, Artificial Sequence
  Description of Artificial Sequence: Synthetic oligonucleotide
  Antisense strand to SEQ ID NO: 651050
ucccaacauaauuaucuga

SEQ ID NO: 651052 - RNA, 19 nt, Artificial Sequence
  Description of Artificial Sequence: Synthetic oligonucleotide
  Sense strand starting at position 2756 of SEQ ID NO: 585578
agggcauucuugguagaga

SEQ ID NO: 651053 - RNA, 19 nt, Artificial Sequence
  Description of Artificial Sequence: Synthetic oligonucleotide
  Antisense strand to SEQ ID NO: 651052
ucucuaccaagaaugcccu

SEQ ID NO: 651054 - RNA, 19 nt, Artificial Sequence
  Description of Artificial Sequence: Synthetic oligonucleotide
  Sense strand starting at position 2799 of SEQ ID NO: 585578
gagauuagugagggauagu

SEQ ID NO: 651055 - RNA, 19 nt, Artificial Sequence
  Description of Artificial Sequence: Synthetic oligonucleotide
  Antisense strand to SEQ ID NO: 651054
acuaucccucacuaaucuc

SEQ ID NO: 651056 - RNA, 19 nt, Artificial Sequence
  Description of Artificial Sequence: Synthetic oligonucleotide
  Sense strand starting at position 2829 of SEQ ID NO: 585578
cugaaagggugguugaaga

SEQ ID NO: 651057 - RNA, 19 nt, Artificial Sequence
  Description of Artificial Sequence: Synthetic oligonucleotide
  Antisense strand to SEQ ID NO: 651056
ucuucaaccacccuuucag

SEQ ID NO: 651058 - RNA, 19 nt, Artificial Sequence
  Description of Artificial Sequence: Synthetic oligonucleotide
  Sense strand starting at position 2932 of SEQ ID NO: 585578
auggguuugcaggaugauu

SEQ ID NO: 651059 - RNA, 19 nt, Artificial Sequence
  Description of Artificial Sequence: Synthetic oligonucleotide
  Antisense strand to SEQ ID NO: 651058
aaucauccugcaaacccau

SEQ ID NO: 651060 - RNA, 19 nt, Artificial Sequence
  Description of Artificial Sequence: Synthetic oligonucleotide
  Sense strand starting at position 3215 of SEQ ID NO: 585578
auggucuuacgggacuaau

SEQ ID NO: 651061 - RNA, 19 nt, Artificial Sequence
  Description of Artificial Sequence: Synthetic oligonucleotide
  Antisense strand to SEQ ID NO: 651060
auuagucccguaagaccau

SEQ ID NO: 651062 - RNA, 19 nt, Artificial Sequence
  Description of Artificial Sequence: Synthetic oligonucleotide
  Sense strand starting at position 3401 of SEQ ID NO: 585578
uguaaaucccaucauguug

SEQ ID NO: 651063 - RNA, 19 nt, Artificial Sequence
  Description of Artificial Sequence: Synthetic oligonucleotide
  Antisense strand to SEQ ID NO: 651062
caacaugaugggauuuaca

SEQ ID NO: 651064 - RNA, 19 nt, Artificial Sequence
  Description of Artificial Sequence: Synthetic oligonucleotide
  Sense strand starting at position 3421 of SEQ ID NO: 585578
cugauucuuguauacugau

SEQ ID NO: 651065 - RNA, 19 nt, Artificial Sequence
  Description of Artificial Sequence: Synthetic oligonucleotide
  Antisense strand to SEQ ID NO: 651064
aucaguauacaagaaucag

SEQ ID NO: 651066 - RNA, 19 nt, Artificial Sequence
  Description of Artificial Sequence: Synthetic oligonucleotide
  Sense strand starting at position 3970 of SEQ ID NO: 585578
acagaauacuuccuguaug

SEQ ID NO: 651067 - RNA, 19 nt, Artificial Sequence
  Description of Artificial Sequence: Synthetic oligonucleotide
  Antisense strand to SEQ ID NO: 651066
cauacaggaaguauucugu

SEQ ID NO: 651068 - RNA, 19 nt, Artificial Sequence
  Description of Artificial Sequence: Synthetic oligonucleotide
  Sense strand starting at position 3982 of SEQ ID NO: 585578
cuguauguucuggaugaaa

SEQ ID NO: 651069 - RNA, 19 nt, Artificial Sequence
  Description of Artificial Sequence: Synthetic oligonucleotide
  Antisense strand to SEQ ID NO: 651068
uuucauccagaacauacag

SEQ ID NO: 651070 - RNA, 19 nt, Artificial Sequence
  Description of Artificial Sequence: Synthetic oligonucleotide
  Sense strand starting at position 4 of SEQ ID NO: 585579
gcccuuugaccaugggauu

SEQ ID NO: 651071 - RNA, 19 nt, Artificial Sequence
  Description of Artificial Sequence: Synthetic oligonucleotide
  Antisense strand to SEQ ID NO: 651070
aaucccauggucaaagggc

SEQ ID NO: 651072 - RNA, 19 nt, Artificial Sequence
  Description of Artificial Sequence: Synthetic oligonucleotide
  Sense strand starting at position 84 of SEQ ID NO: 585579
uccagcuccgagugguaua

SEQ ID NO: 651073 - RNA, 19 nt, Artificial Sequence
  Description of Artificial Sequence: Synthetic oligonucleotide
  Antisense strand to SEQ ID NO: 651072
uauaccacucggagcugga

SEQ ID NO: 651074 - RNA, 19 nt, Artificial Sequence
  Description of Artificial Sequence: Synthetic oligonucleotide
  Sense strand starting at position 85 of SEQ ID NO: 585579
ccagcuccgagugguauau

SEQ ID NO: 651075 - RNA, 19 nt, Artificial Sequence
  Description of Artificial Sequence: Synthetic oligonucleotide
  Antisense strand to SEQ ID NO: 651074
auauaccacucggagcugg

SEQ ID NO: 651076 - RNA, 19 nt, Artificial Sequence
  Description of Artificial Sequence: Synthetic oligonucleotide
  Sense strand starting at position 89 of SEQ ID NO: 585579
cuccgagugguauauguga

SEQ ID NO: 651077 - RNA, 19 nt, Artificial Sequence
  Description of Artificial Sequence: Synthetic oligonucleotide
  Antisense strand to SEQ ID NO: 651076
ucacauauaccacucggag

SEQ ID NO: 651078 - RNA, 19 nt, Artificial Sequence
  Description of Artificial Sequence: Synthetic oligonucleotide
  Sense strand starting at position 106 of SEQ ID NO: 585579
gacggaucugggcaaguuu

SEQ ID NO: 651079 - RNA, 19 nt, Artificial Sequence
  Description of Artificial Sequence: Synthetic oligonucleotide
  Antisense strand to SEQ ID NO: 651078
aaacuugcccagauccguc

SEQ ID NO: 651080 - RNA, 19 nt, Artificial Sequence
  Description of Artificial Sequence: Synthetic oligonucleotide
  Sense strand starting at position 127 of SEQ ID NO: 585579
ugcgauaguccgaguguuc

SEQ ID NO: 651081 - RNA, 19 nt, Artificial Sequence
  Description of Artificial Sequence: Synthetic oligonucleotide
  Antisense strand to SEQ ID NO: 651080
gaacacucggacuaucgca

SEQ ID NO: 651082 - RNA, 19 nt, Artificial Sequence
  Description of Artificial Sequence: Synthetic oligonucleotide
  Sense strand starting at position 129 of SEQ ID NO: 585579
cgauaguccgaguguucga

SEQ ID NO: 651083 - RNA, 19 nt, Artificial Sequence
  Description of Artificial Sequence: Synthetic oligonucleotide
  Antisense strand to SEQ ID NO: 651082
ucgaacacucggacuaucg

SEQ ID NO: 651084 - RNA, 19 nt, Artificial Sequence
  Description of Artificial Sequence: Synthetic oligonucleotide
  Sense strand starting at position 136 of SEQ ID NO: 585579
ccgaguguucgauggaguu

SEQ ID NO: 651085 - RNA, 19 nt, Artificial Sequence
  Description of Artificial Sequence: Synthetic oligonucleotide
  Antisense strand to SEQ ID NO: 651084
aacuccaucgaacacucgg

SEQ ID NO: 651086 - RNA, 19 nt, Artificial Sequence
  Description of Artificial Sequence: Synthetic oligonucleotide
  Sense strand starting at position 137 of SEQ ID NO: 585579
cgaguguucgauggaguug

SEQ ID NO: 651087 - RNA, 19 nt, Artificial Sequence
  Description of Artificial Sequence: Synthetic oligonucleotide
  Antisense strand to SEQ ID NO: 651086
caacuccaucgaacacucg

SEQ ID NO: 651088 - RNA, 19 nt, Artificial Sequence
  Description of Artificial Sequence: Synthetic oligonucleotide
  Sense strand starting at position 138 of SEQ ID NO: 585579
gaguguucgauggaguugu

SEQ ID NO: 651089 - RNA, 19 nt, Artificial Sequence
  Description of Artificial Sequence: Synthetic oligonucleotide
  Antisense strand to SEQ ID NO: 651088
acaacuccaucgaacacuc

SEQ ID NO: 651090 - RNA, 19 nt, Artificial Sequence
  Description of Artificial Sequence: Synthetic oligonucleotide
  Sense strand starting at position 491 of SEQ ID NO: 585579
aggguucuguucccagagu

SEQ ID NO: 651091 - RNA, 19 nt, Artificial Sequence
  Description of Artificial Sequence: Synthetic oligonucleotide
  Antisense strand to SEQ ID NO: 651090
acucugggaacagaacccu

SEQ ID NO: 651092 - RNA, 19 nt, Artificial Sequence
  Description of Artificial Sequence: Synthetic oligonucleotide
  Sense strand starting at position 600 of SEQ ID NO: 585579
gggcguguuuccuugggag

SEQ ID NO: 651093 - RNA, 19 nt, Artificial Sequence
  Description of Artificial Sequence: Synthetic oligonucleotide
  Antisense strand to SEQ ID NO: 651092
cucccaaggaaacacgccc

SEQ ID NO: 651094 - RNA, 19 nt, Artificial Sequence
  Description of Artificial Sequence: Synthetic oligonucleotide
  Sense strand starting at position 602 of SEQ ID NO: 585579
gcguguuuccuugggagga

SEQ ID NO: 651095 - RNA, 19 nt, Artificial Sequence
  Description of Artificial Sequence: Synthetic oligonucleotide
  Antisense strand to SEQ ID NO: 651094
uccucccaaggaaacacgc

SEQ ID NO: 651096 - RNA, 19 nt, Artificial Sequence
  Description of Artificial Sequence: Synthetic oligonucleotide
  Sense strand starting at position 849 of SEQ ID NO: 585579
ggcuuugggagauggucua

SEQ ID NO: 651097 - RNA, 19 nt, Artificial Sequence
  Description of Artificial Sequence: Synthetic oligonucleotide
  Antisense strand to SEQ ID NO: 651096
uagaccaucucccaaagcc

SEQ ID NO: 651098 - RNA, 19 nt, Artificial Sequence
  Description of Artificial Sequence: Synthetic oligonucleotide
  Sense strand starting at position 855 of SEQ ID NO: 585579
gggagauggucuagaaagg

SEQ ID NO: 651099 - RNA, 19 nt, Artificial Sequence
  Description of Artificial Sequence: Synthetic oligonucleotide
  Antisense strand to SEQ ID NO: 651098
ccuuucuagaccaucuccc

SEQ ID NO: 651100 - RNA, 19 nt, Artificial Sequence
  Description of Artificial Sequence: Synthetic oligonucleotide
  Sense strand starting at position 879 of SEQ ID NO: 585579
ggaggaaucugggagugga

SEQ ID NO: 651101 - RNA, 19 nt, Artificial Sequence
  Description of Artificial Sequence: Synthetic oligonucleotide
  Antisense strand to SEQ ID NO: 651100
uccacucccagauuccucc

SEQ ID NO: 651102 - RNA, 19 nt, Artificial Sequence
  Description of Artificial Sequence: Synthetic oligonucleotide
  Sense strand starting at position 907 of SEQ ID NO: 585579
gaaagugacuugguagguu

SEQ ID NO: 651103 - RNA, 19 nt, Artificial Sequence
  Description of Artificial Sequence: Synthetic oligonucleotide
  Antisense strand to SEQ ID NO: 651102
aaccuaccaagucacuuuc

SEQ ID NO: 651104 - RNA, 19 nt, Artificial Sequence
  Description of Artificial Sequence: Synthetic oligonucleotide
  Sense strand starting at position 919 of SEQ ID NO: 585579
guagguuucagagggagag

SEQ ID NO: 651105 - RNA, 19 nt, Artificial Sequence
  Description of Artificial Sequence: Synthetic oligonucleotide
  Antisense strand to SEQ ID NO: 651104
cucucccucugaaaccuac

SEQ ID NO: 651106 - RNA, 19 nt, Artificial Sequence
  Description of Artificial Sequence: Synthetic oligonucleotide
  Sense strand starting at position 954 of SEQ ID NO: 585579
ugagaagagucagaguuug

SEQ ID NO: 651107 - RNA, 19 nt, Artificial Sequence
  Description of Artificial Sequence: Synthetic oligonucleotide
  Antisense strand to SEQ ID NO: 651106
caaacucugacucuucuca

SEQ ID NO: 651108 - RNA, 19 nt, Artificial Sequence
  Description of Artificial Sequence: Synthetic oligonucleotide
  Sense strand starting at position 964 of SEQ ID NO: 585579
cagaguuugagguggcaga

SEQ ID NO: 651109 - RNA, 19 nt, Artificial Sequence
  Description of Artificial Sequence: Synthetic oligonucleotide
  Antisense strand to SEQ ID NO: 651108
ucugccaccucaaacucug

SEQ ID NO: 651110 - RNA, 19 nt, Artificial Sequence
  Description of Artificial Sequence: Synthetic oligonucleotide
  Sense strand starting at position 1199 of SEQ ID NO: 585579
acaguuucuuagucuggga

SEQ ID NO: 651111 - RNA, 19 nt, Artificial Sequence
  Description of Artificial Sequence: Synthetic oligonucleotide
  Antisense strand to SEQ ID NO: 651110
ucccagacuaagaaacugu

SEQ ID NO: 651112 - RNA, 19 nt, Artificial Sequence
  Description of Artificial Sequence: Synthetic oligonucleotide
  Sense strand starting at position 1203 of SEQ ID NO: 585579
uuucuuagucugggagcca

SEQ ID NO: 651113 - RNA, 19 nt, Artificial Sequence
  Description of Artificial Sequence: Synthetic oligonucleotide
  Antisense strand to SEQ ID NO: 651112
uggcucccagacuaagaaa

SEQ ID NO: 651114 - RNA, 19 nt, Artificial Sequence
  Description of Artificial Sequence: Synthetic oligonucleotide
  Sense strand starting at position 1303 of SEQ ID NO: 585579
ggguucccucugugaaggu

SEQ ID NO: 651115 - RNA, 19 nt, Artificial Sequence
  Description of Artificial Sequence: Synthetic oligonucleotide
  Antisense strand to SEQ ID NO: 651114
accuucacagagggaaccc

SEQ ID NO: 651116 - RNA, 19 nt, Artificial Sequence
  Description of Artificial Sequence: Synthetic oligonucleotide
  Sense strand starting at position 1537 of SEQ ID NO: 585579
cggugauggucauuaucug

SEQ ID NO: 651117 - RNA, 19 nt, Artificial Sequence
  Description of Artificial Sequence: Synthetic oligonucleotide
  Antisense strand to SEQ ID NO: 651116
cagauaaugaccaucaccg

SEQ ID NO: 651118 - RNA, 19 nt, Artificial Sequence
  Description of Artificial Sequence: Synthetic oligonucleotide
  Sense strand starting at position 2322 of SEQ ID NO: 585579
gcuggaaugccuggguuca

SEQ ID NO: 651119 - RNA, 19 nt, Artificial Sequence
  Description of Artificial Sequence: Synthetic oligonucleotide
  Antisense strand to SEQ ID NO: 651118
ugaacccaggcauuccagc

SEQ ID NO: 651120 - RNA, 19 nt, Artificial Sequence
  Description of Artificial Sequence: Synthetic oligonucleotide
  Sense strand starting at position 2724 of SEQ ID NO: 585579
cugggagaauagucuuaau

SEQ ID NO: 651121 - RNA, 19 nt, Artificial Sequence
  Description of Artificial Sequence: Synthetic oligonucleotide
  Antisense strand to SEQ ID NO: 651120
auuaagacuauucucccag

SEQ ID NO: 651122 - RNA, 19 nt, Artificial Sequence
  Description of Artificial Sequence: Synthetic oligonucleotide
  Sense strand starting at position 2727 of SEQ ID NO: 585579
ggagaauagucuuaaucuc

SEQ ID NO: 651123 - RNA, 19 nt, Artificial Sequence
  Description of Artificial Sequence: Synthetic oligonucleotide
  Antisense strand to SEQ ID NO: 651122
gagauuaagacuauucucc

SEQ ID NO: 651124 - RNA, 19 nt, Artificial Sequence
  Description of Artificial Sequence: Synthetic oligonucleotide
  Sense strand starting at position 2765 of SEQ ID NO: 585579
cccuucuuacugggaggaa

SEQ ID NO: 651125 - RNA, 19 nt, Artificial Sequence
  Description of Artificial Sequence: Synthetic oligonucleotide
  Antisense strand to SEQ ID NO: 651124
uuccucccaguaagaaggg

SEQ ID NO: 651126 - RNA, 19 nt, Artificial Sequence
  Description of Artificial Sequence: Synthetic oligonucleotide
  Sense strand starting at position 2845 of SEQ ID NO: 585579
ugccuaguagcuugacaac

SEQ ID NO: 651127 - RNA, 19 nt, Artificial Sequence
  Description of Artificial Sequence: Synthetic oligonucleotide
  Antisense strand to SEQ ID NO: 651126
guugucaagcuacuaggca

SEQ ID NO: 651128 - RNA, 19 nt, Artificial Sequence
  Description of Artificial Sequence: Synthetic oligonucleotide
  Sense strand starting at position 3049 of SEQ ID NO: 585579
ggagaugaauauugagauu

SEQ ID NO: 651129 - RNA, 19 nt, Artificial Sequence
  Description of Artificial Sequence: Synthetic oligonucleotide
  Antisense strand to SEQ ID NO: 651128
aaucucaauauucaucucc

SEQ ID NO: 651130 - RNA, 19 nt, Artificial Sequence
  Description of Artificial Sequence: Synthetic oligonucleotide
  Sense strand starting at position 3052 of SEQ ID NO: 585579
gaugaauauugagauuugu

SEQ ID NO: 651131 - RNA, 19 nt, Artificial Sequence
  Description of Artificial Sequence: Synthetic oligonucleotide
  Antisense strand to SEQ ID NO: 651130
acaaaucucaauauucauc

SEQ ID NO: 651132 - RNA, 19 nt, Artificial Sequence
  Description of Artificial Sequence: Synthetic oligonucleotide
  Sense strand starting at position 3063 of SEQ ID NO: 585579
agauuugugccgugucuuu

SEQ ID NO: 651133 - RNA, 19 nt, Artificial Sequence
  Description of Artificial Sequence: Synthetic oligonucleotide
  Antisense strand to SEQ ID NO: 651132
aaagacacggcacaaaucu

SEQ ID NO: 651134 - RNA, 19 nt, Artificial Sequence
  Description of Artificial Sequence: Synthetic oligonucleotide
  Sense strand starting at position 3366 of SEQ ID NO: 585579
ggagguucuugagaggauc

SEQ ID NO: 651135 - RNA, 19 nt, Artificial Sequence
  Description of Artificial Sequence: Synthetic oligonucleotide
  Antisense strand to SEQ ID NO: 651134
gauccucucaagaaccucc

SEQ ID NO: 651136 - RNA, 19 nt, Artificial Sequence
  Description of Artificial Sequence: Synthetic oligonucleotide
  Sense strand starting at position 3512 of SEQ ID NO: 585579
ggaugucuuaccuggugac

SEQ ID NO: 651137 - RNA, 19 nt, Artificial Sequence
  Description of Artificial Sequence: Synthetic oligonucleotide
  Antisense strand to SEQ ID NO: 651136
gucaccagguaagacaucc

SEQ ID NO: 651138 - RNA, 19 nt, Artificial Sequence
  Description of Artificial Sequence: Synthetic oligonucleotide
  Sense strand starting at position 3513 of SEQ ID NO: 585579
gaugucuuaccuggugacu

SEQ ID NO: 651139 - RNA, 19 nt, Artificial Sequence
  Description of Artificial Sequence: Synthetic oligonucleotide
  Antisense strand to SEQ ID NO: 651138
agucaccagguaagacauc

SEQ ID NO: 651140 - RNA, 19 nt, Artificial Sequence
  Description of Artificial Sequence: Synthetic oligonucleotide
  Sense strand starting at position 3533 of SEQ ID NO: 585579
aggauagugcuguaaagcu

SEQ ID NO: 651141 - RNA, 19 nt, Artificial Sequence
  Description of Artificial Sequence: Synthetic oligonucleotide
  Antisense strand to SEQ ID NO: 651140
agcuuuacagcacuauccu

SEQ ID NO: 651142 - RNA, 19 nt, Artificial Sequence
  Description of Artificial Sequence: Synthetic oligonucleotide
  Sense strand starting at position 3542 of SEQ ID NO: 585579
cuguaaagcuguucucugu

SEQ ID NO: 651143 - RNA, 19 nt, Artificial Sequence
  Description of Artificial Sequence: Synthetic oligonucleotide
  Antisense strand to SEQ ID NO: 651142
acagagaacagcuuuacag

SEQ ID NO: 651144 - RNA, 19 nt, Artificial Sequence
  Description of Artificial Sequence: Synthetic oligonucleotide
  Sense strand starting at position 3553 of SEQ ID NO: 585579
uucucuguccucgagagga

SEQ ID NO: 651145 - RNA, 19 nt, Artificial Sequence
  Description of Artificial Sequence: Synthetic oligonucleotide
  Antisense strand to SEQ ID NO: 651144
uccucucgaggacagagaa

SEQ ID NO: 651146 - RNA, 19 nt, Artificial Sequence
  Description of Artificial Sequence: Synthetic oligonucleotide
  Sense strand starting at position 3812 of SEQ ID NO: 585579
gacuuuggaucagaggaga

SEQ ID NO: 651147 - RNA, 19 nt, Artificial Sequence
  Description of Artificial Sequence: Synthetic oligonucleotide
  Antisense strand to SEQ ID NO: 651146
ucuccucugauccaaaguc

SEQ ID NO: 651148 - RNA, 19 nt, Artificial Sequence
  Description of Artificial Sequence: Synthetic oligonucleotide
  Sense strand starting at position 3889 of SEQ ID NO: 585579
uggagugggccuugguaau

SEQ ID NO: 651149 - RNA, 19 nt, Artificial Sequence
  Description of Artificial Sequence: Synthetic oligonucleotide
  Antisense strand to SEQ ID NO: 651148
auuaccaaggcccacucca

SEQ ID NO: 651150 - RNA, 19 nt, Artificial Sequence
  Description of Artificial Sequence: Synthetic oligonucleotide
  Sense strand starting at position 277 of SEQ ID NO: 585580
agcacagauuuaggcauau

SEQ ID NO: 651151 - RNA, 19 nt, Artificial Sequence
  Description of Artificial Sequence: Synthetic oligonucleotide
  Antisense strand to SEQ ID NO: 651150
auaugccuaaaucugugcu

SEQ ID NO: 651152 - RNA, 19 nt, Artificial Sequence
  Description of Artificial Sequence: Synthetic oligonucleotide
  Sense strand starting at position 334 of SEQ ID NO: 585580
acuguuaaauucuuagaga

SEQ ID NO: 651153 - RNA, 19 nt, Artificial Sequence
  Description of Artificial Sequence: Synthetic oligonucleotide
  Antisense strand to SEQ ID NO: 651152
ucucuaagaauuuaacagu

SEQ ID NO: 651154 - RNA, 19 nt, Artificial Sequence
  Description of Artificial Sequence: Synthetic oligonucleotide
  Sense strand starting at position 780 of SEQ ID NO: 585580
auaugauuacugcauagua

SEQ ID NO: 651155 - RNA, 19 nt, Artificial Sequence
  Description of Artificial Sequence: Synthetic oligonucleotide
  Antisense strand to SEQ ID NO: 651154
uacuaugcaguaaucauau

SEQ ID NO: 651156 - RNA, 19 nt, Artificial Sequence
  Description of Artificial Sequence: Synthetic oligonucleotide
  Sense strand starting at position 789 of SEQ ID NO: 585580
cugcauaguagcgaauaau

SEQ ID NO: 651157 - RNA, 19 nt, Artificial Sequence
  Description of Artificial Sequence: Synthetic oligonucleotide
  Antisense strand to SEQ ID NO: 651156
auuauucgcuacuaugcag

SEQ ID NO: 651158 - RNA, 19 nt, Artificial Sequence
  Description of Artificial Sequence: Synthetic oligonucleotide
  Sense strand starting at position 800 of SEQ ID NO: 585580
cgaauaaugcuauaaauuc

SEQ ID NO: 651159 - RNA, 19 nt, Artificial Sequence
  Description of Artificial Sequence: Synthetic oligonucleotide
  Antisense strand to SEQ ID NO: 651158
gaauuuauagcauuauucg

SEQ ID NO: 651160 - RNA, 19 nt, Artificial Sequence
  Description of Artificial Sequence: Synthetic oligonucleotide
  Sense strand starting at position 814 of SEQ ID NO: 585580
aauucugaccagugaguuu

SEQ ID NO: 651161 - RNA, 19 nt, Artificial Sequence
  Description of Artificial Sequence: Synthetic oligonucleotide
  Antisense strand to SEQ ID NO: 651160
aaacucacuggucagaauu

SEQ ID NO: 651162 - RNA, 19 nt, Artificial Sequence
  Description of Artificial Sequence: Synthetic oligonucleotide
  Sense strand starting at position 817 of SEQ ID NO: 585580
ucugaccagugaguuuauu

SEQ ID NO: 651163 - RNA, 19 nt, Artificial Sequence
  Description of Artificial Sequence: Synthetic oligonucleotide
  Antisense strand to SEQ ID NO: 651162
aauaaacucacuggucaga

SEQ ID NO: 651164 - RNA, 19 nt, Artificial Sequence
  Description of Artificial Sequence: Synthetic oligonucleotide
  Sense strand starting at position 873 of SEQ ID NO: 585580
gacgcuauauuucgauuua

SEQ ID NO: 651165 - RNA, 19 nt, Artificial Sequence
  Description of Artificial Sequence: Synthetic oligonucleotide
  Antisense strand to SEQ ID NO: 651164
uaaaucgaaauauagcguc

SEQ ID NO: 651166 - RNA, 19 nt, Artificial Sequence
  Description of Artificial Sequence: Synthetic oligonucleotide
  Sense strand starting at position 874 of SEQ ID NO: 585580
acgcuauauuucgauuuaa

SEQ ID NO: 651167 - RNA, 19 nt, Artificial Sequence
  Description of Artificial Sequence: Synthetic oligonucleotide
  Antisense strand to SEQ ID NO: 651166
uuaaaucgaaauauagcgu

SEQ ID NO: 651168 - RNA, 19 nt, Artificial Sequence
  Description of Artificial Sequence: Synthetic oligonucleotide
  Sense strand starting at position 958 of SEQ ID NO: 585580
uaaggagagugauauaaag

SEQ ID NO: 651169 - RNA, 19 nt, Artificial Sequence
  Description of Artificial Sequence: Synthetic oligonucleotide
  Antisense strand to SEQ ID NO: 651168
cuuuauaucacucuccuua

SEQ ID NO: 651170 - RNA, 19 nt, Artificial Sequence
  Description of Artificial Sequence: Synthetic oligonucleotide
  Sense strand starting at position 1128 of SEQ ID NO: 585580
ggagcuuuccacuggacag

SEQ ID NO: 651171 - RNA, 19 nt, Artificial Sequence
  Description of Artificial Sequence: Synthetic oligonucleotide
  Antisense strand to SEQ ID NO: 651170
cuguccaguggaaagcucc

SEQ ID NO: 651172 - RNA, 19 nt, Artificial Sequence
  Description of Artificial Sequence: Synthetic oligonucleotide
  Sense strand starting at position 1277 of SEQ ID NO: 585580
gcuugcagcgagguugauu

SEQ ID NO: 651173 - RNA, 19 nt, Artificial Sequence
  Description of Artificial Sequence: Synthetic oligonucleotide
  Antisense strand to SEQ ID NO: 651172
aaucaaccucgcugcaagc

SEQ ID NO: 651174 - RNA, 19 nt, Artificial Sequence
  Description of Artificial Sequence: Synthetic oligonucleotide
  Sense strand starting at position 1282 of SEQ ID NO: 585580
cagcgagguugauuaugga

SEQ ID NO: 651175 - RNA, 19 nt, Artificial Sequence
  Description of Artificial Sequence: Synthetic oligonucleotide
  Antisense strand to SEQ ID NO: 651174
uccauaaucaaccucgcug

SEQ ID NO: 651176 - RNA, 19 nt, Artificial Sequence
  Description of Artificial Sequence: Synthetic oligonucleotide
  Sense strand starting at position 1288 of SEQ ID NO: 585580
gguugauuauggaggagga

SEQ ID NO: 651177 - RNA, 19 nt, Artificial Sequence
  Description of Artificial Sequence: Synthetic oligonucleotide
  Antisense strand to SEQ ID NO: 651176
uccuccuccauaaucaacc

SEQ ID NO: 651178 - RNA, 19 nt, Artificial Sequence
  Description of Artificial Sequence: Synthetic oligonucleotide
  Sense strand starting at position 2326 of SEQ ID NO: 585580
uccuauagauguccagauu

SEQ ID NO: 651179 - RNA, 19 nt, Artificial Sequence
  Description of Artificial Sequence: Synthetic oligonucleotide
  Antisense strand to SEQ ID NO: 651178
aaucuggacaucuauagga

SEQ ID NO: 651180 - RNA, 19 nt, Artificial Sequence
  Description of Artificial Sequence: Synthetic oligonucleotide
  Sense strand starting at position 2329 of SEQ ID NO: 585580
uauagauguccagauuguu

SEQ ID NO: 651181 - RNA, 19 nt, Artificial Sequence
  Description of Artificial Sequence: Synthetic oligonucleotide
  Antisense strand to SEQ ID NO: 651180
aacaaucuggacaucuaua

SEQ ID NO: 651182 - RNA, 19 nt, Artificial Sequence
  Description of Artificial Sequence: Synthetic oligonucleotide
  Sense strand starting at position 2332 of SEQ ID NO: 585580
agauguccagauuguuaga

SEQ ID NO: 651183 - RNA, 19 nt, Artificial Sequence
  Description of Artificial Sequence: Synthetic oligonucleotide
  Antisense strand to SEQ ID NO: 651182
ucuaacaaucuggacaucu

SEQ ID NO: 651184 - RNA, 19 nt, Artificial Sequence
  Description of Artificial Sequence: Synthetic oligonucleotide
  Sense strand starting at position 2539 of SEQ ID NO: 585580
aagcucucagaguggaaga

SEQ ID NO: 651185 - RNA, 19 nt, Artificial Sequence
  Description of Artificial Sequence: Synthetic oligonucleotide
  Antisense strand to SEQ ID NO: 651184
ucuuccacucugagagcuu

SEQ ID NO: 651186 - RNA, 19 nt, Artificial Sequence
  Description of Artificial Sequence: Synthetic oligonucleotide
  Sense strand starting at position 2621 of SEQ ID NO: 585580
cagaguugcgauugguuaa

SEQ ID NO: 651187 - RNA, 19 nt, Artificial Sequence
  Description of Artificial Sequence: Synthetic oligonucleotide
  Antisense strand to SEQ ID NO: 651186
uuaaccaaucgcaacucug

SEQ ID NO: 651188 - RNA, 19 nt, Artificial Sequence
  Description of Artificial Sequence: Synthetic oligonucleotide
  Sense strand starting at position 2622 of SEQ ID NO: 585580
agaguugcgauugguuaaa

SEQ ID NO: 651189 - RNA, 19 nt, Artificial Sequence
  Description of Artificial Sequence: Synthetic oligonucleotide
  Antisense strand to SEQ ID NO: 651188
uuuaaccaaucgcaacucu

SEQ ID NO: 651190 - RNA, 19 nt, Artificial Sequence
  Description of Artificial Sequence: Synthetic oligonucleotide
  Sense strand starting at position 2647 of SEQ ID NO: 585580
cacuguguccuuuggugaa

SEQ ID NO: 651191 - RNA, 19 nt, Artificial Sequence
  Description of Artificial Sequence: Synthetic oligonucleotide
  Antisense strand to SEQ ID NO: 651190
uucaccaaaggacacagug

SEQ ID NO: 651192 - RNA, 19 nt, Artificial Sequence
  Description of Artificial Sequence: Synthetic oligonucleotide
  Sense strand starting at position 2666 of SEQ ID NO: 585580
cguguuauucucccgacgu

SEQ ID NO: 651193 - RNA, 19 nt, Artificial Sequence
  Description of Artificial Sequence: Synthetic oligonucleotide
  Antisense strand to SEQ ID NO: 651192
acgucgggagaauaacacg

SEQ ID NO: 651194 - RNA, 19 nt, Artificial Sequence
  Description of Artificial Sequence: Synthetic oligonucleotide
  Sense strand starting at position 2668 of SEQ ID NO: 585580
uguuauucucccgacguaa

SEQ ID NO: 651195 - RNA, 19 nt, Artificial Sequence
  Description of Artificial Sequence: Synthetic oligonucleotide
  Antisense strand to SEQ ID NO: 651194
uuacgucgggagaauaaca

SEQ ID NO: 651196 - RNA, 19 nt, Artificial Sequence
  Description of Artificial Sequence: Synthetic oligonucleotide
  Sense strand starting at position 2729 of SEQ ID NO: 585580
gcuuuauugcucucagcuc

SEQ ID NO: 651197 - RNA, 19 nt, Artificial Sequence
  Description of Artificial Sequence: Synthetic oligonucleotide
  Antisense strand to SEQ ID NO: 651196
gagcugagagcaauaaagc

SEQ ID NO: 651198 - RNA, 19 nt, Artificial Sequence
  Description of Artificial Sequence: Synthetic oligonucleotide
  Sense strand starting at position 2749 of SEQ ID NO: 585580
gcaagaccaugagugagaa

SEQ ID NO: 651199 - RNA, 19 nt, Artificial Sequence
  Description of Artificial Sequence: Synthetic oligonucleotide
  Antisense strand to SEQ ID NO: 651198
uucucacucauggucuugc

SEQ ID NO: 651200 - RNA, 19 nt, Artificial Sequence
  Description of Artificial Sequence: Synthetic oligonucleotide
  Sense strand starting at position 2762 of SEQ ID NO: 585580
ugagaagcucacugagaac

SEQ ID NO: 651201 - RNA, 19 nt, Artificial Sequence
  Description of Artificial Sequence: Synthetic oligonucleotide
  Antisense strand to SEQ ID NO: 651200
guucucagugagcuucuca

SEQ ID NO: 651202 - RNA, 19 nt, Artificial Sequence
  Description of Artificial Sequence: Synthetic oligonucleotide
  Sense strand starting at position 2781 of SEQ ID NO: 585580
auugcuugucgcguccaaa

SEQ ID NO: 651203 - RNA, 19 nt, Artificial Sequence
  Description of Artificial Sequence: Synthetic oligonucleotide
  Antisense strand to SEQ ID NO: 651202
uuuggacgcgacaagcaau

SEQ ID NO: 651204 - RNA, 19 nt, Artificial Sequence
  Description of Artificial Sequence: Synthetic oligonucleotide
  Sense strand starting at position 2782 of SEQ ID NO: 585580
uugcuugucgcguccaaau

SEQ ID NO: 651205 - RNA, 19 nt, Artificial Sequence
  Description of Artificial Sequence: Synthetic oligonucleotide
  Antisense strand to SEQ ID NO: 651204
auuuggacgcgacaagcaa

SEQ ID NO: 651206 - RNA, 19 nt, Artificial Sequence
  Description of Artificial Sequence: Synthetic oligonucleotide
  Sense strand starting at position 2839 of SEQ ID NO: 585580
gccaucaucuaguccagua

SEQ ID NO: 651207 - RNA, 19 nt, Artificial Sequence
  Description of Artificial Sequence: Synthetic oligonucleotide
  Antisense strand to SEQ ID NO: 651206
uacuggacuagaugauggc

SEQ ID NO: 651208 - RNA, 19 nt, Artificial Sequence
  Description of Artificial Sequence: Synthetic oligonucleotide
  Sense strand starting at position 3197 of SEQ ID NO: 585580
cuaagacaucugugccacu

SEQ ID NO: 651209 - RNA, 19 nt, Artificial Sequence
  Description of Artificial Sequence: Synthetic oligonucleotide
  Antisense strand to SEQ ID NO: 651208
aguggcacagaugucuuag

SEQ ID NO: 651210 - RNA, 19 nt, Artificial Sequence
  Description of Artificial Sequence: Synthetic oligonucleotide
  Sense strand starting at position 3237 of SEQ ID NO: 585580
ucuaguucuuauccgauuu

SEQ ID NO: 651211 - RNA, 19 nt, Artificial Sequence
  Description of Artificial Sequence: Synthetic oligonucleotide
  Antisense strand to SEQ ID NO: 651210
aaaucggauaagaacuaga

SEQ ID NO: 651212 - RNA, 19 nt, Artificial Sequence
  Description of Artificial Sequence: Synthetic oligonucleotide
  Sense strand starting at position 3749 of SEQ ID NO: 585580
uucuacaguuucuugauga

SEQ ID NO: 651213 - RNA, 19 nt, Artificial Sequence
  Description of Artificial Sequence: Synthetic oligonucleotide
  Antisense strand to SEQ ID NO: 651212
ucaucaagaaacuguagaa

SEQ ID NO: 651214 - RNA, 19 nt, Artificial Sequence
  Description of Artificial Sequence: Synthetic oligonucleotide
  Sense strand starting at position 3756 of SEQ ID NO: 585580
guuucuugaugaucuucca

SEQ ID NO: 651215 - RNA, 19 nt, Artificial Sequence
  Description of Artificial Sequence: Synthetic oligonucleotide
  Antisense strand to SEQ ID NO: 651214
uggaagaucaucaagaaac

SEQ ID NO: 651216 - RNA, 19 nt, Artificial Sequence
  Description of Artificial Sequence: Synthetic oligonucleotide
  Sense strand starting at position 3791 of SEQ ID NO: 585580
aagucaaauccuugauagg

SEQ ID NO: 651217 - RNA, 19 nt, Artificial Sequence
  Description of Artificial Sequence: Synthetic oligonucleotide
  Antisense strand to SEQ ID NO: 651216
ccuaucaaggauuugacuu

SEQ ID NO: 651218 - RNA, 19 nt, Artificial Sequence
  Description of Artificial Sequence: Synthetic oligonucleotide
  Sense strand starting at position 3794 of SEQ ID NO: 585580
ucaaauccuugauaggaaa

SEQ ID NO: 651219 - RNA, 19 nt, Artificial Sequence
  Description of Artificial Sequence: Synthetic oligonucleotide
  Antisense strand to SEQ ID NO: 651218
uuuccuaucaaggauuuga

SEQ ID NO: 651220 - RNA, 19 nt, Artificial Sequence
  Description of Artificial Sequence: Synthetic oligonucleotide
  Sense strand starting at position 3850 of SEQ ID NO: 585580
acaugcagugcuuccguaa

SEQ ID NO: 651221 - RNA, 19 nt, Artificial Sequence
  Description of Artificial Sequence: Synthetic oligonucleotide
  Antisense strand to SEQ ID NO: 651220
uuacggaagcacugcaugu

SEQ ID NO: 651222 - RNA, 19 nt, Artificial Sequence
  Description of Artificial Sequence: Synthetic oligonucleotide
  Sense strand starting at position 3851 of SEQ ID NO: 585580
caugcagugcuuccguaaa

SEQ ID NO: 651223 - RNA, 19 nt, Artificial Sequence
  Description of Artificial Sequence: Synthetic oligonucleotide
  Antisense strand to SEQ ID NO: 651222
uuuacggaagcacugcaug

SEQ ID NO: 651224 - RNA, 19 nt, Artificial Sequence
  Description of Artificial Sequence: Synthetic oligonucleotide
  Sense strand starting at position 3864 of SEQ ID NO: 585580
cguaaacugucccugugaa

SEQ ID NO: 651225 - RNA, 19 nt, Artificial Sequence
  Description of Artificial Sequence: Synthetic oligonucleotide
  Antisense strand to SEQ ID NO: 651224
uucacagggacaguuuacg

SEQ ID NO: 651226 - RNA, 19 nt, Artificial Sequence
  Description of Artificial Sequence: Synthetic oligonucleotide
  Sense strand starting at position 3865 of SEQ ID NO: 585580
guaaacugucccugugaag

SEQ ID NO: 651227 - RNA, 19 nt, Artificial Sequence
  Description of Artificial Sequence: Synthetic oligonucleotide
  Antisense strand to SEQ ID NO: 651226
cuucacagggacaguuuac

SEQ ID NO: 651228 - RNA, 19 nt, Artificial Sequence
  Description of Artificial Sequence: Synthetic oligonucleotide
  Sense strand starting at position 3953 of SEQ ID NO: 585580
aguuaugaauaccuauagu

SEQ ID NO: 651229 - RNA, 19 nt, Artificial Sequence
  Description of Artificial Sequence: Synthetic oligonucleotide
  Antisense strand to SEQ ID NO: 651228
acuauagguauucauaacu

SEQ ID NO: 651230 - RNA, 19 nt, Artificial Sequence
  Description of Artificial Sequence: Synthetic oligonucleotide
  Sense strand starting at position 157 of SEQ ID NO: 585581
ugucuuuacagggagcaga

SEQ ID NO: 651231 - RNA, 19 nt, Artificial Sequence
  Description of Artificial Sequence: Synthetic oligonucleotide
  Antisense strand to SEQ ID NO: 651230
ucugcucccuguaaagaca

SEQ ID NO: 651232 - RNA, 19 nt, Artificial Sequence
  Description of Artificial Sequence: Synthetic oligonucleotide
  Sense strand starting at position 412 of SEQ ID NO: 585581
ggcauaaucucaucuucug

SEQ ID NO: 651233 - RNA, 19 nt, Artificial Sequence
  Description of Artificial Sequence: Synthetic oligonucleotide
  Antisense strand to SEQ ID NO: 651232
cagaagaugagauuaugcc

SEQ ID NO: 651234 - RNA, 19 nt, Artificial Sequence
  Description of Artificial Sequence: Synthetic oligonucleotide
  Sense strand starting at position 462 of SEQ ID NO: 585581
gaaguuguggucuggaauu

SEQ ID NO: 651235 - RNA, 19 nt, Artificial Sequence
  Description of Artificial Sequence: Synthetic oligonucleotide
  Antisense strand to SEQ ID NO: 651234
aauuccagaccacaacuuc

SEQ ID NO: 651236 - RNA, 19 nt, Artificial Sequence
  Description of Artificial Sequence: Synthetic oligonucleotide
  Sense strand starting at position 464 of SEQ ID NO: 585581
aguuguggucuggaauuau

SEQ ID NO: 651237 - RNA, 19 nt, Artificial Sequence
  Description of Artificial Sequence: Synthetic oligonucleotide
  Antisense strand to SEQ ID NO: 651236
auaauuccagaccacaacu

SEQ ID NO: 651238 - RNA, 19 nt, Artificial Sequence
  Description of Artificial Sequence: Synthetic oligonucleotide
  Sense strand starting at position 475 of SEQ ID NO: 585581
ggaauuauaugguccagau

SEQ ID NO: 651239 - RNA, 19 nt, Artificial Sequence
  Description of Artificial Sequence: Synthetic oligonucleotide
  Antisense strand to SEQ ID NO: 651238
aucuggaccauauaauucc

SEQ ID NO: 651240 - RNA, 19 nt, Artificial Sequence
  Description of Artificial Sequence: Synthetic oligonucleotide
  Sense strand starting at position 484 of SEQ ID NO: 585581
ugguccagaugaucugaaa

SEQ ID NO: 651241 - RNA, 19 nt, Artificial Sequence
  Description of Artificial Sequence: Synthetic oligonucleotide
  Antisense strand to SEQ ID NO: 651240
uuucagaucaucuggacca

SEQ ID NO: 651242 - RNA, 19 nt, Artificial Sequence
  Description of Artificial Sequence: Synthetic oligonucleotide
  Sense strand starting at position 622 of SEQ ID NO: 585581
ugccuauauggugacauua

SEQ ID NO: 651243 - RNA, 19 nt, Artificial Sequence
  Description of Artificial Sequence: Synthetic oligonucleotide
  Antisense strand to SEQ ID NO: 651242
uaaugucaccauauaggca

SEQ ID NO: 651244 - RNA, 19 nt, Artificial Sequence
  Description of Artificial Sequence: Synthetic oligonucleotide
  Sense strand starting at position 681 of SEQ ID NO: 585581
aaagguguuccaggcauga

SEQ ID NO: 651245 - RNA, 19 nt, Artificial Sequence
  Description of Artificial Sequence: Synthetic oligonucleotide
  Antisense strand to SEQ ID NO: 651244
ucaugccuggaacaccuuu

SEQ ID NO: 651246 - RNA, 19 nt, Artificial Sequence
  Description of Artificial Sequence: Synthetic oligonucleotide
  Sense strand starting at position 683 of SEQ ID NO: 585581
agguguuccaggcaugaaa

SEQ ID NO: 651247 - RNA, 19 nt, Artificial Sequence
  Description of Artificial Sequence: Synthetic oligonucleotide
  Antisense strand to SEQ ID NO: 651246
uuucaugccuggaacaccu

SEQ ID NO: 651248 - RNA, 19 nt, Artificial Sequence
  Description of Artificial Sequence: Synthetic oligonucleotide
  Sense strand starting at position 734 of SEQ ID NO: 585581
ccuuuaaaguuguccugga

SEQ ID NO: 651249 - RNA, 19 nt, Artificial Sequence
  Description of Artificial Sequence: Synthetic oligonucleotide
  Antisense strand to SEQ ID NO: 651248
uccaggacaacuuuaaagg

SEQ ID NO: 651250 - RNA, 19 nt, Artificial Sequence
  Description of Artificial Sequence: Synthetic oligonucleotide
  Sense strand starting at position 735 of SEQ ID NO: 585581
cuuuaaaguuguccuggaa

SEQ ID NO: 651251 - RNA, 19 nt, Artificial Sequence
  Description of Artificial Sequence: Synthetic oligonucleotide
  Antisense strand to SEQ ID NO: 651250
uuccaggacaacuuuaaag

SEQ ID NO: 651252 - RNA, 19 nt, Artificial Sequence
  Description of Artificial Sequence: Synthetic oligonucleotide
  Sense strand starting at position 738 of SEQ ID NO: 585581
uaaaguuguccuggaaaua

SEQ ID NO: 651253 - RNA, 19 nt, Artificial Sequence
  Description of Artificial Sequence: Synthetic oligonucleotide
  Antisense strand to SEQ ID NO: 651252
uauuuccaggacaacuuua

SEQ ID NO: 651254 - RNA, 19 nt, Artificial Sequence
  Description of Artificial Sequence: Synthetic oligonucleotide
  Sense strand starting at position 747 of SEQ ID NO: 585581
ccuggaaauaucuggguug

SEQ ID NO: 651255 - RNA, 19 nt, Artificial Sequence
  Description of Artificial Sequence: Synthetic oligonucleotide
  Antisense strand to SEQ ID NO: 651254
caacccagauauuuccagg

SEQ ID NO: 651256 - RNA, 19 nt, Artificial Sequence
  Description of Artificial Sequence: Synthetic oligonucleotide
  Sense strand starting at position 749 of SEQ ID NO: 585581
uggaaauaucuggguugac

SEQ ID NO: 651257 - RNA, 19 nt, Artificial Sequence
  Description of Artificial Sequence: Synthetic oligonucleotide
  Antisense strand to SEQ ID NO: 651256
gucaacccagauauuucca

SEQ ID NO: 651258 - RNA, 19 nt, Artificial Sequence
  Description of Artificial Sequence: Synthetic oligonucleotide
  Sense strand starting at position 764 of SEQ ID NO: 585581
ugacaaaggcgaugaaacu

SEQ ID NO: 651259 - RNA, 19 nt, Artificial Sequence
  Description of Artificial Sequence: Synthetic oligonucleotide
  Antisense strand to SEQ ID NO: 651258
aguuucaucgccuuuguca

SEQ ID NO: 651260 - RNA, 19 nt, Artificial Sequence
  Description of Artificial Sequence: Synthetic oligonucleotide
  Sense strand starting at position 948 of SEQ ID NO: 585581
cagacuuaagcuggagaca

SEQ ID NO: 651261 - RNA, 19 nt, Artificial Sequence
  Description of Artificial Sequence: Synthetic oligonucleotide
  Antisense strand to SEQ ID NO: 651260
ugucuccagcuuaagucug

SEQ ID NO: 651262 - RNA, 19 nt, Artificial Sequence
  Description of Artificial Sequence: Synthetic oligonucleotide
  Sense strand starting at position 1034 of SEQ ID NO: 585581
cuggguaguugauuccuaa

SEQ ID NO: 651263 - RNA, 19 nt, Artificial Sequence
  Description of Artificial Sequence: Synthetic oligonucleotide
  Antisense strand to SEQ ID NO: 651262
uuaggaaucaacuacccag

SEQ ID NO: 651264 - RNA, 19 nt, Artificial Sequence
  Description of Artificial Sequence: Synthetic oligonucleotide
  Sense strand starting at position 1202 of SEQ ID NO: 585581
cuagauuucguccgguaca

SEQ ID NO: 651265 - RNA, 19 nt, Artificial Sequence
  Description of Artificial Sequence: Synthetic oligonucleotide
  Antisense strand to SEQ ID NO: 651264
uguaccggacgaaaucuag

SEQ ID NO: 651266 - RNA, 19 nt, Artificial Sequence
  Description of Artificial Sequence: Synthetic oligonucleotide
  Sense strand starting at position 1243 of SEQ ID NO: 585581
ggugguuugaguuaaucaa

SEQ ID NO: 651267 - RNA, 19 nt, Artificial Sequence
  Description of Artificial Sequence: Synthetic oligonucleotide
  Antisense strand to SEQ ID NO: 651266
uugauuaacucaaaccacc

SEQ ID NO: 651268 - RNA, 19 nt, Artificial Sequence
  Description of Artificial Sequence: Synthetic oligonucleotide
  Sense strand starting at position 1267 of SEQ ID NO: 585581
uaagacugaucguuaagaa

SEQ ID NO: 651269 - RNA, 19 nt, Artificial Sequence
  Description of Artificial Sequence: Synthetic oligonucleotide
  Antisense strand to SEQ ID NO: 651268
uucuuaacgaucagucuua

SEQ ID NO: 651270 - RNA, 19 nt, Artificial Sequence
  Description of Artificial Sequence: Synthetic oligonucleotide
  Sense strand starting at position 1315 of SEQ ID NO: 585581
ggauccaucuuuccaagac

SEQ ID NO: 651271 - RNA, 19 nt, Artificial Sequence
  Description of Artificial Sequence: Synthetic oligonucleotide
  Antisense strand to SEQ ID NO: 651270
gucuuggaaagauggaucc

SEQ ID NO: 651272 - RNA, 19 nt, Artificial Sequence
  Description of Artificial Sequence: Synthetic oligonucleotide
  Sense strand starting at position 1362 of SEQ ID NO: 585581
ccugguacccacugauuaa

SEQ ID NO: 651273 - RNA, 19 nt, Artificial Sequence
  Description of Artificial Sequence: Synthetic oligonucleotide
  Antisense strand to SEQ ID NO: 651272
uuaaucaguggguaccagg

SEQ ID NO: 651274 - RNA, 19 nt, Artificial Sequence
  Description of Artificial Sequence: Synthetic oligonucleotide
  Sense strand starting at position 1410 of SEQ ID NO: 585581
caguuagaagcuuauguag

SEQ ID NO: 651275 - RNA, 19 nt, Artificial Sequence
  Description of Artificial Sequence: Synthetic oligonucleotide
  Antisense strand to SEQ ID NO: 651274
cuacauaagcuucuaacug

SEQ ID NO: 651276 - RNA, 19 nt, Artificial Sequence
  Description of Artificial Sequence: Synthetic oligonucleotide
  Sense strand starting at position 1973 of SEQ ID NO: 585581
ggcaccuuuccggaggaca

SEQ ID NO: 651277 - RNA, 19 nt, Artificial Sequence
  Description of Artificial Sequence: Synthetic oligonucleotide
  Antisense strand to SEQ ID NO: 651276
uguccuccggaaaggugcc

SEQ ID NO: 651278 - RNA, 19 nt, Artificial Sequence
  Description of Artificial Sequence: Synthetic oligonucleotide
  Sense strand starting at position 2132 of SEQ ID NO: 585581
gguucuggucuuugggaga

SEQ ID NO: 651279 - RNA, 19 nt, Artificial Sequence
  Description of Artificial Sequence: Synthetic oligonucleotide
  Antisense strand to SEQ ID NO: 651278
ucucccaaagaccagaacc

SEQ ID NO: 651280 - RNA, 19 nt, Artificial Sequence
  Description of Artificial Sequence: Synthetic oligonucleotide
  Sense strand starting at position 2291 of SEQ ID NO: 585581
ccgagugcuaaccaagagu

SEQ ID NO: 651281 - RNA, 19 nt, Artificial Sequence
  Description of Artificial Sequence: Synthetic oligonucleotide
  Antisense strand to SEQ ID NO: 651280
acucuugguuagcacucgg

SEQ ID NO: 651282 - RNA, 19 nt, Artificial Sequence
  Description of Artificial Sequence: Synthetic oligonucleotide
  Sense strand starting at position 2304 of SEQ ID NO: 585581
aagaguaggcagugaaaga

SEQ ID NO: 651283 - RNA, 19 nt, Artificial Sequence
  Description of Artificial Sequence: Synthetic oligonucleotide
  Antisense strand to SEQ ID NO: 651282
ucuuucacugccuacucuu

SEQ ID NO: 651284 - RNA, 19 nt, Artificial Sequence
  Description of Artificial Sequence: Synthetic oligonucleotide
  Sense strand starting at position 2379 of SEQ ID NO: 585581
ugugccugagaguaaugaa

SEQ ID NO: 651285 - RNA, 19 nt, Artificial Sequence
  Description of Artificial Sequence: Synthetic oligonucleotide
  Antisense strand to SEQ ID NO: 651284
uucauuacucucaggcaca

SEQ ID NO: 651286 - RNA, 19 nt, Artificial Sequence
  Description of Artificial Sequence: Synthetic oligonucleotide
  Sense strand starting at position 2394 of SEQ ID NO: 585581
ugaagaagccucugcagaa

SEQ ID NO: 651287 - RNA, 19 nt, Artificial Sequence
  Description of Artificial Sequence: Synthetic oligonucleotide
  Antisense strand to SEQ ID NO: 651286
uucugcagaggcuucuuca

SEQ ID NO: 651288 - RNA, 19 nt, Artificial Sequence
  Description of Artificial Sequence: Synthetic oligonucleotide
  Sense strand starting at position 2398 of SEQ ID NO: 585581
gaagccucugcagaagagu

SEQ ID NO: 651289 - RNA, 19 nt, Artificial Sequence
  Description of Artificial Sequence: Synthetic oligonucleotide
  Antisense strand to SEQ ID NO: 651288
acucuucugcagaggcuuc

SEQ ID NO: 651290 - RNA, 19 nt, Artificial Sequence
  Description of Artificial Sequence: Synthetic oligonucleotide
  Sense strand starting at position 2555 of SEQ ID NO: 585581
ucagaaugcccuugggcaa

SEQ ID NO: 651291 - RNA, 19 nt, Artificial Sequence
  Description of Artificial Sequence: Synthetic oligonucleotide
  Antisense strand to SEQ ID NO: 651290
uugcccaagggcauucuga

SEQ ID NO: 651292 - RNA, 19 nt, Artificial Sequence
  Description of Artificial Sequence: Synthetic oligonucleotide
  Sense strand starting at position 2621 of SEQ ID NO: 585581
uuugcaaaggucugaaaga

SEQ ID NO: 651293 - RNA, 19 nt, Artificial Sequence
  Description of Artificial Sequence: Synthetic oligonucleotide
  Antisense strand to SEQ ID NO: 651292
ucuuucagaccuuugcaaa

SEQ ID NO: 651294 - RNA, 19 nt, Artificial Sequence
  Description of Artificial Sequence: Synthetic oligonucleotide
  Sense strand starting at position 2950 of SEQ ID NO: 585581
aguggcuuuaauggaagua

SEQ ID NO: 651295 - RNA, 19 nt, Artificial Sequence
  Description of Artificial Sequence: Synthetic oligonucleotide
  Antisense strand to SEQ ID NO: 651294
uacuuccauuaaagccacu

SEQ ID NO: 651296 - RNA, 19 nt, Artificial Sequence
  Description of Artificial Sequence: Synthetic oligonucleotide
  Sense strand starting at position 2951 of SEQ ID NO: 585581
guggcuuuaauggaaguaa

SEQ ID NO: 651297 - RNA, 19 nt, Artificial Sequence
  Description of Artificial Sequence: Synthetic oligonucleotide
  Antisense strand to SEQ ID NO: 651296
uuacuuccauuaaagccac

SEQ ID NO: 651298 - RNA, 19 nt, Artificial Sequence
  Description of Artificial Sequence: Synthetic oligonucleotide
  Sense strand starting at position 3013 of SEQ ID NO: 585581
ggcaguauauuuguuuguu

SEQ ID NO: 651299 - RNA, 19 nt, Artificial Sequence
  Description of Artificial Sequence: Synthetic oligonucleotide
  Antisense strand to SEQ ID NO: 651298
aacaaacaaauauacugcc

SEQ ID NO: 651300 - RNA, 19 nt, Artificial Sequence
  Description of Artificial Sequence: Synthetic oligonucleotide
  Sense strand starting at position 3014 of SEQ ID NO: 585581
gcaguauauuuguuuguuu

SEQ ID NO: 651301 - RNA, 19 nt, Artificial Sequence
  Description of Artificial Sequence: Synthetic oligonucleotide
  Antisense strand to SEQ ID NO: 651300
aaacaaacaaauauacugc

SEQ ID NO: 651302 - RNA, 19 nt, Artificial Sequence
  Description of Artificial Sequence: Synthetic oligonucleotide
  Sense strand starting at position 3160 of SEQ ID NO: 585581
guagcaguauauuuguaau

SEQ ID NO: 651303 - RNA, 19 nt, Artificial Sequence
  Description of Artificial Sequence: Synthetic oligonucleotide
  Antisense strand to SEQ ID NO: 651302
auuacaaauauacugcuac

SEQ ID NO: 651304 - RNA, 19 nt, Artificial Sequence
  Description of Artificial Sequence: Synthetic oligonucleotide
  Sense strand starting at position 3694 of SEQ ID NO: 585581
auguguaagauguacuuua

SEQ ID NO: 651305 - RNA, 19 nt, Artificial Sequence
  Description of Artificial Sequence: Synthetic oligonucleotide
  Antisense strand to SEQ ID NO: 651304
uaaaguacaucuuacacau

SEQ ID NO: 651306 - RNA, 19 nt, Artificial Sequence
  Description of Artificial Sequence: Synthetic oligonucleotide
  Sense strand starting at position 3702 of SEQ ID NO: 585581
gauguacuuuagucaggua

SEQ ID NO: 651307 - RNA, 19 nt, Artificial Sequence
  Description of Artificial Sequence: Synthetic oligonucleotide
  Antisense strand to SEQ ID NO: 651306
uaccugacuaaaguacauc

SEQ ID NO: 651308 - RNA, 19 nt, Artificial Sequence
  Description of Artificial Sequence: Synthetic oligonucleotide
  Sense strand starting at position 3703 of SEQ ID NO: 585581
auguacuuuagucagguaa

SEQ ID NO: 651309 - RNA, 19 nt, Artificial Sequence
  Description of Artificial Sequence: Synthetic oligonucleotide
  Antisense strand to SEQ ID NO: 651308
uuaccugacuaaaguacau

SEQ ID NO: 651310 - RNA, 19 nt, Artificial Sequence
  Description of Artificial Sequence: Synthetic oligonucleotide
  Sense strand starting at position 195 of SEQ ID NO: 585582
ugucuuuacagggagcaga

SEQ ID NO: 651311 - RNA, 19 nt, Artificial Sequence
  Description of Artificial Sequence: Synthetic oligonucleotide
  Antisense strand to SEQ ID NO: 651310
ucugcucccuguaaagaca

SEQ ID NO: 651312 - RNA, 19 nt, Artificial Sequence
  Description of Artificial Sequence: Synthetic oligonucleotide
  Sense strand starting at position 450 of SEQ ID NO: 585582
ggcauaaucucaucuucug

SEQ ID NO: 651313 - RNA, 19 nt, Artificial Sequence
  Description of Artificial Sequence: Synthetic oligonucleotide
  Antisense strand to SEQ ID NO: 651312
cagaagaugagauuaugcc

SEQ ID NO: 651314 - RNA, 19 nt, Artificial Sequence
  Description of Artificial Sequence: Synthetic oligonucleotide
  Sense strand starting at position 500 of SEQ ID NO: 585582
gaaguuguggucuggaauu

SEQ ID NO: 651315 - RNA, 19 nt, Artificial Sequence
  Description of Artificial Sequence: Synthetic oligonucleotide
  Antisense strand to SEQ ID NO: 651314
aauuccagaccacaacuuc

SEQ ID NO: 651316 - RNA, 19 nt, Artificial Sequence
  Description of Artificial Sequence: Synthetic oligonucleotide
  Sense strand starting at position 502 of SEQ ID NO: 585582
aguuguggucuggaauuau

SEQ ID NO: 651317 - RNA, 19 nt, Artificial Sequence
  Description of Artificial Sequence: Synthetic oligonucleotide
  Antisense strand to SEQ ID NO: 651316
auaauuccagaccacaacu

SEQ ID NO: 651318 - RNA, 19 nt, Artificial Sequence
  Description of Artificial Sequence: Synthetic oligonucleotide
  Sense strand starting at position 513 of SEQ ID NO: 585582
ggaauuauaugguccagau

SEQ ID NO: 651319 - RNA, 19 nt, Artificial Sequence
  Description of Artificial Sequence: Synthetic oligonucleotide
  Antisense strand to SEQ ID NO: 651318
aucuggaccauauaauucc

SEQ ID NO: 651320 - RNA, 19 nt, Artificial Sequence
  Description of Artificial Sequence: Synthetic oligonucleotide
  Sense strand starting at position 522 of SEQ ID NO: 585582
ugguccagaugaucugaaa

SEQ ID NO: 651321 - RNA, 19 nt, Artificial Sequence
  Description of Artificial Sequence: Synthetic oligonucleotide
  Antisense strand to SEQ ID NO: 651320
uuucagaucaucuggacca

SEQ ID NO: 651322 - RNA, 19 nt, Artificial Sequence
  Description of Artificial Sequence: Synthetic oligonucleotide
  Sense strand starting at position 660 of SEQ ID NO: 585582
ugccuauauggugacauua

SEQ ID NO: 651323 - RNA, 19 nt, Artificial Sequence
  Description of Artificial Sequence: Synthetic oligonucleotide
  Antisense strand to SEQ ID NO: 651322
uaaugucaccauauaggca

SEQ ID NO: 651324 - RNA, 19 nt, Artificial Sequence
  Description of Artificial Sequence: Synthetic oligonucleotide
  Sense strand starting at position 719 of SEQ ID NO: 585582
aaagguguuccaggcauga

SEQ ID NO: 651325 - RNA, 19 nt, Artificial Sequence
  Description of Artificial Sequence: Synthetic oligonucleotide
  Antisense strand to SEQ ID NO: 651324
ucaugccuggaacaccuuu

SEQ ID NO: 651326 - RNA, 19 nt, Artificial Sequence
  Description of Artificial Sequence: Synthetic oligonucleotide
  Sense strand starting at position 721 of SEQ ID NO: 585582
agguguuccaggcaugaaa

SEQ ID NO: 651327 - RNA, 19 nt, Artificial Sequence
  Description of Artificial Sequence: Synthetic oligonucleotide
  Antisense strand to SEQ ID NO: 651326
uuucaugccuggaacaccu

SEQ ID NO: 651328 - RNA, 19 nt, Artificial Sequence
  Description of Artificial Sequence: Synthetic oligonucleotide
  Sense strand starting at position 772 of SEQ ID NO: 585582
ccuuuaaaguuguccugga

SEQ ID NO: 651329 - RNA, 19 nt, Artificial Sequence
  Description of Artificial Sequence: Synthetic oligonucleotide
  Antisense strand to SEQ ID NO: 651328
uccaggacaacuuuaaagg

SEQ ID NO: 651330 - RNA, 19 nt, Artificial Sequence
  Description of Artificial Sequence: Synthetic oligonucleotide
  Sense strand starting at position 773 of SEQ ID NO: 585582
cuuuaaaguuguccuggaa

SEQ ID NO: 651331 - RNA, 19 nt, Artificial Sequence
  Description of Artificial Sequence: Synthetic oligonucleotide
  Antisense strand to SEQ ID NO: 651330
uuccaggacaacuuuaaag

SEQ ID NO: 651332 - RNA, 19 nt, Artificial Sequence
  Description of Artificial Sequence: Synthetic oligonucleotide
  Sense strand starting at position 776 of SEQ ID NO: 585582
uaaaguuguccuggaaaua

SEQ ID NO: 651333 - RNA, 19 nt, Artificial Sequence
  Description of Artificial Sequence: Synthetic oligonucleotide
  Antisense strand to SEQ ID NO: 651332
uauuuccaggacaacuuua

SEQ ID NO: 651334 - RNA, 19 nt, Artificial Sequence
  Description of Artificial Sequence: Synthetic oligonucleotide
  Sense strand starting at position 785 of SEQ ID NO: 585582
ccuggaaauaucuggguug

SEQ ID NO: 651335 - RNA, 19 nt, Artificial Sequence
  Description of Artificial Sequence: Synthetic oligonucleotide
  Antisense strand to SEQ ID NO: 651334
caacccagauauuuccagg

SEQ ID NO: 651336 - RNA, 19 nt, Artificial Sequence
  Description of Artificial Sequence: Synthetic oligonucleotide
  Sense strand starting at position 787 of SEQ ID NO: 585582
uggaaauaucuggguugac

SEQ ID NO: 651337 - RNA, 19 nt, Artificial Sequence
  Description of Artificial Sequence: Synthetic oligonucleotide
  Antisense strand to SEQ ID NO: 651336
gucaacccagauauuucca

SEQ ID NO: 651338 - RNA, 19 nt, Artificial Sequence
  Description of Artificial Sequence: Synthetic oligonucleotide
  Sense strand starting at position 802 of SEQ ID NO: 585582
ugacaaaggcgaugaaacu

SEQ ID NO: 651339 - RNA, 19 nt, Artificial Sequence
  Description of Artificial Sequence: Synthetic oligonucleotide
  Antisense strand to SEQ ID NO: 651338
aguuucaucgccuuuguca

SEQ ID NO: 651340 - RNA, 19 nt, Artificial Sequence
  Description of Artificial Sequence: Synthetic oligonucleotide
  Sense strand starting at position 986 of SEQ ID NO: 585582
cagacuuaagcuggagaca

SEQ ID NO: 651341 - RNA, 19 nt, Artificial Sequence
  Description of Artificial Sequence: Synthetic oligonucleotide
  Antisense strand to SEQ ID NO: 651340
ugucuccagcuuaagucug

SEQ ID NO: 651342 - RNA, 19 nt, Artificial Sequence
  Description of Artificial Sequence: Synthetic oligonucleotide
  Sense strand starting at position 1072 of SEQ ID NO: 585582
cuggguaguugauuccuaa

SEQ ID NO: 651343 - RNA, 19 nt, Artificial Sequence
  Description of Artificial Sequence: Synthetic oligonucleotide
  Antisense strand to SEQ ID NO: 651342
uuaggaaucaacuacccag

SEQ ID NO: 651344 - RNA, 19 nt, Artificial Sequence
  Description of Artificial Sequence: Synthetic oligonucleotide
  Sense strand starting at position 1240 of SEQ ID NO: 585582
cuagauuucguccgguaca

SEQ ID NO: 651345 - RNA, 19 nt, Artificial Sequence
  Description of Artificial Sequence: Synthetic oligonucleotide
  Antisense strand to SEQ ID NO: 651344
uguaccggacgaaaucuag

SEQ ID NO: 651346 - RNA, 19 nt, Artificial Sequence
  Description of Artificial Sequence: Synthetic oligonucleotide
  Sense strand starting at position 1281 of SEQ ID NO: 585582
ggugguuugaguuaaucaa

SEQ ID NO: 651347 - RNA, 19 nt, Artificial Sequence
  Description of Artificial Sequence: Synthetic oligonucleotide
  Antisense strand to SEQ ID NO: 651346
uugauuaacucaaaccacc

SEQ ID NO: 651348 - RNA, 19 nt, Artificial Sequence
  Description of Artificial Sequence: Synthetic oligonucleotide
  Sense strand starting at position 1305 of SEQ ID NO: 585582
uaagacugaucguuaagaa

SEQ ID NO: 651349 - RNA, 19 nt, Artificial Sequence
  Description of Artificial Sequence: Synthetic oligonucleotide
  Antisense strand to SEQ ID NO: 651348
uucuuaacgaucagucuua

SEQ ID NO: 651350 - RNA, 19 nt, Artificial Sequence
  Description of Artificial Sequence: Synthetic oligonucleotide
  Sense strand starting at position 1353 of SEQ ID NO: 585582
ggauccaucuuuccaagac

SEQ ID NO: 651351 - RNA, 19 nt, Artificial Sequence
  Description of Artificial Sequence: Synthetic oligonucleotide
  Antisense strand to SEQ ID NO: 651350
gucuuggaaagauggaucc

SEQ ID NO: 651352 - RNA, 19 nt, Artificial Sequence
  Description of Artificial Sequence: Synthetic oligonucleotide
  Sense strand starting at position 1400 of SEQ ID NO: 585582
ccugguacccacugauuaa

SEQ ID NO: 651353 - RNA, 19 nt, Artificial Sequence
  Description of Artificial Sequence: Synthetic oligonucleotide
  Antisense strand to SEQ ID NO: 651352
uuaaucaguggguaccagg

SEQ ID NO: 651354 - RNA, 19 nt, Artificial Sequence
  Description of Artificial Sequence: Synthetic oligonucleotide
  Sense strand starting at position 1448 of SEQ ID NO: 585582
caguuagaagcuuauguag

SEQ ID NO: 651355 - RNA, 19 nt, Artificial Sequence
  Description of Artificial Sequence: Synthetic oligonucleotide
  Antisense strand to SEQ ID NO: 651354
cuacauaagcuucuaacug

SEQ ID NO: 651356 - RNA, 19 nt, Artificial Sequence
  Description of Artificial Sequence: Synthetic oligonucleotide
  Sense strand starting at position 2011 of SEQ ID NO: 585582
ggcaccuuuccggaggaca

SEQ ID NO: 651357 - RNA, 19 nt, Artificial Sequence
  Description of Artificial Sequence: Synthetic oligonucleotide
  Antisense strand to SEQ ID NO: 651356
uguccuccggaaaggugcc

SEQ ID NO: 651358 - RNA, 19 nt, Artificial Sequence
  Description of Artificial Sequence: Synthetic oligonucleotide
  Sense strand starting at position 2170 of SEQ ID NO: 585582
gguucuggucuuugggaga

SEQ ID NO: 651359 - RNA, 19 nt, Artificial Sequence
  Description of Artificial Sequence: Synthetic oligonucleotide
  Antisense strand to SEQ ID NO: 651358
ucucccaaagaccagaacc

SEQ ID NO: 651360 - RNA, 19 nt, Artificial Sequence
  Description of Artificial Sequence: Synthetic oligonucleotide
  Sense strand starting at position 2329 of SEQ ID NO: 585582
ccgagugcuaaccaagagu

SEQ ID NO: 651361 - RNA, 19 nt, Artificial Sequence
  Description of Artificial Sequence: Synthetic oligonucleotide
  Antisense strand to SEQ ID NO: 651360
acucuugguuagcacucgg

SEQ ID NO: 651362 - RNA, 19 nt, Artificial Sequence
  Description of Artificial Sequence: Synthetic oligonucleotide
  Sense strand starting at position 2342 of SEQ ID NO: 585582
aagaguaggcagugaaaga

SEQ ID NO: 651363 - RNA, 19 nt, Artificial Sequence
  Description of Artificial Sequence: Synthetic oligonucleotide
  Antisense strand to SEQ ID NO: 651362
ucuuucacugccuacucuu

SEQ ID NO: 651364 - RNA, 19 nt, Artificial Sequence
  Description of Artificial Sequence: Synthetic oligonucleotide
  Sense strand starting at position 2417 of SEQ ID NO: 585582
ugugccugagaguaaugaa

SEQ ID NO: 651365 - RNA, 19 nt, Artificial Sequence
  Description of Artificial Sequence: Synthetic oligonucleotide
  Antisense strand to SEQ ID NO: 651364
uucauuacucucaggcaca

SEQ ID NO: 651366 - RNA, 19 nt, Artificial Sequence
  Description of Artificial Sequence: Synthetic oligonucleotide
  Sense strand starting at position 2432 of SEQ ID NO: 585582
ugaagaagccucugcagaa

SEQ ID NO: 651367 - RNA, 19 nt, Artificial Sequence
  Description of Artificial Sequence: Synthetic oligonucleotide
  Antisense strand to SEQ ID NO: 651366
uucugcagaggcuucuuca

SEQ ID NO: 651368 - RNA, 19 nt, Artificial Sequence
  Description of Artificial Sequence: Synthetic oligonucleotide
  Sense strand starting at position 2436 of SEQ ID NO: 585582
gaagccucugcagaagagu

SEQ ID NO: 651369 - RNA, 19 nt, Artificial Sequence
  Description of Artificial Sequence: Synthetic oligonucleotide
  Antisense strand to SEQ ID NO: 651368
acucuucugcagaggcuuc

SEQ ID NO: 651370 - RNA, 19 nt, Artificial Sequence
  Description of Artificial Sequence: Synthetic oligonucleotide
  Sense strand starting at position 2593 of SEQ ID NO: 585582
ucagaaugcccuugggcaa

SEQ ID NO: 651371 - RNA, 19 nt, Artificial Sequence
  Description of Artificial Sequence: Synthetic oligonucleotide
  Antisense strand to SEQ ID NO: 651370
uugcccaagggcauucuga

SEQ ID NO: 651372 - RNA, 19 nt, Artificial Sequence
  Description of Artificial Sequence: Synthetic oligonucleotide
  Sense strand starting at position 2659 of SEQ ID NO: 585582
uuugcaaaggucugaaaga

SEQ ID NO: 651373 - RNA, 19 nt, Artificial Sequence
  Description of Artificial Sequence: Synthetic oligonucleotide
  Antisense strand to SEQ ID NO: 651372
ucuuucagaccuuugcaaa

SEQ ID NO: 651374 - RNA, 19 nt, Artificial Sequence
  Description of Artificial Sequence: Synthetic oligonucleotide
  Sense strand starting at position 2988 of SEQ ID NO: 585582
aguggcuuuaauggaagua

SEQ ID NO: 651375 - RNA, 19 nt, Artificial Sequence
  Description of Artificial Sequence: Synthetic oligonucleotide
  Antisense strand to SEQ ID NO: 651374
uacuuccauuaaagccacu

SEQ ID NO: 651376 - RNA, 19 nt, Artificial Sequence
  Description of Artificial Sequence: Synthetic oligonucleotide
  Sense strand starting at position 2989 of SEQ ID NO: 585582
guggcuuuaauggaaguaa

SEQ ID NO: 651377 - RNA, 19 nt, Artificial Sequence
  Description of Artificial Sequence: Synthetic oligonucleotide
  Antisense strand to SEQ ID NO: 651376
uuacuuccauuaaagccac

SEQ ID NO: 651378 - RNA, 19 nt, Artificial Sequence
  Description of Artificial Sequence: Synthetic oligonucleotide
  Sense strand starting at position 3051 of SEQ ID NO: 585582
ggcaguauauuuguuuguu

SEQ ID NO: 651379 - RNA, 19 nt, Artificial Sequence
  Description of Artificial Sequence: Synthetic oligonucleotide
  Antisense strand to SEQ ID NO: 651378
aacaaacaaauauacugcc

SEQ ID NO: 651380 - RNA, 19 nt, Artificial Sequence
  Description of Artificial Sequence: Synthetic oligonucleotide
  Sense strand starting at position 3052 of SEQ ID NO: 585582
gcaguauauuuguuuguuu

SEQ ID NO: 651381 - RNA, 19 nt, Artificial Sequence
  Description of Artificial Sequence: Synthetic oligonucleotide
  Antisense strand to SEQ ID NO: 651380
aaacaaacaaauauacugc

SEQ ID NO: 651382 - RNA, 19 nt, Artificial Sequence
  Description of Artificial Sequence: Synthetic oligonucleotide
  Sense strand starting at position 3198 of SEQ ID NO: 585582
guagcaguauauuuguaau

SEQ ID NO: 651383 - RNA, 19 nt, Artificial Sequence
  Description of Artificial Sequence: Synthetic oligonucleotide
  Antisense strand to SEQ ID NO: 651382
auuacaaauauacugcuac

SEQ ID NO: 651384 - RNA, 19 nt, Artificial Sequence
  Description of Artificial Sequence: Synthetic oligonucleotide
  Sense strand starting at position 3732 of SEQ ID NO: 585582
auguguaagauguacuuua

SEQ ID NO: 651385 - RNA, 19 nt, Artificial Sequence
  Description of Artificial Sequence: Synthetic oligonucleotide
  Antisense strand to SEQ ID NO: 651384
uaaaguacaucuuacacau

SEQ ID NO: 651386 - RNA, 19 nt, Artificial Sequence
  Description of Artificial Sequence: Synthetic oligonucleotide
  Sense strand starting at position 3740 of SEQ ID NO: 585582
gauguacuuuagucaggua

SEQ ID NO: 651387 - RNA, 19 nt, Artificial Sequence
  Description of Artificial Sequence: Synthetic oligonucleotide
  Antisense strand to SEQ ID NO: 651386
uaccugacuaaaguacauc

SEQ ID NO: 651388 - RNA, 19 nt, Artificial Sequence
  Description of Artificial Sequence: Synthetic oligonucleotide
  Sense strand starting at position 3741 of SEQ ID NO: 585582
auguacuuuagucagguaa

SEQ ID NO: 651389 - RNA, 19 nt, Artificial Sequence
  Description of Artificial Sequence: Synthetic oligonucleotide
  Antisense strand to SEQ ID NO: 651388
uuaccugacuaaaguacau

SEQ ID NO: 651390 - RNA, 19 nt, Artificial Sequence
  Description of Artificial Sequence: Synthetic oligonucleotide
  Sense strand starting at position 286 of SEQ ID NO: 585583
agaggacuucgggagcauu

SEQ ID NO: 651391 - RNA, 19 nt, Artificial Sequence
  Description of Artificial Sequence: Synthetic oligonucleotide
  Antisense strand to SEQ ID NO: 651390
aaugcucccgaaguccucu

SEQ ID NO: 651392 - RNA, 19 nt, Artificial Sequence
  Description of Artificial Sequence: Synthetic oligonucleotide
  Sense strand starting at position 570 of SEQ ID NO: 585583
ggccaaagccugggaauga

SEQ ID NO: 651393 - RNA, 19 nt, Artificial Sequence
  Description of Artificial Sequence: Synthetic oligonucleotide
  Antisense strand to SEQ ID NO: 651392
ucauucccaggcuuuggcc

SEQ ID NO: 651394 - RNA, 19 nt, Artificial Sequence
  Description of Artificial Sequence: Synthetic oligonucleotide
  Sense strand starting at position 938 of SEQ ID NO: 585583
ccugcuuccuucuagcgaa

SEQ ID NO: 651395 - RNA, 19 nt, Artificial Sequence
  Description of Artificial Sequence: Synthetic oligonucleotide
  Antisense strand to SEQ ID NO: 651394
uucgcuagaaggaagcagg

SEQ ID NO: 651396 - RNA, 19 nt, Artificial Sequence
  Description of Artificial Sequence: Synthetic oligonucleotide
  Sense strand starting at position 1475 of SEQ ID NO: 585583
gaaccuaaguggucacaaa

SEQ ID NO: 651397 - RNA, 19 nt, Artificial Sequence
  Description of Artificial Sequence: Synthetic oligonucleotide
  Antisense strand to SEQ ID NO: 651396
uuugugaccacuuagguuc

SEQ ID NO: 651398 - RNA, 19 nt, Artificial Sequence
  Description of Artificial Sequence: Synthetic oligonucleotide
  Sense strand starting at position 1484 of SEQ ID NO: 585583
uggucacaaaguugaguau

SEQ ID NO: 651399 - RNA, 19 nt, Artificial Sequence
  Description of Artificial Sequence: Synthetic oligonucleotide
  Antisense strand to SEQ ID NO: 651398
auacucaacuuugugacca

SEQ ID NO: 651400 - RNA, 19 nt, Artificial Sequence
  Description of Artificial Sequence: Synthetic oligonucleotide
  Sense strand starting at position 1485 of SEQ ID NO: 585583
ggucacaaaguugaguaua

SEQ ID NO: 651401 - RNA, 19 nt, Artificial Sequence
  Description of Artificial Sequence: Synthetic oligonucleotide
  Antisense strand to SEQ ID NO: 651400
uauacucaacuuugugacc

SEQ ID NO: 651402 - RNA, 19 nt, Artificial Sequence
  Description of Artificial Sequence: Synthetic oligonucleotide
  Sense strand starting at position 1487 of SEQ ID NO: 585583
ucacaaaguugaguauaaa

SEQ ID NO: 651403 - RNA, 19 nt, Artificial Sequence
  Description of Artificial Sequence: Synthetic oligonucleotide
  Antisense strand to SEQ ID NO: 651402
uuuauacucaacuuuguga

SEQ ID NO: 651404 - RNA, 19 nt, Artificial Sequence
  Description of Artificial Sequence: Synthetic oligonucleotide
  Sense strand starting at position 1514 of SEQ ID NO: 585583
ggacaaguguggccagaaa

SEQ ID NO: 651405 - RNA, 19 nt, Artificial Sequence
  Description of Artificial Sequence: Synthetic oligonucleotide
  Antisense strand to SEQ ID NO: 651404
uuucuggccacacuugucc

SEQ ID NO: 651406 - RNA, 19 nt, Artificial Sequence
  Description of Artificial Sequence: Synthetic oligonucleotide
  Sense strand starting at position 1877 of SEQ ID NO: 585583
ggaagcagcucgcauuauu

SEQ ID NO: 651407 - RNA, 19 nt, Artificial Sequence
  Description of Artificial Sequence: Synthetic oligonucleotide
  Antisense strand to SEQ ID NO: 651406
aauaaugcgagcugcuucc

SEQ ID NO: 651408 - RNA, 19 nt, Artificial Sequence
  Description of Artificial Sequence: Synthetic oligonucleotide
  Sense strand starting at position 1880 of SEQ ID NO: 585583
agcagcucgcauuauuaga

SEQ ID NO: 651409 - RNA, 19 nt, Artificial Sequence
  Description of Artificial Sequence: Synthetic oligonucleotide
  Antisense strand to SEQ ID NO: 651408
ucuaauaaugcgagcugcu

SEQ ID NO: 651410 - RNA, 19 nt, Artificial Sequence
  Description of Artificial Sequence: Synthetic oligonucleotide
  Sense strand starting at position 1888 of SEQ ID NO: 585583
gcauuauuagaagguccau

SEQ ID NO: 651411 - RNA, 19 nt, Artificial Sequence
  Description of Artificial Sequence: Synthetic oligonucleotide
  Antisense strand to SEQ ID NO: 651410
auggaccuucuaauaaugc

SEQ ID NO: 651412 - RNA, 19 nt, Artificial Sequence
  Description of Artificial Sequence: Synthetic oligonucleotide
  Sense strand starting at position 3333 of SEQ ID NO: 585583
uccgguguuucggauucua

SEQ ID NO: 651413 - RNA, 19 nt, Artificial Sequence
  Description of Artificial Sequence: Synthetic oligonucleotide
  Antisense strand to SEQ ID NO: 651412
uagaauccgaaacaccgga

SEQ ID NO: 651414 - RNA, 19 nt, Artificial Sequence
  Description of Artificial Sequence: Synthetic oligonucleotide
  Sense strand starting at position 3474 of SEQ ID NO: 585583
gucagaguucccgggagag

SEQ ID NO: 651415 - RNA, 19 nt, Artificial Sequence
  Description of Artificial Sequence: Synthetic oligonucleotide
  Antisense strand to SEQ ID NO: 651414
cucucccgggaacucugac

SEQ ID NO: 651416 - RNA, 19 nt, Artificial Sequence
  Description of Artificial Sequence: Synthetic oligonucleotide
  Sense strand starting at position 3504 of SEQ ID NO: 585583
ggaccuuugguuggaguuu

SEQ ID NO: 651417 - RNA, 19 nt, Artificial Sequence
  Description of Artificial Sequence: Synthetic oligonucleotide
  Antisense strand to SEQ ID NO: 651416
aaacuccaaccaaaggucc

SEQ ID NO: 651418 - RNA, 19 nt, Artificial Sequence
  Description of Artificial Sequence: Synthetic oligonucleotide
  Sense strand starting at position 3510 of SEQ ID NO: 585583
uugguuggaguuuaaauca

SEQ ID NO: 651419 - RNA, 19 nt, Artificial Sequence
  Description of Artificial Sequence: Synthetic oligonucleotide
  Antisense strand to SEQ ID NO: 651418
ugauuuaaacuccaaccaa

SEQ ID NO: 651420 - RNA, 19 nt, Artificial Sequence
  Description of Artificial Sequence: Synthetic oligonucleotide
  Sense strand starting at position 3522 of SEQ ID NO: 585583
uaaaucaacucgcaguguu

SEQ ID NO: 651421 - RNA, 19 nt, Artificial Sequence
  Description of Artificial Sequence: Synthetic oligonucleotide
  Antisense strand to SEQ ID NO: 651420
aacacugcgaguugauuua

SEQ ID NO: 651422 - RNA, 19 nt, Artificial Sequence
  Description of Artificial Sequence: Synthetic oligonucleotide
  Sense strand starting at position 3530 of SEQ ID NO: 585583
cucgcaguguuucccauaa

SEQ ID NO: 651423 - RNA, 19 nt, Artificial Sequence
  Description of Artificial Sequence: Synthetic oligonucleotide
  Antisense strand to SEQ ID NO: 651422
uuaugggaaacacugcgag

SEQ ID NO: 651424 - RNA, 19 nt, Artificial Sequence
  Description of Artificial Sequence: Synthetic oligonucleotide
  Sense strand starting at position 3532 of SEQ ID NO: 585583
cgcaguguuucccauaaac

SEQ ID NO: 651425 - RNA, 19 nt, Artificial Sequence
  Description of Artificial Sequence: Synthetic oligonucleotide
  Antisense strand to SEQ ID NO: 651424
guuuaugggaaacacugcg

SEQ ID NO: 651426 - RNA, 19 nt, Artificial Sequence
  Description of Artificial Sequence: Synthetic oligonucleotide
  Sense strand starting at position 3542 of SEQ ID NO: 585583
cccauaaacuaggguuuga

SEQ ID NO: 651427 - RNA, 19 nt, Artificial Sequence
  Description of Artificial Sequence: Synthetic oligonucleotide
  Antisense strand to SEQ ID NO: 651426
ucaaacccuaguuuauggg

SEQ ID NO: 651428 - RNA, 19 nt, Artificial Sequence
  Description of Artificial Sequence: Synthetic oligonucleotide
  Sense strand starting at position 3606 of SEQ ID NO: 585583
acgaacuucgugugcacaa

SEQ ID NO: 651429 - RNA, 19 nt, Artificial Sequence
  Description of Artificial Sequence: Synthetic oligonucleotide
  Antisense strand to SEQ ID NO: 651428
uugugcacacgaaguucgu

SEQ ID NO: 651430 - RNA, 19 nt, Artificial Sequence
  Description of Artificial Sequence: Synthetic oligonucleotide
  Sense strand starting at position 3684 of SEQ ID NO: 585583
gcaagacugugcgaucauu

SEQ ID NO: 651431 - RNA, 19 nt, Artificial Sequence
  Description of Artificial Sequence: Synthetic oligonucleotide
  Antisense strand to SEQ ID NO: 651430
aaugaucgcacagucuugc

SEQ ID NO: 651432 - RNA, 19 nt, Artificial Sequence
  Description of Artificial Sequence: Synthetic oligonucleotide
  Sense strand starting at position 3713 of SEQ ID NO: 585583
cugagaccgccuugccaua

SEQ ID NO: 651433 - RNA, 19 nt, Artificial Sequence
  Description of Artificial Sequence: Synthetic oligonucleotide
  Antisense strand to SEQ ID NO: 651432
uauggcaaggcggucucag

SEQ ID NO: 651434 - RNA, 19 nt, Artificial Sequence
  Description of Artificial Sequence: Synthetic oligonucleotide
  Sense strand starting at position 26 of SEQ ID NO: 585584
ucaagagagugaguacauu

SEQ ID NO: 651435 - RNA, 19 nt, Artificial Sequence
  Description of Artificial Sequence: Synthetic oligonucleotide
  Antisense strand to SEQ ID NO: 651434
aauguacucacucucuuga

SEQ ID NO: 651436 - RNA, 19 nt, Artificial Sequence
  Description of Artificial Sequence: Synthetic oligonucleotide
  Sense strand starting at position 103 of SEQ ID NO: 585584
uggaguugcaacuaguuaa

SEQ ID NO: 651437 - RNA, 19 nt, Artificial Sequence
  Description of Artificial Sequence: Synthetic oligonucleotide
  Antisense strand to SEQ ID NO: 651436
uuaacuaguugcaacucca

SEQ ID NO: 651438 - RNA, 19 nt, Artificial Sequence
  Description of Artificial Sequence: Synthetic oligonucleotide
  Sense strand starting at position 125 of SEQ ID NO: 585584
ugggcuucuacuugagaca

SEQ ID NO: 651439 - RNA, 19 nt, Artificial Sequence
  Description of Artificial Sequence: Synthetic oligonucleotide
  Antisense strand to SEQ ID NO: 651438
ugucucaaguagaagccca

SEQ ID NO: 651440 - RNA, 19 nt, Artificial Sequence
  Description of Artificial Sequence: Synthetic oligonucleotide
  Sense strand starting at position 169 of SEQ ID NO: 585584
aaugucaaucaagacguaa

SEQ ID NO: 651441 - RNA, 19 nt, Artificial Sequence
  Description of Artificial Sequence: Synthetic oligonucleotide
  Antisense strand to SEQ ID NO: 651440
uuacgucuugauugacauu

SEQ ID NO: 651442 - RNA, 19 nt, Artificial Sequence
  Description of Artificial Sequence: Synthetic oligonucleotide
  Sense strand starting at position 253 of SEQ ID NO: 585584
ugcaguuaugcguuugcaa

SEQ ID NO: 651443 - RNA, 19 nt, Artificial Sequence
  Description of Artificial Sequence: Synthetic oligonucleotide
  Antisense strand to SEQ ID NO: 651442
uugcaaacgcauaacugca

SEQ ID NO: 651444 - RNA, 19 nt, Artificial Sequence
  Description of Artificial Sequence: Synthetic oligonucleotide
  Sense strand starting at position 254 of SEQ ID NO: 585584
gcaguuaugcguuugcaac

SEQ ID NO: 651445 - RNA, 19 nt, Artificial Sequence
  Description of Artificial Sequence: Synthetic oligonucleotide
  Antisense strand to SEQ ID NO: 651444
guugcaaacgcauaacugc

SEQ ID NO: 651446 - RNA, 19 nt, Artificial Sequence
  Description of Artificial Sequence: Synthetic oligonucleotide
  Sense strand starting at position 365 of SEQ ID NO: 585584
guucuuaacuuaguacauu

SEQ ID NO: 651447 - RNA, 19 nt, Artificial Sequence
  Description of Artificial Sequence: Synthetic oligonucleotide
  Antisense strand to SEQ ID NO: 651446
aauguacuaaguuaagaac

SEQ ID NO: 651448 - RNA, 19 nt, Artificial Sequence
  Description of Artificial Sequence: Synthetic oligonucleotide
  Sense strand starting at position 434 of SEQ ID NO: 585584
ugaaaucgugcuuaauauu

SEQ ID NO: 651449 - RNA, 19 nt, Artificial Sequence
  Description of Artificial Sequence: Synthetic oligonucleotide
  Antisense strand to SEQ ID NO: 651448
aauauuaagcacgauuuca

SEQ ID NO: 651450 - RNA, 19 nt, Artificial Sequence
  Description of Artificial Sequence: Synthetic oligonucleotide
  Sense strand starting at position 486 of SEQ ID NO: 585584
guucucaauguugagaaua

SEQ ID NO: 651451 - RNA, 19 nt, Artificial Sequence
  Description of Artificial Sequence: Synthetic oligonucleotide
  Antisense strand to SEQ ID NO: 651450
uauucucaacauugagaac

SEQ ID NO: 651452 - RNA, 19 nt, Artificial Sequence
  Description of Artificial Sequence: Synthetic oligonucleotide
  Sense strand starting at position 576 of SEQ ID NO: 585584
auugcauaacuuugagaag

SEQ ID NO: 651453 - RNA, 19 nt, Artificial Sequence
  Description of Artificial Sequence: Synthetic oligonucleotide
  Antisense strand to SEQ ID NO: 651452
cuucucaaaguuaugcaau

SEQ ID NO: 651454 - RNA, 19 nt, Artificial Sequence
  Description of Artificial Sequence: Synthetic oligonucleotide
  Sense strand starting at position 720 of SEQ ID NO: 585584
acauuagcccuguauugaa

SEQ ID NO: 651455 - RNA, 19 nt, Artificial Sequence
  Description of Artificial Sequence: Synthetic oligonucleotide
  Antisense strand to SEQ ID NO: 651454
uucaauacagggcuaaugu

SEQ ID NO: 651456 - RNA, 19 nt, Artificial Sequence
  Description of Artificial Sequence: Synthetic oligonucleotide
  Sense strand starting at position 755 of SEQ ID NO: 585584
agcauuuaguguguuuacu

SEQ ID NO: 651457 - RNA, 19 nt, Artificial Sequence
  Description of Artificial Sequence: Synthetic oligonucleotide
  Antisense strand to SEQ ID NO: 651456
aguaaacacacuaaaugcu

SEQ ID NO: 651458 - RNA, 19 nt, Artificial Sequence
  Description of Artificial Sequence: Synthetic oligonucleotide
  Sense strand starting at position 757 of SEQ ID NO: 585584
cauuuaguguguuuacugu

SEQ ID NO: 651459 - RNA, 19 nt, Artificial Sequence
  Description of Artificial Sequence: Synthetic oligonucleotide
  Antisense strand to SEQ ID NO: 651458
acaguaaacacacuaaaug

SEQ ID NO: 651460 - RNA, 19 nt, Artificial Sequence
  Description of Artificial Sequence: Synthetic oligonucleotide
  Sense strand starting at position 765 of SEQ ID NO: 585584
guguuuacuguauaugaau

SEQ ID NO: 651461 - RNA, 19 nt, Artificial Sequence
  Description of Artificial Sequence: Synthetic oligonucleotide
  Antisense strand to SEQ ID NO: 651460
auucauauacaguaaacac

SEQ ID NO: 651462 - RNA, 19 nt, Artificial Sequence
  Description of Artificial Sequence: Synthetic oligonucleotide
  Sense strand starting at position 771 of SEQ ID NO: 585584
acuguauaugaaugccuau

SEQ ID NO: 651463 - RNA, 19 nt, Artificial Sequence
  Description of Artificial Sequence: Synthetic oligonucleotide
  Antisense strand to SEQ ID NO: 651462
auaggcauucauauacagu

SEQ ID NO: 651464 - RNA, 19 nt, Artificial Sequence
  Description of Artificial Sequence: Synthetic oligonucleotide
  Sense strand starting at position 802 of SEQ ID NO: 585584
ugcaaagagguuuacucuu

SEQ ID NO: 651465 - RNA, 19 nt, Artificial Sequence
  Description of Artificial Sequence: Synthetic oligonucleotide
  Antisense strand to SEQ ID NO: 651464
aagaguaaaccucuuugca

SEQ ID NO: 651466 - RNA, 19 nt, Artificial Sequence
  Description of Artificial Sequence: Synthetic oligonucleotide
  Sense strand starting at position 956 of SEQ ID NO: 585584
gcaaauuugcagugguaau

SEQ ID NO: 651467 - RNA, 19 nt, Artificial Sequence
  Description of Artificial Sequence: Synthetic oligonucleotide
  Antisense strand to SEQ ID NO: 651466
auuaccacugcaaauuugc

SEQ ID NO: 651468 - RNA, 19 nt, Artificial Sequence
  Description of Artificial Sequence: Synthetic oligonucleotide
  Sense strand starting at position 1020 of SEQ ID NO: 585584
ggucauguaacuuaguacu

SEQ ID NO: 651469 - RNA, 19 nt, Artificial Sequence
  Description of Artificial Sequence: Synthetic oligonucleotide
  Antisense strand to SEQ ID NO: 651468
aguacuaaguuacaugacc

SEQ ID NO: 651470 - RNA, 19 nt, Artificial Sequence
  Description of Artificial Sequence: Synthetic oligonucleotide
  Sense strand starting at position 1339 of SEQ ID NO: 585584
caagauuuauguuggagaa

SEQ ID NO: 651471 - RNA, 19 nt, Artificial Sequence
  Description of Artificial Sequence: Synthetic oligonucleotide
  Antisense strand to SEQ ID NO: 651470
uucuccaacauaaaucuug

SEQ ID NO: 651472 - RNA, 19 nt, Artificial Sequence
  Description of Artificial Sequence: Synthetic oligonucleotide
  Sense strand starting at position 1437 of SEQ ID NO: 585584
ucauuacacugguuggaau

SEQ ID NO: 651473 - RNA, 19 nt, Artificial Sequence
  Description of Artificial Sequence: Synthetic oligonucleotide
  Antisense strand to SEQ ID NO: 651472
auuccaaccaguguaauga

SEQ ID NO: 651474 - RNA, 19 nt, Artificial Sequence
  Description of Artificial Sequence: Synthetic oligonucleotide
  Sense strand starting at position 1478 of SEQ ID NO: 585584
guuaauucaggguaaguga

SEQ ID NO: 651475 - RNA, 19 nt, Artificial Sequence
  Description of Artificial Sequence: Synthetic oligonucleotide
  Antisense strand to SEQ ID NO: 651474
ucacuuacccugaauuaac

SEQ ID NO: 651476 - RNA, 19 nt, Artificial Sequence
  Description of Artificial Sequence: Synthetic oligonucleotide
  Sense strand starting at position 1491 of SEQ ID NO: 585584
aagugauaauguuuaguca

SEQ ID NO: 651477 - RNA, 19 nt, Artificial Sequence
  Description of Artificial Sequence: Synthetic oligonucleotide
  Antisense strand to SEQ ID NO: 651476
ugacuaaacauuaucacuu

SEQ ID NO: 651478 - RNA, 19 nt, Artificial Sequence
  Description of Artificial Sequence: Synthetic oligonucleotide
  Sense strand starting at position 1500 of SEQ ID NO: 585584
uguuuagucaguucgccua

SEQ ID NO: 651479 - RNA, 19 nt, Artificial Sequence
  Description of Artificial Sequence: Synthetic oligonucleotide
  Antisense strand to SEQ ID NO: 651478
uaggcgaacugacuaaaca

SEQ ID NO: 651480 - RNA, 19 nt, Artificial Sequence
  Description of Artificial Sequence: Synthetic oligonucleotide
  Sense strand starting at position 1648 of SEQ ID NO: 585584
gagcuugccgcuuaaauuu

SEQ ID NO: 651481 - RNA, 19 nt, Artificial Sequence
  Description of Artificial Sequence: Synthetic oligonucleotide
  Antisense strand to SEQ ID NO: 651480
aaauuuaagcggcaagcuc

SEQ ID NO: 651482 - RNA, 19 nt, Artificial Sequence
  Description of Artificial Sequence: Synthetic oligonucleotide
  Sense strand starting at position 1656 of SEQ ID NO: 585584
cgcuuaaauuuguuguaca

SEQ ID NO: 651483 - RNA, 19 nt, Artificial Sequence
  Description of Artificial Sequence: Synthetic oligonucleotide
  Antisense strand to SEQ ID NO: 651482
uguacaacaaauuuaagcg

SEQ ID NO: 651484 - RNA, 19 nt, Artificial Sequence
  Description of Artificial Sequence: Synthetic oligonucleotide
  Sense strand starting at position 2531 of SEQ ID NO: 585584
guacaaaugcacuggugaa

SEQ ID NO: 651485 - RNA, 19 nt, Artificial Sequence
  Description of Artificial Sequence: Synthetic oligonucleotide
  Antisense strand to SEQ ID NO: 651484
uucaccagugcauuuguac

SEQ ID NO: 651486 - RNA, 19 nt, Artificial Sequence
  Description of Artificial Sequence: Synthetic oligonucleotide
  Sense strand starting at position 2690 of SEQ ID NO: 585584
gaagcaaggcuauggugau

SEQ ID NO: 651487 - RNA, 19 nt, Artificial Sequence
  Description of Artificial Sequence: Synthetic oligonucleotide
  Antisense strand to SEQ ID NO: 651486
aucaccauagccuugcuuc

SEQ ID NO: 651488 - RNA, 19 nt, Artificial Sequence
  Description of Artificial Sequence: Synthetic oligonucleotide
  Sense strand starting at position 2774 of SEQ ID NO: 585584
agggauacuuccuuuacca

SEQ ID NO: 651489 - RNA, 19 nt, Artificial Sequence
  Description of Artificial Sequence: Synthetic oligonucleotide
  Antisense strand to SEQ ID NO: 651488
ugguaaaggaaguaucccu

SEQ ID NO: 651490 - RNA, 19 nt, Artificial Sequence
  Description of Artificial Sequence: Synthetic oligonucleotide
  Sense strand starting at position 3129 of SEQ ID NO: 585584
cuaauauuguuucuuugag

SEQ ID NO: 651491 - RNA, 19 nt, Artificial Sequence
  Description of Artificial Sequence: Synthetic oligonucleotide
  Antisense strand to SEQ ID NO: 651490
cucaaagaaacaauauuag

SEQ ID NO: 651492 - RNA, 19 nt, Artificial Sequence
  Description of Artificial Sequence: Synthetic oligonucleotide
  Sense strand starting at position 3223 of SEQ ID NO: 585584
ugguguugaagcuacaaua

SEQ ID NO: 651493 - RNA, 19 nt, Artificial Sequence
  Description of Artificial Sequence: Synthetic oligonucleotide
  Antisense strand to SEQ ID NO: 651492
uauuguagcuucaacacca

SEQ ID NO: 651494 - RNA, 19 nt, Artificial Sequence
  Description of Artificial Sequence: Synthetic oligonucleotide
  Sense strand starting at position 3473 of SEQ ID NO: 585584
gcccgaaugaugggacaua

SEQ ID NO: 651495 - RNA, 19 nt, Artificial Sequence
  Description of Artificial Sequence: Synthetic oligonucleotide
  Antisense strand to SEQ ID NO: 651494
uaugucccaucauucgggc

SEQ ID NO: 651496 - RNA, 19 nt, Artificial Sequence
  Description of Artificial Sequence: Synthetic oligonucleotide
  Sense strand starting at position 3635 of SEQ ID NO: 585584
aagguaugucugggacaag

SEQ ID NO: 651497 - RNA, 19 nt, Artificial Sequence
  Description of Artificial Sequence: Synthetic oligonucleotide
  Antisense strand to SEQ ID NO: 651496
cuugucccagacauaccuu

SEQ ID NO: 651498 - RNA, 19 nt, Artificial Sequence
  Description of Artificial Sequence: Synthetic oligonucleotide
  Sense strand starting at position 3638 of SEQ ID NO: 585584
guaugucugggacaagauc

SEQ ID NO: 651499 - RNA, 19 nt, Artificial Sequence
  Description of Artificial Sequence: Synthetic oligonucleotide
  Antisense strand to SEQ ID NO: 651498
gaucuugucccagacauac

SEQ ID NO: 651500 - RNA, 19 nt, Artificial Sequence
  Description of Artificial Sequence: Synthetic oligonucleotide
  Sense strand starting at position 3730 of SEQ ID NO: 585584
ugaacugaggaaugucuau

SEQ ID NO: 651501 - RNA, 19 nt, Artificial Sequence
  Description of Artificial Sequence: Synthetic oligonucleotide
  Antisense strand to SEQ ID NO: 651500
auagacauuccucaguuca

SEQ ID NO: 651502 - RNA, 19 nt, Artificial Sequence
  Description of Artificial Sequence: Synthetic oligonucleotide
  Sense strand starting at position 3736 of SEQ ID NO: 585584
gaggaaugucuaugauucg

SEQ ID NO: 651503 - RNA, 19 nt, Artificial Sequence
  Description of Artificial Sequence: Synthetic oligonucleotide
  Antisense strand to SEQ ID NO: 651502
cgaaucauagacauuccuc

SEQ ID NO: 651504 - RNA, 19 nt, Artificial Sequence
  Description of Artificial Sequence: Synthetic oligonucleotide
  Sense strand starting at position 3739 of SEQ ID NO: 585584
gaaugucuaugauucgaca

SEQ ID NO: 651505 - RNA, 19 nt, Artificial Sequence
  Description of Artificial Sequence: Synthetic oligonucleotide
  Antisense strand to SEQ ID NO: 651504
ugucgaaucauagacauuc

SEQ ID NO: 651506 - RNA, 19 nt, Artificial Sequence
  Description of Artificial Sequence: Synthetic oligonucleotide
  Sense strand starting at position 3932 of SEQ ID NO: 585584
gggccuguguauuugcaga

SEQ ID NO: 651507 - RNA, 19 nt, Artificial Sequence
  Description of Artificial Sequence: Synthetic oligonucleotide
  Antisense strand to SEQ ID NO: 651506
ucugcaaauacacaggccc

SEQ ID NO: 651508 - RNA, 19 nt, Artificial Sequence
  Description of Artificial Sequence: Synthetic oligonucleotide
  Sense strand starting at position 3934 of SEQ ID NO: 585584
gccuguguauuugcagaga

SEQ ID NO: 651509 - RNA, 19 nt, Artificial Sequence
  Description of Artificial Sequence: Synthetic oligonucleotide
  Antisense strand to SEQ ID NO: 651508
ucucugcaaauacacaggc

SEQ ID NO: 651510 - RNA, 19 nt, Artificial Sequence
  Description of Artificial Sequence: Synthetic oligonucleotide
  Sense strand starting at position 3939 of SEQ ID NO: 585584
uguauuugcagagagcguu

SEQ ID NO: 651511 - RNA, 19 nt, Artificial Sequence
  Description of Artificial Sequence: Synthetic oligonucleotide
  Antisense strand to SEQ ID NO: 651510
aacgcucucugcaaauaca

SEQ ID NO: 651512 - RNA, 19 nt, Artificial Sequence
  Description of Artificial Sequence: Synthetic oligonucleotide
  Sense strand starting at position 3951 of SEQ ID NO: 585584
gagcguuggcaguauuuga

SEQ ID NO: 651513 - RNA, 19 nt, Artificial Sequence
  Description of Artificial Sequence: Synthetic oligonucleotide
  Antisense strand to SEQ ID NO: 651512
ucaaauacugccaacgcuc

SEQ ID NO: 651514 - RNA, 19 nt, Artificial Sequence
  Description of Artificial Sequence: Synthetic oligonucleotide
  Sense strand starting at position 64 of SEQ ID NO: 585585
gaaccagugcucuagucau

SEQ ID NO: 651515 - RNA, 19 nt, Artificial Sequence
  Description of Artificial Sequence: Synthetic oligonucleotide
  Antisense strand to SEQ ID NO: 651514
augacuagagcacugguuc

SEQ ID NO: 651516 - RNA, 19 nt, Artificial Sequence
  Description of Artificial Sequence: Synthetic oligonucleotide
  Sense strand starting at position 152 of SEQ ID NO: 585585
auacuugauccuggacuga

SEQ ID NO: 651517 - RNA, 19 nt, Artificial Sequence
  Description of Artificial Sequence: Synthetic oligonucleotide
  Antisense strand to SEQ ID NO: 651516
ucaguccaggaucaaguau

SEQ ID NO: 651518 - RNA, 19 nt, Artificial Sequence
  Description of Artificial Sequence: Synthetic oligonucleotide
  Sense strand starting at position 170 of SEQ ID NO: 585585
aauccuguccuggagggua

SEQ ID NO: 651519 - RNA, 19 nt, Artificial Sequence
  Description of Artificial Sequence: Synthetic oligonucleotide
  Antisense strand to SEQ ID NO: 651518
uacccuccaggacaggauu

SEQ ID NO: 651520 - RNA, 19 nt, Artificial Sequence
  Description of Artificial Sequence: Synthetic oligonucleotide
  Sense strand starting at position 172 of SEQ ID NO: 585585
uccuguccuggaggguaaa

SEQ ID NO: 651521 - RNA, 19 nt, Artificial Sequence
  Description of Artificial Sequence: Synthetic oligonucleotide
  Antisense strand to SEQ ID NO: 651520
uuuacccuccaggacagga

SEQ ID NO: 651522 - RNA, 19 nt, Artificial Sequence
  Description of Artificial Sequence: Synthetic oligonucleotide
  Sense strand starting at position 182 of SEQ ID NO: 585585
gaggguaaagaaugcuaua

SEQ ID NO: 651523 - RNA, 19 nt, Artificial Sequence
  Description of Artificial Sequence: Synthetic oligonucleotide
  Antisense strand to SEQ ID NO: 651522
uauagcauucuuuacccuc

SEQ ID NO: 651524 - RNA, 19 nt, Artificial Sequence
  Description of Artificial Sequence: Synthetic oligonucleotide
  Sense strand starting at position 298 of SEQ ID NO: 585585
gcguacuuacguaggagau

SEQ ID NO: 651525 - RNA, 19 nt, Artificial Sequence
  Description of Artificial Sequence: Synthetic oligonucleotide
  Antisense strand to SEQ ID NO: 651524
aucuccuacguaaguacgc

SEQ ID NO: 651526 - RNA, 19 nt, Artificial Sequence
  Description of Artificial Sequence: Synthetic oligonucleotide
  Sense strand starting at position 361 of SEQ ID NO: 585585
aggaucgugauguaugcaa

SEQ ID NO: 651527 - RNA, 19 nt, Artificial Sequence
  Description of Artificial Sequence: Synthetic oligonucleotide
  Antisense strand to SEQ ID NO: 651526
uugcauacaucacgauccu

SEQ ID NO: 651528 - RNA, 19 nt, Artificial Sequence
  Description of Artificial Sequence: Synthetic oligonucleotide
  Sense strand starting at position 418 of SEQ ID NO: 585585
auauauacacgugaauagu

SEQ ID NO: 651529 - RNA, 19 nt, Artificial Sequence
  Description of Artificial Sequence: Synthetic oligonucleotide
  Antisense strand to SEQ ID NO: 651528
acuauucacguguauauau

SEQ ID NO: 651530 - RNA, 19 nt, Artificial Sequence
  Description of Artificial Sequence: Synthetic oligonucleotide
  Sense strand starting at position 421 of SEQ ID NO: 585585
uauacacgugaauaguaua

SEQ ID NO: 651531 - RNA, 19 nt, Artificial Sequence
  Description of Artificial Sequence: Synthetic oligonucleotide
  Antisense strand to SEQ ID NO: 651530
uauacuauucacguguaua

SEQ ID NO: 651532 - RNA, 19 nt, Artificial Sequence
  Description of Artificial Sequence: Synthetic oligonucleotide
  Sense strand starting at position 511 of SEQ ID NO: 585585
gauuaaagaguaugcaagu

SEQ ID NO: 651533 - RNA, 19 nt, Artificial Sequence
  Description of Artificial Sequence: Synthetic oligonucleotide
  Antisense strand to SEQ ID NO: 651532
acuugcauacucuuuaauc

SEQ ID NO: 651534 - RNA, 19 nt, Artificial Sequence
  Description of Artificial Sequence: Synthetic oligonucleotide
  Sense strand starting at position 554 of SEQ ID NO: 585585
uguaacuucgcuguauguu

SEQ ID NO: 651535 - RNA, 19 nt, Artificial Sequence
  Description of Artificial Sequence: Synthetic oligonucleotide
  Antisense strand to SEQ ID NO: 651534
aacauacagcgaaguuaca

SEQ ID NO: 651536 - RNA, 19 nt, Artificial Sequence
  Description of Artificial Sequence: Synthetic oligonucleotide
  Sense strand starting at position 890 of SEQ ID NO: 585585
aguaguacagcauaaguga

SEQ ID NO: 651537 - RNA, 19 nt, Artificial Sequence
  Description of Artificial Sequence: Synthetic oligonucleotide
  Antisense strand to SEQ ID NO: 651536
ucacuuaugcuguacuacu

SEQ ID NO: 651538 - RNA, 19 nt, Artificial Sequence
  Description of Artificial Sequence: Synthetic oligonucleotide
  Sense strand starting at position 962 of SEQ ID NO: 585585
ccaagacauucguuggaaa

SEQ ID NO: 651539 - RNA, 19 nt, Artificial Sequence
  Description of Artificial Sequence: Synthetic oligonucleotide
  Antisense strand to SEQ ID NO: 651538
uuuccaacgaaugucuugg

SEQ ID NO: 651540 - RNA, 19 nt, Artificial Sequence
  Description of Artificial Sequence: Synthetic oligonucleotide
  Sense strand starting at position 963 of SEQ ID NO: 585585
caagacauucguuggaaag

SEQ ID NO: 651541 - RNA, 19 nt, Artificial Sequence
  Description of Artificial Sequence: Synthetic oligonucleotide
  Antisense strand to SEQ ID NO: 651540
cuuuccaacgaaugucuug

SEQ ID NO: 651542 - RNA, 19 nt, Artificial Sequence
  Description of Artificial Sequence: Synthetic oligonucleotide
  Sense strand starting at position 964 of SEQ ID NO: 585585
aagacauucguuggaaaga

SEQ ID NO: 651543 - RNA, 19 nt, Artificial Sequence
  Description of Artificial Sequence: Synthetic oligonucleotide
  Antisense strand to SEQ ID NO: 651542
ucuuuccaacgaaugucuu

SEQ ID NO: 651544 - RNA, 19 nt, Artificial Sequence
  Description of Artificial Sequence: Synthetic oligonucleotide
  Sense strand starting at position 1015 of SEQ ID NO: 585585
gccuacuuucuggagguga

SEQ ID NO: 651545 - RNA, 19 nt, Artificial Sequence
  Description of Artificial Sequence: Synthetic oligonucleotide
  Antisense strand to SEQ ID NO: 651544
ucaccuccagaaaguaggc

SEQ ID NO: 651546 - RNA, 19 nt, Artificial Sequence
  Description of Artificial Sequence: Synthetic oligonucleotide
  Sense strand starting at position 1121 of SEQ ID NO: 585585
ccgcucgauuucuccacaa

SEQ ID NO: 651547 - RNA, 19 nt, Artificial Sequence
  Description of Artificial Sequence: Synthetic oligonucleotide
  Antisense strand to SEQ ID NO: 651546
uuguggagaaaucgagcgg

SEQ ID NO: 651548 - RNA, 19 nt, Artificial Sequence
  Description of Artificial Sequence: Synthetic oligonucleotide
  Sense strand starting at position 1237 of SEQ ID NO: 585585
gaacguuaaguggacuaga

SEQ ID NO: 651549 - RNA, 19 nt, Artificial Sequence
  Description of Artificial Sequence: Synthetic oligonucleotide
  Antisense strand to SEQ ID NO: 651548
ucuaguccacuuaacguuc

SEQ ID NO: 651550 - RNA, 19 nt, Artificial Sequence
  Description of Artificial Sequence: Synthetic oligonucleotide
  Sense strand starting at position 1240 of SEQ ID NO: 585585
cguuaaguggacuagagaa

SEQ ID NO: 651551 - RNA, 19 nt, Artificial Sequence
  Description of Artificial Sequence: Synthetic oligonucleotide
  Antisense strand to SEQ ID NO: 651550
uucucuaguccacuuaacg

SEQ ID NO: 651552 - RNA, 19 nt, Artificial Sequence
  Description of Artificial Sequence: Synthetic oligonucleotide
  Sense strand starting at position 1270 of SEQ ID NO: 585585
gaaugucuaggaggaguga

SEQ ID NO: 651553 - RNA, 19 nt, Artificial Sequence
  Description of Artificial Sequence: Synthetic oligonucleotide
  Antisense strand to SEQ ID NO: 651552
ucacuccuccuagacauuc

SEQ ID NO: 651554 - RNA, 19 nt, Artificial Sequence
  Description of Artificial Sequence: Synthetic oligonucleotide
  Sense strand starting at position 1344 of SEQ ID NO: 585585
augcguaugcccgccagaa

SEQ ID NO: 651555 - RNA, 19 nt, Artificial Sequence
  Description of Artificial Sequence: Synthetic oligonucleotide
  Antisense strand to SEQ ID NO: 651554
uucuggcgggcauacgcau

SEQ ID NO: 651556 - RNA, 19 nt, Artificial Sequence
  Description of Artificial Sequence: Synthetic oligonucleotide
  Sense strand starting at position 1345 of SEQ ID NO: 585585
ugcguaugcccgccagaaa

SEQ ID NO: 651557 - RNA, 19 nt, Artificial Sequence
  Description of Artificial Sequence: Synthetic oligonucleotide
  Antisense strand to SEQ ID NO: 651556
uuucuggcgggcauacgca

SEQ ID NO: 651558 - RNA, 19 nt, Artificial Sequence
  Description of Artificial Sequence: Synthetic oligonucleotide
  Sense strand starting at position 1711 of SEQ ID NO: 585585
gguuugagucuggaagggu

SEQ ID NO: 651559 - RNA, 19 nt, Artificial Sequence
  Description of Artificial Sequence: Synthetic oligonucleotide
  Antisense strand to SEQ ID NO: 651558
acccuuccagacucaaacc

SEQ ID NO: 651560 - RNA, 19 nt, Artificial Sequence
  Description of Artificial Sequence: Synthetic oligonucleotide
  Sense strand starting at position 1814 of SEQ ID NO: 585585
auucuugacccucagagua

SEQ ID NO: 651561 - RNA, 19 nt, Artificial Sequence
  Description of Artificial Sequence: Synthetic oligonucleotide
  Antisense strand to SEQ ID NO: 651560
uacucugagggucaagaau

SEQ ID NO: 651562 - RNA, 19 nt, Artificial Sequence
  Description of Artificial Sequence: Synthetic oligonucleotide
  Sense strand starting at position 2148 of SEQ ID NO: 585585
gucagugacagggaucagu

SEQ ID NO: 651563 - RNA, 19 nt, Artificial Sequence
  Description of Artificial Sequence: Synthetic oligonucleotide
  Antisense strand to SEQ ID NO: 651562
acugaucccugucacugac

SEQ ID NO: 651564 - RNA, 19 nt, Artificial Sequence
  Description of Artificial Sequence: Synthetic oligonucleotide
  Sense strand starting at position 2543 of SEQ ID NO: 585585
caaggaaaguccucggauc

SEQ ID NO: 651565 - RNA, 19 nt, Artificial Sequence
  Description of Artificial Sequence: Synthetic oligonucleotide
  Antisense strand to SEQ ID NO: 651564
gauccgaggacuuuccuug

SEQ ID NO: 651566 - RNA, 19 nt, Artificial Sequence
  Description of Artificial Sequence: Synthetic oligonucleotide
  Sense strand starting at position 2545 of SEQ ID NO: 585585
aggaaaguccucggaucca

SEQ ID NO: 651567 - RNA, 19 nt, Artificial Sequence
  Description of Artificial Sequence: Synthetic oligonucleotide
  Antisense strand to SEQ ID NO: 651566
uggauccgaggacuuuccu

SEQ ID NO: 651568 - RNA, 19 nt, Artificial Sequence
  Description of Artificial Sequence: Synthetic oligonucleotide
  Sense strand starting at position 2556 of SEQ ID NO: 585585
cggauccaacuucgaauua

SEQ ID NO: 651569 - RNA, 19 nt, Artificial Sequence
  Description of Artificial Sequence: Synthetic oligonucleotide
  Antisense strand to SEQ ID NO: 651568
uaauucgaaguuggauccg

SEQ ID NO: 651570 - RNA, 19 nt, Artificial Sequence
  Description of Artificial Sequence: Synthetic oligonucleotide
  Sense strand starting at position 2912 of SEQ ID NO: 585585
cguauucuaaccgaaagau

SEQ ID NO: 651571 - RNA, 19 nt, Artificial Sequence
  Description of Artificial Sequence: Synthetic oligonucleotide
  Antisense strand to SEQ ID NO: 651570
aucuuucgguuagaauacg

SEQ ID NO: 651572 - RNA, 19 nt, Artificial Sequence
  Description of Artificial Sequence: Synthetic oligonucleotide
  Sense strand starting at position 2924 of SEQ ID NO: 585585
gaaagauuacaccgucuaa

SEQ ID NO: 651573 - RNA, 19 nt, Artificial Sequence
  Description of Artificial Sequence: Synthetic oligonucleotide
  Antisense strand to SEQ ID NO: 651572
uuagacgguguaaucuuuc

SEQ ID NO: 651574 - RNA, 19 nt, Artificial Sequence
  Description of Artificial Sequence: Synthetic oligonucleotide
  Sense strand starting at position 2968 of SEQ ID NO: 585585
cuccuuauugcugagagga

SEQ ID NO: 651575 - RNA, 19 nt, Artificial Sequence
  Description of Artificial Sequence: Synthetic oligonucleotide
  Antisense strand to SEQ ID NO: 651574
uccucucagcaauaaggag

SEQ ID NO: 651576 - RNA, 19 nt, Artificial Sequence
  Description of Artificial Sequence: Synthetic oligonucleotide
  Sense strand starting at position 3511 of SEQ ID NO: 585585
uuaaaugagcaucaugcau

SEQ ID NO: 651577 - RNA, 19 nt, Artificial Sequence
  Description of Artificial Sequence: Synthetic oligonucleotide
  Antisense strand to SEQ ID NO: 651576
augcaugaugcucauuuaa

SEQ ID NO: 651578 - RNA, 19 nt, Artificial Sequence
  Description of Artificial Sequence: Synthetic oligonucleotide
  Sense strand starting at position 3568 of SEQ ID NO: 585585
ggacuuaaagaguaguugu

SEQ ID NO: 651579 - RNA, 19 nt, Artificial Sequence
  Description of Artificial Sequence: Synthetic oligonucleotide
  Antisense strand to SEQ ID NO: 651578
acaacuacucuuuaagucc

SEQ ID NO: 651580 - RNA, 19 nt, Artificial Sequence
  Description of Artificial Sequence: Synthetic oligonucleotide
  Sense strand starting at position 3688 of SEQ ID NO: 585585
ucaguuuagguguaacuuu

SEQ ID NO: 651581 - RNA, 19 nt, Artificial Sequence
  Description of Artificial Sequence: Synthetic oligonucleotide
  Antisense strand to SEQ ID NO: 651580
aaaguuacaccuaaacuga

SEQ ID NO: 651582 - RNA, 19 nt, Artificial Sequence
  Description of Artificial Sequence: Synthetic oligonucleotide
  Sense strand starting at position 3728 of SEQ ID NO: 585585
caugaauugugauuauaag

SEQ ID NO: 651583 - RNA, 19 nt, Artificial Sequence
  Description of Artificial Sequence: Synthetic oligonucleotide
  Antisense strand to SEQ ID NO: 651582
cuuauaaucacaauucaug

SEQ ID NO: 651584 - RNA, 19 nt, Artificial Sequence
  Description of Artificial Sequence: Synthetic oligonucleotide
  Sense strand starting at position 3757 of SEQ ID NO: 585585
agucuaugcccuuaaagua

SEQ ID NO: 651585 - RNA, 19 nt, Artificial Sequence
  Description of Artificial Sequence: Synthetic oligonucleotide
  Antisense strand to SEQ ID NO: 651584
uacuuuaagggcauagacu

SEQ ID NO: 651586 - RNA, 19 nt, Artificial Sequence
  Description of Artificial Sequence: Synthetic oligonucleotide
  Sense strand starting at position 3811 of SEQ ID NO: 585585
agauaaacucuuggcaaca

SEQ ID NO: 651587 - RNA, 19 nt, Artificial Sequence
  Description of Artificial Sequence: Synthetic oligonucleotide
  Antisense strand to SEQ ID NO: 651586
uguugccaagaguuuaucu

SEQ ID NO: 651588 - RNA, 19 nt, Artificial Sequence
  Description of Artificial Sequence: Synthetic oligonucleotide
  Sense strand starting at position 3950 of SEQ ID NO: 585585
gagcuucuggguuauccaa

SEQ ID NO: 651589 - RNA, 19 nt, Artificial Sequence
  Description of Artificial Sequence: Synthetic oligonucleotide
  Antisense strand to SEQ ID NO: 651588
uuggauaacccagaagcuc

SEQ ID NO: 651590 - RNA, 19 nt, Artificial Sequence
  Description of Artificial Sequence: Synthetic oligonucleotide
  Sense strand starting at position 3957 of SEQ ID NO: 585585
uggguuauccaaggugaaa

SEQ ID NO: 651591 - RNA, 19 nt, Artificial Sequence
  Description of Artificial Sequence: Synthetic oligonucleotide
  Antisense strand to SEQ ID NO: 651590
uuucaccuuggauaaccca

SEQ ID NO: 651592 - RNA, 19 nt, Artificial Sequence
  Description of Artificial Sequence: Synthetic oligonucleotide
  Sense strand starting at position 3959 of SEQ ID NO: 585585
gguuauccaaggugaaaga

SEQ ID NO: 651593 - RNA, 19 nt, Artificial Sequence
  Description of Artificial Sequence: Synthetic oligonucleotide
  Antisense strand to SEQ ID NO: 651592
ucuuucaccuuggauaacc

SEQ ID NO: 651594 - RNA, 19 nt, Artificial Sequence
  Description of Artificial Sequence: Synthetic oligonucleotide
  Sense strand starting at position 56 of SEQ ID NO: 585586
aguagcacugaucauaguu

SEQ ID NO: 651595 - RNA, 19 nt, Artificial Sequence
  Description of Artificial Sequence: Synthetic oligonucleotide
  Antisense strand to SEQ ID NO: 651594
aacuaugaucagugcuacu

SEQ ID NO: 651596 - RNA, 19 nt, Artificial Sequence
  Description of Artificial Sequence: Synthetic oligonucleotide
  Sense strand starting at position 108 of SEQ ID NO: 585586
cuagucuuacuuuauaugu

SEQ ID NO: 651597 - RNA, 19 nt, Artificial Sequence
  Description of Artificial Sequence: Synthetic oligonucleotide
  Antisense strand to SEQ ID NO: 651596
acauauaaaguaagacuag

SEQ ID NO: 651598 - RNA, 19 nt, Artificial Sequence
  Description of Artificial Sequence: Synthetic oligonucleotide
  Sense strand starting at position 114 of SEQ ID NO: 585586
uuacuuuauauguggagga

SEQ ID NO: 651599 - RNA, 19 nt, Artificial Sequence
  Description of Artificial Sequence: Synthetic oligonucleotide
  Antisense strand to SEQ ID NO: 651598
uccuccacauauaaaguaa

SEQ ID NO: 651600 - RNA, 19 nt, Artificial Sequence
  Description of Artificial Sequence: Synthetic oligonucleotide
  Sense strand starting at position 118 of SEQ ID NO: 585586
uuuauauguggaggauuac

SEQ ID NO: 651601 - RNA, 19 nt, Artificial Sequence
  Description of Artificial Sequence: Synthetic oligonucleotide
  Antisense strand to SEQ ID NO: 651600
guaauccuccacauauaaa

SEQ ID NO: 651602 - RNA, 19 nt, Artificial Sequence
  Description of Artificial Sequence: Synthetic oligonucleotide
  Sense strand starting at position 124 of SEQ ID NO: 585586
uguggaggauuacugcaua

SEQ ID NO: 651603 - RNA, 19 nt, Artificial Sequence
  Description of Artificial Sequence: Synthetic oligonucleotide
  Antisense strand to SEQ ID NO: 651602
uaugcaguaauccuccaca

SEQ ID NO: 651604 - RNA, 19 nt, Artificial Sequence
  Description of Artificial Sequence: Synthetic oligonucleotide
  Sense strand starting at position 129 of SEQ ID NO: 585586
aggauuacugcauauacuu

SEQ ID NO: 651605 - RNA, 19 nt, Artificial Sequence
  Description of Artificial Sequence: Synthetic oligonucleotide
  Antisense strand to SEQ ID NO: 651604
aaguauaugcaguaauccu

SEQ ID NO: 651606 - RNA, 19 nt, Artificial Sequence
  Description of Artificial Sequence: Synthetic oligonucleotide
  Sense strand starting at position 159 of SEQ ID NO: 585586
uagucuuuggaguagggua

SEQ ID NO: 651607 - RNA, 19 nt, Artificial Sequence
  Description of Artificial Sequence: Synthetic oligonucleotide
  Antisense strand to SEQ ID NO: 651606
uacccuacuccaaagacua

SEQ ID NO: 651608 - RNA, 19 nt, Artificial Sequence
  Description of Artificial Sequence: Synthetic oligonucleotide
  Sense strand starting at position 161 of SEQ ID NO: 585586
gucuuuggaguaggguaua

SEQ ID NO: 651609 - RNA, 19 nt, Artificial Sequence
  Description of Artificial Sequence: Synthetic oligonucleotide
  Antisense strand to SEQ ID NO: 651608
uauacccuacuccaaagac

SEQ ID NO: 651610 - RNA, 19 nt, Artificial Sequence
  Description of Artificial Sequence: Synthetic oligonucleotide
  Sense strand starting at position 164 of SEQ ID NO: 585586
uuuggaguaggguauaauu

SEQ ID NO: 651611 - RNA, 19 nt, Artificial Sequence
  Description of Artificial Sequence: Synthetic oligonucleotide
  Antisense strand to SEQ ID NO: 651610
aauuauacccuacuccaaa

SEQ ID NO: 651612 - RNA, 19 nt, Artificial Sequence
  Description of Artificial Sequence: Synthetic oligonucleotide
  Sense strand starting at position 172 of SEQ ID NO: 585586
aggguauaauuaucaaagu

SEQ ID NO: 651613 - RNA, 19 nt, Artificial Sequence
  Description of Artificial Sequence: Synthetic oligonucleotide
  Antisense strand to SEQ ID NO: 651612
acuuugauaauuauacccu

SEQ ID NO: 651614 - RNA, 19 nt, Artificial Sequence
  Description of Artificial Sequence: Synthetic oligonucleotide
  Sense strand starting at position 640 of SEQ ID NO: 585586
uauuaaacccgguagguaa

SEQ ID NO: 651615 - RNA, 19 nt, Artificial Sequence
  Description of Artificial Sequence: Synthetic oligonucleotide
  Antisense strand to SEQ ID NO: 651614
uuaccuaccggguuuaaua

SEQ ID NO: 651616 - RNA, 19 nt, Artificial Sequence
  Description of Artificial Sequence: Synthetic oligonucleotide
  Sense strand starting at position 779 of SEQ ID NO: 585586
ggcuucccacugugaaaga

SEQ ID NO: 651617 - RNA, 19 nt, Artificial Sequence
  Description of Artificial Sequence: Synthetic oligonucleotide
  Antisense strand to SEQ ID NO: 651616
ucuuucacagugggaagcc

SEQ ID NO: 651618 - RNA, 19 nt, Artificial Sequence
  Description of Artificial Sequence: Synthetic oligonucleotide
  Sense strand starting at position 895 of SEQ ID NO: 585586
accugcuagguacauuaaa

SEQ ID NO: 651619 - RNA, 19 nt, Artificial Sequence
  Description of Artificial Sequence: Synthetic oligonucleotide
  Antisense strand to SEQ ID NO: 651618
uuuaauguaccuagcaggu

SEQ ID NO: 651620 - RNA, 19 nt, Artificial Sequence
  Description of Artificial Sequence: Synthetic oligonucleotide
  Sense strand starting at position 1058 of SEQ ID NO: 585586
uagccugaccgguaaagua

SEQ ID NO: 651621 - RNA, 19 nt, Artificial Sequence
  Description of Artificial Sequence: Synthetic oligonucleotide
  Antisense strand to SEQ ID NO: 651620
uacuuuaccggucaggcua

SEQ ID NO: 651622 - RNA, 19 nt, Artificial Sequence
  Description of Artificial Sequence: Synthetic oligonucleotide
  Sense strand starting at position 1152 of SEQ ID NO: 585586
gcuauaucaaguugaacga

SEQ ID NO: 651623 - RNA, 19 nt, Artificial Sequence
  Description of Artificial Sequence: Synthetic oligonucleotide
  Antisense strand to SEQ ID NO: 651622
ucguucaacuugauauagc

SEQ ID NO: 651624 - RNA, 19 nt, Artificial Sequence
  Description of Artificial Sequence: Synthetic oligonucleotide
  Sense strand starting at position 1303 of SEQ ID NO: 585586
acuugcaaugcuugaaaua

SEQ ID NO: 651625 - RNA, 19 nt, Artificial Sequence
  Description of Artificial Sequence: Synthetic oligonucleotide
  Antisense strand to SEQ ID NO: 651624
uauuucaagcauugcaagu

SEQ ID NO: 651626 - RNA, 19 nt, Artificial Sequence
  Description of Artificial Sequence: Synthetic oligonucleotide
  Sense strand starting at position 1304 of SEQ ID NO: 585586
cuugcaaugcuugaaauaa

SEQ ID NO: 651627 - RNA, 19 nt, Artificial Sequence
  Description of Artificial Sequence: Synthetic oligonucleotide
  Antisense strand to SEQ ID NO: 651626
uuauuucaagcauugcaag

SEQ ID NO: 651628 - RNA, 19 nt, Artificial Sequence
  Description of Artificial Sequence: Synthetic oligonucleotide
  Sense strand starting at position 1314 of SEQ ID NO: 585586
uugaaauaaucuuucguac

SEQ ID NO: 651629 - RNA, 19 nt, Artificial Sequence
  Description of Artificial Sequence: Synthetic oligonucleotide
  Antisense strand to SEQ ID NO: 651628
guacgaaagauuauuucaa

SEQ ID NO: 651630 - RNA, 19 nt, Artificial Sequence
  Description of Artificial Sequence: Synthetic oligonucleotide
  Sense strand starting at position 1733 of SEQ ID NO: 585586
cgaugaugucgaaggcgau

SEQ ID NO: 651631 - RNA, 19 nt, Artificial Sequence
  Description of Artificial Sequence: Synthetic oligonucleotide
  Antisense strand to SEQ ID NO: 651630
aucgccuucgacaucaucg

SEQ ID NO: 651632 - RNA, 19 nt, Artificial Sequence
  Description of Artificial Sequence: Synthetic oligonucleotide
  Sense strand starting at position 2252 of SEQ ID NO: 585586
ucagcagugccauaucuga

SEQ ID NO: 651633 - RNA, 19 nt, Artificial Sequence
  Description of Artificial Sequence: Synthetic oligonucleotide
  Antisense strand to SEQ ID NO: 651632
ucagauauggcacugcuga

SEQ ID NO: 651634 - RNA, 19 nt, Artificial Sequence
  Description of Artificial Sequence: Synthetic oligonucleotide
  Sense strand starting at position 2284 of SEQ ID NO: 585586
ugagauggguguucuaauu

SEQ ID NO: 651635 - RNA, 19 nt, Artificial Sequence
  Description of Artificial Sequence: Synthetic oligonucleotide
  Antisense strand to SEQ ID NO: 651634
aauuagaacacccaucuca

SEQ ID NO: 651636 - RNA, 19 nt, Artificial Sequence
  Description of Artificial Sequence: Synthetic oligonucleotide
  Sense strand starting at position 2502 of SEQ ID NO: 585586
ugcugaauuuaucugugua

SEQ ID NO: 651637 - RNA, 19 nt, Artificial Sequence
  Description of Artificial Sequence: Synthetic oligonucleotide
  Antisense strand to SEQ ID NO: 651636
uacacagauaaauucagca

SEQ ID NO: 651638 - RNA, 19 nt, Artificial Sequence
  Description of Artificial Sequence: Synthetic oligonucleotide
  Sense strand starting at position 2560 of SEQ ID NO: 585586
cucagugaauuugaugaau

SEQ ID NO: 651639 - RNA, 19 nt, Artificial Sequence
  Description of Artificial Sequence: Synthetic oligonucleotide
  Antisense strand to SEQ ID NO: 651638
auucaucaaauucacugag

SEQ ID NO: 651640 - RNA, 19 nt, Artificial Sequence
  Description of Artificial Sequence: Synthetic oligonucleotide
  Sense strand starting at position 2562 of SEQ ID NO: 585586
cagugaauuugaugaauga

SEQ ID NO: 651641 - RNA, 19 nt, Artificial Sequence
  Description of Artificial Sequence: Synthetic oligonucleotide
  Antisense strand to SEQ ID NO: 651640
ucauucaucaaauucacug

SEQ ID NO: 651642 - RNA, 19 nt, Artificial Sequence
  Description of Artificial Sequence: Synthetic oligonucleotide
  Sense strand starting at position 2599 of SEQ ID NO: 585586
gcucgcuuccuuucggaaa

SEQ ID NO: 651643 - RNA, 19 nt, Artificial Sequence
  Description of Artificial Sequence: Synthetic oligonucleotide
  Antisense strand to SEQ ID NO: 651642
uuuccgaaaggaagcgagc

SEQ ID NO: 651644 - RNA, 19 nt, Artificial Sequence
  Description of Artificial Sequence: Synthetic oligonucleotide
  Sense strand starting at position 2881 of SEQ ID NO: 585586
aggaguucucagugucagg

SEQ ID NO: 651645 - RNA, 19 nt, Artificial Sequence
  Description of Artificial Sequence: Synthetic oligonucleotide
  Antisense strand to SEQ ID NO: 651644
ccugacacugagaacuccu

SEQ ID NO: 651646 - RNA, 19 nt, Artificial Sequence
  Description of Artificial Sequence: Synthetic oligonucleotide
  Sense strand starting at position 3105 of SEQ ID NO: 585586
gcaauucuugaggacgaau

SEQ ID NO: 651647 - RNA, 19 nt, Artificial Sequence
  Description of Artificial Sequence: Synthetic oligonucleotide
  Antisense strand to SEQ ID NO: 651646
auucguccucaagaauugc

SEQ ID NO: 651648 - RNA, 19 nt, Artificial Sequence
  Description of Artificial Sequence: Synthetic oligonucleotide
  Sense strand starting at position 3289 of SEQ ID NO: 585586
guggaagcugugugaagaa

SEQ ID NO: 651649 - RNA, 19 nt, Artificial Sequence
  Description of Artificial Sequence: Synthetic oligonucleotide
  Antisense strand to SEQ ID NO: 651648
uucuucacacagcuuccac

SEQ ID NO: 651650 - RNA, 19 nt, Artificial Sequence
  Description of Artificial Sequence: Synthetic oligonucleotide
  Sense strand starting at position 3460 of SEQ ID NO: 585586
gcaucuuaauaucucugga

SEQ ID NO: 651651 - RNA, 19 nt, Artificial Sequence
  Description of Artificial Sequence: Synthetic oligonucleotide
  Antisense strand to SEQ ID NO: 651650
uccagagauauuaagaugc

SEQ ID NO: 651652 - RNA, 19 nt, Artificial Sequence
  Description of Artificial Sequence: Synthetic oligonucleotide
  Sense strand starting at position 3530 of SEQ ID NO: 585586
uuccgaugggcuugaggaa

SEQ ID NO: 651653 - RNA, 19 nt, Artificial Sequence
  Description of Artificial Sequence: Synthetic oligonucleotide
  Antisense strand to SEQ ID NO: 651652
uuccucaagcccaucggaa

SEQ ID NO: 651654 - RNA, 19 nt, Artificial Sequence
  Description of Artificial Sequence: Synthetic oligonucleotide
  Sense strand starting at position 3554 of SEQ ID NO: 585586
cucauuaaugccgagguga

SEQ ID NO: 651655 - RNA, 19 nt, Artificial Sequence
  Description of Artificial Sequence: Synthetic oligonucleotide
  Antisense strand to SEQ ID NO: 651654
ucaccucggcauuaaugag

SEQ ID NO: 651656 - RNA, 19 nt, Artificial Sequence
  Description of Artificial Sequence: Synthetic oligonucleotide
  Sense strand starting at position 3625 of SEQ ID NO: 585586
guggguuuccaacaauaau

SEQ ID NO: 651657 - RNA, 19 nt, Artificial Sequence
  Description of Artificial Sequence: Synthetic oligonucleotide
  Antisense strand to SEQ ID NO: 651656
auuauuguuggaaacccac

SEQ ID NO: 651658 - RNA, 19 nt, Artificial Sequence
  Description of Artificial Sequence: Synthetic oligonucleotide
  Sense strand starting at position 3818 of SEQ ID NO: 585586
aucuaaagugcucaagaua

SEQ ID NO: 651659 - RNA, 19 nt, Artificial Sequence
  Description of Artificial Sequence: Synthetic oligonucleotide
  Antisense strand to SEQ ID NO: 651658
uaucuugagcacuuuagau

SEQ ID NO: 651660 - RNA, 19 nt, Artificial Sequence
  Description of Artificial Sequence: Synthetic oligonucleotide
  Sense strand starting at position 3821 of SEQ ID NO: 585586
uaaagugcucaagauaguu

SEQ ID NO: 651661 - RNA, 19 nt, Artificial Sequence
  Description of Artificial Sequence: Synthetic oligonucleotide
  Antisense strand to SEQ ID NO: 651660
aacuaucuugagcacuuua

SEQ ID NO: 651662 - RNA, 19 nt, Artificial Sequence
  Description of Artificial Sequence: Synthetic oligonucleotide
  Sense strand starting at position 3829 of SEQ ID NO: 585586
ucaagauaguuccugcaua

SEQ ID NO: 651663 - RNA, 19 nt, Artificial Sequence
  Description of Artificial Sequence: Synthetic oligonucleotide
  Antisense strand to SEQ ID NO: 651662
uaugcaggaacuaucuuga

SEQ ID NO: 651664 - RNA, 19 nt, Artificial Sequence
  Description of Artificial Sequence: Synthetic oligonucleotide
  Sense strand starting at position 3843 of SEQ ID NO: 585586
gcauauaguaaggguugau

SEQ ID NO: 651665 - RNA, 19 nt, Artificial Sequence
  Description of Artificial Sequence: Synthetic oligonucleotide
  Antisense strand to SEQ ID NO: 651664
aucaacccuuacuauaugc

SEQ ID NO: 651666 - RNA, 19 nt, Artificial Sequence
  Description of Artificial Sequence: Synthetic oligonucleotide
  Sense strand starting at position 3846 of SEQ ID NO: 585586
uauaguaaggguugaugau

SEQ ID NO: 651667 - RNA, 19 nt, Artificial Sequence
  Description of Artificial Sequence: Synthetic oligonucleotide
  Antisense strand to SEQ ID NO: 651666
aucaucaacccuuacuaua

SEQ ID NO: 651668 - RNA, 19 nt, Artificial Sequence
  Description of Artificial Sequence: Synthetic oligonucleotide
  Sense strand starting at position 3960 of SEQ ID NO: 585586
aacuguaagugacuaaguu

SEQ ID NO: 651669 - RNA, 19 nt, Artificial Sequence
  Description of Artificial Sequence: Synthetic oligonucleotide
  Antisense strand to SEQ ID NO: 651668
aacuuagucacuuacaguu

SEQ ID NO: 651670 - RNA, 19 nt, Artificial Sequence
  Description of Artificial Sequence: Synthetic oligonucleotide
  Sense strand starting at position 3961 of SEQ ID NO: 585586
acuguaagugacuaaguua

SEQ ID NO: 651671 - RNA, 19 nt, Artificial Sequence
  Description of Artificial Sequence: Synthetic oligonucleotide
  Antisense strand to SEQ ID NO: 651670
uaacuuagucacuuacagu

SEQ ID NO: 651672 - RNA, 19 nt, Artificial Sequence
  Description of Artificial Sequence: Synthetic oligonucleotide
  Sense strand starting at position 3973 of SEQ ID NO: 585586
uaaguuauuugagacaaug

SEQ ID NO: 651673 - RNA, 19 nt, Artificial Sequence
  Description of Artificial Sequence: Synthetic oligonucleotide
  Antisense strand to SEQ ID NO: 651672
cauugucucaaauaacuua

SEQ ID NO: 651674 - RNA, 19 nt, Artificial Sequence
  Description of Artificial Sequence: Synthetic oligonucleotide
  Sense strand starting at position 2 of SEQ ID NO: 585587
uguagaacuuucucccuga

SEQ ID NO: 651675 - RNA, 19 nt, Artificial Sequence
  Description of Artificial Sequence: Synthetic oligonucleotide
  Antisense strand to SEQ ID NO: 651674
ucagggagaaaguucuaca

SEQ ID NO: 651676 - RNA, 19 nt, Artificial Sequence
  Description of Artificial Sequence: Synthetic oligonucleotide
  Sense strand starting at position 3 of SEQ ID NO: 585587
guagaacuuucucccugaa

SEQ ID NO: 651677 - RNA, 19 nt, Artificial Sequence
  Description of Artificial Sequence: Synthetic oligonucleotide
  Antisense strand to SEQ ID NO: 651676
uucagggagaaaguucuac

SEQ ID NO: 651678 - RNA, 19 nt, Artificial Sequence
  Description of Artificial Sequence: Synthetic oligonucleotide
  Sense strand starting at position 259 of SEQ ID NO: 585587
acuacaaaguuguuccaua

SEQ ID NO: 651679 - RNA, 19 nt, Artificial Sequence
  Description of Artificial Sequence: Synthetic oligonucleotide
  Antisense strand to SEQ ID NO: 651678
uauggaacaacuuuguagu

SEQ ID NO: 651680 - RNA, 19 nt, Artificial Sequence
  Description of Artificial Sequence: Synthetic oligonucleotide
  Sense strand starting at position 260 of SEQ ID NO: 585587
cuacaaaguuguuccauaa

SEQ ID NO: 651681 - RNA, 19 nt, Artificial Sequence
  Description of Artificial Sequence: Synthetic oligonucleotide
  Antisense strand to SEQ ID NO: 651680
uuauggaacaacuuuguag

SEQ ID NO: 651682 - RNA, 19 nt, Artificial Sequence
  Description of Artificial Sequence: Synthetic oligonucleotide
  Sense strand starting at position 282 of SEQ ID NO: 585587
gaaggaguauuccuucuga

SEQ ID NO: 651683 - RNA, 19 nt, Artificial Sequence
  Description of Artificial Sequence: Synthetic oligonucleotide
  Antisense strand to SEQ ID NO: 651682
ucagaaggaauacuccuuc

SEQ ID NO: 651684 - RNA, 19 nt, Artificial Sequence
  Description of Artificial Sequence: Synthetic oligonucleotide
  Sense strand starting at position 295 of SEQ ID NO: 585587
uucugagaucgcuaaagag

SEQ ID NO: 651685 - RNA, 19 nt, Artificial Sequence
  Description of Artificial Sequence: Synthetic oligonucleotide
  Antisense strand to SEQ ID NO: 651684
cucuuuagcgaucucagaa

SEQ ID NO: 651686 - RNA, 19 nt, Artificial Sequence
  Description of Artificial Sequence: Synthetic oligonucleotide
  Sense strand starting at position 435 of SEQ ID NO: 585587
uuagauacuagcgacugaa

SEQ ID NO: 651687 - RNA, 19 nt, Artificial Sequence
  Description of Artificial Sequence: Synthetic oligonucleotide
  Antisense strand to SEQ ID NO: 651686
uucagucgcuaguaucuaa

SEQ ID NO: 651688 - RNA, 19 nt, Artificial Sequence
  Description of Artificial Sequence: Synthetic oligonucleotide
  Sense strand starting at position 438 of SEQ ID NO: 585587
gauacuagcgacugaagau

SEQ ID NO: 651689 - RNA, 19 nt, Artificial Sequence
  Description of Artificial Sequence: Synthetic oligonucleotide
  Antisense strand to SEQ ID NO: 651688
aucuucagucgcuaguauc

SEQ ID NO: 651690 - RNA, 19 nt, Artificial Sequence
  Description of Artificial Sequence: Synthetic oligonucleotide
  Sense strand starting at position 483 of SEQ ID NO: 585587
ggauuucucgaagguguuc

SEQ ID NO: 651691 - RNA, 19 nt, Artificial Sequence
  Description of Artificial Sequence: Synthetic oligonucleotide
  Antisense strand to SEQ ID NO: 651690
gaacaccuucgagaaaucc

SEQ ID NO: 651692 - RNA, 19 nt, Artificial Sequence
  Description of Artificial Sequence: Synthetic oligonucleotide
  Sense strand starting at position 518 of SEQ ID NO: 585587
uauuauugaugugugauag

SEQ ID NO: 651693 - RNA, 19 nt, Artificial Sequence
  Description of Artificial Sequence: Synthetic oligonucleotide
  Antisense strand to SEQ ID NO: 651692
cuaucacacaucaauaaua

SEQ ID NO: 651694 - RNA, 19 nt, Artificial Sequence
  Description of Artificial Sequence: Synthetic oligonucleotide
  Sense strand starting at position 519 of SEQ ID NO: 585587
auuauugaugugugauaga

SEQ ID NO: 651695 - RNA, 19 nt, Artificial Sequence
  Description of Artificial Sequence: Synthetic oligonucleotide
  Antisense strand to SEQ ID NO: 651694
ucuaucacacaucaauaau

SEQ ID NO: 651696 - RNA, 19 nt, Artificial Sequence
  Description of Artificial Sequence: Synthetic oligonucleotide
  Sense strand starting at position 524 of SEQ ID NO: 585587
ugaugugugauagaccuca

SEQ ID NO: 651697 - RNA, 19 nt, Artificial Sequence
  Description of Artificial Sequence: Synthetic oligonucleotide
  Antisense strand to SEQ ID NO: 651696
ugaggucuaucacacauca

SEQ ID NO: 651698 - RNA, 19 nt, Artificial Sequence
  Description of Artificial Sequence: Synthetic oligonucleotide
  Sense strand starting at position 755 of SEQ ID NO: 585587
gggaaacucuguucuugau

SEQ ID NO: 651699 - RNA, 19 nt, Artificial Sequence
  Description of Artificial Sequence: Synthetic oligonucleotide
  Antisense strand to SEQ ID NO: 651698
aucaagaacagaguuuccc

SEQ ID NO: 651700 - RNA, 19 nt, Artificial Sequence
  Description of Artificial Sequence: Synthetic oligonucleotide
  Sense strand starting at position 787 of SEQ ID NO: 585587
guaaacauagcauguaaua

SEQ ID NO: 651701 - RNA, 19 nt, Artificial Sequence
  Description of Artificial Sequence: Synthetic oligonucleotide
  Antisense strand to SEQ ID NO: 651700
uauuacaugcuauguuuac

SEQ ID NO: 651702 - RNA, 19 nt, Artificial Sequence
  Description of Artificial Sequence: Synthetic oligonucleotide
  Sense strand starting at position 796 of SEQ ID NO: 585587
gcauguaauaagugaugag

SEQ ID NO: 651703 - RNA, 19 nt, Artificial Sequence
  Description of Artificial Sequence: Synthetic oligonucleotide
  Antisense strand to SEQ ID NO: 651702
cucaucacuuauuacaugc

SEQ ID NO: 651704 - RNA, 19 nt, Artificial Sequence
  Description of Artificial Sequence: Synthetic oligonucleotide
  Sense strand starting at position 924 of SEQ ID NO: 585587
uuaucacaugagcauugua

SEQ ID NO: 651705 - RNA, 19 nt, Artificial Sequence
  Description of Artificial Sequence: Synthetic oligonucleotide
  Antisense strand to SEQ ID NO: 651704
uacaaugcucaugugauaa

SEQ ID NO: 651706 - RNA, 19 nt, Artificial Sequence
  Description of Artificial Sequence: Synthetic oligonucleotide
  Sense strand starting at position 931 of SEQ ID NO: 585587
augagcauuguaugaggga

SEQ ID NO: 651707 - RNA, 19 nt, Artificial Sequence
  Description of Artificial Sequence: Synthetic oligonucleotide
  Antisense strand to SEQ ID NO: 651706
ucccucauacaaugcucau

SEQ ID NO: 651708 - RNA, 19 nt, Artificial Sequence
  Description of Artificial Sequence: Synthetic oligonucleotide
  Sense strand starting at position 1012 of SEQ ID NO: 585587
uuaugucagcuagauuaca

SEQ ID NO: 651709 - RNA, 19 nt, Artificial Sequence
  Description of Artificial Sequence: Synthetic oligonucleotide
  Antisense strand to SEQ ID NO: 651708
uguaaucuagcugacauaa

SEQ ID NO: 651710 - RNA, 19 nt, Artificial Sequence
  Description of Artificial Sequence: Synthetic oligonucleotide
  Sense strand starting at position 1032 of SEQ ID NO: 585587
ugaucccaaccuugaagau

SEQ ID NO: 651711 - RNA, 19 nt, Artificial Sequence
  Description of Artificial Sequence: Synthetic oligonucleotide
  Antisense strand to SEQ ID NO: 651710
aucuucaagguugggauca

SEQ ID NO: 651712 - RNA, 19 nt, Artificial Sequence
  Description of Artificial Sequence: Synthetic oligonucleotide
  Sense strand starting at position 1242 of SEQ ID NO: 585587
auagguaacuucccuagau

SEQ ID NO: 651713 - RNA, 19 nt, Artificial Sequence
  Description of Artificial Sequence: Synthetic oligonucleotide
  Antisense strand to SEQ ID NO: 651712
aucuagggaaguuaccuau

SEQ ID NO: 651714 - RNA, 19 nt, Artificial Sequence
  Description of Artificial Sequence: Synthetic oligonucleotide
  Sense strand starting at position 1365 of SEQ ID NO: 585587
agagaauggugccuugaaa

SEQ ID NO: 651715 - RNA, 19 nt, Artificial Sequence
  Description of Artificial Sequence: Synthetic oligonucleotide
  Antisense strand to SEQ ID NO: 651714
uuucaaggcaccauucucu

SEQ ID NO: 651716 - RNA, 19 nt, Artificial Sequence
  Description of Artificial Sequence: Synthetic oligonucleotide
  Sense strand starting at position 1397 of SEQ ID NO: 585587
ugugaugaguucuccaaag

SEQ ID NO: 651717 - RNA, 19 nt, Artificial Sequence
  Description of Artificial Sequence: Synthetic oligonucleotide
  Antisense strand to SEQ ID NO: 651716
cuuuggagaacucaucaca

SEQ ID NO: 651718 - RNA, 19 nt, Artificial Sequence
  Description of Artificial Sequence: Synthetic oligonucleotide
  Sense strand starting at position 1399 of SEQ ID NO: 585587
ugaugaguucuccaaaggu

SEQ ID NO: 651719 - RNA, 19 nt, Artificial Sequence
  Description of Artificial Sequence: Synthetic oligonucleotide
  Antisense strand to SEQ ID NO: 651718
accuuuggagaacucauca

SEQ ID NO: 651720 - RNA, 19 nt, Artificial Sequence
  Description of Artificial Sequence: Synthetic oligonucleotide
  Sense strand starting at position 1409 of SEQ ID NO: 585587
uccaaagguccgugagaaa

SEQ ID NO: 651721 - RNA, 19 nt, Artificial Sequence
  Description of Artificial Sequence: Synthetic oligonucleotide
  Antisense strand to SEQ ID NO: 651720
uuucucacggaccuuugga

SEQ ID NO: 651722 - RNA, 19 nt, Artificial Sequence
  Description of Artificial Sequence: Synthetic oligonucleotide
  Sense strand starting at position 2281 of SEQ ID NO: 585587
ccggcauuugagcaaacgu

SEQ ID NO: 651723 - RNA, 19 nt, Artificial Sequence
  Description of Artificial Sequence: Synthetic oligonucleotide
  Antisense strand to SEQ ID NO: 651722
acguuugcucaaaugccgg

SEQ ID NO: 651724 - RNA, 19 nt, Artificial Sequence
  Description of Artificial Sequence: Synthetic oligonucleotide
  Sense strand starting at position 2332 of SEQ ID NO: 585587
agauguucugggugaacaa

SEQ ID NO: 651725 - RNA, 19 nt, Artificial Sequence
  Description of Artificial Sequence: Synthetic oligonucleotide
  Antisense strand to SEQ ID NO: 651724
uuguucacccagaacaucu

SEQ ID NO: 651726 - RNA, 19 nt, Artificial Sequence
  Description of Artificial Sequence: Synthetic oligonucleotide
  Sense strand starting at position 2333 of SEQ ID NO: 585587
gauguucugggugaacaac

SEQ ID NO: 651727 - RNA, 19 nt, Artificial Sequence
  Description of Artificial Sequence: Synthetic oligonucleotide
  Antisense strand to SEQ ID NO: 651726
guuguucacccagaacauc

SEQ ID NO: 651728 - RNA, 19 nt, Artificial Sequence
  Description of Artificial Sequence: Synthetic oligonucleotide
  Sense strand starting at position 2341 of SEQ ID NO: 585587
gggugaacaacuggcuuua

SEQ ID NO: 651729 - RNA, 19 nt, Artificial Sequence
  Description of Artificial Sequence: Synthetic oligonucleotide
  Antisense strand to SEQ ID NO: 651728
uaaagccaguuguucaccc

SEQ ID NO: 651730 - RNA, 19 nt, Artificial Sequence
  Description of Artificial Sequence: Synthetic oligonucleotide
  Sense strand starting at position 2450 of SEQ ID NO: 585587
gaguaugcugcagacuuaa

SEQ ID NO: 651731 - RNA, 19 nt, Artificial Sequence
  Description of Artificial Sequence: Synthetic oligonucleotide
  Antisense strand to SEQ ID NO: 651730
uuaagucugcagcauacuc

SEQ ID NO: 651732 - RNA, 19 nt, Artificial Sequence
  Description of Artificial Sequence: Synthetic oligonucleotide
  Sense strand starting at position 2622 of SEQ ID NO: 585587
ggaaacaagucccuguaca

SEQ ID NO: 651733 - RNA, 19 nt, Artificial Sequence
  Description of Artificial Sequence: Synthetic oligonucleotide
  Antisense strand to SEQ ID NO: 651732
uguacagggacuuguuucc

SEQ ID NO: 651734 - RNA, 19 nt, Artificial Sequence
  Description of Artificial Sequence: Synthetic oligonucleotide
  Sense strand starting at position 2734 of SEQ ID NO: 585587
gaaugcugugugcuagcga

SEQ ID NO: 651735 - RNA, 19 nt, Artificial Sequence
  Description of Artificial Sequence: Synthetic oligonucleotide
  Antisense strand to SEQ ID NO: 651734
ucgcuagcacacagcauuc

SEQ ID NO: 651736 - RNA, 19 nt, Artificial Sequence
  Description of Artificial Sequence: Synthetic oligonucleotide
  Sense strand starting at position 2742 of SEQ ID NO: 585587
ugugcuagcgagcuucuua

SEQ ID NO: 651737 - RNA, 19 nt, Artificial Sequence
  Description of Artificial Sequence: Synthetic oligonucleotide
  Antisense strand to SEQ ID NO: 651736
uaagaagcucgcuagcaca

SEQ ID NO: 651738 - RNA, 19 nt, Artificial Sequence
  Description of Artificial Sequence: Synthetic oligonucleotide
  Sense strand starting at position 2743 of SEQ ID NO: 585587
gugcuagcgagcuucuuaa

SEQ ID NO: 651739 - RNA, 19 nt, Artificial Sequence
  Description of Artificial Sequence: Synthetic oligonucleotide
  Antisense strand to SEQ ID NO: 651738
uuaagaagcucgcuagcac

SEQ ID NO: 651740 - RNA, 19 nt, Artificial Sequence
  Description of Artificial Sequence: Synthetic oligonucleotide
  Sense strand starting at position 2854 of SEQ ID NO: 585587
guuauccuggagcauuaaa

SEQ ID NO: 651741 - RNA, 19 nt, Artificial Sequence
  Description of Artificial Sequence: Synthetic oligonucleotide
  Antisense strand to SEQ ID NO: 651740
uuuaaugcuccaggauaac

SEQ ID NO: 651742 - RNA, 19 nt, Artificial Sequence
  Description of Artificial Sequence: Synthetic oligonucleotide
  Sense strand starting at position 2946 of SEQ ID NO: 585587
ggacauucagggugguaug

SEQ ID NO: 651743 - RNA, 19 nt, Artificial Sequence
  Description of Artificial Sequence: Synthetic oligonucleotide
  Antisense strand to SEQ ID NO: 651742
cauaccacccugaaugucc

SEQ ID NO: 651744 - RNA, 19 nt, Artificial Sequence
  Description of Artificial Sequence: Synthetic oligonucleotide
  Sense strand starting at position 3154 of SEQ ID NO: 585587
gugcuauaggauuauaaug

SEQ ID NO: 651745 - RNA, 19 nt, Artificial Sequence
  Description of Artificial Sequence: Synthetic oligonucleotide
  Antisense strand to SEQ ID NO: 651744
cauuauaauccuauagcac

SEQ ID NO: 651746 - RNA, 19 nt, Artificial Sequence
  Description of Artificial Sequence: Synthetic oligonucleotide
  Sense strand starting at position 3303 of SEQ ID NO: 585587
ggacguaaacuauggaauc

SEQ ID NO: 651747 - RNA, 19 nt, Artificial Sequence
  Description of Artificial Sequence: Synthetic oligonucleotide
  Antisense strand to SEQ ID NO: 651746
gauuccauaguuuacgucc

SEQ ID NO: 651748 - RNA, 19 nt, Artificial Sequence
  Description of Artificial Sequence: Synthetic oligonucleotide
  Sense strand starting at position 3317 of SEQ ID NO: 585587
gaaucacaucccuaggugu

SEQ ID NO: 651749 - RNA, 19 nt, Artificial Sequence
  Description of Artificial Sequence: Synthetic oligonucleotide
  Antisense strand to SEQ ID NO: 651748
acaccuagggaugugauuc

SEQ ID NO: 651750 - RNA, 19 nt, Artificial Sequence
  Description of Artificial Sequence: Synthetic oligonucleotide
  Sense strand starting at position 3325 of SEQ ID NO: 585587
ucccuagguguuuauaaua

SEQ ID NO: 651751 - RNA, 19 nt, Artificial Sequence
  Description of Artificial Sequence: Synthetic oligonucleotide
  Antisense strand to SEQ ID NO: 651750
uauuauaaacaccuaggga

SEQ ID NO: 651752 - RNA, 19 nt, Artificial Sequence
  Description of Artificial Sequence: Synthetic oligonucleotide
  Sense strand starting at position 3874 of SEQ ID NO: 585587
ggucaaaggcuaugaauau

SEQ ID NO: 651753 - RNA, 19 nt, Artificial Sequence
  Description of Artificial Sequence: Synthetic oligonucleotide
  Antisense strand to SEQ ID NO: 651752
auauucauagccuuugacc

SEQ ID NO: 651754 - RNA, 19 nt, Artificial Sequence
  Description of Artificial Sequence: Synthetic oligonucleotide
  Sense strand starting at position 218 of SEQ ID NO: 585588
cuacauuauggaggcuuau

SEQ ID NO: 651755 - RNA, 19 nt, Artificial Sequence
  Description of Artificial Sequence: Synthetic oligonucleotide
  Antisense strand to SEQ ID NO: 651754
auaagccuccauaauguag

SEQ ID NO: 651756 - RNA, 19 nt, Artificial Sequence
  Description of Artificial Sequence: Synthetic oligonucleotide
  Sense strand starting at position 224 of SEQ ID NO: 585588
uauggaggcuuaugauauu

SEQ ID NO: 651757 - RNA, 19 nt, Artificial Sequence
  Description of Artificial Sequence: Synthetic oligonucleotide
  Antisense strand to SEQ ID NO: 651756
aauaucauaagccuccaua

SEQ ID NO: 651758 - RNA, 19 nt, Artificial Sequence
  Description of Artificial Sequence: Synthetic oligonucleotide
  Sense strand starting at position 473 of SEQ ID NO: 585588
ccgagaucgcaucaccaca

SEQ ID NO: 651759 - RNA, 19 nt, Artificial Sequence
  Description of Artificial Sequence: Synthetic oligonucleotide
  Antisense strand to SEQ ID NO: 651758
uguggugaugcgaucucgg

SEQ ID NO: 651760 - RNA, 19 nt, Artificial Sequence
  Description of Artificial Sequence: Synthetic oligonucleotide
  Sense strand starting at position 912 of SEQ ID NO: 585588
uguucaaaguccgggauga

SEQ ID NO: 651761 - RNA, 19 nt, Artificial Sequence
  Description of Artificial Sequence: Synthetic oligonucleotide
  Antisense strand to SEQ ID NO: 651760
ucaucccggacuuugaaca

SEQ ID NO: 651762 - RNA, 19 nt, Artificial Sequence
  Description of Artificial Sequence: Synthetic oligonucleotide
  Sense strand starting at position 913 of SEQ ID NO: 585588
guucaaaguccgggaugau

SEQ ID NO: 651763 - RNA, 19 nt, Artificial Sequence
  Description of Artificial Sequence: Synthetic oligonucleotide
  Antisense strand to SEQ ID NO: 651762
aucaucccggacuuugaac

SEQ ID NO: 651764 - RNA, 19 nt, Artificial Sequence
  Description of Artificial Sequence: Synthetic oligonucleotide
  Sense strand starting at position 916 of SEQ ID NO: 585588
caaaguccgggaugauaug

SEQ ID NO: 651765 - RNA, 19 nt, Artificial Sequence
  Description of Artificial Sequence: Synthetic oligonucleotide
  Antisense strand to SEQ ID NO: 651764
cauaucaucccggacuuug

SEQ ID NO: 651766 - RNA, 19 nt, Artificial Sequence
  Description of Artificial Sequence: Synthetic oligonucleotide
  Sense strand starting at position 935 of SEQ ID NO: 585588
gggcacgaguccuaaaucu

SEQ ID NO: 651767 - RNA, 19 nt, Artificial Sequence
  Description of Artificial Sequence: Synthetic oligonucleotide
  Antisense strand to SEQ ID NO: 651766
agauuuaggacucgugccc

SEQ ID NO: 651768 - RNA, 19 nt, Artificial Sequence
  Description of Artificial Sequence: Synthetic oligonucleotide
  Sense strand starting at position 1011 of SEQ ID NO: 585588
aguccuuuauccuaccuga

SEQ ID NO: 651769 - RNA, 19 nt, Artificial Sequence
  Description of Artificial Sequence: Synthetic oligonucleotide
  Antisense strand to SEQ ID NO: 651768
ucagguaggauaaaggacu

SEQ ID NO: 651770 - RNA, 19 nt, Artificial Sequence
  Description of Artificial Sequence: Synthetic oligonucleotide
  Sense strand starting at position 1200 of SEQ ID NO: 585588
cugugaaguguucgaugac

SEQ ID NO: 651771 - RNA, 19 nt, Artificial Sequence
  Description of Artificial Sequence: Synthetic oligonucleotide
  Antisense strand to SEQ ID NO: 651770
gucaucgaacacuucacag

SEQ ID NO: 651772 - RNA, 19 nt, Artificial Sequence
  Description of Artificial Sequence: Synthetic oligonucleotide
  Sense strand starting at position 1201 of SEQ ID NO: 585588
ugugaaguguucgaugacu

SEQ ID NO: 651773 - RNA, 19 nt, Artificial Sequence
  Description of Artificial Sequence: Synthetic oligonucleotide
  Antisense strand to SEQ ID NO: 651772
agucaucgaacacuucaca

SEQ ID NO: 651774 - RNA, 19 nt, Artificial Sequence
  Description of Artificial Sequence: Synthetic oligonucleotide
  Sense strand starting at position 1203 of SEQ ID NO: 585588
ugaaguguucgaugacucu

SEQ ID NO: 651775 - RNA, 19 nt, Artificial Sequence
  Description of Artificial Sequence: Synthetic oligonucleotide
  Antisense strand to SEQ ID NO: 651774
agagucaucgaacacuuca

SEQ ID NO: 651776 - RNA, 19 nt, Artificial Sequence
  Description of Artificial Sequence: Synthetic oligonucleotide
  Sense strand starting at position 1240 of SEQ ID NO: 585588
acccauucgcccuggaaga

SEQ ID NO: 651777 - RNA, 19 nt, Artificial Sequence
  Description of Artificial Sequence: Synthetic oligonucleotide
  Antisense strand to SEQ ID NO: 651776
ucuuccagggcgaaugggu

SEQ ID NO: 651778 - RNA, 19 nt, Artificial Sequence
  Description of Artificial Sequence: Synthetic oligonucleotide
  Sense strand starting at position 1857 of SEQ ID NO: 585588
gggugucucggucggaaag

SEQ ID NO: 651779 - RNA, 19 nt, Artificial Sequence
  Description of Artificial Sequence: Synthetic oligonucleotide
  Antisense strand to SEQ ID NO: 651778
cuuuccgaccgagacaccc

SEQ ID NO: 651780 - RNA, 19 nt, Artificial Sequence
  Description of Artificial Sequence: Synthetic oligonucleotide
  Sense strand starting at position 2152 of SEQ ID NO: 585588
ugaacuugugcuuaaggga

SEQ ID NO: 651781 - RNA, 19 nt, Artificial Sequence
  Description of Artificial Sequence: Synthetic oligonucleotide
  Antisense strand to SEQ ID NO: 651780
ucccuuaagcacaaguuca

SEQ ID NO: 651782 - RNA, 19 nt, Artificial Sequence
  Description of Artificial Sequence: Synthetic oligonucleotide
  Sense strand starting at position 2155 of SEQ ID NO: 585588
acuugugcuuaagggauuu

SEQ ID NO: 651783 - RNA, 19 nt, Artificial Sequence
  Description of Artificial Sequence: Synthetic oligonucleotide
  Antisense strand to SEQ ID NO: 651782
aaaucccuuaagcacaagu

SEQ ID NO: 651784 - RNA, 19 nt, Artificial Sequence
  Description of Artificial Sequence: Synthetic oligonucleotide
  Sense strand starting at position 2168 of SEQ ID NO: 585588
ggauuuaucuuugccuucu

SEQ ID NO: 651785 - RNA, 19 nt, Artificial Sequence
  Description of Artificial Sequence: Synthetic oligonucleotide
  Antisense strand to SEQ ID NO: 651784
agaaggcaaagauaaaucc

SEQ ID NO: 651786 - RNA, 19 nt, Artificial Sequence
  Description of Artificial Sequence: Synthetic oligonucleotide
  Sense strand starting at position 2174 of SEQ ID NO: 585588
aucuuugccuucuacggaa

SEQ ID NO: 651787 - RNA, 19 nt, Artificial Sequence
  Description of Artificial Sequence: Synthetic oligonucleotide
  Antisense strand to SEQ ID NO: 651786
uuccguagaaggcaaagau

SEQ ID NO: 651788 - RNA, 19 nt, Artificial Sequence
  Description of Artificial Sequence: Synthetic oligonucleotide
  Sense strand starting at position 2178 of SEQ ID NO: 585588
uugccuucuacggaaguaa

SEQ ID NO: 651789 - RNA, 19 nt, Artificial Sequence
  Description of Artificial Sequence: Synthetic oligonucleotide
  Antisense strand to SEQ ID NO: 651788
uuacuuccguagaaggcaa

SEQ ID NO: 651790 - RNA, 19 nt, Artificial Sequence
  Description of Artificial Sequence: Synthetic oligonucleotide
  Sense strand starting at position 2220 of SEQ ID NO: 585588
guggcaugaacguaacagu

SEQ ID NO: 651791 - RNA, 19 nt, Artificial Sequence
  Description of Artificial Sequence: Synthetic oligonucleotide
  Antisense strand to SEQ ID NO: 651790
acuguuacguucaugccac

SEQ ID NO: 651792 - RNA, 19 nt, Artificial Sequence
  Description of Artificial Sequence: Synthetic oligonucleotide
  Sense strand starting at position 2223 of SEQ ID NO: 585588
gcaugaacguaacaguuua

SEQ ID NO: 651793 - RNA, 19 nt, Artificial Sequence
  Description of Artificial Sequence: Synthetic oligonucleotide
  Antisense strand to SEQ ID NO: 651792
uaaacuguuacguucaugc

SEQ ID NO: 651794 - RNA, 19 nt, Artificial Sequence
  Description of Artificial Sequence: Synthetic oligonucleotide
  Sense strand starting at position 2231 of SEQ ID NO: 585588
guaacaguuuauugacuga

SEQ ID NO: 651795 - RNA, 19 nt, Artificial Sequence
  Description of Artificial Sequence: Synthetic oligonucleotide
  Antisense strand to SEQ ID NO: 651794
ucagucaauaaacuguuac

SEQ ID NO: 651796 - RNA, 19 nt, Artificial Sequence
  Description of Artificial Sequence: Synthetic oligonucleotide
  Sense strand starting at position 2234 of SEQ ID NO: 585588
acaguuuauugacugauaa

SEQ ID NO: 651797 - RNA, 19 nt, Artificial Sequence
  Description of Artificial Sequence: Synthetic oligonucleotide
  Antisense strand to SEQ ID NO: 651796
uuaucagucaauaaacugu

SEQ ID NO: 651798 - RNA, 19 nt, Artificial Sequence
  Description of Artificial Sequence: Synthetic oligonucleotide
  Sense strand starting at position 2262 of SEQ ID NO: 585588
cagcaugcucgggaugacu

SEQ ID NO: 651799 - RNA, 19 nt, Artificial Sequence
  Description of Artificial Sequence: Synthetic oligonucleotide
  Antisense strand to SEQ ID NO: 651798
agucaucccgagcaugcug

SEQ ID NO: 651800 - RNA, 19 nt, Artificial Sequence
  Description of Artificial Sequence: Synthetic oligonucleotide
  Sense strand starting at position 2294 of SEQ ID NO: 585588
ggagcucuaggugaaaugu

SEQ ID NO: 651801 - RNA, 19 nt, Artificial Sequence
  Description of Artificial Sequence: Synthetic oligonucleotide
  Antisense strand to SEQ ID NO: 651800
acauuucaccuagagcucc

SEQ ID NO: 651802 - RNA, 19 nt, Artificial Sequence
  Description of Artificial Sequence: Synthetic oligonucleotide
  Sense strand starting at position 2303 of SEQ ID NO: 585588
ggugaaauguuucggaagg

SEQ ID NO: 651803 - RNA, 19 nt, Artificial Sequence
  Description of Artificial Sequence: Synthetic oligonucleotide
  Antisense strand to SEQ ID NO: 651802
ccuuccgaaacauuucacc

SEQ ID NO: 651804 - RNA, 19 nt, Artificial Sequence
  Description of Artificial Sequence: Synthetic oligonucleotide
  Sense strand starting at position 2304 of SEQ ID NO: 585588
gugaaauguuucggaagga

SEQ ID NO: 651805 - RNA, 19 nt, Artificial Sequence
  Description of Artificial Sequence: Synthetic oligonucleotide
  Antisense strand to SEQ ID NO: 651804
uccuuccgaaacauuucac

SEQ ID NO: 651806 - RNA, 19 nt, Artificial Sequence
  Description of Artificial Sequence: Synthetic oligonucleotide
  Sense strand starting at position 2305 of SEQ ID NO: 585588
ugaaauguuucggaaggag

SEQ ID NO: 651807 - RNA, 19 nt, Artificial Sequence
  Description of Artificial Sequence: Synthetic oligonucleotide
  Antisense strand to SEQ ID NO: 651806
cuccuuccgaaacauuuca

SEQ ID NO: 651808 - RNA, 19 nt, Artificial Sequence
  Description of Artificial Sequence: Synthetic oligonucleotide
  Sense strand starting at position 2362 of SEQ ID NO: 585588
aacugugagcacugagguu

SEQ ID NO: 651809 - RNA, 19 nt, Artificial Sequence
  Description of Artificial Sequence: Synthetic oligonucleotide
  Antisense strand to SEQ ID NO: 651808
aaccucagugcucacaguu

SEQ ID NO: 651810 - RNA, 19 nt, Artificial Sequence
  Description of Artificial Sequence: Synthetic oligonucleotide
  Sense strand starting at position 2378 of SEQ ID NO: 585588
guuugaggguugcaggaaa

SEQ ID NO: 651811 - RNA, 19 nt, Artificial Sequence
  Description of Artificial Sequence: Synthetic oligonucleotide
  Antisense strand to SEQ ID NO: 651810
uuuccugcaacccucaaac

SEQ ID NO: 651812 - RNA, 19 nt, Artificial Sequence
  Description of Artificial Sequence: Synthetic oligonucleotide
  Sense strand starting at position 2437 of SEQ ID NO: 585588
acuugcuuauagguauaua

SEQ ID NO: 651813 - RNA, 19 nt, Artificial Sequence
  Description of Artificial Sequence: Synthetic oligonucleotide
  Antisense strand to SEQ ID NO: 651812
uauauaccuauaagcaagu

SEQ ID NO: 651814 - RNA, 19 nt, Artificial Sequence
  Description of Artificial Sequence: Synthetic oligonucleotide
  Sense strand starting at position 2455 of SEQ ID NO: 585588
aguggcugcugagugaauu

SEQ ID NO: 651815 - RNA, 19 nt, Artificial Sequence
  Description of Artificial Sequence: Synthetic oligonucleotide
  Antisense strand to SEQ ID NO: 651814
aauucacucagcagccacu

SEQ ID NO: 651816 - RNA, 19 nt, Artificial Sequence
  Description of Artificial Sequence: Synthetic oligonucleotide
  Sense strand starting at position 2456 of SEQ ID NO: 585588
guggcugcugagugaauua

SEQ ID NO: 651817 - RNA, 19 nt, Artificial Sequence
  Description of Artificial Sequence: Synthetic oligonucleotide
  Antisense strand to SEQ ID NO: 651816
uaauucacucagcagccac

SEQ ID NO: 651818 - RNA, 19 nt, Artificial Sequence
  Description of Artificial Sequence: Synthetic oligonucleotide
  Sense strand starting at position 2461 of SEQ ID NO: 585588
ugcugagugaauuacuaga

SEQ ID NO: 651819 - RNA, 19 nt, Artificial Sequence
  Description of Artificial Sequence: Synthetic oligonucleotide
  Antisense strand to SEQ ID NO: 651818
ucuaguaauucacucagca

SEQ ID NO: 651820 - RNA, 19 nt, Artificial Sequence
  Description of Artificial Sequence: Synthetic oligonucleotide
  Sense strand starting at position 2727 of SEQ ID NO: 585588
caaggcuucugucagcaua

SEQ ID NO: 651821 - RNA, 19 nt, Artificial Sequence
  Description of Artificial Sequence: Synthetic oligonucleotide
  Antisense strand to SEQ ID NO: 651820
uaugcugacagaagccuug

SEQ ID NO: 651822 - RNA, 19 nt, Artificial Sequence
  Description of Artificial Sequence: Synthetic oligonucleotide
  Sense strand starting at position 2729 of SEQ ID NO: 585588
aggcuucugucagcauaac

SEQ ID NO: 651823 - RNA, 19 nt, Artificial Sequence
  Description of Artificial Sequence: Synthetic oligonucleotide
  Antisense strand to SEQ ID NO: 651822
guuaugcugacagaagccu

SEQ ID NO: 651824 - RNA, 19 nt, Artificial Sequence
  Description of Artificial Sequence: Synthetic oligonucleotide
  Sense strand starting at position 2730 of SEQ ID NO: 585588
ggcuucugucagcauaaca

SEQ ID NO: 651825 - RNA, 19 nt, Artificial Sequence
  Description of Artificial Sequence: Synthetic oligonucleotide
  Antisense strand to SEQ ID NO: 651824
uguuaugcugacagaagcc

SEQ ID NO: 651826 - RNA, 19 nt, Artificial Sequence
  Description of Artificial Sequence: Synthetic oligonucleotide
  Sense strand starting at position 2768 of SEQ ID NO: 585588
gugugcuguuauuuagauu

SEQ ID NO: 651827 - RNA, 19 nt, Artificial Sequence
  Description of Artificial Sequence: Synthetic oligonucleotide
  Antisense strand to SEQ ID NO: 651826
aaucuaaauaacagcacac

SEQ ID NO: 651828 - RNA, 19 nt, Artificial Sequence
  Description of Artificial Sequence: Synthetic oligonucleotide
  Sense strand starting at position 2771 of SEQ ID NO: 585588
ugcuguuauuuagauucca

SEQ ID NO: 651829 - RNA, 19 nt, Artificial Sequence
  Description of Artificial Sequence: Synthetic oligonucleotide
  Antisense strand to SEQ ID NO: 651828
uggaaucuaaauaacagca

SEQ ID NO: 651830 - RNA, 19 nt, Artificial Sequence
  Description of Artificial Sequence: Synthetic oligonucleotide
  Sense strand starting at position 2804 of SEQ ID NO: 585588
uccacuguucuguacaaga

SEQ ID NO: 651831 - RNA, 19 nt, Artificial Sequence
  Description of Artificial Sequence: Synthetic oligonucleotide
  Antisense strand to SEQ ID NO: 651830
ucuuguacagaacagugga

SEQ ID NO: 651832 - RNA, 19 nt, Artificial Sequence
  Description of Artificial Sequence: Synthetic oligonucleotide
  Sense strand starting at position 3975 of SEQ ID NO: 585588
gcaagaauguacuaaccag

SEQ ID NO: 651833 - RNA, 19 nt, Artificial Sequence
  Description of Artificial Sequence: Synthetic oligonucleotide
  Antisense strand to SEQ ID NO: 651832
cugguuaguacauucuugc

SEQ ID NO: 651834 - RNA, 19 nt, Artificial Sequence
  Description of Artificial Sequence: Synthetic oligonucleotide
  Sense strand starting at position 413 of SEQ ID NO: 585589
acuggugggccauguaaau

SEQ ID NO: 651835 - RNA, 19 nt, Artificial Sequence
  Description of Artificial Sequence: Synthetic oligonucleotide
  Antisense strand to SEQ ID NO: 651834
auuuacauggcccaccagu

SEQ ID NO: 651836 - RNA, 19 nt, Artificial Sequence
  Description of Artificial Sequence: Synthetic oligonucleotide
  Sense strand starting at position 425 of SEQ ID NO: 585589
uguaaaucugaaugugcaa

SEQ ID NO: 651837 - RNA, 19 nt, Artificial Sequence
  Description of Artificial Sequence: Synthetic oligonucleotide
  Antisense strand to SEQ ID NO: 651836
uugcacauucagauuuaca

SEQ ID NO: 651838 - RNA, 19 nt, Artificial Sequence
  Description of Artificial Sequence: Synthetic oligonucleotide
  Sense strand starting at position 583 of SEQ ID NO: 585589
gcguauaauagcuaggaca

SEQ ID NO: 651839 - RNA, 19 nt, Artificial Sequence
  Description of Artificial Sequence: Synthetic oligonucleotide
  Antisense strand to SEQ ID NO: 651838
uguccuagcuauuauacgc

SEQ ID NO: 651840 - RNA, 19 nt, Artificial Sequence
  Description of Artificial Sequence: Synthetic oligonucleotide
  Sense strand starting at position 585 of SEQ ID NO: 585589
guauaauagcuaggacaug

SEQ ID NO: 651841 - RNA, 19 nt, Artificial Sequence
  Description of Artificial Sequence: Synthetic oligonucleotide
  Antisense strand to SEQ ID NO: 651840
cauguccuagcuauuauac

SEQ ID NO: 651842 - RNA, 19 nt, Artificial Sequence
  Description of Artificial Sequence: Synthetic oligonucleotide
  Sense strand starting at position 639 of SEQ ID NO: 585589
ucaucuaguccacggacua

SEQ ID NO: 651843 - RNA, 19 nt, Artificial Sequence
  Description of Artificial Sequence: Synthetic oligonucleotide
  Antisense strand to SEQ ID NO: 651842
uaguccguggacuagauga

SEQ ID NO: 651844 - RNA, 19 nt, Artificial Sequence
  Description of Artificial Sequence: Synthetic oligonucleotide
  Sense strand starting at position 1162 of SEQ ID NO: 585589
uuaacuggagucuguaaca

SEQ ID NO: 651845 - RNA, 19 nt, Artificial Sequence
  Description of Artificial Sequence: Synthetic oligonucleotide
  Antisense strand to SEQ ID NO: 651844
uguuacagacuccaguuaa

SEQ ID NO: 651846 - RNA, 19 nt, Artificial Sequence
  Description of Artificial Sequence: Synthetic oligonucleotide
  Sense strand starting at position 1197 of SEQ ID NO: 585589
ugcauuccucguuagacaa

SEQ ID NO: 651847 - RNA, 19 nt, Artificial Sequence
  Description of Artificial Sequence: Synthetic oligonucleotide
  Antisense strand to SEQ ID NO: 651846
uugucuaacgaggaaugca

SEQ ID NO: 651848 - RNA, 19 nt, Artificial Sequence
  Description of Artificial Sequence: Synthetic oligonucleotide
  Sense strand starting at position 1282 of SEQ ID NO: 585589
ggagcaucguccuuaggaa

SEQ ID NO: 651849 - RNA, 19 nt, Artificial Sequence
  Description of Artificial Sequence: Synthetic oligonucleotide
  Antisense strand to SEQ ID NO: 651848
uuccuaaggacgaugcucc

SEQ ID NO: 651850 - RNA, 19 nt, Artificial Sequence
  Description of Artificial Sequence: Synthetic oligonucleotide
  Sense strand starting at position 1283 of SEQ ID NO: 585589
gagcaucguccuuaggaag

SEQ ID NO: 651851 - RNA, 19 nt, Artificial Sequence
  Description of Artificial Sequence: Synthetic oligonucleotide
  Antisense strand to SEQ ID NO: 651850
cuuccuaaggacgaugcuc

SEQ ID NO: 651852 - RNA, 19 nt, Artificial Sequence
  Description of Artificial Sequence: Synthetic oligonucleotide
  Sense strand starting at position 1341 of SEQ ID NO: 585589
ugggaauugugggccaacu

SEQ ID NO: 651853 - RNA, 19 nt, Artificial Sequence
  Description of Artificial Sequence: Synthetic oligonucleotide
  Antisense strand to SEQ ID NO: 651852
aguuggcccacaauuccca

SEQ ID NO: 651854 - RNA, 19 nt, Artificial Sequence
  Description of Artificial Sequence: Synthetic oligonucleotide
  Sense strand starting at position 2030 of SEQ ID NO: 585589
cugauugguccgcacagga

SEQ ID NO: 651855 - RNA, 19 nt, Artificial Sequence
  Description of Artificial Sequence: Synthetic oligonucleotide
  Antisense strand to SEQ ID NO: 651854
uccugugcggaccaaucag

SEQ ID NO: 651856 - RNA, 19 nt, Artificial Sequence
  Description of Artificial Sequence: Synthetic oligonucleotide
  Sense strand starting at position 2135 of SEQ ID NO: 585589
gggagugauccaggguuag

SEQ ID NO: 651857 - RNA, 19 nt, Artificial Sequence
  Description of Artificial Sequence: Synthetic oligonucleotide
  Antisense strand to SEQ ID NO: 651856
cuaacccuggaucacuccc

SEQ ID NO: 651858 - RNA, 19 nt, Artificial Sequence
  Description of Artificial Sequence: Synthetic oligonucleotide
  Sense strand starting at position 2136 of SEQ ID NO: 585589
ggagugauccaggguuagg

SEQ ID NO: 651859 - RNA, 19 nt, Artificial Sequence
  Description of Artificial Sequence: Synthetic oligonucleotide
  Antisense strand to SEQ ID NO: 651858
ccuaacccuggaucacucc

SEQ ID NO: 651860 - RNA, 19 nt, Artificial Sequence
  Description of Artificial Sequence: Synthetic oligonucleotide
  Sense strand starting at position 2382 of SEQ ID NO: 585589
cacugcggucuuuaggaau

SEQ ID NO: 651861 - RNA, 19 nt, Artificial Sequence
  Description of Artificial Sequence: Synthetic oligonucleotide
  Antisense strand to SEQ ID NO: 651860
auuccuaaagaccgcagug

SEQ ID NO: 651862 - RNA, 19 nt, Artificial Sequence
  Description of Artificial Sequence: Synthetic oligonucleotide
  Sense strand starting at position 2475 of SEQ ID NO: 585589
augcuuggcaagugagaaa

SEQ ID NO: 651863 - RNA, 19 nt, Artificial Sequence
  Description of Artificial Sequence: Synthetic oligonucleotide
  Antisense strand to SEQ ID NO: 651862
uuucucacuugccaagcau

SEQ ID NO: 651864 - RNA, 19 nt, Artificial Sequence
  Description of Artificial Sequence: Synthetic oligonucleotide
  Sense strand starting at position 2591 of SEQ ID NO: 585589
gguaauaagugcucagaug

SEQ ID NO: 651865 - RNA, 19 nt, Artificial Sequence
  Description of Artificial Sequence: Synthetic oligonucleotide
  Antisense strand to SEQ ID NO: 651864
caucugagcacuuauuacc

SEQ ID NO: 651866 - RNA, 19 nt, Artificial Sequence
  Description of Artificial Sequence: Synthetic oligonucleotide
  Sense strand starting at position 2638 of SEQ ID NO: 585589
ggcauauacuauguggaga

SEQ ID NO: 651867 - RNA, 19 nt, Artificial Sequence
  Description of Artificial Sequence: Synthetic oligonucleotide
  Antisense strand to SEQ ID NO: 651866
ucuccacauaguauaugcc

SEQ ID NO: 651868 - RNA, 19 nt, Artificial Sequence
  Description of Artificial Sequence: Synthetic oligonucleotide
  Sense strand starting at position 2639 of SEQ ID NO: 585589
gcauauacuauguggagaa

SEQ ID NO: 651869 - RNA, 19 nt, Artificial Sequence
  Description of Artificial Sequence: Synthetic oligonucleotide
  Antisense strand to SEQ ID NO: 651868
uucuccacauaguauaugc

SEQ ID NO: 651870 - RNA, 19 nt, Artificial Sequence
  Description of Artificial Sequence: Synthetic oligonucleotide
  Sense strand starting at position 2699 of SEQ ID NO: 585589
gaguaaagaggguguaauu

SEQ ID NO: 651871 - RNA, 19 nt, Artificial Sequence
  Description of Artificial Sequence: Synthetic oligonucleotide
  Antisense strand to SEQ ID NO: 651870
aauuacacccucuuuacuc

SEQ ID NO: 651872 - RNA, 19 nt, Artificial Sequence
  Description of Artificial Sequence: Synthetic oligonucleotide
  Sense strand starting at position 2715 of SEQ ID NO: 585589
auuauuaagccaggucaac

SEQ ID NO: 651873 - RNA, 19 nt, Artificial Sequence
  Description of Artificial Sequence: Synthetic oligonucleotide
  Antisense strand to SEQ ID NO: 651872
guugaccuggcuuaauaau

SEQ ID NO: 651874 - RNA, 19 nt, Artificial Sequence
  Description of Artificial Sequence: Synthetic oligonucleotide
  Sense strand starting at position 2741 of SEQ ID NO: 585589
aaccaagucguaugaucau

SEQ ID NO: 651875 - RNA, 19 nt, Artificial Sequence
  Description of Artificial Sequence: Synthetic oligonucleotide
  Antisense strand to SEQ ID NO: 651874
augaucauacgacuugguu

SEQ ID NO: 651876 - RNA, 19 nt, Artificial Sequence
  Description of Artificial Sequence: Synthetic oligonucleotide
  Sense strand starting at position 2816 of SEQ ID NO: 585589
gguccauggccucaagaga

SEQ ID NO: 651877 - RNA, 19 nt, Artificial Sequence
  Description of Artificial Sequence: Synthetic oligonucleotide
  Antisense strand to SEQ ID NO: 651876
ucucuugaggccauggacc

SEQ ID NO: 651878 - RNA, 19 nt, Artificial Sequence
  Description of Artificial Sequence: Synthetic oligonucleotide
  Sense strand starting at position 2856 of SEQ ID NO: 585589
gaagucauguaauuaguua

SEQ ID NO: 651879 - RNA, 19 nt, Artificial Sequence
  Description of Artificial Sequence: Synthetic oligonucleotide
  Antisense strand to SEQ ID NO: 651878
uaacuaauuacaugacuuc

SEQ ID NO: 651880 - RNA, 19 nt, Artificial Sequence
  Description of Artificial Sequence: Synthetic oligonucleotide
  Sense strand starting at position 2860 of SEQ ID NO: 585589
ucauguaauuaguuaagug

SEQ ID NO: 651881 - RNA, 19 nt, Artificial Sequence
  Description of Artificial Sequence: Synthetic oligonucleotide
  Antisense strand to SEQ ID NO: 651880
cacuuaacuaauuacauga

SEQ ID NO: 651882 - RNA, 19 nt, Artificial Sequence
  Description of Artificial Sequence: Synthetic oligonucleotide
  Sense strand starting at position 2888 of SEQ ID NO: 585589
uacuguagaggcuaugaua

SEQ ID NO: 651883 - RNA, 19 nt, Artificial Sequence
  Description of Artificial Sequence: Synthetic oligonucleotide
  Antisense strand to SEQ ID NO: 651882
uaucauagccucuacagua

SEQ ID NO: 651884 - RNA, 19 nt, Artificial Sequence
  Description of Artificial Sequence: Synthetic oligonucleotide
  Sense strand starting at position 2942 of SEQ ID NO: 585589
gugccagagguauggaaau

SEQ ID NO: 651885 - RNA, 19 nt, Artificial Sequence
  Description of Artificial Sequence: Synthetic oligonucleotide
  Antisense strand to SEQ ID NO: 651884
auuuccauaccucuggcac

SEQ ID NO: 651886 - RNA, 19 nt, Artificial Sequence
  Description of Artificial Sequence: Synthetic oligonucleotide
  Sense strand starting at position 2981 of SEQ ID NO: 585589
agagauaagucuuuauggu

SEQ ID NO: 651887 - RNA, 19 nt, Artificial Sequence
  Description of Artificial Sequence: Synthetic oligonucleotide
  Antisense strand to SEQ ID NO: 651886
accauaaagacuuaucucu

SEQ ID NO: 651888 - RNA, 19 nt, Artificial Sequence
  Description of Artificial Sequence: Synthetic oligonucleotide
  Sense strand starting at position 2988 of SEQ ID NO: 585589
agucuuuauggugauugca

SEQ ID NO: 651889 - RNA, 19 nt, Artificial Sequence
  Description of Artificial Sequence: Synthetic oligonucleotide
  Antisense strand to SEQ ID NO: 651888
ugcaaucaccauaaagacu

SEQ ID NO: 651890 - RNA, 19 nt, Artificial Sequence
  Description of Artificial Sequence: Synthetic oligonucleotide
  Sense strand starting at position 2990 of SEQ ID NO: 585589
ucuuuauggugauugcaca

SEQ ID NO: 651891 - RNA, 19 nt, Artificial Sequence
  Description of Artificial Sequence: Synthetic oligonucleotide
  Antisense strand to SEQ ID NO: 651890
ugugcaaucaccauaaaga

SEQ ID NO: 651892 - RNA, 19 nt, Artificial Sequence
  Description of Artificial Sequence: Synthetic oligonucleotide
  Sense strand starting at position 3042 of SEQ ID NO: 585589
gauggagaucuuuguagga

SEQ ID NO: 651893 - RNA, 19 nt, Artificial Sequence
  Description of Artificial Sequence: Synthetic oligonucleotide
  Antisense strand to SEQ ID NO: 651892
uccuacaaagaucuccauc

SEQ ID NO: 651894 - RNA, 19 nt, Artificial Sequence
  Description of Artificial Sequence: Synthetic oligonucleotide
  Sense strand starting at position 3052 of SEQ ID NO: 585589
uuuguaggagcaggaauaa

SEQ ID NO: 651895 - RNA, 19 nt, Artificial Sequence
  Description of Artificial Sequence: Synthetic oligonucleotide
  Antisense strand to SEQ ID NO: 651894
uuauuccugcuccuacaaa

SEQ ID NO: 651896 - RNA, 19 nt, Artificial Sequence
  Description of Artificial Sequence: Synthetic oligonucleotide
  Sense strand starting at position 3233 of SEQ ID NO: 585589
cuaagagaauuggauuucu

SEQ ID NO: 651897 - RNA, 19 nt, Artificial Sequence
  Description of Artificial Sequence: Synthetic oligonucleotide
  Antisense strand to SEQ ID NO: 651896
agaaauccaauucucuuag

SEQ ID NO: 651898 - RNA, 19 nt, Artificial Sequence
  Description of Artificial Sequence: Synthetic oligonucleotide
  Sense strand starting at position 3443 of SEQ ID NO: 585589
ggcggaucacuugaggauc

SEQ ID NO: 651899 - RNA, 19 nt, Artificial Sequence
  Description of Artificial Sequence: Synthetic oligonucleotide
  Antisense strand to SEQ ID NO: 651898
gauccucaagugauccgcc

SEQ ID NO: 651900 - RNA, 19 nt, Artificial Sequence
  Description of Artificial Sequence: Synthetic oligonucleotide
  Sense strand starting at position 3499 of SEQ ID NO: 585589
auauguagucacuggaaug

SEQ ID NO: 651901 - RNA, 19 nt, Artificial Sequence
  Description of Artificial Sequence: Synthetic oligonucleotide
  Antisense strand to SEQ ID NO: 651900
cauuccagugacuacauau

SEQ ID NO: 651902 - RNA, 19 nt, Artificial Sequence
  Description of Artificial Sequence: Synthetic oligonucleotide
  Sense strand starting at position 3521 of SEQ ID NO: 585589
gcugcaugagggcagaaau

SEQ ID NO: 651903 - RNA, 19 nt, Artificial Sequence
  Description of Artificial Sequence: Synthetic oligonucleotide
  Antisense strand to SEQ ID NO: 651902
auuucugcccucaugcagc

SEQ ID NO: 651904 - RNA, 19 nt, Artificial Sequence
  Description of Artificial Sequence: Synthetic oligonucleotide
  Sense strand starting at position 3549 of SEQ ID NO: 585589
uuauguucgcuguuguauc

SEQ ID NO: 651905 - RNA, 19 nt, Artificial Sequence
  Description of Artificial Sequence: Synthetic oligonucleotide
  Antisense strand to SEQ ID NO: 651904
gauacaacagcgaacauaa

SEQ ID NO: 651906 - RNA, 19 nt, Artificial Sequence
  Description of Artificial Sequence: Synthetic oligonucleotide
  Sense strand starting at position 3605 of SEQ ID NO: 585589
gugaaugcagccuaauaca

SEQ ID NO: 651907 - RNA, 19 nt, Artificial Sequence
  Description of Artificial Sequence: Synthetic oligonucleotide
  Antisense strand to SEQ ID NO: 651906
uguauuaggcugcauucac

SEQ ID NO: 651908 - RNA, 19 nt, Artificial Sequence
  Description of Artificial Sequence: Synthetic oligonucleotide
  Sense strand starting at position 3699 of SEQ ID NO: 585589
cuaaauaggcguuaauaaa

SEQ ID NO: 651909 - RNA, 19 nt, Artificial Sequence
  Description of Artificial Sequence: Synthetic oligonucleotide
  Antisense strand to SEQ ID NO: 651908
uuuauuaacgccuauuuag

SEQ ID NO: 651910 - RNA, 19 nt, Artificial Sequence
  Description of Artificial Sequence: Synthetic oligonucleotide
  Sense strand starting at position 3753 of SEQ ID NO: 585589
uuggcaaagaguuguauau

SEQ ID NO: 651911 - RNA, 19 nt, Artificial Sequence
  Description of Artificial Sequence: Synthetic oligonucleotide
  Antisense strand to SEQ ID NO: 651910
auauacaacucuuugccaa

SEQ ID NO: 651912 - RNA, 19 nt, Artificial Sequence
  Description of Artificial Sequence: Synthetic oligonucleotide
  Sense strand starting at position 3853 of SEQ ID NO: 585589
uacagugaccuuggacaua

SEQ ID NO: 651913 - RNA, 19 nt, Artificial Sequence
  Description of Artificial Sequence: Synthetic oligonucleotide
  Antisense strand to SEQ ID NO: 651912
uauguccaaggucacugua

SEQ ID NO: 651914 - RNA, 19 nt, Artificial Sequence
  Description of Artificial Sequence: Synthetic oligonucleotide
  Sense strand starting at position 105 of SEQ ID NO: 585590
aagugagguauuggugaaa

SEQ ID NO: 651915 - RNA, 19 nt, Artificial Sequence
  Description of Artificial Sequence: Synthetic oligonucleotide
  Antisense strand to SEQ ID NO: 651914
uuucaccaauaccucacuu

SEQ ID NO: 651916 - RNA, 19 nt, Artificial Sequence
  Description of Artificial Sequence: Synthetic oligonucleotide
  Sense strand starting at position 135 of SEQ ID NO: 585590
agaacaguuucucuccagu

SEQ ID NO: 651917 - RNA, 19 nt, Artificial Sequence
  Description of Artificial Sequence: Synthetic oligonucleotide
  Antisense strand to SEQ ID NO: 651916
acuggagagaaacuguucu

SEQ ID NO: 651918 - RNA, 19 nt, Artificial Sequence
  Description of Artificial Sequence: Synthetic oligonucleotide
  Sense strand starting at position 138 of SEQ ID NO: 585590
acaguuucucuccaguaac

SEQ ID NO: 651919 - RNA, 19 nt, Artificial Sequence
  Description of Artificial Sequence: Synthetic oligonucleotide
  Antisense strand to SEQ ID NO: 651918
guuacuggagagaaacugu

SEQ ID NO: 651920 - RNA, 19 nt, Artificial Sequence
  Description of Artificial Sequence: Synthetic oligonucleotide
  Sense strand starting at position 407 of SEQ ID NO: 585590
agguuagagaacuguguau

SEQ ID NO: 651921 - RNA, 19 nt, Artificial Sequence
  Description of Artificial Sequence: Synthetic oligonucleotide
  Antisense strand to SEQ ID NO: 651920
auacacaguucucuaaccu

SEQ ID NO: 651922 - RNA, 19 nt, Artificial Sequence
  Description of Artificial Sequence: Synthetic oligonucleotide
  Sense strand starting at position 409 of SEQ ID NO: 585590
guuagagaacuguguauuc

SEQ ID NO: 651923 - RNA, 19 nt, Artificial Sequence
  Description of Artificial Sequence: Synthetic oligonucleotide
  Antisense strand to SEQ ID NO: 651922
gaauacacaguucucuaac

SEQ ID NO: 651924 - RNA, 19 nt, Artificial Sequence
  Description of Artificial Sequence: Synthetic oligonucleotide
  Sense strand starting at position 411 of SEQ ID NO: 585590
uagagaacuguguauucuu

SEQ ID NO: 651925 - RNA, 19 nt, Artificial Sequence
  Description of Artificial Sequence: Synthetic oligonucleotide
  Antisense strand to SEQ ID NO: 651924
aagaauacacaguucucua

SEQ ID NO: 651926 - RNA, 19 nt, Artificial Sequence
  Description of Artificial Sequence: Synthetic oligonucleotide
  Sense strand starting at position 507 of SEQ ID NO: 585590
gggagaguuaaggguugua

SEQ ID NO: 651927 - RNA, 19 nt, Artificial Sequence
  Description of Artificial Sequence: Synthetic oligonucleotide
  Antisense strand to SEQ ID NO: 651926
uacaacccuuaacucuccc

SEQ ID NO: 651928 - RNA, 19 nt, Artificial Sequence
  Description of Artificial Sequence: Synthetic oligonucleotide
  Sense strand starting at position 510 of SEQ ID NO: 585590
agaguuaaggguuguauau

SEQ ID NO: 651929 - RNA, 19 nt, Artificial Sequence
  Description of Artificial Sequence: Synthetic oligonucleotide
  Antisense strand to SEQ ID NO: 651928
auauacaacccuuaacucu

SEQ ID NO: 651930 - RNA, 19 nt, Artificial Sequence
  Description of Artificial Sequence: Synthetic oligonucleotide
  Sense strand starting at position 520 of SEQ ID NO: 585590
guuguauauacaggcaaga

SEQ ID NO: 651931 - RNA, 19 nt, Artificial Sequence
  Description of Artificial Sequence: Synthetic oligonucleotide
  Antisense strand to SEQ ID NO: 651930
ucuugccuguauauacaac

SEQ ID NO: 651932 - RNA, 19 nt, Artificial Sequence
  Description of Artificial Sequence: Synthetic oligonucleotide
  Sense strand starting at position 594 of SEQ ID NO: 585590
agagauuccaagugcaaga

SEQ ID NO: 651933 - RNA, 19 nt, Artificial Sequence
  Description of Artificial Sequence: Synthetic oligonucleotide
  Antisense strand to SEQ ID NO: 651932
ucuugcacuuggaaucucu

SEQ ID NO: 651934 - RNA, 19 nt, Artificial Sequence
  Description of Artificial Sequence: Synthetic oligonucleotide
  Sense strand starting at position 678 of SEQ ID NO: 585590
agaagugccuggucaggaa

SEQ ID NO: 651935 - RNA, 19 nt, Artificial Sequence
  Description of Artificial Sequence: Synthetic oligonucleotide
  Antisense strand to SEQ ID NO: 651934
uuccugaccaggcacuucu

SEQ ID NO: 651936 - RNA, 19 nt, Artificial Sequence
  Description of Artificial Sequence: Synthetic oligonucleotide
  Sense strand starting at position 694 of SEQ ID NO: 585590
gaaacagagccagguguuu

SEQ ID NO: 651937 - RNA, 19 nt, Artificial Sequence
  Description of Artificial Sequence: Synthetic oligonucleotide
  Antisense strand to SEQ ID NO: 651936
aaacaccuggcucuguuuc

SEQ ID NO: 651938 - RNA, 19 nt, Artificial Sequence
  Description of Artificial Sequence: Synthetic oligonucleotide
  Sense strand starting at position 970 of SEQ ID NO: 585590
cacuauggagagugcuaaa

SEQ ID NO: 651939 - RNA, 19 nt, Artificial Sequence
  Description of Artificial Sequence: Synthetic oligonucleotide
  Antisense strand to SEQ ID NO: 651938
uuuagcacucuccauagug

SEQ ID NO: 651940 - RNA, 19 nt, Artificial Sequence
  Description of Artificial Sequence: Synthetic oligonucleotide
  Sense strand starting at position 977 of SEQ ID NO: 585590
gagagugcuaaacgcaaga

SEQ ID NO: 651941 - RNA, 19 nt, Artificial Sequence
  Description of Artificial Sequence: Synthetic oligonucleotide
  Antisense strand to SEQ ID NO: 651940
ucuugcguuuagcacucuc

SEQ ID NO: 651942 - RNA, 19 nt, Artificial Sequence
  Description of Artificial Sequence: Synthetic oligonucleotide
  Sense strand starting at position 1519 of SEQ ID NO: 585590
auccuagucagguggauau

SEQ ID NO: 651943 - RNA, 19 nt, Artificial Sequence
  Description of Artificial Sequence: Synthetic oligonucleotide
  Antisense strand to SEQ ID NO: 651942
auauccaccugacuaggau

SEQ ID NO: 651944 - RNA, 19 nt, Artificial Sequence
  Description of Artificial Sequence: Synthetic oligonucleotide
  Sense strand starting at position 1532 of SEQ ID NO: 585590
ggauauggaucugaggaag

SEQ ID NO: 651945 - RNA, 19 nt, Artificial Sequence
  Description of Artificial Sequence: Synthetic oligonucleotide
  Antisense strand to SEQ ID NO: 651944
cuuccucagauccauaucc

SEQ ID NO: 651946 - RNA, 19 nt, Artificial Sequence
  Description of Artificial Sequence: Synthetic oligonucleotide
  Sense strand starting at position 1645 of SEQ ID NO: 585590
aaaccuuaucucgguaaug

SEQ ID NO: 651947 - RNA, 19 nt, Artificial Sequence
  Description of Artificial Sequence: Synthetic oligonucleotide
  Antisense strand to SEQ ID NO: 651946
cauuaccgagauaagguuu

SEQ ID NO: 651948 - RNA, 19 nt, Artificial Sequence
  Description of Artificial Sequence: Synthetic oligonucleotide
  Sense strand starting at position 1678 of SEQ ID NO: 585590
gugcauugggcgagaccau

SEQ ID NO: 651949 - RNA, 19 nt, Artificial Sequence
  Description of Artificial Sequence: Synthetic oligonucleotide
  Antisense strand to SEQ ID NO: 651948
auggucucgcccaaugcac

SEQ ID NO: 651950 - RNA, 19 nt, Artificial Sequence
  Description of Artificial Sequence: Synthetic oligonucleotide
  Sense strand starting at position 1679 of SEQ ID NO: 585590
ugcauugggcgagaccaua

SEQ ID NO: 651951 - RNA, 19 nt, Artificial Sequence
  Description of Artificial Sequence: Synthetic oligonucleotide
  Antisense strand to SEQ ID NO: 651950
uauggucucgcccaaugca

SEQ ID NO: 651952 - RNA, 19 nt, Artificial Sequence
  Description of Artificial Sequence: Synthetic oligonucleotide
  Sense strand starting at position 2030 of SEQ ID NO: 585590
aguaauaaacccggaagua

SEQ ID NO: 651953 - RNA, 19 nt, Artificial Sequence
  Description of Artificial Sequence: Synthetic oligonucleotide
  Antisense strand to SEQ ID NO: 651952
uacuuccggguuuauuacu

SEQ ID NO: 651954 - RNA, 19 nt, Artificial Sequence
  Description of Artificial Sequence: Synthetic oligonucleotide
  Sense strand starting at position 2067 of SEQ ID NO: 585590
aagacugugccggaaguuu

SEQ ID NO: 651955 - RNA, 19 nt, Artificial Sequence
  Description of Artificial Sequence: Synthetic oligonucleotide
  Antisense strand to SEQ ID NO: 651954
aaacuuccggcacagucuu

SEQ ID NO: 651956 - RNA, 19 nt, Artificial Sequence
  Description of Artificial Sequence: Synthetic oligonucleotide
  Sense strand starting at position 2076 of SEQ ID NO: 585590
ccggaaguuucuuucugac

SEQ ID NO: 651957 - RNA, 19 nt, Artificial Sequence
  Description of Artificial Sequence: Synthetic oligonucleotide
  Antisense strand to SEQ ID NO: 651956
gucagaaagaaacuuccgg

SEQ ID NO: 651958 - RNA, 19 nt, Artificial Sequence
  Description of Artificial Sequence: Synthetic oligonucleotide
  Sense strand starting at position 2082 of SEQ ID NO: 585590
guuucuuucugacccuuga

SEQ ID NO: 651959 - RNA, 19 nt, Artificial Sequence
  Description of Artificial Sequence: Synthetic oligonucleotide
  Antisense strand to SEQ ID NO: 651958
ucaagggucagaaagaaac

SEQ ID NO: 651960 - RNA, 19 nt, Artificial Sequence
  Description of Artificial Sequence: Synthetic oligonucleotide
  Sense strand starting at position 2148 of SEQ ID NO: 585590
agacuagacuaggacauuu

SEQ ID NO: 651961 - RNA, 19 nt, Artificial Sequence
  Description of Artificial Sequence: Synthetic oligonucleotide
  Antisense strand to SEQ ID NO: 651960
aaauguccuagucuagucu

SEQ ID NO: 651962 - RNA, 19 nt, Artificial Sequence
  Description of Artificial Sequence: Synthetic oligonucleotide
  Sense strand starting at position 2492 of SEQ ID NO: 585590
ggaugucccgcccaagaaa

SEQ ID NO: 651963 - RNA, 19 nt, Artificial Sequence
  Description of Artificial Sequence: Synthetic oligonucleotide
  Antisense strand to SEQ ID NO: 651962
uuucuugggcgggacaucc

SEQ ID NO: 651964 - RNA, 19 nt, Artificial Sequence
  Description of Artificial Sequence: Synthetic oligonucleotide
  Sense strand starting at position 2706 of SEQ ID NO: 585590
ggagcuccguccucagaga

SEQ ID NO: 651965 - RNA, 19 nt, Artificial Sequence
  Description of Artificial Sequence: Synthetic oligonucleotide
  Antisense strand to SEQ ID NO: 651964
ucucugaggacggagcucc

SEQ ID NO: 651966 - RNA, 19 nt, Artificial Sequence
  Description of Artificial Sequence: Synthetic oligonucleotide
  Sense strand starting at position 2750 of SEQ ID NO: 585590
agucucggaucucuaagaa

SEQ ID NO: 651967 - RNA, 19 nt, Artificial Sequence
  Description of Artificial Sequence: Synthetic oligonucleotide
  Antisense strand to SEQ ID NO: 651966
uucuuagagauccgagacu

SEQ ID NO: 651968 - RNA, 19 nt, Artificial Sequence
  Description of Artificial Sequence: Synthetic oligonucleotide
  Sense strand starting at position 2769 of SEQ ID NO: 585590
gccucaggucccgaagaaa

SEQ ID NO: 651969 - RNA, 19 nt, Artificial Sequence
  Description of Artificial Sequence: Synthetic oligonucleotide
  Antisense strand to SEQ ID NO: 651968
uuucuucgggaccugaggc

SEQ ID NO: 651970 - RNA, 19 nt, Artificial Sequence
  Description of Artificial Sequence: Synthetic oligonucleotide
  Sense strand starting at position 2978 of SEQ ID NO: 585590
guggaagugguccagaagu

SEQ ID NO: 651971 - RNA, 19 nt, Artificial Sequence
  Description of Artificial Sequence: Synthetic oligonucleotide
  Antisense strand to SEQ ID NO: 651970
acuucuggaccacuuccac

SEQ ID NO: 651972 - RNA, 19 nt, Artificial Sequence
  Description of Artificial Sequence: Synthetic oligonucleotide
  Sense strand starting at position 2980 of SEQ ID NO: 585590
ggaagugguccagaaguuc

SEQ ID NO: 651973 - RNA, 19 nt, Artificial Sequence
  Description of Artificial Sequence: Synthetic oligonucleotide
  Antisense strand to SEQ ID NO: 651972
gaacuucuggaccacuucc

SEQ ID NO: 651974 - RNA, 19 nt, Artificial Sequence
  Description of Artificial Sequence: Synthetic oligonucleotide
  Sense strand starting at position 3279 of SEQ ID NO: 585590
gugagugagcccuaaucug

SEQ ID NO: 651975 - RNA, 19 nt, Artificial Sequence
  Description of Artificial Sequence: Synthetic oligonucleotide
  Antisense strand to SEQ ID NO: 651974
cagauuagggcucacucac

SEQ ID NO: 651976 - RNA, 19 nt, Artificial Sequence
  Description of Artificial Sequence: Synthetic oligonucleotide
  Sense strand starting at position 3606 of SEQ ID NO: 585590
ccagcacuuugacuugaau

SEQ ID NO: 651977 - RNA, 19 nt, Artificial Sequence
  Description of Artificial Sequence: Synthetic oligonucleotide
  Antisense strand to SEQ ID NO: 651976
auucaagucaaagugcugg

SEQ ID NO: 651978 - RNA, 19 nt, Artificial Sequence
  Description of Artificial Sequence: Synthetic oligonucleotide
  Sense strand starting at position 3646 of SEQ ID NO: 585590
agacuaaacuacucucgaa

SEQ ID NO: 651979 - RNA, 19 nt, Artificial Sequence
  Description of Artificial Sequence: Synthetic oligonucleotide
  Antisense strand to SEQ ID NO: 651978
uucgagaguaguuuagucu

SEQ ID NO: 651980 - RNA, 19 nt, Artificial Sequence
  Description of Artificial Sequence: Synthetic oligonucleotide
  Sense strand starting at position 3680 of SEQ ID NO: 585590
gaauucuagugacucuuga

SEQ ID NO: 651981 - RNA, 19 nt, Artificial Sequence
  Description of Artificial Sequence: Synthetic oligonucleotide
  Antisense strand to SEQ ID NO: 651980
ucaagagucacuagaauuc

SEQ ID NO: 651982 - RNA, 19 nt, Artificial Sequence
  Description of Artificial Sequence: Synthetic oligonucleotide
  Sense strand starting at position 3697 of SEQ ID NO: 585590
gaacuaagauguguuuccu

SEQ ID NO: 651983 - RNA, 19 nt, Artificial Sequence
  Description of Artificial Sequence: Synthetic oligonucleotide
  Antisense strand to SEQ ID NO: 651982
aggaaacacaucuuaguuc

SEQ ID NO: 651984 - RNA, 19 nt, Artificial Sequence
  Description of Artificial Sequence: Synthetic oligonucleotide
  Sense strand starting at position 3703 of SEQ ID NO: 585590
agauguguuuccuuaacca

SEQ ID NO: 651985 - RNA, 19 nt, Artificial Sequence
  Description of Artificial Sequence: Synthetic oligonucleotide
  Antisense strand to SEQ ID NO: 651984
ugguuaaggaaacacaucu

SEQ ID NO: 651986 - RNA, 19 nt, Artificial Sequence
  Description of Artificial Sequence: Synthetic oligonucleotide
  Sense strand starting at position 3770 of SEQ ID NO: 585590
cuucgauuugcuugggugu

SEQ ID NO: 651987 - RNA, 19 nt, Artificial Sequence
  Description of Artificial Sequence: Synthetic oligonucleotide
  Antisense strand to SEQ ID NO: 651986
acacccaagcaaaucgaag

SEQ ID NO: 651988 - RNA, 19 nt, Artificial Sequence
  Description of Artificial Sequence: Synthetic oligonucleotide
  Sense strand starting at position 3852 of SEQ ID NO: 585590
gaccucaaguugucugagu

SEQ ID NO: 651989 - RNA, 19 nt, Artificial Sequence
  Description of Artificial Sequence: Synthetic oligonucleotide
  Antisense strand to SEQ ID NO: 651988
acucagacaacuugagguc

SEQ ID NO: 651990 - RNA, 19 nt, Artificial Sequence
  Description of Artificial Sequence: Synthetic oligonucleotide
  Sense strand starting at position 3955 of SEQ ID NO: 585590
gcccuugauuggguaacaa

SEQ ID NO: 651991 - RNA, 19 nt, Artificial Sequence
  Description of Artificial Sequence: Synthetic oligonucleotide
  Antisense strand to SEQ ID NO: 651990
uuguuacccaaucaagggc

SEQ ID NO: 651992 - RNA, 19 nt, Artificial Sequence
  Description of Artificial Sequence: Synthetic oligonucleotide
  Sense strand starting at position 3978 of SEQ ID NO: 585590
gcuuaugugcgagaucaac

SEQ ID NO: 651993 - RNA, 19 nt, Artificial Sequence
  Description of Artificial Sequence: Synthetic oligonucleotide
  Antisense strand to SEQ ID NO: 651992
guugaucucgcacauaagc

SEQ ID NO: 651994 - RNA, 19 nt, Artificial Sequence
  Description of Artificial Sequence: Synthetic oligonucleotide
  Sense strand starting at position 67 of SEQ ID NO: 585591
aagugagguauuggugaaa

SEQ ID NO: 651995 - RNA, 19 nt, Artificial Sequence
  Description of Artificial Sequence: Synthetic oligonucleotide
  Antisense strand to SEQ ID NO: 651994
uuucaccaauaccucacuu

SEQ ID NO: 651996 - RNA, 19 nt, Artificial Sequence
  Description of Artificial Sequence: Synthetic oligonucleotide
  Sense strand starting at position 97 of SEQ ID NO: 585591
agaacaguuucucuccagu

SEQ ID NO: 651997 - RNA, 19 nt, Artificial Sequence
  Description of Artificial Sequence: Synthetic oligonucleotide
  Antisense strand to SEQ ID NO: 651996
acuggagagaaacuguucu

SEQ ID NO: 651998 - RNA, 19 nt, Artificial Sequence
  Description of Artificial Sequence: Synthetic oligonucleotide
  Sense strand starting at position 100 of SEQ ID NO: 585591
acaguuucucuccaguaac

SEQ ID NO: 651999 - RNA, 19 nt, Artificial Sequence
  Description of Artificial Sequence: Synthetic oligonucleotide
  Antisense strand to SEQ ID NO: 651998
guuacuggagagaaacugu

SEQ ID NO: 652000 - RNA, 19 nt, Artificial Sequence
  Description of Artificial Sequence: Synthetic oligonucleotide
  Sense strand starting at position 369 of SEQ ID NO: 585591
agguuagagaacuguguau

SEQ ID NO: 652001 - RNA, 19 nt, Artificial Sequence
  Description of Artificial Sequence: Synthetic oligonucleotide
  Antisense strand to SEQ ID NO: 652000
auacacaguucucuaaccu

SEQ ID NO: 652002 - RNA, 19 nt, Artificial Sequence
  Description of Artificial Sequence: Synthetic oligonucleotide
  Sense strand starting at position 371 of SEQ ID NO: 585591
guuagagaacuguguauuc

SEQ ID NO: 652003 - RNA, 19 nt, Artificial Sequence
  Description of Artificial Sequence: Synthetic oligonucleotide
  Antisense strand to SEQ ID NO: 652002
gaauacacaguucucuaac

SEQ ID NO: 652004 - RNA, 19 nt, Artificial Sequence
  Description of Artificial Sequence: Synthetic oligonucleotide
  Sense strand starting at position 373 of SEQ ID NO: 585591
uagagaacuguguauucuu

SEQ ID NO: 652005 - RNA, 19 nt, Artificial Sequence
  Description of Artificial Sequence: Synthetic oligonucleotide
  Antisense strand to SEQ ID NO: 652004
aagaauacacaguucucua

SEQ ID NO: 652006 - RNA, 19 nt, Artificial Sequence
  Description of Artificial Sequence: Synthetic oligonucleotide
  Sense strand starting at position 469 of SEQ ID NO: 585591
gggagaguuaaggguugua

SEQ ID NO: 652007 - RNA, 19 nt, Artificial Sequence
  Description of Artificial Sequence: Synthetic oligonucleotide
  Antisense strand to SEQ ID NO: 652006
uacaacccuuaacucuccc

SEQ ID NO: 652008 - RNA, 19 nt, Artificial Sequence
  Description of Artificial Sequence: Synthetic oligonucleotide
  Sense strand starting at position 472 of SEQ ID NO: 585591
agaguuaaggguuguauau

SEQ ID NO: 652009 - RNA, 19 nt, Artificial Sequence
  Description of Artificial Sequence: Synthetic oligonucleotide
  Antisense strand to SEQ ID NO: 652008
auauacaacccuuaacucu

SEQ ID NO: 652010 - RNA, 19 nt, Artificial Sequence
  Description of Artificial Sequence: Synthetic oligonucleotide
  Sense strand starting at position 482 of SEQ ID NO: 585591
guuguauauacaggcaaga

SEQ ID NO: 652011 - RNA, 19 nt, Artificial Sequence
  Description of Artificial Sequence: Synthetic oligonucleotide
  Antisense strand to SEQ ID NO: 652010
ucuugccuguauauacaac

SEQ ID NO: 652012 - RNA, 19 nt, Artificial Sequence
  Description of Artificial Sequence: Synthetic oligonucleotide
  Sense strand starting at position 556 of SEQ ID NO: 585591
agagauuccaagugcaaga

SEQ ID NO: 652013 - RNA, 19 nt, Artificial Sequence
  Description of Artificial Sequence: Synthetic oligonucleotide
  Antisense strand to SEQ ID NO: 652012
ucuugcacuuggaaucucu

SEQ ID NO: 652014 - RNA, 19 nt, Artificial Sequence
  Description of Artificial Sequence: Synthetic oligonucleotide
  Sense strand starting at position 640 of SEQ ID NO: 585591
agaagugccuggucaggaa

SEQ ID NO: 652015 - RNA, 19 nt, Artificial Sequence
  Description of Artificial Sequence: Synthetic oligonucleotide
  Antisense strand to SEQ ID NO: 652014
uuccugaccaggcacuucu

SEQ ID NO: 652016 - RNA, 19 nt, Artificial Sequence
  Description of Artificial Sequence: Synthetic oligonucleotide
  Sense strand starting at position 656 of SEQ ID NO: 585591
gaaacagagccagguguuu

SEQ ID NO: 652017 - RNA, 19 nt, Artificial Sequence
  Description of Artificial Sequence: Synthetic oligonucleotide
  Antisense strand to SEQ ID NO: 652016
aaacaccuggcucuguuuc

SEQ ID NO: 652018 - RNA, 19 nt, Artificial Sequence
  Description of Artificial Sequence: Synthetic oligonucleotide
  Sense strand starting at position 932 of SEQ ID NO: 585591
cacuauggagagugcuaaa

SEQ ID NO: 652019 - RNA, 19 nt, Artificial Sequence
  Description of Artificial Sequence: Synthetic oligonucleotide
  Antisense strand to SEQ ID NO: 652018
uuuagcacucuccauagug

SEQ ID NO: 652020 - RNA, 19 nt, Artificial Sequence
  Description of Artificial Sequence: Synthetic oligonucleotide
  Sense strand starting at position 939 of SEQ ID NO: 585591
gagagugcuaaacgcaaga

SEQ ID NO: 652021 - RNA, 19 nt, Artificial Sequence
  Description of Artificial Sequence: Synthetic oligonucleotide
  Antisense strand to SEQ ID NO: 652020
ucuugcguuuagcacucuc

SEQ ID NO: 652022 - RNA, 19 nt, Artificial Sequence
  Description of Artificial Sequence: Synthetic oligonucleotide
  Sense strand starting at position 1481 of SEQ ID NO: 585591
auccuagucagguggauau

SEQ ID NO: 652023 - RNA, 19 nt, Artificial Sequence
  Description of Artificial Sequence: Synthetic oligonucleotide
  Antisense strand to SEQ ID NO: 652022
auauccaccugacuaggau

SEQ ID NO: 652024 - RNA, 19 nt, Artificial Sequence
  Description of Artificial Sequence: Synthetic oligonucleotide
  Sense strand starting at position 1494 of SEQ ID NO: 585591
ggauauggaucugaggaag

SEQ ID NO: 652025 - RNA, 19 nt, Artificial Sequence
  Description of Artificial Sequence: Synthetic oligonucleotide
  Antisense strand to SEQ ID NO: 652024
cuuccucagauccauaucc

SEQ ID NO: 652026 - RNA, 19 nt, Artificial Sequence
  Description of Artificial Sequence: Synthetic oligonucleotide
  Sense strand starting at position 1607 of SEQ ID NO: 585591
aaaccuuaucucgguaaug

SEQ ID NO: 652027 - RNA, 19 nt, Artificial Sequence
  Description of Artificial Sequence: Synthetic oligonucleotide
  Antisense strand to SEQ ID NO: 652026
cauuaccgagauaagguuu

SEQ ID NO: 652028 - RNA, 19 nt, Artificial Sequence
  Description of Artificial Sequence: Synthetic oligonucleotide
  Sense strand starting at position 1640 of SEQ ID NO: 585591
gugcauugggcgagaccau

SEQ ID NO: 652029 - RNA, 19 nt, Artificial Sequence
  Description of Artificial Sequence: Synthetic oligonucleotide
  Antisense strand to SEQ ID NO: 652028
auggucucgcccaaugcac

SEQ ID NO: 652030 - RNA, 19 nt, Artificial Sequence
  Description of Artificial Sequence: Synthetic oligonucleotide
  Sense strand starting at position 1641 of SEQ ID NO: 585591
ugcauugggcgagaccaua

SEQ ID NO: 652031 - RNA, 19 nt, Artificial Sequence
  Description of Artificial Sequence: Synthetic oligonucleotide
  Antisense strand to SEQ ID NO: 652030
uauggucucgcccaaugca

SEQ ID NO: 652032 - RNA, 19 nt, Artificial Sequence
  Description of Artificial Sequence: Synthetic oligonucleotide
  Sense strand starting at position 1992 of SEQ ID NO: 585591
aguaauaaacccggaagua

SEQ ID NO: 652033 - RNA, 19 nt, Artificial Sequence
  Description of Artificial Sequence: Synthetic oligonucleotide
  Antisense strand to SEQ ID NO: 652032
uacuuccggguuuauuacu

SEQ ID NO: 652034 - RNA, 19 nt, Artificial Sequence
  Description of Artificial Sequence: Synthetic oligonucleotide
  Sense strand starting at position 2029 of SEQ ID NO: 585591
aagacugugccggaaguuu

SEQ ID NO: 652035 - RNA, 19 nt, Artificial Sequence
  Description of Artificial Sequence: Synthetic oligonucleotide
  Antisense strand to SEQ ID NO: 652034
aaacuuccggcacagucuu

SEQ ID NO: 652036 - RNA, 19 nt, Artificial Sequence
  Description of Artificial Sequence: Synthetic oligonucleotide
  Sense strand starting at position 2038 of SEQ ID NO: 585591
ccggaaguuucuuucugac

SEQ ID NO: 652037 - RNA, 19 nt, Artificial Sequence
  Description of Artificial Sequence: Synthetic oligonucleotide
  Antisense strand to SEQ ID NO: 652036
gucagaaagaaacuuccgg

SEQ ID NO: 652038 - RNA, 19 nt, Artificial Sequence
  Description of Artificial Sequence: Synthetic oligonucleotide
  Sense strand starting at position 2044 of SEQ ID NO: 585591
guuucuuucugacccuuga

SEQ ID NO: 652039 - RNA, 19 nt, Artificial Sequence
  Description of Artificial Sequence: Synthetic oligonucleotide
  Antisense strand to SEQ ID NO: 652038
ucaagggucagaaagaaac

SEQ ID NO: 652040 - RNA, 19 nt, Artificial Sequence
  Description of Artificial Sequence: Synthetic oligonucleotide
  Sense strand starting at position 2110 of SEQ ID NO: 585591
agacuagacuaggacauuu

SEQ ID NO: 652041 - RNA, 19 nt, Artificial Sequence
  Description of Artificial Sequence: Synthetic oligonucleotide
  Antisense strand to SEQ ID NO: 652040
aaauguccuagucuagucu

SEQ ID NO: 652042 - RNA, 19 nt, Artificial Sequence
  Description of Artificial Sequence: Synthetic oligonucleotide
  Sense strand starting at position 2454 of SEQ ID NO: 585591
ggaugucccgcccaagaaa

SEQ ID NO: 652043 - RNA, 19 nt, Artificial Sequence
  Description of Artificial Sequence: Synthetic oligonucleotide
  Antisense strand to SEQ ID NO: 652042
uuucuugggcgggacaucc

SEQ ID NO: 652044 - RNA, 19 nt, Artificial Sequence
  Description of Artificial Sequence: Synthetic oligonucleotide
  Sense strand starting at position 2668 of SEQ ID NO: 585591
ggagcuccguccucagaga

SEQ ID NO: 652045 - RNA, 19 nt, Artificial Sequence
  Description of Artificial Sequence: Synthetic oligonucleotide
  Antisense strand to SEQ ID NO: 652044
ucucugaggacggagcucc

SEQ ID NO: 652046 - RNA, 19 nt, Artificial Sequence
  Description of Artificial Sequence: Synthetic oligonucleotide
  Sense strand starting at position 2712 of SEQ ID NO: 585591
agucucggaucucuaagaa

SEQ ID NO: 652047 - RNA, 19 nt, Artificial Sequence
  Description of Artificial Sequence: Synthetic oligonucleotide
  Antisense strand to SEQ ID NO: 652046
uucuuagagauccgagacu

SEQ ID NO: 652048 - RNA, 19 nt, Artificial Sequence
  Description of Artificial Sequence: Synthetic oligonucleotide
  Sense strand starting at position 2731 of SEQ ID NO: 585591
gccucaggucccgaagaaa

SEQ ID NO: 652049 - RNA, 19 nt, Artificial Sequence
  Description of Artificial Sequence: Synthetic oligonucleotide
  Antisense strand to SEQ ID NO: 652048
uuucuucgggaccugaggc

SEQ ID NO: 652050 - RNA, 19 nt, Artificial Sequence
  Description of Artificial Sequence: Synthetic oligonucleotide
  Sense strand starting at position 2940 of SEQ ID NO: 585591
guggaagugguccagaagu

SEQ ID NO: 652051 - RNA, 19 nt, Artificial Sequence
  Description of Artificial Sequence: Synthetic oligonucleotide
  Antisense strand to SEQ ID NO: 652050
acuucuggaccacuuccac

SEQ ID NO: 652052 - RNA, 19 nt, Artificial Sequence
  Description of Artificial Sequence: Synthetic oligonucleotide
  Sense strand starting at position 2942 of SEQ ID NO: 585591
ggaagugguccagaaguuc

SEQ ID NO: 652053 - RNA, 19 nt, Artificial Sequence
  Description of Artificial Sequence: Synthetic oligonucleotide
  Antisense strand to SEQ ID NO: 652052
gaacuucuggaccacuucc

SEQ ID NO: 652054 - RNA, 19 nt, Artificial Sequence
  Description of Artificial Sequence: Synthetic oligonucleotide
  Sense strand starting at position 3241 of SEQ ID NO: 585591
gugagugagcccuaaucug

SEQ ID NO: 652055 - RNA, 19 nt, Artificial Sequence
  Description of Artificial Sequence: Synthetic oligonucleotide
  Antisense strand to SEQ ID NO: 652054
cagauuagggcucacucac

SEQ ID NO: 652056 - RNA, 19 nt, Artificial Sequence
  Description of Artificial Sequence: Synthetic oligonucleotide
  Sense strand starting at position 3568 of SEQ ID NO: 585591
ccagcacuuugacuugaau

SEQ ID NO: 652057 - RNA, 19 nt, Artificial Sequence
  Description of Artificial Sequence: Synthetic oligonucleotide
  Antisense strand to SEQ ID NO: 652056
auucaagucaaagugcugg

SEQ ID NO: 652058 - RNA, 19 nt, Artificial Sequence
  Description of Artificial Sequence: Synthetic oligonucleotide
  Sense strand starting at position 3608 of SEQ ID NO: 585591
agacuaaacuacucucgaa

SEQ ID NO: 652059 - RNA, 19 nt, Artificial Sequence
  Description of Artificial Sequence: Synthetic oligonucleotide
  Antisense strand to SEQ ID NO: 652058
uucgagaguaguuuagucu

SEQ ID NO: 652060 - RNA, 19 nt, Artificial Sequence
  Description of Artificial Sequence: Synthetic oligonucleotide
  Sense strand starting at position 3642 of SEQ ID NO: 585591
gaauucuagugacucuuga

SEQ ID NO: 652061 - RNA, 19 nt, Artificial Sequence
  Description of Artificial Sequence: Synthetic oligonucleotide
  Antisense strand to SEQ ID NO: 652060
ucaagagucacuagaauuc

SEQ ID NO: 652062 - RNA, 19 nt, Artificial Sequence
  Description of Artificial Sequence: Synthetic oligonucleotide
  Sense strand starting at position 3659 of SEQ ID NO: 585591
gaacuaagauguguuuccu

SEQ ID NO: 652063 - RNA, 19 nt, Artificial Sequence
  Description of Artificial Sequence: Synthetic oligonucleotide
  Antisense strand to SEQ ID NO: 652062
aggaaacacaucuuaguuc

SEQ ID NO: 652064 - RNA, 19 nt, Artificial Sequence
  Description of Artificial Sequence: Synthetic oligonucleotide
  Sense strand starting at position 3665 of SEQ ID NO: 585591
agauguguuuccuuaacca

SEQ ID NO: 652065 - RNA, 19 nt, Artificial Sequence
  Description of Artificial Sequence: Synthetic oligonucleotide
  Antisense strand to SEQ ID NO: 652064
ugguuaaggaaacacaucu

SEQ ID NO: 652066 - RNA, 19 nt, Artificial Sequence
  Description of Artificial Sequence: Synthetic oligonucleotide
  Sense strand starting at position 3732 of SEQ ID NO: 585591
cuucgauuugcuugggugu

SEQ ID NO: 652067 - RNA, 19 nt, Artificial Sequence
  Description of Artificial Sequence: Synthetic oligonucleotide
  Antisense strand to SEQ ID NO: 652066
acacccaagcaaaucgaag

SEQ ID NO: 652068 - RNA, 19 nt, Artificial Sequence
  Description of Artificial Sequence: Synthetic oligonucleotide
  Sense strand starting at position 3814 of SEQ ID NO: 585591
gaccucaaguugucugagu

SEQ ID NO: 652069 - RNA, 19 nt, Artificial Sequence
  Description of Artificial Sequence: Synthetic oligonucleotide
  Antisense strand to SEQ ID NO: 652068
acucagacaacuugagguc

SEQ ID NO: 652070 - RNA, 19 nt, Artificial Sequence
  Description of Artificial Sequence: Synthetic oligonucleotide
  Sense strand starting at position 3917 of SEQ ID NO: 585591
gcccuugauuggguaacaa

SEQ ID NO: 652071 - RNA, 19 nt, Artificial Sequence
  Description of Artificial Sequence: Synthetic oligonucleotide
  Antisense strand to SEQ ID NO: 652070
uuguuacccaaucaagggc

SEQ ID NO: 652072 - RNA, 19 nt, Artificial Sequence
  Description of Artificial Sequence: Synthetic oligonucleotide
  Sense strand starting at position 3940 of SEQ ID NO: 585591
gcuuaugugcgagaucaac

SEQ ID NO: 652073 - RNA, 19 nt, Artificial Sequence
  Description of Artificial Sequence: Synthetic oligonucleotide
  Antisense strand to SEQ ID NO: 652072
guugaucucgcacauaagc

SEQ ID NO: 652074 - RNA, 19 nt, Artificial Sequence
  Description of Artificial Sequence: Synthetic oligonucleotide
  Sense strand starting at position 110 of SEQ ID NO: 585592
ucuauaucuguguaacucu

SEQ ID NO: 652075 - RNA, 19 nt, Artificial Sequence
  Description of Artificial Sequence: Synthetic oligonucleotide
  Antisense strand to SEQ ID NO: 652074
agaguuacacagauauaga

SEQ ID NO: 652076 - RNA, 19 nt, Artificial Sequence
  Description of Artificial Sequence: Synthetic oligonucleotide
  Sense strand starting at position 119 of SEQ ID NO: 585592
guguaacucucauugaaua

SEQ ID NO: 652077 - RNA, 19 nt, Artificial Sequence
  Description of Artificial Sequence: Synthetic oligonucleotide
  Antisense strand to SEQ ID NO: 652076
uauucaaugagaguuacac

SEQ ID NO: 652078 - RNA, 19 nt, Artificial Sequence
  Description of Artificial Sequence: Synthetic oligonucleotide
  Sense strand starting at position 142 of SEQ ID NO: 585592
acuuuaaauguagguguaa

SEQ ID NO: 652079 - RNA, 19 nt, Artificial Sequence
  Description of Artificial Sequence: Synthetic oligonucleotide
  Antisense strand to SEQ ID NO: 652078
uuacaccuacauuuaaagu

SEQ ID NO: 652080 - RNA, 19 nt, Artificial Sequence
  Description of Artificial Sequence: Synthetic oligonucleotide
  Sense strand starting at position 151 of SEQ ID NO: 585592
guagguguaacagaauguu

SEQ ID NO: 652081 - RNA, 19 nt, Artificial Sequence
  Description of Artificial Sequence: Synthetic oligonucleotide
  Antisense strand to SEQ ID NO: 652080
aacauucuguuacaccuac

SEQ ID NO: 652082 - RNA, 19 nt, Artificial Sequence
  Description of Artificial Sequence: Synthetic oligonucleotide
  Sense strand starting at position 157 of SEQ ID NO: 585592
guaacagaauguuuccaaa

SEQ ID NO: 652083 - RNA, 19 nt, Artificial Sequence
  Description of Artificial Sequence: Synthetic oligonucleotide
  Antisense strand to SEQ ID NO: 652082
uuuggaaacauucuguuac

SEQ ID NO: 652084 - RNA, 19 nt, Artificial Sequence
  Description of Artificial Sequence: Synthetic oligonucleotide
  Sense strand starting at position 261 of SEQ ID NO: 585592
ucuguucuggccuaugacu

SEQ ID NO: 652085 - RNA, 19 nt, Artificial Sequence
  Description of Artificial Sequence: Synthetic oligonucleotide
  Antisense strand to SEQ ID NO: 652084
agucauaggccagaacaga

SEQ ID NO: 652086 - RNA, 19 nt, Artificial Sequence
  Description of Artificial Sequence: Synthetic oligonucleotide
  Sense strand starting at position 342 of SEQ ID NO: 585592
ggcucacugccauaagacu

SEQ ID NO: 652087 - RNA, 19 nt, Artificial Sequence
  Description of Artificial Sequence: Synthetic oligonucleotide
  Antisense strand to SEQ ID NO: 652086
agucuuauggcagugagcc

SEQ ID NO: 652088 - RNA, 19 nt, Artificial Sequence
  Description of Artificial Sequence: Synthetic oligonucleotide
  Sense strand starting at position 441 of SEQ ID NO: 585592
aggccuagugcucaaauaa

SEQ ID NO: 652089 - RNA, 19 nt, Artificial Sequence
  Description of Artificial Sequence: Synthetic oligonucleotide
  Antisense strand to SEQ ID NO: 652088
uuauuugagcacuaggccu

SEQ ID NO: 652090 - RNA, 19 nt, Artificial Sequence
  Description of Artificial Sequence: Synthetic oligonucleotide
  Sense strand starting at position 483 of SEQ ID NO: 585592
uuaguaacuccaggugaga

SEQ ID NO: 652091 - RNA, 19 nt, Artificial Sequence
  Description of Artificial Sequence: Synthetic oligonucleotide
  Antisense strand to SEQ ID NO: 652090
ucucaccuggaguuacuaa

SEQ ID NO: 652092 - RNA, 19 nt, Artificial Sequence
  Description of Artificial Sequence: Synthetic oligonucleotide
  Sense strand starting at position 504 of SEQ ID NO: 585592
aguagaaccgccuagucaa

SEQ ID NO: 652093 - RNA, 19 nt, Artificial Sequence
  Description of Artificial Sequence: Synthetic oligonucleotide
  Antisense strand to SEQ ID NO: 652092
uugacuaggcgguucuacu

SEQ ID NO: 652094 - RNA, 19 nt, Artificial Sequence
  Description of Artificial Sequence: Synthetic oligonucleotide
  Sense strand starting at position 524 of SEQ ID NO: 585592
ccgcauaauccugaggaac

SEQ ID NO: 652095 - RNA, 19 nt, Artificial Sequence
  Description of Artificial Sequence: Synthetic oligonucleotide
  Antisense strand to SEQ ID NO: 652094
guuccucaggauuaugcgg

SEQ ID NO: 652096 - RNA, 19 nt, Artificial Sequence
  Description of Artificial Sequence: Synthetic oligonucleotide
  Sense strand starting at position 663 of SEQ ID NO: 585592
uugugaucuccuuagucac

SEQ ID NO: 652097 - RNA, 19 nt, Artificial Sequence
  Description of Artificial Sequence: Synthetic oligonucleotide
  Antisense strand to SEQ ID NO: 652096
gugacuaaggagaucacaa

SEQ ID NO: 652098 - RNA, 19 nt, Artificial Sequence
  Description of Artificial Sequence: Synthetic oligonucleotide
  Sense strand starting at position 838 of SEQ ID NO: 585592
gcguucacucgguauuucu

SEQ ID NO: 652099 - RNA, 19 nt, Artificial Sequence
  Description of Artificial Sequence: Synthetic oligonucleotide
  Antisense strand to SEQ ID NO: 652098
agaaauaccgagugaacgc

SEQ ID NO: 652100 - RNA, 19 nt, Artificial Sequence
  Description of Artificial Sequence: Synthetic oligonucleotide
  Sense strand starting at position 914 of SEQ ID NO: 585592
auacacaaucagugaguca

SEQ ID NO: 652101 - RNA, 19 nt, Artificial Sequence
  Description of Artificial Sequence: Synthetic oligonucleotide
  Antisense strand to SEQ ID NO: 652100
ugacucacugauuguguau

SEQ ID NO: 652102 - RNA, 19 nt, Artificial Sequence
  Description of Artificial Sequence: Synthetic oligonucleotide
  Sense strand starting at position 1042 of SEQ ID NO: 585592
cuucuauggucacuggauu

SEQ ID NO: 652103 - RNA, 19 nt, Artificial Sequence
  Description of Artificial Sequence: Synthetic oligonucleotide
  Antisense strand to SEQ ID NO: 652102
aauccagugaccauagaag

SEQ ID NO: 652104 - RNA, 19 nt, Artificial Sequence
  Description of Artificial Sequence: Synthetic oligonucleotide
  Sense strand starting at position 1131 of SEQ ID NO: 585592
ucauuaaacucguugaagu

SEQ ID NO: 652105 - RNA, 19 nt, Artificial Sequence
  Description of Artificial Sequence: Synthetic oligonucleotide
  Antisense strand to SEQ ID NO: 652104
acuucaacgaguuuaauga

SEQ ID NO: 652106 - RNA, 19 nt, Artificial Sequence
  Description of Artificial Sequence: Synthetic oligonucleotide
  Sense strand starting at position 1132 of SEQ ID NO: 585592
cauuaaacucguugaagua

SEQ ID NO: 652107 - RNA, 19 nt, Artificial Sequence
  Description of Artificial Sequence: Synthetic oligonucleotide
  Antisense strand to SEQ ID NO: 652106
uacuucaacgaguuuaaug

SEQ ID NO: 652108 - RNA, 19 nt, Artificial Sequence
  Description of Artificial Sequence: Synthetic oligonucleotide
  Sense strand starting at position 1133 of SEQ ID NO: 585592
auuaaacucguugaaguaa

SEQ ID NO: 652109 - RNA, 19 nt, Artificial Sequence
  Description of Artificial Sequence: Synthetic oligonucleotide
  Antisense strand to SEQ ID NO: 652108
uuacuucaacgaguuuaau

SEQ ID NO: 652110 - RNA, 19 nt, Artificial Sequence
  Description of Artificial Sequence: Synthetic oligonucleotide
  Sense strand starting at position 1186 of SEQ ID NO: 585592
uuugcugauuuguuuguca

SEQ ID NO: 652111 - RNA, 19 nt, Artificial Sequence
  Description of Artificial Sequence: Synthetic oligonucleotide
  Antisense strand to SEQ ID NO: 652110
ugacaaacaaaucagcaaa

SEQ ID NO: 652112 - RNA, 19 nt, Artificial Sequence
  Description of Artificial Sequence: Synthetic oligonucleotide
  Sense strand starting at position 1188 of SEQ ID NO: 585592
ugcugauuuguuugucacu

SEQ ID NO: 652113 - RNA, 19 nt, Artificial Sequence
  Description of Artificial Sequence: Synthetic oligonucleotide
  Antisense strand to SEQ ID NO: 652112
agugacaaacaaaucagca

SEQ ID NO: 652114 - RNA, 19 nt, Artificial Sequence
  Description of Artificial Sequence: Synthetic oligonucleotide
  Sense strand starting at position 1190 of SEQ ID NO: 585592
cugauuuguuugucacuca

SEQ ID NO: 652115 - RNA, 19 nt, Artificial Sequence
  Description of Artificial Sequence: Synthetic oligonucleotide
  Antisense strand to SEQ ID NO: 652114
ugagugacaaacaaaucag

SEQ ID NO: 652116 - RNA, 19 nt, Artificial Sequence
  Description of Artificial Sequence: Synthetic oligonucleotide
  Sense strand starting at position 1284 of SEQ ID NO: 585592
ucaagaaagccauggucuu

SEQ ID NO: 652117 - RNA, 19 nt, Artificial Sequence
  Description of Artificial Sequence: Synthetic oligonucleotide
  Antisense strand to SEQ ID NO: 652116
aagaccauggcuuucuuga

SEQ ID NO: 652118 - RNA, 19 nt, Artificial Sequence
  Description of Artificial Sequence: Synthetic oligonucleotide
  Sense strand starting at position 1576 of SEQ ID NO: 585592
acaggaguuuaucucugca

SEQ ID NO: 652119 - RNA, 19 nt, Artificial Sequence
  Description of Artificial Sequence: Synthetic oligonucleotide
  Antisense strand to SEQ ID NO: 652118
ugcagagauaaacuccugu

SEQ ID NO: 652120 - RNA, 19 nt, Artificial Sequence
  Description of Artificial Sequence: Synthetic oligonucleotide
  Sense strand starting at position 1578 of SEQ ID NO: 585592
aggaguuuaucucugcaua

SEQ ID NO: 652121 - RNA, 19 nt, Artificial Sequence
  Description of Artificial Sequence: Synthetic oligonucleotide
  Antisense strand to SEQ ID NO: 652120
uaugcagagauaaacuccu

SEQ ID NO: 652122 - RNA, 19 nt, Artificial Sequence
  Description of Artificial Sequence: Synthetic oligonucleotide
  Sense strand starting at position 1579 of SEQ ID NO: 585592
ggaguuuaucucugcauag

SEQ ID NO: 652123 - RNA, 19 nt, Artificial Sequence
  Description of Artificial Sequence: Synthetic oligonucleotide
  Antisense strand to SEQ ID NO: 652122
cuaugcagagauaaacucc

SEQ ID NO: 652124 - RNA, 19 nt, Artificial Sequence
  Description of Artificial Sequence: Synthetic oligonucleotide
  Sense strand starting at position 1580 of SEQ ID NO: 585592
gaguuuaucucugcauaga

SEQ ID NO: 652125 - RNA, 19 nt, Artificial Sequence
  Description of Artificial Sequence: Synthetic oligonucleotide
  Antisense strand to SEQ ID NO: 652124
ucuaugcagagauaaacuc

SEQ ID NO: 652126 - RNA, 19 nt, Artificial Sequence
  Description of Artificial Sequence: Synthetic oligonucleotide
  Sense strand starting at position 1581 of SEQ ID NO: 585592
aguuuaucucugcauagac

SEQ ID NO: 652127 - RNA, 19 nt, Artificial Sequence
  Description of Artificial Sequence: Synthetic oligonucleotide
  Antisense strand to SEQ ID NO: 652126
gucuaugcagagauaaacu

SEQ ID NO: 652128 - RNA, 19 nt, Artificial Sequence
  Description of Artificial Sequence: Synthetic oligonucleotide
  Sense strand starting at position 2558 of SEQ ID NO: 585592
uaaguaauacuguaugagu

SEQ ID NO: 652129 - RNA, 19 nt, Artificial Sequence
  Description of Artificial Sequence: Synthetic oligonucleotide
  Antisense strand to SEQ ID NO: 652128
acucauacaguauuacuua

SEQ ID NO: 652130 - RNA, 19 nt, Artificial Sequence
  Description of Artificial Sequence: Synthetic oligonucleotide
  Sense strand starting at position 2606 of SEQ ID NO: 585592
augcauacuuagguuauau

SEQ ID NO: 652131 - RNA, 19 nt, Artificial Sequence
  Description of Artificial Sequence: Synthetic oligonucleotide
  Antisense strand to SEQ ID NO: 652130
auauaaccuaaguaugcau

SEQ ID NO: 652132 - RNA, 19 nt, Artificial Sequence
  Description of Artificial Sequence: Synthetic oligonucleotide
  Sense strand starting at position 2782 of SEQ ID NO: 585592
gggcacuucuguuuaagag

SEQ ID NO: 652133 - RNA, 19 nt, Artificial Sequence
  Description of Artificial Sequence: Synthetic oligonucleotide
  Antisense strand to SEQ ID NO: 652132
cucuuaaacagaagugccc

SEQ ID NO: 652134 - RNA, 19 nt, Artificial Sequence
  Description of Artificial Sequence: Synthetic oligonucleotide
  Sense strand starting at position 2783 of SEQ ID NO: 585592
ggcacuucuguuuaagagu

SEQ ID NO: 652135 - RNA, 19 nt, Artificial Sequence
  Description of Artificial Sequence: Synthetic oligonucleotide
  Antisense strand to SEQ ID NO: 652134
acucuuaaacagaagugcc

SEQ ID NO: 652136 - RNA, 19 nt, Artificial Sequence
  Description of Artificial Sequence: Synthetic oligonucleotide
  Sense strand starting at position 3056 of SEQ ID NO: 585592
gcuguaucacaugguaaga

SEQ ID NO: 652137 - RNA, 19 nt, Artificial Sequence
  Description of Artificial Sequence: Synthetic oligonucleotide
  Antisense strand to SEQ ID NO: 652136
ucuuaccaugugauacagc

SEQ ID NO: 652138 - RNA, 19 nt, Artificial Sequence
  Description of Artificial Sequence: Synthetic oligonucleotide
  Sense strand starting at position 3161 of SEQ ID NO: 585592
ccuguuguuccacauccau

SEQ ID NO: 652139 - RNA, 19 nt, Artificial Sequence
  Description of Artificial Sequence: Synthetic oligonucleotide
  Antisense strand to SEQ ID NO: 652138
auggauguggaacaacagg

SEQ ID NO: 652140 - RNA, 19 nt, Artificial Sequence
  Description of Artificial Sequence: Synthetic oligonucleotide
  Sense strand starting at position 3330 of SEQ ID NO: 585592
uaaugaggugucugucaag

SEQ ID NO: 652141 - RNA, 19 nt, Artificial Sequence
  Description of Artificial Sequence: Synthetic oligonucleotide
  Antisense strand to SEQ ID NO: 652140
cuugacagacaccucauua

SEQ ID NO: 652142 - RNA, 19 nt, Artificial Sequence
  Description of Artificial Sequence: Synthetic oligonucleotide
  Sense strand starting at position 3369 of SEQ ID NO: 585592
ucggguuguuuccuuauuu

SEQ ID NO: 652143 - RNA, 19 nt, Artificial Sequence
  Description of Artificial Sequence: Synthetic oligonucleotide
  Antisense strand to SEQ ID NO: 652142
aaauaaggaaacaacccga

SEQ ID NO: 652144 - RNA, 19 nt, Artificial Sequence
  Description of Artificial Sequence: Synthetic oligonucleotide
  Sense strand starting at position 3370 of SEQ ID NO: 585592
cggguuguuuccuuauuuc

SEQ ID NO: 652145 - RNA, 19 nt, Artificial Sequence
  Description of Artificial Sequence: Synthetic oligonucleotide
  Antisense strand to SEQ ID NO: 652144
gaaauaaggaaacaacccg

SEQ ID NO: 652146 - RNA, 19 nt, Artificial Sequence
  Description of Artificial Sequence: Synthetic oligonucleotide
  Sense strand starting at position 3373 of SEQ ID NO: 585592
guuguuuccuuauuucuga

SEQ ID NO: 652147 - RNA, 19 nt, Artificial Sequence
  Description of Artificial Sequence: Synthetic oligonucleotide
  Antisense strand to SEQ ID NO: 652146
ucagaaauaaggaaacaac

SEQ ID NO: 652148 - RNA, 19 nt, Artificial Sequence
  Description of Artificial Sequence: Synthetic oligonucleotide
  Sense strand starting at position 3376 of SEQ ID NO: 585592
guuuccuuauuucugaguu

SEQ ID NO: 652149 - RNA, 19 nt, Artificial Sequence
  Description of Artificial Sequence: Synthetic oligonucleotide
  Antisense strand to SEQ ID NO: 652148
aacucagaaauaaggaaac

SEQ ID NO: 652150 - RNA, 19 nt, Artificial Sequence
  Description of Artificial Sequence: Synthetic oligonucleotide
  Sense strand starting at position 3490 of SEQ ID NO: 585592
aagaaauaagcuggccaga

SEQ ID NO: 652151 - RNA, 19 nt, Artificial Sequence
  Description of Artificial Sequence: Synthetic oligonucleotide
  Antisense strand to SEQ ID NO: 652150
ucuggccagcuuauuucuu

SEQ ID NO: 652152 - RNA, 19 nt, Artificial Sequence
  Description of Artificial Sequence: Synthetic oligonucleotide
  Sense strand starting at position 3492 of SEQ ID NO: 585592
gaaauaagcuggccagaca

SEQ ID NO: 652153 - RNA, 19 nt, Artificial Sequence
  Description of Artificial Sequence: Synthetic oligonucleotide
  Antisense strand to SEQ ID NO: 652152
ugucuggccagcuuauuuc

SEQ ID NO: 652154 - RNA, 19 nt, Artificial Sequence
  Description of Artificial Sequence: Synthetic oligonucleotide
  Sense strand starting at position 912 of SEQ ID NO: 585593
aguucugucccagcugcua

SEQ ID NO: 652155 - RNA, 19 nt, Artificial Sequence
  Description of Artificial Sequence: Synthetic oligonucleotide
  Antisense strand to SEQ ID NO: 652154
uagcagcugggacagaacu

SEQ ID NO: 652156 - RNA, 19 nt, Artificial Sequence
  Description of Artificial Sequence: Synthetic oligonucleotide
  Sense strand starting at position 995 of SEQ ID NO: 585593
gguggucuggagcacagau

SEQ ID NO: 652157 - RNA, 19 nt, Artificial Sequence
  Description of Artificial Sequence: Synthetic oligonucleotide
  Antisense strand to SEQ ID NO: 652156
aucugugcuccagaccacc

SEQ ID NO: 652158 - RNA, 19 nt, Artificial Sequence
  Description of Artificial Sequence: Synthetic oligonucleotide
  Sense strand starting at position 1008 of SEQ ID NO: 585593
acagaucagcucuggaguu

SEQ ID NO: 652159 - RNA, 19 nt, Artificial Sequence
  Description of Artificial Sequence: Synthetic oligonucleotide
  Antisense strand to SEQ ID NO: 652158
aacuccagagcugaucugu

SEQ ID NO: 652160 - RNA, 19 nt, Artificial Sequence
  Description of Artificial Sequence: Synthetic oligonucleotide
  Sense strand starting at position 1146 of SEQ ID NO: 585593
ugcucuaggcuccagaauu

SEQ ID NO: 652161 - RNA, 19 nt, Artificial Sequence
  Description of Artificial Sequence: Synthetic oligonucleotide
  Antisense strand to SEQ ID NO: 652160
aauucuggagccuagagca

SEQ ID NO: 652162 - RNA, 19 nt, Artificial Sequence
  Description of Artificial Sequence: Synthetic oligonucleotide
  Sense strand starting at position 1268 of SEQ ID NO: 585593
ugcauauugauaggaguuu

SEQ ID NO: 652163 - RNA, 19 nt, Artificial Sequence
  Description of Artificial Sequence: Synthetic oligonucleotide
  Antisense strand to SEQ ID NO: 652162
aaacuccuaucaauaugca

SEQ ID NO: 652164 - RNA, 19 nt, Artificial Sequence
  Description of Artificial Sequence: Synthetic oligonucleotide
  Sense strand starting at position 1313 of SEQ ID NO: 585593
ggaaguacucuuggguaga

SEQ ID NO: 652165 - RNA, 19 nt, Artificial Sequence
  Description of Artificial Sequence: Synthetic oligonucleotide
  Antisense strand to SEQ ID NO: 652164
ucuacccaagaguacuucc

SEQ ID NO: 652166 - RNA, 19 nt, Artificial Sequence
  Description of Artificial Sequence: Synthetic oligonucleotide
  Sense strand starting at position 1315 of SEQ ID NO: 585593
aaguacucuuggguagaga

SEQ ID NO: 652167 - RNA, 19 nt, Artificial Sequence
  Description of Artificial Sequence: Synthetic oligonucleotide
  Antisense strand to SEQ ID NO: 652166
ucucuacccaagaguacuu

SEQ ID NO: 652168 - RNA, 19 nt, Artificial Sequence
  Description of Artificial Sequence: Synthetic oligonucleotide
  Sense strand starting at position 1385 of SEQ ID NO: 585593
ugccaucuacuccagaguu

SEQ ID NO: 652169 - RNA, 19 nt, Artificial Sequence
  Description of Artificial Sequence: Synthetic oligonucleotide
  Antisense strand to SEQ ID NO: 652168
aacucuggaguagauggca

SEQ ID NO: 652170 - RNA, 19 nt, Artificial Sequence
  Description of Artificial Sequence: Synthetic oligonucleotide
  Sense strand starting at position 1442 of SEQ ID NO: 585593
gguguuucugcuuagauga

SEQ ID NO: 652171 - RNA, 19 nt, Artificial Sequence
  Description of Artificial Sequence: Synthetic oligonucleotide
  Antisense strand to SEQ ID NO: 652170
ucaucuaagcagaaacacc

SEQ ID NO: 652172 - RNA, 19 nt, Artificial Sequence
  Description of Artificial Sequence: Synthetic oligonucleotide
  Sense strand starting at position 1544 of SEQ ID NO: 585593
uugcucccuucugugagaa

SEQ ID NO: 652173 - RNA, 19 nt, Artificial Sequence
  Description of Artificial Sequence: Synthetic oligonucleotide
  Antisense strand to SEQ ID NO: 652172
uucucacagaagggagcaa

SEQ ID NO: 652174 - RNA, 19 nt, Artificial Sequence
  Description of Artificial Sequence: Synthetic oligonucleotide
  Sense strand starting at position 1625 of SEQ ID NO: 585593
gguccaucuuuccucauca

SEQ ID NO: 652175 - RNA, 19 nt, Artificial Sequence
  Description of Artificial Sequence: Synthetic oligonucleotide
  Antisense strand to SEQ ID NO: 652174
ugaugaggaaagauggacc

SEQ ID NO: 652176 - RNA, 19 nt, Artificial Sequence
  Description of Artificial Sequence: Synthetic oligonucleotide
  Sense strand starting at position 1718 of SEQ ID NO: 585593
auguguccugucuaacauc

SEQ ID NO: 652177 - RNA, 19 nt, Artificial Sequence
  Description of Artificial Sequence: Synthetic oligonucleotide
  Antisense strand to SEQ ID NO: 652176
gauguuagacaggacacau

SEQ ID NO: 652178 - RNA, 19 nt, Artificial Sequence
  Description of Artificial Sequence: Synthetic oligonucleotide
  Sense strand starting at position 1763 of SEQ ID NO: 585593
gcagaagucccagaguaga

SEQ ID NO: 652179 - RNA, 19 nt, Artificial Sequence
  Description of Artificial Sequence: Synthetic oligonucleotide
  Antisense strand to SEQ ID NO: 652178
ucuacucugggacuucugc

SEQ ID NO: 652180 - RNA, 19 nt, Artificial Sequence
  Description of Artificial Sequence: Synthetic oligonucleotide
  Sense strand starting at position 2027 of SEQ ID NO: 585593
cgcccaagauuagucuaau

SEQ ID NO: 652181 - RNA, 19 nt, Artificial Sequence
  Description of Artificial Sequence: Synthetic oligonucleotide
  Antisense strand to SEQ ID NO: 652180
auuagacuaaucuugggcg

SEQ ID NO: 652182 - RNA, 19 nt, Artificial Sequence
  Description of Artificial Sequence: Synthetic oligonucleotide
  Sense strand starting at position 2028 of SEQ ID NO: 585593
gcccaagauuagucuaauc

SEQ ID NO: 652183 - RNA, 19 nt, Artificial Sequence
  Description of Artificial Sequence: Synthetic oligonucleotide
  Antisense strand to SEQ ID NO: 652182
gauuagacuaaucuugggc

SEQ ID NO: 652184 - RNA, 19 nt, Artificial Sequence
  Description of Artificial Sequence: Synthetic oligonucleotide
  Sense strand starting at position 2101 of SEQ ID NO: 585593
ucguguaucguuucugugu

SEQ ID NO: 652185 - RNA, 19 nt, Artificial Sequence
  Description of Artificial Sequence: Synthetic oligonucleotide
  Antisense strand to SEQ ID NO: 652184
acacagaaacgauacacga

SEQ ID NO: 652186 - RNA, 19 nt, Artificial Sequence
  Description of Artificial Sequence: Synthetic oligonucleotide
  Sense strand starting at position 2192 of SEQ ID NO: 585593
ggaggugcaagcgauaaga

SEQ ID NO: 652187 - RNA, 19 nt, Artificial Sequence
  Description of Artificial Sequence: Synthetic oligonucleotide
  Antisense strand to SEQ ID NO: 652186
ucuuaucgcuugcaccucc

SEQ ID NO: 652188 - RNA, 19 nt, Artificial Sequence
  Description of Artificial Sequence: Synthetic oligonucleotide
  Sense strand starting at position 2194 of SEQ ID NO: 585593
aggugcaagcgauaagaga

SEQ ID NO: 652189 - RNA, 19 nt, Artificial Sequence
  Description of Artificial Sequence: Synthetic oligonucleotide
  Antisense strand to SEQ ID NO: 652188
ucucuuaucgcuugcaccu

SEQ ID NO: 652190 - RNA, 19 nt, Artificial Sequence
  Description of Artificial Sequence: Synthetic oligonucleotide
  Sense strand starting at position 2222 of SEQ ID NO: 585593
cguaagauggaguggugaa

SEQ ID NO: 652191 - RNA, 19 nt, Artificial Sequence
  Description of Artificial Sequence: Synthetic oligonucleotide
  Antisense strand to SEQ ID NO: 652190
uucaccacuccaucuuacg

SEQ ID NO: 652192 - RNA, 19 nt, Artificial Sequence
  Description of Artificial Sequence: Synthetic oligonucleotide
  Sense strand starting at position 2265 of SEQ ID NO: 585593
aggcauaaugugugcauuu

SEQ ID NO: 652193 - RNA, 19 nt, Artificial Sequence
  Description of Artificial Sequence: Synthetic oligonucleotide
  Antisense strand to SEQ ID NO: 652192
aaaugcacacauuaugccu

SEQ ID NO: 652194 - RNA, 19 nt, Artificial Sequence
  Description of Artificial Sequence: Synthetic oligonucleotide
  Sense strand starting at position 2266 of SEQ ID NO: 585593
ggcauaaugugugcauuua

SEQ ID NO: 652195 - RNA, 19 nt, Artificial Sequence
  Description of Artificial Sequence: Synthetic oligonucleotide
  Antisense strand to SEQ ID NO: 652194
uaaaugcacacauuaugcc

SEQ ID NO: 652196 - RNA, 19 nt, Artificial Sequence
  Description of Artificial Sequence: Synthetic oligonucleotide
  Sense strand starting at position 2310 of SEQ ID NO: 585593
ggcagagugcugggauaga

SEQ ID NO: 652197 - RNA, 19 nt, Artificial Sequence
  Description of Artificial Sequence: Synthetic oligonucleotide
  Antisense strand to SEQ ID NO: 652196
ucuaucccagcacucugcc

SEQ ID NO: 652198 - RNA, 19 nt, Artificial Sequence
  Description of Artificial Sequence: Synthetic oligonucleotide
  Sense strand starting at position 2320 of SEQ ID NO: 585593
ugggauagauaggaucuau

SEQ ID NO: 652199 - RNA, 19 nt, Artificial Sequence
  Description of Artificial Sequence: Synthetic oligonucleotide
  Antisense strand to SEQ ID NO: 652198
auagauccuaucuauccca

SEQ ID NO: 652200 - RNA, 19 nt, Artificial Sequence
  Description of Artificial Sequence: Synthetic oligonucleotide
  Sense strand starting at position 2332 of SEQ ID NO: 585593
gaucuauagccaggguuuc

SEQ ID NO: 652201 - RNA, 19 nt, Artificial Sequence
  Description of Artificial Sequence: Synthetic oligonucleotide
  Antisense strand to SEQ ID NO: 652200
gaaacccuggcuauagauc

SEQ ID NO: 652202 - RNA, 19 nt, Artificial Sequence
  Description of Artificial Sequence: Synthetic oligonucleotide
  Sense strand starting at position 2356 of SEQ ID NO: 585593
cucagugcugucgacauuu

SEQ ID NO: 652203 - RNA, 19 nt, Artificial Sequence
  Description of Artificial Sequence: Synthetic oligonucleotide
  Antisense strand to SEQ ID NO: 652202
aaaugucgacagcacugag

SEQ ID NO: 652204 - RNA, 19 nt, Artificial Sequence
  Description of Artificial Sequence: Synthetic oligonucleotide
  Sense strand starting at position 2379 of SEQ ID NO: 585593
acaaauaguucuuuguugu

SEQ ID NO: 652205 - RNA, 19 nt, Artificial Sequence
  Description of Artificial Sequence: Synthetic oligonucleotide
  Antisense strand to SEQ ID NO: 652204
acaacaaagaacuauuugu

SEQ ID NO: 652206 - RNA, 19 nt, Artificial Sequence
  Description of Artificial Sequence: Synthetic oligonucleotide
  Sense strand starting at position 2406 of SEQ ID NO: 585593
uccuguguacuauagaaug

SEQ ID NO: 652207 - RNA, 19 nt, Artificial Sequence
  Description of Artificial Sequence: Synthetic oligonucleotide
  Antisense strand to SEQ ID NO: 652206
cauucuauaguacacagga

SEQ ID NO: 652208 - RNA, 19 nt, Artificial Sequence
  Description of Artificial Sequence: Synthetic oligonucleotide
  Sense strand starting at position 2512 of SEQ ID NO: 585593
gugucuucuggaugggcaa

SEQ ID NO: 652209 - RNA, 19 nt, Artificial Sequence
  Description of Artificial Sequence: Synthetic oligonucleotide
  Antisense strand to SEQ ID NO: 652208
uugcccauccagaagacac

SEQ ID NO: 652210 - RNA, 19 nt, Artificial Sequence
  Description of Artificial Sequence: Synthetic oligonucleotide
  Sense strand starting at position 2513 of SEQ ID NO: 585593
ugucuucuggaugggcaaa

SEQ ID NO: 652211 - RNA, 19 nt, Artificial Sequence
  Description of Artificial Sequence: Synthetic oligonucleotide
  Antisense strand to SEQ ID NO: 652210
uuugcccauccagaagaca

SEQ ID NO: 652212 - RNA, 19 nt, Artificial Sequence
  Description of Artificial Sequence: Synthetic oligonucleotide
  Sense strand starting at position 2536 of SEQ ID NO: 585593
uugagaacugcuugucucu

SEQ ID NO: 652213 - RNA, 19 nt, Artificial Sequence
  Description of Artificial Sequence: Synthetic oligonucleotide
  Antisense strand to SEQ ID NO: 652212
agagacaagcaguucucaa

SEQ ID NO: 652214 - RNA, 19 nt, Artificial Sequence
  Description of Artificial Sequence: Synthetic oligonucleotide
  Sense strand starting at position 2542 of SEQ ID NO: 585593
acugcuugucucuagguua

SEQ ID NO: 652215 - RNA, 19 nt, Artificial Sequence
  Description of Artificial Sequence: Synthetic oligonucleotide
  Antisense strand to SEQ ID NO: 652214
uaaccuagagacaagcagu

SEQ ID NO: 652216 - RNA, 19 nt, Artificial Sequence
  Description of Artificial Sequence: Synthetic oligonucleotide
  Sense strand starting at position 2555 of SEQ ID NO: 585593
agguuauguacuugaagcu

SEQ ID NO: 652217 - RNA, 19 nt, Artificial Sequence
  Description of Artificial Sequence: Synthetic oligonucleotide
  Antisense strand to SEQ ID NO: 652216
agcuucaaguacauaaccu

SEQ ID NO: 652218 - RNA, 19 nt, Artificial Sequence
  Description of Artificial Sequence: Synthetic oligonucleotide
  Sense strand starting at position 2556 of SEQ ID NO: 585593
gguuauguacuugaagcuu

SEQ ID NO: 652219 - RNA, 19 nt, Artificial Sequence
  Description of Artificial Sequence: Synthetic oligonucleotide
  Antisense strand to SEQ ID NO: 652218
aagcuucaaguacauaacc

SEQ ID NO: 652220 - RNA, 19 nt, Artificial Sequence
  Description of Artificial Sequence: Synthetic oligonucleotide
  Sense strand starting at position 2661 of SEQ ID NO: 585593
cuaggaugcugguuacaau

SEQ ID NO: 652221 - RNA, 19 nt, Artificial Sequence
  Description of Artificial Sequence: Synthetic oligonucleotide
  Antisense strand to SEQ ID NO: 652220
auuguaaccagcauccuag

SEQ ID NO: 652222 - RNA, 19 nt, Artificial Sequence
  Description of Artificial Sequence: Synthetic oligonucleotide
  Sense strand starting at position 2812 of SEQ ID NO: 585593
uggagaaaugcuugucaua

SEQ ID NO: 652223 - RNA, 19 nt, Artificial Sequence
  Description of Artificial Sequence: Synthetic oligonucleotide
  Antisense strand to SEQ ID NO: 652222
uaugacaagcauuucucca

SEQ ID NO: 652224 - RNA, 19 nt, Artificial Sequence
  Description of Artificial Sequence: Synthetic oligonucleotide
  Sense strand starting at position 2814 of SEQ ID NO: 585593
gagaaaugcuugucauaau

SEQ ID NO: 652225 - RNA, 19 nt, Artificial Sequence
  Description of Artificial Sequence: Synthetic oligonucleotide
  Antisense strand to SEQ ID NO: 652224
auuaugacaagcauuucuc

SEQ ID NO: 652226 - RNA, 19 nt, Artificial Sequence
  Description of Artificial Sequence: Synthetic oligonucleotide
  Sense strand starting at position 2878 of SEQ ID NO: 585593
ucugguugugccucuugua

SEQ ID NO: 652227 - RNA, 19 nt, Artificial Sequence
  Description of Artificial Sequence: Synthetic oligonucleotide
  Antisense strand to SEQ ID NO: 652226
uacaagaggcacaaccaga

SEQ ID NO: 652228 - RNA, 19 nt, Artificial Sequence
  Description of Artificial Sequence: Synthetic oligonucleotide
  Sense strand starting at position 3065 of SEQ ID NO: 585593
ccaagucugauuuguuagu

SEQ ID NO: 652229 - RNA, 19 nt, Artificial Sequence
  Description of Artificial Sequence: Synthetic oligonucleotide
  Antisense strand to SEQ ID NO: 652228
acuaacaaaucagacuugg

SEQ ID NO: 652230 - RNA, 19 nt, Artificial Sequence
  Description of Artificial Sequence: Synthetic oligonucleotide
  Sense strand starting at position 3066 of SEQ ID NO: 585593
caagucugauuuguuaguu

SEQ ID NO: 652231 - RNA, 19 nt, Artificial Sequence
  Description of Artificial Sequence: Synthetic oligonucleotide
  Antisense strand to SEQ ID NO: 652230
aacuaacaaaucagacuug

SEQ ID NO: 652232 - RNA, 19 nt, Artificial Sequence
  Description of Artificial Sequence: Synthetic oligonucleotide
  Sense strand starting at position 3969 of SEQ ID NO: 585593
auuggaaucuugccaaauc

SEQ ID NO: 652233 - RNA, 19 nt, Artificial Sequence
  Description of Artificial Sequence: Synthetic oligonucleotide
  Antisense strand to SEQ ID NO: 652232
gauuuggcaagauuccaau

SEQ ID NO: 652234 - RNA, 19 nt, Artificial Sequence
  Description of Artificial Sequence: Synthetic oligonucleotide
  Sense strand starting at position 152 of SEQ ID NO: 585594
acccaugaguucuuuauau

SEQ ID NO: 652235 - RNA, 19 nt, Artificial Sequence
  Description of Artificial Sequence: Synthetic oligonucleotide
  Antisense strand to SEQ ID NO: 652234
auauaaagaacucaugggu

SEQ ID NO: 652236 - RNA, 19 nt, Artificial Sequence
  Description of Artificial Sequence: Synthetic oligonucleotide
  Sense strand starting at position 154 of SEQ ID NO: 585594
ccaugaguucuuuauaugu

SEQ ID NO: 652237 - RNA, 19 nt, Artificial Sequence
  Description of Artificial Sequence: Synthetic oligonucleotide
  Antisense strand to SEQ ID NO: 652236
acauauaaagaacucaugg

SEQ ID NO: 652238 - RNA, 19 nt, Artificial Sequence
  Description of Artificial Sequence: Synthetic oligonucleotide
  Sense strand starting at position 353 of SEQ ID NO: 585594
auauguccucccuagauag

SEQ ID NO: 652239 - RNA, 19 nt, Artificial Sequence
  Description of Artificial Sequence: Synthetic oligonucleotide
  Antisense strand to SEQ ID NO: 652238
cuaucuagggaggacauau

SEQ ID NO: 652240 - RNA, 19 nt, Artificial Sequence
  Description of Artificial Sequence: Synthetic oligonucleotide
  Sense strand starting at position 484 of SEQ ID NO: 585594
uaggucuugaucuaggagu

SEQ ID NO: 652241 - RNA, 19 nt, Artificial Sequence
  Description of Artificial Sequence: Synthetic oligonucleotide
  Antisense strand to SEQ ID NO: 652240
acuccuagaucaagaccua

SEQ ID NO: 652242 - RNA, 19 nt, Artificial Sequence
  Description of Artificial Sequence: Synthetic oligonucleotide
  Sense strand starting at position 486 of SEQ ID NO: 585594
ggucuugaucuaggaguag

SEQ ID NO: 652243 - RNA, 19 nt, Artificial Sequence
  Description of Artificial Sequence: Synthetic oligonucleotide
  Antisense strand to SEQ ID NO: 652242
cuacuccuagaucaagacc

SEQ ID NO: 652244 - RNA, 19 nt, Artificial Sequence
  Description of Artificial Sequence: Synthetic oligonucleotide
  Sense strand starting at position 515 of SEQ ID NO: 585594
aagucacaucgagauguaa

SEQ ID NO: 652245 - RNA, 19 nt, Artificial Sequence
  Description of Artificial Sequence: Synthetic oligonucleotide
  Antisense strand to SEQ ID NO: 652244
uuacaucucgaugugacuu

SEQ ID NO: 652246 - RNA, 19 nt, Artificial Sequence
  Description of Artificial Sequence: Synthetic oligonucleotide
  Sense strand starting at position 669 of SEQ ID NO: 585594
gcugacauggcugacuuua

SEQ ID NO: 652247 - RNA, 19 nt, Artificial Sequence
  Description of Artificial Sequence: Synthetic oligonucleotide
  Antisense strand to SEQ ID NO: 652246
uaaagucagccaugucagc

SEQ ID NO: 652248 - RNA, 19 nt, Artificial Sequence
  Description of Artificial Sequence: Synthetic oligonucleotide
  Sense strand starting at position 863 of SEQ ID NO: 585594
ccacaacuugagcaugauu

SEQ ID NO: 652249 - RNA, 19 nt, Artificial Sequence
  Description of Artificial Sequence: Synthetic oligonucleotide
  Antisense strand to SEQ ID NO: 652248
aaucaugcucaaguugugg

SEQ ID NO: 652250 - RNA, 19 nt, Artificial Sequence
  Description of Artificial Sequence: Synthetic oligonucleotide
  Sense strand starting at position 865 of SEQ ID NO: 585594
acaacuugagcaugauucu

SEQ ID NO: 652251 - RNA, 19 nt, Artificial Sequence
  Description of Artificial Sequence: Synthetic oligonucleotide
  Antisense strand to SEQ ID NO: 652250
agaaucaugcucaaguugu

SEQ ID NO: 652252 - RNA, 19 nt, Artificial Sequence
  Description of Artificial Sequence: Synthetic oligonucleotide
  Sense strand starting at position 957 of SEQ ID NO: 585594
cugagcguucucgucaaac

SEQ ID NO: 652253 - RNA, 19 nt, Artificial Sequence
  Description of Artificial Sequence: Synthetic oligonucleotide
  Antisense strand to SEQ ID NO: 652252
guuugacgagaacgcucag

SEQ ID NO: 652254 - RNA, 19 nt, Artificial Sequence
  Description of Artificial Sequence: Synthetic oligonucleotide
  Sense strand starting at position 1034 of SEQ ID NO: 585594
uggccaugauaucuuuaac

SEQ ID NO: 652255 - RNA, 19 nt, Artificial Sequence
  Description of Artificial Sequence: Synthetic oligonucleotide
  Antisense strand to SEQ ID NO: 652254
guuaaagauaucauggcca

SEQ ID NO: 652256 - RNA, 19 nt, Artificial Sequence
  Description of Artificial Sequence: Synthetic oligonucleotide
  Sense strand starting at position 1241 of SEQ ID NO: 585594
uuuccaaggcuuuagcaaa

SEQ ID NO: 652257 - RNA, 19 nt, Artificial Sequence
  Description of Artificial Sequence: Synthetic oligonucleotide
  Antisense strand to SEQ ID NO: 652256
uuugcuaaagccuuggaaa

SEQ ID NO: 652258 - RNA, 19 nt, Artificial Sequence
  Description of Artificial Sequence: Synthetic oligonucleotide
  Sense strand starting at position 1354 of SEQ ID NO: 585594
gcaucauugacauagacgu

SEQ ID NO: 652259 - RNA, 19 nt, Artificial Sequence
  Description of Artificial Sequence: Synthetic oligonucleotide
  Antisense strand to SEQ ID NO: 652258
acgucuaugucaaugaugc

SEQ ID NO: 652260 - RNA, 19 nt, Artificial Sequence
  Description of Artificial Sequence: Synthetic oligonucleotide
  Sense strand starting at position 1432 of SEQ ID NO: 585594
uucuuuccagagggaucuu

SEQ ID NO: 652261 - RNA, 19 nt, Artificial Sequence
  Description of Artificial Sequence: Synthetic oligonucleotide
  Antisense strand to SEQ ID NO: 652260
aagaucccucuggaaagaa

SEQ ID NO: 652262 - RNA, 19 nt, Artificial Sequence
  Description of Artificial Sequence: Synthetic oligonucleotide
  Sense strand starting at position 1651 of SEQ ID NO: 585594
cgaccuagaugacucauaa

SEQ ID NO: 652263 - RNA, 19 nt, Artificial Sequence
  Description of Artificial Sequence: Synthetic oligonucleotide
  Antisense strand to SEQ ID NO: 652262
uuaugagucaucuaggucg

SEQ ID NO: 652264 - RNA, 19 nt, Artificial Sequence
  Description of Artificial Sequence: Synthetic oligonucleotide
  Sense strand starting at position 1770 of SEQ ID NO: 585594
auugaagucuacucucaug

SEQ ID NO: 652265 - RNA, 19 nt, Artificial Sequence
  Description of Artificial Sequence: Synthetic oligonucleotide
  Antisense strand to SEQ ID NO: 652264
caugagaguagacuucaau

SEQ ID NO: 652266 - RNA, 19 nt, Artificial Sequence
  Description of Artificial Sequence: Synthetic oligonucleotide
  Sense strand starting at position 1776 of SEQ ID NO: 585594
gucuacucucaugaugacu

SEQ ID NO: 652267 - RNA, 19 nt, Artificial Sequence
  Description of Artificial Sequence: Synthetic oligonucleotide
  Antisense strand to SEQ ID NO: 652266
agucaucaugagaguagac

SEQ ID NO: 652268 - RNA, 19 nt, Artificial Sequence
  Description of Artificial Sequence: Synthetic oligonucleotide
  Sense strand starting at position 1868 of SEQ ID NO: 585594
ggcugacaccuggaucuua

SEQ ID NO: 652269 - RNA, 19 nt, Artificial Sequence
  Description of Artificial Sequence: Synthetic oligonucleotide
  Antisense strand to SEQ ID NO: 652268
uaagauccaggugucagcc

SEQ ID NO: 652270 - RNA, 19 nt, Artificial Sequence
  Description of Artificial Sequence: Synthetic oligonucleotide
  Sense strand starting at position 2041 of SEQ ID NO: 585594
ccugucaaucucgaucuga

SEQ ID NO: 652271 - RNA, 19 nt, Artificial Sequence
  Description of Artificial Sequence: Synthetic oligonucleotide
  Antisense strand to SEQ ID NO: 652270
ucagaucgagauugacagg

SEQ ID NO: 652272 - RNA, 19 nt, Artificial Sequence
  Description of Artificial Sequence: Synthetic oligonucleotide
  Sense strand starting at position 2099 of SEQ ID NO: 585594
gggucauguaguggaauag

SEQ ID NO: 652273 - RNA, 19 nt, Artificial Sequence
  Description of Artificial Sequence: Synthetic oligonucleotide
  Antisense strand to SEQ ID NO: 652272
cuauuccacuacaugaccc

SEQ ID NO: 652274 - RNA, 19 nt, Artificial Sequence
  Description of Artificial Sequence: Synthetic oligonucleotide
  Sense strand starting at position 2100 of SEQ ID NO: 585594
ggucauguaguggaauaga

SEQ ID NO: 652275 - RNA, 19 nt, Artificial Sequence
  Description of Artificial Sequence: Synthetic oligonucleotide
  Antisense strand to SEQ ID NO: 652274
ucuauuccacuacaugacc

SEQ ID NO: 652276 - RNA, 19 nt, Artificial Sequence
  Description of Artificial Sequence: Synthetic oligonucleotide
  Sense strand starting at position 2162 of SEQ ID NO: 585594
ccagaauaagaaugguucu

SEQ ID NO: 652277 - RNA, 19 nt, Artificial Sequence
  Description of Artificial Sequence: Synthetic oligonucleotide
  Antisense strand to SEQ ID NO: 652276
agaaccauucuuauucugg

SEQ ID NO: 652278 - RNA, 19 nt, Artificial Sequence
  Description of Artificial Sequence: Synthetic oligonucleotide
  Sense strand starting at position 2189 of SEQ ID NO: 585594
aagaauaguccugaggugu

SEQ ID NO: 652279 - RNA, 19 nt, Artificial Sequence
  Description of Artificial Sequence: Synthetic oligonucleotide
  Antisense strand to SEQ ID NO: 652278
acaccucaggacuauucuu

SEQ ID NO: 652280 - RNA, 19 nt, Artificial Sequence
  Description of Artificial Sequence: Synthetic oligonucleotide
  Sense strand starting at position 2583 of SEQ ID NO: 585594
augaaagaauguuugguca

SEQ ID NO: 652281 - RNA, 19 nt, Artificial Sequence
  Description of Artificial Sequence: Synthetic oligonucleotide
  Antisense strand to SEQ ID NO: 652280
ugaccaaacauucuuucau

SEQ ID NO: 652282 - RNA, 19 nt, Artificial Sequence
  Description of Artificial Sequence: Synthetic oligonucleotide
  Sense strand starting at position 2586 of SEQ ID NO: 585594
aaagaauguuuggucacuu

SEQ ID NO: 652283 - RNA, 19 nt, Artificial Sequence
  Description of Artificial Sequence: Synthetic oligonucleotide
  Antisense strand to SEQ ID NO: 652282
aagugaccaaacauucuuu

SEQ ID NO: 652284 - RNA, 19 nt, Artificial Sequence
  Description of Artificial Sequence: Synthetic oligonucleotide
  Sense strand starting at position 2596 of SEQ ID NO: 585594
uggucacuucugcaggaga

SEQ ID NO: 652285 - RNA, 19 nt, Artificial Sequence
  Description of Artificial Sequence: Synthetic oligonucleotide
  Antisense strand to SEQ ID NO: 652284
ucuccugcagaagugacca

SEQ ID NO: 652286 - RNA, 19 nt, Artificial Sequence
  Description of Artificial Sequence: Synthetic oligonucleotide
  Sense strand starting at position 2599 of SEQ ID NO: 585594
ucacuucugcaggagaauc

SEQ ID NO: 652287 - RNA, 19 nt, Artificial Sequence
  Description of Artificial Sequence: Synthetic oligonucleotide
  Antisense strand to SEQ ID NO: 652286
gauucuccugcagaaguga

SEQ ID NO: 652288 - RNA, 19 nt, Artificial Sequence
  Description of Artificial Sequence: Synthetic oligonucleotide
  Sense strand starting at position 2646 of SEQ ID NO: 585594
guaacaagugcugaaagua

SEQ ID NO: 652289 - RNA, 19 nt, Artificial Sequence
  Description of Artificial Sequence: Synthetic oligonucleotide
  Antisense strand to SEQ ID NO: 652288
uacuuucagcacuuguuac

SEQ ID NO: 652290 - RNA, 19 nt, Artificial Sequence
  Description of Artificial Sequence: Synthetic oligonucleotide
  Sense strand starting at position 2840 of SEQ ID NO: 585594
ggagaaagcaaauguaugu

SEQ ID NO: 652291 - RNA, 19 nt, Artificial Sequence
  Description of Artificial Sequence: Synthetic oligonucleotide
  Antisense strand to SEQ ID NO: 652290
acauacauuugcuuucucc

SEQ ID NO: 652292 - RNA, 19 nt, Artificial Sequence
  Description of Artificial Sequence: Synthetic oligonucleotide
  Sense strand starting at position 2910 of SEQ ID NO: 585594
uccauaaguugagugaacu

SEQ ID NO: 652293 - RNA, 19 nt, Artificial Sequence
  Description of Artificial Sequence: Synthetic oligonucleotide
  Antisense strand to SEQ ID NO: 652292
aguucacucaacuuaugga

SEQ ID NO: 652294 - RNA, 19 nt, Artificial Sequence
  Description of Artificial Sequence: Synthetic oligonucleotide
  Sense strand starting at position 2911 of SEQ ID NO: 585594
ccauaaguugagugaacua

SEQ ID NO: 652295 - RNA, 19 nt, Artificial Sequence
  Description of Artificial Sequence: Synthetic oligonucleotide
  Antisense strand to SEQ ID NO: 652294
uaguucacucaacuuaugg

SEQ ID NO: 652296 - RNA, 19 nt, Artificial Sequence
  Description of Artificial Sequence: Synthetic oligonucleotide
  Sense strand starting at position 2974 of SEQ ID NO: 585594
uccuauuaagauggcuaaa

SEQ ID NO: 652297 - RNA, 19 nt, Artificial Sequence
  Description of Artificial Sequence: Synthetic oligonucleotide
  Antisense strand to SEQ ID NO: 652296
uuuagccaucuuaauagga

SEQ ID NO: 652298 - RNA, 19 nt, Artificial Sequence
  Description of Artificial Sequence: Synthetic oligonucleotide
  Sense strand starting at position 3050 of SEQ ID NO: 585594
ugcugauaggaaugucuaa

SEQ ID NO: 652299 - RNA, 19 nt, Artificial Sequence
  Description of Artificial Sequence: Synthetic oligonucleotide
  Antisense strand to SEQ ID NO: 652298
uuagacauuccuaucagca

SEQ ID NO: 652300 - RNA, 19 nt, Artificial Sequence
  Description of Artificial Sequence: Synthetic oligonucleotide
  Sense strand starting at position 3188 of SEQ ID NO: 585594
ugcucccaggaaugaaaua

SEQ ID NO: 652301 - RNA, 19 nt, Artificial Sequence
  Description of Artificial Sequence: Synthetic oligonucleotide
  Antisense strand to SEQ ID NO: 652300
uauuucauuccugggagca

SEQ ID NO: 652302 - RNA, 19 nt, Artificial Sequence
  Description of Artificial Sequence: Synthetic oligonucleotide
  Sense strand starting at position 3221 of SEQ ID NO: 585594
ugggaaacagcuuggcaau

SEQ ID NO: 652303 - RNA, 19 nt, Artificial Sequence
  Description of Artificial Sequence: Synthetic oligonucleotide
  Antisense strand to SEQ ID NO: 652302
auugccaagcuguuuccca

SEQ ID NO: 652304 - RNA, 19 nt, Artificial Sequence
  Description of Artificial Sequence: Synthetic oligonucleotide
  Sense strand starting at position 3222 of SEQ ID NO: 585594
gggaaacagcuuggcaauu

SEQ ID NO: 652305 - RNA, 19 nt, Artificial Sequence
  Description of Artificial Sequence: Synthetic oligonucleotide
  Antisense strand to SEQ ID NO: 652304
aauugccaagcuguuuccc

SEQ ID NO: 652306 - RNA, 19 nt, Artificial Sequence
  Description of Artificial Sequence: Synthetic oligonucleotide
  Sense strand starting at position 3616 of SEQ ID NO: 585594
guugcuacagguuaagaga

SEQ ID NO: 652307 - RNA, 19 nt, Artificial Sequence
  Description of Artificial Sequence: Synthetic oligonucleotide
  Antisense strand to SEQ ID NO: 652306
ucucuuaaccuguagcaac

SEQ ID NO: 652308 - RNA, 19 nt, Artificial Sequence
  Description of Artificial Sequence: Synthetic oligonucleotide
  Sense strand starting at position 3799 of SEQ ID NO: 585594
cagaguguuagggaaucgu

SEQ ID NO: 652309 - RNA, 19 nt, Artificial Sequence
  Description of Artificial Sequence: Synthetic oligonucleotide
  Antisense strand to SEQ ID NO: 652308
acgauucccuaacacucug

SEQ ID NO: 652310 - RNA, 19 nt, Artificial Sequence
  Description of Artificial Sequence: Synthetic oligonucleotide
  Sense strand starting at position 3837 of SEQ ID NO: 585594
gacagauaagccuaacugu

SEQ ID NO: 652311 - RNA, 19 nt, Artificial Sequence
  Description of Artificial Sequence: Synthetic oligonucleotide
  Antisense strand to SEQ ID NO: 652310
acaguuaggcuuaucuguc

SEQ ID NO: 652312 - RNA, 19 nt, Artificial Sequence
  Description of Artificial Sequence: Synthetic oligonucleotide
  Sense strand starting at position 3879 of SEQ ID NO: 585594
cuacaugugauguggaaau

SEQ ID NO: 652313 - RNA, 19 nt, Artificial Sequence
  Description of Artificial Sequence: Synthetic oligonucleotide
  Antisense strand to SEQ ID NO: 652312
auuuccacaucacauguag

SEQ ID NO: 652314 - RNA, 19 nt, Artificial Sequence
  Description of Artificial Sequence: Synthetic oligonucleotide
  Sense strand starting at position 380 of SEQ ID NO: 585595
cugggauacucccauuaag

SEQ ID NO: 652315 - RNA, 19 nt, Artificial Sequence
  Description of Artificial Sequence: Synthetic oligonucleotide
  Antisense strand to SEQ ID NO: 652314
cuuaaugggaguaucccag

SEQ ID NO: 652316 - RNA, 19 nt, Artificial Sequence
  Description of Artificial Sequence: Synthetic oligonucleotide
  Sense strand starting at position 476 of SEQ ID NO: 585595
ucccaauuagcccagagau

SEQ ID NO: 652317 - RNA, 19 nt, Artificial Sequence
  Description of Artificial Sequence: Synthetic oligonucleotide
  Antisense strand to SEQ ID NO: 652316
aucucugggcuaauuggga

SEQ ID NO: 652318 - RNA, 19 nt, Artificial Sequence
  Description of Artificial Sequence: Synthetic oligonucleotide
  Sense strand starting at position 510 of SEQ ID NO: 585595
agcugcuagccucauaauu

SEQ ID NO: 652319 - RNA, 19 nt, Artificial Sequence
  Description of Artificial Sequence: Synthetic oligonucleotide
  Antisense strand to SEQ ID NO: 652318
aauuaugaggcuagcagcu

SEQ ID NO: 652320 - RNA, 19 nt, Artificial Sequence
  Description of Artificial Sequence: Synthetic oligonucleotide
  Sense strand starting at position 569 of SEQ ID NO: 585595
cuugcaagaaauggugaaa

SEQ ID NO: 652321 - RNA, 19 nt, Artificial Sequence
  Description of Artificial Sequence: Synthetic oligonucleotide
  Antisense strand to SEQ ID NO: 652320
uuucaccauuucuugcaag

SEQ ID NO: 652322 - RNA, 19 nt, Artificial Sequence
  Description of Artificial Sequence: Synthetic oligonucleotide
  Sense strand starting at position 642 of SEQ ID NO: 585595
ucaagacagugaucagauc

SEQ ID NO: 652323 - RNA, 19 nt, Artificial Sequence
  Description of Artificial Sequence: Synthetic oligonucleotide
  Antisense strand to SEQ ID NO: 652322
gaucugaucacugucuuga

SEQ ID NO: 652324 - RNA, 19 nt, Artificial Sequence
  Description of Artificial Sequence: Synthetic oligonucleotide
  Sense strand starting at position 656 of SEQ ID NO: 585595
agaucucuuuccuaaggau

SEQ ID NO: 652325 - RNA, 19 nt, Artificial Sequence
  Description of Artificial Sequence: Synthetic oligonucleotide
  Antisense strand to SEQ ID NO: 652324
auccuuaggaaagagaucu

SEQ ID NO: 652326 - RNA, 19 nt, Artificial Sequence
  Description of Artificial Sequence: Synthetic oligonucleotide
  Sense strand starting at position 659 of SEQ ID NO: 585595
ucucuuuccuaaggaugaa

SEQ ID NO: 652327 - RNA, 19 nt, Artificial Sequence
  Description of Artificial Sequence: Synthetic oligonucleotide
  Antisense strand to SEQ ID NO: 652326
uucauccuuaggaaagaga

SEQ ID NO: 652328 - RNA, 19 nt, Artificial Sequence
  Description of Artificial Sequence: Synthetic oligonucleotide
  Sense strand starting at position 695 of SEQ ID NO: 585595
ugagcagucaguuaugugu

SEQ ID NO: 652329 - RNA, 19 nt, Artificial Sequence
  Description of Artificial Sequence: Synthetic oligonucleotide
  Antisense strand to SEQ ID NO: 652328
acacauaacugacugcuca

SEQ ID NO: 652330 - RNA, 19 nt, Artificial Sequence
  Description of Artificial Sequence: Synthetic oligonucleotide
  Sense strand starting at position 698 of SEQ ID NO: 585595
gcagucaguuaugugucau

SEQ ID NO: 652331 - RNA, 19 nt, Artificial Sequence
  Description of Artificial Sequence: Synthetic oligonucleotide
  Antisense strand to SEQ ID NO: 652330
augacacauaacugacugc

SEQ ID NO: 652332 - RNA, 19 nt, Artificial Sequence
  Description of Artificial Sequence: Synthetic oligonucleotide
  Sense strand starting at position 841 of SEQ ID NO: 585595
ugcgaaugccuuuauugaa

SEQ ID NO: 652333 - RNA, 19 nt, Artificial Sequence
  Description of Artificial Sequence: Synthetic oligonucleotide
  Antisense strand to SEQ ID NO: 652332
uucaauaaaggcauucgca

SEQ ID NO: 652334 - RNA, 19 nt, Artificial Sequence
  Description of Artificial Sequence: Synthetic oligonucleotide
  Sense strand starting at position 1782 of SEQ ID NO: 585595
cuuugaaucugggaagccu

SEQ ID NO: 652335 - RNA, 19 nt, Artificial Sequence
  Description of Artificial Sequence: Synthetic oligonucleotide
  Antisense strand to SEQ ID NO: 652334
aggcuucccagauucaaag

SEQ ID NO: 652336 - RNA, 19 nt, Artificial Sequence
  Description of Artificial Sequence: Synthetic oligonucleotide
  Sense strand starting at position 1860 of SEQ ID NO: 585595
uuuaaugaccucugagaca

SEQ ID NO: 652337 - RNA, 19 nt, Artificial Sequence
  Description of Artificial Sequence: Synthetic oligonucleotide
  Antisense strand to SEQ ID NO: 652336
ugucucagaggucauuaaa

SEQ ID NO: 652338 - RNA, 19 nt, Artificial Sequence
  Description of Artificial Sequence: Synthetic oligonucleotide
  Sense strand starting at position 2302 of SEQ ID NO: 585595
agaggauguugugcauacu

SEQ ID NO: 652339 - RNA, 19 nt, Artificial Sequence
  Description of Artificial Sequence: Synthetic oligonucleotide
  Antisense strand to SEQ ID NO: 652338
aguaugcacaacauccucu

SEQ ID NO: 652340 - RNA, 19 nt, Artificial Sequence
  Description of Artificial Sequence: Synthetic oligonucleotide
  Sense strand starting at position 2305 of SEQ ID NO: 585595
ggauguugugcauacuaga

SEQ ID NO: 652341 - RNA, 19 nt, Artificial Sequence
  Description of Artificial Sequence: Synthetic oligonucleotide
  Antisense strand to SEQ ID NO: 652340
ucuaguaugcacaacaucc

SEQ ID NO: 652342 - RNA, 19 nt, Artificial Sequence
  Description of Artificial Sequence: Synthetic oligonucleotide
  Sense strand starting at position 2308 of SEQ ID NO: 585595
uguugugcauacuagauuu

SEQ ID NO: 652343 - RNA, 19 nt, Artificial Sequence
  Description of Artificial Sequence: Synthetic oligonucleotide
  Antisense strand to SEQ ID NO: 652342
aaaucuaguaugcacaaca

SEQ ID NO: 652344 - RNA, 19 nt, Artificial Sequence
  Description of Artificial Sequence: Synthetic oligonucleotide
  Sense strand starting at position 2347 of SEQ ID NO: 585595
gagugcaagugucugguuu

SEQ ID NO: 652345 - RNA, 19 nt, Artificial Sequence
  Description of Artificial Sequence: Synthetic oligonucleotide
  Antisense strand to SEQ ID NO: 652344
aaaccagacacuugcacuc

SEQ ID NO: 652346 - RNA, 19 nt, Artificial Sequence
  Description of Artificial Sequence: Synthetic oligonucleotide
  Sense strand starting at position 2781 of SEQ ID NO: 585595
gcuuucugucaaggaaaga

SEQ ID NO: 652347 - RNA, 19 nt, Artificial Sequence
  Description of Artificial Sequence: Synthetic oligonucleotide
  Antisense strand to SEQ ID NO: 652346
ucuuuccuugacagaaagc

SEQ ID NO: 652348 - RNA, 19 nt, Artificial Sequence
  Description of Artificial Sequence: Synthetic oligonucleotide
  Sense strand starting at position 2801 of SEQ ID NO: 585595
agaaauauuccaggugcau

SEQ ID NO: 652349 - RNA, 19 nt, Artificial Sequence
  Description of Artificial Sequence: Synthetic oligonucleotide
  Antisense strand to SEQ ID NO: 652348
augcaccuggaauauuucu

SEQ ID NO: 652350 - RNA, 19 nt, Artificial Sequence
  Description of Artificial Sequence: Synthetic oligonucleotide
  Sense strand starting at position 2813 of SEQ ID NO: 585595
ggugcauauuuccuuguuu

SEQ ID NO: 652351 - RNA, 19 nt, Artificial Sequence
  Description of Artificial Sequence: Synthetic oligonucleotide
  Antisense strand to SEQ ID NO: 652350
aaacaaggaaauaugcacc

SEQ ID NO: 652352 - RNA, 19 nt, Artificial Sequence
  Description of Artificial Sequence: Synthetic oligonucleotide
  Sense strand starting at position 2815 of SEQ ID NO: 585595
ugcauauuuccuuguuuga

SEQ ID NO: 652353 - RNA, 19 nt, Artificial Sequence
  Description of Artificial Sequence: Synthetic oligonucleotide
  Antisense strand to SEQ ID NO: 652352
ucaaacaaggaaauaugca

SEQ ID NO: 652354 - RNA, 19 nt, Artificial Sequence
  Description of Artificial Sequence: Synthetic oligonucleotide
  Sense strand starting at position 2820 of SEQ ID NO: 585595
auuuccuuguuugaaagau

SEQ ID NO: 652355 - RNA, 19 nt, Artificial Sequence
  Description of Artificial Sequence: Synthetic oligonucleotide
  Antisense strand to SEQ ID NO: 652354
aucuuucaaacaaggaaau

SEQ ID NO: 652356 - RNA, 19 nt, Artificial Sequence
  Description of Artificial Sequence: Synthetic oligonucleotide
  Sense strand starting at position 2828 of SEQ ID NO: 585595
guuugaaagauacggaaug

SEQ ID NO: 652357 - RNA, 19 nt, Artificial Sequence
  Description of Artificial Sequence: Synthetic oligonucleotide
  Antisense strand to SEQ ID NO: 652356
cauuccguaucuuucaaac

SEQ ID NO: 652358 - RNA, 19 nt, Artificial Sequence
  Description of Artificial Sequence: Synthetic oligonucleotide
  Sense strand starting at position 2840 of SEQ ID NO: 585595
cggaaugcucuauaaauug

SEQ ID NO: 652359 - RNA, 19 nt, Artificial Sequence
  Description of Artificial Sequence: Synthetic oligonucleotide
  Antisense strand to SEQ ID NO: 652358
caauuuauagagcauuccg

SEQ ID NO: 652360 - RNA, 19 nt, Artificial Sequence
  Description of Artificial Sequence: Synthetic oligonucleotide
  Sense strand starting at position 2906 of SEQ ID NO: 585595
acaaauauaccuggaguuu

SEQ ID NO: 652361 - RNA, 19 nt, Artificial Sequence
  Description of Artificial Sequence: Synthetic oligonucleotide
  Antisense strand to SEQ ID NO: 652360
aaacuccagguauauuugu

SEQ ID NO: 652362 - RNA, 19 nt, Artificial Sequence
  Description of Artificial Sequence: Synthetic oligonucleotide
  Sense strand starting at position 2932 of SEQ ID NO: 585595
cgcuaucuugcagucuuau

SEQ ID NO: 652363 - RNA, 19 nt, Artificial Sequence
  Description of Artificial Sequence: Synthetic oligonucleotide
  Antisense strand to SEQ ID NO: 652362
auaagacugcaagauagcg

SEQ ID NO: 652364 - RNA, 19 nt, Artificial Sequence
  Description of Artificial Sequence: Synthetic oligonucleotide
  Sense strand starting at position 2944 of SEQ ID NO: 585595
gucuuaugccauuauuauu

SEQ ID NO: 652365 - RNA, 19 nt, Artificial Sequence
  Description of Artificial Sequence: Synthetic oligonucleotide
  Antisense strand to SEQ ID NO: 652364
aauaauaauggcauaagac

SEQ ID NO: 652366 - RNA, 19 nt, Artificial Sequence
  Description of Artificial Sequence: Synthetic oligonucleotide
  Sense strand starting at position 3049 of SEQ ID NO: 585595
aggagugaaugaguggauu

SEQ ID NO: 652367 - RNA, 19 nt, Artificial Sequence
  Description of Artificial Sequence: Synthetic oligonucleotide
  Antisense strand to SEQ ID NO: 652366
aauccacucauucacuccu

SEQ ID NO: 652368 - RNA, 19 nt, Artificial Sequence
  Description of Artificial Sequence: Synthetic oligonucleotide
  Sense strand starting at position 3163 of SEQ ID NO: 585595
gcaacauuagcauagcaua

SEQ ID NO: 652369 - RNA, 19 nt, Artificial Sequence
  Description of Artificial Sequence: Synthetic oligonucleotide
  Antisense strand to SEQ ID NO: 652368
uaugcuaugcuaauguugc

SEQ ID NO: 652370 - RNA, 19 nt, Artificial Sequence
  Description of Artificial Sequence: Synthetic oligonucleotide
  Sense strand starting at position 3217 of SEQ ID NO: 585595
uguagcuauuuccuacuca

SEQ ID NO: 652371 - RNA, 19 nt, Artificial Sequence
  Description of Artificial Sequence: Synthetic oligonucleotide
  Antisense strand to SEQ ID NO: 652370
ugaguaggaaauagcuaca

SEQ ID NO: 652372 - RNA, 19 nt, Artificial Sequence
  Description of Artificial Sequence: Synthetic oligonucleotide
  Sense strand starting at position 3242 of SEQ ID NO: 585595
aguuguuauucccucagag

SEQ ID NO: 652373 - RNA, 19 nt, Artificial Sequence
  Description of Artificial Sequence: Synthetic oligonucleotide
  Antisense strand to SEQ ID NO: 652372
cucugagggaauaacaacu

SEQ ID NO: 652374 - RNA, 19 nt, Artificial Sequence
  Description of Artificial Sequence: Synthetic oligonucleotide
  Sense strand starting at position 3244 of SEQ ID NO: 585595
uuguuauucccucagagga

SEQ ID NO: 652375 - RNA, 19 nt, Artificial Sequence
  Description of Artificial Sequence: Synthetic oligonucleotide
  Antisense strand to SEQ ID NO: 652374
uccucugagggaauaacaa

SEQ ID NO: 652376 - RNA, 19 nt, Artificial Sequence
  Description of Artificial Sequence: Synthetic oligonucleotide
  Sense strand starting at position 3246 of SEQ ID NO: 585595
guuauucccucagaggaga

SEQ ID NO: 652377 - RNA, 19 nt, Artificial Sequence
  Description of Artificial Sequence: Synthetic oligonucleotide
  Antisense strand to SEQ ID NO: 652376
ucuccucugagggaauaac

SEQ ID NO: 652378 - RNA, 19 nt, Artificial Sequence
  Description of Artificial Sequence: Synthetic oligonucleotide
  Sense strand starting at position 3261 of SEQ ID NO: 585595
gagacuuucugguucucca

SEQ ID NO: 652379 - RNA, 19 nt, Artificial Sequence
  Description of Artificial Sequence: Synthetic oligonucleotide
  Antisense strand to SEQ ID NO: 652378
uggagaaccagaaagucuc

SEQ ID NO: 652380 - RNA, 19 nt, Artificial Sequence
  Description of Artificial Sequence: Synthetic oligonucleotide
  Sense strand starting at position 3268 of SEQ ID NO: 585595
ucugguucuccagacugga

SEQ ID NO: 652381 - RNA, 19 nt, Artificial Sequence
  Description of Artificial Sequence: Synthetic oligonucleotide
  Antisense strand to SEQ ID NO: 652380
uccagucuggagaaccaga

SEQ ID NO: 652382 - RNA, 19 nt, Artificial Sequence
  Description of Artificial Sequence: Synthetic oligonucleotide
  Sense strand starting at position 3434 of SEQ ID NO: 585595
aauagugucugguuuauuc

SEQ ID NO: 652383 - RNA, 19 nt, Artificial Sequence
  Description of Artificial Sequence: Synthetic oligonucleotide
  Antisense strand to SEQ ID NO: 652382
gaauaaaccagacacuauu

SEQ ID NO: 652384 - RNA, 19 nt, Artificial Sequence
  Description of Artificial Sequence: Synthetic oligonucleotide
  Sense strand starting at position 3527 of SEQ ID NO: 585595
agcaaucauguauguaaag

SEQ ID NO: 652385 - RNA, 19 nt, Artificial Sequence
  Description of Artificial Sequence: Synthetic oligonucleotide
  Antisense strand to SEQ ID NO: 652384
cuuuacauacaugauugcu

SEQ ID NO: 652386 - RNA, 19 nt, Artificial Sequence
  Description of Artificial Sequence: Synthetic oligonucleotide
  Sense strand starting at position 3528 of SEQ ID NO: 585595
gcaaucauguauguaaagu

SEQ ID NO: 652387 - RNA, 19 nt, Artificial Sequence
  Description of Artificial Sequence: Synthetic oligonucleotide
  Antisense strand to SEQ ID NO: 652386
acuuuacauacaugauugc

SEQ ID NO: 652388 - RNA, 19 nt, Artificial Sequence
  Description of Artificial Sequence: Synthetic oligonucleotide
  Sense strand starting at position 3600 of SEQ ID NO: 585595
uugauaaacuagcuuaugu

SEQ ID NO: 652389 - RNA, 19 nt, Artificial Sequence
  Description of Artificial Sequence: Synthetic oligonucleotide
  Antisense strand to SEQ ID NO: 652388
acauaagcuaguuuaucaa

SEQ ID NO: 652390 - RNA, 19 nt, Artificial Sequence
  Description of Artificial Sequence: Synthetic oligonucleotide
  Sense strand starting at position 3602 of SEQ ID NO: 585595
gauaaacuagcuuauguga

SEQ ID NO: 652391 - RNA, 19 nt, Artificial Sequence
  Description of Artificial Sequence: Synthetic oligonucleotide
  Antisense strand to SEQ ID NO: 652390
ucacauaagcuaguuuauc

SEQ ID NO: 652392 - RNA, 19 nt, Artificial Sequence
  Description of Artificial Sequence: Synthetic oligonucleotide
  Sense strand starting at position 3615 of SEQ ID NO: 585595
augugauguuaugguauuu

SEQ ID NO: 652393 - RNA, 19 nt, Artificial Sequence
  Description of Artificial Sequence: Synthetic oligonucleotide
  Antisense strand to SEQ ID NO: 652392
aaauaccauaacaucacau

SEQ ID NO: 652394 - RNA, 19 nt, Artificial Sequence
  Description of Artificial Sequence: Synthetic oligonucleotide
  Sense strand starting at position 135 of SEQ ID NO: 585596
cggauugaggccuaaaguc

SEQ ID NO: 652395 - RNA, 19 nt, Artificial Sequence
  Description of Artificial Sequence: Synthetic oligonucleotide
  Antisense strand to SEQ ID NO: 652394
gacuuuaggccucaauccg

SEQ ID NO: 652396 - RNA, 19 nt, Artificial Sequence
  Description of Artificial Sequence: Synthetic oligonucleotide
  Sense strand starting at position 152 of SEQ ID NO: 585596
ucagauucuugaguggacu

SEQ ID NO: 652397 - RNA, 19 nt, Artificial Sequence
  Description of Artificial Sequence: Synthetic oligonucleotide
  Antisense strand to SEQ ID NO: 652396
aguccacucaagaaucuga

SEQ ID NO: 652398 - RNA, 19 nt, Artificial Sequence
  Description of Artificial Sequence: Synthetic oligonucleotide
  Sense strand starting at position 154 of SEQ ID NO: 585596
agauucuugaguggacuga

SEQ ID NO: 652399 - RNA, 19 nt, Artificial Sequence
  Description of Artificial Sequence: Synthetic oligonucleotide
  Antisense strand to SEQ ID NO: 652398
ucaguccacucaagaaucu

SEQ ID NO: 652400 - RNA, 19 nt, Artificial Sequence
  Description of Artificial Sequence: Synthetic oligonucleotide
  Sense strand starting at position 158 of SEQ ID NO: 585596
ucuugaguggacugaaacu

SEQ ID NO: 652401 - RNA, 19 nt, Artificial Sequence
  Description of Artificial Sequence: Synthetic oligonucleotide
  Antisense strand to SEQ ID NO: 652400
aguuucaguccacucaaga

SEQ ID NO: 652402 - RNA, 19 nt, Artificial Sequence
  Description of Artificial Sequence: Synthetic oligonucleotide
  Sense strand starting at position 193 of SEQ ID NO: 585596
cugagaaaucuuugugguu

SEQ ID NO: 652403 - RNA, 19 nt, Artificial Sequence
  Description of Artificial Sequence: Synthetic oligonucleotide
  Antisense strand to SEQ ID NO: 652402
aaccacaaagauuucucag

SEQ ID NO: 652404 - RNA, 19 nt, Artificial Sequence
  Description of Artificial Sequence: Synthetic oligonucleotide
  Sense strand starting at position 194 of SEQ ID NO: 585596
ugagaaaucuuugugguuc

SEQ ID NO: 652405 - RNA, 19 nt, Artificial Sequence
  Description of Artificial Sequence: Synthetic oligonucleotide
  Antisense strand to SEQ ID NO: 652404
gaaccacaaagauuucuca

SEQ ID NO: 652406 - RNA, 19 nt, Artificial Sequence
  Description of Artificial Sequence: Synthetic oligonucleotide
  Sense strand starting at position 1023 of SEQ ID NO: 585596
cugggauacucccauuaag

SEQ ID NO: 652407 - RNA, 19 nt, Artificial Sequence
  Description of Artificial Sequence: Synthetic oligonucleotide
  Antisense strand to SEQ ID NO: 652406
cuuaaugggaguaucccag

SEQ ID NO: 652408 - RNA, 19 nt, Artificial Sequence
  Description of Artificial Sequence: Synthetic oligonucleotide
  Sense strand starting at position 1119 of SEQ ID NO: 585596
ucccaauuagcccagagau

SEQ ID NO: 652409 - RNA, 19 nt, Artificial Sequence
  Description of Artificial Sequence: Synthetic oligonucleotide
  Antisense strand to SEQ ID NO: 652408
aucucugggcuaauuggga

SEQ ID NO: 652410 - RNA, 19 nt, Artificial Sequence
  Description of Artificial Sequence: Synthetic oligonucleotide
  Sense strand starting at position 1153 of SEQ ID NO: 585596
agcugcuagccucauaauu

SEQ ID NO: 652411 - RNA, 19 nt, Artificial Sequence
  Description of Artificial Sequence: Synthetic oligonucleotide
  Antisense strand to SEQ ID NO: 652410
aauuaugaggcuagcagcu

SEQ ID NO: 652412 - RNA, 19 nt, Artificial Sequence
  Description of Artificial Sequence: Synthetic oligonucleotide
  Sense strand starting at position 1212 of SEQ ID NO: 585596
cuugcaagaaauggugaaa

SEQ ID NO: 652413 - RNA, 19 nt, Artificial Sequence
  Description of Artificial Sequence: Synthetic oligonucleotide
  Antisense strand to SEQ ID NO: 652412
uuucaccauuucuugcaag

SEQ ID NO: 652414 - RNA, 19 nt, Artificial Sequence
  Description of Artificial Sequence: Synthetic oligonucleotide
  Sense strand starting at position 1285 of SEQ ID NO: 585596
ucaagacagugaucagauc

SEQ ID NO: 652415 - RNA, 19 nt, Artificial Sequence
  Description of Artificial Sequence: Synthetic oligonucleotide
  Antisense strand to SEQ ID NO: 652414
gaucugaucacugucuuga

SEQ ID NO: 652416 - RNA, 19 nt, Artificial Sequence
  Description of Artificial Sequence: Synthetic oligonucleotide
  Sense strand starting at position 1299 of SEQ ID NO: 585596
agaucucuuuccuaaggau

SEQ ID NO: 652417 - RNA, 19 nt, Artificial Sequence
  Description of Artificial Sequence: Synthetic oligonucleotide
  Antisense strand to SEQ ID NO: 652416
auccuuaggaaagagaucu

SEQ ID NO: 652418 - RNA, 19 nt, Artificial Sequence
  Description of Artificial Sequence: Synthetic oligonucleotide
  Sense strand starting at position 1302 of SEQ ID NO: 585596
ucucuuuccuaaggaugaa

SEQ ID NO: 652419 - RNA, 19 nt, Artificial Sequence
  Description of Artificial Sequence: Synthetic oligonucleotide
  Antisense strand to SEQ ID NO: 652418
uucauccuuaggaaagaga

SEQ ID NO: 652420 - RNA, 19 nt, Artificial Sequence
  Description of Artificial Sequence: Synthetic oligonucleotide
  Sense strand starting at position 1338 of SEQ ID NO: 585596
ugagcagucaguuaugugu

SEQ ID NO: 652421 - RNA, 19 nt, Artificial Sequence
  Description of Artificial Sequence: Synthetic oligonucleotide
  Antisense strand to SEQ ID NO: 652420
acacauaacugacugcuca

SEQ ID NO: 652422 - RNA, 19 nt, Artificial Sequence
  Description of Artificial Sequence: Synthetic oligonucleotide
  Sense strand starting at position 1341 of SEQ ID NO: 585596
gcagucaguuaugugucau

SEQ ID NO: 652423 - RNA, 19 nt, Artificial Sequence
  Description of Artificial Sequence: Synthetic oligonucleotide
  Antisense strand to SEQ ID NO: 652422
augacacauaacugacugc

SEQ ID NO: 652424 - RNA, 19 nt, Artificial Sequence
  Description of Artificial Sequence: Synthetic oligonucleotide
  Sense strand starting at position 1484 of SEQ ID NO: 585596
ugcgaaugccuuuauugaa

SEQ ID NO: 652425 - RNA, 19 nt, Artificial Sequence
  Description of Artificial Sequence: Synthetic oligonucleotide
  Antisense strand to SEQ ID NO: 652424
uucaauaaaggcauucgca

SEQ ID NO: 652426 - RNA, 19 nt, Artificial Sequence
  Description of Artificial Sequence: Synthetic oligonucleotide
  Sense strand starting at position 2425 of SEQ ID NO: 585596
cuuugaaucugggaagccu

SEQ ID NO: 652427 - RNA, 19 nt, Artificial Sequence
  Description of Artificial Sequence: Synthetic oligonucleotide
  Antisense strand to SEQ ID NO: 652426
aggcuucccagauucaaag

SEQ ID NO: 652428 - RNA, 19 nt, Artificial Sequence
  Description of Artificial Sequence: Synthetic oligonucleotide
  Sense strand starting at position 2503 of SEQ ID NO: 585596
uuuaaugaccucugagaca

SEQ ID NO: 652429 - RNA, 19 nt, Artificial Sequence
  Description of Artificial Sequence: Synthetic oligonucleotide
  Antisense strand to SEQ ID NO: 652428
ugucucagaggucauuaaa

SEQ ID NO: 652430 - RNA, 19 nt, Artificial Sequence
  Description of Artificial Sequence: Synthetic oligonucleotide
  Sense strand starting at position 2945 of SEQ ID NO: 585596
agaggauguugugcauacu

SEQ ID NO: 652431 - RNA, 19 nt, Artificial Sequence
  Description of Artificial Sequence: Synthetic oligonucleotide
  Antisense strand to SEQ ID NO: 652430
aguaugcacaacauccucu

SEQ ID NO: 652432 - RNA, 19 nt, Artificial Sequence
  Description of Artificial Sequence: Synthetic oligonucleotide
  Sense strand starting at position 2948 of SEQ ID NO: 585596
ggauguugugcauacuaga

SEQ ID NO: 652433 - RNA, 19 nt, Artificial Sequence
  Description of Artificial Sequence: Synthetic oligonucleotide
  Antisense strand to SEQ ID NO: 652432
ucuaguaugcacaacaucc

SEQ ID NO: 652434 - RNA, 19 nt, Artificial Sequence
  Description of Artificial Sequence: Synthetic oligonucleotide
  Sense strand starting at position 2951 of SEQ ID NO: 585596
uguugugcauacuagauuu

SEQ ID NO: 652435 - RNA, 19 nt, Artificial Sequence
  Description of Artificial Sequence: Synthetic oligonucleotide
  Antisense strand to SEQ ID NO: 652434
aaaucuaguaugcacaaca

SEQ ID NO: 652436 - RNA, 19 nt, Artificial Sequence
  Description of Artificial Sequence: Synthetic oligonucleotide
  Sense strand starting at position 2990 of SEQ ID NO: 585596
gagugcaagugucugguuu

SEQ ID NO: 652437 - RNA, 19 nt, Artificial Sequence
  Description of Artificial Sequence: Synthetic oligonucleotide
  Antisense strand to SEQ ID NO: 652436
aaaccagacacuugcacuc

SEQ ID NO: 652438 - RNA, 19 nt, Artificial Sequence
  Description of Artificial Sequence: Synthetic oligonucleotide
  Sense strand starting at position 3424 of SEQ ID NO: 585596
gcuuucugucaaggaaaga

SEQ ID NO: 652439 - RNA, 19 nt, Artificial Sequence
  Description of Artificial Sequence: Synthetic oligonucleotide
  Antisense strand to SEQ ID NO: 652438
ucuuuccuugacagaaagc

SEQ ID NO: 652440 - RNA, 19 nt, Artificial Sequence
  Description of Artificial Sequence: Synthetic oligonucleotide
  Sense strand starting at position 3444 of SEQ ID NO: 585596
agaaauauuccaggugcau

SEQ ID NO: 652441 - RNA, 19 nt, Artificial Sequence
  Description of Artificial Sequence: Synthetic oligonucleotide
  Antisense strand to SEQ ID NO: 652440
augcaccuggaauauuucu

SEQ ID NO: 652442 - RNA, 19 nt, Artificial Sequence
  Description of Artificial Sequence: Synthetic oligonucleotide
  Sense strand starting at position 3456 of SEQ ID NO: 585596
ggugcauauuuccuuguuu

SEQ ID NO: 652443 - RNA, 19 nt, Artificial Sequence
  Description of Artificial Sequence: Synthetic oligonucleotide
  Antisense strand to SEQ ID NO: 652442
aaacaaggaaauaugcacc

SEQ ID NO: 652444 - RNA, 19 nt, Artificial Sequence
  Description of Artificial Sequence: Synthetic oligonucleotide
  Sense strand starting at position 3458 of SEQ ID NO: 585596
ugcauauuuccuuguuuga

SEQ ID NO: 652445 - RNA, 19 nt, Artificial Sequence
  Description of Artificial Sequence: Synthetic oligonucleotide
  Antisense strand to SEQ ID NO: 652444
ucaaacaaggaaauaugca

SEQ ID NO: 652446 - RNA, 19 nt, Artificial Sequence
  Description of Artificial Sequence: Synthetic oligonucleotide
  Sense strand starting at position 3463 of SEQ ID NO: 585596
auuuccuuguuugaaagau

SEQ ID NO: 652447 - RNA, 19 nt, Artificial Sequence
  Description of Artificial Sequence: Synthetic oligonucleotide
  Antisense strand to SEQ ID NO: 652446
aucuuucaaacaaggaaau

SEQ ID NO: 652448 - RNA, 19 nt, Artificial Sequence
  Description of Artificial Sequence: Synthetic oligonucleotide
  Sense strand starting at position 3471 of SEQ ID NO: 585596
guuugaaagauacggaaug

SEQ ID NO: 652449 - RNA, 19 nt, Artificial Sequence
  Description of Artificial Sequence: Synthetic oligonucleotide
  Antisense strand to SEQ ID NO: 652448
cauuccguaucuuucaaac

SEQ ID NO: 652450 - RNA, 19 nt, Artificial Sequence
  Description of Artificial Sequence: Synthetic oligonucleotide
  Sense strand starting at position 3483 of SEQ ID NO: 585596
cggaaugcucuauaaauug

SEQ ID NO: 652451 - RNA, 19 nt, Artificial Sequence
  Description of Artificial Sequence: Synthetic oligonucleotide
  Antisense strand to SEQ ID NO: 652450
caauuuauagagcauuccg

SEQ ID NO: 652452 - RNA, 19 nt, Artificial Sequence
  Description of Artificial Sequence: Synthetic oligonucleotide
  Sense strand starting at position 3549 of SEQ ID NO: 585596
acaaauauaccuggaguuu

SEQ ID NO: 652453 - RNA, 19 nt, Artificial Sequence
  Description of Artificial Sequence: Synthetic oligonucleotide
  Antisense strand to SEQ ID NO: 652452
aaacuccagguauauuugu

SEQ ID NO: 652454 - RNA, 19 nt, Artificial Sequence
  Description of Artificial Sequence: Synthetic oligonucleotide
  Sense strand starting at position 3575 of SEQ ID NO: 585596
cgcuaucuugcagucuuau

SEQ ID NO: 652455 - RNA, 19 nt, Artificial Sequence
  Description of Artificial Sequence: Synthetic oligonucleotide
  Antisense strand to SEQ ID NO: 652454
auaagacugcaagauagcg

SEQ ID NO: 652456 - RNA, 19 nt, Artificial Sequence
  Description of Artificial Sequence: Synthetic oligonucleotide
  Sense strand starting at position 3587 of SEQ ID NO: 585596
gucuuaugccauuauuauu

SEQ ID NO: 652457 - RNA, 19 nt, Artificial Sequence
  Description of Artificial Sequence: Synthetic oligonucleotide
  Antisense strand to SEQ ID NO: 652456
aauaauaauggcauaagac

SEQ ID NO: 652458 - RNA, 19 nt, Artificial Sequence
  Description of Artificial Sequence: Synthetic oligonucleotide
  Sense strand starting at position 3692 of SEQ ID NO: 585596
aggagugaaugaguggauu

SEQ ID NO: 652459 - RNA, 19 nt, Artificial Sequence
  Description of Artificial Sequence: Synthetic oligonucleotide
  Antisense strand to SEQ ID NO: 652458
aauccacucauucacuccu

SEQ ID NO: 652460 - RNA, 19 nt, Artificial Sequence
  Description of Artificial Sequence: Synthetic oligonucleotide
  Sense strand starting at position 3806 of SEQ ID NO: 585596
gcaacauuagcauagcaua

SEQ ID NO: 652461 - RNA, 19 nt, Artificial Sequence
  Description of Artificial Sequence: Synthetic oligonucleotide
  Antisense strand to SEQ ID NO: 652460
uaugcuaugcuaauguugc

SEQ ID NO: 652462 - RNA, 19 nt, Artificial Sequence
  Description of Artificial Sequence: Synthetic oligonucleotide
  Sense strand starting at position 3860 of SEQ ID NO: 585596
uguagcuauuuccuacuca

SEQ ID NO: 652463 - RNA, 19 nt, Artificial Sequence
  Description of Artificial Sequence: Synthetic oligonucleotide
  Antisense strand to SEQ ID NO: 652462
ugaguaggaaauagcuaca

SEQ ID NO: 652464 - RNA, 19 nt, Artificial Sequence
  Description of Artificial Sequence: Synthetic oligonucleotide
  Sense strand starting at position 3885 of SEQ ID NO: 585596
aguuguuauucccucagag

SEQ ID NO: 652465 - RNA, 19 nt, Artificial Sequence
  Description of Artificial Sequence: Synthetic oligonucleotide
  Antisense strand to SEQ ID NO: 652464
cucugagggaauaacaacu

SEQ ID NO: 652466 - RNA, 19 nt, Artificial Sequence
  Description of Artificial Sequence: Synthetic oligonucleotide
  Sense strand starting at position 3887 of SEQ ID NO: 585596
uuguuauucccucagagga

SEQ ID NO: 652467 - RNA, 19 nt, Artificial Sequence
  Description of Artificial Sequence: Synthetic oligonucleotide
  Antisense strand to SEQ ID NO: 652466
uccucugagggaauaacaa

SEQ ID NO: 652468 - RNA, 19 nt, Artificial Sequence
  Description of Artificial Sequence: Synthetic oligonucleotide
  Sense strand starting at position 3889 of SEQ ID NO: 585596
guuauucccucagaggaga

SEQ ID NO: 652469 - RNA, 19 nt, Artificial Sequence
  Description of Artificial Sequence: Synthetic oligonucleotide
  Antisense strand to SEQ ID NO: 652468
ucuccucugagggaauaac

SEQ ID NO: 652470 - RNA, 19 nt, Artificial Sequence
  Description of Artificial Sequence: Synthetic oligonucleotide
  Sense strand starting at position 3904 of SEQ ID NO: 585596
gagacuuucugguucucca

SEQ ID NO: 652471 - RNA, 19 nt, Artificial Sequence
  Description of Artificial Sequence: Synthetic oligonucleotide
  Antisense strand to SEQ ID NO: 652470
uggagaaccagaaagucuc

SEQ ID NO: 652472 - RNA, 19 nt, Artificial Sequence
  Description of Artificial Sequence: Synthetic oligonucleotide
  Sense strand starting at position 3911 of SEQ ID NO: 585596
ucugguucuccagacugga

SEQ ID NO: 652473 - RNA, 19 nt, Artificial Sequence
  Description of Artificial Sequence: Synthetic oligonucleotide
  Antisense strand to SEQ ID NO: 652472
uccagucuggagaaccaga

SEQ ID NO: 652474 - RNA, 19 nt, Artificial Sequence
  Description of Artificial Sequence: Synthetic oligonucleotide
  Sense strand starting at position 139 of SEQ ID NO: 585597
uuagacgucaaguauaaag

SEQ ID NO: 652475 - RNA, 19 nt, Artificial Sequence
  Description of Artificial Sequence: Synthetic oligonucleotide
  Antisense strand to SEQ ID NO: 652474
cuuuauacuugacgucuaa

SEQ ID NO: 652476 - RNA, 19 nt, Artificial Sequence
  Description of Artificial Sequence: Synthetic oligonucleotide
  Sense strand starting at position 378 of SEQ ID NO: 585597
gcuuuauauucucuggaac

SEQ ID NO: 652477 - RNA, 19 nt, Artificial Sequence
  Description of Artificial Sequence: Synthetic oligonucleotide
  Antisense strand to SEQ ID NO: 652476
guuccagagaauauaaagc

SEQ ID NO: 652478 - RNA, 19 nt, Artificial Sequence
  Description of Artificial Sequence: Synthetic oligonucleotide
  Sense strand starting at position 433 of SEQ ID NO: 585597
aggucuauuugauaaauag

SEQ ID NO: 652479 - RNA, 19 nt, Artificial Sequence
  Description of Artificial Sequence: Synthetic oligonucleotide
  Antisense strand to SEQ ID NO: 652478
cuauuuaucaaauagaccu

SEQ ID NO: 652480 - RNA, 19 nt, Artificial Sequence
  Description of Artificial Sequence: Synthetic oligonucleotide
  Sense strand starting at position 443 of SEQ ID NO: 585597
gauaaauagcgucauuaag

SEQ ID NO: 652481 - RNA, 19 nt, Artificial Sequence
  Description of Artificial Sequence: Synthetic oligonucleotide
  Antisense strand to SEQ ID NO: 652480
cuuaaugacgcuauuuauc

SEQ ID NO: 652482 - RNA, 19 nt, Artificial Sequence
  Description of Artificial Sequence: Synthetic oligonucleotide
  Sense strand starting at position 467 of SEQ ID NO: 585597
gccguugugaguguugauc

SEQ ID NO: 652483 - RNA, 19 nt, Artificial Sequence
  Description of Artificial Sequence: Synthetic oligonucleotide
  Antisense strand to SEQ ID NO: 652482
gaucaacacucacaacggc

SEQ ID NO: 652484 - RNA, 19 nt, Artificial Sequence
  Description of Artificial Sequence: Synthetic oligonucleotide
  Sense strand starting at position 476 of SEQ ID NO: 585597
aguguugauccucagcuca

SEQ ID NO: 652485 - RNA, 19 nt, Artificial Sequence
  Description of Artificial Sequence: Synthetic oligonucleotide
  Antisense strand to SEQ ID NO: 652484
ugagcugaggaucaacacu

SEQ ID NO: 652486 - RNA, 19 nt, Artificial Sequence
  Description of Artificial Sequence: Synthetic oligonucleotide
  Sense strand starting at position 556 of SEQ ID NO: 585597
cauagaugccgugcguuua

SEQ ID NO: 652487 - RNA, 19 nt, Artificial Sequence
  Description of Artificial Sequence: Synthetic oligonucleotide
  Antisense strand to SEQ ID NO: 652486
uaaacgcacggcaucuaug

SEQ ID NO: 652488 - RNA, 19 nt, Artificial Sequence
  Description of Artificial Sequence: Synthetic oligonucleotide
  Sense strand starting at position 596 of SEQ ID NO: 585597
cuguacaaaugcuuugaau

SEQ ID NO: 652489 - RNA, 19 nt, Artificial Sequence
  Description of Artificial Sequence: Synthetic oligonucleotide
  Antisense strand to SEQ ID NO: 652488
auucaaagcauuuguacag

SEQ ID NO: 652490 - RNA, 19 nt, Artificial Sequence
  Description of Artificial Sequence: Synthetic oligonucleotide
  Sense strand starting at position 700 of SEQ ID NO: 585597
uugagaaacaauugugguu

SEQ ID NO: 652491 - RNA, 19 nt, Artificial Sequence
  Description of Artificial Sequence: Synthetic oligonucleotide
  Antisense strand to SEQ ID NO: 652490
aaccacaauuguuucucaa

SEQ ID NO: 652492 - RNA, 19 nt, Artificial Sequence
  Description of Artificial Sequence: Synthetic oligonucleotide
  Sense strand starting at position 705 of SEQ ID NO: 585597
aaacaauugugguuuguag

SEQ ID NO: 652493 - RNA, 19 nt, Artificial Sequence
  Description of Artificial Sequence: Synthetic oligonucleotide
  Antisense strand to SEQ ID NO: 652492
cuacaaaccacaauuguuu

SEQ ID NO: 652494 - RNA, 19 nt, Artificial Sequence
  Description of Artificial Sequence: Synthetic oligonucleotide
  Sense strand starting at position 707 of SEQ ID NO: 585597
acaauugugguuuguagag

SEQ ID NO: 652495 - RNA, 19 nt, Artificial Sequence
  Description of Artificial Sequence: Synthetic oligonucleotide
  Antisense strand to SEQ ID NO: 652494
cucuacaaaccacaauugu

SEQ ID NO: 652496 - RNA, 19 nt, Artificial Sequence
  Description of Artificial Sequence: Synthetic oligonucleotide
  Sense strand starting at position 717 of SEQ ID NO: 585597
uuuguagagcagcaagaau

SEQ ID NO: 652497 - RNA, 19 nt, Artificial Sequence
  Description of Artificial Sequence: Synthetic oligonucleotide
  Antisense strand to SEQ ID NO: 652496
auucuugcugcucuacaaa

SEQ ID NO: 652498 - RNA, 19 nt, Artificial Sequence
  Description of Artificial Sequence: Synthetic oligonucleotide
  Sense strand starting at position 941 of SEQ ID NO: 585597
uuggaagucuaauccaauu

SEQ ID NO: 652499 - RNA, 19 nt, Artificial Sequence
  Description of Artificial Sequence: Synthetic oligonucleotide
  Antisense strand to SEQ ID NO: 652498
aauuggauuagacuuccaa

SEQ ID NO: 652500 - RNA, 19 nt, Artificial Sequence
  Description of Artificial Sequence: Synthetic oligonucleotide
  Sense strand starting at position 966 of SEQ ID NO: 585597
ucuuucuaacaguauguau

SEQ ID NO: 652501 - RNA, 19 nt, Artificial Sequence
  Description of Artificial Sequence: Synthetic oligonucleotide
  Antisense strand to SEQ ID NO: 652500
auacauacuguuagaaaga

SEQ ID NO: 652502 - RNA, 19 nt, Artificial Sequence
  Description of Artificial Sequence: Synthetic oligonucleotide
  Sense strand starting at position 997 of SEQ ID NO: 585597
aaccaaguccgguaagaca

SEQ ID NO: 652503 - RNA, 19 nt, Artificial Sequence
  Description of Artificial Sequence: Synthetic oligonucleotide
  Antisense strand to SEQ ID NO: 652502
ugucuuaccggacuugguu

SEQ ID NO: 652504 - RNA, 19 nt, Artificial Sequence
  Description of Artificial Sequence: Synthetic oligonucleotide
  Sense strand starting at position 1394 of SEQ ID NO: 585597
ccuaucucuuaggcagaga

SEQ ID NO: 652505 - RNA, 19 nt, Artificial Sequence
  Description of Artificial Sequence: Synthetic oligonucleotide
  Antisense strand to SEQ ID NO: 652504
ucucugccuaagagauagg

SEQ ID NO: 652506 - RNA, 19 nt, Artificial Sequence
  Description of Artificial Sequence: Synthetic oligonucleotide
  Sense strand starting at position 1408 of SEQ ID NO: 585597
agagaagugccauagucau

SEQ ID NO: 652507 - RNA, 19 nt, Artificial Sequence
  Description of Artificial Sequence: Synthetic oligonucleotide
  Antisense strand to SEQ ID NO: 652506
augacuauggcacuucucu

SEQ ID NO: 652508 - RNA, 19 nt, Artificial Sequence
  Description of Artificial Sequence: Synthetic oligonucleotide
  Sense strand starting at position 1484 of SEQ ID NO: 585597
uuaguuugauuugcagcua

SEQ ID NO: 652509 - RNA, 19 nt, Artificial Sequence
  Description of Artificial Sequence: Synthetic oligonucleotide
  Antisense strand to SEQ ID NO: 652508
uagcugcaaaucaaacuaa

SEQ ID NO: 652510 - RNA, 19 nt, Artificial Sequence
  Description of Artificial Sequence: Synthetic oligonucleotide
  Sense strand starting at position 1644 of SEQ ID NO: 585597
cuuaacauacguuagacau

SEQ ID NO: 652511 - RNA, 19 nt, Artificial Sequence
  Description of Artificial Sequence: Synthetic oligonucleotide
  Antisense strand to SEQ ID NO: 652510
augucuaacguauguuaag

SEQ ID NO: 652512 - RNA, 19 nt, Artificial Sequence
  Description of Artificial Sequence: Synthetic oligonucleotide
  Sense strand starting at position 1880 of SEQ ID NO: 585597
ggaagagucuggaaguuag

SEQ ID NO: 652513 - RNA, 19 nt, Artificial Sequence
  Description of Artificial Sequence: Synthetic oligonucleotide
  Antisense strand to SEQ ID NO: 652512
cuaacuuccagacucuucc

SEQ ID NO: 652514 - RNA, 19 nt, Artificial Sequence
  Description of Artificial Sequence: Synthetic oligonucleotide
  Sense strand starting at position 2094 of SEQ ID NO: 585597
aagagaucugaguggagcu

SEQ ID NO: 652515 - RNA, 19 nt, Artificial Sequence
  Description of Artificial Sequence: Synthetic oligonucleotide
  Antisense strand to SEQ ID NO: 652514
agcuccacucagaucucuu

SEQ ID NO: 652516 - RNA, 19 nt, Artificial Sequence
  Description of Artificial Sequence: Synthetic oligonucleotide
  Sense strand starting at position 2107 of SEQ ID NO: 585597
ggagcugcucuuuagaaca

SEQ ID NO: 652517 - RNA, 19 nt, Artificial Sequence
  Description of Artificial Sequence: Synthetic oligonucleotide
  Antisense strand to SEQ ID NO: 652516
uguucuaaagagcagcucc

SEQ ID NO: 652518 - RNA, 19 nt, Artificial Sequence
  Description of Artificial Sequence: Synthetic oligonucleotide
  Sense strand starting at position 2328 of SEQ ID NO: 585597
caaggcagguagucauaau

SEQ ID NO: 652519 - RNA, 19 nt, Artificial Sequence
  Description of Artificial Sequence: Synthetic oligonucleotide
  Antisense strand to SEQ ID NO: 652518
auuaugacuaccugccuug

SEQ ID NO: 652520 - RNA, 19 nt, Artificial Sequence
  Description of Artificial Sequence: Synthetic oligonucleotide
  Sense strand starting at position 2433 of SEQ ID NO: 585597
cugauugccuggucaaaua

SEQ ID NO: 652521 - RNA, 19 nt, Artificial Sequence
  Description of Artificial Sequence: Synthetic oligonucleotide
  Antisense strand to SEQ ID NO: 652520
uauuugaccaggcaaucag

SEQ ID NO: 652522 - RNA, 19 nt, Artificial Sequence
  Description of Artificial Sequence: Synthetic oligonucleotide
  Sense strand starting at position 2601 of SEQ ID NO: 585597
ggcacaguacuuugagauc

SEQ ID NO: 652523 - RNA, 19 nt, Artificial Sequence
  Description of Artificial Sequence: Synthetic oligonucleotide
  Antisense strand to SEQ ID NO: 652522
gaucucaaaguacugugcc

SEQ ID NO: 652524 - RNA, 19 nt, Artificial Sequence
  Description of Artificial Sequence: Synthetic oligonucleotide
  Sense strand starting at position 2698 of SEQ ID NO: 585597
agcagaauugcucauuagu

SEQ ID NO: 652525 - RNA, 19 nt, Artificial Sequence
  Description of Artificial Sequence: Synthetic oligonucleotide
  Antisense strand to SEQ ID NO: 652524
acuaaugagcaauucugcu

SEQ ID NO: 652526 - RNA, 19 nt, Artificial Sequence
  Description of Artificial Sequence: Synthetic oligonucleotide
  Sense strand starting at position 2701 of SEQ ID NO: 585597
agaauugcucauuaguaug

SEQ ID NO: 652527 - RNA, 19 nt, Artificial Sequence
  Description of Artificial Sequence: Synthetic oligonucleotide
  Antisense strand to SEQ ID NO: 652526
cauacuaaugagcaauucu

SEQ ID NO: 652528 - RNA, 19 nt, Artificial Sequence
  Description of Artificial Sequence: Synthetic oligonucleotide
  Sense strand starting at position 2733 of SEQ ID NO: 585597
ugggucagcuuguuaagaa

SEQ ID NO: 652529 - RNA, 19 nt, Artificial Sequence
  Description of Artificial Sequence: Synthetic oligonucleotide
  Antisense strand to SEQ ID NO: 652528
uucuuaacaagcugaccca

SEQ ID NO: 652530 - RNA, 19 nt, Artificial Sequence
  Description of Artificial Sequence: Synthetic oligonucleotide
  Sense strand starting at position 2766 of SEQ ID NO: 585597
uugauaagccucggaagga

SEQ ID NO: 652531 - RNA, 19 nt, Artificial Sequence
  Description of Artificial Sequence: Synthetic oligonucleotide
  Antisense strand to SEQ ID NO: 652530
uccuuccgaggcuuaucaa

SEQ ID NO: 652532 - RNA, 19 nt, Artificial Sequence
  Description of Artificial Sequence: Synthetic oligonucleotide
  Sense strand starting at position 2937 of SEQ ID NO: 585597
acaguuaagccucaugaaa

SEQ ID NO: 652533 - RNA, 19 nt, Artificial Sequence
  Description of Artificial Sequence: Synthetic oligonucleotide
  Antisense strand to SEQ ID NO: 652532
uuucaugaggcuuaacugu

SEQ ID NO: 652534 - RNA, 19 nt, Artificial Sequence
  Description of Artificial Sequence: Synthetic oligonucleotide
  Sense strand starting at position 2975 of SEQ ID NO: 585597
aucauaugcccuuguagga

SEQ ID NO: 652535 - RNA, 19 nt, Artificial Sequence
  Description of Artificial Sequence: Synthetic oligonucleotide
  Antisense strand to SEQ ID NO: 652534
uccuacaagggcauaugau

SEQ ID NO: 652536 - RNA, 19 nt, Artificial Sequence
  Description of Artificial Sequence: Synthetic oligonucleotide
  Sense strand starting at position 3041 of SEQ ID NO: 585597
gacugacuucuuuaagguu

SEQ ID NO: 652537 - RNA, 19 nt, Artificial Sequence
  Description of Artificial Sequence: Synthetic oligonucleotide
  Antisense strand to SEQ ID NO: 652536
aaccuuaaagaagucaguc

SEQ ID NO: 652538 - RNA, 19 nt, Artificial Sequence
  Description of Artificial Sequence: Synthetic oligonucleotide
  Sense strand starting at position 3167 of SEQ ID NO: 585597
uucugaacucguuauugua

SEQ ID NO: 652539 - RNA, 19 nt, Artificial Sequence
  Description of Artificial Sequence: Synthetic oligonucleotide
  Antisense strand to SEQ ID NO: 652538
uacaauaacgaguucagaa

SEQ ID NO: 652540 - RNA, 19 nt, Artificial Sequence
  Description of Artificial Sequence: Synthetic oligonucleotide
  Sense strand starting at position 3232 of SEQ ID NO: 585597
gagagaguauaagucuaug

SEQ ID NO: 652541 - RNA, 19 nt, Artificial Sequence
  Description of Artificial Sequence: Synthetic oligonucleotide
  Antisense strand to SEQ ID NO: 652540
cauagacuuauacucucuc

SEQ ID NO: 652542 - RNA, 19 nt, Artificial Sequence
  Description of Artificial Sequence: Synthetic oligonucleotide
  Sense strand starting at position 3244 of SEQ ID NO: 585597
gucuaugcugcugaccaaa

SEQ ID NO: 652543 - RNA, 19 nt, Artificial Sequence
  Description of Artificial Sequence: Synthetic oligonucleotide
  Antisense strand to SEQ ID NO: 652542
uuuggucagcagcauagac

SEQ ID NO: 652544 - RNA, 19 nt, Artificial Sequence
  Description of Artificial Sequence: Synthetic oligonucleotide
  Sense strand starting at position 3262 of SEQ ID NO: 585597
accuuuaggugagugcaaa

SEQ ID NO: 652545 - RNA, 19 nt, Artificial Sequence
  Description of Artificial Sequence: Synthetic oligonucleotide
  Antisense strand to SEQ ID NO: 652544
uuugcacucaccuaaaggu

SEQ ID NO: 652546 - RNA, 19 nt, Artificial Sequence
  Description of Artificial Sequence: Synthetic oligonucleotide
  Sense strand starting at position 3275 of SEQ ID NO: 585597
ugcaaaugaaugugugauu

SEQ ID NO: 652547 - RNA, 19 nt, Artificial Sequence
  Description of Artificial Sequence: Synthetic oligonucleotide
  Antisense strand to SEQ ID NO: 652546
aaucacacauucauuugca

SEQ ID NO: 652548 - RNA, 19 nt, Artificial Sequence
  Description of Artificial Sequence: Synthetic oligonucleotide
  Sense strand starting at position 3280 of SEQ ID NO: 585597
augaaugugugauugaaga

SEQ ID NO: 652549 - RNA, 19 nt, Artificial Sequence
  Description of Artificial Sequence: Synthetic oligonucleotide
  Antisense strand to SEQ ID NO: 652548
ucuucaaucacacauucau

SEQ ID NO: 652550 - RNA, 19 nt, Artificial Sequence
  Description of Artificial Sequence: Synthetic oligonucleotide
  Sense strand starting at position 3429 of SEQ ID NO: 585597
auaauaugaaagggucgua

SEQ ID NO: 652551 - RNA, 19 nt, Artificial Sequence
  Description of Artificial Sequence: Synthetic oligonucleotide
  Antisense strand to SEQ ID NO: 652550
uacgacccuuucauauuau

SEQ ID NO: 652552 - RNA, 19 nt, Artificial Sequence
  Description of Artificial Sequence: Synthetic oligonucleotide
  Sense strand starting at position 3432 of SEQ ID NO: 585597
auaugaaagggucguaauu

SEQ ID NO: 652553 - RNA, 19 nt, Artificial Sequence
  Description of Artificial Sequence: Synthetic oligonucleotide
  Antisense strand to SEQ ID NO: 652552
aauuacgacccuuucauau

SEQ ID NO: 652554 - RNA, 19 nt, Artificial Sequence
  Description of Artificial Sequence: Synthetic oligonucleotide
  Sense strand starting at position 54 of SEQ ID NO: 585598
aacaccguuccgugagaua

SEQ ID NO: 652555 - RNA, 19 nt, Artificial Sequence
  Description of Artificial Sequence: Synthetic oligonucleotide
  Antisense strand to SEQ ID NO: 652554
uaucucacggaacgguguu

SEQ ID NO: 652556 - RNA, 19 nt, Artificial Sequence
  Description of Artificial Sequence: Synthetic oligonucleotide
  Sense strand starting at position 128 of SEQ ID NO: 585598
acuuaaguagauuacaguu

SEQ ID NO: 652557 - RNA, 19 nt, Artificial Sequence
  Description of Artificial Sequence: Synthetic oligonucleotide
  Antisense strand to SEQ ID NO: 652556
aacuguaaucuacuuaagu

SEQ ID NO: 652558 - RNA, 19 nt, Artificial Sequence
  Description of Artificial Sequence: Synthetic oligonucleotide
  Sense strand starting at position 136 of SEQ ID NO: 585598
agauuacaguuucucauua

SEQ ID NO: 652559 - RNA, 19 nt, Artificial Sequence
  Description of Artificial Sequence: Synthetic oligonucleotide
  Antisense strand to SEQ ID NO: 652558
uaaugagaaacuguaaucu

SEQ ID NO: 652560 - RNA, 19 nt, Artificial Sequence
  Description of Artificial Sequence: Synthetic oligonucleotide
  Sense strand starting at position 347 of SEQ ID NO: 585598
ggacaauacuuucuguaua

SEQ ID NO: 652561 - RNA, 19 nt, Artificial Sequence
  Description of Artificial Sequence: Synthetic oligonucleotide
  Antisense strand to SEQ ID NO: 652560
uauacagaaaguauugucc

SEQ ID NO: 652562 - RNA, 19 nt, Artificial Sequence
  Description of Artificial Sequence: Synthetic oligonucleotide
  Sense strand starting at position 368 of SEQ ID NO: 585598
cuuguauuggaguacagau

SEQ ID NO: 652563 - RNA, 19 nt, Artificial Sequence
  Description of Artificial Sequence: Synthetic oligonucleotide
  Antisense strand to SEQ ID NO: 652562
aucuguacuccaauacaag

SEQ ID NO: 652564 - RNA, 19 nt, Artificial Sequence
  Description of Artificial Sequence: Synthetic oligonucleotide
  Sense strand starting at position 592 of SEQ ID NO: 585598
uagccaugucauuaauggu

SEQ ID NO: 652565 - RNA, 19 nt, Artificial Sequence
  Description of Artificial Sequence: Synthetic oligonucleotide
  Antisense strand to SEQ ID NO: 652564
accauuaaugacauggcua

SEQ ID NO: 652566 - RNA, 19 nt, Artificial Sequence
  Description of Artificial Sequence: Synthetic oligonucleotide
  Sense strand starting at position 617 of SEQ ID NO: 585598
gguauauucugauucugau

SEQ ID NO: 652567 - RNA, 19 nt, Artificial Sequence
  Description of Artificial Sequence: Synthetic oligonucleotide
  Antisense strand to SEQ ID NO: 652566
aucagaaucagaauauacc

SEQ ID NO: 652568 - RNA, 19 nt, Artificial Sequence
  Description of Artificial Sequence: Synthetic oligonucleotide
  Sense strand starting at position 633 of SEQ ID NO: 585598
gaugucucuucuuugcaga

SEQ ID NO: 652569 - RNA, 19 nt, Artificial Sequence
  Description of Artificial Sequence: Synthetic oligonucleotide
  Antisense strand to SEQ ID NO: 652568
ucugcaaagaagagacauc

SEQ ID NO: 652570 - RNA, 19 nt, Artificial Sequence
  Description of Artificial Sequence: Synthetic oligonucleotide
  Sense strand starting at position 634 of SEQ ID NO: 585598
augucucuucuuugcagaa

SEQ ID NO: 652571 - RNA, 19 nt, Artificial Sequence
  Description of Artificial Sequence: Synthetic oligonucleotide
  Antisense strand to SEQ ID NO: 652570
uucugcaaagaagagacau

SEQ ID NO: 652572 - RNA, 19 nt, Artificial Sequence
  Description of Artificial Sequence: Synthetic oligonucleotide
  Sense strand starting at position 651 of SEQ ID NO: 585598
aagggucuucugugguauu

SEQ ID NO: 652573 - RNA, 19 nt, Artificial Sequence
  Description of Artificial Sequence: Synthetic oligonucleotide
  Antisense strand to SEQ ID NO: 652572
aauaccacagaagacccuu

SEQ ID NO: 652574 - RNA, 19 nt, Artificial Sequence
  Description of Artificial Sequence: Synthetic oligonucleotide
  Sense strand starting at position 692 of SEQ ID NO: 585598
gugguaucucagggaguga

SEQ ID NO: 652575 - RNA, 19 nt, Artificial Sequence
  Description of Artificial Sequence: Synthetic oligonucleotide
  Antisense strand to SEQ ID NO: 652574
ucacucccugagauaccac

SEQ ID NO: 652576 - RNA, 19 nt, Artificial Sequence
  Description of Artificial Sequence: Synthetic oligonucleotide
  Sense strand starting at position 767 of SEQ ID NO: 585598
acagaaugcuaucuagcua

SEQ ID NO: 652577 - RNA, 19 nt, Artificial Sequence
  Description of Artificial Sequence: Synthetic oligonucleotide
  Antisense strand to SEQ ID NO: 652576
uagcuagauagcauucugu

SEQ ID NO: 652578 - RNA, 19 nt, Artificial Sequence
  Description of Artificial Sequence: Synthetic oligonucleotide
  Sense strand starting at position 906 of SEQ ID NO: 585598
ggucccuucgaguauuauu

SEQ ID NO: 652579 - RNA, 19 nt, Artificial Sequence
  Description of Artificial Sequence: Synthetic oligonucleotide
  Antisense strand to SEQ ID NO: 652578
aauaauacucgaagggacc

SEQ ID NO: 652580 - RNA, 19 nt, Artificial Sequence
  Description of Artificial Sequence: Synthetic oligonucleotide
  Sense strand starting at position 1153 of SEQ ID NO: 585598
aacuuuaguccuggagaac

SEQ ID NO: 652581 - RNA, 19 nt, Artificial Sequence
  Description of Artificial Sequence: Synthetic oligonucleotide
  Antisense strand to SEQ ID NO: 652580
guucuccaggacuaaaguu

SEQ ID NO: 652582 - RNA, 19 nt, Artificial Sequence
  Description of Artificial Sequence: Synthetic oligonucleotide
  Sense strand starting at position 1180 of SEQ ID NO: 585598
ugagauauguuucccuaaa

SEQ ID NO: 652583 - RNA, 19 nt, Artificial Sequence
  Description of Artificial Sequence: Synthetic oligonucleotide
  Antisense strand to SEQ ID NO: 652582
uuuagggaaacauaucuca

SEQ ID NO: 652584 - RNA, 19 nt, Artificial Sequence
  Description of Artificial Sequence: Synthetic oligonucleotide
  Sense strand starting at position 1182 of SEQ ID NO: 585598
agauauguuucccuaaaug

SEQ ID NO: 652585 - RNA, 19 nt, Artificial Sequence
  Description of Artificial Sequence: Synthetic oligonucleotide
  Antisense strand to SEQ ID NO: 652584
cauuuagggaaacauaucu

SEQ ID NO: 652586 - RNA, 19 nt, Artificial Sequence
  Description of Artificial Sequence: Synthetic oligonucleotide
  Sense strand starting at position 1480 of SEQ ID NO: 585598
aguuucuggcuccgaaaua

SEQ ID NO: 652587 - RNA, 19 nt, Artificial Sequence
  Description of Artificial Sequence: Synthetic oligonucleotide
  Antisense strand to SEQ ID NO: 652586
uauuucggagccagaaacu

SEQ ID NO: 652588 - RNA, 19 nt, Artificial Sequence
  Description of Artificial Sequence: Synthetic oligonucleotide
  Sense strand starting at position 1491 of SEQ ID NO: 585598
ccgaaauaauuuggauaaa

SEQ ID NO: 652589 - RNA, 19 nt, Artificial Sequence
  Description of Artificial Sequence: Synthetic oligonucleotide
  Antisense strand to SEQ ID NO: 652588
uuuauccaaauuauuucgg

SEQ ID NO: 652590 - RNA, 19 nt, Artificial Sequence
  Description of Artificial Sequence: Synthetic oligonucleotide
  Sense strand starting at position 1628 of SEQ ID NO: 585598
ggguuucuccgagggacuu

SEQ ID NO: 652591 - RNA, 19 nt, Artificial Sequence
  Description of Artificial Sequence: Synthetic oligonucleotide
  Antisense strand to SEQ ID NO: 652590
aagucccucggagaaaccc

SEQ ID NO: 652592 - RNA, 19 nt, Artificial Sequence
  Description of Artificial Sequence: Synthetic oligonucleotide
  Sense strand starting at position 2004 of SEQ ID NO: 585598
cugucauuccucuaugcag

SEQ ID NO: 652593 - RNA, 19 nt, Artificial Sequence
  Description of Artificial Sequence: Synthetic oligonucleotide
  Antisense strand to SEQ ID NO: 652592
cugcauagaggaaugacag

SEQ ID NO: 652594 - RNA, 19 nt, Artificial Sequence
  Description of Artificial Sequence: Synthetic oligonucleotide
  Sense strand starting at position 2006 of SEQ ID NO: 585598
gucauuccucuaugcagau

SEQ ID NO: 652595 - RNA, 19 nt, Artificial Sequence
  Description of Artificial Sequence: Synthetic oligonucleotide
  Antisense strand to SEQ ID NO: 652594
aucugcauagaggaaugac

SEQ ID NO: 652596 - RNA, 19 nt, Artificial Sequence
  Description of Artificial Sequence: Synthetic oligonucleotide
  Sense strand starting at position 2253 of SEQ ID NO: 585598
uaaaguauuuagucacggu

SEQ ID NO: 652597 - RNA, 19 nt, Artificial Sequence
  Description of Artificial Sequence: Synthetic oligonucleotide
  Antisense strand to SEQ ID NO: 652596
accgugacuaaauacuuua

SEQ ID NO: 652598 - RNA, 19 nt, Artificial Sequence
  Description of Artificial Sequence: Synthetic oligonucleotide
  Sense strand starting at position 2257 of SEQ ID NO: 585598
guauuuagucacgguacuu

SEQ ID NO: 652599 - RNA, 19 nt, Artificial Sequence
  Description of Artificial Sequence: Synthetic oligonucleotide
  Antisense strand to SEQ ID NO: 652598
aaguaccgugacuaaauac

SEQ ID NO: 652600 - RNA, 19 nt, Artificial Sequence
  Description of Artificial Sequence: Synthetic oligonucleotide
  Sense strand starting at position 2429 of SEQ ID NO: 585598
cucaaucaggcuugacaac

SEQ ID NO: 652601 - RNA, 19 nt, Artificial Sequence
  Description of Artificial Sequence: Synthetic oligonucleotide
  Antisense strand to SEQ ID NO: 652600
guugucaagccugauugag

SEQ ID NO: 652602 - RNA, 19 nt, Artificial Sequence
  Description of Artificial Sequence: Synthetic oligonucleotide
  Sense strand starting at position 2767 of SEQ ID NO: 585598
uauggaacaucuguauaug

SEQ ID NO: 652603 - RNA, 19 nt, Artificial Sequence
  Description of Artificial Sequence: Synthetic oligonucleotide
  Antisense strand to SEQ ID NO: 652602
cauauacagauguuccaua

SEQ ID NO: 652604 - RNA, 19 nt, Artificial Sequence
  Description of Artificial Sequence: Synthetic oligonucleotide
  Sense strand starting at position 2777 of SEQ ID NO: 585598
cuguauauggugcauuaga

SEQ ID NO: 652605 - RNA, 19 nt, Artificial Sequence
  Description of Artificial Sequence: Synthetic oligonucleotide
  Antisense strand to SEQ ID NO: 652604
ucuaaugcaccauauacag

SEQ ID NO: 652606 - RNA, 19 nt, Artificial Sequence
  Description of Artificial Sequence: Synthetic oligonucleotide
  Sense strand starting at position 2802 of SEQ ID NO: 585598
ggugguuacuggauguguu

SEQ ID NO: 652607 - RNA, 19 nt, Artificial Sequence
  Description of Artificial Sequence: Synthetic oligonucleotide
  Antisense strand to SEQ ID NO: 652606
aacacauccaguaaccacc

SEQ ID NO: 652608 - RNA, 19 nt, Artificial Sequence
  Description of Artificial Sequence: Synthetic oligonucleotide
  Sense strand starting at position 2836 of SEQ ID NO: 585598
cauugagaugucuguaaug

SEQ ID NO: 652609 - RNA, 19 nt, Artificial Sequence
  Description of Artificial Sequence: Synthetic oligonucleotide
  Antisense strand to SEQ ID NO: 652608
cauuacagacaucucaaug

SEQ ID NO: 652610 - RNA, 19 nt, Artificial Sequence
  Description of Artificial Sequence: Synthetic oligonucleotide
  Sense strand starting at position 2838 of SEQ ID NO: 585598
uugagaugucuguaaugau

SEQ ID NO: 652611 - RNA, 19 nt, Artificial Sequence
  Description of Artificial Sequence: Synthetic oligonucleotide
  Antisense strand to SEQ ID NO: 652610
aucauuacagacaucucaa

SEQ ID NO: 652612 - RNA, 19 nt, Artificial Sequence
  Description of Artificial Sequence: Synthetic oligonucleotide
  Sense strand starting at position 3072 of SEQ ID NO: 585598
ugucaugguuaauuaaguu

SEQ ID NO: 652613 - RNA, 19 nt, Artificial Sequence
  Description of Artificial Sequence: Synthetic oligonucleotide
  Antisense strand to SEQ ID NO: 652612
aacuuaauuaaccaugaca

SEQ ID NO: 652614 - RNA, 19 nt, Artificial Sequence
  Description of Artificial Sequence: Synthetic oligonucleotide
  Sense strand starting at position 3342 of SEQ ID NO: 585598
aagcgaugagaguaagcaa

SEQ ID NO: 652615 - RNA, 19 nt, Artificial Sequence
  Description of Artificial Sequence: Synthetic oligonucleotide
  Antisense strand to SEQ ID NO: 652614
uugcuuacucucaucgcuu

SEQ ID NO: 652616 - RNA, 19 nt, Artificial Sequence
  Description of Artificial Sequence: Synthetic oligonucleotide
  Sense strand starting at position 3345 of SEQ ID NO: 585598
cgaugagaguaagcaauua

SEQ ID NO: 652617 - RNA, 19 nt, Artificial Sequence
  Description of Artificial Sequence: Synthetic oligonucleotide
  Antisense strand to SEQ ID NO: 652616
uaauugcuuacucucaucg

SEQ ID NO: 652618 - RNA, 19 nt, Artificial Sequence
  Description of Artificial Sequence: Synthetic oligonucleotide
  Sense strand starting at position 3387 of SEQ ID NO: 585598
uugcuuugaguugccguaa

SEQ ID NO: 652619 - RNA, 19 nt, Artificial Sequence
  Description of Artificial Sequence: Synthetic oligonucleotide
  Antisense strand to SEQ ID NO: 652618
uuacggcaacucaaagcaa

SEQ ID NO: 652620 - RNA, 19 nt, Artificial Sequence
  Description of Artificial Sequence: Synthetic oligonucleotide
  Sense strand starting at position 3426 of SEQ ID NO: 585598
agugguuaaagguaaguua

SEQ ID NO: 652621 - RNA, 19 nt, Artificial Sequence
  Description of Artificial Sequence: Synthetic oligonucleotide
  Antisense strand to SEQ ID NO: 652620
uaacuuaccuuuaaccacu

SEQ ID NO: 652622 - RNA, 19 nt, Artificial Sequence
  Description of Artificial Sequence: Synthetic oligonucleotide
  Sense strand starting at position 3429 of SEQ ID NO: 585598
gguuaaagguaaguuaaga

SEQ ID NO: 652623 - RNA, 19 nt, Artificial Sequence
  Description of Artificial Sequence: Synthetic oligonucleotide
  Antisense strand to SEQ ID NO: 652622
ucuuaacuuaccuuuaacc

SEQ ID NO: 652624 - RNA, 19 nt, Artificial Sequence
  Description of Artificial Sequence: Synthetic oligonucleotide
  Sense strand starting at position 3471 of SEQ ID NO: 585598
uugacagucuuucugauaa

SEQ ID NO: 652625 - RNA, 19 nt, Artificial Sequence
  Description of Artificial Sequence: Synthetic oligonucleotide
  Antisense strand to SEQ ID NO: 652624
uuaucagaaagacugucaa

SEQ ID NO: 652626 - RNA, 19 nt, Artificial Sequence
  Description of Artificial Sequence: Synthetic oligonucleotide
  Sense strand starting at position 3581 of SEQ ID NO: 585598
acuuuaagguugcuaucau

SEQ ID NO: 652627 - RNA, 19 nt, Artificial Sequence
  Description of Artificial Sequence: Synthetic oligonucleotide
  Antisense strand to SEQ ID NO: 652626
augauagcaaccuuaaagu

SEQ ID NO: 652628 - RNA, 19 nt, Artificial Sequence
  Description of Artificial Sequence: Synthetic oligonucleotide
  Sense strand starting at position 3872 of SEQ ID NO: 585598
ggaagugugcacuaaguuu

SEQ ID NO: 652629 - RNA, 19 nt, Artificial Sequence
  Description of Artificial Sequence: Synthetic oligonucleotide
  Antisense strand to SEQ ID NO: 652628
aaacuuagugcacacuucc

SEQ ID NO: 652630 - RNA, 19 nt, Artificial Sequence
  Description of Artificial Sequence: Synthetic oligonucleotide
  Sense strand starting at position 3891 of SEQ ID NO: 585598
ucuuucuaagagugggaca

SEQ ID NO: 652631 - RNA, 19 nt, Artificial Sequence
  Description of Artificial Sequence: Synthetic oligonucleotide
  Antisense strand to SEQ ID NO: 652630
ugucccacucuuagaaaga

SEQ ID NO: 652632 - RNA, 19 nt, Artificial Sequence
  Description of Artificial Sequence: Synthetic oligonucleotide
  Sense strand starting at position 3938 of SEQ ID NO: 585598
gauggaacuuggcauuuaa

SEQ ID NO: 652633 - RNA, 19 nt, Artificial Sequence
  Description of Artificial Sequence: Synthetic oligonucleotide
  Antisense strand to SEQ ID NO: 652632
uuaaaugccaaguuccauc

SEQ ID NO: 652634 - RNA, 19 nt, Artificial Sequence
  Description of Artificial Sequence: Synthetic oligonucleotide
  Sense strand starting at position 133 of SEQ ID NO: 585599
auggcuauauuugagauua

SEQ ID NO: 652635 - RNA, 19 nt, Artificial Sequence
  Description of Artificial Sequence: Synthetic oligonucleotide
  Antisense strand to SEQ ID NO: 652634
uaaucucaaauauagccau

SEQ ID NO: 652636 - RNA, 19 nt, Artificial Sequence
  Description of Artificial Sequence: Synthetic oligonucleotide
  Sense strand starting at position 135 of SEQ ID NO: 585599
ggcuauauuugagauuaca

SEQ ID NO: 652637 - RNA, 19 nt, Artificial Sequence
  Description of Artificial Sequence: Synthetic oligonucleotide
  Antisense strand to SEQ ID NO: 652636
uguaaucucaaauauagcc

SEQ ID NO: 652638 - RNA, 19 nt, Artificial Sequence
  Description of Artificial Sequence: Synthetic oligonucleotide
  Sense strand starting at position 198 of SEQ ID NO: 585599
ucuccacaguguuuaaaua

SEQ ID NO: 652639 - RNA, 19 nt, Artificial Sequence
  Description of Artificial Sequence: Synthetic oligonucleotide
  Antisense strand to SEQ ID NO: 652638
uauuuaaacacuguggaga

SEQ ID NO: 652640 - RNA, 19 nt, Artificial Sequence
  Description of Artificial Sequence: Synthetic oligonucleotide
  Sense strand starting at position 199 of SEQ ID NO: 585599
cuccacaguguuuaaauaa

SEQ ID NO: 652641 - RNA, 19 nt, Artificial Sequence
  Description of Artificial Sequence: Synthetic oligonucleotide
  Antisense strand to SEQ ID NO: 652640
uuauuuaaacacuguggag

SEQ ID NO: 652642 - RNA, 19 nt, Artificial Sequence
  Description of Artificial Sequence: Synthetic oligonucleotide
  Sense strand starting at position 349 of SEQ ID NO: 585599
uaaagucugccacaggagu

SEQ ID NO: 652643 - RNA, 19 nt, Artificial Sequence
  Description of Artificial Sequence: Synthetic oligonucleotide
  Antisense strand to SEQ ID NO: 652642
acuccuguggcagacuuua

SEQ ID NO: 652644 - RNA, 19 nt, Artificial Sequence
  Description of Artificial Sequence: Synthetic oligonucleotide
  Sense strand starting at position 360 of SEQ ID NO: 585599
acaggaguuucuuuccuuu

SEQ ID NO: 652645 - RNA, 19 nt, Artificial Sequence
  Description of Artificial Sequence: Synthetic oligonucleotide
  Antisense strand to SEQ ID NO: 652644
aaaggaaagaaacuccugu

SEQ ID NO: 652646 - RNA, 19 nt, Artificial Sequence
  Description of Artificial Sequence: Synthetic oligonucleotide
  Sense strand starting at position 430 of SEQ ID NO: 585599
uugaauuaaagugaucguu

SEQ ID NO: 652647 - RNA, 19 nt, Artificial Sequence
  Description of Artificial Sequence: Synthetic oligonucleotide
  Antisense strand to SEQ ID NO: 652646
aacgaucacuuuaauucaa

SEQ ID NO: 652648 - RNA, 19 nt, Artificial Sequence
  Description of Artificial Sequence: Synthetic oligonucleotide
  Sense strand starting at position 451 of SEQ ID NO: 585599
gccagaaugucaguauaau

SEQ ID NO: 652649 - RNA, 19 nt, Artificial Sequence
  Description of Artificial Sequence: Synthetic oligonucleotide
  Antisense strand to SEQ ID NO: 652648
auuauacugacauucuggc

SEQ ID NO: 652650 - RNA, 19 nt, Artificial Sequence
  Description of Artificial Sequence: Synthetic oligonucleotide
  Sense strand starting at position 468 of SEQ ID NO: 585599
auaaauuguggguggcaga

SEQ ID NO: 652651 - RNA, 19 nt, Artificial Sequence
  Description of Artificial Sequence: Synthetic oligonucleotide
  Antisense strand to SEQ ID NO: 652650
ucugccacccacaauuuau

SEQ ID NO: 652652 - RNA, 19 nt, Artificial Sequence
  Description of Artificial Sequence: Synthetic oligonucleotide
  Sense strand starting at position 469 of SEQ ID NO: 585599
uaaauuguggguggcagaa

SEQ ID NO: 652653 - RNA, 19 nt, Artificial Sequence
  Description of Artificial Sequence: Synthetic oligonucleotide
  Antisense strand to SEQ ID NO: 652652
uucugccacccacaauuua

SEQ ID NO: 652654 - RNA, 19 nt, Artificial Sequence
  Description of Artificial Sequence: Synthetic oligonucleotide
  Sense strand starting at position 624 of SEQ ID NO: 585599
ugacaagcccuauaguaca

SEQ ID NO: 652655 - RNA, 19 nt, Artificial Sequence
  Description of Artificial Sequence: Synthetic oligonucleotide
  Antisense strand to SEQ ID NO: 652654
uguacuauagggcuuguca

SEQ ID NO: 652656 - RNA, 19 nt, Artificial Sequence
  Description of Artificial Sequence: Synthetic oligonucleotide
  Sense strand starting at position 869 of SEQ ID NO: 585599
cuaauacacgcugacuuua

SEQ ID NO: 652657 - RNA, 19 nt, Artificial Sequence
  Description of Artificial Sequence: Synthetic oligonucleotide
  Antisense strand to SEQ ID NO: 652656
uaaagucagcguguauuag

SEQ ID NO: 652658 - RNA, 19 nt, Artificial Sequence
  Description of Artificial Sequence: Synthetic oligonucleotide
  Sense strand starting at position 971 of SEQ ID NO: 585599
ggucuuguaguguagaaug

SEQ ID NO: 652659 - RNA, 19 nt, Artificial Sequence
  Description of Artificial Sequence: Synthetic oligonucleotide
  Antisense strand to SEQ ID NO: 652658
cauucuacacuacaagacc

SEQ ID NO: 652660 - RNA, 19 nt, Artificial Sequence
  Description of Artificial Sequence: Synthetic oligonucleotide
  Sense strand starting at position 1122 of SEQ ID NO: 585599
ggagaauucugcuugagug

SEQ ID NO: 652661 - RNA, 19 nt, Artificial Sequence
  Description of Artificial Sequence: Synthetic oligonucleotide
  Antisense strand to SEQ ID NO: 652660
cacucaagcagaauucucc

SEQ ID NO: 652662 - RNA, 19 nt, Artificial Sequence
  Description of Artificial Sequence: Synthetic oligonucleotide
  Sense strand starting at position 1613 of SEQ ID NO: 585599
ccuaaauagcaguagucuu

SEQ ID NO: 652663 - RNA, 19 nt, Artificial Sequence
  Description of Artificial Sequence: Synthetic oligonucleotide
  Antisense strand to SEQ ID NO: 652662
aagacuacugcuauuuagg

SEQ ID NO: 652664 - RNA, 19 nt, Artificial Sequence
  Description of Artificial Sequence: Synthetic oligonucleotide
  Sense strand starting at position 1734 of SEQ ID NO: 585599
cgcgucucagucuugaaca

SEQ ID NO: 652665 - RNA, 19 nt, Artificial Sequence
  Description of Artificial Sequence: Synthetic oligonucleotide
  Antisense strand to SEQ ID NO: 652664
uguucaagacugagacgcg

SEQ ID NO: 652666 - RNA, 19 nt, Artificial Sequence
  Description of Artificial Sequence: Synthetic oligonucleotide
  Sense strand starting at position 2010 of SEQ ID NO: 585599
gagacaccgccaggaaauu

SEQ ID NO: 652667 - RNA, 19 nt, Artificial Sequence
  Description of Artificial Sequence: Synthetic oligonucleotide
  Antisense strand to SEQ ID NO: 652666
aauuuccuggcggugucuc

SEQ ID NO: 652668 - RNA, 19 nt, Artificial Sequence
  Description of Artificial Sequence: Synthetic oligonucleotide
  Sense strand starting at position 2061 of SEQ ID NO: 585599
uccauuacaggcugauuaa

SEQ ID NO: 652669 - RNA, 19 nt, Artificial Sequence
  Description of Artificial Sequence: Synthetic oligonucleotide
  Antisense strand to SEQ ID NO: 652668
uuaaucagccuguaaugga

SEQ ID NO: 652670 - RNA, 19 nt, Artificial Sequence
  Description of Artificial Sequence: Synthetic oligonucleotide
  Sense strand starting at position 2497 of SEQ ID NO: 585599
auauuaggaaguugaguau

SEQ ID NO: 652671 - RNA, 19 nt, Artificial Sequence
  Description of Artificial Sequence: Synthetic oligonucleotide
  Antisense strand to SEQ ID NO: 652670
auacucaacuuccuaauau

SEQ ID NO: 652672 - RNA, 19 nt, Artificial Sequence
  Description of Artificial Sequence: Synthetic oligonucleotide
  Sense strand starting at position 2677 of SEQ ID NO: 585599
uaucaucuguggcuaaaga

SEQ ID NO: 652673 - RNA, 19 nt, Artificial Sequence
  Description of Artificial Sequence: Synthetic oligonucleotide
  Antisense strand to SEQ ID NO: 652672
ucuuuagccacagaugaua

SEQ ID NO: 652674 - RNA, 19 nt, Artificial Sequence
  Description of Artificial Sequence: Synthetic oligonucleotide
  Sense strand starting at position 2678 of SEQ ID NO: 585599
aucaucuguggcuaaagaa

SEQ ID NO: 652675 - RNA, 19 nt, Artificial Sequence
  Description of Artificial Sequence: Synthetic oligonucleotide
  Antisense strand to SEQ ID NO: 652674
uucuuuagccacagaugau

SEQ ID NO: 652676 - RNA, 19 nt, Artificial Sequence
  Description of Artificial Sequence: Synthetic oligonucleotide
  Sense strand starting at position 2686 of SEQ ID NO: 585599
uggcuaaagaaaugugaag

SEQ ID NO: 652677 - RNA, 19 nt, Artificial Sequence
  Description of Artificial Sequence: Synthetic oligonucleotide
  Antisense strand to SEQ ID NO: 652676
cuucacauuucuuuagcca

SEQ ID NO: 652678 - RNA, 19 nt, Artificial Sequence
  Description of Artificial Sequence: Synthetic oligonucleotide
  Sense strand starting at position 2688 of SEQ ID NO: 585599
gcuaaagaaaugugaagau

SEQ ID NO: 652679 - RNA, 19 nt, Artificial Sequence
  Description of Artificial Sequence: Synthetic oligonucleotide
  Antisense strand to SEQ ID NO: 652678
aucuucacauuucuuuagc

SEQ ID NO: 652680 - RNA, 19 nt, Artificial Sequence
  Description of Artificial Sequence: Synthetic oligonucleotide
  Sense strand starting at position 2752 of SEQ ID NO: 585599
guuuaauuuggcuguguaa

SEQ ID NO: 652681 - RNA, 19 nt, Artificial Sequence
  Description of Artificial Sequence: Synthetic oligonucleotide
  Antisense strand to SEQ ID NO: 652680
uuacacagccaaauuaaac

SEQ ID NO: 652682 - RNA, 19 nt, Artificial Sequence
  Description of Artificial Sequence: Synthetic oligonucleotide
  Sense strand starting at position 2765 of SEQ ID NO: 585599
guguaaagaugacucucaa

SEQ ID NO: 652683 - RNA, 19 nt, Artificial Sequence
  Description of Artificial Sequence: Synthetic oligonucleotide
  Antisense strand to SEQ ID NO: 652682
uugagagucaucuuuacac

SEQ ID NO: 652684 - RNA, 19 nt, Artificial Sequence
  Description of Artificial Sequence: Synthetic oligonucleotide
  Sense strand starting at position 2823 of SEQ ID NO: 585599
gaacacagugcuggagaaa

SEQ ID NO: 652685 - RNA, 19 nt, Artificial Sequence
  Description of Artificial Sequence: Synthetic oligonucleotide
  Antisense strand to SEQ ID NO: 652684
uuucuccagcacuguguuc

SEQ ID NO: 652686 - RNA, 19 nt, Artificial Sequence
  Description of Artificial Sequence: Synthetic oligonucleotide
  Sense strand starting at position 2952 of SEQ ID NO: 585599
augaauccacaguauaguu

SEQ ID NO: 652687 - RNA, 19 nt, Artificial Sequence
  Description of Artificial Sequence: Synthetic oligonucleotide
  Antisense strand to SEQ ID NO: 652686
aacuauacuguggauucau

SEQ ID NO: 652688 - RNA, 19 nt, Artificial Sequence
  Description of Artificial Sequence: Synthetic oligonucleotide
  Sense strand starting at position 3054 of SEQ ID NO: 585599
gcaauuuguuuauuaagca

SEQ ID NO: 652689 - RNA, 19 nt, Artificial Sequence
  Description of Artificial Sequence: Synthetic oligonucleotide
  Antisense strand to SEQ ID NO: 652688
ugcuuaauaaacaaauugc

SEQ ID NO: 652690 - RNA, 19 nt, Artificial Sequence
  Description of Artificial Sequence: Synthetic oligonucleotide
  Sense strand starting at position 3146 of SEQ ID NO: 585599
agcuucuagguuuaaguau

SEQ ID NO: 652691 - RNA, 19 nt, Artificial Sequence
  Description of Artificial Sequence: Synthetic oligonucleotide
  Antisense strand to SEQ ID NO: 652690
auacuuaaaccuagaagcu

SEQ ID NO: 652692 - RNA, 19 nt, Artificial Sequence
  Description of Artificial Sequence: Synthetic oligonucleotide
  Sense strand starting at position 3420 of SEQ ID NO: 585599
gacugaaaucacuggguuu

SEQ ID NO: 652693 - RNA, 19 nt, Artificial Sequence
  Description of Artificial Sequence: Synthetic oligonucleotide
  Antisense strand to SEQ ID NO: 652692
aaacccagugauuucaguc

SEQ ID NO: 652694 - RNA, 19 nt, Artificial Sequence
  Description of Artificial Sequence: Synthetic oligonucleotide
  Sense strand starting at position 3422 of SEQ ID NO: 585599
cugaaaucacuggguuucu

SEQ ID NO: 652695 - RNA, 19 nt, Artificial Sequence
  Description of Artificial Sequence: Synthetic oligonucleotide
  Antisense strand to SEQ ID NO: 652694
agaaacccagugauuucag

SEQ ID NO: 652696 - RNA, 19 nt, Artificial Sequence
  Description of Artificial Sequence: Synthetic oligonucleotide
  Sense strand starting at position 3423 of SEQ ID NO: 585599
ugaaaucacuggguuucua

SEQ ID NO: 652697 - RNA, 19 nt, Artificial Sequence
  Description of Artificial Sequence: Synthetic oligonucleotide
  Antisense strand to SEQ ID NO: 652696
uagaaacccagugauuuca

SEQ ID NO: 652698 - RNA, 19 nt, Artificial Sequence
  Description of Artificial Sequence: Synthetic oligonucleotide
  Sense strand starting at position 3449 of SEQ ID NO: 585599
ucuacuugcccugauuaag

SEQ ID NO: 652699 - RNA, 19 nt, Artificial Sequence
  Description of Artificial Sequence: Synthetic oligonucleotide
  Antisense strand to SEQ ID NO: 652698
cuuaaucagggcaaguaga

SEQ ID NO: 652700 - RNA, 19 nt, Artificial Sequence
  Description of Artificial Sequence: Synthetic oligonucleotide
  Sense strand starting at position 3499 of SEQ ID NO: 585599
gcuccaaaucuaggacaaa

SEQ ID NO: 652701 - RNA, 19 nt, Artificial Sequence
  Description of Artificial Sequence: Synthetic oligonucleotide
  Antisense strand to SEQ ID NO: 652700
uuuguccuagauuuggagc

SEQ ID NO: 652702 - RNA, 19 nt, Artificial Sequence
  Description of Artificial Sequence: Synthetic oligonucleotide
  Sense strand starting at position 3590 of SEQ ID NO: 585599
aaagcugagauguggguaa

SEQ ID NO: 652703 - RNA, 19 nt, Artificial Sequence
  Description of Artificial Sequence: Synthetic oligonucleotide
  Antisense strand to SEQ ID NO: 652702
uuacccacaucucagcuuu

SEQ ID NO: 652704 - RNA, 19 nt, Artificial Sequence
  Description of Artificial Sequence: Synthetic oligonucleotide
  Sense strand starting at position 3593 of SEQ ID NO: 585599
gcugagauguggguaagga

SEQ ID NO: 652705 - RNA, 19 nt, Artificial Sequence
  Description of Artificial Sequence: Synthetic oligonucleotide
  Antisense strand to SEQ ID NO: 652704
uccuuacccacaucucagc

SEQ ID NO: 652706 - RNA, 19 nt, Artificial Sequence
  Description of Artificial Sequence: Synthetic oligonucleotide
  Sense strand starting at position 3601 of SEQ ID NO: 585599
guggguaaggaguagcuaa

SEQ ID NO: 652707 - RNA, 19 nt, Artificial Sequence
  Description of Artificial Sequence: Synthetic oligonucleotide
  Antisense strand to SEQ ID NO: 652706
uuagcuacuccuuacccac

SEQ ID NO: 652708 - RNA, 19 nt, Artificial Sequence
  Description of Artificial Sequence: Synthetic oligonucleotide
  Sense strand starting at position 3719 of SEQ ID NO: 585599
acuguuaguccuuaaauga

SEQ ID NO: 652709 - RNA, 19 nt, Artificial Sequence
  Description of Artificial Sequence: Synthetic oligonucleotide
  Antisense strand to SEQ ID NO: 652708
ucauuuaaggacuaacagu

SEQ ID NO: 652710 - RNA, 19 nt, Artificial Sequence
  Description of Artificial Sequence: Synthetic oligonucleotide
  Sense strand starting at position 3948 of SEQ ID NO: 585599
agugucauaacuugaagug

SEQ ID NO: 652711 - RNA, 19 nt, Artificial Sequence
  Description of Artificial Sequence: Synthetic oligonucleotide
  Antisense strand to SEQ ID NO: 652710
cacuucaaguuaugacacu

SEQ ID NO: 652712 - RNA, 19 nt, Artificial Sequence
  Description of Artificial Sequence: Synthetic oligonucleotide
  Sense strand starting at position 3949 of SEQ ID NO: 585599
gugucauaacuugaaguga

SEQ ID NO: 652713 - RNA, 19 nt, Artificial Sequence
  Description of Artificial Sequence: Synthetic oligonucleotide
  Antisense strand to SEQ ID NO: 652712
ucacuucaaguuaugacac

SEQ ID NO: 652714 - RNA, 19 nt, Artificial Sequence
  Description of Artificial Sequence: Synthetic oligonucleotide
  Sense strand starting at position 8 of SEQ ID NO: 585600
ccaucuucugccugcaaag

SEQ ID NO: 652715 - RNA, 19 nt, Artificial Sequence
  Description of Artificial Sequence: Synthetic oligonucleotide
  Antisense strand to SEQ ID NO: 652714
cuuugcaggcagaagaugg

SEQ ID NO: 652716 - RNA, 19 nt, Artificial Sequence
  Description of Artificial Sequence: Synthetic oligonucleotide
  Sense strand starting at position 51 of SEQ ID NO: 585600
gcuucucccugggcugaaa

SEQ ID NO: 652717 - RNA, 19 nt, Artificial Sequence
  Description of Artificial Sequence: Synthetic oligonucleotide
  Antisense strand to SEQ ID NO: 652716
uuucagcccagggagaagc

SEQ ID NO: 652718 - RNA, 19 nt, Artificial Sequence
  Description of Artificial Sequence: Synthetic oligonucleotide
  Sense strand starting at position 304 of SEQ ID NO: 585600
gagagaacacagugucaca

SEQ ID NO: 652719 - RNA, 19 nt, Artificial Sequence
  Description of Artificial Sequence: Synthetic oligonucleotide
  Antisense strand to SEQ ID NO: 652718
ugugacacuguguucucuc

SEQ ID NO: 652720 - RNA, 19 nt, Artificial Sequence
  Description of Artificial Sequence: Synthetic oligonucleotide
  Sense strand starting at position 384 of SEQ ID NO: 585600
aaucucaggucucuagagu

SEQ ID NO: 652721 - RNA, 19 nt, Artificial Sequence
  Description of Artificial Sequence: Synthetic oligonucleotide
  Antisense strand to SEQ ID NO: 652720
acucuagagaccugagauu

SEQ ID NO: 652722 - RNA, 19 nt, Artificial Sequence
  Description of Artificial Sequence: Synthetic oligonucleotide
  Sense strand starting at position 398 of SEQ ID NO: 585600
agagucuuaccagggcuaa

SEQ ID NO: 652723 - RNA, 19 nt, Artificial Sequence
  Description of Artificial Sequence: Synthetic oligonucleotide
  Antisense strand to SEQ ID NO: 652722
uuagcccugguaagacucu

SEQ ID NO: 652724 - RNA, 19 nt, Artificial Sequence
  Description of Artificial Sequence: Synthetic oligonucleotide
  Sense strand starting at position 399 of SEQ ID NO: 585600
gagucuuaccagggcuaau

SEQ ID NO: 652725 - RNA, 19 nt, Artificial Sequence
  Description of Artificial Sequence: Synthetic oligonucleotide
  Antisense strand to SEQ ID NO: 652724
auuagcccugguaagacuc

SEQ ID NO: 652726 - RNA, 19 nt, Artificial Sequence
  Description of Artificial Sequence: Synthetic oligonucleotide
  Sense strand starting at position 526 of SEQ ID NO: 585600
agaauuagauaagggaacu

SEQ ID NO: 652727 - RNA, 19 nt, Artificial Sequence
  Description of Artificial Sequence: Synthetic oligonucleotide
  Antisense strand to SEQ ID NO: 652726
aguucccuuaucuaauucu

SEQ ID NO: 652728 - RNA, 19 nt, Artificial Sequence
  Description of Artificial Sequence: Synthetic oligonucleotide
  Sense strand starting at position 560 of SEQ ID NO: 585600
gguagaaggucuuaccuuu

SEQ ID NO: 652729 - RNA, 19 nt, Artificial Sequence
  Description of Artificial Sequence: Synthetic oligonucleotide
  Antisense strand to SEQ ID NO: 652728
aaagguaagaccuucuacc

SEQ ID NO: 652730 - RNA, 19 nt, Artificial Sequence
  Description of Artificial Sequence: Synthetic oligonucleotide
  Sense strand starting at position 772 of SEQ ID NO: 585600
ggagaagguuaugaaugcu

SEQ ID NO: 652731 - RNA, 19 nt, Artificial Sequence
  Description of Artificial Sequence: Synthetic oligonucleotide
  Antisense strand to SEQ ID NO: 652730
agcauucauaaccuucucc

SEQ ID NO: 652732 - RNA, 19 nt, Artificial Sequence
  Description of Artificial Sequence: Synthetic oligonucleotide
  Sense strand starting at position 778 of SEQ ID NO: 585600
gguuaugaaugcugagaaa

SEQ ID NO: 652733 - RNA, 19 nt, Artificial Sequence
  Description of Artificial Sequence: Synthetic oligonucleotide
  Antisense strand to SEQ ID NO: 652732
uuucucagcauucauaacc

SEQ ID NO: 652734 - RNA, 19 nt, Artificial Sequence
  Description of Artificial Sequence: Synthetic oligonucleotide
  Sense strand starting at position 1143 of SEQ ID NO: 585600
ugccaucaagaaugaagua

SEQ ID NO: 652735 - RNA, 19 nt, Artificial Sequence
  Description of Artificial Sequence: Synthetic oligonucleotide
  Antisense strand to SEQ ID NO: 652734
uacuucauucuugauggca

SEQ ID NO: 652736 - RNA, 19 nt, Artificial Sequence
  Description of Artificial Sequence: Synthetic oligonucleotide
  Sense strand starting at position 1187 of SEQ ID NO: 585600
gagacaccuugauaggaaa

SEQ ID NO: 652737 - RNA, 19 nt, Artificial Sequence
  Description of Artificial Sequence: Synthetic oligonucleotide
  Antisense strand to SEQ ID NO: 652736
uuuccuaucaaggugucuc

SEQ ID NO: 652738 - RNA, 19 nt, Artificial Sequence
  Description of Artificial Sequence: Synthetic oligonucleotide
  Sense strand starting at position 1259 of SEQ ID NO: 585600
gcucuccucucgguaacua

SEQ ID NO: 652739 - RNA, 19 nt, Artificial Sequence
  Description of Artificial Sequence: Synthetic oligonucleotide
  Antisense strand to SEQ ID NO: 652738
uaguuaccgagaggagagc

SEQ ID NO: 652740 - RNA, 19 nt, Artificial Sequence
  Description of Artificial Sequence: Synthetic oligonucleotide
  Sense strand starting at position 1260 of SEQ ID NO: 585600
cucuccucucgguaacuaa

SEQ ID NO: 652741 - RNA, 19 nt, Artificial Sequence
  Description of Artificial Sequence: Synthetic oligonucleotide
  Antisense strand to SEQ ID NO: 652740
uuaguuaccgagaggagag

SEQ ID NO: 652742 - RNA, 19 nt, Artificial Sequence
  Description of Artificial Sequence: Synthetic oligonucleotide
  Sense strand starting at position 1325 of SEQ ID NO: 585600
cagagcucuccugggauau

SEQ ID NO: 652743 - RNA, 19 nt, Artificial Sequence
  Description of Artificial Sequence: Synthetic oligonucleotide
  Antisense strand to SEQ ID NO: 652742
auaucccaggagagcucug

SEQ ID NO: 652744 - RNA, 19 nt, Artificial Sequence
  Description of Artificial Sequence: Synthetic oligonucleotide
  Sense strand starting at position 1326 of SEQ ID NO: 585600
agagcucuccugggauauu

SEQ ID NO: 652745 - RNA, 19 nt, Artificial Sequence
  Description of Artificial Sequence: Synthetic oligonucleotide
  Antisense strand to SEQ ID NO: 652744
aauaucccaggagagcucu

SEQ ID NO: 652746 - RNA, 19 nt, Artificial Sequence
  Description of Artificial Sequence: Synthetic oligonucleotide
  Sense strand starting at position 1327 of SEQ ID NO: 585600
gagcucuccugggauauua

SEQ ID NO: 652747 - RNA, 19 nt, Artificial Sequence
  Description of Artificial Sequence: Synthetic oligonucleotide
  Antisense strand to SEQ ID NO: 652746
uaauaucccaggagagcuc

SEQ ID NO: 652748 - RNA, 19 nt, Artificial Sequence
  Description of Artificial Sequence: Synthetic oligonucleotide
  Sense strand starting at position 1329 of SEQ ID NO: 585600
gcucuccugggauauuaua

SEQ ID NO: 652749 - RNA, 19 nt, Artificial Sequence
  Description of Artificial Sequence: Synthetic oligonucleotide
  Antisense strand to SEQ ID NO: 652748
uauaauaucccaggagagc

SEQ ID NO: 652750 - RNA, 19 nt, Artificial Sequence
  Description of Artificial Sequence: Synthetic oligonucleotide
  Sense strand starting at position 1342 of SEQ ID NO: 585600
auuauauacuggccuugaa

SEQ ID NO: 652751 - RNA, 19 nt, Artificial Sequence
  Description of Artificial Sequence: Synthetic oligonucleotide
  Antisense strand to SEQ ID NO: 652750
uucaaggccaguauauaau

SEQ ID NO: 652752 - RNA, 19 nt, Artificial Sequence
  Description of Artificial Sequence: Synthetic oligonucleotide
  Sense strand starting at position 1345 of SEQ ID NO: 585600
auauacuggccuugaaauu

SEQ ID NO: 652753 - RNA, 19 nt, Artificial Sequence
  Description of Artificial Sequence: Synthetic oligonucleotide
  Antisense strand to SEQ ID NO: 652752
aauuucaaggccaguauau

SEQ ID NO: 652754 - RNA, 19 nt, Artificial Sequence
  Description of Artificial Sequence: Synthetic oligonucleotide
  Sense strand starting at position 1366 of SEQ ID NO: 585600
aggagaaauuaugguugua

SEQ ID NO: 652755 - RNA, 19 nt, Artificial Sequence
  Description of Artificial Sequence: Synthetic oligonucleotide
  Antisense strand to SEQ ID NO: 652754
uacaaccauaauuucuccu

SEQ ID NO: 652756 - RNA, 19 nt, Artificial Sequence
  Description of Artificial Sequence: Synthetic oligonucleotide
  Sense strand starting at position 1368 of SEQ ID NO: 585600
gagaaauuaugguuguaga

SEQ ID NO: 652757 - RNA, 19 nt, Artificial Sequence
  Description of Artificial Sequence: Synthetic oligonucleotide
  Antisense strand to SEQ ID NO: 652756
ucuacaaccauaauuucuc

SEQ ID NO: 652758 - RNA, 19 nt, Artificial Sequence
  Description of Artificial Sequence: Synthetic oligonucleotide
  Sense strand starting at position 1369 of SEQ ID NO: 585600
agaaauuaugguuguagaa

SEQ ID NO: 652759 - RNA, 19 nt, Artificial Sequence
  Description of Artificial Sequence: Synthetic oligonucleotide
  Antisense strand to SEQ ID NO: 652758
uucuacaaccauaauuucu

SEQ ID NO: 652760 - RNA, 19 nt, Artificial Sequence
  Description of Artificial Sequence: Synthetic oligonucleotide
  Sense strand starting at position 1390 of SEQ ID NO: 585600
aaaggcuacucaguuuaga

SEQ ID NO: 652761 - RNA, 19 nt, Artificial Sequence
  Description of Artificial Sequence: Synthetic oligonucleotide
  Antisense strand to SEQ ID NO: 652760
ucuaaacugaguagccuuu

SEQ ID NO: 652762 - RNA, 19 nt, Artificial Sequence
  Description of Artificial Sequence: Synthetic oligonucleotide
  Sense strand starting at position 1395 of SEQ ID NO: 585600
cuacucaguuuagagguau

SEQ ID NO: 652763 - RNA, 19 nt, Artificial Sequence
  Description of Artificial Sequence: Synthetic oligonucleotide
  Antisense strand to SEQ ID NO: 652762
auaccucuaaacugaguag

SEQ ID NO: 652764 - RNA, 19 nt, Artificial Sequence
  Description of Artificial Sequence: Synthetic oligonucleotide
  Sense strand starting at position 1424 of SEQ ID NO: 585600
guguccuguugcccagaga

SEQ ID NO: 652765 - RNA, 19 nt, Artificial Sequence
  Description of Artificial Sequence: Synthetic oligonucleotide
  Antisense strand to SEQ ID NO: 652764
ucucugggcaacaggacac

SEQ ID NO: 652766 - RNA, 19 nt, Artificial Sequence
  Description of Artificial Sequence: Synthetic oligonucleotide
  Sense strand starting at position 1499 of SEQ ID NO: 585600
aggccugcgcgucucauua

SEQ ID NO: 652767 - RNA, 19 nt, Artificial Sequence
  Description of Artificial Sequence: Synthetic oligonucleotide
  Antisense strand to SEQ ID NO: 652766
uaaugagacgcgcaggccu

SEQ ID NO: 652768 - RNA, 19 nt, Artificial Sequence
  Description of Artificial Sequence: Synthetic oligonucleotide
  Sense strand starting at position 1503 of SEQ ID NO: 585600
cugcgcgucucauuaagaa

SEQ ID NO: 652769 - RNA, 19 nt, Artificial Sequence
  Description of Artificial Sequence: Synthetic oligonucleotide
  Antisense strand to SEQ ID NO: 652768
uucuuaaugagacgcgcag

SEQ ID NO: 652770 - RNA, 19 nt, Artificial Sequence
  Description of Artificial Sequence: Synthetic oligonucleotide
  Sense strand starting at position 1507 of SEQ ID NO: 585600
gcgucucauuaagaacaau

SEQ ID NO: 652771 - RNA, 19 nt, Artificial Sequence
  Description of Artificial Sequence: Synthetic oligonucleotide
  Antisense strand to SEQ ID NO: 652770
auuguucuuaaugagacgc

SEQ ID NO: 652772 - RNA, 19 nt, Artificial Sequence
  Description of Artificial Sequence: Synthetic oligonucleotide
  Sense strand starting at position 1584 of SEQ ID NO: 585600
uuagacaacuucucugagu

SEQ ID NO: 652773 - RNA, 19 nt, Artificial Sequence
  Description of Artificial Sequence: Synthetic oligonucleotide
  Antisense strand to SEQ ID NO: 652772
acucagagaaguugucuaa

SEQ ID NO: 652774 - RNA, 19 nt, Artificial Sequence
  Description of Artificial Sequence: Synthetic oligonucleotide
  Sense strand starting at position 2848 of SEQ ID NO: 585600
gggugaaaguuaccuauaa

SEQ ID NO: 652775 - RNA, 19 nt, Artificial Sequence
  Description of Artificial Sequence: Synthetic oligonucleotide
  Antisense strand to SEQ ID NO: 652774
uuauagguaacuuucaccc

SEQ ID NO: 652776 - RNA, 19 nt, Artificial Sequence
  Description of Artificial Sequence: Synthetic oligonucleotide
  Sense strand starting at position 2849 of SEQ ID NO: 585600
ggugaaaguuaccuauaac

SEQ ID NO: 652777 - RNA, 19 nt, Artificial Sequence
  Description of Artificial Sequence: Synthetic oligonucleotide
  Antisense strand to SEQ ID NO: 652776
guuauagguaacuuucacc

SEQ ID NO: 652778 - RNA, 19 nt, Artificial Sequence
  Description of Artificial Sequence: Synthetic oligonucleotide
  Sense strand starting at position 3032 of SEQ ID NO: 585600
cacguaaacguuuggcaga

SEQ ID NO: 652779 - RNA, 19 nt, Artificial Sequence
  Description of Artificial Sequence: Synthetic oligonucleotide
  Antisense strand to SEQ ID NO: 652778
ucugccaaacguuuacgug

SEQ ID NO: 652780 - RNA, 19 nt, Artificial Sequence
  Description of Artificial Sequence: Synthetic oligonucleotide
  Sense strand starting at position 3037 of SEQ ID NO: 585600
aaacguuuggcagagggua

SEQ ID NO: 652781 - RNA, 19 nt, Artificial Sequence
  Description of Artificial Sequence: Synthetic oligonucleotide
  Antisense strand to SEQ ID NO: 652780
uacccucugccaaacguuu

SEQ ID NO: 652782 - RNA, 19 nt, Artificial Sequence
  Description of Artificial Sequence: Synthetic oligonucleotide
  Sense strand starting at position 3379 of SEQ ID NO: 585600
aaguuugcagcguaaccaa

SEQ ID NO: 652783 - RNA, 19 nt, Artificial Sequence
  Description of Artificial Sequence: Synthetic oligonucleotide
  Antisense strand to SEQ ID NO: 652782
uugguuacgcugcaaacuu

SEQ ID NO: 652784 - RNA, 19 nt, Artificial Sequence
  Description of Artificial Sequence: Synthetic oligonucleotide
  Sense strand starting at position 3435 of SEQ ID NO: 585600
uagggcugcccucagaaau

SEQ ID NO: 652785 - RNA, 19 nt, Artificial Sequence
  Description of Artificial Sequence: Synthetic oligonucleotide
  Antisense strand to SEQ ID NO: 652784
auuucugagggcagcccua

SEQ ID NO: 652786 - RNA, 19 nt, Artificial Sequence
  Description of Artificial Sequence: Synthetic oligonucleotide
  Sense strand starting at position 3485 of SEQ ID NO: 585600
gcuggugccaguuaugguu

SEQ ID NO: 652787 - RNA, 19 nt, Artificial Sequence
  Description of Artificial Sequence: Synthetic oligonucleotide
  Antisense strand to SEQ ID NO: 652786
aaccauaacuggcaccagc

SEQ ID NO: 652788 - RNA, 19 nt, Artificial Sequence
  Description of Artificial Sequence: Synthetic oligonucleotide
  Sense strand starting at position 3489 of SEQ ID NO: 585600
gugccaguuaugguuuguu

SEQ ID NO: 652789 - RNA, 19 nt, Artificial Sequence
  Description of Artificial Sequence: Synthetic oligonucleotide
  Antisense strand to SEQ ID NO: 652788
aacaaaccauaacuggcac

SEQ ID NO: 652790 - RNA, 19 nt, Artificial Sequence
  Description of Artificial Sequence: Synthetic oligonucleotide
  Sense strand starting at position 3607 of SEQ ID NO: 585600
agcaauacccuguacuaga

SEQ ID NO: 652791 - RNA, 19 nt, Artificial Sequence
  Description of Artificial Sequence: Synthetic oligonucleotide
  Antisense strand to SEQ ID NO: 652790
ucuaguacaggguauugcu

SEQ ID NO: 652792 - RNA, 19 nt, Artificial Sequence
  Description of Artificial Sequence: Synthetic oligonucleotide
  Sense strand starting at position 3763 of SEQ ID NO: 585600
cuacuagaguucugucuaa

SEQ ID NO: 652793 - RNA, 19 nt, Artificial Sequence
  Description of Artificial Sequence: Synthetic oligonucleotide
  Antisense strand to SEQ ID NO: 652792
uuagacagaacucuaguag

SEQ ID NO: 652794 - RNA, 19 nt, Artificial Sequence
  Description of Artificial Sequence: Synthetic oligonucleotide
  Sense strand starting at position 7 of SEQ ID NO: 585601
guagguuauucucugugag

SEQ ID NO: 652795 - RNA, 19 nt, Artificial Sequence
  Description of Artificial Sequence: Synthetic oligonucleotide
  Antisense strand to SEQ ID NO: 652794
cucacagagaauaaccuac

SEQ ID NO: 652796 - RNA, 19 nt, Artificial Sequence
  Description of Artificial Sequence: Synthetic oligonucleotide
  Sense strand starting at position 9 of SEQ ID NO: 585601
agguuauucucugugagca

SEQ ID NO: 652797 - RNA, 19 nt, Artificial Sequence
  Description of Artificial Sequence: Synthetic oligonucleotide
  Antisense strand to SEQ ID NO: 652796
ugcucacagagaauaaccu

SEQ ID NO: 652798 - RNA, 19 nt, Artificial Sequence
  Description of Artificial Sequence: Synthetic oligonucleotide
  Sense strand starting at position 22 of SEQ ID NO: 585601
ugagcaucuccuuauccga

SEQ ID NO: 652799 - RNA, 19 nt, Artificial Sequence
  Description of Artificial Sequence: Synthetic oligonucleotide
  Antisense strand to SEQ ID NO: 652798
ucggauaaggagaugcuca

SEQ ID NO: 652800 - RNA, 19 nt, Artificial Sequence
  Description of Artificial Sequence: Synthetic oligonucleotide
  Sense strand starting at position 24 of SEQ ID NO: 585601
agcaucuccuuauccgaaa

SEQ ID NO: 652801 - RNA, 19 nt, Artificial Sequence
  Description of Artificial Sequence: Synthetic oligonucleotide
  Antisense strand to SEQ ID NO: 652800
uuucggauaaggagaugcu

SEQ ID NO: 652802 - RNA, 19 nt, Artificial Sequence
  Description of Artificial Sequence: Synthetic oligonucleotide
  Sense strand starting at position 125 of SEQ ID NO: 585601
acuggcgaguuaucugaua

SEQ ID NO: 652803 - RNA, 19 nt, Artificial Sequence
  Description of Artificial Sequence: Synthetic oligonucleotide
  Antisense strand to SEQ ID NO: 652802
uaucagauaacucgccagu

SEQ ID NO: 652804 - RNA, 19 nt, Artificial Sequence
  Description of Artificial Sequence: Synthetic oligonucleotide
  Sense strand starting at position 127 of SEQ ID NO: 585601
uggcgaguuaucugauaaa

SEQ ID NO: 652805 - RNA, 19 nt, Artificial Sequence
  Description of Artificial Sequence: Synthetic oligonucleotide
  Antisense strand to SEQ ID NO: 652804
uuuaucagauaacucgcca

SEQ ID NO: 652806 - RNA, 19 nt, Artificial Sequence
  Description of Artificial Sequence: Synthetic oligonucleotide
  Sense strand starting at position 273 of SEQ ID NO: 585601
auuaaagagcuuugcauag

SEQ ID NO: 652807 - RNA, 19 nt, Artificial Sequence
  Description of Artificial Sequence: Synthetic oligonucleotide
  Antisense strand to SEQ ID NO: 652806
cuaugcaaagcucuuuaau

SEQ ID NO: 652808 - RNA, 19 nt, Artificial Sequence
  Description of Artificial Sequence: Synthetic oligonucleotide
  Sense strand starting at position 277 of SEQ ID NO: 585601
aagagcuuugcauagucua

SEQ ID NO: 652809 - RNA, 19 nt, Artificial Sequence
  Description of Artificial Sequence: Synthetic oligonucleotide
  Antisense strand to SEQ ID NO: 652808
uagacuaugcaaagcucuu

SEQ ID NO: 652810 - RNA, 19 nt, Artificial Sequence
  Description of Artificial Sequence: Synthetic oligonucleotide
  Sense strand starting at position 280 of SEQ ID NO: 585601
agcuuugcauagucuaaau

SEQ ID NO: 652811 - RNA, 19 nt, Artificial Sequence
  Description of Artificial Sequence: Synthetic oligonucleotide
  Antisense strand to SEQ ID NO: 652810
auuuagacuaugcaaagcu

SEQ ID NO: 652812 - RNA, 19 nt, Artificial Sequence
  Description of Artificial Sequence: Synthetic oligonucleotide
  Sense strand starting at position 316 of SEQ ID NO: 585601
gcauaaguaucugcauaca

SEQ ID NO: 652813 - RNA, 19 nt, Artificial Sequence
  Description of Artificial Sequence: Synthetic oligonucleotide
  Antisense strand to SEQ ID NO: 652812
uguaugcagauacuuaugc

SEQ ID NO: 652814 - RNA, 19 nt, Artificial Sequence
  Description of Artificial Sequence: Synthetic oligonucleotide
  Sense strand starting at position 574 of SEQ ID NO: 585601
aggcaaaggcauuauuaua

SEQ ID NO: 652815 - RNA, 19 nt, Artificial Sequence
  Description of Artificial Sequence: Synthetic oligonucleotide
  Antisense strand to SEQ ID NO: 652814
uauaauaaugccuuugccu

SEQ ID NO: 652816 - RNA, 19 nt, Artificial Sequence
  Description of Artificial Sequence: Synthetic oligonucleotide
  Sense strand starting at position 621 of SEQ ID NO: 585601
uuucuugagggagguagua

SEQ ID NO: 652817 - RNA, 19 nt, Artificial Sequence
  Description of Artificial Sequence: Synthetic oligonucleotide
  Antisense strand to SEQ ID NO: 652816
uacuaccucccucaagaaa

SEQ ID NO: 652818 - RNA, 19 nt, Artificial Sequence
  Description of Artificial Sequence: Synthetic oligonucleotide
  Sense strand starting at position 667 of SEQ ID NO: 585601
ggaauaagguaagaauuuc

SEQ ID NO: 652819 - RNA, 19 nt, Artificial Sequence
  Description of Artificial Sequence: Synthetic oligonucleotide
  Antisense strand to SEQ ID NO: 652818
gaaauucuuaccuuauucc

SEQ ID NO: 652820 - RNA, 19 nt, Artificial Sequence
  Description of Artificial Sequence: Synthetic oligonucleotide
  Sense strand starting at position 675 of SEQ ID NO: 585601
guaagaauuuccguguaac

SEQ ID NO: 652821 - RNA, 19 nt, Artificial Sequence
  Description of Artificial Sequence: Synthetic oligonucleotide
  Antisense strand to SEQ ID NO: 652820
guuacacggaaauucuuac

SEQ ID NO: 652822 - RNA, 19 nt, Artificial Sequence
  Description of Artificial Sequence: Synthetic oligonucleotide
  Sense strand starting at position 687 of SEQ ID NO: 585601
guguaaccgcaauacugau

SEQ ID NO: 652823 - RNA, 19 nt, Artificial Sequence
  Description of Artificial Sequence: Synthetic oligonucleotide
  Antisense strand to SEQ ID NO: 652822
aucaguauugcgguuacac

SEQ ID NO: 652824 - RNA, 19 nt, Artificial Sequence
  Description of Artificial Sequence: Synthetic oligonucleotide
  Sense strand starting at position 760 of SEQ ID NO: 585601
uccagaguuacaggugguu

SEQ ID NO: 652825 - RNA, 19 nt, Artificial Sequence
  Description of Artificial Sequence: Synthetic oligonucleotide
  Antisense strand to SEQ ID NO: 652824
aaccaccuguaacucugga

SEQ ID NO: 652826 - RNA, 19 nt, Artificial Sequence
  Description of Artificial Sequence: Synthetic oligonucleotide
  Sense strand starting at position 950 of SEQ ID NO: 585601
gacgacagccuuugaggaa

SEQ ID NO: 652827 - RNA, 19 nt, Artificial Sequence
  Description of Artificial Sequence: Synthetic oligonucleotide
  Antisense strand to SEQ ID NO: 652826
uuccucaaaggcugucguc

SEQ ID NO: 652828 - RNA, 19 nt, Artificial Sequence
  Description of Artificial Sequence: Synthetic oligonucleotide
  Sense strand starting at position 1213 of SEQ ID NO: 585601
cugcuagccuaacuuuaga

SEQ ID NO: 652829 - RNA, 19 nt, Artificial Sequence
  Description of Artificial Sequence: Synthetic oligonucleotide
  Antisense strand to SEQ ID NO: 652828
ucuaaaguuaggcuagcag

SEQ ID NO: 652830 - RNA, 19 nt, Artificial Sequence
  Description of Artificial Sequence: Synthetic oligonucleotide
  Sense strand starting at position 1350 of SEQ ID NO: 585601
gacgcuugcguauuaacuu

SEQ ID NO: 652831 - RNA, 19 nt, Artificial Sequence
  Description of Artificial Sequence: Synthetic oligonucleotide
  Antisense strand to SEQ ID NO: 652830
aaguuaauacgcaagcguc

SEQ ID NO: 652832 - RNA, 19 nt, Artificial Sequence
  Description of Artificial Sequence: Synthetic oligonucleotide
  Sense strand starting at position 1454 of SEQ ID NO: 585601
caaacuaugcgcggaauga

SEQ ID NO: 652833 - RNA, 19 nt, Artificial Sequence
  Description of Artificial Sequence: Synthetic oligonucleotide
  Antisense strand to SEQ ID NO: 652832
ucauuccgcgcauaguuug

SEQ ID NO: 652834 - RNA, 19 nt, Artificial Sequence
  Description of Artificial Sequence: Synthetic oligonucleotide
  Sense strand starting at position 1455 of SEQ ID NO: 585601
aaacuaugcgcggaaugaa

SEQ ID NO: 652835 - RNA, 19 nt, Artificial Sequence
  Description of Artificial Sequence: Synthetic oligonucleotide
  Antisense strand to SEQ ID NO: 652834
uucauuccgcgcauaguuu

SEQ ID NO: 652836 - RNA, 19 nt, Artificial Sequence
  Description of Artificial Sequence: Synthetic oligonucleotide
  Sense strand starting at position 1572 of SEQ ID NO: 585601
gggacaagcuugucaagca

SEQ ID NO: 652837 - RNA, 19 nt, Artificial Sequence
  Description of Artificial Sequence: Synthetic oligonucleotide
  Antisense strand to SEQ ID NO: 652836
ugcuugacaagcuuguccc

SEQ ID NO: 652838 - RNA, 19 nt, Artificial Sequence
  Description of Artificial Sequence: Synthetic oligonucleotide
  Sense strand starting at position 2937 of SEQ ID NO: 585601
ggaagaagucgcugagauu

SEQ ID NO: 652839 - RNA, 19 nt, Artificial Sequence
  Description of Artificial Sequence: Synthetic oligonucleotide
  Antisense strand to SEQ ID NO: 652838
aaucucagcgacuucuucc

SEQ ID NO: 652840 - RNA, 19 nt, Artificial Sequence
  Description of Artificial Sequence: Synthetic oligonucleotide
  Sense strand starting at position 2938 of SEQ ID NO: 585601
gaagaagucgcugagauuc

SEQ ID NO: 652841 - RNA, 19 nt, Artificial Sequence
  Description of Artificial Sequence: Synthetic oligonucleotide
  Antisense strand to SEQ ID NO: 652840
gaaucucagcgacuucuuc

SEQ ID NO: 652842 - RNA, 19 nt, Artificial Sequence
  Description of Artificial Sequence: Synthetic oligonucleotide
  Sense strand starting at position 3067 of SEQ ID NO: 585601
cgugggagccgguguauuu

SEQ ID NO: 652843 - RNA, 19 nt, Artificial Sequence
  Description of Artificial Sequence: Synthetic oligonucleotide
  Antisense strand to SEQ ID NO: 652842
aaauacaccggcucccacg

SEQ ID NO: 652844 - RNA, 19 nt, Artificial Sequence
  Description of Artificial Sequence: Synthetic oligonucleotide
  Sense strand starting at position 3076 of SEQ ID NO: 585601
cgguguauuucagcugcau

SEQ ID NO: 652845 - RNA, 19 nt, Artificial Sequence
  Description of Artificial Sequence: Synthetic oligonucleotide
  Antisense strand to SEQ ID NO: 652844
augcagcugaaauacaccg

SEQ ID NO: 652846 - RNA, 19 nt, Artificial Sequence
  Description of Artificial Sequence: Synthetic oligonucleotide
  Sense strand starting at position 3231 of SEQ ID NO: 585601
ugacuuguucuggagagua

SEQ ID NO: 652847 - RNA, 19 nt, Artificial Sequence
  Description of Artificial Sequence: Synthetic oligonucleotide
  Antisense strand to SEQ ID NO: 652846
uacucuccagaacaaguca

SEQ ID NO: 652848 - RNA, 19 nt, Artificial Sequence
  Description of Artificial Sequence: Synthetic oligonucleotide
  Sense strand starting at position 3233 of SEQ ID NO: 585601
acuuguucuggagaguaga

SEQ ID NO: 652849 - RNA, 19 nt, Artificial Sequence
  Description of Artificial Sequence: Synthetic oligonucleotide
  Antisense strand to SEQ ID NO: 652848
ucuacucuccagaacaagu

SEQ ID NO: 652850 - RNA, 19 nt, Artificial Sequence
  Description of Artificial Sequence: Synthetic oligonucleotide
  Sense strand starting at position 3246 of SEQ ID NO: 585601
aguagagaauguucucgga

SEQ ID NO: 652851 - RNA, 19 nt, Artificial Sequence
  Description of Artificial Sequence: Synthetic oligonucleotide
  Antisense strand to SEQ ID NO: 652850
uccgagaacauucucuacu

SEQ ID NO: 652852 - RNA, 19 nt, Artificial Sequence
  Description of Artificial Sequence: Synthetic oligonucleotide
  Sense strand starting at position 3248 of SEQ ID NO: 585601
uagagaauguucucggauu

SEQ ID NO: 652853 - RNA, 19 nt, Artificial Sequence
  Description of Artificial Sequence: Synthetic oligonucleotide
  Antisense strand to SEQ ID NO: 652852
aauccgagaacauucucua

SEQ ID NO: 652854 - RNA, 19 nt, Artificial Sequence
  Description of Artificial Sequence: Synthetic oligonucleotide
  Sense strand starting at position 3345 of SEQ ID NO: 585601
uuauucuagcgcgucacau

SEQ ID NO: 652855 - RNA, 19 nt, Artificial Sequence
  Description of Artificial Sequence: Synthetic oligonucleotide
  Antisense strand to SEQ ID NO: 652854
augugacgcgcuagaauaa

SEQ ID NO: 652856 - RNA, 19 nt, Artificial Sequence
  Description of Artificial Sequence: Synthetic oligonucleotide
  Sense strand starting at position 3346 of SEQ ID NO: 585601
uauucuagcgcgucacauu

SEQ ID NO: 652857 - RNA, 19 nt, Artificial Sequence
  Description of Artificial Sequence: Synthetic oligonucleotide
  Antisense strand to SEQ ID NO: 652856
aaugugacgcgcuagaaua

SEQ ID NO: 652858 - RNA, 19 nt, Artificial Sequence
  Description of Artificial Sequence: Synthetic oligonucleotide
  Sense strand starting at position 3540 of SEQ ID NO: 585601
gccgcacuucuugucugaa

SEQ ID NO: 652859 - RNA, 19 nt, Artificial Sequence
  Description of Artificial Sequence: Synthetic oligonucleotide
  Antisense strand to SEQ ID NO: 652858
uucagacaagaagugcggc

SEQ ID NO: 652860 - RNA, 19 nt, Artificial Sequence
  Description of Artificial Sequence: Synthetic oligonucleotide
  Sense strand starting at position 3550 of SEQ ID NO: 585601
uugucugaaucugccaaga

SEQ ID NO: 652861 - RNA, 19 nt, Artificial Sequence
  Description of Artificial Sequence: Synthetic oligonucleotide
  Antisense strand to SEQ ID NO: 652860
ucuuggcagauucagacaa

SEQ ID NO: 652862 - RNA, 19 nt, Artificial Sequence
  Description of Artificial Sequence: Synthetic oligonucleotide
  Sense strand starting at position 3599 of SEQ ID NO: 585601
cacugaucaggguagaguu

SEQ ID NO: 652863 - RNA, 19 nt, Artificial Sequence
  Description of Artificial Sequence: Synthetic oligonucleotide
  Antisense strand to SEQ ID NO: 652862
aacucuacccugaucagug

SEQ ID NO: 652864 - RNA, 19 nt, Artificial Sequence
  Description of Artificial Sequence: Synthetic oligonucleotide
  Sense strand starting at position 3690 of SEQ ID NO: 585601
ccgggauucugucucuaga

SEQ ID NO: 652865 - RNA, 19 nt, Artificial Sequence
  Description of Artificial Sequence: Synthetic oligonucleotide
  Antisense strand to SEQ ID NO: 652864
ucuagagacagaaucccgg

SEQ ID NO: 652866 - RNA, 19 nt, Artificial Sequence
  Description of Artificial Sequence: Synthetic oligonucleotide
  Sense strand starting at position 3692 of SEQ ID NO: 585601
gggauucugucucuagauu

SEQ ID NO: 652867 - RNA, 19 nt, Artificial Sequence
  Description of Artificial Sequence: Synthetic oligonucleotide
  Antisense strand to SEQ ID NO: 652866
aaucuagagacagaauccc

SEQ ID NO: 652868 - RNA, 19 nt, Artificial Sequence
  Description of Artificial Sequence: Synthetic oligonucleotide
  Sense strand starting at position 3693 of SEQ ID NO: 585601
ggauucugucucuagauug

SEQ ID NO: 652869 - RNA, 19 nt, Artificial Sequence
  Description of Artificial Sequence: Synthetic oligonucleotide
  Antisense strand to SEQ ID NO: 652868
caaucuagagacagaaucc

SEQ ID NO: 652870 - RNA, 19 nt, Artificial Sequence
  Description of Artificial Sequence: Synthetic oligonucleotide
  Sense strand starting at position 3707 of SEQ ID NO: 585601
gauugugaaagcugucaga

SEQ ID NO: 652871 - RNA, 19 nt, Artificial Sequence
  Description of Artificial Sequence: Synthetic oligonucleotide
  Antisense strand to SEQ ID NO: 652870
ucugacagcuuucacaauc

SEQ ID NO: 652872 - RNA, 19 nt, Artificial Sequence
  Description of Artificial Sequence: Synthetic oligonucleotide
  Sense strand starting at position 3749 of SEQ ID NO: 585601
augggaaaguucucacuaa

SEQ ID NO: 652873 - RNA, 19 nt, Artificial Sequence
  Description of Artificial Sequence: Synthetic oligonucleotide
  Antisense strand to SEQ ID NO: 652872
uuagugagaacuuucccau

SEQ ID NO: 652874 - RNA, 19 nt, Artificial Sequence
  Description of Artificial Sequence: Synthetic oligonucleotide
  Sense strand starting at position 43 of SEQ ID NO: 585602
gauuguguggcucaaucag

SEQ ID NO: 652875 - RNA, 19 nt, Artificial Sequence
  Description of Artificial Sequence: Synthetic oligonucleotide
  Antisense strand to SEQ ID NO: 652874
cugauugagccacacaauc

SEQ ID NO: 652876 - RNA, 19 nt, Artificial Sequence
  Description of Artificial Sequence: Synthetic oligonucleotide
  Sense strand starting at position 182 of SEQ ID NO: 585602
gguaauauauagccaguaa

SEQ ID NO: 652877 - RNA, 19 nt, Artificial Sequence
  Description of Artificial Sequence: Synthetic oligonucleotide
  Antisense strand to SEQ ID NO: 652876
uuacuggcuauauauuacc

SEQ ID NO: 652878 - RNA, 19 nt, Artificial Sequence
  Description of Artificial Sequence: Synthetic oligonucleotide
  Sense strand starting at position 364 of SEQ ID NO: 585602
ggugcuuugacucaacaug

SEQ ID NO: 652879 - RNA, 19 nt, Artificial Sequence
  Description of Artificial Sequence: Synthetic oligonucleotide
  Antisense strand to SEQ ID NO: 652878
cauguugagucaaagcacc

SEQ ID NO: 652880 - RNA, 19 nt, Artificial Sequence
  Description of Artificial Sequence: Synthetic oligonucleotide
  Sense strand starting at position 460 of SEQ ID NO: 585602
gaauaauggaggcguaguu

SEQ ID NO: 652881 - RNA, 19 nt, Artificial Sequence
  Description of Artificial Sequence: Synthetic oligonucleotide
  Antisense strand to SEQ ID NO: 652880
aacuacgccuccauuauuc

SEQ ID NO: 652882 - RNA, 19 nt, Artificial Sequence
  Description of Artificial Sequence: Synthetic oligonucleotide
  Sense strand starting at position 479 of SEQ ID NO: 585602
uuguuaggccuuuaacaau

SEQ ID NO: 652883 - RNA, 19 nt, Artificial Sequence
  Description of Artificial Sequence: Synthetic oligonucleotide
  Antisense strand to SEQ ID NO: 652882
auuguuaaaggccuaacaa

SEQ ID NO: 652884 - RNA, 19 nt, Artificial Sequence
  Description of Artificial Sequence: Synthetic oligonucleotide
  Sense strand starting at position 668 of SEQ ID NO: 585602
auuaaauaucgcuacaugu

SEQ ID NO: 652885 - RNA, 19 nt, Artificial Sequence
  Description of Artificial Sequence: Synthetic oligonucleotide
  Antisense strand to SEQ ID NO: 652884
acauguagcgauauuuaau

SEQ ID NO: 652886 - RNA, 19 nt, Artificial Sequence
  Description of Artificial Sequence: Synthetic oligonucleotide
  Sense strand starting at position 698 of SEQ ID NO: 585602
ggacuagaauauuaaagca

SEQ ID NO: 652887 - RNA, 19 nt, Artificial Sequence
  Description of Artificial Sequence: Synthetic oligonucleotide
  Antisense strand to SEQ ID NO: 652886
ugcuuuaauauucuagucc

SEQ ID NO: 652888 - RNA, 19 nt, Artificial Sequence
  Description of Artificial Sequence: Synthetic oligonucleotide
  Sense strand starting at position 711 of SEQ ID NO: 585602
aaagcaguguugccacuua

SEQ ID NO: 652889 - RNA, 19 nt, Artificial Sequence
  Description of Artificial Sequence: Synthetic oligonucleotide
  Antisense strand to SEQ ID NO: 652888
uaaguggcaacacugcuuu

SEQ ID NO: 652890 - RNA, 19 nt, Artificial Sequence
  Description of Artificial Sequence: Synthetic oligonucleotide
  Sense strand starting at position 742 of SEQ ID NO: 585602
gaacauauucuacgcguga

SEQ ID NO: 652891 - RNA, 19 nt, Artificial Sequence
  Description of Artificial Sequence: Synthetic oligonucleotide
  Antisense strand to SEQ ID NO: 652890
ucacgcguagaauauguuc

SEQ ID NO: 652892 - RNA, 19 nt, Artificial Sequence
  Description of Artificial Sequence: Synthetic oligonucleotide
  Sense strand starting at position 755 of SEQ ID NO: 585602
gcgugacuacuggaaagca

SEQ ID NO: 652893 - RNA, 19 nt, Artificial Sequence
  Description of Artificial Sequence: Synthetic oligonucleotide
  Antisense strand to SEQ ID NO: 652892
ugcuuuccaguagucacgc

SEQ ID NO: 652894 - RNA, 19 nt, Artificial Sequence
  Description of Artificial Sequence: Synthetic oligonucleotide
  Sense strand starting at position 786 of SEQ ID NO: 585602
ccaaucuagucucuaggaa

SEQ ID NO: 652895 - RNA, 19 nt, Artificial Sequence
  Description of Artificial Sequence: Synthetic oligonucleotide
  Antisense strand to SEQ ID NO: 652894
uuccuagagacuagauugg

SEQ ID NO: 652896 - RNA, 19 nt, Artificial Sequence
  Description of Artificial Sequence: Synthetic oligonucleotide
  Sense strand starting at position 889 of SEQ ID NO: 585602
gcgcgauaucaacauucuc

SEQ ID NO: 652897 - RNA, 19 nt, Artificial Sequence
  Description of Artificial Sequence: Synthetic oligonucleotide
  Antisense strand to SEQ ID NO: 652896
gagaauguugauaucgcgc

SEQ ID NO: 652898 - RNA, 19 nt, Artificial Sequence
  Description of Artificial Sequence: Synthetic oligonucleotide
  Sense strand starting at position 942 of SEQ ID NO: 585602
gugucaggugaucaguuau

SEQ ID NO: 652899 - RNA, 19 nt, Artificial Sequence
  Description of Artificial Sequence: Synthetic oligonucleotide
  Antisense strand to SEQ ID NO: 652898
auaacugaucaccugacac

SEQ ID NO: 652900 - RNA, 19 nt, Artificial Sequence
  Description of Artificial Sequence: Synthetic oligonucleotide
  Sense strand starting at position 2284 of SEQ ID NO: 585602
uuauuaauugacugugagu

SEQ ID NO: 652901 - RNA, 19 nt, Artificial Sequence
  Description of Artificial Sequence: Synthetic oligonucleotide
  Antisense strand to SEQ ID NO: 652900
acucacagucaauuaauaa

SEQ ID NO: 652902 - RNA, 19 nt, Artificial Sequence
  Description of Artificial Sequence: Synthetic oligonucleotide
  Sense strand starting at position 2286 of SEQ ID NO: 585602
auuaauugacugugaguuc

SEQ ID NO: 652903 - RNA, 19 nt, Artificial Sequence
  Description of Artificial Sequence: Synthetic oligonucleotide
  Antisense strand to SEQ ID NO: 652902
gaacucacagucaauuaau

SEQ ID NO: 652904 - RNA, 19 nt, Artificial Sequence
  Description of Artificial Sequence: Synthetic oligonucleotide
  Sense strand starting at position 2298 of SEQ ID NO: 585602
ugaguucaagaaugguaga

SEQ ID NO: 652905 - RNA, 19 nt, Artificial Sequence
  Description of Artificial Sequence: Synthetic oligonucleotide
  Antisense strand to SEQ ID NO: 652904
ucuaccauucuugaacuca

SEQ ID NO: 652906 - RNA, 19 nt, Artificial Sequence
  Description of Artificial Sequence: Synthetic oligonucleotide
  Sense strand starting at position 2332 of SEQ ID NO: 585602
ugagcccucugcccaaaua

SEQ ID NO: 652907 - RNA, 19 nt, Artificial Sequence
  Description of Artificial Sequence: Synthetic oligonucleotide
  Antisense strand to SEQ ID NO: 652906
uauuugggcagagggcuca

SEQ ID NO: 652908 - RNA, 19 nt, Artificial Sequence
  Description of Artificial Sequence: Synthetic oligonucleotide
  Sense strand starting at position 2457 of SEQ ID NO: 585602
cuugguauccaguaagcag

SEQ ID NO: 652909 - RNA, 19 nt, Artificial Sequence
  Description of Artificial Sequence: Synthetic oligonucleotide
  Antisense strand to SEQ ID NO: 652908
cugcuuacuggauaccaag

SEQ ID NO: 652910 - RNA, 19 nt, Artificial Sequence
  Description of Artificial Sequence: Synthetic oligonucleotide
  Sense strand starting at position 2537 of SEQ ID NO: 585602
auuccuuugccaggagcau

SEQ ID NO: 652911 - RNA, 19 nt, Artificial Sequence
  Description of Artificial Sequence: Synthetic oligonucleotide
  Antisense strand to SEQ ID NO: 652910
augcuccuggcaaaggaau

SEQ ID NO: 652912 - RNA, 19 nt, Artificial Sequence
  Description of Artificial Sequence: Synthetic oligonucleotide
  Sense strand starting at position 2748 of SEQ ID NO: 585602
acaaauauuguguagaggu

SEQ ID NO: 652913 - RNA, 19 nt, Artificial Sequence
  Description of Artificial Sequence: Synthetic oligonucleotide
  Antisense strand to SEQ ID NO: 652912
accucuacacaauauuugu

SEQ ID NO: 652914 - RNA, 19 nt, Artificial Sequence
  Description of Artificial Sequence: Synthetic oligonucleotide
  Sense strand starting at position 2838 of SEQ ID NO: 585602
cuuaauaagcgcugugaag

SEQ ID NO: 652915 - RNA, 19 nt, Artificial Sequence
  Description of Artificial Sequence: Synthetic oligonucleotide
  Antisense strand to SEQ ID NO: 652914
cuucacagcgcuuauuaag

SEQ ID NO: 652916 - RNA, 19 nt, Artificial Sequence
  Description of Artificial Sequence: Synthetic oligonucleotide
  Sense strand starting at position 3048 of SEQ ID NO: 585602
agauuagugcaggguggaa

SEQ ID NO: 652917 - RNA, 19 nt, Artificial Sequence
  Description of Artificial Sequence: Synthetic oligonucleotide
  Antisense strand to SEQ ID NO: 652916
uuccacccugcacuaaucu

SEQ ID NO: 652918 - RNA, 19 nt, Artificial Sequence
  Description of Artificial Sequence: Synthetic oligonucleotide
  Sense strand starting at position 3085 of SEQ ID NO: 585602
uggugaagaucuguucuuu

SEQ ID NO: 652919 - RNA, 19 nt, Artificial Sequence
  Description of Artificial Sequence: Synthetic oligonucleotide
  Antisense strand to SEQ ID NO: 652918
aaagaacagaucuucacca

SEQ ID NO: 652920 - RNA, 19 nt, Artificial Sequence
  Description of Artificial Sequence: Synthetic oligonucleotide
  Sense strand starting at position 3106 of SEQ ID NO: 585602
ucucucuagucuucugaua

SEQ ID NO: 652921 - RNA, 19 nt, Artificial Sequence
  Description of Artificial Sequence: Synthetic oligonucleotide
  Antisense strand to SEQ ID NO: 652920
uaucagaagacuagagaga

SEQ ID NO: 652922 - RNA, 19 nt, Artificial Sequence
  Description of Artificial Sequence: Synthetic oligonucleotide
  Sense strand starting at position 3164 of SEQ ID NO: 585602
aaguuuggguuguccugau

SEQ ID NO: 652923 - RNA, 19 nt, Artificial Sequence
  Description of Artificial Sequence: Synthetic oligonucleotide
  Antisense strand to SEQ ID NO: 652922
aucaggacaacccaaacuu

SEQ ID NO: 652924 - RNA, 19 nt, Artificial Sequence
  Description of Artificial Sequence: Synthetic oligonucleotide
  Sense strand starting at position 3168 of SEQ ID NO: 585602
uuggguuguccugauucca

SEQ ID NO: 652925 - RNA, 19 nt, Artificial Sequence
  Description of Artificial Sequence: Synthetic oligonucleotide
  Antisense strand to SEQ ID NO: 652924
uggaaucaggacaacccaa

SEQ ID NO: 652926 - RNA, 19 nt, Artificial Sequence
  Description of Artificial Sequence: Synthetic oligonucleotide
  Sense strand starting at position 3176 of SEQ ID NO: 585602
uccugauuccacuggauuc

SEQ ID NO: 652927 - RNA, 19 nt, Artificial Sequence
  Description of Artificial Sequence: Synthetic oligonucleotide
  Antisense strand to SEQ ID NO: 652926
gaauccaguggaaucagga

SEQ ID NO: 652928 - RNA, 19 nt, Artificial Sequence
  Description of Artificial Sequence: Synthetic oligonucleotide
  Sense strand starting at position 3316 of SEQ ID NO: 585602
uugggaugucugggaugaa

SEQ ID NO: 652929 - RNA, 19 nt, Artificial Sequence
  Description of Artificial Sequence: Synthetic oligonucleotide
  Antisense strand to SEQ ID NO: 652928
uucaucccagacaucccaa

SEQ ID NO: 652930 - RNA, 19 nt, Artificial Sequence
  Description of Artificial Sequence: Synthetic oligonucleotide
  Sense strand starting at position 3319 of SEQ ID NO: 585602
ggaugucugggaugaauua

SEQ ID NO: 652931 - RNA, 19 nt, Artificial Sequence
  Description of Artificial Sequence: Synthetic oligonucleotide
  Antisense strand to SEQ ID NO: 652930
uaauucaucccagacaucc

SEQ ID NO: 652932 - RNA, 19 nt, Artificial Sequence
  Description of Artificial Sequence: Synthetic oligonucleotide
  Sense strand starting at position 3581 of SEQ ID NO: 585602
auguaagaaucauaagacu

SEQ ID NO: 652933 - RNA, 19 nt, Artificial Sequence
  Description of Artificial Sequence: Synthetic oligonucleotide
  Antisense strand to SEQ ID NO: 652932
agucuuaugauucuuacau

SEQ ID NO: 652934 - RNA, 19 nt, Artificial Sequence
  Description of Artificial Sequence: Synthetic oligonucleotide
  Sense strand starting at position 3613 of SEQ ID NO: 585602
agcaaagauuucugauccu

SEQ ID NO: 652935 - RNA, 19 nt, Artificial Sequence
  Description of Artificial Sequence: Synthetic oligonucleotide
  Antisense strand to SEQ ID NO: 652934
aggaucagaaaucuuugcu

SEQ ID NO: 652936 - RNA, 19 nt, Artificial Sequence
  Description of Artificial Sequence: Synthetic oligonucleotide
  Sense strand starting at position 3637 of SEQ ID NO: 585602
agucaacaagcuugccaua

SEQ ID NO: 652937 - RNA, 19 nt, Artificial Sequence
  Description of Artificial Sequence: Synthetic oligonucleotide
  Antisense strand to SEQ ID NO: 652936
uauggcaagcuuguugacu

SEQ ID NO: 652938 - RNA, 19 nt, Artificial Sequence
  Description of Artificial Sequence: Synthetic oligonucleotide
  Sense strand starting at position 3648 of SEQ ID NO: 585602
uugccauaggcaugauguu

SEQ ID NO: 652939 - RNA, 19 nt, Artificial Sequence
  Description of Artificial Sequence: Synthetic oligonucleotide
  Antisense strand to SEQ ID NO: 652938
aacaucaugccuauggcaa

SEQ ID NO: 652940 - RNA, 19 nt, Artificial Sequence
  Description of Artificial Sequence: Synthetic oligonucleotide
  Sense strand starting at position 3750 of SEQ ID NO: 585602
acacgaacuguuuaucuua

SEQ ID NO: 652941 - RNA, 19 nt, Artificial Sequence
  Description of Artificial Sequence: Synthetic oligonucleotide
  Antisense strand to SEQ ID NO: 652940
uaagauaaacaguucgugu

SEQ ID NO: 652942 - RNA, 19 nt, Artificial Sequence
  Description of Artificial Sequence: Synthetic oligonucleotide
  Sense strand starting at position 3752 of SEQ ID NO: 585602
acgaacuguuuaucuuaua

SEQ ID NO: 652943 - RNA, 19 nt, Artificial Sequence
  Description of Artificial Sequence: Synthetic oligonucleotide
  Antisense strand to SEQ ID NO: 652942
uauaagauaaacaguucgu

SEQ ID NO: 652944 - RNA, 19 nt, Artificial Sequence
  Description of Artificial Sequence: Synthetic oligonucleotide
  Sense strand starting at position 3753 of SEQ ID NO: 585602
cgaacuguuuaucuuauac

SEQ ID NO: 652945 - RNA, 19 nt, Artificial Sequence
  Description of Artificial Sequence: Synthetic oligonucleotide
  Antisense strand to SEQ ID NO: 652944
guauaagauaaacaguucg

SEQ ID NO: 652946 - RNA, 19 nt, Artificial Sequence
  Description of Artificial Sequence: Synthetic oligonucleotide
  Sense strand starting at position 3780 of SEQ ID NO: 585602
uagaaagguuaguagaaga

SEQ ID NO: 652947 - RNA, 19 nt, Artificial Sequence
  Description of Artificial Sequence: Synthetic oligonucleotide
  Antisense strand to SEQ ID NO: 652946
ucuucuacuaaccuuucua

SEQ ID NO: 652948 - RNA, 19 nt, Artificial Sequence
  Description of Artificial Sequence: Synthetic oligonucleotide
  Sense strand starting at position 3849 of SEQ ID NO: 585602
auuggaagaucagauugua

SEQ ID NO: 652949 - RNA, 19 nt, Artificial Sequence
  Description of Artificial Sequence: Synthetic oligonucleotide
  Antisense strand to SEQ ID NO: 652948
uacaaucugaucuuccaau

SEQ ID NO: 652950 - RNA, 19 nt, Artificial Sequence
  Description of Artificial Sequence: Synthetic oligonucleotide
  Sense strand starting at position 3928 of SEQ ID NO: 585602
cagaguaauugauaaugac

SEQ ID NO: 652951 - RNA, 19 nt, Artificial Sequence
  Description of Artificial Sequence: Synthetic oligonucleotide
  Antisense strand to SEQ ID NO: 652950
gucauuaucaauuacucug

SEQ ID NO: 652952 - RNA, 19 nt, Artificial Sequence
  Description of Artificial Sequence: Synthetic oligonucleotide
  Sense strand starting at position 3952 of SEQ ID NO: 585602
cugacaguguauuuguauu

SEQ ID NO: 652953 - RNA, 19 nt, Artificial Sequence
  Description of Artificial Sequence: Synthetic oligonucleotide
  Antisense strand to SEQ ID NO: 652952
aauacaaauacacugucag

SEQ ID NO: 652954 - RNA, 19 nt, Artificial Sequence
  Description of Artificial Sequence: Synthetic oligonucleotide
  Sense strand starting at position 17 of SEQ ID NO: 585603
uuaaauggaucuuaagaag

SEQ ID NO: 652955 - RNA, 19 nt, Artificial Sequence
  Description of Artificial Sequence: Synthetic oligonucleotide
  Antisense strand to SEQ ID NO: 652954
cuucuuaagauccauuuaa

SEQ ID NO: 652956 - RNA, 19 nt, Artificial Sequence
  Description of Artificial Sequence: Synthetic oligonucleotide
  Sense strand starting at position 20 of SEQ ID NO: 585603
aauggaucuuaagaaggca

SEQ ID NO: 652957 - RNA, 19 nt, Artificial Sequence
  Description of Artificial Sequence: Synthetic oligonucleotide
  Antisense strand to SEQ ID NO: 652956
ugccuucuuaagauccauu

SEQ ID NO: 652958 - RNA, 19 nt, Artificial Sequence
  Description of Artificial Sequence: Synthetic oligonucleotide
  Sense strand starting at position 150 of SEQ ID NO: 585603
ccaaguaggccuuauacua

SEQ ID NO: 652959 - RNA, 19 nt, Artificial Sequence
  Description of Artificial Sequence: Synthetic oligonucleotide
  Antisense strand to SEQ ID NO: 652958
uaguauaaggccuacuugg

SEQ ID NO: 652960 - RNA, 19 nt, Artificial Sequence
  Description of Artificial Sequence: Synthetic oligonucleotide
  Sense strand starting at position 359 of SEQ ID NO: 585603
ucuugaaaugugcaucuga

SEQ ID NO: 652961 - RNA, 19 nt, Artificial Sequence
  Description of Artificial Sequence: Synthetic oligonucleotide
  Antisense strand to SEQ ID NO: 652960
ucagaugcacauuucaaga

SEQ ID NO: 652962 - RNA, 19 nt, Artificial Sequence
  Description of Artificial Sequence: Synthetic oligonucleotide
  Sense strand starting at position 461 of SEQ ID NO: 585603
agaucaacaugauaaaguu

SEQ ID NO: 652963 - RNA, 19 nt, Artificial Sequence
  Description of Artificial Sequence: Synthetic oligonucleotide
  Antisense strand to SEQ ID NO: 652962
aacuuuaucauguugaucu

SEQ ID NO: 652964 - RNA, 19 nt, Artificial Sequence
  Description of Artificial Sequence: Synthetic oligonucleotide
  Sense strand starting at position 470 of SEQ ID NO: 585603
ugauaaaguuaucugaagu

SEQ ID NO: 652965 - RNA, 19 nt, Artificial Sequence
  Description of Artificial Sequence: Synthetic oligonucleotide
  Antisense strand to SEQ ID NO: 652964
acuucagauaacuuuauca

SEQ ID NO: 652966 - RNA, 19 nt, Artificial Sequence
  Description of Artificial Sequence: Synthetic oligonucleotide
  Sense strand starting at position 722 of SEQ ID NO: 585603
gauuguguggcucaaucag

SEQ ID NO: 652967 - RNA, 19 nt, Artificial Sequence
  Description of Artificial Sequence: Synthetic oligonucleotide
  Antisense strand to SEQ ID NO: 652966
cugauugagccacacaauc

SEQ ID NO: 652968 - RNA, 19 nt, Artificial Sequence
  Description of Artificial Sequence: Synthetic oligonucleotide
  Sense strand starting at position 861 of SEQ ID NO: 585603
gguaauauauagccaguaa

SEQ ID NO: 652969 - RNA, 19 nt, Artificial Sequence
  Description of Artificial Sequence: Synthetic oligonucleotide
  Antisense strand to SEQ ID NO: 652968
uuacuggcuauauauuacc

SEQ ID NO: 652970 - RNA, 19 nt, Artificial Sequence
  Description of Artificial Sequence: Synthetic oligonucleotide
  Sense strand starting at position 1043 of SEQ ID NO: 585603
ggugcuuugacucaacaug

SEQ ID NO: 652971 - RNA, 19 nt, Artificial Sequence
  Description of Artificial Sequence: Synthetic oligonucleotide
  Antisense strand to SEQ ID NO: 652970
cauguugagucaaagcacc

SEQ ID NO: 652972 - RNA, 19 nt, Artificial Sequence
  Description of Artificial Sequence: Synthetic oligonucleotide
  Sense strand starting at position 1139 of SEQ ID NO: 585603
gaauaauggaggcguaguu

SEQ ID NO: 652973 - RNA, 19 nt, Artificial Sequence
  Description of Artificial Sequence: Synthetic oligonucleotide
  Antisense strand to SEQ ID NO: 652972
aacuacgccuccauuauuc

SEQ ID NO: 652974 - RNA, 19 nt, Artificial Sequence
  Description of Artificial Sequence: Synthetic oligonucleotide
  Sense strand starting at position 1158 of SEQ ID NO: 585603
uuguuaggccuuuaacaau

SEQ ID NO: 652975 - RNA, 19 nt, Artificial Sequence
  Description of Artificial Sequence: Synthetic oligonucleotide
  Antisense strand to SEQ ID NO: 652974
auuguuaaaggccuaacaa

SEQ ID NO: 652976 - RNA, 19 nt, Artificial Sequence
  Description of Artificial Sequence: Synthetic oligonucleotide
  Sense strand starting at position 1347 of SEQ ID NO: 585603
auuaaauaucgcuacaugu

SEQ ID NO: 652977 - RNA, 19 nt, Artificial Sequence
  Description of Artificial Sequence: Synthetic oligonucleotide
  Antisense strand to SEQ ID NO: 652976
acauguagcgauauuuaau

SEQ ID NO: 652978 - RNA, 19 nt, Artificial Sequence
  Description of Artificial Sequence: Synthetic oligonucleotide
  Sense strand starting at position 1377 of SEQ ID NO: 585603
ggacuagaauauuaaagca

SEQ ID NO: 652979 - RNA, 19 nt, Artificial Sequence
  Description of Artificial Sequence: Synthetic oligonucleotide
  Antisense strand to SEQ ID NO: 652978
ugcuuuaauauucuagucc

SEQ ID NO: 652980 - RNA, 19 nt, Artificial Sequence
  Description of Artificial Sequence: Synthetic oligonucleotide
  Sense strand starting at position 1390 of SEQ ID NO: 585603
aaagcaguguugccacuua

SEQ ID NO: 652981 - RNA, 19 nt, Artificial Sequence
  Description of Artificial Sequence: Synthetic oligonucleotide
  Antisense strand to SEQ ID NO: 652980
uaaguggcaacacugcuuu

SEQ ID NO: 652982 - RNA, 19 nt, Artificial Sequence
  Description of Artificial Sequence: Synthetic oligonucleotide
  Sense strand starting at position 1421 of SEQ ID NO: 585603
gaacauauucuacgcguga

SEQ ID NO: 652983 - RNA, 19 nt, Artificial Sequence
  Description of Artificial Sequence: Synthetic oligonucleotide
  Antisense strand to SEQ ID NO: 652982
ucacgcguagaauauguuc

SEQ ID NO: 652984 - RNA, 19 nt, Artificial Sequence
  Description of Artificial Sequence: Synthetic oligonucleotide
  Sense strand starting at position 1423 of SEQ ID NO: 585603
acauauucuacgcgugacu

SEQ ID NO: 652985 - RNA, 19 nt, Artificial Sequence
  Description of Artificial Sequence: Synthetic oligonucleotide
  Antisense strand to SEQ ID NO: 652984
agucacgcguagaauaugu

SEQ ID NO: 652986 - RNA, 19 nt, Artificial Sequence
  Description of Artificial Sequence: Synthetic oligonucleotide
  Sense strand starting at position 1434 of SEQ ID NO: 585603
gcgugacuacuggaaagca

SEQ ID NO: 652987 - RNA, 19 nt, Artificial Sequence
  Description of Artificial Sequence: Synthetic oligonucleotide
  Antisense strand to SEQ ID NO: 652986
ugcuuuccaguagucacgc

SEQ ID NO: 652988 - RNA, 19 nt, Artificial Sequence
  Description of Artificial Sequence: Synthetic oligonucleotide
  Sense strand starting at position 1465 of SEQ ID NO: 585603
ccaaucuagucucuaggaa

SEQ ID NO: 652989 - RNA, 19 nt, Artificial Sequence
  Description of Artificial Sequence: Synthetic oligonucleotide
  Antisense strand to SEQ ID NO: 652988
uuccuagagacuagauugg

SEQ ID NO: 652990 - RNA, 19 nt, Artificial Sequence
  Description of Artificial Sequence: Synthetic oligonucleotide
  Sense strand starting at position 1568 of SEQ ID NO: 585603
gcgcgauaucaacauucuc

SEQ ID NO: 652991 - RNA, 19 nt, Artificial Sequence
  Description of Artificial Sequence: Synthetic oligonucleotide
  Antisense strand to SEQ ID NO: 652990
gagaauguugauaucgcgc

SEQ ID NO: 652992 - RNA, 19 nt, Artificial Sequence
  Description of Artificial Sequence: Synthetic oligonucleotide
  Sense strand starting at position 1620 of SEQ ID NO: 585603
cgugucaggugaucaguua

SEQ ID NO: 652993 - RNA, 19 nt, Artificial Sequence
  Description of Artificial Sequence: Synthetic oligonucleotide
  Antisense strand to SEQ ID NO: 652992
uaacugaucaccugacacg

SEQ ID NO: 652994 - RNA, 19 nt, Artificial Sequence
  Description of Artificial Sequence: Synthetic oligonucleotide
  Sense strand starting at position 1621 of SEQ ID NO: 585603
gugucaggugaucaguuau

SEQ ID NO: 652995 - RNA, 19 nt, Artificial Sequence
  Description of Artificial Sequence: Synthetic oligonucleotide
  Antisense strand to SEQ ID NO: 652994
auaacugaucaccugacac

SEQ ID NO: 652996 - RNA, 19 nt, Artificial Sequence
  Description of Artificial Sequence: Synthetic oligonucleotide
  Sense strand starting at position 1632 of SEQ ID NO: 585603
ucaguuauuuagcaccauu

SEQ ID NO: 652997 - RNA, 19 nt, Artificial Sequence
  Description of Artificial Sequence: Synthetic oligonucleotide
  Antisense strand to SEQ ID NO: 652996
aauggugcuaaauaacuga

SEQ ID NO: 652998 - RNA, 19 nt, Artificial Sequence
  Description of Artificial Sequence: Synthetic oligonucleotide
  Sense strand starting at position 2963 of SEQ ID NO: 585603
uuauuaauugacugugagu

SEQ ID NO: 652999 - RNA, 19 nt, Artificial Sequence
  Description of Artificial Sequence: Synthetic oligonucleotide
  Antisense strand to SEQ ID NO: 652998
acucacagucaauuaauaa

SEQ ID NO: 653000 - RNA, 19 nt, Artificial Sequence
  Description of Artificial Sequence: Synthetic oligonucleotide
  Sense strand starting at position 2965 of SEQ ID NO: 585603
auuaauugacugugaguuc

SEQ ID NO: 653001 - RNA, 19 nt, Artificial Sequence
  Description of Artificial Sequence: Synthetic oligonucleotide
  Antisense strand to SEQ ID NO: 653000
gaacucacagucaauuaau

SEQ ID NO: 653002 - RNA, 19 nt, Artificial Sequence
  Description of Artificial Sequence: Synthetic oligonucleotide
  Sense strand starting at position 2977 of SEQ ID NO: 585603
ugaguucaagaaugguaga

SEQ ID NO: 653003 - RNA, 19 nt, Artificial Sequence
  Description of Artificial Sequence: Synthetic oligonucleotide
  Antisense strand to SEQ ID NO: 653002
ucuaccauucuugaacuca

SEQ ID NO: 653004 - RNA, 19 nt, Artificial Sequence
  Description of Artificial Sequence: Synthetic oligonucleotide
  Sense strand starting at position 3011 of SEQ ID NO: 585603
ugagcccucugcccaaaua

SEQ ID NO: 653005 - RNA, 19 nt, Artificial Sequence
  Description of Artificial Sequence: Synthetic oligonucleotide
  Antisense strand to SEQ ID NO: 653004
uauuugggcagagggcuca

SEQ ID NO: 653006 - RNA, 19 nt, Artificial Sequence
  Description of Artificial Sequence: Synthetic oligonucleotide
  Sense strand starting at position 3136 of SEQ ID NO: 585603
cuugguauccaguaagcag

SEQ ID NO: 653007 - RNA, 19 nt, Artificial Sequence
  Description of Artificial Sequence: Synthetic oligonucleotide
  Antisense strand to SEQ ID NO: 653006
cugcuuacuggauaccaag

SEQ ID NO: 653008 - RNA, 19 nt, Artificial Sequence
  Description of Artificial Sequence: Synthetic oligonucleotide
  Sense strand starting at position 3216 of SEQ ID NO: 585603
auuccuuugccaggagcau

SEQ ID NO: 653009 - RNA, 19 nt, Artificial Sequence
  Description of Artificial Sequence: Synthetic oligonucleotide
  Antisense strand to SEQ ID NO: 653008
augcuccuggcaaaggaau

SEQ ID NO: 653010 - RNA, 19 nt, Artificial Sequence
  Description of Artificial Sequence: Synthetic oligonucleotide
  Sense strand starting at position 3410 of SEQ ID NO: 585603
auacauuauuugugguaac

SEQ ID NO: 653011 - RNA, 19 nt, Artificial Sequence
  Description of Artificial Sequence: Synthetic oligonucleotide
  Antisense strand to SEQ ID NO: 653010
guuaccacaaauaauguau

SEQ ID NO: 653012 - RNA, 19 nt, Artificial Sequence
  Description of Artificial Sequence: Synthetic oligonucleotide
  Sense strand starting at position 3427 of SEQ ID NO: 585603
acaaauauuguguagaggu

SEQ ID NO: 653013 - RNA, 19 nt, Artificial Sequence
  Description of Artificial Sequence: Synthetic oligonucleotide
  Antisense strand to SEQ ID NO: 653012
accucuacacaauauuugu

SEQ ID NO: 653014 - RNA, 19 nt, Artificial Sequence
  Description of Artificial Sequence: Synthetic oligonucleotide
  Sense strand starting at position 3517 of SEQ ID NO: 585603
cuuaauaagcgcugugaag

SEQ ID NO: 653015 - RNA, 19 nt, Artificial Sequence
  Description of Artificial Sequence: Synthetic oligonucleotide
  Antisense strand to SEQ ID NO: 653014
cuucacagcgcuuauuaag

SEQ ID NO: 653016 - RNA, 19 nt, Artificial Sequence
  Description of Artificial Sequence: Synthetic oligonucleotide
  Sense strand starting at position 3519 of SEQ ID NO: 585603
uaauaagcgcugugaagua

SEQ ID NO: 653017 - RNA, 19 nt, Artificial Sequence
  Description of Artificial Sequence: Synthetic oligonucleotide
  Antisense strand to SEQ ID NO: 653016
uacuucacagcgcuuauua

SEQ ID NO: 653018 - RNA, 19 nt, Artificial Sequence
  Description of Artificial Sequence: Synthetic oligonucleotide
  Sense strand starting at position 3533 of SEQ ID NO: 585603
aaguaauuguugcuuguca

SEQ ID NO: 653019 - RNA, 19 nt, Artificial Sequence
  Description of Artificial Sequence: Synthetic oligonucleotide
  Antisense strand to SEQ ID NO: 653018
ugacaagcaacaauuacuu

SEQ ID NO: 653020 - RNA, 19 nt, Artificial Sequence
  Description of Artificial Sequence: Synthetic oligonucleotide
  Sense strand starting at position 3537 of SEQ ID NO: 585603
aauuguugcuugucaguca

SEQ ID NO: 653021 - RNA, 19 nt, Artificial Sequence
  Description of Artificial Sequence: Synthetic oligonucleotide
  Antisense strand to SEQ ID NO: 653020
ugacugacaagcaacaauu

SEQ ID NO: 653022 - RNA, 19 nt, Artificial Sequence
  Description of Artificial Sequence: Synthetic oligonucleotide
  Sense strand starting at position 3727 of SEQ ID NO: 585603
agauuagugcaggguggaa

SEQ ID NO: 653023 - RNA, 19 nt, Artificial Sequence
  Description of Artificial Sequence: Synthetic oligonucleotide
  Antisense strand to SEQ ID NO: 653022
uuccacccugcacuaaucu

SEQ ID NO: 653024 - RNA, 19 nt, Artificial Sequence
  Description of Artificial Sequence: Synthetic oligonucleotide
  Sense strand starting at position 3764 of SEQ ID NO: 585603
uggugaagaucuguucuuu

SEQ ID NO: 653025 - RNA, 19 nt, Artificial Sequence
  Description of Artificial Sequence: Synthetic oligonucleotide
  Antisense strand to SEQ ID NO: 653024
aaagaacagaucuucacca

SEQ ID NO: 653026 - RNA, 19 nt, Artificial Sequence
  Description of Artificial Sequence: Synthetic oligonucleotide
  Sense strand starting at position 3785 of SEQ ID NO: 585603
ucucucuagucuucugaua

SEQ ID NO: 653027 - RNA, 19 nt, Artificial Sequence
  Description of Artificial Sequence: Synthetic oligonucleotide
  Antisense strand to SEQ ID NO: 653026
uaucagaagacuagagaga

SEQ ID NO: 653028 - RNA, 19 nt, Artificial Sequence
  Description of Artificial Sequence: Synthetic oligonucleotide
  Sense strand starting at position 3843 of SEQ ID NO: 585603
aaguuuggguuguccugau

SEQ ID NO: 653029 - RNA, 19 nt, Artificial Sequence
  Description of Artificial Sequence: Synthetic oligonucleotide
  Antisense strand to SEQ ID NO: 653028
aucaggacaacccaaacuu

SEQ ID NO: 653030 - RNA, 19 nt, Artificial Sequence
  Description of Artificial Sequence: Synthetic oligonucleotide
  Sense strand starting at position 3847 of SEQ ID NO: 585603
uuggguuguccugauucca

SEQ ID NO: 653031 - RNA, 19 nt, Artificial Sequence
  Description of Artificial Sequence: Synthetic oligonucleotide
  Antisense strand to SEQ ID NO: 653030
uggaaucaggacaacccaa

SEQ ID NO: 653032 - RNA, 19 nt, Artificial Sequence
  Description of Artificial Sequence: Synthetic oligonucleotide
  Sense strand starting at position 3855 of SEQ ID NO: 585603
uccugauuccacuggauuc

SEQ ID NO: 653033 - RNA, 19 nt, Artificial Sequence
  Description of Artificial Sequence: Synthetic oligonucleotide
  Antisense strand to SEQ ID NO: 653032
gaauccaguggaaucagga

SEQ ID NO: 653034 - RNA, 19 nt, Artificial Sequence
  Description of Artificial Sequence: Synthetic oligonucleotide
  Sense strand starting at position 56 of SEQ ID NO: 585604
agaugacacaugugucagu

SEQ ID NO: 653035 - RNA, 19 nt, Artificial Sequence
  Description of Artificial Sequence: Synthetic oligonucleotide
  Antisense strand to SEQ ID NO: 653034
acugacacaugugucaucu

SEQ ID NO: 653036 - RNA, 19 nt, Artificial Sequence
  Description of Artificial Sequence: Synthetic oligonucleotide
  Sense strand starting at position 67 of SEQ ID NO: 585604
gugucaguuccacauccaa

SEQ ID NO: 653037 - RNA, 19 nt, Artificial Sequence
  Description of Artificial Sequence: Synthetic oligonucleotide
  Antisense strand to SEQ ID NO: 653036
uuggauguggaacugacac

SEQ ID NO: 653038 - RNA, 19 nt, Artificial Sequence
  Description of Artificial Sequence: Synthetic oligonucleotide
  Sense strand starting at position 426 of SEQ ID NO: 585604
aaaugaagcuuccuaguag

SEQ ID NO: 653039 - RNA, 19 nt, Artificial Sequence
  Description of Artificial Sequence: Synthetic oligonucleotide
  Antisense strand to SEQ ID NO: 653038
cuacuaggaagcuucauuu

SEQ ID NO: 653040 - RNA, 19 nt, Artificial Sequence
  Description of Artificial Sequence: Synthetic oligonucleotide
  Sense strand starting at position 463 of SEQ ID NO: 585604
ggcagaguaaccuggcaaa

SEQ ID NO: 653041 - RNA, 19 nt, Artificial Sequence
  Description of Artificial Sequence: Synthetic oligonucleotide
  Antisense strand to SEQ ID NO: 653040
uuugccagguuacucugcc

SEQ ID NO: 653042 - RNA, 19 nt, Artificial Sequence
  Description of Artificial Sequence: Synthetic oligonucleotide
  Sense strand starting at position 518 of SEQ ID NO: 585604
uaaguauugccguauuaaa

SEQ ID NO: 653043 - RNA, 19 nt, Artificial Sequence
  Description of Artificial Sequence: Synthetic oligonucleotide
  Antisense strand to SEQ ID NO: 653042
uuuaauacggcaauacuua

SEQ ID NO: 653044 - RNA, 19 nt, Artificial Sequence
  Description of Artificial Sequence: Synthetic oligonucleotide
  Sense strand starting at position 742 of SEQ ID NO: 585604
uaguaauugccacaacguu

SEQ ID NO: 653045 - RNA, 19 nt, Artificial Sequence
  Description of Artificial Sequence: Synthetic oligonucleotide
  Antisense strand to SEQ ID NO: 653044
aacguuguggcaauuacua

SEQ ID NO: 653046 - RNA, 19 nt, Artificial Sequence
  Description of Artificial Sequence: Synthetic oligonucleotide
  Sense strand starting at position 837 of SEQ ID NO: 585604
aggauaguuuagccuuaca

SEQ ID NO: 653047 - RNA, 19 nt, Artificial Sequence
  Description of Artificial Sequence: Synthetic oligonucleotide
  Antisense strand to SEQ ID NO: 653046
uguaaggcuaaacuauccu

SEQ ID NO: 653048 - RNA, 19 nt, Artificial Sequence
  Description of Artificial Sequence: Synthetic oligonucleotide
  Sense strand starting at position 840 of SEQ ID NO: 585604
auaguuuagccuuacagaa

SEQ ID NO: 653049 - RNA, 19 nt, Artificial Sequence
  Description of Artificial Sequence: Synthetic oligonucleotide
  Antisense strand to SEQ ID NO: 653048
uucuguaaggcuaaacuau

SEQ ID NO: 653050 - RNA, 19 nt, Artificial Sequence
  Description of Artificial Sequence: Synthetic oligonucleotide
  Sense strand starting at position 1128 of SEQ ID NO: 585604
ggaccagacucauugcaag

SEQ ID NO: 653051 - RNA, 19 nt, Artificial Sequence
  Description of Artificial Sequence: Synthetic oligonucleotide
  Antisense strand to SEQ ID NO: 653050
cuugcaaugagucuggucc

SEQ ID NO: 653052 - RNA, 19 nt, Artificial Sequence
  Description of Artificial Sequence: Synthetic oligonucleotide
  Sense strand starting at position 1147 of SEQ ID NO: 585604
cgaccagacucauugcaaa

SEQ ID NO: 653053 - RNA, 19 nt, Artificial Sequence
  Description of Artificial Sequence: Synthetic oligonucleotide
  Antisense strand to SEQ ID NO: 653052
uuugcaaugagucuggucg

SEQ ID NO: 653054 - RNA, 19 nt, Artificial Sequence
  Description of Artificial Sequence: Synthetic oligonucleotide
  Sense strand starting at position 1195 of SEQ ID NO: 585604
gcagcagagguauagaguu

SEQ ID NO: 653055 - RNA, 19 nt, Artificial Sequence
  Description of Artificial Sequence: Synthetic oligonucleotide
  Antisense strand to SEQ ID NO: 653054
aacucuauaccucugcugc

SEQ ID NO: 653056 - RNA, 19 nt, Artificial Sequence
  Description of Artificial Sequence: Synthetic oligonucleotide
  Sense strand starting at position 1203 of SEQ ID NO: 585604
gguauagaguucuuucucu

SEQ ID NO: 653057 - RNA, 19 nt, Artificial Sequence
  Description of Artificial Sequence: Synthetic oligonucleotide
  Antisense strand to SEQ ID NO: 653056
agagaaagaacucuauacc

SEQ ID NO: 653058 - RNA, 19 nt, Artificial Sequence
  Description of Artificial Sequence: Synthetic oligonucleotide
  Sense strand starting at position 1207 of SEQ ID NO: 585604
uagaguucuuucucugguu

SEQ ID NO: 653059 - RNA, 19 nt, Artificial Sequence
  Description of Artificial Sequence: Synthetic oligonucleotide
  Antisense strand to SEQ ID NO: 653058
aaccagagaaagaacucua

SEQ ID NO: 653060 - RNA, 19 nt, Artificial Sequence
  Description of Artificial Sequence: Synthetic oligonucleotide
  Sense strand starting at position 1263 of SEQ ID NO: 585604
gggagcaaacaauguaaau

SEQ ID NO: 653061 - RNA, 19 nt, Artificial Sequence
  Description of Artificial Sequence: Synthetic oligonucleotide
  Antisense strand to SEQ ID NO: 653060
auuuacauuguuugcuccc

SEQ ID NO: 653062 - RNA, 19 nt, Artificial Sequence
  Description of Artificial Sequence: Synthetic oligonucleotide
  Sense strand starting at position 1350 of SEQ ID NO: 585604
gugaccacaugucucaauu

SEQ ID NO: 653063 - RNA, 19 nt, Artificial Sequence
  Description of Artificial Sequence: Synthetic oligonucleotide
  Antisense strand to SEQ ID NO: 653062
aauugagacauguggucac

SEQ ID NO: 653064 - RNA, 19 nt, Artificial Sequence
  Description of Artificial Sequence: Synthetic oligonucleotide
  Sense strand starting at position 1361 of SEQ ID NO: 585604
ucucaauuugccgggcaau

SEQ ID NO: 653065 - RNA, 19 nt, Artificial Sequence
  Description of Artificial Sequence: Synthetic oligonucleotide
  Antisense strand to SEQ ID NO: 653064
auugcccggcaaauugaga

SEQ ID NO: 653066 - RNA, 19 nt, Artificial Sequence
  Description of Artificial Sequence: Synthetic oligonucleotide
  Sense strand starting at position 1408 of SEQ ID NO: 585604
accuguugucaugauguaa

SEQ ID NO: 653067 - RNA, 19 nt, Artificial Sequence
  Description of Artificial Sequence: Synthetic oligonucleotide
  Antisense strand to SEQ ID NO: 653066
uuacaucaugacaacaggu

SEQ ID NO: 653068 - RNA, 19 nt, Artificial Sequence
  Description of Artificial Sequence: Synthetic oligonucleotide
  Sense strand starting at position 1412 of SEQ ID NO: 585604
guugucaugauguaauuau

SEQ ID NO: 653069 - RNA, 19 nt, Artificial Sequence
  Description of Artificial Sequence: Synthetic oligonucleotide
  Antisense strand to SEQ ID NO: 653068
auaauuacaucaugacaac

SEQ ID NO: 653070 - RNA, 19 nt, Artificial Sequence
  Description of Artificial Sequence: Synthetic oligonucleotide
  Sense strand starting at position 1427 of SEQ ID NO: 585604
uuauuaaaguacucucugu

SEQ ID NO: 653071 - RNA, 19 nt, Artificial Sequence
  Description of Artificial Sequence: Synthetic oligonucleotide
  Antisense strand to SEQ ID NO: 653070
acagagaguacuuuaauaa

SEQ ID NO: 653072 - RNA, 19 nt, Artificial Sequence
  Description of Artificial Sequence: Synthetic oligonucleotide
  Sense strand starting at position 1453 of SEQ ID NO: 585604
guaagugucccauacugga

SEQ ID NO: 653073 - RNA, 19 nt, Artificial Sequence
  Description of Artificial Sequence: Synthetic oligonucleotide
  Antisense strand to SEQ ID NO: 653072
uccaguaugggacacuuac

SEQ ID NO: 653074 - RNA, 19 nt, Artificial Sequence
  Description of Artificial Sequence: Synthetic oligonucleotide
  Sense strand starting at position 1523 of SEQ ID NO: 585604
cuccacacuccuuggaaga

SEQ ID NO: 653075 - RNA, 19 nt, Artificial Sequence
  Description of Artificial Sequence: Synthetic oligonucleotide
  Antisense strand to SEQ ID NO: 653074
ucuuccaaggaguguggag

SEQ ID NO: 653076 - RNA, 19 nt, Artificial Sequence
  Description of Artificial Sequence: Synthetic oligonucleotide
  Sense strand starting at position 1524 of SEQ ID NO: 585604
uccacacuccuuggaagaa

SEQ ID NO: 653077 - RNA, 19 nt, Artificial Sequence
  Description of Artificial Sequence: Synthetic oligonucleotide
  Antisense strand to SEQ ID NO: 653076
uucuuccaaggagugugga

SEQ ID NO: 653078 - RNA, 19 nt, Artificial Sequence
  Description of Artificial Sequence: Synthetic oligonucleotide
  Sense strand starting at position 2100 of SEQ ID NO: 585604
uaagguauuucugaauugu

SEQ ID NO: 653079 - RNA, 19 nt, Artificial Sequence
  Description of Artificial Sequence: Synthetic oligonucleotide
  Antisense strand to SEQ ID NO: 653078
acaauucagaaauaccuua

SEQ ID NO: 653080 - RNA, 19 nt, Artificial Sequence
  Description of Artificial Sequence: Synthetic oligonucleotide
  Sense strand starting at position 2104 of SEQ ID NO: 585604
guauuucugaauuguuguu

SEQ ID NO: 653081 - RNA, 19 nt, Artificial Sequence
  Description of Artificial Sequence: Synthetic oligonucleotide
  Antisense strand to SEQ ID NO: 653080
aacaacaauucagaaauac

SEQ ID NO: 653082 - RNA, 19 nt, Artificial Sequence
  Description of Artificial Sequence: Synthetic oligonucleotide
  Sense strand starting at position 2162 of SEQ ID NO: 585604
ggaaauguagaacgaaucu

SEQ ID NO: 653083 - RNA, 19 nt, Artificial Sequence
  Description of Artificial Sequence: Synthetic oligonucleotide
  Antisense strand to SEQ ID NO: 653082
agauucguucuacauuucc

SEQ ID NO: 653084 - RNA, 19 nt, Artificial Sequence
  Description of Artificial Sequence: Synthetic oligonucleotide
  Sense strand starting at position 2204 of SEQ ID NO: 585604
augcauguaguauaucauu

SEQ ID NO: 653085 - RNA, 19 nt, Artificial Sequence
  Description of Artificial Sequence: Synthetic oligonucleotide
  Antisense strand to SEQ ID NO: 653084
aaugauauacuacaugcau

SEQ ID NO: 653086 - RNA, 19 nt, Artificial Sequence
  Description of Artificial Sequence: Synthetic oligonucleotide
  Sense strand starting at position 2237 of SEQ ID NO: 585604
acuaaauguuuacucaguu

SEQ ID NO: 653087 - RNA, 19 nt, Artificial Sequence
  Description of Artificial Sequence: Synthetic oligonucleotide
  Antisense strand to SEQ ID NO: 653086
aacugaguaaacauuuagu

SEQ ID NO: 653088 - RNA, 19 nt, Artificial Sequence
  Description of Artificial Sequence: Synthetic oligonucleotide
  Sense strand starting at position 2278 of SEQ ID NO: 585604
cuauguauauaguccauua

SEQ ID NO: 653089 - RNA, 19 nt, Artificial Sequence
  Description of Artificial Sequence: Synthetic oligonucleotide
  Antisense strand to SEQ ID NO: 653088
uaauggacuauauacauag

SEQ ID NO: 653090 - RNA, 19 nt, Artificial Sequence
  Description of Artificial Sequence: Synthetic oligonucleotide
  Sense strand starting at position 2280 of SEQ ID NO: 585604
auguauauaguccauuaac

SEQ ID NO: 653091 - RNA, 19 nt, Artificial Sequence
  Description of Artificial Sequence: Synthetic oligonucleotide
  Antisense strand to SEQ ID NO: 653090
guuaauggacuauauacau

SEQ ID NO: 653092 - RNA, 19 nt, Artificial Sequence
  Description of Artificial Sequence: Synthetic oligonucleotide
  Sense strand starting at position 2720 of SEQ ID NO: 585604
uuauguguggucuauacaa

SEQ ID NO: 653093 - RNA, 19 nt, Artificial Sequence
  Description of Artificial Sequence: Synthetic oligonucleotide
  Antisense strand to SEQ ID NO: 653092
uuguauagaccacacauaa

SEQ ID NO: 653094 - RNA, 19 nt, Artificial Sequence
  Description of Artificial Sequence: Synthetic oligonucleotide
  Sense strand starting at position 2722 of SEQ ID NO: 585604
auguguggucuauacaagu

SEQ ID NO: 653095 - RNA, 19 nt, Artificial Sequence
  Description of Artificial Sequence: Synthetic oligonucleotide
  Antisense strand to SEQ ID NO: 653094
acuuguauagaccacacau

SEQ ID NO: 653096 - RNA, 19 nt, Artificial Sequence
  Description of Artificial Sequence: Synthetic oligonucleotide
  Sense strand starting at position 2739 of SEQ ID NO: 585604
guaucaaguuagucuccca

SEQ ID NO: 653097 - RNA, 19 nt, Artificial Sequence
  Description of Artificial Sequence: Synthetic oligonucleotide
  Antisense strand to SEQ ID NO: 653096
ugggagacuaacuugauac

SEQ ID NO: 653098 - RNA, 19 nt, Artificial Sequence
  Description of Artificial Sequence: Synthetic oligonucleotide
  Sense strand starting at position 2839 of SEQ ID NO: 585604
guuaaaucaguuugagaga

SEQ ID NO: 653099 - RNA, 19 nt, Artificial Sequence
  Description of Artificial Sequence: Synthetic oligonucleotide
  Antisense strand to SEQ ID NO: 653098
ucucucaaacugauuuaac

SEQ ID NO: 653100 - RNA, 19 nt, Artificial Sequence
  Description of Artificial Sequence: Synthetic oligonucleotide
  Sense strand starting at position 2925 of SEQ ID NO: 585604
agucccagugauuaaccua

SEQ ID NO: 653101 - RNA, 19 nt, Artificial Sequence
  Description of Artificial Sequence: Synthetic oligonucleotide
  Antisense strand to SEQ ID NO: 653100
uagguuaaucacugggacu

SEQ ID NO: 653102 - RNA, 19 nt, Artificial Sequence
  Description of Artificial Sequence: Synthetic oligonucleotide
  Sense strand starting at position 3259 of SEQ ID NO: 585604
gcccauacccauuaguaag

SEQ ID NO: 653103 - RNA, 19 nt, Artificial Sequence
  Description of Artificial Sequence: Synthetic oligonucleotide
  Antisense strand to SEQ ID NO: 653102
cuuacuaauggguaugggc

SEQ ID NO: 653104 - RNA, 19 nt, Artificial Sequence
  Description of Artificial Sequence: Synthetic oligonucleotide
  Sense strand starting at position 3561 of SEQ ID NO: 585604
ggagguugcagcgaaauca

SEQ ID NO: 653105 - RNA, 19 nt, Artificial Sequence
  Description of Artificial Sequence: Synthetic oligonucleotide
  Antisense strand to SEQ ID NO: 653104
ugauuucgcugcaaccucc

SEQ ID NO: 653106 - RNA, 19 nt, Artificial Sequence
  Description of Artificial Sequence: Synthetic oligonucleotide
  Sense strand starting at position 3729 of SEQ ID NO: 585604
uccuaaaucuugguuguga

SEQ ID NO: 653107 - RNA, 19 nt, Artificial Sequence
  Description of Artificial Sequence: Synthetic oligonucleotide
  Antisense strand to SEQ ID NO: 653106
ucacaaccaagauuuagga

SEQ ID NO: 653108 - RNA, 19 nt, Artificial Sequence
  Description of Artificial Sequence: Synthetic oligonucleotide
  Sense strand starting at position 3730 of SEQ ID NO: 585604
ccuaaaucuugguugugau

SEQ ID NO: 653109 - RNA, 19 nt, Artificial Sequence
  Description of Artificial Sequence: Synthetic oligonucleotide
  Antisense strand to SEQ ID NO: 653108
aucacaaccaagauuuagg

SEQ ID NO: 653110 - RNA, 19 nt, Artificial Sequence
  Description of Artificial Sequence: Synthetic oligonucleotide
  Sense strand starting at position 3731 of SEQ ID NO: 585604
cuaaaucuugguugugaua

SEQ ID NO: 653111 - RNA, 19 nt, Artificial Sequence
  Description of Artificial Sequence: Synthetic oligonucleotide
  Antisense strand to SEQ ID NO: 653110
uaucacaaccaagauuuag

SEQ ID NO: 653112 - RNA, 19 nt, Artificial Sequence
  Description of Artificial Sequence: Synthetic oligonucleotide
  Sense strand starting at position 3941 of SEQ ID NO: 585604
uuuacagauuugcugcuua

SEQ ID NO: 653113 - RNA, 19 nt, Artificial Sequence
  Description of Artificial Sequence: Synthetic oligonucleotide
  Antisense strand to SEQ ID NO: 653112
uaagcagcaaaucuguaaa

SEQ ID NO: 653114 - RNA, 19 nt, Artificial Sequence
  Description of Artificial Sequence: Synthetic oligonucleotide
  Sense strand starting at position 111 of SEQ ID NO: 585605
uccggugcgacugcuuuaa

SEQ ID NO: 653115 - RNA, 19 nt, Artificial Sequence
  Description of Artificial Sequence: Synthetic oligonucleotide
  Antisense strand to SEQ ID NO: 653114
uuaaagcagucgcaccgga

SEQ ID NO: 653116 - RNA, 19 nt, Artificial Sequence
  Description of Artificial Sequence: Synthetic oligonucleotide
  Sense strand starting at position 159 of SEQ ID NO: 585605
ccuguaucaguuuaggaga

SEQ ID NO: 653117 - RNA, 19 nt, Artificial Sequence
  Description of Artificial Sequence: Synthetic oligonucleotide
  Antisense strand to SEQ ID NO: 653116
ucuccuaaacugauacagg

SEQ ID NO: 653118 - RNA, 19 nt, Artificial Sequence
  Description of Artificial Sequence: Synthetic oligonucleotide
  Sense strand starting at position 362 of SEQ ID NO: 585605
aguuccaucccacaguaaa

SEQ ID NO: 653119 - RNA, 19 nt, Artificial Sequence
  Description of Artificial Sequence: Synthetic oligonucleotide
  Antisense strand to SEQ ID NO: 653118
uuuacugugggauggaacu

SEQ ID NO: 653120 - RNA, 19 nt, Artificial Sequence
  Description of Artificial Sequence: Synthetic oligonucleotide
  Sense strand starting at position 1141 of SEQ ID NO: 585605
gugaaugucucaccagauu

SEQ ID NO: 653121 - RNA, 19 nt, Artificial Sequence
  Description of Artificial Sequence: Synthetic oligonucleotide
  Antisense strand to SEQ ID NO: 653120
aaucuggugagacauucac

SEQ ID NO: 653122 - RNA, 19 nt, Artificial Sequence
  Description of Artificial Sequence: Synthetic oligonucleotide
  Sense strand starting at position 1771 of SEQ ID NO: 585605
acauguuuaugggucacuu

SEQ ID NO: 653123 - RNA, 19 nt, Artificial Sequence
  Description of Artificial Sequence: Synthetic oligonucleotide
  Antisense strand to SEQ ID NO: 653122
aagugacccauaaacaugu

SEQ ID NO: 653124 - RNA, 19 nt, Artificial Sequence
  Description of Artificial Sequence: Synthetic oligonucleotide
  Sense strand starting at position 1848 of SEQ ID NO: 585605
gcccuauagcugucagugu

SEQ ID NO: 653125 - RNA, 19 nt, Artificial Sequence
  Description of Artificial Sequence: Synthetic oligonucleotide
  Antisense strand to SEQ ID NO: 653124
acacugacagcuauagggc

SEQ ID NO: 653126 - RNA, 19 nt, Artificial Sequence
  Description of Artificial Sequence: Synthetic oligonucleotide
  Sense strand starting at position 2341 of SEQ ID NO: 585605
gauggaaguuaguuucuau

SEQ ID NO: 653127 - RNA, 19 nt, Artificial Sequence
  Description of Artificial Sequence: Synthetic oligonucleotide
  Antisense strand to SEQ ID NO: 653126
auagaaacuaacuuccauc

SEQ ID NO: 653128 - RNA, 19 nt, Artificial Sequence
  Description of Artificial Sequence: Synthetic oligonucleotide
  Sense strand starting at position 2344 of SEQ ID NO: 585605
ggaaguuaguuucuaugua

SEQ ID NO: 653129 - RNA, 19 nt, Artificial Sequence
  Description of Artificial Sequence: Synthetic oligonucleotide
  Antisense strand to SEQ ID NO: 653128
uacauagaaacuaacuucc

SEQ ID NO: 653130 - RNA, 19 nt, Artificial Sequence
  Description of Artificial Sequence: Synthetic oligonucleotide
  Sense strand starting at position 2354 of SEQ ID NO: 585605
uucuauguagcagaaauau

SEQ ID NO: 653131 - RNA, 19 nt, Artificial Sequence
  Description of Artificial Sequence: Synthetic oligonucleotide
  Antisense strand to SEQ ID NO: 653130
auauuucugcuacauagaa

SEQ ID NO: 653132 - RNA, 19 nt, Artificial Sequence
  Description of Artificial Sequence: Synthetic oligonucleotide
  Sense strand starting at position 2536 of SEQ ID NO: 585605
ugccaugugcauguguaua

SEQ ID NO: 653133 - RNA, 19 nt, Artificial Sequence
  Description of Artificial Sequence: Synthetic oligonucleotide
  Antisense strand to SEQ ID NO: 653132
uauacacaugcacauggca

SEQ ID NO: 653134 - RNA, 19 nt, Artificial Sequence
  Description of Artificial Sequence: Synthetic oligonucleotide
  Sense strand starting at position 2577 of SEQ ID NO: 585605
guaagucuuguccugcguu

SEQ ID NO: 653135 - RNA, 19 nt, Artificial Sequence
  Description of Artificial Sequence: Synthetic oligonucleotide
  Antisense strand to SEQ ID NO: 653134
aacgcaggacaagacuuac

SEQ ID NO: 653136 - RNA, 19 nt, Artificial Sequence
  Description of Artificial Sequence: Synthetic oligonucleotide
  Sense strand starting at position 2579 of SEQ ID NO: 585605
aagucuuguccugcguuau

SEQ ID NO: 653137 - RNA, 19 nt, Artificial Sequence
  Description of Artificial Sequence: Synthetic oligonucleotide
  Antisense strand to SEQ ID NO: 653136
auaacgcaggacaagacuu

SEQ ID NO: 653138 - RNA, 19 nt, Artificial Sequence
  Description of Artificial Sequence: Synthetic oligonucleotide
  Sense strand starting at position 2591 of SEQ ID NO: 585605
gcguuauuucugcagccua

SEQ ID NO: 653139 - RNA, 19 nt, Artificial Sequence
  Description of Artificial Sequence: Synthetic oligonucleotide
  Antisense strand to SEQ ID NO: 653138
uaggcugcagaaauaacgc

SEQ ID NO: 653140 - RNA, 19 nt, Artificial Sequence
  Description of Artificial Sequence: Synthetic oligonucleotide
  Sense strand starting at position 2611 of SEQ ID NO: 585605
gcaaguguuguguaauuua

SEQ ID NO: 653141 - RNA, 19 nt, Artificial Sequence
  Description of Artificial Sequence: Synthetic oligonucleotide
  Antisense strand to SEQ ID NO: 653140
uaaauuacacaacacuugc

SEQ ID NO: 653142 - RNA, 19 nt, Artificial Sequence
  Description of Artificial Sequence: Synthetic oligonucleotide
  Sense strand starting at position 2614 of SEQ ID NO: 585605
aguguuguguaauuuauug

SEQ ID NO: 653143 - RNA, 19 nt, Artificial Sequence
  Description of Artificial Sequence: Synthetic oligonucleotide
  Antisense strand to SEQ ID NO: 653142
caauaaauuacacaacacu

SEQ ID NO: 653144 - RNA, 19 nt, Artificial Sequence
  Description of Artificial Sequence: Synthetic oligonucleotide
  Sense strand starting at position 2629 of SEQ ID NO: 585605
auuggagugcuguauauug

SEQ ID NO: 653145 - RNA, 19 nt, Artificial Sequence
  Description of Artificial Sequence: Synthetic oligonucleotide
  Antisense strand to SEQ ID NO: 653144
caauauacagcacuccaau

SEQ ID NO: 653146 - RNA, 19 nt, Artificial Sequence
  Description of Artificial Sequence: Synthetic oligonucleotide
  Sense strand starting at position 2639 of SEQ ID NO: 585605
uguauauugcaauagaggu

SEQ ID NO: 653147 - RNA, 19 nt, Artificial Sequence
  Description of Artificial Sequence: Synthetic oligonucleotide
  Antisense strand to SEQ ID NO: 653146
accucuauugcaauauaca

SEQ ID NO: 653148 - RNA, 19 nt, Artificial Sequence
  Description of Artificial Sequence: Synthetic oligonucleotide
  Sense strand starting at position 2696 of SEQ ID NO: 585605
ccguuauuugcugaagcca

SEQ ID NO: 653149 - RNA, 19 nt, Artificial Sequence
  Description of Artificial Sequence: Synthetic oligonucleotide
  Antisense strand to SEQ ID NO: 653148
uggcuucagcaaauaacgg

SEQ ID NO: 653150 - RNA, 19 nt, Artificial Sequence
  Description of Artificial Sequence: Synthetic oligonucleotide
  Sense strand starting at position 2793 of SEQ ID NO: 585605
gcgaacucuugauuuguac

SEQ ID NO: 653151 - RNA, 19 nt, Artificial Sequence
  Description of Artificial Sequence: Synthetic oligonucleotide
  Antisense strand to SEQ ID NO: 653150
guacaaaucaagaguucgc

SEQ ID NO: 653152 - RNA, 19 nt, Artificial Sequence
  Description of Artificial Sequence: Synthetic oligonucleotide
  Sense strand starting at position 2843 of SEQ ID NO: 585605
gcuagugauggcuaauuag

SEQ ID NO: 653153 - RNA, 19 nt, Artificial Sequence
  Description of Artificial Sequence: Synthetic oligonucleotide
  Antisense strand to SEQ ID NO: 653152
cuaauuagccaucacuagc

SEQ ID NO: 653154 - RNA, 19 nt, Artificial Sequence
  Description of Artificial Sequence: Synthetic oligonucleotide
  Sense strand starting at position 2846 of SEQ ID NO: 585605
agugauggcuaauuaggua

SEQ ID NO: 653155 - RNA, 19 nt, Artificial Sequence
  Description of Artificial Sequence: Synthetic oligonucleotide
  Antisense strand to SEQ ID NO: 653154
uaccuaauuagccaucacu

SEQ ID NO: 653156 - RNA, 19 nt, Artificial Sequence
  Description of Artificial Sequence: Synthetic oligonucleotide
  Sense strand starting at position 2955 of SEQ ID NO: 585605
gucuaacugaucuggaggu

SEQ ID NO: 653157 - RNA, 19 nt, Artificial Sequence
  Description of Artificial Sequence: Synthetic oligonucleotide
  Antisense strand to SEQ ID NO: 653156
accuccagaucaguuagac

SEQ ID NO: 653158 - RNA, 19 nt, Artificial Sequence
  Description of Artificial Sequence: Synthetic oligonucleotide
  Sense strand starting at position 2959 of SEQ ID NO: 585605
aacugaucuggagguaauu

SEQ ID NO: 653159 - RNA, 19 nt, Artificial Sequence
  Description of Artificial Sequence: Synthetic oligonucleotide
  Antisense strand to SEQ ID NO: 653158
aauuaccuccagaucaguu

SEQ ID NO: 653160 - RNA, 19 nt, Artificial Sequence
  Description of Artificial Sequence: Synthetic oligonucleotide
  Sense strand starting at position 2988 of SEQ ID NO: 585605
ucgauaaccugccuaagga

SEQ ID NO: 653161 - RNA, 19 nt, Artificial Sequence
  Description of Artificial Sequence: Synthetic oligonucleotide
  Antisense strand to SEQ ID NO: 653160
uccuuaggcagguuaucga

SEQ ID NO: 653162 - RNA, 19 nt, Artificial Sequence
  Description of Artificial Sequence: Synthetic oligonucleotide
  Sense strand starting at position 2989 of SEQ ID NO: 585605
cgauaaccugccuaaggau

SEQ ID NO: 653163 - RNA, 19 nt, Artificial Sequence
  Description of Artificial Sequence: Synthetic oligonucleotide
  Antisense strand to SEQ ID NO: 653162
auccuuaggcagguuaucg

SEQ ID NO: 653164 - RNA, 19 nt, Artificial Sequence
  Description of Artificial Sequence: Synthetic oligonucleotide
  Sense strand starting at position 3025 of SEQ ID NO: 585605
caguuuagccaaggugaau

SEQ ID NO: 653165 - RNA, 19 nt, Artificial Sequence
  Description of Artificial Sequence: Synthetic oligonucleotide
  Antisense strand to SEQ ID NO: 653164
auucaccuuggcuaaacug

SEQ ID NO: 653166 - RNA, 19 nt, Artificial Sequence
  Description of Artificial Sequence: Synthetic oligonucleotide
  Sense strand starting at position 3037 of SEQ ID NO: 585605
ggugaauagugauuaaaua

SEQ ID NO: 653167 - RNA, 19 nt, Artificial Sequence
  Description of Artificial Sequence: Synthetic oligonucleotide
  Antisense strand to SEQ ID NO: 653166
uauuuaaucacuauucacc

SEQ ID NO: 653168 - RNA, 19 nt, Artificial Sequence
  Description of Artificial Sequence: Synthetic oligonucleotide
  Sense strand starting at position 3095 of SEQ ID NO: 585605
gcuaauuaauggcuucuaa

SEQ ID NO: 653169 - RNA, 19 nt, Artificial Sequence
  Description of Artificial Sequence: Synthetic oligonucleotide
  Antisense strand to SEQ ID NO: 653168
uuagaagccauuaauuagc

SEQ ID NO: 653170 - RNA, 19 nt, Artificial Sequence
  Description of Artificial Sequence: Synthetic oligonucleotide
  Sense strand starting at position 3107 of SEQ ID NO: 585605
cuucuaauuugagauguaa

SEQ ID NO: 653171 - RNA, 19 nt, Artificial Sequence
  Description of Artificial Sequence: Synthetic oligonucleotide
  Antisense strand to SEQ ID NO: 653170
uuacaucucaaauuagaag

SEQ ID NO: 653172 - RNA, 19 nt, Artificial Sequence
  Description of Artificial Sequence: Synthetic oligonucleotide
  Sense strand starting at position 3202 of SEQ ID NO: 585605
auuaguauguaauuaccga

SEQ ID NO: 653173 - RNA, 19 nt, Artificial Sequence
  Description of Artificial Sequence: Synthetic oligonucleotide
  Antisense strand to SEQ ID NO: 653172
ucgguaauuacauacuaau

SEQ ID NO: 653174 - RNA, 19 nt, Artificial Sequence
  Description of Artificial Sequence: Synthetic oligonucleotide
  Sense strand starting at position 3284 of SEQ ID NO: 585605
aacgaauaugggugaaauu

SEQ ID NO: 653175 - RNA, 19 nt, Artificial Sequence
  Description of Artificial Sequence: Synthetic oligonucleotide
  Antisense strand to SEQ ID NO: 653174
aauuucacccauauucguu

SEQ ID NO: 653176 - RNA, 19 nt, Artificial Sequence
  Description of Artificial Sequence: Synthetic oligonucleotide
  Sense strand starting at position 3569 of SEQ ID NO: 585605
ucuagauuguuuccucaag

SEQ ID NO: 653177 - RNA, 19 nt, Artificial Sequence
  Description of Artificial Sequence: Synthetic oligonucleotide
  Antisense strand to SEQ ID NO: 653176
cuugaggaaacaaucuaga

SEQ ID NO: 653178 - RNA, 19 nt, Artificial Sequence
  Description of Artificial Sequence: Synthetic oligonucleotide
  Sense strand starting at position 3610 of SEQ ID NO: 585605
acauuccuagugggaaaua

SEQ ID NO: 653179 - RNA, 19 nt, Artificial Sequence
  Description of Artificial Sequence: Synthetic oligonucleotide
  Antisense strand to SEQ ID NO: 653178
uauuucccacuaggaaugu

SEQ ID NO: 653180 - RNA, 19 nt, Artificial Sequence
  Description of Artificial Sequence: Synthetic oligonucleotide
  Sense strand starting at position 3621 of SEQ ID NO: 585605
gggaaauacuugcugcaaa

SEQ ID NO: 653181 - RNA, 19 nt, Artificial Sequence
  Description of Artificial Sequence: Synthetic oligonucleotide
  Antisense strand to SEQ ID NO: 653180
uuugcagcaaguauuuccc

SEQ ID NO: 653182 - RNA, 19 nt, Artificial Sequence
  Description of Artificial Sequence: Synthetic oligonucleotide
  Sense strand starting at position 3680 of SEQ ID NO: 585605
ugugaugcccuauacuaaa

SEQ ID NO: 653183 - RNA, 19 nt, Artificial Sequence
  Description of Artificial Sequence: Synthetic oligonucleotide
  Antisense strand to SEQ ID NO: 653182
uuuaguauagggcaucaca

SEQ ID NO: 653184 - RNA, 19 nt, Artificial Sequence
  Description of Artificial Sequence: Synthetic oligonucleotide
  Sense strand starting at position 3802 of SEQ ID NO: 585605
gaagguuaccaugacuugu

SEQ ID NO: 653185 - RNA, 19 nt, Artificial Sequence
  Description of Artificial Sequence: Synthetic oligonucleotide
  Antisense strand to SEQ ID NO: 653184
acaagucaugguaaccuuc

SEQ ID NO: 653186 - RNA, 19 nt, Artificial Sequence
  Description of Artificial Sequence: Synthetic oligonucleotide
  Sense strand starting at position 3825 of SEQ ID NO: 585605
uugcaaccugguuaucaga

SEQ ID NO: 653187 - RNA, 19 nt, Artificial Sequence
  Description of Artificial Sequence: Synthetic oligonucleotide
  Antisense strand to SEQ ID NO: 653186
ucugauaaccagguugcaa

SEQ ID NO: 653188 - RNA, 19 nt, Artificial Sequence
  Description of Artificial Sequence: Synthetic oligonucleotide
  Sense strand starting at position 3827 of SEQ ID NO: 585605
gcaaccugguuaucagaau

SEQ ID NO: 653189 - RNA, 19 nt, Artificial Sequence
  Description of Artificial Sequence: Synthetic oligonucleotide
  Antisense strand to SEQ ID NO: 653188
auucugauaaccagguugc

SEQ ID NO: 653190 - RNA, 19 nt, Artificial Sequence
  Description of Artificial Sequence: Synthetic oligonucleotide
  Sense strand starting at position 3935 of SEQ ID NO: 585605
agccuauuucuaggugguu

SEQ ID NO: 653191 - RNA, 19 nt, Artificial Sequence
  Description of Artificial Sequence: Synthetic oligonucleotide
  Antisense strand to SEQ ID NO: 653190
aaccaccuagaaauaggcu

SEQ ID NO: 653192 - RNA, 19 nt, Artificial Sequence
  Description of Artificial Sequence: Synthetic oligonucleotide
  Sense strand starting at position 3936 of SEQ ID NO: 585605
gccuauuucuaggugguua

SEQ ID NO: 653193 - RNA, 19 nt, Artificial Sequence
  Description of Artificial Sequence: Synthetic oligonucleotide
  Antisense strand to SEQ ID NO: 653192
uaaccaccuagaaauaggc

SEQ ID NO: 653194 - RNA, 19 nt, Artificial Sequence
  Description of Artificial Sequence: Synthetic oligonucleotide
  Sense strand starting at position 75 of SEQ ID NO: 585606
ggaguuaguguuuaguggu

SEQ ID NO: 653195 - RNA, 19 nt, Artificial Sequence
  Description of Artificial Sequence: Synthetic oligonucleotide
  Antisense strand to SEQ ID NO: 653194
accacuaaacacuaacucc

SEQ ID NO: 653196 - RNA, 19 nt, Artificial Sequence
  Description of Artificial Sequence: Synthetic oligonucleotide
  Sense strand starting at position 83 of SEQ ID NO: 585606
uguuuagugguguagaggu

SEQ ID NO: 653197 - RNA, 19 nt, Artificial Sequence
  Description of Artificial Sequence: Synthetic oligonucleotide
  Antisense strand to SEQ ID NO: 653196
accucuacaccacuaaaca

SEQ ID NO: 653198 - RNA, 19 nt, Artificial Sequence
  Description of Artificial Sequence: Synthetic oligonucleotide
  Sense strand starting at position 94 of SEQ ID NO: 585606
guagagguuugguuuggga

SEQ ID NO: 653199 - RNA, 19 nt, Artificial Sequence
  Description of Artificial Sequence: Synthetic oligonucleotide
  Antisense strand to SEQ ID NO: 653198
ucccaaaccaaaccucuac

SEQ ID NO: 653200 - RNA, 19 nt, Artificial Sequence
  Description of Artificial Sequence: Synthetic oligonucleotide
  Sense strand starting at position 96 of SEQ ID NO: 585606
agagguuugguuugggaag

SEQ ID NO: 653201 - RNA, 19 nt, Artificial Sequence
  Description of Artificial Sequence: Synthetic oligonucleotide
  Antisense strand to SEQ ID NO: 653200
cuucccaaaccaaaccucu

SEQ ID NO: 653202 - RNA, 19 nt, Artificial Sequence
  Description of Artificial Sequence: Synthetic oligonucleotide
  Sense strand starting at position 116 of SEQ ID NO: 585606
ggaacaaguucuguugaug

SEQ ID NO: 653203 - RNA, 19 nt, Artificial Sequence
  Description of Artificial Sequence: Synthetic oligonucleotide
  Antisense strand to SEQ ID NO: 653202
caucaacagaacuuguucc

SEQ ID NO: 653204 - RNA, 19 nt, Artificial Sequence
  Description of Artificial Sequence: Synthetic oligonucleotide
  Sense strand starting at position 148 of SEQ ID NO: 585606
gugacaaugcugugaaagu

SEQ ID NO: 653205 - RNA, 19 nt, Artificial Sequence
  Description of Artificial Sequence: Synthetic oligonucleotide
  Antisense strand to SEQ ID NO: 653204
acuuucacagcauugucac

SEQ ID NO: 653206 - RNA, 19 nt, Artificial Sequence
  Description of Artificial Sequence: Synthetic oligonucleotide
  Sense strand starting at position 158 of SEQ ID NO: 585606
ugugaaaguccauacuuaa

SEQ ID NO: 653207 - RNA, 19 nt, Artificial Sequence
  Description of Artificial Sequence: Synthetic oligonucleotide
  Antisense strand to SEQ ID NO: 653206
uuaaguauggacuuucaca

SEQ ID NO: 653208 - RNA, 19 nt, Artificial Sequence
  Description of Artificial Sequence: Synthetic oligonucleotide
  Sense strand starting at position 282 of SEQ ID NO: 585606
ccaggaguacggugacaaa

SEQ ID NO: 653209 - RNA, 19 nt, Artificial Sequence
  Description of Artificial Sequence: Synthetic oligonucleotide
  Antisense strand to SEQ ID NO: 653208
uuugucaccguacuccugg

SEQ ID NO: 653210 - RNA, 19 nt, Artificial Sequence
  Description of Artificial Sequence: Synthetic oligonucleotide
  Sense strand starting at position 448 of SEQ ID NO: 585606
acaucacaauaggagaauu

SEQ ID NO: 653211 - RNA, 19 nt, Artificial Sequence
  Description of Artificial Sequence: Synthetic oligonucleotide
  Antisense strand to SEQ ID NO: 653210
aauucuccuauugugaugu

SEQ ID NO: 653212 - RNA, 19 nt, Artificial Sequence
  Description of Artificial Sequence: Synthetic oligonucleotide
  Sense strand starting at position 458 of SEQ ID NO: 585606
aggagaauuucugacccug

SEQ ID NO: 653213 - RNA, 19 nt, Artificial Sequence
  Description of Artificial Sequence: Synthetic oligonucleotide
  Antisense strand to SEQ ID NO: 653212
cagggucagaaauucuccu

SEQ ID NO: 653214 - RNA, 19 nt, Artificial Sequence
  Description of Artificial Sequence: Synthetic oligonucleotide
  Sense strand starting at position 473 of SEQ ID NO: 585606
ccugaaacuugagauaaua

SEQ ID NO: 653215 - RNA, 19 nt, Artificial Sequence
  Description of Artificial Sequence: Synthetic oligonucleotide
  Antisense strand to SEQ ID NO: 653214
uauuaucucaaguuucagg

SEQ ID NO: 653216 - RNA, 19 nt, Artificial Sequence
  Description of Artificial Sequence: Synthetic oligonucleotide
  Sense strand starting at position 745 of SEQ ID NO: 585606
guggcaaagcugugagaug

SEQ ID NO: 653217 - RNA, 19 nt, Artificial Sequence
  Description of Artificial Sequence: Synthetic oligonucleotide
  Antisense strand to SEQ ID NO: 653216
caucucacagcuuugccac

SEQ ID NO: 653218 - RNA, 19 nt, Artificial Sequence
  Description of Artificial Sequence: Synthetic oligonucleotide
  Sense strand starting at position 763 of SEQ ID NO: 585606
ggaucucuuuccuccauag

SEQ ID NO: 653219 - RNA, 19 nt, Artificial Sequence
  Description of Artificial Sequence: Synthetic oligonucleotide
  Antisense strand to SEQ ID NO: 653218
cuauggaggaaagagaucc

SEQ ID NO: 653220 - RNA, 19 nt, Artificial Sequence
  Description of Artificial Sequence: Synthetic oligonucleotide
  Sense strand starting at position 784 of SEQ ID NO: 585606
gggagaacucagugaguuc

SEQ ID NO: 653221 - RNA, 19 nt, Artificial Sequence
  Description of Artificial Sequence: Synthetic oligonucleotide
  Antisense strand to SEQ ID NO: 653220
gaacucacugaguucuccc

SEQ ID NO: 653222 - RNA, 19 nt, Artificial Sequence
  Description of Artificial Sequence: Synthetic oligonucleotide
  Sense strand starting at position 791 of SEQ ID NO: 585606
cucagugaguuccugacaa

SEQ ID NO: 653223 - RNA, 19 nt, Artificial Sequence
  Description of Artificial Sequence: Synthetic oligonucleotide
  Antisense strand to SEQ ID NO: 653222
uugucaggaacucacugag

SEQ ID NO: 653224 - RNA, 19 nt, Artificial Sequence
  Description of Artificial Sequence: Synthetic oligonucleotide
  Sense strand starting at position 793 of SEQ ID NO: 585606
cagugaguuccugacaacu

SEQ ID NO: 653225 - RNA, 19 nt, Artificial Sequence
  Description of Artificial Sequence: Synthetic oligonucleotide
  Antisense strand to SEQ ID NO: 653224
aguugucaggaacucacug

SEQ ID NO: 653226 - RNA, 19 nt, Artificial Sequence
  Description of Artificial Sequence: Synthetic oligonucleotide
  Sense strand starting at position 1103 of SEQ ID NO: 585606
gcaagacuccagugagaag

SEQ ID NO: 653227 - RNA, 19 nt, Artificial Sequence
  Description of Artificial Sequence: Synthetic oligonucleotide
  Antisense strand to SEQ ID NO: 653226
cuucucacuggagucuugc

SEQ ID NO: 653228 - RNA, 19 nt, Artificial Sequence
  Description of Artificial Sequence: Synthetic oligonucleotide
  Sense strand starting at position 2131 of SEQ ID NO: 585606
ggcaguguuguggaugaga

SEQ ID NO: 653229 - RNA, 19 nt, Artificial Sequence
  Description of Artificial Sequence: Synthetic oligonucleotide
  Antisense strand to SEQ ID NO: 653228
ucucauccacaacacugcc

SEQ ID NO: 653230 - RNA, 19 nt, Artificial Sequence
  Description of Artificial Sequence: Synthetic oligonucleotide
  Sense strand starting at position 2133 of SEQ ID NO: 585606
caguguuguggaugagagu

SEQ ID NO: 653231 - RNA, 19 nt, Artificial Sequence
  Description of Artificial Sequence: Synthetic oligonucleotide
  Antisense strand to SEQ ID NO: 653230
acucucauccacaacacug

SEQ ID NO: 653232 - RNA, 19 nt, Artificial Sequence
  Description of Artificial Sequence: Synthetic oligonucleotide
  Sense strand starting at position 2182 of SEQ ID NO: 585606
aggugauuucucugcucac

SEQ ID NO: 653233 - RNA, 19 nt, Artificial Sequence
  Description of Artificial Sequence: Synthetic oligonucleotide
  Antisense strand to SEQ ID NO: 653232
gugagcagagaaaucaccu

SEQ ID NO: 653234 - RNA, 19 nt, Artificial Sequence
  Description of Artificial Sequence: Synthetic oligonucleotide
  Sense strand starting at position 2254 of SEQ ID NO: 585606
gaugguugugagcauuaaa

SEQ ID NO: 653235 - RNA, 19 nt, Artificial Sequence
  Description of Artificial Sequence: Synthetic oligonucleotide
  Antisense strand to SEQ ID NO: 653234
uuuaaugcucacaaccauc

SEQ ID NO: 653236 - RNA, 19 nt, Artificial Sequence
  Description of Artificial Sequence: Synthetic oligonucleotide
  Sense strand starting at position 2264 of SEQ ID NO: 585606
agcauuaaaugaguuagua

SEQ ID NO: 653237 - RNA, 19 nt, Artificial Sequence
  Description of Artificial Sequence: Synthetic oligonucleotide
  Antisense strand to SEQ ID NO: 653236
uacuaacucauuuaaugcu

SEQ ID NO: 653238 - RNA, 19 nt, Artificial Sequence
  Description of Artificial Sequence: Synthetic oligonucleotide
  Sense strand starting at position 2295 of SEQ ID NO: 585606
cugugaucaucccuggaac

SEQ ID NO: 653239 - RNA, 19 nt, Artificial Sequence
  Description of Artificial Sequence: Synthetic oligonucleotide
  Antisense strand to SEQ ID NO: 653238
guuccagggaugaucacag

SEQ ID NO: 653240 - RNA, 19 nt, Artificial Sequence
  Description of Artificial Sequence: Synthetic oligonucleotide
  Sense strand starting at position 2296 of SEQ ID NO: 585606
ugugaucaucccuggaaca

SEQ ID NO: 653241 - RNA, 19 nt, Artificial Sequence
  Description of Artificial Sequence: Synthetic oligonucleotide
  Antisense strand to SEQ ID NO: 653240
uguuccagggaugaucaca

SEQ ID NO: 653242 - RNA, 19 nt, Artificial Sequence
  Description of Artificial Sequence: Synthetic oligonucleotide
  Sense strand starting at position 2297 of SEQ ID NO: 585606
gugaucaucccuggaacau

SEQ ID NO: 653243 - RNA, 19 nt, Artificial Sequence
  Description of Artificial Sequence: Synthetic oligonucleotide
  Antisense strand to SEQ ID NO: 653242
auguuccagggaugaucac

SEQ ID NO: 653244 - RNA, 19 nt, Artificial Sequence
  Description of Artificial Sequence: Synthetic oligonucleotide
  Sense strand starting at position 2313 of SEQ ID NO: 585606
cauaguaagugcucauuga

SEQ ID NO: 653245 - RNA, 19 nt, Artificial Sequence
  Description of Artificial Sequence: Synthetic oligonucleotide
  Antisense strand to SEQ ID NO: 653244
ucaaugagcacuuacuaug

SEQ ID NO: 653246 - RNA, 19 nt, Artificial Sequence
  Description of Artificial Sequence: Synthetic oligonucleotide
  Sense strand starting at position 2314 of SEQ ID NO: 585606
auaguaagugcucauugag

SEQ ID NO: 653247 - RNA, 19 nt, Artificial Sequence
  Description of Artificial Sequence: Synthetic oligonucleotide
  Antisense strand to SEQ ID NO: 653246
cucaaugagcacuuacuau

SEQ ID NO: 653248 - RNA, 19 nt, Artificial Sequence
  Description of Artificial Sequence: Synthetic oligonucleotide
  Sense strand starting at position 2317 of SEQ ID NO: 585606
guaagugcucauugaguua

SEQ ID NO: 653249 - RNA, 19 nt, Artificial Sequence
  Description of Artificial Sequence: Synthetic oligonucleotide
  Antisense strand to SEQ ID NO: 653248
uaacucaaugagcacuuac

SEQ ID NO: 653250 - RNA, 19 nt, Artificial Sequence
  Description of Artificial Sequence: Synthetic oligonucleotide
  Sense strand starting at position 2324 of SEQ ID NO: 585606
cucauugaguuagccagua

SEQ ID NO: 653251 - RNA, 19 nt, Artificial Sequence
  Description of Artificial Sequence: Synthetic oligonucleotide
  Antisense strand to SEQ ID NO: 653250
uacuggcuaacucaaugag

SEQ ID NO: 653252 - RNA, 19 nt, Artificial Sequence
  Description of Artificial Sequence: Synthetic oligonucleotide
  Sense strand starting at position 2391 of SEQ ID NO: 585606
uugucaugacauugguaag

SEQ ID NO: 653253 - RNA, 19 nt, Artificial Sequence
  Description of Artificial Sequence: Synthetic oligonucleotide
  Antisense strand to SEQ ID NO: 653252
cuuaccaaugucaugacaa

SEQ ID NO: 653254 - RNA, 19 nt, Artificial Sequence
  Description of Artificial Sequence: Synthetic oligonucleotide
  Sense strand starting at position 2392 of SEQ ID NO: 585606
ugucaugacauugguaaga

SEQ ID NO: 653255 - RNA, 19 nt, Artificial Sequence
  Description of Artificial Sequence: Synthetic oligonucleotide
  Antisense strand to SEQ ID NO: 653254
ucuuaccaaugucaugaca

SEQ ID NO: 653256 - RNA, 19 nt, Artificial Sequence
  Description of Artificial Sequence: Synthetic oligonucleotide
  Sense strand starting at position 2394 of SEQ ID NO: 585606
ucaugacauugguaagaga

SEQ ID NO: 653257 - RNA, 19 nt, Artificial Sequence
  Description of Artificial Sequence: Synthetic oligonucleotide
  Antisense strand to SEQ ID NO: 653256
ucucuuaccaaugucauga

SEQ ID NO: 653258 - RNA, 19 nt, Artificial Sequence
  Description of Artificial Sequence: Synthetic oligonucleotide
  Sense strand starting at position 3020 of SEQ ID NO: 585606
gugcaccuggccuaauuau

SEQ ID NO: 653259 - RNA, 19 nt, Artificial Sequence
  Description of Artificial Sequence: Synthetic oligonucleotide
  Antisense strand to SEQ ID NO: 653258
auaauuaggccaggugcac

SEQ ID NO: 653260 - RNA, 19 nt, Artificial Sequence
  Description of Artificial Sequence: Synthetic oligonucleotide
  Sense strand starting at position 3065 of SEQ ID NO: 585606
guauguauagcuuacauuc

SEQ ID NO: 653261 - RNA, 19 nt, Artificial Sequence
  Description of Artificial Sequence: Synthetic oligonucleotide
  Antisense strand to SEQ ID NO: 653260
gaauguaagcuauacauac

SEQ ID NO: 653262 - RNA, 19 nt, Artificial Sequence
  Description of Artificial Sequence: Synthetic oligonucleotide
  Sense strand starting at position 3144 of SEQ ID NO: 585606
ccagaaauaugucacagga

SEQ ID NO: 653263 - RNA, 19 nt, Artificial Sequence
  Description of Artificial Sequence: Synthetic oligonucleotide
  Antisense strand to SEQ ID NO: 653262
uccugugacauauuucugg

SEQ ID NO: 653264 - RNA, 19 nt, Artificial Sequence
  Description of Artificial Sequence: Synthetic oligonucleotide
  Sense strand starting at position 3221 of SEQ ID NO: 585606
ugcaguuuccaagagucua

SEQ ID NO: 653265 - RNA, 19 nt, Artificial Sequence
  Description of Artificial Sequence: Synthetic oligonucleotide
  Antisense strand to SEQ ID NO: 653264
uagacucuuggaaacugca

SEQ ID NO: 653266 - RNA, 19 nt, Artificial Sequence
  Description of Artificial Sequence: Synthetic oligonucleotide
  Sense strand starting at position 3232 of SEQ ID NO: 585606
agagucuaucagcaacuua

SEQ ID NO: 653267 - RNA, 19 nt, Artificial Sequence
  Description of Artificial Sequence: Synthetic oligonucleotide
  Antisense strand to SEQ ID NO: 653266
uaaguugcugauagacucu

SEQ ID NO: 653268 - RNA, 19 nt, Artificial Sequence
  Description of Artificial Sequence: Synthetic oligonucleotide
  Sense strand starting at position 3400 of SEQ ID NO: 585606
gagagcuccuagguagaaa

SEQ ID NO: 653269 - RNA, 19 nt, Artificial Sequence
  Description of Artificial Sequence: Synthetic oligonucleotide
  Antisense strand to SEQ ID NO: 653268
uuucuaccuaggagcucuc

SEQ ID NO: 653270 - RNA, 19 nt, Artificial Sequence
  Description of Artificial Sequence: Synthetic oligonucleotide
  Sense strand starting at position 3455 of SEQ ID NO: 585606
gguugaguguugccaggau

SEQ ID NO: 653271 - RNA, 19 nt, Artificial Sequence
  Description of Artificial Sequence: Synthetic oligonucleotide
  Antisense strand to SEQ ID NO: 653270
auccuggcaacacucaacc

SEQ ID NO: 653272 - RNA, 19 nt, Artificial Sequence
  Description of Artificial Sequence: Synthetic oligonucleotide
  Sense strand starting at position 3695 of SEQ ID NO: 585606
caggauagcucuccaaggu

SEQ ID NO: 653273 - RNA, 19 nt, Artificial Sequence
  Description of Artificial Sequence: Synthetic oligonucleotide
  Antisense strand to SEQ ID NO: 653272
accuuggagagcuauccug

SEQ ID NO: 653274 - RNA, 19 nt, Artificial Sequence
  Description of Artificial Sequence: Synthetic oligonucleotide
  Sense strand starting at position 247 of SEQ ID NO: 585607
ccuagaucuuucuuacgug

SEQ ID NO: 653275 - RNA, 19 nt, Artificial Sequence
  Description of Artificial Sequence: Synthetic oligonucleotide
  Antisense strand to SEQ ID NO: 653274
cacguaagaaagaucuagg

SEQ ID NO: 653276 - RNA, 19 nt, Artificial Sequence
  Description of Artificial Sequence: Synthetic oligonucleotide
  Sense strand starting at position 371 of SEQ ID NO: 585607
ucacauuaggcugagguua

SEQ ID NO: 653277 - RNA, 19 nt, Artificial Sequence
  Description of Artificial Sequence: Synthetic oligonucleotide
  Antisense strand to SEQ ID NO: 653276
uaaccucagccuaauguga

SEQ ID NO: 653278 - RNA, 19 nt, Artificial Sequence
  Description of Artificial Sequence: Synthetic oligonucleotide
  Sense strand starting at position 383 of SEQ ID NO: 585607
gagguuagaacuuagguuu

SEQ ID NO: 653279 - RNA, 19 nt, Artificial Sequence
  Description of Artificial Sequence: Synthetic oligonucleotide
  Antisense strand to SEQ ID NO: 653278
aaaccuaaguucuaaccuc

SEQ ID NO: 653280 - RNA, 19 nt, Artificial Sequence
  Description of Artificial Sequence: Synthetic oligonucleotide
  Sense strand starting at position 556 of SEQ ID NO: 585607
gggugaauuucucacuuua

SEQ ID NO: 653281 - RNA, 19 nt, Artificial Sequence
  Description of Artificial Sequence: Synthetic oligonucleotide
  Antisense strand to SEQ ID NO: 653280
uaaagugagaaauucaccc

SEQ ID NO: 653282 - RNA, 19 nt, Artificial Sequence
  Description of Artificial Sequence: Synthetic oligonucleotide
  Sense strand starting at position 623 of SEQ ID NO: 585607
auagcucuuccugacagaa

SEQ ID NO: 653283 - RNA, 19 nt, Artificial Sequence
  Description of Artificial Sequence: Synthetic oligonucleotide
  Antisense strand to SEQ ID NO: 653282
uucugucaggaagagcuau

SEQ ID NO: 653284 - RNA, 19 nt, Artificial Sequence
  Description of Artificial Sequence: Synthetic oligonucleotide
  Sense strand starting at position 650 of SEQ ID NO: 585607
cccuaaaucuggcuucugu

SEQ ID NO: 653285 - RNA, 19 nt, Artificial Sequence
  Description of Artificial Sequence: Synthetic oligonucleotide
  Antisense strand to SEQ ID NO: 653284
acagaagccagauuuaggg

SEQ ID NO: 653286 - RNA, 19 nt, Artificial Sequence
  Description of Artificial Sequence: Synthetic oligonucleotide
  Sense strand starting at position 684 of SEQ ID NO: 585607
acauguaauguuuacuaca

SEQ ID NO: 653287 - RNA, 19 nt, Artificial Sequence
  Description of Artificial Sequence: Synthetic oligonucleotide
  Antisense strand to SEQ ID NO: 653286
uguaguaaacauuacaugu

SEQ ID NO: 653288 - RNA, 19 nt, Artificial Sequence
  Description of Artificial Sequence: Synthetic oligonucleotide
  Sense strand starting at position 686 of SEQ ID NO: 585607
auguaauguuuacuacauc

SEQ ID NO: 653289 - RNA, 19 nt, Artificial Sequence
  Description of Artificial Sequence: Synthetic oligonucleotide
  Antisense strand to SEQ ID NO: 653288
gauguaguaaacauuacau

SEQ ID NO: 653290 - RNA, 19 nt, Artificial Sequence
  Description of Artificial Sequence: Synthetic oligonucleotide
  Sense strand starting at position 807 of SEQ ID NO: 585607
ucaguaugauaucugugag

SEQ ID NO: 653291 - RNA, 19 nt, Artificial Sequence
  Description of Artificial Sequence: Synthetic oligonucleotide
  Antisense strand to SEQ ID NO: 653290
cucacagauaucauacuga

SEQ ID NO: 653292 - RNA, 19 nt, Artificial Sequence
  Description of Artificial Sequence: Synthetic oligonucleotide
  Sense strand starting at position 810 of SEQ ID NO: 585607
guaugauaucugugagauu

SEQ ID NO: 653293 - RNA, 19 nt, Artificial Sequence
  Description of Artificial Sequence: Synthetic oligonucleotide
  Antisense strand to SEQ ID NO: 653292
aaucucacagauaucauac

SEQ ID NO: 653294 - RNA, 19 nt, Artificial Sequence
  Description of Artificial Sequence: Synthetic oligonucleotide
  Sense strand starting at position 903 of SEQ ID NO: 585607
caggacuugccucgaauca

SEQ ID NO: 653295 - RNA, 19 nt, Artificial Sequence
  Description of Artificial Sequence: Synthetic oligonucleotide
  Antisense strand to SEQ ID NO: 653294
ugauucgaggcaaguccug

SEQ ID NO: 653296 - RNA, 19 nt, Artificial Sequence
  Description of Artificial Sequence: Synthetic oligonucleotide
  Sense strand starting at position 904 of SEQ ID NO: 585607
aggacuugccucgaaucau

SEQ ID NO: 653297 - RNA, 19 nt, Artificial Sequence
  Description of Artificial Sequence: Synthetic oligonucleotide
  Antisense strand to SEQ ID NO: 653296
augauucgaggcaaguccu

SEQ ID NO: 653298 - RNA, 19 nt, Artificial Sequence
  Description of Artificial Sequence: Synthetic oligonucleotide
  Sense strand starting at position 1074 of SEQ ID NO: 585607
uuggcaggcaugugaaaga

SEQ ID NO: 653299 - RNA, 19 nt, Artificial Sequence
  Description of Artificial Sequence: Synthetic oligonucleotide
  Antisense strand to SEQ ID NO: 653298
ucuuucacaugccugccaa

SEQ ID NO: 653300 - RNA, 19 nt, Artificial Sequence
  Description of Artificial Sequence: Synthetic oligonucleotide
  Sense strand starting at position 1164 of SEQ ID NO: 585607
gggaaagcucauuggagug

SEQ ID NO: 653301 - RNA, 19 nt, Artificial Sequence
  Description of Artificial Sequence: Synthetic oligonucleotide
  Antisense strand to SEQ ID NO: 653300
cacuccaaugagcuuuccc

SEQ ID NO: 653302 - RNA, 19 nt, Artificial Sequence
  Description of Artificial Sequence: Synthetic oligonucleotide
  Sense strand starting at position 1249 of SEQ ID NO: 585607
uuuccuuaucuguauuaug

SEQ ID NO: 653303 - RNA, 19 nt, Artificial Sequence
  Description of Artificial Sequence: Synthetic oligonucleotide
  Antisense strand to SEQ ID NO: 653302
cauaauacagauaaggaaa

SEQ ID NO: 653304 - RNA, 19 nt, Artificial Sequence
  Description of Artificial Sequence: Synthetic oligonucleotide
  Sense strand starting at position 1369 of SEQ ID NO: 585607
cucugucacugaccagaaa

SEQ ID NO: 653305 - RNA, 19 nt, Artificial Sequence
  Description of Artificial Sequence: Synthetic oligonucleotide
  Antisense strand to SEQ ID NO: 653304
uuucuggucagugacagag

SEQ ID NO: 653306 - RNA, 19 nt, Artificial Sequence
  Description of Artificial Sequence: Synthetic oligonucleotide
  Sense strand starting at position 2011 of SEQ ID NO: 585607
cuguguguugaagauagau

SEQ ID NO: 653307 - RNA, 19 nt, Artificial Sequence
  Description of Artificial Sequence: Synthetic oligonucleotide
  Antisense strand to SEQ ID NO: 653306
aucuaucuucaacacacag

SEQ ID NO: 653308 - RNA, 19 nt, Artificial Sequence
  Description of Artificial Sequence: Synthetic oligonucleotide
  Sense strand starting at position 2013 of SEQ ID NO: 585607
guguguugaagauagauaa

SEQ ID NO: 653309 - RNA, 19 nt, Artificial Sequence
  Description of Artificial Sequence: Synthetic oligonucleotide
  Antisense strand to SEQ ID NO: 653308
uuaucuaucuucaacacac

SEQ ID NO: 653310 - RNA, 19 nt, Artificial Sequence
  Description of Artificial Sequence: Synthetic oligonucleotide
  Sense strand starting at position 2196 of SEQ ID NO: 585607
ucaagugaaucagugacaa

SEQ ID NO: 653311 - RNA, 19 nt, Artificial Sequence
  Description of Artificial Sequence: Synthetic oligonucleotide
  Antisense strand to SEQ ID NO: 653310
uugucacugauucacuuga

SEQ ID NO: 653312 - RNA, 19 nt, Artificial Sequence
  Description of Artificial Sequence: Synthetic oligonucleotide
  Sense strand starting at position 2468 of SEQ ID NO: 585607
cagguauccucucugaaug

SEQ ID NO: 653313 - RNA, 19 nt, Artificial Sequence
  Description of Artificial Sequence: Synthetic oligonucleotide
  Antisense strand to SEQ ID NO: 653312
cauucagagaggauaccug

SEQ ID NO: 653314 - RNA, 19 nt, Artificial Sequence
  Description of Artificial Sequence: Synthetic oligonucleotide
  Sense strand starting at position 2482 of SEQ ID NO: 585607
gaaugcaugugcuugacau

SEQ ID NO: 653315 - RNA, 19 nt, Artificial Sequence
  Description of Artificial Sequence: Synthetic oligonucleotide
  Antisense strand to SEQ ID NO: 653314
augucaagcacaugcauuc

SEQ ID NO: 653316 - RNA, 19 nt, Artificial Sequence
  Description of Artificial Sequence: Synthetic oligonucleotide
  Sense strand starting at position 2483 of SEQ ID NO: 585607
aaugcaugugcuugacaug

SEQ ID NO: 653317 - RNA, 19 nt, Artificial Sequence
  Description of Artificial Sequence: Synthetic oligonucleotide
  Antisense strand to SEQ ID NO: 653316
caugucaagcacaugcauu

SEQ ID NO: 653318 - RNA, 19 nt, Artificial Sequence
  Description of Artificial Sequence: Synthetic oligonucleotide
  Sense strand starting at position 2532 of SEQ ID NO: 585607
gugcucuaacuauguagaa

SEQ ID NO: 653319 - RNA, 19 nt, Artificial Sequence
  Description of Artificial Sequence: Synthetic oligonucleotide
  Antisense strand to SEQ ID NO: 653318
uucuacauaguuagagcac

SEQ ID NO: 653320 - RNA, 19 nt, Artificial Sequence
  Description of Artificial Sequence: Synthetic oligonucleotide
  Sense strand starting at position 2533 of SEQ ID NO: 585607
ugcucuaacuauguagaaa

SEQ ID NO: 653321 - RNA, 19 nt, Artificial Sequence
  Description of Artificial Sequence: Synthetic oligonucleotide
  Antisense strand to SEQ ID NO: 653320
uuucuacauaguuagagca

SEQ ID NO: 653322 - RNA, 19 nt, Artificial Sequence
  Description of Artificial Sequence: Synthetic oligonucleotide
  Sense strand starting at position 2548 of SEQ ID NO: 585607
gaaauauaaugugucuguu

SEQ ID NO: 653323 - RNA, 19 nt, Artificial Sequence
  Description of Artificial Sequence: Synthetic oligonucleotide
  Antisense strand to SEQ ID NO: 653322
aacagacacauuauauuuc

SEQ ID NO: 653324 - RNA, 19 nt, Artificial Sequence
  Description of Artificial Sequence: Synthetic oligonucleotide
  Sense strand starting at position 2556 of SEQ ID NO: 585607
augugucuguuucuuaaau

SEQ ID NO: 653325 - RNA, 19 nt, Artificial Sequence
  Description of Artificial Sequence: Synthetic oligonucleotide
  Antisense strand to SEQ ID NO: 653324
auuuaagaaacagacacau

SEQ ID NO: 653326 - RNA, 19 nt, Artificial Sequence
  Description of Artificial Sequence: Synthetic oligonucleotide
  Sense strand starting at position 2598 of SEQ ID NO: 585607
gguugaaugagcugaugca

SEQ ID NO: 653327 - RNA, 19 nt, Artificial Sequence
  Description of Artificial Sequence: Synthetic oligonucleotide
  Antisense strand to SEQ ID NO: 653326
ugcaucagcucauucaacc

SEQ ID NO: 653328 - RNA, 19 nt, Artificial Sequence
  Description of Artificial Sequence: Synthetic oligonucleotide
  Sense strand starting at position 2646 of SEQ ID NO: 585607
gggaaauagccuuagcagu

SEQ ID NO: 653329 - RNA, 19 nt, Artificial Sequence
  Description of Artificial Sequence: Synthetic oligonucleotide
  Antisense strand to SEQ ID NO: 653328
acugcuaaggcuauuuccc

SEQ ID NO: 653330 - RNA, 19 nt, Artificial Sequence
  Description of Artificial Sequence: Synthetic oligonucleotide
  Sense strand starting at position 2648 of SEQ ID NO: 585607
gaaauagccuuagcaguca

SEQ ID NO: 653331 - RNA, 19 nt, Artificial Sequence
  Description of Artificial Sequence: Synthetic oligonucleotide
  Antisense strand to SEQ ID NO: 653330
ugacugcuaaggcuauuuc

SEQ ID NO: 653332 - RNA, 19 nt, Artificial Sequence
  Description of Artificial Sequence: Synthetic oligonucleotide
  Sense strand starting at position 2816 of SEQ ID NO: 585607
uuuggaagaugacaagaaa

SEQ ID NO: 653333 - RNA, 19 nt, Artificial Sequence
  Description of Artificial Sequence: Synthetic oligonucleotide
  Antisense strand to SEQ ID NO: 653332
uuucuugucaucuuccaaa

SEQ ID NO: 653334 - RNA, 19 nt, Artificial Sequence
  Description of Artificial Sequence: Synthetic oligonucleotide
  Sense strand starting at position 2843 of SEQ ID NO: 585607
cugccugagucuccaagua

SEQ ID NO: 653335 - RNA, 19 nt, Artificial Sequence
  Description of Artificial Sequence: Synthetic oligonucleotide
  Antisense strand to SEQ ID NO: 653334
uacuuggagacucaggcag

SEQ ID NO: 653336 - RNA, 19 nt, Artificial Sequence
  Description of Artificial Sequence: Synthetic oligonucleotide
  Sense strand starting at position 2924 of SEQ ID NO: 585607
uuaauaaagucagcaaagu

SEQ ID NO: 653337 - RNA, 19 nt, Artificial Sequence
  Description of Artificial Sequence: Synthetic oligonucleotide
  Antisense strand to SEQ ID NO: 653336
acuuugcugacuuuauuaa

SEQ ID NO: 653338 - RNA, 19 nt, Artificial Sequence
  Description of Artificial Sequence: Synthetic oligonucleotide
  Sense strand starting at position 3393 of SEQ ID NO: 585607
ggcccuuagcaauaaacuu

SEQ ID NO: 653339 - RNA, 19 nt, Artificial Sequence
  Description of Artificial Sequence: Synthetic oligonucleotide
  Antisense strand to SEQ ID NO: 653338
aaguuuauugcuaagggcc

SEQ ID NO: 653340 - RNA, 19 nt, Artificial Sequence
  Description of Artificial Sequence: Synthetic oligonucleotide
  Sense strand starting at position 3697 of SEQ ID NO: 585607
gucuuacaguuucugauuu

SEQ ID NO: 653341 - RNA, 19 nt, Artificial Sequence
  Description of Artificial Sequence: Synthetic oligonucleotide
  Antisense strand to SEQ ID NO: 653340
aaaucagaaacuguaagac

SEQ ID NO: 653342 - RNA, 19 nt, Artificial Sequence
  Description of Artificial Sequence: Synthetic oligonucleotide
  Sense strand starting at position 3753 of SEQ ID NO: 585607
gugguauuaguauaaagac

SEQ ID NO: 653343 - RNA, 19 nt, Artificial Sequence
  Description of Artificial Sequence: Synthetic oligonucleotide
  Antisense strand to SEQ ID NO: 653342
gucuuuauacuaauaccac

SEQ ID NO: 653344 - RNA, 19 nt, Artificial Sequence
  Description of Artificial Sequence: Synthetic oligonucleotide
  Sense strand starting at position 3902 of SEQ ID NO: 585607
cuggaauguccacaugcga

SEQ ID NO: 653345 - RNA, 19 nt, Artificial Sequence
  Description of Artificial Sequence: Synthetic oligonucleotide
  Antisense strand to SEQ ID NO: 653344
ucgcauguggacauuccag

SEQ ID NO: 653346 - RNA, 19 nt, Artificial Sequence
  Description of Artificial Sequence: Synthetic oligonucleotide
  Sense strand starting at position 3927 of SEQ ID NO: 585607
gaaguugaaucuuuaccgu

SEQ ID NO: 653347 - RNA, 19 nt, Artificial Sequence
  Description of Artificial Sequence: Synthetic oligonucleotide
  Antisense strand to SEQ ID NO: 653346
acgguaaagauucaacuuc

SEQ ID NO: 653348 - RNA, 19 nt, Artificial Sequence
  Description of Artificial Sequence: Synthetic oligonucleotide
  Sense strand starting at position 3930 of SEQ ID NO: 585607
guugaaucuuuaccguaag

SEQ ID NO: 653349 - RNA, 19 nt, Artificial Sequence
  Description of Artificial Sequence: Synthetic oligonucleotide
  Antisense strand to SEQ ID NO: 653348
cuuacgguaaagauucaac

SEQ ID NO: 653350 - RNA, 19 nt, Artificial Sequence
  Description of Artificial Sequence: Synthetic oligonucleotide
  Sense strand starting at position 3933 of SEQ ID NO: 585607
gaaucuuuaccguaaguau

SEQ ID NO: 653351 - RNA, 19 nt, Artificial Sequence
  Description of Artificial Sequence: Synthetic oligonucleotide
  Antisense strand to SEQ ID NO: 653350
auacuuacgguaaagauuc

SEQ ID NO: 653352 - RNA, 19 nt, Artificial Sequence
  Description of Artificial Sequence: Synthetic oligonucleotide
  Sense strand starting at position 3936 of SEQ ID NO: 585607
ucuuuaccguaaguauauu

SEQ ID NO: 653353 - RNA, 19 nt, Artificial Sequence
  Description of Artificial Sequence: Synthetic oligonucleotide
  Antisense strand to SEQ ID NO: 653352
aauauacuuacgguaaaga

SEQ ID NO: 653354 - RNA, 19 nt, Artificial Sequence
  Description of Artificial Sequence: Synthetic oligonucleotide
  Sense strand starting at position 342 of SEQ ID NO: 585608
gaaacugggucagacuuua

SEQ ID NO: 653355 - RNA, 19 nt, Artificial Sequence
  Description of Artificial Sequence: Synthetic oligonucleotide
  Antisense strand to SEQ ID NO: 653354
uaaagucugacccaguuuc

SEQ ID NO: 653356 - RNA, 19 nt, Artificial Sequence
  Description of Artificial Sequence: Synthetic oligonucleotide
  Sense strand starting at position 404 of SEQ ID NO: 585608
ucgggaaagccuggaacua

SEQ ID NO: 653357 - RNA, 19 nt, Artificial Sequence
  Description of Artificial Sequence: Synthetic oligonucleotide
  Antisense strand to SEQ ID NO: 653356
uaguuccaggcuuucccga

SEQ ID NO: 653358 - RNA, 19 nt, Artificial Sequence
  Description of Artificial Sequence: Synthetic oligonucleotide
  Sense strand starting at position 1364 of SEQ ID NO: 585608
cuucuccuugccuaggaaa

SEQ ID NO: 653359 - RNA, 19 nt, Artificial Sequence
  Description of Artificial Sequence: Synthetic oligonucleotide
  Antisense strand to SEQ ID NO: 653358
uuuccuaggcaaggagaag

SEQ ID NO: 653360 - RNA, 19 nt, Artificial Sequence
  Description of Artificial Sequence: Synthetic oligonucleotide
  Sense strand starting at position 2219 of SEQ ID NO: 585608
caaccagaggccgauugau

SEQ ID NO: 653361 - RNA, 19 nt, Artificial Sequence
  Description of Artificial Sequence: Synthetic oligonucleotide
  Antisense strand to SEQ ID NO: 653360
aucaaucggccucugguug

SEQ ID NO: 653362 - RNA, 19 nt, Artificial Sequence
  Description of Artificial Sequence: Synthetic oligonucleotide
  Sense strand starting at position 2227 of SEQ ID NO: 585608
ggccgauugaucugcauaa

SEQ ID NO: 653363 - RNA, 19 nt, Artificial Sequence
  Description of Artificial Sequence: Synthetic oligonucleotide
  Antisense strand to SEQ ID NO: 653362
uuaugcagaucaaucggcc

SEQ ID NO: 653364 - RNA, 19 nt, Artificial Sequence
  Description of Artificial Sequence: Synthetic oligonucleotide
  Sense strand starting at position 2228 of SEQ ID NO: 585608
gccgauugaucugcauaac

SEQ ID NO: 653365 - RNA, 19 nt, Artificial Sequence
  Description of Artificial Sequence: Synthetic oligonucleotide
  Antisense strand to SEQ ID NO: 653364
guuaugcagaucaaucggc

SEQ ID NO: 653366 - RNA, 19 nt, Artificial Sequence
  Description of Artificial Sequence: Synthetic oligonucleotide
  Sense strand starting at position 2229 of SEQ ID NO: 585608
ccgauugaucugcauaacu

SEQ ID NO: 653367 - RNA, 19 nt, Artificial Sequence
  Description of Artificial Sequence: Synthetic oligonucleotide
  Antisense strand to SEQ ID NO: 653366
aguuaugcagaucaaucgg

SEQ ID NO: 653368 - RNA, 19 nt, Artificial Sequence
  Description of Artificial Sequence: Synthetic oligonucleotide
  Sense strand starting at position 2272 of SEQ ID NO: 585608
ccagcucucgcggucagaa

SEQ ID NO: 653369 - RNA, 19 nt, Artificial Sequence
  Description of Artificial Sequence: Synthetic oligonucleotide
  Antisense strand to SEQ ID NO: 653368
uucugaccgcgagagcugg

SEQ ID NO: 653370 - RNA, 19 nt, Artificial Sequence
  Description of Artificial Sequence: Synthetic oligonucleotide
  Sense strand starting at position 2273 of SEQ ID NO: 585608
cagcucucgcggucagaau

SEQ ID NO: 653371 - RNA, 19 nt, Artificial Sequence
  Description of Artificial Sequence: Synthetic oligonucleotide
  Antisense strand to SEQ ID NO: 653370
auucugaccgcgagagcug

SEQ ID NO: 653372 - RNA, 19 nt, Artificial Sequence
  Description of Artificial Sequence: Synthetic oligonucleotide
  Sense strand starting at position 2481 of SEQ ID NO: 585608
cuccguuucgcugaggguu

SEQ ID NO: 653373 - RNA, 19 nt, Artificial Sequence
  Description of Artificial Sequence: Synthetic oligonucleotide
  Antisense strand to SEQ ID NO: 653372
aacccucagcgaaacggag

SEQ ID NO: 653374 - RNA, 19 nt, Artificial Sequence
  Description of Artificial Sequence: Synthetic oligonucleotide
  Sense strand starting at position 2482 of SEQ ID NO: 585608
uccguuucgcugaggguuu

SEQ ID NO: 653375 - RNA, 19 nt, Artificial Sequence
  Description of Artificial Sequence: Synthetic oligonucleotide
  Antisense strand to SEQ ID NO: 653374
aaacccucagcgaaacgga

SEQ ID NO: 653376 - RNA, 19 nt, Artificial Sequence
  Description of Artificial Sequence: Synthetic oligonucleotide
  Sense strand starting at position 2618 of SEQ ID NO: 585608
guggucuuucugugugacu

SEQ ID NO: 653377 - RNA, 19 nt, Artificial Sequence
  Description of Artificial Sequence: Synthetic oligonucleotide
  Antisense strand to SEQ ID NO: 653376
agucacacagaaagaccac

SEQ ID NO: 653378 - RNA, 19 nt, Artificial Sequence
  Description of Artificial Sequence: Synthetic oligonucleotide
  Sense strand starting at position 2620 of SEQ ID NO: 585608
ggucuuucugugugacuca

SEQ ID NO: 653379 - RNA, 19 nt, Artificial Sequence
  Description of Artificial Sequence: Synthetic oligonucleotide
  Antisense strand to SEQ ID NO: 653378
ugagucacacagaaagacc

SEQ ID NO: 653380 - RNA, 19 nt, Artificial Sequence
  Description of Artificial Sequence: Synthetic oligonucleotide
  Sense strand starting at position 2772 of SEQ ID NO: 585608
aggagucaggccuggaaca

SEQ ID NO: 653381 - RNA, 19 nt, Artificial Sequence
  Description of Artificial Sequence: Synthetic oligonucleotide
  Antisense strand to SEQ ID NO: 653380
uguuccaggccugacuccu

SEQ ID NO: 653382 - RNA, 19 nt, Artificial Sequence
  Description of Artificial Sequence: Synthetic oligonucleotide
  Sense strand starting at position 2905 of SEQ ID NO: 585608
aauccugauuucugggaag

SEQ ID NO: 653383 - RNA, 19 nt, Artificial Sequence
  Description of Artificial Sequence: Synthetic oligonucleotide
  Antisense strand to SEQ ID NO: 653382
cuucccagaaaucaggauu

SEQ ID NO: 653384 - RNA, 19 nt, Artificial Sequence
  Description of Artificial Sequence: Synthetic oligonucleotide
  Sense strand starting at position 2957 of SEQ ID NO: 585608
ucacgaagcaaauguuagu

SEQ ID NO: 653385 - RNA, 19 nt, Artificial Sequence
  Description of Artificial Sequence: Synthetic oligonucleotide
  Antisense strand to SEQ ID NO: 653384
acuaacauuugcuucguga

SEQ ID NO: 653386 - RNA, 19 nt, Artificial Sequence
  Description of Artificial Sequence: Synthetic oligonucleotide
  Sense strand starting at position 2966 of SEQ ID NO: 585608
aaauguuaguguugugaug

SEQ ID NO: 653387 - RNA, 19 nt, Artificial Sequence
  Description of Artificial Sequence: Synthetic oligonucleotide
  Antisense strand to SEQ ID NO: 653386
caucacaacacuaacauuu

SEQ ID NO: 653388 - RNA, 19 nt, Artificial Sequence
  Description of Artificial Sequence: Synthetic oligonucleotide
  Sense strand starting at position 3114 of SEQ ID NO: 585608
aggcaauaccagcaauuau

SEQ ID NO: 653389 - RNA, 19 nt, Artificial Sequence
  Description of Artificial Sequence: Synthetic oligonucleotide
  Antisense strand to SEQ ID NO: 653388
auaauugcugguauugccu

SEQ ID NO: 653390 - RNA, 19 nt, Artificial Sequence
  Description of Artificial Sequence: Synthetic oligonucleotide
  Sense strand starting at position 3143 of SEQ ID NO: 585608
caagucuugucucaaagga

SEQ ID NO: 653391 - RNA, 19 nt, Artificial Sequence
  Description of Artificial Sequence: Synthetic oligonucleotide
  Antisense strand to SEQ ID NO: 653390
uccuuugagacaagacuug

SEQ ID NO: 653392 - RNA, 19 nt, Artificial Sequence
  Description of Artificial Sequence: Synthetic oligonucleotide
  Sense strand starting at position 3173 of SEQ ID NO: 585608
cucugccucccuuggaaau

SEQ ID NO: 653393 - RNA, 19 nt, Artificial Sequence
  Description of Artificial Sequence: Synthetic oligonucleotide
  Antisense strand to SEQ ID NO: 653392
auuuccaagggaggcagag

SEQ ID NO: 653394 - RNA, 19 nt, Artificial Sequence
  Description of Artificial Sequence: Synthetic oligonucleotide
  Sense strand starting at position 3174 of SEQ ID NO: 585608
ucugccucccuuggaaaua

SEQ ID NO: 653395 - RNA, 19 nt, Artificial Sequence
  Description of Artificial Sequence: Synthetic oligonucleotide
  Antisense strand to SEQ ID NO: 653394
uauuuccaagggaggcaga

SEQ ID NO: 653396 - RNA, 19 nt, Artificial Sequence
  Description of Artificial Sequence: Synthetic oligonucleotide
  Sense strand starting at position 3175 of SEQ ID NO: 585608
cugccucccuuggaaauaa

SEQ ID NO: 653397 - RNA, 19 nt, Artificial Sequence
  Description of Artificial Sequence: Synthetic oligonucleotide
  Antisense strand to SEQ ID NO: 653396
uuauuuccaagggaggcag

SEQ ID NO: 653398 - RNA, 19 nt, Artificial Sequence
  Description of Artificial Sequence: Synthetic oligonucleotide
  Sense strand starting at position 3249 of SEQ ID NO: 585608
aguugauaacgacguguga

SEQ ID NO: 653399 - RNA, 19 nt, Artificial Sequence
  Description of Artificial Sequence: Synthetic oligonucleotide
  Antisense strand to SEQ ID NO: 653398
ucacacgucguuaucaacu

SEQ ID NO: 653400 - RNA, 19 nt, Artificial Sequence
  Description of Artificial Sequence: Synthetic oligonucleotide
  Sense strand starting at position 3251 of SEQ ID NO: 585608
uugauaacgacgugugaaa

SEQ ID NO: 653401 - RNA, 19 nt, Artificial Sequence
  Description of Artificial Sequence: Synthetic oligonucleotide
  Antisense strand to SEQ ID NO: 653400
uuucacacgucguuaucaa

SEQ ID NO: 653402 - RNA, 19 nt, Artificial Sequence
  Description of Artificial Sequence: Synthetic oligonucleotide
  Sense strand starting at position 3258 of SEQ ID NO: 585608
cgacgugugaaaugaguaa

SEQ ID NO: 653403 - RNA, 19 nt, Artificial Sequence
  Description of Artificial Sequence: Synthetic oligonucleotide
  Antisense strand to SEQ ID NO: 653402
uuacucauuucacacgucg

SEQ ID NO: 653404 - RNA, 19 nt, Artificial Sequence
  Description of Artificial Sequence: Synthetic oligonucleotide
  Sense strand starting at position 3302 of SEQ ID NO: 585608
uugaauugucaguggccua

SEQ ID NO: 653405 - RNA, 19 nt, Artificial Sequence
  Description of Artificial Sequence: Synthetic oligonucleotide
  Antisense strand to SEQ ID NO: 653404
uaggccacugacaauucaa

SEQ ID NO: 653406 - RNA, 19 nt, Artificial Sequence
  Description of Artificial Sequence: Synthetic oligonucleotide
  Sense strand starting at position 3303 of SEQ ID NO: 585608
ugaauugucaguggccuaa

SEQ ID NO: 653407 - RNA, 19 nt, Artificial Sequence
  Description of Artificial Sequence: Synthetic oligonucleotide
  Antisense strand to SEQ ID NO: 653406
uuaggccacugacaauuca

SEQ ID NO: 653408 - RNA, 19 nt, Artificial Sequence
  Description of Artificial Sequence: Synthetic oligonucleotide
  Sense strand starting at position 3307 of SEQ ID NO: 585608
uugucaguggccuaaguaa

SEQ ID NO: 653409 - RNA, 19 nt, Artificial Sequence
  Description of Artificial Sequence: Synthetic oligonucleotide
  Antisense strand to SEQ ID NO: 653408
uuacuuaggccacugacaa

SEQ ID NO: 653410 - RNA, 19 nt, Artificial Sequence
  Description of Artificial Sequence: Synthetic oligonucleotide
  Sense strand starting at position 3314 of SEQ ID NO: 585608
uggccuaaguaauugaaag

SEQ ID NO: 653411 - RNA, 19 nt, Artificial Sequence
  Description of Artificial Sequence: Synthetic oligonucleotide
  Antisense strand to SEQ ID NO: 653410
cuuucaauuacuuaggcca

SEQ ID NO: 653412 - RNA, 19 nt, Artificial Sequence
  Description of Artificial Sequence: Synthetic oligonucleotide
  Sense strand starting at position 3358 of SEQ ID NO: 585608
ugaagugccugccauuuaa

SEQ ID NO: 653413 - RNA, 19 nt, Artificial Sequence
  Description of Artificial Sequence: Synthetic oligonucleotide
  Antisense strand to SEQ ID NO: 653412
uuaaauggcaggcacuuca

SEQ ID NO: 653414 - RNA, 19 nt, Artificial Sequence
  Description of Artificial Sequence: Synthetic oligonucleotide
  Sense strand starting at position 3392 of SEQ ID NO: 585608
cccuauagcugucauuagu

SEQ ID NO: 653415 - RNA, 19 nt, Artificial Sequence
  Description of Artificial Sequence: Synthetic oligonucleotide
  Antisense strand to SEQ ID NO: 653414
acuaaugacagcuauaggg

SEQ ID NO: 653416 - RNA, 19 nt, Artificial Sequence
  Description of Artificial Sequence: Synthetic oligonucleotide
  Sense strand starting at position 3395 of SEQ ID NO: 585608
uauagcugucauuagugaa

SEQ ID NO: 653417 - RNA, 19 nt, Artificial Sequence
  Description of Artificial Sequence: Synthetic oligonucleotide
  Antisense strand to SEQ ID NO: 653416
uucacuaaugacagcuaua

SEQ ID NO: 653418 - RNA, 19 nt, Artificial Sequence
  Description of Artificial Sequence: Synthetic oligonucleotide
  Sense strand starting at position 3398 of SEQ ID NO: 585608
agcugucauuagugaauuu

SEQ ID NO: 653419 - RNA, 19 nt, Artificial Sequence
  Description of Artificial Sequence: Synthetic oligonucleotide
  Antisense strand to SEQ ID NO: 653418
aaauucacuaaugacagcu

SEQ ID NO: 653420 - RNA, 19 nt, Artificial Sequence
  Description of Artificial Sequence: Synthetic oligonucleotide
  Sense strand starting at position 3703 of SEQ ID NO: 585608
uccgcuuaucagggucuaa

SEQ ID NO: 653421 - RNA, 19 nt, Artificial Sequence
  Description of Artificial Sequence: Synthetic oligonucleotide
  Antisense strand to SEQ ID NO: 653420
uuagacccugauaagcgga

SEQ ID NO: 653422 - RNA, 19 nt, Artificial Sequence
  Description of Artificial Sequence: Synthetic oligonucleotide
  Sense strand starting at position 3808 of SEQ ID NO: 585608
ccucaaauguagucaaaca

SEQ ID NO: 653423 - RNA, 19 nt, Artificial Sequence
  Description of Artificial Sequence: Synthetic oligonucleotide
  Antisense strand to SEQ ID NO: 653422
uguuugacuacauuugagg

SEQ ID NO: 653424 - RNA, 19 nt, Artificial Sequence
  Description of Artificial Sequence: Synthetic oligonucleotide
  Sense strand starting at position 3965 of SEQ ID NO: 585608
guaguucuaccacagauug

SEQ ID NO: 653425 - RNA, 19 nt, Artificial Sequence
  Description of Artificial Sequence: Synthetic oligonucleotide
  Antisense strand to SEQ ID NO: 653424
caaucugugguagaacuac

SEQ ID NO: 653426 - RNA, 19 nt, Artificial Sequence
  Description of Artificial Sequence: Synthetic oligonucleotide
  Sense strand starting at position 3973 of SEQ ID NO: 585608
accacagauugaugaacaa

SEQ ID NO: 653427 - RNA, 19 nt, Artificial Sequence
  Description of Artificial Sequence: Synthetic oligonucleotide
  Antisense strand to SEQ ID NO: 653426
uuguucaucaaucuguggu

SEQ ID NO: 653428 - RNA, 19 nt, Artificial Sequence
  Description of Artificial Sequence: Synthetic oligonucleotide
  Sense strand starting at position 145 of SEQ ID NO: 585609
aguacauuggaguggauga

SEQ ID NO: 653429 - RNA, 19 nt, Artificial Sequence
  Description of Artificial Sequence: Synthetic oligonucleotide
  Antisense strand to SEQ ID NO: 653428
ucauccacuccaauguacu

SEQ ID NO: 653430 - RNA, 19 nt, Artificial Sequence
  Description of Artificial Sequence: Synthetic oligonucleotide
  Sense strand starting at position 146 of SEQ ID NO: 585609
guacauuggaguggaugaa

SEQ ID NO: 653431 - RNA, 19 nt, Artificial Sequence
  Description of Artificial Sequence: Synthetic oligonucleotide
  Antisense strand to SEQ ID NO: 653430
uucauccacuccaauguac

SEQ ID NO: 653432 - RNA, 19 nt, Artificial Sequence
  Description of Artificial Sequence: Synthetic oligonucleotide
  Sense strand starting at position 189 of SEQ ID NO: 585609
ggguuuaccuaaucugaga

SEQ ID NO: 653433 - RNA, 19 nt, Artificial Sequence
  Description of Artificial Sequence: Synthetic oligonucleotide
  Antisense strand to SEQ ID NO: 653432
ucucagauuagguaaaccc

SEQ ID NO: 653434 - RNA, 19 nt, Artificial Sequence
  Description of Artificial Sequence: Synthetic oligonucleotide
  Sense strand starting at position 224 of SEQ ID NO: 585609
ucaugccugcucuaaggaa

SEQ ID NO: 653435 - RNA, 19 nt, Artificial Sequence
  Description of Artificial Sequence: Synthetic oligonucleotide
  Antisense strand to SEQ ID NO: 653434
uuccuuagagcaggcauga

SEQ ID NO: 653436 - RNA, 19 nt, Artificial Sequence
  Description of Artificial Sequence: Synthetic oligonucleotide
  Sense strand starting at position 510 of SEQ ID NO: 585609
gggucucauucugucauuu

SEQ ID NO: 653437 - RNA, 19 nt, Artificial Sequence
  Description of Artificial Sequence: Synthetic oligonucleotide
  Antisense strand to SEQ ID NO: 653436
aaaugacagaaugagaccc

SEQ ID NO: 653438 - RNA, 19 nt, Artificial Sequence
  Description of Artificial Sequence: Synthetic oligonucleotide
  Sense strand starting at position 922 of SEQ ID NO: 585609
gcauguucugauugagaca

SEQ ID NO: 653439 - RNA, 19 nt, Artificial Sequence
  Description of Artificial Sequence: Synthetic oligonucleotide
  Antisense strand to SEQ ID NO: 653438
ugucucaaucagaacaugc

SEQ ID NO: 653440 - RNA, 19 nt, Artificial Sequence
  Description of Artificial Sequence: Synthetic oligonucleotide
  Sense strand starting at position 1086 of SEQ ID NO: 585609
ggaggcuacuuggauuuaa

SEQ ID NO: 653441 - RNA, 19 nt, Artificial Sequence
  Description of Artificial Sequence: Synthetic oligonucleotide
  Antisense strand to SEQ ID NO: 653440
uuaaauccaaguagccucc

SEQ ID NO: 653442 - RNA, 19 nt, Artificial Sequence
  Description of Artificial Sequence: Synthetic oligonucleotide
  Sense strand starting at position 1339 of SEQ ID NO: 585609
caaucuggcuacgugauuu

SEQ ID NO: 653443 - RNA, 19 nt, Artificial Sequence
  Description of Artificial Sequence: Synthetic oligonucleotide
  Antisense strand to SEQ ID NO: 653442
aaaucacguagccagauug

SEQ ID NO: 653444 - RNA, 19 nt, Artificial Sequence
  Description of Artificial Sequence: Synthetic oligonucleotide
  Sense strand starting at position 1564 of SEQ ID NO: 585609
aggagagcugugugcauuu

SEQ ID NO: 653445 - RNA, 19 nt, Artificial Sequence
  Description of Artificial Sequence: Synthetic oligonucleotide
  Antisense strand to SEQ ID NO: 653444
aaaugcacacagcucuccu

SEQ ID NO: 653446 - RNA, 19 nt, Artificial Sequence
  Description of Artificial Sequence: Synthetic oligonucleotide
  Sense strand starting at position 1695 of SEQ ID NO: 585609
guugcaaggcacuacuaua

SEQ ID NO: 653447 - RNA, 19 nt, Artificial Sequence
  Description of Artificial Sequence: Synthetic oligonucleotide
  Antisense strand to SEQ ID NO: 653446
uauaguagugccuugcaac

SEQ ID NO: 653448 - RNA, 19 nt, Artificial Sequence
  Description of Artificial Sequence: Synthetic oligonucleotide
  Sense strand starting at position 1885 of SEQ ID NO: 585609
ugucaagaauccguggaca

SEQ ID NO: 653449 - RNA, 19 nt, Artificial Sequence
  Description of Artificial Sequence: Synthetic oligonucleotide
  Antisense strand to SEQ ID NO: 653448
uguccacggauucuugaca

SEQ ID NO: 653450 - RNA, 19 nt, Artificial Sequence
  Description of Artificial Sequence: Synthetic oligonucleotide
  Sense strand starting at position 1888 of SEQ ID NO: 585609
caagaauccguggacaugu

SEQ ID NO: 653451 - RNA, 19 nt, Artificial Sequence
  Description of Artificial Sequence: Synthetic oligonucleotide
  Antisense strand to SEQ ID NO: 653450
acauguccacggauucuug

SEQ ID NO: 653452 - RNA, 19 nt, Artificial Sequence
  Description of Artificial Sequence: Synthetic oligonucleotide
  Sense strand starting at position 1898 of SEQ ID NO: 585609
uggacauguuaucugguua

SEQ ID NO: 653453 - RNA, 19 nt, Artificial Sequence
  Description of Artificial Sequence: Synthetic oligonucleotide
  Antisense strand to SEQ ID NO: 653452
uaaccagauaacaugucca

SEQ ID NO: 653454 - RNA, 19 nt, Artificial Sequence
  Description of Artificial Sequence: Synthetic oligonucleotide
  Sense strand starting at position 1899 of SEQ ID NO: 585609
ggacauguuaucugguuag

SEQ ID NO: 653455 - RNA, 19 nt, Artificial Sequence
  Description of Artificial Sequence: Synthetic oligonucleotide
  Antisense strand to SEQ ID NO: 653454
cuaaccagauaacaugucc

SEQ ID NO: 653456 - RNA, 19 nt, Artificial Sequence
  Description of Artificial Sequence: Synthetic oligonucleotide
  Sense strand starting at position 1903 of SEQ ID NO: 585609
auguuaucugguuagagcu

SEQ ID NO: 653457 - RNA, 19 nt, Artificial Sequence
  Description of Artificial Sequence: Synthetic oligonucleotide
  Antisense strand to SEQ ID NO: 653456
agcucuaaccagauaacau

SEQ ID NO: 653458 - RNA, 19 nt, Artificial Sequence
  Description of Artificial Sequence: Synthetic oligonucleotide
  Sense strand starting at position 1946 of SEQ ID NO: 585609
acucacucacguuagacua

SEQ ID NO: 653459 - RNA, 19 nt, Artificial Sequence
  Description of Artificial Sequence: Synthetic oligonucleotide
  Antisense strand to SEQ ID NO: 653458
uagucuaacgugagugagu

SEQ ID NO: 653460 - RNA, 19 nt, Artificial Sequence
  Description of Artificial Sequence: Synthetic oligonucleotide
  Sense strand starting at position 1990 of SEQ ID NO: 585609
cagccaaauguguaccaga

SEQ ID NO: 653461 - RNA, 19 nt, Artificial Sequence
  Description of Artificial Sequence: Synthetic oligonucleotide
  Antisense strand to SEQ ID NO: 653460
ucugguacacauuuggcug

SEQ ID NO: 653462 - RNA, 19 nt, Artificial Sequence
  Description of Artificial Sequence: Synthetic oligonucleotide
  Sense strand starting at position 2018 of SEQ ID NO: 585609
cagaccugaccauggguaa

SEQ ID NO: 653463 - RNA, 19 nt, Artificial Sequence
  Description of Artificial Sequence: Synthetic oligonucleotide
  Antisense strand to SEQ ID NO: 653462
uuacccauggucaggucug

SEQ ID NO: 653464 - RNA, 19 nt, Artificial Sequence
  Description of Artificial Sequence: Synthetic oligonucleotide
  Sense strand starting at position 2025 of SEQ ID NO: 585609
gaccauggguaaguuuaau

SEQ ID NO: 653465 - RNA, 19 nt, Artificial Sequence
  Description of Artificial Sequence: Synthetic oligonucleotide
  Antisense strand to SEQ ID NO: 653464
auuaaacuuacccaugguc

SEQ ID NO: 653466 - RNA, 19 nt, Artificial Sequence
  Description of Artificial Sequence: Synthetic oligonucleotide
  Sense strand starting at position 2353 of SEQ ID NO: 585609
ggguaugggucuaaagaag

SEQ ID NO: 653467 - RNA, 19 nt, Artificial Sequence
  Description of Artificial Sequence: Synthetic oligonucleotide
  Antisense strand to SEQ ID NO: 653466
cuucuuuagacccauaccc

SEQ ID NO: 653468 - RNA, 19 nt, Artificial Sequence
  Description of Artificial Sequence: Synthetic oligonucleotide
  Sense strand starting at position 2381 of SEQ ID NO: 585609
gaaguaacuugguccaagu

SEQ ID NO: 653469 - RNA, 19 nt, Artificial Sequence
  Description of Artificial Sequence: Synthetic oligonucleotide
  Antisense strand to SEQ ID NO: 653468
acuuggaccaaguuacuuc

SEQ ID NO: 653470 - RNA, 19 nt, Artificial Sequence
  Description of Artificial Sequence: Synthetic oligonucleotide
  Sense strand starting at position 2394 of SEQ ID NO: 585609
ccaagucuugcugagaaag

SEQ ID NO: 653471 - RNA, 19 nt, Artificial Sequence
  Description of Artificial Sequence: Synthetic oligonucleotide
  Antisense strand to SEQ ID NO: 653470
cuuucucagcaagacuugg

SEQ ID NO: 653472 - RNA, 19 nt, Artificial Sequence
  Description of Artificial Sequence: Synthetic oligonucleotide
  Sense strand starting at position 2411 of SEQ ID NO: 585609
aggguugauugauucucuu

SEQ ID NO: 653473 - RNA, 19 nt, Artificial Sequence
  Description of Artificial Sequence: Synthetic oligonucleotide
  Antisense strand to SEQ ID NO: 653472
aagagaaucaaucaacccu

SEQ ID NO: 653474 - RNA, 19 nt, Artificial Sequence
  Description of Artificial Sequence: Synthetic oligonucleotide
  Sense strand starting at position 2477 of SEQ ID NO: 585609
agaggagguccuugacuug

SEQ ID NO: 653475 - RNA, 19 nt, Artificial Sequence
  Description of Artificial Sequence: Synthetic oligonucleotide
  Antisense strand to SEQ ID NO: 653474
caagucaaggaccuccucu

SEQ ID NO: 653476 - RNA, 19 nt, Artificial Sequence
  Description of Artificial Sequence: Synthetic oligonucleotide
  Sense strand starting at position 2522 of SEQ ID NO: 585609
gaccaugggccucagucau

SEQ ID NO: 653477 - RNA, 19 nt, Artificial Sequence
  Description of Artificial Sequence: Synthetic oligonucleotide
  Antisense strand to SEQ ID NO: 653476
augacugaggcccaugguc

SEQ ID NO: 653478 - RNA, 19 nt, Artificial Sequence
  Description of Artificial Sequence: Synthetic oligonucleotide
  Sense strand starting at position 2792 of SEQ ID NO: 585609
ggagaagcaucuccagcaa

SEQ ID NO: 653479 - RNA, 19 nt, Artificial Sequence
  Description of Artificial Sequence: Synthetic oligonucleotide
  Antisense strand to SEQ ID NO: 653478
uugcuggagaugcuucucc

SEQ ID NO: 653480 - RNA, 19 nt, Artificial Sequence
  Description of Artificial Sequence: Synthetic oligonucleotide
  Sense strand starting at position 2867 of SEQ ID NO: 585609
uccucuagaaaguguggaa

SEQ ID NO: 653481 - RNA, 19 nt, Artificial Sequence
  Description of Artificial Sequence: Synthetic oligonucleotide
  Antisense strand to SEQ ID NO: 653480
uuccacacuuucuagagga

SEQ ID NO: 653482 - RNA, 19 nt, Artificial Sequence
  Description of Artificial Sequence: Synthetic oligonucleotide
  Sense strand starting at position 2871 of SEQ ID NO: 585609
cuagaaaguguggaaguuu

SEQ ID NO: 653483 - RNA, 19 nt, Artificial Sequence
  Description of Artificial Sequence: Synthetic oligonucleotide
  Antisense strand to SEQ ID NO: 653482
aaacuuccacacuuucuag

SEQ ID NO: 653484 - RNA, 19 nt, Artificial Sequence
  Description of Artificial Sequence: Synthetic oligonucleotide
  Sense strand starting at position 3322 of SEQ ID NO: 585609
auuguagagucuccugaua

SEQ ID NO: 653485 - RNA, 19 nt, Artificial Sequence
  Description of Artificial Sequence: Synthetic oligonucleotide
  Antisense strand to SEQ ID NO: 653484
uaucaggagacucuacaau

SEQ ID NO: 653486 - RNA, 19 nt, Artificial Sequence
  Description of Artificial Sequence: Synthetic oligonucleotide
  Sense strand starting at position 3334 of SEQ ID NO: 585609
ccugauaaguuuccuaaga

SEQ ID NO: 653487 - RNA, 19 nt, Artificial Sequence
  Description of Artificial Sequence: Synthetic oligonucleotide
  Antisense strand to SEQ ID NO: 653486
ucuuaggaaacuuaucagg

SEQ ID NO: 653488 - RNA, 19 nt, Artificial Sequence
  Description of Artificial Sequence: Synthetic oligonucleotide
  Sense strand starting at position 3335 of SEQ ID NO: 585609
cugauaaguuuccuaagac

SEQ ID NO: 653489 - RNA, 19 nt, Artificial Sequence
  Description of Artificial Sequence: Synthetic oligonucleotide
  Antisense strand to SEQ ID NO: 653488
gucuuaggaaacuuaucag

SEQ ID NO: 653490 - RNA, 19 nt, Artificial Sequence
  Description of Artificial Sequence: Synthetic oligonucleotide
  Sense strand starting at position 3574 of SEQ ID NO: 585609
cucuguguuauagguauuu

SEQ ID NO: 653491 - RNA, 19 nt, Artificial Sequence
  Description of Artificial Sequence: Synthetic oligonucleotide
  Antisense strand to SEQ ID NO: 653490
aaauaccuauaacacagag

SEQ ID NO: 653492 - RNA, 19 nt, Artificial Sequence
  Description of Artificial Sequence: Synthetic oligonucleotide
  Sense strand starting at position 3584 of SEQ ID NO: 585609
uagguauuucgugguggac

SEQ ID NO: 653493 - RNA, 19 nt, Artificial Sequence
  Description of Artificial Sequence: Synthetic oligonucleotide
  Antisense strand to SEQ ID NO: 653492
guccaccacgaaauaccua

SEQ ID NO: 653494 - RNA, 19 nt, Artificial Sequence
  Description of Artificial Sequence: Synthetic oligonucleotide
  Sense strand starting at position 3587 of SEQ ID NO: 585609
guauuucgugguggacaau

SEQ ID NO: 653495 - RNA, 19 nt, Artificial Sequence
  Description of Artificial Sequence: Synthetic oligonucleotide
  Antisense strand to SEQ ID NO: 653494
auuguccaccacgaaauac

SEQ ID NO: 653496 - RNA, 19 nt, Artificial Sequence
  Description of Artificial Sequence: Synthetic oligonucleotide
  Sense strand starting at position 3728 of SEQ ID NO: 585609
uauuccugucauugggaua

SEQ ID NO: 653497 - RNA, 19 nt, Artificial Sequence
  Description of Artificial Sequence: Synthetic oligonucleotide
  Antisense strand to SEQ ID NO: 653496
uaucccaaugacaggaaua

SEQ ID NO: 653498 - RNA, 19 nt, Artificial Sequence
  Description of Artificial Sequence: Synthetic oligonucleotide
  Sense strand starting at position 3735 of SEQ ID NO: 585609
gucauugggauauguccau

SEQ ID NO: 653499 - RNA, 19 nt, Artificial Sequence
  Description of Artificial Sequence: Synthetic oligonucleotide
  Antisense strand to SEQ ID NO: 653498
auggacauaucccaaugac

SEQ ID NO: 653500 - RNA, 19 nt, Artificial Sequence
  Description of Artificial Sequence: Synthetic oligonucleotide
  Sense strand starting at position 3742 of SEQ ID NO: 585609
ggauauguccauggaauau

SEQ ID NO: 653501 - RNA, 19 nt, Artificial Sequence
  Description of Artificial Sequence: Synthetic oligonucleotide
  Antisense strand to SEQ ID NO: 653500
auauuccauggacauaucc

SEQ ID NO: 653502 - RNA, 19 nt, Artificial Sequence
  Description of Artificial Sequence: Synthetic oligonucleotide
  Sense strand starting at position 3862 of SEQ ID NO: 585609
cugcuauuccaaggagggu

SEQ ID NO: 653503 - RNA, 19 nt, Artificial Sequence
  Description of Artificial Sequence: Synthetic oligonucleotide
  Antisense strand to SEQ ID NO: 653502
acccuccuuggaauagcag

SEQ ID NO: 653504 - RNA, 19 nt, Artificial Sequence
  Description of Artificial Sequence: Synthetic oligonucleotide
  Sense strand starting at position 3863 of SEQ ID NO: 585609
ugcuauuccaaggagggua

SEQ ID NO: 653505 - RNA, 19 nt, Artificial Sequence
  Description of Artificial Sequence: Synthetic oligonucleotide
  Antisense strand to SEQ ID NO: 653504
uacccuccuuggaauagca

SEQ ID NO: 653506 - RNA, 19 nt, Artificial Sequence
  Description of Artificial Sequence: Synthetic oligonucleotide
  Sense strand starting at position 3926 of SEQ ID NO: 585609
uccuaugagugcuuauaaa

SEQ ID NO: 653507 - RNA, 19 nt, Artificial Sequence
  Description of Artificial Sequence: Synthetic oligonucleotide
  Antisense strand to SEQ ID NO: 653506
uuuauaagcacucauagga

SEQ ID NO: 653508 - RNA, 19 nt, Artificial Sequence
  Description of Artificial Sequence: Synthetic oligonucleotide
  Sense strand starting at position 157 of SEQ ID NO: 585610
agaaaugggugcuccuacu

SEQ ID NO: 653509 - RNA, 19 nt, Artificial Sequence
  Description of Artificial Sequence: Synthetic oligonucleotide
  Antisense strand to SEQ ID NO: 653508
aguaggagcacccauuucu

SEQ ID NO: 653510 - RNA, 19 nt, Artificial Sequence
  Description of Artificial Sequence: Synthetic oligonucleotide
  Sense strand starting at position 281 of SEQ ID NO: 585610
gagacuggugucgaagacu

SEQ ID NO: 653511 - RNA, 19 nt, Artificial Sequence
  Description of Artificial Sequence: Synthetic oligonucleotide
  Antisense strand to SEQ ID NO: 653510
agucuucgacaccagucuc

SEQ ID NO: 653512 - RNA, 19 nt, Artificial Sequence
  Description of Artificial Sequence: Synthetic oligonucleotide
  Sense strand starting at position 565 of SEQ ID NO: 585610
agacaagaaucugugcaaa

SEQ ID NO: 653513 - RNA, 19 nt, Artificial Sequence
  Description of Artificial Sequence: Synthetic oligonucleotide
  Antisense strand to SEQ ID NO: 653512
uuugcacagauucuugucu

SEQ ID NO: 653514 - RNA, 19 nt, Artificial Sequence
  Description of Artificial Sequence: Synthetic oligonucleotide
  Sense strand starting at position 567 of SEQ ID NO: 585610
acaagaaucugugcaaauu

SEQ ID NO: 653515 - RNA, 19 nt, Artificial Sequence
  Description of Artificial Sequence: Synthetic oligonucleotide
  Antisense strand to SEQ ID NO: 653514
aauuugcacagauucuugu

SEQ ID NO: 653516 - RNA, 19 nt, Artificial Sequence
  Description of Artificial Sequence: Synthetic oligonucleotide
  Sense strand starting at position 629 of SEQ ID NO: 585610
ucuuuacgaccuuaaaguu

SEQ ID NO: 653517 - RNA, 19 nt, Artificial Sequence
  Description of Artificial Sequence: Synthetic oligonucleotide
  Antisense strand to SEQ ID NO: 653516
aacuuuaaggucguaaaga

SEQ ID NO: 653518 - RNA, 19 nt, Artificial Sequence
  Description of Artificial Sequence: Synthetic oligonucleotide
  Sense strand starting at position 674 of SEQ ID NO: 585610
cuucucugguacuuugaaa

SEQ ID NO: 653519 - RNA, 19 nt, Artificial Sequence
  Description of Artificial Sequence: Synthetic oligonucleotide
  Antisense strand to SEQ ID NO: 653518
uuucaaaguaccagagaag

SEQ ID NO: 653520 - RNA, 19 nt, Artificial Sequence
  Description of Artificial Sequence: Synthetic oligonucleotide
  Sense strand starting at position 1116 of SEQ ID NO: 585610
cuuuaagaguggucuacaa

SEQ ID NO: 653521 - RNA, 19 nt, Artificial Sequence
  Description of Artificial Sequence: Synthetic oligonucleotide
  Antisense strand to SEQ ID NO: 653520
uuguagaccacucuuaaag

SEQ ID NO: 653522 - RNA, 19 nt, Artificial Sequence
  Description of Artificial Sequence: Synthetic oligonucleotide
  Sense strand starting at position 1165 of SEQ ID NO: 585610
aagauugucccuuaguggu

SEQ ID NO: 653523 - RNA, 19 nt, Artificial Sequence
  Description of Artificial Sequence: Synthetic oligonucleotide
  Antisense strand to SEQ ID NO: 653522
accacuaagggacaaucuu

SEQ ID NO: 653524 - RNA, 19 nt, Artificial Sequence
  Description of Artificial Sequence: Synthetic oligonucleotide
  Sense strand starting at position 1172 of SEQ ID NO: 585610
ucccuuagugguuacaaua

SEQ ID NO: 653525 - RNA, 19 nt, Artificial Sequence
  Description of Artificial Sequence: Synthetic oligonucleotide
  Antisense strand to SEQ ID NO: 653524
uauuguaaccacuaaggga

SEQ ID NO: 653526 - RNA, 19 nt, Artificial Sequence
  Description of Artificial Sequence: Synthetic oligonucleotide
  Sense strand starting at position 1285 of SEQ ID NO: 585610
uuauuaguuaugggaauga

SEQ ID NO: 653527 - RNA, 19 nt, Artificial Sequence
  Description of Artificial Sequence: Synthetic oligonucleotide
  Antisense strand to SEQ ID NO: 653526
ucauucccauaacuaauaa

SEQ ID NO: 653528 - RNA, 19 nt, Artificial Sequence
  Description of Artificial Sequence: Synthetic oligonucleotide
  Sense strand starting at position 1289 of SEQ ID NO: 585610
uaguuaugggaaugacuau

SEQ ID NO: 653529 - RNA, 19 nt, Artificial Sequence
  Description of Artificial Sequence: Synthetic oligonucleotide
  Antisense strand to SEQ ID NO: 653528
auagucauucccauaacua

SEQ ID NO: 653530 - RNA, 19 nt, Artificial Sequence
  Description of Artificial Sequence: Synthetic oligonucleotide
  Sense strand starting at position 1318 of SEQ ID NO: 585610
agcuguuucccagaauauu

SEQ ID NO: 653531 - RNA, 19 nt, Artificial Sequence
  Description of Artificial Sequence: Synthetic oligonucleotide
  Antisense strand to SEQ ID NO: 653530
aauauucugggaaacagcu

SEQ ID NO: 653532 - RNA, 19 nt, Artificial Sequence
  Description of Artificial Sequence: Synthetic oligonucleotide
  Sense strand starting at position 1452 of SEQ ID NO: 585610
auucgaaaucaauguuuga

SEQ ID NO: 653533 - RNA, 19 nt, Artificial Sequence
  Description of Artificial Sequence: Synthetic oligonucleotide
  Antisense strand to SEQ ID NO: 653532
ucaaacauugauuucgaau

SEQ ID NO: 653534 - RNA, 19 nt, Artificial Sequence
  Description of Artificial Sequence: Synthetic oligonucleotide
  Sense strand starting at position 1456 of SEQ ID NO: 585610
gaaaucaauguuugaguuu

SEQ ID NO: 653535 - RNA, 19 nt, Artificial Sequence
  Description of Artificial Sequence: Synthetic oligonucleotide
  Antisense strand to SEQ ID NO: 653534
aaacucaaacauugauuuc

SEQ ID NO: 653536 - RNA, 19 nt, Artificial Sequence
  Description of Artificial Sequence: Synthetic oligonucleotide
  Sense strand starting at position 1459 of SEQ ID NO: 585610
aucaauguuugaguuugau

SEQ ID NO: 653537 - RNA, 19 nt, Artificial Sequence
  Description of Artificial Sequence: Synthetic oligonucleotide
  Antisense strand to SEQ ID NO: 653536
aucaaacucaaacauugau

SEQ ID NO: 653538 - RNA, 19 nt, Artificial Sequence
  Description of Artificial Sequence: Synthetic oligonucleotide
  Sense strand starting at position 1511 of SEQ ID NO: 585610
acgugcaaauuucuuguaa

SEQ ID NO: 653539 - RNA, 19 nt, Artificial Sequence
  Description of Artificial Sequence: Synthetic oligonucleotide
  Antisense strand to SEQ ID NO: 653538
uuacaagaaauuugcacgu

SEQ ID NO: 653540 - RNA, 19 nt, Artificial Sequence
  Description of Artificial Sequence: Synthetic oligonucleotide
  Sense strand starting at position 1512 of SEQ ID NO: 585610
cgugcaaauuucuuguaac

SEQ ID NO: 653541 - RNA, 19 nt, Artificial Sequence
  Description of Artificial Sequence: Synthetic oligonucleotide
  Antisense strand to SEQ ID NO: 653540
guuacaagaaauuugcacg

SEQ ID NO: 653542 - RNA, 19 nt, Artificial Sequence
  Description of Artificial Sequence: Synthetic oligonucleotide
  Sense strand starting at position 1701 of SEQ ID NO: 585610
augggaaauaaguggaguu

SEQ ID NO: 653543 - RNA, 19 nt, Artificial Sequence
  Description of Artificial Sequence: Synthetic oligonucleotide
  Antisense strand to SEQ ID NO: 653542
aacuccacuuauuucccau

SEQ ID NO: 653544 - RNA, 19 nt, Artificial Sequence
  Description of Artificial Sequence: Synthetic oligonucleotide
  Sense strand starting at position 1702 of SEQ ID NO: 585610
ugggaaauaaguggaguua

SEQ ID NO: 653545 - RNA, 19 nt, Artificial Sequence
  Description of Artificial Sequence: Synthetic oligonucleotide
  Antisense strand to SEQ ID NO: 653544
uaacuccacuuauuuccca

SEQ ID NO: 653546 - RNA, 19 nt, Artificial Sequence
  Description of Artificial Sequence: Synthetic oligonucleotide
  Sense strand starting at position 1713 of SEQ ID NO: 585610
uggaguuaggacggacaaa

SEQ ID NO: 653547 - RNA, 19 nt, Artificial Sequence
  Description of Artificial Sequence: Synthetic oligonucleotide
  Antisense strand to SEQ ID NO: 653546
uuuguccguccuaacucca

SEQ ID NO: 653548 - RNA, 19 nt, Artificial Sequence
  Description of Artificial Sequence: Synthetic oligonucleotide
  Sense strand starting at position 1764 of SEQ ID NO: 585610
cagagagguuccucagaug

SEQ ID NO: 653549 - RNA, 19 nt, Artificial Sequence
  Description of Artificial Sequence: Synthetic oligonucleotide
  Antisense strand to SEQ ID NO: 653548
caucugaggaaccucucug

SEQ ID NO: 653550 - RNA, 19 nt, Artificial Sequence
  Description of Artificial Sequence: Synthetic oligonucleotide
  Sense strand starting at position 2101 of SEQ ID NO: 585610
gauaguaaauaaucucgga

SEQ ID NO: 653551 - RNA, 19 nt, Artificial Sequence
  Description of Artificial Sequence: Synthetic oligonucleotide
  Antisense strand to SEQ ID NO: 653550
uccgagauuauuuacuauc

SEQ ID NO: 653552 - RNA, 19 nt, Artificial Sequence
  Description of Artificial Sequence: Synthetic oligonucleotide
  Sense strand starting at position 2105 of SEQ ID NO: 585610
guaaauaaucucggaaagg

SEQ ID NO: 653553 - RNA, 19 nt, Artificial Sequence
  Description of Artificial Sequence: Synthetic oligonucleotide
  Antisense strand to SEQ ID NO: 653552
ccuuuccgagauuauuuac

SEQ ID NO: 653554 - RNA, 19 nt, Artificial Sequence
  Description of Artificial Sequence: Synthetic oligonucleotide
  Sense strand starting at position 2161 of SEQ ID NO: 585610
gcucuugugacguugugga

SEQ ID NO: 653555 - RNA, 19 nt, Artificial Sequence
  Description of Artificial Sequence: Synthetic oligonucleotide
  Antisense strand to SEQ ID NO: 653554
uccacaacgucacaagagc

SEQ ID NO: 653556 - RNA, 19 nt, Artificial Sequence
  Description of Artificial Sequence: Synthetic oligonucleotide
  Sense strand starting at position 2248 of SEQ ID NO: 585610
gcuagugugagagaccaaa

SEQ ID NO: 653557 - RNA, 19 nt, Artificial Sequence
  Description of Artificial Sequence: Synthetic oligonucleotide
  Antisense strand to SEQ ID NO: 653556
uuuggucucucacacuagc

SEQ ID NO: 653558 - RNA, 19 nt, Artificial Sequence
  Description of Artificial Sequence: Synthetic oligonucleotide
  Sense strand starting at position 2397 of SEQ ID NO: 585610
gggucuugcgaagaacuga

SEQ ID NO: 653559 - RNA, 19 nt, Artificial Sequence
  Description of Artificial Sequence: Synthetic oligonucleotide
  Antisense strand to SEQ ID NO: 653558
ucaguucuucgcaagaccc

SEQ ID NO: 653560 - RNA, 19 nt, Artificial Sequence
  Description of Artificial Sequence: Synthetic oligonucleotide
  Sense strand starting at position 2428 of SEQ ID NO: 585610
agguuuaguggcgauggga

SEQ ID NO: 653561 - RNA, 19 nt, Artificial Sequence
  Description of Artificial Sequence: Synthetic oligonucleotide
  Antisense strand to SEQ ID NO: 653560
ucccaucgccacuaaaccu

SEQ ID NO: 653562 - RNA, 19 nt, Artificial Sequence
  Description of Artificial Sequence: Synthetic oligonucleotide
  Sense strand starting at position 2562 of SEQ ID NO: 585610
aggccaucucuacaaaggu

SEQ ID NO: 653563 - RNA, 19 nt, Artificial Sequence
  Description of Artificial Sequence: Synthetic oligonucleotide
  Antisense strand to SEQ ID NO: 653562
accuuuguagagauggccu

SEQ ID NO: 653564 - RNA, 19 nt, Artificial Sequence
  Description of Artificial Sequence: Synthetic oligonucleotide
  Sense strand starting at position 2950 of SEQ ID NO: 585610
auuaaagaguuguuagagu

SEQ ID NO: 653565 - RNA, 19 nt, Artificial Sequence
  Description of Artificial Sequence: Synthetic oligonucleotide
  Antisense strand to SEQ ID NO: 653564
acucuaacaacucuuuaau

SEQ ID NO: 653566 - RNA, 19 nt, Artificial Sequence
  Description of Artificial Sequence: Synthetic oligonucleotide
  Sense strand starting at position 3001 of SEQ ID NO: 585610
guccguguggcacaaauuu

SEQ ID NO: 653567 - RNA, 19 nt, Artificial Sequence
  Description of Artificial Sequence: Synthetic oligonucleotide
  Antisense strand to SEQ ID NO: 653566
aaauuugugccacacggac

SEQ ID NO: 653568 - RNA, 19 nt, Artificial Sequence
  Description of Artificial Sequence: Synthetic oligonucleotide
  Sense strand starting at position 3186 of SEQ ID NO: 585610
ccaaaugauuccguuauau

SEQ ID NO: 653569 - RNA, 19 nt, Artificial Sequence
  Description of Artificial Sequence: Synthetic oligonucleotide
  Antisense strand to SEQ ID NO: 653568
auauaacggaaucauuugg

SEQ ID NO: 653570 - RNA, 19 nt, Artificial Sequence
  Description of Artificial Sequence: Synthetic oligonucleotide
  Sense strand starting at position 3323 of SEQ ID NO: 585610
cacggaagccuggaauauu

SEQ ID NO: 653571 - RNA, 19 nt, Artificial Sequence
  Description of Artificial Sequence: Synthetic oligonucleotide
  Antisense strand to SEQ ID NO: 653570
aauauuccaggcuuccgug

SEQ ID NO: 653572 - RNA, 19 nt, Artificial Sequence
  Description of Artificial Sequence: Synthetic oligonucleotide
  Sense strand starting at position 3394 of SEQ ID NO: 585610
uauuuagugugauaaacag

SEQ ID NO: 653573 - RNA, 19 nt, Artificial Sequence
  Description of Artificial Sequence: Synthetic oligonucleotide
  Antisense strand to SEQ ID NO: 653572
cuguuuaucacacuaaaua

SEQ ID NO: 653574 - RNA, 19 nt, Artificial Sequence
  Description of Artificial Sequence: Synthetic oligonucleotide
  Sense strand starting at position 3468 of SEQ ID NO: 585610
ggaagauguuaugcaauuc

SEQ ID NO: 653575 - RNA, 19 nt, Artificial Sequence
  Description of Artificial Sequence: Synthetic oligonucleotide
  Antisense strand to SEQ ID NO: 653574
gaauugcauaacaucuucc

SEQ ID NO: 653576 - RNA, 19 nt, Artificial Sequence
  Description of Artificial Sequence: Synthetic oligonucleotide
  Sense strand starting at position 3594 of SEQ ID NO: 585610
gaucgccaccuuuauugau

SEQ ID NO: 653577 - RNA, 19 nt, Artificial Sequence
  Description of Artificial Sequence: Synthetic oligonucleotide
  Antisense strand to SEQ ID NO: 653576
aucaauaaagguggcgauc

SEQ ID NO: 653578 - RNA, 19 nt, Artificial Sequence
  Description of Artificial Sequence: Synthetic oligonucleotide
  Sense strand starting at position 3612 of SEQ ID NO: 585610
uuagaagaauguccgugau

SEQ ID NO: 653579 - RNA, 19 nt, Artificial Sequence
  Description of Artificial Sequence: Synthetic oligonucleotide
  Antisense strand to SEQ ID NO: 653578
aucacggacauucuucuaa

SEQ ID NO: 653580 - RNA, 19 nt, Artificial Sequence
  Description of Artificial Sequence: Synthetic oligonucleotide
  Sense strand starting at position 3614 of SEQ ID NO: 585610
agaagaauguccgugauaa

SEQ ID NO: 653581 - RNA, 19 nt, Artificial Sequence
  Description of Artificial Sequence: Synthetic oligonucleotide
  Antisense strand to SEQ ID NO: 653580
uuaucacggacauucuucu

SEQ ID NO: 653582 - RNA, 19 nt, Artificial Sequence
  Description of Artificial Sequence: Synthetic oligonucleotide
  Sense strand starting at position 3615 of SEQ ID NO: 585610
gaagaauguccgugauaaa

SEQ ID NO: 653583 - RNA, 19 nt, Artificial Sequence
  Description of Artificial Sequence: Synthetic oligonucleotide
  Antisense strand to SEQ ID NO: 653582
uuuaucacggacauucuuc

SEQ ID NO: 653584 - RNA, 19 nt, Artificial Sequence
  Description of Artificial Sequence: Synthetic oligonucleotide
  Sense strand starting at position 3945 of SEQ ID NO: 585610
ggccaauagucauugaagg

SEQ ID NO: 653585 - RNA, 19 nt, Artificial Sequence
  Description of Artificial Sequence: Synthetic oligonucleotide
  Antisense strand to SEQ ID NO: 653584
ccuucaaugacuauuggcc

SEQ ID NO: 653586 - RNA, 19 nt, Artificial Sequence
  Description of Artificial Sequence: Synthetic oligonucleotide
  Sense strand starting at position 3963 of SEQ ID NO: 585610
gggaccaucucuuccacau

SEQ ID NO: 653587 - RNA, 19 nt, Artificial Sequence
  Description of Artificial Sequence: Synthetic oligonucleotide
  Antisense strand to SEQ ID NO: 653586
auguggaagagaugguccc

SEQ ID NO: 653588 - RNA, 19 nt, Artificial Sequence
  Description of Artificial Sequence: Synthetic oligonucleotide
  Sense strand starting at position 157 of SEQ ID NO: 585611
gguuaagaacccuguacau

SEQ ID NO: 653589 - RNA, 19 nt, Artificial Sequence
  Description of Artificial Sequence: Synthetic oligonucleotide
  Antisense strand to SEQ ID NO: 653588
auguacaggguucuuaacc

SEQ ID NO: 653590 - RNA, 19 nt, Artificial Sequence
  Description of Artificial Sequence: Synthetic oligonucleotide
  Sense strand starting at position 242 of SEQ ID NO: 585611
ugaguuuaccuuuagcaug

SEQ ID NO: 653591 - RNA, 19 nt, Artificial Sequence
  Description of Artificial Sequence: Synthetic oligonucleotide
  Antisense strand to SEQ ID NO: 653590
caugcuaaagguaaacuca

SEQ ID NO: 653592 - RNA, 19 nt, Artificial Sequence
  Description of Artificial Sequence: Synthetic oligonucleotide
  Sense strand starting at position 440 of SEQ ID NO: 585611
ccaacagaaugcucugaau

SEQ ID NO: 653593 - RNA, 19 nt, Artificial Sequence
  Description of Artificial Sequence: Synthetic oligonucleotide
  Antisense strand to SEQ ID NO: 653592
auucagagcauucuguugg

SEQ ID NO: 653594 - RNA, 19 nt, Artificial Sequence
  Description of Artificial Sequence: Synthetic oligonucleotide
  Sense strand starting at position 716 of SEQ ID NO: 585611
gagggaacuguugauuguu

SEQ ID NO: 653595 - RNA, 19 nt, Artificial Sequence
  Description of Artificial Sequence: Synthetic oligonucleotide
  Antisense strand to SEQ ID NO: 653594
aacaaucaacaguucccuc

SEQ ID NO: 653596 - RNA, 19 nt, Artificial Sequence
  Description of Artificial Sequence: Synthetic oligonucleotide
  Sense strand starting at position 721 of SEQ ID NO: 585611
aacuguugauuguuaggau

SEQ ID NO: 653597 - RNA, 19 nt, Artificial Sequence
  Description of Artificial Sequence: Synthetic oligonucleotide
  Antisense strand to SEQ ID NO: 653596
auccuaacaaucaacaguu

SEQ ID NO: 653598 - RNA, 19 nt, Artificial Sequence
  Description of Artificial Sequence: Synthetic oligonucleotide
  Sense strand starting at position 1118 of SEQ ID NO: 585611
augcauugaguuuaauaga

SEQ ID NO: 653599 - RNA, 19 nt, Artificial Sequence
  Description of Artificial Sequence: Synthetic oligonucleotide
  Antisense strand to SEQ ID NO: 653598
ucuauuaaacucaaugcau

SEQ ID NO: 653600 - RNA, 19 nt, Artificial Sequence
  Description of Artificial Sequence: Synthetic oligonucleotide
  Sense strand starting at position 1391 of SEQ ID NO: 585611
agaugcuagucaccuggaa

SEQ ID NO: 653601 - RNA, 19 nt, Artificial Sequence
  Description of Artificial Sequence: Synthetic oligonucleotide
  Antisense strand to SEQ ID NO: 653600
uuccaggugacuagcaucu

SEQ ID NO: 653602 - RNA, 19 nt, Artificial Sequence
  Description of Artificial Sequence: Synthetic oligonucleotide
  Sense strand starting at position 1435 of SEQ ID NO: 585611
uugcuugaugaugacuaau

SEQ ID NO: 653603 - RNA, 19 nt, Artificial Sequence
  Description of Artificial Sequence: Synthetic oligonucleotide
  Antisense strand to SEQ ID NO: 653602
auuagucaucaucaagcaa

SEQ ID NO: 653604 - RNA, 19 nt, Artificial Sequence
  Description of Artificial Sequence: Synthetic oligonucleotide
  Sense strand starting at position 1437 of SEQ ID NO: 585611
gcuugaugaugacuaauca

SEQ ID NO: 653605 - RNA, 19 nt, Artificial Sequence
  Description of Artificial Sequence: Synthetic oligonucleotide
  Antisense strand to SEQ ID NO: 653604
ugauuagucaucaucaagc

SEQ ID NO: 653606 - RNA, 19 nt, Artificial Sequence
  Description of Artificial Sequence: Synthetic oligonucleotide
  Sense strand starting at position 1684 of SEQ ID NO: 585611
gcagcaauacaugaguaca

SEQ ID NO: 653607 - RNA, 19 nt, Artificial Sequence
  Description of Artificial Sequence: Synthetic oligonucleotide
  Antisense strand to SEQ ID NO: 653606
uguacucauguauugcugc

SEQ ID NO: 653608 - RNA, 19 nt, Artificial Sequence
  Description of Artificial Sequence: Synthetic oligonucleotide
  Sense strand starting at position 1686 of SEQ ID NO: 585611
agcaauacaugaguacaau

SEQ ID NO: 653609 - RNA, 19 nt, Artificial Sequence
  Description of Artificial Sequence: Synthetic oligonucleotide
  Antisense strand to SEQ ID NO: 653608
auuguacucauguauugcu

SEQ ID NO: 653610 - RNA, 19 nt, Artificial Sequence
  Description of Artificial Sequence: Synthetic oligonucleotide
  Sense strand starting at position 1687 of SEQ ID NO: 585611
gcaauacaugaguacaauu

SEQ ID NO: 653611 - RNA, 19 nt, Artificial Sequence
  Description of Artificial Sequence: Synthetic oligonucleotide
  Antisense strand to SEQ ID NO: 653610
aauuguacucauguauugc

SEQ ID NO: 653612 - RNA, 19 nt, Artificial Sequence
  Description of Artificial Sequence: Synthetic oligonucleotide
  Sense strand starting at position 2044 of SEQ ID NO: 585611
gugggaugacucugaguca

SEQ ID NO: 653613 - RNA, 19 nt, Artificial Sequence
  Description of Artificial Sequence: Synthetic oligonucleotide
  Antisense strand to SEQ ID NO: 653612
ugacucagagucaucccac

SEQ ID NO: 653614 - RNA, 19 nt, Artificial Sequence
  Description of Artificial Sequence: Synthetic oligonucleotide
  Sense strand starting at position 2051 of SEQ ID NO: 585611
gacucugagucauccagag

SEQ ID NO: 653615 - RNA, 19 nt, Artificial Sequence
  Description of Artificial Sequence: Synthetic oligonucleotide
  Antisense strand to SEQ ID NO: 653614
cucuggaugacucagaguc

SEQ ID NO: 653616 - RNA, 19 nt, Artificial Sequence
  Description of Artificial Sequence: Synthetic oligonucleotide
  Sense strand starting at position 2055 of SEQ ID NO: 585611
cugagucauccagagcaaa

SEQ ID NO: 653617 - RNA, 19 nt, Artificial Sequence
  Description of Artificial Sequence: Synthetic oligonucleotide
  Antisense strand to SEQ ID NO: 653616
uuugcucuggaugacucag

SEQ ID NO: 653618 - RNA, 19 nt, Artificial Sequence
  Description of Artificial Sequence: Synthetic oligonucleotide
  Sense strand starting at position 2058 of SEQ ID NO: 585611
agucauccagagcaaaguu

SEQ ID NO: 653619 - RNA, 19 nt, Artificial Sequence
  Description of Artificial Sequence: Synthetic oligonucleotide
  Antisense strand to SEQ ID NO: 653618
aacuuugcucuggaugacu

SEQ ID NO: 653620 - RNA, 19 nt, Artificial Sequence
  Description of Artificial Sequence: Synthetic oligonucleotide
  Sense strand starting at position 2218 of SEQ ID NO: 585611
guggguuugacucaaucau

SEQ ID NO: 653621 - RNA, 19 nt, Artificial Sequence
  Description of Artificial Sequence: Synthetic oligonucleotide
  Antisense strand to SEQ ID NO: 653620
augauugagucaaacccac

SEQ ID NO: 653622 - RNA, 19 nt, Artificial Sequence
  Description of Artificial Sequence: Synthetic oligonucleotide
  Sense strand starting at position 2251 of SEQ ID NO: 585611
agugcuuucccugaugaag

SEQ ID NO: 653623 - RNA, 19 nt, Artificial Sequence
  Description of Artificial Sequence: Synthetic oligonucleotide
  Antisense strand to SEQ ID NO: 653622
cuucaucagggaaagcacu

SEQ ID NO: 653624 - RNA, 19 nt, Artificial Sequence
  Description of Artificial Sequence: Synthetic oligonucleotide
  Sense strand starting at position 2310 of SEQ ID NO: 585611
ugcagauugcccuaaagau

SEQ ID NO: 653625 - RNA, 19 nt, Artificial Sequence
  Description of Artificial Sequence: Synthetic oligonucleotide
  Antisense strand to SEQ ID NO: 653624
aucuuuagggcaaucugca

SEQ ID NO: 653626 - RNA, 19 nt, Artificial Sequence
  Description of Artificial Sequence: Synthetic oligonucleotide
  Sense strand starting at position 2648 of SEQ ID NO: 585611
cuuggaauauguucucuaa

SEQ ID NO: 653627 - RNA, 19 nt, Artificial Sequence
  Description of Artificial Sequence: Synthetic oligonucleotide
  Antisense strand to SEQ ID NO: 653626
uuagagaacauauuccaag

SEQ ID NO: 653628 - RNA, 19 nt, Artificial Sequence
  Description of Artificial Sequence: Synthetic oligonucleotide
  Sense strand starting at position 2650 of SEQ ID NO: 585611
uggaauauguucucuaaug

SEQ ID NO: 653629 - RNA, 19 nt, Artificial Sequence
  Description of Artificial Sequence: Synthetic oligonucleotide
  Antisense strand to SEQ ID NO: 653628
cauuagagaacauauucca

SEQ ID NO: 653630 - RNA, 19 nt, Artificial Sequence
  Description of Artificial Sequence: Synthetic oligonucleotide
  Sense strand starting at position 2652 of SEQ ID NO: 585611
gaauauguucucuaaugug

SEQ ID NO: 653631 - RNA, 19 nt, Artificial Sequence
  Description of Artificial Sequence: Synthetic oligonucleotide
  Antisense strand to SEQ ID NO: 653630
cacauuagagaacauauuc

SEQ ID NO: 653632 - RNA, 19 nt, Artificial Sequence
  Description of Artificial Sequence: Synthetic oligonucleotide
  Sense strand starting at position 2691 of SEQ ID NO: 585611
agacaauucucaguuguga

SEQ ID NO: 653633 - RNA, 19 nt, Artificial Sequence
  Description of Artificial Sequence: Synthetic oligonucleotide
  Antisense strand to SEQ ID NO: 653632
ucacaacugagaauugucu

SEQ ID NO: 653634 - RNA, 19 nt, Artificial Sequence
  Description of Artificial Sequence: Synthetic oligonucleotide
  Sense strand starting at position 2699 of SEQ ID NO: 585611
cucaguugugaagagggua

SEQ ID NO: 653635 - RNA, 19 nt, Artificial Sequence
  Description of Artificial Sequence: Synthetic oligonucleotide
  Antisense strand to SEQ ID NO: 653634
uacccucuucacaacugag

SEQ ID NO: 653636 - RNA, 19 nt, Artificial Sequence
  Description of Artificial Sequence: Synthetic oligonucleotide
  Sense strand starting at position 2911 of SEQ ID NO: 585611
agauaaacucagggcuuga

SEQ ID NO: 653637 - RNA, 19 nt, Artificial Sequence
  Description of Artificial Sequence: Synthetic oligonucleotide
  Antisense strand to SEQ ID NO: 653636
ucaagcccugaguuuaucu

SEQ ID NO: 653638 - RNA, 19 nt, Artificial Sequence
  Description of Artificial Sequence: Synthetic oligonucleotide
  Sense strand starting at position 3232 of SEQ ID NO: 585611
guuaacucugcguugccua

SEQ ID NO: 653639 - RNA, 19 nt, Artificial Sequence
  Description of Artificial Sequence: Synthetic oligonucleotide
  Antisense strand to SEQ ID NO: 653638
uaggcaacgcagaguuaac

SEQ ID NO: 653640 - RNA, 19 nt, Artificial Sequence
  Description of Artificial Sequence: Synthetic oligonucleotide
  Sense strand starting at position 3298 of SEQ ID NO: 585611
guugauucuccucagaacu

SEQ ID NO: 653641 - RNA, 19 nt, Artificial Sequence
  Description of Artificial Sequence: Synthetic oligonucleotide
  Antisense strand to SEQ ID NO: 653640
aguucugaggagaaucaac

SEQ ID NO: 653642 - RNA, 19 nt, Artificial Sequence
  Description of Artificial Sequence: Synthetic oligonucleotide
  Sense strand starting at position 3408 of SEQ ID NO: 585611
ggaagugugcuacauacca

SEQ ID NO: 653643 - RNA, 19 nt, Artificial Sequence
  Description of Artificial Sequence: Synthetic oligonucleotide
  Antisense strand to SEQ ID NO: 653642
ugguauguagcacacuucc

SEQ ID NO: 653644 - RNA, 19 nt, Artificial Sequence
  Description of Artificial Sequence: Synthetic oligonucleotide
  Sense strand starting at position 3464 of SEQ ID NO: 585611
ggaauacguaaaugaauau

SEQ ID NO: 653645 - RNA, 19 nt, Artificial Sequence
  Description of Artificial Sequence: Synthetic oligonucleotide
  Antisense strand to SEQ ID NO: 653644
auauucauuuacguauucc

SEQ ID NO: 653646 - RNA, 19 nt, Artificial Sequence
  Description of Artificial Sequence: Synthetic oligonucleotide
  Sense strand starting at position 3477 of SEQ ID NO: 585611
gaauauuaaguauguggga

SEQ ID NO: 653647 - RNA, 19 nt, Artificial Sequence
  Description of Artificial Sequence: Synthetic oligonucleotide
  Antisense strand to SEQ ID NO: 653646
ucccacauacuuaauauuc

SEQ ID NO: 653648 - RNA, 19 nt, Artificial Sequence
  Description of Artificial Sequence: Synthetic oligonucleotide
  Sense strand starting at position 3478 of SEQ ID NO: 585611
aauauuaaguaugugggau

SEQ ID NO: 653649 - RNA, 19 nt, Artificial Sequence
  Description of Artificial Sequence: Synthetic oligonucleotide
  Antisense strand to SEQ ID NO: 653648
aucccacauacuuaauauu

SEQ ID NO: 653650 - RNA, 19 nt, Artificial Sequence
  Description of Artificial Sequence: Synthetic oligonucleotide
  Sense strand starting at position 3479 of SEQ ID NO: 585611
auauuaaguaugugggaua

SEQ ID NO: 653651 - RNA, 19 nt, Artificial Sequence
  Description of Artificial Sequence: Synthetic oligonucleotide
  Antisense strand to SEQ ID NO: 653650
uaucccacauacuuaauau

SEQ ID NO: 653652 - RNA, 19 nt, Artificial Sequence
  Description of Artificial Sequence: Synthetic oligonucleotide
  Sense strand starting at position 3484 of SEQ ID NO: 585611
aaguaugugggauaauugu

SEQ ID NO: 653653 - RNA, 19 nt, Artificial Sequence
  Description of Artificial Sequence: Synthetic oligonucleotide
  Antisense strand to SEQ ID NO: 653652
acaauuaucccacauacuu

SEQ ID NO: 653654 - RNA, 19 nt, Artificial Sequence
  Description of Artificial Sequence: Synthetic oligonucleotide
  Sense strand starting at position 3545 of SEQ ID NO: 585611
agugcauuccuagagggau

SEQ ID NO: 653655 - RNA, 19 nt, Artificial Sequence
  Description of Artificial Sequence: Synthetic oligonucleotide
  Antisense strand to SEQ ID NO: 653654
aucccucuaggaaugcacu

SEQ ID NO: 653656 - RNA, 19 nt, Artificial Sequence
  Description of Artificial Sequence: Synthetic oligonucleotide
  Sense strand starting at position 3547 of SEQ ID NO: 585611
ugcauuccuagagggauua

SEQ ID NO: 653657 - RNA, 19 nt, Artificial Sequence
  Description of Artificial Sequence: Synthetic oligonucleotide
  Antisense strand to SEQ ID NO: 653656
uaaucccucuaggaaugca

SEQ ID NO: 653658 - RNA, 19 nt, Artificial Sequence
  Description of Artificial Sequence: Synthetic oligonucleotide
  Sense strand starting at position 3548 of SEQ ID NO: 585611
gcauuccuagagggauuau

SEQ ID NO: 653659 - RNA, 19 nt, Artificial Sequence
  Description of Artificial Sequence: Synthetic oligonucleotide
  Antisense strand to SEQ ID NO: 653658
auaaucccucuaggaaugc

SEQ ID NO: 653660 - RNA, 19 nt, Artificial Sequence
  Description of Artificial Sequence: Synthetic oligonucleotide
  Sense strand starting at position 3657 of SEQ ID NO: 585611
ggccuuccaccauaguaaa

SEQ ID NO: 653661 - RNA, 19 nt, Artificial Sequence
  Description of Artificial Sequence: Synthetic oligonucleotide
  Antisense strand to SEQ ID NO: 653660
uuuacuaugguggaaggcc

SEQ ID NO: 653662 - RNA, 19 nt, Artificial Sequence
  Description of Artificial Sequence: Synthetic oligonucleotide
  Sense strand starting at position 3808 of SEQ ID NO: 585611
caaggcggucuacauuaaa

SEQ ID NO: 653663 - RNA, 19 nt, Artificial Sequence
  Description of Artificial Sequence: Synthetic oligonucleotide
  Antisense strand to SEQ ID NO: 653662
uuuaauguagaccgccuug

SEQ ID NO: 653664 - RNA, 19 nt, Artificial Sequence
  Description of Artificial Sequence: Synthetic oligonucleotide
  Sense strand starting at position 3811 of SEQ ID NO: 585611
ggcggucuacauuaaauga

SEQ ID NO: 653665 - RNA, 19 nt, Artificial Sequence
  Description of Artificial Sequence: Synthetic oligonucleotide
  Antisense strand to SEQ ID NO: 653664
ucauuuaauguagaccgcc

SEQ ID NO: 653666 - RNA, 19 nt, Artificial Sequence
  Description of Artificial Sequence: Synthetic oligonucleotide
  Sense strand starting at position 3944 of SEQ ID NO: 585611
ccaggagaguccuuaggac

SEQ ID NO: 653667 - RNA, 19 nt, Artificial Sequence
  Description of Artificial Sequence: Synthetic oligonucleotide
  Antisense strand to SEQ ID NO: 653666
guccuaaggacucuccugg

SEQ ID NO: 653668 - RNA, 19 nt, Artificial Sequence
  Description of Artificial Sequence: Synthetic oligonucleotide
  Sense strand starting at position 21 of SEQ ID NO: 585612
aaugcaaacugcguaagaa

SEQ ID NO: 653669 - RNA, 19 nt, Artificial Sequence
  Description of Artificial Sequence: Synthetic oligonucleotide
  Antisense strand to SEQ ID NO: 653668
uucuuacgcaguuugcauu

SEQ ID NO: 653670 - RNA, 19 nt, Artificial Sequence
  Description of Artificial Sequence: Synthetic oligonucleotide
  Sense strand starting at position 22 of SEQ ID NO: 585612
augcaaacugcguaagaau

SEQ ID NO: 653671 - RNA, 19 nt, Artificial Sequence
  Description of Artificial Sequence: Synthetic oligonucleotide
  Antisense strand to SEQ ID NO: 653670
auucuuacgcaguuugcau

SEQ ID NO: 653672 - RNA, 19 nt, Artificial Sequence
  Description of Artificial Sequence: Synthetic oligonucleotide
  Sense strand starting at position 49 of SEQ ID NO: 585612
uuguaagaacugugaggaa

SEQ ID NO: 653673 - RNA, 19 nt, Artificial Sequence
  Description of Artificial Sequence: Synthetic oligonucleotide
  Antisense strand to SEQ ID NO: 653672
uuccucacaguucuuacaa

SEQ ID NO: 653674 - RNA, 19 nt, Artificial Sequence
  Description of Artificial Sequence: Synthetic oligonucleotide
  Sense strand starting at position 174 of SEQ ID NO: 585612
cauaaugugguccauuagu

SEQ ID NO: 653675 - RNA, 19 nt, Artificial Sequence
  Description of Artificial Sequence: Synthetic oligonucleotide
  Antisense strand to SEQ ID NO: 653674
acuaauggaccacauuaug

SEQ ID NO: 653676 - RNA, 19 nt, Artificial Sequence
  Description of Artificial Sequence: Synthetic oligonucleotide
  Sense strand starting at position 184 of SEQ ID NO: 585612
uccauuagucuuugauauu

SEQ ID NO: 653677 - RNA, 19 nt, Artificial Sequence
  Description of Artificial Sequence: Synthetic oligonucleotide
  Antisense strand to SEQ ID NO: 653676
aauaucaaagacuaaugga

SEQ ID NO: 653678 - RNA, 19 nt, Artificial Sequence
  Description of Artificial Sequence: Synthetic oligonucleotide
  Sense strand starting at position 205 of SEQ ID NO: 585612
auugaagaaaguuguggua

SEQ ID NO: 653679 - RNA, 19 nt, Artificial Sequence
  Description of Artificial Sequence: Synthetic oligonucleotide
  Antisense strand to SEQ ID NO: 653678
uaccacaacuuucuucaau

SEQ ID NO: 653680 - RNA, 19 nt, Artificial Sequence
  Description of Artificial Sequence: Synthetic oligonucleotide
  Sense strand starting at position 333 of SEQ ID NO: 585612
agcaaaugaucucuugaga

SEQ ID NO: 653681 - RNA, 19 nt, Artificial Sequence
  Description of Artificial Sequence: Synthetic oligonucleotide
  Antisense strand to SEQ ID NO: 653680
ucucaagagaucauuugcu

SEQ ID NO: 653682 - RNA, 19 nt, Artificial Sequence
  Description of Artificial Sequence: Synthetic oligonucleotide
  Sense strand starting at position 459 of SEQ ID NO: 585612
ugagcauuauggucaucag

SEQ ID NO: 653683 - RNA, 19 nt, Artificial Sequence
  Description of Artificial Sequence: Synthetic oligonucleotide
  Antisense strand to SEQ ID NO: 653682
cugaugaccauaaugcuca

SEQ ID NO: 653684 - RNA, 19 nt, Artificial Sequence
  Description of Artificial Sequence: Synthetic oligonucleotide
  Sense strand starting at position 460 of SEQ ID NO: 585612
gagcauuauggucaucagu

SEQ ID NO: 653685 - RNA, 19 nt, Artificial Sequence
  Description of Artificial Sequence: Synthetic oligonucleotide
  Antisense strand to SEQ ID NO: 653684
acugaugaccauaaugcuc

SEQ ID NO: 653686 - RNA, 19 nt, Artificial Sequence
  Description of Artificial Sequence: Synthetic oligonucleotide
  Sense strand starting at position 548 of SEQ ID NO: 585612
uggcaaugucaguaagaag

SEQ ID NO: 653687 - RNA, 19 nt, Artificial Sequence
  Description of Artificial Sequence: Synthetic oligonucleotide
  Antisense strand to SEQ ID NO: 653686
cuucuuacugacauugcca

SEQ ID NO: 653688 - RNA, 19 nt, Artificial Sequence
  Description of Artificial Sequence: Synthetic oligonucleotide
  Sense strand starting at position 608 of SEQ ID NO: 585612
gaaaucuaucuguacacga

SEQ ID NO: 653689 - RNA, 19 nt, Artificial Sequence
  Description of Artificial Sequence: Synthetic oligonucleotide
  Antisense strand to SEQ ID NO: 653688
ucguguacagauagauuuc

SEQ ID NO: 653690 - RNA, 19 nt, Artificial Sequence
  Description of Artificial Sequence: Synthetic oligonucleotide
  Sense strand starting at position 711 of SEQ ID NO: 585612
uuucuagaugaacguuuaa

SEQ ID NO: 653691 - RNA, 19 nt, Artificial Sequence
  Description of Artificial Sequence: Synthetic oligonucleotide
  Antisense strand to SEQ ID NO: 653690
uuaaacguucaucuagaaa

SEQ ID NO: 653692 - RNA, 19 nt, Artificial Sequence
  Description of Artificial Sequence: Synthetic oligonucleotide
  Sense strand starting at position 974 of SEQ ID NO: 585612
gucauuuggcuccgaaaug

SEQ ID NO: 653693 - RNA, 19 nt, Artificial Sequence
  Description of Artificial Sequence: Synthetic oligonucleotide
  Antisense strand to SEQ ID NO: 653692
cauuucggagccaaaugac

SEQ ID NO: 653694 - RNA, 19 nt, Artificial Sequence
  Description of Artificial Sequence: Synthetic oligonucleotide
  Sense strand starting at position 1210 of SEQ ID NO: 585612
ugaggugacuuggcuaaag

SEQ ID NO: 653695 - RNA, 19 nt, Artificial Sequence
  Description of Artificial Sequence: Synthetic oligonucleotide
  Antisense strand to SEQ ID NO: 653694
cuuuagccaagucaccuca

SEQ ID NO: 653696 - RNA, 19 nt, Artificial Sequence
  Description of Artificial Sequence: Synthetic oligonucleotide
  Sense strand starting at position 1486 of SEQ ID NO: 585612
ccugacuugugaguuaaac

SEQ ID NO: 653697 - RNA, 19 nt, Artificial Sequence
  Description of Artificial Sequence: Synthetic oligonucleotide
  Antisense strand to SEQ ID NO: 653696
guuuaacucacaagucagg

SEQ ID NO: 653698 - RNA, 19 nt, Artificial Sequence
  Description of Artificial Sequence: Synthetic oligonucleotide
  Sense strand starting at position 1488 of SEQ ID NO: 585612
ugacuugugaguuaaacga

SEQ ID NO: 653699 - RNA, 19 nt, Artificial Sequence
  Description of Artificial Sequence: Synthetic oligonucleotide
  Antisense strand to SEQ ID NO: 653698
ucguuuaacucacaaguca

SEQ ID NO: 653700 - RNA, 19 nt, Artificial Sequence
  Description of Artificial Sequence: Synthetic oligonucleotide
  Sense strand starting at position 1492 of SEQ ID NO: 585612
uugugaguuaaacgaugga

SEQ ID NO: 653701 - RNA, 19 nt, Artificial Sequence
  Description of Artificial Sequence: Synthetic oligonucleotide
  Antisense strand to SEQ ID NO: 653700
uccaucguuuaacucacaa

SEQ ID NO: 653702 - RNA, 19 nt, Artificial Sequence
  Description of Artificial Sequence: Synthetic oligonucleotide
  Sense strand starting at position 2039 of SEQ ID NO: 585612
ugcguuaaccaccaacuaa

SEQ ID NO: 653703 - RNA, 19 nt, Artificial Sequence
  Description of Artificial Sequence: Synthetic oligonucleotide
  Antisense strand to SEQ ID NO: 653702
uuaguuggugguuaacgca

SEQ ID NO: 653704 - RNA, 19 nt, Artificial Sequence
  Description of Artificial Sequence: Synthetic oligonucleotide
  Sense strand starting at position 2060 of SEQ ID NO: 585612
aucggugaucgucacacaa

SEQ ID NO: 653705 - RNA, 19 nt, Artificial Sequence
  Description of Artificial Sequence: Synthetic oligonucleotide
  Antisense strand to SEQ ID NO: 653704
uugugugacgaucaccgau

SEQ ID NO: 653706 - RNA, 19 nt, Artificial Sequence
  Description of Artificial Sequence: Synthetic oligonucleotide
  Sense strand starting at position 2121 of SEQ ID NO: 585612
ugaugagguucugcuaaga

SEQ ID NO: 653707 - RNA, 19 nt, Artificial Sequence
  Description of Artificial Sequence: Synthetic oligonucleotide
  Antisense strand to SEQ ID NO: 653706
ucuuagcagaaccucauca

SEQ ID NO: 653708 - RNA, 19 nt, Artificial Sequence
  Description of Artificial Sequence: Synthetic oligonucleotide
  Sense strand starting at position 2134 of SEQ ID NO: 585612
cuaagauuucugugacgug

SEQ ID NO: 653709 - RNA, 19 nt, Artificial Sequence
  Description of Artificial Sequence: Synthetic oligonucleotide
  Antisense strand to SEQ ID NO: 653708
cacgucacagaaaucuuag

SEQ ID NO: 653710 - RNA, 19 nt, Artificial Sequence
  Description of Artificial Sequence: Synthetic oligonucleotide
  Sense strand starting at position 2503 of SEQ ID NO: 585612
agccauauuacauggacga

SEQ ID NO: 653711 - RNA, 19 nt, Artificial Sequence
  Description of Artificial Sequence: Synthetic oligonucleotide
  Antisense strand to SEQ ID NO: 653710
ucguccauguaauauggcu

SEQ ID NO: 653712 - RNA, 19 nt, Artificial Sequence
  Description of Artificial Sequence: Synthetic oligonucleotide
  Sense strand starting at position 2543 of SEQ ID NO: 585612
uuuaucugcuuccugagaa

SEQ ID NO: 653713 - RNA, 19 nt, Artificial Sequence
  Description of Artificial Sequence: Synthetic oligonucleotide
  Antisense strand to SEQ ID NO: 653712
uucucaggaagcagauaaa

SEQ ID NO: 653714 - RNA, 19 nt, Artificial Sequence
  Description of Artificial Sequence: Synthetic oligonucleotide
  Sense strand starting at position 2555 of SEQ ID NO: 585612
cugagaaagugguuucuca

SEQ ID NO: 653715 - RNA, 19 nt, Artificial Sequence
  Description of Artificial Sequence: Synthetic oligonucleotide
  Antisense strand to SEQ ID NO: 653714
ugagaaaccacuuucucag

SEQ ID NO: 653716 - RNA, 19 nt, Artificial Sequence
  Description of Artificial Sequence: Synthetic oligonucleotide
  Sense strand starting at position 2559 of SEQ ID NO: 585612
gaaagugguuucucacuga

SEQ ID NO: 653717 - RNA, 19 nt, Artificial Sequence
  Description of Artificial Sequence: Synthetic oligonucleotide
  Antisense strand to SEQ ID NO: 653716
ucagugagaaaccacuuuc

SEQ ID NO: 653718 - RNA, 19 nt, Artificial Sequence
  Description of Artificial Sequence: Synthetic oligonucleotide
  Sense strand starting at position 2589 of SEQ ID NO: 585612
cuccucuggucuccugaaa

SEQ ID NO: 653719 - RNA, 19 nt, Artificial Sequence
  Description of Artificial Sequence: Synthetic oligonucleotide
  Antisense strand to SEQ ID NO: 653718
uuucaggagaccagaggag

SEQ ID NO: 653720 - RNA, 19 nt, Artificial Sequence
  Description of Artificial Sequence: Synthetic oligonucleotide
  Sense strand starting at position 2610 of SEQ ID NO: 585612
cuuaauuaguacucaaagu

SEQ ID NO: 653721 - RNA, 19 nt, Artificial Sequence
  Description of Artificial Sequence: Synthetic oligonucleotide
  Antisense strand to SEQ ID NO: 653720
acuuugaguacuaauuaag

SEQ ID NO: 653722 - RNA, 19 nt, Artificial Sequence
  Description of Artificial Sequence: Synthetic oligonucleotide
  Sense strand starting at position 2899 of SEQ ID NO: 585612
aagguuagauacuuugaac

SEQ ID NO: 653723 - RNA, 19 nt, Artificial Sequence
  Description of Artificial Sequence: Synthetic oligonucleotide
  Antisense strand to SEQ ID NO: 653722
guucaaaguaucuaaccuu

SEQ ID NO: 653724 - RNA, 19 nt, Artificial Sequence
  Description of Artificial Sequence: Synthetic oligonucleotide
  Sense strand starting at position 2919 of SEQ ID NO: 585612
aggcuaaauagcugagaag

SEQ ID NO: 653725 - RNA, 19 nt, Artificial Sequence
  Description of Artificial Sequence: Synthetic oligonucleotide
  Antisense strand to SEQ ID NO: 653724
cuucucagcuauuuagccu

SEQ ID NO: 653726 - RNA, 19 nt, Artificial Sequence
  Description of Artificial Sequence: Synthetic oligonucleotide
  Sense strand starting at position 2976 of SEQ ID NO: 585612
aggauugauugacuuccuu

SEQ ID NO: 653727 - RNA, 19 nt, Artificial Sequence
  Description of Artificial Sequence: Synthetic oligonucleotide
  Antisense strand to SEQ ID NO: 653726
aaggaagucaaucaauccu

SEQ ID NO: 653728 - RNA, 19 nt, Artificial Sequence
  Description of Artificial Sequence: Synthetic oligonucleotide
  Sense strand starting at position 3031 of SEQ ID NO: 585612
aauugugauguaggcacau

SEQ ID NO: 653729 - RNA, 19 nt, Artificial Sequence
  Description of Artificial Sequence: Synthetic oligonucleotide
  Antisense strand to SEQ ID NO: 653728
augugccuacaucacaauu

SEQ ID NO: 653730 - RNA, 19 nt, Artificial Sequence
  Description of Artificial Sequence: Synthetic oligonucleotide
  Sense strand starting at position 3115 of SEQ ID NO: 585612
ucugcacccgccuaauaaa

SEQ ID NO: 653731 - RNA, 19 nt, Artificial Sequence
  Description of Artificial Sequence: Synthetic oligonucleotide
  Antisense strand to SEQ ID NO: 653730
uuuauuaggcgggugcaga

SEQ ID NO: 653732 - RNA, 19 nt, Artificial Sequence
  Description of Artificial Sequence: Synthetic oligonucleotide
  Sense strand starting at position 3362 of SEQ ID NO: 585612
augguaucaugauuggauu

SEQ ID NO: 653733 - RNA, 19 nt, Artificial Sequence
  Description of Artificial Sequence: Synthetic oligonucleotide
  Antisense strand to SEQ ID NO: 653732
aauccaaucaugauaccau

SEQ ID NO: 653734 - RNA, 19 nt, Artificial Sequence
  Description of Artificial Sequence: Synthetic oligonucleotide
  Sense strand starting at position 3392 of SEQ ID NO: 585612
gcaaguguauuuccuauac

SEQ ID NO: 653735 - RNA, 19 nt, Artificial Sequence
  Description of Artificial Sequence: Synthetic oligonucleotide
  Antisense strand to SEQ ID NO: 653734
guauaggaaauacacuugc

SEQ ID NO: 653736 - RNA, 19 nt, Artificial Sequence
  Description of Artificial Sequence: Synthetic oligonucleotide
  Sense strand starting at position 3606 of SEQ ID NO: 585612
aguauuaacuuuguuucca

SEQ ID NO: 653737 - RNA, 19 nt, Artificial Sequence
  Description of Artificial Sequence: Synthetic oligonucleotide
  Antisense strand to SEQ ID NO: 653736
uggaaacaaaguuaauacu

SEQ ID NO: 653738 - RNA, 19 nt, Artificial Sequence
  Description of Artificial Sequence: Synthetic oligonucleotide
  Sense strand starting at position 3812 of SEQ ID NO: 585612
aguccaagaauugguggua

SEQ ID NO: 653739 - RNA, 19 nt, Artificial Sequence
  Description of Artificial Sequence: Synthetic oligonucleotide
  Antisense strand to SEQ ID NO: 653738
uaccaccaauucuuggacu

SEQ ID NO: 653740 - RNA, 19 nt, Artificial Sequence
  Description of Artificial Sequence: Synthetic oligonucleotide
  Sense strand starting at position 3815 of SEQ ID NO: 585612
ccaagaauuggugguagca

SEQ ID NO: 653741 - RNA, 19 nt, Artificial Sequence
  Description of Artificial Sequence: Synthetic oligonucleotide
  Antisense strand to SEQ ID NO: 653740
ugcuaccaccaauucuugg

SEQ ID NO: 653742 - RNA, 19 nt, Artificial Sequence
  Description of Artificial Sequence: Synthetic oligonucleotide
  Sense strand starting at position 3881 of SEQ ID NO: 585612
ccuuuaaaugcagaaaguu

SEQ ID NO: 653743 - RNA, 19 nt, Artificial Sequence
  Description of Artificial Sequence: Synthetic oligonucleotide
  Antisense strand to SEQ ID NO: 653742
aacuuucugcauuuaaagg

SEQ ID NO: 653744 - RNA, 19 nt, Artificial Sequence
  Description of Artificial Sequence: Synthetic oligonucleotide
  Sense strand starting at position 3899 of SEQ ID NO: 585612
uuaauccaacuuugggauu

SEQ ID NO: 653745 - RNA, 19 nt, Artificial Sequence
  Description of Artificial Sequence: Synthetic oligonucleotide
  Antisense strand to SEQ ID NO: 653744
aaucccaaaguuggauuaa

SEQ ID NO: 653746 - RNA, 19 nt, Artificial Sequence
  Description of Artificial Sequence: Synthetic oligonucleotide
  Sense strand starting at position 3919 of SEQ ID NO: 585612
ugccaagugaugugaugaa

SEQ ID NO: 653747 - RNA, 19 nt, Artificial Sequence
  Description of Artificial Sequence: Synthetic oligonucleotide
  Antisense strand to SEQ ID NO: 653746
uucaucacaucacuuggca

SEQ ID NO: 653748 - RNA, 19 nt, Artificial Sequence
  Description of Artificial Sequence: Synthetic oligonucleotide
  Sense strand starting at position 72 of SEQ ID NO: 585613
gugcuuaaugcucagaucu

SEQ ID NO: 653749 - RNA, 19 nt, Artificial Sequence
  Description of Artificial Sequence: Synthetic oligonucleotide
  Antisense strand to SEQ ID NO: 653748
agaucugagcauuaagcac

SEQ ID NO: 653750 - RNA, 19 nt, Artificial Sequence
  Description of Artificial Sequence: Synthetic oligonucleotide
  Sense strand starting at position 79 of SEQ ID NO: 585613
augcucagaucucugaauu

SEQ ID NO: 653751 - RNA, 19 nt, Artificial Sequence
  Description of Artificial Sequence: Synthetic oligonucleotide
  Antisense strand to SEQ ID NO: 653750
aauucagagaucugagcau

SEQ ID NO: 653752 - RNA, 19 nt, Artificial Sequence
  Description of Artificial Sequence: Synthetic oligonucleotide
  Sense strand starting at position 80 of SEQ ID NO: 585613
ugcucagaucucugaauuc

SEQ ID NO: 653753 - RNA, 19 nt, Artificial Sequence
  Description of Artificial Sequence: Synthetic oligonucleotide
  Antisense strand to SEQ ID NO: 653752
gaauucagagaucugagca

SEQ ID NO: 653754 - RNA, 19 nt, Artificial Sequence
  Description of Artificial Sequence: Synthetic oligonucleotide
  Sense strand starting at position 225 of SEQ ID NO: 585613
gugcaagccugauuuguua

SEQ ID NO: 653755 - RNA, 19 nt, Artificial Sequence
  Description of Artificial Sequence: Synthetic oligonucleotide
  Antisense strand to SEQ ID NO: 653754
uaacaaaucaggcuugcac

SEQ ID NO: 653756 - RNA, 19 nt, Artificial Sequence
  Description of Artificial Sequence: Synthetic oligonucleotide
  Sense strand starting at position 426 of SEQ ID NO: 585613
ggaagacaguguucucugu

SEQ ID NO: 653757 - RNA, 19 nt, Artificial Sequence
  Description of Artificial Sequence: Synthetic oligonucleotide
  Antisense strand to SEQ ID NO: 653756
acagagaacacugucuucc

SEQ ID NO: 653758 - RNA, 19 nt, Artificial Sequence
  Description of Artificial Sequence: Synthetic oligonucleotide
  Sense strand starting at position 542 of SEQ ID NO: 585613
gacaaagagugcuuuguuu

SEQ ID NO: 653759 - RNA, 19 nt, Artificial Sequence
  Description of Artificial Sequence: Synthetic oligonucleotide
  Antisense strand to SEQ ID NO: 653758
aaacaaagcacucuuuguc

SEQ ID NO: 653760 - RNA, 19 nt, Artificial Sequence
  Description of Artificial Sequence: Synthetic oligonucleotide
  Sense strand starting at position 639 of SEQ ID NO: 585613
gggagaagggugugugaga

SEQ ID NO: 653761 - RNA, 19 nt, Artificial Sequence
  Description of Artificial Sequence: Synthetic oligonucleotide
  Antisense strand to SEQ ID NO: 653760
ucucacacacccuucuccc

SEQ ID NO: 653762 - RNA, 19 nt, Artificial Sequence
  Description of Artificial Sequence: Synthetic oligonucleotide
  Sense strand starting at position 805 of SEQ ID NO: 585613
gagagauugucccuguagg

SEQ ID NO: 653763 - RNA, 19 nt, Artificial Sequence
  Description of Artificial Sequence: Synthetic oligonucleotide
  Antisense strand to SEQ ID NO: 653762
ccuacagggacaaucucuc

SEQ ID NO: 653764 - RNA, 19 nt, Artificial Sequence
  Description of Artificial Sequence: Synthetic oligonucleotide
  Sense strand starting at position 806 of SEQ ID NO: 585613
agagauugucccuguagga

SEQ ID NO: 653765 - RNA, 19 nt, Artificial Sequence
  Description of Artificial Sequence: Synthetic oligonucleotide
  Antisense strand to SEQ ID NO: 653764
uccuacagggacaaucucu

SEQ ID NO: 653766 - RNA, 19 nt, Artificial Sequence
  Description of Artificial Sequence: Synthetic oligonucleotide
  Sense strand starting at position 928 of SEQ ID NO: 585613
gaccauuguggcgaacaca

SEQ ID NO: 653767 - RNA, 19 nt, Artificial Sequence
  Description of Artificial Sequence: Synthetic oligonucleotide
  Antisense strand to SEQ ID NO: 653766
uguguucgccacaaugguc

SEQ ID NO: 653768 - RNA, 19 nt, Artificial Sequence
  Description of Artificial Sequence: Synthetic oligonucleotide
  Sense strand starting at position 1939 of SEQ ID NO: 585613
agaccugaugccgaucaga

SEQ ID NO: 653769 - RNA, 19 nt, Artificial Sequence
  Description of Artificial Sequence: Synthetic oligonucleotide
  Antisense strand to SEQ ID NO: 653768
ucugaucggcaucaggucu

SEQ ID NO: 653770 - RNA, 19 nt, Artificial Sequence
  Description of Artificial Sequence: Synthetic oligonucleotide
  Sense strand starting at position 2026 of SEQ ID NO: 585613
acugaauuacuccgagcau

SEQ ID NO: 653771 - RNA, 19 nt, Artificial Sequence
  Description of Artificial Sequence: Synthetic oligonucleotide
  Antisense strand to SEQ ID NO: 653770
augcucggaguaauucagu

SEQ ID NO: 653772 - RNA, 19 nt, Artificial Sequence
  Description of Artificial Sequence: Synthetic oligonucleotide
  Sense strand starting at position 2039 of SEQ ID NO: 585613
gagcaucuauaguuggcaa

SEQ ID NO: 653773 - RNA, 19 nt, Artificial Sequence
  Description of Artificial Sequence: Synthetic oligonucleotide
  Antisense strand to SEQ ID NO: 653772
uugccaacuauagaugcuc

SEQ ID NO: 653774 - RNA, 19 nt, Artificial Sequence
  Description of Artificial Sequence: Synthetic oligonucleotide
  Sense strand starting at position 2121 of SEQ ID NO: 585613
gaccgugcuccagauugga

SEQ ID NO: 653775 - RNA, 19 nt, Artificial Sequence
  Description of Artificial Sequence: Synthetic oligonucleotide
  Antisense strand to SEQ ID NO: 653774
uccaaucuggagcacgguc

SEQ ID NO: 653776 - RNA, 19 nt, Artificial Sequence
  Description of Artificial Sequence: Synthetic oligonucleotide
  Sense strand starting at position 2250 of SEQ ID NO: 585613
cucaguguaacacagaguu

SEQ ID NO: 653777 - RNA, 19 nt, Artificial Sequence
  Description of Artificial Sequence: Synthetic oligonucleotide
  Antisense strand to SEQ ID NO: 653776
aacucuguguuacacugag

SEQ ID NO: 653778 - RNA, 19 nt, Artificial Sequence
  Description of Artificial Sequence: Synthetic oligonucleotide
  Sense strand starting at position 2377 of SEQ ID NO: 585613
gggaaaguaguuugaaauu

SEQ ID NO: 653779 - RNA, 19 nt, Artificial Sequence
  Description of Artificial Sequence: Synthetic oligonucleotide
  Antisense strand to SEQ ID NO: 653778
aauuucaaacuacuuuccc

SEQ ID NO: 653780 - RNA, 19 nt, Artificial Sequence
  Description of Artificial Sequence: Synthetic oligonucleotide
  Sense strand starting at position 2389 of SEQ ID NO: 585613
ugaaauuuauguguggugu

SEQ ID NO: 653781 - RNA, 19 nt, Artificial Sequence
  Description of Artificial Sequence: Synthetic oligonucleotide
  Antisense strand to SEQ ID NO: 653780
acaccacacauaaauuuca

SEQ ID NO: 653782 - RNA, 19 nt, Artificial Sequence
  Description of Artificial Sequence: Synthetic oligonucleotide
  Sense strand starting at position 2390 of SEQ ID NO: 585613
gaaauuuaugugugguguu

SEQ ID NO: 653783 - RNA, 19 nt, Artificial Sequence
  Description of Artificial Sequence: Synthetic oligonucleotide
  Antisense strand to SEQ ID NO: 653782
aacaccacacauaaauuuc

SEQ ID NO: 653784 - RNA, 19 nt, Artificial Sequence
  Description of Artificial Sequence: Synthetic oligonucleotide
  Sense strand starting at position 2491 of SEQ ID NO: 585613
uugaguauucugcaguaag

SEQ ID NO: 653785 - RNA, 19 nt, Artificial Sequence
  Description of Artificial Sequence: Synthetic oligonucleotide
  Antisense strand to SEQ ID NO: 653784
cuuacugcagaauacucaa

SEQ ID NO: 653786 - RNA, 19 nt, Artificial Sequence
  Description of Artificial Sequence: Synthetic oligonucleotide
  Sense strand starting at position 2502 of SEQ ID NO: 585613
gcaguaagauggccugaau

SEQ ID NO: 653787 - RNA, 19 nt, Artificial Sequence
  Description of Artificial Sequence: Synthetic oligonucleotide
  Antisense strand to SEQ ID NO: 653786
auucaggccaucuuacugc

SEQ ID NO: 653788 - RNA, 19 nt, Artificial Sequence
  Description of Artificial Sequence: Synthetic oligonucleotide
  Sense strand starting at position 2536 of SEQ ID NO: 585613
ccacuuaugagugguguga

SEQ ID NO: 653789 - RNA, 19 nt, Artificial Sequence
  Description of Artificial Sequence: Synthetic oligonucleotide
  Antisense strand to SEQ ID NO: 653788
ucacaccacucauaagugg

SEQ ID NO: 653790 - RNA, 19 nt, Artificial Sequence
  Description of Artificial Sequence: Synthetic oligonucleotide
  Sense strand starting at position 2678 of SEQ ID NO: 585613
cagagcuuggccuauggga

SEQ ID NO: 653791 - RNA, 19 nt, Artificial Sequence
  Description of Artificial Sequence: Synthetic oligonucleotide
  Antisense strand to SEQ ID NO: 653790
ucccauaggccaagcucug

SEQ ID NO: 653792 - RNA, 19 nt, Artificial Sequence
  Description of Artificial Sequence: Synthetic oligonucleotide
  Sense strand starting at position 2680 of SEQ ID NO: 585613
gagcuuggccuaugggaaa

SEQ ID NO: 653793 - RNA, 19 nt, Artificial Sequence
  Description of Artificial Sequence: Synthetic oligonucleotide
  Antisense strand to SEQ ID NO: 653792
uuucccauaggccaagcuc

SEQ ID NO: 653794 - RNA, 19 nt, Artificial Sequence
  Description of Artificial Sequence: Synthetic oligonucleotide
  Sense strand starting at position 2790 of SEQ ID NO: 585613
ggaacucuauccgccuaau

SEQ ID NO: 653795 - RNA, 19 nt, Artificial Sequence
  Description of Artificial Sequence: Synthetic oligonucleotide
  Antisense strand to SEQ ID NO: 653794
auuaggcggauagaguucc

SEQ ID NO: 653796 - RNA, 19 nt, Artificial Sequence
  Description of Artificial Sequence: Synthetic oligonucleotide
  Sense strand starting at position 2802 of SEQ ID NO: 585613
gccuaaugacauugucuug

SEQ ID NO: 653797 - RNA, 19 nt, Artificial Sequence
  Description of Artificial Sequence: Synthetic oligonucleotide
  Antisense strand to SEQ ID NO: 653796
caagacaaugucauuaggc

SEQ ID NO: 653798 - RNA, 19 nt, Artificial Sequence
  Description of Artificial Sequence: Synthetic oligonucleotide
  Sense strand starting at position 2817 of SEQ ID NO: 585613
cuuguacuuccuggacuaa

SEQ ID NO: 653799 - RNA, 19 nt, Artificial Sequence
  Description of Artificial Sequence: Synthetic oligonucleotide
  Antisense strand to SEQ ID NO: 653798
uuaguccaggaaguacaag

SEQ ID NO: 653800 - RNA, 19 nt, Artificial Sequence
  Description of Artificial Sequence: Synthetic oligonucleotide
  Sense strand starting at position 2979 of SEQ ID NO: 585613
ggugguaagcuuugagaac

SEQ ID NO: 653801 - RNA, 19 nt, Artificial Sequence
  Description of Artificial Sequence: Synthetic oligonucleotide
  Antisense strand to SEQ ID NO: 653800
guucucaaagcuuaccacc

SEQ ID NO: 653802 - RNA, 19 nt, Artificial Sequence
  Description of Artificial Sequence: Synthetic oligonucleotide
  Sense strand starting at position 3060 of SEQ ID NO: 585613
ucccauugucauuagguca

SEQ ID NO: 653803 - RNA, 19 nt, Artificial Sequence
  Description of Artificial Sequence: Synthetic oligonucleotide
  Antisense strand to SEQ ID NO: 653802
ugaccuaaugacaauggga

SEQ ID NO: 653804 - RNA, 19 nt, Artificial Sequence
  Description of Artificial Sequence: Synthetic oligonucleotide
  Sense strand starting at position 3073 of SEQ ID NO: 585613
aggucauauucucugagca

SEQ ID NO: 653805 - RNA, 19 nt, Artificial Sequence
  Description of Artificial Sequence: Synthetic oligonucleotide
  Antisense strand to SEQ ID NO: 653804
ugcucagagaauaugaccu

SEQ ID NO: 653806 - RNA, 19 nt, Artificial Sequence
  Description of Artificial Sequence: Synthetic oligonucleotide
  Sense strand starting at position 3074 of SEQ ID NO: 585613
ggucauauucucugagcag

SEQ ID NO: 653807 - RNA, 19 nt, Artificial Sequence
  Description of Artificial Sequence: Synthetic oligonucleotide
  Antisense strand to SEQ ID NO: 653806
cugcucagagaauaugacc

SEQ ID NO: 653808 - RNA, 19 nt, Artificial Sequence
  Description of Artificial Sequence: Synthetic oligonucleotide
  Sense strand starting at position 3105 of SEQ ID NO: 585613
uggcauuuggcagguuagu

SEQ ID NO: 653809 - RNA, 19 nt, Artificial Sequence
  Description of Artificial Sequence: Synthetic oligonucleotide
  Antisense strand to SEQ ID NO: 653808
acuaaccugccaaaugcca

SEQ ID NO: 653810 - RNA, 19 nt, Artificial Sequence
  Description of Artificial Sequence: Synthetic oligonucleotide
  Sense strand starting at position 3116 of SEQ ID NO: 585613
agguuagugcccugagaag

SEQ ID NO: 653811 - RNA, 19 nt, Artificial Sequence
  Description of Artificial Sequence: Synthetic oligonucleotide
  Antisense strand to SEQ ID NO: 653810
cuucucagggcacuaaccu

SEQ ID NO: 653812 - RNA, 19 nt, Artificial Sequence
  Description of Artificial Sequence: Synthetic oligonucleotide
  Sense strand starting at position 3131 of SEQ ID NO: 585613
gaagaugcccagugaagag

SEQ ID NO: 653813 - RNA, 19 nt, Artificial Sequence
  Description of Artificial Sequence: Synthetic oligonucleotide
  Antisense strand to SEQ ID NO: 653812
cucuucacugggcaucuuc

SEQ ID NO: 653814 - RNA, 19 nt, Artificial Sequence
  Description of Artificial Sequence: Synthetic oligonucleotide
  Sense strand starting at position 3141 of SEQ ID NO: 585613
agugaagagugcccagauu

SEQ ID NO: 653815 - RNA, 19 nt, Artificial Sequence
  Description of Artificial Sequence: Synthetic oligonucleotide
  Antisense strand to SEQ ID NO: 653814
aaucugggcacucuucacu

SEQ ID NO: 653816 - RNA, 19 nt, Artificial Sequence
  Description of Artificial Sequence: Synthetic oligonucleotide
  Sense strand starting at position 3302 of SEQ ID NO: 585613
cugggcuuccuguauuaua

SEQ ID NO: 653817 - RNA, 19 nt, Artificial Sequence
  Description of Artificial Sequence: Synthetic oligonucleotide
  Antisense strand to SEQ ID NO: 653816
uauaauacaggaagcccag

SEQ ID NO: 653818 - RNA, 19 nt, Artificial Sequence
  Description of Artificial Sequence: Synthetic oligonucleotide
  Sense strand starting at position 3322 of SEQ ID NO: 585613
cuggcaacccaguaaguaa

SEQ ID NO: 653819 - RNA, 19 nt, Artificial Sequence
  Description of Artificial Sequence: Synthetic oligonucleotide
  Antisense strand to SEQ ID NO: 653818
uuacuuacuggguugccag

SEQ ID NO: 653820 - RNA, 19 nt, Artificial Sequence
  Description of Artificial Sequence: Synthetic oligonucleotide
  Sense strand starting at position 3396 of SEQ ID NO: 585613
gauuauaaggugugucuga

SEQ ID NO: 653821 - RNA, 19 nt, Artificial Sequence
  Description of Artificial Sequence: Synthetic oligonucleotide
  Antisense strand to SEQ ID NO: 653820
ucagacacaccuuauaauc

SEQ ID NO: 653822 - RNA, 19 nt, Artificial Sequence
  Description of Artificial Sequence: Synthetic oligonucleotide
  Sense strand starting at position 3397 of SEQ ID NO: 585613
auuauaaggugugucugau

SEQ ID NO: 653823 - RNA, 19 nt, Artificial Sequence
  Description of Artificial Sequence: Synthetic oligonucleotide
  Antisense strand to SEQ ID NO: 653822
aucagacacaccuuauaau

SEQ ID NO: 653824 - RNA, 19 nt, Artificial Sequence
  Description of Artificial Sequence: Synthetic oligonucleotide
  Sense strand starting at position 3948 of SEQ ID NO: 585613
uuugaauaguguuuacuga

SEQ ID NO: 653825 - RNA, 19 nt, Artificial Sequence
  Description of Artificial Sequence: Synthetic oligonucleotide
  Antisense strand to SEQ ID NO: 653824
ucaguaaacacuauucaaa

SEQ ID NO: 653826 - RNA, 19 nt, Artificial Sequence
  Description of Artificial Sequence: Synthetic oligonucleotide
  Sense strand starting at position 3979 of SEQ ID NO: 585613
cuguaugucagguaccauu

SEQ ID NO: 653827 - RNA, 19 nt, Artificial Sequence
  Description of Artificial Sequence: Synthetic oligonucleotide
  Antisense strand to SEQ ID NO: 653826
aaugguaccugacauacag

SEQ ID NO: 653828 - RNA, 19 nt, Artificial Sequence
  Description of Artificial Sequence: Synthetic oligonucleotide
  Sense strand starting at position 133 of SEQ ID NO: 585614
cagcuucuggugcacaaau

SEQ ID NO: 653829 - RNA, 19 nt, Artificial Sequence
  Description of Artificial Sequence: Synthetic oligonucleotide
  Antisense strand to SEQ ID NO: 653828
auuugugcaccagaagcug

SEQ ID NO: 653830 - RNA, 19 nt, Artificial Sequence
  Description of Artificial Sequence: Synthetic oligonucleotide
  Sense strand starting at position 258 of SEQ ID NO: 585614
gcagaauuccucugugagg

SEQ ID NO: 653831 - RNA, 19 nt, Artificial Sequence
  Description of Artificial Sequence: Synthetic oligonucleotide
  Antisense strand to SEQ ID NO: 653830
ccucacagaggaauucugc

SEQ ID NO: 653832 - RNA, 19 nt, Artificial Sequence
  Description of Artificial Sequence: Synthetic oligonucleotide
  Sense strand starting at position 260 of SEQ ID NO: 585614
agaauuccucugugaggga

SEQ ID NO: 653833 - RNA, 19 nt, Artificial Sequence
  Description of Artificial Sequence: Synthetic oligonucleotide
  Antisense strand to SEQ ID NO: 653832
ucccucacagaggaauucu

SEQ ID NO: 653834 - RNA, 19 nt, Artificial Sequence
  Description of Artificial Sequence: Synthetic oligonucleotide
  Sense strand starting at position 274 of SEQ ID NO: 585614
agggaaucugccuggguga

SEQ ID NO: 653835 - RNA, 19 nt, Artificial Sequence
  Description of Artificial Sequence: Synthetic oligonucleotide
  Antisense strand to SEQ ID NO: 653834
ucacccaggcagauucccu

SEQ ID NO: 653836 - RNA, 19 nt, Artificial Sequence
  Description of Artificial Sequence: Synthetic oligonucleotide
  Sense strand starting at position 275 of SEQ ID NO: 585614
gggaaucugccugggugau

SEQ ID NO: 653837 - RNA, 19 nt, Artificial Sequence
  Description of Artificial Sequence: Synthetic oligonucleotide
  Antisense strand to SEQ ID NO: 653836
aucacccaggcagauuccc

SEQ ID NO: 653838 - RNA, 19 nt, Artificial Sequence
  Description of Artificial Sequence: Synthetic oligonucleotide
  Sense strand starting at position 358 of SEQ ID NO: 585614
augcucagaucucugaauu

SEQ ID NO: 653839 - RNA, 19 nt, Artificial Sequence
  Description of Artificial Sequence: Synthetic oligonucleotide
  Antisense strand to SEQ ID NO: 653838
aauucagagaucugagcau

SEQ ID NO: 653840 - RNA, 19 nt, Artificial Sequence
  Description of Artificial Sequence: Synthetic oligonucleotide
  Sense strand starting at position 359 of SEQ ID NO: 585614
ugcucagaucucugaauuc

SEQ ID NO: 653841 - RNA, 19 nt, Artificial Sequence
  Description of Artificial Sequence: Synthetic oligonucleotide
  Antisense strand to SEQ ID NO: 653840
gaauucagagaucugagca

SEQ ID NO: 653842 - RNA, 19 nt, Artificial Sequence
  Description of Artificial Sequence: Synthetic oligonucleotide
  Sense strand starting at position 504 of SEQ ID NO: 585614
gugcaagccugauuuguua

SEQ ID NO: 653843 - RNA, 19 nt, Artificial Sequence
  Description of Artificial Sequence: Synthetic oligonucleotide
  Antisense strand to SEQ ID NO: 653842
uaacaaaucaggcuugcac

SEQ ID NO: 653844 - RNA, 19 nt, Artificial Sequence
  Description of Artificial Sequence: Synthetic oligonucleotide
  Sense strand starting at position 705 of SEQ ID NO: 585614
ggaagacaguguucucugu

SEQ ID NO: 653845 - RNA, 19 nt, Artificial Sequence
  Description of Artificial Sequence: Synthetic oligonucleotide
  Antisense strand to SEQ ID NO: 653844
acagagaacacugucuucc

SEQ ID NO: 653846 - RNA, 19 nt, Artificial Sequence
  Description of Artificial Sequence: Synthetic oligonucleotide
  Sense strand starting at position 918 of SEQ ID NO: 585614
gggagaagggugugugaga

SEQ ID NO: 653847 - RNA, 19 nt, Artificial Sequence
  Description of Artificial Sequence: Synthetic oligonucleotide
  Antisense strand to SEQ ID NO: 653846
ucucacacacccuucuccc

SEQ ID NO: 653848 - RNA, 19 nt, Artificial Sequence
  Description of Artificial Sequence: Synthetic oligonucleotide
  Sense strand starting at position 1084 of SEQ ID NO: 585614
gagagauugucccuguagg

SEQ ID NO: 653849 - RNA, 19 nt, Artificial Sequence
  Description of Artificial Sequence: Synthetic oligonucleotide
  Antisense strand to SEQ ID NO: 653848
ccuacagggacaaucucuc

SEQ ID NO: 653850 - RNA, 19 nt, Artificial Sequence
  Description of Artificial Sequence: Synthetic oligonucleotide
  Sense strand starting at position 1085 of SEQ ID NO: 585614
agagauugucccuguagga

SEQ ID NO: 653851 - RNA, 19 nt, Artificial Sequence
  Description of Artificial Sequence: Synthetic oligonucleotide
  Antisense strand to SEQ ID NO: 653850
uccuacagggacaaucucu

SEQ ID NO: 653852 - RNA, 19 nt, Artificial Sequence
  Description of Artificial Sequence: Synthetic oligonucleotide
  Sense strand starting at position 1207 of SEQ ID NO: 585614
gaccauuguggcgaacaca

SEQ ID NO: 653853 - RNA, 19 nt, Artificial Sequence
  Description of Artificial Sequence: Synthetic oligonucleotide
  Antisense strand to SEQ ID NO: 653852
uguguucgccacaaugguc

SEQ ID NO: 653854 - RNA, 19 nt, Artificial Sequence
  Description of Artificial Sequence: Synthetic oligonucleotide
  Sense strand starting at position 2218 of SEQ ID NO: 585614
agaccugaugccgaucaga

SEQ ID NO: 653855 - RNA, 19 nt, Artificial Sequence
  Description of Artificial Sequence: Synthetic oligonucleotide
  Antisense strand to SEQ ID NO: 653854
ucugaucggcaucaggucu

SEQ ID NO: 653856 - RNA, 19 nt, Artificial Sequence
  Description of Artificial Sequence: Synthetic oligonucleotide
  Sense strand starting at position 2305 of SEQ ID NO: 585614
acugaauuacuccgagcau

SEQ ID NO: 653857 - RNA, 19 nt, Artificial Sequence
  Description of Artificial Sequence: Synthetic oligonucleotide
  Antisense strand to SEQ ID NO: 653856
augcucggaguaauucagu

SEQ ID NO: 653858 - RNA, 19 nt, Artificial Sequence
  Description of Artificial Sequence: Synthetic oligonucleotide
  Sense strand starting at position 2318 of SEQ ID NO: 585614
gagcaucuauaguuggcaa

SEQ ID NO: 653859 - RNA, 19 nt, Artificial Sequence
  Description of Artificial Sequence: Synthetic oligonucleotide
  Antisense strand to SEQ ID NO: 653858
uugccaacuauagaugcuc

SEQ ID NO: 653860 - RNA, 19 nt, Artificial Sequence
  Description of Artificial Sequence: Synthetic oligonucleotide
  Sense strand starting at position 2400 of SEQ ID NO: 585614
gaccgugcuccagauugga

SEQ ID NO: 653861 - RNA, 19 nt, Artificial Sequence
  Description of Artificial Sequence: Synthetic oligonucleotide
  Antisense strand to SEQ ID NO: 653860
uccaaucuggagcacgguc

SEQ ID NO: 653862 - RNA, 19 nt, Artificial Sequence
  Description of Artificial Sequence: Synthetic oligonucleotide
  Sense strand starting at position 2529 of SEQ ID NO: 585614
cucaguguaacacagaguu

SEQ ID NO: 653863 - RNA, 19 nt, Artificial Sequence
  Description of Artificial Sequence: Synthetic oligonucleotide
  Antisense strand to SEQ ID NO: 653862
aacucuguguuacacugag

SEQ ID NO: 653864 - RNA, 19 nt, Artificial Sequence
  Description of Artificial Sequence: Synthetic oligonucleotide
  Sense strand starting at position 2656 of SEQ ID NO: 585614
gggaaaguaguuugaaauu

SEQ ID NO: 653865 - RNA, 19 nt, Artificial Sequence
  Description of Artificial Sequence: Synthetic oligonucleotide
  Antisense strand to SEQ ID NO: 653864
aauuucaaacuacuuuccc

SEQ ID NO: 653866 - RNA, 19 nt, Artificial Sequence
  Description of Artificial Sequence: Synthetic oligonucleotide
  Sense strand starting at position 2668 of SEQ ID NO: 585614
ugaaauuuauguguggugu

SEQ ID NO: 653867 - RNA, 19 nt, Artificial Sequence
  Description of Artificial Sequence: Synthetic oligonucleotide
  Antisense strand to SEQ ID NO: 653866
acaccacacauaaauuuca

SEQ ID NO: 653868 - RNA, 19 nt, Artificial Sequence
  Description of Artificial Sequence: Synthetic oligonucleotide
  Sense strand starting at position 2669 of SEQ ID NO: 585614
gaaauuuaugugugguguu

SEQ ID NO: 653869 - RNA, 19 nt, Artificial Sequence
  Description of Artificial Sequence: Synthetic oligonucleotide
  Antisense strand to SEQ ID NO: 653868
aacaccacacauaaauuuc

SEQ ID NO: 653870 - RNA, 19 nt, Artificial Sequence
  Description of Artificial Sequence: Synthetic oligonucleotide
  Sense strand starting at position 2770 of SEQ ID NO: 585614
uugaguauucugcaguaag

SEQ ID NO: 653871 - RNA, 19 nt, Artificial Sequence
  Description of Artificial Sequence: Synthetic oligonucleotide
  Antisense strand to SEQ ID NO: 653870
cuuacugcagaauacucaa

SEQ ID NO: 653872 - RNA, 19 nt, Artificial Sequence
  Description of Artificial Sequence: Synthetic oligonucleotide
  Sense strand starting at position 2781 of SEQ ID NO: 585614
gcaguaagauggccugaau

SEQ ID NO: 653873 - RNA, 19 nt, Artificial Sequence
  Description of Artificial Sequence: Synthetic oligonucleotide
  Antisense strand to SEQ ID NO: 653872
auucaggccaucuuacugc

SEQ ID NO: 653874 - RNA, 19 nt, Artificial Sequence
  Description of Artificial Sequence: Synthetic oligonucleotide
  Sense strand starting at position 2815 of SEQ ID NO: 585614
ccacuuaugagugguguga

SEQ ID NO: 653875 - RNA, 19 nt, Artificial Sequence
  Description of Artificial Sequence: Synthetic oligonucleotide
  Antisense strand to SEQ ID NO: 653874
ucacaccacucauaagugg

SEQ ID NO: 653876 - RNA, 19 nt, Artificial Sequence
  Description of Artificial Sequence: Synthetic oligonucleotide
  Sense strand starting at position 2957 of SEQ ID NO: 585614
cagagcuuggccuauggga

SEQ ID NO: 653877 - RNA, 19 nt, Artificial Sequence
  Description of Artificial Sequence: Synthetic oligonucleotide
  Antisense strand to SEQ ID NO: 653876
ucccauaggccaagcucug

SEQ ID NO: 653878 - RNA, 19 nt, Artificial Sequence
  Description of Artificial Sequence: Synthetic oligonucleotide
  Sense strand starting at position 2959 of SEQ ID NO: 585614
gagcuuggccuaugggaaa

SEQ ID NO: 653879 - RNA, 19 nt, Artificial Sequence
  Description of Artificial Sequence: Synthetic oligonucleotide
  Antisense strand to SEQ ID NO: 653878
uuucccauaggccaagcuc

SEQ ID NO: 653880 - RNA, 19 nt, Artificial Sequence
  Description of Artificial Sequence: Synthetic oligonucleotide
  Sense strand starting at position 3069 of SEQ ID NO: 585614
ggaacucuauccgccuaau

SEQ ID NO: 653881 - RNA, 19 nt, Artificial Sequence
  Description of Artificial Sequence: Synthetic oligonucleotide
  Antisense strand to SEQ ID NO: 653880
auuaggcggauagaguucc

SEQ ID NO: 653882 - RNA, 19 nt, Artificial Sequence
  Description of Artificial Sequence: Synthetic oligonucleotide
  Sense strand starting at position 3096 of SEQ ID NO: 585614
cuuguacuuccuggacuaa

SEQ ID NO: 653883 - RNA, 19 nt, Artificial Sequence
  Description of Artificial Sequence: Synthetic oligonucleotide
  Antisense strand to SEQ ID NO: 653882
uuaguccaggaaguacaag

SEQ ID NO: 653884 - RNA, 19 nt, Artificial Sequence
  Description of Artificial Sequence: Synthetic oligonucleotide
  Sense strand starting at position 3258 of SEQ ID NO: 585614
ggugguaagcuuugagaac

SEQ ID NO: 653885 - RNA, 19 nt, Artificial Sequence
  Description of Artificial Sequence: Synthetic oligonucleotide
  Antisense strand to SEQ ID NO: 653884
guucucaaagcuuaccacc

SEQ ID NO: 653886 - RNA, 19 nt, Artificial Sequence
  Description of Artificial Sequence: Synthetic oligonucleotide
  Sense strand starting at position 3339 of SEQ ID NO: 585614
ucccauugucauuagguca

SEQ ID NO: 653887 - RNA, 19 nt, Artificial Sequence
  Description of Artificial Sequence: Synthetic oligonucleotide
  Antisense strand to SEQ ID NO: 653886
ugaccuaaugacaauggga

SEQ ID NO: 653888 - RNA, 19 nt, Artificial Sequence
  Description of Artificial Sequence: Synthetic oligonucleotide
  Sense strand starting at position 3352 of SEQ ID NO: 585614
aggucauauucucugagca

SEQ ID NO: 653889 - RNA, 19 nt, Artificial Sequence
  Description of Artificial Sequence: Synthetic oligonucleotide
  Antisense strand to SEQ ID NO: 653888
ugcucagagaauaugaccu

SEQ ID NO: 653890 - RNA, 19 nt, Artificial Sequence
  Description of Artificial Sequence: Synthetic oligonucleotide
  Sense strand starting at position 3353 of SEQ ID NO: 585614
ggucauauucucugagcag

SEQ ID NO: 653891 - RNA, 19 nt, Artificial Sequence
  Description of Artificial Sequence: Synthetic oligonucleotide
  Antisense strand to SEQ ID NO: 653890
cugcucagagaauaugacc

SEQ ID NO: 653892 - RNA, 19 nt, Artificial Sequence
  Description of Artificial Sequence: Synthetic oligonucleotide
  Sense strand starting at position 3384 of SEQ ID NO: 585614
uggcauuuggcagguuagu

SEQ ID NO: 653893 - RNA, 19 nt, Artificial Sequence
  Description of Artificial Sequence: Synthetic oligonucleotide
  Antisense strand to SEQ ID NO: 653892
acuaaccugccaaaugcca

SEQ ID NO: 653894 - RNA, 19 nt, Artificial Sequence
  Description of Artificial Sequence: Synthetic oligonucleotide
  Sense strand starting at position 3395 of SEQ ID NO: 585614
agguuagugcccugagaag

SEQ ID NO: 653895 - RNA, 19 nt, Artificial Sequence
  Description of Artificial Sequence: Synthetic oligonucleotide
  Antisense strand to SEQ ID NO: 653894
cuucucagggcacuaaccu

SEQ ID NO: 653896 - RNA, 19 nt, Artificial Sequence
  Description of Artificial Sequence: Synthetic oligonucleotide
  Sense strand starting at position 3410 of SEQ ID NO: 585614
gaagaugcccagugaagag

SEQ ID NO: 653897 - RNA, 19 nt, Artificial Sequence
  Description of Artificial Sequence: Synthetic oligonucleotide
  Antisense strand to SEQ ID NO: 653896
cucuucacugggcaucuuc

SEQ ID NO: 653898 - RNA, 19 nt, Artificial Sequence
  Description of Artificial Sequence: Synthetic oligonucleotide
  Sense strand starting at position 3420 of SEQ ID NO: 585614
agugaagagugcccagauu

SEQ ID NO: 653899 - RNA, 19 nt, Artificial Sequence
  Description of Artificial Sequence: Synthetic oligonucleotide
  Antisense strand to SEQ ID NO: 653898
aaucugggcacucuucacu

SEQ ID NO: 653900 - RNA, 19 nt, Artificial Sequence
  Description of Artificial Sequence: Synthetic oligonucleotide
  Sense strand starting at position 3581 of SEQ ID NO: 585614
cugggcuuccuguauuaua

SEQ ID NO: 653901 - RNA, 19 nt, Artificial Sequence
  Description of Artificial Sequence: Synthetic oligonucleotide
  Antisense strand to SEQ ID NO: 653900
uauaauacaggaagcccag

SEQ ID NO: 653902 - RNA, 19 nt, Artificial Sequence
  Description of Artificial Sequence: Synthetic oligonucleotide
  Sense strand starting at position 3601 of SEQ ID NO: 585614
cuggcaacccaguaaguaa

SEQ ID NO: 653903 - RNA, 19 nt, Artificial Sequence
  Description of Artificial Sequence: Synthetic oligonucleotide
  Antisense strand to SEQ ID NO: 653902
uuacuuacuggguugccag

SEQ ID NO: 653904 - RNA, 19 nt, Artificial Sequence
  Description of Artificial Sequence: Synthetic oligonucleotide
  Sense strand starting at position 3675 of SEQ ID NO: 585614
gauuauaaggugugucuga

SEQ ID NO: 653905 - RNA, 19 nt, Artificial Sequence
  Description of Artificial Sequence: Synthetic oligonucleotide
  Antisense strand to SEQ ID NO: 653904
ucagacacaccuuauaauc

SEQ ID NO: 653906 - RNA, 19 nt, Artificial Sequence
  Description of Artificial Sequence: Synthetic oligonucleotide
  Sense strand starting at position 3676 of SEQ ID NO: 585614
auuauaaggugugucugau

SEQ ID NO: 653907 - RNA, 19 nt, Artificial Sequence
  Description of Artificial Sequence: Synthetic oligonucleotide
  Antisense strand to SEQ ID NO: 653906
aucagacacaccuuauaau

SEQ ID NO: 653908 - RNA, 19 nt, Artificial Sequence
  Description of Artificial Sequence: Synthetic oligonucleotide
  Sense strand starting at position 80 of SEQ ID NO: 585615
guuauauugcagccuguuu

SEQ ID NO: 653909 - RNA, 19 nt, Artificial Sequence
  Description of Artificial Sequence: Synthetic oligonucleotide
  Antisense strand to SEQ ID NO: 653908
aaacaggcugcaauauaac

SEQ ID NO: 653910 - RNA, 19 nt, Artificial Sequence
  Description of Artificial Sequence: Synthetic oligonucleotide
  Sense strand starting at position 170 of SEQ ID NO: 585615
aagaaugcccgguacauga

SEQ ID NO: 653911 - RNA, 19 nt, Artificial Sequence
  Description of Artificial Sequence: Synthetic oligonucleotide
  Antisense strand to SEQ ID NO: 653910
ucauguaccgggcauucuu

SEQ ID NO: 653912 - RNA, 19 nt, Artificial Sequence
  Description of Artificial Sequence: Synthetic oligonucleotide
  Sense strand starting at position 195 of SEQ ID NO: 585615
ccaacacaugucuguugaa

SEQ ID NO: 653913 - RNA, 19 nt, Artificial Sequence
  Description of Artificial Sequence: Synthetic oligonucleotide
  Antisense strand to SEQ ID NO: 653912
uucaacagacauguguugg

SEQ ID NO: 653914 - RNA, 19 nt, Artificial Sequence
  Description of Artificial Sequence: Synthetic oligonucleotide
  Sense strand starting at position 202 of SEQ ID NO: 585615
augucuguugaaugaugga

SEQ ID NO: 653915 - RNA, 19 nt, Artificial Sequence
  Description of Artificial Sequence: Synthetic oligonucleotide
  Antisense strand to SEQ ID NO: 653914
uccaucauucaacagacau

SEQ ID NO: 653916 - RNA, 19 nt, Artificial Sequence
  Description of Artificial Sequence: Synthetic oligonucleotide
  Sense strand starting at position 285 of SEQ ID NO: 585615
ggacacauuggcgauuacu

SEQ ID NO: 653917 - RNA, 19 nt, Artificial Sequence
  Description of Artificial Sequence: Synthetic oligonucleotide
  Antisense strand to SEQ ID NO: 653916
aguaaucgccaaugugucc

SEQ ID NO: 653918 - RNA, 19 nt, Artificial Sequence
  Description of Artificial Sequence: Synthetic oligonucleotide
  Sense strand starting at position 307 of SEQ ID NO: 585615
ucuuaauuugcuugcagga

SEQ ID NO: 653919 - RNA, 19 nt, Artificial Sequence
  Description of Artificial Sequence: Synthetic oligonucleotide
  Antisense strand to SEQ ID NO: 653918
uccugcaagcaaauuaaga

SEQ ID NO: 653920 - RNA, 19 nt, Artificial Sequence
  Description of Artificial Sequence: Synthetic oligonucleotide
  Sense strand starting at position 337 of SEQ ID NO: 585615
agccuuugguucuugagaa

SEQ ID NO: 653921 - RNA, 19 nt, Artificial Sequence
  Description of Artificial Sequence: Synthetic oligonucleotide
  Antisense strand to SEQ ID NO: 653920
uucucaagaaccaaaggcu

SEQ ID NO: 653922 - RNA, 19 nt, Artificial Sequence
  Description of Artificial Sequence: Synthetic oligonucleotide
  Sense strand starting at position 450 of SEQ ID NO: 585615
acaccaacguugucacaga

SEQ ID NO: 653923 - RNA, 19 nt, Artificial Sequence
  Description of Artificial Sequence: Synthetic oligonucleotide
  Antisense strand to SEQ ID NO: 653922
ucugugacaacguuggugu

SEQ ID NO: 653924 - RNA, 19 nt, Artificial Sequence
  Description of Artificial Sequence: Synthetic oligonucleotide
  Sense strand starting at position 455 of SEQ ID NO: 585615
aacguugucacagaguuga

SEQ ID NO: 653925 - RNA, 19 nt, Artificial Sequence
  Description of Artificial Sequence: Synthetic oligonucleotide
  Antisense strand to SEQ ID NO: 653924
ucaacucugugacaacguu

SEQ ID NO: 653926 - RNA, 19 nt, Artificial Sequence
  Description of Artificial Sequence: Synthetic oligonucleotide
  Sense strand starting at position 465 of SEQ ID NO: 585615
cagaguugaucaccugaaa

SEQ ID NO: 653927 - RNA, 19 nt, Artificial Sequence
  Description of Artificial Sequence: Synthetic oligonucleotide
  Antisense strand to SEQ ID NO: 653926
uuucaggugaucaacucug

SEQ ID NO: 653928 - RNA, 19 nt, Artificial Sequence
  Description of Artificial Sequence: Synthetic oligonucleotide
  Sense strand starting at position 709 of SEQ ID NO: 585615
uguguuuaaggucacauga

SEQ ID NO: 653929 - RNA, 19 nt, Artificial Sequence
  Description of Artificial Sequence: Synthetic oligonucleotide
  Antisense strand to SEQ ID NO: 653928
ucaugugaccuuaaacaca

SEQ ID NO: 653930 - RNA, 19 nt, Artificial Sequence
  Description of Artificial Sequence: Synthetic oligonucleotide
  Sense strand starting at position 1009 of SEQ ID NO: 585615
ugccacgacccuugaauaa

SEQ ID NO: 653931 - RNA, 19 nt, Artificial Sequence
  Description of Artificial Sequence: Synthetic oligonucleotide
  Antisense strand to SEQ ID NO: 653930
uuauucaagggucguggca

SEQ ID NO: 653932 - RNA, 19 nt, Artificial Sequence
  Description of Artificial Sequence: Synthetic oligonucleotide
  Sense strand starting at position 1022 of SEQ ID NO: 585615
gaauaacugccauaguugu

SEQ ID NO: 653933 - RNA, 19 nt, Artificial Sequence
  Description of Artificial Sequence: Synthetic oligonucleotide
  Antisense strand to SEQ ID NO: 653932
acaacuauggcaguuauuc

SEQ ID NO: 653934 - RNA, 19 nt, Artificial Sequence
  Description of Artificial Sequence: Synthetic oligonucleotide
  Sense strand starting at position 1229 of SEQ ID NO: 585615
aguccugcucucgaaauua

SEQ ID NO: 653935 - RNA, 19 nt, Artificial Sequence
  Description of Artificial Sequence: Synthetic oligonucleotide
  Antisense strand to SEQ ID NO: 653934
uaauuucgagagcaggacu

SEQ ID NO: 653936 - RNA, 19 nt, Artificial Sequence
  Description of Artificial Sequence: Synthetic oligonucleotide
  Sense strand starting at position 1352 of SEQ ID NO: 585615
uaacucagucucugggaga

SEQ ID NO: 653937 - RNA, 19 nt, Artificial Sequence
  Description of Artificial Sequence: Synthetic oligonucleotide
  Antisense strand to SEQ ID NO: 653936
ucucccagagacugaguua

SEQ ID NO: 653938 - RNA, 19 nt, Artificial Sequence
  Description of Artificial Sequence: Synthetic oligonucleotide
  Sense strand starting at position 2224 of SEQ ID NO: 585615
ugugaucugagguaaccua

SEQ ID NO: 653939 - RNA, 19 nt, Artificial Sequence
  Description of Artificial Sequence: Synthetic oligonucleotide
  Antisense strand to SEQ ID NO: 653938
uagguuaccucagaucaca

SEQ ID NO: 653940 - RNA, 19 nt, Artificial Sequence
  Description of Artificial Sequence: Synthetic oligonucleotide
  Sense strand starting at position 2303 of SEQ ID NO: 585615
gggcgaauccacguguugu

SEQ ID NO: 653941 - RNA, 19 nt, Artificial Sequence
  Description of Artificial Sequence: Synthetic oligonucleotide
  Antisense strand to SEQ ID NO: 653940
acaacacguggauucgccc

SEQ ID NO: 653942 - RNA, 19 nt, Artificial Sequence
  Description of Artificial Sequence: Synthetic oligonucleotide
  Sense strand starting at position 2357 of SEQ ID NO: 585615
gcgaaucuucaagggaagu

SEQ ID NO: 653943 - RNA, 19 nt, Artificial Sequence
  Description of Artificial Sequence: Synthetic oligonucleotide
  Antisense strand to SEQ ID NO: 653942
acuucccuugaagauucgc

SEQ ID NO: 653944 - RNA, 19 nt, Artificial Sequence
  Description of Artificial Sequence: Synthetic oligonucleotide
  Sense strand starting at position 2391 of SEQ ID NO: 585615
gggauuagcaagcaucugu

SEQ ID NO: 653945 - RNA, 19 nt, Artificial Sequence
  Description of Artificial Sequence: Synthetic oligonucleotide
  Antisense strand to SEQ ID NO: 653944
acagaugcuugcuaauccc

SEQ ID NO: 653946 - RNA, 19 nt, Artificial Sequence
  Description of Artificial Sequence: Synthetic oligonucleotide
  Sense strand starting at position 2477 of SEQ ID NO: 585615
ucaugagauuaauuaagug

SEQ ID NO: 653947 - RNA, 19 nt, Artificial Sequence
  Description of Artificial Sequence: Synthetic oligonucleotide
  Antisense strand to SEQ ID NO: 653946
cacuuaauuaaucucauga

SEQ ID NO: 653948 - RNA, 19 nt, Artificial Sequence
  Description of Artificial Sequence: Synthetic oligonucleotide
  Sense strand starting at position 2482 of SEQ ID NO: 585615
agauuaauuaagugcgaga

SEQ ID NO: 653949 - RNA, 19 nt, Artificial Sequence
  Description of Artificial Sequence: Synthetic oligonucleotide
  Antisense strand to SEQ ID NO: 653948
ucucgcacuuaauuaaucu

SEQ ID NO: 653950 - RNA, 19 nt, Artificial Sequence
  Description of Artificial Sequence: Synthetic oligonucleotide
  Sense strand starting at position 2484 of SEQ ID NO: 585615
auuaauuaagugcgagaau

SEQ ID NO: 653951 - RNA, 19 nt, Artificial Sequence
  Description of Artificial Sequence: Synthetic oligonucleotide
  Antisense strand to SEQ ID NO: 653950
auucucgcacuuaauuaau

SEQ ID NO: 653952 - RNA, 19 nt, Artificial Sequence
  Description of Artificial Sequence: Synthetic oligonucleotide
  Sense strand starting at position 2487 of SEQ ID NO: 585615
aauuaagugcgagaauuaa

SEQ ID NO: 653953 - RNA, 19 nt, Artificial Sequence
  Description of Artificial Sequence: Synthetic oligonucleotide
  Antisense strand to SEQ ID NO: 653952
uuaauucucgcacuuaauu

SEQ ID NO: 653954 - RNA, 19 nt, Artificial Sequence
  Description of Artificial Sequence: Synthetic oligonucleotide
  Sense strand starting at position 2495 of SEQ ID NO: 585615
gcgagaauuaaaugaggug

SEQ ID NO: 653955 - RNA, 19 nt, Artificial Sequence
  Description of Artificial Sequence: Synthetic oligonucleotide
  Antisense strand to SEQ ID NO: 653954
caccucauuuaauucucgc

SEQ ID NO: 653956 - RNA, 19 nt, Artificial Sequence
  Description of Artificial Sequence: Synthetic oligonucleotide
  Sense strand starting at position 2559 of SEQ ID NO: 585615
guuguuuauagggaucauu

SEQ ID NO: 653957 - RNA, 19 nt, Artificial Sequence
  Description of Artificial Sequence: Synthetic oligonucleotide
  Antisense strand to SEQ ID NO: 653956
aaugaucccuauaaacaac

SEQ ID NO: 653958 - RNA, 19 nt, Artificial Sequence
  Description of Artificial Sequence: Synthetic oligonucleotide
  Sense strand starting at position 2612 of SEQ ID NO: 585615
ggaaauaaugcugauuguc

SEQ ID NO: 653959 - RNA, 19 nt, Artificial Sequence
  Description of Artificial Sequence: Synthetic oligonucleotide
  Antisense strand to SEQ ID NO: 653958
gacaaucagcauuauuucc

SEQ ID NO: 653960 - RNA, 19 nt, Artificial Sequence
  Description of Artificial Sequence: Synthetic oligonucleotide
  Sense strand starting at position 2729 of SEQ ID NO: 585615
cagggagucacguaacuug

SEQ ID NO: 653961 - RNA, 19 nt, Artificial Sequence
  Description of Artificial Sequence: Synthetic oligonucleotide
  Antisense strand to SEQ ID NO: 653960
caaguuacgugacucccug

SEQ ID NO: 653962 - RNA, 19 nt, Artificial Sequence
  Description of Artificial Sequence: Synthetic oligonucleotide
  Sense strand starting at position 2826 of SEQ ID NO: 585615
auauguaacuauguuacca

SEQ ID NO: 653963 - RNA, 19 nt, Artificial Sequence
  Description of Artificial Sequence: Synthetic oligonucleotide
  Antisense strand to SEQ ID NO: 653962
ugguaacauaguuacauau

SEQ ID NO: 653964 - RNA, 19 nt, Artificial Sequence
  Description of Artificial Sequence: Synthetic oligonucleotide
  Sense strand starting at position 2830 of SEQ ID NO: 585615
guaacuauguuaccauaac

SEQ ID NO: 653965 - RNA, 19 nt, Artificial Sequence
  Description of Artificial Sequence: Synthetic oligonucleotide
  Antisense strand to SEQ ID NO: 653964
guuaugguaacauaguuac

SEQ ID NO: 653966 - RNA, 19 nt, Artificial Sequence
  Description of Artificial Sequence: Synthetic oligonucleotide
  Sense strand starting at position 2880 of SEQ ID NO: 585615
augagugaauuguuaauga

SEQ ID NO: 653967 - RNA, 19 nt, Artificial Sequence
  Description of Artificial Sequence: Synthetic oligonucleotide
  Antisense strand to SEQ ID NO: 653966
ucauuaacaauucacucau

SEQ ID NO: 653968 - RNA, 19 nt, Artificial Sequence
  Description of Artificial Sequence: Synthetic oligonucleotide
  Sense strand starting at position 2941 of SEQ ID NO: 585615
agacuugcccugcauauga

SEQ ID NO: 653969 - RNA, 19 nt, Artificial Sequence
  Description of Artificial Sequence: Synthetic oligonucleotide
  Antisense strand to SEQ ID NO: 653968
ucauaugcagggcaagucu

SEQ ID NO: 653970 - RNA, 19 nt, Artificial Sequence
  Description of Artificial Sequence: Synthetic oligonucleotide
  Sense strand starting at position 2943 of SEQ ID NO: 585615
acuugcccugcauaugaaa

SEQ ID NO: 653971 - RNA, 19 nt, Artificial Sequence
  Description of Artificial Sequence: Synthetic oligonucleotide
  Antisense strand to SEQ ID NO: 653970
uuucauaugcagggcaagu

SEQ ID NO: 653972 - RNA, 19 nt, Artificial Sequence
  Description of Artificial Sequence: Synthetic oligonucleotide
  Sense strand starting at position 3005 of SEQ ID NO: 585615
acauuugcuugcucuguua

SEQ ID NO: 653973 - RNA, 19 nt, Artificial Sequence
  Description of Artificial Sequence: Synthetic oligonucleotide
  Antisense strand to SEQ ID NO: 653972
uaacagagcaagcaaaugu

SEQ ID NO: 653974 - RNA, 19 nt, Artificial Sequence
  Description of Artificial Sequence: Synthetic oligonucleotide
  Sense strand starting at position 3070 of SEQ ID NO: 585615
ucagaugaaugaguuuaua

SEQ ID NO: 653975 - RNA, 19 nt, Artificial Sequence
  Description of Artificial Sequence: Synthetic oligonucleotide
  Antisense strand to SEQ ID NO: 653974
uauaaacucauucaucuga

SEQ ID NO: 653976 - RNA, 19 nt, Artificial Sequence
  Description of Artificial Sequence: Synthetic oligonucleotide
  Sense strand starting at position 3102 of SEQ ID NO: 585615
gggcguauaaacgaagaca

SEQ ID NO: 653977 - RNA, 19 nt, Artificial Sequence
  Description of Artificial Sequence: Synthetic oligonucleotide
  Antisense strand to SEQ ID NO: 653976
ugucuucguuuauacgccc

SEQ ID NO: 653978 - RNA, 19 nt, Artificial Sequence
  Description of Artificial Sequence: Synthetic oligonucleotide
  Sense strand starting at position 3237 of SEQ ID NO: 585615
uagauuaaguugucuaagu

SEQ ID NO: 653979 - RNA, 19 nt, Artificial Sequence
  Description of Artificial Sequence: Synthetic oligonucleotide
  Antisense strand to SEQ ID NO: 653978
acuuagacaacuuaaucua

SEQ ID NO: 653980 - RNA, 19 nt, Artificial Sequence
  Description of Artificial Sequence: Synthetic oligonucleotide
  Sense strand starting at position 3238 of SEQ ID NO: 585615
agauuaaguugucuaaguu

SEQ ID NO: 653981 - RNA, 19 nt, Artificial Sequence
  Description of Artificial Sequence: Synthetic oligonucleotide
  Antisense strand to SEQ ID NO: 653980
aacuuagacaacuuaaucu

SEQ ID NO: 653982 - RNA, 19 nt, Artificial Sequence
  Description of Artificial Sequence: Synthetic oligonucleotide
  Sense strand starting at position 3239 of SEQ ID NO: 585615
gauuaaguugucuaaguuc

SEQ ID NO: 653983 - RNA, 19 nt, Artificial Sequence
  Description of Artificial Sequence: Synthetic oligonucleotide
  Antisense strand to SEQ ID NO: 653982
gaacuuagacaacuuaauc

SEQ ID NO: 653984 - RNA, 19 nt, Artificial Sequence
  Description of Artificial Sequence: Synthetic oligonucleotide
  Sense strand starting at position 3743 of SEQ ID NO: 585615
guuucuauugcaggagaac

SEQ ID NO: 653985 - RNA, 19 nt, Artificial Sequence
  Description of Artificial Sequence: Synthetic oligonucleotide
  Antisense strand to SEQ ID NO: 653984
guucuccugcaauagaaac

SEQ ID NO: 653986 - RNA, 19 nt, Artificial Sequence
  Description of Artificial Sequence: Synthetic oligonucleotide
  Sense strand starting at position 3744 of SEQ ID NO: 585615
uuucuauugcaggagaacu

SEQ ID NO: 653987 - RNA, 19 nt, Artificial Sequence
  Description of Artificial Sequence: Synthetic oligonucleotide
  Antisense strand to SEQ ID NO: 653986
aguucuccugcaauagaaa

SEQ ID NO: 653988 - RNA, 19 nt, Artificial Sequence
  Description of Artificial Sequence: Synthetic oligonucleotide
  Sense strand starting at position 46 of SEQ ID NO: 585616
ugaccauuagcuugacuuu

SEQ ID NO: 653989 - RNA, 19 nt, Artificial Sequence
  Description of Artificial Sequence: Synthetic oligonucleotide
  Antisense strand to SEQ ID NO: 653988
aaagucaagcuaaugguca

SEQ ID NO: 653990 - RNA, 19 nt, Artificial Sequence
  Description of Artificial Sequence: Synthetic oligonucleotide
  Sense strand starting at position 156 of SEQ ID NO: 585616
agcauucuccggcaacuuu

SEQ ID NO: 653991 - RNA, 19 nt, Artificial Sequence
  Description of Artificial Sequence: Synthetic oligonucleotide
  Antisense strand to SEQ ID NO: 653990
aaaguugccggagaaugcu

SEQ ID NO: 653992 - RNA, 19 nt, Artificial Sequence
  Description of Artificial Sequence: Synthetic oligonucleotide
  Sense strand starting at position 256 of SEQ ID NO: 585616
uuaugagugguguauaauu

SEQ ID NO: 653993 - RNA, 19 nt, Artificial Sequence
  Description of Artificial Sequence: Synthetic oligonucleotide
  Antisense strand to SEQ ID NO: 653992
aauuauacaccacucauaa

SEQ ID NO: 653994 - RNA, 19 nt, Artificial Sequence
  Description of Artificial Sequence: Synthetic oligonucleotide
  Sense strand starting at position 348 of SEQ ID NO: 585616
ucugcuuguggacauguau

SEQ ID NO: 653995 - RNA, 19 nt, Artificial Sequence
  Description of Artificial Sequence: Synthetic oligonucleotide
  Antisense strand to SEQ ID NO: 653994
auacauguccacaagcaga

SEQ ID NO: 653996 - RNA, 19 nt, Artificial Sequence
  Description of Artificial Sequence: Synthetic oligonucleotide
  Sense strand starting at position 618 of SEQ ID NO: 585616
uguucuuaaggaugaauac

SEQ ID NO: 653997 - RNA, 19 nt, Artificial Sequence
  Description of Artificial Sequence: Synthetic oligonucleotide
  Antisense strand to SEQ ID NO: 653996
guauucauccuuaagaaca

SEQ ID NO: 653998 - RNA, 19 nt, Artificial Sequence
  Description of Artificial Sequence: Synthetic oligonucleotide
  Sense strand starting at position 703 of SEQ ID NO: 585616
acuguuaaauguucuuauc

SEQ ID NO: 653999 - RNA, 19 nt, Artificial Sequence
  Description of Artificial Sequence: Synthetic oligonucleotide
  Antisense strand to SEQ ID NO: 653998
gauaagaacauuuaacagu

SEQ ID NO: 654000 - RNA, 19 nt, Artificial Sequence
  Description of Artificial Sequence: Synthetic oligonucleotide
  Sense strand starting at position 716 of SEQ ID NO: 585616
cuuaucuaagcgcauauaa

SEQ ID NO: 654001 - RNA, 19 nt, Artificial Sequence
  Description of Artificial Sequence: Synthetic oligonucleotide
  Antisense strand to SEQ ID NO: 654000
uuauaugcgcuuagauaag

SEQ ID NO: 654002 - RNA, 19 nt, Artificial Sequence
  Description of Artificial Sequence: Synthetic oligonucleotide
  Sense strand starting at position 794 of SEQ ID NO: 585616
uucccucggucauuaaaca

SEQ ID NO: 654003 - RNA, 19 nt, Artificial Sequence
  Description of Artificial Sequence: Synthetic oligonucleotide
  Antisense strand to SEQ ID NO: 654002
uguuuaaugaccgagggaa

SEQ ID NO: 654004 - RNA, 19 nt, Artificial Sequence
  Description of Artificial Sequence: Synthetic oligonucleotide
  Sense strand starting at position 859 of SEQ ID NO: 585616
cgagaccgguggguuaaua

SEQ ID NO: 654005 - RNA, 19 nt, Artificial Sequence
  Description of Artificial Sequence: Synthetic oligonucleotide
  Antisense strand to SEQ ID NO: 654004
uauuaacccaccggucucg

SEQ ID NO: 654006 - RNA, 19 nt, Artificial Sequence
  Description of Artificial Sequence: Synthetic oligonucleotide
  Sense strand starting at position 1058 of SEQ ID NO: 585616
aguaacacauuugaugaga

SEQ ID NO: 654007 - RNA, 19 nt, Artificial Sequence
  Description of Artificial Sequence: Synthetic oligonucleotide
  Antisense strand to SEQ ID NO: 654006
ucucaucaaauguguuacu

SEQ ID NO: 654008 - RNA, 19 nt, Artificial Sequence
  Description of Artificial Sequence: Synthetic oligonucleotide
  Sense strand starting at position 1125 of SEQ ID NO: 585616
ccauuccgcccugaaaguu

SEQ ID NO: 654009 - RNA, 19 nt, Artificial Sequence
  Description of Artificial Sequence: Synthetic oligonucleotide
  Antisense strand to SEQ ID NO: 654008
aacuuucagggcggaaugg

SEQ ID NO: 654010 - RNA, 19 nt, Artificial Sequence
  Description of Artificial Sequence: Synthetic oligonucleotide
  Sense strand starting at position 1176 of SEQ ID NO: 585616
gcugucccgaucuaggaaa

SEQ ID NO: 654011 - RNA, 19 nt, Artificial Sequence
  Description of Artificial Sequence: Synthetic oligonucleotide
  Antisense strand to SEQ ID NO: 654010
uuuccuagaucgggacagc

SEQ ID NO: 654012 - RNA, 19 nt, Artificial Sequence
  Description of Artificial Sequence: Synthetic oligonucleotide
  Sense strand starting at position 1178 of SEQ ID NO: 585616
ugucccgaucuaggaaauu

SEQ ID NO: 654013 - RNA, 19 nt, Artificial Sequence
  Description of Artificial Sequence: Synthetic oligonucleotide
  Antisense strand to SEQ ID NO: 654012
aauuuccuagaucgggaca

SEQ ID NO: 654014 - RNA, 19 nt, Artificial Sequence
  Description of Artificial Sequence: Synthetic oligonucleotide
  Sense strand starting at position 1224 of SEQ ID NO: 585616
uuaagaguaugucugauac

SEQ ID NO: 654015 - RNA, 19 nt, Artificial Sequence
  Description of Artificial Sequence: Synthetic oligonucleotide
  Antisense strand to SEQ ID NO: 654014
guaucagacauacucuuaa

SEQ ID NO: 654016 - RNA, 19 nt, Artificial Sequence
  Description of Artificial Sequence: Synthetic oligonucleotide
  Sense strand starting at position 1235 of SEQ ID NO: 585616
ucugauacagucuguaaua

SEQ ID NO: 654017 - RNA, 19 nt, Artificial Sequence
  Description of Artificial Sequence: Synthetic oligonucleotide
  Antisense strand to SEQ ID NO: 654016
uauuacagacuguaucaga

SEQ ID NO: 654018 - RNA, 19 nt, Artificial Sequence
  Description of Artificial Sequence: Synthetic oligonucleotide
  Sense strand starting at position 1236 of SEQ ID NO: 585616
cugauacagucuguaauac

SEQ ID NO: 654019 - RNA, 19 nt, Artificial Sequence
  Description of Artificial Sequence: Synthetic oligonucleotide
  Antisense strand to SEQ ID NO: 654018
guauuacagacuguaucag

SEQ ID NO: 654020 - RNA, 19 nt, Artificial Sequence
  Description of Artificial Sequence: Synthetic oligonucleotide
  Sense strand starting at position 1237 of SEQ ID NO: 585616
ugauacagucuguaauacu

SEQ ID NO: 654021 - RNA, 19 nt, Artificial Sequence
  Description of Artificial Sequence: Synthetic oligonucleotide
  Antisense strand to SEQ ID NO: 654020
aguauuacagacuguauca

SEQ ID NO: 654022 - RNA, 19 nt, Artificial Sequence
  Description of Artificial Sequence: Synthetic oligonucleotide
  Sense strand starting at position 1315 of SEQ ID NO: 585616
gucccauuauuacuuggaa

SEQ ID NO: 654023 - RNA, 19 nt, Artificial Sequence
  Description of Artificial Sequence: Synthetic oligonucleotide
  Antisense strand to SEQ ID NO: 654022
uuccaaguaauaaugggac

SEQ ID NO: 654024 - RNA, 19 nt, Artificial Sequence
  Description of Artificial Sequence: Synthetic oligonucleotide
  Sense strand starting at position 1318 of SEQ ID NO: 585616
ccauuauuacuuggaacag

SEQ ID NO: 654025 - RNA, 19 nt, Artificial Sequence
  Description of Artificial Sequence: Synthetic oligonucleotide
  Antisense strand to SEQ ID NO: 654024
cuguuccaaguaauaaugg

SEQ ID NO: 654026 - RNA, 19 nt, Artificial Sequence
  Description of Artificial Sequence: Synthetic oligonucleotide
  Sense strand starting at position 1398 of SEQ ID NO: 585616
gguuguaagaaucgggucu

SEQ ID NO: 654027 - RNA, 19 nt, Artificial Sequence
  Description of Artificial Sequence: Synthetic oligonucleotide
  Antisense strand to SEQ ID NO: 654026
agacccgauucuuacaacc

SEQ ID NO: 654028 - RNA, 19 nt, Artificial Sequence
  Description of Artificial Sequence: Synthetic oligonucleotide
  Sense strand starting at position 2401 of SEQ ID NO: 585616
aagcacuuugcagguaaau

SEQ ID NO: 654029 - RNA, 19 nt, Artificial Sequence
  Description of Artificial Sequence: Synthetic oligonucleotide
  Antisense strand to SEQ ID NO: 654028
auuuaccugcaaagugcuu

SEQ ID NO: 654030 - RNA, 19 nt, Artificial Sequence
  Description of Artificial Sequence: Synthetic oligonucleotide
  Sense strand starting at position 2413 of SEQ ID NO: 585616
gguaaauacguguaauccu

SEQ ID NO: 654031 - RNA, 19 nt, Artificial Sequence
  Description of Artificial Sequence: Synthetic oligonucleotide
  Antisense strand to SEQ ID NO: 654030
aggauuacacguauuuacc

SEQ ID NO: 654032 - RNA, 19 nt, Artificial Sequence
  Description of Artificial Sequence: Synthetic oligonucleotide
  Sense strand starting at position 2420 of SEQ ID NO: 585616
acguguaauccucacagca

SEQ ID NO: 654033 - RNA, 19 nt, Artificial Sequence
  Description of Artificial Sequence: Synthetic oligonucleotide
  Antisense strand to SEQ ID NO: 654032
ugcugugaggauuacacgu

SEQ ID NO: 654034 - RNA, 19 nt, Artificial Sequence
  Description of Artificial Sequence: Synthetic oligonucleotide
  Sense strand starting at position 2444 of SEQ ID NO: 585616
gggagaaauacccgucuca

SEQ ID NO: 654035 - RNA, 19 nt, Artificial Sequence
  Description of Artificial Sequence: Synthetic oligonucleotide
  Antisense strand to SEQ ID NO: 654034
ugagacggguauuucuccc

SEQ ID NO: 654036 - RNA, 19 nt, Artificial Sequence
  Description of Artificial Sequence: Synthetic oligonucleotide
  Sense strand starting at position 2455 of SEQ ID NO: 585616
ccgucucacagcugaagaa

SEQ ID NO: 654037 - RNA, 19 nt, Artificial Sequence
  Description of Artificial Sequence: Synthetic oligonucleotide
  Antisense strand to SEQ ID NO: 654036
uucuucagcugugagacgg

SEQ ID NO: 654038 - RNA, 19 nt, Artificial Sequence
  Description of Artificial Sequence: Synthetic oligonucleotide
  Sense strand starting at position 2456 of SEQ ID NO: 585616
cgucucacagcugaagaaa

SEQ ID NO: 654039 - RNA, 19 nt, Artificial Sequence
  Description of Artificial Sequence: Synthetic oligonucleotide
  Antisense strand to SEQ ID NO: 654038
uuucuucagcugugagacg

SEQ ID NO: 654040 - RNA, 19 nt, Artificial Sequence
  Description of Artificial Sequence: Synthetic oligonucleotide
  Sense strand starting at position 2507 of SEQ ID NO: 585616
uucuaauuacgguaucaca

SEQ ID NO: 654041 - RNA, 19 nt, Artificial Sequence
  Description of Artificial Sequence: Synthetic oligonucleotide
  Antisense strand to SEQ ID NO: 654040
ugugauaccguaauuagaa

SEQ ID NO: 654042 - RNA, 19 nt, Artificial Sequence
  Description of Artificial Sequence: Synthetic oligonucleotide
  Sense strand starting at position 2636 of SEQ ID NO: 585616
gccuauaagcauuacguaa

SEQ ID NO: 654043 - RNA, 19 nt, Artificial Sequence
  Description of Artificial Sequence: Synthetic oligonucleotide
  Antisense strand to SEQ ID NO: 654042
uuacguaaugcuuauaggc

SEQ ID NO: 654044 - RNA, 19 nt, Artificial Sequence
  Description of Artificial Sequence: Synthetic oligonucleotide
  Sense strand starting at position 2686 of SEQ ID NO: 585616
cauguucggguuuagaaag

SEQ ID NO: 654045 - RNA, 19 nt, Artificial Sequence
  Description of Artificial Sequence: Synthetic oligonucleotide
  Antisense strand to SEQ ID NO: 654044
cuuucuaaacccgaacaug

SEQ ID NO: 654046 - RNA, 19 nt, Artificial Sequence
  Description of Artificial Sequence: Synthetic oligonucleotide
  Sense strand starting at position 2704 of SEQ ID NO: 585616
gucucauagcucugaaaga

SEQ ID NO: 654047 - RNA, 19 nt, Artificial Sequence
  Description of Artificial Sequence: Synthetic oligonucleotide
  Antisense strand to SEQ ID NO: 654046
ucuuucagagcuaugagac

SEQ ID NO: 654048 - RNA, 19 nt, Artificial Sequence
  Description of Artificial Sequence: Synthetic oligonucleotide
  Sense strand starting at position 2711 of SEQ ID NO: 585616
agcucugaaagaugagguu

SEQ ID NO: 654049 - RNA, 19 nt, Artificial Sequence
  Description of Artificial Sequence: Synthetic oligonucleotide
  Antisense strand to SEQ ID NO: 654048
aaccucaucuuucagagcu

SEQ ID NO: 654050 - RNA, 19 nt, Artificial Sequence
  Description of Artificial Sequence: Synthetic oligonucleotide
  Sense strand starting at position 2720 of SEQ ID NO: 585616
agaugagguuaauuagcau

SEQ ID NO: 654051 - RNA, 19 nt, Artificial Sequence
  Description of Artificial Sequence: Synthetic oligonucleotide
  Antisense strand to SEQ ID NO: 654050
augcuaauuaaccucaucu

SEQ ID NO: 654052 - RNA, 19 nt, Artificial Sequence
  Description of Artificial Sequence: Synthetic oligonucleotide
  Sense strand starting at position 2723 of SEQ ID NO: 585616
ugagguuaauuagcaucau

SEQ ID NO: 654053 - RNA, 19 nt, Artificial Sequence
  Description of Artificial Sequence: Synthetic oligonucleotide
  Antisense strand to SEQ ID NO: 654052
augaugcuaauuaaccuca

SEQ ID NO: 654054 - RNA, 19 nt, Artificial Sequence
  Description of Artificial Sequence: Synthetic oligonucleotide
  Sense strand starting at position 2784 of SEQ ID NO: 585616
uccauuaguucuguuacuu

SEQ ID NO: 654055 - RNA, 19 nt, Artificial Sequence
  Description of Artificial Sequence: Synthetic oligonucleotide
  Antisense strand to SEQ ID NO: 654054
aaguaacagaacuaaugga

SEQ ID NO: 654056 - RNA, 19 nt, Artificial Sequence
  Description of Artificial Sequence: Synthetic oligonucleotide
  Sense strand starting at position 2806 of SEQ ID NO: 585616
gcuuccuagcaaugagaac

SEQ ID NO: 654057 - RNA, 19 nt, Artificial Sequence
  Description of Artificial Sequence: Synthetic oligonucleotide
  Antisense strand to SEQ ID NO: 654056
guucucauugcuaggaagc

SEQ ID NO: 654058 - RNA, 19 nt, Artificial Sequence
  Description of Artificial Sequence: Synthetic oligonucleotide
  Sense strand starting at position 2825 of SEQ ID NO: 585616
auuugcaauugcucugcaa

SEQ ID NO: 654059 - RNA, 19 nt, Artificial Sequence
  Description of Artificial Sequence: Synthetic oligonucleotide
  Antisense strand to SEQ ID NO: 654058
uugcagagcaauugcaaau

SEQ ID NO: 654060 - RNA, 19 nt, Artificial Sequence
  Description of Artificial Sequence: Synthetic oligonucleotide
  Sense strand starting at position 2829 of SEQ ID NO: 585616
gcaauugcucugcaacuuu

SEQ ID NO: 654061 - RNA, 19 nt, Artificial Sequence
  Description of Artificial Sequence: Synthetic oligonucleotide
  Antisense strand to SEQ ID NO: 654060
aaaguugcagagcaauugc

SEQ ID NO: 654062 - RNA, 19 nt, Artificial Sequence
  Description of Artificial Sequence: Synthetic oligonucleotide
  Sense strand starting at position 2853 of SEQ ID NO: 585616
uccagauguugucuuaauu

SEQ ID NO: 654063 - RNA, 19 nt, Artificial Sequence
  Description of Artificial Sequence: Synthetic oligonucleotide
  Antisense strand to SEQ ID NO: 654062
aauuaagacaacaucugga

SEQ ID NO: 654064 - RNA, 19 nt, Artificial Sequence
  Description of Artificial Sequence: Synthetic oligonucleotide
  Sense strand starting at position 3041 of SEQ ID NO: 585616
aagugaguuggguaaauau

SEQ ID NO: 654065 - RNA, 19 nt, Artificial Sequence
  Description of Artificial Sequence: Synthetic oligonucleotide
  Antisense strand to SEQ ID NO: 654064
auauuuacccaacucacuu

SEQ ID NO: 654066 - RNA, 19 nt, Artificial Sequence
  Description of Artificial Sequence: Synthetic oligonucleotide
  Sense strand starting at position 3816 of SEQ ID NO: 585616
augagauguuaccugauaa

SEQ ID NO: 654067 - RNA, 19 nt, Artificial Sequence
  Description of Artificial Sequence: Synthetic oligonucleotide
  Antisense strand to SEQ ID NO: 654066
uuaucagguaacaucucau

SEQ ID NO: 654068 - RNA, 19 nt, Artificial Sequence
  Description of Artificial Sequence: Synthetic oligonucleotide
  Sense strand starting at position 79 of SEQ ID NO: 585617
guuauauugcagccuguuu

SEQ ID NO: 654069 - RNA, 19 nt, Artificial Sequence
  Description of Artificial Sequence: Synthetic oligonucleotide
  Antisense strand to SEQ ID NO: 654068
aaacaggcugcaauauaac

SEQ ID NO: 654070 - RNA, 19 nt, Artificial Sequence
  Description of Artificial Sequence: Synthetic oligonucleotide
  Sense strand starting at position 169 of SEQ ID NO: 585617
aagaaugcccgguacauga

SEQ ID NO: 654071 - RNA, 19 nt, Artificial Sequence
  Description of Artificial Sequence: Synthetic oligonucleotide
  Antisense strand to SEQ ID NO: 654070
ucauguaccgggcauucuu

SEQ ID NO: 654072 - RNA, 19 nt, Artificial Sequence
  Description of Artificial Sequence: Synthetic oligonucleotide
  Sense strand starting at position 194 of SEQ ID NO: 585617
ccaacacaugucuguugaa

SEQ ID NO: 654073 - RNA, 19 nt, Artificial Sequence
  Description of Artificial Sequence: Synthetic oligonucleotide
  Antisense strand to SEQ ID NO: 654072
uucaacagacauguguugg

SEQ ID NO: 654074 - RNA, 19 nt, Artificial Sequence
  Description of Artificial Sequence: Synthetic oligonucleotide
  Sense strand starting at position 201 of SEQ ID NO: 585617
augucuguugaaugaugga

SEQ ID NO: 654075 - RNA, 19 nt, Artificial Sequence
  Description of Artificial Sequence: Synthetic oligonucleotide
  Antisense strand to SEQ ID NO: 654074
uccaucauucaacagacau

SEQ ID NO: 654076 - RNA, 19 nt, Artificial Sequence
  Description of Artificial Sequence: Synthetic oligonucleotide
  Sense strand starting at position 284 of SEQ ID NO: 585617
ggacacauuggcgauuacu

SEQ ID NO: 654077 - RNA, 19 nt, Artificial Sequence
  Description of Artificial Sequence: Synthetic oligonucleotide
  Antisense strand to SEQ ID NO: 654076
aguaaucgccaaugugucc

SEQ ID NO: 654078 - RNA, 19 nt, Artificial Sequence
  Description of Artificial Sequence: Synthetic oligonucleotide
  Sense strand starting at position 306 of SEQ ID NO: 585617
ucuuaauuugcuugcagga

SEQ ID NO: 654079 - RNA, 19 nt, Artificial Sequence
  Description of Artificial Sequence: Synthetic oligonucleotide
  Antisense strand to SEQ ID NO: 654078
uccugcaagcaaauuaaga

SEQ ID NO: 654080 - RNA, 19 nt, Artificial Sequence
  Description of Artificial Sequence: Synthetic oligonucleotide
  Sense strand starting at position 336 of SEQ ID NO: 585617
agccuuugguucuugagaa

SEQ ID NO: 654081 - RNA, 19 nt, Artificial Sequence
  Description of Artificial Sequence: Synthetic oligonucleotide
  Antisense strand to SEQ ID NO: 654080
uucucaagaaccaaaggcu

SEQ ID NO: 654082 - RNA, 19 nt, Artificial Sequence
  Description of Artificial Sequence: Synthetic oligonucleotide
  Sense strand starting at position 449 of SEQ ID NO: 585617
acaccaacguugucacaga

SEQ ID NO: 654083 - RNA, 19 nt, Artificial Sequence
  Description of Artificial Sequence: Synthetic oligonucleotide
  Antisense strand to SEQ ID NO: 654082
ucugugacaacguuggugu

SEQ ID NO: 654084 - RNA, 19 nt, Artificial Sequence
  Description of Artificial Sequence: Synthetic oligonucleotide
  Sense strand starting at position 454 of SEQ ID NO: 585617
aacguugucacagaguuga

SEQ ID NO: 654085 - RNA, 19 nt, Artificial Sequence
  Description of Artificial Sequence: Synthetic oligonucleotide
  Antisense strand to SEQ ID NO: 654084
ucaacucugugacaacguu

SEQ ID NO: 654086 - RNA, 19 nt, Artificial Sequence
  Description of Artificial Sequence: Synthetic oligonucleotide
  Sense strand starting at position 464 of SEQ ID NO: 585617
cagaguugaucaccugaaa

SEQ ID NO: 654087 - RNA, 19 nt, Artificial Sequence
  Description of Artificial Sequence: Synthetic oligonucleotide
  Antisense strand to SEQ ID NO: 654086
uuucaggugaucaacucug

SEQ ID NO: 654088 - RNA, 19 nt, Artificial Sequence
  Description of Artificial Sequence: Synthetic oligonucleotide
  Sense strand starting at position 708 of SEQ ID NO: 585617
uguguuuaaggucacauga

SEQ ID NO: 654089 - RNA, 19 nt, Artificial Sequence
  Description of Artificial Sequence: Synthetic oligonucleotide
  Antisense strand to SEQ ID NO: 654088
ucaugugaccuuaaacaca

SEQ ID NO: 654090 - RNA, 19 nt, Artificial Sequence
  Description of Artificial Sequence: Synthetic oligonucleotide
  Sense strand starting at position 1008 of SEQ ID NO: 585617
ugccacgacccuugaauaa

SEQ ID NO: 654091 - RNA, 19 nt, Artificial Sequence
  Description of Artificial Sequence: Synthetic oligonucleotide
  Antisense strand to SEQ ID NO: 654090
uuauucaagggucguggca

SEQ ID NO: 654092 - RNA, 19 nt, Artificial Sequence
  Description of Artificial Sequence: Synthetic oligonucleotide
  Sense strand starting at position 1021 of SEQ ID NO: 585617
gaauaacugccauaguugu

SEQ ID NO: 654093 - RNA, 19 nt, Artificial Sequence
  Description of Artificial Sequence: Synthetic oligonucleotide
  Antisense strand to SEQ ID NO: 654092
acaacuauggcaguuauuc

SEQ ID NO: 654094 - RNA, 19 nt, Artificial Sequence
  Description of Artificial Sequence: Synthetic oligonucleotide
  Sense strand starting at position 1228 of SEQ ID NO: 585617
aguccugcucucgaaauua

SEQ ID NO: 654095 - RNA, 19 nt, Artificial Sequence
  Description of Artificial Sequence: Synthetic oligonucleotide
  Antisense strand to SEQ ID NO: 654094
uaauuucgagagcaggacu

SEQ ID NO: 654096 - RNA, 19 nt, Artificial Sequence
  Description of Artificial Sequence: Synthetic oligonucleotide
  Sense strand starting at position 1351 of SEQ ID NO: 585617
uaacucagucucugggaga

SEQ ID NO: 654097 - RNA, 19 nt, Artificial Sequence
  Description of Artificial Sequence: Synthetic oligonucleotide
  Antisense strand to SEQ ID NO: 654096
ucucccagagacugaguua

SEQ ID NO: 654098 - RNA, 19 nt, Artificial Sequence
  Description of Artificial Sequence: Synthetic oligonucleotide
  Sense strand starting at position 2223 of SEQ ID NO: 585617
ugugaucugagguaaccua

SEQ ID NO: 654099 - RNA, 19 nt, Artificial Sequence
  Description of Artificial Sequence: Synthetic oligonucleotide
  Antisense strand to SEQ ID NO: 654098
uagguuaccucagaucaca

SEQ ID NO: 654100 - RNA, 19 nt, Artificial Sequence
  Description of Artificial Sequence: Synthetic oligonucleotide
  Sense strand starting at position 2302 of SEQ ID NO: 585617
gggcgaauccacguguugu

SEQ ID NO: 654101 - RNA, 19 nt, Artificial Sequence
  Description of Artificial Sequence: Synthetic oligonucleotide
  Antisense strand to SEQ ID NO: 654100
acaacacguggauucgccc

SEQ ID NO: 654102 - RNA, 19 nt, Artificial Sequence
  Description of Artificial Sequence: Synthetic oligonucleotide
  Sense strand starting at position 2356 of SEQ ID NO: 585617
gcgaaucuucaagggaagu

SEQ ID NO: 654103 - RNA, 19 nt, Artificial Sequence
  Description of Artificial Sequence: Synthetic oligonucleotide
  Antisense strand to SEQ ID NO: 654102
acuucccuugaagauucgc

SEQ ID NO: 654104 - RNA, 19 nt, Artificial Sequence
  Description of Artificial Sequence: Synthetic oligonucleotide
  Sense strand starting at position 2390 of SEQ ID NO: 585617
gggauuagcaagcaucugu

SEQ ID NO: 654105 - RNA, 19 nt, Artificial Sequence
  Description of Artificial Sequence: Synthetic oligonucleotide
  Antisense strand to SEQ ID NO: 654104
acagaugcuugcuaauccc

SEQ ID NO: 654106 - RNA, 19 nt, Artificial Sequence
  Description of Artificial Sequence: Synthetic oligonucleotide
  Sense strand starting at position 2476 of SEQ ID NO: 585617
ucaugagauuaauuaagug

SEQ ID NO: 654107 - RNA, 19 nt, Artificial Sequence
  Description of Artificial Sequence: Synthetic oligonucleotide
  Antisense strand to SEQ ID NO: 654106
cacuuaauuaaucucauga

SEQ ID NO: 654108 - RNA, 19 nt, Artificial Sequence
  Description of Artificial Sequence: Synthetic oligonucleotide
  Sense strand starting at position 2481 of SEQ ID NO: 585617
agauuaauuaagugcgaga

SEQ ID NO: 654109 - RNA, 19 nt, Artificial Sequence
  Description of Artificial Sequence: Synthetic oligonucleotide
  Antisense strand to SEQ ID NO: 654108
ucucgcacuuaauuaaucu

SEQ ID NO: 654110 - RNA, 19 nt, Artificial Sequence
  Description of Artificial Sequence: Synthetic oligonucleotide
  Sense strand starting at position 2483 of SEQ ID NO: 585617
auuaauuaagugcgagaau

SEQ ID NO: 654111 - RNA, 19 nt, Artificial Sequence
  Description of Artificial Sequence: Synthetic oligonucleotide
  Antisense strand to SEQ ID NO: 654110
auucucgcacuuaauuaau

SEQ ID NO: 654112 - RNA, 19 nt, Artificial Sequence
  Description of Artificial Sequence: Synthetic oligonucleotide
  Sense strand starting at position 2486 of SEQ ID NO: 585617
aauuaagugcgagaauuaa

SEQ ID NO: 654113 - RNA, 19 nt, Artificial Sequence
  Description of Artificial Sequence: Synthetic oligonucleotide
  Antisense strand to SEQ ID NO: 654112
uuaauucucgcacuuaauu

SEQ ID NO: 654114 - RNA, 19 nt, Artificial Sequence
  Description of Artificial Sequence: Synthetic oligonucleotide
  Sense strand starting at position 2494 of SEQ ID NO: 585617
gcgagaauuaaaugaggug

SEQ ID NO: 654115 - RNA, 19 nt, Artificial Sequence
  Description of Artificial Sequence: Synthetic oligonucleotide
  Antisense strand to SEQ ID NO: 654114
caccucauuuaauucucgc

SEQ ID NO: 654116 - RNA, 19 nt, Artificial Sequence
  Description of Artificial Sequence: Synthetic oligonucleotide
  Sense strand starting at position 2558 of SEQ ID NO: 585617
guuguuuauagggaucauu

SEQ ID NO: 654117 - RNA, 19 nt, Artificial Sequence
  Description of Artificial Sequence: Synthetic oligonucleotide
  Antisense strand to SEQ ID NO: 654116
aaugaucccuauaaacaac

SEQ ID NO: 654118 - RNA, 19 nt, Artificial Sequence
  Description of Artificial Sequence: Synthetic oligonucleotide
  Sense strand starting at position 2611 of SEQ ID NO: 585617
ggaaauaaugcugauuguc

SEQ ID NO: 654119 - RNA, 19 nt, Artificial Sequence
  Description of Artificial Sequence: Synthetic oligonucleotide
  Antisense strand to SEQ ID NO: 654118
gacaaucagcauuauuucc

SEQ ID NO: 654120 - RNA, 19 nt, Artificial Sequence
  Description of Artificial Sequence: Synthetic oligonucleotide
  Sense strand starting at position 2728 of SEQ ID NO: 585617
cagggagucacguaacuug

SEQ ID NO: 654121 - RNA, 19 nt, Artificial Sequence
  Description of Artificial Sequence: Synthetic oligonucleotide
  Antisense strand to SEQ ID NO: 654120
caaguuacgugacucccug

SEQ ID NO: 654122 - RNA, 19 nt, Artificial Sequence
  Description of Artificial Sequence: Synthetic oligonucleotide
  Sense strand starting at position 2825 of SEQ ID NO: 585617
auauguaacuauguuacca

SEQ ID NO: 654123 - RNA, 19 nt, Artificial Sequence
  Description of Artificial Sequence: Synthetic oligonucleotide
  Antisense strand to SEQ ID NO: 654122
ugguaacauaguuacauau

SEQ ID NO: 654124 - RNA, 19 nt, Artificial Sequence
  Description of Artificial Sequence: Synthetic oligonucleotide
  Sense strand starting at position 2829 of SEQ ID NO: 585617
guaacuauguuaccauaac

SEQ ID NO: 654125 - RNA, 19 nt, Artificial Sequence
  Description of Artificial Sequence: Synthetic oligonucleotide
  Antisense strand to SEQ ID NO: 654124
guuaugguaacauaguuac

SEQ ID NO: 654126 - RNA, 19 nt, Artificial Sequence
  Description of Artificial Sequence: Synthetic oligonucleotide
  Sense strand starting at position 2879 of SEQ ID NO: 585617
augagugaauuguuaauga

SEQ ID NO: 654127 - RNA, 19 nt, Artificial Sequence
  Description of Artificial Sequence: Synthetic oligonucleotide
  Antisense strand to SEQ ID NO: 654126
ucauuaacaauucacucau

SEQ ID NO: 654128 - RNA, 19 nt, Artificial Sequence
  Description of Artificial Sequence: Synthetic oligonucleotide
  Sense strand starting at position 2940 of SEQ ID NO: 585617
agacuugcccugcauauga

SEQ ID NO: 654129 - RNA, 19 nt, Artificial Sequence
  Description of Artificial Sequence: Synthetic oligonucleotide
  Antisense strand to SEQ ID NO: 654128
ucauaugcagggcaagucu

SEQ ID NO: 654130 - RNA, 19 nt, Artificial Sequence
  Description of Artificial Sequence: Synthetic oligonucleotide
  Sense strand starting at position 2942 of SEQ ID NO: 585617
acuugcccugcauaugaaa

SEQ ID NO: 654131 - RNA, 19 nt, Artificial Sequence
  Description of Artificial Sequence: Synthetic oligonucleotide
  Antisense strand to SEQ ID NO: 654130
uuucauaugcagggcaagu

SEQ ID NO: 654132 - RNA, 19 nt, Artificial Sequence
  Description of Artificial Sequence: Synthetic oligonucleotide
  Sense strand starting at position 3004 of SEQ ID NO: 585617
acauuugcuugcucuguua

SEQ ID NO: 654133 - RNA, 19 nt, Artificial Sequence
  Description of Artificial Sequence: Synthetic oligonucleotide
  Antisense strand to SEQ ID NO: 654132
uaacagagcaagcaaaugu

SEQ ID NO: 654134 - RNA, 19 nt, Artificial Sequence
  Description of Artificial Sequence: Synthetic oligonucleotide
  Sense strand starting at position 3069 of SEQ ID NO: 585617
ucagaugaaugaguuuaua

SEQ ID NO: 654135 - RNA, 19 nt, Artificial Sequence
  Description of Artificial Sequence: Synthetic oligonucleotide
  Antisense strand to SEQ ID NO: 654134
uauaaacucauucaucuga

SEQ ID NO: 654136 - RNA, 19 nt, Artificial Sequence
  Description of Artificial Sequence: Synthetic oligonucleotide
  Sense strand starting at position 3101 of SEQ ID NO: 585617
gggcguauaaacgaagaca

SEQ ID NO: 654137 - RNA, 19 nt, Artificial Sequence
  Description of Artificial Sequence: Synthetic oligonucleotide
  Antisense strand to SEQ ID NO: 654136
ugucuucguuuauacgccc

SEQ ID NO: 654138 - RNA, 19 nt, Artificial Sequence
  Description of Artificial Sequence: Synthetic oligonucleotide
  Sense strand starting at position 3236 of SEQ ID NO: 585617
uagauuaaguugucuaagu

SEQ ID NO: 654139 - RNA, 19 nt, Artificial Sequence
  Description of Artificial Sequence: Synthetic oligonucleotide
  Antisense strand to SEQ ID NO: 654138
acuuagacaacuuaaucua

SEQ ID NO: 654140 - RNA, 19 nt, Artificial Sequence
  Description of Artificial Sequence: Synthetic oligonucleotide
  Sense strand starting at position 3237 of SEQ ID NO: 585617
agauuaaguugucuaaguu

SEQ ID NO: 654141 - RNA, 19 nt, Artificial Sequence
  Description of Artificial Sequence: Synthetic oligonucleotide
  Antisense strand to SEQ ID NO: 654140
aacuuagacaacuuaaucu

SEQ ID NO: 654142 - RNA, 19 nt, Artificial Sequence
  Description of Artificial Sequence: Synthetic oligonucleotide
  Sense strand starting at position 3238 of SEQ ID NO: 585617
gauuaaguugucuaaguuc

SEQ ID NO: 654143 - RNA, 19 nt, Artificial Sequence
  Description of Artificial Sequence: Synthetic oligonucleotide
  Antisense strand to SEQ ID NO: 654142
gaacuuagacaacuuaauc

SEQ ID NO: 654144 - RNA, 19 nt, Artificial Sequence
  Description of Artificial Sequence: Synthetic oligonucleotide
  Sense strand starting at position 3742 of SEQ ID NO: 585617
guuucuauugcaggagaac

SEQ ID NO: 654145 - RNA, 19 nt, Artificial Sequence
  Description of Artificial Sequence: Synthetic oligonucleotide
  Antisense strand to SEQ ID NO: 654144
guucuccugcaauagaaac

SEQ ID NO: 654146 - RNA, 19 nt, Artificial Sequence
  Description of Artificial Sequence: Synthetic oligonucleotide
  Sense strand starting at position 3743 of SEQ ID NO: 585617
uuucuauugcaggagaacu

SEQ ID NO: 654147 - RNA, 19 nt, Artificial Sequence
  Description of Artificial Sequence: Synthetic oligonucleotide
  Antisense strand to SEQ ID NO: 654146
aguucuccugcaauagaaa

SEQ ID NO: 654148 - RNA, 19 nt, Artificial Sequence
  Description of Artificial Sequence: Synthetic oligonucleotide
  Sense strand starting at position 34 of SEQ ID NO: 585618
ugaccauuagcuugacuuu

SEQ ID NO: 654149 - RNA, 19 nt, Artificial Sequence
  Description of Artificial Sequence: Synthetic oligonucleotide
  Antisense strand to SEQ ID NO: 654148
aaagucaagcuaaugguca

SEQ ID NO: 654150 - RNA, 19 nt, Artificial Sequence
  Description of Artificial Sequence: Synthetic oligonucleotide
  Sense strand starting at position 144 of SEQ ID NO: 585618
agcauucuccggcaacuuu

SEQ ID NO: 654151 - RNA, 19 nt, Artificial Sequence
  Description of Artificial Sequence: Synthetic oligonucleotide
  Antisense strand to SEQ ID NO: 654150
aaaguugccggagaaugcu

SEQ ID NO: 654152 - RNA, 19 nt, Artificial Sequence
  Description of Artificial Sequence: Synthetic oligonucleotide
  Sense strand starting at position 244 of SEQ ID NO: 585618
uuaugagugguguauaauu

SEQ ID NO: 654153 - RNA, 19 nt, Artificial Sequence
  Description of Artificial Sequence: Synthetic oligonucleotide
  Antisense strand to SEQ ID NO: 654152
aauuauacaccacucauaa

SEQ ID NO: 654154 - RNA, 19 nt, Artificial Sequence
  Description of Artificial Sequence: Synthetic oligonucleotide
  Sense strand starting at position 336 of SEQ ID NO: 585618
ucugcuuguggacauguau

SEQ ID NO: 654155 - RNA, 19 nt, Artificial Sequence
  Description of Artificial Sequence: Synthetic oligonucleotide
  Antisense strand to SEQ ID NO: 654154
auacauguccacaagcaga

SEQ ID NO: 654156 - RNA, 19 nt, Artificial Sequence
  Description of Artificial Sequence: Synthetic oligonucleotide
  Sense strand starting at position 606 of SEQ ID NO: 585618
uguucuuaaggaugaauac

SEQ ID NO: 654157 - RNA, 19 nt, Artificial Sequence
  Description of Artificial Sequence: Synthetic oligonucleotide
  Antisense strand to SEQ ID NO: 654156
guauucauccuuaagaaca

SEQ ID NO: 654158 - RNA, 19 nt, Artificial Sequence
  Description of Artificial Sequence: Synthetic oligonucleotide
  Sense strand starting at position 691 of SEQ ID NO: 585618
acuguuaaauguucuuauc

SEQ ID NO: 654159 - RNA, 19 nt, Artificial Sequence
  Description of Artificial Sequence: Synthetic oligonucleotide
  Antisense strand to SEQ ID NO: 654158
gauaagaacauuuaacagu

SEQ ID NO: 654160 - RNA, 19 nt, Artificial Sequence
  Description of Artificial Sequence: Synthetic oligonucleotide
  Sense strand starting at position 704 of SEQ ID NO: 585618
cuuaucuaagcgcauauaa

SEQ ID NO: 654161 - RNA, 19 nt, Artificial Sequence
  Description of Artificial Sequence: Synthetic oligonucleotide
  Antisense strand to SEQ ID NO: 654160
uuauaugcgcuuagauaag

SEQ ID NO: 654162 - RNA, 19 nt, Artificial Sequence
  Description of Artificial Sequence: Synthetic oligonucleotide
  Sense strand starting at position 782 of SEQ ID NO: 585618
uucccucggucauuaaaca

SEQ ID NO: 654163 - RNA, 19 nt, Artificial Sequence
  Description of Artificial Sequence: Synthetic oligonucleotide
  Antisense strand to SEQ ID NO: 654162
uguuuaaugaccgagggaa

SEQ ID NO: 654164 - RNA, 19 nt, Artificial Sequence
  Description of Artificial Sequence: Synthetic oligonucleotide
  Sense strand starting at position 847 of SEQ ID NO: 585618
cgagaccgguggguuaaua

SEQ ID NO: 654165 - RNA, 19 nt, Artificial Sequence
  Description of Artificial Sequence: Synthetic oligonucleotide
  Antisense strand to SEQ ID NO: 654164
uauuaacccaccggucucg

SEQ ID NO: 654166 - RNA, 19 nt, Artificial Sequence
  Description of Artificial Sequence: Synthetic oligonucleotide
  Sense strand starting at position 1046 of SEQ ID NO: 585618
aguaacacauuugaugaga

SEQ ID NO: 654167 - RNA, 19 nt, Artificial Sequence
  Description of Artificial Sequence: Synthetic oligonucleotide
  Antisense strand to SEQ ID NO: 654166
ucucaucaaauguguuacu

SEQ ID NO: 654168 - RNA, 19 nt, Artificial Sequence
  Description of Artificial Sequence: Synthetic oligonucleotide
  Sense strand starting at position 1113 of SEQ ID NO: 585618
ccauuccgcccugaaaguu

SEQ ID NO: 654169 - RNA, 19 nt, Artificial Sequence
  Description of Artificial Sequence: Synthetic oligonucleotide
  Antisense strand to SEQ ID NO: 654168
aacuuucagggcggaaugg

SEQ ID NO: 654170 - RNA, 19 nt, Artificial Sequence
  Description of Artificial Sequence: Synthetic oligonucleotide
  Sense strand starting at position 1164 of SEQ ID NO: 585618
gcugucccgaucuaggaaa

SEQ ID NO: 654171 - RNA, 19 nt, Artificial Sequence
  Description of Artificial Sequence: Synthetic oligonucleotide
  Antisense strand to SEQ ID NO: 654170
uuuccuagaucgggacagc

SEQ ID NO: 654172 - RNA, 19 nt, Artificial Sequence
  Description of Artificial Sequence: Synthetic oligonucleotide
  Sense strand starting at position 1166 of SEQ ID NO: 585618
ugucccgaucuaggaaauu

SEQ ID NO: 654173 - RNA, 19 nt, Artificial Sequence
  Description of Artificial Sequence: Synthetic oligonucleotide
  Antisense strand to SEQ ID NO: 654172
aauuuccuagaucgggaca

SEQ ID NO: 654174 - RNA, 19 nt, Artificial Sequence
  Description of Artificial Sequence: Synthetic oligonucleotide
  Sense strand starting at position 1212 of SEQ ID NO: 585618
uuaagaguaugucugauac

SEQ ID NO: 654175 - RNA, 19 nt, Artificial Sequence
  Description of Artificial Sequence: Synthetic oligonucleotide
  Antisense strand to SEQ ID NO: 654174
guaucagacauacucuuaa

SEQ ID NO: 654176 - RNA, 19 nt, Artificial Sequence
  Description of Artificial Sequence: Synthetic oligonucleotide
  Sense strand starting at position 1223 of SEQ ID NO: 585618
ucugauacagucuguaaua

SEQ ID NO: 654177 - RNA, 19 nt, Artificial Sequence
  Description of Artificial Sequence: Synthetic oligonucleotide
  Antisense strand to SEQ ID NO: 654176
uauuacagacuguaucaga

SEQ ID NO: 654178 - RNA, 19 nt, Artificial Sequence
  Description of Artificial Sequence: Synthetic oligonucleotide
  Sense strand starting at position 1224 of SEQ ID NO: 585618
cugauacagucuguaauac

SEQ ID NO: 654179 - RNA, 19 nt, Artificial Sequence
  Description of Artificial Sequence: Synthetic oligonucleotide
  Antisense strand to SEQ ID NO: 654178
guauuacagacuguaucag

SEQ ID NO: 654180 - RNA, 19 nt, Artificial Sequence
  Description of Artificial Sequence: Synthetic oligonucleotide
  Sense strand starting at position 1225 of SEQ ID NO: 585618
ugauacagucuguaauacu

SEQ ID NO: 654181 - RNA, 19 nt, Artificial Sequence
  Description of Artificial Sequence: Synthetic oligonucleotide
  Antisense strand to SEQ ID NO: 654180
aguauuacagacuguauca

SEQ ID NO: 654182 - RNA, 19 nt, Artificial Sequence
  Description of Artificial Sequence: Synthetic oligonucleotide
  Sense strand starting at position 1303 of SEQ ID NO: 585618
gucccauuauuacuuggaa

SEQ ID NO: 654183 - RNA, 19 nt, Artificial Sequence
  Description of Artificial Sequence: Synthetic oligonucleotide
  Antisense strand to SEQ ID NO: 654182
uuccaaguaauaaugggac

SEQ ID NO: 654184 - RNA, 19 nt, Artificial Sequence
  Description of Artificial Sequence: Synthetic oligonucleotide
  Sense strand starting at position 1306 of SEQ ID NO: 585618
ccauuauuacuuggaacag

SEQ ID NO: 654185 - RNA, 19 nt, Artificial Sequence
  Description of Artificial Sequence: Synthetic oligonucleotide
  Antisense strand to SEQ ID NO: 654184
cuguuccaaguaauaaugg

SEQ ID NO: 654186 - RNA, 19 nt, Artificial Sequence
  Description of Artificial Sequence: Synthetic oligonucleotide
  Sense strand starting at position 1386 of SEQ ID NO: 585618
gguuguaagaaucgggucu

SEQ ID NO: 654187 - RNA, 19 nt, Artificial Sequence
  Description of Artificial Sequence: Synthetic oligonucleotide
  Antisense strand to SEQ ID NO: 654186
agacccgauucuuacaacc

SEQ ID NO: 654188 - RNA, 19 nt, Artificial Sequence
  Description of Artificial Sequence: Synthetic oligonucleotide
  Sense strand starting at position 2389 of SEQ ID NO: 585618
aagcacuuugcagguaaau

SEQ ID NO: 654189 - RNA, 19 nt, Artificial Sequence
  Description of Artificial Sequence: Synthetic oligonucleotide
  Antisense strand to SEQ ID NO: 654188
auuuaccugcaaagugcuu

SEQ ID NO: 654190 - RNA, 19 nt, Artificial Sequence
  Description of Artificial Sequence: Synthetic oligonucleotide
  Sense strand starting at position 2401 of SEQ ID NO: 585618
gguaaauacguguaauccu

SEQ ID NO: 654191 - RNA, 19 nt, Artificial Sequence
  Description of Artificial Sequence: Synthetic oligonucleotide
  Antisense strand to SEQ ID NO: 654190
aggauuacacguauuuacc

SEQ ID NO: 654192 - RNA, 19 nt, Artificial Sequence
  Description of Artificial Sequence: Synthetic oligonucleotide
  Sense strand starting at position 2408 of SEQ ID NO: 585618
acguguaauccucacagca

SEQ ID NO: 654193 - RNA, 19 nt, Artificial Sequence
  Description of Artificial Sequence: Synthetic oligonucleotide
  Antisense strand to SEQ ID NO: 654192
ugcugugaggauuacacgu

SEQ ID NO: 654194 - RNA, 19 nt, Artificial Sequence
  Description of Artificial Sequence: Synthetic oligonucleotide
  Sense strand starting at position 2432 of SEQ ID NO: 585618
gggagaaauacccgucuca

SEQ ID NO: 654195 - RNA, 19 nt, Artificial Sequence
  Description of Artificial Sequence: Synthetic oligonucleotide
  Antisense strand to SEQ ID NO: 654194
ugagacggguauuucuccc

SEQ ID NO: 654196 - RNA, 19 nt, Artificial Sequence
  Description of Artificial Sequence: Synthetic oligonucleotide
  Sense strand starting at position 2443 of SEQ ID NO: 585618
ccgucucacagcugaagaa

SEQ ID NO: 654197 - RNA, 19 nt, Artificial Sequence
  Description of Artificial Sequence: Synthetic oligonucleotide
  Antisense strand to SEQ ID NO: 654196
uucuucagcugugagacgg

SEQ ID NO: 654198 - RNA, 19 nt, Artificial Sequence
  Description of Artificial Sequence: Synthetic oligonucleotide
  Sense strand starting at position 2444 of SEQ ID NO: 585618
cgucucacagcugaagaaa

SEQ ID NO: 654199 - RNA, 19 nt, Artificial Sequence
  Description of Artificial Sequence: Synthetic oligonucleotide
  Antisense strand to SEQ ID NO: 654198
uuucuucagcugugagacg

SEQ ID NO: 654200 - RNA, 19 nt, Artificial Sequence
  Description of Artificial Sequence: Synthetic oligonucleotide
  Sense strand starting at position 2495 of SEQ ID NO: 585618
uucuaauuacgguaucaca

SEQ ID NO: 654201 - RNA, 19 nt, Artificial Sequence
  Description of Artificial Sequence: Synthetic oligonucleotide
  Antisense strand to SEQ ID NO: 654200
ugugauaccguaauuagaa

SEQ ID NO: 654202 - RNA, 19 nt, Artificial Sequence
  Description of Artificial Sequence: Synthetic oligonucleotide
  Sense strand starting at position 2624 of SEQ ID NO: 585618
gccuauaagcauuacguaa

SEQ ID NO: 654203 - RNA, 19 nt, Artificial Sequence
  Description of Artificial Sequence: Synthetic oligonucleotide
  Antisense strand to SEQ ID NO: 654202
uuacguaaugcuuauaggc

SEQ ID NO: 654204 - RNA, 19 nt, Artificial Sequence
  Description of Artificial Sequence: Synthetic oligonucleotide
  Sense strand starting at position 2674 of SEQ ID NO: 585618
cauguucggguuuagaaag

SEQ ID NO: 654205 - RNA, 19 nt, Artificial Sequence
  Description of Artificial Sequence: Synthetic oligonucleotide
  Antisense strand to SEQ ID NO: 654204
cuuucuaaacccgaacaug

SEQ ID NO: 654206 - RNA, 19 nt, Artificial Sequence
  Description of Artificial Sequence: Synthetic oligonucleotide
  Sense strand starting at position 2692 of SEQ ID NO: 585618
gucucauagcucugaaaga

SEQ ID NO: 654207 - RNA, 19 nt, Artificial Sequence
  Description of Artificial Sequence: Synthetic oligonucleotide
  Antisense strand to SEQ ID NO: 654206
ucuuucagagcuaugagac

SEQ ID NO: 654208 - RNA, 19 nt, Artificial Sequence
  Description of Artificial Sequence: Synthetic oligonucleotide
  Sense strand starting at position 2699 of SEQ ID NO: 585618
agcucugaaagaugagguu

SEQ ID NO: 654209 - RNA, 19 nt, Artificial Sequence
  Description of Artificial Sequence: Synthetic oligonucleotide
  Antisense strand to SEQ ID NO: 654208
aaccucaucuuucagagcu

SEQ ID NO: 654210 - RNA, 19 nt, Artificial Sequence
  Description of Artificial Sequence: Synthetic oligonucleotide
  Sense strand starting at position 2708 of SEQ ID NO: 585618
agaugagguuaauuagcau

SEQ ID NO: 654211 - RNA, 19 nt, Artificial Sequence
  Description of Artificial Sequence: Synthetic oligonucleotide
  Antisense strand to SEQ ID NO: 654210
augcuaauuaaccucaucu

SEQ ID NO: 654212 - RNA, 19 nt, Artificial Sequence
  Description of Artificial Sequence: Synthetic oligonucleotide
  Sense strand starting at position 2711 of SEQ ID NO: 585618
ugagguuaauuagcaucau

SEQ ID NO: 654213 - RNA, 19 nt, Artificial Sequence
  Description of Artificial Sequence: Synthetic oligonucleotide
  Antisense strand to SEQ ID NO: 654212
augaugcuaauuaaccuca

SEQ ID NO: 654214 - RNA, 19 nt, Artificial Sequence
  Description of Artificial Sequence: Synthetic oligonucleotide
  Sense strand starting at position 2772 of SEQ ID NO: 585618
uccauuaguucuguuacuu

SEQ ID NO: 654215 - RNA, 19 nt, Artificial Sequence
  Description of Artificial Sequence: Synthetic oligonucleotide
  Antisense strand to SEQ ID NO: 654214
aaguaacagaacuaaugga

SEQ ID NO: 654216 - RNA, 19 nt, Artificial Sequence
  Description of Artificial Sequence: Synthetic oligonucleotide
  Sense strand starting at position 2794 of SEQ ID NO: 585618
gcuuccuagcaaugagaac

SEQ ID NO: 654217 - RNA, 19 nt, Artificial Sequence
  Description of Artificial Sequence: Synthetic oligonucleotide
  Antisense strand to SEQ ID NO: 654216
guucucauugcuaggaagc

SEQ ID NO: 654218 - RNA, 19 nt, Artificial Sequence
  Description of Artificial Sequence: Synthetic oligonucleotide
  Sense strand starting at position 2813 of SEQ ID NO: 585618
auuugcaauugcucugcaa

SEQ ID NO: 654219 - RNA, 19 nt, Artificial Sequence
  Description of Artificial Sequence: Synthetic oligonucleotide
  Antisense strand to SEQ ID NO: 654218
uugcagagcaauugcaaau

SEQ ID NO: 654220 - RNA, 19 nt, Artificial Sequence
  Description of Artificial Sequence: Synthetic oligonucleotide
  Sense strand starting at position 2817 of SEQ ID NO: 585618
gcaauugcucugcaacuuu

SEQ ID NO: 654221 - RNA, 19 nt, Artificial Sequence
  Description of Artificial Sequence: Synthetic oligonucleotide
  Antisense strand to SEQ ID NO: 654220
aaaguugcagagcaauugc

SEQ ID NO: 654222 - RNA, 19 nt, Artificial Sequence
  Description of Artificial Sequence: Synthetic oligonucleotide
  Sense strand starting at position 2841 of SEQ ID NO: 585618
uccagauguugucuuaauu

SEQ ID NO: 654223 - RNA, 19 nt, Artificial Sequence
  Description of Artificial Sequence: Synthetic oligonucleotide
  Antisense strand to SEQ ID NO: 654222
aauuaagacaacaucugga

SEQ ID NO: 654224 - RNA, 19 nt, Artificial Sequence
  Description of Artificial Sequence: Synthetic oligonucleotide
  Sense strand starting at position 3029 of SEQ ID NO: 585618
aagugaguuggguaaauau

SEQ ID NO: 654225 - RNA, 19 nt, Artificial Sequence
  Description of Artificial Sequence: Synthetic oligonucleotide
  Antisense strand to SEQ ID NO: 654224
auauuuacccaacucacuu

SEQ ID NO: 654226 - RNA, 19 nt, Artificial Sequence
  Description of Artificial Sequence: Synthetic oligonucleotide
  Sense strand starting at position 3804 of SEQ ID NO: 585618
augagauguuaccugauaa

SEQ ID NO: 654227 - RNA, 19 nt, Artificial Sequence
  Description of Artificial Sequence: Synthetic oligonucleotide
  Antisense strand to SEQ ID NO: 654226
uuaucagguaacaucucau

SEQ ID NO: 654228 - RNA, 19 nt, Artificial Sequence
  Description of Artificial Sequence: Synthetic oligonucleotide
  Sense strand starting at position 61 of SEQ ID NO: 585619
aucugauugccagguaacu

SEQ ID NO: 654229 - RNA, 19 nt, Artificial Sequence
  Description of Artificial Sequence: Synthetic oligonucleotide
  Antisense strand to SEQ ID NO: 654228
aguuaccuggcaaucagau

SEQ ID NO: 654230 - RNA, 19 nt, Artificial Sequence
  Description of Artificial Sequence: Synthetic oligonucleotide
  Sense strand starting at position 183 of SEQ ID NO: 585619
ugaccuauuugaggaugaa

SEQ ID NO: 654231 - RNA, 19 nt, Artificial Sequence
  Description of Artificial Sequence: Synthetic oligonucleotide
  Antisense strand to SEQ ID NO: 654230
uucauccucaaauagguca

SEQ ID NO: 654232 - RNA, 19 nt, Artificial Sequence
  Description of Artificial Sequence: Synthetic oligonucleotide
  Sense strand starting at position 211 of SEQ ID NO: 585619
gugggagcacucugaagaa

SEQ ID NO: 654233 - RNA, 19 nt, Artificial Sequence
  Description of Artificial Sequence: Synthetic oligonucleotide
  Antisense strand to SEQ ID NO: 654232
uucuucagagugcucccac

SEQ ID NO: 654234 - RNA, 19 nt, Artificial Sequence
  Description of Artificial Sequence: Synthetic oligonucleotide
  Sense strand starting at position 451 of SEQ ID NO: 585619
ucgugugcacugcuuuaua

SEQ ID NO: 654235 - RNA, 19 nt, Artificial Sequence
  Description of Artificial Sequence: Synthetic oligonucleotide
  Antisense strand to SEQ ID NO: 654234
uauaaagcagugcacacga

SEQ ID NO: 654236 - RNA, 19 nt, Artificial Sequence
  Description of Artificial Sequence: Synthetic oligonucleotide
  Sense strand starting at position 460 of SEQ ID NO: 585619
cugcuuuauaagggaggca

SEQ ID NO: 654237 - RNA, 19 nt, Artificial Sequence
  Description of Artificial Sequence: Synthetic oligonucleotide
  Antisense strand to SEQ ID NO: 654236
ugccucccuuauaaagcag

SEQ ID NO: 654238 - RNA, 19 nt, Artificial Sequence
  Description of Artificial Sequence: Synthetic oligonucleotide
  Sense strand starting at position 624 of SEQ ID NO: 585619
gaaguaugcugucuacaga

SEQ ID NO: 654239 - RNA, 19 nt, Artificial Sequence
  Description of Artificial Sequence: Synthetic oligonucleotide
  Antisense strand to SEQ ID NO: 654238
ucuguagacagcauacuuc

SEQ ID NO: 654240 - RNA, 19 nt, Artificial Sequence
  Description of Artificial Sequence: Synthetic oligonucleotide
  Sense strand starting at position 625 of SEQ ID NO: 585619
aaguaugcugucuacagaa

SEQ ID NO: 654241 - RNA, 19 nt, Artificial Sequence
  Description of Artificial Sequence: Synthetic oligonucleotide
  Antisense strand to SEQ ID NO: 654240
uucuguagacagcauacuu

SEQ ID NO: 654242 - RNA, 19 nt, Artificial Sequence
  Description of Artificial Sequence: Synthetic oligonucleotide
  Sense strand starting at position 627 of SEQ ID NO: 585619
guaugcugucuacagaauc

SEQ ID NO: 654243 - RNA, 19 nt, Artificial Sequence
  Description of Artificial Sequence: Synthetic oligonucleotide
  Antisense strand to SEQ ID NO: 654242
gauucuguagacagcauac

SEQ ID NO: 654244 - RNA, 19 nt, Artificial Sequence
  Description of Artificial Sequence: Synthetic oligonucleotide
  Sense strand starting at position 679 of SEQ ID NO: 585619
guuguuauuguaccgcauu

SEQ ID NO: 654245 - RNA, 19 nt, Artificial Sequence
  Description of Artificial Sequence: Synthetic oligonucleotide
  Antisense strand to SEQ ID NO: 654244
aaugcgguacaauaacaac

SEQ ID NO: 654246 - RNA, 19 nt, Artificial Sequence
  Description of Artificial Sequence: Synthetic oligonucleotide
  Sense strand starting at position 1174 of SEQ ID NO: 585619
gccagaacgcucgcagagu

SEQ ID NO: 654247 - RNA, 19 nt, Artificial Sequence
  Description of Artificial Sequence: Synthetic oligonucleotide
  Antisense strand to SEQ ID NO: 654246
acucugcgagcguucuggc

SEQ ID NO: 654248 - RNA, 19 nt, Artificial Sequence
  Description of Artificial Sequence: Synthetic oligonucleotide
  Sense strand starting at position 1459 of SEQ ID NO: 585619
ccgggugcucgcagaaacu

SEQ ID NO: 654249 - RNA, 19 nt, Artificial Sequence
  Description of Artificial Sequence: Synthetic oligonucleotide
  Antisense strand to SEQ ID NO: 654248
aguuucugcgagcacccgg

SEQ ID NO: 654250 - RNA, 19 nt, Artificial Sequence
  Description of Artificial Sequence: Synthetic oligonucleotide
  Sense strand starting at position 2433 of SEQ ID NO: 585619
gguguucuucaggcgucau

SEQ ID NO: 654251 - RNA, 19 nt, Artificial Sequence
  Description of Artificial Sequence: Synthetic oligonucleotide
  Antisense strand to SEQ ID NO: 654250
augacgccugaagaacacc

SEQ ID NO: 654252 - RNA, 19 nt, Artificial Sequence
  Description of Artificial Sequence: Synthetic oligonucleotide
  Sense strand starting at position 2445 of SEQ ID NO: 585619
gcgucauuacccuaaucac

SEQ ID NO: 654253 - RNA, 19 nt, Artificial Sequence
  Description of Artificial Sequence: Synthetic oligonucleotide
  Antisense strand to SEQ ID NO: 654252
gugauuaggguaaugacgc

SEQ ID NO: 654254 - RNA, 19 nt, Artificial Sequence
  Description of Artificial Sequence: Synthetic oligonucleotide
  Sense strand starting at position 2454 of SEQ ID NO: 585619
cccuaaucaccucgguuaa

SEQ ID NO: 654255 - RNA, 19 nt, Artificial Sequence
  Description of Artificial Sequence: Synthetic oligonucleotide
  Antisense strand to SEQ ID NO: 654254
uuaaccgaggugauuaggg

SEQ ID NO: 654256 - RNA, 19 nt, Artificial Sequence
  Description of Artificial Sequence: Synthetic oligonucleotide
  Sense strand starting at position 2455 of SEQ ID NO: 585619
ccuaaucaccucgguuaaa

SEQ ID NO: 654257 - RNA, 19 nt, Artificial Sequence
  Description of Artificial Sequence: Synthetic oligonucleotide
  Antisense strand to SEQ ID NO: 654256
uuuaaccgaggugauuagg

SEQ ID NO: 654258 - RNA, 19 nt, Artificial Sequence
  Description of Artificial Sequence: Synthetic oligonucleotide
  Sense strand starting at position 2456 of SEQ ID NO: 585619
cuaaucaccucgguuaaag

SEQ ID NO: 654259 - RNA, 19 nt, Artificial Sequence
  Description of Artificial Sequence: Synthetic oligonucleotide
  Antisense strand to SEQ ID NO: 654258
cuuuaaccgaggugauuag

SEQ ID NO: 654260 - RNA, 19 nt, Artificial Sequence
  Description of Artificial Sequence: Synthetic oligonucleotide
  Sense strand starting at position 2481 of SEQ ID NO: 585619
acgaccuuugccuagagaa

SEQ ID NO: 654261 - RNA, 19 nt, Artificial Sequence
  Description of Artificial Sequence: Synthetic oligonucleotide
  Antisense strand to SEQ ID NO: 654260
uucucuaggcaaaggucgu

SEQ ID NO: 654262 - RNA, 19 nt, Artificial Sequence
  Description of Artificial Sequence: Synthetic oligonucleotide
  Sense strand starting at position 2531 of SEQ ID NO: 585619
cggugacagccagagagau

SEQ ID NO: 654263 - RNA, 19 nt, Artificial Sequence
  Description of Artificial Sequence: Synthetic oligonucleotide
  Antisense strand to SEQ ID NO: 654262
aucucucuggcugucaccg

SEQ ID NO: 654264 - RNA, 19 nt, Artificial Sequence
  Description of Artificial Sequence: Synthetic oligonucleotide
  Sense strand starting at position 2607 of SEQ ID NO: 585619
gacaguuaaaggcauguga

SEQ ID NO: 654265 - RNA, 19 nt, Artificial Sequence
  Description of Artificial Sequence: Synthetic oligonucleotide
  Antisense strand to SEQ ID NO: 654264
ucacaugccuuuaacuguc

SEQ ID NO: 654266 - RNA, 19 nt, Artificial Sequence
  Description of Artificial Sequence: Synthetic oligonucleotide
  Sense strand starting at position 2609 of SEQ ID NO: 585619
caguuaaaggcaugugaag

SEQ ID NO: 654267 - RNA, 19 nt, Artificial Sequence
  Description of Artificial Sequence: Synthetic oligonucleotide
  Antisense strand to SEQ ID NO: 654266
cuucacaugccuuuaacug

SEQ ID NO: 654268 - RNA, 19 nt, Artificial Sequence
  Description of Artificial Sequence: Synthetic oligonucleotide
  Sense strand starting at position 2757 of SEQ ID NO: 585619
cuguguggccuugagagaa

SEQ ID NO: 654269 - RNA, 19 nt, Artificial Sequence
  Description of Artificial Sequence: Synthetic oligonucleotide
  Antisense strand to SEQ ID NO: 654268
uucucucaaggccacacag

SEQ ID NO: 654270 - RNA, 19 nt, Artificial Sequence
  Description of Artificial Sequence: Synthetic oligonucleotide
  Sense strand starting at position 2769 of SEQ ID NO: 585619
gagagaacgcuuuaaccuc

SEQ ID NO: 654271 - RNA, 19 nt, Artificial Sequence
  Description of Artificial Sequence: Synthetic oligonucleotide
  Antisense strand to SEQ ID NO: 654270
gagguuaaagcguucucuc

SEQ ID NO: 654272 - RNA, 19 nt, Artificial Sequence
  Description of Artificial Sequence: Synthetic oligonucleotide
  Sense strand starting at position 2787 of SEQ ID NO: 585619
cucuguguucugucuguuu

SEQ ID NO: 654273 - RNA, 19 nt, Artificial Sequence
  Description of Artificial Sequence: Synthetic oligonucleotide
  Antisense strand to SEQ ID NO: 654272
aaacagacagaacacagag

SEQ ID NO: 654274 - RNA, 19 nt, Artificial Sequence
  Description of Artificial Sequence: Synthetic oligonucleotide
  Sense strand starting at position 2864 of SEQ ID NO: 585619
aguugcuguaugugauuua

SEQ ID NO: 654275 - RNA, 19 nt, Artificial Sequence
  Description of Artificial Sequence: Synthetic oligonucleotide
  Antisense strand to SEQ ID NO: 654274
uaaaucacauacagcaacu

SEQ ID NO: 654276 - RNA, 19 nt, Artificial Sequence
  Description of Artificial Sequence: Synthetic oligonucleotide
  Sense strand starting at position 2867 of SEQ ID NO: 585619
ugcuguaugugauuuaaau

SEQ ID NO: 654277 - RNA, 19 nt, Artificial Sequence
  Description of Artificial Sequence: Synthetic oligonucleotide
  Antisense strand to SEQ ID NO: 654276
auuuaaaucacauacagca

SEQ ID NO: 654278 - RNA, 19 nt, Artificial Sequence
  Description of Artificial Sequence: Synthetic oligonucleotide
  Sense strand starting at position 2896 of SEQ ID NO: 585619
gcgugaagggcuuaggaga

SEQ ID NO: 654279 - RNA, 19 nt, Artificial Sequence
  Description of Artificial Sequence: Synthetic oligonucleotide
  Antisense strand to SEQ ID NO: 654278
ucuccuaagcccuucacgc

SEQ ID NO: 654280 - RNA, 19 nt, Artificial Sequence
  Description of Artificial Sequence: Synthetic oligonucleotide
  Sense strand starting at position 2927 of SEQ ID NO: 585619
ugcucuacagccugaauaa

SEQ ID NO: 654281 - RNA, 19 nt, Artificial Sequence
  Description of Artificial Sequence: Synthetic oligonucleotide
  Antisense strand to SEQ ID NO: 654280
uuauucaggcuguagagca

SEQ ID NO: 654282 - RNA, 19 nt, Artificial Sequence
  Description of Artificial Sequence: Synthetic oligonucleotide
  Sense strand starting at position 2928 of SEQ ID NO: 585619
gcucuacagccugaauaaa

SEQ ID NO: 654283 - RNA, 19 nt, Artificial Sequence
  Description of Artificial Sequence: Synthetic oligonucleotide
  Antisense strand to SEQ ID NO: 654282
uuuauucaggcuguagagc

SEQ ID NO: 654284 - RNA, 19 nt, Artificial Sequence
  Description of Artificial Sequence: Synthetic oligonucleotide
  Sense strand starting at position 2990 of SEQ ID NO: 585619
gcauauacaugauuaugga

SEQ ID NO: 654285 - RNA, 19 nt, Artificial Sequence
  Description of Artificial Sequence: Synthetic oligonucleotide
  Antisense strand to SEQ ID NO: 654284
uccauaaucauguauaugc

SEQ ID NO: 654286 - RNA, 19 nt, Artificial Sequence
  Description of Artificial Sequence: Synthetic oligonucleotide
  Sense strand starting at position 3149 of SEQ ID NO: 585619
cuggguuaugcuuggaaua

SEQ ID NO: 654287 - RNA, 19 nt, Artificial Sequence
  Description of Artificial Sequence: Synthetic oligonucleotide
  Antisense strand to SEQ ID NO: 654286
uauuccaagcauaacccag

SEQ ID NO: 654288 - RNA, 19 nt, Artificial Sequence
  Description of Artificial Sequence: Synthetic oligonucleotide
  Sense strand starting at position 3150 of SEQ ID NO: 585619
uggguuaugcuuggaauac

SEQ ID NO: 654289 - RNA, 19 nt, Artificial Sequence
  Description of Artificial Sequence: Synthetic oligonucleotide
  Antisense strand to SEQ ID NO: 654288
guauuccaagcauaaccca

SEQ ID NO: 654290 - RNA, 19 nt, Artificial Sequence
  Description of Artificial Sequence: Synthetic oligonucleotide
  Sense strand starting at position 3163 of SEQ ID NO: 585619
gaauacauuuaccacggua

SEQ ID NO: 654291 - RNA, 19 nt, Artificial Sequence
  Description of Artificial Sequence: Synthetic oligonucleotide
  Antisense strand to SEQ ID NO: 654290
uaccgugguaaauguauuc

SEQ ID NO: 654292 - RNA, 19 nt, Artificial Sequence
  Description of Artificial Sequence: Synthetic oligonucleotide
  Sense strand starting at position 3391 of SEQ ID NO: 585619
gugugcaguauguuuguga

SEQ ID NO: 654293 - RNA, 19 nt, Artificial Sequence
  Description of Artificial Sequence: Synthetic oligonucleotide
  Antisense strand to SEQ ID NO: 654292
ucacaaacauacugcacac

SEQ ID NO: 654294 - RNA, 19 nt, Artificial Sequence
  Description of Artificial Sequence: Synthetic oligonucleotide
  Sense strand starting at position 3432 of SEQ ID NO: 585619
ccaucaacccugugaggua

SEQ ID NO: 654295 - RNA, 19 nt, Artificial Sequence
  Description of Artificial Sequence: Synthetic oligonucleotide
  Antisense strand to SEQ ID NO: 654294
uaccucacaggguugaugg

SEQ ID NO: 654296 - RNA, 19 nt, Artificial Sequence
  Description of Artificial Sequence: Synthetic oligonucleotide
  Sense strand starting at position 3511 of SEQ ID NO: 585619
gugucuguggcugagagau

SEQ ID NO: 654297 - RNA, 19 nt, Artificial Sequence
  Description of Artificial Sequence: Synthetic oligonucleotide
  Antisense strand to SEQ ID NO: 654296
aucucucagccacagacac

SEQ ID NO: 654298 - RNA, 19 nt, Artificial Sequence
  Description of Artificial Sequence: Synthetic oligonucleotide
  Sense strand starting at position 3526 of SEQ ID NO: 585619
agauaaggguuuccgacaa

SEQ ID NO: 654299 - RNA, 19 nt, Artificial Sequence
  Description of Artificial Sequence: Synthetic oligonucleotide
  Antisense strand to SEQ ID NO: 654298
uugucggaaacccuuaucu

SEQ ID NO: 654300 - RNA, 19 nt, Artificial Sequence
  Description of Artificial Sequence: Synthetic oligonucleotide
  Sense strand starting at position 3530 of SEQ ID NO: 585619
aaggguuuccgacaacuug

SEQ ID NO: 654301 - RNA, 19 nt, Artificial Sequence
  Description of Artificial Sequence: Synthetic oligonucleotide
  Antisense strand to SEQ ID NO: 654300
caaguugucggaaacccuu

SEQ ID NO: 654302 - RNA, 19 nt, Artificial Sequence
  Description of Artificial Sequence: Synthetic oligonucleotide
  Sense strand starting at position 3608 of SEQ ID NO: 585619
gauugauugagacgggauc

SEQ ID NO: 654303 - RNA, 19 nt, Artificial Sequence
  Description of Artificial Sequence: Synthetic oligonucleotide
  Antisense strand to SEQ ID NO: 654302
gaucccgucucaaucaauc

SEQ ID NO: 654304 - RNA, 19 nt, Artificial Sequence
  Description of Artificial Sequence: Synthetic oligonucleotide
  Sense strand starting at position 3905 of SEQ ID NO: 585619
aguuaugcauuucuuagca

SEQ ID NO: 654305 - RNA, 19 nt, Artificial Sequence
  Description of Artificial Sequence: Synthetic oligonucleotide
  Antisense strand to SEQ ID NO: 654304
ugcuaagaaaugcauaacu

SEQ ID NO: 654306 - RNA, 19 nt, Artificial Sequence
  Description of Artificial Sequence: Synthetic oligonucleotide
  Sense strand starting at position 3931 of SEQ ID NO: 585619
uucgaaugaagcuguggau

SEQ ID NO: 654307 - RNA, 19 nt, Artificial Sequence
  Description of Artificial Sequence: Synthetic oligonucleotide
  Antisense strand to SEQ ID NO: 654306
auccacagcuucauucgaa

SEQ ID NO: 654308 - RNA, 19 nt, Artificial Sequence
  Description of Artificial Sequence: Synthetic oligonucleotide
  Sense strand starting at position 427 of SEQ ID NO: 585620
agugaucuauguccuaguu

SEQ ID NO: 654309 - RNA, 19 nt, Artificial Sequence
  Description of Artificial Sequence: Synthetic oligonucleotide
  Antisense strand to SEQ ID NO: 654308
aacuaggacauagaucacu

SEQ ID NO: 654310 - RNA, 19 nt, Artificial Sequence
  Description of Artificial Sequence: Synthetic oligonucleotide
  Sense strand starting at position 429 of SEQ ID NO: 585620
ugaucuauguccuaguuuc

SEQ ID NO: 654311 - RNA, 19 nt, Artificial Sequence
  Description of Artificial Sequence: Synthetic oligonucleotide
  Antisense strand to SEQ ID NO: 654310
gaaacuaggacauagauca

SEQ ID NO: 654312 - RNA, 19 nt, Artificial Sequence
  Description of Artificial Sequence: Synthetic oligonucleotide
  Sense strand starting at position 637 of SEQ ID NO: 585620
guacauuauuuacaugaag

SEQ ID NO: 654313 - RNA, 19 nt, Artificial Sequence
  Description of Artificial Sequence: Synthetic oligonucleotide
  Antisense strand to SEQ ID NO: 654312
cuucauguaaauaauguac

SEQ ID NO: 654314 - RNA, 19 nt, Artificial Sequence
  Description of Artificial Sequence: Synthetic oligonucleotide
  Sense strand starting at position 669 of SEQ ID NO: 585620
ucguaugauuccguuugua

SEQ ID NO: 654315 - RNA, 19 nt, Artificial Sequence
  Description of Artificial Sequence: Synthetic oligonucleotide
  Antisense strand to SEQ ID NO: 654314
uacaaacggaaucauacga

SEQ ID NO: 654316 - RNA, 19 nt, Artificial Sequence
  Description of Artificial Sequence: Synthetic oligonucleotide
  Sense strand starting at position 847 of SEQ ID NO: 585620
cuugaaauccauuggauug

SEQ ID NO: 654317 - RNA, 19 nt, Artificial Sequence
  Description of Artificial Sequence: Synthetic oligonucleotide
  Antisense strand to SEQ ID NO: 654316
caauccaauggauuucaag

SEQ ID NO: 654318 - RNA, 19 nt, Artificial Sequence
  Description of Artificial Sequence: Synthetic oligonucleotide
  Sense strand starting at position 875 of SEQ ID NO: 585620
augggugaauucuauaugu

SEQ ID NO: 654319 - RNA, 19 nt, Artificial Sequence
  Description of Artificial Sequence: Synthetic oligonucleotide
  Antisense strand to SEQ ID NO: 654318
acauauagaauucacccau

SEQ ID NO: 654320 - RNA, 19 nt, Artificial Sequence
  Description of Artificial Sequence: Synthetic oligonucleotide
  Sense strand starting at position 877 of SEQ ID NO: 585620
gggugaauucuauauguua

SEQ ID NO: 654321 - RNA, 19 nt, Artificial Sequence
  Description of Artificial Sequence: Synthetic oligonucleotide
  Antisense strand to SEQ ID NO: 654320
uaacauauagaauucaccc

SEQ ID NO: 654322 - RNA, 19 nt, Artificial Sequence
  Description of Artificial Sequence: Synthetic oligonucleotide
  Sense strand starting at position 1046 of SEQ ID NO: 585620
uuucccagaucugagaauu

SEQ ID NO: 654323 - RNA, 19 nt, Artificial Sequence
  Description of Artificial Sequence: Synthetic oligonucleotide
  Antisense strand to SEQ ID NO: 654322
aauucucagaucugggaaa

SEQ ID NO: 654324 - RNA, 19 nt, Artificial Sequence
  Description of Artificial Sequence: Synthetic oligonucleotide
  Sense strand starting at position 1054 of SEQ ID NO: 585620
aucugagaauuuggucacu

SEQ ID NO: 654325 - RNA, 19 nt, Artificial Sequence
  Description of Artificial Sequence: Synthetic oligonucleotide
  Antisense strand to SEQ ID NO: 654324
agugaccaaauucucagau

SEQ ID NO: 654326 - RNA, 19 nt, Artificial Sequence
  Description of Artificial Sequence: Synthetic oligonucleotide
  Sense strand starting at position 1071 of SEQ ID NO: 585620
cugagcaaauaacaugaua

SEQ ID NO: 654327 - RNA, 19 nt, Artificial Sequence
  Description of Artificial Sequence: Synthetic oligonucleotide
  Antisense strand to SEQ ID NO: 654326
uaucauguuauuugcucag

SEQ ID NO: 654328 - RNA, 19 nt, Artificial Sequence
  Description of Artificial Sequence: Synthetic oligonucleotide
  Sense strand starting at position 1085 of SEQ ID NO: 585620
ugauauuccuaagucugau

SEQ ID NO: 654329 - RNA, 19 nt, Artificial Sequence
  Description of Artificial Sequence: Synthetic oligonucleotide
  Antisense strand to SEQ ID NO: 654328
aucagacuuaggaauauca

SEQ ID NO: 654330 - RNA, 19 nt, Artificial Sequence
  Description of Artificial Sequence: Synthetic oligonucleotide
  Sense strand starting at position 1097 of SEQ ID NO: 585620
gucugauuucuuuguuuau

SEQ ID NO: 654331 - RNA, 19 nt, Artificial Sequence
  Description of Artificial Sequence: Synthetic oligonucleotide
  Antisense strand to SEQ ID NO: 654330
auaaacaaagaaaucagac

SEQ ID NO: 654332 - RNA, 19 nt, Artificial Sequence
  Description of Artificial Sequence: Synthetic oligonucleotide
  Sense strand starting at position 1139 of SEQ ID NO: 585620
cuaccuauaccacgagcua

SEQ ID NO: 654333 - RNA, 19 nt, Artificial Sequence
  Description of Artificial Sequence: Synthetic oligonucleotide
  Antisense strand to SEQ ID NO: 654332
uagcucgugguauagguag

SEQ ID NO: 654334 - RNA, 19 nt, Artificial Sequence
  Description of Artificial Sequence: Synthetic oligonucleotide
  Sense strand starting at position 1253 of SEQ ID NO: 585620
cugaguauuuguugaucac

SEQ ID NO: 654335 - RNA, 19 nt, Artificial Sequence
  Description of Artificial Sequence: Synthetic oligonucleotide
  Antisense strand to SEQ ID NO: 654334
gugaucaacaaauacucag

SEQ ID NO: 654336 - RNA, 19 nt, Artificial Sequence
  Description of Artificial Sequence: Synthetic oligonucleotide
  Sense strand starting at position 1481 of SEQ ID NO: 585620
ccguaacagagaugauaua

SEQ ID NO: 654337 - RNA, 19 nt, Artificial Sequence
  Description of Artificial Sequence: Synthetic oligonucleotide
  Antisense strand to SEQ ID NO: 654336
uauaucaucucuguuacgg

SEQ ID NO: 654338 - RNA, 19 nt, Artificial Sequence
  Description of Artificial Sequence: Synthetic oligonucleotide
  Sense strand starting at position 1531 of SEQ ID NO: 585620
uuagccguccuuugcauaa

SEQ ID NO: 654339 - RNA, 19 nt, Artificial Sequence
  Description of Artificial Sequence: Synthetic oligonucleotide
  Antisense strand to SEQ ID NO: 654338
uuaugcaaaggacggcuaa

SEQ ID NO: 654340 - RNA, 19 nt, Artificial Sequence
  Description of Artificial Sequence: Synthetic oligonucleotide
  Sense strand starting at position 2068 of SEQ ID NO: 585620
cauguuugaggguggaauc

SEQ ID NO: 654341 - RNA, 19 nt, Artificial Sequence
  Description of Artificial Sequence: Synthetic oligonucleotide
  Antisense strand to SEQ ID NO: 654340
gauuccacccucaaacaug

SEQ ID NO: 654342 - RNA, 19 nt, Artificial Sequence
  Description of Artificial Sequence: Synthetic oligonucleotide
  Sense strand starting at position 2142 of SEQ ID NO: 585620
ugccgucaugucuccuuau

SEQ ID NO: 654343 - RNA, 19 nt, Artificial Sequence
  Description of Artificial Sequence: Synthetic oligonucleotide
  Antisense strand to SEQ ID NO: 654342
auaaggagacaugacggca

SEQ ID NO: 654344 - RNA, 19 nt, Artificial Sequence
  Description of Artificial Sequence: Synthetic oligonucleotide
  Sense strand starting at position 2143 of SEQ ID NO: 585620
gccgucaugucuccuuauu

SEQ ID NO: 654345 - RNA, 19 nt, Artificial Sequence
  Description of Artificial Sequence: Synthetic oligonucleotide
  Antisense strand to SEQ ID NO: 654344
aauaaggagacaugacggc

SEQ ID NO: 654346 - RNA, 19 nt, Artificial Sequence
  Description of Artificial Sequence: Synthetic oligonucleotide
  Sense strand starting at position 2176 of SEQ ID NO: 585620
uguacuuuaucucucgcaa

SEQ ID NO: 654347 - RNA, 19 nt, Artificial Sequence
  Description of Artificial Sequence: Synthetic oligonucleotide
  Antisense strand to SEQ ID NO: 654346
uugcgagagauaaaguaca

SEQ ID NO: 654348 - RNA, 19 nt, Artificial Sequence
  Description of Artificial Sequence: Synthetic oligonucleotide
  Sense strand starting at position 2187 of SEQ ID NO: 585620
ucucgcaauuagucuuauu

SEQ ID NO: 654349 - RNA, 19 nt, Artificial Sequence
  Description of Artificial Sequence: Synthetic oligonucleotide
  Antisense strand to SEQ ID NO: 654348
aauaagacuaauugcgaga

SEQ ID NO: 654350 - RNA, 19 nt, Artificial Sequence
  Description of Artificial Sequence: Synthetic oligonucleotide
  Sense strand starting at position 2444 of SEQ ID NO: 585620
ggucuuagaugacaaacuu

SEQ ID NO: 654351 - RNA, 19 nt, Artificial Sequence
  Description of Artificial Sequence: Synthetic oligonucleotide
  Antisense strand to SEQ ID NO: 654350
aaguuugucaucuaagacc

SEQ ID NO: 654352 - RNA, 19 nt, Artificial Sequence
  Description of Artificial Sequence: Synthetic oligonucleotide
  Sense strand starting at position 2461 of SEQ ID NO: 585620
uuaaguuagguguaaacgu

SEQ ID NO: 654353 - RNA, 19 nt, Artificial Sequence
  Description of Artificial Sequence: Synthetic oligonucleotide
  Antisense strand to SEQ ID NO: 654352
acguuuacaccuaacuuaa

SEQ ID NO: 654354 - RNA, 19 nt, Artificial Sequence
  Description of Artificial Sequence: Synthetic oligonucleotide
  Sense strand starting at position 2468 of SEQ ID NO: 585620
agguguaaacguuaauauc

SEQ ID NO: 654355 - RNA, 19 nt, Artificial Sequence
  Description of Artificial Sequence: Synthetic oligonucleotide
  Antisense strand to SEQ ID NO: 654354
gauauuaacguuuacaccu

SEQ ID NO: 654356 - RNA, 19 nt, Artificial Sequence
  Description of Artificial Sequence: Synthetic oligonucleotide
  Sense strand starting at position 2626 of SEQ ID NO: 585620
aaaugaacguaugccauau

SEQ ID NO: 654357 - RNA, 19 nt, Artificial Sequence
  Description of Artificial Sequence: Synthetic oligonucleotide
  Antisense strand to SEQ ID NO: 654356
auauggcauacguucauuu

SEQ ID NO: 654358 - RNA, 19 nt, Artificial Sequence
  Description of Artificial Sequence: Synthetic oligonucleotide
  Sense strand starting at position 2628 of SEQ ID NO: 585620
augaacguaugccauauua

SEQ ID NO: 654359 - RNA, 19 nt, Artificial Sequence
  Description of Artificial Sequence: Synthetic oligonucleotide
  Antisense strand to SEQ ID NO: 654358
uaauauggcauacguucau

SEQ ID NO: 654360 - RNA, 19 nt, Artificial Sequence
  Description of Artificial Sequence: Synthetic oligonucleotide
  Sense strand starting at position 2671 of SEQ ID NO: 585620
aagcaagacugguagcauu

SEQ ID NO: 654361 - RNA, 19 nt, Artificial Sequence
  Description of Artificial Sequence: Synthetic oligonucleotide
  Antisense strand to SEQ ID NO: 654360
aaugcuaccagucuugcuu

SEQ ID NO: 654362 - RNA, 19 nt, Artificial Sequence
  Description of Artificial Sequence: Synthetic oligonucleotide
  Sense strand starting at position 2947 of SEQ ID NO: 585620
uggaauguccugcggaauu

SEQ ID NO: 654363 - RNA, 19 nt, Artificial Sequence
  Description of Artificial Sequence: Synthetic oligonucleotide
  Antisense strand to SEQ ID NO: 654362
aauuccgcaggacauucca

SEQ ID NO: 654364 - RNA, 19 nt, Artificial Sequence
  Description of Artificial Sequence: Synthetic oligonucleotide
  Sense strand starting at position 3662 of SEQ ID NO: 585620
gaauguguugcucagguau

SEQ ID NO: 654365 - RNA, 19 nt, Artificial Sequence
  Description of Artificial Sequence: Synthetic oligonucleotide
  Antisense strand to SEQ ID NO: 654364
auaccugagcaacacauuc

SEQ ID NO: 654366 - RNA, 19 nt, Artificial Sequence
  Description of Artificial Sequence: Synthetic oligonucleotide
  Sense strand starting at position 3760 of SEQ ID NO: 585620
ccagguugugcauaggaaa

SEQ ID NO: 654367 - RNA, 19 nt, Artificial Sequence
  Description of Artificial Sequence: Synthetic oligonucleotide
  Antisense strand to SEQ ID NO: 654366
uuuccuaugcacaaccugg

SEQ ID NO: 654368 - RNA, 19 nt, Artificial Sequence
  Description of Artificial Sequence: Synthetic oligonucleotide
  Sense strand starting at position 3783 of SEQ ID NO: 585620
acagcacucuuggagggau

SEQ ID NO: 654369 - RNA, 19 nt, Artificial Sequence
  Description of Artificial Sequence: Synthetic oligonucleotide
  Antisense strand to SEQ ID NO: 654368
aucccuccaagagugcugu

SEQ ID NO: 654370 - RNA, 19 nt, Artificial Sequence
  Description of Artificial Sequence: Synthetic oligonucleotide
  Sense strand starting at position 3833 of SEQ ID NO: 585620
ggcgcuuucuaccugaaag

SEQ ID NO: 654371 - RNA, 19 nt, Artificial Sequence
  Description of Artificial Sequence: Synthetic oligonucleotide
  Antisense strand to SEQ ID NO: 654370
cuuucagguagaaagcgcc

SEQ ID NO: 654372 - RNA, 19 nt, Artificial Sequence
  Description of Artificial Sequence: Synthetic oligonucleotide
  Sense strand starting at position 3834 of SEQ ID NO: 585620
gcgcuuucuaccugaaaga

SEQ ID NO: 654373 - RNA, 19 nt, Artificial Sequence
  Description of Artificial Sequence: Synthetic oligonucleotide
  Antisense strand to SEQ ID NO: 654372
ucuuucagguagaaagcgc

SEQ ID NO: 654374 - RNA, 19 nt, Artificial Sequence
  Description of Artificial Sequence: Synthetic oligonucleotide
  Sense strand starting at position 3835 of SEQ ID NO: 585620
cgcuuucuaccugaaagaa

SEQ ID NO: 654375 - RNA, 19 nt, Artificial Sequence
  Description of Artificial Sequence: Synthetic oligonucleotide
  Antisense strand to SEQ ID NO: 654374
uucuuucagguagaaagcg

SEQ ID NO: 654376 - RNA, 19 nt, Artificial Sequence
  Description of Artificial Sequence: Synthetic oligonucleotide
  Sense strand starting at position 3883 of SEQ ID NO: 585620
agagaucucuguguacuau

SEQ ID NO: 654377 - RNA, 19 nt, Artificial Sequence
  Description of Artificial Sequence: Synthetic oligonucleotide
  Antisense strand to SEQ ID NO: 654376
auaguacacagagaucucu

SEQ ID NO: 654378 - RNA, 19 nt, Artificial Sequence
  Description of Artificial Sequence: Synthetic oligonucleotide
  Sense strand starting at position 3884 of SEQ ID NO: 585620
gagaucucuguguacuaug

SEQ ID NO: 654379 - RNA, 19 nt, Artificial Sequence
  Description of Artificial Sequence: Synthetic oligonucleotide
  Antisense strand to SEQ ID NO: 654378
cauaguacacagagaucuc

SEQ ID NO: 654380 - RNA, 19 nt, Artificial Sequence
  Description of Artificial Sequence: Synthetic oligonucleotide
  Sense strand starting at position 3892 of SEQ ID NO: 585620
uguguacuaugaucagguu

SEQ ID NO: 654381 - RNA, 19 nt, Artificial Sequence
  Description of Artificial Sequence: Synthetic oligonucleotide
  Antisense strand to SEQ ID NO: 654380
aaccugaucauaguacaca

SEQ ID NO: 654382 - RNA, 19 nt, Artificial Sequence
  Description of Artificial Sequence: Synthetic oligonucleotide
  Sense strand starting at position 3898 of SEQ ID NO: 585620
cuaugaucagguugcacau

SEQ ID NO: 654383 - RNA, 19 nt, Artificial Sequence
  Description of Artificial Sequence: Synthetic oligonucleotide
  Antisense strand to SEQ ID NO: 654382
augugcaaccugaucauag

SEQ ID NO: 654384 - RNA, 19 nt, Artificial Sequence
  Description of Artificial Sequence: Synthetic oligonucleotide
  Sense strand starting at position 3909 of SEQ ID NO: 585620
uugcacauauucugggauu

SEQ ID NO: 654385 - RNA, 19 nt, Artificial Sequence
  Description of Artificial Sequence: Synthetic oligonucleotide
  Antisense strand to SEQ ID NO: 654384
aaucccagaauaugugcaa

SEQ ID NO: 654386 - RNA, 19 nt, Artificial Sequence
  Description of Artificial Sequence: Synthetic oligonucleotide
  Sense strand starting at position 3910 of SEQ ID NO: 585620
ugcacauauucugggauuu

SEQ ID NO: 654387 - RNA, 19 nt, Artificial Sequence
  Description of Artificial Sequence: Synthetic oligonucleotide
  Antisense strand to SEQ ID NO: 654386
aaaucccagaauaugugca

SEQ ID NO: 654388 - RNA, 19 nt, Artificial Sequence
  Description of Artificial Sequence: Synthetic oligonucleotide
  Sense strand starting at position 401 of SEQ ID NO: 585621
gugagcuaaggguaaguuu

SEQ ID NO: 654389 - RNA, 19 nt, Artificial Sequence
  Description of Artificial Sequence: Synthetic oligonucleotide
  Antisense strand to SEQ ID NO: 654388
aaacuuacccuuagcucac

SEQ ID NO: 654390 - RNA, 19 nt, Artificial Sequence
  Description of Artificial Sequence: Synthetic oligonucleotide
  Sense strand starting at position 404 of SEQ ID NO: 585621
agcuaaggguaaguuuaau

SEQ ID NO: 654391 - RNA, 19 nt, Artificial Sequence
  Description of Artificial Sequence: Synthetic oligonucleotide
  Antisense strand to SEQ ID NO: 654390
auuaaacuuacccuuagcu

SEQ ID NO: 654392 - RNA, 19 nt, Artificial Sequence
  Description of Artificial Sequence: Synthetic oligonucleotide
  Sense strand starting at position 430 of SEQ ID NO: 585621
cugcucuauccagaaguau

SEQ ID NO: 654393 - RNA, 19 nt, Artificial Sequence
  Description of Artificial Sequence: Synthetic oligonucleotide
  Antisense strand to SEQ ID NO: 654392
auacuucuggauagagcag

SEQ ID NO: 654394 - RNA, 19 nt, Artificial Sequence
  Description of Artificial Sequence: Synthetic oligonucleotide
  Sense strand starting at position 649 of SEQ ID NO: 585621
aggauaccucagugguaga

SEQ ID NO: 654395 - RNA, 19 nt, Artificial Sequence
  Description of Artificial Sequence: Synthetic oligonucleotide
  Antisense strand to SEQ ID NO: 654394
ucuaccacugagguauccu

SEQ ID NO: 654396 - RNA, 19 nt, Artificial Sequence
  Description of Artificial Sequence: Synthetic oligonucleotide
  Sense strand starting at position 693 of SEQ ID NO: 585621
aaggaaagcugcuuacaga

SEQ ID NO: 654397 - RNA, 19 nt, Artificial Sequence
  Description of Artificial Sequence: Synthetic oligonucleotide
  Antisense strand to SEQ ID NO: 654396
ucuguaagcagcuuuccuu

SEQ ID NO: 654398 - RNA, 19 nt, Artificial Sequence
  Description of Artificial Sequence: Synthetic oligonucleotide
  Sense strand starting at position 729 of SEQ ID NO: 585621
uguagugagcaauagaauu

SEQ ID NO: 654399 - RNA, 19 nt, Artificial Sequence
  Description of Artificial Sequence: Synthetic oligonucleotide
  Antisense strand to SEQ ID NO: 654398
aauucuauugcucacuaca

SEQ ID NO: 654400 - RNA, 19 nt, Artificial Sequence
  Description of Artificial Sequence: Synthetic oligonucleotide
  Sense strand starting at position 745 of SEQ ID NO: 585621
auuaacauuugucauagga

SEQ ID NO: 654401 - RNA, 19 nt, Artificial Sequence
  Description of Artificial Sequence: Synthetic oligonucleotide
  Antisense strand to SEQ ID NO: 654400
uccuaugacaaauguuaau

SEQ ID NO: 654402 - RNA, 19 nt, Artificial Sequence
  Description of Artificial Sequence: Synthetic oligonucleotide
  Sense strand starting at position 1018 of SEQ ID NO: 585621
uggaguaccacuggaggau

SEQ ID NO: 654403 - RNA, 19 nt, Artificial Sequence
  Description of Artificial Sequence: Synthetic oligonucleotide
  Antisense strand to SEQ ID NO: 654402
auccuccagugguacucca

SEQ ID NO: 654404 - RNA, 19 nt, Artificial Sequence
  Description of Artificial Sequence: Synthetic oligonucleotide
  Sense strand starting at position 1056 of SEQ ID NO: 585621
aggcauuaauaggcagaaa

SEQ ID NO: 654405 - RNA, 19 nt, Artificial Sequence
  Description of Artificial Sequence: Synthetic oligonucleotide
  Antisense strand to SEQ ID NO: 654404
uuucugccuauuaaugccu

SEQ ID NO: 654406 - RNA, 19 nt, Artificial Sequence
  Description of Artificial Sequence: Synthetic oligonucleotide
  Sense strand starting at position 1104 of SEQ ID NO: 585621
gauaguuaagaauauucgu

SEQ ID NO: 654407 - RNA, 19 nt, Artificial Sequence
  Description of Artificial Sequence: Synthetic oligonucleotide
  Antisense strand to SEQ ID NO: 654406
acgaauauucuuaacuauc

SEQ ID NO: 654408 - RNA, 19 nt, Artificial Sequence
  Description of Artificial Sequence: Synthetic oligonucleotide
  Sense strand starting at position 1462 of SEQ ID NO: 585621
auguaaauagcucaguucu

SEQ ID NO: 654409 - RNA, 19 nt, Artificial Sequence
  Description of Artificial Sequence: Synthetic oligonucleotide
  Antisense strand to SEQ ID NO: 654408
agaacugagcuauuuacau

SEQ ID NO: 654410 - RNA, 19 nt, Artificial Sequence
  Description of Artificial Sequence: Synthetic oligonucleotide
  Sense strand starting at position 1858 of SEQ ID NO: 585621
uuaccaaagucagcgaaau

SEQ ID NO: 654411 - RNA, 19 nt, Artificial Sequence
  Description of Artificial Sequence: Synthetic oligonucleotide
  Antisense strand to SEQ ID NO: 654410
auuucgcugacuuugguaa

SEQ ID NO: 654412 - RNA, 19 nt, Artificial Sequence
  Description of Artificial Sequence: Synthetic oligonucleotide
  Sense strand starting at position 2376 of SEQ ID NO: 585621
gcugcuguugcuuuaauac

SEQ ID NO: 654413 - RNA, 19 nt, Artificial Sequence
  Description of Artificial Sequence: Synthetic oligonucleotide
  Antisense strand to SEQ ID NO: 654412
guauuaaagcaacagcagc

SEQ ID NO: 654414 - RNA, 19 nt, Artificial Sequence
  Description of Artificial Sequence: Synthetic oligonucleotide
  Sense strand starting at position 2472 of SEQ ID NO: 585621
guucuuguucuugugugua

SEQ ID NO: 654415 - RNA, 19 nt, Artificial Sequence
  Description of Artificial Sequence: Synthetic oligonucleotide
  Antisense strand to SEQ ID NO: 654414
uacacacaagaacaagaac

SEQ ID NO: 654416 - RNA, 19 nt, Artificial Sequence
  Description of Artificial Sequence: Synthetic oligonucleotide
  Sense strand starting at position 2819 of SEQ ID NO: 585621
aguuacaucucaguuaaug

SEQ ID NO: 654417 - RNA, 19 nt, Artificial Sequence
  Description of Artificial Sequence: Synthetic oligonucleotide
  Antisense strand to SEQ ID NO: 654416
cauuaacugagauguaacu

SEQ ID NO: 654418 - RNA, 19 nt, Artificial Sequence
  Description of Artificial Sequence: Synthetic oligonucleotide
  Sense strand starting at position 2837 of SEQ ID NO: 585621
gaggcuuuauagguuugau

SEQ ID NO: 654419 - RNA, 19 nt, Artificial Sequence
  Description of Artificial Sequence: Synthetic oligonucleotide
  Antisense strand to SEQ ID NO: 654418
aucaaaccuauaaagccuc

SEQ ID NO: 654420 - RNA, 19 nt, Artificial Sequence
  Description of Artificial Sequence: Synthetic oligonucleotide
  Sense strand starting at position 2945 of SEQ ID NO: 585621
gaugcuaguaagugagaug

SEQ ID NO: 654421 - RNA, 19 nt, Artificial Sequence
  Description of Artificial Sequence: Synthetic oligonucleotide
  Antisense strand to SEQ ID NO: 654420
caucucacuuacuagcauc

SEQ ID NO: 654422 - RNA, 19 nt, Artificial Sequence
  Description of Artificial Sequence: Synthetic oligonucleotide
  Sense strand starting at position 3140 of SEQ ID NO: 585621
agaggagguacuuguaauu

SEQ ID NO: 654423 - RNA, 19 nt, Artificial Sequence
  Description of Artificial Sequence: Synthetic oligonucleotide
  Antisense strand to SEQ ID NO: 654422
aauuacaaguaccuccucu

SEQ ID NO: 654424 - RNA, 19 nt, Artificial Sequence
  Description of Artificial Sequence: Synthetic oligonucleotide
  Sense strand starting at position 3204 of SEQ ID NO: 585621
acuuucuuauggguaacua

SEQ ID NO: 654425 - RNA, 19 nt, Artificial Sequence
  Description of Artificial Sequence: Synthetic oligonucleotide
  Antisense strand to SEQ ID NO: 654424
uaguuacccauaagaaagu

SEQ ID NO: 654426 - RNA, 19 nt, Artificial Sequence
  Description of Artificial Sequence: Synthetic oligonucleotide
  Sense strand starting at position 3205 of SEQ ID NO: 585621
cuuucuuauggguaacuaa

SEQ ID NO: 654427 - RNA, 19 nt, Artificial Sequence
  Description of Artificial Sequence: Synthetic oligonucleotide
  Antisense strand to SEQ ID NO: 654426
uuaguuacccauaagaaag

SEQ ID NO: 654428 - RNA, 19 nt, Artificial Sequence
  Description of Artificial Sequence: Synthetic oligonucleotide
  Sense strand starting at position 3259 of SEQ ID NO: 585621
ggaaaugaucuuggcuucu

SEQ ID NO: 654429 - RNA, 19 nt, Artificial Sequence
  Description of Artificial Sequence: Synthetic oligonucleotide
  Antisense strand to SEQ ID NO: 654428
agaagccaagaucauuucc

SEQ ID NO: 654430 - RNA, 19 nt, Artificial Sequence
  Description of Artificial Sequence: Synthetic oligonucleotide
  Sense strand starting at position 3320 of SEQ ID NO: 585621
uuuaaagagucagcuuaaa

SEQ ID NO: 654431 - RNA, 19 nt, Artificial Sequence
  Description of Artificial Sequence: Synthetic oligonucleotide
  Antisense strand to SEQ ID NO: 654430
uuuaagcugacucuuuaaa

SEQ ID NO: 654432 - RNA, 19 nt, Artificial Sequence
  Description of Artificial Sequence: Synthetic oligonucleotide
  Sense strand starting at position 3360 of SEQ ID NO: 585621
uagcaaagauauccuguga

SEQ ID NO: 654433 - RNA, 19 nt, Artificial Sequence
  Description of Artificial Sequence: Synthetic oligonucleotide
  Antisense strand to SEQ ID NO: 654432
ucacaggauaucuuugcua

SEQ ID NO: 654434 - RNA, 19 nt, Artificial Sequence
  Description of Artificial Sequence: Synthetic oligonucleotide
  Sense strand starting at position 3433 of SEQ ID NO: 585621
gcagaauaauguuugauac

SEQ ID NO: 654435 - RNA, 19 nt, Artificial Sequence
  Description of Artificial Sequence: Synthetic oligonucleotide
  Antisense strand to SEQ ID NO: 654434
guaucaaacauuauucugc

SEQ ID NO: 654436 - RNA, 19 nt, Artificial Sequence
  Description of Artificial Sequence: Synthetic oligonucleotide
  Sense strand starting at position 3492 of SEQ ID NO: 585621
uaaugaggaucucucagua

SEQ ID NO: 654437 - RNA, 19 nt, Artificial Sequence
  Description of Artificial Sequence: Synthetic oligonucleotide
  Antisense strand to SEQ ID NO: 654436
uacugagagauccucauua

SEQ ID NO: 654438 - RNA, 19 nt, Artificial Sequence
  Description of Artificial Sequence: Synthetic oligonucleotide
  Sense strand starting at position 3496 of SEQ ID NO: 585621
gaggaucucucaguacuau

SEQ ID NO: 654439 - RNA, 19 nt, Artificial Sequence
  Description of Artificial Sequence: Synthetic oligonucleotide
  Antisense strand to SEQ ID NO: 654438
auaguacugagagauccuc

SEQ ID NO: 654440 - RNA, 19 nt, Artificial Sequence
  Description of Artificial Sequence: Synthetic oligonucleotide
  Sense strand starting at position 3497 of SEQ ID NO: 585621
aggaucucucaguacuauc

SEQ ID NO: 654441 - RNA, 19 nt, Artificial Sequence
  Description of Artificial Sequence: Synthetic oligonucleotide
  Antisense strand to SEQ ID NO: 654440
gauaguacugagagauccu

SEQ ID NO: 654442 - RNA, 19 nt, Artificial Sequence
  Description of Artificial Sequence: Synthetic oligonucleotide
  Sense strand starting at position 3513 of SEQ ID NO: 585621
aucaguuaccaaugaugau

SEQ ID NO: 654443 - RNA, 19 nt, Artificial Sequence
  Description of Artificial Sequence: Synthetic oligonucleotide
  Antisense strand to SEQ ID NO: 654442
aucaucauugguaacugau

SEQ ID NO: 654444 - RNA, 19 nt, Artificial Sequence
  Description of Artificial Sequence: Synthetic oligonucleotide
  Sense strand starting at position 3568 of SEQ ID NO: 585621
aguaauuugucagagauaa

SEQ ID NO: 654445 - RNA, 19 nt, Artificial Sequence
  Description of Artificial Sequence: Synthetic oligonucleotide
  Antisense strand to SEQ ID NO: 654444
uuaucucugacaaauuacu

SEQ ID NO: 654446 - RNA, 19 nt, Artificial Sequence
  Description of Artificial Sequence: Synthetic oligonucleotide
  Sense strand starting at position 3692 of SEQ ID NO: 585621
auuagaguagcauauagua

SEQ ID NO: 654447 - RNA, 19 nt, Artificial Sequence
  Description of Artificial Sequence: Synthetic oligonucleotide
  Antisense strand to SEQ ID NO: 654446
uacuauaugcuacucuaau

SEQ ID NO: 654448 - RNA, 19 nt, Artificial Sequence
  Description of Artificial Sequence: Synthetic oligonucleotide
  Sense strand starting at position 3700 of SEQ ID NO: 585621
agcauauaguaacugagaa

SEQ ID NO: 654449 - RNA, 19 nt, Artificial Sequence
  Description of Artificial Sequence: Synthetic oligonucleotide
  Antisense strand to SEQ ID NO: 654448
uucucaguuacuauaugcu

SEQ ID NO: 654450 - RNA, 19 nt, Artificial Sequence
  Description of Artificial Sequence: Synthetic oligonucleotide
  Sense strand starting at position 3736 of SEQ ID NO: 585621
agaugcauucuugagcacu

SEQ ID NO: 654451 - RNA, 19 nt, Artificial Sequence
  Description of Artificial Sequence: Synthetic oligonucleotide
  Antisense strand to SEQ ID NO: 654450
agugcucaagaaugcaucu

SEQ ID NO: 654452 - RNA, 19 nt, Artificial Sequence
  Description of Artificial Sequence: Synthetic oligonucleotide
  Sense strand starting at position 3768 of SEQ ID NO: 585621
gaaagucugcuuuaaguuu

SEQ ID NO: 654453 - RNA, 19 nt, Artificial Sequence
  Description of Artificial Sequence: Synthetic oligonucleotide
  Antisense strand to SEQ ID NO: 654452
aaacuuaaagcagacuuuc

SEQ ID NO: 654454 - RNA, 19 nt, Artificial Sequence
  Description of Artificial Sequence: Synthetic oligonucleotide
  Sense strand starting at position 3811 of SEQ ID NO: 585621
aaauuuaggugauagauca

SEQ ID NO: 654455 - RNA, 19 nt, Artificial Sequence
  Description of Artificial Sequence: Synthetic oligonucleotide
  Antisense strand to SEQ ID NO: 654454
ugaucuaucaccuaaauuu

SEQ ID NO: 654456 - RNA, 19 nt, Artificial Sequence
  Description of Artificial Sequence: Synthetic oligonucleotide
  Sense strand starting at position 3818 of SEQ ID NO: 585621
ggugauagaucauuguucu

SEQ ID NO: 654457 - RNA, 19 nt, Artificial Sequence
  Description of Artificial Sequence: Synthetic oligonucleotide
  Antisense strand to SEQ ID NO: 654456
agaacaaugaucuaucacc

SEQ ID NO: 654458 - RNA, 19 nt, Artificial Sequence
  Description of Artificial Sequence: Synthetic oligonucleotide
  Sense strand starting at position 3821 of SEQ ID NO: 585621
gauagaucauuguucugag

SEQ ID NO: 654459 - RNA, 19 nt, Artificial Sequence
  Description of Artificial Sequence: Synthetic oligonucleotide
  Antisense strand to SEQ ID NO: 654458
cucagaacaaugaucuauc

SEQ ID NO: 654460 - RNA, 19 nt, Artificial Sequence
  Description of Artificial Sequence: Synthetic oligonucleotide
  Sense strand starting at position 3822 of SEQ ID NO: 585621
auagaucauuguucugaga

SEQ ID NO: 654461 - RNA, 19 nt, Artificial Sequence
  Description of Artificial Sequence: Synthetic oligonucleotide
  Antisense strand to SEQ ID NO: 654460
ucucagaacaaugaucuau

SEQ ID NO: 654462 - RNA, 19 nt, Artificial Sequence
  Description of Artificial Sequence: Synthetic oligonucleotide
  Sense strand starting at position 3866 of SEQ ID NO: 585621
uaguaauacuuaguuggau

SEQ ID NO: 654463 - RNA, 19 nt, Artificial Sequence
  Description of Artificial Sequence: Synthetic oligonucleotide
  Antisense strand to SEQ ID NO: 654462
auccaacuaaguauuacua

SEQ ID NO: 654464 - RNA, 19 nt, Artificial Sequence
  Description of Artificial Sequence: Synthetic oligonucleotide
  Sense strand starting at position 3867 of SEQ ID NO: 585621
aguaauacuuaguuggaua

SEQ ID NO: 654465 - RNA, 19 nt, Artificial Sequence
  Description of Artificial Sequence: Synthetic oligonucleotide
  Antisense strand to SEQ ID NO: 654464
uauccaacuaaguauuacu

SEQ ID NO: 654466 - RNA, 19 nt, Artificial Sequence
  Description of Artificial Sequence: Synthetic oligonucleotide
  Sense strand starting at position 3926 of SEQ ID NO: 585621
uuaccacauguuuauaagu

SEQ ID NO: 654467 - RNA, 19 nt, Artificial Sequence
  Description of Artificial Sequence: Synthetic oligonucleotide
  Antisense strand to SEQ ID NO: 654466
acuuauaaacaugugguaa

SEQ ID NO: 654468 - RNA, 19 nt, Artificial Sequence
  Description of Artificial Sequence: Synthetic oligonucleotide
  Sense strand starting at position 696 of SEQ ID NO: 585622
cccuuaacugaaugacgau

SEQ ID NO: 654469 - RNA, 19 nt, Artificial Sequence
  Description of Artificial Sequence: Synthetic oligonucleotide
  Antisense strand to SEQ ID NO: 654468
aucgucauucaguuaaggg

SEQ ID NO: 654470 - RNA, 19 nt, Artificial Sequence
  Description of Artificial Sequence: Synthetic oligonucleotide
  Sense strand starting at position 703 of SEQ ID NO: 585622
cugaaugacgauugaaucu

SEQ ID NO: 654471 - RNA, 19 nt, Artificial Sequence
  Description of Artificial Sequence: Synthetic oligonucleotide
  Antisense strand to SEQ ID NO: 654470
agauucaaucgucauucag

SEQ ID NO: 654472 - RNA, 19 nt, Artificial Sequence
  Description of Artificial Sequence: Synthetic oligonucleotide
  Sense strand starting at position 722 of SEQ ID NO: 585622
uagcucauaguguagaaua

SEQ ID NO: 654473 - RNA, 19 nt, Artificial Sequence
  Description of Artificial Sequence: Synthetic oligonucleotide
  Antisense strand to SEQ ID NO: 654472
uauucuacacuaugagcua

SEQ ID NO: 654474 - RNA, 19 nt, Artificial Sequence
  Description of Artificial Sequence: Synthetic oligonucleotide
  Sense strand starting at position 724 of SEQ ID NO: 585622
gcucauaguguagaauaua

SEQ ID NO: 654475 - RNA, 19 nt, Artificial Sequence
  Description of Artificial Sequence: Synthetic oligonucleotide
  Antisense strand to SEQ ID NO: 654474
uauauucuacacuaugagc

SEQ ID NO: 654476 - RNA, 19 nt, Artificial Sequence
  Description of Artificial Sequence: Synthetic oligonucleotide
  Sense strand starting at position 771 of SEQ ID NO: 585622
uuaaacuugcccuacgaca

SEQ ID NO: 654477 - RNA, 19 nt, Artificial Sequence
  Description of Artificial Sequence: Synthetic oligonucleotide
  Antisense strand to SEQ ID NO: 654476
ugucguagggcaaguuuaa

SEQ ID NO: 654478 - RNA, 19 nt, Artificial Sequence
  Description of Artificial Sequence: Synthetic oligonucleotide
  Sense strand starting at position 810 of SEQ ID NO: 585622
guuuaaagagucgagguau

SEQ ID NO: 654479 - RNA, 19 nt, Artificial Sequence
  Description of Artificial Sequence: Synthetic oligonucleotide
  Antisense strand to SEQ ID NO: 654478
auaccucgacucuuuaaac

SEQ ID NO: 654480 - RNA, 19 nt, Artificial Sequence
  Description of Artificial Sequence: Synthetic oligonucleotide
  Sense strand starting at position 929 of SEQ ID NO: 585622
ggugguucuagcgacugaa

SEQ ID NO: 654481 - RNA, 19 nt, Artificial Sequence
  Description of Artificial Sequence: Synthetic oligonucleotide
  Antisense strand to SEQ ID NO: 654480
uucagucgcuagaaccacc

SEQ ID NO: 654482 - RNA, 19 nt, Artificial Sequence
  Description of Artificial Sequence: Synthetic oligonucleotide
  Sense strand starting at position 1059 of SEQ ID NO: 585622
auuuccuccugagauugau

SEQ ID NO: 654483 - RNA, 19 nt, Artificial Sequence
  Description of Artificial Sequence: Synthetic oligonucleotide
  Antisense strand to SEQ ID NO: 654482
aucaaucucaggaggaaau

SEQ ID NO: 654484 - RNA, 19 nt, Artificial Sequence
  Description of Artificial Sequence: Synthetic oligonucleotide
  Sense strand starting at position 1182 of SEQ ID NO: 585622
agcagagcuguuuauaacu

SEQ ID NO: 654485 - RNA, 19 nt, Artificial Sequence
  Description of Artificial Sequence: Synthetic oligonucleotide
  Antisense strand to SEQ ID NO: 654484
aguuauaaacagcucugcu

SEQ ID NO: 654486 - RNA, 19 nt, Artificial Sequence
  Description of Artificial Sequence: Synthetic oligonucleotide
  Sense strand starting at position 1187 of SEQ ID NO: 585622
agcuguuuauaacuagaga

SEQ ID NO: 654487 - RNA, 19 nt, Artificial Sequence
  Description of Artificial Sequence: Synthetic oligonucleotide
  Antisense strand to SEQ ID NO: 654486
ucucuaguuauaaacagcu

SEQ ID NO: 654488 - RNA, 19 nt, Artificial Sequence
  Description of Artificial Sequence: Synthetic oligonucleotide
  Sense strand starting at position 1188 of SEQ ID NO: 585622
gcuguuuauaacuagagag

SEQ ID NO: 654489 - RNA, 19 nt, Artificial Sequence
  Description of Artificial Sequence: Synthetic oligonucleotide
  Antisense strand to SEQ ID NO: 654488
cucucuaguuauaaacagc

SEQ ID NO: 654490 - RNA, 19 nt, Artificial Sequence
  Description of Artificial Sequence: Synthetic oligonucleotide
  Sense strand starting at position 2195 of SEQ ID NO: 585622
ugaguuaugcucuaagauu

SEQ ID NO: 654491 - RNA, 19 nt, Artificial Sequence
  Description of Artificial Sequence: Synthetic oligonucleotide
  Antisense strand to SEQ ID NO: 654490
aaucuuagagcauaacuca

SEQ ID NO: 654492 - RNA, 19 nt, Artificial Sequence
  Description of Artificial Sequence: Synthetic oligonucleotide
  Sense strand starting at position 2201 of SEQ ID NO: 585622
augcucuaagauuaucgau

SEQ ID NO: 654493 - RNA, 19 nt, Artificial Sequence
  Description of Artificial Sequence: Synthetic oligonucleotide
  Antisense strand to SEQ ID NO: 654492
aucgauaaucuuagagcau

SEQ ID NO: 654494 - RNA, 19 nt, Artificial Sequence
  Description of Artificial Sequence: Synthetic oligonucleotide
  Sense strand starting at position 2203 of SEQ ID NO: 585622
gcucuaagauuaucgauua

SEQ ID NO: 654495 - RNA, 19 nt, Artificial Sequence
  Description of Artificial Sequence: Synthetic oligonucleotide
  Antisense strand to SEQ ID NO: 654494
uaaucgauaaucuuagagc

SEQ ID NO: 654496 - RNA, 19 nt, Artificial Sequence
  Description of Artificial Sequence: Synthetic oligonucleotide
  Sense strand starting at position 2252 of SEQ ID NO: 585622
gcagaaugagaacgguuau

SEQ ID NO: 654497 - RNA, 19 nt, Artificial Sequence
  Description of Artificial Sequence: Synthetic oligonucleotide
  Antisense strand to SEQ ID NO: 654496
auaaccguucucauucugc

SEQ ID NO: 654498 - RNA, 19 nt, Artificial Sequence
  Description of Artificial Sequence: Synthetic oligonucleotide
  Sense strand starting at position 2258 of SEQ ID NO: 585622
ugagaacgguuauuaguua

SEQ ID NO: 654499 - RNA, 19 nt, Artificial Sequence
  Description of Artificial Sequence: Synthetic oligonucleotide
  Antisense strand to SEQ ID NO: 654498
uaacuaauaaccguucuca

SEQ ID NO: 654500 - RNA, 19 nt, Artificial Sequence
  Description of Artificial Sequence: Synthetic oligonucleotide
  Sense strand starting at position 2262 of SEQ ID NO: 585622
aacgguuauuaguuaauag

SEQ ID NO: 654501 - RNA, 19 nt, Artificial Sequence
  Description of Artificial Sequence: Synthetic oligonucleotide
  Antisense strand to SEQ ID NO: 654500
cuauuaacuaauaaccguu

SEQ ID NO: 654502 - RNA, 19 nt, Artificial Sequence
  Description of Artificial Sequence: Synthetic oligonucleotide
  Sense strand starting at position 2301 of SEQ ID NO: 585622
ggaacacaguccucggaaa

SEQ ID NO: 654503 - RNA, 19 nt, Artificial Sequence
  Description of Artificial Sequence: Synthetic oligonucleotide
  Antisense strand to SEQ ID NO: 654502
uuuccgaggacuguguucc

SEQ ID NO: 654504 - RNA, 19 nt, Artificial Sequence
  Description of Artificial Sequence: Synthetic oligonucleotide
  Sense strand starting at position 2446 of SEQ ID NO: 585622
ucuccuugacauuguauua

SEQ ID NO: 654505 - RNA, 19 nt, Artificial Sequence
  Description of Artificial Sequence: Synthetic oligonucleotide
  Antisense strand to SEQ ID NO: 654504
uaauacaaugucaaggaga

SEQ ID NO: 654506 - RNA, 19 nt, Artificial Sequence
  Description of Artificial Sequence: Synthetic oligonucleotide
  Sense strand starting at position 2502 of SEQ ID NO: 585622
guuacuaaugucuggaaca

SEQ ID NO: 654507 - RNA, 19 nt, Artificial Sequence
  Description of Artificial Sequence: Synthetic oligonucleotide
  Antisense strand to SEQ ID NO: 654506
uguuccagacauuaguaac

SEQ ID NO: 654508 - RNA, 19 nt, Artificial Sequence
  Description of Artificial Sequence: Synthetic oligonucleotide
  Sense strand starting at position 2514 of SEQ ID NO: 585622
uggaacagcagcuagauua

SEQ ID NO: 654509 - RNA, 19 nt, Artificial Sequence
  Description of Artificial Sequence: Synthetic oligonucleotide
  Antisense strand to SEQ ID NO: 654508
uaaucuagcugcuguucca

SEQ ID NO: 654510 - RNA, 19 nt, Artificial Sequence
  Description of Artificial Sequence: Synthetic oligonucleotide
  Sense strand starting at position 2667 of SEQ ID NO: 585622
uuuggacaguugucuugaa

SEQ ID NO: 654511 - RNA, 19 nt, Artificial Sequence
  Description of Artificial Sequence: Synthetic oligonucleotide
  Antisense strand to SEQ ID NO: 654510
uucaagacaacuguccaaa

SEQ ID NO: 654512 - RNA, 19 nt, Artificial Sequence
  Description of Artificial Sequence: Synthetic oligonucleotide
  Sense strand starting at position 2708 of SEQ ID NO: 585622
acagguuucguuuauaauu

SEQ ID NO: 654513 - RNA, 19 nt, Artificial Sequence
  Description of Artificial Sequence: Synthetic oligonucleotide
  Antisense strand to SEQ ID NO: 654512
aauuauaaacgaaaccugu

SEQ ID NO: 654514 - RNA, 19 nt, Artificial Sequence
  Description of Artificial Sequence: Synthetic oligonucleotide
  Sense strand starting at position 2736 of SEQ ID NO: 585622
gcugaacuccacuaacaug

SEQ ID NO: 654515 - RNA, 19 nt, Artificial Sequence
  Description of Artificial Sequence: Synthetic oligonucleotide
  Antisense strand to SEQ ID NO: 654514
cauguuaguggaguucagc

SEQ ID NO: 654516 - RNA, 19 nt, Artificial Sequence
  Description of Artificial Sequence: Synthetic oligonucleotide
  Sense strand starting at position 2886 of SEQ ID NO: 585622
uuaauaacacuguagaugu

SEQ ID NO: 654517 - RNA, 19 nt, Artificial Sequence
  Description of Artificial Sequence: Synthetic oligonucleotide
  Antisense strand to SEQ ID NO: 654516
acaucuacaguguuauuaa

SEQ ID NO: 654518 - RNA, 19 nt, Artificial Sequence
  Description of Artificial Sequence: Synthetic oligonucleotide
  Sense strand starting at position 2975 of SEQ ID NO: 585622
uugucucaacuauguuaaa

SEQ ID NO: 654519 - RNA, 19 nt, Artificial Sequence
  Description of Artificial Sequence: Synthetic oligonucleotide
  Antisense strand to SEQ ID NO: 654518
uuuaacauaguugagacaa

SEQ ID NO: 654520 - RNA, 19 nt, Artificial Sequence
  Description of Artificial Sequence: Synthetic oligonucleotide
  Sense strand starting at position 2976 of SEQ ID NO: 585622
ugucucaacuauguuaaau

SEQ ID NO: 654521 - RNA, 19 nt, Artificial Sequence
  Description of Artificial Sequence: Synthetic oligonucleotide
  Antisense strand to SEQ ID NO: 654520
auuuaacauaguugagaca

SEQ ID NO: 654522 - RNA, 19 nt, Artificial Sequence
  Description of Artificial Sequence: Synthetic oligonucleotide
  Sense strand starting at position 3247 of SEQ ID NO: 585622
ugguauucugcugaagaaa

SEQ ID NO: 654523 - RNA, 19 nt, Artificial Sequence
  Description of Artificial Sequence: Synthetic oligonucleotide
  Antisense strand to SEQ ID NO: 654522
uuucuucagcagaauacca

SEQ ID NO: 654524 - RNA, 19 nt, Artificial Sequence
  Description of Artificial Sequence: Synthetic oligonucleotide
  Sense strand starting at position 3272 of SEQ ID NO: 585622
cuguauccacgagauccaa

SEQ ID NO: 654525 - RNA, 19 nt, Artificial Sequence
  Description of Artificial Sequence: Synthetic oligonucleotide
  Antisense strand to SEQ ID NO: 654524
uuggaucucguggauacag

SEQ ID NO: 654526 - RNA, 19 nt, Artificial Sequence
  Description of Artificial Sequence: Synthetic oligonucleotide
  Sense strand starting at position 3402 of SEQ ID NO: 585622
gggcuuagcauuuguuaac

SEQ ID NO: 654527 - RNA, 19 nt, Artificial Sequence
  Description of Artificial Sequence: Synthetic oligonucleotide
  Antisense strand to SEQ ID NO: 654526
guuaacaaaugcuaagccc

SEQ ID NO: 654528 - RNA, 19 nt, Artificial Sequence
  Description of Artificial Sequence: Synthetic oligonucleotide
  Sense strand starting at position 3403 of SEQ ID NO: 585622
ggcuuagcauuuguuaacu

SEQ ID NO: 654529 - RNA, 19 nt, Artificial Sequence
  Description of Artificial Sequence: Synthetic oligonucleotide
  Antisense strand to SEQ ID NO: 654528
aguuaacaaaugcuaagcc

SEQ ID NO: 654530 - RNA, 19 nt, Artificial Sequence
  Description of Artificial Sequence: Synthetic oligonucleotide
  Sense strand starting at position 3439 of SEQ ID NO: 585622
aaacuaugaggugguuaau

SEQ ID NO: 654531 - RNA, 19 nt, Artificial Sequence
  Description of Artificial Sequence: Synthetic oligonucleotide
  Antisense strand to SEQ ID NO: 654530
auuaaccaccucauaguuu

SEQ ID NO: 654532 - RNA, 19 nt, Artificial Sequence
  Description of Artificial Sequence: Synthetic oligonucleotide
  Sense strand starting at position 3476 of SEQ ID NO: 585622
uuuacagauguauguccaa

SEQ ID NO: 654533 - RNA, 19 nt, Artificial Sequence
  Description of Artificial Sequence: Synthetic oligonucleotide
  Antisense strand to SEQ ID NO: 654532
uuggacauacaucuguaaa

SEQ ID NO: 654534 - RNA, 19 nt, Artificial Sequence
  Description of Artificial Sequence: Synthetic oligonucleotide
  Sense strand starting at position 3479 of SEQ ID NO: 585622
acagauguauguccaagau

SEQ ID NO: 654535 - RNA, 19 nt, Artificial Sequence
  Description of Artificial Sequence: Synthetic oligonucleotide
  Antisense strand to SEQ ID NO: 654534
aucuuggacauacaucugu

SEQ ID NO: 654536 - RNA, 19 nt, Artificial Sequence
  Description of Artificial Sequence: Synthetic oligonucleotide
  Sense strand starting at position 3483 of SEQ ID NO: 585622
auguauguccaagauuaua

SEQ ID NO: 654537 - RNA, 19 nt, Artificial Sequence
  Description of Artificial Sequence: Synthetic oligonucleotide
  Antisense strand to SEQ ID NO: 654536
uauaaucuuggacauacau

SEQ ID NO: 654538 - RNA, 19 nt, Artificial Sequence
  Description of Artificial Sequence: Synthetic oligonucleotide
  Sense strand starting at position 3616 of SEQ ID NO: 585622
gcaucuccaguuuaucuau

SEQ ID NO: 654539 - RNA, 19 nt, Artificial Sequence
  Description of Artificial Sequence: Synthetic oligonucleotide
  Antisense strand to SEQ ID NO: 654538
auagauaaacuggagaugc

SEQ ID NO: 654540 - RNA, 19 nt, Artificial Sequence
  Description of Artificial Sequence: Synthetic oligonucleotide
  Sense strand starting at position 3688 of SEQ ID NO: 585622
gccugcugacaucaguaga

SEQ ID NO: 654541 - RNA, 19 nt, Artificial Sequence
  Description of Artificial Sequence: Synthetic oligonucleotide
  Antisense strand to SEQ ID NO: 654540
ucuacugaugucagcaggc

SEQ ID NO: 654542 - RNA, 19 nt, Artificial Sequence
  Description of Artificial Sequence: Synthetic oligonucleotide
  Sense strand starting at position 3789 of SEQ ID NO: 585622
auugcuuugcaggaauuaa

SEQ ID NO: 654543 - RNA, 19 nt, Artificial Sequence
  Description of Artificial Sequence: Synthetic oligonucleotide
  Antisense strand to SEQ ID NO: 654542
uuaauuccugcaaagcaau

SEQ ID NO: 654544 - RNA, 19 nt, Artificial Sequence
  Description of Artificial Sequence: Synthetic oligonucleotide
  Sense strand starting at position 3943 of SEQ ID NO: 585622
uuucuugcucaugguauuu

SEQ ID NO: 654545 - RNA, 19 nt, Artificial Sequence
  Description of Artificial Sequence: Synthetic oligonucleotide
  Antisense strand to SEQ ID NO: 654544
aaauaccaugagcaagaaa

SEQ ID NO: 654546 - RNA, 19 nt, Artificial Sequence
  Description of Artificial Sequence: Synthetic oligonucleotide
  Sense strand starting at position 3982 of SEQ ID NO: 585622
uuugauaaacugugauaac

SEQ ID NO: 654547 - RNA, 19 nt, Artificial Sequence
  Description of Artificial Sequence: Synthetic oligonucleotide
  Antisense strand to SEQ ID NO: 654546
guuaucacaguuuaucaaa

SEQ ID NO: 654548 - RNA, 19 nt, Artificial Sequence
  Description of Artificial Sequence: Synthetic oligonucleotide
  Sense strand starting at position 179 of SEQ ID NO: 585623
aacgcuacuccagaaggau

SEQ ID NO: 654549 - RNA, 19 nt, Artificial Sequence
  Description of Artificial Sequence: Synthetic oligonucleotide
  Antisense strand to SEQ ID NO: 654548
auccuucuggaguagcguu

SEQ ID NO: 654550 - RNA, 19 nt, Artificial Sequence
  Description of Artificial Sequence: Synthetic oligonucleotide
  Sense strand starting at position 192 of SEQ ID NO: 585623
aaggaugaucaaggucagu

SEQ ID NO: 654551 - RNA, 19 nt, Artificial Sequence
  Description of Artificial Sequence: Synthetic oligonucleotide
  Antisense strand to SEQ ID NO: 654550
acugaccuugaucauccuu

SEQ ID NO: 654552 - RNA, 19 nt, Artificial Sequence
  Description of Artificial Sequence: Synthetic oligonucleotide
  Sense strand starting at position 197 of SEQ ID NO: 585623
ugaucaaggucaguaauaa

SEQ ID NO: 654553 - RNA, 19 nt, Artificial Sequence
  Description of Artificial Sequence: Synthetic oligonucleotide
  Antisense strand to SEQ ID NO: 654552
uuauuacugaccuugauca

SEQ ID NO: 654554 - RNA, 19 nt, Artificial Sequence
  Description of Artificial Sequence: Synthetic oligonucleotide
  Sense strand starting at position 220 of SEQ ID NO: 585623
auaagucaccuugauagua

SEQ ID NO: 654555 - RNA, 19 nt, Artificial Sequence
  Description of Artificial Sequence: Synthetic oligonucleotide
  Antisense strand to SEQ ID NO: 654554
uacuaucaaggugacuuau

SEQ ID NO: 654556 - RNA, 19 nt, Artificial Sequence
  Description of Artificial Sequence: Synthetic oligonucleotide
  Sense strand starting at position 416 of SEQ ID NO: 585623
guaugcuugccauaacaaa

SEQ ID NO: 654557 - RNA, 19 nt, Artificial Sequence
  Description of Artificial Sequence: Synthetic oligonucleotide
  Antisense strand to SEQ ID NO: 654556
uuuguuauggcaagcauac

SEQ ID NO: 654558 - RNA, 19 nt, Artificial Sequence
  Description of Artificial Sequence: Synthetic oligonucleotide
  Sense strand starting at position 577 of SEQ ID NO: 585623
acaugaucaucccucugua

SEQ ID NO: 654559 - RNA, 19 nt, Artificial Sequence
  Description of Artificial Sequence: Synthetic oligonucleotide
  Antisense strand to SEQ ID NO: 654558
uacagagggaugaucaugu

SEQ ID NO: 654560 - RNA, 19 nt, Artificial Sequence
  Description of Artificial Sequence: Synthetic oligonucleotide
  Sense strand starting at position 776 of SEQ ID NO: 585623
acuaguuaagccugagaaa

SEQ ID NO: 654561 - RNA, 19 nt, Artificial Sequence
  Description of Artificial Sequence: Synthetic oligonucleotide
  Antisense strand to SEQ ID NO: 654560
uuucucaggcuuaacuagu

SEQ ID NO: 654562 - RNA, 19 nt, Artificial Sequence
  Description of Artificial Sequence: Synthetic oligonucleotide
  Sense strand starting at position 777 of SEQ ID NO: 585623
cuaguuaagccugagaaac
